United States Patent Application Publication US 2005/0244851 A1 - sequence listing, part 98

SEQ ID NO: 3819763 - DNA, 25 bp, Homo sapien
gtctccttggcatgtcccaccacct

SEQ ID NO: 3819764 - DNA, 25 bp, Homo sapien
ctcggtggccttctcggtgcggtgg

SEQ ID NO: 3819765 - DNA, 25 bp, Homo sapien
gtggccttctcggtgcggtgggcca

SEQ ID NO: 3819766 - DNA, 25 bp, Homo sapien
cggtggccttctcggtgcggtgggc

SEQ ID NO: 3819767 - DNA, 25 bp, Homo sapien
ggccttctcggtgcggtgggccagg

SEQ ID NO: 3819768 - DNA, 25 bp, Homo sapien
aagtcgggggcctggagctcaggcg

SEQ ID NO: 3819769 - DNA, 25 bp, Homo sapien
ggctgtgaaagtcgggggcctggag

SEQ ID NO: 3819770 - DNA, 25 bp, Homo sapien
ctcaggcgggtccagatgaccctgt

SEQ ID NO: 3819771 - DNA, 25 bp, Homo sapien
tcaggcgggtccagatgaccctgtc

SEQ ID NO: 3819772 - DNA, 25 bp, Homo sapien
tctccaccagtccccgctttcagga

SEQ ID NO: 3819773 - DNA, 25 bp, Homo sapien
tccaccagtccccgctttcaggagc

SEQ ID NO: 3819774 - DNA, 25 bp, Homo sapien
ctccaccagtccccgctttcaggag

SEQ ID NO: 3819775 - DNA, 25 bp, Homo sapien
agcctgttgtcagagctcatccaca

SEQ ID NO: 3819776 - DNA, 25 bp, Homo sapien
gacccagacagcctgttgtcagagc

SEQ ID NO: 3819777 - DNA, 25 bp, Homo sapien
ccagacagcctgttgtcagagctca

SEQ ID NO: 3819778 - DNA, 25 bp, Homo sapien
ttgtcagagctcatccacacagcag

SEQ ID NO: 3819779 - DNA, 25 bp, Homo sapien
ttatgaaatgttcctcgatttggga

SEQ ID NO: 3819780 - DNA, 25 bp, Homo sapien
tccatcagagttatggcattgatag

SEQ ID NO: 3819781 - DNA, 25 bp, Homo sapien
gacatcttgaaccagtactgatcag

SEQ ID NO: 3819782 - DNA, 25 bp, Homo sapien
gttacgaacttttggcaattacagc

SEQ ID NO: 3819783 - DNA, 25 bp, Homo sapien
ggatgtgtatggccagacacggtgg

SEQ ID NO: 3819784 - DNA, 25 bp, Homo sapien
tctatagcataggggaagggtaatg

SEQ ID NO: 3819785 - DNA, 25 bp, Homo sapien
gggatgtgtatggccagacacggtg

SEQ ID NO: 3819786 - DNA, 25 bp, Homo sapien
cataggggaagggtaatgcgggctt

SEQ ID NO: 3819787 - DNA, 25 bp, Homo sapien
agagtgagactcggtctcaaaaaat

SEQ ID NO: 3819788 - DNA, 25 bp, Homo sapien
tgtgccactgaagtccaacctggga

SEQ ID NO: 3819789 - DNA, 25 bp, Homo sapien
gccactgaagtccaacctgggagac

SEQ ID NO: 3819790 - DNA, 25 bp, Homo sapien
tgccactgaagtccaacctgggaga

SEQ ID NO: 3819791 - DNA, 25 bp, Homo sapien
ttcaaatagctctctagacaggctc

SEQ ID NO: 3819792 - DNA, 25 bp, Homo sapien
aaatgcgtttctgtcttggcagtca

SEQ ID NO: 3819793 - DNA, 25 bp, Homo sapien
taaaagcaagaactgtgctccacct

SEQ ID NO: 3819794 - DNA, 25 bp, Homo sapien
ccagtgagtgttcatgaatcaagtc

SEQ ID NO: 3819795 - DNA, 25 bp, Homo sapien
tgactagaggctgccggctctgctc

SEQ ID NO: 3819796 - DNA, 25 bp, Homo sapien
tagaggctgccggctctgctctttc

SEQ ID NO: 3819797 - DNA, 25 bp, Homo sapien
atgactagaggctgccggctctgct

SEQ ID NO: 3819798 - DNA, 25 bp, Homo sapien
aggctgccggctctgctctttcaaa

SEQ ID NO: 3819799 - DNA, 25 bp, Homo sapien
tggaagtggttactgctgggaatat

SEQ ID NO: 3819800 - DNA, 25 bp, Homo sapien
catgtgcaatgatctgtaaccctct

SEQ ID NO: 3819801 - DNA, 25 bp, Homo sapien
ttccatgtgcaatgatctgtaaccc

SEQ ID NO: 3819802 - DNA, 25 bp, Homo sapien
gatcacattaatggaagtggttact

SEQ ID NO: 3819803 - DNA, 25 bp, Homo sapien
acctggtgatcagtccgcctaggcc

SEQ ID NO: 3819804 - DNA, 25 bp, Homo sapien
tgacctggtgatcagtccgcctagg

SEQ ID NO: 3819805 - DNA, 25 bp, Homo sapien
cctgacctggtgatcagtccgccta

SEQ ID NO: 3819806 - DNA, 25 bp, Homo sapien
ccacgcctggccattcccagctaat

SEQ ID NO: 3819807 - DNA, 25 bp, Homo sapien
aagagaggtgccatgggcctggtac

SEQ ID NO: 3819808 - DNA, 25 bp, Homo sapien
agagaggtgccatgggcctggtacg

SEQ ID NO: 3819809 - DNA, 25 bp, Homo sapien
taagagaggtgccatgggcctggta

SEQ ID NO: 3819810 - DNA, 25 bp, Homo sapien
gagaggtgccatgggcctggtacgg

SEQ ID NO: 3819811 - DNA, 25 bp, Homo sapien
gagcaaaacatcgtccaaaaaaata

SEQ ID NO: 3819812 - DNA, 25 bp, Homo sapien
agagcaaaacatcgtccaaaaaaat

SEQ ID NO: 3819813 - DNA, 25 bp, Homo sapien
aaagaggtgccatgtgtacaaaaat

SEQ ID NO: 3819814 - DNA, 25 bp, Homo sapien
aaaagaggtgccatgtgtacaaaaa

SEQ ID NO: 3819815 - DNA, 25 bp, Homo sapien
tgcagaagcacgttgatgcactcct

SEQ ID NO: 3819816 - DNA, 25 bp, Homo sapien
gcagaagcacgttgatgcactcctg

SEQ ID NO: 3819817 - DNA, 25 bp, Homo sapien
cgtaggtcagcgctgtgttcccgtg

SEQ ID NO: 3819818 - DNA, 25 bp, Homo sapien
tgttcccgtgggcatctcgggccat

SEQ ID NO: 3819819 - DNA, 25 bp, Homo sapien
gctggaggcctgccgggcgtaggtc

SEQ ID NO: 3819820 - DNA, 25 bp, Homo sapien
ggcctgccgggcgtaggtcagcgct

SEQ ID NO: 3819821 - DNA, 25 bp, Homo sapien
ggcaggccagatggagtgccgtgca

SEQ ID NO: 3819822 - DNA, 25 bp, Homo sapien
cttgcggcaggccagatggagtgcc

SEQ ID NO: 3819823 - DNA, 25 bp, Homo sapien
gccagatggagtgccgtgcagccgt

SEQ ID NO: 3819824 - DNA, 25 bp, Homo sapien
gatggagtgccgtgcagccgtctcc

SEQ ID NO: 3819825 - DNA, 25 bp, Homo sapien
tcagtgcagggtagtggggccagaa

SEQ ID NO: 3819826 - DNA, 25 bp, Homo sapien
ctccagagatcgcacacgggaaagg

SEQ ID NO: 3819827 - DNA, 25 bp, Homo sapien
ccagctccagagatcgcacacggga

SEQ ID NO: 3819828 - DNA, 25 bp, Homo sapien
cagtgcagggtagtggggccagaaa

SEQ ID NO: 3819829 - DNA, 25 bp, Homo sapien
ctggcccacttaggattctgggtct

SEQ ID NO: 3819830 - DNA, 25 bp, Homo sapien
tggcccacttaggattctgggtctc

SEQ ID NO: 3819831 - DNA, 25 bp, Homo sapien
ggcccacttaggattctgggtctca

SEQ ID NO: 3819832 - DNA, 25 bp, Homo sapien
gcccacttaggattctgggtctcac

SEQ ID NO: 3819833 - DNA, 25 bp, Homo sapien
tcccacgcatgttttggatcgactg

SEQ ID NO: 3819834 - DNA, 25 bp, Homo sapien
cccacgcatgttttggatcgactgc

SEQ ID NO: 3819835 - DNA, 25 bp, Homo sapien
ttcccacgcatgttttggatcgact

SEQ ID NO: 3819836 - DNA, 25 bp, Homo sapien
gttcccacgcatgttttggatcgac

SEQ ID NO: 3819837 - DNA, 25 bp, Homo sapien
gggacttgcttttactgctcttgca

SEQ ID NO: 3819838 - DNA, 25 bp, Homo sapien
gacttgcttttactgctcttgcatg

SEQ ID NO: 3819839 - DNA, 25 bp, Homo sapien
tttactgctcttgcatgactgcagg

SEQ ID NO: 3819840 - DNA, 25 bp, Homo sapien
tgcttttactgctcttgcatgactg

SEQ ID NO: 3819841 - DNA, 25 bp, Homo sapien
tcttcatataatcacctaagcttga

SEQ ID NO: 3819842 - DNA, 25 bp, Homo sapien
atgtggctagggatggccactttcc

SEQ ID NO: 3819843 - DNA, 25 bp, Homo sapien
gatgtggctagggatggccactttc

SEQ ID NO: 3819844 - DNA, 25 bp, Homo sapien
cctaagcttgaataataggtgagca

SEQ ID NO: 3819845 - DNA, 25 bp, Homo sapien
cttcgctttaagagcatgccctgtt

SEQ ID NO: 3819846 - DNA, 25 bp, Homo sapien
ttcgctttaagagcatgccctgttt

SEQ ID NO: 3819847 - DNA, 25 bp, Homo sapien
tcgctttaagagcatgccctgttta

SEQ ID NO: 3819848 - DNA, 25 bp, Homo sapien
tgttcatcaggtatgctcaaagatc

SEQ ID NO: 3819849 - DNA, 25 bp, Homo sapien
caggtatgctcaaagatctatctgc

SEQ ID NO: 3819850 - DNA, 25 bp, Homo sapien
tgtaactgttcatcaggtatgctca

SEQ ID NO: 3819851 - DNA, 25 bp, Homo sapien
cgcaaatgagtgtaactgttcatca

SEQ ID NO: 3819852 - DNA, 25 bp, Homo sapien
ccaggttcaagtgattctcctaccc

SEQ ID NO: 3819853 - DNA, 25 bp, Homo sapien
tgattctcctaccccagcctcccaa

SEQ ID NO: 3819854 - DNA, 25 bp, Homo sapien
taacctcaggcgatccacttgcctc

SEQ ID NO: 3819855 - DNA, 25 bp, Homo sapien
atctcggctcatggcaaccttcgcc

SEQ ID NO: 3819856 - DNA, 25 bp, Homo sapien
tttaaaagtacaactgggccagcgc

SEQ ID NO: 3819857 - DNA, 25 bp, Homo sapien
gaaaccgtgtctctatcaaacatat

SEQ ID NO: 3819858 - DNA, 25 bp, Homo sapien
ccttctactgtaggcttggcagctt

SEQ ID NO: 3819859 - DNA, 25 bp, Homo sapien
ttaagctttcctgtggactttgaaa

SEQ ID NO: 3819860 - DNA, 25 bp, Homo sapien
tatctagcccataatatcaacagtg

SEQ ID NO: 3819861 - DNA, 25 bp, Homo sapien
tggtagaggccatgaatactgctaa

SEQ ID NO: 3819862 - DNA, 25 bp, Homo sapien
tactgctaaactctctgcaatgcac

SEQ ID NO: 3819863 - DNA, 25 bp, Homo sapien
tcaacagtggtaaggctgtgaaatc

SEQ ID NO: 3819864 - DNA, 25 bp, Homo sapien
tgtgtgatatgatgaggtatctcca

SEQ ID NO: 3819865 - DNA, 25 bp, Homo sapien
ctttgtgtgatatgatgaggtatct

SEQ ID NO: 3819866 - DNA, 25 bp, Homo sapien
atatgatgaggtatctccaaggtca

SEQ ID NO: 3819867 - DNA, 25 bp, Homo sapien
tatgatgaggtatctccaaggtcac

SEQ ID NO: 3819868 - DNA, 25 bp, Homo sapien
aaataggagcagtttctcgtcctaa

SEQ ID NO: 3819869 - DNA, 25 bp, Homo sapien
cccaaggtcccaccaaataggagca

SEQ ID NO: 3819870 - DNA, 25 bp, Homo sapien
caaggtcccaccaaataggagcagt

SEQ ID NO: 3819871 - DNA, 25 bp, Homo sapien
ttctcgtcctaaactcaaattaagc

SEQ ID NO: 3819872 - DNA, 25 bp, Homo sapien
taaaaaggctagtgcatttgaaaca

SEQ ID NO: 3819873 - DNA, 25 bp, Homo sapien
cattattatgagtgtaaacttgcca

SEQ ID NO: 3819874 - DNA, 25 bp, Homo sapien
gacaattgaattagctaaaaaggct

SEQ ID NO: 3819875 - DNA, 25 bp, Homo sapien
ttactcaataggtcccaaagctcag

SEQ ID NO: 3819876 - DNA, 25 bp, Homo sapien
tattgttgactgaaacgctcagtag

SEQ ID NO: 3819877 - DNA, 25 bp, Homo sapien
ttgtaagataatgctggatggctgt

SEQ ID NO: 3819878 - DNA, 25 bp, Homo sapien
tcatcaaggaatattgtcgaacacg

SEQ ID NO: 3819879 - DNA, 25 bp, Homo sapien
tcgaacacgagctgtattgttgact

SEQ ID NO: 3819880 - DNA, 25 bp, Homo sapien
gatgcggatgcccacgcactgactt

SEQ ID NO: 3819881 - DNA, 25 bp, Homo sapien
tgcggatgcccacgcactgacttct

SEQ ID NO: 3819882 - DNA, 25 bp, Homo sapien
ccattggatgcggatgcccacgcac

SEQ ID NO: 3819883 - DNA, 25 bp, Homo sapien
ttggatgcggatgcccacgcactga

SEQ ID NO: 3819884 - DNA, 25 bp, Homo sapien
tttgtacagttgcttcttcttattt

SEQ ID NO: 3819885 - DNA, 25 bp, Homo sapien
atggtttgtacagttgcttcttctt

SEQ ID NO: 3819886 - DNA, 25 bp, Homo sapien
cagttgcttcttcttatttctacaa

SEQ ID NO: 3819887 - DNA, 25 bp, Homo sapien
ggtttgtacagttgcttcttcttat

SEQ ID NO: 3819888 - DNA, 25 bp, Homo sapien
cctctggattggcagaagagttaaa

SEQ ID NO: 3819889 - DNA, 25 bp, Homo sapien
tgcttgcctctggattggcagaaga

SEQ ID NO: 3819890 - DNA, 25 bp, Homo sapien
ctggattggcagaagagttaaactc

SEQ ID NO: 3819891 - DNA, 25 bp, Homo sapien
ttggcagaagagttaaactccaaag

SEQ ID NO: 3819892 - DNA, 25 bp, Homo sapien
gtgcttgcctctggattggcagaaa

SEQ ID NO: 3819893 - DNA, 25 bp, Homo sapien
tgcctctggattggcagaaaggtta

SEQ ID NO: 3819894 - DNA, 25 bp, Homo sapien
ggattggcagaaaggttaaactcca

SEQ ID NO: 3819895 - DNA, 25 bp, Homo sapien
tattgtgcttgcctctggattggca

SEQ ID NO: 3819896 - DNA, 25 bp, Homo sapien
tctcagattcagagggacacaccga

SEQ ID NO: 3819897 - DNA, 25 bp, Homo sapien
tgtggaggtcctcaccaacttcaac

SEQ ID NO: 3819898 - DNA, 25 bp, Homo sapien
gcatgtggaggtcctcaccaacttc

SEQ ID NO: 3819899 - DNA, 25 bp, Homo sapien
gccatgggcgctcctgccatcctgt

SEQ ID NO: 3819900 - DNA, 25 bp, Homo sapien
ctagggtgcacacgacaggtcagta

SEQ ID NO: 3819901 - DNA, 25 bp, Homo sapien
tgcacacgacaggtcagtatgttcc

SEQ ID NO: 3819902 - DNA, 25 bp, Homo sapien
acacgacaggtcagtatgttcccca

SEQ ID NO: 3819903 - DNA, 25 bp, Homo sapien
tagggtgcacacgacaggtcagtat

SEQ ID NO: 3819904 - DNA, 25 bp, Homo sapien
tcccgctgtcctaggccgaggctat

SEQ ID NO: 3819905 - DNA, 25 bp, Homo sapien
tgtcctaggccgaggctatgctgca

SEQ ID NO: 3819906 - DNA, 25 bp, Homo sapien
cagctttggccacgcactcccgctg

SEQ ID NO: 3819907 - DNA, 25 bp, Homo sapien
gggcgcctctactgtctgccaccac

SEQ ID NO: 3819908 - DNA, 25 bp, Homo sapien
tgaattccccaattgcttaagcatg

SEQ ID NO: 3819909 - DNA, 25 bp, Homo sapien
cactgtgctatgctcatttaaccct

SEQ ID NO: 3819910 - DNA, 25 bp, Homo sapien
gaatactcgacatctggcaagtagt

SEQ ID NO: 3819911 - DNA, 25 bp, Homo sapien
ccataaagtggcttaccacagtcct

SEQ ID NO: 3819912 - DNA, 25 bp, Homo sapien
tatgaacctgggatacaaacccacc

SEQ ID NO: 3819913 - DNA, 25 bp, Homo sapien
caggcactgtatgtgtgaaatagtc

SEQ ID NO: 3819914 - DNA, 25 bp, Homo sapien
tttctgagaccatactgctggacag

SEQ ID NO: 3819915 - DNA, 25 bp, Homo sapien
gaaatagtcccaactctcaatgagt

SEQ ID NO: 3819916 - DNA, 25 bp, Homo sapien
taaatcaagccattaagcgtaactg

SEQ ID NO: 3819917 - DNA, 25 bp, Homo sapien
tataaatctctgtaggctaagtcca

SEQ ID NO: 3819918 - DNA, 25 bp, Homo sapien
gactgccttgagaagttgtgtatag

SEQ ID NO: 3819919 - DNA, 25 bp, Homo sapien
gagcaactttgaatctatggttaca

SEQ ID NO: 3819920 - DNA, 25 bp, Homo sapien
gagaaaggaccatgtgacactagag

SEQ ID NO: 3819921 - DNA, 25 bp, Homo sapien
cgtgcaatccggatcagggacagat

SEQ ID NO: 3819922 - DNA, 25 bp, Homo sapien
gacagattagctttggattcctaca

SEQ ID NO: 3819923 - DNA, 25 bp, Homo sapien
caaaaggcacaggtgcgtgcaatcc

SEQ ID NO: 3819924 - DNA, 25 bp, Homo sapien
gtttcagcttaaagcaagaataatc

SEQ ID NO: 3819925 - DNA, 25 bp, Homo sapien
gataattcttgtagacttgagatga

SEQ ID NO: 3819926 - DNA, 25 bp, Homo sapien
ggctacaatctgcattaatagtgtc

SEQ ID NO: 3819927 - DNA, 25 bp, Homo sapien
aatcttcaggacctagaggctacaa

SEQ ID NO: 3819928 - DNA, 25 bp, Homo sapien
gtccttggagagacactgactgaag

SEQ ID NO: 3819929 - DNA, 25 bp, Homo sapien
gtttagtccttggagagacactgac

SEQ ID NO: 3819930 - DNA, 25 bp, Homo sapien
tccttggagagacactgactgaagc

SEQ ID NO: 3819931 - DNA, 25 bp, Homo sapien
tagtccttggagagacactgactga

SEQ ID NO: 3819932 - DNA, 25 bp, Homo sapien
tgtcagagcacttgccccagtactt

SEQ ID NO: 3819933 - DNA, 25 bp, Homo sapien
ctccatttatcctgtaaacattgtc

SEQ ID NO: 3819934 - DNA, 25 bp, Homo sapien
caccttgtccagaactacagtccat

SEQ ID NO: 3819935 - DNA, 25 bp, Homo sapien
tctcttaagagaataaacaggccag

SEQ ID NO: 3819936 - DNA, 25 bp, Homo sapien
tcatgtcagaaaaagtaccccacct

SEQ ID NO: 3819937 - DNA, 25 bp, Homo sapien
atatatcccattaggcaagagccca

SEQ ID NO: 3819938 - DNA, 25 bp, Homo sapien
gagtctaagagttcaaaagaagcct

SEQ ID NO: 3819939 - DNA, 25 bp, Homo sapien
caaaaagtggtcagagatatcatca

SEQ ID NO: 3819940 - DNA, 25 bp, Homo sapien
tgatgagtcatcaaatgggagaaat

SEQ ID NO: 3819941 - DNA, 25 bp, Homo sapien
agctgatgagtcatcaaatgggaga

SEQ ID NO: 3819942 - DNA, 25 bp, Homo sapien
gctagaaagccatgtgggggcagct

SEQ ID NO: 3819943 - DNA, 25 bp, Homo sapien
ctgtgagctagaaagccatgtgggg

SEQ ID NO: 3819944 - DNA, 25 bp, Homo sapien
tattaacgaaaatcgactggccatg

SEQ ID NO: 3819945 - DNA, 25 bp, Homo sapien
cgagaaaaaagatcccctagagcct

SEQ ID NO: 3819946 - DNA, 25 bp, Homo sapien
ggaacctctcaaactgaaccatgga

SEQ ID NO: 3819947 - DNA, 25 bp, Homo sapien
cctctagagatgaaggtagcctttc

SEQ ID NO: 3819948 - DNA, 25 bp, Homo sapien
atctaatccccataacagaaaattt

SEQ ID NO: 3819949 - DNA, 25 bp, Homo sapien
gatatctaatccccataacagaaaa

SEQ ID NO: 3819950 - DNA, 25 bp, Homo sapien
acatggatactggatatctaatccc

SEQ ID NO: 3819951 - DNA, 25 bp, Homo sapien
catggatactggatatctaatcccc

SEQ ID NO: 3819952 - DNA, 25 bp, Homo sapien
gtgcacacactgatgcccctagatt

SEQ ID NO: 3819953 - DNA, 25 bp, Homo sapien
acacaggcacttccgcattcacaag

SEQ ID NO: 3819954 - DNA, 25 bp, Homo sapien
ccagccaccggattctttattaaga

SEQ ID NO: 3819955 - DNA, 25 bp, Homo sapien
cattcttgagcacaactatgcacac

SEQ ID NO: 3819956 - DNA, 25 bp, Homo sapien
tattatcaagaaatgaacaagagat

SEQ ID NO: 3819957 - DNA, 25 bp, Homo sapien
aatctgccaggctttcattctgaca

SEQ ID NO: 3819958 - DNA, 25 bp, Homo sapien
ttaatctgccaggctttcattctga

SEQ ID NO: 3819959 - DNA, 25 bp, Homo sapien
atattatcaagaaatgaacaagaga

SEQ ID NO: 3819960 - DNA, 25 bp, Homo sapien
gacatactgagagtactgctcagct

SEQ ID NO: 3819961 - DNA, 25 bp, Homo sapien
tatgccatgctctacttcacaagtt

SEQ ID NO: 3819962 - DNA, 25 bp, Homo sapien
tgatgatccctgacaatgagcactg

SEQ ID NO: 3819963 - DNA, 25 bp, Homo sapien
tgcctaggcctgattctgatgatcc

SEQ ID NO: 3819964 - DNA, 25 bp, Homo sapien
agaaaggagagaagacgttcgcaca

SEQ ID NO: 3819965 - DNA, 25 bp, Homo sapien
aagacgttcgcacagaatcatctcc

SEQ ID NO: 3819966 - DNA, 25 bp, Homo sapien
aaaggagagaagacgttcgcacaga

SEQ ID NO: 3819967 - DNA, 25 bp, Homo sapien
gagagaagacgttcgcacagaatca

SEQ ID NO: 3819968 - DNA, 25 bp, Homo sapien
gcattcgaccagttttcaagtctat

SEQ ID NO: 3819969 - DNA, 25 bp, Homo sapien
tttttcctcctttggcatcaacagc

SEQ ID NO: 3819970 - DNA, 25 bp, Homo sapien
ctatttgtttttcctcctttggcat

SEQ ID NO: 3819971 - DNA, 25 bp, Homo sapien
cattcgaccagttttcaagtctatt

SEQ ID NO: 3819972 - DNA, 25 bp, Homo sapien
aacactggtaacaataaaatcatga

SEQ ID NO: 3819973 - DNA, 25 bp, Homo sapien
catgattacataaagactgtataga

SEQ ID NO: 3819974 - DNA, 25 bp, Homo sapien
gaactcgtccctagaacagaacaaa

SEQ ID NO: 3819975 - DNA, 25 bp, Homo sapien
tagaatacaggaataacaggccagg

SEQ ID NO: 3819976 - DNA, 25 bp, Homo sapien
gactctgctctagtgtttcggccat

SEQ ID NO: 3819977 - DNA, 25 bp, Homo sapien
gaaacctacccatgggagataatac

SEQ ID NO: 3819978 - DNA, 25 bp, Homo sapien
aagatggcgtggtatttgaggaata

SEQ ID NO: 3819979 - DNA, 25 bp, Homo sapien
aaagcaacctatggaagatggcgtg

SEQ ID NO: 3819980 - DNA, 25 bp, Homo sapien
ctctgacccaagtggtttggaattg

SEQ ID NO: 3819981 - DNA, 25 bp, Homo sapien
ctgacccaagtggtttggaattgga

SEQ ID NO: 3819982 - DNA, 25 bp, Homo sapien
tctgacccaagtggtttggaattgg

SEQ ID NO: 3819983 - DNA, 25 bp, Homo sapien
cagcgtctttgtcatacagcacacc

SEQ ID NO: 3819984 - DNA, 25 bp, Homo sapien
agcgtctttgtcatacagcacaccc

SEQ ID NO: 3819985 - DNA, 25 bp, Homo sapien
gctgctccttcttatttaaacagca

SEQ ID NO: 3819986 - DNA, 25 bp, Homo sapien
aaacaggcacataaaccagctgctc

SEQ ID NO: 3819987 - DNA, 25 bp, Homo sapien
gctccttcttatttaaacagcactt

SEQ ID NO: 3819988 - DNA, 25 bp, Homo sapien
agaaacaggcacataaaccagctgc

SEQ ID NO: 3819989 - DNA, 25 bp, Homo sapien
ggaacagtggccctctagctacaag

SEQ ID NO: 3819990 - DNA, 25 bp, Homo sapien
gggattcggtaacacctttgcaggc

SEQ ID NO: 3819991 - DNA, 25 bp, Homo sapien
tcagagaagagggattcggtaacac

SEQ ID NO: 3819992 - DNA, 25 bp, Homo sapien
gaacagtggccctctagctacaaga

SEQ ID NO: 3819993 - DNA, 25 bp, Homo sapien
cttttatctttgaagtgtgctcctc

SEQ ID NO: 3819994 - DNA, 25 bp, Homo sapien
tgatgtttgtttggatatcctccgg

SEQ ID NO: 3819995 - DNA, 25 bp, Homo sapien
cacctgccggtcacatttgatgttt

SEQ ID NO: 3819996 - DNA, 25 bp, Homo sapien
cataaagtgacacctgccggtcaca

SEQ ID NO: 3819997 - DNA, 25 bp, Homo sapien
atcatacagcagaaacgaatgccaa

SEQ ID NO: 3819998 - DNA, 25 bp, Homo sapien
gcagaaacgaatgccaaagttccta

SEQ ID NO: 3819999 - DNA, 25 bp, Homo sapien
aactcaatcatacagcagaaacgaa

SEQ ID NO: 3820000 - DNA, 25 bp, Homo sapien
gaaacgaatgccaaagttcctatac

SEQ ID NO: 3820001 - DNA, 25 bp, Homo sapien
tcttgtccactaagcacatcactta

SEQ ID NO: 3820002 - DNA, 25 bp, Homo sapien
gtccactaagcacatcacttaggaa

SEQ ID NO: 3820003 - DNA, 25 bp, Homo sapien
ttgtccactaagcacatcacttagg

SEQ ID NO: 3820004 - DNA, 25 bp, Homo sapien
actcttgtccactaagcacatcact

SEQ ID NO: 3820005 - DNA, 25 bp, Homo sapien
ggaagcaccgttcaccatccagcag

SEQ ID NO: 3820006 - DNA, 25 bp, Homo sapien
ggatataagggtgaaaagtttgcca

SEQ ID NO: 3820007 - DNA, 25 bp, Homo sapien
taagggtgaaaagtttgccatgaga

SEQ ID NO: 3820008 - DNA, 25 bp, Homo sapien
tgccaggatataagggtgaaaagtt

SEQ ID NO: 3820009 - DNA, 25 bp, Homo sapien
ggtgaaaagtttgccatgagaggcc

SEQ ID NO: 3820010 - DNA, 25 bp, Homo sapien
taaaatggcccagattgtggatttc

SEQ ID NO: 3820011 - DNA, 25 bp, Homo sapien
ccattccagaaaggtagaacagttt

SEQ ID NO: 3820012 - DNA, 25 bp, Homo sapien
cagaaaggtagaacagtttggcaac

SEQ ID NO: 3820013 - DNA, 25 bp, Homo sapien
tccatgcaccattccagaaaggtag

SEQ ID NO: 3820014 - DNA, 25 bp, Homo sapien
cccaaagctggcatctataagcatc

SEQ ID NO: 3820015 - DNA, 25 bp, Homo sapien
caaagctggcatctataagcatcag

SEQ ID NO: 3820016 - DNA, 25 bp, Homo sapien
agctggcatctataagcatcagtac

SEQ ID NO: 3820017 - DNA, 25 bp, Homo sapien
caaacccaaagctggcatctataag

SEQ ID NO: 3820018 - DNA, 25 bp, Homo sapien
tcagaaaaggctgggtctaacctgg

SEQ ID NO: 3820019 - DNA, 25 bp, Homo sapien
tcaaatgactacacaggcatcaccc

SEQ ID NO: 3820020 - DNA, 25 bp, Homo sapien
tatctggccctcgacagaaaagtcc

SEQ ID NO: 3820021 - DNA, 25 bp, Homo sapien
catattgtctatggccgcctgtgca

SEQ ID NO: 3820022 - DNA, 25 bp, Homo sapien
gaagtgacggatctctgaattaccc

SEQ ID NO: 3820023 - DNA, 25 bp, Homo sapien
gaaaatgcgcattgtgtgtaccgtg

SEQ ID NO: 3820024 - DNA, 25 bp, Homo sapien
tctcaatgatggttaagaggctggg

SEQ ID NO: 3820025 - DNA, 25 bp, Homo sapien
tatataaaggtctgcagggacctga

SEQ ID NO: 3820026 - DNA, 25 bp, Homo sapien
aaagatcatagaatatcagagatag

SEQ ID NO: 3820027 - DNA, 25 bp, Homo sapien
aatgtaaaagatcatagaatatcag

SEQ ID NO: 3820028 - DNA, 25 bp, Homo sapien
gatcatagaatatcagagatagtga

SEQ ID NO: 3820029 - DNA, 25 bp, Homo sapien
tgtaaaagatcatagaatatcagag

SEQ ID NO: 3820030 - DNA, 25 bp, Homo sapien
tcatcatgttaatgtcacacccaca

SEQ ID NO: 3820031 - DNA, 25 bp, Homo sapien
catgttaatgtcacacccacattca

SEQ ID NO: 3820032 - DNA, 25 bp, Homo sapien
gccagatcaatcatcatgttaatgt

SEQ ID NO: 3820033 - DNA, 25 bp, Homo sapien
gatcaatcatcatgttaatgtcaca

SEQ ID NO: 3820034 - DNA, 25 bp, Homo sapien
gtttacaggagtgtaccagaagttc

SEQ ID NO: 3820035 - DNA, 25 bp, Homo sapien
tacaggagtgtaccagaagttcatt

SEQ ID NO: 3820036 - DNA, 25 bp, Homo sapien
caggagtgtaccagaagttcatttt

SEQ ID NO: 3820037 - DNA, 25 bp, Homo sapien
agttcatttttataggcaaaaactg

SEQ ID NO: 3820038 - DNA, 25 bp, Homo sapien
cactatcgctaaaaacatcctcaaa

SEQ ID NO: 3820039 - DNA, 25 bp, Homo sapien
tgtattcccactatcgctaaaaaca

SEQ ID NO: 3820040 - DNA, 25 bp, Homo sapien
ttcctgtattcccactatcgctaaa

SEQ ID NO: 3820041 - DNA, 25 bp, Homo sapien
ttcccactatcgctaaaaacatcct

SEQ ID NO: 3820042 - DNA, 25 bp, Homo sapien
cacgatcgtcacagggcctctgatc

SEQ ID NO: 3820043 - DNA, 25 bp, Homo sapien
cagggcctctgatctcggtgaactt

SEQ ID NO: 3820044 - DNA, 25 bp, Homo sapien
ctgacacgatcgtcacagggcctct

SEQ ID NO: 3820045 - DNA, 25 bp, Homo sapien
tcgtcacagggcctctgatctcggt

SEQ ID NO: 3820046 - DNA, 25 bp, Homo sapien
cgtcaccactaccggtattggtggc

SEQ ID NO: 3820047 - DNA, 25 bp, Homo sapien
ccaggtgaagttccgaatgaggcat

SEQ ID NO: 3820048 - DNA, 25 bp, Homo sapien
ccactaccggtattggtggcggctc

SEQ ID NO: 3820049 - DNA, 25 bp, Homo sapien
tcaccactaccggtattggtggcgg

SEQ ID NO: 3820050 - DNA, 25 bp, Homo sapien
ttagtaaaagccacacagcatgcat

SEQ ID NO: 3820051 - DNA, 25 bp, Homo sapien
tagtaaaagccacacagcatgcatc

SEQ ID NO: 3820052 - DNA, 25 bp, Homo sapien
aaaagccacacagcatgcatctcca

SEQ ID NO: 3820053 - DNA, 25 bp, Homo sapien
gtaaaagccacacagcatgcatctc

SEQ ID NO: 3820054 - DNA, 25 bp, Homo sapien
aaaagcattggcatttctcttctgg

SEQ ID NO: 3820055 - DNA, 25 bp, Homo sapien
ctgtgaaaggatcgagacatccaca

SEQ ID NO: 3820056 - DNA, 25 bp, Homo sapien
aaggatcgagacatccacacagcag

SEQ ID NO: 3820057 - DNA, 25 bp, Homo sapien
gactgaactgcaaaagcattggcat

SEQ ID NO: 3820058 - DNA, 25 bp, Homo sapien
tgcagctttgggtccaccgtttttc

SEQ ID NO: 3820059 - DNA, 25 bp, Homo sapien
ctttgcagctttgggtccaccgttt

SEQ ID NO: 3820060 - DNA, 25 bp, Homo sapien
ttcttagtctcctagctggagatcc

SEQ ID NO: 3820061 - DNA, 25 bp, Homo sapien
tttctttgcagctttgggtccaccg

SEQ ID NO: 3820062 - DNA, 25 bp, Homo sapien
cacacacgagcggaaacagaaagtc

SEQ ID NO: 3820063 - DNA, 25 bp, Homo sapien
tcttccgtgccatgcaataagggct

SEQ ID NO: 3820064 - DNA, 25 bp, Homo sapien
gattcggctcaggtctaagtcgcct

SEQ ID NO: 3820065 - DNA, 25 bp, Homo sapien
tcaaggaacactggccgggagttag

SEQ ID NO: 3820066 - DNA, 25 bp, Homo sapien
cgctcctcgggagcaaagatgaccc

SEQ ID NO: 3820067 - DNA, 25 bp, Homo sapien
tcagatggtcattacttacgggtgg

SEQ ID NO: 3820068 - DNA, 25 bp, Homo sapien
tgagtaagtggcaagagtgttaacg

SEQ ID NO: 3820069 - DNA, 25 bp, Homo sapien
tgaaaagtgagagagtacagctgga

SEQ ID NO: 3820070 - DNA, 25 bp, Homo sapien
tccccatgctgaatgtctgaatttt

SEQ ID NO: 3820071 - DNA, 25 bp, Homo sapien
taagcagtgtctgtgccactacgct

SEQ ID NO: 3820072 - DNA, 25 bp, Homo sapien
agtaagcagtgtctgtgccactacg

SEQ ID NO: 3820073 - DNA, 25 bp, Homo sapien
gttgaagctacagtaagcagtgtct

SEQ ID NO: 3820074 - DNA, 25 bp, Homo sapien
agctacagtaagcagtgtctgtgcc

SEQ ID NO: 3820075 - DNA, 25 bp, Homo sapien
ccccatcatggccggggaccggctc

SEQ ID NO: 3820076 - DNA, 25 bp, Homo sapien
agacgagctggccccggattcgcac

SEQ ID NO: 3820077 - DNA, 25 bp, Homo sapien
gtcagacgagctggccccggattcg

SEQ ID NO: 3820078 - DNA, 25 bp, Homo sapien
tggtcagacgagctggccccggatt

SEQ ID NO: 3820079 - DNA, 25 bp, Homo sapien
cagctggtcagacgagctggccccg

SEQ ID NO: 3820080 - DNA, 25 bp, Homo sapien
atgtgtagccacatagattttggca

SEQ ID NO: 3820081 - DNA, 25 bp, Homo sapien
tcttattttacaggataacgaattg

SEQ ID NO: 3820082 - DNA, 25 bp, Homo sapien
tacaggataacgaattggaaaagat

SEQ ID NO: 3820083 - DNA, 25 bp, Homo sapien
gcataaagtgggaacatctaaaaaa

SEQ ID NO: 3820084 - DNA, 25 bp, Homo sapien
tcattgacccatgatgcagctaaat

SEQ ID NO: 3820085 - DNA, 25 bp, Homo sapien
taaattgacgtcttggcccagacag

SEQ ID NO: 3820086 - DNA, 25 bp, Homo sapien
gatgcagctaaattgacgtcttggc

SEQ ID NO: 3820087 - DNA, 25 bp, Homo sapien
gacccatgatgcagctaaattgacg

SEQ ID NO: 3820088 - DNA, 25 bp, Homo sapien
gagccctgatcctatcacatgtgtg

SEQ ID NO: 3820089 - DNA, 25 bp, Homo sapien
ttatttcctgacactccacagagag

SEQ ID NO: 3820090 - DNA, 25 bp, Homo sapien
gagagtgtcagattgaggctcagac

SEQ ID NO: 3820091 - DNA, 25 bp, Homo sapien
caggcaaagggagttttttctctca

SEQ ID NO: 3820092 - DNA, 25 bp, Homo sapien
agaaactaaacagcaggatgacata

SEQ ID NO: 3820093 - DNA, 25 bp, Homo sapien
tgtagaaactaaacagcaggatgac

SEQ ID NO: 3820094 - DNA, 25 bp, Homo sapien
atgtagaaactaaacagcaggatga

SEQ ID NO: 3820095 - DNA, 25 bp, Homo sapien
tagaaactaaacagcaggatgacat

SEQ ID NO: 3820096 - DNA, 25 bp, Homo sapien
ctgcaggacagagcaggacctgtct

SEQ ID NO: 3820097 - DNA, 25 bp, Homo sapien
gcctgcaggacagagcaggacctgt

SEQ ID NO: 3820098 - DNA, 25 bp, Homo sapien
cacgccgctgcactcaaccttgagc

SEQ ID NO: 3820099 - DNA, 25 bp, Homo sapien
gcactcaaccttgagcaacagagtg

SEQ ID NO: 3820100 - DNA, 25 bp, Homo sapien
ctgtttcccgttcctgtgcttctgg

SEQ ID NO: 3820101 - DNA, 25 bp, Homo sapien
caggcgttcctggaactgtttcccg

SEQ ID NO: 3820102 - DNA, 25 bp, Homo sapien
tctggtattgaaaaccattcatcac

SEQ ID NO: 3820103 - DNA, 25 bp, Homo sapien
ggatctcaagaagcaggcgttcctg

SEQ ID NO: 3820104 - DNA, 25 bp, Homo sapien
tattcctgattgtgctgctcagtca

SEQ ID NO: 3820105 - DNA, 25 bp, Homo sapien
tccaaaggtgttcatggccattgtg

SEQ ID NO: 3820106 - DNA, 25 bp, Homo sapien
catgtctccaaaggtgttcatggcc

SEQ ID NO: 3820107 - DNA, 25 bp, Homo sapien
ctgtattcctgattgtgctgctcag

SEQ ID NO: 3820108 - DNA, 25 bp, Homo sapien
catgttctctcacactgctctcctc

SEQ ID NO: 3820109 - DNA, 25 bp, Homo sapien
cttcatgttctctcacactgctctc

SEQ ID NO: 3820110 - DNA, 25 bp, Homo sapien
ctgctctcctccatccttcttcatt

SEQ ID NO: 3820111 - DNA, 25 bp, Homo sapien
actgctctcctccatccttcttcat

SEQ ID NO: 3820112 - DNA, 25 bp, Homo sapien
tgtggtcacgtgttagagcagctga

SEQ ID NO: 3820113 - DNA, 25 bp, Homo sapien
actgtggtcacgtgttagagcagct

SEQ ID NO: 3820114 - DNA, 25 bp, Homo sapien
ctgtggtcacgtgttagagcagctg

SEQ ID NO: 3820115 - DNA, 25 bp, Homo sapien
gatttgaggacaatgagaccaagac

SEQ ID NO: 3820116 - DNA, 25 bp, Homo sapien
tgatttgaggacaatgagaccaaga

SEQ ID NO: 3820117 - DNA, 25 bp, Homo sapien
tttgaggacaatgagaccaagacag

SEQ ID NO: 3820118 - DNA, 25 bp, Homo sapien
tgaggacaatgagaccaagacagga

SEQ ID NO: 3820119 - DNA, 25 bp, Homo sapien
taagccctacttgcctgacatgcat

SEQ ID NO: 3820120 - DNA, 25 bp, Homo sapien
tttcaacttgacactagctgaggct

SEQ ID NO: 3820121 - DNA, 25 bp, Homo sapien
gcttatccgcatcaaagtggaggga

SEQ ID NO: 3820122 - DNA, 25 bp, Homo sapien
gatcctcagggcttcaccttgatgg

SEQ ID NO: 3820123 - DNA, 25 bp, Homo sapien
cataacatcattgtgatgggcaagc

SEQ ID NO: 3820124 - DNA, 25 bp, Homo sapien
cagacacagtatgcagaggcctgaa

SEQ ID NO: 3820125 - DNA, 25 bp, Homo sapien
caagaggcaggttaccaaattggtg

SEQ ID NO: 3820126 - DNA, 25 bp, Homo sapien
tactttcgtacttcccaagaggcag

SEQ ID NO: 3820127 - DNA, 25 bp, Homo sapien
ttctcaagggtgaagtgccaatcct

SEQ ID NO: 3820128 - DNA, 25 bp, Homo sapien
tcaagggtgaagtgccaatcctttt

SEQ ID NO: 3820129 - DNA, 25 bp, Homo sapien
aagggtgaagtgccaatccttttct

SEQ ID NO: 3820130 - DNA, 25 bp, Homo sapien
tctcaagggtgaagtgccaatcctt

SEQ ID NO: 3820131 - DNA, 25 bp, Homo sapien
agcagttcgttcctcacacgcactg

SEQ ID NO: 3820132 - DNA, 25 bp, Homo sapien
tcaaacagcagttcgttcctcacac

SEQ ID NO: 3820133 - DNA, 25 bp, Homo sapien
aacagcagttcgttcctcacacgca

SEQ ID NO: 3820134 - DNA, 25 bp, Homo sapien
tttcctgcggggccttggccacgcg

SEQ ID NO: 3820135 - DNA, 25 bp, Homo sapien
ccctgccaccagatcactaggagat

SEQ ID NO: 3820136 - DNA, 25 bp, Homo sapien
caccagatcactaggagatattgca

SEQ ID NO: 3820137 - DNA, 25 bp, Homo sapien
tgccaccagatcactaggagatatt

SEQ ID NO: 3820138 - DNA, 25 bp, Homo sapien
gatcactaggagatattgcaatcat

SEQ ID NO: 3820139 - DNA, 25 bp, Homo sapien
aagcaagaagcaggcaacaactggc

SEQ ID NO: 3820140 - DNA, 25 bp, Homo sapien
aagaagcaggcaacaactggccatg

SEQ ID NO: 3820141 - DNA, 25 bp, Homo sapien
caagaagcaggcaacaactggccat

SEQ ID NO: 3820142 - DNA, 25 bp, Homo sapien
gcaagaagcaggcaacaactggcca

SEQ ID NO: 3820143 - DNA, 25 bp, Homo sapien
ctccttgtagacatgctcacagatg

SEQ ID NO: 3820144 - DNA, 25 bp, Homo sapien
atgctcacagatgatccatgctccc

SEQ ID NO: 3820145 - DNA, 25 bp, Homo sapien
tgtcctccttgtagacatgctcaca

SEQ ID NO: 3820146 - DNA, 25 bp, Homo sapien
gtagacatgctcacagatgatccat

SEQ ID NO: 3820147 - DNA, 25 bp, Homo sapien
cagtttttatgatgtacctcttgca

SEQ ID NO: 3820148 - DNA, 25 bp, Homo sapien
tgtacaggcagtttcaagtaatcaa

SEQ ID NO: 3820149 - DNA, 25 bp, Homo sapien
cacttgcatgtatgtagatgtatcc

SEQ ID NO: 3820150 - DNA, 25 bp, Homo sapien
ggattcaaatccctacattctctag

SEQ ID NO: 3820151 - DNA, 25 bp, Homo sapien
cagttgtttagactcatttctcagc

SEQ ID NO: 3820152 - DNA, 25 bp, Homo sapien
tcagcttgttattgatgagtttcct

SEQ ID NO: 3820153 - DNA, 25 bp, Homo sapien
gatactgtggatatctgatggcttt

SEQ ID NO: 3820154 - DNA, 25 bp, Homo sapien
aaagatggatactgtggatatctga

SEQ ID NO: 3820155 - DNA, 25 bp, Homo sapien
gaaacttgctgtctgtctacagagg

SEQ ID NO: 3820156 - DNA, 25 bp, Homo sapien
ctaggaggtttgcacaatagagtac

SEQ ID NO: 3820157 - DNA, 25 bp, Homo sapien
gattagactaaaccatgccttcaag

SEQ ID NO: 3820158 - DNA, 25 bp, Homo sapien
gatggtctatctacagggttctggg

SEQ ID NO: 3820159 - DNA, 25 bp, Homo sapien
ttcccctggatgaggacggtgtctc

SEQ ID NO: 3820160 - DNA, 25 bp, Homo sapien
caggttctctcagttgcagatgggt

SEQ ID NO: 3820161 - DNA, 25 bp, Homo sapien
tctgacctcgtcttcagtaggaaat

SEQ ID NO: 3820162 - DNA, 25 bp, Homo sapien
cagatgggtgtaatgttagctcctc

SEQ ID NO: 3820163 - DNA, 25 bp, Homo sapien
acgccttgtgcagggtgttgtgtgc

SEQ ID NO: 3820164 - DNA, 25 bp, Homo sapien
ggacgccttgtgcagggtgttgtgt

SEQ ID NO: 3820165 - DNA, 25 bp, Homo sapien
tatttctctggacgccttgtgcagg

SEQ ID NO: 3820166 - DNA, 25 bp, Homo sapien
ttatttctctggacgccttgtgcag

SEQ ID NO: 3820167 - DNA, 25 bp, Homo sapien
cacatataggcaagccattgtgttg

SEQ ID NO: 3820168 - DNA, 25 bp, Homo sapien
tataggcaagccattgtgttgaagc

SEQ ID NO: 3820169 - DNA, 25 bp, Homo sapien
ctacacatataggcaagccattgtg

SEQ ID NO: 3820170 - DNA, 25 bp, Homo sapien
acatataggcaagccattgtgttga

SEQ ID NO: 3820171 - DNA, 25 bp, Homo sapien
ttcaaaaattctacggaaaagcata

SEQ ID NO: 3820172 - DNA, 25 bp, Homo sapien
aaattctacggaaaagcataaatat

SEQ ID NO: 3820173 - DNA, 25 bp, Homo sapien
tcaaaaattctacggaaaagcataa

SEQ ID NO: 3820174 - DNA, 25 bp, Homo sapien
gttctggcaggtgcaatataaatcc

SEQ ID NO: 3820175 - DNA, 25 bp, Homo sapien
caagctccctggtgacaaactcttt

SEQ ID NO: 3820176 - DNA, 25 bp, Homo sapien
gaatgaatccatgtctggcatcccc

SEQ ID NO: 3820177 - DNA, 25 bp, Homo sapien
tcaactcctttgaccataaacaaag

SEQ ID NO: 3820178 - DNA, 25 bp, Homo sapien
gcattgcagaatctgtgcttgggaa

SEQ ID NO: 3820179 - DNA, 25 bp, Homo sapien
tgggaaaagtactcccggctgtgtc

SEQ ID NO: 3820180 - DNA, 25 bp, Homo sapien
tgatggggaggcactctcagctggg

SEQ ID NO: 3820181 - DNA, 25 bp, Homo sapien
gaaggcagctctttgcattgcagaa

SEQ ID NO: 3820182 - DNA, 25 bp, Homo sapien
cccgtaggaacagctaattctgtct

SEQ ID NO: 3820183 - DNA, 25 bp, Homo sapien
cagcttgggtgagagaggtcacgga

SEQ ID NO: 3820184 - DNA, 25 bp, Homo sapien
tgggtgagagaggtcacggaagata

SEQ ID NO: 3820185 - DNA, 25 bp, Homo sapien
gagaggtcacggaagatatccagat

SEQ ID NO: 3820186 - DNA, 25 bp, Homo sapien
tgagagaggtcacggaagatatcca

SEQ ID NO: 3820187 - DNA, 25 bp, Homo sapien
gaatgttttgccgttgttcaagctg

SEQ ID NO: 3820188 - DNA, 25 bp, Homo sapien
caagctgacttcaatgaagtactcc

SEQ ID NO: 3820189 - DNA, 25 bp, Homo sapien
gctgacattgctcttgaatgttttg

SEQ ID NO: 3820190 - DNA, 25 bp, Homo sapien
tttgccgttgttcaagctgacttca

SEQ ID NO: 3820191 - DNA, 25 bp, Homo sapien
tggtccagggcaagttttggaagtc

SEQ ID NO: 3820192 - DNA, 25 bp, Homo sapien
tccccacttggcagatgaagggagg

SEQ ID NO: 3820193 - DNA, 25 bp, Homo sapien
tccacttgtcttcatggcctctaac

SEQ ID NO: 3820194 - DNA, 25 bp, Homo sapien
ccacagggaatggttggcaagggct

SEQ ID NO: 3820195 - DNA, 25 bp, Homo sapien
ttcatggcctctaaccccacagggt

SEQ ID NO: 3820196 - DNA, 25 bp, Homo sapien
agccatttccatgaataaccacatg

SEQ ID NO: 3820197 - DNA, 25 bp, Homo sapien
aagccatttccatgaataaccacat

SEQ ID NO: 3820198 - DNA, 25 bp, Homo sapien
gctgctgaacactcggggtctctcc

SEQ ID NO: 3820199 - DNA, 25 bp, Homo sapien
ggctgctgaacactcggggtctctc

SEQ ID NO: 3820200 - DNA, 25 bp, Homo sapien
gggctgctgaacactcggggtctct

SEQ ID NO: 3820201 - DNA, 25 bp, Homo sapien
ctgctgaacactcggggtctctcct

SEQ ID NO: 3820202 - DNA, 25 bp, Homo sapien
ctgctcagacgccacagcctgtgca

SEQ ID NO: 3820203 - DNA, 25 bp, Homo sapien
atctccaggggacatcatcagagca

SEQ ID NO: 3820204 - DNA, 25 bp, Homo sapien
gtcacactggctgcatggctgagca

SEQ ID NO: 3820205 - DNA, 25 bp, Homo sapien
gagcacagctgtcacactggctgca

SEQ ID NO: 3820206 - DNA, 25 bp, Homo sapien
acacatggtccggaccgcctgccat

SEQ ID NO: 3820207 - DNA, 25 bp, Homo sapien
aaacacatggtccggaccgcctgcc

SEQ ID NO: 3820208 - DNA, 25 bp, Homo sapien
gcaaacacatggtccggaccgcctg

SEQ ID NO: 3820209 - DNA, 25 bp, Homo sapien
acatggtccggaccgcctgccattg

SEQ ID NO: 3820210 - DNA, 25 bp, Homo sapien
gagtgtccaaagatggatgtttcat

SEQ ID NO: 3820211 - DNA, 25 bp, Homo sapien
ctccaaaagttcctgtattgggaga

SEQ ID NO: 3820212 - DNA, 25 bp, Homo sapien
tccaaaagttcctgtattgggagaa

SEQ ID NO: 3820213 - DNA, 25 bp, Homo sapien
cctccaaaagttcctgtattgggag

SEQ ID NO: 3820214 - DNA, 25 bp, Homo sapien
cagcttggctctcctgtgggcagag

SEQ ID NO: 3820215 - DNA, 25 bp, Homo sapien
tgcagccaggactccacaagcacag

SEQ ID NO: 3820216 - DNA, 25 bp, Homo sapien
gcctgcaccacctctgcctgagggc

SEQ ID NO: 3820217 - DNA, 25 bp, Homo sapien
agcacaggcctgtcccatgggtagg

SEQ ID NO: 3820218 - DNA, 25 bp, Homo sapien
agacagtgtcgccatctgtggagta

SEQ ID NO: 3820219 - DNA, 25 bp, Homo sapien
gacagtgtcgccatctgtggagtag

SEQ ID NO: 3820220 - DNA, 25 bp, Homo sapien
acagtgtcgccatctgtggagtagg

SEQ ID NO: 3820221 - DNA, 25 bp, Homo sapien
cagtgtcctgcatgttgacaacacc

SEQ ID NO: 3820222 - DNA, 25 bp, Homo sapien
cacaggacctttggaggggccacaa

SEQ ID NO: 3820223 - DNA, 25 bp, Homo sapien
ccatttcccttacaacagccctcat

SEQ ID NO: 3820224 - DNA, 25 bp, Homo sapien
gcctccatttcccttacaacagccc

SEQ ID NO: 3820225 - DNA, 25 bp, Homo sapien
aaaagttttgcttcaggactgtcag

SEQ ID NO: 3820226 - DNA, 25 bp, Homo sapien
cgttctcagaaagctaggcattcct

SEQ ID NO: 3820227 - DNA, 25 bp, Homo sapien
gaattctatttttgaggcacccaag

SEQ ID NO: 3820228 - DNA, 25 bp, Homo sapien
ccaaggacatatcactggtggctgt

SEQ ID NO: 3820229 - DNA, 25 bp, Homo sapien
agaaggatccatgtttctgtacagt

SEQ ID NO: 3820230 - DNA, 25 bp, Homo sapien
tggcccctggctttagaccacttgc

SEQ ID NO: 3820231 - DNA, 25 bp, Homo sapien
agtggcccctggctttagaccactt

SEQ ID NO: 3820232 - DNA, 25 bp, Homo sapien
ccatgtttctgtacagtggcagctt

SEQ ID NO: 3820233 - DNA, 25 bp, Homo sapien
cactgagtgggcttgtcgcctgctg

SEQ ID NO: 3820234 - DNA, 25 bp, Homo sapien
caccacgaacactgcaaggatgcca

SEQ ID NO: 3820235 - DNA, 25 bp, Homo sapien
ctgtcactgagtgggcttgtcgcct

SEQ ID NO: 3820236 - DNA, 25 bp, Homo sapien
cacgaacactgcaaggatgccaggg

SEQ ID NO: 3820237 - DNA, 25 bp, Homo sapien
gatgatttcatcaccagggtttata

SEQ ID NO: 3820238 - DNA, 25 bp, Homo sapien
tttatagagggacctgcactggcca

SEQ ID NO: 3820239 - DNA, 25 bp, Homo sapien
ggctgtgcatggacaaggccttgca

SEQ ID NO: 3820240 - DNA, 25 bp, Homo sapien
gccagcataggttctcagtggccag

SEQ ID NO: 3820241 - DNA, 25 bp, Homo sapien
aggcacacggcagaaccccctttgt

SEQ ID NO: 3820242 - DNA, 25 bp, Homo sapien
ccctttgtcactccccccgtcagag

SEQ ID NO: 3820243 - DNA, 25 bp, Homo sapien
cactgctcaggcacacggcagaacc

SEQ ID NO: 3820244 - DNA, 25 bp, Homo sapien
cagctaggtgcttgaggcctccctc

SEQ ID NO: 3820245 - DNA, 25 bp, Homo sapien
caacagccccgaattcatctgtcat

SEQ ID NO: 3820246 - DNA, 25 bp, Homo sapien
cacagtgccctggtgccgtcgggat

SEQ ID NO: 3820247 - DNA, 25 bp, Homo sapien
cgggatgccaggcatggatgcattc

SEQ ID NO: 3820248 - DNA, 25 bp, Homo sapien
ggcatggatgcattccactcccaac

SEQ ID NO: 3820249 - DNA, 25 bp, Homo sapien
gtgtgcagcgcaatgagacagggtc

SEQ ID NO: 3820250 - DNA, 25 bp, Homo sapien
acattagctgagcatgggggcggga

SEQ ID NO: 3820251 - DNA, 25 bp, Homo sapien
agcatgggggcgggatcctgtaatc

SEQ ID NO: 3820252 - DNA, 25 bp, Homo sapien
gctgagcatgggggcgggatcctgt

SEQ ID NO: 3820253 - DNA, 25 bp, Homo sapien
ttagctgagcatgggggcgggatcc

SEQ ID NO: 3820254 - DNA, 25 bp, Homo sapien
aaaggagggtgtcattgtgttactc

SEQ ID NO: 3820255 - DNA, 25 bp, Homo sapien
atcttatgtctatacattcatttca

SEQ ID NO: 3820256 - DNA, 25 bp, Homo sapien
tttcaatggataagaatcaaagtag

SEQ ID NO: 3820257 - DNA, 25 bp, Homo sapien
atcaaagtagagatagtgaaatagc

SEQ ID NO: 3820258 - DNA, 25 bp, Homo sapien
caggcagttcatggagtgtaagaca

SEQ ID NO: 3820259 - DNA, 25 bp, Homo sapien
cggcgaagccgacttttcccattat

SEQ ID NO: 3820260 - DNA, 25 bp, Homo sapien
tgacaggtaccatattaagggcagc

SEQ ID NO: 3820261 - DNA, 25 bp, Homo sapien
tctatagagtgcacatgataccaca

SEQ ID NO: 3820262 - DNA, 25 bp, Homo sapien
attacccttcccctatgctatagaa

SEQ ID NO: 3820263 - DNA, 25 bp, Homo sapien
atacacatccctgctgaagcccgca

SEQ ID NO: 3820264 - DNA, 25 bp, Homo sapien
tgccttctgttcataaacgcctatt

SEQ ID NO: 3820265 - DNA, 25 bp, Homo sapien
tatgctatagaagccctgggtcggg

SEQ ID NO: 3820266 - DNA, 25 bp, Homo sapien
gctgctgaacactcggggtctctcc

SEQ ID NO: 3820267 - DNA, 25 bp, Homo sapien
ggctgctgaacactcggggtctctc

SEQ ID NO: 3820268 - DNA, 25 bp, Homo sapien
gggctgctgaacactcggggtctct

SEQ ID NO: 3820269 - DNA, 25 bp, Homo sapien
ctgctgaacactcggggtctctcct

SEQ ID NO: 3820270 - DNA, 25 bp, Homo sapien
acagtgggggctccgcagacctaac

SEQ ID NO: 3820271 - DNA, 25 bp, Homo sapien
ctaactgcagtgcaggcctttgatg

SEQ ID NO: 3820272 - DNA, 25 bp, Homo sapien
ccgcagacctaactgcagtgcaggc

SEQ ID NO: 3820273 - DNA, 25 bp, Homo sapien
agggcctcctcagctcttacctcct

SEQ ID NO: 3820274 - DNA, 25 bp, Homo sapien
acatcagcccactcatggcatcaat

SEQ ID NO: 3820275 - DNA, 25 bp, Homo sapien
ccaggctgtctgcaattgttgttat

SEQ ID NO: 3820276 - DNA, 25 bp, Homo sapien
tggcatcaatggtgcttctcagggc

SEQ ID NO: 3820277 - DNA, 25 bp, Homo sapien
tccactgcaaacacatggtccaggc

SEQ ID NO: 3820278 - DNA, 25 bp, Homo sapien
cagccccgagtggccaagggatgtc

SEQ ID NO: 3820279 - DNA, 25 bp, Homo sapien
ttcaggctgcccatgattgagccac

SEQ ID NO: 3820280 - DNA, 25 bp, Homo sapien
ctggatgccgtctctagggtgtgaa

SEQ ID NO: 3820281 - DNA, 25 bp, Homo sapien
actgtcctggtacatcctggtggta

SEQ ID NO: 3820282 - DNA, 25 bp, Homo sapien
ggaatgtgcttttgagccgtcctga

SEQ ID NO: 3820283 - DNA, 25 bp, Homo sapien
agaagggttgttcttccagtgccgt

SEQ ID NO: 3820284 - DNA, 25 bp, Homo sapien
tgttcttccagtgccgtaagtgctc

SEQ ID NO: 3820285 - DNA, 25 bp, Homo sapien
ggttgttcttccagtgccgtaagtg

SEQ ID NO: 3820286 - DNA, 25 bp, Homo sapien
agggttgttcttccagtgccgtaag

SEQ ID NO: 3820287 - DNA, 25 bp, Homo sapien
gggagagatacttcaagactacata

SEQ ID NO: 3820288 - DNA, 25 bp, Homo sapien
gatggttttatcaagatctctgtga

SEQ ID NO: 3820289 - DNA, 25 bp, Homo sapien
tctctgtgatgctgttgtatggtgg

SEQ ID NO: 3820290 - DNA, 25 bp, Homo sapien
tatgaccctgacatctttaaagagt

SEQ ID NO: 3820291 - DNA, 25 bp, Homo sapien
cctccacctcttcggttcaagtgat

SEQ ID NO: 3820292 - DNA, 25 bp, Homo sapien
gtggcacgatattggttcactacaa

SEQ ID NO: 3820293 - DNA, 25 bp, Homo sapien
gtgattctcatgcctcagcctccca

SEQ ID NO: 3820294 - DNA, 25 bp, Homo sapien
aagtagctgggattataggcatgtg

SEQ ID NO: 3820295 - DNA, 25 bp, Homo sapien
agacagggtctggttgtgttgccta

SEQ ID NO: 3820296 - DNA, 25 bp, Homo sapien
tcaaccttcttacctcaagtgattc

SEQ ID NO: 3820297 - DNA, 25 bp, Homo sapien
gcatgagccacaatggccagcttct

SEQ ID NO: 3820298 - DNA, 25 bp, Homo sapien
tcatagcttgctgcacctttgaact

SEQ ID NO: 3820299 - DNA, 25 bp, Homo sapien
ctcttttcatagtctaggttcccca

SEQ ID NO: 3820300 - DNA, 25 bp, Homo sapien
taggttccccacagaccccttcatc

SEQ ID NO: 3820301 - DNA, 25 bp, Homo sapien
ttttcatagtctaggttccccacag

SEQ ID NO: 3820302 - DNA, 25 bp, Homo sapien
ttcatagtctaggttccccacagac

SEQ ID NO: 3820303 - DNA, 25 bp, Homo sapien
ccttccacgatgcattctacatctg

SEQ ID NO: 3820304 - DNA, 25 bp, Homo sapien
cacgatgcattctacatctgagaaa

SEQ ID NO: 3820305 - DNA, 25 bp, Homo sapien
tccacgatgcattctacatctgaga

SEQ ID NO: 3820306 - DNA, 25 bp, Homo sapien
gatgcattctacatctgagaaactg

SEQ ID NO: 3820307 - DNA, 25 bp, Homo sapien
ggccatcaaggacatatcccggcat

SEQ ID NO: 3820308 - DNA, 25 bp, Homo sapien
caaggagaagaacctgtttgtcagc

SEQ ID NO: 3820309 - DNA, 25 bp, Homo sapien
tcatagaccaggtggtcatgtccta

SEQ ID NO: 3820310 - DNA, 25 bp, Homo sapien
caagctccatgagaagctgcaccac

SEQ ID NO: 3820311 - DNA, 25 bp, Homo sapien
ctgaacgtggcagacgttcggtatg

SEQ ID NO: 3820312 - DNA, 25 bp, Homo sapien
gagtacattcgtcgctacagccaca

SEQ ID NO: 3820313 - DNA, 25 bp, Homo sapien
gagaacatcagtgccgtctgtctgg

SEQ ID NO: 3820314 - DNA, 25 bp, Homo sapien
gtctgtctggacgttcagtccctga

SEQ ID NO: 3820315 - DNA, 25 bp, Homo sapien
caggagcaggaaatcttcgacaggt

SEQ ID NO: 3820316 - DNA, 25 bp, Homo sapien
gagcaggaaatcttcgacaggtcca

SEQ ID NO: 3820317 - DNA, 25 bp, Homo sapien
gaagcaggagcaggaaatcttcgac

SEQ ID NO: 3820318 - DNA, 25 bp, Homo sapien
gcaggaaatcttcgacaggtccatg

SEQ ID NO: 3820319 - DNA, 25 bp, Homo sapien
agaagcggtaaaacagcagcatccc

SEQ ID NO: 3820320 - DNA, 25 bp, Homo sapien
cccagaagcggtaaaacagcagcat

SEQ ID NO: 3820321 - DNA, 25 bp, Homo sapien
cgcccagaagcggtaaaacagcagc

SEQ ID NO: 3820322 - DNA, 25 bp, Homo sapien
aagagcgcccagaagcggtaaaaca

SEQ ID NO: 3820323 - DNA, 25 bp, Homo sapien
gcagagccgcactaacgcgaacccg

SEQ ID NO: 3820324 - DNA, 25 bp, Homo sapien
gagccgcactaacgcgaacccgcga

SEQ ID NO: 3820325 - DNA, 25 bp, Homo sapien
gcctactccggcagagccgcactaa

SEQ ID NO: 3820326 - DNA, 25 bp, Homo sapien
tccggcagagccgcactaacgcgaa

SEQ ID NO: 3820327 - DNA, 25 bp, Homo sapien
tggggcaggagagacgccgctgtga

SEQ ID NO: 3820328 - DNA, 25 bp, Homo sapien
ctggggcaggagagacgccgctgtg

SEQ ID NO: 3820329 - DNA, 25 bp, Homo sapien
gggcaggagagacgccgctgtgaac

SEQ ID NO: 3820330 - DNA, 25 bp, Homo sapien
gcaggagagacgccgctgtgaacac

SEQ ID NO: 3820331 - DNA, 25 bp, Homo sapien
caggccggaaatgccggcttgaagc

SEQ ID NO: 3820332 - DNA, 25 bp, Homo sapien
aaatgactgaaaggaattcaaatat

SEQ ID NO: 3820333 - DNA, 25 bp, Homo sapien
ggtgtcatctcgcctttgtccactt

SEQ ID NO: 3820334 - DNA, 25 bp, Homo sapien
gtgtcatctcgcctttgtccacttc

SEQ ID NO: 3820335 - DNA, 25 bp, Homo sapien
aaggtgtcatctcgcctttgtccac

SEQ ID NO: 3820336 - DNA, 25 bp, Homo sapien
aggtaaagtttggtgctgcctcact

SEQ ID NO: 3820337 - DNA, 25 bp, Homo sapien
taacaatatgggtcactctgtacag

SEQ ID NO: 3820338 - DNA, 25 bp, Homo sapien
ccttttggcagggaatagctttgcc

SEQ ID NO: 3820339 - DNA, 25 bp, Homo sapien
ggaatagtctatttgcccagtacac

SEQ ID NO: 3820340 - DNA, 25 bp, Homo sapien
taaataatccattgaatattgacaa

SEQ ID NO: 3820341 - DNA, 25 bp, Homo sapien
gagtaggcagggtacagcaaataaa

SEQ ID NO: 3820342 - DNA, 25 bp, Homo sapien
tacccaatctgccatattccacttt

SEQ ID NO: 3820343 - DNA, 25 bp, Homo sapien
aaaaccagagtaggcagggtacagc

SEQ ID NO: 3820344 - DNA, 25 bp, Homo sapien
tgatacagtggccaccttggtacag

SEQ ID NO: 3820345 - DNA, 25 bp, Homo sapien
tgccagtgagctatcaggaatcaca

SEQ ID NO: 3820346 - DNA, 25 bp, Homo sapien
tcacaagtagatttgaggaaagctt

SEQ ID NO: 3820347 - DNA, 25 bp, Homo sapien
tagtggaaactgattcatgaaccct

SEQ ID NO: 3820348 - DNA, 25 bp, Homo sapien
cacagatgatacacaagatataact

SEQ ID NO: 3820349 - DNA, 25 bp, Homo sapien
aattagagtatccaacacagatgat

SEQ ID NO: 3820350 - DNA, 25 bp, Homo sapien
tatttagcaaactgtctggagcctc

SEQ ID NO: 3820351 - DNA, 25 bp, Homo sapien
cacaagatataacttgaagattact

SEQ ID NO: 3820352 - DNA, 25 bp, Homo sapien
gtcctgcttccgattgtgtccaaaa

SEQ ID NO: 3820353 - DNA, 25 bp, Homo sapien
aagtatgacagcaggcttcagaatg

SEQ ID NO: 3820354 - DNA, 25 bp, Homo sapien
aagccggggaagtgccttcaaatga

SEQ ID NO: 3820355 - DNA, 25 bp, Homo sapien
cattccactgttgcattactcagac

SEQ ID NO: 3820356 - DNA, 25 bp, Homo sapien
cgatgttgaagtagcctcatatttc

SEQ ID NO: 3820357 - DNA, 25 bp, Homo sapien
tacacactatctgccacgatgttga

SEQ ID NO: 3820358 - DNA, 25 bp, Homo sapien
tgaagtagcctcatatttctccaca

SEQ ID NO: 3820359 - DNA, 25 bp, Homo sapien
attacacactatctgccacgatgtt

SEQ ID NO: 3820360 - DNA, 25 bp, Homo sapien
tttgtactgaattcttcgggttagc

SEQ ID NO: 3820361 - DNA, 25 bp, Homo sapien
tacaaatataacttcagcaacttcc

SEQ ID NO: 3820362 - DNA, 25 bp, Homo sapien
caaatataacttcagcaacttcccc

SEQ ID NO: 3820363 - DNA, 25 bp, Homo sapien
ttcgggttagcacctacaaatataa

SEQ ID NO: 3820364 - DNA, 25 bp, Homo sapien
ggctgcaggacatccccgaaagttc

SEQ ID NO: 3820365 - DNA, 25 bp, Homo sapien
tgccttttggtgctctatccacaat

SEQ ID NO: 3820366 - DNA, 25 bp, Homo sapien
cactctgtattcaggttttgctggc

SEQ ID NO: 3820367 - DNA, 25 bp, Homo sapien
gaggttctggacctctgctcaggtt

SEQ ID NO: 3820368 - DNA, 25 bp, Homo sapien
gtgcggtccataaattgtcgatgct

SEQ ID NO: 3820369 - DNA, 25 bp, Homo sapien
tcgatgctgcctcatatcgctgagc

SEQ ID NO: 3820370 - DNA, 25 bp, Homo sapien
cgtagcaatagccttagcaaggttt

SEQ ID NO: 3820371 - DNA, 25 bp, Homo sapien
tccataaattgtcgatgctgcctca

SEQ ID NO: 3820372 - DNA, 25 bp, Homo sapien
taatgtaatgtgtatagacgttgca

SEQ ID NO: 3820373 - DNA, 25 bp, Homo sapien
gcatagacctgaaataacaacagtc

SEQ ID NO: 3820374 - DNA, 25 bp, Homo sapien
tgttctgcatcccatgagatgcaaa

SEQ ID NO: 3820375 - DNA, 25 bp, Homo sapien
tcttcataagtggtaatgtaatgtg

SEQ ID NO: 3820376 - DNA, 25 bp, Homo sapien
tgcttgaactgcctctcgaagtctt

SEQ ID NO: 3820377 - DNA, 25 bp, Homo sapien
cttgaactgcctctcgaagtcttcg

SEQ ID NO: 3820378 - DNA, 25 bp, Homo sapien
tgcctctcgaagtcttcgtccagac

SEQ ID NO: 3820379 - DNA, 25 bp, Homo sapien
cctctcgaagtcttcgtccagacat

SEQ ID NO: 3820380 - DNA, 25 bp, Homo sapien
gatggcagttatggccaaggaccca

SEQ ID NO: 3820381 - DNA, 25 bp, Homo sapien
ccaaggacccaagggtaataatctg

SEQ ID NO: 3820382 - DNA, 25 bp, Homo sapien
ggatggcagttatggccaaggaccc

SEQ ID NO: 3820383 - DNA, 25 bp, Homo sapien
ccaagggtaataatctgaacatcaa

SEQ ID NO: 3820384 - DNA, 25 bp, Homo sapien
ttctccggtgtgaagaaggatgggc

SEQ ID NO: 3820385 - DNA, 25 bp, Homo sapien
ccgaatggtgtcccaaaatggatcc

SEQ ID NO: 3820386 - DNA, 25 bp, Homo sapien
aatggtgtcccaaaatggatcccct

SEQ ID NO: 3820387 - DNA, 25 bp, Homo sapien
gatgggctttggtttatgacattct

SEQ ID NO: 3820388 - DNA, 25 bp, Homo sapien
tagtgccagccgcaaaactgtagcc

SEQ ID NO: 3820389 - DNA, 25 bp, Homo sapien
cgcaaaactgtagcccaatgctggt

SEQ ID NO: 3820390 - DNA, 25 bp, Homo sapien
aactccatcaatagtgccagccgca

SEQ ID NO: 3820391 - DNA, 25 bp, Homo sapien
cctgtgtaaaattgaggcctccaac

SEQ ID NO: 3820392 - DNA, 25 bp, Homo sapien
ctgaagccagtggtcctgttacctc

SEQ ID NO: 3820393 - DNA, 25 bp, Homo sapien
tgcatgtgtggaattgagccagaca

SEQ ID NO: 3820394 - DNA, 25 bp, Homo sapien
gtgtgctgaagccagtggtcctgtt

SEQ ID NO: 3820395 - DNA, 25 bp, Homo sapien
catctgtcatatccacccactggtg

SEQ ID NO: 3820396 - DNA, 25 bp, Homo sapien
ctctgatacatggcccgtcctataa

SEQ ID NO: 3820397 - DNA, 25 bp, Homo sapien
cgtcctataatttgtgtgctgtcaa

SEQ ID NO: 3820398 - DNA, 25 bp, Homo sapien
ggcccgtcctataatttgtgtgctg

SEQ ID NO: 3820399 - DNA, 25 bp, Homo sapien
tacatggcccgtcctataatttgtg

SEQ ID NO: 3820400 - DNA, 25 bp, Homo sapien
tgggacaagtgctattggcgttatc

SEQ ID NO: 3820401 - DNA, 25 bp, Homo sapien
gggacacatctcctaggtttgatga

SEQ ID NO: 3820402 - DNA, 25 bp, Homo sapien
tattggcgttatcacaggactctcc

SEQ ID NO: 3820403 - DNA, 25 bp, Homo sapien
tcctgtgttgatgcaacgtggtcca

SEQ ID NO: 3820404 - DNA, 25 bp, Homo sapien
tctcttgctcaagcaggtaagatgc

SEQ ID NO: 3820405 - DNA, 25 bp, Homo sapien
tgctgaccgggtggatggcaaacca

SEQ ID NO: 3820406 - DNA, 25 bp, Homo sapien
ggtaagatgcatagcccacattgtc

SEQ ID NO: 3820407 - DNA, 25 bp, Homo sapien
acaagatggttactgttgttcatgc

SEQ ID NO: 3820408 - DNA, 25 bp, Homo sapien
cttcctttaggtgttctcagttcta

SEQ ID NO: 3820409 - DNA, 25 bp, Homo sapien
gcttcctttaggtgttctcagttct

SEQ ID NO: 3820410 - DNA, 25 bp, Homo sapien
ttcctttaggtgttctcagttctat

SEQ ID NO: 3820411 - DNA, 25 bp, Homo sapien
tcctttaggtgttctcagttctatt

SEQ ID NO: 3820412 - DNA, 25 bp, Homo sapien
atctccattcaaatctaccattttc

SEQ ID NO: 3820413 - DNA, 25 bp, Homo sapien
tcaaaactatcatttccttgtctgt

SEQ ID NO: 3820414 - DNA, 25 bp, Homo sapien
tcaaatctaccattttcaaaactat

SEQ ID NO: 3820415 - DNA, 25 bp, Homo sapien
gataaggcccaagtcatctccattc

SEQ ID NO: 3820416 - DNA, 25 bp, Homo sapien
caagtaacagccctgtacttagatt

SEQ ID NO: 3820417 - DNA, 25 bp, Homo sapien
catattcatcaagtaacagccctgt

SEQ ID NO: 3820418 - DNA, 25 bp, Homo sapien
tattcatcaagtaacagccctgtac

SEQ ID NO: 3820419 - DNA, 25 bp, Homo sapien
taacagccctgtacttagattttgt

SEQ ID NO: 3820420 - DNA, 25 bp, Homo sapien
cctggtttcatatttgtgtgtgcta

SEQ ID NO: 3820421 - DNA, 25 bp, Homo sapien
tctctgactgcggattttgaaggta

SEQ ID NO: 3820422 - DNA, 25 bp, Homo sapien
ggacttctgttgatctgcacaccat

SEQ ID NO: 3820423 - DNA, 25 bp, Homo sapien
ttgaaggtaagaatacggacttctg

SEQ ID NO: 3820424 - DNA, 25 bp, Homo sapien
cacggtatactggaaatatcctgca

SEQ ID NO: 3820425 - DNA, 25 bp, Homo sapien
tctgtacagggagccatatttactc

SEQ ID NO: 3820426 - DNA, 25 bp, Homo sapien
ttcaagataccagtgaccatgtgct

SEQ ID NO: 3820427 - DNA, 25 bp, Homo sapien
cctgcaggacctgaatgagtgtgag

SEQ ID NO: 3820428 - DNA, 25 bp, Homo sapien
gtttctattccatttcgtctcactg

SEQ ID NO: 3820429 - DNA, 25 bp, Homo sapien
tctattccatttcgtctcactgaca

SEQ ID NO: 3820430 - DNA, 25 bp, Homo sapien
ttcagtttctattccatttcgtctc

SEQ ID NO: 3820431 - DNA, 25 bp, Homo sapien
tattccatttcgtctcactgacact

SEQ ID NO: 3820432 - DNA, 25 bp, Homo sapien
gcacagagatcttccataatcttca

SEQ ID NO: 3820433 - DNA, 25 bp, Homo sapien
tgcacagagatcttccataatcttc

SEQ ID NO: 3820434 - DNA, 25 bp, Homo sapien
cacagagatcttccataatcttcat

SEQ ID NO: 3820435 - DNA, 25 bp, Homo sapien
tcctggcttttgcacggcatcaagt

SEQ ID NO: 3820436 - DNA, 25 bp, Homo sapien
tttgcacggcatcaagtaacccgcg

SEQ ID NO: 3820437 - DNA, 25 bp, Homo sapien
aggaagtggactcccaatccagcca

SEQ ID NO: 3820438 - DNA, 25 bp, Homo sapien
aatccagccatagtccattcgcccc

SEQ ID NO: 3820439 - DNA, 25 bp, Homo sapien
caagcggacctaaggagtcgcagtt

SEQ ID NO: 3820440 - DNA, 25 bp, Homo sapien
tcagcaaggactccgcgagcgaggt

SEQ ID NO: 3820441 - DNA, 25 bp, Homo sapien
gcactcggccgttgacgagtctttc

SEQ ID NO: 3820442 - DNA, 25 bp, Homo sapien
ctccgcgagcgaggtgcaagctgct

SEQ ID NO: 3820443 - DNA, 25 bp, Homo sapien
tgtcattccttctaagtttgttacc

SEQ ID NO: 3820444 - DNA, 25 bp, Homo sapien
caaaatggatgttattcctctgtca

SEQ ID NO: 3820445 - DNA, 25 bp, Homo sapien
taacttatccatcccttatggtatg

SEQ ID NO: 3820446 - DNA, 25 bp, Homo sapien
gttatggcactggtgactcaaaatg

SEQ ID NO: 3820447 - DNA, 25 bp, Homo sapien
ttggagatgattctgtgcgaacgtc

SEQ ID NO: 3820448 - DNA, 25 bp, Homo sapien
cttgaaaactggtcgaatgcgtcag

SEQ ID NO: 3820449 - DNA, 25 bp, Homo sapien
aagtgtggtgttagggaaccatgcc

SEQ ID NO: 3820450 - DNA, 25 bp, Homo sapien
ccttggtgatataggctgttgatgc

SEQ ID NO: 3820451 - DNA, 25 bp, Homo sapien
caagcttcacttaatgccgtgcaaa

SEQ ID NO: 3820452 - DNA, 25 bp, Homo sapien
caaaatttgactctgcattgggata

SEQ ID NO: 3820453 - DNA, 25 bp, Homo sapien
cattgggataatacatgtcgagtac

SEQ ID NO: 3820454 - DNA, 25 bp, Homo sapien
tgtcgagtacctattgaacaggcac

SEQ ID NO: 3820455 - DNA, 25 bp, Homo sapien
agaactatcaatgccataactctga

SEQ ID NO: 3820456 - DNA, 25 bp, Homo sapien
caagtatttctcctaagatctttcc

SEQ ID NO: 3820457 - DNA, 25 bp, Homo sapien
tttcatagtctccaagtatttctcc

SEQ ID NO: 3820458 - DNA, 25 bp, Homo sapien
aagatagtatctttacaatggagaa

SEQ ID NO: 3820459 - DNA, 25 bp, Homo sapien
acatcagcccactcatggcatcaat

SEQ ID NO: 3820460 - DNA, 25 bp, Homo sapien
ccaggctgtctgcaattgttgttat

SEQ ID NO: 3820461 - DNA, 25 bp, Homo sapien
cactgcaaacacatggtccaggctg

SEQ ID NO: 3820462 - DNA, 25 bp, Homo sapien
tggcatcaatggtgcttctcagggc

SEQ ID NO: 3820463 - DNA, 25 bp, Homo sapien
cagccccgagtggccaagggatgtc

SEQ ID NO: 3820464 - DNA, 25 bp, Homo sapien
actgtcctggtacatcctggtggta

SEQ ID NO: 3820465 - DNA, 25 bp, Homo sapien
ctggatgccgtctctagggtgtgaa

SEQ ID NO: 3820466 - DNA, 25 bp, Homo sapien
ggaatgtgcttttgagccgtcctga

SEQ ID NO: 3820467 - DNA, 25 bp, Homo sapien
ttcaggctgcccatgattgagccac

SEQ ID NO: 3820468 - DNA, 25 bp, Homo sapien
agaagggttgttcttccagtgccgt

SEQ ID NO: 3820469 - DNA, 25 bp, Homo sapien
tgttcttccagtgccgtaagtgctc

SEQ ID NO: 3820470 - DNA, 25 bp, Homo sapien
ggttgttcttccagtgccgtaagtg

SEQ ID NO: 3820471 - DNA, 25 bp, Homo sapien
agggttgttcttccagtgccgtaag

SEQ ID NO: 3820472 - DNA, 25 bp, Homo sapien
acgattggcctatgatggctggcca

SEQ ID NO: 3820473 - DNA, 25 bp, Homo sapien
tggcctatgatggatggatgttctg

SEQ ID NO: 3820474 - DNA, 25 bp, Homo sapien
tgatgaatgattggcctatgatgga

SEQ ID NO: 3820475 - DNA, 25 bp, Homo sapien
cctgtgatggatggatggcctatga

SEQ ID NO: 3820476 - DNA, 25 bp, Homo sapien
cactgtaatggatgggtgctctgtg

SEQ ID NO: 3820477 - DNA, 25 bp, Homo sapien
tctgtggtgaatgggtggcctgtga

SEQ ID NO: 3820478 - DNA, 25 bp, Homo sapien
gcactgtaatggatgggtgctctgt

SEQ ID NO: 3820479 - DNA, 25 bp, Homo sapien
tctgtggtgaatgggtggcctatga

SEQ ID NO: 3820480 - DNA, 25 bp, Homo sapien
ctgccattgttcaggctggcttcaa

SEQ ID NO: 3820481 - DNA, 25 bp, Homo sapien
agggcaagtcatgaaagtcttgtcc

SEQ ID NO: 3820482 - DNA, 25 bp, Homo sapien
ggcaagtcatgaaagtcttgtccat

SEQ ID NO: 3820483 - DNA, 25 bp, Homo sapien
caagtcatgaaagtcttgtccatac

SEQ ID NO: 3820484 - DNA, 25 bp, Homo sapien
gcaagtcatgaaagtcttgtccata

SEQ ID NO: 3820485 - DNA, 25 bp, Homo sapien
ctgagcagtgttgtagggctgacaa

SEQ ID NO: 3820486 - DNA, 25 bp, Homo sapien
ggactgggactcccgcacactgctt

SEQ ID NO: 3820487 - DNA, 25 bp, Homo sapien
actgggactcccgcacactgcttgg

SEQ ID NO: 3820488 - DNA, 25 bp, Homo sapien
ctgggactcccgcacactgcttggt

SEQ ID NO: 3820489 - DNA, 25 bp, Homo sapien
tgggactcccgcacactgcttggta

SEQ ID NO: 3820490 - DNA, 25 bp, Homo sapien
tgtcacactgctgcacggctgagtg

SEQ ID NO: 3820491 - DNA, 25 bp, Homo sapien
gctgtcacactgctgcacggctgag

SEQ ID NO: 3820492 - DNA, 25 bp, Homo sapien
tcagaggagcgcagctgtcacactg

SEQ ID NO: 3820493 - DNA, 25 bp, Homo sapien
gtcacactgctgcacggctgagtgg

SEQ ID NO: 3820494 - DNA, 25 bp, Homo sapien
ttcacctcaagacaccttgtgttcc

SEQ ID NO: 3820495 - DNA, 25 bp, Homo sapien
acctcaagacaccttgtgttccgat

SEQ ID NO: 3820496 - DNA, 25 bp, Homo sapien
agacttcacctcaagacaccttgtg

SEQ ID NO: 3820497 - DNA, 25 bp, Homo sapien
gacttcacctcaagacaccttgtgt

SEQ ID NO: 3820498 - DNA, 25 bp, Homo sapien
catgggttggcccaaatcacttggg

SEQ ID NO: 3820499 - DNA, 25 bp, Homo sapien
tgtggtgggatttctacaacacgct

SEQ ID NO: 3820500 - DNA, 25 bp, Homo sapien
cactgcaaacatgcggtccaggctg

SEQ ID NO: 3820501 - DNA, 25 bp, Homo sapien
gcaagttagatgactgtccttgtgg

SEQ ID NO: 3820502 - DNA, 25 bp, Homo sapien
actggtcatagcaataatcgtgctg

SEQ ID NO: 3820503 - DNA, 25 bp, Homo sapien
tggtaaccttgttgtctgcagaaga

SEQ ID NO: 3820504 - DNA, 25 bp, Homo sapien
tcagcaaaggcatcaggagtgacct

SEQ ID NO: 3820505 - DNA, 25 bp, Homo sapien
ggagtgacctccagaagctccggga

SEQ ID NO: 3820506 - DNA, 25 bp, Homo sapien
ccgggcagtcccatgggcagagcct

SEQ ID NO: 3820507 - DNA, 25 bp, Homo sapien
tgcaccacttctgcctgagggcagc

SEQ ID NO: 3820508 - DNA, 25 bp, Homo sapien
ccactagcagcctgcaccacttctg

SEQ ID NO: 3820509 - DNA, 25 bp, Homo sapien
agagctccacaagcacaggcctgtc

SEQ ID NO: 3820510 - DNA, 25 bp, Homo sapien
tctccaacagattatatccaaagat

SEQ ID NO: 3820511 - DNA, 25 bp, Homo sapien
tctggacatgtatcctgttcactgc

SEQ ID NO: 3820512 - DNA, 25 bp, Homo sapien
cgctgggcagtagggtaagaaccat

SEQ ID NO: 3820513 - DNA, 25 bp, Homo sapien
tgctgttattctcagcccgggcttg

SEQ ID NO: 3820514 - DNA, 25 bp, Homo sapien
tgagatcacatccacccctatgagg

SEQ ID NO: 3820515 - DNA, 25 bp, Homo sapien
tggccatcctcagtcatattcatgg

SEQ ID NO: 3820516 - DNA, 25 bp, Homo sapien
tattcatggcagactctcaatctgc

SEQ ID NO: 3820517 - DNA, 25 bp, Homo sapien
gggccccattgaagcattggatctg

SEQ ID NO: 3820518 - DNA, 25 bp, Homo sapien
caggacctcacaatccaaatgcaga

SEQ ID NO: 3820519 - DNA, 25 bp, Homo sapien
gcctggatcaccttcagtgtttaat

SEQ ID NO: 3820520 - DNA, 25 bp, Homo sapien
gtccaggcgtagctggccacagagc

SEQ ID NO: 3820521 - DNA, 25 bp, Homo sapien
ggctgaccaggaattgctcatctcc

SEQ ID NO: 3820522 - DNA, 25 bp, Homo sapien
tgataaaccgagaaccacaagctct

SEQ ID NO: 3820523 - DNA, 25 bp, Homo sapien
cagcacttgctgagttgggcaacag

SEQ ID NO: 3820524 - DNA, 25 bp, Homo sapien
aggcatggttagatcccctgtagac

SEQ ID NO: 3820525 - DNA, 25 bp, Homo sapien
tgattcacgtgatctgagggctctg

SEQ ID NO: 3820526 - DNA, 25 bp, Homo sapien
cagccctgacggtgttttggtgtga

SEQ ID NO: 3820527 - DNA, 25 bp, Homo sapien
tttggtgtgagcagctcgcagatgc

SEQ ID NO: 3820528 - DNA, 25 bp, Homo sapien
caggctgctgaaggtggtctctgca

SEQ ID NO: 3820529 - DNA, 25 bp, Homo sapien
ggtcacctcaagtctgcacacaagg

SEQ ID NO: 3820530 - DNA, 25 bp, Homo sapien
tccctgattggtgaactcgtattca

SEQ ID NO: 3820531 - DNA, 25 bp, Homo sapien
atccctgattggtgaactcgtattc

SEQ ID NO: 3820532 - DNA, 25 bp, Homo sapien
catccctgattggtgaactcgtatt

SEQ ID NO: 3820533 - DNA, 25 bp, Homo sapien
gcctcctcagcattcgttcataagc

SEQ ID NO: 3820534 - DNA, 25 bp, Homo sapien
cgtcttgcgtatgcatcctgctttg

SEQ ID NO: 3820535 - DNA, 25 bp, Homo sapien
gctgcacagtgcttcgtcttgcgta

SEQ ID NO: 3820536 - DNA, 25 bp, Homo sapien
taagcatagcgagcatcactgtccg

SEQ ID NO: 3820537 - DNA, 25 bp, Homo sapien
tctctgatcatccaaaggtgctgca

SEQ ID NO: 3820538 - DNA, 25 bp, Homo sapien
tatgtacatcaccagcagaagggcc

SEQ ID NO: 3820539 - DNA, 25 bp, Homo sapien
caggcaaggctgacatcactgtttc

SEQ ID NO: 3820540 - DNA, 25 bp, Homo sapien
tatgcagccggcatgaggctcagaa

SEQ ID NO: 3820541 - DNA, 25 bp, Homo sapien
ggaataatgatagctgcatctgaaa

SEQ ID NO: 3820542 - DNA, 25 bp, Homo sapien
ggtggttattggaaagccatatata

SEQ ID NO: 3820543 - DNA, 25 bp, Homo sapien
tgatatatgcacattaatgagtatt

SEQ ID NO: 3820544 - DNA, 25 bp, Homo sapien
ctgtaacctaaccagagctcagcag

SEQ ID NO: 3820545 - DNA, 25 bp, Homo sapien
tggccctggcgagagcctcttctgc

SEQ ID NO: 3820546 - DNA, 25 bp, Homo sapien
cttggccctggcgagagcctcttct

SEQ ID NO: 3820547 - DNA, 25 bp, Homo sapien
tccttggccctggcgagagcctctt

SEQ ID NO: 3820548 - DNA, 25 bp, Homo sapien
gccctggcgagagcctcttctgcag

SEQ ID NO: 3820549 - DNA, 25 bp, Homo sapien
gtgccggccgtcacactgctggtca

SEQ ID NO: 3820550 - DNA, 25 bp, Homo sapien
gcccagcctcttcatgatataggtg

SEQ ID NO: 3820551 - DNA, 25 bp, Homo sapien
gatataggtgaactcctccgcggtg

SEQ ID NO: 3820552 - DNA, 25 bp, Homo sapien
gttggtgtcatccacgtggtaggtc

SEQ ID NO: 3820553 - DNA, 25 bp, Homo sapien
tgtccagcagaactggagggccttc

SEQ ID NO: 3820554 - DNA, 25 bp, Homo sapien
ggccggctgtagatcttgtccagca

SEQ ID NO: 3820555 - DNA, 25 bp, Homo sapien
tacaacctgggcgtgtgtccagagt

SEQ ID NO: 3820556 - DNA, 25 bp, Homo sapien
tccagagttcactgacagagtcatc

SEQ ID NO: 3820557 - DNA, 25 bp, Homo sapien
tgtggaaggaaaacttgatcagctc

SEQ ID NO: 3820558 - DNA, 25 bp, Homo sapien
gccaatgttgtcctcaagcacgtta

SEQ ID NO: 3820559 - DNA, 25 bp, Homo sapien
tcatgtcgatgatcatggcatccgt

SEQ ID NO: 3820560 - DNA, 25 bp, Homo sapien
gggtgagcagctcaccgtccccaaa

SEQ ID NO: 3820561 - DNA, 25 bp, Homo sapien
tggtagatgcccacagagagtgcgc

SEQ ID NO: 3820562 - DNA, 25 bp, Homo sapien
cagcgactgcataaggaaggcgaac

SEQ ID NO: 3820563 - DNA, 25 bp, Homo sapien
tgagcagatacaccccacgttgggt

SEQ ID NO: 3820564 - DNA, 25 bp, Homo sapien
tggaaagggcttcgctcatgggcac

SEQ ID NO: 3820565 - DNA, 25 bp, Homo sapien
tgatgttggtgcggcgatcataggt

SEQ ID NO: 3820566 - DNA, 25 bp, Homo sapien
tgcggcgatcataggtggtgaagag

SEQ ID NO: 3820567 - DNA, 25 bp, Homo sapien
cggcgatcataggtggtgaagaggt

SEQ ID NO: 3820568 - DNA, 25 bp, Homo sapien
ttggtgcggcgatcataggtggtga

SEQ ID NO: 3820569 - DNA, 25 bp, Homo sapien
aaaactatcgaagcgcaggtagccc

SEQ ID NO: 3820570 - DNA, 25 bp, Homo sapien
gagtccaccagtgcttgccggatag

SEQ ID NO: 3820571 - DNA, 25 bp, Homo sapien
gaatctcatggctcttgatggcctg

SEQ ID NO: 3820572 - DNA, 25 bp, Homo sapien
gacggaggcgtcagcaaaactatcg

SEQ ID NO: 3820573 - DNA, 25 bp, Homo sapien
ttctcagctggtggacagaaggtct

SEQ ID NO: 3820574 - DNA, 25 bp, Homo sapien
actgtgtgcaaggccgtggccctgc

SEQ ID NO: 3820575 - DNA, 25 bp, Homo sapien
tgcacaaaagctccctggactgtgt

SEQ ID NO: 3820576 - DNA, 25 bp, Homo sapien
tgtgcagctgccttccgcccttgtc

SEQ ID NO: 3820577 - DNA, 25 bp, Homo sapien
ttgtaacactacactgcccggcatg

SEQ ID NO: 3820578 - DNA, 25 bp, Homo sapien
gtcagagggccataggtgcactctt

SEQ ID NO: 3820579 - DNA, 25 bp, Homo sapien
gcccggcatgtagcaggaattcata

SEQ ID NO: 3820580 - DNA, 25 bp, Homo sapien
aagatgctcaacacccaacttggaa

SEQ ID NO: 3820581 - DNA, 25 bp, Homo sapien
cacgtgactcaagagagccggcaaa

SEQ ID NO: 3820582 - DNA, 25 bp, Homo sapien
tgatagccgataaggactgcagctc

SEQ ID NO: 3820583 - DNA, 25 bp, Homo sapien
ttcaaagaccaaagccagagcacat

SEQ ID NO: 3820584 - DNA, 25 bp, Homo sapien
tgagctggctatgcagagtaactgc

SEQ ID NO: 3820585 - DNA, 25 bp, Homo sapien
tacaatgatgggtgtgacacgcggc

SEQ ID NO: 3820586 - DNA, 25 bp, Homo sapien
cagtctatggacagtgaatggccct

SEQ ID NO: 3820587 - DNA, 25 bp, Homo sapien
tcacacctgtgactgatgggcctca

SEQ ID NO: 3820588 - DNA, 25 bp, Homo sapien
gaccacgccctgtgtgtgacaagca

SEQ ID NO: 3820589 - DNA, 25 bp, Homo sapien
gatgtcctcgaagtttacccgcagg

SEQ ID NO: 3820590 - DNA, 25 bp, Homo sapien
tacccgcagggaggtcttttgacag

SEQ ID NO: 3820591 - DNA, 25 bp, Homo sapien
gctcatgccctcgtaatggtacttg

SEQ ID NO: 3820592 - DNA, 25 bp, Homo sapien
gatagcgtgtttcgtcggcgtcaca

SEQ ID NO: 3820593 - DNA, 25 bp, Homo sapien
acgctggcgtagtcgacttatcgga

SEQ ID NO: 3820594 - DNA, 25 bp, Homo sapien
cttatcggacgtgtacctgttgtac

SEQ ID NO: 3820595 - DNA, 25 bp, Homo sapien
ggtcaatcatgtactgcggcggctc

SEQ ID NO: 3820596 - DNA, 25 bp, Homo sapien
gctgaagctccgcacaatgttggac

SEQ ID NO: 3820597 - DNA, 25 bp, Homo sapien
ttcaggttgaaggtgtgctcaggca

SEQ ID NO: 3820598 - DNA, 25 bp, Homo sapien
agggaccccactcaggttaaggctg

SEQ ID NO: 3820599 - DNA, 25 bp, Homo sapien
aaacatcttcaggttgaaggtgtgc

SEQ ID NO: 3820600 - DNA, 25 bp, Homo sapien
gttaaggctgcgcaggaaatccacc

SEQ ID NO: 3820601 - DNA, 25 bp, Homo sapien
tgtgggcgtttcccccagcagaccc

SEQ ID NO: 3820602 - DNA, 25 bp, Homo sapien
ctgtgggcgtttcccccagcagacc

SEQ ID NO: 3820603 - DNA, 25 bp, Homo sapien
ctgtagggagccagccagcagggac

SEQ ID NO: 3820604 - DNA, 25 bp, Homo sapien
acagcaggggcagggccacccacag

SEQ ID NO: 3820605 - DNA, 25 bp, Homo sapien
ggcagggccacccacagtgccccag

SEQ ID NO: 3820606 - DNA, 25 bp, Homo sapien
caggggcagggccacccacagtgcc

SEQ ID NO: 3820607 - DNA, 25 bp, Homo sapien
ttaggcccgcgcaatcacccagaga

SEQ ID NO: 3820608 - DNA, 25 bp, Homo sapien
tgtttgctctgaaggaaccgtcctg

SEQ ID NO: 3820609 - DNA, 25 bp, Homo sapien
gcggccgtgctgtgttagcgggcac

SEQ ID NO: 3820610 - DNA, 25 bp, Homo sapien
caatcacccagagaggagactgcag

SEQ ID NO: 3820611 - DNA, 25 bp, Homo sapien
tcattgtattaaatggattgcttga

SEQ ID NO: 3820612 - DNA, 25 bp, Homo sapien
tattatcaggaagtctagtcttctc

SEQ ID NO: 3820613 - DNA, 25 bp, Homo sapien
ttaagtccaaaggagatagggtatg

SEQ ID NO: 3820614 - DNA, 25 bp, Homo sapien
tagggtatgaaggtgttagtccagc

SEQ ID NO: 3820615 - DNA, 25 bp, Homo sapien
gtctaaacggctgcttgttcttagc

SEQ ID NO: 3820616 - DNA, 25 bp, Homo sapien
ggctttgctgttgggcactggtcct

SEQ ID NO: 3820617 - DNA, 25 bp, Homo sapien
gcttctcaacaacactggctttgct

SEQ ID NO: 3820618 - DNA, 25 bp, Homo sapien
tggtcctacatgtctaaacggctgc

SEQ ID NO: 3820619 - DNA, 25 bp, Homo sapien
ctatagcagcttgaagggaacaatt

SEQ ID NO: 3820620 - DNA, 25 bp, Homo sapien
tagcagcttgaagggaacaatttgg

SEQ ID NO: 3820621 - DNA, 25 bp, Homo sapien
cagcttgaagggaacaatttggtcc

SEQ ID NO: 3820622 - DNA, 25 bp, Homo sapien
gcttgaagggaacaatttggtccca

SEQ ID NO: 3820623 - DNA, 25 bp, Homo sapien
taatgatgcactggcggacagctct

SEQ ID NO: 3820624 - DNA, 25 bp, Homo sapien
ttgcagaaggctccgagaaggcagc

SEQ ID NO: 3820625 - DNA, 25 bp, Homo sapien
gagcgagcgccctaagatttgcata

SEQ ID NO: 3820626 - DNA, 25 bp, Homo sapien
aacagagttctttccgtgtgcaggg

SEQ ID NO: 3820627 - DNA, 25 bp, Homo sapien
catcttatcgggaacacagcagggc

SEQ ID NO: 3820628 - DNA, 25 bp, Homo sapien
cacaggtgtccacggacatgttggg

SEQ ID NO: 3820629 - DNA, 25 bp, Homo sapien
gaagaggaccccaagggagttcatc

SEQ ID NO: 3820630 - DNA, 25 bp, Homo sapien
attccgattctcatccaggaagagg

SEQ ID NO: 3820631 - DNA, 25 bp, Homo sapien
cccaggccatactgctctgctgttg

SEQ ID NO: 3820632 - DNA, 25 bp, Homo sapien
ccaggccatactgctctgctgttgt

SEQ ID NO: 3820633 - DNA, 25 bp, Homo sapien
gtcccaggccatactgctctgctgt

SEQ ID NO: 3820634 - DNA, 25 bp, Homo sapien
tcccaggccatactgctctgctgtt

SEQ ID NO: 3820635 - DNA, 25 bp, Homo sapien
tcccgcgcagtagtaggcatcaaaa

SEQ ID NO: 3820636 - DNA, 25 bp, Homo sapien
ttccagccgatgtctgcgaagtcca

SEQ ID NO: 3820637 - DNA, 25 bp, Homo sapien
gggtcgtatctctgcagcgtcactg

SEQ ID NO: 3820638 - DNA, 25 bp, Homo sapien
catagactaggatgtagggcgcata

SEQ ID NO: 3820639 - DNA, 25 bp, Homo sapien
aaagtggccgtaaggatcatttccg

SEQ ID NO: 3820640 - DNA, 25 bp, Homo sapien
tccgagtcttgcatggaagtcaggt

SEQ ID NO: 3820641 - DNA, 25 bp, Homo sapien
ccctgtgtggccgtgttctgcgaga

SEQ ID NO: 3820642 - DNA, 25 bp, Homo sapien
ttgcatagcacctcgagcgctcgag

SEQ ID NO: 3820643 - DNA, 25 bp, Homo sapien
cggctgtacttctcatagagcctgt

SEQ ID NO: 3820644 - DNA, 25 bp, Homo sapien
ctgaagctgcggaccgtgttgcccc

SEQ ID NO: 3820645 - DNA, 25 bp, Homo sapien
gccctgccggctgtacttctcatag

SEQ ID NO: 3820646 - DNA, 25 bp, Homo sapien
tggccctgaagctgcggaccgtgtt

SEQ ID NO: 3820647 - DNA, 25 bp, Homo sapien
gtcctgggcgctggggcccaacgtg

SEQ ID NO: 3820648 - DNA, 25 bp, Homo sapien
gggcagtgcggaccaggcgggggcc

SEQ ID NO: 3820649 - DNA, 25 bp, Homo sapien
gggtgccgctggagatccctgtccc

SEQ ID NO: 3820650 - DNA, 25 bp, Homo sapien
cccagggtgccgctggagatccctg

SEQ ID NO: 3820651 - DNA, 25 bp, Homo sapien
ggccacatcccggagcaacagcaga

SEQ ID NO: 3820652 - DNA, 25 bp, Homo sapien
tcccgggctggtccgagcggggaca

SEQ ID NO: 3820653 - DNA, 25 bp, Homo sapien
tgccggccacatcccggagcaacag

SEQ ID NO: 3820654 - DNA, 25 bp, Homo sapien
cacatcccggagcaacagcagaaac

SEQ ID NO: 3820655 - DNA, 25 bp, Homo sapien
tgccttggcggactcgcgccgcgaa

SEQ ID NO: 3820656 - DNA, 25 bp, Homo sapien
gcgaaagtttgtagcccactgcgcg

SEQ ID NO: 3820657 - DNA, 25 bp, Homo sapien
ggtcacagccgtccggagcagcgca

SEQ ID NO: 3820658 - DNA, 25 bp, Homo sapien
ctgcggactgacctcgcggcagtag

SEQ ID NO: 3820659 - DNA, 25 bp, Homo sapien
gctaaaatacccgtgacatgtgaat

SEQ ID NO: 3820660 - DNA, 25 bp, Homo sapien
tgttttgctaaaatacccgtgacat

SEQ ID NO: 3820661 - DNA, 25 bp, Homo sapien
aaaatacccgtgacatgtgaataaa

SEQ ID NO: 3820662 - DNA, 25 bp, Homo sapien
ttcctagggtggtgggggccattca

SEQ ID NO: 3820663 - DNA, 25 bp, Homo sapien
tccatccacttcccaatccggcatc

SEQ ID NO: 3820664 - DNA, 25 bp, Homo sapien
catccacttcccaatccggcatctc

SEQ ID NO: 3820665 - DNA, 25 bp, Homo sapien
acttcccaatccggcatctccactc

SEQ ID NO: 3820666 - DNA, 25 bp, Homo sapien
ccacttcccaatccggcatctccac

SEQ ID NO: 3820667 - DNA, 25 bp, Homo sapien
ctgctcccctactgtgatggtgcca

SEQ ID NO: 3820668 - DNA, 25 bp, Homo sapien
gctcccctactgtgatggtgccatg

SEQ ID NO: 3820669 - DNA, 25 bp, Homo sapien
attccccagtggctctgggatacca

SEQ ID NO: 3820670 - DNA, 25 bp, Homo sapien
gggataccaagcttgcttccaggga

SEQ ID NO: 3820671 - DNA, 25 bp, Homo sapien
tcctgattttggactcccacagcac

SEQ ID NO: 3820672 - DNA, 25 bp, Homo sapien
ttccatgagctcagcactagggcag

SEQ ID NO: 3820673 - DNA, 25 bp, Homo sapien
gaagatgcttcctgaggaacttcca

SEQ ID NO: 3820674 - DNA, 25 bp, Homo sapien
tcaacatccatgtgaagatgcttcc

SEQ ID NO: 3820675 - DNA, 25 bp, Homo sapien
ctggttggggggtggtagcttctgg

SEQ ID NO: 3820676 - DNA, 25 bp, Homo sapien
ctggggatgcagaaaataagagcag

SEQ ID NO: 3820677 - DNA, 25 bp, Homo sapien
agcaggggtgtccaaagctggttgg

SEQ ID NO: 3820678 - DNA, 25 bp, Homo sapien
gcagaaaataagagcaggggtgtcc

SEQ ID NO: 3820679 - DNA, 25 bp, Homo sapien
tcagacaatcacagacagcaggacc

SEQ ID NO: 3820680 - DNA, 25 bp, Homo sapien
ttcagacaatcacagacagcaggac

SEQ ID NO: 3820681 - DNA, 25 bp, Homo sapien
cttcagacaatcacagacagcagga

SEQ ID NO: 3820682 - DNA, 25 bp, Homo sapien
gacctgaaggaggttctctccagac

SEQ ID NO: 3820683 - DNA, 25 bp, Homo sapien
ttggacagacctgaaggaggttctc

SEQ ID NO: 3820684 - DNA, 25 bp, Homo sapien
acagacctgaaggaggttctctcca

SEQ ID NO: 3820685 - DNA, 25 bp, Homo sapien
ctggctttggacagacctgaaggag

SEQ ID NO: 3820686 - DNA, 25 bp, Homo sapien
ccctcagaatgagagggcaactggc

SEQ ID NO: 3820687 - DNA, 25 bp, Homo sapien
tgagacacctcttatttccaggagc

SEQ ID NO: 3820688 - DNA, 25 bp, Homo sapien
gagacacctcttatttccaggagcc

SEQ ID NO: 3820689 - DNA, 25 bp, Homo sapien
agacacctcttatttccaggagcca

SEQ ID NO: 3820690 - DNA, 25 bp, Homo sapien
gggcccgtcagcgcctctctggagc

SEQ ID NO: 3820691 - DNA, 25 bp, Homo sapien
gtgtcctggatcctcgccaccttgg

SEQ ID NO: 3820692 - DNA, 25 bp, Homo sapien
tgtcctggatcctcgccaccttggg

SEQ ID NO: 3820693 - DNA, 25 bp, Homo sapien
cgtgtcctggatcctcgccaccttg

SEQ ID NO: 3820694 - DNA, 25 bp, Homo sapien
ggctggcaggcagcttttatatgcc

SEQ ID NO: 3820695 - DNA, 25 bp, Homo sapien
agccgggaggatctgcgtctgacaa

SEQ ID NO: 3820696 - DNA, 25 bp, Homo sapien
tagttagggttttatggtgcagccg

SEQ ID NO: 3820697 - DNA, 25 bp, Homo sapien
tctgacaaggcgtgcatgtgactgc

SEQ ID NO: 3820698 - DNA, 25 bp, Homo sapien
atagtgagcctgcaaagacagtgaa

SEQ ID NO: 3820699 - DNA, 25 bp, Homo sapien
tctgggggccatcaggagatttccg

SEQ ID NO: 3820700 - DNA, 25 bp, Homo sapien
atcaggagatttccggcaaagctgg

SEQ ID NO: 3820701 - DNA, 25 bp, Homo sapien
gggccatcaggagatttccggcaaa

SEQ ID NO: 3820702 - DNA, 25 bp, Homo sapien
tatctgaactctgggggccatcagg

SEQ ID NO: 3820703 - DNA, 25 bp, Homo sapien
catgcagcaccatgggggatgctcg

SEQ ID NO: 3820704 - DNA, 25 bp, Homo sapien
tgctcggtcccctggagaatggcca

SEQ ID NO: 3820705 - DNA, 25 bp, Homo sapien
agaatggccagatttctctggggct

SEQ ID NO: 3820706 - DNA, 25 bp, Homo sapien
gggatgctcggtcccctggagaatg

SEQ ID NO: 3820707 - DNA, 25 bp, Homo sapien
gcaagatgaagcttggaccaacagc

SEQ ID NO: 3820708 - DNA, 25 bp, Homo sapien
gggcaagatgaagcttggaccaaca

SEQ ID NO: 3820709 - DNA, 25 bp, Homo sapien
caagatgaagcttggaccaacagct

SEQ ID NO: 3820710 - DNA, 25 bp, Homo sapien
aagatgaagcttggaccaacagctg

SEQ ID NO: 3820711 - DNA, 25 bp, Homo sapien
tctatgttcctctcttggtgagggc

SEQ ID NO: 3820712 - DNA, 25 bp, Homo sapien
gagctatattactagcctcctcctc

SEQ ID NO: 3820713 - DNA, 25 bp, Homo sapien
ccaaggagagcagcatgagttctct

SEQ ID NO: 3820714 - DNA, 25 bp, Homo sapien
gcatgagttctctgctcacaaaact

SEQ ID NO: 3820715 - DNA, 25 bp, Homo sapien
tggagctctgggtacctgggctcat

SEQ ID NO: 3820716 - DNA, 25 bp, Homo sapien
ctacagtgggttagttcctgcagtc

SEQ ID NO: 3820717 - DNA, 25 bp, Homo sapien
gtgggttagttcctgcagtcctctt

SEQ ID NO: 3820718 - DNA, 25 bp, Homo sapien
cagtgggttagttcctgcagtcctc

SEQ ID NO: 3820719 - DNA, 25 bp, Homo sapien
cagaggagctgacaaatggcttcct

SEQ ID NO: 3820720 - DNA, 25 bp, Homo sapien
acattttacacttgtctgacacctt

SEQ ID NO: 3820721 - DNA, 25 bp, Homo sapien
acttgtctgacaccttttctcctct

SEQ ID NO: 3820722 - DNA, 25 bp, Homo sapien
ttcagaggagctgacaaatggcttc

SEQ ID NO: 3820723 - DNA, 25 bp, Homo sapien
gagcccagaaacagcagggtctgag

SEQ ID NO: 3820724 - DNA, 25 bp, Homo sapien
cgcctgcccagctgagcgagaggtc

SEQ ID NO: 3820725 - DNA, 25 bp, Homo sapien
ctgccacccccgctgtagccggccc

SEQ ID NO: 3820726 - DNA, 25 bp, Homo sapien
ctgagcgagaggtcgctggagccca

SEQ ID NO: 3820727 - DNA, 25 bp, Homo sapien
gggacaagggaacggccatatcgac

SEQ ID NO: 3820728 - DNA, 25 bp, Homo sapien
catatcgacgatggcttctgtcttc

SEQ ID NO: 3820729 - DNA, 25 bp, Homo sapien
gagaggagtcagccctggtatgctt

SEQ ID NO: 3820730 - DNA, 25 bp, Homo sapien
ttcctaaggacgcagtccaggcctg

SEQ ID NO: 3820731 - DNA, 25 bp, Homo sapien
tgcaagctgtgatgccgttttcccc

SEQ ID NO: 3820732 - DNA, 25 bp, Homo sapien
tctgggccgctgtgtgatcatgctt

SEQ ID NO: 3820733 - DNA, 25 bp, Homo sapien
ggccgctgtgtgatcatgctttcct

SEQ ID NO: 3820734 - DNA, 25 bp, Homo sapien
gggtgcaagctgtgatgccgttttc

SEQ ID NO: 3820735 - DNA, 25 bp, Homo sapien
ctgggagcagctggtggctccacca

SEQ ID NO: 3820736 - DNA, 25 bp, Homo sapien
ctgccgtactctctgtgtggcagcc

SEQ ID NO: 3820737 - DNA, 25 bp, Homo sapien
ccgtactctctgtgtggcagccggg

SEQ ID NO: 3820738 - DNA, 25 bp, Homo sapien
cagctggtggctccaccaggagcac

SEQ ID NO: 3820739 - DNA, 25 bp, Homo sapien
tgaccctttgcacagcagttctggg

SEQ ID NO: 3820740 - DNA, 25 bp, Homo sapien
gggaagttgaccctttgcacagcag

SEQ ID NO: 3820741 - DNA, 25 bp, Homo sapien
gaagttgaccctttgcacagcagtt

SEQ ID NO: 3820742 - DNA, 25 bp, Homo sapien
tctgggaagttgaccctttgcacag

SEQ ID NO: 3820743 - DNA, 25 bp, Homo sapien
atcataggcattgcccgagggcttg

SEQ ID NO: 3820744 - DNA, 25 bp, Homo sapien
agcatcataggcattgcccgagggc

SEQ ID NO: 3820745 - DNA, 25 bp, Homo sapien
aggcattgcccgagggcttgttgat

SEQ ID NO: 3820746 - DNA, 25 bp, Homo sapien
taggcattgcccgagggcttgttga

SEQ ID NO: 3820747 - DNA, 25 bp, Homo sapien
aactggagtacatgggcctgcgaca

SEQ ID NO: 3820748 - DNA, 25 bp, Homo sapien
tcctgctgcacatgaccagggtggt

SEQ ID NO: 3820749 - DNA, 25 bp, Homo sapien
ttagttggtaactcgcccgtcacca

SEQ ID NO: 3820750 - DNA, 25 bp, Homo sapien
ctgggcctgcagaactggagtacat

SEQ ID NO: 3820751 - DNA, 25 bp, Homo sapien
gacatcttgccacccataagtaggg

SEQ ID NO: 3820752 - DNA, 25 bp, Homo sapien
ttcaatcagctttgccagaatgaag

SEQ ID NO: 3820753 - DNA, 25 bp, Homo sapien
tgtatagctgcacatctaatgctgc

SEQ ID NO: 3820754 - DNA, 25 bp, Homo sapien
ggctactgcttgtccctcctaatgg

SEQ ID NO: 3820755 - DNA, 25 bp, Homo sapien
gttgtctcatcttcgtccctgtagg

SEQ ID NO: 3820756 - DNA, 25 bp, Homo sapien
gctctgttgtctcatcttcgtccct

SEQ ID NO: 3820757 - DNA, 25 bp, Homo sapien
ctttcctgtgtttgtcgctctgttg

SEQ ID NO: 3820758 - DNA, 25 bp, Homo sapien
ttcctgtgtttgtcgctctgttgtc

SEQ ID NO: 3820759 - DNA, 25 bp, Homo sapien
caagggcctcggttacagtatcttc

SEQ ID NO: 3820760 - DNA, 25 bp, Homo sapien
gacagctttgattattgctttccaa

SEQ ID NO: 3820761 - DNA, 25 bp, Homo sapien
agtggtggccggcaatcagtctaat

SEQ ID NO: 3820762 - DNA, 25 bp, Homo sapien
tatctatctgcctcaaataatgaca

SEQ ID NO: 3820763 - DNA, 25 bp, Homo sapien
ggtctgcagcatgggcgggtaccgg

SEQ ID NO: 3820764 - DNA, 25 bp, Homo sapien
gaggtctgcagcatgggcgggtacc

SEQ ID NO: 3820765 - DNA, 25 bp, Homo sapien
catgggcgggtaccgggactcagag

SEQ ID NO: 3820766 - DNA, 25 bp, Homo sapien
cagcatgggcgggtaccgggactca

SEQ ID NO: 3820767 - DNA, 25 bp, Homo sapien
gcctgctctaatgcagccgggctcg

SEQ ID NO: 3820768 - DNA, 25 bp, Homo sapien
aatactgtgtggtgagcgtgccgtc

SEQ ID NO: 3820769 - DNA, 25 bp, Homo sapien
gtgccgtcgccccagccaagagcag

SEQ ID NO: 3820770 - DNA, 25 bp, Homo sapien
cagggcctgctctaatgcagccggg

SEQ ID NO: 3820771 - DNA, 25 bp, Homo sapien
cacgtggatcacaccgaaaatataa

SEQ ID NO: 3820772 - DNA, 25 bp, Homo sapien
ggatcacaccgaaaatataatcacc

SEQ ID NO: 3820773 - DNA, 25 bp, Homo sapien
ccgaaaatataatcaccttcttcct

SEQ ID NO: 3820774 - DNA, 25 bp, Homo sapien
tctcgtccacgtggatcacaccgaa

SEQ ID NO: 3820775 - DNA, 25 bp, Homo sapien
tatgctgtcgtcacagcatgctgta

SEQ ID NO: 3820776 - DNA, 25 bp, Homo sapien
ttatgctgtcgtcacagcatgctgt

SEQ ID NO: 3820777 - DNA, 25 bp, Homo sapien
atgctgtcgtcacagcatgctgtac

SEQ ID NO: 3820778 - DNA, 25 bp, Homo sapien
ccagagaacctctgacacagatagt

SEQ ID NO: 3820779 - DNA, 25 bp, Homo sapien
cacagatagttacaggcaaatactc

SEQ ID NO: 3820780 - DNA, 25 bp, Homo sapien
actgtgtcttgtgtgctggtcctgg

SEQ ID NO: 3820781 - DNA, 25 bp, Homo sapien
tgggtgctctggcacctcaccagag

SEQ ID NO: 3820782 - DNA, 25 bp, Homo sapien
ctggagcagcagcaaccacgtgggc

SEQ ID NO: 3820783 - DNA, 25 bp, Homo sapien
gagcagcagcaaccacgtgggcagc

SEQ ID NO: 3820784 - DNA, 25 bp, Homo sapien
gccaatgatccaaccagctggagca

SEQ ID NO: 3820785 - DNA, 25 bp, Homo sapien
aatgatccaaccagctggagcagca

SEQ ID NO: 3820786 - DNA, 25 bp, Homo sapien
agggatggtgtggccctgaactcac

SEQ ID NO: 3820787 - DNA, 25 bp, Homo sapien
ctgagggatggtgtggccctgaact

SEQ ID NO: 3820788 - DNA, 25 bp, Homo sapien
gagggatggtgtggccctgaactca

SEQ ID NO: 3820789 - DNA, 25 bp, Homo sapien
tgagggatggtgtggccctgaactc

SEQ ID NO: 3820790 - DNA, 25 bp, Homo sapien
gggatgtggggtggaggagactggc

SEQ ID NO: 3820791 - DNA, 25 bp, Homo sapien
cctgacatccacatctgggtccagg

SEQ ID NO: 3820792 - DNA, 25 bp, Homo sapien
tctgggtccagggatgtggggtgga

SEQ ID NO: 3820793 - DNA, 25 bp, Homo sapien
ctgacatccacatctgggtccaggg

SEQ ID NO: 3820794 - DNA, 25 bp, Homo sapien
caccctcaccctgcatcacagaggg

SEQ ID NO: 3820795 - DNA, 25 bp, Homo sapien
ggttgcacaggtgggacacaccctc

SEQ ID NO: 3820796 - DNA, 25 bp, Homo sapien
atagggttgcacaggtgggacacac

SEQ ID NO: 3820797 - DNA, 25 bp, Homo sapien
ctgagggtatagggttgcacaggtg

SEQ ID NO: 3820798 - DNA, 25 bp, Homo sapien
gacattgacagggaaggtgtcctct

SEQ ID NO: 3820799 - DNA, 25 bp, Homo sapien
agacattgacagggaaggtgtcctc

SEQ ID NO: 3820800 - DNA, 25 bp, Homo sapien
acattgacagggaaggtgtcctctt

SEQ ID NO: 3820801 - DNA, 25 bp, Homo sapien
aagacattgacagggaaggtgtcct

SEQ ID NO: 3820802 - DNA, 25 bp, Homo sapien
tgtgacatcctgtgggtgcttgtgt

SEQ ID NO: 3820803 - DNA, 25 bp, Homo sapien
gactgtgacatcctgtgggtgcttg

SEQ ID NO: 3820804 - DNA, 25 bp, Homo sapien
actgtgacatcctgtgggtgcttgt

SEQ ID NO: 3820805 - DNA, 25 bp, Homo sapien
gtgacatcctgtgggtgcttgtgtc

SEQ ID NO: 3820806 - DNA, 25 bp, Homo sapien
tctggacgtggcaccgtgtagctca

SEQ ID NO: 3820807 - DNA, 25 bp, Homo sapien
gcaggcatggcccttgggccgcctg

SEQ ID NO: 3820808 - DNA, 25 bp, Homo sapien
ggccgcctgggtgtgaacatgtttc

SEQ ID NO: 3820809 - DNA, 25 bp, Homo sapien
agtgccccagaagcaataattttgt

SEQ ID NO: 3820810 - DNA, 25 bp, Homo sapien
tgagcacctgtgaggttctgaggac

SEQ ID NO: 3820811 - DNA, 25 bp, Homo sapien
ggaccgaggctctgcccttatgcag

SEQ ID NO: 3820812 - DNA, 25 bp, Homo sapien
ggaatatcatgcaggacatctgtgc

SEQ ID NO: 3820813 - DNA, 25 bp, Homo sapien
ttctgaggacaccacgatggagtgc

SEQ ID NO: 3820814 - DNA, 25 bp, Homo sapien
tttctcccttatcagatggcttacc

SEQ ID NO: 3820815 - DNA, 25 bp, Homo sapien
gtttctcccttatcagatggcttac

SEQ ID NO: 3820816 - DNA, 25 bp, Homo sapien
cttgagcccagtgacgctgtggctg

SEQ ID NO: 3820817 - DNA, 25 bp, Homo sapien
ctgcagcgggtgagcctgtctcctc

SEQ ID NO: 3820818 - DNA, 25 bp, Homo sapien
gggaagtgcgtcttcatggccagct

SEQ ID NO: 3820819 - DNA, 25 bp, Homo sapien
ctccattgcaggcaggctgtgggac

SEQ ID NO: 3820820 - DNA, 25 bp, Homo sapien
ggcccgttcagagaaggcccaacca

SEQ ID NO: 3820821 - DNA, 25 bp, Homo sapien
gcccaccgaggtcacggtaaagata

SEQ ID NO: 3820822 - DNA, 25 bp, Homo sapien
aggtcagcagttcaaaccaggtatc

SEQ ID NO: 3820823 - DNA, 25 bp, Homo sapien
ggtcagcagttcaaaccaggtatcc

SEQ ID NO: 3820824 - DNA, 25 bp, Homo sapien
tcacggtaaagatatgaggtcagca

SEQ ID NO: 3820825 - DNA, 25 bp, Homo sapien
gtgctgactcttgcaactgggtttc

SEQ ID NO: 3820826 - DNA, 25 bp, Homo sapien
tttcatcacggcagtgtgctccaga

SEQ ID NO: 3820827 - DNA, 25 bp, Homo sapien
ttcagagctgtaggcaaatggacgg

SEQ ID NO: 3820828 - DNA, 25 bp, Homo sapien
aatggacggagggaccggtgctgac

SEQ ID NO: 3820829 - DNA, 25 bp, Homo sapien
taagacagccaattttgctaagggt

SEQ ID NO: 3820830 - DNA, 25 bp, Homo sapien
tgctaagggtctgagcaagaaggaa

SEQ ID NO: 3820831 - DNA, 25 bp, Homo sapien
caagaaggaattgcggatgcagccg

SEQ ID NO: 3820832 - DNA, 25 bp, Homo sapien
tatgaaggctatcagtaagacagcc

SEQ ID NO: 3820833 - DNA, 25 bp, Homo sapien
actcgccgaccctcccagcagtgga

SEQ ID NO: 3820834 - DNA, 25 bp, Homo sapien
ctcatccccaacaatggagatgcct

SEQ ID NO: 3820835 - DNA, 25 bp, Homo sapien
agatgcctgcgaggcactcgccgac

SEQ ID NO: 3820836 - DNA, 25 bp, Homo sapien
caatggagatgcctgcgaggcactc

SEQ ID NO: 3820837 - DNA, 25 bp, Homo sapien
gtgggacagagggacaactgaaggc

SEQ ID NO: 3820838 - DNA, 25 bp, Homo sapien
atggtgggacagagggacaactgaa

SEQ ID NO: 3820839 - DNA, 25 bp, Homo sapien
gacaactgaaggctgatgtcgtggt

SEQ ID NO: 3820840 - DNA, 25 bp, Homo sapien
aactgaaggctgatgtcgtggtcac

SEQ ID NO: 3820841 - DNA, 25 bp, Homo sapien
gactccagggcttacgaatactgcc

SEQ ID NO: 3820842 - DNA, 25 bp, Homo sapien
ctgcccagttcctgaaagtggcgtc

SEQ ID NO: 3820843 - DNA, 25 bp, Homo sapien
cactgacggtagacaagacatctga

SEQ ID NO: 3820844 - DNA, 25 bp, Homo sapien
gggcactgacggtagacaagacatc

SEQ ID NO: 3820845 - DNA, 25 bp, Homo sapien
ccggggttggatcatccaaagactc

SEQ ID NO: 3820846 - DNA, 25 bp, Homo sapien
agttactttcaccagcatctaccat

SEQ ID NO: 3820847 - DNA, 25 bp, Homo sapien
ggggttggatcatccaaagactctt

SEQ ID NO: 3820848 - DNA, 25 bp, Homo sapien
aggccccagggcagaacagttactt

SEQ ID NO: 3820849 - DNA, 25 bp, Homo sapien
ctccatggtacaaagcaagctaagg

SEQ ID NO: 3820850 - DNA, 25 bp, Homo sapien
agatgggaccctaccatgctctcag

SEQ ID NO: 3820851 - DNA, 25 bp, Homo sapien
tgagatgaccttccagaaacccata

SEQ ID NO: 3820852 - DNA, 25 bp, Homo sapien
ggagaattgatcctacagccatctg

SEQ ID NO: 3820853 - DNA, 25 bp, Homo sapien
gcttgctcccaggtgtcccaaggaa

SEQ ID NO: 3820854 - DNA, 25 bp, Homo sapien
actatccccacagaaattgcgcagg

SEQ ID NO: 3820855 - DNA, 25 bp, Homo sapien
tcccaggaggcgcttgaagtgacac

SEQ ID NO: 3820856 - DNA, 25 bp, Homo sapien
gaagtgacactctccgtggctccat

SEQ ID NO: 3820857 - DNA, 25 bp, Homo sapien
cagtctaaaggctaaactaggaaat

SEQ ID NO: 3820858 - DNA, 25 bp, Homo sapien
ctaaaggctaaactaggaaattctg

SEQ ID NO: 3820859 - DNA, 25 bp, Homo sapien
agcagtctaaaggctaaactaggaa

SEQ ID NO: 3820860 - DNA, 25 bp, Homo sapien
aaggctaaactaggaaattctgtgg

SEQ ID NO: 3820861 - DNA, 25 bp, Homo sapien
atgacatatgacaccgggctttaca

SEQ ID NO: 3820862 - DNA, 25 bp, Homo sapien
tgacatatgacaccgggctttacag

SEQ ID NO: 3820863 - DNA, 25 bp, Homo sapien
ggatgccggtcacaggaagcatcag

SEQ ID NO: 3820864 - DNA, 25 bp, Homo sapien
cctgctggatgccggtcacaggaag

SEQ ID NO: 3820865 - DNA, 25 bp, Homo sapien
tgcccagcacaaaatgttctggtaa

SEQ ID NO: 3820866 - DNA, 25 bp, Homo sapien
cagttatgctccctttgctgctgtt

SEQ ID NO: 3820867 - DNA, 25 bp, Homo sapien
tccttgtgcccaggacctagactgg

SEQ ID NO: 3820868 - DNA, 25 bp, Homo sapien
gcagtatttgacttctccttgtgcc

SEQ ID NO: 3820869 - DNA, 25 bp, Homo sapien
ggtccacacatacacttgcgaaagg

SEQ ID NO: 3820870 - DNA, 25 bp, Homo sapien
ccaaccaggatttagataagacgaa

SEQ ID NO: 3820871 - DNA, 25 bp, Homo sapien
tagataagacgaagacgatgtgtgg

SEQ ID NO: 3820872 - DNA, 25 bp, Homo sapien
cctaggcacttcaggacaatgggca

SEQ ID NO: 3820873 - DNA, 25 bp, Homo sapien
cagccggctcctgaagttcaataga

SEQ ID NO: 3820874 - DNA, 25 bp, Homo sapien
tattcagccactcgagaggagcggc

SEQ ID NO: 3820875 - DNA, 25 bp, Homo sapien
agcggcagcctttgagagcatccag

SEQ ID NO: 3820876 - DNA, 25 bp, Homo sapien
tcacaaactcttgtgggcaaggtgc

SEQ ID NO: 3820877 - DNA, 25 bp, Homo sapien
tcccagaggctcatgcctttgccag

SEQ ID NO: 3820878 - DNA, 25 bp, Homo sapien
caggtacacttaagggcatcagagg

SEQ ID NO: 3820879 - DNA, 25 bp, Homo sapien
tgtgaatgcgcatgagtgctctgct

SEQ ID NO: 3820880 - DNA, 25 bp, Homo sapien
tgctcttctgatccccgaaactggg

SEQ ID NO: 3820881 - DNA, 25 bp, Homo sapien
tcttcgtctttgggagcattttcaa

SEQ ID NO: 3820882 - DNA, 25 bp, Homo sapien
ttcgtctttgggagcattttcaaag

SEQ ID NO: 3820883 - DNA, 25 bp, Homo sapien
cgtctttgggagcattttcaaagta

SEQ ID NO: 3820884 - DNA, 25 bp, Homo sapien
cctcttcgtctttgggagcattttc

SEQ ID NO: 3820885 - DNA, 25 bp, Homo sapien
cttggacctcgcatgcaaaaagtgt

SEQ ID NO: 3820886 - DNA, 25 bp, Homo sapien
accactgtagcttggacctcgcatg

SEQ ID NO: 3820887 - DNA, 25 bp, Homo sapien
tcttccatttccacgttgaggatgc

SEQ ID NO: 3820888 - DNA, 25 bp, Homo sapien
tctcttccatttccacgttgaggat

SEQ ID NO: 3820889 - DNA, 25 bp, Homo sapien
ccgagtgggtaccacctccagattg

SEQ ID NO: 3820890 - DNA, 25 bp, Homo sapien
gagtgggtaccacctccagattggc

SEQ ID NO: 3820891 - DNA, 25 bp, Homo sapien
gggtaccacctccagattggctttc

SEQ ID NO: 3820892 - DNA, 25 bp, Homo sapien
ggctttccccaaggatgcccttcaa

SEQ ID NO: 3820893 - DNA, 25 bp, Homo sapien
gtctaagcctggtgtctctgagcag

SEQ ID NO: 3820894 - DNA, 25 bp, Homo sapien
ctcttgggatcaggcggcagacaaa

SEQ ID NO: 3820895 - DNA, 25 bp, Homo sapien
ctgctccatcggcagtgccgtgagg

SEQ ID NO: 3820896 - DNA, 25 bp, Homo sapien
agtgggcacagggttagggaggtga

SEQ ID NO: 3820897 - DNA, 25 bp, Homo sapien
gctccagcattctctcggggctgtc

SEQ ID NO: 3820898 - DNA, 25 bp, Homo sapien
tcggggctgtcggaaaagtgacagg

SEQ ID NO: 3820899 - DNA, 25 bp, Homo sapien
ctgacaattctgttgggatctgggg

SEQ ID NO: 3820900 - DNA, 25 bp, Homo sapien
atgttgaagcaggtcaccaaaggtc

SEQ ID NO: 3820901 - DNA, 25 bp, Homo sapien
catgttgaagcaggtcaccaaaggt

SEQ ID NO: 3820902 - DNA, 25 bp, Homo sapien
cctgcacccagaaccactcaagaag

SEQ ID NO: 3820903 - DNA, 25 bp, Homo sapien
gaaccactcaagaagcagcgggggt

SEQ ID NO: 3820904 - DNA, 25 bp, Homo sapien
gcgggggtgggatgaacctccagga

SEQ ID NO: 3820905 - DNA, 25 bp, Homo sapien
gcacccagaaccactcaagaagcag

SEQ ID NO: 3820906 - DNA, 25 bp, Homo sapien
acttgggcacgccatgccagctgca

SEQ ID NO: 3820907 - DNA, 25 bp, Homo sapien
ccgcacacacttgggcacgccatgc

SEQ ID NO: 3820908 - DNA, 25 bp, Homo sapien
atctgctgtgagatgccgggaaacg

SEQ ID NO: 3820909 - DNA, 25 bp, Homo sapien
ccaatctgctgtgagatgccgggaa

SEQ ID NO: 3820910 - DNA, 25 bp, Homo sapien
cactttccaagccagcgaaggtgat

SEQ ID NO: 3820911 - DNA, 25 bp, Homo sapien
agccagcgaaggtgatctccctctg

SEQ ID NO: 3820912 - DNA, 25 bp, Homo sapien
ttccaagccagcgaaggtgatctcc

SEQ ID NO: 3820913 - DNA, 25 bp, Homo sapien
ccaagccagcgaaggtgatctccct

SEQ ID NO: 3820914 - DNA, 25 bp, Homo sapien
ggtatgcaccattttgttagcatgg

SEQ ID NO: 3820915 - DNA, 25 bp, Homo sapien
gttagcatggaactctctccctatc

SEQ ID NO: 3820916 - DNA, 25 bp, Homo sapien
atgcaccattttgttagcatggaac

SEQ ID NO: 3820917 - DNA, 25 bp, Homo sapien
tctccctatccctatctcagcagct

SEQ ID NO: 3820918 - DNA, 25 bp, Homo sapien
ttcatcctggtcatggggctctgcc

SEQ ID NO: 3820919 - DNA, 25 bp, Homo sapien
gctggtcagccggtgtagacatctg

SEQ ID NO: 3820920 - DNA, 25 bp, Homo sapien
gcctccaggctggtcagccggtgta

SEQ ID NO: 3820921 - DNA, 25 bp, Homo sapien
ccggtgtagacatctggtcattctt

SEQ ID NO: 3820922 - DNA, 25 bp, Homo sapien
ggcaggagcccacctgcagtacagc

SEQ ID NO: 3820923 - DNA, 25 bp, Homo sapien
tccagtactcttgccaagaatgctc

SEQ ID NO: 3820924 - DNA, 25 bp, Homo sapien
caagaatgctcgagcattctcacca

SEQ ID NO: 3820925 - DNA, 25 bp, Homo sapien
caaccacgtggcctatctctgcact

SEQ ID NO: 3820926 - DNA, 25 bp, Homo sapien
tggcctatctctgcactctcctgca

SEQ ID NO: 3820927 - DNA, 25 bp, Homo sapien
tctgtggtatccaccctcccgccca

SEQ ID NO: 3820928 - DNA, 25 bp, Homo sapien
catgccccaacaccctctgtggtat

SEQ ID NO: 3820929 - DNA, 25 bp, Homo sapien
agaagcacccatgccccaacaccct

SEQ ID NO: 3820930 - DNA, 25 bp, Homo sapien
caacaccctctgtggtatccaccct

SEQ ID NO: 3820931 - DNA, 25 bp, Homo sapien
caacttgccccagattgtgccttgg

SEQ ID NO: 3820932 - DNA, 25 bp, Homo sapien
ctttgggcctctcagagcttatttc

SEQ ID NO: 3820933 - DNA, 25 bp, Homo sapien
gcccagtccatgctcaggtgggcca

SEQ ID NO: 3820934 - DNA, 25 bp, Homo sapien
agctcccacattggactcagttctg

SEQ ID NO: 3820935 - DNA, 25 bp, Homo sapien
ccatcagagggatggccatcactca

SEQ ID NO: 3820936 - DNA, 25 bp, Homo sapien
ggggccatcagagggatggccatca

SEQ ID NO: 3820937 - DNA, 25 bp, Homo sapien
ggccatcagagggatggccatcact

SEQ ID NO: 3820938 - DNA, 25 bp, Homo sapien
tgggggccatcagagggatggccat

SEQ ID NO: 3820939 - DNA, 25 bp, Homo sapien
gtgagcgagtgtgcacatctggatt

SEQ ID NO: 3820940 - DNA, 25 bp, Homo sapien
agcgagtgtgcacatctggattcat

SEQ ID NO: 3820941 - DNA, 25 bp, Homo sapien
aggtgagcgagtgtgcacatctgga

SEQ ID NO: 3820942 - DNA, 25 bp, Homo sapien
gagcgagtgtgcacatctggattca

SEQ ID NO: 3820943 - DNA, 25 bp, Homo sapien
tgagcatattcatcagggacaaggg

SEQ ID NO: 3820944 - DNA, 25 bp, Homo sapien
cggggccgccgtcctgcacttctga

SEQ ID NO: 3820945 - DNA, 25 bp, Homo sapien
atattcatcagggacaaggggagag

SEQ ID NO: 3820946 - DNA, 25 bp, Homo sapien
tctgagcatattcatcagggacaag

SEQ ID NO: 3820947 - DNA, 25 bp, Homo sapien
catcacagacgtagtgtgggctcca

SEQ ID NO: 3820948 - DNA, 25 bp, Homo sapien
catccagatcacattgggcagaggt

SEQ ID NO: 3820949 - DNA, 25 bp, Homo sapien
cctgggtggaagaacgctctggtcc

SEQ ID NO: 3820950 - DNA, 25 bp, Homo sapien
ttcaaggaacctgcgtgtggcaccc

SEQ ID NO: 3820951 - DNA, 25 bp, Homo sapien
gagtcgtgattagcatgaagaagcc

SEQ ID NO: 3820952 - DNA, 25 bp, Homo sapien
gaccgtaactgtggagactccgtga

SEQ ID NO: 3820953 - DNA, 25 bp, Homo sapien
cagcatgtcccttctcgtgggcggg

SEQ ID NO: 3820954 - DNA, 25 bp, Homo sapien
tgtgaaagacccagaaagggccctg

SEQ ID NO: 3820955 - DNA, 25 bp, Homo sapien
cacaagtgtgttggggtactgacgc

SEQ ID NO: 3820956 - DNA, 25 bp, Homo sapien
tgtggcatcaggctggcagcttctg

SEQ ID NO: 3820957 - DNA, 25 bp, Homo sapien
tggcagaacaccctcaaaatgtgaa

SEQ ID NO: 3820958 - DNA, 25 bp, Homo sapien
tgaccagccccatgacccctgggtg

SEQ ID NO: 3820959 - DNA, 25 bp, Homo sapien
tccaaaagccaatttggggattgtg

SEQ ID NO: 3820960 - DNA, 25 bp, Homo sapien
gcagccataaaaccatgcatccttc

SEQ ID NO: 3820961 - DNA, 25 bp, Homo sapien
gatcctatcttggagctgagcatca

SEQ ID NO: 3820962 - DNA, 25 bp, Homo sapien
agcatcagcagccataaaaccatgc

SEQ ID NO: 3820963 - DNA, 25 bp, Homo sapien
ttgctccgtccatgccgggctggag

SEQ ID NO: 3820964 - DNA, 25 bp, Homo sapien
agaagctcgttgatctctgacctcc

SEQ ID NO: 3820965 - DNA, 25 bp, Homo sapien
gctccgtcccacagctggggtctga

SEQ ID NO: 3820966 - DNA, 25 bp, Homo sapien
gggtctgacaaacagcacccccttg

SEQ ID NO: 3820967 - DNA, 25 bp, Homo sapien
agcgtgggtctacagccttggccaa

SEQ ID NO: 3820968 - DNA, 25 bp, Homo sapien
gaatgcctgagcgtgcactagctgg

SEQ ID NO: 3820969 - DNA, 25 bp, Homo sapien
gggatgccgccaatgatcaggctcc

SEQ ID NO: 3820970 - DNA, 25 bp, Homo sapien
tgtagatctttaagccgtggctgga

SEQ ID NO: 3820971 - DNA, 25 bp, Homo sapien
taattaggtatagcttgtcaccaga

SEQ ID NO: 3820972 - DNA, 25 bp, Homo sapien
gaatattctgatctccattgagtta

SEQ ID NO: 3820973 - DNA, 25 bp, Homo sapien
catgactatgaatctggttttccaa

SEQ ID NO: 3820974 - DNA, 25 bp, Homo sapien
tattaattgtacgaggcaaagtcct

SEQ ID NO: 3820975 - DNA, 25 bp, Homo sapien
gaggagctctccctatccatgaaat

SEQ ID NO: 3820976 - DNA, 25 bp, Homo sapien
tctttatgaggaggtgcaaacccac

SEQ ID NO: 3820977 - DNA, 25 bp, Homo sapien
ccaaatgatattgcccttcagggag

SEQ ID NO: 3820978 - DNA, 25 bp, Homo sapien
tagttttggactgttcaccgagagg

SEQ ID NO: 3820979 - DNA, 25 bp, Homo sapien
caatatcgtaacaaaagtgatactg

SEQ ID NO: 3820980 - DNA, 25 bp, Homo sapien
tcaagcacaatatcgtaacaaaagt

SEQ ID NO: 3820981 - DNA, 25 bp, Homo sapien
tatcgtaacaaaagtgatactgctc

SEQ ID NO: 3820982 - DNA, 25 bp, Homo sapien
gcacaatatcgtaacaaaagtgata

SEQ ID NO: 3820983 - DNA, 25 bp, Homo sapien
tcgtttgaaccatgccagaacgttg

SEQ ID NO: 3820984 - DNA, 25 bp, Homo sapien
cttcgtttgaaccatgccagaacgt

SEQ ID NO: 3820985 - DNA, 25 bp, Homo sapien
tgccagaacgttgttctctcatttg

SEQ ID NO: 3820986 - DNA, 25 bp, Homo sapien
tgaaccatgccagaacgttgttctc

SEQ ID NO: 3820987 - DNA, 25 bp, Homo sapien
tgcacaattagctctgactcccaag

SEQ ID NO: 3820988 - DNA, 25 bp, Homo sapien
tactgcatcaacaaaccatctgtag

SEQ ID NO: 3820989 - DNA, 25 bp, Homo sapien
gatctcctggtgacctaatctttgg

SEQ ID NO: 3820990 - DNA, 25 bp, Homo sapien
taatctttggctcgagctgccccaa

SEQ ID NO: 3820991 - DNA, 25 bp, Homo sapien
tgaacagttctttacgatggcacag

SEQ ID NO: 3820992 - DNA, 25 bp, Homo sapien
tgtccggcctatgccggcactgcag

SEQ ID NO: 3820993 - DNA, 25 bp, Homo sapien
actgcagtgaacaaccatgggtcct

SEQ ID NO: 3820994 - DNA, 25 bp, Homo sapien
gaacacgacatccacacataggaac

SEQ ID NO: 3820995 - DNA, 25 bp, Homo sapien
aaagtcatctatggtgctcagcagt

SEQ ID NO: 3820996 - DNA, 25 bp, Homo sapien
tctccaggaatacacggaagtgttt

SEQ ID NO: 3820997 - DNA, 25 bp, Homo sapien
ttccaagaggaacgcgtgttgaatc

SEQ ID NO: 3820998 - DNA, 25 bp, Homo sapien
cagcagtggtccttgagtagcgata

SEQ ID NO: 3820999 - DNA, 25 bp, Homo sapien
cttcactgctccaggagttccttct

SEQ ID NO: 3821000 - DNA, 25 bp, Homo sapien
accttcactgctccaggagttcctt

SEQ ID NO: 3821001 - DNA, 25 bp, Homo sapien
actgctccaggagttccttcttcac

SEQ ID NO: 3821002 - DNA, 25 bp, Homo sapien
taaccttcactgctccaggagttcc

SEQ ID NO: 3821003 - DNA, 25 bp, Homo sapien
atctgaagctctggttccaccacca

SEQ ID NO: 3821004 - DNA, 25 bp, Homo sapien
ctgacacagacatctgaagctctgg

SEQ ID NO: 3821005 - DNA, 25 bp, Homo sapien
tctgaagctctggttccaccaccat

SEQ ID NO: 3821006 - DNA, 25 bp, Homo sapien
acacagacatctgaagctctggttc

SEQ ID NO: 3821007 - DNA, 25 bp, Homo sapien
ggatctgctcaagcccaatgttgta

SEQ ID NO: 3821008 - DNA, 25 bp, Homo sapien
aagcagtctctaccaaggcccagta

SEQ ID NO: 3821009 - DNA, 25 bp, Homo sapien
ggcaactcctcatgagacaacaggt

SEQ ID NO: 3821010 - DNA, 25 bp, Homo sapien
tctaaaatcctacgtgcctgcactg

SEQ ID NO: 3821011 - DNA, 25 bp, Homo sapien
taatatgagtcttcaggaacctttt

SEQ ID NO: 3821012 - DNA, 25 bp, Homo sapien
gctttcttaatatgagtcttcagga

SEQ ID NO: 3821013 - DNA, 25 bp, Homo sapien
tttagctttcttaatatgagtcttc

SEQ ID NO: 3821014 - DNA, 25 bp, Homo sapien
ttcttaatatgagtcttcaggaacc

SEQ ID NO: 3821015 - DNA, 25 bp, Homo sapien
agaatatctcggtatctattttttt

SEQ ID NO: 3821016 - DNA, 25 bp, Homo sapien
aatatctcggtatctatttttttct

SEQ ID NO: 3821017 - DNA, 25 bp, Homo sapien
atggaagaatatctcggtatctatt

SEQ ID NO: 3821018 - DNA, 25 bp, Homo sapien
ggaagaatatctcggtatctatttt

SEQ ID NO: 3821019 - DNA, 25 bp, Homo sapien
tgcttggttgattcccagagttgaa

SEQ ID NO: 3821020 - DNA, 25 bp, Homo sapien
gttgcttggttgattcccagagttg

SEQ ID NO: 3821021 - DNA, 25 bp, Homo sapien
ctgttgcttggttgattcccagagt

SEQ ID NO: 3821022 - DNA, 25 bp, Homo sapien
gcttggttgattcccagagttgaac

SEQ ID NO: 3821023 - DNA, 25 bp, Homo sapien
caggcagattcttaagttctaaagc

SEQ ID NO: 3821024 - DNA, 25 bp, Homo sapien
ttgaatattaatggccgaatctgag

SEQ ID NO: 3821025 - DNA, 25 bp, Homo sapien
tgatggctgtctgctcatgaaaatt

SEQ ID NO: 3821026 - DNA, 25 bp, Homo sapien
gccaactgatctagttctccttcag

SEQ ID NO: 3821027 - DNA, 25 bp, Homo sapien
gctgtctgctcatgaaaattgaata

SEQ ID NO: 3821028 - DNA, 25 bp, Homo sapien
gtgttccacctttgctagtacaaaa

SEQ ID NO: 3821029 - DNA, 25 bp, Homo sapien
tgttccacctttgctagtacaaaag

SEQ ID NO: 3821030 - DNA, 25 bp, Homo sapien
gtgaatatctgtagtacttttatcc

SEQ ID NO: 3821031 - DNA, 25 bp, Homo sapien
atatctgtagtacttttatccataa

SEQ ID NO: 3821032 - DNA, 25 bp, Homo sapien
gaatatctgtagtacttttatccat

SEQ ID NO: 3821033 - DNA, 25 bp, Homo sapien
ttgtgaatatctgtagtacttttat

SEQ ID NO: 3821034 - DNA, 25 bp, Homo sapien
tagaaatatctttgtgcatatctct

SEQ ID NO: 3821035 - DNA, 25 bp, Homo sapien
tgctactacaaataggatgatgtca

SEQ ID NO: 3821036 - DNA, 25 bp, Homo sapien
aaaatagagcctcaacttgctacta

SEQ ID NO: 3821037 - DNA, 25 bp, Homo sapien
tatctttgtgcatatctctaaaata

SEQ ID NO: 3821038 - DNA, 25 bp, Homo sapien
ctgtccacatgctgggatcactgcc

SEQ ID NO: 3821039 - DNA, 25 bp, Homo sapien
ttaccttgcaaactagtcgcctcag

SEQ ID NO: 3821040 - DNA, 25 bp, Homo sapien
tacttttaccttgcaaactagtcgc

SEQ ID NO: 3821041 - DNA, 25 bp, Homo sapien
ttgcaaactagtcgcctcagatcca

SEQ ID NO: 3821042 - DNA, 25 bp, Homo sapien
aaactagtcgcctcagatccatcca

SEQ ID NO: 3821043 - DNA, 25 bp, Homo sapien
tatgtgggaaattccgaagagaaag

SEQ ID NO: 3821044 - DNA, 25 bp, Homo sapien
taatcattatgtgggaaattccgaa

SEQ ID NO: 3821045 - DNA, 25 bp, Homo sapien
ttctgaaggctcttcaaaaacatcc

SEQ ID NO: 3821046 - DNA, 25 bp, Homo sapien
tgaaggctcttcaaaaacatcctca

SEQ ID NO: 3821047 - DNA, 25 bp, Homo sapien
gaaatgaacacaaggccagcatcat

SEQ ID NO: 3821048 - DNA, 25 bp, Homo sapien
ggaaatgaacacaaggccagcatca

SEQ ID NO: 3821049 - DNA, 25 bp, Homo sapien
aggaaatgaacacaaggccagcatc

SEQ ID NO: 3821050 - DNA, 25 bp, Homo sapien
gcttcagagtcatttccctcataat

SEQ ID NO: 3821051 - DNA, 25 bp, Homo sapien
tgatctaggtgtgttttcctgactt

SEQ ID NO: 3821052 - DNA, 25 bp, Homo sapien
ggaaaaactgatcaaatagaaaaca

SEQ ID NO: 3821053 - DNA, 25 bp, Homo sapien
gtcaggccaaaggtctagttagtat

SEQ ID NO: 3821054 - DNA, 25 bp, Homo sapien
aaaaggagccttagtgtcctgtgag

SEQ ID NO: 3821055 - DNA, 25 bp, Homo sapien
ccttagtgtcctgtgagtcaggcca

SEQ ID NO: 3821056 - DNA, 25 bp, Homo sapien
agtcaggccaaaggtctagttagta

SEQ ID NO: 3821057 - DNA, 25 bp, Homo sapien
tgcctaatcctagtattttaataaa

SEQ ID NO: 3821058 - DNA, 25 bp, Homo sapien
gctttgatcagaaatgcatgcctaa

SEQ ID NO: 3821059 - DNA, 25 bp, Homo sapien
ttgatcagaaatgcatgcctaatcc

SEQ ID NO: 3821060 - DNA, 25 bp, Homo sapien
agaaatgcatgcctaatcctagtat

SEQ ID NO: 3821061 - DNA, 25 bp, Homo sapien
agccaatttgaaaggctgcatacta

SEQ ID NO: 3821062 - DNA, 25 bp, Homo sapien
gggttgagctagaataatgaacaga

SEQ ID NO: 3821063 - DNA, 25 bp, Homo sapien
ggttattttgcatatatggcccttt

SEQ ID NO: 3821064 - DNA, 25 bp, Homo sapien
caataagctatcaagctataataag

SEQ ID NO: 3821065 - DNA, 25 bp, Homo sapien
cacgccttgtgacccctgcacgtca

SEQ ID NO: 3821066 - DNA, 25 bp, Homo sapien
agggccacaacccacgccttgtgac

SEQ ID NO: 3821067 - DNA, 25 bp, Homo sapien
gccttgtgacccctgcacgtcaacg

SEQ ID NO: 3821068 - DNA, 25 bp, Homo sapien
tgtgacccctgcacgtcaacggcat

SEQ ID NO: 3821069 - DNA, 25 bp, Homo sapien
gcctagcctgccggccttcgtcgct

SEQ ID NO: 3821070 - DNA, 25 bp, Homo sapien
cgccagttgggtccacgcctagcct

SEQ ID NO: 3821071 - DNA, 25 bp, Homo sapien
cctgccggccttcgtcgctatccaa

SEQ ID NO: 3821072 - DNA, 25 bp, Homo sapien
gccagttgggtccacgcctagcctg

SEQ ID NO: 3821073 - DNA, 25 bp, Homo sapien
caccaggaaatccttgcatggaggc

SEQ ID NO: 3821074 - DNA, 25 bp, Homo sapien
taagagtggaccctgaggtgtcatt

SEQ ID NO: 3821075 - DNA, 25 bp, Homo sapien
tgcttgaccacacaatattcccaga

SEQ ID NO: 3821076 - DNA, 25 bp, Homo sapien
tggaggctaaatgaacagttggtaa

SEQ ID NO: 3821077 - DNA, 25 bp, Homo sapien
gcagaagaagccaaatgacccataa

SEQ ID NO: 3821078 - DNA, 25 bp, Homo sapien
gtgaaactgtaatgatgcaccaggg

SEQ ID NO: 3821079 - DNA, 25 bp, Homo sapien
tgagagaatttagaacaaggctgtt

SEQ ID NO: 3821080 - DNA, 25 bp, Homo sapien
gaagccaaatgacccataagatttt

SEQ ID NO: 3821081 - DNA, 25 bp, Homo sapien
ccactctccttatcagctggcccac

SEQ ID NO: 3821082 - DNA, 25 bp, Homo sapien
tcaaatatccactctccttatcagc

SEQ ID NO: 3821083 - DNA, 25 bp, Homo sapien
atatccactctccttatcagctggc

SEQ ID NO: 3821084 - DNA, 25 bp, Homo sapien
aaatatccactctccttatcagctg

SEQ ID NO: 3821085 - DNA, 25 bp, Homo sapien
gagcttccttatgtacagccaggaa

SEQ ID NO: 3821086 - DNA, 25 bp, Homo sapien
cagctcaatcatttgtggtggctga

SEQ ID NO: 3821087 - DNA, 25 bp, Homo sapien
gctcaatcatttgtggtggctgagc

SEQ ID NO: 3821088 - DNA, 25 bp, Homo sapien
ctcaatcatttgtggtggctgagct

SEQ ID NO: 3821089 - DNA, 25 bp, Homo sapien
tgagggcaccgtattccagggccac

SEQ ID NO: 3821090 - DNA, 25 bp, Homo sapien
gcaccgtattccagggccacaggct

SEQ ID NO: 3821091 - DNA, 25 bp, Homo sapien
ctgagggcaccgtattccagggcca

SEQ ID NO: 3821092 - DNA, 25 bp, Homo sapien
agggcaccgtattccagggccacag

SEQ ID NO: 3821093 - DNA, 25 bp, Homo sapien
ctgggacagtgccccaagagcagaa

SEQ ID NO: 3821094 - DNA, 25 bp, Homo sapien
gtaagatactcttcatcctccgagg

SEQ ID NO: 3821095 - DNA, 25 bp, Homo sapien
catggatggtacatgtcaccttccc

SEQ ID NO: 3821096 - DNA, 25 bp, Homo sapien
ttcacagggtagctggccttggcat

SEQ ID NO: 3821097 - DNA, 25 bp, Homo sapien
catgtagagttgatggtaagatact

SEQ ID NO: 3821098 - DNA, 25 bp, Homo sapien
aacttataaggcaccaaccctggct

SEQ ID NO: 3821099 - DNA, 25 bp, Homo sapien
gcaccaggaagcaagaaacttataa

SEQ ID NO: 3821100 - DNA, 25 bp, Homo sapien
gagcccccaatttaatgagaagttg

SEQ ID NO: 3821101 - DNA, 25 bp, Homo sapien
ttgaggagcccccaatttaatgaga

SEQ ID NO: 3821102 - DNA, 25 bp, Homo sapien
tgacccagttctaagacagactcgt

SEQ ID NO: 3821103 - DNA, 25 bp, Homo sapien
agggcaatgacccagttctaagaca

SEQ ID NO: 3821104 - DNA, 25 bp, Homo sapien
gttctaagacagactcgtcacatgg

SEQ ID NO: 3821105 - DNA, 25 bp, Homo sapien
cagactcgtcacatggcaagcagag

SEQ ID NO: 3821106 - DNA, 25 bp, Homo sapien
cctatttagagatgcggcaagctga

SEQ ID NO: 3821107 - DNA, 25 bp, Homo sapien
ttgggagtgactcaagcaggcaacc

SEQ ID NO: 3821108 - DNA, 25 bp, Homo sapien
tcattatctggtgatgcagccgcag

SEQ ID NO: 3821109 - DNA, 25 bp, Homo sapien
gaagtgacatttactccccgcggaa

SEQ ID NO: 3821110 - DNA, 25 bp, Homo sapien
aatatctgtcgaaagtctggttaga

SEQ ID NO: 3821111 - DNA, 25 bp, Homo sapien
aaaatatctgtcgaaagtctggtta

SEQ ID NO: 3821112 - DNA, 25 bp, Homo sapien
aaatatctgtcgaaagtctggttag

SEQ ID NO: 3821113 - DNA, 25 bp, Homo sapien
tccagctactggctctgcctggaca

SEQ ID NO: 3821114 - DNA, 25 bp, Homo sapien
ttgattctgagctccagctactggc

SEQ ID NO: 3821115 - DNA, 25 bp, Homo sapien
ccacctcttctaataagctccttgc

SEQ ID NO: 3821116 - DNA, 25 bp, Homo sapien
tttgattctgagctccagctactgg

SEQ ID NO: 3821117 - DNA, 25 bp, Homo sapien
attctgaaggctctgcttgctacag

SEQ ID NO: 3821118 - DNA, 25 bp, Homo sapien
gacactgtgcccaacttttctggac

SEQ ID NO: 3821119 - DNA, 25 bp, Homo sapien
agctgtcctttaaagacttgggcca

SEQ ID NO: 3821120 - DNA, 25 bp, Homo sapien
tttaagaggaatcccagttcagctc

SEQ ID NO: 3821121 - DNA, 25 bp, Homo sapien
tgagtcagtacatgttgccctggtg

SEQ ID NO: 3821122 - DNA, 25 bp, Homo sapien
gaatgtgtcaaggaactggcccaag

SEQ ID NO: 3821123 - DNA, 25 bp, Homo sapien
caaagaggtcgccaatgttgattca

SEQ ID NO: 3821124 - DNA, 25 bp, Homo sapien
tctgatggccttttgggaagactct

SEQ ID NO: 3821125 - DNA, 25 bp, Homo sapien
cagcgcacctggagggggtcggcaa

SEQ ID NO: 3821126 - DNA, 25 bp, Homo sapien
gcccctctcagtaaatgcagcacct

SEQ ID NO: 3821127 - DNA, 25 bp, Homo sapien
caaaggaggagcgtgacttcctgtg

SEQ ID NO: 3821128 - DNA, 25 bp, Homo sapien
gggtcggcaaaggaggagcgtgact

SEQ ID NO: 3821129 - DNA, 25 bp, Homo sapien
gcccagagttttccccacggcagca

SEQ ID NO: 3821130 - DNA, 25 bp, Homo sapien
ccagagttttccccacggcagcagg

SEQ ID NO: 3821131 - DNA, 25 bp, Homo sapien
gagagcccagagttttccccacggc

SEQ ID NO: 3821132 - DNA, 25 bp, Homo sapien
gagcccagagttttccccacggcag

SEQ ID NO: 3821133 - DNA, 25 bp, Homo sapien
gtggaccttccattcacggccagga

SEQ ID NO: 3821134 - DNA, 25 bp, Homo sapien
cggccaggataatgtcaccagctgc

SEQ ID NO: 3821135 - DNA, 25 bp, Homo sapien
aactgaatcccaaaccattggcatt

SEQ ID NO: 3821136 - DNA, 25 bp, Homo sapien
gaagatgaggccttccgtggacctt

SEQ ID NO: 3821137 - DNA, 25 bp, Homo sapien
caggcaaggctgttaccaaggaaac

SEQ ID NO: 3821138 - DNA, 25 bp, Homo sapien
tgtcattagcagaaggacactgctg

SEQ ID NO: 3821139 - DNA, 25 bp, Homo sapien
aaacagccgtgcgttcatctcccat

SEQ ID NO: 3821140 - DNA, 25 bp, Homo sapien
ttctctctaagaccagtcttgcaac

SEQ ID NO: 3821141 - DNA, 25 bp, Homo sapien
gtgaggccgcacagaatcactccat

SEQ ID NO: 3821142 - DNA, 25 bp, Homo sapien
gcctgcttgtgggtgaggccgcaca

SEQ ID NO: 3821143 - DNA, 25 bp, Homo sapien
acagcctgcttgtgggtgaggccgc

SEQ ID NO: 3821144 - DNA, 25 bp, Homo sapien
ttgtgggtgaggccgcacagaatca

SEQ ID NO: 3821145 - DNA, 25 bp, Homo sapien
ctgaggtgccaggtgtccccctgga

SEQ ID NO: 3821146 - DNA, 25 bp, Homo sapien
tggatttcacatagataccaccata

SEQ ID NO: 3821147 - DNA, 25 bp, Homo sapien
tagataccaccatatggcacactgg

SEQ ID NO: 3821148 - DNA, 25 bp, Homo sapien
agataccaccatatggcacactggt

SEQ ID NO: 3821149 - DNA, 25 bp, Homo sapien
caatggatttcacatagataccacc

SEQ ID NO: 3821150 - DNA, 25 bp, Homo sapien
gtcttctgtattcacctgtttgttt

SEQ ID NO: 3821151 - DNA, 25 bp, Homo sapien
tcttctgtattcacctgtttgttta

SEQ ID NO: 3821152 - DNA, 25 bp, Homo sapien
atccaagtgtcccatcttctttaac

SEQ ID NO: 3821153 - DNA, 25 bp, Homo sapien
aatccaagtgtcccatcttctttaa

SEQ ID NO: 3821154 - DNA, 25 bp, Homo sapien
atggaggacaagaagaaccagcacc

SEQ ID NO: 3821155 - DNA, 25 bp, Homo sapien
cacagaggatcatctggccacaaag

SEQ ID NO: 3821156 - DNA, 25 bp, Homo sapien
catctggccacaaagttggccaaga

SEQ ID NO: 3821157 - DNA, 25 bp, Homo sapien
catctgggttgcgtcctacagcctg

SEQ ID NO: 3821158 - DNA, 25 bp, Homo sapien
ggttgcgtcctacagcctgcaccat

SEQ ID NO: 3821159 - DNA, 25 bp, Homo sapien
aggaaagctgatgtctcagcctggg

SEQ ID NO: 3821160 - DNA, 25 bp, Homo sapien
tcagcctgggcactaagctctgcac

SEQ ID NO: 3821161 - DNA, 25 bp, Homo sapien
cagaaaggaaagctgatgtctcagc

SEQ ID NO: 3821162 - DNA, 25 bp, Homo sapien
gaaaggaaagctgatgtctcagcct

SEQ ID NO: 3821163 - DNA, 25 bp, Homo sapien
agctcaggatgtctgtagaggagac

SEQ ID NO: 3821164 - DNA, 25 bp, Homo sapien
gagaccccagaattggctgtgctat

SEQ ID NO: 3821165 - DNA, 25 bp, Homo sapien
tgtcctggtcttgtgtgtgtgacaa

SEQ ID NO: 3821166 - DNA, 25 bp, Homo sapien
aacttccctggtacccgaagctcag

SEQ ID NO: 3821167 - DNA, 25 bp, Homo sapien
aatcttgtcaaaacctttgattgat

SEQ ID NO: 3821168 - DNA, 25 bp, Homo sapien
tgcctcaatcttgtcaaaacctttg

SEQ ID NO: 3821169 - DNA, 25 bp, Homo sapien
tgtcaaaacctttgattgatttttg

SEQ ID NO: 3821170 - DNA, 25 bp, Homo sapien
gtgcctcaatcttgtcaaaaccttt

SEQ ID NO: 3821171 - DNA, 25 bp, Homo sapien
tgactcctttggtaacacatgccga

SEQ ID NO: 3821172 - DNA, 25 bp, Homo sapien
taagtctcctagaaaacatttgcag

SEQ ID NO: 3821173 - DNA, 25 bp, Homo sapien
cactcaaggcctgttggattaaact

SEQ ID NO: 3821174 - DNA, 25 bp, Homo sapien
acatgccgatatataccactcaagg

SEQ ID NO: 3821175 - DNA, 25 bp, Homo sapien
tatctctctacatctggaaccatcg

SEQ ID NO: 3821176 - DNA, 25 bp, Homo sapien
tctctctacatctggaaccatcggc

SEQ ID NO: 3821177 - DNA, 25 bp, Homo sapien
tctacatctggaaccatcggcagct

SEQ ID NO: 3821178 - DNA, 25 bp, Homo sapien
tctctacatctggaaccatcggcag

SEQ ID NO: 3821179 - DNA, 25 bp, Homo sapien
taaaatatgtcttatggtcagaaaa

SEQ ID NO: 3821180 - DNA, 25 bp, Homo sapien
gtactgaaaatgctattactagctg

SEQ ID NO: 3821181 - DNA, 25 bp, Homo sapien
acagatactacacgcactcgtcggg

SEQ ID NO: 3821182 - DNA, 25 bp, Homo sapien
cctcggcaaaaggacataaaatatg

SEQ ID NO: 3821183 - DNA, 25 bp, Homo sapien
cagtgcagggtagtggggccagaaa

SEQ ID NO: 3821184 - DNA, 25 bp, Homo sapien
tcagtgcagggtagtggggccagaa

SEQ ID NO: 3821185 - DNA, 25 bp, Homo sapien
ccagctccagagatcgcacacggga

SEQ ID NO: 3821186 - DNA, 25 bp, Homo sapien
ctccagagatcgcacacgggaaagg

SEQ ID NO: 3821187 - DNA, 25 bp, Homo sapien
ctggcccacttaggattctgggtct

SEQ ID NO: 3821188 - DNA, 25 bp, Homo sapien
tggcccacttaggattctgggtctc

SEQ ID NO: 3821189 - DNA, 25 bp, Homo sapien
ggcccacttaggattctgggtctca

SEQ ID NO: 3821190 - DNA, 25 bp, Homo sapien
gcccacttaggattctgggtctcac

SEQ ID NO: 3821191 - DNA, 25 bp, Homo sapien
gttcccacgcatgttttggatcgac

SEQ ID NO: 3821192 - DNA, 25 bp, Homo sapien
ttcccacgcatgttttggatcgact

SEQ ID NO: 3821193 - DNA, 25 bp, Homo sapien
tcccacgcatgttttggatcgactg

SEQ ID NO: 3821194 - DNA, 25 bp, Homo sapien
cccacgcatgttttggatcgactgc

SEQ ID NO: 3821195 - DNA, 25 bp, Homo sapien
tcagctgggacttgcttttactgct

SEQ ID NO: 3821196 - DNA, 25 bp, Homo sapien
gggacttgcttttactgctctcgca

SEQ ID NO: 3821197 - DNA, 25 bp, Homo sapien
ctggtcagctgggacttgcttttac

SEQ ID NO: 3821198 - DNA, 25 bp, Homo sapien
ttttactgctctcgcatgactgcag

SEQ ID NO: 3821199 - DNA, 25 bp, Homo sapien
tcttcatataatcacctaagcttga

SEQ ID NO: 3821200 - DNA, 25 bp, Homo sapien
atgtggctagggatggccactttcc

SEQ ID NO: 3821201 - DNA, 25 bp, Homo sapien
gatgtggctagggatggccactttc

SEQ ID NO: 3821202 - DNA, 25 bp, Homo sapien
cctaagcttgaataataggtgagca

SEQ ID NO: 3821203 - DNA, 25 bp, Homo sapien
tcgctttaagagcatgccctgttta

SEQ ID NO: 3821204 - DNA, 25 bp, Homo sapien
cttcgctttaagagcatgccctgtt

SEQ ID NO: 3821205 - DNA, 25 bp, Homo sapien
ttcgctttaagagcatgccctgttt

SEQ ID NO: 3821206 - DNA, 25 bp, Homo sapien
caggtatgctcaaagatctatctgc

SEQ ID NO: 3821207 - DNA, 25 bp, Homo sapien
tgttcatcaggtatgctcaaagatc

SEQ ID NO: 3821208 - DNA, 25 bp, Homo sapien
tgtaactgttcatcaggtatgctca

SEQ ID NO: 3821209 - DNA, 25 bp, Homo sapien
cgcaaatgagtgtaactgttcatca

SEQ ID NO: 3821210 - DNA, 25 bp, Homo sapien
ctttgtgtgatatgatgaggtatct

SEQ ID NO: 3821211 - DNA, 25 bp, Homo sapien
tgtgtgatatgatgaggtatctcca

SEQ ID NO: 3821212 - DNA, 25 bp, Homo sapien
tatgatgaggtatctccaaggtcac

SEQ ID NO: 3821213 - DNA, 25 bp, Homo sapien
atatgatgaggtatctccaaggtca

SEQ ID NO: 3821214 - DNA, 25 bp, Homo sapien
ttcagaacagtaccataagggcact

SEQ ID NO: 3821215 - DNA, 25 bp, Homo sapien
ggaaactctcctagtggccctgaaa

SEQ ID NO: 3821216 - DNA, 25 bp, Homo sapien
gaaacctttcgtcccatgcgattta

SEQ ID NO: 3821217 - DNA, 25 bp, Homo sapien
ggaaatatgccgttagaagacgcgt

SEQ ID NO: 3821218 - DNA, 25 bp, Homo sapien
ccgattttcctaaaaggcttctcag

SEQ ID NO: 3821219 - DNA, 25 bp, Homo sapien
cgattttcctaaaaggcttctcagt

SEQ ID NO: 3821220 - DNA, 25 bp, Homo sapien
gattttcctaaaaggcttctcagtg

SEQ ID NO: 3821221 - DNA, 25 bp, Homo sapien
attttcctaaaaggcttctcagtgc

SEQ ID NO: 3821222 - DNA, 25 bp, Homo sapien
agctgtattgttgactgaaacgcac

SEQ ID NO: 3821223 - DNA, 25 bp, Homo sapien
tgtattgttgactgaaacgcacagt

SEQ ID NO: 3821224 - DNA, 25 bp, Homo sapien
tcaaggaatattgtcgaacacaagc

SEQ ID NO: 3821225 - DNA, 25 bp, Homo sapien
attgttgactgaaacgcacagtaga

SEQ ID NO: 3821226 - DNA, 25 bp, Homo sapien
ccaaaacttcgacaagtgtttgaca

SEQ ID NO: 3821227 - DNA, 25 bp, Homo sapien
agtaaatccaaaacttcgacaagtg

SEQ ID NO: 3821228 - DNA, 25 bp, Homo sapien
tttgagtaaatccaaaacttcgaca

SEQ ID NO: 3821229 - DNA, 25 bp, Homo sapien
ccagctgctgagcatagaattttga

SEQ ID NO: 3821230 - DNA, 25 bp, Homo sapien
gatgcggatgcccacgcactgactt

SEQ ID NO: 3821231 - DNA, 25 bp, Homo sapien
ccattggatgcggatgcccacgcac

SEQ ID NO: 3821232 - DNA, 25 bp, Homo sapien
tgcggatgcccacgcactgacttct

SEQ ID NO: 3821233 - DNA, 25 bp, Homo sapien
ttggatgcggatgcccacgcactga

SEQ ID NO: 3821234 - DNA, 25 bp, Homo sapien
catccttttatgtcaaactatcaat

SEQ ID NO: 3821235 - DNA, 25 bp, Homo sapien
aggtccatgctaccaccaccaggtc

SEQ ID NO: 3821236 - DNA, 25 bp, Homo sapien
ttaaagaaatcaagagagacatcct

SEQ ID NO: 3821237 - DNA, 25 bp, Homo sapien
gagagacatccttttatgtcaaact

SEQ ID NO: 3821238 - DNA, 25 bp, Homo sapien
tttgtacagttgcttcttcttattt

SEQ ID NO: 3821239 - DNA, 25 bp, Homo sapien
atggtttgtacagttgcttcttctt

SEQ ID NO: 3821240 - DNA, 25 bp, Homo sapien
cagttgcttcttcttatttctacaa

SEQ ID NO: 3821241 - DNA, 25 bp, Homo sapien
ggtttgtacagttgcttcttcttat

SEQ ID NO: 3821242 - DNA, 25 bp, Homo sapien
gagttcctctggaatattgtgcttg

SEQ ID NO: 3821243 - DNA, 25 bp, Homo sapien
ggattggcagaagggttaaactcca

SEQ ID NO: 3821244 - DNA, 25 bp, Homo sapien
tgcctctggattggcagaagggtta

SEQ ID NO: 3821245 - DNA, 25 bp, Homo sapien
tattgtgcttgcctctggattggca

SEQ ID NO: 3821246 - DNA, 25 bp, Homo sapien
aactcatttattcgactgctgcatt

SEQ ID NO: 3821247 - DNA, 25 bp, Homo sapien
tcaactcatttattcgactgctgca

SEQ ID NO: 3821248 - DNA, 25 bp, Homo sapien
tcatttattcgactgctgcatttag

SEQ ID NO: 3821249 - DNA, 25 bp, Homo sapien
ctcatttattcgactgctgcattta

SEQ ID NO: 3821250 - DNA, 25 bp, Homo sapien
gagttcctctggaatattgtgcttg

SEQ ID NO: 3821251 - DNA, 25 bp, Homo sapien
cttgcctctggattggcagaaaggt

SEQ ID NO: 3821252 - DNA, 25 bp, Homo sapien
ggattggcagaaaggttaaactcca

SEQ ID NO: 3821253 - DNA, 25 bp, Homo sapien
tattgtgcttgcctctggattggca

SEQ ID NO: 3821254 - DNA, 25 bp, Homo sapien
ccgagggtagatggcacctatcacc

SEQ ID NO: 3821255 - DNA, 25 bp, Homo sapien
caaaccgagggtagatggcacctat

SEQ ID NO: 3821256 - DNA, 25 bp, Homo sapien
ggcaaaccgagggtagatggcacct

SEQ ID NO: 3821257 - DNA, 25 bp, Homo sapien
aaccgagggtagatggcacctatca

SEQ ID NO: 3821258 - DNA, 25 bp, Homo sapien
tgtggaggtcctcaccaacttcaac

SEQ ID NO: 3821259 - DNA, 25 bp, Homo sapien
tctcagattcagagggacacaccga

SEQ ID NO: 3821260 - DNA, 25 bp, Homo sapien
gcatgtggaggtcctcaccaacttc

SEQ ID NO: 3821261 - DNA, 25 bp, Homo sapien
gccatgggcgctcctgccatcctgt

SEQ ID NO: 3821262 - DNA, 25 bp, Homo sapien
tagggtgcacacgacaggtcagtat

SEQ ID NO: 3821263 - DNA, 25 bp, Homo sapien
ctagggtgcacacgacaggtcagta

SEQ ID NO: 3821264 - DNA, 25 bp, Homo sapien
tgcacacgacaggtcagtatgttcc

SEQ ID NO: 3821265 - DNA, 25 bp, Homo sapien
acacgacaggtcagtatgttcccca

SEQ ID NO: 3821266 - DNA, 25 bp, Homo sapien
gattctcattcaagtgcctaagcct

SEQ ID NO: 3821267 - DNA, 25 bp, Homo sapien
gtgattctcattcaagtgcctaagc

SEQ ID NO: 3821268 - DNA, 25 bp, Homo sapien
gattacaggatcccgcccccatgct

SEQ ID NO: 3821269 - DNA, 25 bp, Homo sapien
ttctcattcaagtgcctaagcctcc

SEQ ID NO: 3821270 - DNA, 25 bp, Homo sapien
gaagcaacccaaccaattaagagac

SEQ ID NO: 3821271 - DNA, 25 bp, Homo sapien
taatgctaagggcagtggcagtgac

SEQ ID NO: 3821272 - DNA, 25 bp, Homo sapien
tctctgtcagatgtgcgtgtagtgg

SEQ ID NO: 3821273 - DNA, 25 bp, Homo sapien
gagactttctctaaaggcagagtaa

SEQ ID NO: 3821274 - DNA, 25 bp, Homo sapien
ctcctggccgagaatgtaggaagag

SEQ ID NO: 3821275 - DNA, 25 bp, Homo sapien
cctcctggccgagaatgtaggaaga

SEQ ID NO: 3821276 - DNA, 25 bp, Homo sapien
gagagcgagaataaacaacccatgt

SEQ ID NO: 3821277 - DNA, 25 bp, Homo sapien
gaataaacaacccatgtcaagtaca

SEQ ID NO: 3821278 - DNA, 25 bp, Homo sapien
gagagagcgagaataaacaacccat

SEQ ID NO: 3821279 - DNA, 25 bp, Homo sapien
gcgagaataaacaacccatgtcaag

SEQ ID NO: 3821280 - DNA, 25 bp, Homo sapien
atctcatccttggatgagcccgact

SEQ ID NO: 3821281 - DNA, 25 bp, Homo sapien
tctcatccttggatgagcccgactt

SEQ ID NO: 3821282 - DNA, 25 bp, Homo sapien
aaatctcatccttggatgagcccga

SEQ ID NO: 3821283 - DNA, 25 bp, Homo sapien
aatctcatccttggatgagcccgac

SEQ ID NO: 3821284 - DNA, 25 bp, Homo sapien
tagttctgacccaactggcaagaag

SEQ ID NO: 3821285 - DNA, 25 bp, Homo sapien
tggttggagccagttcgattaaagc

SEQ ID NO: 3821286 - DNA, 25 bp, Homo sapien
tagcccttttcaagcctccaactgg

SEQ ID NO: 3821287 - DNA, 25 bp, Homo sapien
actggttaataagctagttctgacc

SEQ ID NO: 3821288 - DNA, 25 bp, Homo sapien
tctaagcaacgtcctcattggcagg

SEQ ID NO: 3821289 - DNA, 25 bp, Homo sapien
caggacccttaagccagctgaatgt

SEQ ID NO: 3821290 - DNA, 25 bp, Homo sapien
ttcagcaaaacagtgggcttcatgc

SEQ ID NO: 3821291 - DNA, 25 bp, Homo sapien
tgcaaatatgacacagcgaggcccc

SEQ ID NO: 3821292 - DNA, 25 bp, Homo sapien
tgatgagtcatcaaatgggagaaat

SEQ ID NO: 3821293 - DNA, 25 bp, Homo sapien
agctgatgagtcatcaaatgggaga

SEQ ID NO: 3821294 - DNA, 25 bp, Homo sapien
gctagaaagccatgtgggggcagct

SEQ ID NO: 3821295 - DNA, 25 bp, Homo sapien
ctgtgagctagaaagccatgtgggg

SEQ ID NO: 3821296 - DNA, 25 bp, Homo sapien
tattaacgaaaatcgactggccatg

SEQ ID NO: 3821297 - DNA, 25 bp, Homo sapien
cacaggacgctgagaggaaggatca

SEQ ID NO: 3821298 - DNA, 25 bp, Homo sapien
ccgggtagctaagatcatgggcacg

SEQ ID NO: 3821299 - DNA, 25 bp, Homo sapien
tacggattcggacagtgggctcatg

SEQ ID NO: 3821300 - DNA, 25 bp, Homo sapien
tataaacgtgaacttcaggccaggc

SEQ ID NO: 3821301 - DNA, 25 bp, Homo sapien
tctttataaacgtgaacttcaggcc

SEQ ID NO: 3821302 - DNA, 25 bp, Homo sapien
agagatctttataaacgtgaacttc

SEQ ID NO: 3821303 - DNA, 25 bp, Homo sapien
gatctttataaacgtgaacttcagg

SEQ ID NO: 3821304 - DNA, 25 bp, Homo sapien
cattcttgagcacaactatgcacac

SEQ ID NO: 3821305 - DNA, 25 bp, Homo sapien
gtgcacacactgatgcccctagatt

SEQ ID NO: 3821306 - DNA, 25 bp, Homo sapien
acacaggcacttccgcattcacaag

SEQ ID NO: 3821307 - DNA, 25 bp, Homo sapien
gagatggtctcttggtgtgtcaccc

SEQ ID NO: 3821308 - DNA, 25 bp, Homo sapien
acaacagagatatgtggcaaccagg

SEQ ID NO: 3821309 - DNA, 25 bp, Homo sapien
gaatatatctctaaaccaaagatct

SEQ ID NO: 3821310 - DNA, 25 bp, Homo sapien
cagagagttctccaatttataaata

SEQ ID NO: 3821311 - DNA, 25 bp, Homo sapien
tctaataccagttaacattaagaga

SEQ ID NO: 3821312 - DNA, 25 bp, Homo sapien
agaaaggagagaagacgttcgcaca

SEQ ID NO: 3821313 - DNA, 25 bp, Homo sapien
aagacgttcgcacagaatcatctcc

SEQ ID NO: 3821314 - DNA, 25 bp, Homo sapien
aaaggagagaagacgttcgcacaga

SEQ ID NO: 3821315 - DNA, 25 bp, Homo sapien
gagagaagacgttcgcacagaatca

SEQ ID NO: 3821316 - DNA, 25 bp, Homo sapien
gcattcgaccagttttcaagtctat

SEQ ID NO: 3821317 - DNA, 25 bp, Homo sapien
cattcgaccagttttcaagtctatt

SEQ ID NO: 3821318 - DNA, 25 bp, Homo sapien
tttttcctcctttggcatcaacagc

SEQ ID NO: 3821319 - DNA, 25 bp, Homo sapien
ctatttgtttttcctcctttggcat

SEQ ID NO: 3821320 - DNA, 25 bp, Homo sapien
gataagactcccttgtaatgtcagg

SEQ ID NO: 3821321 - DNA, 25 bp, Homo sapien
taatgtcaggtaagtgaagagccct

SEQ ID NO: 3821322 - DNA, 25 bp, Homo sapien
gaaactgaggcatggttccctaaca

SEQ ID NO: 3821323 - DNA, 25 bp, Homo sapien
caaggatgtctagaaggatacgcaa

SEQ ID NO: 3821324 - DNA, 25 bp, Homo sapien
ctctgacccaagtggtttggaattg

SEQ ID NO: 3821325 - DNA, 25 bp, Homo sapien
ctgacccaagtggtttggaattgga

SEQ ID NO: 3821326 - DNA, 25 bp, Homo sapien
tctgacccaagtggtttggaattgg

SEQ ID NO: 3821327 - DNA, 25 bp, Homo sapien
aaaaacctcagttccagtgctacaa

SEQ ID NO: 3821328 - DNA, 25 bp, Homo sapien
gaaagcacaaagatcctggagagac

SEQ ID NO: 3821329 - DNA, 25 bp, Homo sapien
caaagcttgaaatggatccccatct

SEQ ID NO: 3821330 - DNA, 25 bp, Homo sapien
caagaaagggcacgtgaggaaagca

SEQ ID NO: 3821331 - DNA, 25 bp, Homo sapien
cagcgtctttgtcatacagcacacc

SEQ ID NO: 3821332 - DNA, 25 bp, Homo sapien
agcgtctttgtcatacagcacaccc

SEQ ID NO: 3821333 - DNA, 25 bp, Homo sapien
ctccagaaacaggcgcataaaccag

SEQ ID NO: 3821334 - DNA, 25 bp, Homo sapien
gaaacaggcgcataaaccagctgct

SEQ ID NO: 3821335 - DNA, 25 bp, Homo sapien
gctccttcttatttaaacagcactt

SEQ ID NO: 3821336 - DNA, 25 bp, Homo sapien
cagaaacaggcgcataaaccagctg

SEQ ID NO: 3821337 - DNA, 25 bp, Homo sapien
aggcctacacatagctggcttactt

SEQ ID NO: 3821338 - DNA, 25 bp, Homo sapien
caggcctacacatagctggcttact

SEQ ID NO: 3821339 - DNA, 25 bp, Homo sapien
cacctgcaggtcacatttgatgttt

SEQ ID NO: 3821340 - DNA, 25 bp, Homo sapien
tgacacctgcaggtcacatttgatg

SEQ ID NO: 3821341 - DNA, 25 bp, Homo sapien
gatgtttgtttggatatcctccggg

SEQ ID NO: 3821342 - DNA, 25 bp, Homo sapien
cataaagtgacacctgcaggtcaca

SEQ ID NO: 3821343 - DNA, 25 bp, Homo sapien
ggatataagggtgaaaagtttgcca

SEQ ID NO: 3821344 - DNA, 25 bp, Homo sapien
taagggtgaaaagtttgccatgaga

SEQ ID NO: 3821345 - DNA, 25 bp, Homo sapien
ggtgaaaagtttgccatgagaggcc

SEQ ID NO: 3821346 - DNA, 25 bp, Homo sapien
tgccaggatataagggtgaaaagtt

SEQ ID NO: 3821347 - DNA, 25 bp, Homo sapien
taaaatggcccagattgtggatttc

SEQ ID NO: 3821348 - DNA, 25 bp, Homo sapien
ccattccagaaaggtagaacagttt

SEQ ID NO: 3821349 - DNA, 25 bp, Homo sapien
cagaaaggtagaacagtttggcaac

SEQ ID NO: 3821350 - DNA, 25 bp, Homo sapien
tccatgcaccattccagaaaggtag

SEQ ID NO: 3821351 - DNA, 25 bp, Homo sapien
tctgtccagaacctgtgttttaatc

SEQ ID NO: 3821352 - DNA, 25 bp, Homo sapien
ctgtccagaacctgtgttttaatca

SEQ ID NO: 3821353 - DNA, 25 bp, Homo sapien
tgtccagaacctgtgttttaatcac

SEQ ID NO: 3821354 - DNA, 25 bp, Homo sapien
cccaaagctggcatctataagcatc

SEQ ID NO: 3821355 - DNA, 25 bp, Homo sapien
caaagctggcatctataagcatcag

SEQ ID NO: 3821356 - DNA, 25 bp, Homo sapien
agctggcatctataagcatcagtac

SEQ ID NO: 3821357 - DNA, 25 bp, Homo sapien
caaacccaaagctggcatctataag

SEQ ID NO: 3821358 - DNA, 25 bp, Homo sapien
agttctgtttgtatctttccatgga

SEQ ID NO: 3821359 - DNA, 25 bp, Homo sapien
ttccatggataactaaaaataacac

SEQ ID NO: 3821360 - DNA, 25 bp, Homo sapien
aatttaagacacttcaaagatgcaa

SEQ ID NO: 3821361 - DNA, 25 bp, Homo sapien
gaactgattcctggaaacttgtaat

SEQ ID NO: 3821362 - DNA, 25 bp, Homo sapien
tagtaatcgttacacaactttacat

SEQ ID NO: 3821363 - DNA, 25 bp, Homo sapien
aaagagcaaagcatagaacagtgta

SEQ ID NO: 3821364 - DNA, 25 bp, Homo sapien
tcaagtatacaagtttagtaatcgt

SEQ ID NO: 3821365 - DNA, 25 bp, Homo sapien
caaatgacttctaggaactattcaa

SEQ ID NO: 3821366 - DNA, 25 bp, Homo sapien
gtactgcctgaattttctattgata

SEQ ID NO: 3821367 - DNA, 25 bp, Homo sapien
gccaatgtaaaagatagttcataga

SEQ ID NO: 3821368 - DNA, 25 bp, Homo sapien
tttttgccaatgtaaaagatagttc

SEQ ID NO: 3821369 - DNA, 25 bp, Homo sapien
tttgccaatgtaaaagatagttcat

SEQ ID NO: 3821370 - DNA, 25 bp, Homo sapien
tcatcatgttaatgtcacacccaca

SEQ ID NO: 3821371 - DNA, 25 bp, Homo sapien
gatcaatcatcatgttaatgtcaca

SEQ ID NO: 3821372 - DNA, 25 bp, Homo sapien
catgttaatgtcacacccacattca

SEQ ID NO: 3821373 - DNA, 25 bp, Homo sapien
gccagatcaatcatcatgttaatgt

SEQ ID NO: 3821374 - DNA, 25 bp, Homo sapien
cacgatcgtcacagggcctctgatc

SEQ ID NO: 3821375 - DNA, 25 bp, Homo sapien
tcgtcacagggcctctgatctcggt

SEQ ID NO: 3821376 - DNA, 25 bp, Homo sapien
cagggcctctgatctcggtgaactt

SEQ ID NO: 3821377 - DNA, 25 bp, Homo sapien
ctgacacgatcgtcacagggcctct

SEQ ID NO: 3821378 - DNA, 25 bp, Homo sapien
gtgaagttccgaatgaggcattata

SEQ ID NO: 3821379 - DNA, 25 bp, Homo sapien
ccaggtgaagttccgaatgaggcat

SEQ ID NO: 3821380 - DNA, 25 bp, Homo sapien
ggtgaagttccgaatgaggcattat

SEQ ID NO: 3821381 - DNA, 25 bp, Homo sapien
ctgccaggtgaagttccgaatgagg

SEQ ID NO: 3821382 - DNA, 25 bp, Homo sapien
gtgctctttccaactttggaggccc

SEQ ID NO: 3821383 - DNA, 25 bp, Homo sapien
aaagtgctctttccaactttggagg

SEQ ID NO: 3821384 - DNA, 25 bp, Homo sapien
tcaaagtgctctttccaactttgga

SEQ ID NO: 3821385 - DNA, 25 bp, Homo sapien
aagtgctctttccaactttggaggc

SEQ ID NO: 3821386 - DNA, 25 bp, Homo sapien
cgctattggtggcggctctagtgga

SEQ ID NO: 3821387 - DNA, 25 bp, Homo sapien
gtggagttccatcaaccactggaat

SEQ ID NO: 3821388 - DNA, 25 bp, Homo sapien
gtggcggctctagtggagttccatc

SEQ ID NO: 3821389 - DNA, 25 bp, Homo sapien
tctagtggagttccatcaaccactg

SEQ ID NO: 3821390 - DNA, 25 bp, Homo sapien
aaaagcattggcatttctcttctgg

SEQ ID NO: 3821391 - DNA, 25 bp, Homo sapien
tctgggcattttcttcgtctcctag

SEQ ID NO: 3821392 - DNA, 25 bp, Homo sapien
gaaaggatcgagacatccacacagc

SEQ ID NO: 3821393 - DNA, 25 bp, Homo sapien
gactgaactgcaaaagcattggcat

SEQ ID NO: 3821394 - DNA, 25 bp, Homo sapien
tggctatttaccaataacaagtaac

SEQ ID NO: 3821395 - DNA, 25 bp, Homo sapien
agtggctatttaccaataacaagta

SEQ ID NO: 3821396 - DNA, 25 bp, Homo sapien
gtggctatttaccaataacaagtaa

SEQ ID NO: 3821397 - DNA, 25 bp, Homo sapien
gcgactccttaggtccgcttggaca

SEQ ID NO: 3821398 - DNA, 25 bp, Homo sapien
ttcacaactgcgactccttaggtcc

SEQ ID NO: 3821399 - DNA, 25 bp, Homo sapien
aactgcgactccttaggtccgcttg

SEQ ID NO: 3821400 - DNA, 25 bp, Homo sapien
tcacaactgcgactccttaggtccg

SEQ ID NO: 3821401 - DNA, 25 bp, Homo sapien
gctgattaacctgttcaccactgga

SEQ ID NO: 3821402 - DNA, 25 bp, Homo sapien
caagcgtgaactaccatgttgggcc

SEQ ID NO: 3821403 - DNA, 25 bp, Homo sapien
gtatttgagtgcctaatgtatgcca

SEQ ID NO: 3821404 - DNA, 25 bp, Homo sapien
cattttctatgttaggaaccaggaa

SEQ ID NO: 3821405 - DNA, 25 bp, Homo sapien
agtaagcagtgtctgtgccactacg

SEQ ID NO: 3821406 - DNA, 25 bp, Homo sapien
gttgaagctacagtaagcagtgtct

SEQ ID NO: 3821407 - DNA, 25 bp, Homo sapien
agctacagtaagcagtgtctgtgcc

SEQ ID NO: 3821408 - DNA, 25 bp, Homo sapien
taagcagtgtctgtgccactacgct

SEQ ID NO: 3821409 - DNA, 25 bp, Homo sapien
cagtggttggtaggtgatcgctttt

SEQ ID NO: 3821410 - DNA, 25 bp, Homo sapien
caccaccaggtatccgttatagcac

SEQ ID NO: 3821411 - DNA, 25 bp, Homo sapien
tacacacatgttactgttaagatgc

SEQ ID NO: 3821412 - DNA, 25 bp, Homo sapien
taagttgtactctttaagacctgca

SEQ ID NO: 3821413 - DNA, 25 bp, Homo sapien
ccccatcatggccggggaccggctc

SEQ ID NO: 3821414 - DNA, 25 bp, Homo sapien
gatgcagctaaattgacgtcttggc

SEQ ID NO: 3821415 - DNA, 25 bp, Homo sapien
tcattgacccatgatgcagctaaat

SEQ ID NO: 3821416 - DNA, 25 bp, Homo sapien
taaattgacgtcttggcccagacag

SEQ ID NO: 3821417 - DNA, 25 bp, Homo sapien
gacccatgatgcagctaaattgacg

SEQ ID NO: 3821418 - DNA, 25 bp, Homo sapien
gagccctgatcctatcacatgtgtg

SEQ ID NO: 3821419 - DNA, 25 bp, Homo sapien
ttatttcctgacactccacagagag

SEQ ID NO: 3821420 - DNA, 25 bp, Homo sapien
gagagtgtcagattgaggctcagac

SEQ ID NO: 3821421 - DNA, 25 bp, Homo sapien
caggcaaagggagttttttctctca

SEQ ID NO: 3821422 - DNA, 25 bp, Homo sapien
tactaataataccacacaaaataga

SEQ ID NO: 3821423 - DNA, 25 bp, Homo sapien
cattttatgttcgtaagagagtcaa

SEQ ID NO: 3821424 - DNA, 25 bp, Homo sapien
ttttacaataatggagacctcaatg

SEQ ID NO: 3821425 - DNA, 25 bp, Homo sapien
cctcaatgcagtggctctatcacag

SEQ ID NO: 3821426 - DNA, 25 bp, Homo sapien
tctggtattgaaaaccattcatcac

SEQ ID NO: 3821427 - DNA, 25 bp, Homo sapien
tgatccttcacaggagtcacgtagc

SEQ ID NO: 3821428 - DNA, 25 bp, Homo sapien
ggatctcaagaagcaggcgttcctg

SEQ ID NO: 3821429 - DNA, 25 bp, Homo sapien
aagaagcaggcgttcctggaactgt

SEQ ID NO: 3821430 - DNA, 25 bp, Homo sapien
atgtctccaaaggcgttcatggcca

SEQ ID NO: 3821431 - DNA, 25 bp, Homo sapien
tgtctccaaaggcgttcatggccat

SEQ ID NO: 3821432 - DNA, 25 bp, Homo sapien
catgtctccaaaggcgttcatggcc

SEQ ID NO: 3821433 - DNA, 25 bp, Homo sapien
gctgtattcctgattgtgctgctca

SEQ ID NO: 3821434 - DNA, 25 bp, Homo sapien
tgtattcctgattgtgctgctcagt

SEQ ID NO: 3821435 - DNA, 25 bp, Homo sapien
ccttggctgtattcctgattgtgct

SEQ ID NO: 3821436 - DNA, 25 bp, Homo sapien
tattcctgattgtgctgctcagtca

SEQ ID NO: 3821437 - DNA, 25 bp, Homo sapien
catgttctctcacactgctctcctc

SEQ ID NO: 3821438 - DNA, 25 bp, Homo sapien
cttcatgttctctcacactgctctc

SEQ ID NO: 3821439 - DNA, 25 bp, Homo sapien
ctgctctcctccatccttcttcatt

SEQ ID NO: 3821440 - DNA, 25 bp, Homo sapien
actgctctcctccatccttcttcat

SEQ ID NO: 3821441 - DNA, 25 bp, Homo sapien
cattgtgcgtctaaactgtggtcac

SEQ ID NO: 3821442 - DNA, 25 bp, Homo sapien
gccatataatctcttgtgctttgcc

SEQ ID NO: 3821443 - DNA, 25 bp, Homo sapien
ttgtgcgtctaaactgtggtcacgt

SEQ ID NO: 3821444 - DNA, 25 bp, Homo sapien
ggtccattgtgcgtctaaactgtgg

SEQ ID NO: 3821445 - DNA, 25 bp, Homo sapien
ttagtgtgcttccagtgtcagtgtg

SEQ ID NO: 3821446 - DNA, 25 bp, Homo sapien
cagtctgattctgagattccccggg

SEQ ID NO: 3821447 - DNA, 25 bp, Homo sapien
ctcttgattggaaagaccacctgct

SEQ ID NO: 3821448 - DNA, 25 bp, Homo sapien
gcaaaggctcttccgaatcttcagt

SEQ ID NO: 3821449 - DNA, 25 bp, Homo sapien
tggtcagcggtactacaaaaggatt

SEQ ID NO: 3821450 - DNA, 25 bp, Homo sapien
agcagttcgttcctcacacgcactg

SEQ ID NO: 3821451 - DNA, 25 bp, Homo sapien
tcaaacagcagttcgttcctcacac

SEQ ID NO: 3821452 - DNA, 25 bp, Homo sapien
aacagcagttcgttcctcacacgca

SEQ ID NO: 3821453 - DNA, 25 bp, Homo sapien
tttcctgcggggccttggccacgcg

SEQ ID NO: 3821454 - DNA, 25 bp, Homo sapien
ccctgccaccagatcactaggagat

SEQ ID NO: 3821455 - DNA, 25 bp, Homo sapien
caccagatcactaggagatattgca

SEQ ID NO: 3821456 - DNA, 25 bp, Homo sapien
gatcactaggagatattgcaatcat

SEQ ID NO: 3821457 - DNA, 25 bp, Homo sapien
tgccaccagatcactaggagatatt

SEQ ID NO: 3821458 - DNA, 25 bp, Homo sapien
gcaagaagcaggcaacaactggcca

SEQ ID NO: 3821459 - DNA, 25 bp, Homo sapien
aagcaagaagcaggcaacaactggc

SEQ ID NO: 3821460 - DNA, 25 bp, Homo sapien
aagaagcaggcaacaactggccatg

SEQ ID NO: 3821461 - DNA, 25 bp, Homo sapien
caagaagcaggcaacaactggccat

SEQ ID NO: 3821462 - DNA, 25 bp, Homo sapien
gtagacatgctcacagatgatccat

SEQ ID NO: 3821463 - DNA, 25 bp, Homo sapien
ctccttgtagacatgctcacagatg

SEQ ID NO: 3821464 - DNA, 25 bp, Homo sapien
tgtcctccttgtagacatgctcaca

SEQ ID NO: 3821465 - DNA, 25 bp, Homo sapien
atgctcacagatgatccatgctccc

SEQ ID NO: 3821466 - DNA, 25 bp, Homo sapien
aattaggcccttgcttgcttgcata

SEQ ID NO: 3821467 - DNA, 25 bp, Homo sapien
caaaaattcgaattaggcccttgct

SEQ ID NO: 3821468 - DNA, 25 bp, Homo sapien
tgtcaatacctcagcatttttagtg

SEQ ID NO: 3821469 - DNA, 25 bp, Homo sapien
cagcatttttagtgattgagataac

SEQ ID NO: 3821470 - DNA, 25 bp, Homo sapien
tgactcctttggtaacacatgccga

SEQ ID NO: 3821471 - DNA, 25 bp, Homo sapien
taagtctcctagaaaacatttgcag

SEQ ID NO: 3821472 - DNA, 25 bp, Homo sapien
acatgccgatatataccactcaagg

SEQ ID NO: 3821473 - DNA, 25 bp, Homo sapien
cactcaaggcctgttggattaaact

SEQ ID NO: 3821474 - DNA, 25 bp, Homo sapien
ctcccaatagcagtacgtagcagga

SEQ ID NO: 3821475 - DNA, 25 bp, Homo sapien
cccaatagcagtacgtagcaggatc

SEQ ID NO: 3821476 - DNA, 25 bp, Homo sapien
tagcagtacgtagcaggatcccact

SEQ ID NO: 3821477 - DNA, 25 bp, Homo sapien
caatagcagtacgtagcaggatccc

SEQ ID NO: 3821478 - DNA, 25 bp, Homo sapien
tagaaatctttgacccattcatcag

SEQ ID NO: 3821479 - DNA, 25 bp, Homo sapien
gcggtaatggagatgtacttgcaag

SEQ ID NO: 3821480 - DNA, 25 bp, Homo sapien
tgtattggtttttccgactgaagcg

SEQ ID NO: 3821481 - DNA, 25 bp, Homo sapien
tcatcagactctgaccactctaaag

SEQ ID NO: 3821482 - DNA, 25 bp, Homo sapien
acacctgatcggctacaactctgaa

SEQ ID NO: 3821483 - DNA, 25 bp, Homo sapien
tagggaacctgtggtcctccactcc

SEQ ID NO: 3821484 - DNA, 25 bp, Homo sapien
actacaggcacgcatgccgctgcac

SEQ ID NO: 3821485 - DNA, 25 bp, Homo sapien
tccttagggaacctgtggtcctcca

SEQ ID NO: 3821486 - DNA, 25 bp, Homo sapien
gttgaataccaacacagtagacagt

SEQ ID NO: 3821487 - DNA, 25 bp, Homo sapien
ggacaaacagaataaggactaggag

SEQ ID NO: 3821488 - DNA, 25 bp, Homo sapien
ggaggcttaacattgggaaaccaca

SEQ ID NO: 3821489 - DNA, 25 bp, Homo sapien
gattacctaagggagactactgact

SEQ ID NO: 3821490 - DNA, 25 bp, Homo sapien
tcgtctgggaatgtgggaggcatct

SEQ ID NO: 3821491 - DNA, 25 bp, Homo sapien
gtggccaggctgtgtaaccgcatcc

SEQ ID NO: 3821492 - DNA, 25 bp, Homo sapien
gaacgcaggtcgtctgggaatgtgg

SEQ ID NO: 3821493 - DNA, 25 bp, Homo sapien
gaggcatctcagctctcagtgcctg

SEQ ID NO: 3821494 - DNA, 25 bp, Homo sapien
acctttctcacggagatgaagagac

SEQ ID NO: 3821495 - DNA, 25 bp, Homo sapien
tcacttcgggggcacctttctcacg

SEQ ID NO: 3821496 - DNA, 25 bp, Homo sapien
ctctgctgggactccacatgtctgg

SEQ ID NO: 3821497 - DNA, 25 bp, Homo sapien
ggactccacatgtctggctcctgca

SEQ ID NO: 3821498 - DNA, 25 bp, Homo sapien
tgagaaggtggcaggcggcacagcc

SEQ ID NO: 3821499 - DNA, 25 bp, Homo sapien
gagaaggtggcaggcggcacagcca

SEQ ID NO: 3821500 - DNA, 25 bp, Homo sapien
gatgggaggccagttggtgagaagg

SEQ ID NO: 3821501 - DNA, 25 bp, Homo sapien
cacagatgggaggccagttggtgag

SEQ ID NO: 3821502 - DNA, 25 bp, Homo sapien
ggtctcgtttctttggtggaaggca

SEQ ID NO: 3821503 - DNA, 25 bp, Homo sapien
gtctcgtttctttggtggaaggcat

SEQ ID NO: 3821504 - DNA, 25 bp, Homo sapien
ctcgtttctttggtggaaggcattc

SEQ ID NO: 3821505 - DNA, 25 bp, Homo sapien
tcgtttctttggtggaaggcattcc

SEQ ID NO: 3821506 - DNA, 25 bp, Homo sapien
gatgggaggccagttggtgagaagg

SEQ ID NO: 3821507 - DNA, 25 bp, Homo sapien
tgagaaggtggcaggcggcacagcc

SEQ ID NO: 3821508 - DNA, 25 bp, Homo sapien
gagaaggtggcaggcggcacagcca

SEQ ID NO: 3821509 - DNA, 25 bp, Homo sapien
cacagatgggaggccagttggtgag

SEQ ID NO: 3821510 - DNA, 25 bp, Homo sapien
ggcatcactggaggatgtctggtta

SEQ ID NO: 3821511 - DNA, 25 bp, Homo sapien
agcccctcgggaccattcagaggca

SEQ ID NO: 3821512 - DNA, 25 bp, Homo sapien
ttcagaggcatcactggaggatgtc

SEQ ID NO: 3821513 - DNA, 25 bp, Homo sapien
cagaggcatcactggaggatgtctg

SEQ ID NO: 3821514 - DNA, 25 bp, Homo sapien
tttggtggaaggcattccaccttct

SEQ ID NO: 3821515 - DNA, 25 bp, Homo sapien
ctttggtggaaggcattccaccttc

SEQ ID NO: 3821516 - DNA, 25 bp, Homo sapien
tggggaagggccgtggtagcaggtg

SEQ ID NO: 3821517 - DNA, 25 bp, Homo sapien
gagactggggaagggccgtggtagc

SEQ ID NO: 3821518 - DNA, 25 bp, Homo sapien
agactggggaagggccgtggtagca

SEQ ID NO: 3821519 - DNA, 25 bp, Homo sapien
ggaagggccgtggtagcaggtgcac

SEQ ID NO: 3821520 - DNA, 25 bp, Homo sapien
atggcatttgtgactgtgttggtca

SEQ ID NO: 3821521 - DNA, 25 bp, Homo sapien
tgatggcatttgtgactgtgttggt

SEQ ID NO: 3821522 - DNA, 25 bp, Homo sapien
gatggcatttgtgactgtgttggtc

SEQ ID NO: 3821523 - DNA, 25 bp, Homo sapien
gtgatggcatttgtgactgtgttgg

SEQ ID NO: 3821524 - DNA, 25 bp, Homo sapien
ctccagtctccttggcatgtcccac

SEQ ID NO: 3821525 - DNA, 25 bp, Homo sapien
ttcaccacttcctccacggcatgaa

SEQ ID NO: 3821526 - DNA, 25 bp, Homo sapien
cagtctccttggcatgtcccaccac

SEQ ID NO: 3821527 - DNA, 25 bp, Homo sapien
gtctccttggcatgtcccaccacct

SEQ ID NO: 3821528 - DNA, 25 bp, Homo sapien
catctttagaatgggaatctgttgg

SEQ ID NO: 3821529 - DNA, 25 bp, Homo sapien
tcacgggggcggcaagtccagcgga

SEQ ID NO: 3821530 - DNA, 25 bp, Homo sapien
ctttagaatgggaatctgttgggat

SEQ ID NO: 3821531 - DNA, 25 bp, Homo sapien
ccaacaccaggtcacgggggcggca

SEQ ID NO: 3821532 - DNA, 25 bp, Homo sapien
gtggccttctcggtgcggtgggcca

SEQ ID NO: 3821533 - DNA, 25 bp, Homo sapien
cggtggccttctcggtgcggtgggc

SEQ ID NO: 3821534 - DNA, 25 bp, Homo sapien
ctcggtggccttctcggtgcggtgg

SEQ ID NO: 3821535 - DNA, 25 bp, Homo sapien
ggccttctcggtgcggtgggccagg

SEQ ID NO: 3821536 - DNA, 25 bp, Homo sapien
agcctgttgtcagagctcatccaca

SEQ ID NO: 3821537 - DNA, 25 bp, Homo sapien
gacccagacagcctgttgtcagagc

SEQ ID NO: 3821538 - DNA, 25 bp, Homo sapien
gcccaccacggcctctggggacaac

SEQ ID NO: 3821539 - DNA, 25 bp, Homo sapien
ttgtcagagctcatccacacagcag

SEQ ID NO: 3821540 - DNA, 25 bp, Homo sapien
tagaggctgccggctctgctctttc

SEQ ID NO: 3821541 - DNA, 25 bp, Homo sapien
atgactagaggctgccggctctgct

SEQ ID NO: 3821542 - DNA, 25 bp, Homo sapien
tgactagaggctgccggctctgctc

SEQ ID NO: 3821543 - DNA, 25 bp, Homo sapien
aggctgccggctctgctctttcaaa

SEQ ID NO: 3821544 - DNA, 25 bp, Homo sapien
taaaatatgtcttatggtcagaaaa

SEQ ID NO: 3821545 - DNA, 25 bp, Homo sapien
gtactgaaaatgctattactagctg

SEQ ID NO: 3821546 - DNA, 25 bp, Homo sapien
gagactaacacatccaccttggcaa

SEQ ID NO: 3821547 - DNA, 25 bp, Homo sapien
acagatactacacgcactcgtcggg

SEQ ID NO: 3821548 - DNA, 25 bp, Homo sapien
tcagtgcagggtagtggggccagaa

SEQ ID NO: 3821549 - DNA, 25 bp, Homo sapien
ccagctccagagatcgcacacggga

SEQ ID NO: 3821550 - DNA, 25 bp, Homo sapien
ctccagagatcgcacacgggaaagg

SEQ ID NO: 3821551 - DNA, 25 bp, Homo sapien
cagtgcagggtagtggggccagaaa

SEQ ID NO: 3821552 - DNA, 25 bp, Homo sapien
tggcccacttaggattctgggtctc

SEQ ID NO: 3821553 - DNA, 25 bp, Homo sapien
ggcccacttaggattctgggtctca

SEQ ID NO: 3821554 - DNA, 25 bp, Homo sapien
ctggcccacttaggattctgggtct

SEQ ID NO: 3821555 - DNA, 25 bp, Homo sapien
gcccacttaggattctgggtctcac

SEQ ID NO: 3821556 - DNA, 25 bp, Homo sapien
ttcccacgcatgttttggatcgact

SEQ ID NO: 3821557 - DNA, 25 bp, Homo sapien
gttcccacgcatgttttggatcgac

SEQ ID NO: 3821558 - DNA, 25 bp, Homo sapien
cccacgcatgttttggatcgactgc

SEQ ID NO: 3821559 - DNA, 25 bp, Homo sapien
tcccacgcatgttttggatcgactg

SEQ ID NO: 3821560 - DNA, 25 bp, Homo sapien
tcagctgggacttgcttttactgct

SEQ ID NO: 3821561 - DNA, 25 bp, Homo sapien
ttttactgctctcgcatgactgcag

SEQ ID NO: 3821562 - DNA, 25 bp, Homo sapien
ctggtcagctgggacttgcttttac

SEQ ID NO: 3821563 - DNA, 25 bp, Homo sapien
gggacttgcttttactgctctcgca

SEQ ID NO: 3821564 - DNA, 25 bp, Homo sapien
cctaagcttgaataataggtgagca

SEQ ID NO: 3821565 - DNA, 25 bp, Homo sapien
atgtggctagggatggccactttcc

SEQ ID NO: 3821566 - DNA, 25 bp, Homo sapien
tcttcatataatcacctaagcttga

SEQ ID NO: 3821567 - DNA, 25 bp, Homo sapien
gatgtggctagggatggccactttc

SEQ ID NO: 3821568 - DNA, 25 bp, Homo sapien
tcgctttaagagcatgccctgttta

SEQ ID NO: 3821569 - DNA, 25 bp, Homo sapien
cttcgctttaagagcatgccctgtt

SEQ ID NO: 3821570 - DNA, 25 bp, Homo sapien
ttcgctttaagagcatgccctgttt

SEQ ID NO: 3821571 - DNA, 25 bp, Homo sapien
caggtatgctcaaagatctatctgc

SEQ ID NO: 3821572 - DNA, 25 bp, Homo sapien
tgttcatcaggtatgctcaaagatc

SEQ ID NO: 3821573 - DNA, 25 bp, Homo sapien
tgtaactgttcatcaggtatgctca

SEQ ID NO: 3821574 - DNA, 25 bp, Homo sapien
cgcaaatgagtgtaactgttcatca

SEQ ID NO: 3821575 - DNA, 25 bp, Homo sapien
gaatcatactaattaaacctgagaa

SEQ ID NO: 3821576 - DNA, 25 bp, Homo sapien
ggccaacactgttctgaatcatact

SEQ ID NO: 3821577 - DNA, 25 bp, Homo sapien
ttctgaatcatactaattaaacctg

SEQ ID NO: 3821578 - DNA, 25 bp, Homo sapien
cactgttctgaatcatactaattaa

SEQ ID NO: 3821579 - DNA, 25 bp, Homo sapien
tactgctaaactctctgcaatgcac

SEQ ID NO: 3821580 - DNA, 25 bp, Homo sapien
tatctagcccataatatcaacagtg

SEQ ID NO: 3821581 - DNA, 25 bp, Homo sapien
tggtagaggccatgaatactgctaa

SEQ ID NO: 3821582 - DNA, 25 bp, Homo sapien
tcaacagtggtaaggctgtgaaatc

SEQ ID NO: 3821583 - DNA, 25 bp, Homo sapien
tgtgtgatatgatgaggtatctcca

SEQ ID NO: 3821584 - DNA, 25 bp, Homo sapien
atatgatgaggtatctccaaggtca

SEQ ID NO: 3821585 - DNA, 25 bp, Homo sapien
ctttgtgtgatatgatgaggtatct

SEQ ID NO: 3821586 - DNA, 25 bp, Homo sapien
tatgatgaggtatctccaaggtcac

SEQ ID NO: 3821587 - DNA, 25 bp, Homo sapien
ccgattttcctaaaaggcttctcag

SEQ ID NO: 3821588 - DNA, 25 bp, Homo sapien
cgattttcctaaaaggcttctcagt

SEQ ID NO: 3821589 - DNA, 25 bp, Homo sapien
gattttcctaaaaggcttctcagtg

SEQ ID NO: 3821590 - DNA, 25 bp, Homo sapien
attttcctaaaaggcttctcagtgc

SEQ ID NO: 3821591 - DNA, 25 bp, Homo sapien
taaaaaggctagtgcatttgaaaca

SEQ ID NO: 3821592 - DNA, 25 bp, Homo sapien
cattattatgagtgtaaacttgcca

SEQ ID NO: 3821593 - DNA, 25 bp, Homo sapien
ttactcaataggtcccaaagctcag

SEQ ID NO: 3821594 - DNA, 25 bp, Homo sapien
gacaattgaattagctaaaaaggct

SEQ ID NO: 3821595 - DNA, 25 bp, Homo sapien
tattgttgactgaaacgctcagtag

SEQ ID NO: 3821596 - DNA, 25 bp, Homo sapien
tcatcaaggaatattgtcgaacacg

SEQ ID NO: 3821597 - DNA, 25 bp, Homo sapien
tcgaacacgagctgtattgttgact

SEQ ID NO: 3821598 - DNA, 25 bp, Homo sapien
ttgtaagataatgctggatggctgt

SEQ ID NO: 3821599 - DNA, 25 bp, Homo sapien
gatgcggatgcccacgcactgactt

SEQ ID NO: 3821600 - DNA, 25 bp, Homo sapien
ccattggatgcggatgcccacgcac

SEQ ID NO: 3821601 - DNA, 25 bp, Homo sapien
tgcggatgcccacgcactgacttct

SEQ ID NO: 3821602 - DNA, 25 bp, Homo sapien
ttggatgcggatgcccacgcactga

SEQ ID NO: 3821603 - DNA, 25 bp, Homo sapien
gtacagttgcttcttcttatttcta

SEQ ID NO: 3821604 - DNA, 25 bp, Homo sapien
acggtttgtacagttgcttcttctt

SEQ ID NO: 3821605 - DNA, 25 bp, Homo sapien
cggtttgtacagttgcttcttctta

SEQ ID NO: 3821606 - DNA, 25 bp, Homo sapien
cagttgcttcttcttatttctacaa

SEQ ID NO: 3821607 - DNA, 25 bp, Homo sapien
gagttcctctggaatattgtgcttg

SEQ ID NO: 3821608 - DNA, 25 bp, Homo sapien
ggattggcagaagggttaaactcca

SEQ ID NO: 3821609 - DNA, 25 bp, Homo sapien
tgcctctggattggcagaagggtta

SEQ ID NO: 3821610 - DNA, 25 bp, Homo sapien
tattgtgcttgcctctggattggca

SEQ ID NO: 3821611 - DNA, 25 bp, Homo sapien
gagttcctctggaatattgtgcttg

SEQ ID NO: 3821612 - DNA, 25 bp, Homo sapien
cttgcctctggattggcagaaaggt

SEQ ID NO: 3821613 - DNA, 25 bp, Homo sapien
ggattggcagaaaggttaaactcca

SEQ ID NO: 3821614 - DNA, 25 bp, Homo sapien
tattgtgcttgcctctggattggca

SEQ ID NO: 3821615 - DNA, 25 bp, Homo sapien
tgtggaggtcctcaccaacttcaac

SEQ ID NO: 3821616 - DNA, 25 bp, Homo sapien
atgtggaggtcctcaccaacttcaa

SEQ ID NO: 3821617 - DNA, 25 bp, Homo sapien
gcatgtggaggtcctcaccaacttc

SEQ ID NO: 3821618 - DNA, 25 bp, Homo sapien
catgtggaggtcctcaccaacttca

SEQ ID NO: 3821619 - DNA, 25 bp, Homo sapien
ctcgaggctgacgctagggtgcaca

SEQ ID NO: 3821620 - DNA, 25 bp, Homo sapien
tcgaggctgacgctagggtgcacac

SEQ ID NO: 3821621 - DNA, 25 bp, Homo sapien
cactgtgctatgctcatttaaccct

SEQ ID NO: 3821622 - DNA, 25 bp, Homo sapien
tgaattccccaattgcttaagcatg

SEQ ID NO: 3821623 - DNA, 25 bp, Homo sapien
gaatactcgacatctggcaagtagt

SEQ ID NO: 3821624 - DNA, 25 bp, Homo sapien
ccataaagtggcttaccacagtcct

SEQ ID NO: 3821625 - DNA, 25 bp, Homo sapien
gaaatagtcccaactctcaatgagt

SEQ ID NO: 3821626 - DNA, 25 bp, Homo sapien
caggcactgtatgtgtgaaatagtc

SEQ ID NO: 3821627 - DNA, 25 bp, Homo sapien
tatgaacctgggatacaaacccacc

SEQ ID NO: 3821628 - DNA, 25 bp, Homo sapien
tttctgagaccatactgctggacag

SEQ ID NO: 3821629 - DNA, 25 bp, Homo sapien
taaatcaagccattaagcgtaactg

SEQ ID NO: 3821630 - DNA, 25 bp, Homo sapien
gagcaactttgaatctatggttaca

SEQ ID NO: 3821631 - DNA, 25 bp, Homo sapien
tataaatctctgtaggctaagtcca

SEQ ID NO: 3821632 - DNA, 25 bp, Homo sapien
gactgccttgagaagttgtgtatag

SEQ ID NO: 3821633 - DNA, 25 bp, Homo sapien
cactgcacccggctagacttaaaaa

SEQ ID NO: 3821634 - DNA, 25 bp, Homo sapien
tcaaggagttcaattataaataagc

SEQ ID NO: 3821635 - DNA, 25 bp, Homo sapien
gggtaacttgaaaagcaattcgagc

SEQ ID NO: 3821636 - DNA, 25 bp, Homo sapien
caaataatgtcttccctaaaagtgg

SEQ ID NO: 3821637 - DNA, 25 bp, Homo sapien
catgaacacaaatgcgcagtctcct

SEQ ID NO: 3821638 - DNA, 25 bp, Homo sapien
gtctcctctgcgatcggtagctaag

SEQ ID NO: 3821639 - DNA, 25 bp, Homo sapien
taatgttccaaatgaggccactgct

SEQ ID NO: 3821640 - DNA, 25 bp, Homo sapien
taactagagaccttccactgtaatg

SEQ ID NO: 3821641 - DNA, 25 bp, Homo sapien
tgatgagtcatcaaatgggagaaat

SEQ ID NO: 3821642 - DNA, 25 bp, Homo sapien
agctgatgagtcatcaaatgggaga

SEQ ID NO: 3821643 - DNA, 25 bp, Homo sapien
gctagaaagccatgtgggggcagct

SEQ ID NO: 3821644 - DNA, 25 bp, Homo sapien
ctgtgagctagaaagccatgtgggg

SEQ ID NO: 3821645 - DNA, 25 bp, Homo sapien
aatcattttcaattccactgcccag

SEQ ID NO: 3821646 - DNA, 25 bp, Homo sapien
aaaatcattttcaattccactgccc

SEQ ID NO: 3821647 - DNA, 25 bp, Homo sapien
ttcaattccactgcccagttataat

SEQ ID NO: 3821648 - DNA, 25 bp, Homo sapien
cattttcaattccactgcccagtta

SEQ ID NO: 3821649 - DNA, 25 bp, Homo sapien
cacatcacactctgacatacgggag

SEQ ID NO: 3821650 - DNA, 25 bp, Homo sapien
tatggattaggacagtgggctcatg

SEQ ID NO: 3821651 - DNA, 25 bp, Homo sapien
tagctaagatcatgggcgcgcaaca

SEQ ID NO: 3821652 - DNA, 25 bp, Homo sapien
gcgagaaaaaagatcccctagagcc

SEQ ID NO: 3821653 - DNA, 25 bp, Homo sapien
acatggatactggatatctaatccc

SEQ ID NO: 3821654 - DNA, 25 bp, Homo sapien
gaattgatgaatagtagttcataaa

SEQ ID NO: 3821655 - DNA, 25 bp, Homo sapien
ttaaaacattgctctgacagagact

SEQ ID NO: 3821656 - DNA, 25 bp, Homo sapien
aatgaattgatgaatagtagttcat

SEQ ID NO: 3821657 - DNA, 25 bp, Homo sapien
tttaaaacattgctctgacagagac

SEQ ID NO: 3821658 - DNA, 25 bp, Homo sapien
tccaacctttgttacacatcagaga

SEQ ID NO: 3821659 - DNA, 25 bp, Homo sapien
ggattcgtcttccaattgtctctga

SEQ ID NO: 3821660 - DNA, 25 bp, Homo sapien
aaagaagaggtgacaatagagtaga

SEQ ID NO: 3821661 - DNA, 25 bp, Homo sapien
tctatccaacctttgttacacatca

SEQ ID NO: 3821662 - DNA, 25 bp, Homo sapien
gagagaagacgttcgcacagaatca

SEQ ID NO: 3821663 - DNA, 25 bp, Homo sapien
aagacgttcgcacagaatcatctcc

SEQ ID NO: 3821664 - DNA, 25 bp, Homo sapien
aaaggagagaagacgttcgcacaga

SEQ ID NO: 3821665 - DNA, 25 bp, Homo sapien
agaaaggagagaagacgttcgcaca

SEQ ID NO: 3821666 - DNA, 25 bp, Homo sapien
gcattcgaccagttttcaagtctat

SEQ ID NO: 3821667 - DNA, 25 bp, Homo sapien
cattcgaccagttttcaagtctatt

SEQ ID NO: 3821668 - DNA, 25 bp, Homo sapien
tttttcctcctttggcatcaacagc

SEQ ID NO: 3821669 - DNA, 25 bp, Homo sapien
ctatttgtttttcctcctttggcat

SEQ ID NO: 3821670 - DNA, 25 bp, Homo sapien
ctctgacccaagtggtttggaattg

SEQ ID NO: 3821671 - DNA, 25 bp, Homo sapien
ctgacccaagtggtttggaattgga

SEQ ID NO: 3821672 - DNA, 25 bp, Homo sapien
tctgacccaagtggtttggaattgg

SEQ ID NO: 3821673 - DNA, 25 bp, Homo sapien
cagcgtctttgtcatacagcacacc

SEQ ID NO: 3821674 - DNA, 25 bp, Homo sapien
agcgtctttgtcatacagcacaccc

SEQ ID NO: 3821675 - DNA, 25 bp, Homo sapien
tgctccttcttatttaaacagcact

SEQ ID NO: 3821676 - DNA, 25 bp, Homo sapien
gctccttcttatttaaacagcactt

SEQ ID NO: 3821677 - DNA, 25 bp, Homo sapien
aaacaggcacataaaccagctgctc

SEQ ID NO: 3821678 - DNA, 25 bp, Homo sapien
cagaaacaggcacataaaccagctg

SEQ ID NO: 3821679 - DNA, 25 bp, Homo sapien
cttttatctttgaagtgtgctcctc

SEQ ID NO: 3821680 - DNA, 25 bp, Homo sapien
cacctgccggtcacatttgatgttt

SEQ ID NO: 3821681 - DNA, 25 bp, Homo sapien
tggcatgtgaatttggcttttatct

SEQ ID NO: 3821682 - DNA, 25 bp, Homo sapien
gatgtttgtttggatatcctccggg

SEQ ID NO: 3821683 - DNA, 25 bp, Homo sapien
gtccactaagcacatcacttaggaa

SEQ ID NO: 3821684 - DNA, 25 bp, Homo sapien
ttgtccactaagcacatcacttagg

SEQ ID NO: 3821685 - DNA, 25 bp, Homo sapien
actcttgtccactaagcacatcact

SEQ ID NO: 3821686 - DNA, 25 bp, Homo sapien
tcttgtccactaagcacatcactta

SEQ ID NO: 3821687 - DNA, 25 bp, Homo sapien
ggatataagggtgaaaagtttgcca

SEQ ID NO: 3821688 - DNA, 25 bp, Homo sapien
taagggtgaaaagtttgccatgaga

SEQ ID NO: 3821689 - DNA, 25 bp, Homo sapien
ggtgaaaagtttgccatgagaggcc

SEQ ID NO: 3821690 - DNA, 25 bp, Homo sapien
tgccaggatataagggtgaaaagtt

SEQ ID NO: 3821691 - DNA, 25 bp, Homo sapien
ccattccagaaaggtagaacagttt

SEQ ID NO: 3821692 - DNA, 25 bp, Homo sapien
taaaatggcccagattgtggatttc

SEQ ID NO: 3821693 - DNA, 25 bp, Homo sapien
cagaaaggtagaacagtttggcaac

SEQ ID NO: 3821694 - DNA, 25 bp, Homo sapien
tccatgcaccattccagaaaggtag

SEQ ID NO: 3821695 - DNA, 25 bp, Homo sapien
cccaaagctggcatctataagcatc

SEQ ID NO: 3821696 - DNA, 25 bp, Homo sapien
agctggcatctataagcatcagtac

SEQ ID NO: 3821697 - DNA, 25 bp, Homo sapien
caaacccaaagctggcatctataag

SEQ ID NO: 3821698 - DNA, 25 bp, Homo sapien
caaagctggcatctataagcatcag

SEQ ID NO: 3821699 - DNA, 25 bp, Homo sapien
tgctaatgtaaaagatcatagaata

SEQ ID NO: 3821700 - DNA, 25 bp, Homo sapien
aaagatcatagaatatcagagatag

SEQ ID NO: 3821701 - DNA, 25 bp, Homo sapien
tttccacacgctgagtactatctaa

SEQ ID NO: 3821702 - DNA, 25 bp, Homo sapien
cctgtgatctgcttttagattttgg

SEQ ID NO: 3821703 - DNA, 25 bp, Homo sapien
catgttaatgtcacacccacattca

SEQ ID NO: 3821704 - DNA, 25 bp, Homo sapien
tcatcatgttaatgtcacacccaca

SEQ ID NO: 3821705 - DNA, 25 bp, Homo sapien
gatcaatcatcatgttaatgtcaca

SEQ ID NO: 3821706 - DNA, 25 bp, Homo sapien
gccagatcaatcatcatgttaatgt

SEQ ID NO: 3821707 - DNA, 25 bp, Homo sapien
cagggcctctgatctcggtgaactt

SEQ ID NO: 3821708 - DNA, 25 bp, Homo sapien
cacgatcgtcacagggcctctgatc

SEQ ID NO: 3821709 - DNA, 25 bp, Homo sapien
ctgacacgatcgtcacagggcctct

SEQ ID NO: 3821710 - DNA, 25 bp, Homo sapien
tcgtcacagggcctctgatctcggt

SEQ ID NO: 3821711 - DNA, 25 bp, Homo sapien
gaggcattatatcaaagtgctcttt

SEQ ID NO: 3821712 - DNA, 25 bp, Homo sapien
ccaggtgaagttccgaatgaggcat

SEQ ID NO: 3821713 - DNA, 25 bp, Homo sapien
ctgccaggtgaagttccgaatgagg

SEQ ID NO: 3821714 - DNA, 25 bp, Homo sapien
gcattatatcaaagtgctctttcca

SEQ ID NO: 3821715 - DNA, 25 bp, Homo sapien
cggtattggtggcggctctagtgga

SEQ ID NO: 3821716 - DNA, 25 bp, Homo sapien
gtggagttccatcaaccactggaat

SEQ ID NO: 3821717 - DNA, 25 bp, Homo sapien
gtggcggctctagtggagttccatc

SEQ ID NO: 3821718 - DNA, 25 bp, Homo sapien
tctagtggagttccatcaaccactg

SEQ ID NO: 3821719 - DNA, 25 bp, Homo sapien
aaaagcattggcatttctcttctgg

SEQ ID NO: 3821720 - DNA, 25 bp, Homo sapien
tctgggcattttcttcgtctcctag

SEQ ID NO: 3821721 - DNA, 25 bp, Homo sapien
gaaaggatcgagacatccacacagc

SEQ ID NO: 3821722 - DNA, 25 bp, Homo sapien
gactgaactgcaaaagcattggcat

SEQ ID NO: 3821723 - DNA, 25 bp, Homo sapien
tgaacagttctttacgatggcacag

SEQ ID NO: 3821724 - DNA, 25 bp, Homo sapien
tgtccggcctatgccggcactgcag

SEQ ID NO: 3821725 - DNA, 25 bp, Homo sapien
actgcagtgaacaaccatgggtcct

SEQ ID NO: 3821726 - DNA, 25 bp, Homo sapien
gaacacgacatccacacataggaac

SEQ ID NO: 3821727 - DNA, 25 bp, Homo sapien
aaagtcatctatggtgctcagcagt

SEQ ID NO: 3821728 - DNA, 25 bp, Homo sapien
ttccaagaggaacgcgtgttgaatc

SEQ ID NO: 3821729 - DNA, 25 bp, Homo sapien
tctccaggaatacacggaagtgttt

SEQ ID NO: 3821730 - DNA, 25 bp, Homo sapien
cagcagtggtccttgagtagcgata

SEQ ID NO: 3821731 - DNA, 25 bp, Homo sapien
gagtgatattatcctgcaaatctga

SEQ ID NO: 3821732 - DNA, 25 bp, Homo sapien
gaatgatatcattagcatccaggta

SEQ ID NO: 3821733 - DNA, 25 bp, Homo sapien
gaagtatcctatagtttgcaactga

SEQ ID NO: 3821734 - DNA, 25 bp, Homo sapien
aatttctgctagaagtggcatgggc

SEQ ID NO: 3821735 - DNA, 25 bp, Homo sapien
cttcactgctccaggagttccttct

SEQ ID NO: 3821736 - DNA, 25 bp, Homo sapien
taaccttcactgctccaggagttcc

SEQ ID NO: 3821737 - DNA, 25 bp, Homo sapien
accttcactgctccaggagttcctt

SEQ ID NO: 3821738 - DNA, 25 bp, Homo sapien
actgctccaggagttccttcttcac

SEQ ID NO: 3821739 - DNA, 25 bp, Homo sapien
ctgatacagacatctgaagctctgg

SEQ ID NO: 3821740 - DNA, 25 bp, Homo sapien
tctgaagctctggttccaccaccat

SEQ ID NO: 3821741 - DNA, 25 bp, Homo sapien
atacagacatctgaagctctggttc

SEQ ID NO: 3821742 - DNA, 25 bp, Homo sapien
atctgaagctctggttccaccacca

SEQ ID NO: 3821743 - DNA, 25 bp, Homo sapien
taatatgagtcttcaggaacctttt

SEQ ID NO: 3821744 - DNA, 25 bp, Homo sapien
gctttcttaatatgagtcttcagga

SEQ ID NO: 3821745 - DNA, 25 bp, Homo sapien
tttagctttcttaatatgagtcttc

SEQ ID NO: 3821746 - DNA, 25 bp, Homo sapien
ttcttaatatgagtcttcaggaacc

SEQ ID NO: 3821747 - DNA, 25 bp, Homo sapien
atggaagaatatctcggtatctgtt

SEQ ID NO: 3821748 - DNA, 25 bp, Homo sapien
tggaagaatatctcggtatctgttt

SEQ ID NO: 3821749 - DNA, 25 bp, Homo sapien
ggaagaatatctcggtatctgtttt

SEQ ID NO: 3821750 - DNA, 25 bp, Homo sapien
ctgttgcttggttgattcccagagt

SEQ ID NO: 3821751 - DNA, 25 bp, Homo sapien
caccaggcagattcttaagttctaa

SEQ ID NO: 3821752 - DNA, 25 bp, Homo sapien
actcaccaggcagattcttaagttc

SEQ ID NO: 3821753 - DNA, 25 bp, Homo sapien
gcttggttgattcccagagttgaac

SEQ ID NO: 3821754 - DNA, 25 bp, Homo sapien
gccaactgatctagttctccttcag

SEQ ID NO: 3821755 - DNA, 25 bp, Homo sapien
gatggctgtctgctcatgaaaattg

SEQ ID NO: 3821756 - DNA, 25 bp, Homo sapien
aattcctgcatgatatcatacgctg

SEQ ID NO: 3821757 - DNA, 25 bp, Homo sapien
ttgaatattaatggccgaatctgag

SEQ ID NO: 3821758 - DNA, 25 bp, Homo sapien
gtgttccacctttgctagtacaaaa

SEQ ID NO: 3821759 - DNA, 25 bp, Homo sapien
tgttccacctttgctagtacaaaag

SEQ ID NO: 3821760 - DNA, 25 bp, Homo sapien
ttaccttgcaaactagtcgcctcag

SEQ ID NO: 3821761 - DNA, 25 bp, Homo sapien
ttgcaaactagtcgcctcagatcca

SEQ ID NO: 3821762 - DNA, 25 bp, Homo sapien
aaactagtcgcctcagatccatcca

SEQ ID NO: 3821763 - DNA, 25 bp, Homo sapien
tacttttaccttgcaaactagtcgc

SEQ ID NO: 3821764 - DNA, 25 bp, Homo sapien
tatgtgggaaattccgaagagaaag

SEQ ID NO: 3821765 - DNA, 25 bp, Homo sapien
ttctgaaggctcttcaaaaacatcc

SEQ ID NO: 3821766 - DNA, 25 bp, Homo sapien
taatcattatgtgggaaattccgaa

SEQ ID NO: 3821767 - DNA, 25 bp, Homo sapien
tgaaggctcttcaaaaacatcctca

SEQ ID NO: 3821768 - DNA, 25 bp, Homo sapien
gcttcagagtcatttccctcataat

SEQ ID NO: 3821769 - DNA, 25 bp, Homo sapien
tgatctaggtgtgttttcctgactt

SEQ ID NO: 3821770 - DNA, 25 bp, Homo sapien
ggaaaaactgatcaaatagaaaaca

SEQ ID NO: 3821771 - DNA, 25 bp, Homo sapien
catataaatgcacatgttactttat

SEQ ID NO: 3821772 - DNA, 25 bp, Homo sapien
tgcatattctagcataactgattta

SEQ ID NO: 3821773 - DNA, 25 bp, Homo sapien
aaatcacagctctcatacagacata

SEQ ID NO: 3821774 - DNA, 25 bp, Homo sapien
gcaactgttaaaggatagtttccag

SEQ ID NO: 3821775 - DNA, 25 bp, Homo sapien
taatgacaggccatcccaaagatta

SEQ ID NO: 3821776 - DNA, 25 bp, Homo sapien
tctaacattggttcaaaacgccagt

SEQ ID NO: 3821777 - DNA, 25 bp, Homo sapien
gccagtgaaaaacctagatcctcaa

SEQ ID NO: 3821778 - DNA, 25 bp, Homo sapien
taaggcaaaagataagtggaatgtc

SEQ ID NO: 3821779 - DNA, 25 bp, Homo sapien
gctgcagatacaagcaagtacagga

SEQ ID NO: 3821780 - DNA, 25 bp, Homo sapien
ggtagtggtttcgactgggcacaca

SEQ ID NO: 3821781 - DNA, 25 bp, Homo sapien
tacaggagtacaagaactgccacca

SEQ ID NO: 3821782 - DNA, 25 bp, Homo sapien
cattgcaggatatgcgggcttgcca

SEQ ID NO: 3821783 - DNA, 25 bp, Homo sapien
ggttattttgcatatatggcccttt

SEQ ID NO: 3821784 - DNA, 25 bp, Homo sapien
agccaatttgaaaggctgcatacta

SEQ ID NO: 3821785 - DNA, 25 bp, Homo sapien
gggttgagctagaataatgaacaga

SEQ ID NO: 3821786 - DNA, 25 bp, Homo sapien
caataagctatcaagctataataag

SEQ ID NO: 3821787 - DNA, 25 bp, Homo sapien
cacgccttgtgacccctgcacgtca

SEQ ID NO: 3821788 - DNA, 25 bp, Homo sapien
gccttgtgacccctgcacgtcaacg

SEQ ID NO: 3821789 - DNA, 25 bp, Homo sapien
agggccacaacccacgccttgtgac

SEQ ID NO: 3821790 - DNA, 25 bp, Homo sapien
tgtgacccctgcacgtcaacggcat

SEQ ID NO: 3821791 - DNA, 25 bp, Homo sapien
gcctagcctgccggccttcgtcgct

SEQ ID NO: 3821792 - DNA, 25 bp, Homo sapien
cgccagttgggtccacgcctagcct

SEQ ID NO: 3821793 - DNA, 25 bp, Homo sapien
gccagttgggtccacgcctagcctg

SEQ ID NO: 3821794 - DNA, 25 bp, Homo sapien
cctgccggccttcgtcgctatccaa

SEQ ID NO: 3821795 - DNA, 25 bp, Homo sapien
tgcttgaccacacaatattcccaga

SEQ ID NO: 3821796 - DNA, 25 bp, Homo sapien
caccaggaaatccttgcatggaggc

SEQ ID NO: 3821797 - DNA, 25 bp, Homo sapien
taagagtggaccctgaggtgtcatt

SEQ ID NO: 3821798 - DNA, 25 bp, Homo sapien
tggaggctaaatgaacagttggtaa

SEQ ID NO: 3821799 - DNA, 25 bp, Homo sapien
ggtaagaattgcattggacctataa

SEQ ID NO: 3821800 - DNA, 25 bp, Homo sapien
aataccttgctaggattttggtaag

SEQ ID NO: 3821801 - DNA, 25 bp, Homo sapien
gggagaactgatgcctttactatgt

SEQ ID NO: 3821802 - DNA, 25 bp, Homo sapien
tagcaacctcataacaacggtgtgc

SEQ ID NO: 3821803 - DNA, 25 bp, Homo sapien
gtgaaactgtaatgatgcaccaggg

SEQ ID NO: 3821804 - DNA, 25 bp, Homo sapien
gcagaagaagccaaatgacccataa

SEQ ID NO: 3821805 - DNA, 25 bp, Homo sapien
gaagccaaatgacccataagatttt

SEQ ID NO: 3821806 - DNA, 25 bp, Homo sapien
tgagagaatttagaacaaggctgtt

SEQ ID NO: 3821807 - DNA, 25 bp, Homo sapien
ttccaaggtgaactatgaagtgcac

SEQ ID NO: 3821808 - DNA, 25 bp, Homo sapien
cactgtatctgtcccggagagtgtg

SEQ ID NO: 3821809 - DNA, 25 bp, Homo sapien
ccttaacagagtccttccactgtga

SEQ ID NO: 3821810 - DNA, 25 bp, Homo sapien
tattacacccataaccttggagcca

SEQ ID NO: 3821811 - DNA, 25 bp, Homo sapien
aaatatccactctccttatcagctg

SEQ ID NO: 3821812 - DNA, 25 bp, Homo sapien
tcaaatatccactctccttatcagc

SEQ ID NO: 3821813 - DNA, 25 bp, Homo sapien
atatccactctccttatcagctggc

SEQ ID NO: 3821814 - DNA, 25 bp, Homo sapien
ccactctccttatcagctggcccac

SEQ ID NO: 3821815 - DNA, 25 bp, Homo sapien
gctcaatcatttgtggtggctgagc

SEQ ID NO: 3821816 - DNA, 25 bp, Homo sapien
cagctcaatcatttgtggtggctga

SEQ ID NO: 3821817 - DNA, 25 bp, Homo sapien
gagcttccttatgtacagccaggaa

SEQ ID NO: 3821818 - DNA, 25 bp, Homo sapien
ctcaatcatttgtggtggctgagct

SEQ ID NO: 3821819 - DNA, 25 bp, Homo sapien
cacagcagtccaacaagatgggccc

SEQ ID NO: 3821820 - DNA, 25 bp, Homo sapien
tggtggctccttgcattaacagtga

SEQ ID NO: 3821821 - DNA, 25 bp, Homo sapien
ggtggttacagacctgcccagaatt

SEQ ID NO: 3821822 - DNA, 25 bp, Homo sapien
gatgggccctatgacaggacaccaa

SEQ ID NO: 3821823 - DNA, 25 bp, Homo sapien
tgagggcaccgtattccagggccac

SEQ ID NO: 3821824 - DNA, 25 bp, Homo sapien
agggcaccgtattccagggccacag

SEQ ID NO: 3821825 - DNA, 25 bp, Homo sapien
ctgagggcaccgtattccagggcca

SEQ ID NO: 3821826 - DNA, 25 bp, Homo sapien
gcaccgtattccagggccacaggct

SEQ ID NO: 3821827 - DNA, 25 bp, Homo sapien
ctgggacagtgccccaagagcagaa

SEQ ID NO: 3821828 - DNA, 25 bp, Homo sapien
tcttcatcctccgaggtgggagaag

SEQ ID NO: 3821829 - DNA, 25 bp, Homo sapien
ttcacagggtagctggccttggcat

SEQ ID NO: 3821830 - DNA, 25 bp, Homo sapien
catgtagagttgatggtaagatact

SEQ ID NO: 3821831 - DNA, 25 bp, Homo sapien
ggtaagatactcttcatcctccgag

SEQ ID NO: 3821832 - DNA, 25 bp, Homo sapien
cttccccatcctccccatccaattc

SEQ ID NO: 3821833 - DNA, 25 bp, Homo sapien
ccttccccatcctccccatccaatt

SEQ ID NO: 3821834 - DNA, 25 bp, Homo sapien
tccccatcctccccatccaattcag

SEQ ID NO: 3821835 - DNA, 25 bp, Homo sapien
cccatcctccccatccaattcagga

SEQ ID NO: 3821836 - DNA, 25 bp, Homo sapien
aacttataaggcaccaaccctggct

SEQ ID NO: 3821837 - DNA, 25 bp, Homo sapien
gcaccaggaagcaagaaacttataa

SEQ ID NO: 3821838 - DNA, 25 bp, Homo sapien
gagcccccaatttaatgagaagttg

SEQ ID NO: 3821839 - DNA, 25 bp, Homo sapien
ttgaggagcccccaatttaatgaga

SEQ ID NO: 3821840 - DNA, 25 bp, Homo sapien
gctggagcaccttaccgagctcagg

SEQ ID NO: 3821841 - DNA, 25 bp, Homo sapien
agctggagcaccttaccgagctcag

SEQ ID NO: 3821842 - DNA, 25 bp, Homo sapien
tggagcaccttaccgagctcaggag

SEQ ID NO: 3821843 - DNA, 25 bp, Homo sapien
gcagctggagcaccttaccgagctc

SEQ ID NO: 3821844 - DNA, 25 bp, Homo sapien
gactttggacaagtttattgacttc

SEQ ID NO: 3821845 - DNA, 25 bp, Homo sapien
tctaggattattgggacacgtaaat

SEQ ID NO: 3821846 - DNA, 25 bp, Homo sapien
tgacaaaactagatggtcaagaagc

SEQ ID NO: 3821847 - DNA, 25 bp, Homo sapien
ttgggacacgtaaattacataattc

SEQ ID NO: 3821848 - DNA, 25 bp, Homo sapien
cctatttagagatgcggcaagctga

SEQ ID NO: 3821849 - DNA, 25 bp, Homo sapien
gaagtgacatttactccccgcggaa

SEQ ID NO: 3821850 - DNA, 25 bp, Homo sapien
tcattatctggtgatgcagccgcag

SEQ ID NO: 3821851 - DNA, 25 bp, Homo sapien
ttgggagtgactcaagcaggcaacc

SEQ ID NO: 3821852 - DNA, 25 bp, Homo sapien
aatatctgtcgaaagtctggttaga

SEQ ID NO: 3821853 - DNA, 25 bp, Homo sapien
aaaatatctgtcgaaagtctggtta

SEQ ID NO: 3821854 - DNA, 25 bp, Homo sapien
aaatatctgtcgaaagtctggttag

SEQ ID NO: 3821855 - DNA, 25 bp, Homo sapien
tcttaaaattggctctggtgcaccc

SEQ ID NO: 3821856 - DNA, 25 bp, Homo sapien
ggctttattatgtgctgctgctctc

SEQ ID NO: 3821857 - DNA, 25 bp, Homo sapien
gatttagcaaatacatggatcctca

SEQ ID NO: 3821858 - DNA, 25 bp, Homo sapien
tacaaacccttagatacccagagag

SEQ ID NO: 3821859 - DNA, 25 bp, Homo sapien
gttttggcaggttggatttacagta

SEQ ID NO: 3821860 - DNA, 25 bp, Homo sapien
ttggcaggttggatttacagtatct

SEQ ID NO: 3821861 - DNA, 25 bp, Homo sapien
agttttggcaggttggatttacagt

SEQ ID NO: 3821862 - DNA, 25 bp, Homo sapien
tttggcaggttggatttacagtatc

SEQ ID NO: 3821863 - DNA, 25 bp, Homo sapien
tgagtcagtacatgttgccctggtg

SEQ ID NO: 3821864 - DNA, 25 bp, Homo sapien
gaatgtgtcaaggaactggcccaag

SEQ ID NO: 3821865 - DNA, 25 bp, Homo sapien
caaagaggtcgccaatgttgattca

SEQ ID NO: 3821866 - DNA, 25 bp, Homo sapien
tctgatggccttttgggaagactct

SEQ ID NO: 3821867 - DNA, 25 bp, Homo sapien
cattcctgctccagctcaggcagcg

SEQ ID NO: 3821868 - DNA, 25 bp, Homo sapien
tcctgctccagctcaggcagcgcac

SEQ ID NO: 3821869 - DNA, 25 bp, Homo sapien
ctgccattcctgctccagctcaggc

SEQ ID NO: 3821870 - DNA, 25 bp, Homo sapien
gccattcctgctccagctcaggcag

SEQ ID NO: 3821871 - DNA, 25 bp, Homo sapien
gggtcggcaaaggaggagcgtgact

SEQ ID NO: 3821872 - DNA, 25 bp, Homo sapien
caaaggaggagcgtgacttcctgtg

SEQ ID NO: 3821873 - DNA, 25 bp, Homo sapien
tcggcaaaggaggagcgtgacttcc

SEQ ID NO: 3821874 - DNA, 25 bp, Homo sapien
gcccctctcagtaaatgcagcacct

SEQ ID NO: 3821875 - DNA, 25 bp, Homo sapien
ccagagttttccccacggcagcagg

SEQ ID NO: 3821876 - DNA, 25 bp, Homo sapien
gcccagagttttccccacggcagca

SEQ ID NO: 3821877 - DNA, 25 bp, Homo sapien
gagagcccagagttttccccacggc

SEQ ID NO: 3821878 - DNA, 25 bp, Homo sapien
gagcccagagttttccccacggcag

SEQ ID NO: 3821879 - DNA, 25 bp, Homo sapien
cggccaggataatgtcaccagctgc

SEQ ID NO: 3821880 - DNA, 25 bp, Homo sapien
aactgaatcccaaaccattggcatt

SEQ ID NO: 3821881 - DNA, 25 bp, Homo sapien
gtggaccttccattcacggccagga

SEQ ID NO: 3821882 - DNA, 25 bp, Homo sapien
gaagatgaggccttccgtggacctt

SEQ ID NO: 3821883 - DNA, 25 bp, Homo sapien
caggcaaggctgttaccaaggaaac

SEQ ID NO: 3821884 - DNA, 25 bp, Homo sapien
aaacagccgtgcgttcatctcccat

SEQ ID NO: 3821885 - DNA, 25 bp, Homo sapien
ccaggcaaggctgttaccaaggaaa

SEQ ID NO: 3821886 - DNA, 25 bp, Homo sapien
ttaccaaggaaacagccgtgcgttc

SEQ ID NO: 3821887 - DNA, 25 bp, Homo sapien
gctgtcattagcagaaggacactgc

SEQ ID NO: 3821888 - DNA, 25 bp, Homo sapien
tgtcattagcagaaggacactgctg

SEQ ID NO: 3821889 - DNA, 25 bp, Homo sapien
ttctctctaagaccagtcttgcaac

SEQ ID NO: 3821890 - DNA, 25 bp, Homo sapien
ctgtcattagcagaaggacactgct

SEQ ID NO: 3821891 - DNA, 25 bp, Homo sapien
acagcctgcttgtgggtgaggccgc

SEQ ID NO: 3821892 - DNA, 25 bp, Homo sapien
ttgtgggtgaggccgcacagaatca

SEQ ID NO: 3821893 - DNA, 25 bp, Homo sapien
gcctgcttgtgggtgaggccgcaca

SEQ ID NO: 3821894 - DNA, 25 bp, Homo sapien
gtgaggccgcacagaatcactccat

SEQ ID NO: 3821895 - DNA, 25 bp, Homo sapien
ctgaggtgccaggtgtccccctgga

SEQ ID NO: 3821896 - DNA, 25 bp, Homo sapien
tagataccaccatatggcacactgg

SEQ ID NO: 3821897 - DNA, 25 bp, Homo sapien
agataccaccatatggcacactggt

SEQ ID NO: 3821898 - DNA, 25 bp, Homo sapien
tggatttcacatagataccaccata

SEQ ID NO: 3821899 - DNA, 25 bp, Homo sapien
caatggatttcacatagataccacc

SEQ ID NO: 3821900 - DNA, 25 bp, Homo sapien
cctgttcgtttagattgtattctcc

SEQ ID NO: 3821901 - DNA, 25 bp, Homo sapien
ttctgtattcacctgttcgtttaga

SEQ ID NO: 3821902 - DNA, 25 bp, Homo sapien
tcacctgttcgtttagattgtattc

SEQ ID NO: 3821903 - DNA, 25 bp, Homo sapien
ctgtcttctgtattcacctgttcgt

SEQ ID NO: 3821904 - DNA, 25 bp, Homo sapien
ctgagcaataagattaggtgttcat

SEQ ID NO: 3821905 - DNA, 25 bp, Homo sapien
gaaagtgtcagtcctgatggaggcc

SEQ ID NO: 3821906 - DNA, 25 bp, Homo sapien
tctcctttcacaagggtctaccagg

SEQ ID NO: 3821907 - DNA, 25 bp, Homo sapien
tgagcaagaggctccacactgattc

SEQ ID NO: 3821908 - DNA, 25 bp, Homo sapien
cgagcccagcctgtaatggatcact

SEQ ID NO: 3821909 - DNA, 25 bp, Homo sapien
tggccaccaggttctagacggacat

SEQ ID NO: 3821910 - DNA, 25 bp, Homo sapien
tgctcatcctgaggttccccagtac

SEQ ID NO: 3821911 - DNA, 25 bp, Homo sapien
tttggagtcccctagtgcatgccct

SEQ ID NO: 3821912 - DNA, 25 bp, Homo sapien
acactgtcagaggttgccatctggg

SEQ ID NO: 3821913 - DNA, 25 bp, Homo sapien
accagcactgatttctggaggtgat

SEQ ID NO: 3821914 - DNA, 25 bp, Homo sapien
atccaagtgtcccatcttctttaac

SEQ ID NO: 3821915 - DNA, 25 bp, Homo sapien
agcactgatttctggaggtgatgga

SEQ ID NO: 3821916 - DNA, 25 bp, Homo sapien
atggaggacaagaagaaccagcacc

SEQ ID NO: 3821917 - DNA, 25 bp, Homo sapien
ctctggaggccaatccgaatcccag

SEQ ID NO: 3821918 - DNA, 25 bp, Homo sapien
tgctctggaggccaatccgaatccc

SEQ ID NO: 3821919 - DNA, 25 bp, Homo sapien
aggccaatccgaatcccagctctgt

SEQ ID NO: 3821920 - DNA, 25 bp, Homo sapien
ctggaggccaatccgaatcccagct

SEQ ID NO: 3821921 - DNA, 25 bp, Homo sapien
tcagcctgggcactaagctctgcac

SEQ ID NO: 3821922 - DNA, 25 bp, Homo sapien
aggaaagctgatgtctcagcctggg

SEQ ID NO: 3821923 - DNA, 25 bp, Homo sapien
cagaaaggaaagctgatgtctcagc

SEQ ID NO: 3821924 - DNA, 25 bp, Homo sapien
gaaaggaaagctgatgtctcagcct

SEQ ID NO: 3821925 - DNA, 25 bp, Homo sapien
agctcaggatgtctgtagaggagac

SEQ ID NO: 3821926 - DNA, 25 bp, Homo sapien
gagaccccagaattggctgtgctat

SEQ ID NO: 3821927 - DNA, 25 bp, Homo sapien
tgtcctggtcttgtgtgtgtgacaa

SEQ ID NO: 3821928 - DNA, 25 bp, Homo sapien
aacttccctggtacccgaagctcag

SEQ ID NO: 3821929 - DNA, 25 bp, Homo sapien
tgtgattcagggctagtatctgccc

SEQ ID NO: 3821930 - DNA, 25 bp, Homo sapien
gggaattctggatcatcctaacagc

SEQ ID NO: 3821931 - DNA, 25 bp, Homo sapien
ttctatgttgtcaggggaattctgg

SEQ ID NO: 3821932 - DNA, 25 bp, Homo sapien
cagccatgttgaatgtgaagccctc

SEQ ID NO: 3821933 - DNA, 25 bp, Homo sapien
gtcagcttggcctgaatactctccc

SEQ ID NO: 3821934 - DNA, 25 bp, Homo sapien
aagatataaaaatgccagggtcagc

SEQ ID NO: 3821935 - DNA, 25 bp, Homo sapien
ctggtcctccaggtataatagaaga

SEQ ID NO: 3821936 - DNA, 25 bp, Homo sapien
ggtcctccaggtataatagaagata

SEQ ID NO: 3821937 - DNA, 25 bp, Homo sapien
ggtcacgtttcagtgtcacacgtac

SEQ ID NO: 3821938 - DNA, 25 bp, Homo sapien
cagtgtcacacgtacaatttctcgg

SEQ ID NO: 3821939 - DNA, 25 bp, Homo sapien
cgtacaatttctcggcccggttcag

SEQ ID NO: 3821940 - DNA, 25 bp, Homo sapien
ggttcagctataaagctcttcctcc

SEQ ID NO: 3821941 - DNA, 25 bp, Homo sapien
cagagagagagtcccaggtcattgg

SEQ ID NO: 3821942 - DNA, 25 bp, Homo sapien
tggtccagagagagagtcccaggtc

SEQ ID NO: 3821943 - DNA, 25 bp, Homo sapien
ggatcacacaggcactcttcagctg

SEQ ID NO: 3821944 - DNA, 25 bp, Homo sapien
cttctggatcacacaggcactcttc

SEQ ID NO: 3821945 - DNA, 25 bp, Homo sapien
cactgacctgcttgatcattgtaca

SEQ ID NO: 3821946 - DNA, 25 bp, Homo sapien
tgttgtgttgggtgccgcctgatca

SEQ ID NO: 3821947 - DNA, 25 bp, Homo sapien
gagagctgcacagggtcactgacct

SEQ ID NO: 3821948 - DNA, 25 bp, Homo sapien
cacatgctcgagagctgcacagggt

SEQ ID NO: 3821949 - DNA, 25 bp, Homo sapien
ggtcgctggcatggacagttaccca

SEQ ID NO: 3821950 - DNA, 25 bp, Homo sapien
ttcaactggccctgacggaatatgc

SEQ ID NO: 3821951 - DNA, 25 bp, Homo sapien
ggactcctggacagccaaacatctg

SEQ ID NO: 3821952 - DNA, 25 bp, Homo sapien
ctgtacccttggagctgtgacacca

SEQ ID NO: 3821953 - DNA, 25 bp, Homo sapien
gtgctgtgtaaacaactgctcagga

SEQ ID NO: 3821954 - DNA, 25 bp, Homo sapien
gctgtgtaaacaactgctcaggaat

SEQ ID NO: 3821955 - DNA, 25 bp, Homo sapien
cactggcaccacgtgctgtgtaaac

SEQ ID NO: 3821956 - DNA, 25 bp, Homo sapien
aggaatgccactggcgatggggtcc

SEQ ID NO: 3821957 - DNA, 25 bp, Homo sapien
tatccattgatgtactcagcaggcc

SEQ ID NO: 3821958 - DNA, 25 bp, Homo sapien
tccttgctgccgtccacgttgaagt

SEQ ID NO: 3821959 - DNA, 25 bp, Homo sapien
gcaccctgaagcctggatacaaaca

SEQ ID NO: 3821960 - DNA, 25 bp, Homo sapien
aaatgagaggcttagaccgggcctg

SEQ ID NO: 3821961 - DNA, 25 bp, Homo sapien
atattaatacccacaggcggatatt

SEQ ID NO: 3821962 - DNA, 25 bp, Homo sapien
gaccttagacttaatcatgatggat

SEQ ID NO: 3821963 - DNA, 25 bp, Homo sapien
ggcccaaagggagagtgaccttaga

SEQ ID NO: 3821964 - DNA, 25 bp, Homo sapien
taatcatgatggatattaataccca

SEQ ID NO: 3821965 - DNA, 25 bp, Homo sapien
gcccagcactggtacccaacaatta

SEQ ID NO: 3821966 - DNA, 25 bp, Homo sapien
tggagctgctcttgtggaactccca

SEQ ID NO: 3821967 - DNA, 25 bp, Homo sapien
tgcaggcaggcatatccacaaataa

SEQ ID NO: 3821968 - DNA, 25 bp, Homo sapien
tccaacaaggatgcaacaaaacagg

SEQ ID NO: 3821969 - DNA, 25 bp, Homo sapien
caattaagagtgatacagcagacgg

SEQ ID NO: 3821970 - DNA, 25 bp, Homo sapien
caacccgtcttgcagttgtcttggg

SEQ ID NO: 3821971 - DNA, 25 bp, Homo sapien
gctgcagccgttatggcaaggacca

SEQ ID NO: 3821972 - DNA, 25 bp, Homo sapien
gcaaggaccatggtgtatcgttaca

SEQ ID NO: 3821973 - DNA, 25 bp, Homo sapien
taagtatttactggtcttggctgaa

SEQ ID NO: 3821974 - DNA, 25 bp, Homo sapien
gagcagaggtccagtaagtatttac

SEQ ID NO: 3821975 - DNA, 25 bp, Homo sapien
gctgaatctgtgacaaatgtgtgct

SEQ ID NO: 3821976 - DNA, 25 bp, Homo sapien
gtgcattaaacccatgctgggctga

SEQ ID NO: 3821977 - DNA, 25 bp, Homo sapien
tggcagatgctgtctgactatggcc

SEQ ID NO: 3821978 - DNA, 25 bp, Homo sapien
tgcaagaaaatgctcggtcccttgg

SEQ ID NO: 3821979 - DNA, 25 bp, Homo sapien
tccactgacgcacaactgcaagaaa

SEQ ID NO: 3821980 - DNA, 25 bp, Homo sapien
tagcaggcatccacgggtgcatggc

SEQ ID NO: 3821981 - DNA, 25 bp, Homo sapien
atagactatgacacccttggcacag

SEQ ID NO: 3821982 - DNA, 25 bp, Homo sapien
aaaccgtaacattgcaattctgctg

SEQ ID NO: 3821983 - DNA, 25 bp, Homo sapien
ggtgaaccagcacaccgtattctgg

SEQ ID NO: 3821984 - DNA, 25 bp, Homo sapien
tgtttttcacttcatagactatgac

SEQ ID NO: 3821985 - DNA, 25 bp, Homo sapien
tccatgcaaaacacactgataggcg

SEQ ID NO: 3821986 - DNA, 25 bp, Homo sapien
cactccatgcaaaacacactgatag

SEQ ID NO: 3821987 - DNA, 25 bp, Homo sapien
attcactccatgcaaaacacactga

SEQ ID NO: 3821988 - DNA, 25 bp, Homo sapien
catgcaaaacacactgataggcgtt

SEQ ID NO: 3821989 - DNA, 25 bp, Homo sapien
caggaagacgccagtccccatcaga

SEQ ID NO: 3821990 - DNA, 25 bp, Homo sapien
cagtccccatcagaaggttgatgtg

SEQ ID NO: 3821991 - DNA, 25 bp, Homo sapien
ccaggaagacgccagtccccatcag

SEQ ID NO: 3821992 - DNA, 25 bp, Homo sapien
gagccggtgcatctctgagacttca

SEQ ID NO: 3821993 - DNA, 25 bp, Homo sapien
tgagacttcaacctggacccgtaga

SEQ ID NO: 3821994 - DNA, 25 bp, Homo sapien
tcatcctctcgatcagactcgctgg

SEQ ID NO: 3821995 - DNA, 25 bp, Homo sapien
gactcgctgggatgtaatcttcaac

SEQ ID NO: 3821996 - DNA, 25 bp, Homo sapien
gggaagggcacaatccagacactgg

SEQ ID NO: 3821997 - DNA, 25 bp, Homo sapien
aagggaagggcacaatccagacact

SEQ ID NO: 3821998 - DNA, 25 bp, Homo sapien
gggcacaatccagacactggccggg

SEQ ID NO: 3821999 - DNA, 25 bp, Homo sapien
gaagggcacaatccagacactggcc

SEQ ID NO: 3822000 - DNA, 25 bp, Homo sapien
tcttagctttggcatcattgctgca

SEQ ID NO: 3822001 - DNA, 25 bp, Homo sapien
gctttggcatcattgctgcacatga

SEQ ID NO: 3822002 - DNA, 25 bp, Homo sapien
ttagctttggcatcattgctgcaca

SEQ ID NO: 3822003 - DNA, 25 bp, Homo sapien
tagctttggcatcattgctgcacat

SEQ ID NO: 3822004 - DNA, 25 bp, Homo sapien
ggggagactggatacccccagccca

SEQ ID NO: 3822005 - DNA, 25 bp, Homo sapien
gggagactggatacccccagcccac

SEQ ID NO: 3822006 - DNA, 25 bp, Homo sapien
tgagttggcctgagtggggtatctg

SEQ ID NO: 3822007 - DNA, 25 bp, Homo sapien
ggggtgaatgagttggcctgagtgg

SEQ ID NO: 3822008 - DNA, 25 bp, Homo sapien
gggggtgaatgagttggcctgagtg

SEQ ID NO: 3822009 - DNA, 25 bp, Homo sapien
gaatgagttggcctgagtggggtat

SEQ ID NO: 3822010 - DNA, 25 bp, Homo sapien
ctcccacactcctgatgtagcatgt

SEQ ID NO: 3822011 - DNA, 25 bp, Homo sapien
acactcctgatgtagcatgtcccca

SEQ ID NO: 3822012 - DNA, 25 bp, Homo sapien
cactcctgatgtagcatgtccccat

SEQ ID NO: 3822013 - DNA, 25 bp, Homo sapien
ccacactcctgatgtagcatgtccc

SEQ ID NO: 3822014 - DNA, 25 bp, Homo sapien
catggaccaagaatcctcaggttgg

SEQ ID NO: 3822015 - DNA, 25 bp, Homo sapien
tggaccaagaatcctcaggttggtg

SEQ ID NO: 3822016 - DNA, 25 bp, Homo sapien
ggaccaagaatcctcaggttggtgc

SEQ ID NO: 3822017 - DNA, 25 bp, Homo sapien
atggaccaagaatcctcaggttggt

SEQ ID NO: 3822018 - DNA, 25 bp, Homo sapien
tgggaggatgcgaaaaagtatccag

SEQ ID NO: 3822019 - DNA, 25 bp, Homo sapien
caaaggtatgggaggatgcgaaaaa

SEQ ID NO: 3822020 - DNA, 25 bp, Homo sapien
gatgcgaaaaagtatccagagggtc

SEQ ID NO: 3822021 - DNA, 25 bp, Homo sapien
agtatccagagggtccacttgtggg

SEQ ID NO: 3822022 - DNA, 25 bp, Homo sapien
aacacatgccctcatcctgtaactg

SEQ ID NO: 3822023 - DNA, 25 bp, Homo sapien
tttccgaagctgcaggtaaaactgg

SEQ ID NO: 3822024 - DNA, 25 bp, Homo sapien
ccaggatatctttccgaagctgcag

SEQ ID NO: 3822025 - DNA, 25 bp, Homo sapien
ctctcctccaggatatctttccgaa

SEQ ID NO: 3822026 - DNA, 25 bp, Homo sapien
tatctttccgaagctgcaggtaaaa

SEQ ID NO: 3822027 - DNA, 25 bp, Homo sapien
gcagcccatagtggctgacaaagaa

SEQ ID NO: 3822028 - DNA, 25 bp, Homo sapien
caaagaactttatcctcaggaagag

SEQ ID NO: 3822029 - DNA, 25 bp, Homo sapien
agtgtgaaggtattcatggaggtct

SEQ ID NO: 3822030 - DNA, 25 bp, Homo sapien
gcacaatctggtttcactgtccagg

SEQ ID NO: 3822031 - DNA, 25 bp, Homo sapien
aaagtaggtgagttcctcgaggttg

SEQ ID NO: 3822032 - DNA, 25 bp, Homo sapien
caaaggatgtcacggcattgaagac

SEQ ID NO: 3822033 - DNA, 25 bp, Homo sapien
caggtgctgcccgttcagcaggacc

SEQ ID NO: 3822034 - DNA, 25 bp, Homo sapien
tgagttcctcgaggttggcaaagga

SEQ ID NO: 3822035 - DNA, 25 bp, Homo sapien
gggagagatagggagctacactgac

SEQ ID NO: 3822036 - DNA, 25 bp, Homo sapien
gagatagggagctacactgactgag

SEQ ID NO: 3822037 - DNA, 25 bp, Homo sapien
gagggagagatagggagctacactg

SEQ ID NO: 3822038 - DNA, 25 bp, Homo sapien
ggagggagagatagggagctacact

SEQ ID NO: 3822039 - DNA, 25 bp, Homo sapien
tcccggcagatgtagtgtcatcggg

SEQ ID NO: 3822040 - DNA, 25 bp, Homo sapien
atgtagtgtcatcggggcctctcca

SEQ ID NO: 3822041 - DNA, 25 bp, Homo sapien
cacaaccgatcccggcagatgtagt

SEQ ID NO: 3822042 - DNA, 25 bp, Homo sapien
ccgatcccggcagatgtagtgtcat

SEQ ID NO: 3822043 - DNA, 25 bp, Homo sapien
ctctgagaaggagttgttggccatg

SEQ ID NO: 3822044 - DNA, 25 bp, Homo sapien
tctgagaaggagttgttggccatga

SEQ ID NO: 3822045 - DNA, 25 bp, Homo sapien
ctgccgagtgcacagatccagagct

SEQ ID NO: 3822046 - DNA, 25 bp, Homo sapien
tgccgagtgcacagatccagagctg

SEQ ID NO: 3822047 - DNA, 25 bp, Homo sapien
gccgagtgcacagatccagagctga

SEQ ID NO: 3822048 - DNA, 25 bp, Homo sapien
tcggatctgcttaaatgtggcttct

SEQ ID NO: 3822049 - DNA, 25 bp, Homo sapien
tcatctgttaatggaatagcattgg

SEQ ID NO: 3822050 - DNA, 25 bp, Homo sapien
ggcttcggatctgcttaaatgtggc

SEQ ID NO: 3822051 - DNA, 25 bp, Homo sapien
tctgttaatggaatagcattggcat

SEQ ID NO: 3822052 - DNA, 25 bp, Homo sapien
ggctgcagtgactgtgtgtcaaggt

SEQ ID NO: 3822053 - DNA, 25 bp, Homo sapien
gaggctgcagtgactgtgtgtcaag

SEQ ID NO: 3822054 - DNA, 25 bp, Homo sapien
aggctgcagtgactgtgtgtcaagg

SEQ ID NO: 3822055 - DNA, 25 bp, Homo sapien
ctgtgtgtcaaggtgctccaatggg

SEQ ID NO: 3822056 - DNA, 25 bp, Homo sapien
ctgggctctcgctgcttgtcccacg

SEQ ID NO: 3822057 - DNA, 25 bp, Homo sapien
ctgcaaggatgcagacactccgggg

SEQ ID NO: 3822058 - DNA, 25 bp, Homo sapien
gggcctgtgccgctgggctctcgct

SEQ ID NO: 3822059 - DNA, 25 bp, Homo sapien
ggctctcgctgcttgtcccacgcag

SEQ ID NO: 3822060 - DNA, 25 bp, Homo sapien
ttttaatagccacacatgaccagca

SEQ ID NO: 3822061 - DNA, 25 bp, Homo sapien
cagctactgcttgaaaagcacggtt

SEQ ID NO: 3822062 - DNA, 25 bp, Homo sapien
ttgaaaagcacggttctctactgac

SEQ ID NO: 3822063 - DNA, 25 bp, Homo sapien
taatagccacacatgaccagcagct

SEQ ID NO: 3822064 - DNA, 25 bp, Homo sapien
tggtacccagaaccaagccaaccag

SEQ ID NO: 3822065 - DNA, 25 bp, Homo sapien
gaaatggtacccagaaccaagccaa

SEQ ID NO: 3822066 - DNA, 25 bp, Homo sapien
acccagaaccaagccaaccagcctt

SEQ ID NO: 3822067 - DNA, 25 bp, Homo sapien
ctcagaaatggtacccagaaccaag

SEQ ID NO: 3822068 - DNA, 25 bp, Homo sapien
ttccagaaccgactgcaacgtgcac

SEQ ID NO: 3822069 - DNA, 25 bp, Homo sapien
aacgtgcaccgcctgtgaggctggt

SEQ ID NO: 3822070 - DNA, 25 bp, Homo sapien
caggggctgggtagacagacacttc

SEQ ID NO: 3822071 - DNA, 25 bp, Homo sapien
tctttctcatgaacccgacaagctt

SEQ ID NO: 3822072 - DNA, 25 bp, Homo sapien
cagtagagggtcattcctaaagaat

SEQ ID NO: 3822073 - DNA, 25 bp, Homo sapien
tggcggaacatgaaaccctgctgac

SEQ ID NO: 3822074 - DNA, 25 bp, Homo sapien
ctgatgtggcggaacatgaaaccct

SEQ ID NO: 3822075 - DNA, 25 bp, Homo sapien
tgctgaccagtagagggtcattcct

SEQ ID NO: 3822076 - DNA, 25 bp, Homo sapien
gaggtgtcttgctacatactgccaa

SEQ ID NO: 3822077 - DNA, 25 bp, Homo sapien
tcctagttgaggacgtgttgggtca

SEQ ID NO: 3822078 - DNA, 25 bp, Homo sapien
taaaactcttgaaacccactctggc

SEQ ID NO: 3822079 - DNA, 25 bp, Homo sapien
caatggtaacaatgtgccagaccac

SEQ ID NO: 3822080 - DNA, 25 bp, Homo sapien
tcaggggccttgaaaggagcagcct

SEQ ID NO: 3822081 - DNA, 25 bp, Homo sapien
cctgtagcagttcaggggccttgaa

SEQ ID NO: 3822082 - DNA, 25 bp, Homo sapien
ctgagatgcatcaggctgctcatcc

SEQ ID NO: 3822083 - DNA, 25 bp, Homo sapien
ctatatgagaaacacggccttggaa

SEQ ID NO: 3822084 - DNA, 25 bp, Homo sapien
caggggcaaaccacatagtccgagg

SEQ ID NO: 3822085 - DNA, 25 bp, Homo sapien
gggcaaaccacatagtccgaggaat

SEQ ID NO: 3822086 - DNA, 25 bp, Homo sapien
gctgaccaggggcaaaccacatagt

SEQ ID NO: 3822087 - DNA, 25 bp, Homo sapien
accaggggcaaaccacatagtccga

SEQ ID NO: 3822088 - DNA, 25 bp, Homo sapien
cctctggcagggcacaccagcaaat

SEQ ID NO: 3822089 - DNA, 25 bp, Homo sapien
ctggccaccggtggctattgcctgg

SEQ ID NO: 3822090 - DNA, 25 bp, Homo sapien
ctctggcagggcacaccagcaaatt

SEQ ID NO: 3822091 - DNA, 25 bp, Homo sapien
ggtggctattgcctgggccatgact

SEQ ID NO: 3822092 - DNA, 25 bp, Homo sapien
acaggagggaccagatttcctcctc

SEQ ID NO: 3822093 - DNA, 25 bp, Homo sapien
caatgtccaggaacatgtccgggcc

SEQ ID NO: 3822094 - DNA, 25 bp, Homo sapien
atgtccaggaacatgtccgggcccg

SEQ ID NO: 3822095 - DNA, 25 bp, Homo sapien
ccaggaacatgtccgggcccgtact

SEQ ID NO: 3822096 - DNA, 25 bp, Homo sapien
tctgcaatgtccaggaacatgtccg

SEQ ID NO: 3822097 - DNA, 25 bp, Homo sapien
tgctagtttgcagagcacgtgcaac

SEQ ID NO: 3822098 - DNA, 25 bp, Homo sapien
ctgctagtttgcagagcacgtgcaa

SEQ ID NO: 3822099 - DNA, 25 bp, Homo sapien
ggagaagccttttgacactggcctg

SEQ ID NO: 3822100 - DNA, 25 bp, Homo sapien
ccagggagaagccttttgacactgg

SEQ ID NO: 3822101 - DNA, 25 bp, Homo sapien
agaagccttttgacactggcctgtg

SEQ ID NO: 3822102 - DNA, 25 bp, Homo sapien
agccttttgacactggcctgtggct

SEQ ID NO: 3822103 - DNA, 25 bp, Homo sapien
cctcggcattctttctccctctcat

SEQ ID NO: 3822104 - DNA, 25 bp, Homo sapien
tcctcggcattctttctccctctca

SEQ ID NO: 3822105 - DNA, 25 bp, Homo sapien
ctcctcggcattctttctccctctc

SEQ ID NO: 3822106 - DNA, 25 bp, Homo sapien
acagggcaaggtcgcccaaggcaaa

SEQ ID NO: 3822107 - DNA, 25 bp, Homo sapien
agacacagggcaaggtcgcccaagg

SEQ ID NO: 3822108 - DNA, 25 bp, Homo sapien
caaagcttgtagacactgagcacct

SEQ ID NO: 3822109 - DNA, 25 bp, Homo sapien
ggtcgcccaaggcaaagcttgtaga

SEQ ID NO: 3822110 - DNA, 25 bp, Homo sapien
tcttctcgtggcaacacattccagt

SEQ ID NO: 3822111 - DNA, 25 bp, Homo sapien
aagaaacgaatgatctctccggcac

SEQ ID NO: 3822112 - DNA, 25 bp, Homo sapien
acaaagttctaggaagaaacgaatg

SEQ ID NO: 3822113 - DNA, 25 bp, Homo sapien
ggcctttcttctcgtggcaacacat

SEQ ID NO: 3822114 - DNA, 25 bp, Homo sapien
ttccccattgtgttactccacatgt

SEQ ID NO: 3822115 - DNA, 25 bp, Homo sapien
cacatgtctggcaactcaaacatca

SEQ ID NO: 3822116 - DNA, 25 bp, Homo sapien
ccacaggagctaagagaatttacaa

SEQ ID NO: 3822117 - DNA, 25 bp, Homo sapien
tactccacatgtctggcaactcaaa

SEQ ID NO: 3822118 - DNA, 25 bp, Homo sapien
tggagtctggcatgaagttcatgac

SEQ ID NO: 3822119 - DNA, 25 bp, Homo sapien
gaatttgggcatgtgaacagtaacc

SEQ ID NO: 3822120 - DNA, 25 bp, Homo sapien
tatctacagggaacagcaaactaca

SEQ ID NO: 3822121 - DNA, 25 bp, Homo sapien
tcatgacttcagtccagctccacag

SEQ ID NO: 3822122 - DNA, 25 bp, Homo sapien
tagctgttgaagaccagttcagccc

SEQ ID NO: 3822123 - DNA, 25 bp, Homo sapien
ctagctgttgaagaccagttcagcc

SEQ ID NO: 3822124 - DNA, 25 bp, Homo sapien
agctgttgaagaccagttcagccca

SEQ ID NO: 3822125 - DNA, 25 bp, Homo sapien
gggcatcttcaactgctttgatgtc

SEQ ID NO: 3822126 - DNA, 25 bp, Homo sapien
gcatcttcaactgctttgatgtcca

SEQ ID NO: 3822127 - DNA, 25 bp, Homo sapien
tgtgataatctctggggcatcttca

SEQ ID NO: 3822128 - DNA, 25 bp, Homo sapien
ctggggcatcttcaactgctttgat

SEQ ID NO: 3822129 - DNA, 25 bp, Homo sapien
cagtttctgggtactatggactgaa

SEQ ID NO: 3822130 - DNA, 25 bp, Homo sapien
tctgcaagctgagaaaggtgacttc

SEQ ID NO: 3822131 - DNA, 25 bp, Homo sapien
ggaattaccatcctcataagaagag

SEQ ID NO: 3822132 - DNA, 25 bp, Homo sapien
tcccattgtaatggcattaggaggt

SEQ ID NO: 3822133 - DNA, 25 bp, Homo sapien
ttgaggacaaaaccacataaatgtt

SEQ ID NO: 3822134 - DNA, 25 bp, Homo sapien
catgtacgtaatccacacacaggca

SEQ ID NO: 3822135 - DNA, 25 bp, Homo sapien
ggtgactcttattgtggaaaattga

SEQ ID NO: 3822136 - DNA, 25 bp, Homo sapien
taacttgtattaacacaattggtac

SEQ ID NO: 3822137 - DNA, 25 bp, Homo sapien
tcaaggtcatgaagacaacttctgc

SEQ ID NO: 3822138 - DNA, 25 bp, Homo sapien
gaatcttttataagaagccaatgct

SEQ ID NO: 3822139 - DNA, 25 bp, Homo sapien
gaagccaatgcttaactcaaggtca

SEQ ID NO: 3822140 - DNA, 25 bp, Homo sapien
tcaataaagaaatccaatgtatttg

SEQ ID NO: 3822141 - DNA, 25 bp, Homo sapien
taattgaaggagtcaactttggggc

SEQ ID NO: 3822142 - DNA, 25 bp, Homo sapien
gggctggacttatggttgtgtctta

SEQ ID NO: 3822143 - DNA, 25 bp, Homo sapien
ggttgtgtcttatagcagtataaat

SEQ ID NO: 3822144 - DNA, 25 bp, Homo sapien
gacttatggttgtgtcttatagcag

SEQ ID NO: 3822145 - DNA, 25 bp, Homo sapien
caactgaacattttggtcaccgtcc

SEQ ID NO: 3822146 - DNA, 25 bp, Homo sapien
tgttacacctgtcagtagaatcggc

SEQ ID NO: 3822147 - DNA, 25 bp, Homo sapien
tgtttagtaaaatgatgccctctct

SEQ ID NO: 3822148 - DNA, 25 bp, Homo sapien
atttcagaaggttttatcagcagag

SEQ ID NO: 3822149 - DNA, 25 bp, Homo sapien
caggtggtttgcctaaagtgtgatc

SEQ ID NO: 3822150 - DNA, 25 bp, Homo sapien
tcagtgagatgacgttttggttccc

SEQ ID NO: 3822151 - DNA, 25 bp, Homo sapien
tccccttgacaatcagcagatcagt

SEQ ID NO: 3822152 - DNA, 25 bp, Homo sapien
gaagattgagcctaaagactggatt

SEQ ID NO: 3822153 - DNA, 25 bp, Homo sapien
agcagtggagcctggcgcttctgcc

SEQ ID NO: 3822154 - DNA, 25 bp, Homo sapien
ccaaatctggttgtgcaggctccaa

SEQ ID NO: 3822155 - DNA, 25 bp, Homo sapien
tcttctggtcgccaatttgctgcaa

SEQ ID NO: 3822156 - DNA, 25 bp, Homo sapien
agagctgctggatggctccacccac

SEQ ID NO: 3822157 - DNA, 25 bp, Homo sapien
ttgctggggcctgcacctttcctgg

SEQ ID NO: 3822158 - DNA, 25 bp, Homo sapien
cctctttgctggggcctgcaccttt

SEQ ID NO: 3822159 - DNA, 25 bp, Homo sapien
ctttgctggggcctgcacctttcct

SEQ ID NO: 3822160 - DNA, 25 bp, Homo sapien
gctcctctttgctggggcctgcacc

SEQ ID NO: 3822161 - DNA, 25 bp, Homo sapien
ggcacctcgccctgacacaaatttt

SEQ ID NO: 3822162 - DNA, 25 bp, Homo sapien
gggattgtacccatgagtcatggca

SEQ ID NO: 3822163 - DNA, 25 bp, Homo sapien
tttaaaggagtcatcaagacagtgc

SEQ ID NO: 3822164 - DNA, 25 bp, Homo sapien
gggcttgaatgattgtcccgcctca

SEQ ID NO: 3822165 - DNA, 25 bp, Homo sapien
gcctgtggacatgaaaaggatacta

SEQ ID NO: 3822166 - DNA, 25 bp, Homo sapien
tgggatgctccaccactctggagcc

SEQ ID NO: 3822167 - DNA, 25 bp, Homo sapien
cagaaagtacaacatactgcaagtc

SEQ ID NO: 3822168 - DNA, 25 bp, Homo sapien
aaataggcccgaatgatttcattgg

SEQ ID NO: 3822169 - DNA, 25 bp, Homo sapien
ttcaggttggtacattgagagtaag

SEQ ID NO: 3822170 - DNA, 25 bp, Homo sapien
acatgatggtggtctgactaatgga

SEQ ID NO: 3822171 - DNA, 25 bp, Homo sapien
caggttggtacattgagagtaagat

SEQ ID NO: 3822172 - DNA, 25 bp, Homo sapien
agagtaagatattgacatgatggtg

SEQ ID NO: 3822173 - DNA, 25 bp, Homo sapien
cagtagtacagacaattctgcccat

SEQ ID NO: 3822174 - DNA, 25 bp, Homo sapien
gtttcagtagtacagacaattctgc

SEQ ID NO: 3822175 - DNA, 25 bp, Homo sapien
gataaaatgacagtttcagtagtac

SEQ ID NO: 3822176 - DNA, 25 bp, Homo sapien
tgacagtttcagtagtacagacaat

SEQ ID NO: 3822177 - DNA, 25 bp, Homo sapien
tagttgcgggtcactttgtcggaaa

SEQ ID NO: 3822178 - DNA, 25 bp, Homo sapien
gaggtcccaccatctagatagttgc

SEQ ID NO: 3822179 - DNA, 25 bp, Homo sapien
tgctactgtgagaccaaagctgacg

SEQ ID NO: 3822180 - DNA, 25 bp, Homo sapien
gacttcagcatagtggtgagcccca

SEQ ID NO: 3822181 - DNA, 25 bp, Homo sapien
cagtaaggacttacgttgaaaacag

SEQ ID NO: 3822182 - DNA, 25 bp, Homo sapien
tatagctttgagaaactcttccctg

SEQ ID NO: 3822183 - DNA, 25 bp, Homo sapien
gacatgaacccaaggttttctctgg

SEQ ID NO: 3822184 - DNA, 25 bp, Homo sapien
ttattgaacagcttggaacaccatg

SEQ ID NO: 3822185 - DNA, 25 bp, Homo sapien
tcatcatcgtcgtctgtcaatgatg

SEQ ID NO: 3822186 - DNA, 25 bp, Homo sapien
aatgtcaacagatccgactttggcc

SEQ ID NO: 3822187 - DNA, 25 bp, Homo sapien
atgtcaacagatccgactttggcct

SEQ ID NO: 3822188 - DNA, 25 bp, Homo sapien
catcgtcgtctgtcaatgatgtgtc

SEQ ID NO: 3822189 - DNA, 25 bp, Homo sapien
aatgatgaacgtgttaggagacctc

SEQ ID NO: 3822190 - DNA, 25 bp, Homo sapien
caactattatgtggtgacttgccta

SEQ ID NO: 3822191 - DNA, 25 bp, Homo sapien
taattttggcaaaagccccgtcatc

SEQ ID NO: 3822192 - DNA, 25 bp, Homo sapien
tctaaatggcagaataactcagagc

SEQ ID NO: 3822193 - DNA, 25 bp, Homo sapien
gctgaataatgaagttagactgaat

SEQ ID NO: 3822194 - DNA, 25 bp, Homo sapien
cattacagtttatcctggtcagcag

SEQ ID NO: 3822195 - DNA, 25 bp, Homo sapien
cctggaaacctgagtatgatagctg

SEQ ID NO: 3822196 - DNA, 25 bp, Homo sapien
tagactgaattacgtgtctccctgg

SEQ ID NO: 3822197 - DNA, 25 bp, Homo sapien
tggtgtatatggaggaacaaggacc

SEQ ID NO: 3822198 - DNA, 25 bp, Homo sapien
tgacatagaagtgtgccagaagctg

SEQ ID NO: 3822199 - DNA, 25 bp, Homo sapien
gcagatttaagtgagtgcatgggca

SEQ ID NO: 3822200 - DNA, 25 bp, Homo sapien
tgacccttggcataaagaaggtttg

SEQ ID NO: 3822201 - DNA, 25 bp, Homo sapien
cctttgatagcctggtggcattttc

SEQ ID NO: 3822202 - DNA, 25 bp, Homo sapien
ttctctccaggtcaaaaatcagcag

SEQ ID NO: 3822203 - DNA, 25 bp, Homo sapien
tcatgggaaacccatttcagtctcc

SEQ ID NO: 3822204 - DNA, 25 bp, Homo sapien
cctctgctcctttgatagcctggtg

SEQ ID NO: 3822205 - DNA, 25 bp, Homo sapien
taaagaaagctgactgttcccggtg

SEQ ID NO: 3822206 - DNA, 25 bp, Homo sapien
ggctaagcgctactcttggtaccgt

SEQ ID NO: 3822207 - DNA, 25 bp, Homo sapien
tatttcctgggtaagggctaagcgc

SEQ ID NO: 3822208 - DNA, 25 bp, Homo sapien
tctgtggccatgaaggatatttcct

SEQ ID NO: 3822209 - DNA, 25 bp, Homo sapien
gcccgttcagagttccgcagcttta

SEQ ID NO: 3822210 - DNA, 25 bp, Homo sapien
cattcgttttctcaggtcagcactc

SEQ ID NO: 3822211 - DNA, 25 bp, Homo sapien
cagtcaagcttcctagggtcgaaaa

SEQ ID NO: 3822212 - DNA, 25 bp, Homo sapien
gcagctttatttccagcatgatgta

SEQ ID NO: 3822213 - DNA, 25 bp, Homo sapien
tcggctgccggaaggaggacttcca

SEQ ID NO: 3822214 - DNA, 25 bp, Homo sapien
cacattgtcgtaggtggagagtctc

SEQ ID NO: 3822215 - DNA, 25 bp, Homo sapien
gaggacagcccgttcataagccagt

SEQ ID NO: 3822216 - DNA, 25 bp, Homo sapien
atactggccacgctgggtatgccgg

SEQ ID NO: 3822217 - DNA, 25 bp, Homo sapien
cgctctgccagtcatggagaagctg

SEQ ID NO: 3822218 - DNA, 25 bp, Homo sapien
cttcatccgcccagaggaaaggacc

SEQ ID NO: 3822219 - DNA, 25 bp, Homo sapien
caccaaggctgcacggtgagcaggt

SEQ ID NO: 3822220 - DNA, 25 bp, Homo sapien
aggaagcactgtgcctgcgctcacg

SEQ ID NO: 3822221 - DNA, 25 bp, Homo sapien
gattctggacactcatcttgttgac

SEQ ID NO: 3822222 - DNA, 25 bp, Homo sapien
gtccaaaaacggttgccagattctg

SEQ ID NO: 3822223 - DNA, 25 bp, Homo sapien
gccgcagaatgttaggtccaaaaac

SEQ ID NO: 3822224 - DNA, 25 bp, Homo sapien
ggtcctctacctgtggccgcagaat

SEQ ID NO: 3822225 - DNA, 25 bp, Homo sapien
cctctgccaggctcgatgagggaag

SEQ ID NO: 3822226 - DNA, 25 bp, Homo sapien
tgcctgtgggcttttgcccactggg

SEQ ID NO: 3822227 - DNA, 25 bp, Homo sapien
gcctctgccaggctcgatgagggaa

SEQ ID NO: 3822228 - DNA, 25 bp, Homo sapien
tttgcccactgggtgtagcctgcct

SEQ ID NO: 3822229 - DNA, 25 bp, Homo sapien
ttgtaatttgcctgaggaaggttgc

SEQ ID NO: 3822230 - DNA, 25 bp, Homo sapien
tatctgagcaggttgtaatttgcct

SEQ ID NO: 3822231 - DNA, 25 bp, Homo sapien
tgcctgaggaaggttgctcacttgt

SEQ ID NO: 3822232 - DNA, 25 bp, Homo sapien
gctcacttgtttagccaactccaga

SEQ ID NO: 3822233 - DNA, 25 bp, Homo sapien
gaacagaatttcaaacaccggcaat

SEQ ID NO: 3822234 - DNA, 25 bp, Homo sapien
cagaatttcaaacaccggcaatgag

SEQ ID NO: 3822235 - DNA, 25 bp, Homo sapien
tttcaaacaccggcaatgagggccc

SEQ ID NO: 3822236 - DNA, 25 bp, Homo sapien
ttcaaacaccggcaatgagggccct

SEQ ID NO: 3822237 - DNA, 25 bp, Homo sapien
ttatcaagacacaaatatttgccag

SEQ ID NO: 3822238 - DNA, 25 bp, Homo sapien
ctcccacatggccgcagggaaggca

SEQ ID NO: 3822239 - DNA, 25 bp, Homo sapien
tatcaagacacaaatatttgccaga

SEQ ID NO: 3822240 - DNA, 25 bp, Homo sapien
tatttgccagatagtgagccctcat

SEQ ID NO: 3822241 - DNA, 25 bp, Homo sapien
ggcgcagctgaggaagtcctcgtac

SEQ ID NO: 3822242 - DNA, 25 bp, Homo sapien
ccctcgtccttggtgagcagctggg

SEQ ID NO: 3822243 - DNA, 25 bp, Homo sapien
ttggtgagcagctgggcgcagctga

SEQ ID NO: 3822244 - DNA, 25 bp, Homo sapien
agcagctgggcgcagctgaggaagt

SEQ ID NO: 3822245 - DNA, 25 bp, Homo sapien
agcagggaggccaccgtgtgcacgt

SEQ ID NO: 3822246 - DNA, 25 bp, Homo sapien
ggccaccgtgtgcacgtctgttgtg

SEQ ID NO: 3822247 - DNA, 25 bp, Homo sapien
ggagctcccgcaggtacagcttcag

SEQ ID NO: 3822248 - DNA, 25 bp, Homo sapien
tcccgcaggtacagcttcagcaggg

SEQ ID NO: 3822249 - DNA, 25 bp, Homo sapien
acttccgctcgtggtggactgtttc

SEQ ID NO: 3822250 - DNA, 25 bp, Homo sapien
tgagcccgcgctcccggatgaagtc

SEQ ID NO: 3822251 - DNA, 25 bp, Homo sapien
gcctggcctggcatgcggaacagcc

SEQ ID NO: 3822252 - DNA, 25 bp, Homo sapien
tccccacagtcgaaggaatcctgca

SEQ ID NO: 3822253 - DNA, 25 bp, Homo sapien
gagaggagctagtcacaccctccac

SEQ ID NO: 3822254 - DNA, 25 bp, Homo sapien
gaggagctagtcacaccctccacca

SEQ ID NO: 3822255 - DNA, 25 bp, Homo sapien
agaggagctagtcacaccctccacc

SEQ ID NO: 3822256 - DNA, 25 bp, Homo sapien
agagaggagctagtcacaccctcca

SEQ ID NO: 3822257 - DNA, 25 bp, Homo sapien
ctggccgcccggacacatgctggga

SEQ ID NO: 3822258 - DNA, 25 bp, Homo sapien
ccgcccggacacatgctgggaggat

SEQ ID NO: 3822259 - DNA, 25 bp, Homo sapien
tgccctggccgcccggacacatgct

SEQ ID NO: 3822260 - DNA, 25 bp, Homo sapien
actgggaggatgcataccagaaggc

SEQ ID NO: 3822261 - DNA, 25 bp, Homo sapien
cacagtagctgaaatgcggaagcaa

SEQ ID NO: 3822262 - DNA, 25 bp, Homo sapien
cccttgggagcgttcattatgcctg

SEQ ID NO: 3822263 - DNA, 25 bp, Homo sapien
tgtgacctggccatggagcttgccc

SEQ ID NO: 3822264 - DNA, 25 bp, Homo sapien
caagccaggagcaaatggcccttgg

SEQ ID NO: 3822265 - DNA, 25 bp, Homo sapien
tgtacagtgcctgcacatccaagca

SEQ ID NO: 3822266 - DNA, 25 bp, Homo sapien
catttgtacagtgcctgcacatcca

SEQ ID NO: 3822267 - DNA, 25 bp, Homo sapien
tttgtacagtgcctgcacatccaag

SEQ ID NO: 3822268 - DNA, 25 bp, Homo sapien
acagtgcctgcacatccaagcagct

SEQ ID NO: 3822269 - DNA, 25 bp, Homo sapien
cactttcccaaaacagggatggaag

SEQ ID NO: 3822270 - DNA, 25 bp, Homo sapien
aaacagggatggaagagccaggaaa

SEQ ID NO: 3822271 - DNA, 25 bp, Homo sapien
cccatggcgccttcctgaacacttt

SEQ ID NO: 3822272 - DNA, 25 bp, Homo sapien
gccaggaaagggacatccacagggt

SEQ ID NO: 3822273 - DNA, 25 bp, Homo sapien
aggcggccgcgggcaagcgctgcat

SEQ ID NO: 3822274 - DNA, 25 bp, Homo sapien
acaagcgggcaagcggcaaggcggc

SEQ ID NO: 3822275 - DNA, 25 bp, Homo sapien
gcggcgggcgcgcaacaagcgggca

SEQ ID NO: 3822276 - DNA, 25 bp, Homo sapien
cgcgcaacaagcgggcaagcggcaa

SEQ ID NO: 3822277 - DNA, 25 bp, Homo sapien
gcccgcgcggccggcatcaggccca

SEQ ID NO: 3822278 - DNA, 25 bp, Homo sapien
cccgcgcggccggcatcaggcccat

SEQ ID NO: 3822279 - DNA, 25 bp, Homo sapien
ggcccaggatctgtgagttgcctgg

SEQ ID NO: 3822280 - DNA, 25 bp, Homo sapien
tgcctggaatgccacgcccgaagtc

SEQ ID NO: 3822281 - DNA, 25 bp, Homo sapien
gaggttaggtaactgagtctgggtc

SEQ ID NO: 3822282 - DNA, 25 bp, Homo sapien
acctgctttggagcgcccgcttaac

SEQ ID NO: 3822283 - DNA, 25 bp, Homo sapien
ggcactgccacattgagctccaggt

SEQ ID NO: 3822284 - DNA, 25 bp, Homo sapien
aaggagcagctatgcacttgcacag

SEQ ID NO: 3822285 - DNA, 25 bp, Homo sapien
aaggaagtttgaccacagtggaggc

SEQ ID NO: 3822286 - DNA, 25 bp, Homo sapien
gtcctggccctgacactaagtatgg

SEQ ID NO: 3822287 - DNA, 25 bp, Homo sapien
ctcagatctagtgggtagaatgcgc

SEQ ID NO: 3822288 - DNA, 25 bp, Homo sapien
atgcgctgaggcctacctggcaaca

SEQ ID NO: 3822289 - DNA, 25 bp, Homo sapien
cagcgatgagcttaccctggaggtg

SEQ ID NO: 3822290 - DNA, 25 bp, Homo sapien
gatccaggaccttagggactgcctc

SEQ ID NO: 3822291 - DNA, 25 bp, Homo sapien
cttggggatccaagttctcaggctc

SEQ ID NO: 3822292 - DNA, 25 bp, Homo sapien
tccctagataaggcagctgctcggg

SEQ ID NO: 3822293 - DNA, 25 bp, Homo sapien
ctccctagataaggcagctgctcgg

SEQ ID NO: 3822294 - DNA, 25 bp, Homo sapien
cggccttcctgacatgcctcgtgtt

SEQ ID NO: 3822295 - DNA, 25 bp, Homo sapien
ctcccactcgcctggtcttcactcc

SEQ ID NO: 3822296 - DNA, 25 bp, Homo sapien
atgcctcgtgttcccaaagctcgtc

SEQ ID NO: 3822297 - DNA, 25 bp, Homo sapien
ttcctgacatgcctcgtgttcccaa

SEQ ID NO: 3822298 - DNA, 25 bp, Homo sapien
tgggcatgcgatctacgggcagtac

SEQ ID NO: 3822299 - DNA, 25 bp, Homo sapien
gagggtgggcatgcgatctacgggc

SEQ ID NO: 3822300 - DNA, 25 bp, Homo sapien
caagggttctagagggtgggcatgc

SEQ ID NO: 3822301 - DNA, 25 bp, Homo sapien
tctagagggtgggcatgcgatctac

SEQ ID NO: 3822302 - DNA, 25 bp, Homo sapien
gttggccggcaccttctcccgctcc

SEQ ID NO: 3822303 - DNA, 25 bp, Homo sapien
gggcccagatgactcggcggatggc

SEQ ID NO: 3822304 - DNA, 25 bp, Homo sapien
tgactcggcggatggcctgcaccca

SEQ ID NO: 3822305 - DNA, 25 bp, Homo sapien
gccatgagcaggagcgcctcggggt

SEQ ID NO: 3822306 - DNA, 25 bp, Homo sapien
ctgcacagcatttgggctacgaagg

SEQ ID NO: 3822307 - DNA, 25 bp, Homo sapien
acagcatttgggctacgaaggctgg

SEQ ID NO: 3822308 - DNA, 25 bp, Homo sapien
gcatttgggctacgaaggctggaat

SEQ ID NO: 3822309 - DNA, 25 bp, Homo sapien
catttgggctacgaaggctggaatg

SEQ ID NO: 3822310 - DNA, 25 bp, Homo sapien
ctgggcatacgcctgctcctcttca

SEQ ID NO: 3822311 - DNA, 25 bp, Homo sapien
gggcatacgcctgctcctcttcaga

SEQ ID NO: 3822312 - DNA, 25 bp, Homo sapien
ggcatacgcctgctcctcttcagac

SEQ ID NO: 3822313 - DNA, 25 bp, Homo sapien
ccctgggcatacgcctgctcctctt

SEQ ID NO: 3822314 - DNA, 25 bp, Homo sapien
gagcagtggccagacacacctgttg

SEQ ID NO: 3822315 - DNA, 25 bp, Homo sapien
gcagtggccagacacacctgttggg

SEQ ID NO: 3822316 - DNA, 25 bp, Homo sapien
aggtgcacgaggcactcctccactg

SEQ ID NO: 3822317 - DNA, 25 bp, Homo sapien
cagaaaaccaccaggtgcacgaggc

SEQ ID NO: 3822318 - DNA, 25 bp, Homo sapien
ctaagatccttgtccccgggtgcct

SEQ ID NO: 3822319 - DNA, 25 bp, Homo sapien
gaccaagtgaatctgcagacatcag

SEQ ID NO: 3822320 - DNA, 25 bp, Homo sapien
cagcggtgggttcaaacatagcttc

SEQ ID NO: 3822321 - DNA, 25 bp, Homo sapien
gagagaccactgatttagcgcatga

SEQ ID NO: 3822322 - DNA, 25 bp, Homo sapien
gaaggaactcctcttgaccaagtga

SEQ ID NO: 3822323 - DNA, 25 bp, Homo sapien
tacaaaggaccttggttgccctggc

SEQ ID NO: 3822324 - DNA, 25 bp, Homo sapien
tctggaaaacgagaaggctgagcca

SEQ ID NO: 3822325 - DNA, 25 bp, Homo sapien
tcagtggcacagcaacagtcaggat

SEQ ID NO: 3822326 - DNA, 25 bp, Homo sapien
tccctattggtaaacggaggaagca

SEQ ID NO: 3822327 - DNA, 25 bp, Homo sapien
aatggctccatagggcccaggactc

SEQ ID NO: 3822328 - DNA, 25 bp, Homo sapien
tgctggaaatcctcaacaatggctc

SEQ ID NO: 3822329 - DNA, 25 bp, Homo sapien
aagttgttgatgcagactgggtgct

SEQ ID NO: 3822330 - DNA, 25 bp, Homo sapien
tcataacaaagtggcccgtaagtcc

SEQ ID NO: 3822331 - DNA, 25 bp, Homo sapien
ggtgcggaaaccagagaggtggtct

SEQ ID NO: 3822332 - DNA, 25 bp, Homo sapien
tcaggcccatttgatggcatcttga

SEQ ID NO: 3822333 - DNA, 25 bp, Homo sapien
ggaagtggtgtggtgcggaaaccag

SEQ ID NO: 3822334 - DNA, 25 bp, Homo sapien
caggcccatttgatggcatcttgag

SEQ ID NO: 3822335 - DNA, 25 bp, Homo sapien
ccggcccacgggcagtgcccagctg

SEQ ID NO: 3822336 - DNA, 25 bp, Homo sapien
aggtccggcccacgggcagtgccca

SEQ ID NO: 3822337 - DNA, 25 bp, Homo sapien
ctccagtccttgcagcagcacagcc

SEQ ID NO: 3822338 - DNA, 25 bp, Homo sapien
tttgggcgctcgcaggtgtcccctc

SEQ ID NO: 3822339 - DNA, 25 bp, Homo sapien
gagtgagcccctcgggtgattgtcc

SEQ ID NO: 3822340 - DNA, 25 bp, Homo sapien
tgaggccccaggaattccaagctag

SEQ ID NO: 3822341 - DNA, 25 bp, Homo sapien
catcacagcggccattgtgggccgc

SEQ ID NO: 3822342 - DNA, 25 bp, Homo sapien
ggccaagtcctacatttggaaagca

SEQ ID NO: 3822343 - DNA, 25 bp, Homo sapien
tggtgtatatgttcacgagcaatct

SEQ ID NO: 3822344 - DNA, 25 bp, Homo sapien
caagttgggcctgtccttattgaac

SEQ ID NO: 3822345 - DNA, 25 bp, Homo sapien
ctcttgagggcctactttgcgccag

SEQ ID NO: 3822346 - DNA, 25 bp, Homo sapien
cactgtaaggtgagttagtgacaag

SEQ ID NO: 3822347 - DNA, 25 bp, Homo sapien
cagctcgggccaatgggccttcagc

SEQ ID NO: 3822348 - DNA, 25 bp, Homo sapien
agctcgggccaatgggccttcagct

SEQ ID NO: 3822349 - DNA, 25 bp, Homo sapien
ccccagctcgggccaatgggccttc

SEQ ID NO: 3822350 - DNA, 25 bp, Homo sapien
ccagctcgggccaatgggccttcag

SEQ ID NO: 3822351 - DNA, 25 bp, Homo sapien
tctctgccagacgagggcactgggt

SEQ ID NO: 3822352 - DNA, 25 bp, Homo sapien
ggtatcttccaagctggccttggtg

SEQ ID NO: 3822353 - DNA, 25 bp, Homo sapien
atgggcacagggtggtatcttccaa

SEQ ID NO: 3822354 - DNA, 25 bp, Homo sapien
cttggtgttgccaatgagaggacag

SEQ ID NO: 3822355 - DNA, 25 bp, Homo sapien
ccaagtctctgcaggatcaggcagg

SEQ ID NO: 3822356 - DNA, 25 bp, Homo sapien
aatagggggttgagcctgtggagct

SEQ ID NO: 3822357 - DNA, 25 bp, Homo sapien
ggaaggaaagggctgccaagtctct

SEQ ID NO: 3822358 - DNA, 25 bp, Homo sapien
ctgtatagaaatagggggttgagcc

SEQ ID NO: 3822359 - DNA, 25 bp, Homo sapien
tcagacagtaagactgagcacctca

SEQ ID NO: 3822360 - DNA, 25 bp, Homo sapien
gaggctgagccgtgattgaaactca

SEQ ID NO: 3822361 - DNA, 25 bp, Homo sapien
taccaataactaaccatgtgccaag

SEQ ID NO: 3822362 - DNA, 25 bp, Homo sapien
taagagtgtcaaataagtcagccaa

SEQ ID NO: 3822363 - DNA, 25 bp, Homo sapien
gcccctttgccgtattggatcagga

SEQ ID NO: 3822364 - DNA, 25 bp, Homo sapien
cacctgtgaagtgtatgctggagcc

SEQ ID NO: 3822365 - DNA, 25 bp, Homo sapien
caggttggacaggagaaggctgtag

SEQ ID NO: 3822366 - DNA, 25 bp, Homo sapien
gagccttgctatcagcaggttggac

SEQ ID NO: 3822367 - DNA, 25 bp, Homo sapien
gcaggagtttcccacacctggtcct

SEQ ID NO: 3822368 - DNA, 25 bp, Homo sapien
ggttacttactgtgccgttggccaa

SEQ ID NO: 3822369 - DNA, 25 bp, Homo sapien
gttacttactgtgccgttggccaag

SEQ ID NO: 3822370 - DNA, 25 bp, Homo sapien
ctgaggttacttactgtgccgttgg

SEQ ID NO: 3822371 - DNA, 25 bp, Homo sapien
gaggttacttactgtgccgttggcc

SEQ ID NO: 3822372 - DNA, 25 bp, Homo sapien
agcactgtggccctcacggactggg

SEQ ID NO: 3822373 - DNA, 25 bp, Homo sapien
tgctggcatagataggggttgcttc

SEQ ID NO: 3822374 - DNA, 25 bp, Homo sapien
tccctcacatctggttcaaagctct

SEQ ID NO: 3822375 - DNA, 25 bp, Homo sapien
ggttgcttctcctagactcttccct

SEQ ID NO: 3822376 - DNA, 25 bp, Homo sapien
tggatttcctcttggtctttgcaca

SEQ ID NO: 3822377 - DNA, 25 bp, Homo sapien
ctttgcacatttaccccgggggctg

SEQ ID NO: 3822378 - DNA, 25 bp, Homo sapien
gggctgtgcttggtgcacactggca

SEQ ID NO: 3822379 - DNA, 25 bp, Homo sapien
gcatggcccacttggtgatacttcc

SEQ ID NO: 3822380 - DNA, 25 bp, Homo sapien
gatctgcaggaacctgatgcgcagg

SEQ ID NO: 3822381 - DNA, 25 bp, Homo sapien
acccgtcccgctctccctgaactgc

SEQ ID NO: 3822382 - DNA, 25 bp, Homo sapien
ctgcaggaacctgatgcgcaggcag

SEQ ID NO: 3822383 - DNA, 25 bp, Homo sapien
ggatctgcaggaacctgatgcgcag

SEQ ID NO: 3822384 - DNA, 25 bp, Homo sapien
ctgtgcttgagacaaaggagttcag

SEQ ID NO: 3822385 - DNA, 25 bp, Homo sapien
tgaatttaaaaatcctcgtttcgca

SEQ ID NO: 3822386 - DNA, 25 bp, Homo sapien
cacatttccgagtcatgcctggaga

SEQ ID NO: 3822387 - DNA, 25 bp, Homo sapien
agctcattgtccagataattgatgg

SEQ ID NO: 3822388 - DNA, 25 bp, Homo sapien
tccagataattgatgggactttcta

SEQ ID NO: 3822389 - DNA, 25 bp, Homo sapien
gagtatgctgtcgatttggcccaca

SEQ ID NO: 3822390 - DNA, 25 bp, Homo sapien
cagtcacctgtgtcccttgtagaga

SEQ ID NO: 3822391 - DNA, 25 bp, Homo sapien
ttcagtcacctgtgtcccttgtaga

SEQ ID NO: 3822392 - DNA, 25 bp, Homo sapien
cacctgtgtcccttgtagagaaata

SEQ ID NO: 3822393 - DNA, 25 bp, Homo sapien
tcagtcacctgtgtcccttgtagag

SEQ ID NO: 3822394 - DNA, 25 bp, Homo sapien
acaggaacattgttcaacctgtctg

SEQ ID NO: 3822395 - DNA, 25 bp, Homo sapien
ctcagctacaggaacattgttcaac

SEQ ID NO: 3822396 - DNA, 25 bp, Homo sapien
tcagctacaggaacattgttcaacc

SEQ ID NO: 3822397 - DNA, 25 bp, Homo sapien
gctacaggaacattgttcaacctgt

SEQ ID NO: 3822398 - DNA, 25 bp, Homo sapien
gcccacggcatttggtggctgcata

SEQ ID NO: 3822399 - DNA, 25 bp, Homo sapien
ctggtgttccatgtagaggggctaa

SEQ ID NO: 3822400 - DNA, 25 bp, Homo sapien
tctttgccccctgaagtacctggtg

SEQ ID NO: 3822401 - DNA, 25 bp, Homo sapien
gaccatatggtaggcctctttgccc

SEQ ID NO: 3822402 - DNA, 25 bp, Homo sapien
ctgtgccaggctgatctgctgagcc

SEQ ID NO: 3822403 - DNA, 25 bp, Homo sapien
tgtgccaggctgatctgctgagcca

SEQ ID NO: 3822404 - DNA, 25 bp, Homo sapien
tagttaccagctagaaccatcctgg

SEQ ID NO: 3822405 - DNA, 25 bp, Homo sapien
gagaaggccacaactagggtatttc

SEQ ID NO: 3822406 - DNA, 25 bp, Homo sapien
tggttattctcaacttacaaggagg

SEQ ID NO: 3822407 - DNA, 25 bp, Homo sapien
caaactcacgaagtaaggcagaggc

SEQ ID NO: 3822408 - DNA, 25 bp, Homo sapien
tgagctccgacacctgatggcatct

SEQ ID NO: 3822409 - DNA, 25 bp, Homo sapien
tctactccaggtcaaggactcaggg

SEQ ID NO: 3822410 - DNA, 25 bp, Homo sapien
gattgaagccccacctgaatgaggt

SEQ ID NO: 3822411 - DNA, 25 bp, Homo sapien
caattatgtgtcaagtaccgctagg

SEQ ID NO: 3822412 - DNA, 25 bp, Homo sapien
ggcggtttctcttgagtggttagca

SEQ ID NO: 3822413 - DNA, 25 bp, Homo sapien
tgctgtcctcaaaatagagtgaatt

SEQ ID NO: 3822414 - DNA, 25 bp, Homo sapien
gctgtcctcaaaatagagtgaattc

SEQ ID NO: 3822415 - DNA, 25 bp, Homo sapien
tcttgagtggttagcaccatcttct

SEQ ID NO: 3822416 - DNA, 25 bp, Homo sapien
tgttccactcctagaagtgcatgtg

SEQ ID NO: 3822417 - DNA, 25 bp, Homo sapien
tccctgcaggctgaaatattcctgt

SEQ ID NO: 3822418 - DNA, 25 bp, Homo sapien
agatttctggtttccgactgtccaa

SEQ ID NO: 3822419 - DNA, 25 bp, Homo sapien
tcaagttatgggataggatggcctc

SEQ ID NO: 3822420 - DNA, 25 bp, Homo sapien
cgccattttactggagaacctctgg

SEQ ID NO: 3822421 - DNA, 25 bp, Homo sapien
ggccagagtccccattataaagggc

SEQ ID NO: 3822422 - DNA, 25 bp, Homo sapien
cacctcttggcactggattgctcag

SEQ ID NO: 3822423 - DNA, 25 bp, Homo sapien
gaatggttctctatggagctgactg

SEQ ID NO: 3822424 - DNA, 25 bp, Homo sapien
catctagttgtgcttgtgcctttaa

SEQ ID NO: 3822425 - DNA, 25 bp, Homo sapien
agagatatctagtcctgccaagccc

SEQ ID NO: 3822426 - DNA, 25 bp, Homo sapien
gcagtagcgcttatcttgtctcaac

SEQ ID NO: 3822427 - DNA, 25 bp, Homo sapien
ttttgccctcatttccagagatatc

SEQ ID NO: 3822428 - DNA, 25 bp, Homo sapien
gttgcttccaccagaggatgtggag

SEQ ID NO: 3822429 - DNA, 25 bp, Homo sapien
tagttgcttccaccagaggatgtgg

SEQ ID NO: 3822430 - DNA, 25 bp, Homo sapien
tgcttccaccagaggatgtggaggt

SEQ ID NO: 3822431 - DNA, 25 bp, Homo sapien
ttagttgcttccaccagaggatgtg

SEQ ID NO: 3822432 - DNA, 25 bp, Homo sapien
gacattggctgagtagggatcacac

SEQ ID NO: 3822433 - DNA, 25 bp, Homo sapien
taaaatcgggccaagtggacattgg

SEQ ID NO: 3822434 - DNA, 25 bp, Homo sapien
tgcctagcctaggagtgagcctgag

SEQ ID NO: 3822435 - DNA, 25 bp, Homo sapien
cagtccttcaagatgagtccccagg

SEQ ID NO: 3822436 - DNA, 25 bp, Homo sapien
tcattgcagaagttgtggacatgtt

SEQ ID NO: 3822437 - DNA, 25 bp, Homo sapien
ctgtgataccaggaacatgggggat

SEQ ID NO: 3822438 - DNA, 25 bp, Homo sapien
tgccacgatgcccacggcacaccgg

SEQ ID NO: 3822439 - DNA, 25 bp, Homo sapien
ggcacaccggacatgcacttctcac

SEQ ID NO: 3822440 - DNA, 25 bp, Homo sapien
cccatcactaggcttttggagcggg

SEQ ID NO: 3822441 - DNA, 25 bp, Homo sapien
caaaccagcgctgctgccagttctt

SEQ ID NO: 3822442 - DNA, 25 bp, Homo sapien
tctttgtccttgtagtagaaaagct

SEQ ID NO: 3822443 - DNA, 25 bp, Homo sapien
gcccagcctgtgagggcacggcatc

SEQ ID NO: 3822444 - DNA, 25 bp, Homo sapien
ccacttctacatgcgtgtcctcgtt

SEQ ID NO: 3822445 - DNA, 25 bp, Homo sapien
cacttctacatgcgtgtcctcgtta

SEQ ID NO: 3822446 - DNA, 25 bp, Homo sapien
cagtccctttccagggttggggctg

SEQ ID NO: 3822447 - DNA, 25 bp, Homo sapien
ccctttccagggttggggctgcatc

SEQ ID NO: 3822448 - DNA, 25 bp, Homo sapien
gtccctttccagggttggggctgca

SEQ ID NO: 3822449 - DNA, 25 bp, Homo sapien
ctttccagggttggggctgcatcag

SEQ ID NO: 3822450 - DNA, 25 bp, Homo sapien
gagctgacaagtgttatcaggaccc

SEQ ID NO: 3822451 - DNA, 25 bp, Homo sapien
aggtggagctgacaagtgttatcag

SEQ ID NO: 3822452 - DNA, 25 bp, Homo sapien
ggagctgacaagtgttatcaggacc

SEQ ID NO: 3822453 - DNA, 25 bp, Homo sapien
gtggagctgacaagtgttatcagga

SEQ ID NO: 3822454 - DNA, 25 bp, Homo sapien
atagccctccttgtgctcattctga

SEQ ID NO: 3822455 - DNA, 25 bp, Homo sapien
cctgttccccatagccctccttgtg

SEQ ID NO: 3822456 - DNA, 25 bp, Homo sapien
tcattctgacaacgtccccatccca

SEQ ID NO: 3822457 - DNA, 25 bp, Homo sapien
ctgctgggattggagagtctacctg

SEQ ID NO: 3822458 - DNA, 25 bp, Homo sapien
cacccagcttaatttgtgacttgca

SEQ ID NO: 3822459 - DNA, 25 bp, Homo sapien
tcgcctcggcatgaagaactagagc

SEQ ID NO: 3822460 - DNA, 25 bp, Homo sapien
ttcctggccctaattggccacctgt

SEQ ID NO: 3822461 - DNA, 25 bp, Homo sapien
tgagccaggccctcctaatgagcct

SEQ ID NO: 3822462 - DNA, 25 bp, Homo sapien
gctctccatagatctgtttcaacaa

SEQ ID NO: 3822463 - DNA, 25 bp, Homo sapien
ggaacccagctctccatagatctgt

SEQ ID NO: 3822464 - DNA, 25 bp, Homo sapien
agcagaggaacccagctctccatag

SEQ ID NO: 3822465 - DNA, 25 bp, Homo sapien
ccagctctccatagatctgtttcaa

SEQ ID NO: 3822466 - DNA, 25 bp, Homo sapien
taagctctcgcagaggtatctggct

SEQ ID NO: 3822467 - DNA, 25 bp, Homo sapien
gatactggccacctgaaaagacaca

SEQ ID NO: 3822468 - DNA, 25 bp, Homo sapien
tatctggcttgtcctatcccttggg

SEQ ID NO: 3822469 - DNA, 25 bp, Homo sapien
caaaatgacactttccgtggctaag

SEQ ID NO: 3822470 - DNA, 25 bp, Homo sapien
gcctgcctgatctttgggctcagca

SEQ ID NO: 3822471 - DNA, 25 bp, Homo sapien
cctgcctgatctttgggctcagcat

SEQ ID NO: 3822472 - DNA, 25 bp, Homo sapien
gttcttgcagccgtccggccagccc

SEQ ID NO: 3822473 - DNA, 25 bp, Homo sapien
atccacttgcttttgctcgtcctcg

SEQ ID NO: 3822474 - DNA, 25 bp, Homo sapien
gccttggactacataaacctcgatg

SEQ ID NO: 3822475 - DNA, 25 bp, Homo sapien
tccaagcggaccattaaagcctcag

SEQ ID NO: 3822476 - DNA, 25 bp, Homo sapien
ttatccatcccagaattaattccca

SEQ ID NO: 3822477 - DNA, 25 bp, Homo sapien
caccactgaatgacagaactgacct

SEQ ID NO: 3822478 - DNA, 25 bp, Homo sapien
tcatgggcagatccaagaaacacca

SEQ ID NO: 3822479 - DNA, 25 bp, Homo sapien
ctgaatgacagaactgacctccttt

SEQ ID NO: 3822480 - DNA, 25 bp, Homo sapien
cactgaatgacagaactgacctcct

SEQ ID NO: 3822481 - DNA, 25 bp, Homo sapien
aagtttaccagccctgatctgcagg

SEQ ID NO: 3822482 - DNA, 25 bp, Homo sapien
tgaagtttaccagccctgatctgca

SEQ ID NO: 3822483 - DNA, 25 bp, Homo sapien
agtttaccagccctgatctgcaggg

SEQ ID NO: 3822484 - DNA, 25 bp, Homo sapien
gaagtttaccagccctgatctgcag

SEQ ID NO: 3822485 - DNA, 25 bp, Homo sapien
aggtgtgacaccctgggctaggcag

SEQ ID NO: 3822486 - DNA, 25 bp, Homo sapien
caggtgtgacaccctgggctaggca

SEQ ID NO: 3822487 - DNA, 25 bp, Homo sapien
ctgggctaggcagggtccctgctta

SEQ ID NO: 3822488 - DNA, 25 bp, Homo sapien
acaccctgggctaggcagggtccct

SEQ ID NO: 3822489 - DNA, 25 bp, Homo sapien
gagacgaaagagtgaaacatgtcct

SEQ ID NO: 3822490 - DNA, 25 bp, Homo sapien
tgtccttgctatatggcagtcctgt

SEQ ID NO: 3822491 - DNA, 25 bp, Homo sapien
gatgcactgagattcccaaaagctg

SEQ ID NO: 3822492 - DNA, 25 bp, Homo sapien
gtcctgggaacatgatgcactgaga

SEQ ID NO: 3822493 - DNA, 25 bp, Homo sapien
ataccaccttgtactgctcaggagc

SEQ ID NO: 3822494 - DNA, 25 bp, Homo sapien
caggagccatgctggggtataagct

SEQ ID NO: 3822495 - DNA, 25 bp, Homo sapien
gggtataagctgaaatccagcatgg

SEQ ID NO: 3822496 - DNA, 25 bp, Homo sapien
caccttgtactgctcaggagccatg

SEQ ID NO: 3822497 - DNA, 25 bp, Homo sapien
catctacccctggaagatcctgagt

SEQ ID NO: 3822498 - DNA, 25 bp, Homo sapien
ttcatctacccctggaagatcctga

SEQ ID NO: 3822499 - DNA, 25 bp, Homo sapien
ccttcatctacccctggaagatcct

SEQ ID NO: 3822500 - DNA, 25 bp, Homo sapien
ttccttcatctacccctggaagatc

SEQ ID NO: 3822501 - DNA, 25 bp, Homo sapien
cttgagtggcatgcaaaacccagag

SEQ ID NO: 3822502 - DNA, 25 bp, Homo sapien
gcaggcaaagcccagaccttgagtg

SEQ ID NO: 3822503 - DNA, 25 bp, Homo sapien
ccacaaagaggccacgaagtgggca

SEQ ID NO: 3822504 - DNA, 25 bp, Homo sapien
cacaaagaggccacgaagtgggcag

SEQ ID NO: 3822505 - DNA, 25 bp, Homo sapien
gctgccagccacttgtgcattccat

SEQ ID NO: 3822506 - DNA, 25 bp, Homo sapien
tgctgccagccacttgtgcattcca

SEQ ID NO: 3822507 - DNA, 25 bp, Homo sapien
catgctgccagccacttgtgcattc

SEQ ID NO: 3822508 - DNA, 25 bp, Homo sapien
ccacatgctgccagccacttgtgca

SEQ ID NO: 3822509 - DNA, 25 bp, Homo sapien
cccggtggttgtgtaactcatccca

SEQ ID NO: 3822510 - DNA, 25 bp, Homo sapien
caggtgacccggtggttgtgtaact

SEQ ID NO: 3822511 - DNA, 25 bp, Homo sapien
tcacccaggtgacccggtggttgtg

SEQ ID NO: 3822512 - DNA, 25 bp, Homo sapien
ctgaaagaggtgagtctgtaggcca

SEQ ID NO: 3822513 - DNA, 25 bp, Homo sapien
gaatgaatgtggatgaaacttggaa

SEQ ID NO: 3822514 - DNA, 25 bp, Homo sapien
gagggagcaacctcttaataggtac

SEQ ID NO: 3822515 - DNA, 25 bp, Homo sapien
catcatgaatgtatgaattgccact

SEQ ID NO: 3822516 - DNA, 25 bp, Homo sapien
cagagttggaaaatccatggaggca

SEQ ID NO: 3822517 - DNA, 25 bp, Homo sapien
tgaaatatctggctgcaaacgtcct

SEQ ID NO: 3822518 - DNA, 25 bp, Homo sapien
gaagctgtcggcagcataatgaagc

SEQ ID NO: 3822519 - DNA, 25 bp, Homo sapien
ataaagaaccaaccacatcctcaag

SEQ ID NO: 3822520 - DNA, 25 bp, Homo sapien
tcctcaagcagacaagctaattcct

SEQ ID NO: 3822521 - DNA, 25 bp, Homo sapien
cctccgtgtgatgagcaggcgagca

SEQ ID NO: 3822522 - DNA, 25 bp, Homo sapien
ttcaaaggcaggtcatacaccagct

SEQ ID NO: 3822523 - DNA, 25 bp, Homo sapien
ctgtggatcacacgcattagcctgg

SEQ ID NO: 3822524 - DNA, 25 bp, Homo sapien
ggacgctcgtcttggaatgactcag

SEQ ID NO: 3822525 - DNA, 25 bp, Homo sapien
ctgcagcgtggcctcggaaactgga

SEQ ID NO: 3822526 - DNA, 25 bp, Homo sapien
ccacagtggagcaggcgtggagtcc

SEQ ID NO: 3822527 - DNA, 25 bp, Homo sapien
gcgtggcctcggaaactggaataag

SEQ ID NO: 3822528 - DNA, 25 bp, Homo sapien
tgggtactcggtgacactgggagag

SEQ ID NO: 3822529 - DNA, 25 bp, Homo sapien
catacagtaactaacactgaacaca

SEQ ID NO: 3822530 - DNA, 25 bp, Homo sapien
acagtaactaacactgaacacagtc

SEQ ID NO: 3822531 - DNA, 25 bp, Homo sapien
atacagtaactaacactgaacacag

SEQ ID NO: 3822532 - DNA, 25 bp, Homo sapien
tacagtaactaacactgaacacagt

SEQ ID NO: 3822533 - DNA, 25 bp, Homo sapien
aactctttcaaatccggtgcatatt

SEQ ID NO: 3822534 - DNA, 25 bp, Homo sapien
aatttggatactaaatttctgctgc

SEQ ID NO: 3822535 - DNA, 25 bp, Homo sapien
tcaaatgtgattagtggccctactg

SEQ ID NO: 3822536 - DNA, 25 bp, Homo sapien
tgaacatttaagtgctcggttgatc

SEQ ID NO: 3822537 - DNA, 25 bp, Homo sapien
ctgtgaagtagagcacaacctcgct

SEQ ID NO: 3822538 - DNA, 25 bp, Homo sapien
gcacaacctcgctgcagggagactt

SEQ ID NO: 3822539 - DNA, 25 bp, Homo sapien
tgggccagggatctgctactgcagt

SEQ ID NO: 3822540 - DNA, 25 bp, Homo sapien
tactgcagttatgccttggactccg

SEQ ID NO: 3822541 - DNA, 25 bp, Homo sapien
gggtttatattgcaatccttgtccc

SEQ ID NO: 3822542 - DNA, 25 bp, Homo sapien
ttatattgcaatccttgtccctccc

SEQ ID NO: 3822543 - DNA, 25 bp, Homo sapien
gcctgggtttatattgcaatccttg

SEQ ID NO: 3822544 - DNA, 25 bp, Homo sapien
tgcctgggtttatattgcaatcctt

SEQ ID NO: 3822545 - DNA, 25 bp, Homo sapien
tgactttaagatccgcttggcggtt

SEQ ID NO: 3822546 - DNA, 25 bp, Homo sapien
tttgactttaagatccgcttggcgg

SEQ ID NO: 3822547 - DNA, 25 bp, Homo sapien
ttttgactttaagatccgcttggcg

SEQ ID NO: 3822548 - DNA, 25 bp, Homo sapien
tcttttgactttaagatccgcttgg

SEQ ID NO: 3822549 - DNA, 25 bp, Homo sapien
aggtgttcactgggccaaactgagg

SEQ ID NO: 3822550 - DNA, 25 bp, Homo sapien
tgttcactgggccaaactgaggtgc

SEQ ID NO: 3822551 - DNA, 25 bp, Homo sapien
acctgatcaccatcaccggccagat

SEQ ID NO: 3822552 - DNA, 25 bp, Homo sapien
tgggccaaactgaggtgcatgagca

SEQ ID NO: 3822553 - DNA, 25 bp, Homo sapien
tgcaggaggactcctctgattggtg

SEQ ID NO: 3822554 - DNA, 25 bp, Homo sapien
tcatgtttagcctgcaggaggactc

SEQ ID NO: 3822555 - DNA, 25 bp, Homo sapien
atcattaccttcatgtttagcctgc

SEQ ID NO: 3822556 - DNA, 25 bp, Homo sapien
gaggactcctctgattggtgtttca

SEQ ID NO: 3822557 - DNA, 25 bp, Homo sapien
ctgctgctggctacccggcaaggtg

SEQ ID NO: 3822558 - DNA, 25 bp, Homo sapien
cctgctgctggctacccggcaaggt

SEQ ID NO: 3822559 - DNA, 25 bp, Homo sapien
ctgcctgctgctggctacccggcaa

SEQ ID NO: 3822560 - DNA, 25 bp, Homo sapien
gcctgctgctggctacccggcaagg

SEQ ID NO: 3822561 - DNA, 25 bp, Homo sapien
ccagctccagtgattcagagtgaaa

SEQ ID NO: 3822562 - DNA, 25 bp, Homo sapien
ctccgtggtcggctggagagtgggc

SEQ ID NO: 3822563 - DNA, 25 bp, Homo sapien
gagtcaggcatctgccggctctcca

SEQ ID NO: 3822564 - DNA, 25 bp, Homo sapien
aaacggcgctgaggactgacgatgt

SEQ ID NO: 3822565 - DNA, 25 bp, Homo sapien
aaaccatagaggtgtgtgctgacca

SEQ ID NO: 3822566 - DNA, 25 bp, Homo sapien
tccgttgctgttgcaaaaaccatag

SEQ ID NO: 3822567 - DNA, 25 bp, Homo sapien
tgtgagttcctgtattccgttgctg

SEQ ID NO: 3822568 - DNA, 25 bp, Homo sapien
gctgttgcaaaaaccatagaggtgt

SEQ ID NO: 3822569 - DNA, 25 bp, Homo sapien
cccaaggctggccatcagcaggcga

SEQ ID NO: 3822570 - DNA, 25 bp, Homo sapien
caaggctggccatcagcaggcgaat

SEQ ID NO: 3822571 - DNA, 25 bp, Homo sapien
ggctggccatcagcaggcgaatcat

SEQ ID NO: 3822572 - DNA, 25 bp, Homo sapien
gcaccaccccaaggctggccatcag

SEQ ID NO: 3822573 - DNA, 25 bp, Homo sapien
ctttcttgaatgtatctcctatggg

SEQ ID NO: 3822574 - DNA, 25 bp, Homo sapien
tctcactttaacagtgggtatgggt

SEQ ID NO: 3822575 - DNA, 25 bp, Homo sapien
gttaccaaaaaatctaccagtgagc

SEQ ID NO: 3822576 - DNA, 25 bp, Homo sapien
accccaggaattcatgacactatta

SEQ ID NO: 3822577 - DNA, 25 bp, Homo sapien
gagagaccaatgctgccttacctgg

SEQ ID NO: 3822578 - DNA, 25 bp, Homo sapien
gaactttgggcaggactcacctgga

SEQ ID NO: 3822579 - DNA, 25 bp, Homo sapien
tgtgatacaacccttgccctctggg

SEQ ID NO: 3822580 - DNA, 25 bp, Homo sapien
gaaatgttttccctggctaggcagc

SEQ ID NO: 3822581 - DNA, 25 bp, Homo sapien
ttgttgctgttccttttttacatag

SEQ ID NO: 3822582 - DNA, 25 bp, Homo sapien
aactttcacagttttgttgctgttc

SEQ ID NO: 3822583 - DNA, 25 bp, Homo sapien
tttcacagttttgttgctgttcctt

SEQ ID NO: 3822584 - DNA, 25 bp, Homo sapien
tgttgctgttccttttttacatagc

SEQ ID NO: 3822585 - DNA, 25 bp, Homo sapien
ccaaagcattgcgtggtccatccaa

SEQ ID NO: 3822586 - DNA, 25 bp, Homo sapien
cagacattgatgtgagctgttccag

SEQ ID NO: 3822587 - DNA, 25 bp, Homo sapien
tattatgtggcctaaaccagcagtg

SEQ ID NO: 3822588 - DNA, 25 bp, Homo sapien
tgtttcacagatgacaagaacccag

SEQ ID NO: 3822589 - DNA, 25 bp, Homo sapien
cagccttgcgggcagcagaaacacc

SEQ ID NO: 3822590 - DNA, 25 bp, Homo sapien
ccccacgtaggcaaactctcttgtg

SEQ ID NO: 3822591 - DNA, 25 bp, Homo sapien
cgtaggcaaactctcttgtgggctt

SEQ ID NO: 3822592 - DNA, 25 bp, Homo sapien
tgtttctgcagccttatgagctatt

SEQ ID NO: 3822593 - DNA, 25 bp, Homo sapien
agggcggtgggattccatcgaacac

SEQ ID NO: 3822594 - DNA, 25 bp, Homo sapien
ctgtagggcggtgggattccatcga

SEQ ID NO: 3822595 - DNA, 25 bp, Homo sapien
gtagggcggtgggattccatcgaac

SEQ ID NO: 3822596 - DNA, 25 bp, Homo sapien
tagggcggtgggattccatcgaaca

SEQ ID NO: 3822597 - DNA, 25 bp, Homo sapien
ctcggcgtccaaggcagcctggcct

SEQ ID NO: 3822598 - DNA, 25 bp, Homo sapien
ggcagcctggcctcgctgggccttg

SEQ ID NO: 3822599 - DNA, 25 bp, Homo sapien
gcctggcctcgctgggccttgcgga

SEQ ID NO: 3822600 - DNA, 25 bp, Homo sapien
agcctggcctcgctgggccttgcgg

SEQ ID NO: 3822601 - DNA, 25 bp, Homo sapien
gccctgcactgtcggctggaagacg

SEQ ID NO: 3822602 - DNA, 25 bp, Homo sapien
cctgcactgtcggctggaagacgct

SEQ ID NO: 3822603 - DNA, 25 bp, Homo sapien
gggccctgcactgtcggctggaaga

SEQ ID NO: 3822604 - DNA, 25 bp, Homo sapien
tgcactgtcggctggaagacgctgc

SEQ ID NO: 3822605 - DNA, 25 bp, Homo sapien
agcagtacctgcttcaccacaacgg

SEQ ID NO: 3822606 - DNA, 25 bp, Homo sapien
ggttggtgctcatccgcctgcggaa

SEQ ID NO: 3822607 - DNA, 25 bp, Homo sapien
cagaaacgttgacactctcgcagcg

SEQ ID NO: 3822608 - DNA, 25 bp, Homo sapien
gaagaaggccgggtacttcagctta

SEQ ID NO: 3822609 - DNA, 25 bp, Homo sapien
cgtaccacacttgtatgtccttggg

SEQ ID NO: 3822610 - DNA, 25 bp, Homo sapien
agacagggtgctcgtctctgccgta

SEQ ID NO: 3822611 - DNA, 25 bp, Homo sapien
ccatctcctgatttgaaggcagaca

SEQ ID NO: 3822612 - DNA, 25 bp, Homo sapien
gagtcaggcctgcttgttctatgcc

SEQ ID NO: 3822613 - DNA, 25 bp, Homo sapien
cctcagcagcacatcatccacagtg

SEQ ID NO: 3822614 - DNA, 25 bp, Homo sapien
ccctcagcagcacatcatccacagt

SEQ ID NO: 3822615 - DNA, 25 bp, Homo sapien
tcagcagcacatcatccacagtgca

SEQ ID NO: 3822616 - DNA, 25 bp, Homo sapien
agcagcacatcatccacagtgcagg

SEQ ID NO: 3822617 - DNA, 25 bp, Homo sapien
ggctctgctgctgggcatcctgcag

SEQ ID NO: 3822618 - DNA, 25 bp, Homo sapien
tggctctgctgctgggcatcctgca

SEQ ID NO: 3822619 - DNA, 25 bp, Homo sapien
gctgctgggcatcctgcagcttcat

SEQ ID NO: 3822620 - DNA, 25 bp, Homo sapien
tctgctgctgggcatcctgcagctt

SEQ ID NO: 3822621 - DNA, 25 bp, Homo sapien
ccacaggtcccttgcgagatacaag

SEQ ID NO: 3822622 - DNA, 25 bp, Homo sapien
tgcgagatacaagccgtctgggaac

SEQ ID NO: 3822623 - DNA, 25 bp, Homo sapien
ggtcccttgcgagatacaagccgtc

SEQ ID NO: 3822624 - DNA, 25 bp, Homo sapien
ccgtctgggaacaccaggtcaggtg

SEQ ID NO: 3822625 - DNA, 25 bp, Homo sapien
ccttgggatccagaaccttgtctcc

SEQ ID NO: 3822626 - DNA, 25 bp, Homo sapien
cttatgggtgttctcttctagttta

SEQ ID NO: 3822627 - DNA, 25 bp, Homo sapien
ctgtggtcctttcgttccagaggtt

SEQ ID NO: 3822628 - DNA, 25 bp, Homo sapien
catttgttctgtggtcctttcgttc

SEQ ID NO: 3822629 - DNA, 25 bp, Homo sapien
agctctacgagctgcttttggaaac

SEQ ID NO: 3822630 - DNA, 25 bp, Homo sapien
ggtttgactagaagcttaatcccag

SEQ ID NO: 3822631 - DNA, 25 bp, Homo sapien
caaggcaagctggtagaaagtaaca

SEQ ID NO: 3822632 - DNA, 25 bp, Homo sapien
gcataggtgaagagaaagctccatg

SEQ ID NO: 3822633 - DNA, 25 bp, Homo sapien
gccattacctagttgctgctcagct

SEQ ID NO: 3822634 - DNA, 25 bp, Homo sapien
ttcttctcttcgttgttgttgatgg

SEQ ID NO: 3822635 - DNA, 25 bp, Homo sapien
gttgatgtaaacttggctcttgggc

SEQ ID NO: 3822636 - DNA, 25 bp, Homo sapien
tgttgatgggggttgatgtaaactt

SEQ ID NO: 3822637 - DNA, 25 bp, Homo sapien
tcttctcttcgttgttgttgatggg

SEQ ID NO: 3822638 - DNA, 25 bp, Homo sapien
ggaaggccagcgtggcgacacctcc

SEQ ID NO: 3822639 - DNA, 25 bp, Homo sapien
aatgaggccgacagagatggggtga

SEQ ID NO: 3822640 - DNA, 25 bp, Homo sapien
tcccacctgtctaaggctcacagag

SEQ ID NO: 3822641 - DNA, 25 bp, Homo sapien
agaataggcgagttcagggaaggcc

SEQ ID NO: 3822642 - DNA, 25 bp, Homo sapien
aggagagaagatggcttccttgaga

SEQ ID NO: 3822643 - DNA, 25 bp, Homo sapien
agagaggagagaagatggcttcctt

SEQ ID NO: 3822644 - DNA, 25 bp, Homo sapien
agaggagagaagatggcttccttga

SEQ ID NO: 3822645 - DNA, 25 bp, Homo sapien
gagagaagatggcttccttgagaag

SEQ ID NO: 3822646 - DNA, 25 bp, Homo sapien
catggctgtgatagtcagagggatc

SEQ ID NO: 3822647 - DNA, 25 bp, Homo sapien
cacttgtgagaaacgaggtttggtg

SEQ ID NO: 3822648 - DNA, 25 bp, Homo sapien
aaacgaggtttggtgtgtacaggat

SEQ ID NO: 3822649 - DNA, 25 bp, Homo sapien
tgtacaggatgtgatcatggctgtg

SEQ ID NO: 3822650 - DNA, 25 bp, Homo sapien
gcttgaactgtgtcgcaaactctta

SEQ ID NO: 3822651 - DNA, 25 bp, Homo sapien
gaaggctattgtctgctcgcacaag

SEQ ID NO: 3822652 - DNA, 25 bp, Homo sapien
tctgcaattttgagccagtgatcca

SEQ ID NO: 3822653 - DNA, 25 bp, Homo sapien
tcctaggtacatagcagggacactg

SEQ ID NO: 3822654 - DNA, 25 bp, Homo sapien
ggtagaaatgatccgctcaaaggga

SEQ ID NO: 3822655 - DNA, 25 bp, Homo sapien
tgggctcatgccagttaccacgtgg

SEQ ID NO: 3822656 - DNA, 25 bp, Homo sapien
gcttccagaaccagtccagagtcag

SEQ ID NO: 3822657 - DNA, 25 bp, Homo sapien
cagagtcagtcctcaagtgaaggtt

SEQ ID NO: 3822658 - DNA, 25 bp, Homo sapien
tctgcattctgccatccatcccaga

SEQ ID NO: 3822659 - DNA, 25 bp, Homo sapien
ccatcttcttgtttagatacaccca

SEQ ID NO: 3822660 - DNA, 25 bp, Homo sapien
tcagtcttgaccctttctaatgcca

SEQ ID NO: 3822661 - DNA, 25 bp, Homo sapien
tgaaatagcaacacaacggggcacc

SEQ ID NO: 3822662 - DNA, 25 bp, Homo sapien
agccagtgctgcagcatctaggagc

SEQ ID NO: 3822663 - DNA, 25 bp, Homo sapien
agtgctgcagcatctaggagcttgt

SEQ ID NO: 3822664 - DNA, 25 bp, Homo sapien
atctaggagcttgttcacacatttg

SEQ ID NO: 3822665 - DNA, 25 bp, Homo sapien
taggagcttgttcacacatttggct

SEQ ID NO: 3822666 - DNA, 25 bp, Homo sapien
gaaattttagattagccggctgagc

SEQ ID NO: 3822667 - DNA, 25 bp, Homo sapien
ccgaggttaaggtgcctgaattgcc

SEQ ID NO: 3822668 - DNA, 25 bp, Homo sapien
catgttaagcttgccatagtgcctc

SEQ ID NO: 3822669 - DNA, 25 bp, Homo sapien
caattgtatatctaggctgactcgg

SEQ ID NO: 3822670 - DNA, 25 bp, Homo sapien
aagtttatttgagtcatggttctta

SEQ ID NO: 3822671 - DNA, 25 bp, Homo sapien
gagtcatggttcttacaagctgtac

SEQ ID NO: 3822672 - DNA, 25 bp, Homo sapien
aaaagaagtttatttgagtcatggt

SEQ ID NO: 3822673 - DNA, 25 bp, Homo sapien
tttgagtcatggttcttacaagctg

SEQ ID NO: 3822674 - DNA, 25 bp, Homo sapien
cacacaggtgggctaaagctaaggg

SEQ ID NO: 3822675 - DNA, 25 bp, Homo sapien
tttcaacaggatctaatacagtgag

SEQ ID NO: 3822676 - DNA, 25 bp, Homo sapien
tttatcacagactactggcattgag

SEQ ID NO: 3822677 - DNA, 25 bp, Homo sapien
gcaagtcggtggcttggccagctcc

SEQ ID NO: 3822678 - DNA, 25 bp, Homo sapien
gagttttatgggcttggctgaaaga

SEQ ID NO: 3822679 - DNA, 25 bp, Homo sapien
tttcctgtggaggtagcccactgcc

SEQ ID NO: 3822680 - DNA, 25 bp, Homo sapien
cttggtttcctgtggaggtagccca

SEQ ID NO: 3822681 - DNA, 25 bp, Homo sapien
ttatgggcttggctgaaagagctgc

SEQ ID NO: 3822682 - DNA, 25 bp, Homo sapien
ttcaagcctaggttcacagcgcgga

SEQ ID NO: 3822683 - DNA, 25 bp, Homo sapien
gattctattcaggttgtcccgggcg

SEQ ID NO: 3822684 - DNA, 25 bp, Homo sapien
taagattccggctaaggtccagctc

SEQ ID NO: 3822685 - DNA, 25 bp, Homo sapien
cactaaggcgcagaatacacttggg

SEQ ID NO: 3822686 - DNA, 25 bp, Homo sapien
gtgatcagtgtgaggaaaaatcatg

SEQ ID NO: 3822687 - DNA, 25 bp, Homo sapien
tcaggtcagtggatatgcagtgagc

SEQ ID NO: 3822688 - DNA, 25 bp, Homo sapien
gctacagttcagtctcctcattcag

SEQ ID NO: 3822689 - DNA, 25 bp, Homo sapien
tgtccaacagttcctactggagttg

SEQ ID NO: 3822690 - DNA, 25 bp, Homo sapien
taatctctagagctggctacagttc

SEQ ID NO: 3822691 - DNA, 25 bp, Homo sapien
ctcaactgtgaaactttgtcaccag

SEQ ID NO: 3822692 - DNA, 25 bp, Homo sapien
tcaactgtgaaactttgtcaccagg

SEQ ID NO: 3822693 - DNA, 25 bp, Homo sapien
agagacttaggacctggaggtcatt

SEQ ID NO: 3822694 - DNA, 25 bp, Homo sapien
tctgtacaccattccacctgatagt

SEQ ID NO: 3822695 - DNA, 25 bp, Homo sapien
ttctctgatggtaccagaaataatg

SEQ ID NO: 3822696 - DNA, 25 bp, Homo sapien
tggaactgctggtaatggcgtcttt

SEQ ID NO: 3822697 - DNA, 25 bp, Homo sapien
gctgatagccaatgaaatgaggagg

SEQ ID NO: 3822698 - DNA, 25 bp, Homo sapien
gaatccagacctatcagactcgaaa

SEQ ID NO: 3822699 - DNA, 25 bp, Homo sapien
gacgtctaagtgtcccagtggctat

SEQ ID NO: 3822700 - DNA, 25 bp, Homo sapien
taatcgtaacatgaactggccaggt

SEQ ID NO: 3822701 - DNA, 25 bp, Homo sapien
agtttagttcaagagtgcacgtgcc

SEQ ID NO: 3822702 - DNA, 25 bp, Homo sapien
caccattgtctcctgtgcgggagca

SEQ ID NO: 3822703 - DNA, 25 bp, Homo sapien
tcatcaccgggagtcaagacggcat

SEQ ID NO: 3822704 - DNA, 25 bp, Homo sapien
gactccagcttagagtgatgccagc

SEQ ID NO: 3822705 - DNA, 25 bp, Homo sapien
taccaactgggtagctgagcaagtg

SEQ ID NO: 3822706 - DNA, 25 bp, Homo sapien
catctttactgggacccacaatcaa

SEQ ID NO: 3822707 - DNA, 25 bp, Homo sapien
tcagaaaagattctggccgagaact

SEQ ID NO: 3822708 - DNA, 25 bp, Homo sapien
acatctttactgggacccacaatca

SEQ ID NO: 3822709 - DNA, 25 bp, Homo sapien
aaaagattctggccgagaactggga

SEQ ID NO: 3822710 - DNA, 25 bp, Homo sapien
gatgggtcgcttactggaaattatt

SEQ ID NO: 3822711 - DNA, 25 bp, Homo sapien
gagcagcacgctggaaactgtgact

SEQ ID NO: 3822712 - DNA, 25 bp, Homo sapien
tacacatgactcaccttattaaggg

SEQ ID NO: 3822713 - DNA, 25 bp, Homo sapien
gtgatgcccagctgcacacgaaatt

SEQ ID NO: 3822714 - DNA, 25 bp, Homo sapien
cttgggagcttgtggtgaaaccgtg

SEQ ID NO: 3822715 - DNA, 25 bp, Homo sapien
gagcttgggagcttgtggtgaaacc

SEQ ID NO: 3822716 - DNA, 25 bp, Homo sapien
tgtggtgaaaccgtgaacgccgttg

SEQ ID NO: 3822717 - DNA, 25 bp, Homo sapien
gagcttgtggtgaaaccgtgaacgc

SEQ ID NO: 3822718 - DNA, 25 bp, Homo sapien
agaagctggaagctttagaggcatc

SEQ ID NO: 3822719 - DNA, 25 bp, Homo sapien
cagaagctggaagctttagaggcat

SEQ ID NO: 3822720 - DNA, 25 bp, Homo sapien
gaagctggaagctttagaggcatcc

SEQ ID NO: 3822721 - DNA, 25 bp, Homo sapien
aacctgggagacacatgcacccttg

SEQ ID NO: 3822722 - DNA, 25 bp, Homo sapien
gtgggtgagaatgccccatggagga

SEQ ID NO: 3822723 - DNA, 25 bp, Homo sapien
ggagggaagccgctctgcaccgaaa

SEQ ID NO: 3822724 - DNA, 25 bp, Homo sapien
ggtcctccaggattagctcgcattg

SEQ ID NO: 3822725 - DNA, 25 bp, Homo sapien
gaaagcaccaggcacaactgaggcc

SEQ ID NO: 3822726 - DNA, 25 bp, Homo sapien
tgctggcccgagtggactacgatgt

SEQ ID NO: 3822727 - DNA, 25 bp, Homo sapien
catcggaagcagagtccgctgctgg

SEQ ID NO: 3822728 - DNA, 25 bp, Homo sapien
tgtagactcccgaggcatcggaagc

SEQ ID NO: 3822729 - DNA, 25 bp, Homo sapien
cccagtgccacatggtatctagagg

SEQ ID NO: 3822730 - DNA, 25 bp, Homo sapien
ccagtgccacatggtatctagaggc

SEQ ID NO: 3822731 - DNA, 25 bp, Homo sapien
ggcgctggggatggaggaaccctga

SEQ ID NO: 3822732 - DNA, 25 bp, Homo sapien
cagtgttttccttgctcagccagtc

SEQ ID NO: 3822733 - DNA, 25 bp, Homo sapien
tgctcagccagtccctgagccaggg

SEQ ID NO: 3822734 - DNA, 25 bp, Homo sapien
gttttccttgctcagccagtccctg

SEQ ID NO: 3822735 - DNA, 25 bp, Homo sapien
ggcagcccagagcaattgatgggca

SEQ ID NO: 3822736 - DNA, 25 bp, Homo sapien
gcagcccagagcaattgatgggcat

SEQ ID NO: 3822737 - DNA, 25 bp, Homo sapien
gggcagcccagagcaattgatgggc

SEQ ID NO: 3822738 - DNA, 25 bp, Homo sapien
aagcagggatcccgatcgggcacca

SEQ ID NO: 3822739 - DNA, 25 bp, Homo sapien
gcagggatcccgatcgggcaccact

SEQ ID NO: 3822740 - DNA, 25 bp, Homo sapien
gaaagcagggatcccgatcgggcac

SEQ ID NO: 3822741 - DNA, 25 bp, Homo sapien
agggatcccgatcgggcaccactgt

SEQ ID NO: 3822742 - DNA, 25 bp, Homo sapien
aattgttctcttattggatgttgcc

SEQ ID NO: 3822743 - DNA, 25 bp, Homo sapien
tctcttattggatgttgcctgaagc

SEQ ID NO: 3822744 - DNA, 25 bp, Homo sapien
tggatgttgcctgaagcaccttcat

SEQ ID NO: 3822745 - DNA, 25 bp, Homo sapien
gtgtgattgtgttgtttccaattgt

SEQ ID NO: 3822746 - DNA, 25 bp, Homo sapien
ttatcaatgctttaacaaaagttta

SEQ ID NO: 3822747 - DNA, 25 bp, Homo sapien
gctttaacaaaagtttatgaggaca

SEQ ID NO: 3822748 - DNA, 25 bp, Homo sapien
gaataactcgtgttgagaagggatg

SEQ ID NO: 3822749 - DNA, 25 bp, Homo sapien
gttaacaaatgaataactcgtgttg

SEQ ID NO: 3822750 - DNA, 25 bp, Homo sapien
gacgcttgtaataaagtttaatgtg

SEQ ID NO: 3822751 - DNA, 25 bp, Homo sapien
gctgtaaacatctctaattatattt

SEQ ID NO: 3822752 - DNA, 25 bp, Homo sapien
tatttaaaactgtagagtgcagtac

SEQ ID NO: 3822753 - DNA, 25 bp, Homo sapien
gtttaatgtggaagaacaaggtgca

SEQ ID NO: 3822754 - DNA, 25 bp, Homo sapien
ggttacagtcatgcatatcagaggc

SEQ ID NO: 3822755 - DNA, 25 bp, Homo sapien
aagactccctccagcatgcaagtgg

SEQ ID NO: 3822756 - DNA, 25 bp, Homo sapien
aaggtgactctaaggaatcccaggc

SEQ ID NO: 3822757 - DNA, 25 bp, Homo sapien
tttaggctgacacaaaaagactccc

SEQ ID NO: 3822758 - DNA, 25 bp, Homo sapien
tgtaaaggcagaccagtttgctccc

SEQ ID NO: 3822759 - DNA, 25 bp, Homo sapien
gatcagaatccttacgctcagggct

SEQ ID NO: 3822760 - DNA, 25 bp, Homo sapien
cctcagggtctcataggtgggcacc

SEQ ID NO: 3822761 - DNA, 25 bp, Homo sapien
tgtcccgggagatctgtcaagagct

SEQ ID NO: 3822762 - DNA, 25 bp, Homo sapien
gatcagctccagttcggcataggtt

SEQ ID NO: 3822763 - DNA, 25 bp, Homo sapien
tcggcataggttaagttttcctcag

SEQ ID NO: 3822764 - DNA, 25 bp, Homo sapien
agcttgttctcctcgaagaggatct

SEQ ID NO: 3822765 - DNA, 25 bp, Homo sapien
cctcgaagaggatctgggcgtagac

SEQ ID NO: 3822766 - DNA, 25 bp, Homo sapien
ctagaacgccaccacttagaaattt

SEQ ID NO: 3822767 - DNA, 25 bp, Homo sapien
caagttgacatgaaacactcacaaa

SEQ ID NO: 3822768 - DNA, 25 bp, Homo sapien
aatgactaaacacaaggctaaaatg

SEQ ID NO: 3822769 - DNA, 25 bp, Homo sapien
agagcactacgtcctgcagtgagat

SEQ ID NO: 3822770 - DNA, 25 bp, Homo sapien
aatgtgtagaatcatttcccttatg

SEQ ID NO: 3822771 - DNA, 25 bp, Homo sapien
cataaaatgtgtagaatcatttccc

SEQ ID NO: 3822772 - DNA, 25 bp, Homo sapien
gtgtagaatcatttcccttatgcat

SEQ ID NO: 3822773 - DNA, 25 bp, Homo sapien
agaatcatttcccttatgcatattt

SEQ ID NO: 3822774 - DNA, 25 bp, Homo sapien
caacagatctagctgggttgctggc

SEQ ID NO: 3822775 - DNA, 25 bp, Homo sapien
ctgggctgcaacagatctagctggg

SEQ ID NO: 3822776 - DNA, 25 bp, Homo sapien
ttgctggcagcccacacaaacctcc

SEQ ID NO: 3822777 - DNA, 25 bp, Homo sapien
ggctgcaacagatctagctgggttg

SEQ ID NO: 3822778 - DNA, 25 bp, Homo sapien
tcagaatctgtagccatgacccaca

SEQ ID NO: 3822779 - DNA, 25 bp, Homo sapien
taaatggccaagagttgcatactgg

SEQ ID NO: 3822780 - DNA, 25 bp, Homo sapien
cgtactgatgtagaaagatgtgcct

SEQ ID NO: 3822781 - DNA, 25 bp, Homo sapien
taccaaagcatccattctaagagtg

SEQ ID NO: 3822782 - DNA, 25 bp, Homo sapien
cagctgagaagcacgtgacctggtt

SEQ ID NO: 3822783 - DNA, 25 bp, Homo sapien
cacgtgacctggttcttgctaggca

SEQ ID NO: 3822784 - DNA, 25 bp, Homo sapien
tctattggtctctgacacagctgag

SEQ ID NO: 3822785 - DNA, 25 bp, Homo sapien
cttcaacaaaattggagccccagtg

SEQ ID NO: 3822786 - DNA, 25 bp, Homo sapien
accacgatttagcttctggatggga

SEQ ID NO: 3822787 - DNA, 25 bp, Homo sapien
gggatatcccatgcacactgaggtg

SEQ ID NO: 3822788 - DNA, 25 bp, Homo sapien
gagctccgtgtgtgcttatgtcatg

SEQ ID NO: 3822789 - DNA, 25 bp, Homo sapien
gccatgggctaaggcgggatatccc

SEQ ID NO: 3822790 - DNA, 25 bp, Homo sapien
cgttaggggaccaatgggctgcaca

SEQ ID NO: 3822791 - DNA, 25 bp, Homo sapien
ggaccaatgggctgcacagatggct

SEQ ID NO: 3822792 - DNA, 25 bp, Homo sapien
cccgttaggggaccaatgggctgca

SEQ ID NO: 3822793 - DNA, 25 bp, Homo sapien
taggggaccaatgggctgcacagat

SEQ ID NO: 3822794 - DNA, 25 bp, Homo sapien
tgtgaatgtcaaggagaagacagcc

SEQ ID NO: 3822795 - DNA, 25 bp, Homo sapien
ctgtgaatgtcaaggagaagacagc

SEQ ID NO: 3822796 - DNA, 25 bp, Homo sapien
aaaacttctgactactgttaatgtc

SEQ ID NO: 3822797 - DNA, 25 bp, Homo sapien
aaaaacttctgactactgttaatgt

SEQ ID NO: 3822798 - DNA, 25 bp, Homo sapien
taaaaacttctgactactgttaatg

SEQ ID NO: 3822799 - DNA, 25 bp, Homo sapien
taaaataagccaaaaggcctgctgc

SEQ ID NO: 3822800 - DNA, 25 bp, Homo sapien
tgccaatggcctattaaaataagcc

SEQ ID NO: 3822801 - DNA, 25 bp, Homo sapien
aaataagccaaaaggcctgctgctg

SEQ ID NO: 3822802 - DNA, 25 bp, Homo sapien
ccactgactgccaatggcctattaa

SEQ ID NO: 3822803 - DNA, 25 bp, Homo sapien
gaaaatcacccttagtgcaccatag

SEQ ID NO: 3822804 - DNA, 25 bp, Homo sapien
gatatattgtcgtcatgtgccccga

SEQ ID NO: 3822805 - DNA, 25 bp, Homo sapien
tgaatgtgaattggactcagggact

SEQ ID NO: 3822806 - DNA, 25 bp, Homo sapien
taaccacgtgattgagatgagcatc

SEQ ID NO: 3822807 - DNA, 25 bp, Homo sapien
agcagcttcggtttatggaacgtgg

SEQ ID NO: 3822808 - DNA, 25 bp, Homo sapien
tcagcagcttcggtttatggaacgt

SEQ ID NO: 3822809 - DNA, 25 bp, Homo sapien
gtggtttcagcagcttcggtttatg

SEQ ID NO: 3822810 - DNA, 25 bp, Homo sapien
tttcagcagcttcggtttatggaac

SEQ ID NO: 3822811 - DNA, 25 bp, Homo sapien
gccaagctggtcacgctagtgacag

SEQ ID NO: 3822812 - DNA, 25 bp, Homo sapien
gtcacgctagtgacagtctcccctg

SEQ ID NO: 3822813 - DNA, 25 bp, Homo sapien
ggaatgtcaggcttctccttctgcc

SEQ ID NO: 3822814 - DNA, 25 bp, Homo sapien
ctttggcagggactgcgggaggaat

SEQ ID NO: 3822815 - DNA, 25 bp, Homo sapien
ctgtggttcataatccaaaggcaaa

SEQ ID NO: 3822816 - DNA, 25 bp, Homo sapien
ggatgtgtctggggtcccctgtgac

SEQ ID NO: 3822817 - DNA, 25 bp, Homo sapien
gtcccctgtgactgccggagctttc

SEQ ID NO: 3822818 - DNA, 25 bp, Homo sapien
tgtggttcataatccaaaggcaaac

SEQ ID NO: 3822819 - DNA, 25 bp, Homo sapien
tataatctcttgtccgcaggcacat

SEQ ID NO: 3822820 - DNA, 25 bp, Homo sapien
tttataatctcttgtccgcaggcac

SEQ ID NO: 3822821 - DNA, 25 bp, Homo sapien
ttataatctcttgtccgcaggcaca

SEQ ID NO: 3822822 - DNA, 25 bp, Homo sapien
tttcttacaggtttgcaagcaactt

SEQ ID NO: 3822823 - DNA, 25 bp, Homo sapien
tgcctcaaaacttgggtagtctccc

SEQ ID NO: 3822824 - DNA, 25 bp, Homo sapien
ttttacaccatttggacatatttat

SEQ ID NO: 3822825 - DNA, 25 bp, Homo sapien
taggatcttgagcttttcttacagg

SEQ ID NO: 3822826 - DNA, 25 bp, Homo sapien
tatcatgtaatcttggtctgcttct

SEQ ID NO: 3822827 - DNA, 25 bp, Homo sapien
tatttttgtaggcagtcacccaggt

SEQ ID NO: 3822828 - DNA, 25 bp, Homo sapien
aaggtcccaggtcctatataaatct

SEQ ID NO: 3822829 - DNA, 25 bp, Homo sapien
tatagtagcttgtcagaaggtccca

SEQ ID NO: 3822830 - DNA, 25 bp, Homo sapien
ggtttaaagctttactcagcaggaa

SEQ ID NO: 3822831 - DNA, 25 bp, Homo sapien
gaattagcactatctcttataacta

SEQ ID NO: 3822832 - DNA, 25 bp, Homo sapien
gggcatacagtaagtcagcattggt

SEQ ID NO: 3822833 - DNA, 25 bp, Homo sapien
gtgtgcctcaccagctaaaagcagg

SEQ ID NO: 3822834 - DNA, 25 bp, Homo sapien
tggttcagagcaagtgtgagcccct

SEQ ID NO: 3822835 - DNA, 25 bp, Homo sapien
ggccagcaaaagctgcatgctctct

SEQ ID NO: 3822836 - DNA, 25 bp, Homo sapien
tgcaggaccatacaccaagcctcct

SEQ ID NO: 3822837 - DNA, 25 bp, Homo sapien
ctgcaggaccatacaccaagcctcc

SEQ ID NO: 3822838 - DNA, 25 bp, Homo sapien
gcaggaccatacaccaagcctcctc

SEQ ID NO: 3822839 - DNA, 25 bp, Homo sapien
gaccttggaaacatgcaaatgcatg

SEQ ID NO: 3822840 - DNA, 25 bp, Homo sapien
tgtggacaaatatgcagacttttag

SEQ ID NO: 3822841 - DNA, 25 bp, Homo sapien
ggtgaaaaccagactgtagaccttg

SEQ ID NO: 3822842 - DNA, 25 bp, Homo sapien
catgcaggatacacatttgcaggca

SEQ ID NO: 3822843 - DNA, 25 bp, Homo sapien
tctgagggcatttcaccaaataatg

SEQ ID NO: 3822844 - DNA, 25 bp, Homo sapien
gttctgagggcatttcaccaaataa

SEQ ID NO: 3822845 - DNA, 25 bp, Homo sapien
gagggcatttcaccaaataatgtct

SEQ ID NO: 3822846 - DNA, 25 bp, Homo sapien
ctgttctgagggcatttcaccaaat

SEQ ID NO: 3822847 - DNA, 25 bp, Homo sapien
gcattttcagagtgaaggaccacag

SEQ ID NO: 3822848 - DNA, 25 bp, Homo sapien
tgcacagtaagcacccaggagcatt

SEQ ID NO: 3822849 - DNA, 25 bp, Homo sapien
gccccgcaataggacccatggatgt

SEQ ID NO: 3822850 - DNA, 25 bp, Homo sapien
caagtgtctgcactcgaggcaagga

SEQ ID NO: 3822851 - DNA, 25 bp, Homo sapien
cctgagcctgagcaaccttcttggg

SEQ ID NO: 3822852 - DNA, 25 bp, Homo sapien
tgagcctgagcaaccttcttgggca

SEQ ID NO: 3822853 - DNA, 25 bp, Homo sapien
ctgagcctgagcaaccttcttgggc

SEQ ID NO: 3822854 - DNA, 25 bp, Homo sapien
tcatagagatatgagagtcatgaga

SEQ ID NO: 3822855 - DNA, 25 bp, Homo sapien
tatgagagtcatgagaactacactt

SEQ ID NO: 3822856 - DNA, 25 bp, Homo sapien
cagtgttcatagagatatgagagtc

SEQ ID NO: 3822857 - DNA, 25 bp, Homo sapien
tcaggcagtgttcatagagatatga

SEQ ID NO: 3822858 - DNA, 25 bp, Homo sapien
tggtactttgtctagcatcttccgc

SEQ ID NO: 3822859 - DNA, 25 bp, Homo sapien
ttgtctagcatcttccgcccgtctg

SEQ ID NO: 3822860 - DNA, 25 bp, Homo sapien
catcttccgcccgtctgtggtcggg

SEQ ID NO: 3822861 - DNA, 25 bp, Homo sapien
caccaaggtggtactttgtctagca

SEQ ID NO: 3822862 - DNA, 25 bp, Homo sapien
cagactgccagacgatgaccagcat

SEQ ID NO: 3822863 - DNA, 25 bp, Homo sapien
ccacgcagcacacgaggacagcata

SEQ ID NO: 3822864 - DNA, 25 bp, Homo sapien
cacgaggacagcatacacatagaga

SEQ ID NO: 3822865 - DNA, 25 bp, Homo sapien
tctggatttccgcttgttaaacaca

SEQ ID NO: 3822866 - DNA, 25 bp, Homo sapien
tcaaaaaatgcccaagtctcttttg

SEQ ID NO: 3822867 - DNA, 25 bp, Homo sapien
tcaaaggatgactcttcagaagctt

SEQ ID NO: 3822868 - DNA, 25 bp, Homo sapien
gatgactcttcagaagctttgaggg

SEQ ID NO: 3822869 - DNA, 25 bp, Homo sapien
tttctcaaaggatgactcttcagaa

SEQ ID NO: 3822870 - DNA, 25 bp, Homo sapien
tggccaaaaattccgagaggtcctg

SEQ ID NO: 3822871 - DNA, 25 bp, Homo sapien
aagtgatggccaaaaattccgagag

SEQ ID NO: 3822872 - DNA, 25 bp, Homo sapien
tgatggccaaaaattccgagaggtc

SEQ ID NO: 3822873 - DNA, 25 bp, Homo sapien
gatggccaaaaattccgagaggtcc

SEQ ID NO: 3822874 - DNA, 25 bp, Homo sapien
gctacaagatgttgccagtgggaga

SEQ ID NO: 3822875 - DNA, 25 bp, Homo sapien
gaagctaaattgaggtccacctgca

SEQ ID NO: 3822876 - DNA, 25 bp, Homo sapien
tattgaggatcaactgtgtaccagg

SEQ ID NO: 3822877 - DNA, 25 bp, Homo sapien
actcttatgtagaccaatccgtggg

SEQ ID NO: 3822878 - DNA, 25 bp, Homo sapien
ctgcaggaaggaggccatggttaag

SEQ ID NO: 3822879 - DNA, 25 bp, Homo sapien
tgcaggaaggaggccatggttaagt

SEQ ID NO: 3822880 - DNA, 25 bp, Homo sapien
tgcggtgaagggcaaagagtgaggt

SEQ ID NO: 3822881 - DNA, 25 bp, Homo sapien
agagtgaggtagtattacaagggaa

SEQ ID NO: 3822882 - DNA, 25 bp, Homo sapien
tgaggtagtattacaagggaaatcc

SEQ ID NO: 3822883 - DNA, 25 bp, Homo sapien
cggtgaagggcaaagagtgaggtag

SEQ ID NO: 3822884 - DNA, 25 bp, Homo sapien
ctacccagggagaccaagaccctca

SEQ ID NO: 3822885 - DNA, 25 bp, Homo sapien
tacccagggagaccaagaccctcac

SEQ ID NO: 3822886 - DNA, 25 bp, Homo sapien
tcgaaggagtgtgcaaagaaccagc

SEQ ID NO: 3822887 - DNA, 25 bp, Homo sapien
tgtcaagacggagagcctgtagagc

SEQ ID NO: 3822888 - DNA, 25 bp, Homo sapien
gactctgcagacgtaatgcccttga

SEQ ID NO: 3822889 - DNA, 25 bp, Homo sapien
ggcgctgcggctgaaattcccatag

SEQ ID NO: 3822890 - DNA, 25 bp, Homo sapien
ccatctggtaacagaagagggcttg

SEQ ID NO: 3822891 - DNA, 25 bp, Homo sapien
aaagcacagctttcagtcccaaaat

SEQ ID NO: 3822892 - DNA, 25 bp, Homo sapien
ggtgtccccatggtcatcccaaagc

SEQ ID NO: 3822893 - DNA, 25 bp, Homo sapien
caaaacctttgacccctgggcagtg

SEQ ID NO: 3822894 - DNA, 25 bp, Homo sapien
cgggagatacttagggctgcagact

SEQ ID NO: 3822895 - DNA, 25 bp, Homo sapien
tctggtagcaatcccgctgtcatca

SEQ ID NO: 3822896 - DNA, 25 bp, Homo sapien
ggagggacccactctggtagcaatc

SEQ ID NO: 3822897 - DNA, 25 bp, Homo sapien
taatgtgtagccaaaggagggaccc

SEQ ID NO: 3822898 - DNA, 25 bp, Homo sapien
acagagagcagcaacgatgcagcag

SEQ ID NO: 3822899 - DNA, 25 bp, Homo sapien
agagagcagcaacgatgcagcagct

SEQ ID NO: 3822900 - DNA, 25 bp, Homo sapien
gcccccgccaagtctgaaagctttg

SEQ ID NO: 3822901 - DNA, 25 bp, Homo sapien
ctgatggccacaggcccccgccaag

SEQ ID NO: 3822902 - DNA, 25 bp, Homo sapien
gtgggtggtgtggttagaactctga

SEQ ID NO: 3822903 - DNA, 25 bp, Homo sapien
ggtgtggttagaactctgatggcca

SEQ ID NO: 3822904 - DNA, 25 bp, Homo sapien
gcagtaaaacccgaatgaaagccat

SEQ ID NO: 3822905 - DNA, 25 bp, Homo sapien
aacccgaatgaaagccattagtgtg

SEQ ID NO: 3822906 - DNA, 25 bp, Homo sapien
aatgaaagccattagtgtggaccaa

SEQ ID NO: 3822907 - DNA, 25 bp, Homo sapien
aagtgggagcagtaaaacccgaatg

SEQ ID NO: 3822908 - DNA, 25 bp, Homo sapien
cggccgccgccagtgccagcagccg

SEQ ID NO: 3822909 - DNA, 25 bp, Homo sapien
ccgccgccagtgccagcagccgcat

SEQ ID NO: 3822910 - DNA, 25 bp, Homo sapien
cggagccggagcccgcgccagcagc

SEQ ID NO: 3822911 - DNA, 25 bp, Homo sapien
gcgcggccgccgccagtgccagcag

SEQ ID NO: 3822912 - DNA, 25 bp, Homo sapien
ctgtgacgcgggagagcgccgccgc

SEQ ID NO: 3822913 - DNA, 25 bp, Homo sapien
tgtgacgcgggagagcgccgccgcc

SEQ ID NO: 3822914 - DNA, 25 bp, Homo sapien
gtgacgcgggagagcgccgccgcct

SEQ ID NO: 3822915 - DNA, 25 bp, Homo sapien
gccccttgggccgcctgccacgcgg

SEQ ID NO: 3822916 - DNA, 25 bp, Homo sapien
ccttgggccgcctgccacgcggggc

SEQ ID NO: 3822917 - DNA, 25 bp, Homo sapien
ccccttgggccgcctgccacgcggg

SEQ ID NO: 3822918 - DNA, 25 bp, Homo sapien
cccttgggccgcctgccacgcgggg

SEQ ID NO: 3822919 - DNA, 25 bp, Homo sapien
ttgcagttggctgtcctgtgaccca

SEQ ID NO: 3822920 - DNA, 25 bp, Homo sapien
tatacttagcaagtgtggacctgcc

SEQ ID NO: 3822921 - DNA, 25 bp, Homo sapien
cctagtggctctgatactgctggct

SEQ ID NO: 3822922 - DNA, 25 bp, Homo sapien
aaatagaaatccctctggccatgcg

SEQ ID NO: 3822923 - DNA, 25 bp, Homo sapien
ctgctgctgtgctgagagcacctca

SEQ ID NO: 3822924 - DNA, 25 bp, Homo sapien
tgctgtgctgagagcacctcaccct

SEQ ID NO: 3822925 - DNA, 25 bp, Homo sapien
tgctgagagcacctcaccctggggc

SEQ ID NO: 3822926 - DNA, 25 bp, Homo sapien
tgtgctgagagcacctcaccctggg

SEQ ID NO: 3822927 - DNA, 25 bp, Homo sapien
tcccggatgccatgctgggcgtgct

SEQ ID NO: 3822928 - DNA, 25 bp, Homo sapien
tgggcgtgctccagcagagcgtcca

SEQ ID NO: 3822929 - DNA, 25 bp, Homo sapien
ccgtagttggtggtgaccagccagt

SEQ ID NO: 3822930 - DNA, 25 bp, Homo sapien
cagcgcaccccgtagttggtggtga

SEQ ID NO: 3822931 - DNA, 25 bp, Homo sapien
cactccagcaggtctatgtcctcgg

SEQ ID NO: 3822932 - DNA, 25 bp, Homo sapien
cgggctcggggctgcagttgctctt

SEQ ID NO: 3822933 - DNA, 25 bp, Homo sapien
gggctcggggctgcagttgctcttg

SEQ ID NO: 3822934 - DNA, 25 bp, Homo sapien
gcaggtctatgtcctcgggctcggg

SEQ ID NO: 3822935 - DNA, 25 bp, Homo sapien
tctgcacgtgcgtgtagaaggcaca

SEQ ID NO: 3822936 - DNA, 25 bp, Homo sapien
gggacgacccttctctctgtatagt

SEQ ID NO: 3822937 - DNA, 25 bp, Homo sapien
cagcgcatatcggtgttggaagcca

SEQ ID NO: 3822938 - DNA, 25 bp, Homo sapien
catttcgaaggaggagccgttccac

SEQ ID NO: 3822939 - DNA, 25 bp, Homo sapien
gcagaaggacattgtcatcagtgcc

SEQ ID NO: 3822940 - DNA, 25 bp, Homo sapien
gagaagcagaaggacattgtcatca

SEQ ID NO: 3822941 - DNA, 25 bp, Homo sapien
gaagcagaaggacattgtcatcagt

SEQ ID NO: 3822942 - DNA, 25 bp, Homo sapien
tgagaagcagaaggacattgtcatc

SEQ ID NO: 3822943 - DNA, 25 bp, Homo sapien
gggctggtcaagctgagggtggtcc

SEQ ID NO: 3822944 - DNA, 25 bp, Homo sapien
tcagggctggtcaagctgagggtgg

SEQ ID NO: 3822945 - DNA, 25 bp, Homo sapien
agggctggtcaagctgagggtggtc

SEQ ID NO: 3822946 - DNA, 25 bp, Homo sapien
cagggctggtcaagctgagggtggt

SEQ ID NO: 3822947 - DNA, 25 bp, Homo sapien
ttggctggggctgtactgaaggcct

SEQ ID NO: 3822948 - DNA, 25 bp, Homo sapien
ctggggctgtactgaaggcctccag

SEQ ID NO: 3822949 - DNA, 25 bp, Homo sapien
ccagctgttcagtgagagttggctg

SEQ ID NO: 3822950 - DNA, 25 bp, Homo sapien
agctgttcagtgagagttggctggg

SEQ ID NO: 3822951 - DNA, 25 bp, Homo sapien
cctctgttaaggccacatctatgtc

SEQ ID NO: 3822952 - DNA, 25 bp, Homo sapien
gccacatctatgtcttccttgtttt

SEQ ID NO: 3822953 - DNA, 25 bp, Homo sapien
tcctctgttaaggccacatctatgt

SEQ ID NO: 3822954 - DNA, 25 bp, Homo sapien
gctggaatggccctgactcatgagg

SEQ ID NO: 3822955 - DNA, 25 bp, Homo sapien
aagctgtatgtgtcctagggtccca

SEQ ID NO: 3822956 - DNA, 25 bp, Homo sapien
cacagggtgaggcaaccatgctgga

SEQ ID NO: 3822957 - DNA, 25 bp, Homo sapien
gctacactgcagacccaatggcttg

SEQ ID NO: 3822958 - DNA, 25 bp, Homo sapien
tcttaattaaaatgctgctgaagga

SEQ ID NO: 3822959 - DNA, 25 bp, Homo sapien
actagatgtcttaattaaaatgctg

SEQ ID NO: 3822960 - DNA, 25 bp, Homo sapien
tgtcttaattaaaatgctgctgaag

SEQ ID NO: 3822961 - DNA, 25 bp, Homo sapien
ttaattaaaatgctgctgaaggaag

SEQ ID NO: 3822962 - DNA, 25 bp, Homo sapien
tatcaagttgggtaagagacgccct

SEQ ID NO: 3822963 - DNA, 25 bp, Homo sapien
tcatcgatagggctagagaccatcc

SEQ ID NO: 3822964 - DNA, 25 bp, Homo sapien
cacacacaaggagggtagcccagtc

SEQ ID NO: 3822965 - DNA, 25 bp, Homo sapien
gaatattccgtgatgtgatcccaga

SEQ ID NO: 3822966 - DNA, 25 bp, Homo sapien
ggagagctcaacctggaagttgttt

SEQ ID NO: 3822967 - DNA, 25 bp, Homo sapien
ctggaagacttattgagagagcaac

SEQ ID NO: 3822968 - DNA, 25 bp, Homo sapien
aaaaagagaagtcattcctcgaggt

SEQ ID NO: 3822969 - DNA, 25 bp, Homo sapien
caacatagaaaggaactgaaggcca

SEQ ID NO: 3822970 - DNA, 25 bp, Homo sapien
catgccttgagaccaaattcacacc

SEQ ID NO: 3822971 - DNA, 25 bp, Homo sapien
gaagggcctcacttatacctccatg

SEQ ID NO: 3822972 - DNA, 25 bp, Homo sapien
aaagtaggatgcagaccctgcgaag

SEQ ID NO: 3822973 - DNA, 25 bp, Homo sapien
gacttctctgtgcttggtgtaccag

SEQ ID NO: 3822974 - DNA, 25 bp, Homo sapien
tctgcagatgggtgtgtcaccagcc

SEQ ID NO: 3822975 - DNA, 25 bp, Homo sapien
aattaggctgcatggtactccgggc

SEQ ID NO: 3822976 - DNA, 25 bp, Homo sapien
tccgggctggcatcatgagaaagag

SEQ ID NO: 3822977 - DNA, 25 bp, Homo sapien
gagagccaggcacgatctggagaaa

SEQ ID NO: 3822978 - DNA, 25 bp, Homo sapien
tctcagctctaactgggcaaatgcc

SEQ ID NO: 3822979 - DNA, 25 bp, Homo sapien
gctggtcagacagggagcaaattct

SEQ ID NO: 3822980 - DNA, 25 bp, Homo sapien
cagctgtcctggcatgagggctcct

SEQ ID NO: 3822981 - DNA, 25 bp, Homo sapien
catccataggctcattcaatcaggg

SEQ ID NO: 3822982 - DNA, 25 bp, Homo sapien
ctgaaatatccccaattcgaccaca

SEQ ID NO: 3822983 - DNA, 25 bp, Homo sapien
caacctgaaatatccccaattcgac

SEQ ID NO: 3822984 - DNA, 25 bp, Homo sapien
aatatccccaattcgaccacacatt

SEQ ID NO: 3822985 - DNA, 25 bp, Homo sapien
tcaacctgaaatatccccaattcga

SEQ ID NO: 3822986 - DNA, 25 bp, Homo sapien
taaataggccctccatgatgcagtg

SEQ ID NO: 3822987 - DNA, 25 bp, Homo sapien
tgcaaaggtcccaaggcaggaccgt

SEQ ID NO: 3822988 - DNA, 25 bp, Homo sapien
cactgaagcagggatttgaaggaaa

SEQ ID NO: 3822989 - DNA, 25 bp, Homo sapien
aaaagagggtcgaggcttgcagctt

SEQ ID NO: 3822990 - DNA, 25 bp, Homo sapien
ggctctcttctttagcgggatggtg

SEQ ID NO: 3822991 - DNA, 25 bp, Homo sapien
gctctcttctttagcgggatggtgt

SEQ ID NO: 3822992 - DNA, 25 bp, Homo sapien
gggctctcttctttagcgggatggt

SEQ ID NO: 3822993 - DNA, 25 bp, Homo sapien
ggggctctcttctttagcgggatgg

SEQ ID NO: 3822994 - DNA, 25 bp, Homo sapien
caaggataagcaaactcccatggcc

SEQ ID NO: 3822995 - DNA, 25 bp, Homo sapien
tattaagcccctcgggcgatgcaca

SEQ ID NO: 3822996 - DNA, 25 bp, Homo sapien
tgcagtgagccatctaatacaacag

SEQ ID NO: 3822997 - DNA, 25 bp, Homo sapien
tcataatcacgtcttccaggaaggc

SEQ ID NO: 3822998 - DNA, 25 bp, Homo sapien
ccaggaaatgtgattctcaggactg

SEQ ID NO: 3822999 - DNA, 25 bp, Homo sapien
tcgctgcctactgggactgggttta

SEQ ID NO: 3823000 - DNA, 25 bp, Homo sapien
tgtgtgaagccaattttagttcctc

SEQ ID NO: 3823001 - DNA, 25 bp, Homo sapien
catcatttggatgagagaacagaaa

SEQ ID NO: 3823002 - DNA, 25 bp, Homo sapien
cctgttgggctctgcgcttgtgggt

SEQ ID NO: 3823003 - DNA, 25 bp, Homo sapien
gcctgttgggctctgcgcttgtggg

SEQ ID NO: 3823004 - DNA, 25 bp, Homo sapien
ttgggctctgcgcttgtgggttcat

SEQ ID NO: 3823005 - DNA, 25 bp, Homo sapien
ggctctgcgcttgtgggttcattct

SEQ ID NO: 3823006 - DNA, 25 bp, Homo sapien
agagccaggcccgagcaccacatcc

SEQ ID NO: 3823007 - DNA, 25 bp, Homo sapien
cagagccaggcccgagcaccacatc

SEQ ID NO: 3823008 - DNA, 25 bp, Homo sapien
agccaggcccgagcaccacatccct

SEQ ID NO: 3823009 - DNA, 25 bp, Homo sapien
caggcccgagcaccacatccctcac

SEQ ID NO: 3823010 - DNA, 25 bp, Homo sapien
cacagcagtcccgatgagggcgtac

SEQ ID NO: 3823011 - DNA, 25 bp, Homo sapien
cccaggcgtgcttttcaggtcggaa

SEQ ID NO: 3823012 - DNA, 25 bp, Homo sapien
gagtcgtcgtcaaataagtgcctcc

SEQ ID NO: 3823013 - DNA, 25 bp, Homo sapien
aagccagcagatatggcgacaccca

SEQ ID NO: 3823014 - DNA, 25 bp, Homo sapien
cagccccaggggtcttgcctgttgc

SEQ ID NO: 3823015 - DNA, 25 bp, Homo sapien
caatttcagccccaggggtcttgcc

SEQ ID NO: 3823016 - DNA, 25 bp, Homo sapien
atttcagccccaggggtcttgcctg

SEQ ID NO: 3823017 - DNA, 25 bp, Homo sapien
gcctgttgccagcacttgagctcct

SEQ ID NO: 3823018 - DNA, 25 bp, Homo sapien
actccccagacctgggtgagctgat

SEQ ID NO: 3823019 - DNA, 25 bp, Homo sapien
cagtgtgctccgtagccgtggtgct

SEQ ID NO: 3823020 - DNA, 25 bp, Homo sapien
gtgcttgccggccataactgaccat

SEQ ID NO: 3823021 - DNA, 25 bp, Homo sapien
gccgtggtgcttgccggccataact

SEQ ID NO: 3823022 - DNA, 25 bp, Homo sapien
atactggcataagatgtggccggca

SEQ ID NO: 3823023 - DNA, 25 bp, Homo sapien
agggcttgagggctaaagaaggaag

SEQ ID NO: 3823024 - DNA, 25 bp, Homo sapien
gagggcttgagggctaaagaaggaa

SEQ ID NO: 3823025 - DNA, 25 bp, Homo sapien
gagcagctggggatactggcataag

SEQ ID NO: 3823026 - DNA, 25 bp, Homo sapien
cgggacagatcattcgtaaaccctg

SEQ ID NO: 3823027 - DNA, 25 bp, Homo sapien
gaggcaccagcatccgtgctaggca

SEQ ID NO: 3823028 - DNA, 25 bp, Homo sapien
attcgtaaaccctgcgaggcaccag

SEQ ID NO: 3823029 - DNA, 25 bp, Homo sapien
tgcgaggcaccagcatccgtgctag

SEQ ID NO: 3823030 - DNA, 25 bp, Homo sapien
tgcacaacccctgtagtccatgctg

SEQ ID NO: 3823031 - DNA, 25 bp, Homo sapien
gaggctgatgttccacttcgggcaa

SEQ ID NO: 3823032 - DNA, 25 bp, Homo sapien
tcccattcttgcagactggctccag

SEQ ID NO: 3823033 - DNA, 25 bp, Homo sapien
ctctcttcttaggatggcacgccac

SEQ ID NO: 3823034 - DNA, 25 bp, Homo sapien
ctattctcctttagcccagaagcat

SEQ ID NO: 3823035 - DNA, 25 bp, Homo sapien
tattctcctttagcccagaagcatt

SEQ ID NO: 3823036 - DNA, 25 bp, Homo sapien
attctcctttagcccagaagcattt

SEQ ID NO: 3823037 - DNA, 25 bp, Homo sapien
ttctcctttagcccagaagcatttg

SEQ ID NO: 3823038 - DNA, 25 bp, Homo sapien
tggaatgagacaaacaagatcattg

SEQ ID NO: 3823039 - DNA, 25 bp, Homo sapien
tcactaccagatcaaagtgagaaac

SEQ ID NO: 3823040 - DNA, 25 bp, Homo sapien
aacaagatcattgctcactaccaga

SEQ ID NO: 3823041 - DNA, 25 bp, Homo sapien
tcattgctcactaccagatcaaagt

SEQ ID NO: 3823042 - DNA, 25 bp, Homo sapien
ggaggaagaggatcctcagcatgct

SEQ ID NO: 3823043 - DNA, 25 bp, Homo sapien
agaggatcctcagcatgctgacccc

SEQ ID NO: 3823044 - DNA, 25 bp, Homo sapien
gaagaggatcctcagcatgctgacc

SEQ ID NO: 3823045 - DNA, 25 bp, Homo sapien
ggaagaggatcctcagcatgctgac

SEQ ID NO: 3823046 - DNA, 25 bp, Homo sapien
cagaagctggctgtgattagaccca

SEQ ID NO: 3823047 - DNA, 25 bp, Homo sapien
cattctggactccaccagaagctgg

SEQ ID NO: 3823048 - DNA, 25 bp, Homo sapien
gcagcgcaggcacaatgagccatgt

SEQ ID NO: 3823049 - DNA, 25 bp, Homo sapien
caggacaagacccacgtgactgatg

SEQ ID NO: 3823050 - DNA, 25 bp, Homo sapien
aattggcatgtcttcattaggagga

SEQ ID NO: 3823051 - DNA, 25 bp, Homo sapien
caaaacaccgagagactgagagcag

SEQ ID NO: 3823052 - DNA, 25 bp, Homo sapien
tgaaataaagtagcaaaacaccgag

SEQ ID NO: 3823053 - DNA, 25 bp, Homo sapien
tcactctgaaataaagtagcaaaac

SEQ ID NO: 3823054 - DNA, 25 bp, Homo sapien
gagggtctttgcagacccatgtgga

SEQ ID NO: 3823055 - DNA, 25 bp, Homo sapien
tgcagacccatgtggagggaatggg

SEQ ID NO: 3823056 - DNA, 25 bp, Homo sapien
ccagtgtgcactcataaagtagcac

SEQ ID NO: 3823057 - DNA, 25 bp, Homo sapien
actgacgggggcacctcagtttgga

SEQ ID NO: 3823058 - DNA, 25 bp, Homo sapien
ggctgtcttcctctgttacacccaa

SEQ ID NO: 3823059 - DNA, 25 bp, Homo sapien
tgtcctggctcctgtaaacaccact

SEQ ID NO: 3823060 - DNA, 25 bp, Homo sapien
tctctcaaaggccatctacactgtc

SEQ ID NO: 3823061 - DNA, 25 bp, Homo sapien
tattgcctcctgaacggcacagtgg

SEQ ID NO: 3823062 - DNA, 25 bp, Homo sapien
cagatgattaggtacgtgggctcag

SEQ ID NO: 3823063 - DNA, 25 bp, Homo sapien
cagccagatgattaggtacgtgggc

SEQ ID NO: 3823064 - DNA, 25 bp, Homo sapien
gaacagccagatgattaggtacgtg

SEQ ID NO: 3823065 - DNA, 25 bp, Homo sapien
atgattaggtacgtgggctcaggca

SEQ ID NO: 3823066 - DNA, 25 bp, Homo sapien
cagctccaatggatcaggcacatta

SEQ ID NO: 3823067 - DNA, 25 bp, Homo sapien
attaacaacagagccccgcagcact

SEQ ID NO: 3823068 - DNA, 25 bp, Homo sapien
tccagtgtgaccagctccaatggat

SEQ ID NO: 3823069 - DNA, 25 bp, Homo sapien
aatggatcaggcacattaacaacag

SEQ ID NO: 3823070 - DNA, 25 bp, Homo sapien
tgggtcagagaaatgcacagagccc

SEQ ID NO: 3823071 - DNA, 25 bp, Homo sapien
tcagagaaatgcacagagccccact

SEQ ID NO: 3823072 - DNA, 25 bp, Homo sapien
ctgtgggtcagagaaatgcacagag

SEQ ID NO: 3823073 - DNA, 25 bp, Homo sapien
gtcagagaaatgcacagagccccac

SEQ ID NO: 3823074 - DNA, 25 bp, Homo sapien
ccgctaccgtagcaaagccatttgg

SEQ ID NO: 3823075 - DNA, 25 bp, Homo sapien
acctggaacaacctgctgggtttct

SEQ ID NO: 3823076 - DNA, 25 bp, Homo sapien
tgctcatttcctatattgggttgta

SEQ ID NO: 3823077 - DNA, 25 bp, Homo sapien
tgagggcgagaagctccttccgcta

SEQ ID NO: 3823078 - DNA, 25 bp, Homo sapien
gaaagctgcatggtggcccacctgg

SEQ ID NO: 3823079 - DNA, 25 bp, Homo sapien
agaaagctgcatggtggcccacctg

SEQ ID NO: 3823080 - DNA, 25 bp, Homo sapien
taatggcctggttattaactccacc

SEQ ID NO: 3823081 - DNA, 25 bp, Homo sapien
catcagactaatggcctggttatta

SEQ ID NO: 3823082 - DNA, 25 bp, Homo sapien
tctctggccctccatcagactaatg

SEQ ID NO: 3823083 - DNA, 25 bp, Homo sapien
ctctggccctccatcagactaatgg

SEQ ID NO: 3823084 - DNA, 25 bp, Homo sapien
ctgagtgatggctcttgcttgtggc

SEQ ID NO: 3823085 - DNA, 25 bp, Homo sapien
tggctcttgcttgtggccaagggct

SEQ ID NO: 3823086 - DNA, 25 bp, Homo sapien
ctcgctgggctctacacgctcgggt

SEQ ID NO: 3823087 - DNA, 25 bp, Homo sapien
ctacacgctcgggtatattcaaagg

SEQ ID NO: 3823088 - DNA, 25 bp, Homo sapien
ccttcttgccatgttctcccttact

SEQ ID NO: 3823089 - DNA, 25 bp, Homo sapien
tgttctcccttactccagtcacagt

SEQ ID NO: 3823090 - DNA, 25 bp, Homo sapien
atgttctcccttactccagtcacag

SEQ ID NO: 3823091 - DNA, 25 bp, Homo sapien
ttgccatgttctcccttactccagt

SEQ ID NO: 3823092 - DNA, 25 bp, Homo sapien
tgcgtgacacaggctaacagcaggg

SEQ ID NO: 3823093 - DNA, 25 bp, Homo sapien
ctgcgtgacacaggctaacagcagg

SEQ ID NO: 3823094 - DNA, 25 bp, Homo sapien
gggtgccctggacggtgcagcagca

SEQ ID NO: 3823095 - DNA, 25 bp, Homo sapien
gcagcaggcaccccgaatgtctgct

SEQ ID NO: 3823096 - DNA, 25 bp, Homo sapien
agcagcaggcaccccgaatgtctgc

SEQ ID NO: 3823097 - DNA, 25 bp, Homo sapien
ccagggtgccctggacggtgcagca

SEQ ID NO: 3823098 - DNA, 25 bp, Homo sapien
tgggtccgcaggctatgttcagcac

SEQ ID NO: 3823099 - DNA, 25 bp, Homo sapien
tagctgggtccgcaggctatgttca

SEQ ID NO: 3823100 - DNA, 25 bp, Homo sapien
gctatgttcagcactcttaggagct

SEQ ID NO: 3823101 - DNA, 25 bp, Homo sapien
gcactcttaggagctttaaactggg

SEQ ID NO: 3823102 - DNA, 25 bp, Homo sapien
atcaggaagcaggatcctaagtggg

SEQ ID NO: 3823103 - DNA, 25 bp, Homo sapien
gcaggatcctaagtgggctgcccag

SEQ ID NO: 3823104 - DNA, 25 bp, Homo sapien
caggaagcaggatcctaagtgggct

SEQ ID NO: 3823105 - DNA, 25 bp, Homo sapien
gaagcaggatcctaagtgggctgcc

SEQ ID NO: 3823106 - DNA, 25 bp, Homo sapien
cctatatgagaatgccaccctgtgg

SEQ ID NO: 3823107 - DNA, 25 bp, Homo sapien
caagaaaggcatgtacaggaccctc

SEQ ID NO: 3823108 - DNA, 25 bp, Homo sapien
tatactaggcatgtctggagctcag

SEQ ID NO: 3823109 - DNA, 25 bp, Homo sapien
cacacctgtggcattttgggcctcc

SEQ ID NO: 3823110 - DNA, 25 bp, Homo sapien
tgtgactctccataagtctccaagc

SEQ ID NO: 3823111 - DNA, 25 bp, Homo sapien
cgacgagtggatgcccagaaactta

SEQ ID NO: 3823112 - DNA, 25 bp, Homo sapien
tctggaagcctctcgaaacttcaag

SEQ ID NO: 3823113 - DNA, 25 bp, Homo sapien
tccctgaattctggcctctggaagc

SEQ ID NO: 3823114 - DNA, 25 bp, Homo sapien
gctcattagccacatagggttggtg

SEQ ID NO: 3823115 - DNA, 25 bp, Homo sapien
caagtggacaaagtggctctagggc

SEQ ID NO: 3823116 - DNA, 25 bp, Homo sapien
tagggcagaggtcggcaaactgtcc

SEQ ID NO: 3823117 - DNA, 25 bp, Homo sapien
ccctgtgagctaagagtggttgtac

SEQ ID NO: 3823118 - DNA, 25 bp, Homo sapien
taaaagaatcaggtgagtggcttcc

SEQ ID NO: 3823119 - DNA, 25 bp, Homo sapien
ttaagttagcgatcaccacgtgcgg

SEQ ID NO: 3823120 - DNA, 25 bp, Homo sapien
ttctggacggctagggagcacactg

SEQ ID NO: 3823121 - DNA, 25 bp, Homo sapien
ccagaaattggcctgaaggacccat

SEQ ID NO: 3823122 - DNA, 25 bp, Homo sapien
cagttctgcggctgtgtttctggct

SEQ ID NO: 3823123 - DNA, 25 bp, Homo sapien
tcagtttttggtctggagcttgggc

SEQ ID NO: 3823124 - DNA, 25 bp, Homo sapien
gtctgcatcaggatacccgctgtaa

SEQ ID NO: 3823125 - DNA, 25 bp, Homo sapien
atggtctgcatcaggatacccgctg

SEQ ID NO: 3823126 - DNA, 25 bp, Homo sapien
tcattgacaaagctacccgccagtg

SEQ ID NO: 3823127 - DNA, 25 bp, Homo sapien
ctgctgatgtcattgacaaagctac

SEQ ID NO: 3823128 - DNA, 25 bp, Homo sapien
attgacaaagctacccgccagtgcc

SEQ ID NO: 3823129 - DNA, 25 bp, Homo sapien
ccctcctgctgatgtcattgacaaa

SEQ ID NO: 3823130 - DNA, 25 bp, Homo sapien
tcatatccttctgtaactctcaccc

SEQ ID NO: 3823131 - DNA, 25 bp, Homo sapien
tccttctgtaactctcaccctgaga

SEQ ID NO: 3823132 - DNA, 25 bp, Homo sapien
tgcctcttccccgattatttcatat

SEQ ID NO: 3823133 - DNA, 25 bp, Homo sapien
gtaactctcaccctgagacccagcc

SEQ ID NO: 3823134 - DNA, 25 bp, Homo sapien
gatgaaacgggctatttctgccccg

SEQ ID NO: 3823135 - DNA, 25 bp, Homo sapien
tctgccccgggacatcagcagggct

SEQ ID NO: 3823136 - DNA, 25 bp, Homo sapien
tgccccgggacatcagcagggctct

SEQ ID NO: 3823137 - DNA, 25 bp, Homo sapien
gcggcggtcgtccagagccgatgat

SEQ ID NO: 3823138 - DNA, 25 bp, Homo sapien
gtaagcttcgcggacttcccgtgtc

SEQ ID NO: 3823139 - DNA, 25 bp, Homo sapien
gaatccactctcctatcacctttgg

SEQ ID NO: 3823140 - DNA, 25 bp, Homo sapien
taggtttgtgagctagaggaggctt

SEQ ID NO: 3823141 - DNA, 25 bp, Homo sapien
tggccggcttctggtcactgatctt

SEQ ID NO: 3823142 - DNA, 25 bp, Homo sapien
ggttgtagaagattcagactcccac

SEQ ID NO: 3823143 - DNA, 25 bp, Homo sapien
agatttagaggctcctgcacatgta

SEQ ID NO: 3823144 - DNA, 25 bp, Homo sapien
gtagaagattcagactcccaccagg

SEQ ID NO: 3823145 - DNA, 25 bp, Homo sapien
gcacatgtaatgtggttgtagaaga

SEQ ID NO: 3823146 - DNA, 25 bp, Homo sapien
agcagcaatgtcagtgagtccatga

SEQ ID NO: 3823147 - DNA, 25 bp, Homo sapien
gtcagtgagtccatgaggcaactgc

SEQ ID NO: 3823148 - DNA, 25 bp, Homo sapien
tccttcaaatggttcaaagtggtaa

SEQ ID NO: 3823149 - DNA, 25 bp, Homo sapien
ggtaagcaagagagttttttcactg

SEQ ID NO: 3823150 - DNA, 25 bp, Homo sapien
ccatcctctgcagattggccttcag

SEQ ID NO: 3823151 - DNA, 25 bp, Homo sapien
ctgcagattggccttcagtggccat

SEQ ID NO: 3823152 - DNA, 25 bp, Homo sapien
acactgccatcctctgcagattggc

SEQ ID NO: 3823153 - DNA, 25 bp, Homo sapien
cctctgcagattggccttcagtggc

SEQ ID NO: 3823154 - DNA, 25 bp, Homo sapien
ttgagttcagggatcgccactgggc

SEQ ID NO: 3823155 - DNA, 25 bp, Homo sapien
tcttgctagaatatccatcagaggg

SEQ ID NO: 3823156 - DNA, 25 bp, Homo sapien
tacgtagactggttgagtctcaggc

SEQ ID NO: 3823157 - DNA, 25 bp, Homo sapien
gaaagagagtttccattacgtagac

SEQ ID NO: 3823158 - DNA, 25 bp, Homo sapien
ttcgtagtgatcatagacaaggcat

SEQ ID NO: 3823159 - DNA, 25 bp, Homo sapien
gaattaatgctctccacaccatgag

SEQ ID NO: 3823160 - DNA, 25 bp, Homo sapien
tgaaggcaataaccatccgcatgga

SEQ ID NO: 3823161 - DNA, 25 bp, Homo sapien
gacaaggcatgatacactcaggagt

SEQ ID NO: 3823162 - DNA, 25 bp, Homo sapien
aaaggtagttcatctgtatgcataa

SEQ ID NO: 3823163 - DNA, 25 bp, Homo sapien
ctctacgtgccaggcatgtggggaa

SEQ ID NO: 3823164 - DNA, 25 bp, Homo sapien
cccctctacgtgccaggcatgtggg

SEQ ID NO: 3823165 - DNA, 25 bp, Homo sapien
gggaaaggtagttcatctgtatgca

SEQ ID NO: 3823166 - DNA, 25 bp, Homo sapien
ttaacttcccaccaatccacaggtc

SEQ ID NO: 3823167 - DNA, 25 bp, Homo sapien
acttcccaccaatccacaggtctat

SEQ ID NO: 3823168 - DNA, 25 bp, Homo sapien
taacttcccaccaatccacaggtct

SEQ ID NO: 3823169 - DNA, 25 bp, Homo sapien
cttaacttcccaccaatccacaggt

SEQ ID NO: 3823170 - DNA, 25 bp, Homo sapien
gccagatgtgccagtgagatctcct

SEQ ID NO: 3823171 - DNA, 25 bp, Homo sapien
cttgcaggtgagtgcttcaggtaca

SEQ ID NO: 3823172 - DNA, 25 bp, Homo sapien
tagttccacacccacagtgtcaaga

SEQ ID NO: 3823173 - DNA, 25 bp, Homo sapien
caggtggcctgggtgattagcccag

SEQ ID NO: 3823174 - DNA, 25 bp, Homo sapien
ttcagcccatgccacagttcctggg

SEQ ID NO: 3823175 - DNA, 25 bp, Homo sapien
taaacactgtaagcgggacaggccc

SEQ ID NO: 3823176 - DNA, 25 bp, Homo sapien
acaagaccttcaaaggcagcccagg

SEQ ID NO: 3823177 - DNA, 25 bp, Homo sapien
cattactgctcatcttggtccaggg

SEQ ID NO: 3823178 - DNA, 25 bp, Homo sapien
gcctggatggaaatcccagggaggc

SEQ ID NO: 3823179 - DNA, 25 bp, Homo sapien
ccctccgagactctgggcctggatg

SEQ ID NO: 3823180 - DNA, 25 bp, Homo sapien
atggaaatcccagggaggctcctca

SEQ ID NO: 3823181 - DNA, 25 bp, Homo sapien
ctccctccgagactctgggcctgga

SEQ ID NO: 3823182 - DNA, 25 bp, Homo sapien
acaacactgccgcactggtgggact

SEQ ID NO: 3823183 - DNA, 25 bp, Homo sapien
tccagagggacgctccaggtgccaa

SEQ ID NO: 3823184 - DNA, 25 bp, Homo sapien
gccaccaagtgccatcgggatctgt

SEQ ID NO: 3823185 - DNA, 25 bp, Homo sapien
tctgttgccaaagaagccaggacaa

SEQ ID NO: 3823186 - DNA, 25 bp, Homo sapien
caggccgggcggggcactgtggacc

SEQ ID NO: 3823187 - DNA, 25 bp, Homo sapien
ggagggcaggccgggcggggcactg

SEQ ID NO: 3823188 - DNA, 25 bp, Homo sapien
ggcaggccgggcggggcactgtgga

SEQ ID NO: 3823189 - DNA, 25 bp, Homo sapien
agggcaggccgggcggggcactgtg

SEQ ID NO: 3823190 - DNA, 25 bp, Homo sapien
ctggccgtgcggttactctggcagc

SEQ ID NO: 3823191 - DNA, 25 bp, Homo sapien
gacagcttctgagtgctcgcgggcc

SEQ ID NO: 3823192 - DNA, 25 bp, Homo sapien
gtgcggttactctggcagccatagg

SEQ ID NO: 3823193 - DNA, 25 bp, Homo sapien
gcgggccttcatgcgcagggtggcc

SEQ ID NO: 3823194 - DNA, 25 bp, Homo sapien
gggacgcagcaagagcacagtgggc

SEQ ID NO: 3823195 - DNA, 25 bp, Homo sapien
ctgggacgcagcaagagcacagtgg

SEQ ID NO: 3823196 - DNA, 25 bp, Homo sapien
acgcagcaagagcacagtgggcccc

SEQ ID NO: 3823197 - DNA, 25 bp, Homo sapien
gacgcagcaagagcacagtgggccc

SEQ ID NO: 3823198 - DNA, 25 bp, Homo sapien
tgatcccgtaggcagcagataccaa

SEQ ID NO: 3823199 - DNA, 25 bp, Homo sapien
acacacgcacagtgtgcaagggagc

SEQ ID NO: 3823200 - DNA, 25 bp, Homo sapien
aagtttgactgagggactgatcccg

SEQ ID NO: 3823201 - DNA, 25 bp, Homo sapien
cagtgtgcaagggagctctgagacc

SEQ ID NO: 3823202 - DNA, 25 bp, Homo sapien
tgcaggtggacgcacaaacacggta

SEQ ID NO: 3823203 - DNA, 25 bp, Homo sapien
tgcagcaaaagtgtccatcaaaggg

SEQ ID NO: 3823204 - DNA, 25 bp, Homo sapien
cctggccatctgaagggaggtcctc

SEQ ID NO: 3823205 - DNA, 25 bp, Homo sapien
cacctaggaatgtggcaaatgagcc

SEQ ID NO: 3823206 - DNA, 25 bp, Homo sapien
tcagccgaccattccaaccagagcc

SEQ ID NO: 3823207 - DNA, 25 bp, Homo sapien
caaccagagccttgtgctgtgacac

SEQ ID NO: 3823208 - DNA, 25 bp, Homo sapien
aaccagagccttgtgctgtgacaca

SEQ ID NO: 3823209 - DNA, 25 bp, Homo sapien
tccaaccagagccttgtgctgtgac

SEQ ID NO: 3823210 - DNA, 25 bp, Homo sapien
gcggggcacttgacctacagcagct

SEQ ID NO: 3823211 - DNA, 25 bp, Homo sapien
gtgccattgcatgcctgcaccacgc

SEQ ID NO: 3823212 - DNA, 25 bp, Homo sapien
tgcaccacgcggggcacttgaccta

SEQ ID NO: 3823213 - DNA, 25 bp, Homo sapien
gggcacttgacctacagcagctcct

SEQ ID NO: 3823214 - DNA, 25 bp, Homo sapien
ggccccacccgtgagctgcaggttg

SEQ ID NO: 3823215 - DNA, 25 bp, Homo sapien
gctgcaggttggcacctaacactgt

SEQ ID NO: 3823216 - DNA, 25 bp, Homo sapien
aagtggcccagtcgcatgcatggag

SEQ ID NO: 3823217 - DNA, 25 bp, Homo sapien
cagggatgattgtcccacacaggcc

SEQ ID NO: 3823218 - DNA, 25 bp, Homo sapien
gcctgggcgtaggtggccgtgttca

SEQ ID NO: 3823219 - DNA, 25 bp, Homo sapien
ctgcaggacctaccgttcgccccag

SEQ ID NO: 3823220 - DNA, 25 bp, Homo sapien
aggccctgcaggacctaccgttcgc

SEQ ID NO: 3823221 - DNA, 25 bp, Homo sapien
cgtgttcaggagagtccccggcaag

SEQ ID NO: 3823222 - DNA, 25 bp, Homo sapien
cgcctccttcttactccgggcttgg

SEQ ID NO: 3823223 - DNA, 25 bp, Homo sapien
cagcgcctccttcttactccgggct

SEQ ID NO: 3823224 - DNA, 25 bp, Homo sapien
ccagcgcctccttcttactccgggc

SEQ ID NO: 3823225 - DNA, 25 bp, Homo sapien
gcgcctccttcttactccgggcttg

SEQ ID NO: 3823226 - DNA, 25 bp, Homo sapien
ccttgcacctttcagggagaagtta

SEQ ID NO: 3823227 - DNA, 25 bp, Homo sapien
tcagggagaagttatgatcttccac

SEQ ID NO: 3823228 - DNA, 25 bp, Homo sapien
gggagaagttatgatcttccacttc

SEQ ID NO: 3823229 - DNA, 25 bp, Homo sapien
gaagttatgatcttccacttctgaa

SEQ ID NO: 3823230 - DNA, 25 bp, Homo sapien
catgacccaggggaaccgaaagcaa

SEQ ID NO: 3823231 - DNA, 25 bp, Homo sapien
agatctttgcatagtcttaacccca

SEQ ID NO: 3823232 - DNA, 25 bp, Homo sapien
tttttaagagatactaacatgaccc

SEQ ID NO: 3823233 - DNA, 25 bp, Homo sapien
ccgaaagcaaactattatatttcct

SEQ ID NO: 3823234 - DNA, 25 bp, Homo sapien
tcatggcgagctcttctctggtgaa

SEQ ID NO: 3823235 - DNA, 25 bp, Homo sapien
ggtttattttcatggcgagctcttc

SEQ ID NO: 3823236 - DNA, 25 bp, Homo sapien
catctggatagtgtgtttgggcaaa

SEQ ID NO: 3823237 - DNA, 25 bp, Homo sapien
tttgggcaaaaacggcctcgagagc

SEQ ID NO: 3823238 - DNA, 25 bp, Homo sapien
ctgctgaagagtgaacgtcgtccgg

SEQ ID NO: 3823239 - DNA, 25 bp, Homo sapien
gagtgattgccaaaggttgcagtgc

SEQ ID NO: 3823240 - DNA, 25 bp, Homo sapien
ggttccggcgctgttttctacgcag

SEQ ID NO: 3823241 - DNA, 25 bp, Homo sapien
acgcagaaacccgtcatcaaaatcc

SEQ ID NO: 3823242 - DNA, 25 bp, Homo sapien
gacgcggcgggtccactcgcctttg

SEQ ID NO: 3823243 - DNA, 25 bp, Homo sapien
gagctgcccagaatccagggcggaa

SEQ ID NO: 3823244 - DNA, 25 bp, Homo sapien
tcgtgcagctcgtgatctgggccag

SEQ ID NO: 3823245 - DNA, 25 bp, Homo sapien
cgacgggcccttgtaggctcgtgca

SEQ ID NO: 3823246 - DNA, 25 bp, Homo sapien
tcgccggctgtcagatcggctggac

SEQ ID NO: 3823247 - DNA, 25 bp, Homo sapien
gcagtggaaataaaacatcgccggc

SEQ ID NO: 3823248 - DNA, 25 bp, Homo sapien
cagcagaacggacccgcgcgcgttg

SEQ ID NO: 3823249 - DNA, 25 bp, Homo sapien
ctggacggccgagacctgggagggt

SEQ ID NO: 3823250 - DNA, 25 bp, Homo sapien
caggtccggctagcgcgcaaggcca

SEQ ID NO: 3823251 - DNA, 25 bp, Homo sapien
ggccaccgcagccaggtccggctag

SEQ ID NO: 3823252 - DNA, 25 bp, Homo sapien
accccgcagcgtagtttctggctct

SEQ ID NO: 3823253 - DNA, 25 bp, Homo sapien
accaaaccccgcagcgtagtttctg

SEQ ID NO: 3823254 - DNA, 25 bp, Homo sapien
cggggcccggcgagtgggtcaggag

SEQ ID NO: 3823255 - DNA, 25 bp, Homo sapien
ggggcccggcgagtgggtcaggagc

SEQ ID NO: 3823256 - DNA, 25 bp, Homo sapien
gcggtcgaggaggtcggagcgtgac

SEQ ID NO: 3823257 - DNA, 25 bp, Homo sapien
gcaggaccaaagaagtgactcggga

SEQ ID NO: 3823258 - DNA, 25 bp, Homo sapien
agcgtgaccgcctccgatccgcaag

SEQ ID NO: 3823259 - DNA, 25 bp, Homo sapien
ccgcaagccctgctcggctggcggc

SEQ ID NO: 3823260 - DNA, 25 bp, Homo sapien
taatgctgcgttagggagccttggc

SEQ ID NO: 3823261 - DNA, 25 bp, Homo sapien
cagccttgatcttaaagacgcagcg

SEQ ID NO: 3823262 - DNA, 25 bp, Homo sapien
gcgaggtggtgggtcgggtccctgc

SEQ ID NO: 3823263 - DNA, 25 bp, Homo sapien
tgcacggcccgggatacagccttga

SEQ ID NO: 3823264 - DNA, 25 bp, Homo sapien
caccagactcataatgttaattggc

SEQ ID NO: 3823265 - DNA, 25 bp, Homo sapien
tgttcaccagactcataatgttaat

SEQ ID NO: 3823266 - DNA, 25 bp, Homo sapien
cttgatgttcaccagactcataatg

SEQ ID NO: 3823267 - DNA, 25 bp, Homo sapien
gatgttcaccagactcataatgtta

SEQ ID NO: 3823268 - DNA, 25 bp, Homo sapien
ggttgtcttagctttttgagcatca

SEQ ID NO: 3823269 - DNA, 25 bp, Homo sapien
tcatgtcccaaatccttattgctgc

SEQ ID NO: 3823270 - DNA, 25 bp, Homo sapien
ggggcttcatgtcccaaatccttat

SEQ ID NO: 3823271 - DNA, 25 bp, Homo sapien
gctgaagtcatagaatggatatggg

SEQ ID NO: 3823272 - DNA, 25 bp, Homo sapien
gcccatcagtgaccattggcatgca

SEQ ID NO: 3823273 - DNA, 25 bp, Homo sapien
tcagtgaccattggcatgcaagtat

SEQ ID NO: 3823274 - DNA, 25 bp, Homo sapien
ccatcagtgaccattggcatgcaag

SEQ ID NO: 3823275 - DNA, 25 bp, Homo sapien
gaccattggcatgcaagtatttttc

SEQ ID NO: 3823276 - DNA, 25 bp, Homo sapien
agaattcaccatcatcaaaggagca

SEQ ID NO: 3823277 - DNA, 25 bp, Homo sapien
cagaattcaccatcatcaaaggagc

SEQ ID NO: 3823278 - DNA, 25 bp, Homo sapien
tcagaattcaccatcatcaaaggag

SEQ ID NO: 3823279 - DNA, 25 bp, Homo sapien
cagccaggagagtttaggttctgcc

SEQ ID NO: 3823280 - DNA, 25 bp, Homo sapien
gccagccaggagagtttaggttctg

SEQ ID NO: 3823281 - DNA, 25 bp, Homo sapien
agccagccaggagagtttaggttct

SEQ ID NO: 3823282 - DNA, 25 bp, Homo sapien
ccagccaggagagtttaggttctgc

SEQ ID NO: 3823283 - DNA, 25 bp, Homo sapien
tgagtccaagtaaaggagtctggtg

SEQ ID NO: 3823284 - DNA, 25 bp, Homo sapien
ttggagatgtcagggttcaccttga

SEQ ID NO: 3823285 - DNA, 25 bp, Homo sapien
gctctgtttgcatactccctcagca

SEQ ID NO: 3823286 - DNA, 25 bp, Homo sapien
tccctcagcaagaccatcttctgtg

SEQ ID NO: 3823287 - DNA, 25 bp, Homo sapien
ggtggtgggaagactcagccaatgt

SEQ ID NO: 3823288 - DNA, 25 bp, Homo sapien
tggggcagacgctacagccccaagg

SEQ ID NO: 3823289 - DNA, 25 bp, Homo sapien
tgtcctggaagtccactttgtgtct

SEQ ID NO: 3823290 - DNA, 25 bp, Homo sapien
taattgattcggtagcttgatgggt

SEQ ID NO: 3823291 - DNA, 25 bp, Homo sapien
tgtctcaggaagtagtctcctgcgg

SEQ ID NO: 3823292 - DNA, 25 bp, Homo sapien
ctgtgctaatgctaggctttgtctc

SEQ ID NO: 3823293 - DNA, 25 bp, Homo sapien
gctaatgctaggctttgtctcagga

SEQ ID NO: 3823294 - DNA, 25 bp, Homo sapien
ccagagcttgaacatgtggagctga

SEQ ID NO: 3823295 - DNA, 25 bp, Homo sapien
ttggtgaccccgctggagtcggcac

SEQ ID NO: 3823296 - DNA, 25 bp, Homo sapien
ttgcctgtggcagcgttggtccttg

SEQ ID NO: 3823297 - DNA, 25 bp, Homo sapien
ctggagtcggcacccttctggaagg

SEQ ID NO: 3823298 - DNA, 25 bp, Homo sapien
cctggaggcaccacacgtgttgcct

SEQ ID NO: 3823299 - DNA, 25 bp, Homo sapien
ctccttctcggcctcgtacctggcc

SEQ ID NO: 3823300 - DNA, 25 bp, Homo sapien
agacggcctcttcccagggctcaga

SEQ ID NO: 3823301 - DNA, 25 bp, Homo sapien
ccagggctcagagggatgaacaagc

SEQ ID NO: 3823302 - DNA, 25 bp, Homo sapien
ctcttcccagggctcagagggatga

SEQ ID NO: 3823303 - DNA, 25 bp, Homo sapien
caagacggcctcttcccagggctca

SEQ ID NO: 3823304 - DNA, 25 bp, Homo sapien
gggcagaaccaagcctctcagcaga

SEQ ID NO: 3823305 - DNA, 25 bp, Homo sapien
tcttctgatgacaccgttggctgat

SEQ ID NO: 3823306 - DNA, 25 bp, Homo sapien
gaccacaggcaagagccaaagttgg

SEQ ID NO: 3823307 - DNA, 25 bp, Homo sapien
tgatgacaccgttggctgatgacca

SEQ ID NO: 3823308 - DNA, 25 bp, Homo sapien
tacaactgtctccttattactgcga

SEQ ID NO: 3823309 - DNA, 25 bp, Homo sapien
agtgctggacgctatccccatgctc

SEQ ID NO: 3823310 - DNA, 25 bp, Homo sapien
ctgagcctggtgcttaccgtactgg

SEQ ID NO: 3823311 - DNA, 25 bp, Homo sapien
tcaatctgtgagagccacactgcaa

SEQ ID NO: 3823312 - DNA, 25 bp, Homo sapien
taaacagtcacagaacacccaacaa

SEQ ID NO: 3823313 - DNA, 25 bp, Homo sapien
aaaatagccaatcccacgcagagca

SEQ ID NO: 3823314 - DNA, 25 bp, Homo sapien
gaaagacagtcaaccctgcaaatgt

SEQ ID NO: 3823315 - DNA, 25 bp, Homo sapien
tgctaagcaacaaaagtggcctcaa

SEQ ID NO: 3823316 - DNA, 25 bp, Homo sapien
tcacttagcaggaaattttagaggt

SEQ ID NO: 3823317 - DNA, 25 bp, Homo sapien
gatgggatcatagcatgtggtcttt

SEQ ID NO: 3823318 - DNA, 25 bp, Homo sapien
tctggacttttatatggatgggatc

SEQ ID NO: 3823319 - DNA, 25 bp, Homo sapien
gtatcagtgtatccgtccttcattg

SEQ ID NO: 3823320 - DNA, 25 bp, Homo sapien
gttcaagtgatccttctgcctcagc

SEQ ID NO: 3823321 - DNA, 25 bp, Homo sapien
gggttcaagtgatccttctgcctca

SEQ ID NO: 3823322 - DNA, 25 bp, Homo sapien
ctgggttcaagtgatccttctgcct

SEQ ID NO: 3823323 - DNA, 25 bp, Homo sapien
gcacaatctcggctcctgggttcaa

SEQ ID NO: 3823324 - DNA, 25 bp, Homo sapien
aatataatgtaaggtaagtgtccaa

SEQ ID NO: 3823325 - DNA, 25 bp, Homo sapien
aaatataatgtaaggtaagtgtcca

SEQ ID NO: 3823326 - DNA, 25 bp, Homo sapien
aaaatcagttgactacagatgtttg

SEQ ID NO: 3823327 - DNA, 25 bp, Homo sapien
taaatataatgtaaggtaagtgtcc

SEQ ID NO: 3823328 - DNA, 25 bp, Homo sapien
aaatagaagtgtgataatgggcatc

SEQ ID NO: 3823329 - DNA, 25 bp, Homo sapien
cctacttggtgatggtgcataatta

SEQ ID NO: 3823330 - DNA, 25 bp, Homo sapien
gttaagccaatcttatatccctggg

SEQ ID NO: 3823331 - DNA, 25 bp, Homo sapien
tggcttagaccctccagtacaatgt

SEQ ID NO: 3823332 - DNA, 25 bp, Homo sapien
cctggtttaatctgttcactagtta

SEQ ID NO: 3823333 - DNA, 25 bp, Homo sapien
tatctttgagcagttttgttatcag

SEQ ID NO: 3823334 - DNA, 25 bp, Homo sapien
ggtagaacacagtggtaaaactgtc

SEQ ID NO: 3823335 - DNA, 25 bp, Homo sapien
tcagggcaatactgggaagtactcc

SEQ ID NO: 3823336 - DNA, 25 bp, Homo sapien
cctaaagtgtgttatctatgggagc

SEQ ID NO: 3823337 - DNA, 25 bp, Homo sapien
gcatagataacatagagttggaatg

SEQ ID NO: 3823338 - DNA, 25 bp, Homo sapien
gtctctatctctaggagcatttttg

SEQ ID NO: 3823339 - DNA, 25 bp, Homo sapien
tgacactagtatagccagtccagct

SEQ ID NO: 3823340 - DNA, 25 bp, Homo sapien
tattaggcaggttggttaacaacaa

SEQ ID NO: 3823341 - DNA, 25 bp, Homo sapien
gttatagaccaatacatcatatacg

SEQ ID NO: 3823342 - DNA, 25 bp, Homo sapien
tatataattgcttttactggtgctc

SEQ ID NO: 3823343 - DNA, 25 bp, Homo sapien
tgactgttatacctgccttctggcc

SEQ ID NO: 3823344 - DNA, 25 bp, Homo sapien
tgtactcccattacatgcatactta

SEQ ID NO: 3823345 - DNA, 25 bp, Homo sapien
ttatcatgctggaagttcactaagc

SEQ ID NO: 3823346 - DNA, 25 bp, Homo sapien
tcactaagcttcctagatgtttttc

SEQ ID NO: 3823347 - DNA, 25 bp, Homo sapien
catacttaatggtgcacataatggt

SEQ ID NO: 3823348 - DNA, 25 bp, Homo sapien
ggcatcttgcccctccctgtgaggt

SEQ ID NO: 3823349 - DNA, 25 bp, Homo sapien
ggtaccatacctctggacagggagc

SEQ ID NO: 3823350 - DNA, 25 bp, Homo sapien
tctactattgaacccctttagtgca

SEQ ID NO: 3823351 - DNA, 25 bp, Homo sapien
tctcttattctatctgccagttggc

SEQ ID NO: 3823352 - DNA, 25 bp, Homo sapien
gaccaatttaacagaatgcagagcc

SEQ ID NO: 3823353 - DNA, 25 bp, Homo sapien
gttatagctaattcctaggacagtg

SEQ ID NO: 3823354 - DNA, 25 bp, Homo sapien
gaatgtattcatgaccctagctagg

SEQ ID NO: 3823355 - DNA, 25 bp, Homo sapien
gactttgaggacaatcattctacca

SEQ ID NO: 3823356 - DNA, 25 bp, Homo sapien
gaagtagtcttaagctgagcagcca

SEQ ID NO: 3823357 - DNA, 25 bp, Homo sapien
ggagaatacacaccaaacctagggc

SEQ ID NO: 3823358 - DNA, 25 bp, Homo sapien
taatccaacaattctgtgcaggcag

SEQ ID NO: 3823359 - DNA, 25 bp, Homo sapien
ggtactttcaatcacgagactggtt

SEQ ID NO: 3823360 - DNA, 25 bp, Homo sapien
tagaaattaagagctccccagaaac

SEQ ID NO: 3823361 - DNA, 25 bp, Homo sapien
cagccaggaggcacggtaacaatgt

SEQ ID NO: 3823362 - DNA, 25 bp, Homo sapien
aagaaagcccgtcgcaaggaatgca

SEQ ID NO: 3823363 - DNA, 25 bp, Homo sapien
tgtcctctcatgcagtccggcaagg

SEQ ID NO: 3823364 - DNA, 25 bp, Homo sapien
caaacctgacctttgtgggtggcaa

SEQ ID NO: 3823365 - DNA, 25 bp, Homo sapien
taccagtaccttgaaaagaggatct

SEQ ID NO: 3823366 - DNA, 25 bp, Homo sapien
aaacttctaactgtgctccctgaca

SEQ ID NO: 3823367 - DNA, 25 bp, Homo sapien
ggaacaaatgtgctccaaggagtaa

SEQ ID NO: 3823368 - DNA, 25 bp, Homo sapien
gacatcatgcaaacaaacatcaagt

SEQ ID NO: 3823369 - DNA, 25 bp, Homo sapien
cttgaaagtttaggaagcaatgttg

SEQ ID NO: 3823370 - DNA, 25 bp, Homo sapien
ggacttgaaagtttaggaagcaatg

SEQ ID NO: 3823371 - DNA, 25 bp, Homo sapien
gtagacatcatgcaaacaaacatca

SEQ ID NO: 3823372 - DNA, 25 bp, Homo sapien
gacacaagactgtgatgcagataac

SEQ ID NO: 3823373 - DNA, 25 bp, Homo sapien
tttctcaatagttctcggaagacac

SEQ ID NO: 3823374 - DNA, 25 bp, Homo sapien
tcaccaccagaagttctatggaaag

SEQ ID NO: 3823375 - DNA, 25 bp, Homo sapien
tctatggaaagtgcacagatttctc

SEQ ID NO: 3823376 - DNA, 25 bp, Homo sapien
gcaggtgcccgctttcactttctaa

SEQ ID NO: 3823377 - DNA, 25 bp, Homo sapien
tctaaacgctctggcagaatcaggt

SEQ ID NO: 3823378 - DNA, 25 bp, Homo sapien
caccagaaggtcatcgtgttctgtg

SEQ ID NO: 3823379 - DNA, 25 bp, Homo sapien
tgggcctggaaagcgatgaagtttc

SEQ ID NO: 3823380 - DNA, 25 bp, Homo sapien
gagcgtgcaacacaaatatcaggtg

SEQ ID NO: 3823381 - DNA, 25 bp, Homo sapien
gaaatgctgctacggatcttgggtt

SEQ ID NO: 3823382 - DNA, 25 bp, Homo sapien
ttgtctttaggaaatcagcaggtcc

SEQ ID NO: 3823383 - DNA, 25 bp, Homo sapien
gaatgtgcatcgtaaatcagagcgt

SEQ ID NO: 3823384 - DNA, 25 bp, Homo sapien
ctctgttggagatgttgatgaagga

SEQ ID NO: 3823385 - DNA, 25 bp, Homo sapien
tgttgatgaaggatgctgcacagag

SEQ ID NO: 3823386 - DNA, 25 bp, Homo sapien
gagatgttgatgaaggatgctgcac

SEQ ID NO: 3823387 - DNA, 25 bp, Homo sapien
tgttggagatgttgatgaaggatgc

SEQ ID NO: 3823388 - DNA, 25 bp, Homo sapien
cagtacataatctgggctggctcca

SEQ ID NO: 3823389 - DNA, 25 bp, Homo sapien
gatggcatcgtgcttcatgacactg

SEQ ID NO: 3823390 - DNA, 25 bp, Homo sapien
acaccgctgacgagagagcctcagt

SEQ ID NO: 3823391 - DNA, 25 bp, Homo sapien
tgggccactcggttggcttctgcct

SEQ ID NO: 3823392 - DNA, 25 bp, Homo sapien
tgtaaacactcaggtagggctgaag

SEQ ID NO: 3823393 - DNA, 25 bp, Homo sapien
aggctgatcattccctactacagag

SEQ ID NO: 3823394 - DNA, 25 bp, Homo sapien
ctggccatgggtgagcaccagacat

SEQ ID NO: 3823395 - DNA, 25 bp, Homo sapien
gaagcagtgctcactctaaggctga

SEQ ID NO: 3823396 - DNA, 25 bp, Homo sapien
tagagacaggtgtatctgtgcaatt

SEQ ID NO: 3823397 - DNA, 25 bp, Homo sapien
aaatgttaatctgcctttgctggaa

SEQ ID NO: 3823398 - DNA, 25 bp, Homo sapien
caggtgtatctgtgcaatttgttgt

SEQ ID NO: 3823399 - DNA, 25 bp, Homo sapien
tcattgtttcacatggaagggtaaa

SEQ ID NO: 3823400 - DNA, 25 bp, Homo sapien
caaaacataatcgtcattgctctgt

SEQ ID NO: 3823401 - DNA, 25 bp, Homo sapien
ctgtcttgcttctggtaacgccttt

SEQ ID NO: 3823402 - DNA, 25 bp, Homo sapien
ttccaaaacataatcgtcattgctc

SEQ ID NO: 3823403 - DNA, 25 bp, Homo sapien
ctggtaacgccttttcttcaccagg

SEQ ID NO: 3823404 - DNA, 25 bp, Homo sapien
tggtccagatactgcatttgtctct

SEQ ID NO: 3823405 - DNA, 25 bp, Homo sapien
tcaccagatggcatagaagttttgc

SEQ ID NO: 3823406 - DNA, 25 bp, Homo sapien
ggtctcagatgtttctccagggtct

SEQ ID NO: 3823407 - DNA, 25 bp, Homo sapien
tgtttattctcccaaaaagcttctg

SEQ ID NO: 3823408 - DNA, 25 bp, Homo sapien
ttcaaaggatcacttcgattagaag

SEQ ID NO: 3823409 - DNA, 25 bp, Homo sapien
gggtgtctgaacatctgatccagtt

SEQ ID NO: 3823410 - DNA, 25 bp, Homo sapien
actcatgtgagggtcatctttcaaa

SEQ ID NO: 3823411 - DNA, 25 bp, Homo sapien
tcttgcgttttggaacatcatggtc

SEQ ID NO: 3823412 - DNA, 25 bp, Homo sapien
gatcattggatttgaaaaaccgcct

SEQ ID NO: 3823413 - DNA, 25 bp, Homo sapien
cagagtaaatagctcatagagatca

SEQ ID NO: 3823414 - DNA, 25 bp, Homo sapien
tgtcaaaaactgcttgaagatttgt

SEQ ID NO: 3823415 - DNA, 25 bp, Homo sapien
cagtgctctgggatgcatcaggact

SEQ ID NO: 3823416 - DNA, 25 bp, Homo sapien
ggtataaaacaatgtgtagctctac

SEQ ID NO: 3823417 - DNA, 25 bp, Homo sapien
gctggtataaaacaatgtgtagctc

SEQ ID NO: 3823418 - DNA, 25 bp, Homo sapien
ctggtataaaacaatgtgtagctct

SEQ ID NO: 3823419 - DNA, 25 bp, Homo sapien
taagctggtataaaacaatgtgtag

SEQ ID NO: 3823420 - DNA, 25 bp, Homo sapien
agccaagagtggccactgtgtgcac

SEQ ID NO: 3823421 - DNA, 25 bp, Homo sapien
gccaagagtggccactgtgtgcact

SEQ ID NO: 3823422 - DNA, 25 bp, Homo sapien
aagagtggccactgtgtgcactgac

SEQ ID NO: 3823423 - DNA, 25 bp, Homo sapien
caagagtggccactgtgtgcactga

SEQ ID NO: 3823424 - DNA, 25 bp, Homo sapien
tacacagtcacttgcttcttctggc

SEQ ID NO: 3823425 - DNA, 25 bp, Homo sapien
ggagcctgtacacagtcacttgctt

SEQ ID NO: 3823426 - DNA, 25 bp, Homo sapien
tgcccgcagtcaggagcctgtacac

SEQ ID NO: 3823427 - DNA, 25 bp, Homo sapien
tcttttcttcaatggtgcccgcagt

SEQ ID NO: 3823428 - DNA, 25 bp, Homo sapien
cgcgtggtcagaagaaacacaaata

SEQ ID NO: 3823429 - DNA, 25 bp, Homo sapien
catagatgacaactctgtttgcccc

SEQ ID NO: 3823430 - DNA, 25 bp, Homo sapien
gtcaggttgacacctaagccgccca

SEQ ID NO: 3823431 - DNA, 25 bp, Homo sapien
cgtgcttgggttccagtctgggtca

SEQ ID NO: 3823432 - DNA, 25 bp, Homo sapien
tcttgagataggtatacttttgggc

SEQ ID NO: 3823433 - DNA, 25 bp, Homo sapien
tgaagctattgtagtggtaccatcc

SEQ ID NO: 3823434 - DNA, 25 bp, Homo sapien
tgtatctcgtaatcagtggctgtct

SEQ ID NO: 3823435 - DNA, 25 bp, Homo sapien
cttttgggctctaaggaatacttca

SEQ ID NO: 3823436 - DNA, 25 bp, Homo sapien
cagaaaagagatcagggtggttgca

SEQ ID NO: 3823437 - DNA, 25 bp, Homo sapien
tcttagggctataagtccggagaaa

SEQ ID NO: 3823438 - DNA, 25 bp, Homo sapien
cgctgaccctgcttgtgccatattt

SEQ ID NO: 3823439 - DNA, 25 bp, Homo sapien
gattcttgggacctccagaaaagag

SEQ ID NO: 3823440 - DNA, 25 bp, Homo sapien
ttggaatcaacgaaattttggtaga

SEQ ID NO: 3823441 - DNA, 25 bp, Homo sapien
tcatctgtaagacggcaaaataaga

SEQ ID NO: 3823442 - DNA, 25 bp, Homo sapien
ccattgagaatcctgtaaacttctt

SEQ ID NO: 3823443 - DNA, 25 bp, Homo sapien
tttggtagactttatgctgctcatc

SEQ ID NO: 3823444 - DNA, 25 bp, Homo sapien
tggacccctttcaaccccctgcatc

SEQ ID NO: 3823445 - DNA, 25 bp, Homo sapien
tggatttatggtatctcgtaagaca

SEQ ID NO: 3823446 - DNA, 25 bp, Homo sapien
tctccgcagtaggtatggatttatg

SEQ ID NO: 3823447 - DNA, 25 bp, Homo sapien
gatttatggtatctcgtaagacaca

SEQ ID NO: 3823448 - DNA, 25 bp, Homo sapien
ggatttatggtatctcgtaagacac

SEQ ID NO: 3823449 - DNA, 25 bp, Homo sapien
tatagtatttaataggagcacttta

SEQ ID NO: 3823450 - DNA, 25 bp, Homo sapien
gccagacagaatgatccgatgaggg

SEQ ID NO: 3823451 - DNA, 25 bp, Homo sapien
gatgaagtcaaagagcgaccacagc

SEQ ID NO: 3823452 - DNA, 25 bp, Homo sapien
tattttgcatcggtgagccagacag

SEQ ID NO: 3823453 - DNA, 25 bp, Homo sapien
tgctccataaacacaggcaacgtgc

SEQ ID NO: 3823454 - DNA, 25 bp, Homo sapien
ttttatgcaattacaaatccttaat

SEQ ID NO: 3823455 - DNA, 25 bp, Homo sapien
taccttttagcaatcgccattccta

SEQ ID NO: 3823456 - DNA, 25 bp, Homo sapien
attcctaccctaaaacgctcctctg

SEQ ID NO: 3823457 - DNA, 25 bp, Homo sapien
tcttgcatcattttggtactctcca

SEQ ID NO: 3823458 - DNA, 25 bp, Homo sapien
cttcgtccaagatcacatagtgcca

SEQ ID NO: 3823459 - DNA, 25 bp, Homo sapien
gagcaacatctcgaattagtttctc

SEQ ID NO: 3823460 - DNA, 25 bp, Homo sapien
tgcatcaatcgaatgtaggagtaag

SEQ ID NO: 3823461 - DNA, 25 bp, Homo sapien
catagtgccagtcatacctgctaat

SEQ ID NO: 3823462 - DNA, 25 bp, Homo sapien
catattgaaggccacatctgaaaga

SEQ ID NO: 3823463 - DNA, 25 bp, Homo sapien
tgaaggccacatctgaaagacccat

SEQ ID NO: 3823464 - DNA, 25 bp, Homo sapien
attgaaggccacatctgaaagaccc

SEQ ID NO: 3823465 - DNA, 25 bp, Homo sapien
tattgaaggccacatctgaaagacc

SEQ ID NO: 3823466 - DNA, 25 bp, Homo sapien
tcaatcagcaatgcctcattcagca

SEQ ID NO: 3823467 - DNA, 25 bp, Homo sapien
tgagtcaatcagcaatgcctcattc

SEQ ID NO: 3823468 - DNA, 25 bp, Homo sapien
gagtcaatcagcaatgcctcattca

SEQ ID NO: 3823469 - DNA, 25 bp, Homo sapien
agtcaatcagcaatgcctcattcag

SEQ ID NO: 3823470 - DNA, 25 bp, Homo sapien
gaaacacatggatcagagaaaaacc

SEQ ID NO: 3823471 - DNA, 25 bp, Homo sapien
tatattcataactgttctgaaaaca

SEQ ID NO: 3823472 - DNA, 25 bp, Homo sapien
gctctaaagtaagtcaataataata

SEQ ID NO: 3823473 - DNA, 25 bp, Homo sapien
aaacacagagctctaaagtaagtca

SEQ ID NO: 3823474 - DNA, 25 bp, Homo sapien
ggacagacaattacagttggaccca

SEQ ID NO: 3823475 - DNA, 25 bp, Homo sapien
gaattgccactctgaacggaggcca

SEQ ID NO: 3823476 - DNA, 25 bp, Homo sapien
aaccggtttcatgtagaattgccac

SEQ ID NO: 3823477 - DNA, 25 bp, Homo sapien
ggaggccaccacgtgtgaaattcct

SEQ ID NO: 3823478 - DNA, 25 bp, Homo sapien
aaaacaatgctaactatggaaattt

SEQ ID NO: 3823479 - DNA, 25 bp, Homo sapien
gtcatcaactgctcaaaagatcccc

SEQ ID NO: 3823480 - DNA, 25 bp, Homo sapien
ctgcatccaaacgtccaagaagaaa

SEQ ID NO: 3823481 - DNA, 25 bp, Homo sapien
gaaagagcatatacagtcatcaact

SEQ ID NO: 3823482 - DNA, 25 bp, Homo sapien
catcaataattcacaagaccctcct

SEQ ID NO: 3823483 - DNA, 25 bp, Homo sapien
ggaatattgtaattgaaatgtcatc

SEQ ID NO: 3823484 - DNA, 25 bp, Homo sapien
tcaatgcctggaattcattaaaagt

SEQ ID NO: 3823485 - DNA, 25 bp, Homo sapien
tgccctacagctccattgtctcgta

SEQ ID NO: 3823486 - DNA, 25 bp, Homo sapien
ccacctaacacctgtctgctggtac

SEQ ID NO: 3823487 - DNA, 25 bp, Homo sapien
tgtaatttgaaccacgagtcctgat

SEQ ID NO: 3823488 - DNA, 25 bp, Homo sapien
tgaaccacgagtcctgatcttgctg

SEQ ID NO: 3823489 - DNA, 25 bp, Homo sapien
tatctggatggtcttgcccaatccc

SEQ ID NO: 3823490 - DNA, 25 bp, Homo sapien
gctaattataatacacacactggat

SEQ ID NO: 3823491 - DNA, 25 bp, Homo sapien
cacgatgaagtgtagtacagataca

SEQ ID NO: 3823492 - DNA, 25 bp, Homo sapien
cacactggatatgcaccttggagaa

SEQ ID NO: 3823493 - DNA, 25 bp, Homo sapien
tagaagtttgactctagctgttcca

SEQ ID NO: 3823494 - DNA, 25 bp, Homo sapien
tgtgtacaactctataccctgtcaa

SEQ ID NO: 3823495 - DNA, 25 bp, Homo sapien
aaaaatggagactctatcaatccta

SEQ ID NO: 3823496 - DNA, 25 bp, Homo sapien
ctatagagttttgttaatacactga

SEQ ID NO: 3823497 - DNA, 25 bp, Homo sapien
aattggccccgctaaaacgcaatca

SEQ ID NO: 3823498 - DNA, 25 bp, Homo sapien
gcatcctgctcccaactacaaattg

SEQ ID NO: 3823499 - DNA, 25 bp, Homo sapien
tcaacttctacacggctgttcctct

SEQ ID NO: 3823500 - DNA, 25 bp, Homo sapien
aatcatctcgaacaaagaactttgc

SEQ ID NO: 3823501 - DNA, 25 bp, Homo sapien
gacagctgaatctataaaggagacc

SEQ ID NO: 3823502 - DNA, 25 bp, Homo sapien
caattttaatgaacagcacgtggct

SEQ ID NO: 3823503 - DNA, 25 bp, Homo sapien
caaattgctgcaagtaccttcaggg

SEQ ID NO: 3823504 - DNA, 25 bp, Homo sapien
ggagactggccagcccttagagaca

SEQ ID NO: 3823505 - DNA, 25 bp, Homo sapien
tttacattcatcacgggagactggc

SEQ ID NO: 3823506 - DNA, 25 bp, Homo sapien
catcactttcctcagaatcgtcctc

SEQ ID NO: 3823507 - DNA, 25 bp, Homo sapien
gtcctccagcttcagacgtttctct

SEQ ID NO: 3823508 - DNA, 25 bp, Homo sapien
agaatcgtcctccagcttcagacgt

SEQ ID NO: 3823509 - DNA, 25 bp, Homo sapien
agcttcagacgtttctctttgtcct

SEQ ID NO: 3823510 - DNA, 25 bp, Homo sapien
tctcacagaccctcatttcaagcat

SEQ ID NO: 3823511 - DNA, 25 bp, Homo sapien
cttttcatacgtatgagtattcatt

SEQ ID NO: 3823512 - DNA, 25 bp, Homo sapien
ttcatatatgttacctagaaaaatt

SEQ ID NO: 3823513 - DNA, 25 bp, Homo sapien
tgcatgaaattcatatatgttacct

SEQ ID NO: 3823514 - DNA, 25 bp, Homo sapien
tgaaattcatatatgttacctagaa

SEQ ID NO: 3823515 - DNA, 25 bp, Homo sapien
aatttttgcatgaaattcatatatg

SEQ ID NO: 3823516 - DNA, 25 bp, Homo sapien
ctatgtttcttatctcaggaggtgg

SEQ ID NO: 3823517 - DNA, 25 bp, Homo sapien
cactgctacactgtacataatgtat

SEQ ID NO: 3823518 - DNA, 25 bp, Homo sapien
atgttccattgttatgtgacgttcc

SEQ ID NO: 3823519 - DNA, 25 bp, Homo sapien
tgacgttccaaaattggaacactag

SEQ ID NO: 3823520 - DNA, 25 bp, Homo sapien
tctgggagtaacgactgacaagaca

SEQ ID NO: 3823521 - DNA, 25 bp, Homo sapien
caaatgtagcccagacaggtggcac

SEQ ID NO: 3823522 - DNA, 25 bp, Homo sapien
gctgcacagtaaacgtagatggaac

SEQ ID NO: 3823523 - DNA, 25 bp, Homo sapien
tttctttccacggattgatgcccga

SEQ ID NO: 3823524 - DNA, 25 bp, Homo sapien
cagctatgtgttgatttttggcacc

SEQ ID NO: 3823525 - DNA, 25 bp, Homo sapien
tgtgggcaagccaattaactggagg

SEQ ID NO: 3823526 - DNA, 25 bp, Homo sapien
acatgtatgtagagggcccagccga

SEQ ID NO: 3823527 - DNA, 25 bp, Homo sapien
tacagattcaggttacaccagacca

SEQ ID NO: 3823528 - DNA, 25 bp, Homo sapien
tgaagagtccgtttctgaactcccc

SEQ ID NO: 3823529 - DNA, 25 bp, Homo sapien
gagggagccttcaaaccatgcagag

SEQ ID NO: 3823530 - DNA, 25 bp, Homo sapien
catcagaagtgctgaaaggtggcga

SEQ ID NO: 3823531 - DNA, 25 bp, Homo sapien
tctgaggagactcaggcaccgccta

SEQ ID NO: 3823532 - DNA, 25 bp, Homo sapien
gcttacctcgaatatggcaactggg

SEQ ID NO: 3823533 - DNA, 25 bp, Homo sapien
taatctttatttggcacccggagct

SEQ ID NO: 3823534 - DNA, 25 bp, Homo sapien
cacagcctgtactaggtaagcagca

SEQ ID NO: 3823535 - DNA, 25 bp, Homo sapien
taagcaaatggaaaccgtggtagca

SEQ ID NO: 3823536 - DNA, 25 bp, Homo sapien
ttaagagctatcgtattttggtggc

SEQ ID NO: 3823537 - DNA, 25 bp, Homo sapien
tctgacaccgctcactgttcaagag

SEQ ID NO: 3823538 - DNA, 25 bp, Homo sapien
tccttgcagtagttaagaaaaagtc

SEQ ID NO: 3823539 - DNA, 25 bp, Homo sapien
caggtaataaacgtgcacagaaacg

SEQ ID NO: 3823540 - DNA, 25 bp, Homo sapien
tagcacagtgttcagtgggccacca

SEQ ID NO: 3823541 - DNA, 25 bp, Homo sapien
ggaaaaagccatcccactatcaagt

SEQ ID NO: 3823542 - DNA, 25 bp, Homo sapien
gggaggcctgcaatacagattattt

SEQ ID NO: 3823543 - DNA, 25 bp, Homo sapien
tcaaggagacttgaaatgcgcggca

SEQ ID NO: 3823544 - DNA, 25 bp, Homo sapien
tagacttgcctccaaatccaactaa

SEQ ID NO: 3823545 - DNA, 25 bp, Homo sapien
tttcatcttagacttgcctccaaat

SEQ ID NO: 3823546 - DNA, 25 bp, Homo sapien
gacttgcctccaaatccaactaaag

SEQ ID NO: 3823547 - DNA, 25 bp, Homo sapien
tcttagacttgcctccaaatccaac

SEQ ID NO: 3823548 - DNA, 25 bp, Homo sapien
tgtcacctaagataaagcaaacagt

SEQ ID NO: 3823549 - DNA, 25 bp, Homo sapien
gaaatccaacctctgtataatcggg

SEQ ID NO: 3823550 - DNA, 25 bp, Homo sapien
gggccccactgcttctagcaggtta

SEQ ID NO: 3823551 - DNA, 25 bp, Homo sapien
gctggatctagaatgcttacatatt

SEQ ID NO: 3823552 - DNA, 25 bp, Homo sapien
ccatcatctcggtatcttcccactt

SEQ ID NO: 3823553 - DNA, 25 bp, Homo sapien
tccatcatctcggtatcttcccact

SEQ ID NO: 3823554 - DNA, 25 bp, Homo sapien
catcatctcggtatcttcccacttt

SEQ ID NO: 3823555 - DNA, 25 bp, Homo sapien
agtcatcatcaatctcctgcactgg

SEQ ID NO: 3823556 - DNA, 25 bp, Homo sapien
tcatcatcaatctcctgcactggca

SEQ ID NO: 3823557 - DNA, 25 bp, Homo sapien
gcactttcttctgccgtttcccgcc

SEQ ID NO: 3823558 - DNA, 25 bp, Homo sapien
aagtcatcatcaatctcctgcactg

SEQ ID NO: 3823559 - DNA, 25 bp, Homo sapien
tctgtggggaaatactcagactctt

SEQ ID NO: 3823560 - DNA, 25 bp, Homo sapien
tcctctgtggggaaatactcagact

SEQ ID NO: 3823561 - DNA, 25 bp, Homo sapien
ctcctctgtggggaaatactcagac

SEQ ID NO: 3823562 - DNA, 25 bp, Homo sapien
ctctgtggggaaatactcagactct

SEQ ID NO: 3823563 - DNA, 25 bp, Homo sapien
gcctctggcctcatgtctgactccc

SEQ ID NO: 3823564 - DNA, 25 bp, Homo sapien
tgcctctggcctcatgtctgactcc

SEQ ID NO: 3823565 - DNA, 25 bp, Homo sapien
ctctggcctcatgtctgactcccaa

SEQ ID NO: 3823566 - DNA, 25 bp, Homo sapien
ctgcctctggcctcatgtctgactc

SEQ ID NO: 3823567 - DNA, 25 bp, Homo sapien
ttcaaacgctcctcttttttggaca

SEQ ID NO: 3823568 - DNA, 25 bp, Homo sapien
tcaaacgctcctcttttttggacag

SEQ ID NO: 3823569 - DNA, 25 bp, Homo sapien
caaacgctcctcttttttggacaga

SEQ ID NO: 3823570 - DNA, 25 bp, Homo sapien
gatctgggtaccaaaaggtgtcatc

SEQ ID NO: 3823571 - DNA, 25 bp, Homo sapien
gaagcctgatgcttcattaagcatg

SEQ ID NO: 3823572 - DNA, 25 bp, Homo sapien
tgatctgccaaatacttttcgaagc

SEQ ID NO: 3823573 - DNA, 25 bp, Homo sapien
gccagtgcggatgagctcttcccag

SEQ ID NO: 3823574 - DNA, 25 bp, Homo sapien
gctgccaagactggatggccccggc

SEQ ID NO: 3823575 - DNA, 25 bp, Homo sapien
ctgccaagactggatggccccggct

SEQ ID NO: 3823576 - DNA, 25 bp, Homo sapien
accaaaaacagggatcaccatgtac

SEQ ID NO: 3823577 - DNA, 25 bp, Homo sapien
ccttatcagctgagtagtcgtccat

SEQ ID NO: 3823578 - DNA, 25 bp, Homo sapien
tctctgccatccaaagataggctta

SEQ ID NO: 3823579 - DNA, 25 bp, Homo sapien
gaagcaagctccgaagttctcacgt

SEQ ID NO: 3823580 - DNA, 25 bp, Homo sapien
tgtgtagtggtaccacattatggct

SEQ ID NO: 3823581 - DNA, 25 bp, Homo sapien
tacatcctagatttgagtcctttga

SEQ ID NO: 3823582 - DNA, 25 bp, Homo sapien
gtgtcagaaagttccaactggtgta

SEQ ID NO: 3823583 - DNA, 25 bp, Homo sapien
ccagctcagtatcttgccctaaatg

SEQ ID NO: 3823584 - DNA, 25 bp, Homo sapien
actggcgtgatctagttcaattttc

SEQ ID NO: 3823585 - DNA, 25 bp, Homo sapien
ctccagactggcgtgatctagttca

SEQ ID NO: 3823586 - DNA, 25 bp, Homo sapien
cctcctccagactggcgtgatctag

SEQ ID NO: 3823587 - DNA, 25 bp, Homo sapien
cagactggcgtgatctagttcaatt

SEQ ID NO: 3823588 - DNA, 25 bp, Homo sapien
caactgctagctttgacctttgggc

SEQ ID NO: 3823589 - DNA, 25 bp, Homo sapien
ctgccttgggcaactgctagctttg

SEQ ID NO: 3823590 - DNA, 25 bp, Homo sapien
gctagctttgacctttgggctgcta

SEQ ID NO: 3823591 - DNA, 25 bp, Homo sapien
tgggcaactgctagctttgaccttt

SEQ ID NO: 3823592 - DNA, 25 bp, Homo sapien
gactttttcaaaaatgcaatactga

SEQ ID NO: 3823593 - DNA, 25 bp, Homo sapien
gcaatactgaatgttattctgaatc

SEQ ID NO: 3823594 - DNA, 25 bp, Homo sapien
ctaaatgatgactttttcaaaaatg

SEQ ID NO: 3823595 - DNA, 25 bp, Homo sapien
aatactgaatgttattctgaatcac

SEQ ID NO: 3823596 - DNA, 25 bp, Homo sapien
agtttcctgttgatgtctctgctgg

SEQ ID NO: 3823597 - DNA, 25 bp, Homo sapien
gcttgagggctaagctgttcaataa

SEQ ID NO: 3823598 - DNA, 25 bp, Homo sapien
tcgttttacagaatctagtttcctg

SEQ ID NO: 3823599 - DNA, 25 bp, Homo sapien
ttgccttagggatgtcgtacatgac

SEQ ID NO: 3823600 - DNA, 25 bp, Homo sapien
tggtcatagacgtccacacccaaac

SEQ ID NO: 3823601 - DNA, 25 bp, Homo sapien
tgggcgctaggctctactgcctgga

SEQ ID NO: 3823602 - DNA, 25 bp, Homo sapien
ccttctccacgtcaacgagctggga

SEQ ID NO: 3823603 - DNA, 25 bp, Homo sapien
tctgatgtcggtcgatgtgcagcag

SEQ ID NO: 3823604 - DNA, 25 bp, Homo sapien
tctgtaaacagtcttgctcctgagt

SEQ ID NO: 3823605 - DNA, 25 bp, Homo sapien
tactgacaggttgactctgtaaaca

SEQ ID NO: 3823606 - DNA, 25 bp, Homo sapien
tgctgatgcgcaccccacagcagag

SEQ ID NO: 3823607 - DNA, 25 bp, Homo sapien
cacagaacgaaaggagaggtactcc

SEQ ID NO: 3823608 - DNA, 25 bp, Homo sapien
agcagagaagggctccgttcatggc

SEQ ID NO: 3823609 - DNA, 25 bp, Homo sapien
catggcctaagtcttgcagagtatc

SEQ ID NO: 3823610 - DNA, 25 bp, Homo sapien
catctgggacactagtatcttcacc

SEQ ID NO: 3823611 - DNA, 25 bp, Homo sapien
atcttctaaggcttaatcatctggg

SEQ ID NO: 3823612 - DNA, 25 bp, Homo sapien
aaggaaacagagacgctaccgccgc

SEQ ID NO: 3823613 - DNA, 25 bp, Homo sapien
agccgccttggaacccagctcgacg

SEQ ID NO: 3823614 - DNA, 25 bp, Homo sapien
cgcgcgagcgcccacaaggaaacag

SEQ ID NO: 3823615 - DNA, 25 bp, Homo sapien
gcccacaaggaaacagagacgctac

SEQ ID NO: 3823616 - DNA, 25 bp, Homo sapien
cacgactgaacacgggaaggatgga

SEQ ID NO: 3823617 - DNA, 25 bp, Homo sapien
tttttggtcgccaggctgtgacctc

SEQ ID NO: 3823618 - DNA, 25 bp, Homo sapien
tgtctcccacgactgaacacgggaa

SEQ ID NO: 3823619 - DNA, 25 bp, Homo sapien
ctcttgttgtctcccacgactgaac

SEQ ID NO: 3823620 - DNA, 25 bp, Homo sapien
accacgcctggccaatattctttta

SEQ ID NO: 3823621 - DNA, 25 bp, Homo sapien
ccaccacgcctggccaatattcttt

SEQ ID NO: 3823622 - DNA, 25 bp, Homo sapien
ccacgcctggccaatattcttttat

SEQ ID NO: 3823623 - DNA, 25 bp, Homo sapien
acgcctggccaatattcttttatta

SEQ ID NO: 3823624 - DNA, 25 bp, Homo sapien
taagcgaattttgaggaggcccctg

SEQ ID NO: 3823625 - DNA, 25 bp, Homo sapien
ttttcgcacaagatgacctgcagga

SEQ ID NO: 3823626 - DNA, 25 bp, Homo sapien
catatatgcctttgtctcaggtggg

SEQ ID NO: 3823627 - DNA, 25 bp, Homo sapien
tgtactgttaccaaaagcacttccc

SEQ ID NO: 3823628 - DNA, 25 bp, Homo sapien
ccagggggactgtgtttccgtctga

SEQ ID NO: 3823629 - DNA, 25 bp, Homo sapien
tgtttccgtctgaacaaaccatccc

SEQ ID NO: 3823630 - DNA, 25 bp, Homo sapien
gggactgtgtttccgtctgaacaaa

SEQ ID NO: 3823631 - DNA, 25 bp, Homo sapien
cgtctgaacaaaccatccctcgggg

SEQ ID NO: 3823632 - DNA, 25 bp, Homo sapien
gcactggtgcgttcagggcctgctt

SEQ ID NO: 3823633 - DNA, 25 bp, Homo sapien
tagatgcaggtctagcactggtgcg

SEQ ID NO: 3823634 - DNA, 25 bp, Homo sapien
ggaggctgctctgcgtccttgcaca

SEQ ID NO: 3823635 - DNA, 25 bp, Homo sapien
caggctgctccacctttagatgcag

SEQ ID NO: 3823636 - DNA, 25 bp, Homo sapien
tagaagtcccatatagttccagaag

SEQ ID NO: 3823637 - DNA, 25 bp, Homo sapien
tgagcaggcactgcatgatacagat

SEQ ID NO: 3823638 - DNA, 25 bp, Homo sapien
acttttgcatcaactggtgctattc

SEQ ID NO: 3823639 - DNA, 25 bp, Homo sapien
tagcaccagttggtgcaagctcata

SEQ ID NO: 3823640 - DNA, 25 bp, Homo sapien
gataatccttgacagacgaatagga

SEQ ID NO: 3823641 - DNA, 25 bp, Homo sapien
tccttgacagacgaataggatttca

SEQ ID NO: 3823642 - DNA, 25 bp, Homo sapien
aaagataatccttgacagacgaata

SEQ ID NO: 3823643 - DNA, 25 bp, Homo sapien
cagacgaataggatttcatggacaa

SEQ ID NO: 3823644 - DNA, 25 bp, Homo sapien
gatggttgctatctacccacccaga

SEQ ID NO: 3823645 - DNA, 25 bp, Homo sapien
cacagtatgcgtgctcctcagggct

SEQ ID NO: 3823646 - DNA, 25 bp, Homo sapien
tgtctccatgggcatccttccgagg

SEQ ID NO: 3823647 - DNA, 25 bp, Homo sapien
catcagacttgcctagacacggcgg

SEQ ID NO: 3823648 - DNA, 25 bp, Homo sapien
gaccctcccgtagccttttgctgca

SEQ ID NO: 3823649 - DNA, 25 bp, Homo sapien
cgtatttggagccacgatggattgg

SEQ ID NO: 3823650 - DNA, 25 bp, Homo sapien
tgcaaccccggcactcccgtatttg

SEQ ID NO: 3823651 - DNA, 25 bp, Homo sapien
gggcctgacgcctccttgcaacccc

SEQ ID NO: 3823652 - DNA, 25 bp, Homo sapien
ctggcttcatgctcaggaacagcca

SEQ ID NO: 3823653 - DNA, 25 bp, Homo sapien
tggcttcatgctcaggaacagccat

SEQ ID NO: 3823654 - DNA, 25 bp, Homo sapien
tgccccagccattctatgatgcagg

SEQ ID NO: 3823655 - DNA, 25 bp, Homo sapien
ctagtcagaacagggcaactcgggc

SEQ ID NO: 3823656 - DNA, 25 bp, Homo sapien
tctcaatctcaacccatagggagag

SEQ ID NO: 3823657 - DNA, 25 bp, Homo sapien
ggacactgggctctgctagtcagaa

SEQ ID NO: 3823658 - DNA, 25 bp, Homo sapien
tcaccggatagtagatagggacagt

SEQ ID NO: 3823659 - DNA, 25 bp, Homo sapien
gggcctacaaggacagtgtacccca

SEQ ID NO: 3823660 - DNA, 25 bp, Homo sapien
tactcctttacctgcacttcattga

SEQ ID NO: 3823661 - DNA, 25 bp, Homo sapien
gacaaggcattcagctacttaagag

SEQ ID NO: 3823662 - DNA, 25 bp, Homo sapien
tcctgaattatctggtaccgggcca

SEQ ID NO: 3823663 - DNA, 25 bp, Homo sapien
gaagcaggcttacgagtggctagct

SEQ ID NO: 3823664 - DNA, 25 bp, Homo sapien
tagctagatagaaactggaggtacc

SEQ ID NO: 3823665 - DNA, 25 bp, Homo sapien
tcctcatggggaatggaaatgtcct

SEQ ID NO: 3823666 - DNA, 25 bp, Homo sapien
tactctaggataatcacaaccagga

SEQ ID NO: 3823667 - DNA, 25 bp, Homo sapien
gattcctgttagatgcagtatcagc

SEQ ID NO: 3823668 - DNA, 25 bp, Homo sapien
cagtatcagcattgtgaaactcctg

SEQ ID NO: 3823669 - DNA, 25 bp, Homo sapien
gagacagacattccatcacaaagat

SEQ ID NO: 3823670 - DNA, 25 bp, Homo sapien
gactgtatgcaccttgggcaggcca

SEQ ID NO: 3823671 - DNA, 25 bp, Homo sapien
tgcctcagccaatcgcagagaaagc

SEQ ID NO: 3823672 - DNA, 25 bp, Homo sapien
aggtgcctcaccagttgctgcctca

SEQ ID NO: 3823673 - DNA, 25 bp, Homo sapien
taactgggactatagctaggagcca

SEQ ID NO: 3823674 - DNA, 25 bp, Homo sapien
gaaattccagcaagatgggagcagc

SEQ ID NO: 3823675 - DNA, 25 bp, Homo sapien
ggagaagccgcccaagaaattccag

SEQ ID NO: 3823676 - DNA, 25 bp, Homo sapien
gaagctgacacatctcgcaggaatg

SEQ ID NO: 3823677 - DNA, 25 bp, Homo sapien
ggaatgccccataaaacagagcgca

SEQ ID NO: 3823678 - DNA, 25 bp, Homo sapien
aggcctggagattgaaggcagtatc

SEQ ID NO: 3823679 - DNA, 25 bp, Homo sapien
aaggcctggagattgaaggcagtat

SEQ ID NO: 3823680 - DNA, 25 bp, Homo sapien
agtagcccatgttcttgtgctcctc

SEQ ID NO: 3823681 - DNA, 25 bp, Homo sapien
tgaagcgtgggctgatgtagtcata

SEQ ID NO: 3823682 - DNA, 25 bp, Homo sapien
agctccgcacctgggtacttctctg

SEQ ID NO: 3823683 - DNA, 25 bp, Homo sapien
cgcctcaggatggtcatgaagcgtg

SEQ ID NO: 3823684 - DNA, 25 bp, Homo sapien
gggccagcgacgtgagcttgcccat

SEQ ID NO: 3823685 - DNA, 25 bp, Homo sapien
gaggggcggtatgtccccagcaccc

SEQ ID NO: 3823686 - DNA, 25 bp, Homo sapien
gcttgcccatcacttgactgtacaa

SEQ ID NO: 3823687 - DNA, 25 bp, Homo sapien
gcagaaacaaaggagcatagccaga

SEQ ID NO: 3823688 - DNA, 25 bp, Homo sapien
tccttcaccaggtcatagtacacct

SEQ ID NO: 3823689 - DNA, 25 bp, Homo sapien
ggaatcacccgctggaagctggtcc

SEQ ID NO: 3823690 - DNA, 25 bp, Homo sapien
acacctttcccgtgcagaagatgag

SEQ ID NO: 3823691 - DNA, 25 bp, Homo sapien
tccaggcgcgtgatggccactttct

SEQ ID NO: 3823692 - DNA, 25 bp, Homo sapien
ctgagggaccaacaggacatggcag

SEQ ID NO: 3823693 - DNA, 25 bp, Homo sapien
acttgtggctgcagtggacacctct

SEQ ID NO: 3823694 - DNA, 25 bp, Homo sapien
ggacacctcttgaactaaaagatgg

SEQ ID NO: 3823695 - DNA, 25 bp, Homo sapien
tagccactgacactaactgcaggtt

SEQ ID NO: 3823696 - DNA, 25 bp, Homo sapien
ggtgcctcagcagagatttaggtgt

SEQ ID NO: 3823697 - DNA, 25 bp, Homo sapien
ctgggtgcctcagcagagatttagg

SEQ ID NO: 3823698 - DNA, 25 bp, Homo sapien
tgcctcagcagagatttaggtgtga

SEQ ID NO: 3823699 - DNA, 25 bp, Homo sapien
tcagcagagatttaggtgtgaagat

SEQ ID NO: 3823700 - DNA, 25 bp, Homo sapien
cagttgaccacgatccagttgcagt

SEQ ID NO: 3823701 - DNA, 25 bp, Homo sapien
cagttgcagtcatagagctggctca

SEQ ID NO: 3823702 - DNA, 25 bp, Homo sapien
ctggctcacctcgaagtccttggtg

SEQ ID NO: 3823703 - DNA, 25 bp, Homo sapien
tctgccggcgcagcacgtggaagta

SEQ ID NO: 3823704 - DNA, 25 bp, Homo sapien
acaatagggcgcgtccctgtcctgg

SEQ ID NO: 3823705 - DNA, 25 bp, Homo sapien
tgtggggacgagatgcatatggcca

SEQ ID NO: 3823706 - DNA, 25 bp, Homo sapien
cctgtgggcacaatagggcgcgtcc

SEQ ID NO: 3823707 - DNA, 25 bp, Homo sapien
agatgcatatggccagggtggctgt

SEQ ID NO: 3823708 - DNA, 25 bp, Homo sapien
ggcctcgctgacgagtgctctgggc

SEQ ID NO: 3823709 - DNA, 25 bp, Homo sapien
gggtaggcatccgagtcatcattgc

SEQ ID NO: 3823710 - DNA, 25 bp, Homo sapien
gcaggaacctttcgggcctcgctga

SEQ ID NO: 3823711 - DNA, 25 bp, Homo sapien
gagtcatcattgctcatctgcagga

SEQ ID NO: 3823712 - DNA, 25 bp, Homo sapien
ggcagagttctaggaatcccacacg

SEQ ID NO: 3823713 - DNA, 25 bp, Homo sapien
gatgccgagtatgcagcctgtaaag

SEQ ID NO: 3823714 - DNA, 25 bp, Homo sapien
tcatacgtggtagcgccttctgctg

SEQ ID NO: 3823715 - DNA, 25 bp, Homo sapien
tggcgcacagcaagcactcatacgt

SEQ ID NO: 3823716 - DNA, 25 bp, Homo sapien
gccaccagccaccaccgcagccctc

SEQ ID NO: 3823717 - DNA, 25 bp, Homo sapien
agccaccagccaccaccgcagccct

SEQ ID NO: 3823718 - DNA, 25 bp, Homo sapien
caagccaccagccaccaccgcagcc

SEQ ID NO: 3823719 - DNA, 25 bp, Homo sapien
caccagccaccaccgcagccctcac

SEQ ID NO: 3823720 - DNA, 25 bp, Homo sapien
gcagcacaatgccattatgccgcac

SEQ ID NO: 3823721 - DNA, 25 bp, Homo sapien
ggccggtgctgatgaactggtcgat

SEQ ID NO: 3823722 - DNA, 25 bp, Homo sapien
gctggccatggcatagcccagctca

SEQ ID NO: 3823723 - DNA, 25 bp, Homo sapien
cagcagcacaatgccattatgccgc

SEQ ID NO: 3823724 - DNA, 25 bp, Homo sapien
ataggcacacacgtcctgcggtcaa

SEQ ID NO: 3823725 - DNA, 25 bp, Homo sapien
tccgtactccgagagggagctgttg

SEQ ID NO: 3823726 - DNA, 25 bp, Homo sapien
ggagctgttgcacacggtgtacggg

SEQ ID NO: 3823727 - DNA, 25 bp, Homo sapien
caggccagagatgattcataggcac

SEQ ID NO: 3823728 - DNA, 25 bp, Homo sapien
gtcatggagaacatggtgccggtga

SEQ ID NO: 3823729 - DNA, 25 bp, Homo sapien
ggtcatggagaacatggtgccggtg

SEQ ID NO: 3823730 - DNA, 25 bp, Homo sapien
tggtcatggagaacatggtgccggt

SEQ ID NO: 3823731 - DNA, 25 bp, Homo sapien
ctggtcatggagaacatggtgccgg

SEQ ID NO: 3823732 - DNA, 25 bp, Homo sapien
tgagccgcacgtggatgccttcctt

SEQ ID NO: 3823733 - DNA, 25 bp, Homo sapien
cacggccccgcagaatgcgagagag

SEQ ID NO: 3823734 - DNA, 25 bp, Homo sapien
aggccatgtactctgccaacgccca

SEQ ID NO: 3823735 - DNA, 25 bp, Homo sapien
ggttcttggtcatgtccgcacggcc

SEQ ID NO: 3823736 - DNA, 25 bp, Homo sapien
agaattctgcccacgttccaggctg

SEQ ID NO: 3823737 - DNA, 25 bp, Homo sapien
cattctagtctcaccccggagtggg

SEQ ID NO: 3823738 - DNA, 25 bp, Homo sapien
acatggtgccgagagctacgtggac

SEQ ID NO: 3823739 - DNA, 25 bp, Homo sapien
taagactagtcactggtacccagct

SEQ ID NO: 3823740 - DNA, 25 bp, Homo sapien
tcagggatccccgtggctgggcatg

SEQ ID NO: 3823741 - DNA, 25 bp, Homo sapien
ctgggcatgtcatgctcttgggctc

SEQ ID NO: 3823742 - DNA, 25 bp, Homo sapien
ccacactgccgatgtgggtgagcat

SEQ ID NO: 3823743 - DNA, 25 bp, Homo sapien
gctggccacactgccgatgtgggtg

SEQ ID NO: 3823744 - DNA, 25 bp, Homo sapien
tatccttggacctgccataagcctc

SEQ ID NO: 3823745 - DNA, 25 bp, Homo sapien
ataagcctcctcacagatccggtcg

SEQ ID NO: 3823746 - DNA, 25 bp, Homo sapien
gatccggtcgtatttggcaatttct

SEQ ID NO: 3823747 - DNA, 25 bp, Homo sapien
tttttatccttggacctgccataag

SEQ ID NO: 3823748 - DNA, 25 bp, Homo sapien
gcacaggcacctgtctgtggatctg

SEQ ID NO: 3823749 - DNA, 25 bp, Homo sapien
tcggcaatcagcttgtctgcgtact

SEQ ID NO: 3823750 - DNA, 25 bp, Homo sapien
cagggtgactgtgccctcggcaatc

SEQ ID NO: 3823751 - DNA, 25 bp, Homo sapien
tctcattgtggccacgccggcggta

SEQ ID NO: 3823752 - DNA, 25 bp, Homo sapien
ccatgccttggcctcagtccccaga

SEQ ID NO: 3823753 - DNA, 25 bp, Homo sapien
atgccttggcctcagtccccagacc

SEQ ID NO: 3823754 - DNA, 25 bp, Homo sapien
tgccttggcctcagtccccagaccc

SEQ ID NO: 3823755 - DNA, 25 bp, Homo sapien
ccttggcctcagtccccagacccac

SEQ ID NO: 3823756 - DNA, 25 bp, Homo sapien
ctgggtcatcggcattcacatggaa

SEQ ID NO: 3823757 - DNA, 25 bp, Homo sapien
aagataggcgcattgaccacccggg

SEQ ID NO: 3823758 - DNA, 25 bp, Homo sapien
caggtccacgacaacatctttgttg

SEQ ID NO: 3823759 - DNA, 25 bp, Homo sapien
tgtttctccattcggctgccacact

SEQ ID NO: 3823760 - DNA, 25 bp, Homo sapien
gcgtccccatgaaccaggatggaca

SEQ ID NO: 3823761 - DNA, 25 bp, Homo sapien
cacggtaccattggtcgtgtaggag

SEQ ID NO: 3823762 - DNA, 25 bp, Homo sapien
tgacgacgacgtgcacggtaccatt

SEQ ID NO: 3823763 - DNA, 25 bp, Homo sapien
gaaggtctcatataccacgccctgg

SEQ ID NO: 3823764 - DNA, 25 bp, Homo sapien
gatcctctcatggtacatgcccagg

SEQ ID NO: 3823765 - DNA, 25 bp, Homo sapien
tggcaaccagcgacagagtgatgtt

SEQ ID NO: 3823766 - DNA, 25 bp, Homo sapien
catctccacggtagaactgctctgc

SEQ ID NO: 3823767 - DNA, 25 bp, Homo sapien
tccggttggtgacgcggttgatcct

SEQ ID NO: 3823768 - DNA, 25 bp, Homo sapien
acgttggccagcacgttcagccttc

SEQ ID NO: 3823769 - DNA, 25 bp, Homo sapien
tgcggatcacgttggccagcacgtt

SEQ ID NO: 3823770 - DNA, 25 bp, Homo sapien
agcttggggtcaaactggcagaaga

SEQ ID NO: 3823771 - DNA, 25 bp, Homo sapien
tctgctccaggtccttgcggatcac

SEQ ID NO: 3823772 - DNA, 25 bp, Homo sapien
tccaggccaaaccgcttctctgagg

SEQ ID NO: 3823773 - DNA, 25 bp, Homo sapien
ctggatttgtcgatgatggtcttga

SEQ ID NO: 3823774 - DNA, 25 bp, Homo sapien
tccccatctcgctggatttgtcgat

SEQ ID NO: 3823775 - DNA, 25 bp, Homo sapien
tgaggaccatttccgggccaggaag

SEQ ID NO: 3823776 - DNA, 25 bp, Homo sapien
gctccacatcgttgatgaacatgaa

SEQ ID NO: 3823777 - DNA, 25 bp, Homo sapien
ctcatggagcgcactagccgggcca

SEQ ID NO: 3823778 - DNA, 25 bp, Homo sapien
ctcctcgctggagaactgcatcaca

SEQ ID NO: 3823779 - DNA, 25 bp, Homo sapien
actggcactgctccacatcgttgat

SEQ ID NO: 3823780 - DNA, 25 bp, Homo sapien
ctggggagacacattgggaccccat

SEQ ID NO: 3823781 - DNA, 25 bp, Homo sapien
tggggagacacattgggaccccatg

SEQ ID NO: 3823782 - DNA, 25 bp, Homo sapien
agagggacggctgacatccctgctg

SEQ ID NO: 3823783 - DNA, 25 bp, Homo sapien
gaccccatgaggagcggggaagagg

SEQ ID NO: 3823784 - DNA, 25 bp, Homo sapien
tttcagagcccccaatgaaggtggt

SEQ ID NO: 3823785 - DNA, 25 bp, Homo sapien
cccgcagagagagggtgttttcaga

SEQ ID NO: 3823786 - DNA, 25 bp, Homo sapien
tgatctcccgcagagagagggtgtt

SEQ ID NO: 3823787 - DNA, 25 bp, Homo sapien
cagctggaactccttatcaaggtca

SEQ ID NO: 3823788 - DNA, 25 bp, Homo sapien
tctccccagtgccctccctctgggt

SEQ ID NO: 3823789 - DNA, 25 bp, Homo sapien
ccagtttatcaatggttgtgatcaa

SEQ ID NO: 3823790 - DNA, 25 bp, Homo sapien
tcaagtctgagggcacaaaggagtc

SEQ ID NO: 3823791 - DNA, 25 bp, Homo sapien
tttatcaatggttgtgatcaagtct

SEQ ID NO: 3823792 - DNA, 25 bp, Homo sapien
atcaatggttgtgatcaagtctgag

SEQ ID NO: 3823793 - DNA, 25 bp, Homo sapien
tgggtggtgtacagggaactctgtt

SEQ ID NO: 3823794 - DNA, 25 bp, Homo sapien
cagggaactctgttccatcccacag

SEQ ID NO: 3823795 - DNA, 25 bp, Homo sapien
ccaggtgggtggtgtacagggaact

SEQ ID NO: 3823796 - DNA, 25 bp, Homo sapien
aggtgggtggtgtacagggaactct

SEQ ID NO: 3823797 - DNA, 25 bp, Homo sapien
tcacatttccctgacggaatacctc

SEQ ID NO: 3823798 - DNA, 25 bp, Homo sapien
ctgacggaatacctcctgccagcag

SEQ ID NO: 3823799 - DNA, 25 bp, Homo sapien
tccaaatgattacgcttgttatggc

SEQ ID NO: 3823800 - DNA, 25 bp, Homo sapien
agttcccagagatattccaaatgat

SEQ ID NO: 3823801 - DNA, 25 bp, Homo sapien
gcagcagtcctccaattagtcctgt

SEQ ID NO: 3823802 - DNA, 25 bp, Homo sapien
cgcagcagtcctccaattagtcctg

SEQ ID NO: 3823803 - DNA, 25 bp, Homo sapien
acaccgcagcagtcctccaattagt

SEQ ID NO: 3823804 - DNA, 25 bp, Homo sapien
tgaacaccgcagcagtcctccaatt

SEQ ID NO: 3823805 - DNA, 25 bp, Homo sapien
gttggagctgagaccccttcccttc

SEQ ID NO: 3823806 - DNA, 25 bp, Homo sapien
ttggagctgagaccccttcccttca

SEQ ID NO: 3823807 - DNA, 25 bp, Homo sapien
gccgctcagtagaggacaaggagaa

SEQ ID NO: 3823808 - DNA, 25 bp, Homo sapien
aagactggctagaggagtaggtgcc

SEQ ID NO: 3823809 - DNA, 25 bp, Homo sapien
tcttggtccgacttgagactgcaga

SEQ ID NO: 3823810 - DNA, 25 bp, Homo sapien
ggtggtcctccaccaatttgctggt

SEQ ID NO: 3823811 - DNA, 25 bp, Homo sapien
agaaaaggcttcctcgctggcttcc

SEQ ID NO: 3823812 - DNA, 25 bp, Homo sapien
gactgcagacctgctctcatggaca

SEQ ID NO: 3823813 - DNA, 25 bp, Homo sapien
gttttccaaccaggcgaagtacatc

SEQ ID NO: 3823814 - DNA, 25 bp, Homo sapien
tgtaccccaagacgggacggcagca

SEQ ID NO: 3823815 - DNA, 25 bp, Homo sapien
gccaaacaccgggacgtcatgtgca

SEQ ID NO: 3823816 - DNA, 25 bp, Homo sapien
tgctgcttgggaaggtggccggtgg

SEQ ID NO: 3823817 - DNA, 25 bp, Homo sapien
tcctctgcgcaggaccctggactag

SEQ ID NO: 3823818 - DNA, 25 bp, Homo sapien
ctctgcgcaggaccctggactagcc

SEQ ID NO: 3823819 - DNA, 25 bp, Homo sapien
ctgcgcaggaccctggactagccgg

SEQ ID NO: 3823820 - DNA, 25 bp, Homo sapien
gcgcaggaccctggactagccgggt

SEQ ID NO: 3823821 - DNA, 25 bp, Homo sapien
gcgctgcagcgaggtccggaggctg

SEQ ID NO: 3823822 - DNA, 25 bp, Homo sapien
gtccgcgctgcagcgaggtccggag

SEQ ID NO: 3823823 - DNA, 25 bp, Homo sapien
agcgaggtccggaggctgcaggtca

SEQ ID NO: 3823824 - DNA, 25 bp, Homo sapien
cagcgaggtccggaggctgcaggtc

SEQ ID NO: 3823825 - DNA, 25 bp, Homo sapien
gagagcctcagagacgccactgcgg

SEQ ID NO: 3823826 - DNA, 25 bp, Homo sapien
caggccctgcactctctcgatgagt

SEQ ID NO: 3823827 - DNA, 25 bp, Homo sapien
cagcacagccggagacctgagctgg

SEQ ID NO: 3823828 - DNA, 25 bp, Homo sapien
gatgagttggagaagtcccattgta

SEQ ID NO: 3823829 - DNA, 25 bp, Homo sapien
ttatgtgctcacatatagacacact

SEQ ID NO: 3823830 - DNA, 25 bp, Homo sapien
aagagcatacgtttatatatacata

SEQ ID NO: 3823831 - DNA, 25 bp, Homo sapien
atagacacacttaaagagcatacgt

SEQ ID NO: 3823832 - DNA, 25 bp, Homo sapien
tatgtgctcacatatagacacactt

SEQ ID NO: 3823833 - DNA, 25 bp, Homo sapien
ccttccatgggatttcacaagagat

SEQ ID NO: 3823834 - DNA, 25 bp, Homo sapien
aacctaggaggtttgcattatgcaa

SEQ ID NO: 3823835 - DNA, 25 bp, Homo sapien
aacttgtttcctggcatcgctggca

SEQ ID NO: 3823836 - DNA, 25 bp, Homo sapien
ctgcgggctgcagaagcaactggta

SEQ ID NO: 3823837 - DNA, 25 bp, Homo sapien
gtaccaactgacaactgcacatgtg

SEQ ID NO: 3823838 - DNA, 25 bp, Homo sapien
tctaagtccacgtgagtcaggatgg

SEQ ID NO: 3823839 - DNA, 25 bp, Homo sapien
tgcgtccttgactacaaatgtggat

SEQ ID NO: 3823840 - DNA, 25 bp, Homo sapien
tggagggagtttagatgtaccaact

SEQ ID NO: 3823841 - DNA, 25 bp, Homo sapien
ctgacagctcaaacaggacgtctct

SEQ ID NO: 3823842 - DNA, 25 bp, Homo sapien
tcaaacaggacgtctctggtgggag

SEQ ID NO: 3823843 - DNA, 25 bp, Homo sapien
gaggagatgctattcgctcggctcc

SEQ ID NO: 3823844 - DNA, 25 bp, Homo sapien
gtgggaggagatgctattcgctcgg

SEQ ID NO: 3823845 - DNA, 25 bp, Homo sapien
ccctgaatggtcagcggtctctgca

SEQ ID NO: 3823846 - DNA, 25 bp, Homo sapien
cctgaatggtcagcggtctctgcac

SEQ ID NO: 3823847 - DNA, 25 bp, Homo sapien
tatcgtagcaacagcttatacacat

SEQ ID NO: 3823848 - DNA, 25 bp, Homo sapien
tcttcattgtagtatcgtagcaaca

SEQ ID NO: 3823849 - DNA, 25 bp, Homo sapien
aggactcgacagcatggtatatgaa

SEQ ID NO: 3823850 - DNA, 25 bp, Homo sapien
caggggtggaacagtttctgcattc

SEQ ID NO: 3823851 - DNA, 25 bp, Homo sapien
ttatgcactgtcatggcagccctcg

SEQ ID NO: 3823852 - DNA, 25 bp, Homo sapien
tagcaagcacactggatgagcgctg

SEQ ID NO: 3823853 - DNA, 25 bp, Homo sapien
catccagatttagcaagtgttccca

SEQ ID NO: 3823854 - DNA, 25 bp, Homo sapien
agactgtggatgaaactctgccaga

SEQ ID NO: 3823855 - DNA, 25 bp, Homo sapien
aaatgtgcatgctgtaaatgtctct

SEQ ID NO: 3823856 - DNA, 25 bp, Homo sapien
tgaaataaaccacatctcgctcagc

SEQ ID NO: 3823857 - DNA, 25 bp, Homo sapien
catcaattctgagtccccaaaggtg

SEQ ID NO: 3823858 - DNA, 25 bp, Homo sapien
atgtctctcatcaattctgagtccc

SEQ ID NO: 3823859 - DNA, 25 bp, Homo sapien
ggcaaagagaaaagacacggctata

SEQ ID NO: 3823860 - DNA, 25 bp, Homo sapien
gatttataaacccagtatacatggt

SEQ ID NO: 3823861 - DNA, 25 bp, Homo sapien
tagatacctttagctctttaccagc

SEQ ID NO: 3823862 - DNA, 25 bp, Homo sapien
gctggtgtgccacagcttcatccta

SEQ ID NO: 3823863 - DNA, 25 bp, Homo sapien
gatagtcaccagagcaagcacagct

SEQ ID NO: 3823864 - DNA, 25 bp, Homo sapien
tgtcgtaagatcaataagcccagag

SEQ ID NO: 3823865 - DNA, 25 bp, Homo sapien
aaatgaccacggcttacagcagacc

SEQ ID NO: 3823866 - DNA, 25 bp, Homo sapien
taatcctggcacgtaaacagatgaa

SEQ ID NO: 3823867 - DNA, 25 bp, Homo sapien
ctccaggacggagaaatccacagta

SEQ ID NO: 3823868 - DNA, 25 bp, Homo sapien
gaaactccaggacggagaaatccac

SEQ ID NO: 3823869 - DNA, 25 bp, Homo sapien
aactccaggacggagaaatccacag

SEQ ID NO: 3823870 - DNA, 25 bp, Homo sapien
tgaagaaactccaggacggagaaat

SEQ ID NO: 3823871 - DNA, 25 bp, Homo sapien
gaagaccattgtgtaagatcccaga

SEQ ID NO: 3823872 - DNA, 25 bp, Homo sapien
cctgggattatgcaaggaagagact

SEQ ID NO: 3823873 - DNA, 25 bp, Homo sapien
gaagggattcctatacctggttatg

SEQ ID NO: 3823874 - DNA, 25 bp, Homo sapien
gcctgtgagtgcctagacactaaca

SEQ ID NO: 3823875 - DNA, 25 bp, Homo sapien
gagcagaccttttccagaggcctgg

SEQ ID NO: 3823876 - DNA, 25 bp, Homo sapien
tatcagatgccttcccatgtgccag

SEQ ID NO: 3823877 - DNA, 25 bp, Homo sapien
tacttgcaggtcacgatgtgggtcc

SEQ ID NO: 3823878 - DNA, 25 bp, Homo sapien
gttagatagaaggagactggtcccc

SEQ ID NO: 3823879 - DNA, 25 bp, Homo sapien
tcccaaacttgatttgacactcaac

SEQ ID NO: 3823880 - DNA, 25 bp, Homo sapien
catattgacatgaataattgcaggt

SEQ ID NO: 3823881 - DNA, 25 bp, Homo sapien
gaatgtagaactgcatcactataca

SEQ ID NO: 3823882 - DNA, 25 bp, Homo sapien
aacattttgtgacatattgagtgac

SEQ ID NO: 3823883 - DNA, 25 bp, Homo sapien
caaactgatcgaggtagcgtctgaa

SEQ ID NO: 3823884 - DNA, 25 bp, Homo sapien
tgttcagctcgcgtctcattttctc

SEQ ID NO: 3823885 - DNA, 25 bp, Homo sapien
gatggcaacgatctcagtgcagcgc

SEQ ID NO: 3823886 - DNA, 25 bp, Homo sapien
cattttctcaggcacaaactgatcg

SEQ ID NO: 3823887 - DNA, 25 bp, Homo sapien
gcaggttctgccatcaactggtttg

SEQ ID NO: 3823888 - DNA, 25 bp, Homo sapien
agcagcaaagcacaccgcaggttct

SEQ ID NO: 3823889 - DNA, 25 bp, Homo sapien
gaataaatttgtggcacgtgggcaa

SEQ ID NO: 3823890 - DNA, 25 bp, Homo sapien
tggcattaggtcaactgtcgcaaca

SEQ ID NO: 3823891 - DNA, 25 bp, Homo sapien
ttcactcccatcttcgtggctccgg

SEQ ID NO: 3823892 - DNA, 25 bp, Homo sapien
atcttcgtggctccgggaccaacga

SEQ ID NO: 3823893 - DNA, 25 bp, Homo sapien
ggaccaacgatatgtctcagcatag

SEQ ID NO: 3823894 - DNA, 25 bp, Homo sapien
tagcctgtgtattcactgtactgct

SEQ ID NO: 3823895 - DNA, 25 bp, Homo sapien
tccacctttcataacatggcaagaa

SEQ ID NO: 3823896 - DNA, 25 bp, Homo sapien
gaaacaaacaatctgtcactattaa

SEQ ID NO: 3823897 - DNA, 25 bp, Homo sapien
tttagcactgtactgaaggtctctc

SEQ ID NO: 3823898 - DNA, 25 bp, Homo sapien
gtcaaactgtccctatttgtagata

SEQ ID NO: 3823899 - DNA, 25 bp, Homo sapien
actcaggattgattaaaaagcggat

SEQ ID NO: 3823900 - DNA, 25 bp, Homo sapien
tgaagagccgtgaaataatcaactc

SEQ ID NO: 3823901 - DNA, 25 bp, Homo sapien
ctgcactggttacaccacctccaac

SEQ ID NO: 3823902 - DNA, 25 bp, Homo sapien
gacattcattgtgatccagcacctc

SEQ ID NO: 3823903 - DNA, 25 bp, Homo sapien
cttcgtaagtgacatgcaatcgtgt

SEQ ID NO: 3823904 - DNA, 25 bp, Homo sapien
tcttctatggtaccttcgtaagtga

SEQ ID NO: 3823905 - DNA, 25 bp, Homo sapien
gcaatcgtgtcaagggtttttcaca

SEQ ID NO: 3823906 - DNA, 25 bp, Homo sapien
taagtgacatgcaatcgtgtcaagg

SEQ ID NO: 3823907 - DNA, 25 bp, Homo sapien
tcttgtaaatgtcaccaacccagta

SEQ ID NO: 3823908 - DNA, 25 bp, Homo sapien
cttgtaaatgtcaccaacccagtag

SEQ ID NO: 3823909 - DNA, 25 bp, Homo sapien
tgtaaatgtcaccaacccagtaggt

SEQ ID NO: 3823910 - DNA, 25 bp, Homo sapien
ttgtaaatgtcaccaacccagtagg

SEQ ID NO: 3823911 - DNA, 25 bp, Homo sapien
gtctagactagaggtgaattttccc

SEQ ID NO: 3823912 - DNA, 25 bp, Homo sapien
cataggtctagactagaggtgaatt

SEQ ID NO: 3823913 - DNA, 25 bp, Homo sapien
tctagactagaggtgaattttccca

SEQ ID NO: 3823914 - DNA, 25 bp, Homo sapien
aggtctagactagaggtgaattttc

SEQ ID NO: 3823915 - DNA, 25 bp, Homo sapien
cttctgagataagagtggcaatacc

SEQ ID NO: 3823916 - DNA, 25 bp, Homo sapien
catccacttgtaggaaaggctaccc

SEQ ID NO: 3823917 - DNA, 25 bp, Homo sapien
gacaatcctatgacccagaactgaa

SEQ ID NO: 3823918 - DNA, 25 bp, Homo sapien
gccatttcacttgaccaggttgacc

SEQ ID NO: 3823919 - DNA, 25 bp, Homo sapien
aacacaaaatgttcctcacatgtca

SEQ ID NO: 3823920 - DNA, 25 bp, Homo sapien
tcacatgtcacttgacttgaactgt

SEQ ID NO: 3823921 - DNA, 25 bp, Homo sapien
acatgtcacttgacttgaactgttc

SEQ ID NO: 3823922 - DNA, 25 bp, Homo sapien
ctcacatgtcacttgacttgaactg

SEQ ID NO: 3823923 - DNA, 25 bp, Homo sapien
tagcagaagagcgttttaagtttct

SEQ ID NO: 3823924 - DNA, 25 bp, Homo sapien
gactcttctaaagtagcagaagagc

SEQ ID NO: 3823925 - DNA, 25 bp, Homo sapien
tcttctaaagtagcagaagagcgtt

SEQ ID NO: 3823926 - DNA, 25 bp, Homo sapien
cttctaaagtagcagaagagcgttt

SEQ ID NO: 3823927 - DNA, 25 bp, Homo sapien
agctaaaagactggcaatctgttcc

SEQ ID NO: 3823928 - DNA, 25 bp, Homo sapien
tctgttcctgcgacattgtgatgga

SEQ ID NO: 3823929 - DNA, 25 bp, Homo sapien
gggtaactagaatactccgatttca

SEQ ID NO: 3823930 - DNA, 25 bp, Homo sapien
cgacattgtgatggaatgattcatc

SEQ ID NO: 3823931 - DNA, 25 bp, Homo sapien
ccatatcaggcaagatggactgata

SEQ ID NO: 3823932 - DNA, 25 bp, Homo sapien
ttggcagacagagtgcaattttcac

SEQ ID NO: 3823933 - DNA, 25 bp, Homo sapien
ggcagacagagtgcaattttcacca

SEQ ID NO: 3823934 - DNA, 25 bp, Homo sapien
ggcaagatggactgatataaatgtt

SEQ ID NO: 3823935 - DNA, 25 bp, Homo sapien
taaaataattgtcagacaattcaca

SEQ ID NO: 3823936 - DNA, 25 bp, Homo sapien
gacaattcacatctgtattctcctg

SEQ ID NO: 3823937 - DNA, 25 bp, Homo sapien
tctgtattctcctggtgtctattga

SEQ ID NO: 3823938 - DNA, 25 bp, Homo sapien
tcacatctgtattctcctggtgtct

SEQ ID NO: 3823939 - DNA, 25 bp, Homo sapien
ggatacatgtcccttgtcagataaa

SEQ ID NO: 3823940 - DNA, 25 bp, Homo sapien
ccaaagctggagtgtcgtgatgcaa

SEQ ID NO: 3823941 - DNA, 25 bp, Homo sapien
tgctcattttctagcgaggttggct

SEQ ID NO: 3823942 - DNA, 25 bp, Homo sapien
gagttgcaactgctccatatcgcta

SEQ ID NO: 3823943 - DNA, 25 bp, Homo sapien
cagttgttggtagtatcacgctccc

SEQ ID NO: 3823944 - DNA, 25 bp, Homo sapien
ccagtcattgatttagggtacacca

SEQ ID NO: 3823945 - DNA, 25 bp, Homo sapien
gtcgactcccaagctacaaagatgt

SEQ ID NO: 3823946 - DNA, 25 bp, Homo sapien
gctataaaagctgtaggtcctagga

SEQ ID NO: 3823947 - DNA, 25 bp, Homo sapien
gccatgtggttctaaatgatgccag

SEQ ID NO: 3823948 - DNA, 25 bp, Homo sapien
ggtgctatgtcaaagaccgactctg

SEQ ID NO: 3823949 - DNA, 25 bp, Homo sapien
tctttgaacttattgggcctcccta

SEQ ID NO: 3823950 - DNA, 25 bp, Homo sapien
gatgccagatctaaggctatgggcc

SEQ ID NO: 3823951 - DNA, 25 bp, Homo sapien
tatgcctgcaacagatagaagtgtc

SEQ ID NO: 3823952 - DNA, 25 bp, Homo sapien
gacaggagccaactatcaggaaaga

SEQ ID NO: 3823953 - DNA, 25 bp, Homo sapien
tagagctaggcttctcaggactgag

SEQ ID NO: 3823954 - DNA, 25 bp, Homo sapien
cccagtggaagatgccctttgttta

SEQ ID NO: 3823955 - DNA, 25 bp, Homo sapien
gaatattattgcaaccattaaggct

SEQ ID NO: 3823956 - DNA, 25 bp, Homo sapien
gacatcatatatatgggcaaagact

SEQ ID NO: 3823957 - DNA, 25 bp, Homo sapien
cagaatagcaaacaatcacagggag

SEQ ID NO: 3823958 - DNA, 25 bp, Homo sapien
tccaaccctccatatgtttacaaag

SEQ ID NO: 3823959 - DNA, 25 bp, Homo sapien
cagaaatcgatcaaagctgtaaagt

SEQ ID NO: 3823960 - DNA, 25 bp, Homo sapien
ttatcccagaaatcgatcaaagctg

SEQ ID NO: 3823961 - DNA, 25 bp, Homo sapien
aaatcgatcaaagctgtaaagtccc

SEQ ID NO: 3823962 - DNA, 25 bp, Homo sapien
tcccagaaatcgatcaaagctgtaa

SEQ ID NO: 3823963 - DNA, 25 bp, Homo sapien
gtgcagtctgaatgagctcccaccg

SEQ ID NO: 3823964 - DNA, 25 bp, Homo sapien
tgcagtctgaatgagctcccaccgg

SEQ ID NO: 3823965 - DNA, 25 bp, Homo sapien
ggctccccgcagttcgctcaccatt

SEQ ID NO: 3823966 - DNA, 25 bp, Homo sapien
agtctgaatgagctcccaccggctc

SEQ ID NO: 3823967 - DNA, 25 bp, Homo sapien
cccacaaatctttataatgtgttgg

SEQ ID NO: 3823968 - DNA, 25 bp, Homo sapien
gaacttctcctgctcgcaaaagatc

SEQ ID NO: 3823969 - DNA, 25 bp, Homo sapien
ttctgaacaaggcattttaacatgc

SEQ ID NO: 3823970 - DNA, 25 bp, Homo sapien
atcttccactgggtacaaattttgt

SEQ ID NO: 3823971 - DNA, 25 bp, Homo sapien
gagaaggtggcaggcggcatagcca

SEQ ID NO: 3823972 - DNA, 25 bp, Homo sapien
catgggaggccagttggtgagaagg

SEQ ID NO: 3823973 - DNA, 25 bp, Homo sapien
acatgggaggccagttggtgagaag

SEQ ID NO: 3823974 - DNA, 25 bp, Homo sapien
ggtgagaaggtggcaggcggcatag

SEQ ID NO: 3823975 - DNA, 25 bp, Homo sapien
ggtctcgtttctttggtggaaggca

SEQ ID NO: 3823976 - DNA, 25 bp, Homo sapien
tcgtttctttggtggaaggcattcc

SEQ ID NO: 3823977 - DNA, 25 bp, Homo sapien
gtttctttggtggaaggcattcctg

SEQ ID NO: 3823978 - DNA, 25 bp, Homo sapien
tctcgtttctttggtggaaggcatt

SEQ ID NO: 3823979 - DNA, 25 bp, Homo sapien
agcccgtttcacagcgcttcctggg

SEQ ID NO: 3823980 - DNA, 25 bp, Homo sapien
gcccgtttcacagcgcttcctggga

SEQ ID NO: 3823981 - DNA, 25 bp, Homo sapien
cgtttcacagcgcttcctgggatcc

SEQ ID NO: 3823982 - DNA, 25 bp, Homo sapien
acacacccctgtgtatgcaatattt

SEQ ID NO: 3823983 - DNA, 25 bp, Homo sapien
cacacccctgtgtatgcaatatttg

SEQ ID NO: 3823984 - DNA, 25 bp, Homo sapien
acacccctgtgtatgcaatatttgt

SEQ ID NO: 3823985 - DNA, 25 bp, Homo sapien
ttgagacttgggaagggtgggccat

SEQ ID NO: 3823986 - DNA, 25 bp, Homo sapien
ttattgagacttgggaagggtgggc

SEQ ID NO: 3823987 - DNA, 25 bp, Homo sapien
gggtgggccatggtagcaggtgcat

SEQ ID NO: 3823988 - DNA, 25 bp, Homo sapien
gacttgggaagggtgggccatggta

SEQ ID NO: 3823989 - DNA, 25 bp, Homo sapien
atggcatttgtgactgtgttggtca

SEQ ID NO: 3823990 - DNA, 25 bp, Homo sapien
gatggcatttgtgactgtgttggtc

SEQ ID NO: 3823991 - DNA, 25 bp, Homo sapien
tgatggcatttgtgactgtgttggt

SEQ ID NO: 3823992 - DNA, 25 bp, Homo sapien
gtgatggcatttgtgactgtgttgg

SEQ ID NO: 3823993 - DNA, 25 bp, Homo sapien
gtctccttggcatgtcccaccacct

SEQ ID NO: 3823994 - DNA, 25 bp, Homo sapien
ttcaccacttcctccatggcatgaa

SEQ ID NO: 3823995 - DNA, 25 bp, Homo sapien
cagtctccttggcatgtcccaccac

SEQ ID NO: 3823996 - DNA, 25 bp, Homo sapien
ctccagtctccttggcatgtcccac

SEQ ID NO: 3823997 - DNA, 25 bp, Homo sapien
ccagggtgagggctcagagcaggcc

SEQ ID NO: 3823998 - DNA, 25 bp, Homo sapien
ctgaacagaggagacaagtccaggg

SEQ ID NO: 3823999 - DNA, 25 bp, Homo sapien
aacagaggagacaagtccagggtga

SEQ ID NO: 3824000 - DNA, 25 bp, Homo sapien
cagggtgagggctcagagcaggccc

SEQ ID NO: 3824001 - DNA, 25 bp, Homo sapien
gaaatcgtagatgaattcttggaac

SEQ ID NO: 3824002 - DNA, 25 bp, Homo sapien
tagaaatcgtagatgaattcttgga

SEQ ID NO: 3824003 - DNA, 25 bp, Homo sapien
aaaatagaaatcgtagatgaattct

SEQ ID NO: 3824004 - DNA, 25 bp, Homo sapien
tcgtagatgaattcttggaactggg

SEQ ID NO: 3824005 - DNA, 25 bp, Homo sapien
tctctctacatctggaaccatcggc

SEQ ID NO: 3824006 - DNA, 25 bp, Homo sapien
tatctctctacatctggaaccatcg

SEQ ID NO: 3824007 - DNA, 25 bp, Homo sapien
tctacatctggaaccatcggcagct

SEQ ID NO: 3824008 - DNA, 25 bp, Homo sapien
tctctacatctggaaccatcggcag

SEQ ID NO: 3824009 - DNA, 25 bp, Homo sapien
catatttatgaactttatttcaaat

SEQ ID NO: 3824010 - DNA, 25 bp, Homo sapien
ggcctgagactaacaaatccacctt

SEQ ID NO: 3824011 - DNA, 25 bp, Homo sapien
tggcaaaaggacataaaatacgtct

SEQ ID NO: 3824012 - DNA, 25 bp, Homo sapien
ggacataaaatacgtcttatggtca

SEQ ID NO: 3824013 - DNA, 25 bp, Homo sapien
atacacactcgtcggggcagccgta

SEQ ID NO: 3824014 - DNA, 25 bp, Homo sapien
tatacacactcgtcggggcagccgt

SEQ ID NO: 3824015 - DNA, 25 bp, Homo sapien
ctatacacactcgtcggggcagccg

SEQ ID NO: 3824016 - DNA, 25 bp, Homo sapien
tacacactcgtcggggcagccgtac

SEQ ID NO: 3824017 - DNA, 25 bp, Homo sapien
ctccagagatcgcacacgggaaagg

SEQ ID NO: 3824018 - DNA, 25 bp, Homo sapien
tcagtgcagggtagtggggccagaa

SEQ ID NO: 3824019 - DNA, 25 bp, Homo sapien
cagtgcagggtagtggggccagaaa

SEQ ID NO: 3824020 - DNA, 25 bp, Homo sapien
ccagctccagagatcgcacacggga

SEQ ID NO: 3824021 - DNA, 25 bp, Homo sapien
ctggcccacttaggattctgggtct

SEQ ID NO: 3824022 - DNA, 25 bp, Homo sapien
tggcccacttaggattctgggtctc

SEQ ID NO: 3824023 - DNA, 25 bp, Homo sapien
ggcccacttaggattctgggtctca

SEQ ID NO: 3824024 - DNA, 25 bp, Homo sapien
gcccacttaggattctgggtctcac

SEQ ID NO: 3824025 - DNA, 25 bp, Homo sapien
ttcccacgcatgttttggatcgact

SEQ ID NO: 3824026 - DNA, 25 bp, Homo sapien
cccacgcatgttttggatcgactgc

SEQ ID NO: 3824027 - DNA, 25 bp, Homo sapien
tcccacgcatgttttggatcgactg

SEQ ID NO: 3824028 - DNA, 25 bp, Homo sapien
gggacttgcttttactgctctcgca

SEQ ID NO: 3824029 - DNA, 25 bp, Homo sapien
tcagctgggacttgcttttactgct

SEQ ID NO: 3824030 - DNA, 25 bp, Homo sapien
ttttactgctctcgcatgactgcag

SEQ ID NO: 3824031 - DNA, 25 bp, Homo sapien
ctggtcagctgggacttgcttttac

SEQ ID NO: 3824032 - DNA, 25 bp, Homo sapien
cttcatataatcacctaagcttgaa

SEQ ID NO: 3824033 - DNA, 25 bp, Homo sapien
cctaagcttgaataataggtgagca

SEQ ID NO: 3824034 - DNA, 25 bp, Homo sapien
taatcacctaagcttgaataatagg

SEQ ID NO: 3824035 - DNA, 25 bp, Homo sapien
atgtggctagggatggccactttcc

SEQ ID NO: 3824036 - DNA, 25 bp, Homo sapien
ttcgctttaagagcatgccctgttt

SEQ ID NO: 3824037 - DNA, 25 bp, Homo sapien
cttcgctttaagagcatgccctgtt

SEQ ID NO: 3824038 - DNA, 25 bp, Homo sapien
tcgctttaagagcatgccctgttta

SEQ ID NO: 3824039 - DNA, 25 bp, Homo sapien
tgttcatcaggtatgctcaaagatc

SEQ ID NO: 3824040 - DNA, 25 bp, Homo sapien
caggtatgctcaaagatctatctgc

SEQ ID NO: 3824041 - DNA, 25 bp, Homo sapien
tgtaactgttcatcaggtatgctca

SEQ ID NO: 3824042 - DNA, 25 bp, Homo sapien
cgcaaatgagtgtaactgttcatca

SEQ ID NO: 3824043 - DNA, 25 bp, Homo sapien
tatgatgaggtatctccaaggtcac

SEQ ID NO: 3824044 - DNA, 25 bp, Homo sapien
ctttgtgtgatatgatgaggtatct

SEQ ID NO: 3824045 - DNA, 25 bp, Homo sapien
atatgatgaggtatctccaaggtca

SEQ ID NO: 3824046 - DNA, 25 bp, Homo sapien
tgtgtgatatgatgaggtatctcca

SEQ ID NO: 3824047 - DNA, 25 bp, Homo sapien
aaaaaattcataacaatagatgtta

SEQ ID NO: 3824048 - DNA, 25 bp, Homo sapien
tgtattgttgactgaaacgcacagt

SEQ ID NO: 3824049 - DNA, 25 bp, Homo sapien
gctgtattgttgactgaaacgcaca

SEQ ID NO: 3824050 - DNA, 25 bp, Homo sapien
cacaagctgtattgttgactgaaac

SEQ ID NO: 3824051 - DNA, 25 bp, Homo sapien
ttgtaagataatgctggatggctgt

SEQ ID NO: 3824052 - DNA, 25 bp, Homo sapien
gatgcggatgcccacgcactgactt

SEQ ID NO: 3824053 - DNA, 25 bp, Homo sapien
ccattggatgcggatgcccacgcac

SEQ ID NO: 3824054 - DNA, 25 bp, Homo sapien
tgcggatgcccacgcactgacttct

SEQ ID NO: 3824055 - DNA, 25 bp, Homo sapien
ttggatgcggatgcccacgcactga

SEQ ID NO: 3824056 - DNA, 25 bp, Homo sapien
tatatatgaggaataccacctcagc

SEQ ID NO: 3824057 - DNA, 25 bp, Homo sapien
ggttcagcggatactgctcaggtga

SEQ ID NO: 3824058 - DNA, 25 bp, Homo sapien
gaacttagtcatgtcaccaaatgcc

SEQ ID NO: 3824059 - DNA, 25 bp, Homo sapien
gacaaccacagagtgggaggaaatc

SEQ ID NO: 3824060 - DNA, 25 bp, Homo sapien
tttgtacagttgcttcttcttattt

SEQ ID NO: 3824061 - DNA, 25 bp, Homo sapien
atggtttgtacagttgcttcttctt

SEQ ID NO: 3824062 - DNA, 25 bp, Homo sapien
cagttgcttcttcttatttctacaa

SEQ ID NO: 3824063 - DNA, 25 bp, Homo sapien
ggtttgtacagttgcttcttcttat

SEQ ID NO: 3824064 - DNA, 25 bp, Homo sapien
gagttcctctggaatattgtgcttg

SEQ ID NO: 3824065 - DNA, 25 bp, Homo sapien
ggattggcagaagggttaaactcca

SEQ ID NO: 3824066 - DNA, 25 bp, Homo sapien
tgcctctggattggcagaagggtta

SEQ ID NO: 3824067 - DNA, 25 bp, Homo sapien
tattgtgcttgcctctggattggca

SEQ ID NO: 3824068 - DNA, 25 bp, Homo sapien
gagttcctctggaatattgtgcttg

SEQ ID NO: 3824069 - DNA, 25 bp, Homo sapien
tgcctctggattggcagaaaggtta

SEQ ID NO: 3824070 - DNA, 25 bp, Homo sapien
ggattggcagaaaggttaaactcca

SEQ ID NO: 3824071 - DNA, 25 bp, Homo sapien
tattgtgcttgcctctggattggca

SEQ ID NO: 3824072 - DNA, 25 bp, Homo sapien
aaaccgagggtagatggcacctatc

SEQ ID NO: 3824073 - DNA, 25 bp, Homo sapien
caaaccgagggtagatggcacctat

SEQ ID NO: 3824074 - DNA, 25 bp, Homo sapien
accgagggtagatggcacctatcac

SEQ ID NO: 3824075 - DNA, 25 bp, Homo sapien
ggcaaaccgagggtagatggcacct

SEQ ID NO: 3824076 - DNA, 25 bp, Homo sapien
atgtggaggtcctcaccaacttcaa

SEQ ID NO: 3824077 - DNA, 25 bp, Homo sapien
gcatgtggaggtcctcaccaacttc

SEQ ID NO: 3824078 - DNA, 25 bp, Homo sapien
catgtggaggtcctcaccaacttca

SEQ ID NO: 3824079 - DNA, 25 bp, Homo sapien
tgtggaggtcctcaccaacttcaac

SEQ ID NO: 3824080 - DNA, 25 bp, Homo sapien
tctcagattcagagggacacaccga

SEQ ID NO: 3824081 - DNA, 25 bp, Homo sapien
ctcagattcagagggacacaccgac

SEQ ID NO: 3824082 - DNA, 25 bp, Homo sapien
ctagggtgcacacgacaggtcagta

SEQ ID NO: 3824083 - DNA, 25 bp, Homo sapien
tgcacacgacaggtcagtatgttcc

SEQ ID NO: 3824084 - DNA, 25 bp, Homo sapien
tagggtgcacacgacaggtcagtat

SEQ ID NO: 3824085 - DNA, 25 bp, Homo sapien
acacgacaggtcagtatgttcccca

SEQ ID NO: 3824086 - DNA, 25 bp, Homo sapien
tcccgctgtcctaggccgaggctat

SEQ ID NO: 3824087 - DNA, 25 bp, Homo sapien
tgtcctaggccgaggctatgctgca

SEQ ID NO: 3824088 - DNA, 25 bp, Homo sapien
cagctttggccacgcactcccgctg

SEQ ID NO: 3824089 - DNA, 25 bp, Homo sapien
gggcgcctctactgtctgccaccac

SEQ ID NO: 3824090 - DNA, 25 bp, Homo sapien
gaatcattatcataggaagcaaagg

SEQ ID NO: 3824091 - DNA, 25 bp, Homo sapien
gttgaaatgcgggaaaccacagtgg

SEQ ID NO: 3824092 - DNA, 25 bp, Homo sapien
cagtttcagtaaccagtatctagta

SEQ ID NO: 3824093 - DNA, 25 bp, Homo sapien
gggtaacttgaaaagcaattcgagc

SEQ ID NO: 3824094 - DNA, 25 bp, Homo sapien
tcgagaccaacttcgcctacgtagt

SEQ ID NO: 3824095 - DNA, 25 bp, Homo sapien
gttcgagaccaacttcgcctacgta

SEQ ID NO: 3824096 - DNA, 25 bp, Homo sapien
gagttcgagaccaacttcgcctacg

SEQ ID NO: 3824097 - DNA, 25 bp, Homo sapien
cgagaccaacttcgcctacgtagta

SEQ ID NO: 3824098 - DNA, 25 bp, Homo sapien
atctcatccttggatgagcccgact

SEQ ID NO: 3824099 - DNA, 25 bp, Homo sapien
tctcatccttggatgagcccgactt

SEQ ID NO: 3824100 - DNA, 25 bp, Homo sapien
aatctcatccttggatgagcccgac

SEQ ID NO: 3824101 - DNA, 25 bp, Homo sapien
aaatctcatccttggatgagcccga

SEQ ID NO: 3824102 - DNA, 25 bp, Homo sapien
ggtttctattccattgagtgaaatg

SEQ ID NO: 3824103 - DNA, 25 bp, Homo sapien
tgccccagtgtatggcagattagaa

SEQ ID NO: 3824104 - DNA, 25 bp, Homo sapien
tgggtttctattccattgagtgaaa

SEQ ID NO: 3824105 - DNA, 25 bp, Homo sapien
gggtttctattccattgagtgaaat

SEQ ID NO: 3824106 - DNA, 25 bp, Homo sapien
ggagaaatctgagagccatgtgttc

SEQ ID NO: 3824107 - DNA, 25 bp, Homo sapien
tgggagaaatctgagagccatgtgt

SEQ ID NO: 3824108 - DNA, 25 bp, Homo sapien
aaatctgagagccatgtgttccaca

SEQ ID NO: 3824109 - DNA, 25 bp, Homo sapien
agaaatctgagagccatgtgttcca

SEQ ID NO: 3824110 - DNA, 25 bp, Homo sapien
aggatgatggctcagtgtgcagagc

SEQ ID NO: 3824111 - DNA, 25 bp, Homo sapien
tgatggctcagtgtgcagagctgag

SEQ ID NO: 3824112 - DNA, 25 bp, Homo sapien
atgatggctcagtgtgcagagctga

SEQ ID NO: 3824113 - DNA, 25 bp, Homo sapien
cataggatgatggctcagtgtgcag

SEQ ID NO: 3824114 - DNA, 25 bp, Homo sapien
gactaccctggtgctatggaatgaa

SEQ ID NO: 3824115 - DNA, 25 bp, Homo sapien
aaatgggtatatttgtgtctacaac

SEQ ID NO: 3824116 - DNA, 25 bp, Homo sapien
gaaggaagcctctatgagaaagcag

SEQ ID NO: 3824117 - DNA, 25 bp, Homo sapien
tataaagcaatggaagtggcattgt

SEQ ID NO: 3824118 - DNA, 25 bp, Homo sapien
atatcctacccttcaaaattgaagc

SEQ ID NO: 3824119 - DNA, 25 bp, Homo sapien
tatatcctacccttcaaaattgaag

SEQ ID NO: 3824120 - DNA, 25 bp, Homo sapien
gctgacttttgtggcggaagcagag

SEQ ID NO: 3824121 - DNA, 25 bp, Homo sapien
cttttgtggcggaagcagaggcaca

SEQ ID NO: 3824122 - DNA, 25 bp, Homo sapien
catcaggctcctcagtatcctgaac

SEQ ID NO: 3824123 - DNA, 25 bp, Homo sapien
ctacatcaggctcctcagtatcctg

SEQ ID NO: 3824124 - DNA, 25 bp, Homo sapien
cattgtgcccagcaactgtattctt

SEQ ID NO: 3824125 - DNA, 25 bp, Homo sapien
ggtcacgtgatcctcctacatcagg

SEQ ID NO: 3824126 - DNA, 25 bp, Homo sapien
ttaaaatgtagctctgacagagact

SEQ ID NO: 3824127 - DNA, 25 bp, Homo sapien
taatactttgatgccttttgtgtag

SEQ ID NO: 3824128 - DNA, 25 bp, Homo sapien
gccagacagcagcacacagaatggg

SEQ ID NO: 3824129 - DNA, 25 bp, Homo sapien
tcttctcagtacttcaccagctggg

SEQ ID NO: 3824130 - DNA, 25 bp, Homo sapien
accagctgggattgacacacctcta

SEQ ID NO: 3824131 - DNA, 25 bp, Homo sapien
tagtgcaacctgtgactcacgctgt

SEQ ID NO: 3824132 - DNA, 25 bp, Homo sapien
ttctagtgcaacctgtgactcacgc

SEQ ID NO: 3824133 - DNA, 25 bp, Homo sapien
tcagcaggatttggatgatagagag

SEQ ID NO: 3824134 - DNA, 25 bp, Homo sapien
ggatgatagagagctttgtgtacaa

SEQ ID NO: 3824135 - DNA, 25 bp, Homo sapien
tgtcatgtcacgtcatttcattctg

SEQ ID NO: 3824136 - DNA, 25 bp, Homo sapien
catttcattctgagacagactcgct

SEQ ID NO: 3824137 - DNA, 25 bp, Homo sapien
cacgtcatttcattctgagacagac

SEQ ID NO: 3824138 - DNA, 25 bp, Homo sapien
catgtcacgtcatttcattctgaga

SEQ ID NO: 3824139 - DNA, 25 bp, Homo sapien
gagtaccagtctactaccttcagag

SEQ ID NO: 3824140 - DNA, 25 bp, Homo sapien
tagaacatgacagagctgtgtgagc

SEQ ID NO: 3824141 - DNA, 25 bp, Homo sapien
aattcagtccatccttaaggtctgg

SEQ ID NO: 3824142 - DNA, 25 bp, Homo sapien
caatttttagcggagttaacacagc

SEQ ID NO: 3824143 - DNA, 25 bp, Homo sapien
cggtagacaagcctcgtttttcctg

SEQ ID NO: 3824144 - DNA, 25 bp, Homo sapien
ctgatctgttaactcggaaaacaaa

SEQ ID NO: 3824145 - DNA, 25 bp, Homo sapien
ctctgagaggaacaaggttagattt

SEQ ID NO: 3824146 - DNA, 25 bp, Homo sapien
tctgttttctgcctagcggtagaca

SEQ ID NO: 3824147 - DNA, 25 bp, Homo sapien
cctttaagacttcatagtcaaagac

SEQ ID NO: 3824148 - DNA, 25 bp, Homo sapien
ggcctttaagacttcatagtcaaag

SEQ ID NO: 3824149 - DNA, 25 bp, Homo sapien
gcctttaagacttcatagtcaaaga

SEQ ID NO: 3824150 - DNA, 25 bp, Homo sapien
tgaagagccgtgaaataatcaactc

SEQ ID NO: 3824151 - DNA, 25 bp, Homo sapien
ctgcactggttacaccacctccaac

SEQ ID NO: 3824152 - DNA, 25 bp, Homo sapien
actcaggattgattaaaaagcggat

SEQ ID NO: 3824153 - DNA, 25 bp, Homo sapien
gacattcattgtgatccagcacctc

SEQ ID NO: 3824154 - DNA, 25 bp, Homo sapien
taagtgacatgcaatcgtgtcaagg

SEQ ID NO: 3824155 - DNA, 25 bp, Homo sapien
cttcgtaagtgacatgcaatcgtgt

SEQ ID NO: 3824156 - DNA, 25 bp, Homo sapien
tcttctatggtaccttcgtaagtga

SEQ ID NO: 3824157 - DNA, 25 bp, Homo sapien
gcaatcgtgtcaagggtttttcaca

SEQ ID NO: 3824158 - DNA, 25 bp, Homo sapien
cagaaattctgaacaatggtatttt

SEQ ID NO: 3824159 - DNA, 25 bp, Homo sapien
ctgccacagaaattctgaacaatgg

SEQ ID NO: 3824160 - DNA, 25 bp, Homo sapien
ccacagaaattctgaacaatggtat

SEQ ID NO: 3824161 - DNA, 25 bp, Homo sapien
tgccacagaaattctgaacaatggt

SEQ ID NO: 3824162 - DNA, 25 bp, Homo sapien
tcttgtaaatgtcaccaacccagta

SEQ ID NO: 3824163 - DNA, 25 bp, Homo sapien
cttgtaaatgtcaccaacccagtag

SEQ ID NO: 3824164 - DNA, 25 bp, Homo sapien
tgtaaatgtcaccaacccagtaggt

SEQ ID NO: 3824165 - DNA, 25 bp, Homo sapien
ttgtaaatgtcaccaacccagtagg

SEQ ID NO: 3824166 - DNA, 25 bp, Homo sapien
gtgtagactagaggtgaattttccc

SEQ ID NO: 3824167 - DNA, 25 bp, Homo sapien
aggtgtagactagaggtgaattttc

SEQ ID NO: 3824168 - DNA, 25 bp, Homo sapien
cataggtgtagactagaggtgaatt

SEQ ID NO: 3824169 - DNA, 25 bp, Homo sapien
tgtagactagaggtgaattttccca

SEQ ID NO: 3824170 - DNA, 25 bp, Homo sapien
tcttctaaagtagcagaagagcgtt

SEQ ID NO: 3824171 - DNA, 25 bp, Homo sapien
cttctaaagtagcagaagagcgttt

SEQ ID NO: 3824172 - DNA, 25 bp, Homo sapien
gactcttctaaagtagcagaagagc

SEQ ID NO: 3824173 - DNA, 25 bp, Homo sapien
tagcagaagagcgttttaagtttct

SEQ ID NO: 3824174 - DNA, 25 bp, Homo sapien
agatatcagggctcaacaatccttg

SEQ ID NO: 3824175 - DNA, 25 bp, Homo sapien
tactacgtagtttgataagtaacaa

SEQ ID NO: 3824176 - DNA, 25 bp, Homo sapien
tcagtcagtcagtgcacagctactt

SEQ ID NO: 3824177 - DNA, 25 bp, Homo sapien
caacctatcttccaccacagagaag

SEQ ID NO: 3824178 - DNA, 25 bp, Homo sapien
tttccatgcaaactcagaagcatcg

SEQ ID NO: 3824179 - DNA, 25 bp, Homo sapien
catctagtttccatgcaaactcaga

SEQ ID NO: 3824180 - DNA, 25 bp, Homo sapien
tgcaaactcagaagcatcgatgcta

SEQ ID NO: 3824181 - DNA, 25 bp, Homo sapien
cagaagcatcgatgctaatcacatt

SEQ ID NO: 3824182 - DNA, 25 bp, Homo sapien
caaaaatgcatgacctcattccaat

SEQ ID NO: 3824183 - DNA, 25 bp, Homo sapien
ccagtaataagaagtatcatgatcc

SEQ ID NO: 3824184 - DNA, 25 bp, Homo sapien
tggtattctcccaaaaatgcatgac

SEQ ID NO: 3824185 - DNA, 25 bp, Homo sapien
atcatgatcccactgatatggtgca

SEQ ID NO: 3824186 - DNA, 25 bp, Homo sapien
agctaaaagactggcaatctgttcc

SEQ ID NO: 3824187 - DNA, 25 bp, Homo sapien
tctgttcctgcgacattgtgatgga

SEQ ID NO: 3824188 - DNA, 25 bp, Homo sapien
gggtaactagaatactccgatttca

SEQ ID NO: 3824189 - DNA, 25 bp, Homo sapien
cgacattgtgatggaatgattcatc

SEQ ID NO: 3824190 - DNA, 25 bp, Homo sapien
ggcagacagagtgcaattttcacca

SEQ ID NO: 3824191 - DNA, 25 bp, Homo sapien
ccatatcaggcaagatggactgata

SEQ ID NO: 3824192 - DNA, 25 bp, Homo sapien
ggcaagatggactgatataaatgtt

SEQ ID NO: 3824193 - DNA, 25 bp, Homo sapien
ttggcagacagagtgcaattttcac

SEQ ID NO: 3824194 - DNA, 25 bp, Homo sapien
gcactgtacttcttcacaactgtca

SEQ ID NO: 3824195 - DNA, 25 bp, Homo sapien
gctgacaagctttacaatattgctt

SEQ ID NO: 3824196 - DNA, 25 bp, Homo sapien
gcattattgcactgtacttcttcac

SEQ ID NO: 3824197 - DNA, 25 bp, Homo sapien
tctgatgaagcattattgcactgta

SEQ ID NO: 3824198 - DNA, 25 bp, Homo sapien
ctctcggtaagtgattgtggttcaa

SEQ ID NO: 3824199 - DNA, 25 bp, Homo sapien
taattcctaaatctctcggtaagtg

SEQ ID NO: 3824200 - DNA, 25 bp, Homo sapien
tggtcaactatcaccttacacaaaa

SEQ ID NO: 3824201 - DNA, 25 bp, Homo sapien
tctaccaatcaccagtcgcaaatgg

SEQ ID NO: 3824202 - DNA, 25 bp, Homo sapien
ctgaatatcctgaactcagttcaag

SEQ ID NO: 3824203 - DNA, 25 bp, Homo sapien
gttcaagaaacattaactgtgcatt

SEQ ID NO: 3824204 - DNA, 25 bp, Homo sapien
tactctccctgaatatcctgaactc

SEQ ID NO: 3824205 - DNA, 25 bp, Homo sapien
tctccctgaatatcctgaactcagt

SEQ ID NO: 3824206 - DNA, 25 bp, Homo sapien
ccatttcttagaatatgccacagtg

SEQ ID NO: 3824207 - DNA, 25 bp, Homo sapien
ttcttagaatatgccacagtgtatt

SEQ ID NO: 3824208 - DNA, 25 bp, Homo sapien
cccatttcttagaatatgccacagt

SEQ ID NO: 3824209 - DNA, 25 bp, Homo sapien
tttcttagaatatgccacagtgtat

SEQ ID NO: 3824210 - DNA, 25 bp, Homo sapien
tgcagtctgaatgagctcccaccgg

SEQ ID NO: 3824211 - DNA, 25 bp, Homo sapien
gtgcagtctgaatgagctcccaccg

SEQ ID NO: 3824212 - DNA, 25 bp, Homo sapien
ggctccccgcagttcgctcaccatt

SEQ ID NO: 3824213 - DNA, 25 bp, Homo sapien
agtctgaatgagctcccaccggctc

SEQ ID NO: 3824214 - DNA, 25 bp, Homo sapien
aatctcggttttgttcttccctcat

SEQ ID NO: 3824215 - DNA, 25 bp, Homo sapien
gaatctcggttttgttcttccctca

SEQ ID NO: 3824216 - DNA, 25 bp, Homo sapien
tctcggttttgttcttccctcatct

SEQ ID NO: 3824217 - DNA, 25 bp, Homo sapien
tcggttttgttcttccctcatcttc

SEQ ID NO: 3824218 - DNA, 25 bp, Homo sapien
ccacaaatctttataatgtgttgga

SEQ ID NO: 3824219 - DNA, 25 bp, Homo sapien
ttctgaacaaggcattttaacatgc

SEQ ID NO: 3824220 - DNA, 25 bp, Homo sapien
gaacttctcctgctcgcaaaagatc

SEQ ID NO: 3824221 - DNA, 25 bp, Homo sapien
atgcttgttatcccacaaatcttta

SEQ ID NO: 3824222 - DNA, 25 bp, Homo sapien
ttactgtgtgattggcagatggtct

SEQ ID NO: 3824223 - DNA, 25 bp, Homo sapien
tctcctcaatgggagttccaagcca

SEQ ID NO: 3824224 - DNA, 25 bp, Homo sapien
tggtctcaagagaggcagccggatc

SEQ ID NO: 3824225 - DNA, 25 bp, Homo sapien
cagccggatcccacactgaggcatt

SEQ ID NO: 3824226 - DNA, 25 bp, Homo sapien
tggaaatgtaatctaacttcaccgc

SEQ ID NO: 3824227 - DNA, 25 bp, Homo sapien
tgcattctacattcaggctagaaat

SEQ ID NO: 3824228 - DNA, 25 bp, Homo sapien
gggcagtctcatgaaatgatctgtg

SEQ ID NO: 3824229 - DNA, 25 bp, Homo sapien
aatctaacttcaccgcccttagtag

SEQ ID NO: 3824230 - DNA, 25 bp, Homo sapien
caatgtcagcgtctcttgcttggaa

SEQ ID NO: 3824231 - DNA, 25 bp, Homo sapien
tactaaactgctctggtaccagggt

SEQ ID NO: 3824232 - DNA, 25 bp, Homo sapien
tggcgtgttcatcttccgtagtctg

SEQ ID NO: 3824233 - DNA, 25 bp, Homo sapien
cacatccatcggtgattcgggttca

SEQ ID NO: 3824234 - DNA, 25 bp, Homo sapien
gatgctggttcaaatactgtgtact

SEQ ID NO: 3824235 - DNA, 25 bp, Homo sapien
ggattctattattgtattgttgttt

SEQ ID NO: 3824236 - DNA, 25 bp, Homo sapien
tattgtattgttgttttctttacta

SEQ ID NO: 3824237 - DNA, 25 bp, Homo sapien
tctattattgtattgttgttttctt

SEQ ID NO: 3824238 - DNA, 25 bp, Homo sapien
gtattgttgttttctttactatcca

SEQ ID NO: 3824239 - DNA, 25 bp, Homo sapien
accaggcagtaattatgtgtttttg

SEQ ID NO: 3824240 - DNA, 25 bp, Homo sapien
tgtgccttgctcatacctttactat

SEQ ID NO: 3824241 - DNA, 25 bp, Homo sapien
tacctttactattgcatctatcaca

SEQ ID NO: 3824242 - DNA, 25 bp, Homo sapien
tgtggccactgctacactgtaagta

SEQ ID NO: 3824243 - DNA, 25 bp, Homo sapien
cgctgtcttgattccttcagtgtcc

SEQ ID NO: 3824244 - DNA, 25 bp, Homo sapien
tcagtgtccatccaactggtaatag

SEQ ID NO: 3824245 - DNA, 25 bp, Homo sapien
ttccttcagtgtccatccaactggt

SEQ ID NO: 3824246 - DNA, 25 bp, Homo sapien
ttccgctgtcttgattccttcagtg

SEQ ID NO: 3824247 - DNA, 25 bp, Homo sapien
tctgcagcagatcaggcttcagaga

SEQ ID NO: 3824248 - DNA, 25 bp, Homo sapien
ccatatggagcaaaacagatgcagg

SEQ ID NO: 3824249 - DNA, 25 bp, Homo sapien
gaaaatcctcaaattgggccgggca

SEQ ID NO: 3824250 - DNA, 25 bp, Homo sapien
gaacataaactagtccttgtgagag

SEQ ID NO: 3824251 - DNA, 25 bp, Homo sapien
tgcccagcaaaattagcgatttcag

SEQ ID NO: 3824252 - DNA, 25 bp, Homo sapien
taccccgcctacttgtcctaagata

SEQ ID NO: 3824253 - DNA, 25 bp, Homo sapien
taaacatgcgaaatacagccccaag

SEQ ID NO: 3824254 - DNA, 25 bp, Homo sapien
ataaatatccatttcgctaccccgc

SEQ ID NO: 3824255 - DNA, 25 bp, Homo sapien
gcatccaggcctaagctacaattat

SEQ ID NO: 3824256 - DNA, 25 bp, Homo sapien
tgtttatgccatgaactccccaatc

SEQ ID NO: 3824257 - DNA, 25 bp, Homo sapien
gattaactccttaactgagtcttga

SEQ ID NO: 3824258 - DNA, 25 bp, Homo sapien
gagtcttgatgctccacttgagttc

SEQ ID NO: 3824259 - DNA, 25 bp, Homo sapien
gcctccattgcactcctgaaacact

SEQ ID NO: 3824260 - DNA, 25 bp, Homo sapien
cggcctccattgcactcctgaaaca

SEQ ID NO: 3824261 - DNA, 25 bp, Homo sapien
ggcctccattgcactcctgaaacac

SEQ ID NO: 3824262 - DNA, 25 bp, Homo sapien
tgaactgcacgtgagcgtccttggg

SEQ ID NO: 3824263 - DNA, 25 bp, Homo sapien
ccggcgaagttgtagcggcgcccca

SEQ ID NO: 3824264 - DNA, 25 bp, Homo sapien
aggctggcgaggacggtgggaccct

SEQ ID NO: 3824265 - DNA, 25 bp, Homo sapien
ggtcgcttggtgcagggttcacagc

SEQ ID NO: 3824266 - DNA, 25 bp, Homo sapien
agcagcgcactgtccccgggccggc

SEQ ID NO: 3824267 - DNA, 25 bp, Homo sapien
gggcggagagcctcatttcactaac

SEQ ID NO: 3824268 - DNA, 25 bp, Homo sapien
cgggcggagagcctcatttcactaa

SEQ ID NO: 3824269 - DNA, 25 bp, Homo sapien
gctgggaccagcagcgcactgtccc

SEQ ID NO: 3824270 - DNA, 25 bp, Homo sapien
caagtcaggccgtaaacactcgcct

SEQ ID NO: 3824271 - DNA, 25 bp, Homo sapien
ctcaatgcgccgctttgattcggga

SEQ ID NO: 3824272 - DNA, 25 bp, Homo sapien
gatggactgcgcgtccttctcagcg

SEQ ID NO: 3824273 - DNA, 25 bp, Homo sapien
cttctgcaattgctgatccgccggc

SEQ ID NO: 3824274 - DNA, 25 bp, Homo sapien
taatgatcgagttcagcaagttgca

SEQ ID NO: 3824275 - DNA, 25 bp, Homo sapien
tagattggaggacttgaacttgcca

SEQ ID NO: 3824276 - DNA, 25 bp, Homo sapien
tattcagcattgtctggccagggca

SEQ ID NO: 3824277 - DNA, 25 bp, Homo sapien
tagtcaagtacgttaaatggcattc

SEQ ID NO: 3824278 - DNA, 25 bp, Homo sapien
cacagttgaatcactaacggcatct

SEQ ID NO: 3824279 - DNA, 25 bp, Homo sapien
tcccagatagctagggctgcagatg

SEQ ID NO: 3824280 - DNA, 25 bp, Homo sapien
taagcattatggttggaacctttta

SEQ ID NO: 3824281 - DNA, 25 bp, Homo sapien
gatgtgatctgacttggttgcccag

SEQ ID NO: 3824282 - DNA, 25 bp, Homo sapien
taaccatctgatgtagtgatacttg

SEQ ID NO: 3824283 - DNA, 25 bp, Homo sapien
aagaatcagaagtgtagttatgcag

SEQ ID NO: 3824284 - DNA, 25 bp, Homo sapien
cgtttggtgcaatgaatggtcttcg

SEQ ID NO: 3824285 - DNA, 25 bp, Homo sapien
aaagctgtctttatctgggtgaatt

SEQ ID NO: 3824286 - DNA, 25 bp, Homo sapien
aaatttggaaatattcgtcactagc

SEQ ID NO: 3824287 - DNA, 25 bp, Homo sapien
cattaagtgcttattgctgaaggta

SEQ ID NO: 3824288 - DNA, 25 bp, Homo sapien
aaaggtccgcctaataccatgctca

SEQ ID NO: 3824289 - DNA, 25 bp, Homo sapien
agttgaatggtgtttagtgtgccca

SEQ ID NO: 3824290 - DNA, 25 bp, Homo sapien
aatccctatcgtgttttgttccaat

SEQ ID NO: 3824291 - DNA, 25 bp, Homo sapien
tactatcttccaacgcaagaaaggc

SEQ ID NO: 3824292 - DNA, 25 bp, Homo sapien
tcttccttcttctagtaagggagga

SEQ ID NO: 3824293 - DNA, 25 bp, Homo sapien
ctttgatgacgatgaaatgcaggta

SEQ ID NO: 3824294 - DNA, 25 bp, Homo sapien
tccagggttgagacaatttgcccaa

SEQ ID NO: 3824295 - DNA, 25 bp, Homo sapien
tcactcccgagaagtagggatgggt

SEQ ID NO: 3824296 - DNA, 25 bp, Homo sapien
cctcttgtgggaagtacagttgcga

SEQ ID NO: 3824297 - DNA, 25 bp, Homo sapien
gtctcttgggcttgcaggttcctgc

SEQ ID NO: 3824298 - DNA, 25 bp, Homo sapien
caaaagagggtattgaagccacgca

SEQ ID NO: 3824299 - DNA, 25 bp, Homo sapien
gagggtattgaagccacgcagtccc

SEQ ID NO: 3824300 - DNA, 25 bp, Homo sapien
tgagcactgagtgctaggtcccttc

SEQ ID NO: 3824301 - DNA, 25 bp, Homo sapien
caccagctttggagccggagagagc

SEQ ID NO: 3824302 - DNA, 25 bp, Homo sapien
tctgtagctctacatcagattcatg

SEQ ID NO: 3824303 - DNA, 25 bp, Homo sapien
tgtagctctacatcagattcatgct

SEQ ID NO: 3824304 - DNA, 25 bp, Homo sapien
ctgtagctctacatcagattcatgc

SEQ ID NO: 3824305 - DNA, 25 bp, Homo sapien
ggacataaaatacgtcttatggtca

SEQ ID NO: 3824306 - DNA, 25 bp, Homo sapien
ggcctgagactaacaaatccacctt

SEQ ID NO: 3824307 - DNA, 25 bp, Homo sapien
tggcaaaaggacataaaatacgtct

SEQ ID NO: 3824308 - DNA, 25 bp, Homo sapien
catatttatgaactttatttcaaat

SEQ ID NO: 3824309 - DNA, 25 bp, Homo sapien
tcagtgcagggtagtggggccagaa

SEQ ID NO: 3824310 - DNA, 25 bp, Homo sapien
ccagctccagagatcgcacacggga

SEQ ID NO: 3824311 - DNA, 25 bp, Homo sapien
cagtgcagggtagtggggccagaaa

SEQ ID NO: 3824312 - DNA, 25 bp, Homo sapien
ctccagagatcgcacacgggaaagg

SEQ ID NO: 3824313 - DNA, 25 bp, Homo sapien
tggcccacttaggattctgggtctc

SEQ ID NO: 3824314 - DNA, 25 bp, Homo sapien
ggcccacttaggattctgggtctca

SEQ ID NO: 3824315 - DNA, 25 bp, Homo sapien
ctggcccacttaggattctgggtct

SEQ ID NO: 3824316 - DNA, 25 bp, Homo sapien
gcccacttaggattctgggtctcac

SEQ ID NO: 3824317 - DNA, 25 bp, Homo sapien
tcccacgcatgttttggatcgactg

SEQ ID NO: 3824318 - DNA, 25 bp, Homo sapien
cccacgcatgttttggatcgactgc

SEQ ID NO: 3824319 - DNA, 25 bp, Homo sapien
ttcccacgcatgttttggatcgact

SEQ ID NO: 3824320 - DNA, 25 bp, Homo sapien
tcagctgggacttgcttttactgct

SEQ ID NO: 3824321 - DNA, 25 bp, Homo sapien
ttttactgctctcgcatgactgcag

SEQ ID NO: 3824322 - DNA, 25 bp, Homo sapien
gggacttgcttttactgctctcgca

SEQ ID NO: 3824323 - DNA, 25 bp, Homo sapien
ctggtcagctgggacttgcttttac

SEQ ID NO: 3824324 - DNA, 25 bp, Homo sapien
cttcatataatcacctaagcttgaa

SEQ ID NO: 3824325 - DNA, 25 bp, Homo sapien
cctaagcttgaataataggtgagca

SEQ ID NO: 3824326 - DNA, 25 bp, Homo sapien
taatcacctaagcttgaataatagg

SEQ ID NO: 3824327 - DNA, 25 bp, Homo sapien
atgtggctagggatggccactttcc

SEQ ID NO: 3824328 - DNA, 25 bp, Homo sapien
ttcgctttaagagcatgccctgttt

SEQ ID NO: 3824329 - DNA, 25 bp, Homo sapien
tcgctttaagagcatgccctgttta

SEQ ID NO: 3824330 - DNA, 25 bp, Homo sapien
cttcgctttaagagcatgccctgtt

SEQ ID NO: 3824331 - DNA, 25 bp, Homo sapien
caggtatgctcaaagatctatctgc

SEQ ID NO: 3824332 - DNA, 25 bp, Homo sapien
tgttcatcaggtatgctcaaagatc

SEQ ID NO: 3824333 - DNA, 25 bp, Homo sapien
tgtaactgttcatcaggtatgctca

SEQ ID NO: 3824334 - DNA, 25 bp, Homo sapien
cgcaaatgagtgtaactgttcatca

SEQ ID NO: 3824335 - DNA, 25 bp, Homo sapien
ctttgtgtgatatgatgaggtatct

SEQ ID NO: 3824336 - DNA, 25 bp, Homo sapien
atatgatgaggtatctccaaggtca

SEQ ID NO: 3824337 - DNA, 25 bp, Homo sapien
tatgatgaggtatctccaaggtcac

SEQ ID NO: 3824338 - DNA, 25 bp, Homo sapien
tgtgtgatatgatgaggtatctcca

SEQ ID NO: 3824339 - DNA, 25 bp, Homo sapien
gttgactgaaatgcacagtagatac

SEQ ID NO: 3824340 - DNA, 25 bp, Homo sapien
ttgtaagataatgctggatggctgt

SEQ ID NO: 3824341 - DNA, 25 bp, Homo sapien
tcatcaaggaatattgtcgaacaca

SEQ ID NO: 3824342 - DNA, 25 bp, Homo sapien
tcgaacacaagctgtattgttgact

SEQ ID NO: 3824343 - DNA, 25 bp, Homo sapien
agtaaatccaaaacttcgacaagtg

SEQ ID NO: 3824344 - DNA, 25 bp, Homo sapien
ccagctgctgagcatagaattttga

SEQ ID NO: 3824345 - DNA, 25 bp, Homo sapien
tttgagtaaatccaaaacttcgaca

SEQ ID NO: 3824346 - DNA, 25 bp, Homo sapien
ccaaaacttcgacaagtgtttgaca

SEQ ID NO: 3824347 - DNA, 25 bp, Homo sapien
ggttcagcggatactgctcaggtga

SEQ ID NO: 3824348 - DNA, 25 bp, Homo sapien
tatatatgaggaataccacctcagc

SEQ ID NO: 3824349 - DNA, 25 bp, Homo sapien
gaacttagtcatgtcaccaaatgcc

SEQ ID NO: 3824350 - DNA, 25 bp, Homo sapien
gacaaccacagagtgggaggaaatc

SEQ ID NO: 3824351 - DNA, 25 bp, Homo sapien
tttgtacagttgcttcttcttattt

SEQ ID NO: 3824352 - DNA, 25 bp, Homo sapien
atggtttgtacagttgcttcttctt

SEQ ID NO: 3824353 - DNA, 25 bp, Homo sapien
cagttgcttcttcttatttctacaa

SEQ ID NO: 3824354 - DNA, 25 bp, Homo sapien
ggtttgtacagttgcttcttcttat

SEQ ID NO: 3824355 - DNA, 25 bp, Homo sapien
tgcctctggattggcagaagggtta

SEQ ID NO: 3824356 - DNA, 25 bp, Homo sapien
gagttcctctggaatattgtgcttg

SEQ ID NO: 3824357 - DNA, 25 bp, Homo sapien
ggattggcagaagggttaaactcca

SEQ ID NO: 3824358 - DNA, 25 bp, Homo sapien
tattgtgcttgcctctggattggca

SEQ ID NO: 3824359 - DNA, 25 bp, Homo sapien
tcctctgtaatattgtgcttgccct

SEQ ID NO: 3824360 - DNA, 25 bp, Homo sapien
ctgtaatattgtgcttgccctctgg

SEQ ID NO: 3824361 - DNA, 25 bp, Homo sapien
cctctgtaatattgtgcttgccctc

SEQ ID NO: 3824362 - DNA, 25 bp, Homo sapien
tgagagttcctctgtaatattgtgc

SEQ ID NO: 3824363 - DNA, 25 bp, Homo sapien
aaaccgagggtagatggcacctatc

SEQ ID NO: 3824364 - DNA, 25 bp, Homo sapien
accgagggtagatggcacctatcac

SEQ ID NO: 3824365 - DNA, 25 bp, Homo sapien
ggcaaaccgagggtagatggcacct

SEQ ID NO: 3824366 - DNA, 25 bp, Homo sapien
caaaccgagggtagatggcacctat

SEQ ID NO: 3824367 - DNA, 25 bp, Homo sapien
gccatgggcgctcctgccatcctgt

SEQ ID NO: 3824368 - DNA, 25 bp, Homo sapien
tctcagattcagagggacacaccga

SEQ ID NO: 3824369 - DNA, 25 bp, Homo sapien
gcatgtggaggtcctcaccaacttc

SEQ ID NO: 3824370 - DNA, 25 bp, Homo sapien
tgtggaggtcctcaccaacttcaac

SEQ ID NO: 3824371 - DNA, 25 bp, Homo sapien
ctagggtgcacacgacaggtcagta

SEQ ID NO: 3824372 - DNA, 25 bp, Homo sapien
tagggtgcacacgacaggtcagtat

SEQ ID NO: 3824373 - DNA, 25 bp, Homo sapien
tgcacacgacaggtcagtatgttcc

SEQ ID NO: 3824374 - DNA, 25 bp, Homo sapien
acacgacaggtcagtatgttcccca

SEQ ID NO: 3824375 - DNA, 25 bp, Homo sapien
gcacccggccggtatggtattttga

SEQ ID NO: 3824376 - DNA, 25 bp, Homo sapien
gagacaaactctccctctcattgcc

SEQ ID NO: 3824377 - DNA, 25 bp, Homo sapien
tatggtattttgataccagtaattt

SEQ ID NO: 3824378 - DNA, 25 bp, Homo sapien
cggtatggtattttgataccagtaa

SEQ ID NO: 3824379 - DNA, 25 bp, Homo sapien
ggcagatcataggtgaagttctgaa

SEQ ID NO: 3824380 - DNA, 25 bp, Homo sapien
tgtaatgtccgtaaaagaggctagt

SEQ ID NO: 3824381 - DNA, 25 bp, Homo sapien
gccagggaggcgattgtgcttaaca

SEQ ID NO: 3824382 - DNA, 25 bp, Homo sapien
attgtgcttaacaaatacgccaggg

SEQ ID NO: 3824383 - DNA, 25 bp, Homo sapien
tctttgcaatggtgaatcctggtcc

SEQ ID NO: 3824384 - DNA, 25 bp, Homo sapien
gaaagaggcccatccatgatactgt

SEQ ID NO: 3824385 - DNA, 25 bp, Homo sapien
tctaactcaggatacaagtgcccag

SEQ ID NO: 3824386 - DNA, 25 bp, Homo sapien
tggtccttatggagggccagatcaa

SEQ ID NO: 3824387 - DNA, 25 bp, Homo sapien
gagctcgtaccgcaagctgctgtgc

SEQ ID NO: 3824388 - DNA, 25 bp, Homo sapien
tgcggttagtgatgcagaagtccca

SEQ ID NO: 3824389 - DNA, 25 bp, Homo sapien
tgtgcttcagatccgccatgctgcg

SEQ ID NO: 3824390 - DNA, 25 bp, Homo sapien
gtcccagccggcaaatatcttgttg

SEQ ID NO: 3824391 - DNA, 25 bp, Homo sapien
gaggaccccaccacggacaaactca

SEQ ID NO: 3824392 - DNA, 25 bp, Homo sapien
gaccccaccacggacaaactcagga

SEQ ID NO: 3824393 - DNA, 25 bp, Homo sapien
tgaggaccccaccacggacaaactc

SEQ ID NO: 3824394 - DNA, 25 bp, Homo sapien
aggaccccaccacggacaaactcag

SEQ ID NO: 3824395 - DNA, 25 bp, Homo sapien
tcatgtgctcttgcgagaagacagt

SEQ ID NO: 3824396 - DNA, 25 bp, Homo sapien
aagcatgcccctaaaacagccagaa

SEQ ID NO: 3824397 - DNA, 25 bp, Homo sapien
gaagacagttgctacgtatattgca

SEQ ID NO: 3824398 - DNA, 25 bp, Homo sapien
aacaatacagttcaaaaacagtctc

SEQ ID NO: 3824399 - DNA, 25 bp, Homo sapien
tgtcagacggatctcaaagcctgga

SEQ ID NO: 3824400 - DNA, 25 bp, Homo sapien
tcatagcggatgatcttggcaaaga

SEQ ID NO: 3824401 - DNA, 25 bp, Homo sapien
ttggccagcgtgatcacaatagacg

SEQ ID NO: 3824402 - DNA, 25 bp, Homo sapien
cggtagatacaatatgaagaggttc

SEQ ID NO: 3824403 - DNA, 25 bp, Homo sapien
tttctggttgtagccgcaaaggtca

SEQ ID NO: 3824404 - DNA, 25 bp, Homo sapien
tgtgtcatcatcacaggatgtgatc

SEQ ID NO: 3824405 - DNA, 25 bp, Homo sapien
gcgtgaacaccaggacacatatggt

SEQ ID NO: 3824406 - DNA, 25 bp, Homo sapien
ggtggccagccgcataaagacacac

SEQ ID NO: 3824407 - DNA, 25 bp, Homo sapien
tcatcactagaacaagaaagcgaag

SEQ ID NO: 3824408 - DNA, 25 bp, Homo sapien
tctcttgaccatgacactgtattcc

SEQ ID NO: 3824409 - DNA, 25 bp, Homo sapien
tcaaacccatggcttcaaccgctgt

SEQ ID NO: 3824410 - DNA, 25 bp, Homo sapien
actgtattccagaaggacccaccca

SEQ ID NO: 3824411 - DNA, 25 bp, Homo sapien
ttctaggaaaatccacgaagagtgt

SEQ ID NO: 3824412 - DNA, 25 bp, Homo sapien
taggaaaatccacgaagagtgtcac

SEQ ID NO: 3824413 - DNA, 25 bp, Homo sapien
gatgaagtcgaagatcatcagcttg

SEQ ID NO: 3824414 - DNA, 25 bp, Homo sapien
tgatgatgaagtcgaagatcatcag

SEQ ID NO: 3824415 - DNA, 25 bp, Homo sapien
cagggagggagtttgaacccagatc

SEQ ID NO: 3824416 - DNA, 25 bp, Homo sapien
tgggcaactaatgaatgctgaggtc

SEQ ID NO: 3824417 - DNA, 25 bp, Homo sapien
aacccagatcgggagacaggtgtcc

SEQ ID NO: 3824418 - DNA, 25 bp, Homo sapien
tgctgaggtcaacagcctagagctg

SEQ ID NO: 3824419 - DNA, 25 bp, Homo sapien
cccaggacgttatcaggaatggcaa

SEQ ID NO: 3824420 - DNA, 25 bp, Homo sapien
tgagaaaaaggctccgatccagcag

SEQ ID NO: 3824421 - DNA, 25 bp, Homo sapien
gatccagcagatggtttgcccgtaa

SEQ ID NO: 3824422 - DNA, 25 bp, Homo sapien
tgcaagaggaacagtaggtcaccag

SEQ ID NO: 3824423 - DNA, 25 bp, Homo sapien
gctgattgtcagaggtattattgcc

SEQ ID NO: 3824424 - DNA, 25 bp, Homo sapien
aaattagaattggatgctctgaacg

SEQ ID NO: 3824425 - DNA, 25 bp, Homo sapien
tattattgccaaacacagcccgatc

SEQ ID NO: 3824426 - DNA, 25 bp, Homo sapien
cagcccgatcaacaacaccaacagg

SEQ ID NO: 3824427 - DNA, 25 bp, Homo sapien
cagaccaacgggctcagaaggagcg

SEQ ID NO: 3824428 - DNA, 25 bp, Homo sapien
aggacacagaccaacgggctcagaa

SEQ ID NO: 3824429 - DNA, 25 bp, Homo sapien
aaggagcgtgcagcacaggttgagt

SEQ ID NO: 3824430 - DNA, 25 bp, Homo sapien
ccaacgggctcagaaggagcgtgca

SEQ ID NO: 3824431 - DNA, 25 bp, Homo sapien
tgttgaagttggtgaacggcccaca

SEQ ID NO: 3824432 - DNA, 25 bp, Homo sapien
aaggcttcggatgtgacaccatgga

SEQ ID NO: 3824433 - DNA, 25 bp, Homo sapien
gcccacaggctttcgaggaagggat

SEQ ID NO: 3824434 - DNA, 25 bp, Homo sapien
aggaactgcaaaggcttcggatgtg

SEQ ID NO: 3824435 - DNA, 25 bp, Homo sapien
tgaccacccgtttgtgtgctccagc

SEQ ID NO: 3824436 - DNA, 25 bp, Homo sapien
ctccagctaaggcaatgaagtaaaa

SEQ ID NO: 3824437 - DNA, 25 bp, Homo sapien
gctccagctaaggcaatgaagtaaa

SEQ ID NO: 3824438 - DNA, 25 bp, Homo sapien
ggatgaccacccgtttgtgtgctcc

SEQ ID NO: 3824439 - DNA, 25 bp, Homo sapien
tgtcctgggtaaatgtccccagcca

SEQ ID NO: 3824440 - DNA, 25 bp, Homo sapien
aattaatgaagctggacgcggctgg

SEQ ID NO: 3824441 - DNA, 25 bp, Homo sapien
tgagagaaggctgcagtaatttcac

SEQ ID NO: 3824442 - DNA, 25 bp, Homo sapien
gaccctctggagctatgcttcctta

SEQ ID NO: 3824443 - DNA, 25 bp, Homo sapien
ttaggtagcacttgtcacgactttc

SEQ ID NO: 3824444 - DNA, 25 bp, Homo sapien
tgttagtttctggattaggtagcac

SEQ ID NO: 3824445 - DNA, 25 bp, Homo sapien
tctggattaggtagcacttgtcacg

SEQ ID NO: 3824446 - DNA, 25 bp, Homo sapien
ccctttgggcttctgttagtttctg

SEQ ID NO: 3824447 - DNA, 25 bp, Homo sapien
cactcatgggctggtctgattaaca

SEQ ID NO: 3824448 - DNA, 25 bp, Homo sapien
tgggttaggtaaacacagctgcaca

SEQ ID NO: 3824449 - DNA, 25 bp, Homo sapien
ccaggtagactctgtaggctcagca

SEQ ID NO: 3824450 - DNA, 25 bp, Homo sapien
tccccaggaaacgtgtggagccagt

SEQ ID NO: 3824451 - DNA, 25 bp, Homo sapien
tcaaaacctttgctgtaataccact

SEQ ID NO: 3824452 - DNA, 25 bp, Homo sapien
ggatgttgtagcactctcatgtaaa

SEQ ID NO: 3824453 - DNA, 25 bp, Homo sapien
tgatgaacccaaatactacttagtg

SEQ ID NO: 3824454 - DNA, 25 bp, Homo sapien
tgagtgtctgaatctggcgctcaaa

SEQ ID NO: 3824455 - DNA, 25 bp, Homo sapien
agcaaccacttcgttgaacggaact

SEQ ID NO: 3824456 - DNA, 25 bp, Homo sapien
cacttcgttgaacggaactggccaa

SEQ ID NO: 3824457 - DNA, 25 bp, Homo sapien
ggaactggccaatagtgcccttggc

SEQ ID NO: 3824458 - DNA, 25 bp, Homo sapien
ttgaacggaactggccaatagtgcc

SEQ ID NO: 3824459 - DNA, 25 bp, Homo sapien
gcccccgggcgcagccgccaaaggc

SEQ ID NO: 3824460 - DNA, 25 bp, Homo sapien
gcagccgccaaaggcggggagccgc

SEQ ID NO: 3824461 - DNA, 25 bp, Homo sapien
gggcgcagccgccaaaggcggggag

SEQ ID NO: 3824462 - DNA, 25 bp, Homo sapien
agccgccaaaggcggggagccgccg

SEQ ID NO: 3824463 - DNA, 25 bp, Homo sapien
caggggtgcaattgcgtcactcccc

SEQ ID NO: 3824464 - DNA, 25 bp, Homo sapien
tgtcctcctgtcactctcgccgcta

SEQ ID NO: 3824465 - DNA, 25 bp, Homo sapien
tcactgccgaaacaacccctgtcct

SEQ ID NO: 3824466 - DNA, 25 bp, Homo sapien
tgtcactctcgccgctaactacaga

SEQ ID NO: 3824467 - DNA, 25 bp, Homo sapien
gaatctgtatttctagcgagcgccc

SEQ ID NO: 3824468 - DNA, 25 bp, Homo sapien
tgccattaggcaaaaatcccgaaag

SEQ ID NO: 3824469 - DNA, 25 bp, Homo sapien
gcgcccgggctcatgacaattttct

SEQ ID NO: 3824470 - DNA, 25 bp, Homo sapien
ggccctgggcaaagactacaaagag

SEQ ID NO: 3824471 - DNA, 25 bp, Homo sapien
tctgacactggttcttcttccataa

SEQ ID NO: 3824472 - DNA, 25 bp, Homo sapien
ctgcgaaatctgacactggttcttc

SEQ ID NO: 3824473 - DNA, 25 bp, Homo sapien
cgaaatctgacactggttcttcttc

SEQ ID NO: 3824474 - DNA, 25 bp, Homo sapien
ctgacactggttcttcttccataag

SEQ ID NO: 3824475 - DNA, 25 bp, Homo sapien
ggtttgctccatattcgcctgcatg

SEQ ID NO: 3824476 - DNA, 25 bp, Homo sapien
gctgcccgactgatattgtctaaag

SEQ ID NO: 3824477 - DNA, 25 bp, Homo sapien
aatgactggcccgacgctggtccga

SEQ ID NO: 3824478 - DNA, 25 bp, Homo sapien
gattattcgatccacagctgcccga

SEQ ID NO: 3824479 - DNA, 25 bp, Homo sapien
ttggctgttgtgtaatttccttcca

SEQ ID NO: 3824480 - DNA, 25 bp, Homo sapien
gtaatttccttccagattactagaa

SEQ ID NO: 3824481 - DNA, 25 bp, Homo sapien
aaatcaggaaggcagaacattggct

SEQ ID NO: 3824482 - DNA, 25 bp, Homo sapien
gattactagaatagcatcatcttgt

SEQ ID NO: 3824483 - DNA, 25 bp, Homo sapien
tggccggaccctgaacgtaaccatc

SEQ ID NO: 3824484 - DNA, 25 bp, Homo sapien
ccatcaactcattgaactttttcaa

SEQ ID NO: 3824485 - DNA, 25 bp, Homo sapien
caaaccccagcacgttccacaaggg

SEQ ID NO: 3824486 - DNA, 25 bp, Homo sapien
tgaacgtaaccatcaactcattgaa

SEQ ID NO: 3824487 - DNA, 25 bp, Homo sapien
aggatttaatcatcctagatcccca

SEQ ID NO: 3824488 - DNA, 25 bp, Homo sapien
taatcatcctagatccccaagcttg

SEQ ID NO: 3824489 - DNA, 25 bp, Homo sapien
gatccccaagcttgcataagctctt

SEQ ID NO: 3824490 - DNA, 25 bp, Homo sapien
tcctagatccccaagcttgcataag

SEQ ID NO: 3824491 - DNA, 25 bp, Homo sapien
gttgtagtgatgtgctatgctctct

SEQ ID NO: 3824492 - DNA, 25 bp, Homo sapien
gatgtgctatgctctcttccaccgc

SEQ ID NO: 3824493 - DNA, 25 bp, Homo sapien
cggtgcaggccatggcaccttcctt

SEQ ID NO: 3824494 - DNA, 25 bp, Homo sapien
tccatcagcgtcctgatctggttgt

SEQ ID NO: 3824495 - DNA, 25 bp, Homo sapien
gagcagccccgttctagagcacgga

SEQ ID NO: 3824496 - DNA, 25 bp, Homo sapien
gccccgttctagagcacggataaat

SEQ ID NO: 3824497 - DNA, 25 bp, Homo sapien
cccgttctagagcacggataaatac

SEQ ID NO: 3824498 - DNA, 25 bp, Homo sapien
gcagccccgttctagagcacggata

SEQ ID NO: 3824499 - DNA, 25 bp, Homo sapien
caattctgcatcatggtcgaggcct

SEQ ID NO: 3824500 - DNA, 25 bp, Homo sapien
gctcttcatcccgaaatttctttat

SEQ ID NO: 3824501 - DNA, 25 bp, Homo sapien
catggtcgaggcctatgtcatggtg

SEQ ID NO: 3824502 - DNA, 25 bp, Homo sapien
tatgtcatggtgctcaagctcttca

SEQ ID NO: 3824503 - DNA, 25 bp, Homo sapien
gcagaacaggtaacagtagggccct

SEQ ID NO: 3824504 - DNA, 25 bp, Homo sapien
agcagaacaggtaacagtagggccc

SEQ ID NO: 3824505 - DNA, 25 bp, Homo sapien
cagaacaggtaacagtagggcccta

SEQ ID NO: 3824506 - DNA, 25 bp, Homo sapien
taatgctcttcaggacggcataggc

SEQ ID NO: 3824507 - DNA, 25 bp, Homo sapien
tgcatccggcctggataatgctctt

SEQ ID NO: 3824508 - DNA, 25 bp, Homo sapien
tctgataaatatatcgccactctgc

SEQ ID NO: 3824509 - DNA, 25 bp, Homo sapien
tcttcaggacggcataggctggagc

SEQ ID NO: 3824510 - DNA, 25 bp, Homo sapien
caacgataactgtacacctgtttct

SEQ ID NO: 3824511 - DNA, 25 bp, Homo sapien
ttatagacaggcaaaactggacaca

SEQ ID NO: 3824512 - DNA, 25 bp, Homo sapien
atcttttatagacaggcaaaactgg

SEQ ID NO: 3824513 - DNA, 25 bp, Homo sapien
tgtacaaaagtacaacgataactgt

SEQ ID NO: 3824514 - DNA, 25 bp, Homo sapien
tgtaacttgaacaaggctggtgacc

SEQ ID NO: 3824515 - DNA, 25 bp, Homo sapien
caaggcccagcttcgtttgctgtaa

SEQ ID NO: 3824516 - DNA, 25 bp, Homo sapien
ttgtgacccggcctggacaaaagag

SEQ ID NO: 3824517 - DNA, 25 bp, Homo sapien
ggccaatctcaaatactctcatgtt

SEQ ID NO: 3824518 - DNA, 25 bp, Homo sapien
acatacagactgtagcactctccca

SEQ ID NO: 3824519 - DNA, 25 bp, Homo sapien
agacatacagactgtagcactctcc

SEQ ID NO: 3824520 - DNA, 25 bp, Homo sapien
caaaacagaaacgatgatctttgac

SEQ ID NO: 3824521 - DNA, 25 bp, Homo sapien
attatcacccacaattcaaaacaga

SEQ ID NO: 3824522 - DNA, 25 bp, Homo sapien
aggtatctctctagggcctttcata

SEQ ID NO: 3824523 - DNA, 25 bp, Homo sapien
agaggatgaggtatctctctagggc

SEQ ID NO: 3824524 - DNA, 25 bp, Homo sapien
tggagaggatgaggtatctctctag

SEQ ID NO: 3824525 - DNA, 25 bp, Homo sapien
ggatgaggtatctctctagggcctt

SEQ ID NO: 3824526 - DNA, 25 bp, Homo sapien
aagtctcatacttccccttgaagtc

SEQ ID NO: 3824527 - DNA, 25 bp, Homo sapien
gagaagtctcatacttccccttgaa

SEQ ID NO: 3824528 - DNA, 25 bp, Homo sapien
gaagtctcatacttccccttgaagt

SEQ ID NO: 3824529 - DNA, 25 bp, Homo sapien
agagaagtctcatacttccccttga

SEQ ID NO: 3824530 - DNA, 25 bp, Homo sapien
gcactgggtgggaagcaaattccta

SEQ ID NO: 3824531 - DNA, 25 bp, Homo sapien
tagtacatcctttgatggaagcaac

SEQ ID NO: 3824532 - DNA, 25 bp, Homo sapien
ggcaagtcctgccaagtcatcaggt

SEQ ID NO: 3824533 - DNA, 25 bp, Homo sapien
ggacattctaatgggcagccagaga

SEQ ID NO: 3824534 - DNA, 25 bp, Homo sapien
gactacgattgtctgtgaatcacaa

SEQ ID NO: 3824535 - DNA, 25 bp, Homo sapien
gacagagtcaaatgtcatccttgca

SEQ ID NO: 3824536 - DNA, 25 bp, Homo sapien
gggaagcctactgaacatattaaag

SEQ ID NO: 3824537 - DNA, 25 bp, Homo sapien
cctctatggcatccaaaagttaggg

SEQ ID NO: 3824538 - DNA, 25 bp, Homo sapien
taggagccctgtacaaggactgtgt

SEQ ID NO: 3824539 - DNA, 25 bp, Homo sapien
ggtttgtaccctccaatacctatga

SEQ ID NO: 3824540 - DNA, 25 bp, Homo sapien
caaatcataataggattgtttgcaa

SEQ ID NO: 3824541 - DNA, 25 bp, Homo sapien
gcacacccttctatcagaaactggt

SEQ ID NO: 3824542 - DNA, 25 bp, Homo sapien
ttctatattaaccatcccttgtttc

SEQ ID NO: 3824543 - DNA, 25 bp, Homo sapien
agatttctatattaaccatcccttg

SEQ ID NO: 3824544 - DNA, 25 bp, Homo sapien
tccgcctcctctagaatattgatcc

SEQ ID NO: 3824545 - DNA, 25 bp, Homo sapien
cctccgcctcctctagaatattgat

SEQ ID NO: 3824546 - DNA, 25 bp, Homo sapien
ggtatattgccattttgttcatcag

SEQ ID NO: 3824547 - DNA, 25 bp, Homo sapien
tcacattgttgttcaataatcaacg

SEQ ID NO: 3824548 - DNA, 25 bp, Homo sapien
ctctggacccaagcataatattttt

SEQ ID NO: 3824549 - DNA, 25 bp, Homo sapien
gaatacattccattgacattaagta

SEQ ID NO: 3824550 - DNA, 25 bp, Homo sapien
gcagttactccctatttctccccat

SEQ ID NO: 3824551 - DNA, 25 bp, Homo sapien
gactaagacaatttacatgccatac

SEQ ID NO: 3824552 - DNA, 25 bp, Homo sapien
tgtgcaactatcaccgattctagaa

SEQ ID NO: 3824553 - DNA, 25 bp, Homo sapien
taaatttaagtataggttgtgcaac

SEQ ID NO: 3824554 - DNA, 25 bp, Homo sapien
tcctgctggaagagcgagttctcgc

SEQ ID NO: 3824555 - DNA, 25 bp, Homo sapien
tatgggactaagactcctggctgca

SEQ ID NO: 3824556 - DNA, 25 bp, Homo sapien
ggcaagaaatagcacccgagtctca

SEQ ID NO: 3824557 - DNA, 25 bp, Homo sapien
tttggatgatcgaggcggatccctc

SEQ ID NO: 3824558 - DNA, 25 bp, Homo sapien
taggacacccgagacgcatggacgg

SEQ ID NO: 3824559 - DNA, 25 bp, Homo sapien
aaaatgtatcctccgggataggaca

SEQ ID NO: 3824560 - DNA, 25 bp, Homo sapien
ccgggataggacacccgagacgcat

SEQ ID NO: 3824561 - DNA, 25 bp, Homo sapien
tatcctccgggataggacacccgag

SEQ ID NO: 3824562 - DNA, 25 bp, Homo sapien
ggctcccctagatagagtctaatcg

SEQ ID NO: 3824563 - DNA, 25 bp, Homo sapien
tcccctagatagagtctaatcgtcc

SEQ ID NO: 3824564 - DNA, 25 bp, Homo sapien
tagatagagtctaatcgtccccgtt

SEQ ID NO: 3824565 - DNA, 25 bp, Homo sapien
cacatggctcccctagatagagtct

SEQ ID NO: 3824566 - DNA, 25 bp, Homo sapien
ttaagtgcagggaagaaagtatcat

SEQ ID NO: 3824567 - DNA, 25 bp, Homo sapien
aatctcgggtttattctgactggca

SEQ ID NO: 3824568 - DNA, 25 bp, Homo sapien
ggcatgcccagttaaaaatccaggg

SEQ ID NO: 3824569 - DNA, 25 bp, Homo sapien
aaagtatcataaagagaaattctca

SEQ ID NO: 3824570 - DNA, 25 bp, Homo sapien
aaagccgccagttctaaagcctgta

SEQ ID NO: 3824571 - DNA, 25 bp, Homo sapien
ccgccagttctaaagcctgtagtcc

SEQ ID NO: 3824572 - DNA, 25 bp, Homo sapien
aagccgccagttctaaagcctgtag

SEQ ID NO: 3824573 - DNA, 25 bp, Homo sapien
agtccaaggttaaggggccgctctg

SEQ ID NO: 3824574 - DNA, 25 bp, Homo sapien
tggctcttggacacagaggtccttc

SEQ ID NO: 3824575 - DNA, 25 bp, Homo sapien
ctggctcttggacacagaggtcctt

SEQ ID NO: 3824576 - DNA, 25 bp, Homo sapien
ggctcttggacacagaggtccttca

SEQ ID NO: 3824577 - DNA, 25 bp, Homo sapien
gctcttggacacagaggtccttcat

SEQ ID NO: 3824578 - DNA, 25 bp, Homo sapien
gaggaaaggatcacaaagactagag

SEQ ID NO: 3824579 - DNA, 25 bp, Homo sapien
gagatgctgccaggtgtcttgtcat

SEQ ID NO: 3824580 - DNA, 25 bp, Homo sapien
gatagaaatcggcttcactggaact

SEQ ID NO: 3824581 - DNA, 25 bp, Homo sapien
gaggccatgtgcaatttactccaga

SEQ ID NO: 3824582 - DNA, 25 bp, Homo sapien
aacgggaccaaagaaactcagatgt

SEQ ID NO: 3824583 - DNA, 25 bp, Homo sapien
caacgggaccaaagaaactcagatg

SEQ ID NO: 3824584 - DNA, 25 bp, Homo sapien
gccaacgggaccaaagaaactcaga

SEQ ID NO: 3824585 - DNA, 25 bp, Homo sapien
ccaacgggaccaaagaaactcagat

SEQ ID NO: 3824586 - DNA, 25 bp, Homo sapien
ccgacttcccgctgacattgtctgg

SEQ ID NO: 3824587 - DNA, 25 bp, Homo sapien
catggtgagaattttgacagtcatt

SEQ ID NO: 3824588 - DNA, 25 bp, Homo sapien
tcattttatggacgccgacttcccg

SEQ ID NO: 3824589 - DNA, 25 bp, Homo sapien
tggtgagaattttgacagtcattaa

SEQ ID NO: 3824590 - DNA, 25 bp, Homo sapien
tcacactcattacaccttctttgct

SEQ ID NO: 3824591 - DNA, 25 bp, Homo sapien
ttattcacactcattacaccttctt

SEQ ID NO: 3824592 - DNA, 25 bp, Homo sapien
attcacactcattacaccttctttg

SEQ ID NO: 3824593 - DNA, 25 bp, Homo sapien
acactcattacaccttctttgctgg

SEQ ID NO: 3824594 - DNA, 25 bp, Homo sapien
tggagccgagcgtggagctggcgag

SEQ ID NO: 3824595 - DNA, 25 bp, Homo sapien
ccgcgcctgaccctgttactcggac

SEQ ID NO: 3824596 - DNA, 25 bp, Homo sapien
aggaaatgccggagtctggagccga

SEQ ID NO: 3824597 - DNA, 25 bp, Homo sapien
tggagctggcgagccgggtcggccc

SEQ ID NO: 3824598 - DNA, 25 bp, Homo sapien
cttcccgaacgcaggcccgagggag

SEQ ID NO: 3824599 - DNA, 25 bp, Homo sapien
tccgcggcggcttcccgaacgcagg

SEQ ID NO: 3824600 - DNA, 25 bp, Homo sapien
gcccagcatgcgcacagcgcccggg

SEQ ID NO: 3824601 - DNA, 25 bp, Homo sapien
aagtgttccttccagctgcggcccg

SEQ ID NO: 3824602 - DNA, 25 bp, Homo sapien
ccagaagacgcgtagattgagggtg

SEQ ID NO: 3824603 - DNA, 25 bp, Homo sapien
ttaagcaacgggaagccgccatcca

SEQ ID NO: 3824604 - DNA, 25 bp, Homo sapien
tagattgagggtgtagtgcaccgac

SEQ ID NO: 3824605 - DNA, 25 bp, Homo sapien
acaccagggcggtgcacaggccggt

SEQ ID NO: 3824606 - DNA, 25 bp, Homo sapien
cagatcgcgcagagccttaagcaac

SEQ ID NO: 3824607 - DNA, 25 bp, Homo sapien
aaagggtttgcagtcccgaagccag

SEQ ID NO: 3824608 - DNA, 25 bp, Homo sapien
catatgaggataggatgcgtcccca

SEQ ID NO: 3824609 - DNA, 25 bp, Homo sapien
tttatgttgctcgtaggcgctgccc

SEQ ID NO: 3824610 - DNA, 25 bp, Homo sapien
ggcagcctttgccacgtggacagca

SEQ ID NO: 3824611 - DNA, 25 bp, Homo sapien
gcggcttccctcagtgccttgggca

SEQ ID NO: 3824612 - DNA, 25 bp, Homo sapien
gctgctgcaagttcccgggcgtgcc

SEQ ID NO: 3824613 - DNA, 25 bp, Homo sapien
tgcccgtcgaaagcggccaggaggt

SEQ ID NO: 3824614 - DNA, 25 bp, Homo sapien
cagatgcaatgcttggtgctagcaa

SEQ ID NO: 3824615 - DNA, 25 bp, Homo sapien
catattatactggactgtgaagcga

SEQ ID NO: 3824616 - DNA, 25 bp, Homo sapien
gagagatctgtgtctaaaaaccgac

SEQ ID NO: 3824617 - DNA, 25 bp, Homo sapien
gacagaaggaactttccctgcagct

SEQ ID NO: 3824618 - DNA, 25 bp, Homo sapien
taccaaagggtgtctcgccacaaaa

SEQ ID NO: 3824619 - DNA, 25 bp, Homo sapien
taaaggcacgagctaggataccact

SEQ ID NO: 3824620 - DNA, 25 bp, Homo sapien
gcgacccctggttggaaatagcact

SEQ ID NO: 3824621 - DNA, 25 bp, Homo sapien
ttaactacgtaaggcagtggtcgca

SEQ ID NO: 3824622 - DNA, 25 bp, Homo sapien
gatagaaacattcaggggtgaagtc

SEQ ID NO: 3824623 - DNA, 25 bp, Homo sapien
cagaacgacgcttttaggccaggtg

SEQ ID NO: 3824624 - DNA, 25 bp, Homo sapien
tgaagtctgatcagaacgacgcttt

SEQ ID NO: 3824625 - DNA, 25 bp, Homo sapien
tctgatcagaacgacgcttttaggc

SEQ ID NO: 3824626 - DNA, 25 bp, Homo sapien
gtcagaaaatgatagaggccggccg

SEQ ID NO: 3824627 - DNA, 25 bp, Homo sapien
cgaatgccacgatgataacactgaa

SEQ ID NO: 3824628 - DNA, 25 bp, Homo sapien
tggaacaaaaccgacgctatgcctg

SEQ ID NO: 3824629 - DNA, 25 bp, Homo sapien
taagtcacgcaactgaatcaaggca

SEQ ID NO: 3824630 - DNA, 25 bp, Homo sapien
atgacccacatgattcaaagtgcaa

SEQ ID NO: 3824631 - DNA, 25 bp, Homo sapien
aaggtccccaaatgacccacatgat

SEQ ID NO: 3824632 - DNA, 25 bp, Homo sapien
cagttgaggcttgtgcaaggaacta

SEQ ID NO: 3824633 - DNA, 25 bp, Homo sapien
ttgtgcaaggaactacaagccagca

SEQ ID NO: 3824634 - DNA, 25 bp, Homo sapien
tcaaagcagttgaggcttgtgcaag

SEQ ID NO: 3824635 - DNA, 25 bp, Homo sapien
aaggaactacaagccagcacaggca

SEQ ID NO: 3824636 - DNA, 25 bp, Homo sapien
tcagtggtcaggtctattcgggcac

SEQ ID NO: 3824637 - DNA, 25 bp, Homo sapien
tcaaagaaacttacagctgggcgcg

SEQ ID NO: 3824638 - DNA, 25 bp, Homo sapien
gccgttcacatggtagcagtggcct

SEQ ID NO: 3824639 - DNA, 25 bp, Homo sapien
gagtgtttccatcagtcagtggtca

SEQ ID NO: 3824640 - DNA, 25 bp, Homo sapien
gaggctgtccttaggttcacctcca

SEQ ID NO: 3824641 - DNA, 25 bp, Homo sapien
aatgtgaggagtgttgtaagcccct

SEQ ID NO: 3824642 - DNA, 25 bp, Homo sapien
gagttcagcaccagtccggggtcca

SEQ ID NO: 3824643 - DNA, 25 bp, Homo sapien
ctcatctgggtctggaatgtgagga

SEQ ID NO: 3824644 - DNA, 25 bp, Homo sapien
tcctaccagacatctcttcatcttg

SEQ ID NO: 3824645 - DNA, 25 bp, Homo sapien
agacatctcttcatcttgcatgctg

SEQ ID NO: 3824646 - DNA, 25 bp, Homo sapien
taccagacatctcttcatcttgcat

SEQ ID NO: 3824647 - DNA, 25 bp, Homo sapien
tgcctcctaccagacatctcttcat

SEQ ID NO: 3824648 - DNA, 25 bp, Homo sapien
ccggggcagctgcggggactgcagc

SEQ ID NO: 3824649 - DNA, 25 bp, Homo sapien
gcccggggcagctgcggggactgca

SEQ ID NO: 3824650 - DNA, 25 bp, Homo sapien
ggggcagctgcggggactgcagcga

SEQ ID NO: 3824651 - DNA, 25 bp, Homo sapien
gggcagctgcggggactgcagcgac

SEQ ID NO: 3824652 - DNA, 25 bp, Homo sapien
ccggttcggagatatcgggcgccca

SEQ ID NO: 3824653 - DNA, 25 bp, Homo sapien
cgcctccccggttcggagatatcgg

SEQ ID NO: 3824654 - DNA, 25 bp, Homo sapien
ctgtcccgtgctccccaccgaggcg

SEQ ID NO: 3824655 - DNA, 25 bp, Homo sapien
ctcggcctccctcgctgtcccgtgc

SEQ ID NO: 3824656 - DNA, 25 bp, Homo sapien
ggcgtggctgatgagcggcgcccgc

SEQ ID NO: 3824657 - DNA, 25 bp, Homo sapien
tgactggcgtggctgatgagcggcg

SEQ ID NO: 3824658 - DNA, 25 bp, Homo sapien
gactggcgtggctgatgagcggcgc

SEQ ID NO: 3824659 - DNA, 25 bp, Homo sapien
ctggcgtggctgatgagcggcgccc

SEQ ID NO: 3824660 - DNA, 25 bp, Homo sapien
actttgccctcgccaacagcggagg

SEQ ID NO: 3824661 - DNA, 25 bp, Homo sapien
cgccgccacggccactttgccctcg

SEQ ID NO: 3824662 - DNA, 25 bp, Homo sapien
ccgcgcgcactcactccggcccggg

SEQ ID NO: 3824663 - DNA, 25 bp, Homo sapien
gccaacagcggagggggaagaaagc

SEQ ID NO: 3824664 - DNA, 25 bp, Homo sapien
aaggtgttgctattttcagggctgc

SEQ ID NO: 3824665 - DNA, 25 bp, Homo sapien
gaaatagccatgtagccaacccaaa

SEQ ID NO: 3824666 - DNA, 25 bp, Homo sapien
gggagctgacttcctaacatcctaa

SEQ ID NO: 3824667 - DNA, 25 bp, Homo sapien
tcagagcgggcggatagatagtcat

SEQ ID NO: 3824668 - DNA, 25 bp, Homo sapien
gcaacagctggactcgtagcacttc

SEQ ID NO: 3824669 - DNA, 25 bp, Homo sapien
acagctggactcgtagcacttctga

SEQ ID NO: 3824670 - DNA, 25 bp, Homo sapien
tggcaacagctggactcgtagcact

SEQ ID NO: 3824671 - DNA, 25 bp, Homo sapien
aacagctggactcgtagcacttctg

SEQ ID NO: 3824672 - DNA, 25 bp, Homo sapien
cagggaggggtctgagcagggaaag

SEQ ID NO: 3824673 - DNA, 25 bp, Homo sapien
aaggtcccagaatttcaacttcatc

SEQ ID NO: 3824674 - DNA, 25 bp, Homo sapien
ggggtctgagcagggaaaggtccca

SEQ ID NO: 3824675 - DNA, 25 bp, Homo sapien
gaaaggtcccagaatttcaacttca

SEQ ID NO: 3824676 - DNA, 25 bp, Homo sapien
aagggaagaggtctcagtagctgtc

SEQ ID NO: 3824677 - DNA, 25 bp, Homo sapien
gttaagacccacgatgaaaccgctc

SEQ ID NO: 3824678 - DNA, 25 bp, Homo sapien
cagtgtggtgtccttaaactctcaa

SEQ ID NO: 3824679 - DNA, 25 bp, Homo sapien
caacaacgtcttgctttttgcacaa

SEQ ID NO: 3824680 - DNA, 25 bp, Homo sapien
cgtgtggacagagtcaccatccttg

SEQ ID NO: 3824681 - DNA, 25 bp, Homo sapien
gaaatcctccgcgtcaggctgtatg

SEQ ID NO: 3824682 - DNA, 25 bp, Homo sapien
caggctgtatgtagacttggatgtg

SEQ ID NO: 3824683 - DNA, 25 bp, Homo sapien
tgaggacgagcgtcttccatccggg

SEQ ID NO: 3824684 - DNA, 25 bp, Homo sapien
gctgagaacgccaaactcgatgggt

SEQ ID NO: 3824685 - DNA, 25 bp, Homo sapien
cacagtggcgggagaacttatcaaa

SEQ ID NO: 3824686 - DNA, 25 bp, Homo sapien
tataggtccgtctgagcaccgaagg

SEQ ID NO: 3824687 - DNA, 25 bp, Homo sapien
tgtagcgctcctcaaacacgggctt

SEQ ID NO: 3824688 - DNA, 25 bp, Homo sapien
tcttattcatctgcattgcaccttc

SEQ ID NO: 3824689 - DNA, 25 bp, Homo sapien
aatgttcttattcatctgcattgca

SEQ ID NO: 3824690 - DNA, 25 bp, Homo sapien
tagccaatgttcttattcatctgca

SEQ ID NO: 3824691 - DNA, 25 bp, Homo sapien
ttagccaatgttcttattcatctgc

SEQ ID NO: 3824692 - DNA, 25 bp, Homo sapien
gtttcctgttgaccccagaacacgc

SEQ ID NO: 3824693 - DNA, 25 bp, Homo sapien
ggtgtttcctgttgaccccagaaca

SEQ ID NO: 3824694 - DNA, 25 bp, Homo sapien
ctctctgtgatttgtgagaggcgga

SEQ ID NO: 3824695 - DNA, 25 bp, Homo sapien
tgcagcattcacaatcctccctact

SEQ ID NO: 3824696 - DNA, 25 bp, Homo sapien
gatgtctatggggtatttactctgc

SEQ ID NO: 3824697 - DNA, 25 bp, Homo sapien
tatggggtatttactctgccccagg

SEQ ID NO: 3824698 - DNA, 25 bp, Homo sapien
atgctgatgtctatggggtatttac

SEQ ID NO: 3824699 - DNA, 25 bp, Homo sapien
tctatggggtatttactctgcccca

SEQ ID NO: 3824700 - DNA, 25 bp, Homo sapien
gtccactactatattcacagcacca

SEQ ID NO: 3824701 - DNA, 25 bp, Homo sapien
aatccaagatcaagcagtgcagccc

SEQ ID NO: 3824702 - DNA, 25 bp, Homo sapien
ggttgtcagcacgatgttccacccc

SEQ ID NO: 3824703 - DNA, 25 bp, Homo sapien
ggtgacaggcccacttctacctcgt

SEQ ID NO: 3824704 - DNA, 25 bp, Homo sapien
ccataaaggcaaagaaagtgcccat

SEQ ID NO: 3824705 - DNA, 25 bp, Homo sapien
tttctccataaaggcaaagaaagtg

SEQ ID NO: 3824706 - DNA, 25 bp, Homo sapien
tccataaaggcaaagaaagtgccca

SEQ ID NO: 3824707 - DNA, 25 bp, Homo sapien
tctccataaaggcaaagaaagtgcc

SEQ ID NO: 3824708 - DNA, 25 bp, Homo sapien
gaagaagttgcttggctcgaatgac

SEQ ID NO: 3824709 - DNA, 25 bp, Homo sapien
tgcttggctcgaatgacatcaacat

SEQ ID NO: 3824710 - DNA, 25 bp, Homo sapien
tcaacattcagtctgccagcacttg

SEQ ID NO: 3824711 - DNA, 25 bp, Homo sapien
gggagataattcagtgacagaagca

SEQ ID NO: 3824712 - DNA, 25 bp, Homo sapien
gggaactttgaagctgaaggattca

SEQ ID NO: 3824713 - DNA, 25 bp, Homo sapien
tcacaagtttgagtccatgcaccag

SEQ ID NO: 3824714 - DNA, 25 bp, Homo sapien
tgtgccccttaagaaggacgtcttc

SEQ ID NO: 3824715 - DNA, 25 bp, Homo sapien
tgtagaaaggatcaattgtgcccct

SEQ ID NO: 3824716 - DNA, 25 bp, Homo sapien
tattatagggctctatgagtcctgc

SEQ ID NO: 3824717 - DNA, 25 bp, Homo sapien
tgagtcctgccccagttcatagatg

SEQ ID NO: 3824718 - DNA, 25 bp, Homo sapien
aagacctcagttattatgtggcagt

SEQ ID NO: 3824719 - DNA, 25 bp, Homo sapien
gaggaaatttggctcaagtccacat

SEQ ID NO: 3824720 - DNA, 25 bp, Homo sapien
gagagtacaggacttccctgacagc

SEQ ID NO: 3824721 - DNA, 25 bp, Homo sapien
atggagagtacaggacttccctgac

SEQ ID NO: 3824722 - DNA, 25 bp, Homo sapien
gagtacaggacttccctgacagcat

SEQ ID NO: 3824723 - DNA, 25 bp, Homo sapien
ggagagtacaggacttccctgacag

SEQ ID NO: 3824724 - DNA, 25 bp, Homo sapien
tgtgttgctatcttgggcggtgaaa

SEQ ID NO: 3824725 - DNA, 25 bp, Homo sapien
gctgcagaaaccacctgatagaaaa

SEQ ID NO: 3824726 - DNA, 25 bp, Homo sapien
ccagctccactttactttggttcag

SEQ ID NO: 3824727 - DNA, 25 bp, Homo sapien
ggaaaacaagtgttcagaaagtcca

SEQ ID NO: 3824728 - DNA, 25 bp, Homo sapien
ttagggagtcaaacaatgtgcaggg

SEQ ID NO: 3824729 - DNA, 25 bp, Homo sapien
cgtacagacagggttagggagtcaa

SEQ ID NO: 3824730 - DNA, 25 bp, Homo sapien
agtccctgagtaatactaacgtaca

SEQ ID NO: 3824731 - DNA, 25 bp, Homo sapien
tcagtttatctgttctgggaacggg

SEQ ID NO: 3824732 - DNA, 25 bp, Homo sapien
gattcaattagctgatttgatgcta

SEQ ID NO: 3824733 - DNA, 25 bp, Homo sapien
cagattcaattagctgatttgatgc

SEQ ID NO: 3824734 - DNA, 25 bp, Homo sapien
tcaattagctgatttgatgctacag

SEQ ID NO: 3824735 - DNA, 25 bp, Homo sapien
cagcagattcaattagctgatttga

SEQ ID NO: 3824736 - DNA, 25 bp, Homo sapien
cagtgactccaggttatcccaatga

SEQ ID NO: 3824737 - DNA, 25 bp, Homo sapien
acgacctggatgaaagtatggagcc

SEQ ID NO: 3824738 - DNA, 25 bp, Homo sapien
caaaaagaggacttggtgaatctgc

SEQ ID NO: 3824739 - DNA, 25 bp, Homo sapien
gagtgagcaagacaagacgacctgg

SEQ ID NO: 3824740 - DNA, 25 bp, Homo sapien
gagggtatccaaggactgataccat

SEQ ID NO: 3824741 - DNA, 25 bp, Homo sapien
cagttcgcaggctggtatggggctg

SEQ ID NO: 3824742 - DNA, 25 bp, Homo sapien
atccaaggactgataccatgagctg

SEQ ID NO: 3824743 - DNA, 25 bp, Homo sapien
gtatccaaggactgataccatgagc

SEQ ID NO: 3824744 - DNA, 25 bp, Homo sapien
tgaatatatggcaggaaaggtcagg

SEQ ID NO: 3824745 - DNA, 25 bp, Homo sapien
gagtactggtcacatgggatcgtta

SEQ ID NO: 3824746 - DNA, 25 bp, Homo sapien
gggaagtaactgacatgggctatga

SEQ ID NO: 3824747 - DNA, 25 bp, Homo sapien
tcatgaattgatgcacctttctgta

SEQ ID NO: 3824748 - DNA, 25 bp, Homo sapien
ctgggtggcactggttttcaaatgc

SEQ ID NO: 3824749 - DNA, 25 bp, Homo sapien
tcatgtgcagtcagcttagatgcag

SEQ ID NO: 3824750 - DNA, 25 bp, Homo sapien
gctccccgagtgaatctcatgtgca

SEQ ID NO: 3824751 - DNA, 25 bp, Homo sapien
aatatgagttgactggtggcttagc

SEQ ID NO: 3824752 - DNA, 25 bp, Homo sapien
gaagttaagaggttgagtgctcaaa

SEQ ID NO: 3824753 - DNA, 25 bp, Homo sapien
gaaagtcccgtgaaaatcctcataa

SEQ ID NO: 3824754 - DNA, 25 bp, Homo sapien
ccagcacgaggcatagtagaaattg

SEQ ID NO: 3824755 - DNA, 25 bp, Homo sapien
ctcaaccagcatataagggaaaagg

SEQ ID NO: 3824756 - DNA, 25 bp, Homo sapien
accaattgccagtctttgaatccac

SEQ ID NO: 3824757 - DNA, 25 bp, Homo sapien
gtaatttagacattgatttcaggtc

SEQ ID NO: 3824758 - DNA, 25 bp, Homo sapien
cctgctatctagaggctttatctgc

SEQ ID NO: 3824759 - DNA, 25 bp, Homo sapien
atctggtaagaaacacttaccatct

SEQ ID NO: 3824760 - DNA, 25 bp, Homo sapien
cagcttgtctgtgctaactgtgatt

SEQ ID NO: 3824761 - DNA, 25 bp, Homo sapien
tggacctctgcaagctacctctgca

SEQ ID NO: 3824762 - DNA, 25 bp, Homo sapien
taactgtgatttatggtgaggacct

SEQ ID NO: 3824763 - DNA, 25 bp, Homo sapien
ttgggccactcaacattagctggac

SEQ ID NO: 3824764 - DNA, 25 bp, Homo sapien
tgatagctaattggcacagggctcc

SEQ ID NO: 3824765 - DNA, 25 bp, Homo sapien
cctgcaccagggcattgtttataag

SEQ ID NO: 3824766 - DNA, 25 bp, Homo sapien
gcactgaatcgtatacaccaaaagg

SEQ ID NO: 3824767 - DNA, 25 bp, Homo sapien
gcaagactgtccctgagggagtgta

SEQ ID NO: 3824768 - DNA, 25 bp, Homo sapien
gacagggttttgccacattgggcag

SEQ ID NO: 3824769 - DNA, 25 bp, Homo sapien
cagggttttgccacattgggcaggc

SEQ ID NO: 3824770 - DNA, 25 bp, Homo sapien
acagggttttgccacattgggcagg

SEQ ID NO: 3824771 - DNA, 25 bp, Homo sapien
caactgcaaacatgggggtcatcgt

SEQ ID NO: 3824772 - DNA, 25 bp, Homo sapien
acatgggggtcatcgtttagggcac

SEQ ID NO: 3824773 - DNA, 25 bp, Homo sapien
gaggccattagtctacacatttgtc

SEQ ID NO: 3824774 - DNA, 25 bp, Homo sapien
gagaagacaagaggccattagtcta

SEQ ID NO: 3824775 - DNA, 25 bp, Homo sapien
gacgatcctcccgatgaagtcattg

SEQ ID NO: 3824776 - DNA, 25 bp, Homo sapien
ggtgcgtgttgagcatgcgcctcca

SEQ ID NO: 3824777 - DNA, 25 bp, Homo sapien
aagagtactggccaatgacgatcct

SEQ ID NO: 3824778 - DNA, 25 bp, Homo sapien
tgcgcctccagtggttggtctcaga

SEQ ID NO: 3824779 - DNA, 25 bp, Homo sapien
tgttcagaagttacccagtaggtgt

SEQ ID NO: 3824780 - DNA, 25 bp, Homo sapien
cggaaagttcctaggcctcactcaa

SEQ ID NO: 3824781 - DNA, 25 bp, Homo sapien
acacgtgttcgcctgtgagggcaca

SEQ ID NO: 3824782 - DNA, 25 bp, Homo sapien
caggagtattgacaagagcaggcac

SEQ ID NO: 3824783 - DNA, 25 bp, Homo sapien
ttcaataaatagctccccatcacac

SEQ ID NO: 3824784 - DNA, 25 bp, Homo sapien
tgtgttcatgaagaaaaagataact

SEQ ID NO: 3824785 - DNA, 25 bp, Homo sapien
ttcatgaagaaaaagataactcgaa

SEQ ID NO: 3824786 - DNA, 25 bp, Homo sapien
cttctatgtcctgtgttcatgaaga

SEQ ID NO: 3824787 - DNA, 25 bp, Homo sapien
gtcctgtgttcatgaagaaaaagat

SEQ ID NO: 3824788 - DNA, 25 bp, Homo sapien
aaagcaacctcccagcctgagtgga

SEQ ID NO: 3824789 - DNA, 25 bp, Homo sapien
cctgagctcctagaaagcaacctcc

SEQ ID NO: 3824790 - DNA, 25 bp, Homo sapien
ggaggagagaggctttttggctgga

SEQ ID NO: 3824791 - DNA, 25 bp, Homo sapien
gagctcctagaaagcaacctcccag

SEQ ID NO: 3824792 - DNA, 25 bp, Homo sapien
tggagggtcaggaaggctgcagccc

SEQ ID NO: 3824793 - DNA, 25 bp, Homo sapien
cagcccacagtgtccacctttgcat

SEQ ID NO: 3824794 - DNA, 25 bp, Homo sapien
gctgcagcccacagtgtccaccttt

SEQ ID NO: 3824795 - DNA, 25 bp, Homo sapien
ctgtgcagagtggagggtcaggaag

SEQ ID NO: 3824796 - DNA, 25 bp, Homo sapien
ctgatactgatgtctgtttgtggaa

SEQ ID NO: 3824797 - DNA, 25 bp, Homo sapien
tgatactgatgtctgtttgtggaaa

SEQ ID NO: 3824798 - DNA, 25 bp, Homo sapien
gactgatactgatgtctgtttgtgg

SEQ ID NO: 3824799 - DNA, 25 bp, Homo sapien
gatactgatgtctgtttgtggaaag

SEQ ID NO: 3824800 - DNA, 25 bp, Homo sapien
ctcccatgaagaccttctcaacacc

SEQ ID NO: 3824801 - DNA, 25 bp, Homo sapien
ttctcccatgaagaccttctcaaca

SEQ ID NO: 3824802 - DNA, 25 bp, Homo sapien
tctcccatgaagaccttctcaacac

SEQ ID NO: 3824803 - DNA, 25 bp, Homo sapien
ggaaggcaggggcagctctggcagg

SEQ ID NO: 3824804 - DNA, 25 bp, Homo sapien
cagggaaggcaggggcagctctggc

SEQ ID NO: 3824805 - DNA, 25 bp, Homo sapien
gaaggcaggggcagctctggcaggg

SEQ ID NO: 3824806 - DNA, 25 bp, Homo sapien
agggaaggcaggggcagctctggca

SEQ ID NO: 3824807 - DNA, 25 bp, Homo sapien
tattgagagggaagaatcgatagca

SEQ ID NO: 3824808 - DNA, 25 bp, Homo sapien
gccagcttggcggacttcctgccca

SEQ ID NO: 3824809 - DNA, 25 bp, Homo sapien
tcagcccaggtcttattgagaggga

SEQ ID NO: 3824810 - DNA, 25 bp, Homo sapien
tcagaacagtagaggtcggcctcag

SEQ ID NO: 3824811 - DNA, 25 bp, Homo sapien
caaatcagcagggaagtcagatgca

SEQ ID NO: 3824812 - DNA, 25 bp, Homo sapien
aagctgtgataaagggagtgtgcca

SEQ ID NO: 3824813 - DNA, 25 bp, Homo sapien
acttaagagtggtgtcatgtgagca

SEQ ID NO: 3824814 - DNA, 25 bp, Homo sapien
gaatataatgcccaagagtatggag

SEQ ID NO: 3824815 - DNA, 25 bp, Homo sapien
ttgctgtgttgcctgtgcaggtctt

SEQ ID NO: 3824816 - DNA, 25 bp, Homo sapien
agacactgcacccgacccctttctt

SEQ ID NO: 3824817 - DNA, 25 bp, Homo sapien
tgcctgtgcaggtcttgaacttctg

SEQ ID NO: 3824818 - DNA, 25 bp, Homo sapien
atcttagcctcccatagggttggga

SEQ ID NO: 3824819 - DNA, 25 bp, Homo sapien
gggatgccgggaacacagctgttca

SEQ ID NO: 3824820 - DNA, 25 bp, Homo sapien
tgttcacgaggtcatatacaaagac

SEQ ID NO: 3824821 - DNA, 25 bp, Homo sapien
acgtcagctgggatgccgggaacac

SEQ ID NO: 3824822 - DNA, 25 bp, Homo sapien
gaaggcctgtccagacgtcagctgg

SEQ ID NO: 3824823 - DNA, 25 bp, Homo sapien
gaatcctggctggagcttccaaggg

SEQ ID NO: 3824824 - DNA, 25 bp, Homo sapien
aaaatagaatcctggctggagcttc

SEQ ID NO: 3824825 - DNA, 25 bp, Homo sapien
ctggagcttccaagggggcccaatg

SEQ ID NO: 3824826 - DNA, 25 bp, Homo sapien
gggcccaatggccactgctttctca

SEQ ID NO: 3824827 - DNA, 25 bp, Homo sapien
ccgtgacctggcactgatgtgaaaa

SEQ ID NO: 3824828 - DNA, 25 bp, Homo sapien
aaacaggttttctctgaccatgcta

SEQ ID NO: 3824829 - DNA, 25 bp, Homo sapien
tcacaaattggtcatgctgtaactg

SEQ ID NO: 3824830 - DNA, 25 bp, Homo sapien
gatttctctctatatgctgtgtgca

SEQ ID NO: 3824831 - DNA, 25 bp, Homo sapien
ctgccttgtctgtgataagcacatg

SEQ ID NO: 3824832 - DNA, 25 bp, Homo sapien
caggctgttcctagccagtgactca

SEQ ID NO: 3824833 - DNA, 25 bp, Homo sapien
tgcccagtgcaggattccagtcttg

SEQ ID NO: 3824834 - DNA, 25 bp, Homo sapien
gtctcctgccgccttggattcactg

SEQ ID NO: 3824835 - DNA, 25 bp, Homo sapien
caaagagacaaagaagcaagccaag

SEQ ID NO: 3824836 - DNA, 25 bp, Homo sapien
aagaagatcaggcatttgagccagg

SEQ ID NO: 3824837 - DNA, 25 bp, Homo sapien
acccaaagagacaaagaagcaagcc

SEQ ID NO: 3824838 - DNA, 25 bp, Homo sapien
gaagcaagccaagaagaagatcagg

SEQ ID NO: 3824839 - DNA, 25 bp, Homo sapien
catcccagtagctgtagtcatagga

SEQ ID NO: 3824840 - DNA, 25 bp, Homo sapien
tcttcttctgggtccgcgtggacgc

SEQ ID NO: 3824841 - DNA, 25 bp, Homo sapien
ggtccgcgtggacgccatcatctgg

SEQ ID NO: 3824842 - DNA, 25 bp, Homo sapien
taggatgagccatcagtccattcaa

SEQ ID NO: 3824843 - DNA, 25 bp, Homo sapien
cacttggccaagtgaccaccctgta

SEQ ID NO: 3824844 - DNA, 25 bp, Homo sapien
ttgcttcagggatgggcacgtgacc

SEQ ID NO: 3824845 - DNA, 25 bp, Homo sapien
caaagatgtacagctaagcaggagc

SEQ ID NO: 3824846 - DNA, 25 bp, Homo sapien
tcacaccagtaggacaagacaggat

SEQ ID NO: 3824847 - DNA, 25 bp, Homo sapien
tgtaccaggaagaggtgaatgaccc

SEQ ID NO: 3824848 - DNA, 25 bp, Homo sapien
tccattgtaaaggtggtcccctctc

SEQ ID NO: 3824849 - DNA, 25 bp, Homo sapien
caatttgctgcctctagaaagccaa

SEQ ID NO: 3824850 - DNA, 25 bp, Homo sapien
ttttctatgaagtccctctccacgt

SEQ ID NO: 3824851 - DNA, 25 bp, Homo sapien
tggtgcttatgctgaagagtgctac

SEQ ID NO: 3824852 - DNA, 25 bp, Homo sapien
aagtatgttgcaaggttgcaatggg

SEQ ID NO: 3824853 - DNA, 25 bp, Homo sapien
ttatgctgaagagtgctacgggcag

SEQ ID NO: 3824854 - DNA, 25 bp, Homo sapien
tgcttatgctgaagagtgctacggg

SEQ ID NO: 3824855 - DNA, 25 bp, Homo sapien
cctaagggagagactatctattacc

SEQ ID NO: 3824856 - DNA, 25 bp, Homo sapien
catgtgtacagagatgcctatcact

SEQ ID NO: 3824857 - DNA, 25 bp, Homo sapien
tgaactaccaatgccacttctagga

SEQ ID NO: 3824858 - DNA, 25 bp, Homo sapien
gatgcatccacacaatatggtccta

SEQ ID NO: 3824859 - DNA, 25 bp, Homo sapien
gaatatgcctgccttagtactccag

SEQ ID NO: 3824860 - DNA, 25 bp, Homo sapien
caagtgtgatgccatgtgaaggaga

SEQ ID NO: 3824861 - DNA, 25 bp, Homo sapien
gctggaaaacagtccactactgtgg

SEQ ID NO: 3824862 - DNA, 25 bp, Homo sapien
tcagtcaatcatggccctggtagta

SEQ ID NO: 3824863 - DNA, 25 bp, Homo sapien
ggtttctgcggaggcggaatccact

SEQ ID NO: 3824864 - DNA, 25 bp, Homo sapien
ggaatccactgaacatctggttgtt

SEQ ID NO: 3824865 - DNA, 25 bp, Homo sapien
gtaaagtataggtttctgcggaggc

SEQ ID NO: 3824866 - DNA, 25 bp, Homo sapien
tgcggaggcggaatccactgaacat

SEQ ID NO: 3824867 - DNA, 25 bp, Homo sapien
gacttgtcaaggaggtgccagctca

SEQ ID NO: 3824868 - DNA, 25 bp, Homo sapien
aggcacagcgagacttgtcaaggag

SEQ ID NO: 3824869 - DNA, 25 bp, Homo sapien
tgccagctcatatcaagctgccaag

SEQ ID NO: 3824870 - DNA, 25 bp, Homo sapien
tgaaaggtaatgagttaataacact

SEQ ID NO: 3824871 - DNA, 25 bp, Homo sapien
tcattccaattttagtatatgtgct

SEQ ID NO: 3824872 - DNA, 25 bp, Homo sapien
tagtatatgtgctgctgaattgagc

SEQ ID NO: 3824873 - DNA, 25 bp, Homo sapien
agaggccatggtaatcttctctata

SEQ ID NO: 3824874 - DNA, 25 bp, Homo sapien
tatatgtgctgctgaattgagcacc

SEQ ID NO: 3824875 - DNA, 25 bp, Homo sapien
tttgtgatgtcaaggtcatccctgg

SEQ ID NO: 3824876 - DNA, 25 bp, Homo sapien
aaggtcatccctgggtgatcctttc

SEQ ID NO: 3824877 - DNA, 25 bp, Homo sapien
ttatttgtgatgtcaaggtcatccc

SEQ ID NO: 3824878 - DNA, 25 bp, Homo sapien
cttccttatttgtgatgtcaaggtc

SEQ ID NO: 3824879 - DNA, 25 bp, Homo sapien
cccaggactggtccatgagcttggg

SEQ ID NO: 3824880 - DNA, 25 bp, Homo sapien
ggcctctgagattgataagggtaac

SEQ ID NO: 3824881 - DNA, 25 bp, Homo sapien
gagtgggtggctccataagatgact

SEQ ID NO: 3824882 - DNA, 25 bp, Homo sapien
taagatgactcttggatggtttcag

SEQ ID NO: 3824883 - DNA, 25 bp, Homo sapien
ttccagggtgggaatctgtgagtga

SEQ ID NO: 3824884 - DNA, 25 bp, Homo sapien
cttccagggtgggaatctgtgagtg

SEQ ID NO: 3824885 - DNA, 25 bp, Homo sapien
ctaatggggctgagtcaaaatctgg

SEQ ID NO: 3824886 - DNA, 25 bp, Homo sapien
ctgtaagcaaagactaatggggctg

SEQ ID NO: 3824887 - DNA, 25 bp, Homo sapien
gcaaagactaatggggctgagtcaa

SEQ ID NO: 3824888 - DNA, 25 bp, Homo sapien
gactaatggggctgagtcaaaatct

SEQ ID NO: 3824889 - DNA, 25 bp, Homo sapien
tgtcgttgtgcataaagagaccact

SEQ ID NO: 3824890 - DNA, 25 bp, Homo sapien
tgtattcaggagattgtcgttgtgc

SEQ ID NO: 3824891 - DNA, 25 bp, Homo sapien
ttctcctcaggataacagattaaaa

SEQ ID NO: 3824892 - DNA, 25 bp, Homo sapien
gaagtgtgcacctgttgtgtattca

SEQ ID NO: 3824893 - DNA, 25 bp, Homo sapien
gaaccggggcatgctcagctatggc

SEQ ID NO: 3824894 - DNA, 25 bp, Homo sapien
ctcagctatggctgcaagcccttca

SEQ ID NO: 3824895 - DNA, 25 bp, Homo sapien
cagctatggctgcaagcccttcaag

SEQ ID NO: 3824896 - DNA, 25 bp, Homo sapien
tgagagaacaaaggaaccggggcat

SEQ ID NO: 3824897 - DNA, 25 bp, Homo sapien
ctcagttccaaaagccacacagcag

SEQ ID NO: 3824898 - DNA, 25 bp, Homo sapien
tcagacacctgaggctttggtgtcc

SEQ ID NO: 3824899 - DNA, 25 bp, Homo sapien
tcagttccaaaagccacacagcagc

SEQ ID NO: 3824900 - DNA, 25 bp, Homo sapien
gaggctttggtgtcctcagttccaa

SEQ ID NO: 3824901 - DNA, 25 bp, Homo sapien
cagctaaaagcactccatcagacac

SEQ ID NO: 3824902 - DNA, 25 bp, Homo sapien
agtggtgagaatatgcattcttgcc

SEQ ID NO: 3824903 - DNA, 25 bp, Homo sapien
ccatcactgaaggaaagattgatct

SEQ ID NO: 3824904 - DNA, 25 bp, Homo sapien
gaagacttagttatatctaggttgg

SEQ ID NO: 3824905 - DNA, 25 bp, Homo sapien
tgatggccaccagacgccgcgcagg

SEQ ID NO: 3824906 - DNA, 25 bp, Homo sapien
cctgggtggggcggcgctcggagga

SEQ ID NO: 3824907 - DNA, 25 bp, Homo sapien
ggtggggcggcgctcggaggaccca

SEQ ID NO: 3824908 - DNA, 25 bp, Homo sapien
cagacgccgcgcaggcctgggtggg

SEQ ID NO: 3824909 - DNA, 25 bp, Homo sapien
tcgggtcgaccctggcccgaagcag

SEQ ID NO: 3824910 - DNA, 25 bp, Homo sapien
tccctgcaccggagccggccttcct

SEQ ID NO: 3824911 - DNA, 25 bp, Homo sapien
ttgcgctggccctcgggtcgaccct

SEQ ID NO: 3824912 - DNA, 25 bp, Homo sapien
ctggcgctcctgttgccgctgcttg

SEQ ID NO: 3824913 - DNA, 25 bp, Homo sapien
tccccggaagctttcttaatgcaaa

SEQ ID NO: 3824914 - DNA, 25 bp, Homo sapien
cggatcggacatggtgaagtaagca

SEQ ID NO: 3824915 - DNA, 25 bp, Homo sapien
cctgagaaacgggtgcgattattct

SEQ ID NO: 3824916 - DNA, 25 bp, Homo sapien
caattccggcgcctggtggttctcc

SEQ ID NO: 3824917 - DNA, 25 bp, Homo sapien
cgggaagccacgaagatcacgggaa

SEQ ID NO: 3824918 - DNA, 25 bp, Homo sapien
tgtttactgagctcattgccgtttt

SEQ ID NO: 3824919 - DNA, 25 bp, Homo sapien
tcatcaaccaatgagtaaccaggtc

SEQ ID NO: 3824920 - DNA, 25 bp, Homo sapien
tcattgccgttttatgccgccctgg

SEQ ID NO: 3824921 - DNA, 25 bp, Homo sapien
gctagagggacaggcaacaggtcct

SEQ ID NO: 3824922 - DNA, 25 bp, Homo sapien
cccctccactttgtagttcaaagct

SEQ ID NO: 3824923 - DNA, 25 bp, Homo sapien
tgctccttgctatcttggtcacacg

SEQ ID NO: 3824924 - DNA, 25 bp, Homo sapien
gcctctctgccgtgtcgccttaaag

SEQ ID NO: 3824925 - DNA, 25 bp, Homo sapien
tatggaggttctcgagcaatccagg

SEQ ID NO: 3824926 - DNA, 25 bp, Homo sapien
tggaggttctcgagcaatccaggtc

SEQ ID NO: 3824927 - DNA, 25 bp, Homo sapien
atggaggttctcgagcaatccaggt

SEQ ID NO: 3824928 - DNA, 25 bp, Homo sapien
ggaggttctcgagcaatccaggtcc

SEQ ID NO: 3824929 - DNA, 25 bp, Homo sapien
ttagatgtaaagctggtcgatgcaa

SEQ ID NO: 3824930 - DNA, 25 bp, Homo sapien
gatgcaattgaatcgcagtacaatg

SEQ ID NO: 3824931 - DNA, 25 bp, Homo sapien
ttgaatcgcagtacaatgtttgcat

SEQ ID NO: 3824932 - DNA, 25 bp, Homo sapien
aagctggtcgatgcaattgaatcgc

SEQ ID NO: 3824933 - DNA, 25 bp, Homo sapien
gagtcacgtgtccatgggtccttca

SEQ ID NO: 3824934 - DNA, 25 bp, Homo sapien
tgttgttgagaacactggagtcacg

SEQ ID NO: 3824935 - DNA, 25 bp, Homo sapien
cccaagtagatgcaaatgttgtgca

SEQ ID NO: 3824936 - DNA, 25 bp, Homo sapien
gaatattccaagttgctgactgcag

SEQ ID NO: 3824937 - DNA, 25 bp, Homo sapien
acaagcatgcatcttgtggtcctaa

SEQ ID NO: 3824938 - DNA, 25 bp, Homo sapien
caagcatgcatcttgtggtcctaat

SEQ ID NO: 3824939 - DNA, 25 bp, Homo sapien
aagcatgcatcttgtggtcctaatt

SEQ ID NO: 3824940 - DNA, 25 bp, Homo sapien
gcatgcatcttgtggtcctaatttt

SEQ ID NO: 3824941 - DNA, 25 bp, Homo sapien
tggtatggactcttcaccctggagt

SEQ ID NO: 3824942 - DNA, 25 bp, Homo sapien
gttggtatggactcttcaccctgga

SEQ ID NO: 3824943 - DNA, 25 bp, Homo sapien
ggactcttcaccctggagtggtaaa

SEQ ID NO: 3824944 - DNA, 25 bp, Homo sapien
tatggactcttcaccctggagtggt

SEQ ID NO: 3824945 - DNA, 25 bp, Homo sapien
aaatacccctgcgtacggttctgag

SEQ ID NO: 3824946 - DNA, 25 bp, Homo sapien
tctggacgtgttctggaggctacag

SEQ ID NO: 3824947 - DNA, 25 bp, Homo sapien
gagctccagggtagtccggttctaa

SEQ ID NO: 3824948 - DNA, 25 bp, Homo sapien
cagttattcctgtagtaggcagaca

SEQ ID NO: 3824949 - DNA, 25 bp, Homo sapien
gagggctggattgaagatgttctgc

SEQ ID NO: 3824950 - DNA, 25 bp, Homo sapien
ctgtgacgaaatgagggctggattg

SEQ ID NO: 3824951 - DNA, 25 bp, Homo sapien
tgagggctggattgaagatgttctg

SEQ ID NO: 3824952 - DNA, 25 bp, Homo sapien
agggctggattgaagatgttctgct

SEQ ID NO: 3824953 - DNA, 25 bp, Homo sapien
acctggcagagagtggccatatgag

SEQ ID NO: 3824954 - DNA, 25 bp, Homo sapien
gccttcagggtaatcattctctccc

SEQ ID NO: 3824955 - DNA, 25 bp, Homo sapien
caaagactgcccacggggtcatcac

SEQ ID NO: 3824956 - DNA, 25 bp, Homo sapien
gagtggccatatgagtttgccatct

SEQ ID NO: 3824957 - DNA, 25 bp, Homo sapien
gtgccaatcacattcagacaatggt

SEQ ID NO: 3824958 - DNA, 25 bp, Homo sapien
tccataagcatggacaggaccactt

SEQ ID NO: 3824959 - DNA, 25 bp, Homo sapien
caatggtgggtttccataagcatgg

SEQ ID NO: 3824960 - DNA, 25 bp, Homo sapien
ggacaggaccactttcacctacata

SEQ ID NO: 3824961 - DNA, 25 bp, Homo sapien
aagaaaactccattatgatatgtta

SEQ ID NO: 3824962 - DNA, 25 bp, Homo sapien
gggtggattgtcttggacatgttcc

SEQ ID NO: 3824963 - DNA, 25 bp, Homo sapien
ggtcactgtcctttaagtcttactg

SEQ ID NO: 3824964 - DNA, 25 bp, Homo sapien
agggaactccctcaatatcatgaga

SEQ ID NO: 3824965 - DNA, 25 bp, Homo sapien
ctattggccgtgttctctggcctgt

SEQ ID NO: 3824966 - DNA, 25 bp, Homo sapien
gggcctgctattggccgtgttctct

SEQ ID NO: 3824967 - DNA, 25 bp, Homo sapien
gtgggcctgctattggccgtgttct

SEQ ID NO: 3824968 - DNA, 25 bp, Homo sapien
ctgctattggccgtgttctctggcc

SEQ ID NO: 3824969 - DNA, 25 bp, Homo sapien
cagtctctaatcttcttctttctca

SEQ ID NO: 3824970 - DNA, 25 bp, Homo sapien
ctttctcacaccagcaaaagctcca

SEQ ID NO: 3824971 - DNA, 25 bp, Homo sapien
tctcacaccagcaaaagctccattt

SEQ ID NO: 3824972 - DNA, 25 bp, Homo sapien
tcttctttctcacaccagcaaaagc

SEQ ID NO: 3824973 - DNA, 25 bp, Homo sapien
ccctgcatctaacccctgaggagtt

SEQ ID NO: 3824974 - DNA, 25 bp, Homo sapien
tcacacccgcattgattgggactcg

SEQ ID NO: 3824975 - DNA, 25 bp, Homo sapien
ttgggactcgcagggaaaaagtgat

SEQ ID NO: 3824976 - DNA, 25 bp, Homo sapien
tgatcacaaagggatacaccattca

SEQ ID NO: 3824977 - DNA, 25 bp, Homo sapien
ctcctgcaagccttcttctccactg

SEQ ID NO: 3824978 - DNA, 25 bp, Homo sapien
cctgcaagccttcttctccactggg

SEQ ID NO: 3824979 - DNA, 25 bp, Homo sapien
ctcctgcctcctgcaagccttcttc

SEQ ID NO: 3824980 - DNA, 25 bp, Homo sapien
tgcctcctgcaagccttcttctcca

SEQ ID NO: 3824981 - DNA, 25 bp, Homo sapien
gatttcattcacgtggtcatcggac

SEQ ID NO: 3824982 - DNA, 25 bp, Homo sapien
cattcacgtggtcatcggacagcat

SEQ ID NO: 3824983 - DNA, 25 bp, Homo sapien
tttcattcacgtggtcatcggacag

SEQ ID NO: 3824984 - DNA, 25 bp, Homo sapien
tcattcacgtggtcatcggacagca

SEQ ID NO: 3824985 - DNA, 25 bp, Homo sapien
tgcttgagtctagcagcaccttttc

SEQ ID NO: 3824986 - DNA, 25 bp, Homo sapien
ctgatttgaggatgggtggctttgg

SEQ ID NO: 3824987 - DNA, 25 bp, Homo sapien
tgatgcttgagtctagcagcacctt

SEQ ID NO: 3824988 - DNA, 25 bp, Homo sapien
gttgatgcttgagtctagcagcacc

SEQ ID NO: 3824989 - DNA, 25 bp, Homo sapien
cattctaggctatgaagggtctgag

SEQ ID NO: 3824990 - DNA, 25 bp, Homo sapien
tgaaaaccgcagcacctggttaccc

SEQ ID NO: 3824991 - DNA, 25 bp, Homo sapien
tgaagaaccaggagtgtctatgccc

SEQ ID NO: 3824992 - DNA, 25 bp, Homo sapien
gggtctgagacatcgactcattcaa

SEQ ID NO: 3824993 - DNA, 25 bp, Homo sapien
ggtataagggatgcgattaacttct

SEQ ID NO: 3824994 - DNA, 25 bp, Homo sapien
ataagggatgcgattaacttctgtc

SEQ ID NO: 3824995 - DNA, 25 bp, Homo sapien
gggtataagggatgcgattaacttc

SEQ ID NO: 3824996 - DNA, 25 bp, Homo sapien
tataagggatgcgattaacttctgt

SEQ ID NO: 3824997 - DNA, 25 bp, Homo sapien
ttcctgatggctttaattctgtctc

SEQ ID NO: 3824998 - DNA, 25 bp, Homo sapien
ttttctcttccatggtccttggctg

SEQ ID NO: 3824999 - DNA, 25 bp, Homo sapien
tcttccatggtccttggctggttcc

SEQ ID NO: 3825000 - DNA, 25 bp, Homo sapien
gttcctgatggctttaattctgtct

SEQ ID NO: 3825001 - DNA, 25 bp, Homo sapien
gatgttaaccttgagtcttggccaa

SEQ ID NO: 3825002 - DNA, 25 bp, Homo sapien
agaaaggagtacctacagagggcat

SEQ ID NO: 3825003 - DNA, 25 bp, Homo sapien
gaattaagctgtagcccctggagaa

SEQ ID NO: 3825004 - DNA, 25 bp, Homo sapien
ccaaggcagtattaggcagactctc

SEQ ID NO: 3825005 - DNA, 25 bp, Homo sapien
cgggaaatggagttcagacactgaa

SEQ ID NO: 3825006 - DNA, 25 bp, Homo sapien
cagacactgaatacagcaattgagc

SEQ ID NO: 3825007 - DNA, 25 bp, Homo sapien
cagcaattgagctgaaggatacgat

SEQ ID NO: 3825008 - DNA, 25 bp, Homo sapien
ttgagctgaaggatacgatgggtct

SEQ ID NO: 3825009 - DNA, 25 bp, Homo sapien
gaattcagaatttccgacaggctgt

SEQ ID NO: 3825010 - DNA, 25 bp, Homo sapien
tggccacggtaaactgagggattat

SEQ ID NO: 3825011 - DNA, 25 bp, Homo sapien
gatcttcagcgtcttctgccacagg

SEQ ID NO: 3825012 - DNA, 25 bp, Homo sapien
agaggacgctggttccaaacttgcc

SEQ ID NO: 3825013 - DNA, 25 bp, Homo sapien
ggaattggtgtaaaagccatagtac

SEQ ID NO: 3825014 - DNA, 25 bp, Homo sapien
gcaggtggtcaagcatgctccgatt

SEQ ID NO: 3825015 - DNA, 25 bp, Homo sapien
ccgattgtgaagatgtaggccagct

SEQ ID NO: 3825016 - DNA, 25 bp, Homo sapien
ccagctgcatgttgtaggatgcccc

SEQ ID NO: 3825017 - DNA, 25 bp, Homo sapien
agttgttccggaaatacttggccat

SEQ ID NO: 3825018 - DNA, 25 bp, Homo sapien
aatgtggggattaatgaagttgttc

SEQ ID NO: 3825019 - DNA, 25 bp, Homo sapien
aatgaagttgttccggaaatacttg

SEQ ID NO: 3825020 - DNA, 25 bp, Homo sapien
ctccggagtaaatgtggggattaat

SEQ ID NO: 3825021 - DNA, 25 bp, Homo sapien
cagtgctaagattcttctgttttag

SEQ ID NO: 3825022 - DNA, 25 bp, Homo sapien
taaacggctgcacagcaggctatgg

SEQ ID NO: 3825023 - DNA, 25 bp, Homo sapien
taccatgtaggcagagaagcgggtc

SEQ ID NO: 3825024 - DNA, 25 bp, Homo sapien
tgtactcagccaggtaataaacggc

SEQ ID NO: 3825025 - DNA, 25 bp, Homo sapien
caggctatggccactcctgtagaga

SEQ ID NO: 3825026 - DNA, 25 bp, Homo sapien
ctggttctctctgccctggaccctg

SEQ ID NO: 3825027 - DNA, 25 bp, Homo sapien
ctctctgccctggaccctggtgttg

SEQ ID NO: 3825028 - DNA, 25 bp, Homo sapien
ggttctctctgccctggaccctggt

SEQ ID NO: 3825029 - DNA, 25 bp, Homo sapien
tgccctggaccctggtgttggttac

SEQ ID NO: 3825030 - DNA, 25 bp, Homo sapien
taggcatccttccatgggccttgga

SEQ ID NO: 3825031 - DNA, 25 bp, Homo sapien
agtggagccgggactgcacttctgc

SEQ ID NO: 3825032 - DNA, 25 bp, Homo sapien
atttatctgatatctcacattccca

SEQ ID NO: 3825033 - DNA, 25 bp, Homo sapien
gagtcagggattccaatgaatttat

SEQ ID NO: 3825034 - DNA, 25 bp, Homo sapien
catggcacggccagattaatgcagg

SEQ ID NO: 3825035 - DNA, 25 bp, Homo sapien
caagcctgaacatggagtagatgca

SEQ ID NO: 3825036 - DNA, 25 bp, Homo sapien
taatgcaggacacaacgaaaggcag

SEQ ID NO: 3825037 - DNA, 25 bp, Homo sapien
gaacgtagacttcgtgccgtggcat

SEQ ID NO: 3825038 - DNA, 25 bp, Homo sapien
cttgactaaggggaacgctggatga

SEQ ID NO: 3825039 - DNA, 25 bp, Homo sapien
ccaggagcctttgtgcgtgcactgc

SEQ ID NO: 3825040 - DNA, 25 bp, Homo sapien
tgtacatcccatacttgagaactac

SEQ ID NO: 3825041 - DNA, 25 bp, Homo sapien
ggatgatttcagtcccgtcctcagc

SEQ ID NO: 3825042 - DNA, 25 bp, Homo sapien
ccacggtgttgagccaatagtaaca

SEQ ID NO: 3825043 - DNA, 25 bp, Homo sapien
agggccacggtgttgagccaatagt

SEQ ID NO: 3825044 - DNA, 25 bp, Homo sapien
aaagaatgccaatgattgatatttt

SEQ ID NO: 3825045 - DNA, 25 bp, Homo sapien
ggtgttgagccaatagtaacaaaga

SEQ ID NO: 3825046 - DNA, 25 bp, Homo sapien
ggagccggtagatgtcctggccaat

SEQ ID NO: 3825047 - DNA, 25 bp, Homo sapien
aggagccggtagatgtcctggccaa

SEQ ID NO: 3825048 - DNA, 25 bp, Homo sapien
ggaaggaattgactaaagagaacac

SEQ ID NO: 3825049 - DNA, 25 bp, Homo sapien
gagccggtagatgtcctggccaatg

SEQ ID NO: 3825050 - DNA, 25 bp, Homo sapien
cacaccagagtttgtgcatagatca

SEQ ID NO: 3825051 - DNA, 25 bp, Homo sapien
aggccaagacttgtgatcagttgca

SEQ ID NO: 3825052 - DNA, 25 bp, Homo sapien
aatgtcaaactcctgaaggccaaga

SEQ ID NO: 3825053 - DNA, 25 bp, Homo sapien
ttctagaacgttcctggcaatgtca

SEQ ID NO: 3825054 - DNA, 25 bp, Homo sapien
cacccagggcaactttaaagagtca

SEQ ID NO: 3825055 - DNA, 25 bp, Homo sapien
cccagggcaactttaaagagtcaga

SEQ ID NO: 3825056 - DNA, 25 bp, Homo sapien
actcattaactttgagttatttgca

SEQ ID NO: 3825057 - DNA, 25 bp, Homo sapien
tatttgcagacagccaaatcaccca

SEQ ID NO: 3825058 - DNA, 25 bp, Homo sapien
catgcctatttaatcccctcgaaaa

SEQ ID NO: 3825059 - DNA, 25 bp, Homo sapien
ccatgcctatttaatcccctcgaaa

SEQ ID NO: 3825060 - DNA, 25 bp, Homo sapien
acatgatgaaaagcataatcatttg

SEQ ID NO: 3825061 - DNA, 25 bp, Homo sapien
tggagtagaacatgatgaaaagcat

SEQ ID NO: 3825062 - DNA, 25 bp, Homo sapien
gaacatgatgaaaagcataatcatt

SEQ ID NO: 3825063 - DNA, 25 bp, Homo sapien
gtagaacatgatgaaaagcataatc

SEQ ID NO: 3825064 - DNA, 25 bp, Homo sapien
tgattgatggcaatgtcggactgac

SEQ ID NO: 3825065 - DNA, 25 bp, Homo sapien
gattgatggcaatgtcggactgact

SEQ ID NO: 3825066 - DNA, 25 bp, Homo sapien
tgatggcaatgtcggactgactcac

SEQ ID NO: 3825067 - DNA, 25 bp, Homo sapien
gctgattgatggcaatgtcggactg

SEQ ID NO: 3825068 - DNA, 25 bp, Homo sapien
cagagcccccttccccagctttaag

SEQ ID NO: 3825069 - DNA, 25 bp, Homo sapien
gcagagcccccttccccagctttaa

SEQ ID NO: 3825070 - DNA, 25 bp, Homo sapien
ttgcagagcccccttccccagcttt

SEQ ID NO: 3825071 - DNA, 25 bp, Homo sapien
ctttgcagagcccccttccccagct

SEQ ID NO: 3825072 - DNA, 25 bp, Homo sapien
ccggagcagcggcagagggacccca

SEQ ID NO: 3825073 - DNA, 25 bp, Homo sapien
atctgcagccggagcagcggcagag

SEQ ID NO: 3825074 - DNA, 25 bp, Homo sapien
agcagcggcagagggaccccagcca

SEQ ID NO: 3825075 - DNA, 25 bp, Homo sapien
cagcggcagagggaccccagccagg

SEQ ID NO: 3825076 - DNA, 25 bp, Homo sapien
ggtgatggccagggtgcacaagacc

SEQ ID NO: 3825077 - DNA, 25 bp, Homo sapien
gatggccagggtgcacaagaccccg

SEQ ID NO: 3825078 - DNA, 25 bp, Homo sapien
cccgccaggctttgctcggaggctg

SEQ ID NO: 3825079 - DNA, 25 bp, Homo sapien
tggccagggtgcacaagaccccggt

SEQ ID NO: 3825080 - DNA, 25 bp, Homo sapien
ggcagacctcgaaaagggccacagt

SEQ ID NO: 3825081 - DNA, 25 bp, Homo sapien
aagagaggcagacctcgaaaagggc

SEQ ID NO: 3825082 - DNA, 25 bp, Homo sapien
gagaggcagacctcgaaaagggcca

SEQ ID NO: 3825083 - DNA, 25 bp, Homo sapien
gaggcagacctcgaaaagggccaca

SEQ ID NO: 3825084 - DNA, 25 bp, Homo sapien
gccgtgtacttagggtgtcgatcca

SEQ ID NO: 3825085 - DNA, 25 bp, Homo sapien
gaagtgcacacttccaatgaggttc

SEQ ID NO: 3825086 - DNA, 25 bp, Homo sapien
ggttccgatagatccaaacaaccca

SEQ ID NO: 3825087 - DNA, 25 bp, Homo sapien
aaacaacccacaggtagccaggccg

SEQ ID NO: 3825088 - DNA, 25 bp, Homo sapien
ccctctgtgatctgccagtaaagat

SEQ ID NO: 3825089 - DNA, 25 bp, Homo sapien
attaatgatctgctcatggagcagc

SEQ ID NO: 3825090 - DNA, 25 bp, Homo sapien
tctgccagtaaagataggtgatgat

SEQ ID NO: 3825091 - DNA, 25 bp, Homo sapien
tggagcagccttatcataatcttcc

SEQ ID NO: 3825092 - DNA, 25 bp, Homo sapien
ttaaaaagggtgagggcggacatca

SEQ ID NO: 3825093 - DNA, 25 bp, Homo sapien
gggcggacatcagagggatccaagg

SEQ ID NO: 3825094 - DNA, 25 bp, Homo sapien
gagggcggacatcagagggatccaa

SEQ ID NO: 3825095 - DNA, 25 bp, Homo sapien
gtgagggcggacatcagagggatcc

SEQ ID NO: 3825096 - DNA, 25 bp, Homo sapien
cagaacaagtgagctggggtttgct

SEQ ID NO: 3825097 - DNA, 25 bp, Homo sapien
gaacaagtgagctggggtttgcttt

SEQ ID NO: 3825098 - DNA, 25 bp, Homo sapien
tccagaacaagtgagctggggtttg

SEQ ID NO: 3825099 - DNA, 25 bp, Homo sapien
aacaagtgagctggggtttgctttc

SEQ ID NO: 3825100 - DNA, 25 bp, Homo sapien
catcatgttcccccaaatgcaaaaa

SEQ ID NO: 3825101 - DNA, 25 bp, Homo sapien
atcatgttcccccaaatgcaaaaag

SEQ ID NO: 3825102 - DNA, 25 bp, Homo sapien
gaaagagaagttaacgcaggcacac

SEQ ID NO: 3825103 - DNA, 25 bp, Homo sapien
ccccatctctacaagggaaagacca

SEQ ID NO: 3825104 - DNA, 25 bp, Homo sapien
cccatctctacaagggaaagaccag

SEQ ID NO: 3825105 - DNA, 25 bp, Homo sapien
gaagttaacgcaggcacactctgcc

SEQ ID NO: 3825106 - DNA, 25 bp, Homo sapien
tcaggcccttggattaccttcttga

SEQ ID NO: 3825107 - DNA, 25 bp, Homo sapien
caggcccttggattaccttcttgaa

SEQ ID NO: 3825108 - DNA, 25 bp, Homo sapien
gattggtgtctggttaccaaaagag

SEQ ID NO: 3825109 - DNA, 25 bp, Homo sapien
tttgattggtgtctggttaccaaaa

SEQ ID NO: 3825110 - DNA, 25 bp, Homo sapien
tgattggtgtctggttaccaaaaga

SEQ ID NO: 3825111 - DNA, 25 bp, Homo sapien
ttgattggtgtctggttaccaaaag

SEQ ID NO: 3825112 - DNA, 25 bp, Homo sapien
caggtggcatggaagaaatcattcc

SEQ ID NO: 3825113 - DNA, 25 bp, Homo sapien
gaaatcattccattttcgtctcctc

SEQ ID NO: 3825114 - DNA, 25 bp, Homo sapien
aaatcattccattttcgtctcctcc

SEQ ID NO: 3825115 - DNA, 25 bp, Homo sapien
ctaaaggcacaggtggcatggaaga

SEQ ID NO: 3825116 - DNA, 25 bp, Homo sapien
aatagcatggaatgcccaattttac

SEQ ID NO: 3825117 - DNA, 25 bp, Homo sapien
attacatggtagtcagtttccgctc

SEQ ID NO: 3825118 - DNA, 25 bp, Homo sapien
tcagcaatccaggtattaaaaatag

SEQ ID NO: 3825119 - DNA, 25 bp, Homo sapien
atggtagtcagtttccgctcctggc

SEQ ID NO: 3825120 - DNA, 25 bp, Homo sapien
gatggtcatgtataacacctcacag

SEQ ID NO: 3825121 - DNA, 25 bp, Homo sapien
aaatgcaggttctacaattcagagg

SEQ ID NO: 3825122 - DNA, 25 bp, Homo sapien
ttgtattccacctttgggacatggg

SEQ ID NO: 3825123 - DNA, 25 bp, Homo sapien
cgcaagaaagttcagagatgagacc

SEQ ID NO: 3825124 - DNA, 25 bp, Homo sapien
ctacggtactgccactgcaaagcta

SEQ ID NO: 3825125 - DNA, 25 bp, Homo sapien
gctacggtactgccactgcaaagct

SEQ ID NO: 3825126 - DNA, 25 bp, Homo sapien
ggctacggtactgccactgcaaagc

SEQ ID NO: 3825127 - DNA, 25 bp, Homo sapien
cataagccatcgcacccagctaatt

SEQ ID NO: 3825128 - DNA, 25 bp, Homo sapien
ggcataagccatcgcacccagctaa

SEQ ID NO: 3825129 - DNA, 25 bp, Homo sapien
tcctgacattaagtgatccgcttgc

SEQ ID NO: 3825130 - DNA, 25 bp, Homo sapien
caggcataagccatcgcacccagct

SEQ ID NO: 3825131 - DNA, 25 bp, Homo sapien
gattgtattggcataggcatgatag

SEQ ID NO: 3825132 - DNA, 25 bp, Homo sapien
ccccatagctatgtgacaatgagaa

SEQ ID NO: 3825133 - DNA, 25 bp, Homo sapien
gggattggtacgttttgaatcagca

SEQ ID NO: 3825134 - DNA, 25 bp, Homo sapien
tttttgtgacagattgtattggcat

SEQ ID NO: 3825135 - DNA, 25 bp, Homo sapien
tcgtgacgtttatagccaagtggga

SEQ ID NO: 3825136 - DNA, 25 bp, Homo sapien
gagttactacgaatcccatcttggt

SEQ ID NO: 3825137 - DNA, 25 bp, Homo sapien
cactgacagcatggtagaagactgc

SEQ ID NO: 3825138 - DNA, 25 bp, Homo sapien
cagtgaagacatcctgtgggcacca

SEQ ID NO: 3825139 - DNA, 25 bp, Homo sapien
accacgctatgatactttctggaaa

SEQ ID NO: 3825140 - DNA, 25 bp, Homo sapien
gatggacattttgctcgattggagc

SEQ ID NO: 3825141 - DNA, 25 bp, Homo sapien
ttggagcatgcataatatcttgtgg

SEQ ID NO: 3825142 - DNA, 25 bp, Homo sapien
gagatgggaaaccacgctatgatac

SEQ ID NO: 3825143 - DNA, 25 bp, Homo sapien
tctggccaggatttaagtcaatagc

SEQ ID NO: 3825144 - DNA, 25 bp, Homo sapien
cagaataacaagctggttccgtagc

SEQ ID NO: 3825145 - DNA, 25 bp, Homo sapien
caagagcagagactaaaggaactcc

SEQ ID NO: 3825146 - DNA, 25 bp, Homo sapien
ggtcaaaactaaacagcccatcttg

SEQ ID NO: 3825147 - DNA, 25 bp, Homo sapien
gtctcggaaatgtcataaatggttg

SEQ ID NO: 3825148 - DNA, 25 bp, Homo sapien
cagtaaccagcctagtgatgccttt

SEQ ID NO: 3825149 - DNA, 25 bp, Homo sapien
ctgtattacccaggcagttctccaa

SEQ ID NO: 3825150 - DNA, 25 bp, Homo sapien
taaattgctcattcgaataggaccc

SEQ ID NO: 3825151 - DNA, 25 bp, Homo sapien
tgcagagtgcctaaaccataacctc

SEQ ID NO: 3825152 - DNA, 25 bp, Homo sapien
agatccctaccctaagggaagctgt

SEQ ID NO: 3825153 - DNA, 25 bp, Homo sapien
tgtcaaaggccatgcacacaaggta

SEQ ID NO: 3825154 - DNA, 25 bp, Homo sapien
cattgacggtcatttccgaagttac

SEQ ID NO: 3825155 - DNA, 25 bp, Homo sapien
tatggaatgattgactagccagagc

SEQ ID NO: 3825156 - DNA, 25 bp, Homo sapien
taaaaatgtcttgggcaccaccatg

SEQ ID NO: 3825157 - DNA, 25 bp, Homo sapien
gaatgatggagcactcagaaagggc

SEQ ID NO: 3825158 - DNA, 25 bp, Homo sapien
taaacgtgtttgagttccgcaagcc

SEQ ID NO: 3825159 - DNA, 25 bp, Homo sapien
tccccgccatattacggatctcagg

SEQ ID NO: 3825160 - DNA, 25 bp, Homo sapien
ggatctcaggctgcaacgcgggctc

SEQ ID NO: 3825161 - DNA, 25 bp, Homo sapien
cgaatggctcaaatggtactgacag

SEQ ID NO: 3825162 - DNA, 25 bp, Homo sapien
gtcaggaagcgaatggctcaaatgg

SEQ ID NO: 3825163 - DNA, 25 bp, Homo sapien
ttcctggagggcagcgacagtgctt

SEQ ID NO: 3825164 - DNA, 25 bp, Homo sapien
tattcagatgcgtactagctgcaag

SEQ ID NO: 3825165 - DNA, 25 bp, Homo sapien
ttgcccatcagttccgccaaagacg

SEQ ID NO: 3825166 - DNA, 25 bp, Homo sapien
caattaacgtagtgcagaacacgca

SEQ ID NO: 3825167 - DNA, 25 bp, Homo sapien
gaaactggtacctcttaaactgcaa

SEQ ID NO: 3825168 - DNA, 25 bp, Homo sapien
tatacaccgaagctagcaaggaaga

SEQ ID NO: 3825169 - DNA, 25 bp, Homo sapien
tttgcaaaccccgtagactcatggt

SEQ ID NO: 3825170 - DNA, 25 bp, Homo sapien
gaaatttcaccatggctctagtccc

SEQ ID NO: 3825171 - DNA, 25 bp, Homo sapien
cactgaatccccattacacagaaca

SEQ ID NO: 3825172 - DNA, 25 bp, Homo sapien
tccaccaaaatgtaagcgccataag

SEQ ID NO: 3825173 - DNA, 25 bp, Homo sapien
taagcgccataagtacaggtacctt

SEQ ID NO: 3825174 - DNA, 25 bp, Homo sapien
acacagaacagtatcagcacacagc

SEQ ID NO: 3825175 - DNA, 25 bp, Homo sapien
gagaaggcatccctgatgaccccat

SEQ ID NO: 3825176 - DNA, 25 bp, Homo sapien
cacagcatatgacaacgcattactc

SEQ ID NO: 3825177 - DNA, 25 bp, Homo sapien
tccttagagcatgactggatccttc

SEQ ID NO: 3825178 - DNA, 25 bp, Homo sapien
tcagtctcggcttggatatcccctc

SEQ ID NO: 3825179 - DNA, 25 bp, Homo sapien
tggatactcaagcaaagcatgaaat

SEQ ID NO: 3825180 - DNA, 25 bp, Homo sapien
ggatactcaagcaaagcatgaaatt

SEQ ID NO: 3825181 - DNA, 25 bp, Homo sapien
cagcattatgtgtggcactgtttcc

SEQ ID NO: 3825182 - DNA, 25 bp, Homo sapien
cagaatcataaccagcaagggtatg

SEQ ID NO: 3825183 - DNA, 25 bp, Homo sapien
gatatgtcctcggtaggcctcaaag

SEQ ID NO: 3825184 - DNA, 25 bp, Homo sapien
taaccaggagggattaggcatcata

SEQ ID NO: 3825185 - DNA, 25 bp, Homo sapien
agccactccatgaaagcgaataagt

SEQ ID NO: 3825186 - DNA, 25 bp, Homo sapien
aaagcgaataagtgagatactttca

SEQ ID NO: 3825187 - DNA, 25 bp, Homo sapien
ccatgaaagcgaataagtgagatac

SEQ ID NO: 3825188 - DNA, 25 bp, Homo sapien
cttcttgtattctggcaagactttt

SEQ ID NO: 3825189 - DNA, 25 bp, Homo sapien
cagagtctggacctctaatcatgac

SEQ ID NO: 3825190 - DNA, 25 bp, Homo sapien
caaagttctattaggtcttggccaa

SEQ ID NO: 3825191 - DNA, 25 bp, Homo sapien
agttaaactactccactactgatgg

SEQ ID NO: 3825192 - DNA, 25 bp, Homo sapien
gctgcacacggtgttttacactaga

SEQ ID NO: 3825193 - DNA, 25 bp, Homo sapien
cacgagtcagtaaagctttcttcct

SEQ ID NO: 3825194 - DNA, 25 bp, Homo sapien
tcctggacacgagtcagtaaagctt

SEQ ID NO: 3825195 - DNA, 25 bp, Homo sapien
gacacgagtcagtaaagctttcttc

SEQ ID NO: 3825196 - DNA, 25 bp, Homo sapien
tggacacgagtcagtaaagctttct

SEQ ID NO: 3825197 - DNA, 25 bp, Homo sapien
taactttggcataatttcgggcaca

SEQ ID NO: 3825198 - DNA, 25 bp, Homo sapien
ggactcatacttggctctggactag

SEQ ID NO: 3825199 - DNA, 25 bp, Homo sapien
gatgtcctggaacgtcttcggtgca

SEQ ID NO: 3825200 - DNA, 25 bp, Homo sapien
gactctagaacagtgggatggccag

SEQ ID NO: 3825201 - DNA, 25 bp, Homo sapien
tattccacttgttatgacataaggg

SEQ ID NO: 3825202 - DNA, 25 bp, Homo sapien
tcatttccacaggacaccataggtg

SEQ ID NO: 3825203 - DNA, 25 bp, Homo sapien
taacgaagccagatcccttagggta

SEQ ID NO: 3825204 - DNA, 25 bp, Homo sapien
catctgctgtctcgtattctggttt

SEQ ID NO: 3825205 - DNA, 25 bp, Homo sapien
tgggcgtgctgttcttctagtctct

SEQ ID NO: 3825206 - DNA, 25 bp, Homo sapien
tcttgctttttagtaactcctcgct

SEQ ID NO: 3825207 - DNA, 25 bp, Homo sapien
tcctgctcagctatgagtagtgata

SEQ ID NO: 3825208 - DNA, 25 bp, Homo sapien
ttcttcaaaagctaacatcttgctt

SEQ ID NO: 3825209 - DNA, 25 bp, Homo sapien
cagttgtatctccctccacattcct

SEQ ID NO: 3825210 - DNA, 25 bp, Homo sapien
agttgtatctccctccacattcctc

SEQ ID NO: 3825211 - DNA, 25 bp, Homo sapien
ttgtatctccctccacattcctcac

SEQ ID NO: 3825212 - DNA, 25 bp, Homo sapien
gttgtatctccctccacattcctca

SEQ ID NO: 3825213 - DNA, 25 bp, Homo sapien
tgcagtggctagacaaaggcgaaat

SEQ ID NO: 3825214 - DNA, 25 bp, Homo sapien
tatgatacaactcctgcagaatgtg

SEQ ID NO: 3825215 - DNA, 25 bp, Homo sapien
caaaattcataggtatccttggcta

SEQ ID NO: 3825216 - DNA, 25 bp, Homo sapien
gataccacgcccagcatgagtgtca

SEQ ID NO: 3825217 - DNA, 25 bp, Homo sapien
gtttccagcaaactagagtcactta

SEQ ID NO: 3825218 - DNA, 25 bp, Homo sapien
aatttgaagtatggagtgagtccgc

SEQ ID NO: 3825219 - DNA, 25 bp, Homo sapien
tgtccaactcagaggcttccgctgt

SEQ ID NO: 3825220 - DNA, 25 bp, Homo sapien
tgagtccgcttgagacagcattgtt

SEQ ID NO: 3825221 - DNA, 25 bp, Homo sapien
tgagatatgaagataagctatttaa

SEQ ID NO: 3825222 - DNA, 25 bp, Homo sapien
taattgagatatgaagataagctat

SEQ ID NO: 3825223 - DNA, 25 bp, Homo sapien
attgagatatgaagataagctattt

SEQ ID NO: 3825224 - DNA, 25 bp, Homo sapien
tatgaagataagctatttaaaggga

SEQ ID NO: 3825225 - DNA, 25 bp, Homo sapien
ctgccgacttaaaatatttatggac

SEQ ID NO: 3825226 - DNA, 25 bp, Homo sapien
tgccgacttaaaatatttatggact

SEQ ID NO: 3825227 - DNA, 25 bp, Homo sapien
gaaacaaagctatattgcatggcag

SEQ ID NO: 3825228 - DNA, 25 bp, Homo sapien
cactagttgatgatccccagaggta

SEQ ID NO: 3825229 - DNA, 25 bp, Homo sapien
gagagtttggtcaagccactagttg

SEQ ID NO: 3825230 - DNA, 25 bp, Homo sapien
ttccaaaaggccttgttactgagag

SEQ ID NO: 3825231 - DNA, 25 bp, Homo sapien
gacagacacaatgtttattggtgtt

SEQ ID NO: 3825232 - DNA, 25 bp, Homo sapien
cagacacaatgtttattggtgttca

SEQ ID NO: 3825233 - DNA, 25 bp, Homo sapien
gaagacagacacaatgtttattggt

SEQ ID NO: 3825234 - DNA, 25 bp, Homo sapien
taatatagctcttaagaaaagataa

SEQ ID NO: 3825235 - DNA, 25 bp, Homo sapien
ttttacagtttgtcgaagttgcttc

SEQ ID NO: 3825236 - DNA, 25 bp, Homo sapien
gtctgcataagtctacgagtaagaa

SEQ ID NO: 3825237 - DNA, 25 bp, Homo sapien
tctacgagtaagaaatccttttgcc

SEQ ID NO: 3825238 - DNA, 25 bp, Homo sapien
tacagtttgtcgaagttgcttcagc

SEQ ID NO: 3825239 - DNA, 25 bp, Homo sapien
gaaatacaaacgatttacaggaatc

SEQ ID NO: 3825240 - DNA, 25 bp, Homo sapien
gactgatagaaactaagacagaagt

SEQ ID NO: 3825241 - DNA, 25 bp, Homo sapien
gacttcccgcaacaaacaatcagac

SEQ ID NO: 3825242 - DNA, 25 bp, Homo sapien
gaactaatctgttagctcagctgtc

SEQ ID NO: 3825243 - DNA, 25 bp, Homo sapien
ggactggttccatgaatccctcaga

SEQ ID NO: 3825244 - DNA, 25 bp, Homo sapien
aattacagtctttcgtcagtatctg

SEQ ID NO: 3825245 - DNA, 25 bp, Homo sapien
gtggaacccagagatagaggaccga

SEQ ID NO: 3825246 - DNA, 25 bp, Homo sapien
ggaccgactgtactaagaacataaa

SEQ ID NO: 3825247 - DNA, 25 bp, Homo sapien
tctctttaatggtgcttctgactga

SEQ ID NO: 3825248 - DNA, 25 bp, Homo sapien
tgagctaacactctttcctgaagtg

SEQ ID NO: 3825249 - DNA, 25 bp, Homo sapien
gaaaacttcttatgaattccatagt

SEQ ID NO: 3825250 - DNA, 25 bp, Homo sapien
tgactgaaaacttcttatgaattcc

SEQ ID NO: 3825251 - DNA, 25 bp, Homo sapien
tgaataccgtacaaggcagctcgca

SEQ ID NO: 3825252 - DNA, 25 bp, Homo sapien
cgatcatgatgtagaatagacattc

SEQ ID NO: 3825253 - DNA, 25 bp, Homo sapien
tctctttgcgaacttctcgatcatg

SEQ ID NO: 3825254 - DNA, 25 bp, Homo sapien
tctttcagctgcatccattacaaag

SEQ ID NO: 3825255 - DNA, 25 bp, Homo sapien
cttctgtgttgcagctgaaagagcc

SEQ ID NO: 3825256 - DNA, 25 bp, Homo sapien
ttcagaaggattttgtttaaccaga

SEQ ID NO: 3825257 - DNA, 25 bp, Homo sapien
tcagaaggattttgtttaaccagaa

SEQ ID NO: 3825258 - DNA, 25 bp, Homo sapien
caaatcagagcaaatcgactaaagc

SEQ ID NO: 3825259 - DNA, 25 bp, Homo sapien
caacatatagactaacccttgtgct

SEQ ID NO: 3825260 - DNA, 25 bp, Homo sapien
tgtattttgctcactaagagtccaa

SEQ ID NO: 3825261 - DNA, 25 bp, Homo sapien
actgtaaggtaaaggtcaactatgc

SEQ ID NO: 3825262 - DNA, 25 bp, Homo sapien
ccttgtctactaagtagcctatgaa

SEQ ID NO: 3825263 - DNA, 25 bp, Homo sapien
gaacaggtgcattctgtccttggtt

SEQ ID NO: 3825264 - DNA, 25 bp, Homo sapien
gtagcctatgaacaggtgcattctg

SEQ ID NO: 3825265 - DNA, 25 bp, Homo sapien
tactaagtagcctatgaacaggtgc

SEQ ID NO: 3825266 - DNA, 25 bp, Homo sapien
acaacccccttcactgatgtcttag

SEQ ID NO: 3825267 - DNA, 25 bp, Homo sapien
ctctgttaggcactctgctctgtga

SEQ ID NO: 3825268 - DNA, 25 bp, Homo sapien
ctgaaacaggcactctgttaggcac

SEQ ID NO: 3825269 - DNA, 25 bp, Homo sapien
gcttctgtctattttgcacaacccc

SEQ ID NO: 3825270 - DNA, 25 bp, Homo sapien
cacatgtgatcttatagtctgaggg

SEQ ID NO: 3825271 - DNA, 25 bp, Homo sapien
tgaacagacaatgcacagacttagc

SEQ ID NO: 3825272 - DNA, 25 bp, Homo sapien
caaagttacgaccaatagcttgttc

SEQ ID NO: 3825273 - DNA, 25 bp, Homo sapien
gagaaagtttatccccttatgtgca

SEQ ID NO: 3825274 - DNA, 25 bp, Homo sapien
cttttcaagagcgacagtgagttcc

SEQ ID NO: 3825275 - DNA, 25 bp, Homo sapien
aagaatacaattctggctggacgcg

SEQ ID NO: 3825276 - DNA, 25 bp, Homo sapien
tgagttcctgtgttcagattcatag

SEQ ID NO: 3825277 - DNA, 25 bp, Homo sapien
cagccaatatcccaaactctcagtt

SEQ ID NO: 3825278 - DNA, 25 bp, Homo sapien
aagaactctgataacccaagtccac

SEQ ID NO: 3825279 - DNA, 25 bp, Homo sapien
tgcctaaggaacagagctagaagga

SEQ ID NO: 3825280 - DNA, 25 bp, Homo sapien
ctgaggcataggagagcagttgcct

SEQ ID NO: 3825281 - DNA, 25 bp, Homo sapien
tcctgaggtagaaattgttatgacc

SEQ ID NO: 3825282 - DNA, 25 bp, Homo sapien
aacatttggccgctttctttggatt

SEQ ID NO: 3825283 - DNA, 25 bp, Homo sapien
tgtcgcaacatttggccgctttctt

SEQ ID NO: 3825284 - DNA, 25 bp, Homo sapien
gtcttcttaaattgtcgcaacattt

SEQ ID NO: 3825285 - DNA, 25 bp, Homo sapien
taaattgtcgcaacatttggccgct

SEQ ID NO: 3825286 - DNA, 25 bp, Homo sapien
cactttgtctgtgtaaacggagtcc

SEQ ID NO: 3825287 - DNA, 25 bp, Homo sapien
cagggttaaataaagtcttgggcag

SEQ ID NO: 3825288 - DNA, 25 bp, Homo sapien
ggtctctgtagacatctgggcatat

SEQ ID NO: 3825289 - DNA, 25 bp, Homo sapien
tataggtaagcacagagatgatgca

SEQ ID NO: 3825290 - DNA, 25 bp, Homo sapien
tagttgtctgacaggaatgtatgct

SEQ ID NO: 3825291 - DNA, 25 bp, Homo sapien
gaatgtatgcttctgaccaaaatgg

SEQ ID NO: 3825292 - DNA, 25 bp, Homo sapien
aacttctgtagattttagtgggcca

SEQ ID NO: 3825293 - DNA, 25 bp, Homo sapien
aaatggtgacccacattaacttctg

SEQ ID NO: 3825294 - DNA, 25 bp, Homo sapien
aatcaagtttacacccagggtggct

SEQ ID NO: 3825295 - DNA, 25 bp, Homo sapien
gtctggcacctgtatgagaagaagc

SEQ ID NO: 3825296 - DNA, 25 bp, Homo sapien
tgcattcccaagagctacattcaag

SEQ ID NO: 3825297 - DNA, 25 bp, Homo sapien
tggagagacccacaatgctatgaat

SEQ ID NO: 3825298 - DNA, 25 bp, Homo sapien
gaaagtatatccactcgtacctgct

SEQ ID NO: 3825299 - DNA, 25 bp, Homo sapien
ccctccagtgttcagctcagtatga

SEQ ID NO: 3825300 - DNA, 25 bp, Homo sapien
aaggatcatctccagaacgggccct

SEQ ID NO: 3825301 - DNA, 25 bp, Homo sapien
gatggtgacctatgacagggaaaag

SEQ ID NO: 3825302 - DNA, 25 bp, Homo sapien
agctgtctacagtgccgggtggtcc

SEQ ID NO: 3825303 - DNA, 25 bp, Homo sapien
catgcttcggaggagcaacgtcggc

SEQ ID NO: 3825304 - DNA, 25 bp, Homo sapien
gagcgaagacgcaaactgaggttca

SEQ ID NO: 3825305 - DNA, 25 bp, Homo sapien
ttcccacgactagcaaccgagggct

SEQ ID NO: 3825306 - DNA, 25 bp, Homo sapien
tcggccgccatgtttgtgaagggca

SEQ ID NO: 3825307 - DNA, 25 bp, Homo sapien
cttcccagtcacatgaccgcttgtt

SEQ ID NO: 3825308 - DNA, 25 bp, Homo sapien
gaccgcttgttctggggccgtctgc

SEQ ID NO: 3825309 - DNA, 25 bp, Homo sapien
tgctcggcttcccatccttaccccg

SEQ ID NO: 3825310 - DNA, 25 bp, Homo sapien
tttcagagggtgatagtccccaaac

SEQ ID NO: 3825311 - DNA, 25 bp, Homo sapien
atgggtttcagagggtgatagtccc

SEQ ID NO: 3825312 - DNA, 25 bp, Homo sapien
actccaatggtacagcctccagtcg

SEQ ID NO: 3825313 - DNA, 25 bp, Homo sapien
tcggcatgatgcaaattcagctttg

SEQ ID NO: 3825314 - DNA, 25 bp, Homo sapien
tcagtcccatcgaggacgctgctca

SEQ ID NO: 3825315 - DNA, 25 bp, Homo sapien
aggaggacgtggaagaagtgcttcc

SEQ ID NO: 3825316 - DNA, 25 bp, Homo sapien
tcagcgggtccaccacggagctgga

SEQ ID NO: 3825317 - DNA, 25 bp, Homo sapien
gggtcagtcccatcgaggacgctgc

SEQ ID NO: 3825318 - DNA, 25 bp, Homo sapien
gacagcttttcggtagtggtgtacc

SEQ ID NO: 3825319 - DNA, 25 bp, Homo sapien
tccgatcctacaacggagttatcat

SEQ ID NO: 3825320 - DNA, 25 bp, Homo sapien
tggtgtaccgggcaaggatttctcc

SEQ ID NO: 3825321 - DNA, 25 bp, Homo sapien
tggtccaaggctcaaaatccgatcc

SEQ ID NO: 3825322 - DNA, 25 bp, Homo sapien
ctttttcagatcccataaacagatt

SEQ ID NO: 3825323 - DNA, 25 bp, Homo sapien
ccgcaccaggccatatatatatatt

SEQ ID NO: 3825324 - DNA, 25 bp, Homo sapien
tttaagacggcattcctgtcaccca

SEQ ID NO: 3825325 - DNA, 25 bp, Homo sapien
tttttttaagacggcattcctgtca

SEQ ID NO: 3825326 - DNA, 25 bp, Homo sapien
caccgcaccaggccatatatatata

SEQ ID NO: 3825327 - DNA, 25 bp, Homo sapien
catcgaaacatttcccacttagaag

SEQ ID NO: 3825328 - DNA, 25 bp, Homo sapien
ttcatcgtgaataaagacacaaggg

SEQ ID NO: 3825329 - DNA, 25 bp, Homo sapien
aaagcaacttccttatgtaaccaga

SEQ ID NO: 3825330 - DNA, 25 bp, Homo sapien
gcctcaaagaggttaaccgctgcat

SEQ ID NO: 3825331 - DNA, 25 bp, Homo sapien
tggcttttctcgtgcaccaataccc

SEQ ID NO: 3825332 - DNA, 25 bp, Homo sapien
cacaggtggcttttctcgtgcacca

SEQ ID NO: 3825333 - DNA, 25 bp, Homo sapien
ctaaacagaatgaatttacgtcaca

SEQ ID NO: 3825334 - DNA, 25 bp, Homo sapien
gaatttacgtcacacaggtggcttt

SEQ ID NO: 3825335 - DNA, 25 bp, Homo sapien
gggtccgcaccttctctgacattgc

SEQ ID NO: 3825336 - DNA, 25 bp, Homo sapien
ccgcaccttctctgacattgccaat

SEQ ID NO: 3825337 - DNA, 25 bp, Homo sapien
ccgggtccgcaccttctctgacatt

SEQ ID NO: 3825338 - DNA, 25 bp, Homo sapien
gtccgcaccttctctgacattgcca

SEQ ID NO: 3825339 - DNA, 25 bp, Homo sapien
ggttcacgtaatcctgctgagtcaa

SEQ ID NO: 3825340 - DNA, 25 bp, Homo sapien
ccaggcatccttcagcgattggttg

SEQ ID NO: 3825341 - DNA, 25 bp, Homo sapien
tcctgctgagtcaagttcaacagct

SEQ ID NO: 3825342 - DNA, 25 bp, Homo sapien
gattggttgagctcctctatgcggt

SEQ ID NO: 3825343 - DNA, 25 bp, Homo sapien
caagcgaatgcggtcaaggaatccc

SEQ ID NO: 3825344 - DNA, 25 bp, Homo sapien
ggaatcccgaaagaaagttgctcaa

SEQ ID NO: 3825345 - DNA, 25 bp, Homo sapien
agagtaagaccctgcaggtaggccc

SEQ ID NO: 3825346 - DNA, 25 bp, Homo sapien
taatcccaaagacaccaagcgaatg

SEQ ID NO: 3825347 - DNA, 25 bp, Homo sapien
aagaaatcagagacgtgtgaggtga

SEQ ID NO: 3825348 - DNA, 25 bp, Homo sapien
cagagacgtgtgaggtgatgaatat

SEQ ID NO: 3825349 - DNA, 25 bp, Homo sapien
caaagaaatcagagacgtgtgaggt

SEQ ID NO: 3825350 - DNA, 25 bp, Homo sapien
aaatcagagacgtgtgaggtgatga

SEQ ID NO: 3825351 - DNA, 25 bp, Homo sapien
attatttagatccttaccttatagg

SEQ ID NO: 3825352 - DNA, 25 bp, Homo sapien
ttttcaacaaacgttgctgagacaa

SEQ ID NO: 3825353 - DNA, 25 bp, Homo sapien
acaaacgttgctgagacaactgtag

SEQ ID NO: 3825354 - DNA, 25 bp, Homo sapien
tatttagatccttaccttataggat

SEQ ID NO: 3825355 - DNA, 25 bp, Homo sapien
tgttcaattgctttgcagactggct

SEQ ID NO: 3825356 - DNA, 25 bp, Homo sapien
ccataagtaaatccccaaggcttca

SEQ ID NO: 3825357 - DNA, 25 bp, Homo sapien
ggatcctgcttgtatactgaaccag

SEQ ID NO: 3825358 - DNA, 25 bp, Homo sapien
gaaccaggaagcactcaaaatcact

SEQ ID NO: 3825359 - DNA, 25 bp, Homo sapien
gacaaatttgcttgggtagaactga

SEQ ID NO: 3825360 - DNA, 25 bp, Homo sapien
taaggacaaatttgcttgggtagaa

SEQ ID NO: 3825361 - DNA, 25 bp, Homo sapien
aatgtatcaagtatgtcggtgataa

SEQ ID NO: 3825362 - DNA, 25 bp, Homo sapien
caagtatgtcggtgataaggacaaa

SEQ ID NO: 3825363 - DNA, 25 bp, Homo sapien
caggcctccggtctcttggacagga

SEQ ID NO: 3825364 - DNA, 25 bp, Homo sapien
cagtgatgcaggaagctatccaggt

SEQ ID NO: 3825365 - DNA, 25 bp, Homo sapien
gagcccattagtccctgtaagacag

SEQ ID NO: 3825366 - DNA, 25 bp, Homo sapien
ttgttttagctagcgcactcaggcc

SEQ ID NO: 3825367 - DNA, 25 bp, Homo sapien
agacattatacttcctatgaatcct

SEQ ID NO: 3825368 - DNA, 25 bp, Homo sapien
ggtgttagtatcacactcttcagga

SEQ ID NO: 3825369 - DNA, 25 bp, Homo sapien
tatcacactcttcaggagcaaacag

SEQ ID NO: 3825370 - DNA, 25 bp, Homo sapien
cactcttcaggagcaaacagtaaat

SEQ ID NO: 3825371 - DNA, 25 bp, Homo sapien
gaaaaggacagatggtgttagtatc

SEQ ID NO: 3825372 - DNA, 25 bp, Homo sapien
ctggtaagacgctgcggctatccac

SEQ ID NO: 3825373 - DNA, 25 bp, Homo sapien
gaaaagatgcgctcgtacacgagct

SEQ ID NO: 3825374 - DNA, 25 bp, Homo sapien
cacatggaaaagatgcgctcgtaca

SEQ ID NO: 3825375 - DNA, 25 bp, Homo sapien
cgctgcggctatccacacacatgga

SEQ ID NO: 3825376 - DNA, 25 bp, Homo sapien
aataaaagccttctagtcctgactc

SEQ ID NO: 3825377 - DNA, 25 bp, Homo sapien
caagcttcaatgaatcctgactcaa

SEQ ID NO: 3825378 - DNA, 25 bp, Homo sapien
gaatcctgactcaataaaagccttc

SEQ ID NO: 3825379 - DNA, 25 bp, Homo sapien
taaaacctttatcaagcttcaatga

SEQ ID NO: 3825380 - DNA, 25 bp, Homo sapien
gagggaacgatacataggaaaaata

SEQ ID NO: 3825381 - DNA, 25 bp, Homo sapien
caagcagcagaggaaaatatgttcg

SEQ ID NO: 3825382 - DNA, 25 bp, Homo sapien
cctgagttcctacacgggccattta

SEQ ID NO: 3825383 - DNA, 25 bp, Homo sapien
gctgaatctaactgtgaggcctttg

SEQ ID NO: 3825384 - DNA, 25 bp, Homo sapien
tacggacctgcgactgcaacatgaa

SEQ ID NO: 3825385 - DNA, 25 bp, Homo sapien
tcactatgacaacattgttgagaat

SEQ ID NO: 3825386 - DNA, 25 bp, Homo sapien
attccagatgctttacggacctgcg

SEQ ID NO: 3825387 - DNA, 25 bp, Homo sapien
gatgctttacggacctgcgactgca

SEQ ID NO: 3825388 - DNA, 25 bp, Homo sapien
gttagaattcaacccaggcactctg

SEQ ID NO: 3825389 - DNA, 25 bp, Homo sapien
atgtaagagttagaattcaacccag

SEQ ID NO: 3825390 - DNA, 25 bp, Homo sapien
aggcactctggccctgcggccgaca

SEQ ID NO: 3825391 - DNA, 25 bp, Homo sapien
cacagcaagcaaatgtaagagttag

SEQ ID NO: 3825392 - DNA, 25 bp, Homo sapien
ttggaatgagttccctgatggaggc

SEQ ID NO: 3825393 - DNA, 25 bp, Homo sapien
ccttggccgtgtcatttgcattctc

SEQ ID NO: 3825394 - DNA, 25 bp, Homo sapien
ggaatgagttccctgatggaggcaa

SEQ ID NO: 3825395 - DNA, 25 bp, Homo sapien
catgtttccttggccgtgtcatttg

SEQ ID NO: 3825396 - DNA, 25 bp, Homo sapien
gcaagagtccaagggtttctacaat

SEQ ID NO: 3825397 - DNA, 25 bp, Homo sapien
tcaataagaatgtcagggcatccca

SEQ ID NO: 3825398 - DNA, 25 bp, Homo sapien
tcttcaatagtagcatttgccctgc

SEQ ID NO: 3825399 - DNA, 25 bp, Homo sapien
gacacatggcatcgtattcaaagta

SEQ ID NO: 3825400 - DNA, 25 bp, Homo sapien
ttgttacatttcaggatggatgcct

SEQ ID NO: 3825401 - DNA, 25 bp, Homo sapien
ggagaggaatttgttacatttcagg

SEQ ID NO: 3825402 - DNA, 25 bp, Homo sapien
tttgttacatttcaggatggatgcc

SEQ ID NO: 3825403 - DNA, 25 bp, Homo sapien
ggaatttgttacatttcaggatgga

SEQ ID NO: 3825404 - DNA, 25 bp, Homo sapien
cattttttccccagtcgaggtcaca

SEQ ID NO: 3825405 - DNA, 25 bp, Homo sapien
tagagctatctgtggagcaccatga

SEQ ID NO: 3825406 - DNA, 25 bp, Homo sapien
caattattttccatcgactgggcac

SEQ ID NO: 3825407 - DNA, 25 bp, Homo sapien
taaattgagtggcatggacctaagc

SEQ ID NO: 3825408 - DNA, 25 bp, Homo sapien
tcaaccggggcaggcactctgaaat

SEQ ID NO: 3825409 - DNA, 25 bp, Homo sapien
tacaccgacactagtgggtctccga

SEQ ID NO: 3825410 - DNA, 25 bp, Homo sapien
cctctgatcatgcatgtcaaccggg

SEQ ID NO: 3825411 - DNA, 25 bp, Homo sapien
ccggcacaggtaggcacgggcatac

SEQ ID NO: 3825412 - DNA, 25 bp, Homo sapien
aagggcagtgactcgcatggcctac

SEQ ID NO: 3825413 - DNA, 25 bp, Homo sapien
ggagacgggtggcagccgtgccgtc

SEQ ID NO: 3825414 - DNA, 25 bp, Homo sapien
gccgtcaagggcagtgactcgcatg

SEQ ID NO: 3825415 - DNA, 25 bp, Homo sapien
cagccgtgccgtcaagggcagtgac

SEQ ID NO: 3825416 - DNA, 25 bp, Homo sapien
tgtaagaagatgaccttaaacgtcc

SEQ ID NO: 3825417 - DNA, 25 bp, Homo sapien
agcaacctgttagcccaaaggccct

SEQ ID NO: 3825418 - DNA, 25 bp, Homo sapien
taaacgtcccctaattagagctaca

SEQ ID NO: 3825419 - DNA, 25 bp, Homo sapien
gagctacagtaagttggtctacttt

SEQ ID NO: 3825420 - DNA, 25 bp, Homo sapien
caagcagtgggcgatgcatacacac

SEQ ID NO: 3825421 - DNA, 25 bp, Homo sapien
ccccaggtttcaagcagtgggcgat

SEQ ID NO: 3825422 - DNA, 25 bp, Homo sapien
tgggcgatgcatacacactttggcc

SEQ ID NO: 3825423 - DNA, 25 bp, Homo sapien
cgatgcatacacactttggcctctg

SEQ ID NO: 3825424 - DNA, 25 bp, Homo sapien
ttgcatctctcccagaggatgtggc

SEQ ID NO: 3825425 - DNA, 25 bp, Homo sapien
aagaaatatgcaaacaatatctttg

SEQ ID NO: 3825426 - DNA, 25 bp, Homo sapien
atctctcccagaggatgtggcattg

SEQ ID NO: 3825427 - DNA, 25 bp, Homo sapien
cccagaggatgtggcattgtgttct

SEQ ID NO: 3825428 - DNA, 25 bp, Homo sapien
tgaactgggttttgccacttggaac

SEQ ID NO: 3825429 - DNA, 25 bp, Homo sapien
ttgacagcaccctttgagggcctgc

SEQ ID NO: 3825430 - DNA, 25 bp, Homo sapien
cagacactggccagtaagttcttac

SEQ ID NO: 3825431 - DNA, 25 bp, Homo sapien
tcttactaatacacaggctgtctct

SEQ ID NO: 3825432 - DNA, 25 bp, Homo sapien
cccatggccacgtgactagtctagg

SEQ ID NO: 3825433 - DNA, 25 bp, Homo sapien
tcatcgggccaaatgagcagcttgg

SEQ ID NO: 3825434 - DNA, 25 bp, Homo sapien
tagatctactggcaagaagacacac

SEQ ID NO: 3825435 - DNA, 25 bp, Homo sapien
tgtgacccagtcagtaagtacccag

SEQ ID NO: 3825436 - DNA, 25 bp, Homo sapien
taacaatgctataatccactgggtc

SEQ ID NO: 3825437 - DNA, 25 bp, Homo sapien
aaaacaacttcgtaggctgggctgc

SEQ ID NO: 3825438 - DNA, 25 bp, Homo sapien
gaaatgcttcgtttccaaattgctg

SEQ ID NO: 3825439 - DNA, 25 bp, Homo sapien
tcatagagaaggtgccagtactggg

SEQ ID NO: 3825440 - DNA, 25 bp, Homo sapien
tgtttgaacgtaaggaggaagtcaa

SEQ ID NO: 3825441 - DNA, 25 bp, Homo sapien
ctgtttgaacgtaaggaggaagtca

SEQ ID NO: 3825442 - DNA, 25 bp, Homo sapien
agctggttctggaccgtatccccat

SEQ ID NO: 3825443 - DNA, 25 bp, Homo sapien
ggttctggaccgtatccccatgaat

SEQ ID NO: 3825444 - DNA, 25 bp, Homo sapien
catggcaggcgggtacaaggggagg

SEQ ID NO: 3825445 - DNA, 25 bp, Homo sapien
tgcactggaagatccagtccatggc

SEQ ID NO: 3825446 - DNA, 25 bp, Homo sapien
cacttaggtacatggcctctggagc

SEQ ID NO: 3825447 - DNA, 25 bp, Homo sapien
tacatgaaggttaagtgaagacgca

SEQ ID NO: 3825448 - DNA, 25 bp, Homo sapien
actgctggcctgaagtgaactaccc

SEQ ID NO: 3825449 - DNA, 25 bp, Homo sapien
caataaggcttgttggccctggagc

SEQ ID NO: 3825450 - DNA, 25 bp, Homo sapien
accaagaaaacagtcgagttcatgg

SEQ ID NO: 3825451 - DNA, 25 bp, Homo sapien
gaaaacagtcgagttcatggtaccc

SEQ ID NO: 3825452 - DNA, 25 bp, Homo sapien
acagcatgtggttgctgaaactatg

SEQ ID NO: 3825453 - DNA, 25 bp, Homo sapien
aaacagtcgagttcatggtaccctt

SEQ ID NO: 3825454 - DNA, 25 bp, Homo sapien
tatatggagttggagaaccacaacc

SEQ ID NO: 3825455 - DNA, 25 bp, Homo sapien
tggagtattcatcccaattgaagga

SEQ ID NO: 3825456 - DNA, 25 bp, Homo sapien
gtagagagaagtcctgggtacccac

SEQ ID NO: 3825457 - DNA, 25 bp, Homo sapien
taggaaactgacactagtataacac

SEQ ID NO: 3825458 - DNA, 25 bp, Homo sapien
agaggtaattacaggacactgagca

SEQ ID NO: 3825459 - DNA, 25 bp, Homo sapien
tcaccatgtccttgtgaggtccatg

SEQ ID NO: 3825460 - DNA, 25 bp, Homo sapien
ggaatactgttaatggctttggagc

SEQ ID NO: 3825461 - DNA, 25 bp, Homo sapien
agcactgcccaggtttcgggctaag

SEQ ID NO: 3825462 - DNA, 25 bp, Homo sapien
tcctagtttcttacacctttccatc

SEQ ID NO: 3825463 - DNA, 25 bp, Homo sapien
cctagtttcttacacctttccatca

SEQ ID NO: 3825464 - DNA, 25 bp, Homo sapien
ctagtttcttacacctttccatcat

SEQ ID NO: 3825465 - DNA, 25 bp, Homo sapien
gaccttgtggcgatgaactcagccc

SEQ ID NO: 3825466 - DNA, 25 bp, Homo sapien
actcagcccggaaggcagacatcac

SEQ ID NO: 3825467 - DNA, 25 bp, Homo sapien
tgccaatgaaatccatagaccttgt

SEQ ID NO: 3825468 - DNA, 25 bp, Homo sapien
catcacagaattcaacagcaaggca

SEQ ID NO: 3825469 - DNA, 25 bp, Homo sapien
tcgttgagaatctgaagtcggtcac

SEQ ID NO: 3825470 - DNA, 25 bp, Homo sapien
ggtcactctcaggaggatcagccaa

SEQ ID NO: 3825471 - DNA, 25 bp, Homo sapien
tgatgactttccaagcttcgttgag

SEQ ID NO: 3825472 - DNA, 25 bp, Homo sapien
tcagccaaggccaagtttaatccca

SEQ ID NO: 3825473 - DNA, 25 bp, Homo sapien
aaatgcttgcaggtgtattccaccc

SEQ ID NO: 3825474 - DNA, 25 bp, Homo sapien
atgcttgcaggtgtattccacccac

SEQ ID NO: 3825475 - DNA, 25 bp, Homo sapien
aatgcttgcaggtgtattccaccca

SEQ ID NO: 3825476 - DNA, 25 bp, Homo sapien
cacgatctggagtcatgtgcttgat

SEQ ID NO: 3825477 - DNA, 25 bp, Homo sapien
tgccaaaacggtattcacctctcgt

SEQ ID NO: 3825478 - DNA, 25 bp, Homo sapien
gggtaggaatcttcaaatgcacgat

SEQ ID NO: 3825479 - DNA, 25 bp, Homo sapien
catctgccaaaacggtattcacctc

SEQ ID NO: 3825480 - DNA, 25 bp, Homo sapien
tggaagtgggcaataactttcttaa

SEQ ID NO: 3825481 - DNA, 25 bp, Homo sapien
tcatggaagtgggcaataactttct

SEQ ID NO: 3825482 - DNA, 25 bp, Homo sapien
aaaagaactgagaagtcatggaagt

SEQ ID NO: 3825483 - DNA, 25 bp, Homo sapien
catggaagtgggcaataactttctt

SEQ ID NO: 3825484 - DNA, 25 bp, Homo sapien
aatcttgtgagcacatgtaaatgga

SEQ ID NO: 3825485 - DNA, 25 bp, Homo sapien
gataaaggcgtccatgatgcatttg

SEQ ID NO: 3825486 - DNA, 25 bp, Homo sapien
taaaggcgtccatgatgcatttgca

SEQ ID NO: 3825487 - DNA, 25 bp, Homo sapien
catgtccagaaacggcagaaatttt

SEQ ID NO: 3825488 - DNA, 25 bp, Homo sapien
cactctctttttggaacatgtccag

SEQ ID NO: 3825489 - DNA, 25 bp, Homo sapien
agggcattcaagatgaccgggtcct

SEQ ID NO: 3825490 - DNA, 25 bp, Homo sapien
gcaaacatgcaaaagggcattcaag

SEQ ID NO: 3825491 - DNA, 25 bp, Homo sapien
cattcaagatgaccgggtccttggt

SEQ ID NO: 3825492 - DNA, 25 bp, Homo sapien
gtcatgcatggtcttgcaaacatgc

SEQ ID NO: 3825493 - DNA, 25 bp, Homo sapien
aaatccattaatcaaatatgacagc

SEQ ID NO: 3825494 - DNA, 25 bp, Homo sapien
catttttataaatccattaatcaaa

SEQ ID NO: 3825495 - DNA, 25 bp, Homo sapien
aatatgacagcattcttttctcatc

SEQ ID NO: 3825496 - DNA, 25 bp, Homo sapien
tttctcatcctcaagagtgagtgca

SEQ ID NO: 3825497 - DNA, 25 bp, Homo sapien
gctgatccgcagagtttgagaacta

SEQ ID NO: 3825498 - DNA, 25 bp, Homo sapien
actgtgtgatttctaagccttggcc

SEQ ID NO: 3825499 - DNA, 25 bp, Homo sapien
taagagagctcaactggaatcactg

SEQ ID NO: 3825500 - DNA, 25 bp, Homo sapien
cctgtagcagcctggttaccaagct

SEQ ID NO: 3825501 - DNA, 25 bp, Homo sapien
cataaaaactcagctgttgttcaaa

SEQ ID NO: 3825502 - DNA, 25 bp, Homo sapien
tgttcaaaatcacggccaaaggaaa

SEQ ID NO: 3825503 - DNA, 25 bp, Homo sapien
tgaatcaactgcacaagaacaggct

SEQ ID NO: 3825504 - DNA, 25 bp, Homo sapien
cagattgcaaaacatcgacctggac

SEQ ID NO: 3825505 - DNA, 25 bp, Homo sapien
tgtctccattgccaaccggttcaca

SEQ ID NO: 3825506 - DNA, 25 bp, Homo sapien
cttgtctccattgccaaccggttca

SEQ ID NO: 3825507 - DNA, 25 bp, Homo sapien
ttcttgtctccattgccaaccggtt

SEQ ID NO: 3825508 - DNA, 25 bp, Homo sapien
tctccattgccaaccggttcacact

SEQ ID NO: 3825509 - DNA, 25 bp, Homo sapien
cttgggagaggcactggttggccaa

SEQ ID NO: 3825510 - DNA, 25 bp, Homo sapien
ttgagacgtgtgaagatgcccgcca

SEQ ID NO: 3825511 - DNA, 25 bp, Homo sapien
agaggcactggttggccaaggccac

SEQ ID NO: 3825512 - DNA, 25 bp, Homo sapien
tagagattgagacgtgtgaagatgc

SEQ ID NO: 3825513 - DNA, 25 bp, Homo sapien
tcactctccaattggcccagaatgc

SEQ ID NO: 3825514 - DNA, 25 bp, Homo sapien
cactctccaattggcccagaatgcc

SEQ ID NO: 3825515 - DNA, 25 bp, Homo sapien
tcaagaggcaagtgttcagctgcac

SEQ ID NO: 3825516 - DNA, 25 bp, Homo sapien
gctctgaactgggagaccactgagt

SEQ ID NO: 3825517 - DNA, 25 bp, Homo sapien
gaagcaggcctgtgtgactaaagca

SEQ ID NO: 3825518 - DNA, 25 bp, Homo sapien
gaccactgagtgtgttcaaagaaca

SEQ ID NO: 3825519 - DNA, 25 bp, Homo sapien
taatatatcgtacaggatgacctga

SEQ ID NO: 3825520 - DNA, 25 bp, Homo sapien
gaaaaagcacaggtgagcggataat

SEQ ID NO: 3825521 - DNA, 25 bp, Homo sapien
ctcatggaggtgatgcgcttacagg

SEQ ID NO: 3825522 - DNA, 25 bp, Homo sapien
agccattacagtttgtggtagccag

SEQ ID NO: 3825523 - DNA, 25 bp, Homo sapien
catacaaaggcaatacaagtttgct

SEQ ID NO: 3825524 - DNA, 25 bp, Homo sapien
caatgtactccctatttaaccagag

SEQ ID NO: 3825525 - DNA, 25 bp, Homo sapien
ttaaccagagtaggacaaggtggag

SEQ ID NO: 3825526 - DNA, 25 bp, Homo sapien
aatgttcagtcctagaaatgtataa

SEQ ID NO: 3825527 - DNA, 25 bp, Homo sapien
caccgtgccaggctaatttttgtat

SEQ ID NO: 3825528 - DNA, 25 bp, Homo sapien
ccaccgtgccaggctaatttttgta

SEQ ID NO: 3825529 - DNA, 25 bp, Homo sapien
ggctggaatgcggtgatgtgatctc

SEQ ID NO: 3825530 - DNA, 25 bp, Homo sapien
gctggaatgcggtgatgtgatctca

SEQ ID NO: 3825531 - DNA, 25 bp, Homo sapien
tattaatcatctttggaacttccgg

SEQ ID NO: 3825532 - DNA, 25 bp, Homo sapien
tccggaacaaggcttatagcggctt

SEQ ID NO: 3825533 - DNA, 25 bp, Homo sapien
aaaagaaattgcagaggaattccag

SEQ ID NO: 3825534 - DNA, 25 bp, Homo sapien
gaaggaacgattccgatggccgcat

SEQ ID NO: 3825535 - DNA, 25 bp, Homo sapien
tgcctctctgcagataaaccaagcg

SEQ ID NO: 3825536 - DNA, 25 bp, Homo sapien
gcattgccattatatccaacgtgaa

SEQ ID NO: 3825537 - DNA, 25 bp, Homo sapien
tactggtaccagattcgcactgcct

SEQ ID NO: 3825538 - DNA, 25 bp, Homo sapien
tatgttccagggtgatactacgacg

SEQ ID NO: 3825539 - DNA, 25 bp, Homo sapien
ggatggtgtccctgatgacattcaa

SEQ ID NO: 3825540 - DNA, 25 bp, Homo sapien
tgcatttgccaatacaccgccaggt

SEQ ID NO: 3825541 - DNA, 25 bp, Homo sapien
ctctctgtttcatgctagcctataa

SEQ ID NO: 3825542 - DNA, 25 bp, Homo sapien
tattctgttaatggcgcctccagga

SEQ ID NO: 3825543 - DNA, 25 bp, Homo sapien
cctgtctgggcaaacgagctttgag

SEQ ID NO: 3825544 - DNA, 25 bp, Homo sapien
tagaagccacctacgctgggtgagc

SEQ ID NO: 3825545 - DNA, 25 bp, Homo sapien
cacaaaagcaggatcgcgggtatcg

SEQ ID NO: 3825546 - DNA, 25 bp, Homo sapien
tagcagatggaacggtagaagccac

SEQ ID NO: 3825547 - DNA, 25 bp, Homo sapien
tgttgtcctcccaggtgtagtcctg

SEQ ID NO: 3825548 - DNA, 25 bp, Homo sapien
tagtcctggatcacgttgagaagct

SEQ ID NO: 3825549 - DNA, 25 bp, Homo sapien
gagaagctctcgaacaagaaacagg

SEQ ID NO: 3825550 - DNA, 25 bp, Homo sapien
ggtaaaggtacgtctcctggctcat

SEQ ID NO: 3825551 - DNA, 25 bp, Homo sapien
taaaaaattatccaggagcagtggc

SEQ ID NO: 3825552 - DNA, 25 bp, Homo sapien
tttaaaaaattatccaggagcagtg

SEQ ID NO: 3825553 - DNA, 25 bp, Homo sapien
aatttaaaaaattatccaggagcag

SEQ ID NO: 3825554 - DNA, 25 bp, Homo sapien
aattatccaggagcagtggcacatg

SEQ ID NO: 3825555 - DNA, 25 bp, Homo sapien
tcacttgtaagtgggccccaagcat

SEQ ID NO: 3825556 - DNA, 25 bp, Homo sapien
cccaagcattgggtacccatgggca

SEQ ID NO: 3825557 - DNA, 25 bp, Homo sapien
tattgggtactatctcatttgcacc

SEQ ID NO: 3825558 - DNA, 25 bp, Homo sapien
cagacattggagaccactagagtgg

SEQ ID NO: 3825559 - DNA, 25 bp, Homo sapien
tcaggagagagagtggtgtgtcttc

SEQ ID NO: 3825560 - DNA, 25 bp, Homo sapien
atttcttgatctggactgtggttac

SEQ ID NO: 3825561 - DNA, 25 bp, Homo sapien
tggttacctgcgagtgttcactttg

SEQ ID NO: 3825562 - DNA, 25 bp, Homo sapien
tcttcgagagtagggtggtgatgct

SEQ ID NO: 3825563 - DNA, 25 bp, Homo sapien
gcgattgattgctcgtctgacacca

SEQ ID NO: 3825564 - DNA, 25 bp, Homo sapien
caccacctgattgtgcagggcagca

SEQ ID NO: 3825565 - DNA, 25 bp, Homo sapien
ggactctgctgggatacttccccaa

SEQ ID NO: 3825566 - DNA, 25 bp, Homo sapien
gctgaggaccagaatagttcctgca

SEQ ID NO: 3825567 - DNA, 25 bp, Homo sapien
aaccaagagccatgcctgtgcctcg

SEQ ID NO: 3825568 - DNA, 25 bp, Homo sapien
cacggctaatccagttttgtggctt

SEQ ID NO: 3825569 - DNA, 25 bp, Homo sapien
gcggccacaagtgcacacggctaat

SEQ ID NO: 3825570 - DNA, 25 bp, Homo sapien
gagtgcgtggatatctcataaacca

SEQ ID NO: 3825571 - DNA, 25 bp, Homo sapien
gctttcattccagctaccagatggg

SEQ ID NO: 3825572 - DNA, 25 bp, Homo sapien
accagatggggacttgtatgtggcc

SEQ ID NO: 3825573 - DNA, 25 bp, Homo sapien
ttccatgggatcctcttacagctgc

SEQ ID NO: 3825574 - DNA, 25 bp, Homo sapien
ggacttgtatgtggccgagcataac

SEQ ID NO: 3825575 - DNA, 25 bp, Homo sapien
gctgcaaaccctagagttcacaaca

SEQ ID NO: 3825576 - DNA, 25 bp, Homo sapien
ctctgcctacagagccagttctttc

SEQ ID NO: 3825577 - DNA, 25 bp, Homo sapien
ttccacacccacatgagctcacata

SEQ ID NO: 3825578 - DNA, 25 bp, Homo sapien
gcaaaccctagagttcacaacaaaa

SEQ ID NO: 3825579 - DNA, 25 bp, Homo sapien
gtacagctctgttgctttgttgtca

SEQ ID NO: 3825580 - DNA, 25 bp, Homo sapien
gggcgctacgcgtacagctctgttg

SEQ ID NO: 3825581 - DNA, 25 bp, Homo sapien
gctacgcgtacagctctgttgcttt

SEQ ID NO: 3825582 - DNA, 25 bp, Homo sapien
taagggggcgctacgcgtacagctc

SEQ ID NO: 3825583 - DNA, 25 bp, Homo sapien
agcacgcctggctatttttttaatt

SEQ ID NO: 3825584 - DNA, 25 bp, Homo sapien
tattcttttatttttaatagagatg

SEQ ID NO: 3825585 - DNA, 25 bp, Homo sapien
ggaattataggcacctgccagcacg

SEQ ID NO: 3825586 - DNA, 25 bp, Homo sapien
acctccgcctcaaggctcaagcagt

SEQ ID NO: 3825587 - DNA, 25 bp, Homo sapien
cgtccttggccagggttttcagatg

SEQ ID NO: 3825588 - DNA, 25 bp, Homo sapien
caccgtctcacacagcttgttgttt

SEQ ID NO: 3825589 - DNA, 25 bp, Homo sapien
tctcccccgtagaggctgtcgttgg

SEQ ID NO: 3825590 - DNA, 25 bp, Homo sapien
tctgagccatcaccgtctcacacag

SEQ ID NO: 3825591 - DNA, 25 bp, Homo sapien
tcagggttttccaacagcaagaagc

SEQ ID NO: 3825592 - DNA, 25 bp, Homo sapien
ggtaccagacttcagaggactccag

SEQ ID NO: 3825593 - DNA, 25 bp, Homo sapien
tcagaacggcacaggcatcagggtt

SEQ ID NO: 3825594 - DNA, 25 bp, Homo sapien
cacggttgctaccagagctgcgata

SEQ ID NO: 3825595 - DNA, 25 bp, Homo sapien
cagaaaagggaggttactgccttgc

SEQ ID NO: 3825596 - DNA, 25 bp, Homo sapien
gtgccccgcagagatgctgtggaca

SEQ ID NO: 3825597 - DNA, 25 bp, Homo sapien
aagggaggttactgccttgcactgg

SEQ ID NO: 3825598 - DNA, 25 bp, Homo sapien
ggctcaggccgtgccccgcagagat

SEQ ID NO: 3825599 - DNA, 25 bp, Homo sapien
caggtgccacaggttgacggagagc

SEQ ID NO: 3825600 - DNA, 25 bp, Homo sapien
agctggttgagcttgttgttgcgta

SEQ ID NO: 3825601 - DNA, 25 bp, Homo sapien
gtaggtccccatgggccaagatgct

SEQ ID NO: 3825602 - DNA, 25 bp, Homo sapien
aggaaaggcccaacgagctctggcg

SEQ ID NO: 3825603 - DNA, 25 bp, Homo sapien
tgcagagggagtctgagggccagct

SEQ ID NO: 3825604 - DNA, 25 bp, Homo sapien
cgtcagatgagtcatgtctggttgt

SEQ ID NO: 3825605 - DNA, 25 bp, Homo sapien
tcttgatgtattctagcgttttcac

SEQ ID NO: 3825606 - DNA, 25 bp, Homo sapien
gtttgctttgcttcttgatgtattc

SEQ ID NO: 3825607 - DNA, 25 bp, Homo sapien
ccctgagcctggggatgggcccggg

SEQ ID NO: 3825608 - DNA, 25 bp, Homo sapien
tccctgagcctggggatgggcccgg

SEQ ID NO: 3825609 - DNA, 25 bp, Homo sapien
ctgagcctggggatgggcccggggg

SEQ ID NO: 3825610 - DNA, 25 bp, Homo sapien
cctgagcctggggatgggcccgggg

SEQ ID NO: 3825611 - DNA, 25 bp, Homo sapien
atgagaaacctaaattgccgtaaga

SEQ ID NO: 3825612 - DNA, 25 bp, Homo sapien
aatgagaaacctaaattgccgtaag

SEQ ID NO: 3825613 - DNA, 25 bp, Homo sapien
tgagaaacctaaattgccgtaagag

SEQ ID NO: 3825614 - DNA, 25 bp, Homo sapien
gattctaagtccaatcaagagctgc

SEQ ID NO: 3825615 - DNA, 25 bp, Homo sapien
catcagatcgggctgagtagaccga

SEQ ID NO: 3825616 - DNA, 25 bp, Homo sapien
gaaggccacttgtgcaaagacaaca

SEQ ID NO: 3825617 - DNA, 25 bp, Homo sapien
gggttcaggtaacacagttccagac

SEQ ID NO: 3825618 - DNA, 25 bp, Homo sapien
cagttccaggcagcatatcaagacc

SEQ ID NO: 3825619 - DNA, 25 bp, Homo sapien
gacacgggaagttgcctcatcggct

SEQ ID NO: 3825620 - DNA, 25 bp, Homo sapien
tccagtggcccaagtcgcatgtgac

SEQ ID NO: 3825621 - DNA, 25 bp, Homo sapien
gaaagttcagtctcacgtggcagga

SEQ ID NO: 3825622 - DNA, 25 bp, Homo sapien
cagagaggtgtctgagttgttacca

SEQ ID NO: 3825623 - DNA, 25 bp, Homo sapien
gaagccctaagttcactattcgcca

SEQ ID NO: 3825624 - DNA, 25 bp, Homo sapien
cctgtcatagagcagctgtaggcag

SEQ ID NO: 3825625 - DNA, 25 bp, Homo sapien
tgaggaacggagaatcgcaaactcc

SEQ ID NO: 3825626 - DNA, 25 bp, Homo sapien
cacctgtggagattaaggacgagga

SEQ ID NO: 3825627 - DNA, 25 bp, Homo sapien
gacagttggctcacattgaacacct

SEQ ID NO: 3825628 - DNA, 25 bp, Homo sapien
ggtgaggacctcgagcagtaagata

SEQ ID NO: 3825629 - DNA, 25 bp, Homo sapien
tcatatttcgggagccaggagaacg

SEQ ID NO: 3825630 - DNA, 25 bp, Homo sapien
tcatctgtccaatcaagcctgttct

SEQ ID NO: 3825631 - DNA, 25 bp, Homo sapien
cagtacctttgtctcagggattaat

SEQ ID NO: 3825632 - DNA, 25 bp, Homo sapien
gtccaatcaagcctgttcttcagcc

SEQ ID NO: 3825633 - DNA, 25 bp, Homo sapien
cttcagtacctttgtctcagggatt

SEQ ID NO: 3825634 - DNA, 25 bp, Homo sapien
tcctgtgggcggaattccagtctcc

SEQ ID NO: 3825635 - DNA, 25 bp, Homo sapien
ggaaatttcgcccaccggtgagtgc

SEQ ID NO: 3825636 - DNA, 25 bp, Homo sapien
cccagtctgttgatgcggaggcttg

SEQ ID NO: 3825637 - DNA, 25 bp, Homo sapien
gagcttgcgaggtcgggtattcaca

SEQ ID NO: 3825638 - DNA, 25 bp, Homo sapien
cgtccgggtgaacgacgagtctgta

SEQ ID NO: 3825639 - DNA, 25 bp, Homo sapien
ctgccacgacgagacaggcagctcg

SEQ ID NO: 3825640 - DNA, 25 bp, Homo sapien
cacagattcttgcttgacggctcgg

SEQ ID NO: 3825641 - DNA, 25 bp, Homo sapien
cagctgggcttgaggcgcactatgt

SEQ ID NO: 3825642 - DNA, 25 bp, Homo sapien
tcatagcaccaagaggtaaggacgt

SEQ ID NO: 3825643 - DNA, 25 bp, Homo sapien
ggcagccacaataactaccgtcaaa

SEQ ID NO: 3825644 - DNA, 25 bp, Homo sapien
gacagctttggagggcatctatcaa

SEQ ID NO: 3825645 - DNA, 25 bp, Homo sapien
tatcttacttggtccccacaacagc

SEQ ID NO: 3825646 - DNA, 25 bp, Homo sapien
gaaggcattgagagatgctgattgc

SEQ ID NO: 3825647 - DNA, 25 bp, Homo sapien
tgctgattgctgagcagtgctgaga

SEQ ID NO: 3825648 - DNA, 25 bp, Homo sapien
ctagtagaaccaggcaatgggagaa

SEQ ID NO: 3825649 - DNA, 25 bp, Homo sapien
gctgagagccagttggggtcatctt

SEQ ID NO: 3825650 - DNA, 25 bp, Homo sapien
cgctttatctaagagtctgagactc

SEQ ID NO: 3825651 - DNA, 25 bp, Homo sapien
ttttcttagaggacacaacttcagc

SEQ ID NO: 3825652 - DNA, 25 bp, Homo sapien
tctttttcttagaggacacaacttc

SEQ ID NO: 3825653 - DNA, 25 bp, Homo sapien
tgaaagagtcgacgctttatctaag

SEQ ID NO: 3825654 - DNA, 25 bp, Homo sapien
gactttatatccttctggaaaggga

SEQ ID NO: 3825655 - DNA, 25 bp, Homo sapien
ttatatccttctggaaagggaggct

SEQ ID NO: 3825656 - DNA, 25 bp, Homo sapien
tgactttatatccttctggaaaggg

SEQ ID NO: 3825657 - DNA, 25 bp, Homo sapien
ctttatatccttctggaaagggagg

SEQ ID NO: 3825658 - DNA, 25 bp, Homo sapien
ggaactcttctgtaaaccaatgaaa

SEQ ID NO: 3825659 - DNA, 25 bp, Homo sapien
aactcttctgtaaaccaatgaaaca

SEQ ID NO: 3825660 - DNA, 25 bp, Homo sapien
gaactcttctgtaaaccaatgaaac

SEQ ID NO: 3825661 - DNA, 25 bp, Homo sapien
gattgtttccgatttatcttgagga

SEQ ID NO: 3825662 - DNA, 25 bp, Homo sapien
aaaagcatttcctctactggcgcaa

SEQ ID NO: 3825663 - DNA, 25 bp, Homo sapien
tatcttgaggacagggtgtacgtga

SEQ ID NO: 3825664 - DNA, 25 bp, Homo sapien
gaaaccggaaaatagtgctctgcac

SEQ ID NO: 3825665 - DNA, 25 bp, Homo sapien
cattctttcttatgtatgtggtctc

SEQ ID NO: 3825666 - DNA, 25 bp, Homo sapien
tttaaccttaaagataaatcagtga

SEQ ID NO: 3825667 - DNA, 25 bp, Homo sapien
gcaatgttaaaagccccaaattata

SEQ ID NO: 3825668 - DNA, 25 bp, Homo sapien
gcctccatacccaccctgtggttct

SEQ ID NO: 3825669 - DNA, 25 bp, Homo sapien
tctttcttcgcttggtgaagcaggc

SEQ ID NO: 3825670 - DNA, 25 bp, Homo sapien
tgaagcaggctagccattccgggaa

SEQ ID NO: 3825671 - DNA, 25 bp, Homo sapien
cgcttggtgaagcaggctagccatt

SEQ ID NO: 3825672 - DNA, 25 bp, Homo sapien
tagccattccgggaagcagaacagg

SEQ ID NO: 3825673 - DNA, 25 bp, Homo sapien
tgatggtaccaagataatgagctat

SEQ ID NO: 3825674 - DNA, 25 bp, Homo sapien
atggtaccaagataatgagctatca

SEQ ID NO: 3825675 - DNA, 25 bp, Homo sapien
ctgatggtaccaagataatgagcta

SEQ ID NO: 3825676 - DNA, 25 bp, Homo sapien
gatggtaccaagataatgagctatc

SEQ ID NO: 3825677 - DNA, 25 bp, Homo sapien
aggccaagcaaggcggaaaagctct

SEQ ID NO: 3825678 - DNA, 25 bp, Homo sapien
agacagatggcagcgcatgtatgtg

SEQ ID NO: 3825679 - DNA, 25 bp, Homo sapien
catgtatgtgcacaactagatggtg

SEQ ID NO: 3825680 - DNA, 25 bp, Homo sapien
gaaacctggtggatgccaaactgca

SEQ ID NO: 3825681 - DNA, 25 bp, Homo sapien
tccaagactctctgcgagcagttta

SEQ ID NO: 3825682 - DNA, 25 bp, Homo sapien
gagccacagctgaattgttcaggat

SEQ ID NO: 3825683 - DNA, 25 bp, Homo sapien
cagctgaattgttcaggatccaaaa

SEQ ID NO: 3825684 - DNA, 25 bp, Homo sapien
tgagagccacagctgaattgttcag

SEQ ID NO: 3825685 - DNA, 25 bp, Homo sapien
cacagctgaattgttcaggatccaa

SEQ ID NO: 3825686 - DNA, 25 bp, Homo sapien
tactttggtcaacagcaagatagga

SEQ ID NO: 3825687 - DNA, 25 bp, Homo sapien
caccacgggatacctaccaactgta

SEQ ID NO: 3825688 - DNA, 25 bp, Homo sapien
tgctgaaatgtgactcgtgaggtgc

SEQ ID NO: 3825689 - DNA, 25 bp, Homo sapien
cttgcacctgtttaacaccacggga

SEQ ID NO: 3825690 - DNA, 25 bp, Homo sapien
ctgacctcgtgaccatctcctgacc

SEQ ID NO: 3825691 - DNA, 25 bp, Homo sapien
tgacctcgtgaccatctcctgacct

SEQ ID NO: 3825692 - DNA, 25 bp, Homo sapien
gacctcgtgaccatctcctgacctc

SEQ ID NO: 3825693 - DNA, 25 bp, Homo sapien
cctgacctcgtgaccatctcctgac

SEQ ID NO: 3825694 - DNA, 25 bp, Homo sapien
tggaaatgtcagaggcacgtgaacc

SEQ ID NO: 3825695 - DNA, 25 bp, Homo sapien
cttattggaaatgtcagaggcacgt

SEQ ID NO: 3825696 - DNA, 25 bp, Homo sapien
tattggaaatgtcagaggcacgtga

SEQ ID NO: 3825697 - DNA, 25 bp, Homo sapien
ttggaaatgtcagaggcacgtgaac

SEQ ID NO: 3825698 - DNA, 25 bp, Homo sapien
ggttcacataaaccaggctcctgta

SEQ ID NO: 3825699 - DNA, 25 bp, Homo sapien
ttcacataaaccaggctcctgtacc

SEQ ID NO: 3825700 - DNA, 25 bp, Homo sapien
gttcacataaaccaggctcctgtac

SEQ ID NO: 3825701 - DNA, 25 bp, Homo sapien
tggttcacataaaccaggctcctgt

SEQ ID NO: 3825702 - DNA, 25 bp, Homo sapien
aatcacaggcaatgaatttggttct

SEQ ID NO: 3825703 - DNA, 25 bp, Homo sapien
gaaaatcacaggcaatgaatttggt

SEQ ID NO: 3825704 - DNA, 25 bp, Homo sapien
cacaggcaatgaatttggttctttt

SEQ ID NO: 3825705 - DNA, 25 bp, Homo sapien
gtcagaaaatcacaggcaatgaatt

SEQ ID NO: 3825706 - DNA, 25 bp, Homo sapien
ctgcttgcaaattaacacgactgaa

SEQ ID NO: 3825707 - DNA, 25 bp, Homo sapien
gatgccatatgtttgattgacaaga

SEQ ID NO: 3825708 - DNA, 25 bp, Homo sapien
taggatcactgaatagtcagacacg

SEQ ID NO: 3825709 - DNA, 25 bp, Homo sapien
gtcagttgttgctattctgcttgca

SEQ ID NO: 3825710 - DNA, 25 bp, Homo sapien
tgctttagccgctcctccacaaatg

SEQ ID NO: 3825711 - DNA, 25 bp, Homo sapien
gttgctttagccgctcctccacaaa

SEQ ID NO: 3825712 - DNA, 25 bp, Homo sapien
cctccacaaatggaatggagaaaaa

SEQ ID NO: 3825713 - DNA, 25 bp, Homo sapien
gctttagccgctcctccacaaatgg

SEQ ID NO: 3825714 - DNA, 25 bp, Homo sapien
gaataactagagacaggagtcacaa

SEQ ID NO: 3825715 - DNA, 25 bp, Homo sapien
aatgaaattactggcctgattagga

SEQ ID NO: 3825716 - DNA, 25 bp, Homo sapien
cccagagtcctggatggatcacatc

SEQ ID NO: 3825717 - DNA, 25 bp, Homo sapien
tgattaggataaggttagcctaggc

SEQ ID NO: 3825718 - DNA, 25 bp, Homo sapien
gtgagcaccaccatgatcagctgat

SEQ ID NO: 3825719 - DNA, 25 bp, Homo sapien
ccatgatcagctgatttttgatttt

SEQ ID NO: 3825720 - DNA, 25 bp, Homo sapien
ggattgcagcggcacaaccacagct

SEQ ID NO: 3825721 - DNA, 25 bp, Homo sapien
caccatgatcagctgatttttgatt

SEQ ID NO: 3825722 - DNA, 25 bp, Homo sapien
cgagagtgggattggcggccgtggg

SEQ ID NO: 3825723 - DNA, 25 bp, Homo sapien
agcgagagtgggattggcggccgtg

SEQ ID NO: 3825724 - DNA, 25 bp, Homo sapien
tcctcttctgtcagcaggagcgaga

SEQ ID NO: 3825725 - DNA, 25 bp, Homo sapien
cctcttctgtcagcaggagcgagag

SEQ ID NO: 3825726 - DNA, 25 bp, Homo sapien
taactcatctaaggtttaccctgga

SEQ ID NO: 3825727 - DNA, 25 bp, Homo sapien
taccacagtcgcatatgattcttac

SEQ ID NO: 3825728 - DNA, 25 bp, Homo sapien
tttttggcagatacgaggtttcgtc

SEQ ID NO: 3825729 - DNA, 25 bp, Homo sapien
tctgaggtctggatgttagctataa

SEQ ID NO: 3825730 - DNA, 25 bp, Homo sapien
gacaagttataaaggcagaggctat

SEQ ID NO: 3825731 - DNA, 25 bp, Homo sapien
tatatcaatacaggccagtcaaccc

SEQ ID NO: 3825732 - DNA, 25 bp, Homo sapien
cagacgaatgcgcaaaaatgactgc

SEQ ID NO: 3825733 - DNA, 25 bp, Homo sapien
taggattctcctatacaaatgagca

SEQ ID NO: 3825734 - DNA, 25 bp, Homo sapien
taatccaacttcttaactgatagct

SEQ ID NO: 3825735 - DNA, 25 bp, Homo sapien
taactgatagctttttgctggtgtg

SEQ ID NO: 3825736 - DNA, 25 bp, Homo sapien
tctatggaaatccactgggaccttt

SEQ ID NO: 3825737 - DNA, 25 bp, Homo sapien
agagtatgaagagctttggcctcta

SEQ ID NO: 3825738 - DNA, 25 bp, Homo sapien
caagtataagtctcacaaatcaaag

SEQ ID NO: 3825739 - DNA, 25 bp, Homo sapien
tatctgaacgccaggaatattttgc

SEQ ID NO: 3825740 - DNA, 25 bp, Homo sapien
tttgctttggttagacatccctgga

SEQ ID NO: 3825741 - DNA, 25 bp, Homo sapien
tggatgtaagctaaccttctggtgt

SEQ ID NO: 3825742 - DNA, 25 bp, Homo sapien
aactcaggaagtccctcttttctgt

SEQ ID NO: 3825743 - DNA, 25 bp, Homo sapien
tttctgtggtgccttctaaggtcat

SEQ ID NO: 3825744 - DNA, 25 bp, Homo sapien
ggtgccttctaaggtcatccataca

SEQ ID NO: 3825745 - DNA, 25 bp, Homo sapien
cttctaaggtcatccatacatcagg

SEQ ID NO: 3825746 - DNA, 25 bp, Homo sapien
agtactatgttaaactgaagtggca

SEQ ID NO: 3825747 - DNA, 25 bp, Homo sapien
agatgatctctggtttaagttcact

SEQ ID NO: 3825748 - DNA, 25 bp, Homo sapien
tatgttaaactgaagtggcaagaga

SEQ ID NO: 3825749 - DNA, 25 bp, Homo sapien
gagatgatctctggtttaagttcac

SEQ ID NO: 3825750 - DNA, 25 bp, Homo sapien
gatggacttcgtaattctcagttgt

SEQ ID NO: 3825751 - DNA, 25 bp, Homo sapien
caaataacgggtaatgattgatgga

SEQ ID NO: 3825752 - DNA, 25 bp, Homo sapien
taatgattgatggacttcgtaattc

SEQ ID NO: 3825753 - DNA, 25 bp, Homo sapien
taacgggtaatgattgatggacttc

SEQ ID NO: 3825754 - DNA, 25 bp, Homo sapien
tttgaatggtatccccgagttgtgc

SEQ ID NO: 3825755 - DNA, 25 bp, Homo sapien
aaaaatatgtagcaagtggccactc

SEQ ID NO: 3825756 - DNA, 25 bp, Homo sapien
ggtatcaccgatacacgctccattg

SEQ ID NO: 3825757 - DNA, 25 bp, Homo sapien
taccctctagcatggtgtcctcaca

SEQ ID NO: 3825758 - DNA, 25 bp, Homo sapien
gtggatatcaagttgccccagagcc

SEQ ID NO: 3825759 - DNA, 25 bp, Homo sapien
tgggtagtgtagctctttgatccat

SEQ ID NO: 3825760 - DNA, 25 bp, Homo sapien
tcaagttgccccagagccatttgtt

SEQ ID NO: 3825761 - DNA, 25 bp, Homo sapien
tgccccagagccatttgttgaagag

SEQ ID NO: 3825762 - DNA, 25 bp, Homo sapien
gcttggcctcgcgaagtttcttctg

SEQ ID NO: 3825763 - DNA, 25 bp, Homo sapien
agtttcttctgccactgacgcagtt

SEQ ID NO: 3825764 - DNA, 25 bp, Homo sapien
gcagttcttgaatctcaggatcaca

SEQ ID NO: 3825765 - DNA, 25 bp, Homo sapien
aatgtgcttggcctcgcgaagtttc

SEQ ID NO: 3825766 - DNA, 25 bp, Homo sapien
atctgtcctgatggatagagacttg

SEQ ID NO: 3825767 - DNA, 25 bp, Homo sapien
gaagataacttcacaccgcttccat

SEQ ID NO: 3825768 - DNA, 25 bp, Homo sapien
gagacttgaagataacttcacaccg

SEQ ID NO: 3825769 - DNA, 25 bp, Homo sapien
cctgcatctgtcctgatggatagag

SEQ ID NO: 3825770 - DNA, 25 bp, Homo sapien
cagtagggatcttcaggcattgcag

SEQ ID NO: 3825771 - DNA, 25 bp, Homo sapien
aaatagaattggtgaaggcagtgcc

SEQ ID NO: 3825772 - DNA, 25 bp, Homo sapien
cccacagtgggttggtagcattaag

SEQ ID NO: 3825773 - DNA, 25 bp, Homo sapien
tcatccatcaaaagtcccacagtgg

SEQ ID NO: 3825774 - DNA, 25 bp, Homo sapien
ggaccaagaacctgatctcggtgat

SEQ ID NO: 3825775 - DNA, 25 bp, Homo sapien
tttctcttatgtcatggtctggacc

SEQ ID NO: 3825776 - DNA, 25 bp, Homo sapien
gatctcggtgatttcctgtgtctgc

SEQ ID NO: 3825777 - DNA, 25 bp, Homo sapien
tatgtcatggtctggaccaagaacc

SEQ ID NO: 3825778 - DNA, 25 bp, Homo sapien
gctgcaggtactgcatcgtcctcca

SEQ ID NO: 3825779 - DNA, 25 bp, Homo sapien
gcaggtactgcatcgtcctccattt

SEQ ID NO: 3825780 - DNA, 25 bp, Homo sapien
tggctgcaggtactgcatcgtcctc

SEQ ID NO: 3825781 - DNA, 25 bp, Homo sapien
aggtactgcatcgtcctccattttg

SEQ ID NO: 3825782 - DNA, 25 bp, Homo sapien
ttttccttgcacaaggtaacttgtg

SEQ ID NO: 3825783 - DNA, 25 bp, Homo sapien
tgctcgaatgggcaaagatacgtct

SEQ ID NO: 3825784 - DNA, 25 bp, Homo sapien
caaggtaacttgtgctcgaatgggc

SEQ ID NO: 3825785 - DNA, 25 bp, Homo sapien
gggcaaagatacgtcttagctatgg

SEQ ID NO: 3825786 - DNA, 25 bp, Homo sapien
taatgcagaaagtgaagactggtcc

SEQ ID NO: 3825787 - DNA, 25 bp, Homo sapien
tatggatctttgcaaaggcggccac

SEQ ID NO: 3825788 - DNA, 25 bp, Homo sapien
taactactaggctttcggatctgcc

SEQ ID NO: 3825789 - DNA, 25 bp, Homo sapien
tagaagaatactcctgaggcactga

SEQ ID NO: 3825790 - DNA, 25 bp, Homo sapien
cccggctgactgttgcatacttata

SEQ ID NO: 3825791 - DNA, 25 bp, Homo sapien
cggctgactgttgcatacttataaa

SEQ ID NO: 3825792 - DNA, 25 bp, Homo sapien
tgtaccataaacgactatataaata

SEQ ID NO: 3825793 - DNA, 25 bp, Homo sapien
aagaaatttcaagacaatcaatatg

SEQ ID NO: 3825794 - DNA, 25 bp, Homo sapien
aggtgctttttattaactgatgaag

SEQ ID NO: 3825795 - DNA, 25 bp, Homo sapien
caggtgctttttattaactgatgaa

SEQ ID NO: 3825796 - DNA, 25 bp, Homo sapien
cactgaacaagggtgaactcgggtg

SEQ ID NO: 3825797 - DNA, 25 bp, Homo sapien
ttttagcccagatgccgtcaggacc

SEQ ID NO: 3825798 - DNA, 25 bp, Homo sapien
tgagttgaacgcctcaggccaaacc

SEQ ID NO: 3825799 - DNA, 25 bp, Homo sapien
tcggttggccaaggctgagttgaac

SEQ ID NO: 3825800 - DNA, 25 bp, Homo sapien
tccaagcatataaggtgagcacagc

SEQ ID NO: 3825801 - DNA, 25 bp, Homo sapien
gagagtgggctgaacgccttcataa

SEQ ID NO: 3825802 - DNA, 25 bp, Homo sapien
tgccaagagactgtagcagccagct

SEQ ID NO: 3825803 - DNA, 25 bp, Homo sapien
gaaagtcgtgcttccccagcataag

SEQ ID NO: 3825804 - DNA, 25 bp, Homo sapien
cagagttttaacctgacggcatgga

SEQ ID NO: 3825805 - DNA, 25 bp, Homo sapien
ttcccactaggatgcagagatgacc

SEQ ID NO: 3825806 - DNA, 25 bp, Homo sapien
tgtttggccagcataacctctagca

SEQ ID NO: 3825807 - DNA, 25 bp, Homo sapien
cgcgatgatgtcacctagcagggct

SEQ ID NO: 3825808 - DNA, 25 bp, Homo sapien
gtagcctcttggagatgaccgttgc

SEQ ID NO: 3825809 - DNA, 25 bp, Homo sapien
tagcctcttggagatgaccgttgcg

SEQ ID NO: 3825810 - DNA, 25 bp, Homo sapien
agcctcttggagatgaccgttgcgt

SEQ ID NO: 3825811 - DNA, 25 bp, Homo sapien
aggtagcctcttggagatgaccgtt

SEQ ID NO: 3825812 - DNA, 25 bp, Homo sapien
agcagagatcgggagctggtcagtt

SEQ ID NO: 3825813 - DNA, 25 bp, Homo sapien
gcaagaattcctgaaacggatacaa

SEQ ID NO: 3825814 - DNA, 25 bp, Homo sapien
acgggcccttcagggaatgtcgtga

SEQ ID NO: 3825815 - DNA, 25 bp, Homo sapien
tcagggaatgtcgtgagcagagatc

SEQ ID NO: 3825816 - DNA, 25 bp, Homo sapien
cgtagaatcattacttgaagggagt

SEQ ID NO: 3825817 - DNA, 25 bp, Homo sapien
gtcatcatttgttgagcactaacta

SEQ ID NO: 3825818 - DNA, 25 bp, Homo sapien
aggaacccaaatcccctgctattga

SEQ ID NO: 3825819 - DNA, 25 bp, Homo sapien
ctcggttctttgaagatgcatcagg

SEQ ID NO: 3825820 - DNA, 25 bp, Homo sapien
catcatccaggaggacgagaccatc

SEQ ID NO: 3825821 - DNA, 25 bp, Homo sapien
ttcgtgatcacctcggtggcctctg

SEQ ID NO: 3825822 - DNA, 25 bp, Homo sapien
gtggcctctgaaaacgccagcacat

SEQ ID NO: 3825823 - DNA, 25 bp, Homo sapien
agtacgtgtccctgtgcgacctgga

SEQ ID NO: 3825824 - DNA, 25 bp, Homo sapien
tcaccacagtggctaccgggctaga

SEQ ID NO: 3825825 - DNA, 25 bp, Homo sapien
tggctaccgggctagatttgtcaga

SEQ ID NO: 3825826 - DNA, 25 bp, Homo sapien
gctagatttgtcagacagctcccta

SEQ ID NO: 3825827 - DNA, 25 bp, Homo sapien
taccgggctagatttgtcagacagc

SEQ ID NO: 3825828 - DNA, 25 bp, Homo sapien
ctcctgcttttgctggacagtgacc

SEQ ID NO: 3825829 - DNA, 25 bp, Homo sapien
tggacagtgaccaggaaaggctggc

SEQ ID NO: 3825830 - DNA, 25 bp, Homo sapien
gaaaggctggctgaggtccagacaa

SEQ ID NO: 3825831 - DNA, 25 bp, Homo sapien
ttgctggacagtgaccaggaaaggc

SEQ ID NO: 3825832 - DNA, 25 bp, Homo sapien
tggagatgaagtctgccaactgtac

SEQ ID NO: 3825833 - DNA, 25 bp, Homo sapien
tgcagaacacctgcggtccagcgct

SEQ ID NO: 3825834 - DNA, 25 bp, Homo sapien
tacgtgacggcgaggctgtcatgca

SEQ ID NO: 3825835 - DNA, 25 bp, Homo sapien
tgtacagccctaattgcatttcctc

SEQ ID NO: 3825836 - DNA, 25 bp, Homo sapien
caaaaaacggcagacagtccacctg

SEQ ID NO: 3825837 - DNA, 25 bp, Homo sapien
ggatcgcaatagaatctcatcagag

SEQ ID NO: 3825838 - DNA, 25 bp, Homo sapien
tcatcagagccaaggattagattct

SEQ ID NO: 3825839 - DNA, 25 bp, Homo sapien
tgggataagaaaaggccccatggca

SEQ ID NO: 3825840 - DNA, 25 bp, Homo sapien
ttcccagatcctcgagtgccgttct

SEQ ID NO: 3825841 - DNA, 25 bp, Homo sapien
ccagatcctcgagtgccgttctcct

SEQ ID NO: 3825842 - DNA, 25 bp, Homo sapien
agatcctcgagtgccgttctcctca

SEQ ID NO: 3825843 - DNA, 25 bp, Homo sapien
cattcccagatcctcgagtgccgtt

SEQ ID NO: 3825844 - DNA, 25 bp, Homo sapien
gcttggtgctgtaccacctggtgac

SEQ ID NO: 3825845 - DNA, 25 bp, Homo sapien
tgctgtaccacctggtgaccacatc

SEQ ID NO: 3825846 - DNA, 25 bp, Homo sapien
caggcttggtgctgtaccacctggt

SEQ ID NO: 3825847 - DNA, 25 bp, Homo sapien
ggtgctgtaccacctggtgaccaca

SEQ ID NO: 3825848 - DNA, 25 bp, Homo sapien
tgcttgaactaagtggctggtggct

SEQ ID NO: 3825849 - DNA, 25 bp, Homo sapien
gcttgaactaagtggctggtggctc

SEQ ID NO: 3825850 - DNA, 25 bp, Homo sapien
cctccttcatgctccctaggctgcc

SEQ ID NO: 3825851 - DNA, 25 bp, Homo sapien
ccttcatgctccctaggctgccacc

SEQ ID NO: 3825852 - DNA, 25 bp, Homo sapien
tcctccttcatgctccctaggctgc

SEQ ID NO: 3825853 - DNA, 25 bp, Homo sapien
tctgtttttgagtgcaccacacact

SEQ ID NO: 3825854 - DNA, 25 bp, Homo sapien
ctgtttttgagtgcaccacacactc

SEQ ID NO: 3825855 - DNA, 25 bp, Homo sapien
cacaaggccttcagggtgttggccc

SEQ ID NO: 3825856 - DNA, 25 bp, Homo sapien
ggtggctgcacaaggccttcagggt

SEQ ID NO: 3825857 - DNA, 25 bp, Homo sapien
gcaggtggctgcacaaggccttcag

SEQ ID NO: 3825858 - DNA, 25 bp, Homo sapien
tgcacaaggccttcagggtgttggc

SEQ ID NO: 3825859 - DNA, 25 bp, Homo sapien
ccctttcttggatgggtctagtgct

SEQ ID NO: 3825860 - DNA, 25 bp, Homo sapien
tcttggatgggtctagtgctacagt

SEQ ID NO: 3825861 - DNA, 25 bp, Homo sapien
tgtccttgtagaggatcacctcgtc

SEQ ID NO: 3825862 - DNA, 25 bp, Homo sapien
acttgtccttgtagaggatcacctc

SEQ ID NO: 3825863 - DNA, 25 bp, Homo sapien
tgtcctagagctcagcaaagagtga

SEQ ID NO: 3825864 - DNA, 25 bp, Homo sapien
gaagcagttatcacagacaaagcac

SEQ ID NO: 3825865 - DNA, 25 bp, Homo sapien
catttgttggggtcagtggtggtca

SEQ ID NO: 3825866 - DNA, 25 bp, Homo sapien
ggtcatgtcgatgtactccaccagc

SEQ ID NO: 3825867 - DNA, 25 bp, Homo sapien
cagtggtggtcatgtcgatgtactc

SEQ ID NO: 3825868 - DNA, 25 bp, Homo sapien
caaatgaggcatttgttggggtcag

SEQ ID NO: 3825869 - DNA, 25 bp, Homo sapien
gttgggaatctgactggccaggtcc

SEQ ID NO: 3825870 - DNA, 25 bp, Homo sapien
tgggaatctgactggccaggtccat

SEQ ID NO: 3825871 - DNA, 25 bp, Homo sapien
caacatcacagcaccggtgaacttc

SEQ ID NO: 3825872 - DNA, 25 bp, Homo sapien
acatcacagcaccggtgaacttctt

SEQ ID NO: 3825873 - DNA, 25 bp, Homo sapien
tcatccaccgtcattggctcaggac

SEQ ID NO: 3825874 - DNA, 25 bp, Homo sapien
ccattctcatccaccgtcattggct

SEQ ID NO: 3825875 - DNA, 25 bp, Homo sapien
tctcatccaccgtcattggctcagg

SEQ ID NO: 3825876 - DNA, 25 bp, Homo sapien
attctcatccaccgtcattggctca

SEQ ID NO: 3825877 - DNA, 25 bp, Homo sapien
gagctactggaggcctctgggagct

SEQ ID NO: 3825878 - DNA, 25 bp, Homo sapien
ctttgaggagctactggaggcctct

SEQ ID NO: 3825879 - DNA, 25 bp, Homo sapien
ctactggaggcctctgggagctgac

SEQ ID NO: 3825880 - DNA, 25 bp, Homo sapien
tttgaggagctactggaggcctctg

SEQ ID NO: 3825881 - DNA, 25 bp, Homo sapien
acatgctgggaagaggcacagggac

SEQ ID NO: 3825882 - DNA, 25 bp, Homo sapien
tacatgctgggaagaggcacaggga

SEQ ID NO: 3825883 - DNA, 25 bp, Homo sapien
cagtgtgagtgtgctcatgaatctg

SEQ ID NO: 3825884 - DNA, 25 bp, Homo sapien
tctgaagaaagctaatgggtaagaa

SEQ ID NO: 3825885 - DNA, 25 bp, Homo sapien
gtgtgctcatgaatctgaagaaagc

SEQ ID NO: 3825886 - DNA, 25 bp, Homo sapien
gctaatgggtaagaagttcttccca

SEQ ID NO: 3825887 - DNA, 25 bp, Homo sapien
tgggaaatatttgagactctttcca

SEQ ID NO: 3825888 - DNA, 25 bp, Homo sapien
ctgggaaatatttgagactctttcc

SEQ ID NO: 3825889 - DNA, 25 bp, Homo sapien
gggaaatatttgagactctttccat

SEQ ID NO: 3825890 - DNA, 25 bp, Homo sapien
ttccacaaaacagggcccatgttca

SEQ ID NO: 3825891 - DNA, 25 bp, Homo sapien
gttccacaaaacagggcccatgttc

SEQ ID NO: 3825892 - DNA, 25 bp, Homo sapien
tggttccacaaaacagggcccatgt

SEQ ID NO: 3825893 - DNA, 25 bp, Homo sapien
ctggttccacaaaacagggcccatg

SEQ ID NO: 3825894 - DNA, 25 bp, Homo sapien
ggaatgctcccagtagcacctgctt

SEQ ID NO: 3825895 - DNA, 25 bp, Homo sapien
gatacctaattggaagccatccgcg

SEQ ID NO: 3825896 - DNA, 25 bp, Homo sapien
gttatttatattgaagctgactccc

SEQ ID NO: 3825897 - DNA, 25 bp, Homo sapien
cattggtcttcttggccagaccacc

SEQ ID NO: 3825898 - DNA, 25 bp, Homo sapien
cttccatgcaagttctccttgagtt

SEQ ID NO: 3825899 - DNA, 25 bp, Homo sapien
ccttccatgcaagttctccttgagt

SEQ ID NO: 3825900 - DNA, 25 bp, Homo sapien
gctgagaagtttgcaactcttgatt

SEQ ID NO: 3825901 - DNA, 25 bp, Homo sapien
ctgagaagtttgcaactcttgattt

SEQ ID NO: 3825902 - DNA, 25 bp, Homo sapien
tgctgagaagtttgcaactcttgat

SEQ ID NO: 3825903 - DNA, 25 bp, Homo sapien
tctgaatagtaatgcccggatgtcc

SEQ ID NO: 3825904 - DNA, 25 bp, Homo sapien
gatgtcctcgcaacacctccgtcat

SEQ ID NO: 3825905 - DNA, 25 bp, Homo sapien
gtaatgcccggatgtcctcgcaaca

SEQ ID NO: 3825906 - DNA, 25 bp, Homo sapien
tagtaatgcccggatgtcctcgcaa

SEQ ID NO: 3825907 - DNA, 25 bp, Homo sapien
cttctggcttcctcaagtcttcctt

SEQ ID NO: 3825908 - DNA, 25 bp, Homo sapien
tctggcttcctcaagtcttcctttt

SEQ ID NO: 3825909 - DNA, 25 bp, Homo sapien
agccttctggcttcctcaagtcttc

SEQ ID NO: 3825910 - DNA, 25 bp, Homo sapien
tcagccttctggcttcctcaagtct

SEQ ID NO: 3825911 - DNA, 25 bp, Homo sapien
caacaaagacggctgcccaggctct

SEQ ID NO: 3825912 - DNA, 25 bp, Homo sapien
tgcaacaaagacggctgcccaggct

SEQ ID NO: 3825913 - DNA, 25 bp, Homo sapien
gcaacaaagacggctgcccaggctc

SEQ ID NO: 3825914 - DNA, 25 bp, Homo sapien
ctgcaacaaagacggctgcccaggc

SEQ ID NO: 3825915 - DNA, 25 bp, Homo sapien
catgcacctgtgtcgtagtctcttc

SEQ ID NO: 3825916 - DNA, 25 bp, Homo sapien
tctaaggtcaaggtgtctgctgggt

SEQ ID NO: 3825917 - DNA, 25 bp, Homo sapien
catcagtcatattgagtaaggaccc

SEQ ID NO: 3825918 - DNA, 25 bp, Homo sapien
ttcggcttgtaagtgaccaccttct

SEQ ID NO: 3825919 - DNA, 25 bp, Homo sapien
gctctaattgatcattactagccat

SEQ ID NO: 3825920 - DNA, 25 bp, Homo sapien
tcaacaagctaagacagctccctct

SEQ ID NO: 3825921 - DNA, 25 bp, Homo sapien
tctactagctctaattgatcattac

SEQ ID NO: 3825922 - DNA, 25 bp, Homo sapien
acagccctcatctactagctctaat

SEQ ID NO: 3825923 - DNA, 25 bp, Homo sapien
cagtcttgtggttgccagttgccca

SEQ ID NO: 3825924 - DNA, 25 bp, Homo sapien
cttggtgcttccacattacttttat

SEQ ID NO: 3825925 - DNA, 25 bp, Homo sapien
tttcttagcacagtcttgtggttgc

SEQ ID NO: 3825926 - DNA, 25 bp, Homo sapien
ggtgcttccacattacttttatctt

SEQ ID NO: 3825927 - DNA, 25 bp, Homo sapien
ggggtgtgtagacctcacctctgcc

SEQ ID NO: 3825928 - DNA, 25 bp, Homo sapien
gggggtgtgtagacctcacctctgc

SEQ ID NO: 3825929 - DNA, 25 bp, Homo sapien
caattacagatagagtttgccaacc

SEQ ID NO: 3825930 - DNA, 25 bp, Homo sapien
catttgttgacttaacatctatggc

SEQ ID NO: 3825931 - DNA, 25 bp, Homo sapien
agatgggaaacactaagttctcggc

SEQ ID NO: 3825932 - DNA, 25 bp, Homo sapien
tgccaacctctggtctagttccaga

SEQ ID NO: 3825933 - DNA, 25 bp, Homo sapien
aggaggcttgtagaagtacttagca

SEQ ID NO: 3825934 - DNA, 25 bp, Homo sapien
aacttgggccgcgtaagggcgtatg

SEQ ID NO: 3825935 - DNA, 25 bp, Homo sapien
tatgactgggtcttttctcgtcgtc

SEQ ID NO: 3825936 - DNA, 25 bp, Homo sapien
tctcgtcgtctttttaccaggagga

SEQ ID NO: 3825937 - DNA, 25 bp, Homo sapien
ctttcctgaacttgaggcttaaggc

SEQ ID NO: 3825938 - DNA, 25 bp, Homo sapien
gaacttgaggcttaaggcatctctt

SEQ ID NO: 3825939 - DNA, 25 bp, Homo sapien
aaaccaccaggagactgcctttcct

SEQ ID NO: 3825940 - DNA, 25 bp, Homo sapien
tataggaagcccctccaaaccacca

SEQ ID NO: 3825941 - DNA, 25 bp, Homo sapien
cttggagccgtggtcaaaggagtac

SEQ ID NO: 3825942 - DNA, 25 bp, Homo sapien
acataatggcgttgcccagctgtgg

SEQ ID NO: 3825943 - DNA, 25 bp, Homo sapien
caaaggagtacataatggcgttgcc

SEQ ID NO: 3825944 - DNA, 25 bp, Homo sapien
tctgaaggtcttggagccgtggtca

SEQ ID NO: 3825945 - DNA, 25 bp, Homo sapien
tgctgaagctttgagccggccaagg

SEQ ID NO: 3825946 - DNA, 25 bp, Homo sapien
tggccccaggtgctgaagctttgag

SEQ ID NO: 3825947 - DNA, 25 bp, Homo sapien
cattctccactctgcgggggcgttg

SEQ ID NO: 3825948 - DNA, 25 bp, Homo sapien
tgtttgccaagcctatcactgccct

SEQ ID NO: 3825949 - DNA, 25 bp, Homo sapien
ctctactaaacagccaatagagggc

SEQ ID NO: 3825950 - DNA, 25 bp, Homo sapien
catgtgtggtacctgctctctacta

SEQ ID NO: 3825951 - DNA, 25 bp, Homo sapien
atttctcccggtccccggagctgca

SEQ ID NO: 3825952 - DNA, 25 bp, Homo sapien
cccggtccccggagctgcatgtgtg

SEQ ID NO: 3825953 - DNA, 25 bp, Homo sapien
actctaaggcttaacaatgggtagc

SEQ ID NO: 3825954 - DNA, 25 bp, Homo sapien
gaacttttatcgaggaatgtgggct

SEQ ID NO: 3825955 - DNA, 25 bp, Homo sapien
taaatcaatgagaatccgcggcaga

SEQ ID NO: 3825956 - DNA, 25 bp, Homo sapien
catctgccagaaatagggctcatgg

SEQ ID NO: 3825957 - DNA, 25 bp, Homo sapien
gagtcccagaacatccatgaaagtg

SEQ ID NO: 3825958 - DNA, 25 bp, Homo sapien
taagaaccaggacttggactgtgag

SEQ ID NO: 3825959 - DNA, 25 bp, Homo sapien
tgagagtagtagctgccctaataac

SEQ ID NO: 3825960 - DNA, 25 bp, Homo sapien
tctggatccaactctctaagaacca

SEQ ID NO: 3825961 - DNA, 25 bp, Homo sapien
tctgtgccttcaggggaagttggtt

SEQ ID NO: 3825962 - DNA, 25 bp, Homo sapien
gttgtcgtcattgttttgtatttag

SEQ ID NO: 3825963 - DNA, 25 bp, Homo sapien
aagtttgaatggtttgttgttgtcg

SEQ ID NO: 3825964 - DNA, 25 bp, Homo sapien
tggaagtttgaatggtttgttgttg

SEQ ID NO: 3825965 - DNA, 25 bp, Homo sapien
gccctggacccagcatctgaaagtt

SEQ ID NO: 3825966 - DNA, 25 bp, Homo sapien
cagagggctcagtgaaatgggccct

SEQ ID NO: 3825967 - DNA, 25 bp, Homo sapien
agctgcagagggctcagtgaaatgg

SEQ ID NO: 3825968 - DNA, 25 bp, Homo sapien
tgcagagggctcagtgaaatgggcc

SEQ ID NO: 3825969 - DNA, 25 bp, Homo sapien
gaacacaaactcacatagaggcact

SEQ ID NO: 3825970 - DNA, 25 bp, Homo sapien
gagaccctcaagtcagccacttaca

SEQ ID NO: 3825971 - DNA, 25 bp, Homo sapien
tgtatacccagaggcgtctatccac

SEQ ID NO: 3825972 - DNA, 25 bp, Homo sapien
tccctaggaatgttcccaatcctgg

SEQ ID NO: 3825973 - DNA, 25 bp, Homo sapien
ctcatttgttgatgggaccttgaaa

SEQ ID NO: 3825974 - DNA, 25 bp, Homo sapien
ttaacttcagggaagcggtatcctg

SEQ ID NO: 3825975 - DNA, 25 bp, Homo sapien
agcaagcttgctaggtgccctctgt

SEQ ID NO: 3825976 - DNA, 25 bp, Homo sapien
cagcctttaccggaagtgtggtgca

SEQ ID NO: 3825977 - DNA, 25 bp, Homo sapien
gacattcccgaaagctggcacctta

SEQ ID NO: 3825978 - DNA, 25 bp, Homo sapien
taaagctgtcaaagacccaggctcc

SEQ ID NO: 3825979 - DNA, 25 bp, Homo sapien
caacctttgtatccaggcagcagga

SEQ ID NO: 3825980 - DNA, 25 bp, Homo sapien
cacataaatgaagcttagaggcaag

SEQ ID NO: 3825981 - DNA, 25 bp, Homo sapien
tggaaaccccattgaagccagttcg

SEQ ID NO: 3825982 - DNA, 25 bp, Homo sapien
taaggatgtcggagacctgtgtcca

SEQ ID NO: 3825983 - DNA, 25 bp, Homo sapien
gacagacgctcccatgtggctgaat

SEQ ID NO: 3825984 - DNA, 25 bp, Homo sapien
tgcgataaaaacatgagcggctggt

SEQ ID NO: 3825985 - DNA, 25 bp, Homo sapien
gaatcaatccactcagtgcagtggc

SEQ ID NO: 3825986 - DNA, 25 bp, Homo sapien
tgtcacccaggctaccctatccagc

SEQ ID NO: 3825987 - DNA, 25 bp, Homo sapien
gcaatcactccagaatcatcaacaa

SEQ ID NO: 3825988 - DNA, 25 bp, Homo sapien
caaatgatccctccgtctcagcccc

SEQ ID NO: 3825989 - DNA, 25 bp, Homo sapien
ctgtccaattacatgcagggcaact

SEQ ID NO: 3825990 - DNA, 25 bp, Homo sapien
cctgtccaattacatgcagggcaac

SEQ ID NO: 3825991 - DNA, 25 bp, Homo sapien
gagaccaagcttgacaccaaaactg

SEQ ID NO: 3825992 - DNA, 25 bp, Homo sapien
cttgtatatgaagcacgtaggtgtc

SEQ ID NO: 3825993 - DNA, 25 bp, Homo sapien
caaaacaggtgatcatccttgccct

SEQ ID NO: 3825994 - DNA, 25 bp, Homo sapien
tcaggcacggcacttgaaaaccttg

SEQ ID NO: 3825995 - DNA, 25 bp, Homo sapien
cagcatccacataaccaagcctgtg

SEQ ID NO: 3825996 - DNA, 25 bp, Homo sapien
atggacctactctggatgcccctgc

SEQ ID NO: 3825997 - DNA, 25 bp, Homo sapien
cagctcaccagaggttaacgccggt

SEQ ID NO: 3825998 - DNA, 25 bp, Homo sapien
tgctggtggccgcttgtgtctctgc

SEQ ID NO: 3825999 - DNA, 25 bp, Homo sapien
actactgggcctgaggtcgacctaa

SEQ ID NO: 3826000 - DNA, 25 bp, Homo sapien
gtggtctgcgtttgcttcagcatcc

SEQ ID NO: 3826001 - DNA, 25 bp, Homo sapien
ggcttgagtggtctgcgtttgcttc

SEQ ID NO: 3826002 - DNA, 25 bp, Homo sapien
gaggtcgacctaatactttgcttct

SEQ ID NO: 3826003 - DNA, 25 bp, Homo sapien
ccatccacacccctcagagatggtc

SEQ ID NO: 3826004 - DNA, 25 bp, Homo sapien
ccttgaggcttttgcagatctggcc

SEQ ID NO: 3826005 - DNA, 25 bp, Homo sapien
tcagagatggtctcacaatcttgaa

SEQ ID NO: 3826006 - DNA, 25 bp, Homo sapien
ctcagggtcactggcccagtgtcct

SEQ ID NO: 3826007 - DNA, 25 bp, Homo sapien
gccagtggggcttgatctccgtcct

SEQ ID NO: 3826008 - DNA, 25 bp, Homo sapien
ccagtggggcttgatctccgtcctg

SEQ ID NO: 3826009 - DNA, 25 bp, Homo sapien
tagccagtggggcttgatctccgtc

SEQ ID NO: 3826010 - DNA, 25 bp, Homo sapien
cagtggggcttgatctccgtcctgt

SEQ ID NO: 3826011 - DNA, 25 bp, Homo sapien
ggagctgagcttggactttgtgagg

SEQ ID NO: 3826012 - DNA, 25 bp, Homo sapien
ccagcccctcgattttggctattct

SEQ ID NO: 3826013 - DNA, 25 bp, Homo sapien
cacaatatggctggtgaccagcccc

SEQ ID NO: 3826014 - DNA, 25 bp, Homo sapien
agcacaatatggctggtgaccagcc

SEQ ID NO: 3826015 - DNA, 25 bp, Homo sapien
caaagtaatgcaaaaggtctctgtt

SEQ ID NO: 3826016 - DNA, 25 bp, Homo sapien
gaaccaaagtaatgcaaaaggtctc

SEQ ID NO: 3826017 - DNA, 25 bp, Homo sapien
ttgaaccaaagtaatgcaaaaggtc

SEQ ID NO: 3826018 - DNA, 25 bp, Homo sapien
accaaagtaatgcaaaaggtctctg

SEQ ID NO: 3826019 - DNA, 25 bp, Homo sapien
cagtgcctggaggactaggtgtctc

SEQ ID NO: 3826020 - DNA, 25 bp, Homo sapien
gccctggagttcctcagtgcctgga

SEQ ID NO: 3826021 - DNA, 25 bp, Homo sapien
ctaggtgtctcagccatggtctcat

SEQ ID NO: 3826022 - DNA, 25 bp, Homo sapien
cctggaggactaggtgtctcagcca

SEQ ID NO: 3826023 - DNA, 25 bp, Homo sapien
gaagttgaagtactcaggcaccagc

SEQ ID NO: 3826024 - DNA, 25 bp, Homo sapien
cgaagttgaagtactcaggcaccag

SEQ ID NO: 3826025 - DNA, 25 bp, Homo sapien
gcgaagttgaagtactcaggcacca

SEQ ID NO: 3826026 - DNA, 25 bp, Homo sapien
tatttagaagagaagggcgtgacag

SEQ ID NO: 3826027 - DNA, 25 bp, Homo sapien
tctcactgtgtgatttgggctcaag

SEQ ID NO: 3826028 - DNA, 25 bp, Homo sapien
taaggctcacaacactgactcagaa

SEQ ID NO: 3826029 - DNA, 25 bp, Homo sapien
aacatgcttggagccttgagtctca

SEQ ID NO: 3826030 - DNA, 25 bp, Homo sapien
gtagctaagtagatttaaccacctg

SEQ ID NO: 3826031 - DNA, 25 bp, Homo sapien
cattctcaagaaactagtggttctc

SEQ ID NO: 3826032 - DNA, 25 bp, Homo sapien
tagggataccataatagtcagagac

SEQ ID NO: 3826033 - DNA, 25 bp, Homo sapien
ctcagtgattcaccccattagggaa

SEQ ID NO: 3826034 - DNA, 25 bp, Homo sapien
ctgtccgcatgcaagccacactgac

SEQ ID NO: 3826035 - DNA, 25 bp, Homo sapien
ccgtgggagtaccagcatcattctg

SEQ ID NO: 3826036 - DNA, 25 bp, Homo sapien
caccactccgggagccgtgggagta

SEQ ID NO: 3826037 - DNA, 25 bp, Homo sapien
tcaaagctccacttgatctctgctc

SEQ ID NO: 3826038 - DNA, 25 bp, Homo sapien
agggataatatcactggttctttta

SEQ ID NO: 3826039 - DNA, 25 bp, Homo sapien
ctgcaagggataatatcactggttc

SEQ ID NO: 3826040 - DNA, 25 bp, Homo sapien
gatgctgtgataatgagaatcataa

SEQ ID NO: 3826041 - DNA, 25 bp, Homo sapien
ctcctgcaagggataatatcactgg

SEQ ID NO: 3826042 - DNA, 25 bp, Homo sapien
aaacagaaggggatgttgagtggat

SEQ ID NO: 3826043 - DNA, 25 bp, Homo sapien
atgttgagtggatagcggggaaggc

SEQ ID NO: 3826044 - DNA, 25 bp, Homo sapien
cagaaggggatgttgagtggatagc

SEQ ID NO: 3826045 - DNA, 25 bp, Homo sapien
aaggggatgttgagtggatagcggg

SEQ ID NO: 3826046 - DNA, 25 bp, Homo sapien
gaggggcattcggcactgatggcat

SEQ ID NO: 3826047 - DNA, 25 bp, Homo sapien
gggcattcggcactgatggcatcca

SEQ ID NO: 3826048 - DNA, 25 bp, Homo sapien
actgatggcatccacccttggagct

SEQ ID NO: 3826049 - DNA, 25 bp, Homo sapien
ggaggggcattcggcactgatggca

SEQ ID NO: 3826050 - DNA, 25 bp, Homo sapien
accaggattatgctcaggtcagcct

SEQ ID NO: 3826051 - DNA, 25 bp, Homo sapien
taactaccaccgcattatagaagca

SEQ ID NO: 3826052 - DNA, 25 bp, Homo sapien
tgggagtgctcctctctgattcgct

SEQ ID NO: 3826053 - DNA, 25 bp, Homo sapien
catgtactctgaatggtagctctaa

SEQ ID NO: 3826054 - DNA, 25 bp, Homo sapien
gtgctgtgctgaaagctctggcttg

SEQ ID NO: 3826055 - DNA, 25 bp, Homo sapien
cactaggtggcactaccacggtaaa

SEQ ID NO: 3826056 - DNA, 25 bp, Homo sapien
tgggtaatctgcaaccacctcatgg

SEQ ID NO: 3826057 - DNA, 25 bp, Homo sapien
cagttagtagcaccaataatatgtg

SEQ ID NO: 3826058 - DNA, 25 bp, Homo sapien
gatggccagcgggtctcgactcttt

SEQ ID NO: 3826059 - DNA, 25 bp, Homo sapien
gccagcgggtctcgactctttgtcc

SEQ ID NO: 3826060 - DNA, 25 bp, Homo sapien
agcgggtctcgactctttgtcctca

SEQ ID NO: 3826061 - DNA, 25 bp, Homo sapien
aaagtagatggccagcgggtctcga

SEQ ID NO: 3826062 - DNA, 25 bp, Homo sapien
tggatcctctagacaagctgctctg

SEQ ID NO: 3826063 - DNA, 25 bp, Homo sapien
tcttggatcctctagacaagctgct

SEQ ID NO: 3826064 - DNA, 25 bp, Homo sapien
gttcttggatcctctagacaagctg

SEQ ID NO: 3826065 - DNA, 25 bp, Homo sapien
ttggatcctctagacaagctgctct

SEQ ID NO: 3826066 - DNA, 25 bp, Homo sapien
tgcacaaaaatgcaagatccattag

SEQ ID NO: 3826067 - DNA, 25 bp, Homo sapien
tcatgcacaaaaatgcaagatccat

SEQ ID NO: 3826068 - DNA, 25 bp, Homo sapien
cacaaaaatgcaagatccattaggc

SEQ ID NO: 3826069 - DNA, 25 bp, Homo sapien
acaaaaatgcaagatccattaggcc

SEQ ID NO: 3826070 - DNA, 25 bp, Homo sapien
aacacatatggggtattgttggttt

SEQ ID NO: 3826071 - DNA, 25 bp, Homo sapien
cacatatggggtattgttggttttt

SEQ ID NO: 3826072 - DNA, 25 bp, Homo sapien
ccaacacatatggggtattgttggt

SEQ ID NO: 3826073 - DNA, 25 bp, Homo sapien
acacatatggggtattgttggtttt

SEQ ID NO: 3826074 - DNA, 25 bp, Homo sapien
gcacaagcagccgaaagatggttgg

SEQ ID NO: 3826075 - DNA, 25 bp, Homo sapien
cctgcacaagcagccgaaagatggt

SEQ ID NO: 3826076 - DNA, 25 bp, Homo sapien
tcctgcacaagcagccgaaagatgg

SEQ ID NO: 3826077 - DNA, 25 bp, Homo sapien
tgcacaagcagccgaaagatggttg

SEQ ID NO: 3826078 - DNA, 25 bp, Homo sapien
tcagagaacagttggctggggttag

SEQ ID NO: 3826079 - DNA, 25 bp, Homo sapien
ctcagagaacagttggctggggtta

SEQ ID NO: 3826080 - DNA, 25 bp, Homo sapien
cagagaacagttggctggggttagt

SEQ ID NO: 3826081 - DNA, 25 bp, Homo sapien
ggagccatcatcagtgccttgtccc

SEQ ID NO: 3826082 - DNA, 25 bp, Homo sapien
gagccatcatcagtgccttgtccct

SEQ ID NO: 3826083 - DNA, 25 bp, Homo sapien
ctccggtcagacagtgcctcaggct

SEQ ID NO: 3826084 - DNA, 25 bp, Homo sapien
gggttgagggcctctcctccggtca

SEQ ID NO: 3826085 - DNA, 25 bp, Homo sapien
tggccatagccttcgtacagctcca

SEQ ID NO: 3826086 - DNA, 25 bp, Homo sapien
cacttctccctcacgtcagggttga

SEQ ID NO: 3826087 - DNA, 25 bp, Homo sapien
gccttttggattggcacagatgaca

SEQ ID NO: 3826088 - DNA, 25 bp, Homo sapien
gattttcatgccttttggattggca

SEQ ID NO: 3826089 - DNA, 25 bp, Homo sapien
ggatccagacttgattttcatgcct

SEQ ID NO: 3826090 - DNA, 25 bp, Homo sapien
ccatggatccagacttgattttcat

SEQ ID NO: 3826091 - DNA, 25 bp, Homo sapien
agtgggtctgatacggacggcaaca

SEQ ID NO: 3826092 - DNA, 25 bp, Homo sapien
atacggacggcaacattcccctctt

SEQ ID NO: 3826093 - DNA, 25 bp, Homo sapien
gtctgatacggacggcaacattccc

SEQ ID NO: 3826094 - DNA, 25 bp, Homo sapien
agaagggccgagtgggtctgatacg

SEQ ID NO: 3826095 - DNA, 25 bp, Homo sapien
ccccttgttctgatgcagctgtctt

SEQ ID NO: 3826096 - DNA, 25 bp, Homo sapien
cccttgttctgatgcagctgtcttc

SEQ ID NO: 3826097 - DNA, 25 bp, Homo sapien
atcgtcgtttcttcccatgaaccaa

SEQ ID NO: 3826098 - DNA, 25 bp, Homo sapien
aattgatcacatcgtcgtttcttcc

SEQ ID NO: 3826099 - DNA, 25 bp, Homo sapien
agggcactttccacttcaacaggcc

SEQ ID NO: 3826100 - DNA, 25 bp, Homo sapien
tgccagggcactttccacttcaaca

SEQ ID NO: 3826101 - DNA, 25 bp, Homo sapien
gccagggcactttccacttcaacag

SEQ ID NO: 3826102 - DNA, 25 bp, Homo sapien
cacttcaacaggcccgatccggtag

SEQ ID NO: 3826103 - DNA, 25 bp, Homo sapien
gggtctgggctgctgaccacagccg

SEQ ID NO: 3826104 - DNA, 25 bp, Homo sapien
ctctcccctgatggggtctgggctg

SEQ ID NO: 3826105 - DNA, 25 bp, Homo sapien
ctcccctgatggggtctgggctgct

SEQ ID NO: 3826106 - DNA, 25 bp, Homo sapien
gtctgggctgctgaccacagccgac

SEQ ID NO: 3826107 - DNA, 25 bp, Homo sapien
taaggactataaatgcctttaccac

SEQ ID NO: 3826108 - DNA, 25 bp, Homo sapien
gtaggctggagtaaggactataaat

SEQ ID NO: 3826109 - DNA, 25 bp, Homo sapien
ttcctggggtatttgtatggagcag

SEQ ID NO: 3826110 - DNA, 25 bp, Homo sapien
tatttgtatggagcagtcacccttt

SEQ ID NO: 3826111 - DNA, 25 bp, Homo sapien
aaaaacacttggaaatcatcatttc

SEQ ID NO: 3826112 - DNA, 25 bp, Homo sapien
acacttggaaatcatcatttctcaa

SEQ ID NO: 3826113 - DNA, 25 bp, Homo sapien
aacacttggaaatcatcatttctca

SEQ ID NO: 3826114 - DNA, 25 bp, Homo sapien
acaaaaaacacttggaaatcatcat

SEQ ID NO: 3826115 - DNA, 25 bp, Homo sapien
cgcaatttactcctttggatctttc

SEQ ID NO: 3826116 - DNA, 25 bp, Homo sapien
gatctttccagaaaccgtctttggc

SEQ ID NO: 3826117 - DNA, 25 bp, Homo sapien
ttcgcaatttactcctttggatctt

SEQ ID NO: 3826118 - DNA, 25 bp, Homo sapien
tctttggcagttctgaaacaaaggc

SEQ ID NO: 3826119 - DNA, 25 bp, Homo sapien
gatgccgtttggaagctgcacacct

SEQ ID NO: 3826120 - DNA, 25 bp, Homo sapien
caagcatttgctaggcggcgcagca

SEQ ID NO: 3826121 - DNA, 25 bp, Homo sapien
gctcttagtgagaccagtgggcaga

SEQ ID NO: 3826122 - DNA, 25 bp, Homo sapien
gcagcatctatgtgatcagggccaa

SEQ ID NO: 3826123 - DNA, 25 bp, Homo sapien
tggtgactcccgaagatagaatttc

SEQ ID NO: 3826124 - DNA, 25 bp, Homo sapien
tatgtgcttcgtacaaaaacttgga

SEQ ID NO: 3826125 - DNA, 25 bp, Homo sapien
ccaggaggattacaattaaccacag

SEQ ID NO: 3826126 - DNA, 25 bp, Homo sapien
tgatcatcttagtgcaccacacatt

SEQ ID NO: 3826127 - DNA, 25 bp, Homo sapien
agcagcactgggattgcttcagttt

SEQ ID NO: 3826128 - DNA, 25 bp, Homo sapien
gcctttagggtatctgcacttgctg

SEQ ID NO: 3826129 - DNA, 25 bp, Homo sapien
cactgcatgtcaactacaagggctt

SEQ ID NO: 3826130 - DNA, 25 bp, Homo sapien
tcaaggtctggtaagattttcacac

SEQ ID NO: 3826131 - DNA, 25 bp, Homo sapien
gacttttaacggtagctagcacaca

SEQ ID NO: 3826132 - DNA, 25 bp, Homo sapien
cagcagctccagaactcctacagcc

SEQ ID NO: 3826133 - DNA, 25 bp, Homo sapien
gaagagagcacagtaactcaagcag

SEQ ID NO: 3826134 - DNA, 25 bp, Homo sapien
gagagcacagtaactcaagcagaca

SEQ ID NO: 3826135 - DNA, 25 bp, Homo sapien
ggaagagagcacagtaactcaagca

SEQ ID NO: 3826136 - DNA, 25 bp, Homo sapien
aaaagattggtgaggttatcatgga

SEQ ID NO: 3826137 - DNA, 25 bp, Homo sapien
ggattatgaccccatcagcccattc

SEQ ID NO: 3826138 - DNA, 25 bp, Homo sapien
ttatcatggattatgaccccatcag

SEQ ID NO: 3826139 - DNA, 25 bp, Homo sapien
ctaaaagattggtgaggttatcatg

SEQ ID NO: 3826140 - DNA, 25 bp, Homo sapien
gtccctaggaatttctgcttttctg

SEQ ID NO: 3826141 - DNA, 25 bp, Homo sapien
ctgcttttctgtgaggatttttgct

SEQ ID NO: 3826142 - DNA, 25 bp, Homo sapien
ttttctgtgaggatttttgctcttc

SEQ ID NO: 3826143 - DNA, 25 bp, Homo sapien
ggatttttgctcttctcaccagctg

SEQ ID NO: 3826144 - DNA, 25 bp, Homo sapien
ctcctaagacttggcaggtactgtc

SEQ ID NO: 3826145 - DNA, 25 bp, Homo sapien
agacttggcaggtactgtctttcat

SEQ ID NO: 3826146 - DNA, 25 bp, Homo sapien
ttcctcctaagacttggcaggtact

SEQ ID NO: 3826147 - DNA, 25 bp, Homo sapien
taagacttggcaggtactgtctttc

SEQ ID NO: 3826148 - DNA, 25 bp, Homo sapien
gaactacacattgcctttgtacctg

SEQ ID NO: 3826149 - DNA, 25 bp, Homo sapien
ctatggaataagaattgaagattac

SEQ ID NO: 3826150 - DNA, 25 bp, Homo sapien
gaagattactgtaccagctcctgag

SEQ ID NO: 3826151 - DNA, 25 bp, Homo sapien
tcctgagcagaactacacattgcct

SEQ ID NO: 3826152 - DNA, 25 bp, Homo sapien
tcatgctggattaggtggttcctac

SEQ ID NO: 3826153 - DNA, 25 bp, Homo sapien
ctgcttatattctagtcatgctgga

SEQ ID NO: 3826154 - DNA, 25 bp, Homo sapien
gattaggtggttcctacccagatta

SEQ ID NO: 3826155 - DNA, 25 bp, Homo sapien
tacggaagaaagatctaggctggga

SEQ ID NO: 3826156 - DNA, 25 bp, Homo sapien
ctgaggtgcaaggagagccagtttg

SEQ ID NO: 3826157 - DNA, 25 bp, Homo sapien
ggtgcaaggagagccagtttgagtt

SEQ ID NO: 3826158 - DNA, 25 bp, Homo sapien
tgcaaggagagccagtttgagttcc

SEQ ID NO: 3826159 - DNA, 25 bp, Homo sapien
gaggtgcaaggagagccagtttgag

SEQ ID NO: 3826160 - DNA, 25 bp, Homo sapien
cactaacatgataagagcttatgtc

SEQ ID NO: 3826161 - DNA, 25 bp, Homo sapien
agccactaacatgataagagcttat

SEQ ID NO: 3826162 - DNA, 25 bp, Homo sapien
gccactaacatgataagagcttatg

SEQ ID NO: 3826163 - DNA, 25 bp, Homo sapien
taacatgataagagcttatgtctat

SEQ ID NO: 3826164 - DNA, 25 bp, Homo sapien
agttcattggagtttacaaagtcag

SEQ ID NO: 3826165 - DNA, 25 bp, Homo sapien
ttgagaacagagaaccactctgact

SEQ ID NO: 3826166 - DNA, 25 bp, Homo sapien
ggcagcacagagtttacctcctcag

SEQ ID NO: 3826167 - DNA, 25 bp, Homo sapien
ccagggttcttccatgctgggaaaa

SEQ ID NO: 3826168 - DNA, 25 bp, Homo sapien
atgattgttttatgtatgctatcta

SEQ ID NO: 3826169 - DNA, 25 bp, Homo sapien
agttatgattgttttatgtatgcta

SEQ ID NO: 3826170 - DNA, 25 bp, Homo sapien
gatttctcccctcataacttgtatt

SEQ ID NO: 3826171 - DNA, 25 bp, Homo sapien
ttatgattgttttatgtatgctatc

SEQ ID NO: 3826172 - DNA, 25 bp, Homo sapien
cacagggtgcaaagtccctgaactt

SEQ ID NO: 3826173 - DNA, 25 bp, Homo sapien
gacatctgagtaccccacagggtgc

SEQ ID NO: 3826174 - DNA, 25 bp, Homo sapien
gttgcctactattaatgtagagagt

SEQ ID NO: 3826175 - DNA, 25 bp, Homo sapien
gtccctgaacttttcgcagccaatg

SEQ ID NO: 3826176 - DNA, 25 bp, Homo sapien
ttctccatgtcagcccagtgatcca

SEQ ID NO: 3826177 - DNA, 25 bp, Homo sapien
agtgatccaacacatcactagcaaa

SEQ ID NO: 3826178 - DNA, 25 bp, Homo sapien
taaacttggccggcacttcctggtg

SEQ ID NO: 3826179 - DNA, 25 bp, Homo sapien
agcaaagttaaacttggccggcact

SEQ ID NO: 3826180 - DNA, 25 bp, Homo sapien
ttcaccctgggaggtcacaacagag

SEQ ID NO: 3826181 - DNA, 25 bp, Homo sapien
cacaacagagcatgtgcagtctaca

SEQ ID NO: 3826182 - DNA, 25 bp, Homo sapien
tattgacagggacacgtgacctaac

SEQ ID NO: 3826183 - DNA, 25 bp, Homo sapien
taaaattctagacgctcagggctgg

SEQ ID NO: 3826184 - DNA, 25 bp, Homo sapien
ggagtcatgtaaccagaagtcacac

SEQ ID NO: 3826185 - DNA, 25 bp, Homo sapien
gttactgacactacctagacctgtg

SEQ ID NO: 3826186 - DNA, 25 bp, Homo sapien
tacagcaaggaactgactttacctg

SEQ ID NO: 3826187 - DNA, 25 bp, Homo sapien
gtaacttcaccagttgctcctgtag

SEQ ID NO: 3826188 - DNA, 25 bp, Homo sapien
acacgatccccacgctgcaggccac

SEQ ID NO: 3826189 - DNA, 25 bp, Homo sapien
actgccacacgatccccacgctgca

SEQ ID NO: 3826190 - DNA, 25 bp, Homo sapien
tgaaattccacattaattccttccc

SEQ ID NO: 3826191 - DNA, 25 bp, Homo sapien
ctgctcgaatgcagcccaggatcac

SEQ ID NO: 3826192 - DNA, 25 bp, Homo sapien
taaagaagccaacaatttagagaat

SEQ ID NO: 3826193 - DNA, 25 bp, Homo sapien
ctaaagaagccaacaatttagagaa

SEQ ID NO: 3826194 - DNA, 25 bp, Homo sapien
tagccttggccttagacatctgcaa

SEQ ID NO: 3826195 - DNA, 25 bp, Homo sapien
caccagtagcttaattctcagagaa

SEQ ID NO: 3826196 - DNA, 25 bp, Homo sapien
atggttccaggcataaagatgagac

SEQ ID NO: 3826197 - DNA, 25 bp, Homo sapien
tcatccccagcaacaatagccttgg

SEQ ID NO: 3826198 - DNA, 25 bp, Homo sapien
tttttcagagctagactggacacca

SEQ ID NO: 3826199 - DNA, 25 bp, Homo sapien
tccacacagtgatgagtggtggatg

SEQ ID NO: 3826200 - DNA, 25 bp, Homo sapien
ccacacagtgatgagtggtggatgc

SEQ ID NO: 3826201 - DNA, 25 bp, Homo sapien
ctccacacagtgatgagtggtggat

SEQ ID NO: 3826202 - DNA, 25 bp, Homo sapien
ggctcgagtaggaatgttctgccat

SEQ ID NO: 3826203 - DNA, 25 bp, Homo sapien
gtcccactagtgaagtagatggcag

SEQ ID NO: 3826204 - DNA, 25 bp, Homo sapien
accactggtcccactagtgaagtag

SEQ ID NO: 3826205 - DNA, 25 bp, Homo sapien
aggctcgagtaggaatgttctgcca

SEQ ID NO: 3826206 - DNA, 25 bp, Homo sapien
cctaatgcccaaggttccataagtg

SEQ ID NO: 3826207 - DNA, 25 bp, Homo sapien
tatcatagagtccaacatagggtgt

SEQ ID NO: 3826208 - DNA, 25 bp, Homo sapien
gaagcttttaggtactggcactagg

SEQ ID NO: 3826209 - DNA, 25 bp, Homo sapien
gccaaatagatgtctggatgggcca

SEQ ID NO: 3826210 - DNA, 25 bp, Homo sapien
tggcactaggctttagacagaacag

SEQ ID NO: 3826211 - DNA, 25 bp, Homo sapien
gaccatggccatgacagagccctca

SEQ ID NO: 3826212 - DNA, 25 bp, Homo sapien
agaacacgtgcccaaattggtcagg

SEQ ID NO: 3826213 - DNA, 25 bp, Homo sapien
cacgtgcccaaattggtcagggtgc

SEQ ID NO: 3826214 - DNA, 25 bp, Homo sapien
cccaaattggtcagggtgcaccttg

SEQ ID NO: 3826215 - DNA, 25 bp, Homo sapien
gggcacccatcatactcttgattgg

SEQ ID NO: 3826216 - DNA, 25 bp, Homo sapien
aaagatcctgctgtagcaacatccg

SEQ ID NO: 3826217 - DNA, 25 bp, Homo sapien
catactcttgattggataactggag

SEQ ID NO: 3826218 - DNA, 25 bp, Homo sapien
gctgtagcaacatccggtaaacaat

SEQ ID NO: 3826219 - DNA, 25 bp, Homo sapien
cagactctcttaccaatcctcaaag

SEQ ID NO: 3826220 - DNA, 25 bp, Homo sapien
tagataggcatgaatgtatgtgagg

SEQ ID NO: 3826221 - DNA, 25 bp, Homo sapien
gggctctctgtgtgcgagagattca

SEQ ID NO: 3826222 - DNA, 25 bp, Homo sapien
gtgcgagagattcagatagataggc

SEQ ID NO: 3826223 - DNA, 25 bp, Homo sapien
gaagggactcccctacagtgacgca

SEQ ID NO: 3826224 - DNA, 25 bp, Homo sapien
tcccctacagtgacgcagttctgta

SEQ ID NO: 3826225 - DNA, 25 bp, Homo sapien
gggactcccctacagtgacgcagtt

SEQ ID NO: 3826226 - DNA, 25 bp, Homo sapien
ctacagtgacgcagttctgtagatg

SEQ ID NO: 3826227 - DNA, 25 bp, Homo sapien
ccaagaagatatgtcaggaggtgca

SEQ ID NO: 3826228 - DNA, 25 bp, Homo sapien
cattagccaaagaaggatgcagggt

SEQ ID NO: 3826229 - DNA, 25 bp, Homo sapien
cacattgtgcacatgagacctcaag

SEQ ID NO: 3826230 - DNA, 25 bp, Homo sapien
gaacctgagtgtccttgtaagcata

SEQ ID NO: 3826231 - DNA, 25 bp, Homo sapien
agcagacagatcagcaaacctcagg

SEQ ID NO: 3826232 - DNA, 25 bp, Homo sapien
cattactggaaccacaatcctaggg

SEQ ID NO: 3826233 - DNA, 25 bp, Homo sapien
cctcaggaggaggtacaaggtcaca

SEQ ID NO: 3826234 - DNA, 25 bp, Homo sapien
tgttagttcaggaagcaacccatct

SEQ ID NO: 3826235 - DNA, 25 bp, Homo sapien
agcagccgttcccatgtatcctggt

SEQ ID NO: 3826236 - DNA, 25 bp, Homo sapien
aagcagccgttcccatgtatcctgg

SEQ ID NO: 3826237 - DNA, 25 bp, Homo sapien
cacagcaggagatggcttcaatggc

SEQ ID NO: 3826238 - DNA, 25 bp, Homo sapien
agcagattggaagaatgatgcacac

SEQ ID NO: 3826239 - DNA, 25 bp, Homo sapien
gagattgctgaattggtcaaatgaa

SEQ ID NO: 3826240 - DNA, 25 bp, Homo sapien
cttcaatggcatcatgagattgctg

SEQ ID NO: 3826241 - DNA, 25 bp, Homo sapien
ggcctgatgggtttgaccctgatgc

SEQ ID NO: 3826242 - DNA, 25 bp, Homo sapien
gccagagaagatgcctataggcctg

SEQ ID NO: 3826243 - DNA, 25 bp, Homo sapien
gcaggacgttgcccttatcatctat

SEQ ID NO: 3826244 - DNA, 25 bp, Homo sapien
tgccaatgtctccttctgtgccggg

SEQ ID NO: 3826245 - DNA, 25 bp, Homo sapien
ccgtttagtgctcccatcctcactg

SEQ ID NO: 3826246 - DNA, 25 bp, Homo sapien
gtcctccctcatcccgtttagtgct

SEQ ID NO: 3826247 - DNA, 25 bp, Homo sapien
tcatcccgtttagtgctcccatcct

SEQ ID NO: 3826248 - DNA, 25 bp, Homo sapien
tccctcatcccgtttagtgctccca

SEQ ID NO: 3826249 - DNA, 25 bp, Homo sapien
tcttgaggagtctaagggctaactg

SEQ ID NO: 3826250 - DNA, 25 bp, Homo sapien
tgtctccacatctagtgcctcttgg

SEQ ID NO: 3826251 - DNA, 25 bp, Homo sapien
gagatcacagtgataggctgaggat

SEQ ID NO: 3826252 - DNA, 25 bp, Homo sapien
gatggcaaggctgaatagccacttt

SEQ ID NO: 3826253 - DNA, 25 bp, Homo sapien
gacaatgcttgcctcatgatatgca

SEQ ID NO: 3826254 - DNA, 25 bp, Homo sapien
ggacaatgcttgcctcatgatatgc

SEQ ID NO: 3826255 - DNA, 25 bp, Homo sapien
aatgcttgcctcatgatatgcattc

SEQ ID NO: 3826256 - DNA, 25 bp, Homo sapien
gcttgcctcatgatatgcattcaat

SEQ ID NO: 3826257 - DNA, 25 bp, Homo sapien
ggtgaccacagaaagacagagtcat

SEQ ID NO: 3826258 - DNA, 25 bp, Homo sapien
tggtgaccacagaaagacagagtca

SEQ ID NO: 3826259 - DNA, 25 bp, Homo sapien
ctggtgaccacagaaagacagagtc

SEQ ID NO: 3826260 - DNA, 25 bp, Homo sapien
caaaagtctcctcgaatgttggctg

SEQ ID NO: 3826261 - DNA, 25 bp, Homo sapien
cataaactggaaatacccatcttca

SEQ ID NO: 3826262 - DNA, 25 bp, Homo sapien
tttgattccccggtctccaaggagc

SEQ ID NO: 3826263 - DNA, 25 bp, Homo sapien
tgcccgtcccataaactggaaatac

SEQ ID NO: 3826264 - DNA, 25 bp, Homo sapien
agaagaacctgtccttcagagaaca

SEQ ID NO: 3826265 - DNA, 25 bp, Homo sapien
cttcagagaacactggacaccgaac

SEQ ID NO: 3826266 - DNA, 25 bp, Homo sapien
gtccttcagagaacactggacaccg

SEQ ID NO: 3826267 - DNA, 25 bp, Homo sapien
ctgcagaagaacctgtccttcagag

SEQ ID NO: 3826268 - DNA, 25 bp, Homo sapien
ctgctgatcacagccgtctcaacca

SEQ ID NO: 3826269 - DNA, 25 bp, Homo sapien
gcattctctacctccgagggtccaa

SEQ ID NO: 3826270 - DNA, 25 bp, Homo sapien
atcacagccgtctcaaccacagcag

SEQ ID NO: 3826271 - DNA, 25 bp, Homo sapien
atcagtgcattctctacctccgagg

SEQ ID NO: 3826272 - DNA, 25 bp, Homo sapien
caccctgcgggaatgtgctaggaca

SEQ ID NO: 3826273 - DNA, 25 bp, Homo sapien
tatacagcagggctagctcagagct

SEQ ID NO: 3826274 - DNA, 25 bp, Homo sapien
gtctcagagtgttcagccccacagt

SEQ ID NO: 3826275 - DNA, 25 bp, Homo sapien
tgggcacacaggattttctcagcag

SEQ ID NO: 3826276 - DNA, 25 bp, Homo sapien
tttcttgggtacttgtatggggctg

SEQ ID NO: 3826277 - DNA, 25 bp, Homo sapien
ctttcttgggtacttgtatggggct

SEQ ID NO: 3826278 - DNA, 25 bp, Homo sapien
tgggcaggttcaagacaaactctat

SEQ ID NO: 3826279 - DNA, 25 bp, Homo sapien
ttgggcaggttcaagacaaactcta

SEQ ID NO: 3826280 - DNA, 25 bp, Homo sapien
cttgggcaggttcaagacaaactct

SEQ ID NO: 3826281 - DNA, 25 bp, Homo sapien
tcttgggcaggttcaagacaaactc

SEQ ID NO: 3826282 - DNA, 25 bp, Homo sapien
caacatctaacatggtaaagttttg

SEQ ID NO: 3826283 - DNA, 25 bp, Homo sapien
gaatgtctcttagatgtctcactgc

SEQ ID NO: 3826284 - DNA, 25 bp, Homo sapien
taagaaggtgccacggcctttcatt

SEQ ID NO: 3826285 - DNA, 25 bp, Homo sapien
taatgcatctgggttagtgcctggc

SEQ ID NO: 3826286 - DNA, 25 bp, Homo sapien
gcttttggaagcgtacacttacctc

SEQ ID NO: 3826287 - DNA, 25 bp, Homo sapien
ggattccccaactcacaagcttttg

SEQ ID NO: 3826288 - DNA, 25 bp, Homo sapien
cagaagccccaggaattgaggtgct

SEQ ID NO: 3826289 - DNA, 25 bp, Homo sapien
catggtaatgggttgggtgttcaca

SEQ ID NO: 3826290 - DNA, 25 bp, Homo sapien
gagactttggacaggcagtactgct

SEQ ID NO: 3826291 - DNA, 25 bp, Homo sapien
tcttgctggaccactgggtgagact

SEQ ID NO: 3826292 - DNA, 25 bp, Homo sapien
tgtgaatgggtatgactcctccagg

SEQ ID NO: 3826293 - DNA, 25 bp, Homo sapien
tcgaaatattcaggcctacctctgg

SEQ ID NO: 3826294 - DNA, 25 bp, Homo sapien
cccatccagtcgataagaatgatcc

SEQ ID NO: 3826295 - DNA, 25 bp, Homo sapien
caagatgcagtagagattgctgcag

SEQ ID NO: 3826296 - DNA, 25 bp, Homo sapien
tcaccaccaagatgcagtagagatt

SEQ ID NO: 3826297 - DNA, 25 bp, Homo sapien
gataagaatgatccagcatcaccac

SEQ ID NO: 3826298 - DNA, 25 bp, Homo sapien
catgaggtgtcccagacttcatgct

SEQ ID NO: 3826299 - DNA, 25 bp, Homo sapien
cttcatgctgttatctgtagataga

SEQ ID NO: 3826300 - DNA, 25 bp, Homo sapien
tgtgttgatggcatgaggtgtccca

SEQ ID NO: 3826301 - DNA, 25 bp, Homo sapien
caaagtgcatttgtggatgtgttga

SEQ ID NO: 3826302 - DNA, 25 bp, Homo sapien
gattttgtagtgtaaatgagctagg

SEQ ID NO: 3826303 - DNA, 25 bp, Homo sapien
tcaagaaatatcgttgttctaggcc

SEQ ID NO: 3826304 - DNA, 25 bp, Homo sapien
agggtgtaggatctctgtgatgttc

SEQ ID NO: 3826305 - DNA, 25 bp, Homo sapien
gctggacaatcaagaaatatcgttg

SEQ ID NO: 3826306 - DNA, 25 bp, Homo sapien
gaaattacctaatcaatgagccgct

SEQ ID NO: 3826307 - DNA, 25 bp, Homo sapien
tccaaagggtatgctgaggacagct

SEQ ID NO: 3826308 - DNA, 25 bp, Homo sapien
ccctctggacaggtgggaatccaaa

SEQ ID NO: 3826309 - DNA, 25 bp, Homo sapien
gaacacctacaagaggcacctgcat

SEQ ID NO: 3826310 - DNA, 25 bp, Homo sapien
caggttcctgcacttcgggaagagg

SEQ ID NO: 3826311 - DNA, 25 bp, Homo sapien
acttgttgagggcaccaggttcctg

SEQ ID NO: 3826312 - DNA, 25 bp, Homo sapien
cacatcagggtgactactaagcctg

SEQ ID NO: 3826313 - DNA, 25 bp, Homo sapien
acctgcaattcactcctggaggtgc

SEQ ID NO: 3826314 - DNA, 25 bp, Homo sapien
gggccctggccagcagtatggccac

SEQ ID NO: 3826315 - DNA, 25 bp, Homo sapien
agagcaagaggttggagcagcatcc

SEQ ID NO: 3826316 - DNA, 25 bp, Homo sapien
gcagcatccacttcggggccctggc

SEQ ID NO: 3826317 - DNA, 25 bp, Homo sapien
ttcggggccctggccagcagtatgg

SEQ ID NO: 3826318 - DNA, 25 bp, Homo sapien
atccgcaagtcactccaaaccttga

SEQ ID NO: 3826319 - DNA, 25 bp, Homo sapien
gaagatgtccggaaaagcccgtgcg

SEQ ID NO: 3826320 - DNA, 25 bp, Homo sapien
cagtgaggcgtctaggagacattca

SEQ ID NO: 3826321 - DNA, 25 bp, Homo sapien
aacctgcccaagactgtcacaggga

SEQ ID NO: 3826322 - DNA, 25 bp, Homo sapien
accaaacttcgagacaaggagtgga

SEQ ID NO: 3826323 - DNA, 25 bp, Homo sapien
tgacccagaacagctcaccaaggag

SEQ ID NO: 3826324 - DNA, 25 bp, Homo sapien
gcatgtgaagtcagtgacagcccca

SEQ ID NO: 3826325 - DNA, 25 bp, Homo sapien
gtgacagccccatacaagtacccaa

SEQ ID NO: 3826326 - DNA, 25 bp, Homo sapien
tatcccatgacccagaacagctcac

SEQ ID NO: 3826327 - DNA, 25 bp, Homo sapien
tagaaagtaaagtgcttggttggga

SEQ ID NO: 3826328 - DNA, 25 bp, Homo sapien
caaatattatgaaatgataaaaact

SEQ ID NO: 3826329 - DNA, 25 bp, Homo sapien
ttatgaaatgataaaaacttttaga

SEQ ID NO: 3826330 - DNA, 25 bp, Homo sapien
agtaaagtgcttggttgggaggctg

SEQ ID NO: 3826331 - DNA, 25 bp, Homo sapien
agacagaaacggtacctgttcccag

SEQ ID NO: 3826332 - DNA, 25 bp, Homo sapien
gaagggacaggtactgagtattgaa

SEQ ID NO: 3826333 - DNA, 25 bp, Homo sapien
atggccagacagaaacggtacctgt

SEQ ID NO: 3826334 - DNA, 25 bp, Homo sapien
tgggctgtgtgcactttttgggctt

SEQ ID NO: 3826335 - DNA, 25 bp, Homo sapien
tatgtaatgataaaaggtcttgtcc

SEQ ID NO: 3826336 - DNA, 25 bp, Homo sapien
cacagcagttagaaaagacaaagag

SEQ ID NO: 3826337 - DNA, 25 bp, Homo sapien
ttaaactgtaccgtaaaacagatga

SEQ ID NO: 3826338 - DNA, 25 bp, Homo sapien
tacccaacaaccatggaatacacat

SEQ ID NO: 3826339 - DNA, 25 bp, Homo sapien
gcagaaagcctatagaaggatgtgc

SEQ ID NO: 3826340 - DNA, 25 bp, Homo sapien
gaaagcctatagaaggatgtgcaag

SEQ ID NO: 3826341 - DNA, 25 bp, Homo sapien
tgcagaaagcctatagaaggatgtg

SEQ ID NO: 3826342 - DNA, 25 bp, Homo sapien
cagaaagcctatagaaggatgtgca

SEQ ID NO: 3826343 - DNA, 25 bp, Homo sapien
ctgaatggagggatcggccagagct

SEQ ID NO: 3826344 - DNA, 25 bp, Homo sapien
ataagctcttatcatgttagtggct

SEQ ID NO: 3826345 - DNA, 25 bp, Homo sapien
ttcacctcaggactactattgcaca

SEQ ID NO: 3826346 - DNA, 25 bp, Homo sapien
tgacctgcaatgaaaggtgcatgca

SEQ ID NO: 3826347 - DNA, 25 bp, Homo sapien
tggtatttatcatatgcctcggctc

SEQ ID NO: 3826348 - DNA, 25 bp, Homo sapien
aaaaaatgggactccagagacttga

SEQ ID NO: 3826349 - DNA, 25 bp, Homo sapien
gagacttgaaaccacggccacttgt

SEQ ID NO: 3826350 - DNA, 25 bp, Homo sapien
tatcatatgcctcggctcctcaaac

SEQ ID NO: 3826351 - DNA, 25 bp, Homo sapien
ttggtttgtagatctctgacttctc

SEQ ID NO: 3826352 - DNA, 25 bp, Homo sapien
cttggtttgtagatctctgacttct

SEQ ID NO: 3826353 - DNA, 25 bp, Homo sapien
ccccaaagactgctgtattatgtct

SEQ ID NO: 3826354 - DNA, 25 bp, Homo sapien
gactgctgtattatgtctgtattag

SEQ ID NO: 3826355 - DNA, 25 bp, Homo sapien
agttcttcctccacatactcataca

SEQ ID NO: 3826356 - DNA, 25 bp, Homo sapien
aaaccccgtggtataattccatctg

SEQ ID NO: 3826357 - DNA, 25 bp, Homo sapien
gacctcctaagagtccacgagaaac

SEQ ID NO: 3826358 - DNA, 25 bp, Homo sapien
ccgtagacctcctaagagtccacga

SEQ ID NO: 3826359 - DNA, 25 bp, Homo sapien
tagacctcctaagagtccacgagaa

SEQ ID NO: 3826360 - DNA, 25 bp, Homo sapien
ctaagagtccacgagaaactaatgg

SEQ ID NO: 3826361 - DNA, 25 bp, Homo sapien
ttgacttgcctcagccagctagcct

SEQ ID NO: 3826362 - DNA, 25 bp, Homo sapien
taagccagtctctcagcaaggaggt

SEQ ID NO: 3826363 - DNA, 25 bp, Homo sapien
gaccagtgagctagatggcccttcg

SEQ ID NO: 3826364 - DNA, 25 bp, Homo sapien
ttctaagccagtctctcagccatgc

SEQ ID NO: 3826365 - DNA, 25 bp, Homo sapien
cttggataagttttcctcattgcat

SEQ ID NO: 3826366 - DNA, 25 bp, Homo sapien
gcattttccaccttcacccttgctc

SEQ ID NO: 3826367 - DNA, 25 bp, Homo sapien
attttccaccttcacccttgctcat

SEQ ID NO: 3826368 - DNA, 25 bp, Homo sapien
ttgaagacttggataagttttcctc

SEQ ID NO: 3826369 - DNA, 25 bp, Homo sapien
gggaccttggaagaacacgagcttc

SEQ ID NO: 3826370 - DNA, 25 bp, Homo sapien
atcagaaggtctgcgaaggttccag

SEQ ID NO: 3826371 - DNA, 25 bp, Homo sapien
acacgagcttcttgtggattgtcca

SEQ ID NO: 3826372 - DNA, 25 bp, Homo sapien
agtgggctggcacccagaaatcaga

SEQ ID NO: 3826373 - DNA, 25 bp, Homo sapien
tggaaggggatatgttccaggttcc

SEQ ID NO: 3826374 - DNA, 25 bp, Homo sapien
gaaggggatatgttccaggttccaa

SEQ ID NO: 3826375 - DNA, 25 bp, Homo sapien
ggaaggggatatgttccaggttcca

SEQ ID NO: 3826376 - DNA, 25 bp, Homo sapien
cttggaaggggatatgttccaggtt

SEQ ID NO: 3826377 - DNA, 25 bp, Homo sapien
ctgttatctccaatccccatatggg

SEQ ID NO: 3826378 - DNA, 25 bp, Homo sapien
atctgttatctccaatccccatatg

SEQ ID NO: 3826379 - DNA, 25 bp, Homo sapien
tctgttatctccaatccccatatgg

SEQ ID NO: 3826380 - DNA, 25 bp, Homo sapien
tgttatctccaatccccatatgggc

SEQ ID NO: 3826381 - DNA, 25 bp, Homo sapien
attctgccagcaaactcttccttgc

SEQ ID NO: 3826382 - DNA, 25 bp, Homo sapien
cattctgccagcaaactcttccttg

SEQ ID NO: 3826383 - DNA, 25 bp, Homo sapien
tttgggatctaaatgcagcagaacc

SEQ ID NO: 3826384 - DNA, 25 bp, Homo sapien
tataaaggcttaaatactggagact

SEQ ID NO: 3826385 - DNA, 25 bp, Homo sapien
actttatgtcctgcctttcacagca

SEQ ID NO: 3826386 - DNA, 25 bp, Homo sapien
tggagtaggaagtgcacaaacagat

SEQ ID NO: 3826387 - DNA, 25 bp, Homo sapien
ttgggattcgccgtaggtctattcg

SEQ ID NO: 3826388 - DNA, 25 bp, Homo sapien
ggttaatccactggtcatagtcggg

SEQ ID NO: 3826389 - DNA, 25 bp, Homo sapien
aatcagggtcttgttggttaatcca

SEQ ID NO: 3826390 - DNA, 25 bp, Homo sapien
tccactggtcatagtcgggagtcac

SEQ ID NO: 3826391 - DNA, 25 bp, Homo sapien
gccaacttgtgcattctagctctga

SEQ ID NO: 3826392 - DNA, 25 bp, Homo sapien
tgagcttcttctactggcagtggct

SEQ ID NO: 3826393 - DNA, 25 bp, Homo sapien
gaatccagggaccattaggaccaag

SEQ ID NO: 3826394 - DNA, 25 bp, Homo sapien
tctgatttccatgacaacccggcca

SEQ ID NO: 3826395 - DNA, 25 bp, Homo sapien
gatagaagggaatgcaaaaaactca

SEQ ID NO: 3826396 - DNA, 25 bp, Homo sapien
aaggaaacacaaaggcttgagctca

SEQ ID NO: 3826397 - DNA, 25 bp, Homo sapien
taatatggaagatgggtagcaggaa

SEQ ID NO: 3826398 - DNA, 25 bp, Homo sapien
aaagtcaatgtttatggaactaagc

SEQ ID NO: 3826399 - DNA, 25 bp, Homo sapien
gatccttggctggtttctagacctc

SEQ ID NO: 3826400 - DNA, 25 bp, Homo sapien
tagacctcccatgaagctatttcag

SEQ ID NO: 3826401 - DNA, 25 bp, Homo sapien
agaatcttgctgtttctatgaggca

SEQ ID NO: 3826402 - DNA, 25 bp, Homo sapien
cctgcctgtgtaagtgggaattgag

SEQ ID NO: 3826403 - DNA, 25 bp, Homo sapien
tactggactactgggctcaaaagga

SEQ ID NO: 3826404 - DNA, 25 bp, Homo sapien
ggcgagttgctctaccacaaaaggg

SEQ ID NO: 3826405 - DNA, 25 bp, Homo sapien
cagtggctaatgaggttccggaccc

SEQ ID NO: 3826406 - DNA, 25 bp, Homo sapien
gattggcccagcttaggttacaaag

SEQ ID NO: 3826407 - DNA, 25 bp, Homo sapien
aggataaacacttaatgcacatggg

SEQ ID NO: 3826408 - DNA, 25 bp, Homo sapien
cagaatgcccatccatgctagactg

SEQ ID NO: 3826409 - DNA, 25 bp, Homo sapien
gtggagaaatgggagcacttctaca

SEQ ID NO: 3826410 - DNA, 25 bp, Homo sapien
gagaaatgggagcacttctacactg

SEQ ID NO: 3826411 - DNA, 25 bp, Homo sapien
gagtttgcctatgggattgtagcca

SEQ ID NO: 3826412 - DNA, 25 bp, Homo sapien
actatcaggggctctagcaggcgtg

SEQ ID NO: 3826413 - DNA, 25 bp, Homo sapien
tctagcaggcgtggatcctgtctgg

SEQ ID NO: 3826414 - DNA, 25 bp, Homo sapien
gactgctgctgggtccacaatggag

SEQ ID NO: 3826415 - DNA, 25 bp, Homo sapien
ggtgaggaggagcattacaatccat

SEQ ID NO: 3826416 - DNA, 25 bp, Homo sapien
ctgggaaggacactaaacagaaccg

SEQ ID NO: 3826417 - DNA, 25 bp, Homo sapien
accgccatcccttaagtgagactct

SEQ ID NO: 3826418 - DNA, 25 bp, Homo sapien
ccatcccttaagtgagactctgtgg

SEQ ID NO: 3826419 - DNA, 25 bp, Homo sapien
ctgttccggctttgtggagacacca

SEQ ID NO: 3826420 - DNA, 25 bp, Homo sapien
tggtcttaaagtcaggacactccag

SEQ ID NO: 3826421 - DNA, 25 bp, Homo sapien
tgcttgcagccggtagaggatatat

SEQ ID NO: 3826422 - DNA, 25 bp, Homo sapien
tttgctgtcagctggattgttcctg

SEQ ID NO: 3826423 - DNA, 25 bp, Homo sapien
gaaataactcctggaaactgagcca

SEQ ID NO: 3826424 - DNA, 25 bp, Homo sapien
aaataactcctggaaactgagccac

SEQ ID NO: 3826425 - DNA, 25 bp, Homo sapien
tgaaataactcctggaaactgagcc

SEQ ID NO: 3826426 - DNA, 25 bp, Homo sapien
aaagatattccaagatgtagcaata

SEQ ID NO: 3826427 - DNA, 25 bp, Homo sapien
gatgtagcaataatttgtgttgttg

SEQ ID NO: 3826428 - DNA, 25 bp, Homo sapien
agatattccaagatgtagcaataat

SEQ ID NO: 3826429 - DNA, 25 bp, Homo sapien
ccaagatgtagcaataatttgtgtt

SEQ ID NO: 3826430 - DNA, 25 bp, Homo sapien
tgttggcaatgagacagctttccct

SEQ ID NO: 3826431 - DNA, 25 bp, Homo sapien
tcatgaacgtatacacttgagagtc

SEQ ID NO: 3826432 - DNA, 25 bp, Homo sapien
ggacagggtcttctgtactaggaca

SEQ ID NO: 3826433 - DNA, 25 bp, Homo sapien
tcaagatcagaatccagagtcccgg

SEQ ID NO: 3826434 - DNA, 25 bp, Homo sapien
gcagtgattccattatccaacttgt

SEQ ID NO: 3826435 - DNA, 25 bp, Homo sapien
tatggaaatcttttggtaggaggca

SEQ ID NO: 3826436 - DNA, 25 bp, Homo sapien
cacaatctgtgagtgacaagcagtg

SEQ ID NO: 3826437 - DNA, 25 bp, Homo sapien
tacttctcaatccagtatggaaatc

SEQ ID NO: 3826438 - DNA, 25 bp, Homo sapien
cttagagggacttggaagatcagtc

SEQ ID NO: 3826439 - DNA, 25 bp, Homo sapien
cccaagatggtggtgtaagatggcc

SEQ ID NO: 3826440 - DNA, 25 bp, Homo sapien
gctacttatgccctcttgttaccag

SEQ ID NO: 3826441 - DNA, 25 bp, Homo sapien
gaacctaatccaaagctttcctgag

SEQ ID NO: 3826442 - DNA, 25 bp, Homo sapien
acggtgaacccaatgctgaagctgc

SEQ ID NO: 3826443 - DNA, 25 bp, Homo sapien
cggtgaacccaatgctgaagctgct

SEQ ID NO: 3826444 - DNA, 25 bp, Homo sapien
gacggtgaacccaatgctgaagctg

SEQ ID NO: 3826445 - DNA, 25 bp, Homo sapien
tagcaattcaaggagaagtatcgat

SEQ ID NO: 3826446 - DNA, 25 bp, Homo sapien
ggcacggccagcacaagttctgttt

SEQ ID NO: 3826447 - DNA, 25 bp, Homo sapien
ttctgtttggtagcaattaattggc

SEQ ID NO: 3826448 - DNA, 25 bp, Homo sapien
ggatacacatattggcagctctttg

SEQ ID NO: 3826449 - DNA, 25 bp, Homo sapien
aatatactgccaaaggtggccttga

SEQ ID NO: 3826450 - DNA, 25 bp, Homo sapien
cctgtgtcagacacattccatatgc

SEQ ID NO: 3826451 - DNA, 25 bp, Homo sapien
aagccaggaagaaaatatactgcca

SEQ ID NO: 3826452 - DNA, 25 bp, Homo sapien
tgtgtcagacacattccatatgcta

SEQ ID NO: 3826453 - DNA, 25 bp, Homo sapien
aggcttctactccaaagacctcatc

SEQ ID NO: 3826454 - DNA, 25 bp, Homo sapien
tcctcacaggcttctactccaaaga

SEQ ID NO: 3826455 - DNA, 25 bp, Homo sapien
tttcctcacaggcttctactccaaa

SEQ ID NO: 3826456 - DNA, 25 bp, Homo sapien
tactccaaagacctcatcatcaaag

SEQ ID NO: 3826457 - DNA, 25 bp, Homo sapien
tatactattcatatgttctaggtcc

SEQ ID NO: 3826458 - DNA, 25 bp, Homo sapien
taggtccatcatccatagcctcaat

SEQ ID NO: 3826459 - DNA, 25 bp, Homo sapien
ggcaatctcgcacttacaggtatac

SEQ ID NO: 3826460 - DNA, 25 bp, Homo sapien
gatgaacaagacatccgaaaaatag

SEQ ID NO: 3826461 - DNA, 25 bp, Homo sapien
atccagtacatggtgggagggctgc

SEQ ID NO: 3826462 - DNA, 25 bp, Homo sapien
tgtagaagcatccagtacatggtgg

SEQ ID NO: 3826463 - DNA, 25 bp, Homo sapien
ttttgtagaagcatccagtacatgg

SEQ ID NO: 3826464 - DNA, 25 bp, Homo sapien
aggtctttttgtagaagcatccagt

SEQ ID NO: 3826465 - DNA, 25 bp, Homo sapien
gcagttgctaggttataagggcttt

SEQ ID NO: 3826466 - DNA, 25 bp, Homo sapien
gatactcatgatactctgtaccagg

SEQ ID NO: 3826467 - DNA, 25 bp, Homo sapien
tcaagcagcaagcatagaagctagg

SEQ ID NO: 3826468 - DNA, 25 bp, Homo sapien
gatctcaccaagcaagtcacttaca

SEQ ID NO: 3826469 - DNA, 25 bp, Homo sapien
tccagcacctccggggtgagggcct

SEQ ID NO: 3826470 - DNA, 25 bp, Homo sapien
acttccgtctgtccatagctctcat

SEQ ID NO: 3826471 - DNA, 25 bp, Homo sapien
gtccatagctctcatgtagctccag

SEQ ID NO: 3826472 - DNA, 25 bp, Homo sapien
ccgtctgtccatagctctcatgtag

SEQ ID NO: 3826473 - DNA, 25 bp, Homo sapien
atagctctcatgtagctccagccca

SEQ ID NO: 3826474 - DNA, 25 bp, Homo sapien
tgtgtagactttagtctgagggcaa

SEQ ID NO: 3826475 - DNA, 25 bp, Homo sapien
tgtagactttagtctgagggcaatt

SEQ ID NO: 3826476 - DNA, 25 bp, Homo sapien
cgtggcagcagttttctctggactg

SEQ ID NO: 3826477 - DNA, 25 bp, Homo sapien
gtggcagcagttttctctggactgt

SEQ ID NO: 3826478 - DNA, 25 bp, Homo sapien
tggcagcagttttctctggactgtc

SEQ ID NO: 3826479 - DNA, 25 bp, Homo sapien
atcagctctgccgacaaaccagaaa

SEQ ID NO: 3826480 - DNA, 25 bp, Homo sapien
gacatcatcagctctgccgacaaac

SEQ ID NO: 3826481 - DNA, 25 bp, Homo sapien
atcatcagctctgccgacaaaccag

SEQ ID NO: 3826482 - DNA, 25 bp, Homo sapien
agctctgccgacaaaccagaaatac

SEQ ID NO: 3826483 - DNA, 25 bp, Homo sapien
agtaggagagctccccccctgtcaa

SEQ ID NO: 3826484 - DNA, 25 bp, Homo sapien
gaaaagaagcctttgaccaccacat

SEQ ID NO: 3826485 - DNA, 25 bp, Homo sapien
ggaaaagaagcctttgaccaccaca

SEQ ID NO: 3826486 - DNA, 25 bp, Homo sapien
aagaagcctttgaccaccacatcct

SEQ ID NO: 3826487 - DNA, 25 bp, Homo sapien
aaattggatatggactactgacaac

SEQ ID NO: 3826488 - DNA, 25 bp, Homo sapien
ccacaaattggatatggactactga

SEQ ID NO: 3826489 - DNA, 25 bp, Homo sapien
tcagcaagcacactctccacttcaa

SEQ ID NO: 3826490 - DNA, 25 bp, Homo sapien
agctgatttgacaactgctggatgc

SEQ ID NO: 3826491 - DNA, 25 bp, Homo sapien
ctccaatgatagacatatgatccaa

SEQ ID NO: 3826492 - DNA, 25 bp, Homo sapien
ccaagtctggccgatcagcatatat

SEQ ID NO: 3826493 - DNA, 25 bp, Homo sapien
caatgatagacatatgatccaagtc

SEQ ID NO: 3826494 - DNA, 25 bp, Homo sapien
tatatcattccctgaaccacattgg

SEQ ID NO: 3826495 - DNA, 25 bp, Homo sapien
ctctctggtgggattgacaccaacc

SEQ ID NO: 3826496 - DNA, 25 bp, Homo sapien
tggtgggattgacaccaacccctac

SEQ ID NO: 3826497 - DNA, 25 bp, Homo sapien
tctggtgggattgacaccaacccct

SEQ ID NO: 3826498 - DNA, 25 bp, Homo sapien
tctctggtgggattgacaccaaccc

SEQ ID NO: 3826499 - DNA, 25 bp, Homo sapien
tctgtttttcagacacatcaaggat

SEQ ID NO: 3826500 - DNA, 25 bp, Homo sapien
cttgctctgtttttcagacacatca

SEQ ID NO: 3826501 - DNA, 25 bp, Homo sapien
caacagataatttatcttgctctgt

SEQ ID NO: 3826502 - DNA, 25 bp, Homo sapien
ctgcaacagataatttatcttgctc

SEQ ID NO: 3826503 - DNA, 25 bp, Homo sapien
tctaggctgtaggacttacaggatg

SEQ ID NO: 3826504 - DNA, 25 bp, Homo sapien
tacaggatggagctaagacaacaaa

SEQ ID NO: 3826505 - DNA, 25 bp, Homo sapien
gacttacaggatggagctaagacaa

SEQ ID NO: 3826506 - DNA, 25 bp, Homo sapien
atttctctaggctgtaggacttaca

SEQ ID NO: 3826507 - DNA, 25 bp, Homo sapien
gtgtttgattctcccaatgattgtc

SEQ ID NO: 3826508 - DNA, 25 bp, Homo sapien
tcttaaaacgtgtttgattctccca

SEQ ID NO: 3826509 - DNA, 25 bp, Homo sapien
taaaacgtgtttgattctcccaatg

SEQ ID NO: 3826510 - DNA, 25 bp, Homo sapien
aaacgtgtttgattctcccaatgat

SEQ ID NO: 3826511 - DNA, 25 bp, Homo sapien
tttgcttttggtacggccagaaatc

SEQ ID NO: 3826512 - DNA, 25 bp, Homo sapien
actgcagtcttatggtttagaaaac

SEQ ID NO: 3826513 - DNA, 25 bp, Homo sapien
gccagaaatcgagcttgttttttca

SEQ ID NO: 3826514 - DNA, 25 bp, Homo sapien
aaaacatgattctctgaggttaaac

SEQ ID NO: 3826515 - DNA, 25 bp, Homo sapien
tcctgtgttcggttgtaacctgaac

SEQ ID NO: 3826516 - DNA, 25 bp, Homo sapien
taaatgacgggattccagggtagga

SEQ ID NO: 3826517 - DNA, 25 bp, Homo sapien
ttttcactgacatttgagcatgtta

SEQ ID NO: 3826518 - DNA, 25 bp, Homo sapien
tcggttgtaacctgaactcattaaa

SEQ ID NO: 3826519 - DNA, 25 bp, Homo sapien
ctaaaaatgttaggcttcctgcaca

SEQ ID NO: 3826520 - DNA, 25 bp, Homo sapien
catttaatggctagtgaacatggga

SEQ ID NO: 3826521 - DNA, 25 bp, Homo sapien
tagcttgtagaaatggacttatcct

SEQ ID NO: 3826522 - DNA, 25 bp, Homo sapien
gtatttttatcctcctagctggtgg

SEQ ID NO: 3826523 - DNA, 25 bp, Homo sapien
gagagacgagaaccattttaggcat

SEQ ID NO: 3826524 - DNA, 25 bp, Homo sapien
tcctggtgccccatcagtggttgtc

SEQ ID NO: 3826525 - DNA, 25 bp, Homo sapien
gacagtccagtgtcgcaattttgga

SEQ ID NO: 3826526 - DNA, 25 bp, Homo sapien
tctatccaggatgatgagtcaacag

SEQ ID NO: 3826527 - DNA, 25 bp, Homo sapien
catctgctttttcctcgtggcagtc

SEQ ID NO: 3826528 - DNA, 25 bp, Homo sapien
gaagagcagccctgaaccttgagtt

SEQ ID NO: 3826529 - DNA, 25 bp, Homo sapien
tggcagacttgtttcttagaagagc

SEQ ID NO: 3826530 - DNA, 25 bp, Homo sapien
ctcgtggcagtctaaagaagaggga

SEQ ID NO: 3826531 - DNA, 25 bp, Homo sapien
acaggaggggagatgaggtactcac

SEQ ID NO: 3826532 - DNA, 25 bp, Homo sapien
tctttatcacctagaagcttgttag

SEQ ID NO: 3826533 - DNA, 25 bp, Homo sapien
aaagcaccagtctatggcatgatgg

SEQ ID NO: 3826534 - DNA, 25 bp, Homo sapien
gaatcactgatttagaggctgtgat

SEQ ID NO: 3826535 - DNA, 25 bp, Homo sapien
tctactgaattggtagatgttgaca

SEQ ID NO: 3826536 - DNA, 25 bp, Homo sapien
cagtgatcttgagccctctgacacc

SEQ ID NO: 3826537 - DNA, 25 bp, Homo sapien
gatataaccgatgcatcaggaaacc

SEQ ID NO: 3826538 - DNA, 25 bp, Homo sapien
gcagacctggtgtttgggcatcatg

SEQ ID NO: 3826539 - DNA, 25 bp, Homo sapien
catttatgtgtgtgaagacctgaca

SEQ ID NO: 3826540 - DNA, 25 bp, Homo sapien
aggatttgcacagagaccagttcat

SEQ ID NO: 3826541 - DNA, 25 bp, Homo sapien
gcactcaggatttgcacagagacca

SEQ ID NO: 3826542 - DNA, 25 bp, Homo sapien
cactcaggatttgcacagagaccag

SEQ ID NO: 3826543 - DNA, 25 bp, Homo sapien
tcaggatttgcacagagaccagttc

SEQ ID NO: 3826544 - DNA, 25 bp, Homo sapien
agtgccctcacagaaccaaaaattg

SEQ ID NO: 3826545 - DNA, 25 bp, Homo sapien
accaaaaattgctaggcgctgaaaa

SEQ ID NO: 3826546 - DNA, 25 bp, Homo sapien
caaaaattgctaggcgctgaaaaca

SEQ ID NO: 3826547 - DNA, 25 bp, Homo sapien
ctattatctttatgcagtgccctca

SEQ ID NO: 3826548 - DNA, 25 bp, Homo sapien
ccccagtttgaagtcctgtttcatg

SEQ ID NO: 3826549 - DNA, 25 bp, Homo sapien
ttgaaatactctggaatccccagtt

SEQ ID NO: 3826550 - DNA, 25 bp, Homo sapien
ctttagcaaagttgaaatactctgg

SEQ ID NO: 3826551 - DNA, 25 bp, Homo sapien
cagtccattggtccaggacatcttt

SEQ ID NO: 3826552 - DNA, 25 bp, Homo sapien
tctgaaagtatattggcaaattttc

SEQ ID NO: 3826553 - DNA, 25 bp, Homo sapien
tctcctctttgtagggaacaggctt

SEQ ID NO: 3826554 - DNA, 25 bp, Homo sapien
gacaggccacatttgcaagccacca

SEQ ID NO: 3826555 - DNA, 25 bp, Homo sapien
tgggcagaatcagaattacccgatc

SEQ ID NO: 3826556 - DNA, 25 bp, Homo sapien
aagattgtagtctgtagagaatgtc

SEQ ID NO: 3826557 - DNA, 25 bp, Homo sapien
cacatttggatgcaacagcgtctac

SEQ ID NO: 3826558 - DNA, 25 bp, Homo sapien
cagcttggagtgcagattttcacat

SEQ ID NO: 3826559 - DNA, 25 bp, Homo sapien
gttctctgatacaatcagcttggag

SEQ ID NO: 3826560 - DNA, 25 bp, Homo sapien
tatccacttgttccactggtaaaga

SEQ ID NO: 3826561 - DNA, 25 bp, Homo sapien
cagataatcctaaaccaaaactgct

SEQ ID NO: 3826562 - DNA, 25 bp, Homo sapien
attttcggatatccacttgttccac

SEQ ID NO: 3826563 - DNA, 25 bp, Homo sapien
aatatggccatgatctcattgtgtt

SEQ ID NO: 3826564 - DNA, 25 bp, Homo sapien
gaggtattccacatcacatctgagg

SEQ ID NO: 3826565 - DNA, 25 bp, Homo sapien
tgtgaatacacatgctccctggatc

SEQ ID NO: 3826566 - DNA, 25 bp, Homo sapien
caagatagaagtcggctcaaaacgg

SEQ ID NO: 3826567 - DNA, 25 bp, Homo sapien
tgagggtgtcaaatctagccagaac

SEQ ID NO: 3826568 - DNA, 25 bp, Homo sapien
acaagcattcggtatacagttggtg

SEQ ID NO: 3826569 - DNA, 25 bp, Homo sapien
gactgtgatggggtacttggagagt

SEQ ID NO: 3826570 - DNA, 25 bp, Homo sapien
attctgtacaagcattcggtataca

SEQ ID NO: 3826571 - DNA, 25 bp, Homo sapien
tgtacaagcattcggtatacagttg

SEQ ID NO: 3826572 - DNA, 25 bp, Homo sapien
ctgtactgagtcttcatcctgggtt

SEQ ID NO: 3826573 - DNA, 25 bp, Homo sapien
ttagtgtatgtactgctgaagtgag

SEQ ID NO: 3826574 - DNA, 25 bp, Homo sapien
tagtgtatgtactgctgaagtgagc

SEQ ID NO: 3826575 - DNA, 25 bp, Homo sapien
ccaattttagtgtatgtactgctga

SEQ ID NO: 3826576 - DNA, 25 bp, Homo sapien
attttagtgtatgtactgctgaagt

SEQ ID NO: 3826577 - DNA, 25 bp, Homo sapien
tatccaggcccgtcttgtttctcca

SEQ ID NO: 3826578 - DNA, 25 bp, Homo sapien
caggggtaattggttccccagcact

SEQ ID NO: 3826579 - DNA, 25 bp, Homo sapien
tttcagtcacgtcaggggtaattgg

SEQ ID NO: 3826580 - DNA, 25 bp, Homo sapien
gtccatatccttcgtagatatccag

SEQ ID NO: 3826581 - DNA, 25 bp, Homo sapien
cttaacatcgaaagcaggagaaggt

SEQ ID NO: 3826582 - DNA, 25 bp, Homo sapien
taacatcgaaagcaggagaaggttt

SEQ ID NO: 3826583 - DNA, 25 bp, Homo sapien
cccattgagccaggtttaattttca

SEQ ID NO: 3826584 - DNA, 25 bp, Homo sapien
aggagaaggttttcccattgagcca

SEQ ID NO: 3826585 - DNA, 25 bp, Homo sapien
taagcggtaggtaggtagtgtacag

SEQ ID NO: 3826586 - DNA, 25 bp, Homo sapien
taggtagtgtacagattgggttgtt

SEQ ID NO: 3826587 - DNA, 25 bp, Homo sapien
tcataacaaagaaagtttatatggg

SEQ ID NO: 3826588 - DNA, 25 bp, Homo sapien
tgggttgttaaacattctcctggaa

SEQ ID NO: 3826589 - DNA, 25 bp, Homo sapien
ataaaaattaaagtatcatggaagt

SEQ ID NO: 3826590 - DNA, 25 bp, Homo sapien
atcatggaagtaaaatggaatcacc

SEQ ID NO: 3826591 - DNA, 25 bp, Homo sapien
taaagtatcatggaagtaaaatgga

SEQ ID NO: 3826592 - DNA, 25 bp, Homo sapien
aattaaagtatcatggaagtaaaat

SEQ ID NO: 3826593 - DNA, 25 bp, Homo sapien
tgtaagaccctgatagccatgcatg

SEQ ID NO: 3826594 - DNA, 25 bp, Homo sapien
atcactgtgaatacagctgtgcctg

SEQ ID NO: 3826595 - DNA, 25 bp, Homo sapien
tgatagccatgcatgttgggaattg

SEQ ID NO: 3826596 - DNA, 25 bp, Homo sapien
tgcagttgggatcactgtgaataca

SEQ ID NO: 3826597 - DNA, 25 bp, Homo sapien
tcggttgggtagaacttgaatgcca

SEQ ID NO: 3826598 - DNA, 25 bp, Homo sapien
ggtcggttgggtagaacttgaatgc

SEQ ID NO: 3826599 - DNA, 25 bp, Homo sapien
caaatggtcggttgggtagaacttg

SEQ ID NO: 3826600 - DNA, 25 bp, Homo sapien
atggtcggttgggtagaacttgaat

SEQ ID NO: 3826601 - DNA, 25 bp, Homo sapien
ttatccatatatcctctgtccccag

SEQ ID NO: 3826602 - DNA, 25 bp, Homo sapien
gaggataatatgacatcatctgctc

SEQ ID NO: 3826603 - DNA, 25 bp, Homo sapien
ctgtccccagtgatatagaaattgc

SEQ ID NO: 3826604 - DNA, 25 bp, Homo sapien
tagaaattgcctcgtagagttgaag

SEQ ID NO: 3826605 - DNA, 25 bp, Homo sapien
gacaacagctgactctgcaactgaa

SEQ ID NO: 3826606 - DNA, 25 bp, Homo sapien
tgggctgctgacaacagctgactct

SEQ ID NO: 3826607 - DNA, 25 bp, Homo sapien
gggcattttctacctcaaatggtcc

SEQ ID NO: 3826608 - DNA, 25 bp, Homo sapien
aactgaagggtgttcattcagggca

SEQ ID NO: 3826609 - DNA, 25 bp, Homo sapien
tgtcaccccatcctgacgtgagcct

SEQ ID NO: 3826610 - DNA, 25 bp, Homo sapien
cctcgttggtttccagaccttctgg

SEQ ID NO: 3826611 - DNA, 25 bp, Homo sapien
tactggcattcacaccatctttgcc

SEQ ID NO: 3826612 - DNA, 25 bp, Homo sapien
ttcactacaccagggacctcgttgg

SEQ ID NO: 3826613 - DNA, 25 bp, Homo sapien
caggacctatttcatcccctgagat

SEQ ID NO: 3826614 - DNA, 25 bp, Homo sapien
tgcctggcctgccttaaacttcagg

SEQ ID NO: 3826615 - DNA, 25 bp, Homo sapien
gcctgccttaaacttcaggacctat

SEQ ID NO: 3826616 - DNA, 25 bp, Homo sapien
ttcaggacctatttcatcccctgag

SEQ ID NO: 3826617 - DNA, 25 bp, Homo sapien
caggagagcttctgggacccctgta

SEQ ID NO: 3826618 - DNA, 25 bp, Homo sapien
tttaataaagtttgatcccagctct

SEQ ID NO: 3826619 - DNA, 25 bp, Homo sapien
tacctaatacaggagagcttctggg

SEQ ID NO: 3826620 - DNA, 25 bp, Homo sapien
gacccctgtaacaacccagcctcat

SEQ ID NO: 3826621 - DNA, 25 bp, Homo sapien
cttgtaatcaggatttagaacgaca

SEQ ID NO: 3826622 - DNA, 25 bp, Homo sapien
tgatcatgtgacttgtaatcaggat

SEQ ID NO: 3826623 - DNA, 25 bp, Homo sapien
cctgaatctcctttattagttgttc

SEQ ID NO: 3826624 - DNA, 25 bp, Homo sapien
caggatttagaacgacaaaagcctt

SEQ ID NO: 3826625 - DNA, 25 bp, Homo sapien
tccagtaagccaaaggaccaaacaa

SEQ ID NO: 3826626 - DNA, 25 bp, Homo sapien
gtccacaacactgagcaaatattcg

SEQ ID NO: 3826627 - DNA, 25 bp, Homo sapien
tattcgttataattaggatgcctac

SEQ ID NO: 3826628 - DNA, 25 bp, Homo sapien
cagtttgggacatgtggtgcagcat

SEQ ID NO: 3826629 - DNA, 25 bp, Homo sapien
cactgatagtctttggcagctcttg

SEQ ID NO: 3826630 - DNA, 25 bp, Homo sapien
ttcccactgatagtctttggcagct

SEQ ID NO: 3826631 - DNA, 25 bp, Homo sapien
tgtcttcccactgatagtctttggc

SEQ ID NO: 3826632 - DNA, 25 bp, Homo sapien
cccactgatagtctttggcagctct

SEQ ID NO: 3826633 - DNA, 25 bp, Homo sapien
ggtttctagagattgacagatacta

SEQ ID NO: 3826634 - DNA, 25 bp, Homo sapien
catcttgtggtttctagagattgac

SEQ ID NO: 3826635 - DNA, 25 bp, Homo sapien
gcctctgatatcataaccacaagat

SEQ ID NO: 3826636 - DNA, 25 bp, Homo sapien
tattttaaatcaacagtttctaagc

SEQ ID NO: 3826637 - DNA, 25 bp, Homo sapien
taagaaatgataggaacattgacac

SEQ ID NO: 3826638 - DNA, 25 bp, Homo sapien
ccctagtctattttcaggtagattc

SEQ ID NO: 3826639 - DNA, 25 bp, Homo sapien
gaaaacctatgtagcagagatctgg

SEQ ID NO: 3826640 - DNA, 25 bp, Homo sapien
ttatagttagaccttgaaacaagtc

SEQ ID NO: 3826641 - DNA, 25 bp, Homo sapien
catcaactggacagattgactctga

SEQ ID NO: 3826642 - DNA, 25 bp, Homo sapien
gctgaacacatcaactggacagatt

SEQ ID NO: 3826643 - DNA, 25 bp, Homo sapien
gaacacatcaactggacagattgac

SEQ ID NO: 3826644 - DNA, 25 bp, Homo sapien
agtgttgctgaacacatcaactgga

SEQ ID NO: 3826645 - DNA, 25 bp, Homo sapien
tttgaatcgacatgctggaatgatg

SEQ ID NO: 3826646 - DNA, 25 bp, Homo sapien
tgattttgaatcgacatgctggaat

SEQ ID NO: 3826647 - DNA, 25 bp, Homo sapien
cattgattttgaatcgacatgctgg

SEQ ID NO: 3826648 - DNA, 25 bp, Homo sapien
ttgattttgaatcgacatgctggaa

SEQ ID NO: 3826649 - DNA, 25 bp, Homo sapien
ggagaaagtcaattgcgccagcaaa

SEQ ID NO: 3826650 - DNA, 25 bp, Homo sapien
attaggagaaagtcaattgcgccag

SEQ ID NO: 3826651 - DNA, 25 bp, Homo sapien
agtcaattgcgccagcaaatggaaa

SEQ ID NO: 3826652 - DNA, 25 bp, Homo sapien
tcaattgcgccagcaaatggaaatc

SEQ ID NO: 3826653 - DNA, 25 bp, Homo sapien
ctcgcgcggtactcgagggagttcc

SEQ ID NO: 3826654 - DNA, 25 bp, Homo sapien
ctggacctcggtcttcagccttggg

SEQ ID NO: 3826655 - DNA, 25 bp, Homo sapien
gacttccggcagctggacttggaaa

SEQ ID NO: 3826656 - DNA, 25 bp, Homo sapien
gcggtgagggcctctattccccgca

SEQ ID NO: 3826657 - DNA, 25 bp, Homo sapien
gggagcagaggttctcccctcctta

SEQ ID NO: 3826658 - DNA, 25 bp, Homo sapien
ctagcccgggaaacgcagaagagaa

SEQ ID NO: 3826659 - DNA, 25 bp, Homo sapien
cagcctcgcgggctttttgaacgga

SEQ ID NO: 3826660 - DNA, 25 bp, Homo sapien
tccttagccacagctgccaacaaca

SEQ ID NO: 3826661 - DNA, 25 bp, Homo sapien
aaggtgctgccgagcggcttcgccg

SEQ ID NO: 3826662 - DNA, 25 bp, Homo sapien
tgccgagcggcttcgccgcctaaaa

SEQ ID NO: 3826663 - DNA, 25 bp, Homo sapien
aggtgctgccgagcggcttcgccgc

SEQ ID NO: 3826664 - DNA, 25 bp, Homo sapien
tgctgccgagcggcttcgccgccta

SEQ ID NO: 3826665 - DNA, 25 bp, Homo sapien
gatctccccgttccgcggactggac

SEQ ID NO: 3826666 - DNA, 25 bp, Homo sapien
gcggactggacacccgcgccgctct

SEQ ID NO: 3826667 - DNA, 25 bp, Homo sapien
aaagcgaaggtgccaacgatctccc

SEQ ID NO: 3826668 - DNA, 25 bp, Homo sapien
cgcgccgctctaacccaaacggctt

SEQ ID NO: 3826669 - DNA, 25 bp, Homo sapien
tgacagctttcaacctccctcggat

SEQ ID NO: 3826670 - DNA, 25 bp, Homo sapien
cctagcgggagagctacacgggctt

SEQ ID NO: 3826671 - DNA, 25 bp, Homo sapien
cgtgccgcctcctagcgggagagct

SEQ ID NO: 3826672 - DNA, 25 bp, Homo sapien
tacacgggcttgacagctttcaacc

SEQ ID NO: 3826673 - DNA, 25 bp, Homo sapien
gctttcatcgcctcagctgccccga

SEQ ID NO: 3826674 - DNA, 25 bp, Homo sapien
gcctcgggctgactctcctcgagat

SEQ ID NO: 3826675 - DNA, 25 bp, Homo sapien
gaccagcttatttggggcctgcctg

SEQ ID NO: 3826676 - DNA, 25 bp, Homo sapien
tcgagatcccaaccggctttcatcg

SEQ ID NO: 3826677 - DNA, 25 bp, Homo sapien
actcggccgactcactatcccagtg

SEQ ID NO: 3826678 - DNA, 25 bp, Homo sapien
atgatcagggatcaggttcggagag

SEQ ID NO: 3826679 - DNA, 25 bp, Homo sapien
ccgcactcggccgactcactatccc

SEQ ID NO: 3826680 - DNA, 25 bp, Homo sapien
gatcagggatcaggttcggagaggc

SEQ ID NO: 3826681 - DNA, 25 bp, Homo sapien
gtaatcccagaacttgcagaggcca

SEQ ID NO: 3826682 - DNA, 25 bp, Homo sapien
agaacttgcagaggccaaggtggac

SEQ ID NO: 3826683 - DNA, 25 bp, Homo sapien
caaggtggacagatcgcttaagtcc

SEQ ID NO: 3826684 - DNA, 25 bp, Homo sapien
ggagttcaagaccagcctgggcaac

SEQ ID NO: 3826685 - DNA, 25 bp, Homo sapien
gaaccaggtaccctaagagaaatga

SEQ ID NO: 3826686 - DNA, 25 bp, Homo sapien
gtgccagaaagtaatgacatgctca

SEQ ID NO: 3826687 - DNA, 25 bp, Homo sapien
tgtattaacatcaccatagcaccca

SEQ ID NO: 3826688 - DNA, 25 bp, Homo sapien
gggcagggaaagcacatatgagcct

SEQ ID NO: 3826689 - DNA, 25 bp, Homo sapien
tcatgggttacttcacagttgtcag

SEQ ID NO: 3826690 - DNA, 25 bp, Homo sapien
gtcatgggttacttcacagttgtca

SEQ ID NO: 3826691 - DNA, 25 bp, Homo sapien
ggtcatgggttacttcacagttgtc

SEQ ID NO: 3826692 - DNA, 25 bp, Homo sapien
ctgggttttggaacattggatttgc

SEQ ID NO: 3826693 - DNA, 25 bp, Homo sapien
tgcagaacaaaaaccactacgttgt

SEQ ID NO: 3826694 - DNA, 25 bp, Homo sapien
ctgcagaacaaaaaccactacgttg

SEQ ID NO: 3826695 - DNA, 25 bp, Homo sapien
tacgttgtttaggtggttttgatga

SEQ ID NO: 3826696 - DNA, 25 bp, Homo sapien
gttttgatgaaaaagctggcaccag

SEQ ID NO: 3826697 - DNA, 25 bp, Homo sapien
aaatagaacctgtaaaagtgtagct

SEQ ID NO: 3826698 - DNA, 25 bp, Homo sapien
aatagaacctgtaaaagtgtagctg

SEQ ID NO: 3826699 - DNA, 25 bp, Homo sapien
atgcttttcgaagacatccaaactc

SEQ ID NO: 3826700 - DNA, 25 bp, Homo sapien
tcgaagacatccaaactccaaatag

SEQ ID NO: 3826701 - DNA, 25 bp, Homo sapien
gcccaacaacatcagctagaaaatc

SEQ ID NO: 3826702 - DNA, 25 bp, Homo sapien
tgtagcccaacaacatcagctagaa

SEQ ID NO: 3826703 - DNA, 25 bp, Homo sapien
ctttgttcagtttgtagcccaacaa

SEQ ID NO: 3826704 - DNA, 25 bp, Homo sapien
cagtttgtagcccaacaacatcagc

SEQ ID NO: 3826705 - DNA, 25 bp, Homo sapien
ggcggcttttgcattagaaggtaaa

SEQ ID NO: 3826706 - DNA, 25 bp, Homo sapien
ggttgatggcggcttttgcattaga

SEQ ID NO: 3826707 - DNA, 25 bp, Homo sapien
ctgaaggttgatggcggcttttgca

SEQ ID NO: 3826708 - DNA, 25 bp, Homo sapien
gcttttgcattagaaggtaaaggcc

SEQ ID NO: 3826709 - DNA, 25 bp, Homo sapien
cttagagccatacttttgaatgatg

SEQ ID NO: 3826710 - DNA, 25 bp, Homo sapien
gtaatggaaagtgaaacgttctcat

SEQ ID NO: 3826711 - DNA, 25 bp, Homo sapien
gtcagaaggcatctggtcaagccca

SEQ ID NO: 3826712 - DNA, 25 bp, Homo sapien
gcccactttcttagagccatacttt

SEQ ID NO: 3826713 - DNA, 25 bp, Homo sapien
ttagcaatatcagagtaagcctaag

SEQ ID NO: 3826714 - DNA, 25 bp, Homo sapien
attgttagcaatatcagagtaagcc

SEQ ID NO: 3826715 - DNA, 25 bp, Homo sapien
agcaatatcagagtaagcctaagcc

SEQ ID NO: 3826716 - DNA, 25 bp, Homo sapien
tgttagcaatatcagagtaagccta

SEQ ID NO: 3826717 - DNA, 25 bp, Homo sapien
gccagttaatgtacaaaaaggcact

SEQ ID NO: 3826718 - DNA, 25 bp, Homo sapien
gttcatatatcataggactgccagt

SEQ ID NO: 3826719 - DNA, 25 bp, Homo sapien
ggaactggaaacctcatatgctgct

SEQ ID NO: 3826720 - DNA, 25 bp, Homo sapien
ggtgcctggcacctataaaacacgc

SEQ ID NO: 3826721 - DNA, 25 bp, Homo sapien
tgctcatgtgacagtagtgcaacct

SEQ ID NO: 3826722 - DNA, 25 bp, Homo sapien
ctgcccttactacgtgctcatgtga

SEQ ID NO: 3826723 - DNA, 25 bp, Homo sapien
cccttactacgtgctcatgtgacag

SEQ ID NO: 3826724 - DNA, 25 bp, Homo sapien
gtgacagtagtgcaacctcaagaaa

SEQ ID NO: 3826725 - DNA, 25 bp, Homo sapien
tctcacagacactatatttgctgcc

SEQ ID NO: 3826726 - DNA, 25 bp, Homo sapien
gacactatatttgctgcctacctta

SEQ ID NO: 3826727 - DNA, 25 bp, Homo sapien
cacagacactatatttgctgcctac

SEQ ID NO: 3826728 - DNA, 25 bp, Homo sapien
caaatctcacagacactatatttgc

SEQ ID NO: 3826729 - DNA, 25 bp, Homo sapien
aagagaggactattgtctgctatag

SEQ ID NO: 3826730 - DNA, 25 bp, Homo sapien
gtctgctatagaaccattacatttg

SEQ ID NO: 3826731 - DNA, 25 bp, Homo sapien
tgctatagaaccattacatttggta

SEQ ID NO: 3826732 - DNA, 25 bp, Homo sapien
tctgctatagaaccattacatttgg

SEQ ID NO: 3826733 - DNA, 25 bp, Homo sapien
tcagcttgcaacactccaattgaaa

SEQ ID NO: 3826734 - DNA, 25 bp, Homo sapien
gcttgcaacactccaattgaaaaat

SEQ ID NO: 3826735 - DNA, 25 bp, Homo sapien
tgcaacactccaattgaaaaattaa

SEQ ID NO: 3826736 - DNA, 25 bp, Homo sapien
gcaacactccaattgaaaaattaaa

SEQ ID NO: 3826737 - DNA, 25 bp, Homo sapien
acaaagaagatgaatgcaaataata

SEQ ID NO: 3826738 - DNA, 25 bp, Homo sapien
caaagaagatgaatgcaaataatat

SEQ ID NO: 3826739 - DNA, 25 bp, Homo sapien
gaagatgaatgcaaataatattaat

SEQ ID NO: 3826740 - DNA, 25 bp, Homo sapien
aagaagatgaatgcaaataatatta

SEQ ID NO: 3826741 - DNA, 25 bp, Homo sapien
gcacaaacttgctttctagaggatc

SEQ ID NO: 3826742 - DNA, 25 bp, Homo sapien
agggtccctgcagcaatggcacaaa

SEQ ID NO: 3826743 - DNA, 25 bp, Homo sapien
tgggcaggctgctgaatgttacact

SEQ ID NO: 3826744 - DNA, 25 bp, Homo sapien
cttaagaggatcaacacagtgtagt

SEQ ID NO: 3826745 - DNA, 25 bp, Homo sapien
tatttacactatgtcaactgccatc

SEQ ID NO: 3826746 - DNA, 25 bp, Homo sapien
ctatttacactatgtcaactgccat

SEQ ID NO: 3826747 - DNA, 25 bp, Homo sapien
tattgcttcttcttactatttacac

SEQ ID NO: 3826748 - DNA, 25 bp, Homo sapien
ctgtggaagttattgcttcttctta

SEQ ID NO: 3826749 - DNA, 25 bp, Homo sapien
accaacatgtagtcaggctgctgaa

SEQ ID NO: 3826750 - DNA, 25 bp, Homo sapien
ggtagtccagaatcttgttttcagg

SEQ ID NO: 3826751 - DNA, 25 bp, Homo sapien
cagcctccttcagcaaccagtgaga

SEQ ID NO: 3826752 - DNA, 25 bp, Homo sapien
tttgaccagttcatccataacacag

SEQ ID NO: 3826753 - DNA, 25 bp, Homo sapien
gagatgcgtgttagctctctcccct

SEQ ID NO: 3826754 - DNA, 25 bp, Homo sapien
gatccaaatctaaggagtggcccac

SEQ ID NO: 3826755 - DNA, 25 bp, Homo sapien
ggtcgtcactgggttaagaatcttc

SEQ ID NO: 3826756 - DNA, 25 bp, Homo sapien
agtggcccactaacacagcatcagg

SEQ ID NO: 3826757 - DNA, 25 bp, Homo sapien
tacatctttgagtttggtcgtcact

SEQ ID NO: 3826758 - DNA, 25 bp, Homo sapien
cttgagcttaaatcttctgccctgc

SEQ ID NO: 3826759 - DNA, 25 bp, Homo sapien
ctctgacataaagcaacgatgtatc

SEQ ID NO: 3826760 - DNA, 25 bp, Homo sapien
cgatgtatcaataacatatggatgt

SEQ ID NO: 3826761 - DNA, 25 bp, Homo sapien
caaaataactttggctaagaacttg

SEQ ID NO: 3826762 - DNA, 25 bp, Homo sapien
catgaccaagtctgtctggacactg

SEQ ID NO: 3826763 - DNA, 25 bp, Homo sapien
ccaattcaaggattgttctagcatc

SEQ ID NO: 3826764 - DNA, 25 bp, Homo sapien
ttctgtggcatcatgaccaagtctg

SEQ ID NO: 3826765 - DNA, 25 bp, Homo sapien
catgcttaaggaaataccgagccaa

SEQ ID NO: 3826766 - DNA, 25 bp, Homo sapien
tttggtaacctcgaaaggctcatgt

SEQ ID NO: 3826767 - DNA, 25 bp, Homo sapien
tgataatagctaactcacagggctg

SEQ ID NO: 3826768 - DNA, 25 bp, Homo sapien
aaagacagaatgtgacagacctggg

SEQ ID NO: 3826769 - DNA, 25 bp, Homo sapien
tagaacagtacacttaagacctcag

SEQ ID NO: 3826770 - DNA, 25 bp, Homo sapien
aaaatataattgcttgcagagcatt

SEQ ID NO: 3826771 - DNA, 25 bp, Homo sapien
gtatttcttggtgattagctagtgc

SEQ ID NO: 3826772 - DNA, 25 bp, Homo sapien
ctagtgcttctagatttagttctgc

SEQ ID NO: 3826773 - DNA, 25 bp, Homo sapien
gtgtttgggtgctgaagtacttctg

SEQ ID NO: 3826774 - DNA, 25 bp, Homo sapien
gtttttaggctcttggcctgctgct

SEQ ID NO: 3826775 - DNA, 25 bp, Homo sapien
aacattctcaggtgttgttaaataa

SEQ ID NO: 3826776 - DNA, 25 bp, Homo sapien
ttttaatagactcaaaagaggataa

SEQ ID NO: 3826777 - DNA, 25 bp, Homo sapien
taagaaactagatactccatttgtc

SEQ ID NO: 3826778 - DNA, 25 bp, Homo sapien
ccgtggtttttgtgatagatgttat

SEQ ID NO: 3826779 - DNA, 25 bp, Homo sapien
cagcatctgtctcccgggtcaaaaa

SEQ ID NO: 3826780 - DNA, 25 bp, Homo sapien
ttgaaagacacttaatagtttgaca

SEQ ID NO: 3826781 - DNA, 25 bp, Homo sapien
cacttaatagtttgacaatttctgg

SEQ ID NO: 3826782 - DNA, 25 bp, Homo sapien
gacccactgaatccaagcattctaa

SEQ ID NO: 3826783 - DNA, 25 bp, Homo sapien
gtgaggacaggtgaaaaggccttaa

SEQ ID NO: 3826784 - DNA, 25 bp, Homo sapien
tgaggacaggtgaaaaggccttaaa

SEQ ID NO: 3826785 - DNA, 25 bp, Homo sapien
tggcccagcatagacagttgatatc

SEQ ID NO: 3826786 - DNA, 25 bp, Homo sapien
tgcaatttttgctaaatggcccagc

SEQ ID NO: 3826787 - DNA, 25 bp, Homo sapien
caaaagtcattgactggactgggcc

SEQ ID NO: 3826788 - DNA, 25 bp, Homo sapien
cagagccctgagattgcaatttttg

SEQ ID NO: 3826789 - DNA, 25 bp, Homo sapien
tcctcatcattgctttccagctcaa

SEQ ID NO: 3826790 - DNA, 25 bp, Homo sapien
ctgcagaaagaccaagatttcctca

SEQ ID NO: 3826791 - DNA, 25 bp, Homo sapien
ccaagatttcctcatcattgctttc

SEQ ID NO: 3826792 - DNA, 25 bp, Homo sapien
gaaagaccaagatttcctcatcatt

SEQ ID NO: 3826793 - DNA, 25 bp, Homo sapien
gataccatctaccagaataccatcc

SEQ ID NO: 3826794 - DNA, 25 bp, Homo sapien
taccatccaaggattctatggccag

SEQ ID NO: 3826795 - DNA, 25 bp, Homo sapien
tgcagataccatctaccagaatacc

SEQ ID NO: 3826796 - DNA, 25 bp, Homo sapien
tctaccagaataccatccaaggatt

SEQ ID NO: 3826797 - DNA, 25 bp, Homo sapien
cataacaaagtcttgtgcgtgggcc

SEQ ID NO: 3826798 - DNA, 25 bp, Homo sapien
tggtaggccagacccaagcaaaggg

SEQ ID NO: 3826799 - DNA, 25 bp, Homo sapien
gcctcttgagagtgtttcctatatg

SEQ ID NO: 3826800 - DNA, 25 bp, Homo sapien
tataaatacaggctgtggtaggcca

SEQ ID NO: 3826801 - DNA, 25 bp, Homo sapien
ttgaaggtttcactcactccagaca

SEQ ID NO: 3826802 - DNA, 25 bp, Homo sapien
tcaagcgtgagctctgtcacaggcc

SEQ ID NO: 3826803 - DNA, 25 bp, Homo sapien
ctccagacagatatatagagccttg

SEQ ID NO: 3826804 - DNA, 25 bp, Homo sapien
tcacgagggtgtcacaatcaagcgt

SEQ ID NO: 3826805 - DNA, 25 bp, Homo sapien
gggttagggcatgcctgcctttcag

SEQ ID NO: 3826806 - DNA, 25 bp, Homo sapien
tgggggttagggcatgcctgccttt

SEQ ID NO: 3826807 - DNA, 25 bp, Homo sapien
tagggcatgcctgcctttcagcttc

SEQ ID NO: 3826808 - DNA, 25 bp, Homo sapien
gttagggcatgcctgcctttcagct

SEQ ID NO: 3826809 - DNA, 25 bp, Homo sapien
cttgttgattcaggtggtaagcctc

SEQ ID NO: 3826810 - DNA, 25 bp, Homo sapien
ggaggtacaacacgaagccctggga

SEQ ID NO: 3826811 - DNA, 25 bp, Homo sapien
tgcaaggcctcctgttcaaaggggg

SEQ ID NO: 3826812 - DNA, 25 bp, Homo sapien
cctgggagccttgttgattcaggtg

SEQ ID NO: 3826813 - DNA, 25 bp, Homo sapien
gattccagtaaaggttccagacaaa

SEQ ID NO: 3826814 - DNA, 25 bp, Homo sapien
ccaagttggctaaggacttcctcag

SEQ ID NO: 3826815 - DNA, 25 bp, Homo sapien
ctttggaagggctgcaacactcttc

SEQ ID NO: 3826816 - DNA, 25 bp, Homo sapien
gcctctaaggctatgggattccagt

SEQ ID NO: 3826817 - DNA, 25 bp, Homo sapien
tcttcgggtggtccagtttcagagt

SEQ ID NO: 3826818 - DNA, 25 bp, Homo sapien
cagcgccaggctgctatcttcgggt

SEQ ID NO: 3826819 - DNA, 25 bp, Homo sapien
tgtagagctttccaatcttccggct

SEQ ID NO: 3826820 - DNA, 25 bp, Homo sapien
gagtgcccgggcacaagctgttgta

SEQ ID NO: 3826821 - DNA, 25 bp, Homo sapien
gcctgctgaagatggtttaatggaa

SEQ ID NO: 3826822 - DNA, 25 bp, Homo sapien
gcctagttagaggagatatttttcc

SEQ ID NO: 3826823 - DNA, 25 bp, Homo sapien
tttatccataaggttgaatgaatgg

SEQ ID NO: 3826824 - DNA, 25 bp, Homo sapien
caggaaggtttatggaaagctgcct

SEQ ID NO: 3826825 - DNA, 25 bp, Homo sapien
cccatcagtcctagaccagagagtg

SEQ ID NO: 3826826 - DNA, 25 bp, Homo sapien
gcctgggccagcgctttcttcttcc

SEQ ID NO: 3826827 - DNA, 25 bp, Homo sapien
taaactcttttagctgctataccaa

SEQ ID NO: 3826828 - DNA, 25 bp, Homo sapien
tccataaagctgtctgctggttggg

SEQ ID NO: 3826829 - DNA, 25 bp, Homo sapien
ctacaaggggtaagaaatggcacat

SEQ ID NO: 3826830 - DNA, 25 bp, Homo sapien
ggaggctacagcctgaccacattct

SEQ ID NO: 3826831 - DNA, 25 bp, Homo sapien
tgttttgcaagaggccaagttggca

SEQ ID NO: 3826832 - DNA, 25 bp, Homo sapien
acttatgaatggaatgtgtgttttg

SEQ ID NO: 3826833 - DNA, 25 bp, Homo sapien
gctttggcttccaaaaggtggagca

SEQ ID NO: 3826834 - DNA, 25 bp, Homo sapien
gtgtgttttgcaagaggccaagttg

SEQ ID NO: 3826835 - DNA, 25 bp, Homo sapien
ttgcttttcccccataagaagctgc

SEQ ID NO: 3826836 - DNA, 25 bp, Homo sapien
gcttttcccccataagaagctgctt

SEQ ID NO: 3826837 - DNA, 25 bp, Homo sapien
tttcccccataagaagctgcttctc

SEQ ID NO: 3826838 - DNA, 25 bp, Homo sapien
ttttcccccataagaagctgcttct

SEQ ID NO: 3826839 - DNA, 25 bp, Homo sapien
ccttgtcccgtctcttgactcaggg

SEQ ID NO: 3826840 - DNA, 25 bp, Homo sapien
gcagtcagcagcgaagcatcttaac

SEQ ID NO: 3826841 - DNA, 25 bp, Homo sapien
taatccatgctgatggagactctcc

SEQ ID NO: 3826842 - DNA, 25 bp, Homo sapien
gggtgatgctgctaaaactgctagt

SEQ ID NO: 3826843 - DNA, 25 bp, Homo sapien
tcctttcctttacgttgacttgtga

SEQ ID NO: 3826844 - DNA, 25 bp, Homo sapien
cctttcctttacgttgacttgtgag

SEQ ID NO: 3826845 - DNA, 25 bp, Homo sapien
tttcctttacgttgacttgtgagga

SEQ ID NO: 3826846 - DNA, 25 bp, Homo sapien
tcctttacgttgacttgtgaggatg

SEQ ID NO: 3826847 - DNA, 25 bp, Homo sapien
atgttaaatgcatgacccctagatt

SEQ ID NO: 3826848 - DNA, 25 bp, Homo sapien
gaagttgagcagtatgttaaatgca

SEQ ID NO: 3826849 - DNA, 25 bp, Homo sapien
aataaaaagtgaagttgagcagtat

SEQ ID NO: 3826850 - DNA, 25 bp, Homo sapien
tgcatgacccctagatttaacagta

SEQ ID NO: 3826851 - DNA, 25 bp, Homo sapien
gggagcttctaccaacatgatattg

SEQ ID NO: 3826852 - DNA, 25 bp, Homo sapien
tataccctgccttaagccgctgagg

SEQ ID NO: 3826853 - DNA, 25 bp, Homo sapien
tgtggatccctcttggtttgtgacc

SEQ ID NO: 3826854 - DNA, 25 bp, Homo sapien
cagctccgtctgtgcttaattgctc

SEQ ID NO: 3826855 - DNA, 25 bp, Homo sapien
tccagcagtatcttgtttaaacgac

SEQ ID NO: 3826856 - DNA, 25 bp, Homo sapien
cagtttaaactggactgggactgca

SEQ ID NO: 3826857 - DNA, 25 bp, Homo sapien
cattgaggaaatgcgacattgatcc

SEQ ID NO: 3826858 - DNA, 25 bp, Homo sapien
aaatagattcttgagcactggttgc

SEQ ID NO: 3826859 - DNA, 25 bp, Homo sapien
ccaaaaggtgtagactcagttatgc

SEQ ID NO: 3826860 - DNA, 25 bp, Homo sapien
gctatgacttgagcatcttggtaac

SEQ ID NO: 3826861 - DNA, 25 bp, Homo sapien
ttaaggcgtagaagaaagctgctgc

SEQ ID NO: 3826862 - DNA, 25 bp, Homo sapien
tcagtgcagcaaagcccaaaaggtg

SEQ ID NO: 3826863 - DNA, 25 bp, Homo sapien
ggattaagccacacagtattagtct

SEQ ID NO: 3826864 - DNA, 25 bp, Homo sapien
tagtctttgaagcagtactggtctc

SEQ ID NO: 3826865 - DNA, 25 bp, Homo sapien
ggctggtgccaaaatggagtcccat

SEQ ID NO: 3826866 - DNA, 25 bp, Homo sapien
agtagttacactcgatggcctcatg

SEQ ID NO: 3826867 - DNA, 25 bp, Homo sapien
gaatctagagctgggtgaagatcta

SEQ ID NO: 3826868 - DNA, 25 bp, Homo sapien
cctgggcccaggaaaataacaattg

SEQ ID NO: 3826869 - DNA, 25 bp, Homo sapien
tcaatgtatcgttcttaaccccacc

SEQ ID NO: 3826870 - DNA, 25 bp, Homo sapien
tgctgcccacctgtgtgagttgggt

SEQ ID NO: 3826871 - DNA, 25 bp, Homo sapien
ttctgcagtagctctgggccaatgc

SEQ ID NO: 3826872 - DNA, 25 bp, Homo sapien
atgcttgactctttcatgaccacaa

SEQ ID NO: 3826873 - DNA, 25 bp, Homo sapien
tctgcagtagctctgggccaatgct

SEQ ID NO: 3826874 - DNA, 25 bp, Homo sapien
tgactctttcatgaccacaagaaat

SEQ ID NO: 3826875 - DNA, 25 bp, Homo sapien
ctggtttcagttagagggtcctcct

SEQ ID NO: 3826876 - DNA, 25 bp, Homo sapien
cactaaagagaacatgagtttgctc

SEQ ID NO: 3826877 - DNA, 25 bp, Homo sapien
ttctccacgcgctggctccataaag

SEQ ID NO: 3826878 - DNA, 25 bp, Homo sapien
cagaaaactgtactggaaggatggg

SEQ ID NO: 3826879 - DNA, 25 bp, Homo sapien
cttcttgctgcacccatgttgtcac

SEQ ID NO: 3826880 - DNA, 25 bp, Homo sapien
tcagcttacttgtctggcaagggca

SEQ ID NO: 3826881 - DNA, 25 bp, Homo sapien
tactggccataaaagagggagctgc

SEQ ID NO: 3826882 - DNA, 25 bp, Homo sapien
tgactgtttaggtttacatgaccct

SEQ ID NO: 3826883 - DNA, 25 bp, Homo sapien
gagaaccacttaagcattgaatgcg

SEQ ID NO: 3826884 - DNA, 25 bp, Homo sapien
taattcccaggcgatttagagctct

SEQ ID NO: 3826885 - DNA, 25 bp, Homo sapien
taagctaatttatccagaaccctga

SEQ ID NO: 3826886 - DNA, 25 bp, Homo sapien
gcatttgtagtctggtgacaacccc

SEQ ID NO: 3826887 - DNA, 25 bp, Homo sapien
gtgtcaggtagtcaaaagatactct

SEQ ID NO: 3826888 - DNA, 25 bp, Homo sapien
cctacctgaaggccttggcgccagg

SEQ ID NO: 3826889 - DNA, 25 bp, Homo sapien
gatactcttacatggagggctggtt

SEQ ID NO: 3826890 - DNA, 25 bp, Homo sapien
ggttggctcaatgggattagggcct

SEQ ID NO: 3826891 - DNA, 25 bp, Homo sapien
tgctggtggacaaaaacgtcacacg

SEQ ID NO: 3826892 - DNA, 25 bp, Homo sapien
tagggtcaaacaattagccagtggc

SEQ ID NO: 3826893 - DNA, 25 bp, Homo sapien
acgtcacacgtttagggcatctgga

SEQ ID NO: 3826894 - DNA, 25 bp, Homo sapien
taattctcgtttccacgtctggtgg

SEQ ID NO: 3826895 - DNA, 25 bp, Homo sapien
tttccgtaatagtagttcacacttc

SEQ ID NO: 3826896 - DNA, 25 bp, Homo sapien
tctttccgtaatagtagttcacact

SEQ ID NO: 3826897 - DNA, 25 bp, Homo sapien
tccgtaatagtagttcacacttctc

SEQ ID NO: 3826898 - DNA, 25 bp, Homo sapien
gtaatagtagttcacacttctctct

SEQ ID NO: 3826899 - DNA, 25 bp, Homo sapien
ggaatatcctggcacacatcatagc

SEQ ID NO: 3826900 - DNA, 25 bp, Homo sapien
gaaagtggcgagtttagagtcagac

SEQ ID NO: 3826901 - DNA, 25 bp, Homo sapien
tattgtcttccttatagagtcgtgg

SEQ ID NO: 3826902 - DNA, 25 bp, Homo sapien
cagagaacagtagtgagaccagtga

SEQ ID NO: 3826903 - DNA, 25 bp, Homo sapien
tgaacctcggaggtgattggttgca

SEQ ID NO: 3826904 - DNA, 25 bp, Homo sapien
cacttgaacctcggaggtgattggt

SEQ ID NO: 3826905 - DNA, 25 bp, Homo sapien
ttgaacctcggaggtgattggttgc

SEQ ID NO: 3826906 - DNA, 25 bp, Homo sapien
cctcggaggtgattggttgcagtga

SEQ ID NO: 3826907 - DNA, 25 bp, Homo sapien
tctcctaactgaaagggtagtgact

SEQ ID NO: 3826908 - DNA, 25 bp, Homo sapien
tggcaataccgagtcataacctggg

SEQ ID NO: 3826909 - DNA, 25 bp, Homo sapien
gacagtatccatctatgcctgaaga

SEQ ID NO: 3826910 - DNA, 25 bp, Homo sapien
tacagtgagtagttggtgtcagcaa

SEQ ID NO: 3826911 - DNA, 25 bp, Homo sapien
ggagtacccaggcatgatcactgct

SEQ ID NO: 3826912 - DNA, 25 bp, Homo sapien
cttggagaccagtcatctttacaga

SEQ ID NO: 3826913 - DNA, 25 bp, Homo sapien
gaaggccggctaccctacatgtcct

SEQ ID NO: 3826914 - DNA, 25 bp, Homo sapien
tttacagactgctggccaattcccc

SEQ ID NO: 3826915 - DNA, 25 bp, Homo sapien
tcccatcttggagaccagtcatctt

SEQ ID NO: 3826916 - DNA, 25 bp, Homo sapien
caactccagggaatgccgttcacaa

SEQ ID NO: 3826917 - DNA, 25 bp, Homo sapien
tgatcacaagtcctctcccaactgg

SEQ ID NO: 3826918 - DNA, 25 bp, Homo sapien
ttgggcagtgtactggccctggcca

SEQ ID NO: 3826919 - DNA, 25 bp, Homo sapien
aaggagcaggcccacaagattgccc

SEQ ID NO: 3826920 - DNA, 25 bp, Homo sapien
cttgtgtagggtagctggcctttga

SEQ ID NO: 3826921 - DNA, 25 bp, Homo sapien
cagttgtcggagatgagcttgtgta

SEQ ID NO: 3826922 - DNA, 25 bp, Homo sapien
aaagcccatcagtggtctagctggg

SEQ ID NO: 3826923 - DNA, 25 bp, Homo sapien
tggcctttgagaggacacggtggtt

SEQ ID NO: 3826924 - DNA, 25 bp, Homo sapien
tctagtattctcgtggcacctgtag

SEQ ID NO: 3826925 - DNA, 25 bp, Homo sapien
cacctgtagaaggattatcgaaaac

SEQ ID NO: 3826926 - DNA, 25 bp, Homo sapien
ttaggttctagtattctcgtggcac

SEQ ID NO: 3826927 - DNA, 25 bp, Homo sapien
gattatcgaaaacttgaacagagct

SEQ ID NO: 3826928 - DNA, 25 bp, Homo sapien
ggtactgttggactatcataataaa

SEQ ID NO: 3826929 - DNA, 25 bp, Homo sapien
aggtactgttggactatcataataa

SEQ ID NO: 3826930 - DNA, 25 bp, Homo sapien
caggtactgttggactatcataata

SEQ ID NO: 3826931 - DNA, 25 bp, Homo sapien
tttatgaatactggaattccagagc

SEQ ID NO: 3826932 - DNA, 25 bp, Homo sapien
cctttgcaaggaatcctgaatggca

SEQ ID NO: 3826933 - DNA, 25 bp, Homo sapien
ccagagcctttgcaaggaatcctga

SEQ ID NO: 3826934 - DNA, 25 bp, Homo sapien
gctccgattataatgagcattttct

SEQ ID NO: 3826935 - DNA, 25 bp, Homo sapien
ccaccgccagcacccctcaacccag

SEQ ID NO: 3826936 - DNA, 25 bp, Homo sapien
cagggcctggggatatggggttgga

SEQ ID NO: 3826937 - DNA, 25 bp, Homo sapien
gccagcacccctcaacccagggcct

SEQ ID NO: 3826938 - DNA, 25 bp, Homo sapien
accgccagcacccctcaacccaggg

SEQ ID NO: 3826939 - DNA, 25 bp, Homo sapien
tggaaacgcgagcggggatggtagg

SEQ ID NO: 3826940 - DNA, 25 bp, Homo sapien
tccagaaagggtttgactggaggaa

SEQ ID NO: 3826941 - DNA, 25 bp, Homo sapien
ttccagaaagggtttgactggagga

SEQ ID NO: 3826942 - DNA, 25 bp, Homo sapien
aaacgcgagcggggatggtaggtgg

SEQ ID NO: 3826943 - DNA, 25 bp, Homo sapien
gtcgtgacgcaatcttccactcgtt

SEQ ID NO: 3826944 - DNA, 25 bp, Homo sapien
gcttcgtacgtctttatgtgcgtcg

SEQ ID NO: 3826945 - DNA, 25 bp, Homo sapien
ttggcgacggcttcgtacgtcttta

SEQ ID NO: 3826946 - DNA, 25 bp, Homo sapien
tatgtgcgtcgtgacgcaatcttcc

SEQ ID NO: 3826947 - DNA, 25 bp, Homo sapien
ccagcagagccgtggccgaccgagc

SEQ ID NO: 3826948 - DNA, 25 bp, Homo sapien
ccacccacagaagcgcgcagcccgc

SEQ ID NO: 3826949 - DNA, 25 bp, Homo sapien
agagccgtggccgaccgagcacagg

SEQ ID NO: 3826950 - DNA, 25 bp, Homo sapien
agccgtggccgaccgagcacaggct

SEQ ID NO: 3826951 - DNA, 25 bp, Homo sapien
tcttggacgcgcgagccacttccgt

SEQ ID NO: 3826952 - DNA, 25 bp, Homo sapien
ggcctcccctcttggacgcgcgagc

SEQ ID NO: 3826953 - DNA, 25 bp, Homo sapien
acaggcccgtctcccggcaacgccg

SEQ ID NO: 3826954 - DNA, 25 bp, Homo sapien
ggtggcgatgacaccgagccgcccc

SEQ ID NO: 3826955 - DNA, 25 bp, Homo sapien
catctcccatttacattcgggggtc

SEQ ID NO: 3826956 - DNA, 25 bp, Homo sapien
tcgggggtccaaaagattcacagcc

SEQ ID NO: 3826957 - DNA, 25 bp, Homo sapien
aaagattcacagcctccgagggggc

SEQ ID NO: 3826958 - DNA, 25 bp, Homo sapien
tacattcgggggtccaaaagattca

SEQ ID NO: 3826959 - DNA, 25 bp, Homo sapien
ctctcacggtcctagggagtctccg

SEQ ID NO: 3826960 - DNA, 25 bp, Homo sapien
ggtaacggagcaacaccctactctc

SEQ ID NO: 3826961 - DNA, 25 bp, Homo sapien
tctctcctgcacacgaatggaaggt

SEQ ID NO: 3826962 - DNA, 25 bp, Homo sapien
gaattacgaagctggctctcacggt

SEQ ID NO: 3826963 - DNA, 25 bp, Homo sapien
acttagcttctacttgctgcgggta

SEQ ID NO: 3826964 - DNA, 25 bp, Homo sapien
tgaggtcttgtctgtgtcgtctcct

SEQ ID NO: 3826965 - DNA, 25 bp, Homo sapien
ggatgggtcccattattccaggata

SEQ ID NO: 3826966 - DNA, 25 bp, Homo sapien
ctggcaagcgggtggatgagattca

SEQ ID NO: 3826967 - DNA, 25 bp, Homo sapien
tgagcacaagtccaaaagcactgac

SEQ ID NO: 3826968 - DNA, 25 bp, Homo sapien
ctgagcacaagtccaaaagcactga

SEQ ID NO: 3826969 - DNA, 25 bp, Homo sapien
tcaggttttctataacggacacaaa

SEQ ID NO: 3826970 - DNA, 25 bp, Homo sapien
gggggagacagccatataaacagac

SEQ ID NO: 3826971 - DNA, 25 bp, Homo sapien
caggttttctataacggacacaaat

SEQ ID NO: 3826972 - DNA, 25 bp, Homo sapien
ggggagacagccatataaacagaca

SEQ ID NO: 3826973 - DNA, 25 bp, Homo sapien
cattctgtgcaggggtccaggcctt

SEQ ID NO: 3826974 - DNA, 25 bp, Homo sapien
ttctgtgcaggggtccaggccttca

SEQ ID NO: 3826975 - DNA, 25 bp, Homo sapien
acattctgtgcaggggtccaggcct

SEQ ID NO: 3826976 - DNA, 25 bp, Homo sapien
ccttgatccaactctctgataaata

SEQ ID NO: 3826977 - DNA, 25 bp, Homo sapien
gcaaagaaaaggtacgggtcagtca

SEQ ID NO: 3826978 - DNA, 25 bp, Homo sapien
ttatgggcccctcaattcaaaagaa

SEQ ID NO: 3826979 - DNA, 25 bp, Homo sapien
caccggagcgcacacaagattatat

SEQ ID NO: 3826980 - DNA, 25 bp, Homo sapien
caaacaagatcacaggaggcaagca

SEQ ID NO: 3826981 - DNA, 25 bp, Homo sapien
cccctttcagagtcgtaaggattat

SEQ ID NO: 3826982 - DNA, 25 bp, Homo sapien
tgtacaatggggtaatagcagaacc

SEQ ID NO: 3826983 - DNA, 25 bp, Homo sapien
ccatgtaacatcacttagcactgag

SEQ ID NO: 3826984 - DNA, 25 bp, Homo sapien
ttggtttcttagaatgtacaatggg

SEQ ID NO: 3826985 - DNA, 25 bp, Homo sapien
tacattacatgcctaggctggcaca

SEQ ID NO: 3826986 - DNA, 25 bp, Homo sapien
cacagaatggtcattgataacgtat

SEQ ID NO: 3826987 - DNA, 25 bp, Homo sapien
tctggcatacccctgtcataatgtt

SEQ ID NO: 3826988 - DNA, 25 bp, Homo sapien
gctggcacatagttggaacatgaca

SEQ ID NO: 3826989 - DNA, 25 bp, Homo sapien
gaacttactgtacaaggcataccca

SEQ ID NO: 3826990 - DNA, 25 bp, Homo sapien
tgggcagcgatcagtctaaaaaaca

SEQ ID NO: 3826991 - DNA, 25 bp, Homo sapien
ctacaggaggactatggaaagatct

SEQ ID NO: 3826992 - DNA, 25 bp, Homo sapien
tcagggtcaagagccaaaaaagctg

SEQ ID NO: 3826993 - DNA, 25 bp, Homo sapien
tctcagctggtcacgaagtctatcc

SEQ ID NO: 3826994 - DNA, 25 bp, Homo sapien
aattaatgcaagactaaggaagccc

SEQ ID NO: 3826995 - DNA, 25 bp, Homo sapien
cacaattcaactgcggtctcagctg

SEQ ID NO: 3826996 - DNA, 25 bp, Homo sapien
cagtagtttagaggaccacaattca

SEQ ID NO: 3826997 - DNA, 25 bp, Homo sapien
gagtaaagaatgagccaactgatga

SEQ ID NO: 3826998 - DNA, 25 bp, Homo sapien
gatgacgtttcttgaggtttattct

SEQ ID NO: 3826999 - DNA, 25 bp, Homo sapien
tgagtaaagaatgagccaactgatg

SEQ ID NO: 3827000 - DNA, 25 bp, Homo sapien
tctgaccctgatgacgtttcttgag

SEQ ID NO: 3827001 - DNA, 25 bp, Homo sapien
attagtctagaaataattgctcttt

SEQ ID NO: 3827002 - DNA, 25 bp, Homo sapien
ttaattagtctagaaataattgctc

SEQ ID NO: 3827003 - DNA, 25 bp, Homo sapien
cctttaattagtctagaaataattg

SEQ ID NO: 3827004 - DNA, 25 bp, Homo sapien
taattagtctagaaataattgctct

SEQ ID NO: 3827005 - DNA, 25 bp, Homo sapien
acaggaggcaccaggcagatgtaca

SEQ ID NO: 3827006 - DNA, 25 bp, Homo sapien
ttgacaggaggcaccaggcagatgt

SEQ ID NO: 3827007 - DNA, 25 bp, Homo sapien
cttgacaggaggcaccaggcagatg

SEQ ID NO: 3827008 - DNA, 25 bp, Homo sapien
tgacaggaggcaccaggcagatgta

SEQ ID NO: 3827009 - DNA, 25 bp, Homo sapien
cagacccaccaaaatagaagaggga

SEQ ID NO: 3827010 - DNA, 25 bp, Homo sapien
cttcagacccaccaaaatagaagag

SEQ ID NO: 3827011 - DNA, 25 bp, Homo sapien
tagaagagggaaaatttgcataaaa

SEQ ID NO: 3827012 - DNA, 25 bp, Homo sapien
atagaagagggaaaatttgcataaa

SEQ ID NO: 3827013 - DNA, 25 bp, Homo sapien
acttcttgtcgtgttgccgttgtca

SEQ ID NO: 3827014 - DNA, 25 bp, Homo sapien
tgcggtagaggccaaggacttcttg

SEQ ID NO: 3827015 - DNA, 25 bp, Homo sapien
tagaggccaaggacttcttgtcgtg

SEQ ID NO: 3827016 - DNA, 25 bp, Homo sapien
caaggacttcttgtcgtgttgccgt

SEQ ID NO: 3827017 - DNA, 25 bp, Homo sapien
tgtttttccggaacagcgttctggc

SEQ ID NO: 3827018 - DNA, 25 bp, Homo sapien
gaacagcgttctggcttcatttagt

SEQ ID NO: 3827019 - DNA, 25 bp, Homo sapien
catctgccctgatgtcgcctgccat

SEQ ID NO: 3827020 - DNA, 25 bp, Homo sapien
gccatttcctcgcaagcctgaaaat

SEQ ID NO: 3827021 - DNA, 25 bp, Homo sapien
ctgaggacactgagccacttactgg

SEQ ID NO: 3827022 - DNA, 25 bp, Homo sapien
gacactgagccacttactggctggc

SEQ ID NO: 3827023 - DNA, 25 bp, Homo sapien
ggctcatagggtcttctgaggacac

SEQ ID NO: 3827024 - DNA, 25 bp, Homo sapien
ctggctcatagggtcttctgaggac

SEQ ID NO: 3827025 - DNA, 25 bp, Homo sapien
agtgaccgcgctgaatccattagat

SEQ ID NO: 3827026 - DNA, 25 bp, Homo sapien
caggagctgtgacaccaatgggcca

SEQ ID NO: 3827027 - DNA, 25 bp, Homo sapien
gatgaccctgctttggaccattgag

SEQ ID NO: 3827028 - DNA, 25 bp, Homo sapien
gcactcctgtagaaagatgaccctg

SEQ ID NO: 3827029 - DNA, 25 bp, Homo sapien
cagttcatgggatacctttggatta

SEQ ID NO: 3827030 - DNA, 25 bp, Homo sapien
gagcagttcatgggatacctttgga

SEQ ID NO: 3827031 - DNA, 25 bp, Homo sapien
tctgtgcttctcagaagccactgat

SEQ ID NO: 3827032 - DNA, 25 bp, Homo sapien
aacagcaatgcagagaaccacagct

SEQ ID NO: 3827033 - DNA, 25 bp, Homo sapien
tgtgcattcatctatacactgttta

SEQ ID NO: 3827034 - DNA, 25 bp, Homo sapien
ccttgggtaaggaatcttgtaatgc

SEQ ID NO: 3827035 - DNA, 25 bp, Homo sapien
tctatacactgtttaattaggtctg

SEQ ID NO: 3827036 - DNA, 25 bp, Homo sapien
aatgcagtccaatttcaatcctggc

SEQ ID NO: 3827037 - DNA, 25 bp, Homo sapien
tatactggtttggaaagtttcctca

SEQ ID NO: 3827038 - DNA, 25 bp, Homo sapien
gaaacttcatcatgagatctgagat

SEQ ID NO: 3827039 - DNA, 25 bp, Homo sapien
ttctcttggcttcgaagtccccggc

SEQ ID NO: 3827040 - DNA, 25 bp, Homo sapien
tcagtttctcttggcttcgaagtcc

SEQ ID NO: 3827041 - DNA, 25 bp, Homo sapien
gatgtacaaatgactcaccaaggga

SEQ ID NO: 3827042 - DNA, 25 bp, Homo sapien
acaggcctcggtcttgtttccaaag

SEQ ID NO: 3827043 - DNA, 25 bp, Homo sapien
gcaaatttctttgcatcagctggca

SEQ ID NO: 3827044 - DNA, 25 bp, Homo sapien
cagtgaggatgtaaggtccatgacc

SEQ ID NO: 3827045 - DNA, 25 bp, Homo sapien
cgggagctgtagtaggagcctaaat

SEQ ID NO: 3827046 - DNA, 25 bp, Homo sapien
gaaaaagcctaggttgctgtgaatg

SEQ ID NO: 3827047 - DNA, 25 bp, Homo sapien
actacttaagttgttgtgatcaaaa

SEQ ID NO: 3827048 - DNA, 25 bp, Homo sapien
gctgtgaatggagcattaagggcaa

SEQ ID NO: 3827049 - DNA, 25 bp, Homo sapien
tggtgtaatccctcagatggcagct

SEQ ID NO: 3827050 - DNA, 25 bp, Homo sapien
gaagcccagaatgattcagcgacag

SEQ ID NO: 3827051 - DNA, 25 bp, Homo sapien
taaaaccttaaaactagcagagctc

SEQ ID NO: 3827052 - DNA, 25 bp, Homo sapien
tcacccagtgatataggaagcccag

SEQ ID NO: 3827053 - DNA, 25 bp, Homo sapien
gctgctttcccaggtgtcacgggca

SEQ ID NO: 3827054 - DNA, 25 bp, Homo sapien
ggctgagcaagagttcccttcctgg

SEQ ID NO: 3827055 - DNA, 25 bp, Homo sapien
ccgatgtaggagtggaaattcccct

SEQ ID NO: 3827056 - DNA, 25 bp, Homo sapien
gccctgaagctacctggctgagcaa

SEQ ID NO: 3827057 - DNA, 25 bp, Homo sapien
gaaaaggctgttcccctgaagtcaa

SEQ ID NO: 3827058 - DNA, 25 bp, Homo sapien
tattaaccgcccagtggtgggtcag

SEQ ID NO: 3827059 - DNA, 25 bp, Homo sapien
tgcactcatggcacccaagctcttg

SEQ ID NO: 3827060 - DNA, 25 bp, Homo sapien
tgcggtccagacagctcaagtatta

SEQ ID NO: 3827061 - DNA, 25 bp, Homo sapien
tggaaattaagagctctcagcactg

SEQ ID NO: 3827062 - DNA, 25 bp, Homo sapien
gaattcaacgaatctgacctgagga

SEQ ID NO: 3827063 - DNA, 25 bp, Homo sapien
cacacgcagggtggaatattcccta

SEQ ID NO: 3827064 - DNA, 25 bp, Homo sapien
tgtttctcaatgactacaaggaggt

SEQ ID NO: 3827065 - DNA, 25 bp, Homo sapien
taaaaatgtatcgtcggcctgcgag

SEQ ID NO: 3827066 - DNA, 25 bp, Homo sapien
taatgattgaccctcacgggcaggc

SEQ ID NO: 3827067 - DNA, 25 bp, Homo sapien
cattacctcccagaagttgccgtga

SEQ ID NO: 3827068 - DNA, 25 bp, Homo sapien
tcacaacccgtttgaggaatccaca

SEQ ID NO: 3827069 - DNA, 25 bp, Homo sapien
ttagggtgccaatgtaaatagtatt

SEQ ID NO: 3827070 - DNA, 25 bp, Homo sapien
tggtagatttttgcccaagtacaaa

SEQ ID NO: 3827071 - DNA, 25 bp, Homo sapien
gaagctggctagtatcagtcctctg

SEQ ID NO: 3827072 - DNA, 25 bp, Homo sapien
ttagaatcggcttgtcaatatccac

SEQ ID NO: 3827073 - DNA, 25 bp, Homo sapien
ctcaggaaacttatggtcggtcggt

SEQ ID NO: 3827074 - DNA, 25 bp, Homo sapien
cttatggtcggtcggtcgtggcaaa

SEQ ID NO: 3827075 - DNA, 25 bp, Homo sapien
aacttatggtcggtcggtcgtggca

SEQ ID NO: 3827076 - DNA, 25 bp, Homo sapien
atggtcggtcggtcgtggcaaaagg

SEQ ID NO: 3827077 - DNA, 25 bp, Homo sapien
tgattcaaactttcaaggtatttca

SEQ ID NO: 3827078 - DNA, 25 bp, Homo sapien
ctgctccttggaactgttaacgcag

SEQ ID NO: 3827079 - DNA, 25 bp, Homo sapien
ttgattcaaactttcaaggtatttc

SEQ ID NO: 3827080 - DNA, 25 bp, Homo sapien
aatctgctccttggaactgttaacg

SEQ ID NO: 3827081 - DNA, 25 bp, Homo sapien
caaggcctatgtgaataccaatgac

SEQ ID NO: 3827082 - DNA, 25 bp, Homo sapien
gaattacaatgccaagaagacatgg

SEQ ID NO: 3827083 - DNA, 25 bp, Homo sapien
gctgctgctgatcggcaatgtgtga

SEQ ID NO: 3827084 - DNA, 25 bp, Homo sapien
ccagggccggtactacatttgatga

SEQ ID NO: 3827085 - DNA, 25 bp, Homo sapien
gatgagtattggaggcagcgggaac

SEQ ID NO: 3827086 - DNA, 25 bp, Homo sapien
gcttgtgcacaggacccaagcagca

SEQ ID NO: 3827087 - DNA, 25 bp, Homo sapien
gccatgggtagcctttactgtgaag

SEQ ID NO: 3827088 - DNA, 25 bp, Homo sapien
ggaaggtgaagagtcagctccatag

SEQ ID NO: 3827089 - DNA, 25 bp, Homo sapien
tttaacaaataggtgccaggtcctg

SEQ ID NO: 3827090 - DNA, 25 bp, Homo sapien
tggatgcagcctaacaccagggtgc

SEQ ID NO: 3827091 - DNA, 25 bp, Homo sapien
gggctgcttgcccataaaacacttg

SEQ ID NO: 3827092 - DNA, 25 bp, Homo sapien
ccaggtcctggttatgtgctaagca

SEQ ID NO: 3827093 - DNA, 25 bp, Homo sapien
gagttgactctaaggccaggcatag

SEQ ID NO: 3827094 - DNA, 25 bp, Homo sapien
taaatgagttgaagctaagagcaca

SEQ ID NO: 3827095 - DNA, 25 bp, Homo sapien
tgaccttgcaaatggacagaggctc

SEQ ID NO: 3827096 - DNA, 25 bp, Homo sapien
gagcacaacccttagagcttaataa

SEQ ID NO: 3827097 - DNA, 25 bp, Homo sapien
tgaaactcaaaagcccttgcttggg

SEQ ID NO: 3827098 - DNA, 25 bp, Homo sapien
gtgcttctcctctatctgacattag

SEQ ID NO: 3827099 - DNA, 25 bp, Homo sapien
cagaggcaaaccctaaatatacaaa

SEQ ID NO: 3827100 - DNA, 25 bp, Homo sapien
tgacattagtcattcccagagccac

SEQ ID NO: 3827101 - DNA, 25 bp, Homo sapien
caactgaacaaaaccatgctaaaat

SEQ ID NO: 3827102 - DNA, 25 bp, Homo sapien
gctagggaaagtaggcaacaccaca

SEQ ID NO: 3827103 - DNA, 25 bp, Homo sapien
tttcaggatcaagttggccttcaag

SEQ ID NO: 3827104 - DNA, 25 bp, Homo sapien
ggccttcaagacgtcaatcttctca

SEQ ID NO: 3827105 - DNA, 25 bp, Homo sapien
gagccactagaacaagccctgagag

SEQ ID NO: 3827106 - DNA, 25 bp, Homo sapien
cttggagtgagaaagctcagaccac

SEQ ID NO: 3827107 - DNA, 25 bp, Homo sapien
accgcgtttgcaggcgaagcgaaga

SEQ ID NO: 3827108 - DNA, 25 bp, Homo sapien
cttcccacacgactggcttggagtg

SEQ ID NO: 3827109 - DNA, 25 bp, Homo sapien
cttgatggtgggcatgcagacggag

SEQ ID NO: 3827110 - DNA, 25 bp, Homo sapien
ggtgggcatgcagacggagggtaac

SEQ ID NO: 3827111 - DNA, 25 bp, Homo sapien
tggtgggcatgcagacggagggtaa

SEQ ID NO: 3827112 - DNA, 25 bp, Homo sapien
gatggtgggcatgcagacggagggt

SEQ ID NO: 3827113 - DNA, 25 bp, Homo sapien
acaaaagccgttagtggtcttcatc

SEQ ID NO: 3827114 - DNA, 25 bp, Homo sapien
gacgagagcttctaccatcctcata

SEQ ID NO: 3827115 - DNA, 25 bp, Homo sapien
cttcatccatctggttcgacgagag

SEQ ID NO: 3827116 - DNA, 25 bp, Homo sapien
catctggttcgacgagagcttctac

SEQ ID NO: 3827117 - DNA, 25 bp, Homo sapien
gcggtccaatctctcatgtcgctct

SEQ ID NO: 3827118 - DNA, 25 bp, Homo sapien
tctttagggatgaattatcctacca

SEQ ID NO: 3827119 - DNA, 25 bp, Homo sapien
taaattctccagtgcagcccgcggt

SEQ ID NO: 3827120 - DNA, 25 bp, Homo sapien
gaattatcctaccagtaaattctcc

SEQ ID NO: 3827121 - DNA, 25 bp, Homo sapien
ctggaaggagtctatcagcagagac

SEQ ID NO: 3827122 - DNA, 25 bp, Homo sapien
tctgcagttcctgcaagtcccttga

SEQ ID NO: 3827123 - DNA, 25 bp, Homo sapien
ggagtctatcagcagagacagcttc

SEQ ID NO: 3827124 - DNA, 25 bp, Homo sapien
cagttcctgcaagtcccttgagata

SEQ ID NO: 3827125 - DNA, 25 bp, Homo sapien
cgaattgaaatgtgctagaagtgta

SEQ ID NO: 3827126 - DNA, 25 bp, Homo sapien
gaaaacataacgctatctgaagtct

SEQ ID NO: 3827127 - DNA, 25 bp, Homo sapien
cctaaaaagtggctaactcgaattg

SEQ ID NO: 3827128 - DNA, 25 bp, Homo sapien
ctaaattacatacgtgactcacatc

SEQ ID NO: 3827129 - DNA, 25 bp, Homo sapien
aaagggaggcagcagtacacccgtg

SEQ ID NO: 3827130 - DNA, 25 bp, Homo sapien
cagtacacccgtgagtatgctgcgc

SEQ ID NO: 3827131 - DNA, 25 bp, Homo sapien
gaggcagcagtacacccgtgagtat

SEQ ID NO: 3827132 - DNA, 25 bp, Homo sapien
cccgtgagtatgctgcgccagcgag

SEQ ID NO: 3827133 - DNA, 25 bp, Homo sapien
tccagtgagatcctgctgtgttggg

SEQ ID NO: 3827134 - DNA, 25 bp, Homo sapien
cactccatcatcagagtccagtgag

SEQ ID NO: 3827135 - DNA, 25 bp, Homo sapien
gcctggacactccatcatcagagtc

SEQ ID NO: 3827136 - DNA, 25 bp, Homo sapien
ccatcatcagagtccagtgagatcc

SEQ ID NO: 3827137 - DNA, 25 bp, Homo sapien
tgtccaagtactgacccactggaga

SEQ ID NO: 3827138 - DNA, 25 bp, Homo sapien
ccagaaacggatggctgtccaagta

SEQ ID NO: 3827139 - DNA, 25 bp, Homo sapien
caggaacggccgacatgacaatgaa

SEQ ID NO: 3827140 - DNA, 25 bp, Homo sapien
caatgaacaccagcaaggtgaaggc

SEQ ID NO: 3827141 - DNA, 25 bp, Homo sapien
taaaggggtgaatgacggaacaggc

SEQ ID NO: 3827142 - DNA, 25 bp, Homo sapien
ctaaaggggtgaatgacggaacagg

SEQ ID NO: 3827143 - DNA, 25 bp, Homo sapien
aggggtgaatgacggaacaggctac

SEQ ID NO: 3827144 - DNA, 25 bp, Homo sapien
aaaggggtgaatgacggaacaggct

SEQ ID NO: 3827145 - DNA, 25 bp, Homo sapien
catggcgagtgatacgaagcccaaa

SEQ ID NO: 3827146 - DNA, 25 bp, Homo sapien
tgaggctggagaccactacataaga

SEQ ID NO: 3827147 - DNA, 25 bp, Homo sapien
gaccactacataagatgctatcatc

SEQ ID NO: 3827148 - DNA, 25 bp, Homo sapien
tgctatcatcatccccgacatggcg

SEQ ID NO: 3827149 - DNA, 25 bp, Homo sapien
gagaagccggctgacaactgttaag

SEQ ID NO: 3827150 - DNA, 25 bp, Homo sapien
gactatcatagaatatccacaatcg

SEQ ID NO: 3827151 - DNA, 25 bp, Homo sapien
caaacaggacaacatagcacaacag

SEQ ID NO: 3827152 - DNA, 25 bp, Homo sapien
tctcccaaccgcatgttagtgatgc

SEQ ID NO: 3827153 - DNA, 25 bp, Homo sapien
ataaagaattcactaatgcaggctg

SEQ ID NO: 3827154 - DNA, 25 bp, Homo sapien
ccattccatgctttcgatcatttaa

SEQ ID NO: 3827155 - DNA, 25 bp, Homo sapien
gctttcgatcatttaatgagggagt

SEQ ID NO: 3827156 - DNA, 25 bp, Homo sapien
agaattcactaatgcaggctgggta

SEQ ID NO: 3827157 - DNA, 25 bp, Homo sapien
taaggaagctagttatgctcaggct

SEQ ID NO: 3827158 - DNA, 25 bp, Homo sapien
ggctagctgatctacataggaggca

SEQ ID NO: 3827159 - DNA, 25 bp, Homo sapien
tgctcaggctggtttggaagattat

SEQ ID NO: 3827160 - DNA, 25 bp, Homo sapien
tacttctcctgagctgcaggccctg

SEQ ID NO: 3827161 - DNA, 25 bp, Homo sapien
ggaagatcagaggcacttcttacat

SEQ ID NO: 3827162 - DNA, 25 bp, Homo sapien
gaaggcaaaggaagatcagaggcac

SEQ ID NO: 3827163 - DNA, 25 bp, Homo sapien
gcaaaggaagatcagaggcacttct

SEQ ID NO: 3827164 - DNA, 25 bp, Homo sapien
tggaaggcaaaggaagatcagaggc

SEQ ID NO: 3827165 - DNA, 25 bp, Homo sapien
ctggtaaagcccctcgaattctgca

SEQ ID NO: 3827166 - DNA, 25 bp, Homo sapien
cattcctggtaaagcccctcgaatt

SEQ ID NO: 3827167 - DNA, 25 bp, Homo sapien
tcctggtaaagcccctcgaattctg

SEQ ID NO: 3827168 - DNA, 25 bp, Homo sapien
tcattcctggtaaagcccctcgaat

SEQ ID NO: 3827169 - DNA, 25 bp, Homo sapien
caatcactgttgctcccaatgggac

SEQ ID NO: 3827170 - DNA, 25 bp, Homo sapien
cagtacttgaaaagaagcccggcct

SEQ ID NO: 3827171 - DNA, 25 bp, Homo sapien
taaattggctgctgcgggatcctac

SEQ ID NO: 3827172 - DNA, 25 bp, Homo sapien
ggaccgttggacataagccctgagg

SEQ ID NO: 3827173 - DNA, 25 bp, Homo sapien
atttaatgaaatgccacgcaaataa

SEQ ID NO: 3827174 - DNA, 25 bp, Homo sapien
atgaaatgccacgcaaataaaccac

SEQ ID NO: 3827175 - DNA, 25 bp, Homo sapien
ttaatgaaatgccacgcaaataaac

SEQ ID NO: 3827176 - DNA, 25 bp, Homo sapien
taatgaaatgccacgcaaataaacc

SEQ ID NO: 3827177 - DNA, 25 bp, Homo sapien
caatgtctgttggtcccatctttat

SEQ ID NO: 3827178 - DNA, 25 bp, Homo sapien
gacacaatctcattcgtttttataa

SEQ ID NO: 3827179 - DNA, 25 bp, Homo sapien
ctcattcgtttttataactgtgtag

SEQ ID NO: 3827180 - DNA, 25 bp, Homo sapien
ccatgtaggccccaatgtctgttgg

SEQ ID NO: 3827181 - DNA, 25 bp, Homo sapien
ttagatgcagcctggactcaacagt

SEQ ID NO: 3827182 - DNA, 25 bp, Homo sapien
tggactcaacagtccacatcacccc

SEQ ID NO: 3827183 - DNA, 25 bp, Homo sapien
aacagtccacatcacccccagctgc

SEQ ID NO: 3827184 - DNA, 25 bp, Homo sapien
tgcagcctggactcaacagtccaca

SEQ ID NO: 3827185 - DNA, 25 bp, Homo sapien
gctcagccactatatgcatggtctc

SEQ ID NO: 3827186 - DNA, 25 bp, Homo sapien
ctgccccacgcccacagggtgagca

SEQ ID NO: 3827187 - DNA, 25 bp, Homo sapien
gccactatatgcatggtctctccat

SEQ ID NO: 3827188 - DNA, 25 bp, Homo sapien
agcagctcagccactatatgcatgg

SEQ ID NO: 3827189 - DNA, 25 bp, Homo sapien
tctgaagacactgcaactaaattag

SEQ ID NO: 3827190 - DNA, 25 bp, Homo sapien
caactatgcatatgttctcctgtgg

SEQ ID NO: 3827191 - DNA, 25 bp, Homo sapien
taataatgagctccaaaggtcactg

SEQ ID NO: 3827192 - DNA, 25 bp, Homo sapien
taattgtccactaaactgatgtgag

SEQ ID NO: 3827193 - DNA, 25 bp, Homo sapien
tcctgctcaccagaacttggccaga

SEQ ID NO: 3827194 - DNA, 25 bp, Homo sapien
tgctcaccagaacttggccagatgt

SEQ ID NO: 3827195 - DNA, 25 bp, Homo sapien
ttttcctgctcaccagaacttggcc

SEQ ID NO: 3827196 - DNA, 25 bp, Homo sapien
ctcaccagaacttggccagatgtct

SEQ ID NO: 3827197 - DNA, 25 bp, Homo sapien
gcagcttggtggtaacgagtagaca

SEQ ID NO: 3827198 - DNA, 25 bp, Homo sapien
ctagcagcttggtggtaacgagtag

SEQ ID NO: 3827199 - DNA, 25 bp, Homo sapien
cagcttggtggtaacgagtagacat

SEQ ID NO: 3827200 - DNA, 25 bp, Homo sapien
tagcagcttggtggtaacgagtaga

SEQ ID NO: 3827201 - DNA, 25 bp, Homo sapien
atttagatctcgcttggtagcctct

SEQ ID NO: 3827202 - DNA, 25 bp, Homo sapien
cctctactgcagattatctctaggg

SEQ ID NO: 3827203 - DNA, 25 bp, Homo sapien
ttatctctagggcttccaagttccc

SEQ ID NO: 3827204 - DNA, 25 bp, Homo sapien
gagtcatgccgtcttcatccgaaag

SEQ ID NO: 3827205 - DNA, 25 bp, Homo sapien
tgtaagtcattatccagggcaaaga

SEQ ID NO: 3827206 - DNA, 25 bp, Homo sapien
caaaatgtagaggagtgtttcccca

SEQ ID NO: 3827207 - DNA, 25 bp, Homo sapien
ttggcaccaaagttgaccaggaatg

SEQ ID NO: 3827208 - DNA, 25 bp, Homo sapien
aatgagacgcagtgggcatggccat

SEQ ID NO: 3827209 - DNA, 25 bp, Homo sapien
gatagtgacccgaatgtgccaggag

SEQ ID NO: 3827210 - DNA, 25 bp, Homo sapien
cctagacctggacgattgagaatgg

SEQ ID NO: 3827211 - DNA, 25 bp, Homo sapien
aatggattcatggtgcacactgccg

SEQ ID NO: 3827212 - DNA, 25 bp, Homo sapien
gatgatctggagaaggtacccttgg

SEQ ID NO: 3827213 - DNA, 25 bp, Homo sapien
ttacacagatcggaaagcaagcagc

SEQ ID NO: 3827214 - DNA, 25 bp, Homo sapien
tatttggatgggcatagcctacctc

SEQ ID NO: 3827215 - DNA, 25 bp, Homo sapien
agccgcaggccaggaaagaactcta

SEQ ID NO: 3827216 - DNA, 25 bp, Homo sapien
tttaagttgggcatcaagccgcagg

SEQ ID NO: 3827217 - DNA, 25 bp, Homo sapien
tctctcttaccgcctgggctagagt

SEQ ID NO: 3827218 - DNA, 25 bp, Homo sapien
tgaagtaacccaaacagatgtgcat

SEQ ID NO: 3827219 - DNA, 25 bp, Homo sapien
gagaactttggagaacgctcaccta

SEQ ID NO: 3827220 - DNA, 25 bp, Homo sapien
tacctgatgagacccctagtggcaa

SEQ ID NO: 3827221 - DNA, 25 bp, Homo sapien
tatctcattaggcagattccgggca

SEQ ID NO: 3827222 - DNA, 25 bp, Homo sapien
ctcttggatatcatagtatttgctg

SEQ ID NO: 3827223 - DNA, 25 bp, Homo sapien
atatcatagtatttgctgatgctca

SEQ ID NO: 3827224 - DNA, 25 bp, Homo sapien
ttggatatcatagtatttgctgatg

SEQ ID NO: 3827225 - DNA, 25 bp, Homo sapien
tatcatagtatttgctgatgctcat

SEQ ID NO: 3827226 - DNA, 25 bp, Homo sapien
tccccacgttctataatgcttgctc

SEQ ID NO: 3827227 - DNA, 25 bp, Homo sapien
cacgttctataatgcttgctcctct

SEQ ID NO: 3827228 - DNA, 25 bp, Homo sapien
gttctataatgcttgctcctcttgg

SEQ ID NO: 3827229 - DNA, 25 bp, Homo sapien
gctccccacgttctataatgcttgc

SEQ ID NO: 3827230 - DNA, 25 bp, Homo sapien
cactccggcgtttccacctccgtgt

SEQ ID NO: 3827231 - DNA, 25 bp, Homo sapien
ccactccggcgtttccacctccgtg

SEQ ID NO: 3827232 - DNA, 25 bp, Homo sapien
ctccggcgtttccacctccgtgtat

SEQ ID NO: 3827233 - DNA, 25 bp, Homo sapien
taagaagattcatgagccgctgctc

SEQ ID NO: 3827234 - DNA, 25 bp, Homo sapien
tcatgcgggccacccaaaagattcc

SEQ ID NO: 3827235 - DNA, 25 bp, Homo sapien
cagggtctactggagtttagcagat

SEQ ID NO: 3827236 - DNA, 25 bp, Homo sapien
aaaagattccgtcctggagcagacc

SEQ ID NO: 3827237 - DNA, 25 bp, Homo sapien
ttgccttgtcgaccctcctggacga

SEQ ID NO: 3827238 - DNA, 25 bp, Homo sapien
caggttctttgccttgtcgaccctc

SEQ ID NO: 3827239 - DNA, 25 bp, Homo sapien
tcgtgtgccatggtcaccttcagct

SEQ ID NO: 3827240 - DNA, 25 bp, Homo sapien
ctctctccctcgtgtgccatggtca

SEQ ID NO: 3827241 - DNA, 25 bp, Homo sapien
cccacccacctcgtcccatgcgcac

SEQ ID NO: 3827242 - DNA, 25 bp, Homo sapien
cccacctcgtcccatgcgcacaccc

SEQ ID NO: 3827243 - DNA, 25 bp, Homo sapien
cacctcgtcccatgcgcacacccat

SEQ ID NO: 3827244 - DNA, 25 bp, Homo sapien
cacccacctcgtcccatgcgcacac

SEQ ID NO: 3827245 - DNA, 25 bp, Homo sapien
tgaggtagccaagaccaccttaaag

SEQ ID NO: 3827246 - DNA, 25 bp, Homo sapien
ctgactctaggcccaaaactttctt

SEQ ID NO: 3827247 - DNA, 25 bp, Homo sapien
gctttttcctgactctaggcccaaa

SEQ ID NO: 3827248 - DNA, 25 bp, Homo sapien
cttaattgtacttaaatatgtttct

SEQ ID NO: 3827249 - DNA, 25 bp, Homo sapien
tctaattaactcttcaggtggggga

SEQ ID NO: 3827250 - DNA, 25 bp, Homo sapien
ttcagactccgagaaatccattctt

SEQ ID NO: 3827251 - DNA, 25 bp, Homo sapien
aaaattcttccagagaagaaccata

SEQ ID NO: 3827252 - DNA, 25 bp, Homo sapien
cttccagagaagaaccataaatttt

SEQ ID NO: 3827253 - DNA, 25 bp, Homo sapien
aatttttcagactccgagaaatcca

SEQ ID NO: 3827254 - DNA, 25 bp, Homo sapien
gaaaggcacttcatcgacaggctga

SEQ ID NO: 3827255 - DNA, 25 bp, Homo sapien
tgagcagcaaaatcgaaaggtccgt

SEQ ID NO: 3827256 - DNA, 25 bp, Homo sapien
taacagagcgtgttgccaaaagcgc

SEQ ID NO: 3827257 - DNA, 25 bp, Homo sapien
cttctggaaggcacgtaagccaatt

SEQ ID NO: 3827258 - DNA, 25 bp, Homo sapien
tacttacccaggttcaagaagcaca

SEQ ID NO: 3827259 - DNA, 25 bp, Homo sapien
tgcccaggtggcatttatagaacac

SEQ ID NO: 3827260 - DNA, 25 bp, Homo sapien
tgcacgcacatgtgtagagagaggt

SEQ ID NO: 3827261 - DNA, 25 bp, Homo sapien
caaagcgactattggagtaacccat

SEQ ID NO: 3827262 - DNA, 25 bp, Homo sapien
tccctctcaaagtttatccacaaca

SEQ ID NO: 3827263 - DNA, 25 bp, Homo sapien
ccctctcaaagtttatccacaacat

SEQ ID NO: 3827264 - DNA, 25 bp, Homo sapien
taaagataagcgttgggtcactgct

SEQ ID NO: 3827265 - DNA, 25 bp, Homo sapien
taaagctgaagcatattgtggcgat

SEQ ID NO: 3827266 - DNA, 25 bp, Homo sapien
gctttggatgactggtgcaggttca

SEQ ID NO: 3827267 - DNA, 25 bp, Homo sapien
gaagaaagtgctaaccataaagctg

SEQ ID NO: 3827268 - DNA, 25 bp, Homo sapien
tccaaccacaagggctccgaggaag

SEQ ID NO: 3827269 - DNA, 25 bp, Homo sapien
gaatgggtgtgctacagagtgcacc

SEQ ID NO: 3827270 - DNA, 25 bp, Homo sapien
caaagacaacagtttccagcccact

SEQ ID NO: 3827271 - DNA, 25 bp, Homo sapien
tgaaatctcaatttctaaccgtttc

SEQ ID NO: 3827272 - DNA, 25 bp, Homo sapien
cctgactccacctgagcacctccag

SEQ ID NO: 3827273 - DNA, 25 bp, Homo sapien
gcatgctgcatgtggagagcttggc

SEQ ID NO: 3827274 - DNA, 25 bp, Homo sapien
tgactccacctgagcacctccagtg

SEQ ID NO: 3827275 - DNA, 25 bp, Homo sapien
ctgcatgctgcatgtggagagcttg

SEQ ID NO: 3827276 - DNA, 25 bp, Homo sapien
tccgtcttctccgatctggtggatc

SEQ ID NO: 3827277 - DNA, 25 bp, Homo sapien
ctgtccgtcttctccgatctggtgg

SEQ ID NO: 3827278 - DNA, 25 bp, Homo sapien
cttctccgatctggtggatctgcac

SEQ ID NO: 3827279 - DNA, 25 bp, Homo sapien
cgtcttctccgatctggtggatctg

SEQ ID NO: 3827280 - DNA, 25 bp, Homo sapien
caaggtgcgaggtggagagggtacg

SEQ ID NO: 3827281 - DNA, 25 bp, Homo sapien
ccctttcccaaggtgcgaggtggag

SEQ ID NO: 3827282 - DNA, 25 bp, Homo sapien
ggtgcgaggtggagagggtacgtac

SEQ ID NO: 3827283 - DNA, 25 bp, Homo sapien
cctttcccaaggtgcgaggtggaga

SEQ ID NO: 3827284 - DNA, 25 bp, Homo sapien
gcctcctcccaagctatcactgtgc

SEQ ID NO: 3827285 - DNA, 25 bp, Homo sapien
tcctcccaagctatcactgtgctcc

SEQ ID NO: 3827286 - DNA, 25 bp, Homo sapien
cctcctcccaagctatcactgtgct

SEQ ID NO: 3827287 - DNA, 25 bp, Homo sapien
cctcccaagctatcactgtgctccc

SEQ ID NO: 3827288 - DNA, 25 bp, Homo sapien
ctcgctgtcctgcgtgatctggact

SEQ ID NO: 3827289 - DNA, 25 bp, Homo sapien
tcgctgtcctgcgtgatctggactt

SEQ ID NO: 3827290 - DNA, 25 bp, Homo sapien
agcgcaccacggtcactcagtacag

SEQ ID NO: 3827291 - DNA, 25 bp, Homo sapien
gcacgtgtgcgctgcttactgccct

SEQ ID NO: 3827292 - DNA, 25 bp, Homo sapien
gcctgagatcttcgtagcgatacac

SEQ ID NO: 3827293 - DNA, 25 bp, Homo sapien
tgccattggcacgacctagaaacag

SEQ ID NO: 3827294 - DNA, 25 bp, Homo sapien
cagacacggcaaacacgccaagaca

SEQ ID NO: 3827295 - DNA, 25 bp, Homo sapien
agacacggcaaacacgccaagacac

SEQ ID NO: 3827296 - DNA, 25 bp, Homo sapien
tgccccacgtgatggatctggaggt

SEQ ID NO: 3827297 - DNA, 25 bp, Homo sapien
ccccacgtgatggatctggaggttg

SEQ ID NO: 3827298 - DNA, 25 bp, Homo sapien
ccacgtgatggatctggaggttgcc

SEQ ID NO: 3827299 - DNA, 25 bp, Homo sapien
tcctgccccacgtgatggatctgga

SEQ ID NO: 3827300 - DNA, 25 bp, Homo sapien
tggcagcgcaatgcccgcatgtgca

SEQ ID NO: 3827301 - DNA, 25 bp, Homo sapien
ccaccccttggcagcgcaatgcccg

SEQ ID NO: 3827302 - DNA, 25 bp, Homo sapien
catgtgcatggggactgggacactc

SEQ ID NO: 3827303 - DNA, 25 bp, Homo sapien
ccttggcagcgcaatgcccgcatgt

SEQ ID NO: 3827304 - DNA, 25 bp, Homo sapien
caacatcgaggtgagtgggcttctc

SEQ ID NO: 3827305 - DNA, 25 bp, Homo sapien
aaacgtgtggccagcccggaggaca

SEQ ID NO: 3827306 - DNA, 25 bp, Homo sapien
tcttagcccagtcaacaacatcgag

SEQ ID NO: 3827307 - DNA, 25 bp, Homo sapien
tgcatgagcagggtgtagctcagca

SEQ ID NO: 3827308 - DNA, 25 bp, Homo sapien
gtgaatgggccatgtgaccgccccc

SEQ ID NO: 3827309 - DNA, 25 bp, Homo sapien
gaatgggccatgtgaccgcccccac

SEQ ID NO: 3827310 - DNA, 25 bp, Homo sapien
tgaatgggccatgtgaccgccccca

SEQ ID NO: 3827311 - DNA, 25 bp, Homo sapien
tgcctgcaacccagcaccagatgta

SEQ ID NO: 3827312 - DNA, 25 bp, Homo sapien
gcacaccacaactgtcggcaaagaa

SEQ ID NO: 3827313 - DNA, 25 bp, Homo sapien
gagtcaacgaacagctgtgagtccc

SEQ ID NO: 3827314 - DNA, 25 bp, Homo sapien
cctcccagagtcaacgaacagctgt

SEQ ID NO: 3827315 - DNA, 25 bp, Homo sapien
actggagtggaaactagtcatcacg

SEQ ID NO: 3827316 - DNA, 25 bp, Homo sapien
gctgagaggaagtgagcgctcctgg

SEQ ID NO: 3827317 - DNA, 25 bp, Homo sapien
aactagtcatcacggctgggcagct

SEQ ID NO: 3827318 - DNA, 25 bp, Homo sapien
ctgagacacagcgctggagagcacg

SEQ ID NO: 3827319 - DNA, 25 bp, Homo sapien
aacactggggcacgacagcatgtgc

SEQ ID NO: 3827320 - DNA, 25 bp, Homo sapien
ctggaacactggggcacgacagcat

SEQ ID NO: 3827321 - DNA, 25 bp, Homo sapien
cactggggcacgacagcatgtgcac

SEQ ID NO: 3827322 - DNA, 25 bp, Homo sapien
ggaacactggggcacgacagcatgt

SEQ ID NO: 3827323 - DNA, 25 bp, Homo sapien
taaagattcagctgcaatttcaatg

SEQ ID NO: 3827324 - DNA, 25 bp, Homo sapien
gcaatttcaatgtcagtgttctaag

SEQ ID NO: 3827325 - DNA, 25 bp, Homo sapien
gattcagctgcaatttcaatgtcag

SEQ ID NO: 3827326 - DNA, 25 bp, Homo sapien
caatgtcagtgttctaagaaagccc

SEQ ID NO: 3827327 - DNA, 25 bp, Homo sapien
ttcctgatctagatgaaaagccctg

SEQ ID NO: 3827328 - DNA, 25 bp, Homo sapien
catgccaaaaacctgactgcagttc

SEQ ID NO: 3827329 - DNA, 25 bp, Homo sapien
cctaacatatgaccaacagaaggcc

SEQ ID NO: 3827330 - DNA, 25 bp, Homo sapien
gccctgagaagcacgctaaacattt

SEQ ID NO: 3827331 - DNA, 25 bp, Homo sapien
gctggtctgagtgcccggcatagca

SEQ ID NO: 3827332 - DNA, 25 bp, Homo sapien
gggctctggcccccaagggttgctc

SEQ ID NO: 3827333 - DNA, 25 bp, Homo sapien
gcctctcctgcaagaaacgctcaaa

SEQ ID NO: 3827334 - DNA, 25 bp, Homo sapien
gcaactgaagcgttcctttggcccc

SEQ ID NO: 3827335 - DNA, 25 bp, Homo sapien
aagagtatttgaggaggtggcctca

SEQ ID NO: 3827336 - DNA, 25 bp, Homo sapien
gaagagtatttgaggaggtggcctc

SEQ ID NO: 3827337 - DNA, 25 bp, Homo sapien
ggagcggccgccctgagactgggac

SEQ ID NO: 3827338 - DNA, 25 bp, Homo sapien
ccagttatctcccaaaagatctgcc

SEQ ID NO: 3827339 - DNA, 25 bp, Homo sapien
cacacatccagttatctcccaaaag

SEQ ID NO: 3827340 - DNA, 25 bp, Homo sapien
agactgggacccatggcaactctcc

SEQ ID NO: 3827341 - DNA, 25 bp, Homo sapien
ctgaagcacgaggaagcgacactgc

SEQ ID NO: 3827342 - DNA, 25 bp, Homo sapien
aagcacgaggaagcgacactgccgc

SEQ ID NO: 3827343 - DNA, 25 bp, Homo sapien
ctgccgcatcccaagacgacagaca

SEQ ID NO: 3827344 - DNA, 25 bp, Homo sapien
aggaagcgacactgccgcatcccaa

SEQ ID NO: 3827345 - DNA, 25 bp, Homo sapien
tgccaccccaccgcagtgaagaggg

SEQ ID NO: 3827346 - DNA, 25 bp, Homo sapien
caacttcctgagcaggtgctgctgc

SEQ ID NO: 3827347 - DNA, 25 bp, Homo sapien
tgctgccaccccaccgcagtgaaga

SEQ ID NO: 3827348 - DNA, 25 bp, Homo sapien
ccaccccaccgcagtgaagagggca

SEQ ID NO: 3827349 - DNA, 25 bp, Homo sapien
tggtgagtgccacgtgggccgtgtg

SEQ ID NO: 3827350 - DNA, 25 bp, Homo sapien
cagctgttactcctcgtacgtatac

SEQ ID NO: 3827351 - DNA, 25 bp, Homo sapien
taagggccgcagtccagtgacttca

SEQ ID NO: 3827352 - DNA, 25 bp, Homo sapien
cgtatacagggtaaagcttctgtct

SEQ ID NO: 3827353 - DNA, 25 bp, Homo sapien
tccgcgtcaggaggctctaagggcc

SEQ ID NO: 3827354 - DNA, 25 bp, Homo sapien
atgcaaaaggcagaagtgaaaggcc

SEQ ID NO: 3827355 - DNA, 25 bp, Homo sapien
tgcaaaaggcagaagtgaaaggccc

SEQ ID NO: 3827356 - DNA, 25 bp, Homo sapien
gcaaaaggcagaagtgaaaggccca

SEQ ID NO: 3827357 - DNA, 25 bp, Homo sapien
caaaaggcagaagtgaaaggcccac

SEQ ID NO: 3827358 - DNA, 25 bp, Homo sapien
tcagggacccatgtgagagacagaa

SEQ ID NO: 3827359 - DNA, 25 bp, Homo sapien
ggctcagggacccatgtgagagaca

SEQ ID NO: 3827360 - DNA, 25 bp, Homo sapien
aaacgcgagtggctcagggacccat

SEQ ID NO: 3827361 - DNA, 25 bp, Homo sapien
tgatgatggaggaaacgcgagtggc

SEQ ID NO: 3827362 - DNA, 25 bp, Homo sapien
tgaggggtgtctcatcaatgtgaca

SEQ ID NO: 3827363 - DNA, 25 bp, Homo sapien
gaggggtgtctcatcaatgtgacaa

SEQ ID NO: 3827364 - DNA, 25 bp, Homo sapien
ggggtgtctcatcaatgtgacaaca

SEQ ID NO: 3827365 - DNA, 25 bp, Homo sapien
gtgaggggtgtctcatcaatgtgac

SEQ ID NO: 3827366 - DNA, 25 bp, Homo sapien
tccctccgaccttgaatctacatga

SEQ ID NO: 3827367 - DNA, 25 bp, Homo sapien
acctccctccgaccttgaatctaca

SEQ ID NO: 3827368 - DNA, 25 bp, Homo sapien
cagtcacctccctccgaccttgaat

SEQ ID NO: 3827369 - DNA, 25 bp, Homo sapien
cctccgaccttgaatctacatgaac

SEQ ID NO: 3827370 - DNA, 25 bp, Homo sapien
caggacggggaatctggcgacaaca

SEQ ID NO: 3827371 - DNA, 25 bp, Homo sapien
tcagaaaccaggacggggaatctgg

SEQ ID NO: 3827372 - DNA, 25 bp, Homo sapien
tggcgacaacaacgccctgggccag

SEQ ID NO: 3827373 - DNA, 25 bp, Homo sapien
gggaatctggcgacaacaacgccct

SEQ ID NO: 3827374 - DNA, 25 bp, Homo sapien
ttcacgtagtaccagaacacgggct

SEQ ID NO: 3827375 - DNA, 25 bp, Homo sapien
cttcacgtagtaccagaacacgggc

SEQ ID NO: 3827376 - DNA, 25 bp, Homo sapien
gcagctcgtgcttgttgaggacctc

SEQ ID NO: 3827377 - DNA, 25 bp, Homo sapien
tccagggagtgttcgttgagggcac

SEQ ID NO: 3827378 - DNA, 25 bp, Homo sapien
ctccagggagtgttcgttgagggca

SEQ ID NO: 3827379 - DNA, 25 bp, Homo sapien
ccagggagtgttcgttgagggcaca

SEQ ID NO: 3827380 - DNA, 25 bp, Homo sapien
agggagtgttcgttgagggcacagc

SEQ ID NO: 3827381 - DNA, 25 bp, Homo sapien
agtggttctctgtgtccattaacca

SEQ ID NO: 3827382 - DNA, 25 bp, Homo sapien
ccaggaaattccattagacggctcc

SEQ ID NO: 3827383 - DNA, 25 bp, Homo sapien
gaaatcgttcttagcagtggttctc

SEQ ID NO: 3827384 - DNA, 25 bp, Homo sapien
tagacggctccctggaagatctgca

SEQ ID NO: 3827385 - DNA, 25 bp, Homo sapien
ccatggtaggaagcatactggacct

SEQ ID NO: 3827386 - DNA, 25 bp, Homo sapien
gccatggtaggaagcatactggacc

SEQ ID NO: 3827387 - DNA, 25 bp, Homo sapien
ccacacagaggttgcagggagccga

SEQ ID NO: 3827388 - DNA, 25 bp, Homo sapien
gccacacagaggttgcagggagccg

SEQ ID NO: 3827389 - DNA, 25 bp, Homo sapien
agacaacagattacagaagaggaga

SEQ ID NO: 3827390 - DNA, 25 bp, Homo sapien
gaggagacacgttgatcttaaatag

SEQ ID NO: 3827391 - DNA, 25 bp, Homo sapien
cagaagaggagacacgttgatctta

SEQ ID NO: 3827392 - DNA, 25 bp, Homo sapien
gacacgttgatcttaaataggtata

SEQ ID NO: 3827393 - DNA, 25 bp, Homo sapien
gctgatgggcagtcataccaccaat

SEQ ID NO: 3827394 - DNA, 25 bp, Homo sapien
tgggcagtcataccaccaataagag

SEQ ID NO: 3827395 - DNA, 25 bp, Homo sapien
cttgctgatgggcagtcataccacc

SEQ ID NO: 3827396 - DNA, 25 bp, Homo sapien
aagggaaaagtctggagtgcttgct

SEQ ID NO: 3827397 - DNA, 25 bp, Homo sapien
gttaatcgcaaagagtatggagttc

SEQ ID NO: 3827398 - DNA, 25 bp, Homo sapien
atgttaatcgcaaagagtatggagt

SEQ ID NO: 3827399 - DNA, 25 bp, Homo sapien
tctgcccgttcaaatccttgttgtc

SEQ ID NO: 3827400 - DNA, 25 bp, Homo sapien
tgttaatcgcaaagagtatggagtt

SEQ ID NO: 3827401 - DNA, 25 bp, Homo sapien
caaggtcacattctgcgttgactcc

SEQ ID NO: 3827402 - DNA, 25 bp, Homo sapien
tcagcaaggtcacattctgcgttga

SEQ ID NO: 3827403 - DNA, 25 bp, Homo sapien
ttcagcaaggtcacattctgcgttg

SEQ ID NO: 3827404 - DNA, 25 bp, Homo sapien
agcaaggtcacattctgcgttgact

SEQ ID NO: 3827405 - DNA, 25 bp, Homo sapien
tcctgatgagtttccatacacgtca

SEQ ID NO: 3827406 - DNA, 25 bp, Homo sapien
tcacatcaagcttctggtacccaaa

SEQ ID NO: 3827407 - DNA, 25 bp, Homo sapien
caaaggcggacatgatattgacaga

SEQ ID NO: 3827408 - DNA, 25 bp, Homo sapien
catcttcatcatcgatgcttttcac

SEQ ID NO: 3827409 - DNA, 25 bp, Homo sapien
aattagtcgggtgtgttggtgcgcg

SEQ ID NO: 3827410 - DNA, 25 bp, Homo sapien
aaaaagccacttggggctgggcgca

SEQ ID NO: 3827411 - DNA, 25 bp, Homo sapien
ctcatgtaattgaaaaagccacttg

SEQ ID NO: 3827412 - DNA, 25 bp, Homo sapien
attagtcgggtgtgttggtgcgcgc

SEQ ID NO: 3827413 - DNA, 25 bp, Homo sapien
tgctcatgtgactggttcttgctga

SEQ ID NO: 3827414 - DNA, 25 bp, Homo sapien
ccttcattgctgttagatgtgctca

SEQ ID NO: 3827415 - DNA, 25 bp, Homo sapien
ggaaatgacgcggtcccctgtctgg

SEQ ID NO: 3827416 - DNA, 25 bp, Homo sapien
caaggccctagaattactgatgtga

SEQ ID NO: 3827417 - DNA, 25 bp, Homo sapien
gtctctttggagtctcctagtctgg

SEQ ID NO: 3827418 - DNA, 25 bp, Homo sapien
cacattgtggttggctccagtgtct

SEQ ID NO: 3827419 - DNA, 25 bp, Homo sapien
gaaatgcaacttcacaggcctcact

SEQ ID NO: 3827420 - DNA, 25 bp, Homo sapien
gacccaatcaggtttgcacattgtg

SEQ ID NO: 3827421 - DNA, 25 bp, Homo sapien
tcacttgacccctataatgacttca

SEQ ID NO: 3827422 - DNA, 25 bp, Homo sapien
tagctgtagatatcatgtcacttga

SEQ ID NO: 3827423 - DNA, 25 bp, Homo sapien
tgtagatatcatgtcacttgacccc

SEQ ID NO: 3827424 - DNA, 25 bp, Homo sapien
gacccctataatgacttcaatgtga

SEQ ID NO: 3827425 - DNA, 25 bp, Homo sapien
tattttgctgaaatgttaattaatt

SEQ ID NO: 3827426 - DNA, 25 bp, Homo sapien
tgtgtattttgctgaaatgttaatt

SEQ ID NO: 3827427 - DNA, 25 bp, Homo sapien
tgtgtgtattttgctgaaatgttaa

SEQ ID NO: 3827428 - DNA, 25 bp, Homo sapien
tgtattttgctgaaatgttaattaa

SEQ ID NO: 3827429 - DNA, 25 bp, Homo sapien
caaagctacagcttaaaagaaaatc

SEQ ID NO: 3827430 - DNA, 25 bp, Homo sapien
catctcaaaaacaaagctacagctt

SEQ ID NO: 3827431 - DNA, 25 bp, Homo sapien
aagaaaatcagaccatgtcactctc

SEQ ID NO: 3827432 - DNA, 25 bp, Homo sapien
tggggatccattacatcaagcattt

SEQ ID NO: 3827433 - DNA, 25 bp, Homo sapien
tgattgacgcactgccaggagtagc

SEQ ID NO: 3827434 - DNA, 25 bp, Homo sapien
aggacgctctgattgacgcactgcc

SEQ ID NO: 3827435 - DNA, 25 bp, Homo sapien
tctgattgacgcactgccaggagta

SEQ ID NO: 3827436 - DNA, 25 bp, Homo sapien
cgctctgattgacgcactgccagga

SEQ ID NO: 3827437 - DNA, 25 bp, Homo sapien
cgatcctcctacttgtcccgaccac

SEQ ID NO: 3827438 - DNA, 25 bp, Homo sapien
gcgatcctcctacttgtcccgacca

SEQ ID NO: 3827439 - DNA, 25 bp, Homo sapien
atcctcctacttgtcccgaccacca

SEQ ID NO: 3827440 - DNA, 25 bp, Homo sapien
cctcctacttgtcccgaccaccagc

SEQ ID NO: 3827441 - DNA, 25 bp, Homo sapien
aaaaccacgcaaacccaagaggcag

SEQ ID NO: 3827442 - DNA, 25 bp, Homo sapien
tcggtgacgtggaaccgtcacgcaa

SEQ ID NO: 3827443 - DNA, 25 bp, Homo sapien
ccgtcacgcaaacccaagaggcgga

SEQ ID NO: 3827444 - DNA, 25 bp, Homo sapien
ccaagaggcggagggtcggtgacgt

SEQ ID NO: 3827445 - DNA, 25 bp, Homo sapien
cttccgagcgtcagctcactcccct

SEQ ID NO: 3827446 - DNA, 25 bp, Homo sapien
ttccgagcgtcagctcactcccctt

SEQ ID NO: 3827447 - DNA, 25 bp, Homo sapien
cttccgagcgtcagctcactcccct

SEQ ID NO: 3827448 - DNA, 25 bp, Homo sapien
ttccgagcgtcagctcactcccctt

SEQ ID NO: 3827449 - DNA, 25 bp, Homo sapien
cttccgagcgtcagctcactcccct

SEQ ID NO: 3827450 - DNA, 25 bp, Homo sapien
ttccgagcgtcagctcactcccctt

SEQ ID NO: 3827451 - DNA, 25 bp, Homo sapien
cttccgagcgtcagctcactcccct

SEQ ID NO: 3827452 - DNA, 25 bp, Homo sapien
ttccgagcgtcagctcactcccctt

SEQ ID NO: 3827453 - DNA, 25 bp, Homo sapien
tgcggggagcgtctgcgggggccgc

SEQ ID NO: 3827454 - DNA, 25 bp, Homo sapien
cgagcgtctgcgggggccgcttcca

SEQ ID NO: 3827455 - DNA, 25 bp, Homo sapien
gccgagcgtctgcgggggccgcttc

SEQ ID NO: 3827456 - DNA, 25 bp, Homo sapien
gagcgtctgcgggggccgcttccac

SEQ ID NO: 3827457 - DNA, 25 bp, Homo sapien
ctgccgagcgtctgcgggggccgct

SEQ ID NO: 3827458 - DNA, 25 bp, Homo sapien
cttccgagcgtcagctcactcccct

SEQ ID NO: 3827459 - DNA, 25 bp, Homo sapien
ttccgagcgtcagctcactcccctt

SEQ ID NO: 3827460 - DNA, 25 bp, Homo sapien
cttccgagcgtcagctcactcccct

SEQ ID NO: 3827461 - DNA, 25 bp, Homo sapien
ttccgagcgtcagctcactcccctt

SEQ ID NO: 3827462 - DNA, 25 bp, Homo sapien
cttccgagcgtcagctcactcccct

SEQ ID NO: 3827463 - DNA, 25 bp, Homo sapien
ttccgagcgtcagctcactcccctt

SEQ ID NO: 3827464 - DNA, 25 bp, Homo sapien
ggggccgcttccaccctgagcggat

SEQ ID NO: 3827465 - DNA, 25 bp, Homo sapien
aatatcaagacacctgctgagcgtc

SEQ ID NO: 3827466 - DNA, 25 bp, Homo sapien
aagacacctgctgagcgtctgcggg

SEQ ID NO: 3827467 - DNA, 25 bp, Homo sapien
gccgcttccaccctgagcggatgat

SEQ ID NO: 3827468 - DNA, 25 bp, Homo sapien
ctgctgagcgtctgcggattccgct

SEQ ID NO: 3827469 - DNA, 25 bp, Homo sapien
gcgtctgcggattccgcttccacca

SEQ ID NO: 3827470 - DNA, 25 bp, Homo sapien
agcgtctgcggattccgcttccacc

SEQ ID NO: 3827471 - DNA, 25 bp, Homo sapien
tgctgagcgtctgcggattccgctt

SEQ ID NO: 3827472 - DNA, 25 bp, Homo sapien
ttccaccctcagcggatgatctcaa

SEQ ID NO: 3827473 - DNA, 25 bp, Homo sapien
tgccttccaccctcagcggatgatc

SEQ ID NO: 3827474 - DNA, 25 bp, Homo sapien
caccctcagcggatgatctcaagac

SEQ ID NO: 3827475 - DNA, 25 bp, Homo sapien
ccctcagcggatgatctcaagacac

SEQ ID NO: 3827476 - DNA, 25 bp, Homo sapien
cttccgagcgtcagctcactcccct

SEQ ID NO: 3827477 - DNA, 25 bp, Homo sapien
ttccgagcgtcagctcactcccctt

SEQ ID NO: 3827478 - DNA, 25 bp, Homo sapien
ctcagcggatgataatctcaagaca

SEQ ID NO: 3827479 - DNA, 25 bp, Homo sapien
cctcagcggatgataatctcaagac

SEQ ID NO: 3827480 - DNA, 25 bp, Homo sapien
ctcagcggatgataatctcaagaca

SEQ ID NO: 3827481 - DNA, 25 bp, Homo sapien
ttccgagcgtcagctcactcccctt

SEQ ID NO: 3827482 - DNA, 25 bp, Homo sapien
cttccgagcgtcagctcactcccct

SEQ ID NO: 3827483 - DNA, 25 bp, Homo sapien
ctacctcacagctgaaactttaaaa

SEQ ID NO: 3827484 - DNA, 25 bp, Homo sapien
cctcctccaactcaacaacattcta

SEQ ID NO: 3827485 - DNA, 25 bp, Homo sapien
cctacctcacagctgaaactttaaa

SEQ ID NO: 3827486 - DNA, 25 bp, Homo sapien
gccctacctcacagctgaaacttta

SEQ ID NO: 3827487 - DNA, 25 bp, Homo sapien
gcggcgagcagaggactaccacaaa

SEQ ID NO: 3827488 - DNA, 25 bp, Homo sapien
gagcagaggactaccacaaatgcaa

SEQ ID NO: 3827489 - DNA, 25 bp, Homo sapien
cgagcagaggactaccacaaatgca

SEQ ID NO: 3827490 - DNA, 25 bp, Homo sapien
ggcgagcagaggactaccacaaatg

SEQ ID NO: 3827491 - DNA, 25 bp, Homo sapien
tacagctttatgataaaagatgctc

SEQ ID NO: 3827492 - DNA, 25 bp, Homo sapien
aatacagcaacagtttggatcagac

SEQ ID NO: 3827493 - DNA, 25 bp, Homo sapien
gagaatacagctttatgataaaaga

SEQ ID NO: 3827494 - DNA, 25 bp, Homo sapien
caatacagcaacagtttggatcaga

SEQ ID NO: 3827495 - DNA, 25 bp, Homo sapien
caattctcccttcggttgtgagaat

SEQ ID NO: 3827496 - DNA, 25 bp, Homo sapien
ggtgtcaattctcccttcggttgtg

SEQ ID NO: 3827497 - DNA, 25 bp, Homo sapien
tcaattctcccttcggttgtgagaa

SEQ ID NO: 3827498 - DNA, 25 bp, Homo sapien
tgtcaattctcccttcggttgtgag

SEQ ID NO: 3827499 - DNA, 25 bp, Homo sapien
tcacctattttcaggacataacacc

SEQ ID NO: 3827500 - DNA, 25 bp, Homo sapien
gacataacaccctgacttaggagcc

SEQ ID NO: 3827501 - DNA, 25 bp, Homo sapien
gtttgccgttgtcacctattttcag

SEQ ID NO: 3827502 - DNA, 25 bp, Homo sapien
cataacaccctgacttaggagccat

SEQ ID NO: 3827503 - DNA, 25 bp, Homo sapien
caagtggtgtgagggcaacacagca

SEQ ID NO: 3827504 - DNA, 25 bp, Homo sapien
accatgaatcaagtggtgtgagggc

SEQ ID NO: 3827505 - DNA, 25 bp, Homo sapien
aatcaagtggtgtgagggcaacaca

SEQ ID NO: 3827506 - DNA, 25 bp, Homo sapien
tgaatcaagtggtgtgagggcaaca

SEQ ID NO: 3827507 - DNA, 25 bp, Homo sapien
tccagacagcatgtgctgaaggatg

SEQ ID NO: 3827508 - DNA, 25 bp, Homo sapien
accacacactccttgtttgaggcca

SEQ ID NO: 3827509 - DNA, 25 bp, Homo sapien
gacaggaccctgctcccattgcatt

SEQ ID NO: 3827510 - DNA, 25 bp, Homo sapien
gcttctttagcgtggggacaggacc

SEQ ID NO: 3827511 - DNA, 25 bp, Homo sapien
ttcagatgcacttatgtcaactcaa

SEQ ID NO: 3827512 - DNA, 25 bp, Homo sapien
aatcatgggttttatattctgtttg

SEQ ID NO: 3827513 - DNA, 25 bp, Homo sapien
tgcacttatgtcaactcaagagtag

SEQ ID NO: 3827514 - DNA, 25 bp, Homo sapien
tattctgtttggtgtcccccattgt

SEQ ID NO: 3827515 - DNA, 25 bp, Homo sapien
tggtcatatgacattgtattttgct

SEQ ID NO: 3827516 - DNA, 25 bp, Homo sapien
cagcctggattgttgaattcaatgc

SEQ ID NO: 3827517 - DNA, 25 bp, Homo sapien
cagtctttcatgttttggtcatatg

SEQ ID NO: 3827518 - DNA, 25 bp, Homo sapien
ttgaattcaatgcttgggtcacctc

SEQ ID NO: 3827519 - DNA, 25 bp, Homo sapien
caccgtgccagcctcatgtcattct

SEQ ID NO: 3827520 - DNA, 25 bp, Homo sapien
cacaagcttttcctgctgggttcaa

SEQ ID NO: 3827521 - DNA, 25 bp, Homo sapien
cgtgccagcctcatgtcattcttgt

SEQ ID NO: 3827522 - DNA, 25 bp, Homo sapien
cccagcttcaaacggttctctgcct

SEQ ID NO: 3827523 - DNA, 25 bp, Homo sapien
tcataggtatctgacccacatctga

SEQ ID NO: 3827524 - DNA, 25 bp, Homo sapien
gattcataggtatctgacccacatc

SEQ ID NO: 3827525 - DNA, 25 bp, Homo sapien
tcaggagattcataggtatctgacc

SEQ ID NO: 3827526 - DNA, 25 bp, Homo sapien
ggagattcataggtatctgacccac

SEQ ID NO: 3827527 - DNA, 25 bp, Homo sapien
tccacttaggaaagttcagttgagc

SEQ ID NO: 3827528 - DNA, 25 bp, Homo sapien
taacaattccacttaggaaagttca

SEQ ID NO: 3827529 - DNA, 25 bp, Homo sapien
gacaacttcgcacctctcatctttg

SEQ ID NO: 3827530 - DNA, 25 bp, Homo sapien
tgttggacttggacaacttcgcacc

SEQ ID NO: 3827531 - DNA, 25 bp, Homo sapien
atgggaaccagctgaaaaatgagac

SEQ ID NO: 3827532 - DNA, 25 bp, Homo sapien
aatgagactgctagaagggccggat

SEQ ID NO: 3827533 - DNA, 25 bp, Homo sapien
cggatggctgatgcttaaagagcac

SEQ ID NO: 3827534 - DNA, 25 bp, Homo sapien
gccggatggctgatgcttaaagagc

SEQ ID NO: 3827535 - DNA, 25 bp, Homo sapien
cattaggagattttggccaggtaca

SEQ ID NO: 3827536 - DNA, 25 bp, Homo sapien
aaacattaggagattttggccaggt

SEQ ID NO: 3827537 - DNA, 25 bp, Homo sapien
acattaggagattttggccaggtac

SEQ ID NO: 3827538 - DNA, 25 bp, Homo sapien
ttaaaacattaggagattttggcca

SEQ ID NO: 3827539 - DNA, 25 bp, Homo sapien
catccaatgttatacatcaatttaa

SEQ ID NO: 3827540 - DNA, 25 bp, Homo sapien
tgcatccaatgttatacatcaattt

SEQ ID NO: 3827541 - DNA, 25 bp, Homo sapien
aatgcatccaatgttatacatcaat

SEQ ID NO: 3827542 - DNA, 25 bp, Homo sapien
gcatccaatgttatacatcaattta

SEQ ID NO: 3827543 - DNA, 25 bp, Homo sapien
tcattaccattgttgtatggttctc

SEQ ID NO: 3827544 - DNA, 25 bp, Homo sapien
atgccatgccataggtactcttttg

SEQ ID NO: 3827545 - DNA, 25 bp, Homo sapien
gttgtatggttctctaacttcatca

SEQ ID NO: 3827546 - DNA, 25 bp, Homo sapien
tgttctgctcaacaccatgtttctg

SEQ ID NO: 3827547 - DNA, 25 bp, Homo sapien
caaccccctttcaagatctacatta

SEQ ID NO: 3827548 - DNA, 25 bp, Homo sapien
tactaactttggaaagtacatacac

SEQ ID NO: 3827549 - DNA, 25 bp, Homo sapien
tttggaaagtacatacaccagcata

SEQ ID NO: 3827550 - DNA, 25 bp, Homo sapien
taactttggaaagtacatacaccag

SEQ ID NO: 3827551 - DNA, 25 bp, Homo sapien
tagctcagattacaacgcctggcta

SEQ ID NO: 3827552 - DNA, 25 bp, Homo sapien
actgtccattgtgaggcaccaccgg

SEQ ID NO: 3827553 - DNA, 25 bp, Homo sapien
aatcaggtttgtgaaggttccagag

SEQ ID NO: 3827554 - DNA, 25 bp, Homo sapien
tcattggaatgatgcgggcgctact

SEQ ID NO: 3827555 - DNA, 25 bp, Homo sapien
cttggcattgtccattgtgaggcac

SEQ ID NO: 3827556 - DNA, 25 bp, Homo sapien
taagatgatatagataaggacgtca

SEQ ID NO: 3827557 - DNA, 25 bp, Homo sapien
cactcggtttcggatgttaaaatgt

SEQ ID NO: 3827558 - DNA, 25 bp, Homo sapien
cacacacacaggcagtaagatgata

SEQ ID NO: 3827559 - DNA, 25 bp, Homo sapien
tcagtcatgaaagtcaacttggttt

SEQ ID NO: 3827560 - DNA, 25 bp, Homo sapien
aaccttatgtcatagtaaatggtaa

SEQ ID NO: 3827561 - DNA, 25 bp, Homo sapien
tctatttatggtaaaggcattggct

SEQ ID NO: 3827562 - DNA, 25 bp, Homo sapien
atttatggtaaaggcattggctttc

SEQ ID NO: 3827563 - DNA, 25 bp, Homo sapien
tcctgtttacaataaccttatgtca

SEQ ID NO: 3827564 - DNA, 25 bp, Homo sapien
atgcccagccaaatctagggcagga

SEQ ID NO: 3827565 - DNA, 25 bp, Homo sapien
cccagccaaatctagggcaggaaca

SEQ ID NO: 3827566 - DNA, 25 bp, Homo sapien
tggctgcagcatataaaaagaattg

SEQ ID NO: 3827567 - DNA, 25 bp, Homo sapien
gaattgaattccatacttttgttaa

SEQ ID NO: 3827568 - DNA, 25 bp, Homo sapien
tcatcactgccttcagtgaccaagg

SEQ ID NO: 3827569 - DNA, 25 bp, Homo sapien
gtgaccaagggccttccaaggtgcc

SEQ ID NO: 3827570 - DNA, 25 bp, Homo sapien
atcatcactgccttcagtgaccaag

SEQ ID NO: 3827571 - DNA, 25 bp, Homo sapien
ccaagggccttccaaggtgccagct

SEQ ID NO: 3827572 - DNA, 25 bp, Homo sapien
taaacactctcccaaaacatcgtgg

SEQ ID NO: 3827573 - DNA, 25 bp, Homo sapien
gaggttgtaaaccattgctcccaca

SEQ ID NO: 3827574 - DNA, 25 bp, Homo sapien
tctttgttccaatggccctgggtga

SEQ ID NO: 3827575 - DNA, 25 bp, Homo sapien
ggtgactcaagtgcccattcaatga

SEQ ID NO: 3827576 - DNA, 25 bp, Homo sapien
tcccatgggtacatccactttcaag

SEQ ID NO: 3827577 - DNA, 25 bp, Homo sapien
tccactttcaagtggcccaggagag

SEQ ID NO: 3827578 - DNA, 25 bp, Homo sapien
gacaggaggactaagtcaccgcaga

SEQ ID NO: 3827579 - DNA, 25 bp, Homo sapien
caggagagaacctgaaatactcggt

SEQ ID NO: 3827580 - DNA, 25 bp, Homo sapien
caccagttcgtgttctgacggcagg

SEQ ID NO: 3827581 - DNA, 25 bp, Homo sapien
tgcattatgaagctacctggctaac

SEQ ID NO: 3827582 - DNA, 25 bp, Homo sapien
caggccctgggttcaatgctctaca

SEQ ID NO: 3827583 - DNA, 25 bp, Homo sapien
gcaacctgagatggtatagccacct

SEQ ID NO: 3827584 - DNA, 25 bp, Homo sapien
gttcctgtcccatgaccagggccag

SEQ ID NO: 3827585 - DNA, 25 bp, Homo sapien
aaatggtgaagctctctattgtcct

SEQ ID NO: 3827586 - DNA, 25 bp, Homo sapien
gaagctctctattgtcctgacccca

SEQ ID NO: 3827587 - DNA, 25 bp, Homo sapien
ctaataggttggcactcatcatgag

SEQ ID NO: 3827588 - DNA, 25 bp, Homo sapien
tgagttacataagagaggagtcctg

SEQ ID NO: 3827589 - DNA, 25 bp, Homo sapien
gctctgggaggacatagtattcatt

SEQ ID NO: 3827590 - DNA, 25 bp, Homo sapien
tcagacacagttagaggtttccaag

SEQ ID NO: 3827591 - DNA, 25 bp, Homo sapien
tttctaaaacatgcggacatatggg

SEQ ID NO: 3827592 - DNA, 25 bp, Homo sapien
tgaattgaatcgacacaggaagagt

SEQ ID NO: 3827593 - DNA, 25 bp, Homo sapien
tatgagtgtaggcaggtggttactt

SEQ ID NO: 3827594 - DNA, 25 bp, Homo sapien
ggtggttactttggtcatatctcca

SEQ ID NO: 3827595 - DNA, 25 bp, Homo sapien
ggtgcccagccattcgtgacatgtt

SEQ ID NO: 3827596 - DNA, 25 bp, Homo sapien
gatgaaacttcccagttcacaagga

SEQ ID NO: 3827597 - DNA, 25 bp, Homo sapien
agcatcatatcagggccagcagact

SEQ ID NO: 3827598 - DNA, 25 bp, Homo sapien
tttaagacagtaatcagaatcatga

SEQ ID NO: 3827599 - DNA, 25 bp, Homo sapien
gaaatttaattacttatgtgcagca

SEQ ID NO: 3827600 - DNA, 25 bp, Homo sapien
gaggtgctttagtcaactgaatctg

SEQ ID NO: 3827601 - DNA, 25 bp, Homo sapien
ctgaatctgcccaaaactaaaaagc

SEQ ID NO: 3827602 - DNA, 25 bp, Homo sapien
tacaagcgtgaagcattacatccaa

SEQ ID NO: 3827603 - DNA, 25 bp, Homo sapien
gccaaccatacactactcttttttg

SEQ ID NO: 3827604 - DNA, 25 bp, Homo sapien
gtagtactcataattaccttgggta

SEQ ID NO: 3827605 - DNA, 25 bp, Homo sapien
agtgataccacagcttccgtgaagt

SEQ ID NO: 3827606 - DNA, 25 bp, Homo sapien
gcccagccgcaagtacttttacaca

SEQ ID NO: 3827607 - DNA, 25 bp, Homo sapien
gaaatttctgtactatggtcccagt

SEQ ID NO: 3827608 - DNA, 25 bp, Homo sapien
taaacacacacaaactctcaagtgg

SEQ ID NO: 3827609 - DNA, 25 bp, Homo sapien
tctcaccaaaccaatcacaatacag

SEQ ID NO: 3827610 - DNA, 25 bp, Homo sapien
aagtggcctaattccctctcaccaa

SEQ ID NO: 3827611 - DNA, 25 bp, Homo sapien
gatataaattgtgaatgatgcatga

SEQ ID NO: 3827612 - DNA, 25 bp, Homo sapien
tgggaggacaggcgcaagccacggc

SEQ ID NO: 3827613 - DNA, 25 bp, Homo sapien
aggcgcaagccacggcactcagcta

SEQ ID NO: 3827614 - DNA, 25 bp, Homo sapien
ggacaggcgcaagccacggcactca

SEQ ID NO: 3827615 - DNA, 25 bp, Homo sapien
gaggacaggcgcaagccacggcact

SEQ ID NO: 3827616 - DNA, 25 bp, Homo sapien
tatttatttaagacagagtttcgct

SEQ ID NO: 3827617 - DNA, 25 bp, Homo sapien
atgctgtgatagtttgtttgtttgt

SEQ ID NO: 3827618 - DNA, 25 bp, Homo sapien
ttatttatttaagacagagtttcgc

SEQ ID NO: 3827619 - DNA, 25 bp, Homo sapien
agctgaaagaaagcccgtgcagtca

SEQ ID NO: 3827620 - DNA, 25 bp, Homo sapien
ggctccagctgaaagaaagcccgtg

SEQ ID NO: 3827621 - DNA, 25 bp, Homo sapien
cgtgcagtcatatcacgcgtaaaca

SEQ ID NO: 3827622 - DNA, 25 bp, Homo sapien
aaagcccgtgcagtcatatcacgcg

SEQ ID NO: 3827623 - DNA, 25 bp, Homo sapien
agtagcatgatagttacaggaaagg

SEQ ID NO: 3827624 - DNA, 25 bp, Homo sapien
cagggtgatgccacagtgtgaagtg

SEQ ID NO: 3827625 - DNA, 25 bp, Homo sapien
cagtagcatgatagttacaggaaag

SEQ ID NO: 3827626 - DNA, 25 bp, Homo sapien
gtgcagtagcatgatagttacagga

SEQ ID NO: 3827627 - DNA, 25 bp, Homo sapien
gagcttcctttgcactagcatctga

SEQ ID NO: 3827628 - DNA, 25 bp, Homo sapien
tcataaaagtgttgatcctcacacc

SEQ ID NO: 3827629 - DNA, 25 bp, Homo sapien
gaagtattgataagtgctcagctaa

SEQ ID NO: 3827630 - DNA, 25 bp, Homo sapien
acctctttatagtcttgcacctagc

SEQ ID NO: 3827631 - DNA, 25 bp, Homo sapien
tgctctattgcctaagcttgagtgc

SEQ ID NO: 3827632 - DNA, 25 bp, Homo sapien
acacctggcctgaaacccagatttt

SEQ ID NO: 3827633 - DNA, 25 bp, Homo sapien
tggcctgaaacccagattttattta

SEQ ID NO: 3827634 - DNA, 25 bp, Homo sapien
tcttgctctattgcctaagcttgag

SEQ ID NO: 3827635 - DNA, 25 bp, Homo sapien
tggaattcctgaggtcaagctgtct

SEQ ID NO: 3827636 - DNA, 25 bp, Homo sapien
tctggaattcctgaggtcaagctgt

SEQ ID NO: 3827637 - DNA, 25 bp, Homo sapien
attcctgaggtcaagctgtctgccc

SEQ ID NO: 3827638 - DNA, 25 bp, Homo sapien
gaattcctgaggtcaagctgtctgc

SEQ ID NO: 3827639 - DNA, 25 bp, Homo sapien
caggttggagtgtaggagggcgatc

SEQ ID NO: 3827640 - DNA, 25 bp, Homo sapien
ttggagtgtaggagggcgatctcag

SEQ ID NO: 3827641 - DNA, 25 bp, Homo sapien
tcactgtaacatcaacctcccaggc

SEQ ID NO: 3827642 - DNA, 25 bp, Homo sapien
cactgtaacatcaacctcccaggct

SEQ ID NO: 3827643 - DNA, 25 bp, Homo sapien
cctataaggcagaacgtaagacggt

SEQ ID NO: 3827644 - DNA, 25 bp, Homo sapien
gattcatggcagattctaaagcaca

SEQ ID NO: 3827645 - DNA, 25 bp, Homo sapien
taggaagcaaagtctatagggagct

SEQ ID NO: 3827646 - DNA, 25 bp, Homo sapien
tagggagctatataatagaggctgc

SEQ ID NO: 3827647 - DNA, 25 bp, Homo sapien
tcgaactcctgtctcacgtgtctgt

SEQ ID NO: 3827648 - DNA, 25 bp, Homo sapien
agagacatagagtttcaccagattg

SEQ ID NO: 3827649 - DNA, 25 bp, Homo sapien
agaggcctgacagtgtgatcttggc

SEQ ID NO: 3827650 - DNA, 25 bp, Homo sapien
gaactcctgtctcacgtgtctgtgt

SEQ ID NO: 3827651 - DNA, 25 bp, Homo sapien
gagacgcactaaacagtaaagggac

SEQ ID NO: 3827652 - DNA, 25 bp, Homo sapien
tttcatggagcttctagtcaagcga

SEQ ID NO: 3827653 - DNA, 25 bp, Homo sapien
ggtctagtggcgaaggaggcaggta

SEQ ID NO: 3827654 - DNA, 25 bp, Homo sapien
gaaaatgggccctgagcgatcacca

SEQ ID NO: 3827655 - DNA, 25 bp, Homo sapien
gggctctgccttgtttccctagaac

SEQ ID NO: 3827656 - DNA, 25 bp, Homo sapien
cactggcagccgtaacatagtggtt

SEQ ID NO: 3827657 - DNA, 25 bp, Homo sapien
cctagaacctagaatggcatctggc

SEQ ID NO: 3827658 - DNA, 25 bp, Homo sapien
tctttcctagaatgtggatgccttg

SEQ ID NO: 3827659 - DNA, 25 bp, Homo sapien
gacggtttcaccgtcttagccagga

SEQ ID NO: 3827660 - DNA, 25 bp, Homo sapien
tagagacggtttcaccgtcttagcc

SEQ ID NO: 3827661 - DNA, 25 bp, Homo sapien
agagacggtttcaccgtcttagcca

SEQ ID NO: 3827662 - DNA, 25 bp, Homo sapien
gagacggtttcaccgtcttagccag

SEQ ID NO: 3827663 - DNA, 25 bp, Homo sapien
taaaacaagagtgtagatttgggca

SEQ ID NO: 3827664 - DNA, 25 bp, Homo sapien
gatttgggcattgaggccttcaaat

SEQ ID NO: 3827665 - DNA, 25 bp, Homo sapien
acaagagtgtagatttgggcattga

SEQ ID NO: 3827666 - DNA, 25 bp, Homo sapien
aacaagagtgtagatttgggcattg

SEQ ID NO: 3827667 - DNA, 25 bp, Homo sapien
aagtctttgagtggacatatatttg

SEQ ID NO: 3827668 - DNA, 25 bp, Homo sapien
tctttgagtggacatatatttgcgt

SEQ ID NO: 3827669 - DNA, 25 bp, Homo sapien
ttgagtggacatatatttgcgtttc

SEQ ID NO: 3827670 - DNA, 25 bp, Homo sapien
gagtggacatatatttgcgtttctc

SEQ ID NO: 3827671 - DNA, 25 bp, Homo sapien
tgtgcttgcctcttgtgagtagaag

SEQ ID NO: 3827672 - DNA, 25 bp, Homo sapien
tatattgcagtcttggacttaagac

SEQ ID NO: 3827673 - DNA, 25 bp, Homo sapien
caggcattaaggtatactgtgtacc

SEQ ID NO: 3827674 - DNA, 25 bp, Homo sapien
gcaatcaatctgaagtagccaaact

SEQ ID NO: 3827675 - DNA, 25 bp, Homo sapien
tggagaccacagtttctaacagact

SEQ ID NO: 3827676 - DNA, 25 bp, Homo sapien
ccgcatcgctattggacctctgaga

SEQ ID NO: 3827677 - DNA, 25 bp, Homo sapien
taagtaccttgcagctgtattgctc

SEQ ID NO: 3827678 - DNA, 25 bp, Homo sapien
tacttgaagcaaacatcccgcatcg

SEQ ID NO: 3827679 - DNA, 25 bp, Homo sapien
ccatgttaggtaggctgggttcggt

SEQ ID NO: 3827680 - DNA, 25 bp, Homo sapien
aaacaaaatttgccatgttaggtag

SEQ ID NO: 3827681 - DNA, 25 bp, Homo sapien
acaaaatttgccatgttaggtaggc

SEQ ID NO: 3827682 - DNA, 25 bp, Homo sapien
aaaatttgccatgttaggtaggctg

SEQ ID NO: 3827683 - DNA, 25 bp, Homo sapien
ttaaaactccaagctatcacttcac

SEQ ID NO: 3827684 - DNA, 25 bp, Homo sapien
aattaaaactccaagctatcacttc

SEQ ID NO: 3827685 - DNA, 25 bp, Homo sapien
taaaactccaagctatcacttcaca

SEQ ID NO: 3827686 - DNA, 25 bp, Homo sapien
aaattaaaactccaagctatcactt

SEQ ID NO: 3827687 - DNA, 25 bp, Homo sapien
ttatctttagtagcctcagttcttc

SEQ ID NO: 3827688 - DNA, 25 bp, Homo sapien
ggcactgtaactatggccacaaaga

SEQ ID NO: 3827689 - DNA, 25 bp, Homo sapien
gatgaaaagataatctatgctttgt

SEQ ID NO: 3827690 - DNA, 25 bp, Homo sapien
ccaggacacgaggtaacagatatta

SEQ ID NO: 3827691 - DNA, 25 bp, Homo sapien
attttcataacacttactggtgagc

SEQ ID NO: 3827692 - DNA, 25 bp, Homo sapien
tcataacacttactggtgagcatcc

SEQ ID NO: 3827693 - DNA, 25 bp, Homo sapien
ccatgcccagccggagtttggaata

SEQ ID NO: 3827694 - DNA, 25 bp, Homo sapien
tgcccagccggagtttggaatattt

SEQ ID NO: 3827695 - DNA, 25 bp, Homo sapien
tgtgtaatgacatgtttcccctatt

SEQ ID NO: 3827696 - DNA, 25 bp, Homo sapien
cccctattaccagtatcatacagga

SEQ ID NO: 3827697 - DNA, 25 bp, Homo sapien
tgtattctatggactttaacatgtg

SEQ ID NO: 3827698 - DNA, 25 bp, Homo sapien
tcttttatgttctacccactccttc

SEQ ID NO: 3827699 - DNA, 25 bp, Homo sapien
cccacttttattatggacgttctga

SEQ ID NO: 3827700 - DNA, 25 bp, Homo sapien
gacgttctgaagcacataaaaatag

SEQ ID NO: 3827701 - DNA, 25 bp, Homo sapien
tctttgctaatgtgaaaaaatgccc

SEQ ID NO: 3827702 - DNA, 25 bp, Homo sapien
aattctagatgacattctgctgagc

SEQ ID NO: 3827703 - DNA, 25 bp, Homo sapien
aaaactacagaatctatttttcttg

SEQ ID NO: 3827704 - DNA, 25 bp, Homo sapien
cagcctaaaatgatggttttctgat

SEQ ID NO: 3827705 - DNA, 25 bp, Homo sapien
acccagcctaaaatgatggttttct

SEQ ID NO: 3827706 - DNA, 25 bp, Homo sapien
gcctaaaatgatggttttctgattc

SEQ ID NO: 3827707 - DNA, 25 bp, Homo sapien
cccagcctaaaatgatggttttctg

SEQ ID NO: 3827708 - DNA, 25 bp, Homo sapien
tgctttattttgggtatgtagttta

SEQ ID NO: 3827709 - DNA, 25 bp, Homo sapien
cagtttttgatatgctttattttgg

SEQ ID NO: 3827710 - DNA, 25 bp, Homo sapien
tttacagtttttgatatgctttatt

SEQ ID NO: 3827711 - DNA, 25 bp, Homo sapien
tatgctttattttgggtatgtagtt

SEQ ID NO: 3827712 - DNA, 25 bp, Homo sapien
agacaagacataccttggaaaatgg

SEQ ID NO: 3827713 - DNA, 25 bp, Homo sapien
aaagacaagacataccttggaaaat

SEQ ID NO: 3827714 - DNA, 25 bp, Homo sapien
caagacataccttggaaaatggggg

SEQ ID NO: 3827715 - DNA, 25 bp, Homo sapien
gacaagacataccttggaaaatggg

SEQ ID NO: 3827716 - DNA, 25 bp, Homo sapien
tgttgatgggatcgacctactctgg

SEQ ID NO: 3827717 - DNA, 25 bp, Homo sapien
caaggccggttactctggtgaatcg

SEQ ID NO: 3827718 - DNA, 25 bp, Homo sapien
gacacttgagtgaactctgggcacc

SEQ ID NO: 3827719 - DNA, 25 bp, Homo sapien
cctactctggtcttgggcgatggaa

SEQ ID NO: 3827720 - DNA, 25 bp, Homo sapien
gctttccgggaagcatttgggagaa

SEQ ID NO: 3827721 - DNA, 25 bp, Homo sapien
gtcttaggattcgtcaccgctacgc

SEQ ID NO: 3827722 - DNA, 25 bp, Homo sapien
gccctccggtgctttccgggaagca

SEQ ID NO: 3827723 - DNA, 25 bp, Homo sapien
tggccgcagtagtggagatcccgtc

SEQ ID NO: 3827724 - DNA, 25 bp, Homo sapien
caggtccttgattggacgcctgttt

SEQ ID NO: 3827725 - DNA, 25 bp, Homo sapien
tccttgattggacgcctgtttacac

SEQ ID NO: 3827726 - DNA, 25 bp, Homo sapien
ggtccttgattggacgcctgtttac

SEQ ID NO: 3827727 - DNA, 25 bp, Homo sapien
gcaggtccttgattggacgcctgtt

SEQ ID NO: 3827728 - DNA, 25 bp, Homo sapien
gatctctgctcactgggagctccgc

SEQ ID NO: 3827729 - DNA, 25 bp, Homo sapien
atctctgctcactgggagctccgcc

SEQ ID NO: 3827730 - DNA, 25 bp, Homo sapien
tgggggaccaggctgcctgggcttc

SEQ ID NO: 3827731 - DNA, 25 bp, Homo sapien
ctgggggaccaggctgcctgggctt

SEQ ID NO: 3827732 - DNA, 25 bp, Homo sapien
tctctggccctgtgcgaactgctgt

SEQ ID NO: 3827733 - DNA, 25 bp, Homo sapien
caggccagctgtagttgcagcggtc

SEQ ID NO: 3827734 - DNA, 25 bp, Homo sapien
ctgtgcccggtgtcaggccagctgt

SEQ ID NO: 3827735 - DNA, 25 bp, Homo sapien
gcagcggtcagctgccgctctctgg

SEQ ID NO: 3827736 - DNA, 25 bp, Homo sapien
gattcaacactgagcagacaggtgg

SEQ ID NO: 3827737 - DNA, 25 bp, Homo sapien
atctgtatgtctggcccaaagcggg

SEQ ID NO: 3827738 - DNA, 25 bp, Homo sapien
agggacatctgtatgtctggcccaa

SEQ ID NO: 3827739 - DNA, 25 bp, Homo sapien
gggatcatctctgtgcttgcccagg

SEQ ID NO: 3827740 - DNA, 25 bp, Homo sapien
gacttggggtgtcggcaaatttcag

SEQ ID NO: 3827741 - DNA, 25 bp, Homo sapien
cctcgacttggggtgtcggcaaatt

SEQ ID NO: 3827742 - DNA, 25 bp, Homo sapien
tcggcaaatttcagagcttgccaaa

SEQ ID NO: 3827743 - DNA, 25 bp, Homo sapien
gggtgtcggcaaatttcagagcttg

SEQ ID NO: 3827744 - DNA, 25 bp, Homo sapien
tgagctgagtcaactggaagagccc

SEQ ID NO: 3827745 - DNA, 25 bp, Homo sapien
ttctctggcgtttgcttcagagctg

SEQ ID NO: 3827746 - DNA, 25 bp, Homo sapien
cgcagccaggcgcttgacttctctg

SEQ ID NO: 3827747 - DNA, 25 bp, Homo sapien
tgtcttcacctggtaccgtgtaggg

SEQ ID NO: 3827748 - DNA, 25 bp, Homo sapien
ctggaggccaatgcaggattctgcc

SEQ ID NO: 3827749 - DNA, 25 bp, Homo sapien
atgcaggattctgcccacagctcac

SEQ ID NO: 3827750 - DNA, 25 bp, Homo sapien
gaggccaatgcaggattctgcccac

SEQ ID NO: 3827751 - DNA, 25 bp, Homo sapien
aatgcaggattctgcccacagctca

SEQ ID NO: 3827752 - DNA, 25 bp, Homo sapien
ctggggccagtccagctttgtccct

SEQ ID NO: 3827753 - DNA, 25 bp, Homo sapien
tggcaaaagattttctgattcacaa

SEQ ID NO: 3827754 - DNA, 25 bp, Homo sapien
cgtgcctggcaaaagattttctgat

SEQ ID NO: 3827755 - DNA, 25 bp, Homo sapien
caaaagattttctgattcacaattg

SEQ ID NO: 3827756 - DNA, 25 bp, Homo sapien
ccgtgcctggcaaaagattttctga

SEQ ID NO: 3827757 - DNA, 25 bp, Homo sapien
gcccctcccctgccctaggatttgc

SEQ ID NO: 3827758 - DNA, 25 bp, Homo sapien
tgcccgcccctcccctgccctagga

SEQ ID NO: 3827759 - DNA, 25 bp, Homo sapien
cgcccctcccctgccctaggatttg

SEQ ID NO: 3827760 - DNA, 25 bp, Homo sapien
cctcccctgccctaggatttgccca

SEQ ID NO: 3827761 - DNA, 25 bp, Homo sapien
gtctccttccctgattgtggccaaa

SEQ ID NO: 3827762 - DNA, 25 bp, Homo sapien
agctcgtgccctccgggagcgtggg

SEQ ID NO: 3827763 - DNA, 25 bp, Homo sapien
gcatgtgtatgcacgcagattggta

SEQ ID NO: 3827764 - DNA, 25 bp, Homo sapien
ccctggccgtcagaccgccccaggt

SEQ ID NO: 3827765 - DNA, 25 bp, Homo sapien
gaagtaggaatcgccacaactgtct

SEQ ID NO: 3827766 - DNA, 25 bp, Homo sapien
ggaagtaggaatcgccacaactgtc

SEQ ID NO: 3827767 - DNA, 25 bp, Homo sapien
ggtggaagtaggaatcgccacaact

SEQ ID NO: 3827768 - DNA, 25 bp, Homo sapien
tggaagtaggaatcgccacaactgt

SEQ ID NO: 3827769 - DNA, 25 bp, Homo sapien
tctgggaatcacaggcctccgtgtg

SEQ ID NO: 3827770 - DNA, 25 bp, Homo sapien
gtctgggaatcacaggcctccgtgt

SEQ ID NO: 3827771 - DNA, 25 bp, Homo sapien
taggaacctgtgagctgagacattg

SEQ ID NO: 3827772 - DNA, 25 bp, Homo sapien
gtcactcctcagcagattggtgtgg

SEQ ID NO: 3827773 - DNA, 25 bp, Homo sapien
gagacattgtccagctagcgtcagg

SEQ ID NO: 3827774 - DNA, 25 bp, Homo sapien
tcaggccaaaagcaaccaaggcttt

SEQ ID NO: 3827775 - DNA, 25 bp, Homo sapien
tcgcgggactctggctgcgggtggc

SEQ ID NO: 3827776 - DNA, 25 bp, Homo sapien
ggccgtccatcggtctcgcgggact

SEQ ID NO: 3827777 - DNA, 25 bp, Homo sapien
gtccatcggtctcgcgggactctgg

SEQ ID NO: 3827778 - DNA, 25 bp, Homo sapien
gggcaggccgtccatcggtctcgcg

SEQ ID NO: 3827779 - DNA, 25 bp, Homo sapien
ccaagcgcataggtgttcgggaagt

SEQ ID NO: 3827780 - DNA, 25 bp, Homo sapien
agctcctccatgccttgaaagcaga

SEQ ID NO: 3827781 - DNA, 25 bp, Homo sapien
aagcagaagtagccccctcctgttt

SEQ ID NO: 3827782 - DNA, 25 bp, Homo sapien
tgtgggcctcaggggcttccacctc

SEQ ID NO: 3827783 - DNA, 25 bp, Homo sapien
caccggatcgccatctttggcaaga

SEQ ID NO: 3827784 - DNA, 25 bp, Homo sapien
ggttcttccctcgtctcagttcgcg

SEQ ID NO: 3827785 - DNA, 25 bp, Homo sapien
caatgggaattactgggtggcctcg

SEQ ID NO: 3827786 - DNA, 25 bp, Homo sapien
cttctcaaagctacgggcaccggat

SEQ ID NO: 3827787 - DNA, 25 bp, Homo sapien
agtgagcactcggtgagtttgtcca

SEQ ID NO: 3827788 - DNA, 25 bp, Homo sapien
aagttagtatctgtgcgacctccgc

SEQ ID NO: 3827789 - DNA, 25 bp, Homo sapien
tccagccatggtggtactgtctcct

SEQ ID NO: 3827790 - DNA, 25 bp, Homo sapien
cgtggacggcagattacaagttagt

SEQ ID NO: 3827791 - DNA, 25 bp, Homo sapien
ttcagacacttgtcccaaccacggt

SEQ ID NO: 3827792 - DNA, 25 bp, Homo sapien
tggcacagaataaacgcggtcaggc

SEQ ID NO: 3827793 - DNA, 25 bp, Homo sapien
gggcgggatcctcaaccattctgct

SEQ ID NO: 3827794 - DNA, 25 bp, Homo sapien
gttggcatcaggcatgtgttgctgc

SEQ ID NO: 3827795 - DNA, 25 bp, Homo sapien
ttctcccagcaagattcgcagcctg

SEQ ID NO: 3827796 - DNA, 25 bp, Homo sapien
cccagcaagattcgcagcctggccc

SEQ ID NO: 3827797 - DNA, 25 bp, Homo sapien
gcaagattcgcagcctggccctctt

SEQ ID NO: 3827798 - DNA, 25 bp, Homo sapien
cagcaagattcgcagcctggccctc

SEQ ID NO: 3827799 - DNA, 25 bp, Homo sapien
tgccctgttcaaaactgaggctttc

SEQ ID NO: 3827800 - DNA, 25 bp, Homo sapien
gttcaaaactgaggctttccactag

SEQ ID NO: 3827801 - DNA, 25 bp, Homo sapien
aaaactgaggctttccactaggctt

SEQ ID NO: 3827802 - DNA, 25 bp, Homo sapien
tctgctgccctgttcaaaactgagg

SEQ ID NO: 3827803 - DNA, 25 bp, Homo sapien
catgggctgcccatttccatgggga

SEQ ID NO: 3827804 - DNA, 25 bp, Homo sapien
gccattctccatgggctgcccattt

SEQ ID NO: 3827805 - DNA, 25 bp, Homo sapien
ttctccatgggctgcccatttccat

SEQ ID NO: 3827806 - DNA, 25 bp, Homo sapien
tcagccattctccatgggctgccca

SEQ ID NO: 3827807 - DNA, 25 bp, Homo sapien
tgggatgggggcagacagcagctat

SEQ ID NO: 3827808 - DNA, 25 bp, Homo sapien
ttgggatgggggcagacagcagcta

SEQ ID NO: 3827809 - DNA, 25 bp, Homo sapien
cttgggatgggggcagacagcagct

SEQ ID NO: 3827810 - DNA, 25 bp, Homo sapien
gagaatagcccgctcctctggtggg

SEQ ID NO: 3827811 - DNA, 25 bp, Homo sapien
agcagccagaggaaggcacttggct

SEQ ID NO: 3827812 - DNA, 25 bp, Homo sapien
ctgcagcgctgtgagaatagcccgc

SEQ ID NO: 3827813 - DNA, 25 bp, Homo sapien
gctgtgagaatagcccgctcctctg

SEQ ID NO: 3827814 - DNA, 25 bp, Homo sapien
taccctgatcggtaaggtagcagta

SEQ ID NO: 3827815 - DNA, 25 bp, Homo sapien
ggataccctgatcggtaaggtagca

SEQ ID NO: 3827816 - DNA, 25 bp, Homo sapien
ataccctgatcggtaaggtagcagt

SEQ ID NO: 3827817 - DNA, 25 bp, Homo sapien
ctggataccctgatcggtaaggtag

SEQ ID NO: 3827818 - DNA, 25 bp, Homo sapien
ctggccatgtccacgaccaaatctg

SEQ ID NO: 3827819 - DNA, 25 bp, Homo sapien
ttacggaggtggctggccatgtcca

SEQ ID NO: 3827820 - DNA, 25 bp, Homo sapien
gctgacccagcccgagcctcagctt

SEQ ID NO: 3827821 - DNA, 25 bp, Homo sapien
ttgctgacccagcccgagcctcagc

SEQ ID NO: 3827822 - DNA, 25 bp, Homo sapien
cctcagtaaggtgaatgtgtccgta

SEQ ID NO: 3827823 - DNA, 25 bp, Homo sapien
tcaagaatagagagggaatttctcc

SEQ ID NO: 3827824 - DNA, 25 bp, Homo sapien
taatggtgtgagatgcatcgaaggc

SEQ ID NO: 3827825 - DNA, 25 bp, Homo sapien
gatcaccaagtcagtatcaatgagc

SEQ ID NO: 3827826 - DNA, 25 bp, Homo sapien
catgacagccactcctcaatctcct

SEQ ID NO: 3827827 - DNA, 25 bp, Homo sapien
aaccccaaattatcacctccttcat

SEQ ID NO: 3827828 - DNA, 25 bp, Homo sapien
actcgtcagctgtgaaccattcact

SEQ ID NO: 3827829 - DNA, 25 bp, Homo sapien
agaaacatacactgacaaaacccca

SEQ ID NO: 3827830 - DNA, 25 bp, Homo sapien
cttttcatagaacttggtatcccag

SEQ ID NO: 3827831 - DNA, 25 bp, Homo sapien
tttcatagaacttggtatcccagct

SEQ ID NO: 3827832 - DNA, 25 bp, Homo sapien
tggtctttcgatccatctaagaagc

SEQ ID NO: 3827833 - DNA, 25 bp, Homo sapien
ttcgatccatctaagaagctttgct

SEQ ID NO: 3827834 - DNA, 25 bp, Homo sapien
ctccctccgtccaatgagcgggccg

SEQ ID NO: 3827835 - DNA, 25 bp, Homo sapien
cctccgtccaatgagcgggccgctg

SEQ ID NO: 3827836 - DNA, 25 bp, Homo sapien
ctccgtccaatgagcgggccgctgg

SEQ ID NO: 3827837 - DNA, 25 bp, Homo sapien
ccctccctccgtccaatgagcgggc

SEQ ID NO: 3827838 - DNA, 25 bp, Homo sapien
gcgcgcagcctcggcacctccccct

SEQ ID NO: 3827839 - DNA, 25 bp, Homo sapien
cgcgcagcctcggcacctccccctt

SEQ ID NO: 3827840 - DNA, 25 bp, Homo sapien
gccgcggaacgccgctgccccctgc

SEQ ID NO: 3827841 - DNA, 25 bp, Homo sapien
gccaccgcccgagctcgagccatcg

SEQ ID NO: 3827842 - DNA, 25 bp, Homo sapien
gcccgagctcgagccatcgcggccg

SEQ ID NO: 3827843 - DNA, 25 bp, Homo sapien
accgcccgagctcgagccatcgcgg

SEQ ID NO: 3827844 - DNA, 25 bp, Homo sapien
agctcgagccatcgcggccgccttg

SEQ ID NO: 3827845 - DNA, 25 bp, Homo sapien
gggggccgcggccgctcgctcggat

SEQ ID NO: 3827846 - DNA, 25 bp, Homo sapien
cgggggccgcggccgctcgctcgga

SEQ ID NO: 3827847 - DNA, 25 bp, Homo sapien
gggccgcggccgctcgctcggatca

SEQ ID NO: 3827848 - DNA, 25 bp, Homo sapien
ggccgcggccgctcgctcggatcac

SEQ ID NO: 3827849 - DNA, 25 bp, Homo sapien
cagccacacggacgccaggctcagg

SEQ ID NO: 3827850 - DNA, 25 bp, Homo sapien
ggcacagccagcccgccagcagtct

SEQ ID NO: 3827851 - DNA, 25 bp, Homo sapien
ccacacggacgccaggctcaggcac

SEQ ID NO: 3827852 - DNA, 25 bp, Homo sapien
acagccagcccgccagcagtctcat

SEQ ID NO: 3827853 - DNA, 25 bp, Homo sapien
tgagcgggctccgcagcgtccacat

SEQ ID NO: 3827854 - DNA, 25 bp, Homo sapien
gggtgagcgggctccgcagcgtcca

SEQ ID NO: 3827855 - DNA, 25 bp, Homo sapien
cgggtgagcgggctccgcagcgtcc

SEQ ID NO: 3827856 - DNA, 25 bp, Homo sapien
agggagcgggtgagcgggctccgca

SEQ ID NO: 3827857 - DNA, 25 bp, Homo sapien
gccgcccgcggccgccgccggccca

SEQ ID NO: 3827858 - DNA, 25 bp, Homo sapien
ccggcccacccgggccgctagtcat

SEQ ID NO: 3827859 - DNA, 25 bp, Homo sapien
gccggcccacccgggccgctagtca

SEQ ID NO: 3827860 - DNA, 25 bp, Homo sapien
ctgccgcccgcggccgccgccggcc

SEQ ID NO: 3827861 - DNA, 25 bp, Homo sapien
cagcataggcgtaaatattcagacc

SEQ ID NO: 3827862 - DNA, 25 bp, Homo sapien
cacagcataggcgtaaatattcaga

SEQ ID NO: 3827863 - DNA, 25 bp, Homo sapien
ttaagcacagcataggcgtaaatat

SEQ ID NO: 3827864 - DNA, 25 bp, Homo sapien
tgcatttaagcacagcataggcgta

SEQ ID NO: 3827865 - DNA, 25 bp, Homo sapien
agatttagaaagctctgctggcctc

SEQ ID NO: 3827866 - DNA, 25 bp, Homo sapien
tcagaaggcaaacagctagcagcat

SEQ ID NO: 3827867 - DNA, 25 bp, Homo sapien
cccaaatagcaaagtaagcaacaga

SEQ ID NO: 3827868 - DNA, 25 bp, Homo sapien
gaaaacagtcacataatccaatgcc

SEQ ID NO: 3827869 - DNA, 25 bp, Homo sapien
aagacagcctggagtgattcgcata

SEQ ID NO: 3827870 - DNA, 25 bp, Homo sapien
caaggtaactctgaacaaagacagc

SEQ ID NO: 3827871 - DNA, 25 bp, Homo sapien
tggataaatagccagcccgatttct

SEQ ID NO: 3827872 - DNA, 25 bp, Homo sapien
gaagatctgtgttccttgatcaagg

SEQ ID NO: 3827873 - DNA, 25 bp, Homo sapien
tgtactgctgctctctggaaacaat

SEQ ID NO: 3827874 - DNA, 25 bp, Homo sapien
caggaagtggcagggaaacctgttc

SEQ ID NO: 3827875 - DNA, 25 bp, Homo sapien
caatcataaggtacagaatgtttgc

SEQ ID NO: 3827876 - DNA, 25 bp, Homo sapien
tcataaggtacagaatgtttgctgc

SEQ ID NO: 3827877 - DNA, 25 bp, Homo sapien
ctgttcgaatgaggttgggagccca

SEQ ID NO: 3827878 - DNA, 25 bp, Homo sapien
taagagagctgctgctgttcgaatg

SEQ ID NO: 3827879 - DNA, 25 bp, Homo sapien
gagctgtggccagcccacttctagg

SEQ ID NO: 3827880 - DNA, 25 bp, Homo sapien
agataacataagatcctaagagagc

SEQ ID NO: 3827881 - DNA, 25 bp, Homo sapien
ttaagagacactagagaaaagaggg

SEQ ID NO: 3827882 - DNA, 25 bp, Homo sapien
aaagtagattcgtacttatgtcagt

SEQ ID NO: 3827883 - DNA, 25 bp, Homo sapien
tccttgtgatgtcggttaatatgca

SEQ ID NO: 3827884 - DNA, 25 bp, Homo sapien
gtcctagaaaacactcaaaaccata

SEQ ID NO: 3827885 - DNA, 25 bp, Homo sapien
gtctttggagttgcaaataatgccc

SEQ ID NO: 3827886 - DNA, 25 bp, Homo sapien
tgtctttggagttgcaaataatgcc

SEQ ID NO: 3827887 - DNA, 25 bp, Homo sapien
gtctctgaaactgatctggtgaaaa

SEQ ID NO: 3827888 - DNA, 25 bp, Homo sapien
tgaaactgatctggtgaaaacacaa

SEQ ID NO: 3827889 - DNA, 25 bp, Homo sapien
actgatctggtgaaaacacaaacat

SEQ ID NO: 3827890 - DNA, 25 bp, Homo sapien
ttaattttaagcagtctctgaaact

SEQ ID NO: 3827891 - DNA, 25 bp, Homo sapien
gtttcctttacaagaactaatcatg

SEQ ID NO: 3827892 - DNA, 25 bp, Homo sapien
aatttagcatttcacctatttccaa

SEQ ID NO: 3827893 - DNA, 25 bp, Homo sapien
gagctaccacgactggcccatattt

SEQ ID NO: 3827894 - DNA, 25 bp, Homo sapien
ccaaatctcaacacatacgaagttt

SEQ ID NO: 3827895 - DNA, 25 bp, Homo sapien
cgttttccacatagggatgaaaggg

SEQ ID NO: 3827896 - DNA, 25 bp, Homo sapien
gatgacatcatactggaaccccgta

SEQ ID NO: 3827897 - DNA, 25 bp, Homo sapien
caaggatgaccctgcctctagttgg

SEQ ID NO: 3827898 - DNA, 25 bp, Homo sapien
gggctgatcacagcggtccagcaag

SEQ ID NO: 3827899 - DNA, 25 bp, Homo sapien
cagctatcctcagtaagagctagcc

SEQ ID NO: 3827900 - DNA, 25 bp, Homo sapien
caataaacagctatcctcagtaaga

SEQ ID NO: 3827901 - DNA, 25 bp, Homo sapien
taaacagctatcctcagtaagagct

SEQ ID NO: 3827902 - DNA, 25 bp, Homo sapien
tcctcagtaagagctagcctgactg

SEQ ID NO: 3827903 - DNA, 25 bp, Homo sapien
taatgtggcattaagtcagaatggc

SEQ ID NO: 3827904 - DNA, 25 bp, Homo sapien
aagtcacagtaactatgaagtgata

SEQ ID NO: 3827905 - DNA, 25 bp, Homo sapien
tgaagtgatatgaaatcaacccgtt

SEQ ID NO: 3827906 - DNA, 25 bp, Homo sapien
gatatgaaatcaacccgtttcttct

SEQ ID NO: 3827907 - DNA, 25 bp, Homo sapien
gacaagcattaaatctgaaggcact

SEQ ID NO: 3827908 - DNA, 25 bp, Homo sapien
tattaagacaagcattaaatctgaa

SEQ ID NO: 3827909 - DNA, 25 bp, Homo sapien
ccatttggtaaatattaagacaagc

SEQ ID NO: 3827910 - DNA, 25 bp, Homo sapien
gcattaaatctgaaggcactaagat

SEQ ID NO: 3827911 - DNA, 25 bp, Homo sapien
caataatagagtgccgtggcgcgcc

SEQ ID NO: 3827912 - DNA, 25 bp, Homo sapien
tcaggtctgcagtgtgtcacatgcc

SEQ ID NO: 3827913 - DNA, 25 bp, Homo sapien
taaagttctatcatgcggttgccca

SEQ ID NO: 3827914 - DNA, 25 bp, Homo sapien
taaaagtcacccatagcaacaaggc

SEQ ID NO: 3827915 - DNA, 25 bp, Homo sapien
tgtgtaactaccagcttggagaaga

SEQ ID NO: 3827916 - DNA, 25 bp, Homo sapien
gcaaattgctatctagagacctcct

SEQ ID NO: 3827917 - DNA, 25 bp, Homo sapien
aagttatacatctagtggtgtgctg

SEQ ID NO: 3827918 - DNA, 25 bp, Homo sapien
gagacctcctctagtaaagttatac

SEQ ID NO: 3827919 - DNA, 25 bp, Homo sapien
tccgggtgtgtacgggctcagcagg

SEQ ID NO: 3827920 - DNA, 25 bp, Homo sapien
actggctctctgctcgcggggaagt

SEQ ID NO: 3827921 - DNA, 25 bp, Homo sapien
agcgcacgcgggccagcacaggttc

SEQ ID NO: 3827922 - DNA, 25 bp, Homo sapien
tgggcttaatcaggggacaagctcc

SEQ ID NO: 3827923 - DNA, 25 bp, Homo sapien
gattagtttgggatgtacagtcatt

SEQ ID NO: 3827924 - DNA, 25 bp, Homo sapien
tgctacactatacaatcaaaggcct

SEQ ID NO: 3827925 - DNA, 25 bp, Homo sapien
tttcaggcgccaacactatttactg

SEQ ID NO: 3827926 - DNA, 25 bp, Homo sapien
tatcctcgggtcatactgaacttgc

SEQ ID NO: 3827927 - DNA, 25 bp, Homo sapien
gggtaacgcacatttgcctgccagg

SEQ ID NO: 3827928 - DNA, 25 bp, Homo sapien
ggtaaactgaaaagacaactggcta

SEQ ID NO: 3827929 - DNA, 25 bp, Homo sapien
gatctgaagccaaaccatgtgcctc

SEQ ID NO: 3827930 - DNA, 25 bp, Homo sapien
cctgccagggtatgcaaagtaactt

SEQ ID NO: 3827931 - DNA, 25 bp, Homo sapien
tgtatgtgctgccaaagcaagcgct

SEQ ID NO: 3827932 - DNA, 25 bp, Homo sapien
gaacgcttcacgaacttgtgtgtca

SEQ ID NO: 3827933 - DNA, 25 bp, Homo sapien
ttctctatattgttccaattttagt

SEQ ID NO: 3827934 - DNA, 25 bp, Homo sapien
tccttgcccaggggccatgctaatc

SEQ ID NO: 3827935 - DNA, 25 bp, Homo sapien
tgtaagtgctgccaaagcgagcaca

SEQ ID NO: 3827936 - DNA, 25 bp, Homo sapien
tttagtgtaagtgctgccaaagcga

SEQ ID NO: 3827937 - DNA, 25 bp, Homo sapien
attttagtgtaagtgctgccaaagc

SEQ ID NO: 3827938 - DNA, 25 bp, Homo sapien
tagtgtaagtgctgccaaagcgagc

SEQ ID NO: 3827939 - DNA, 25 bp, Homo sapien
ttttgggaccggtggcaatagagca

SEQ ID NO: 3827940 - DNA, 25 bp, Homo sapien
agtgctcggcgtatttttcaggaaa

SEQ ID NO: 3827941 - DNA, 25 bp, Homo sapien
tctttatagaagaagagtgctcggc

SEQ ID NO: 3827942 - DNA, 25 bp, Homo sapien
tcaaggtaactttcaactgcagaca

SEQ ID NO: 3827943 - DNA, 25 bp, Homo sapien
gagatatgaaattccaaagttacaa

SEQ ID NO: 3827944 - DNA, 25 bp, Homo sapien
ttgaaagtcagctatccccgccacc

SEQ ID NO: 3827945 - DNA, 25 bp, Homo sapien
acctgtttttatcctatactactag

SEQ ID NO: 3827946 - DNA, 25 bp, Homo sapien
tagagatatgaaattccaaagttac

SEQ ID NO: 3827947 - DNA, 25 bp, Homo sapien
cacacaatttggattatagggcagg

SEQ ID NO: 3827948 - DNA, 25 bp, Homo sapien
gactgcgagcagaagcaacatcgct

SEQ ID NO: 3827949 - DNA, 25 bp, Homo sapien
tggagacaatctgaccaaagggttg

SEQ ID NO: 3827950 - DNA, 25 bp, Homo sapien
aaaaactgccatgactccaatagcc

SEQ ID NO: 3827951 - DNA, 25 bp, Homo sapien
tactgaatcaccactaagtgctggg

SEQ ID NO: 3827952 - DNA, 25 bp, Homo sapien
ggaggagccatatctaccaaggact

SEQ ID NO: 3827953 - DNA, 25 bp, Homo sapien
cagtggtgcagatgacgctcttccc

SEQ ID NO: 3827954 - DNA, 25 bp, Homo sapien
tccaaacctatgagcaggagatgcc

SEQ ID NO: 3827955 - DNA, 25 bp, Homo sapien
gtgaaagcttcgataacaaaaccag

SEQ ID NO: 3827956 - DNA, 25 bp, Homo sapien
caaagacagcgtcatccagaacgta

SEQ ID NO: 3827957 - DNA, 25 bp, Homo sapien
agtcattatacatgtcgccttcaca

SEQ ID NO: 3827958 - DNA, 25 bp, Homo sapien
acaggtatggtagtctggtgaaagc

SEQ ID NO: 3827959 - DNA, 25 bp, Homo sapien
agggtcctcccttcacgtaattgtg

SEQ ID NO: 3827960 - DNA, 25 bp, Homo sapien
gggtgcggactctgaagacttcgac

SEQ ID NO: 3827961 - DNA, 25 bp, Homo sapien
catgatatttagaatggcggtcccc

SEQ ID NO: 3827962 - DNA, 25 bp, Homo sapien
catcataattggagtgtgacctgca

SEQ ID NO: 3827963 - DNA, 25 bp, Homo sapien
cagtggctataccttaaaaccagta

SEQ ID NO: 3827964 - DNA, 25 bp, Homo sapien
taataacagaaagaatttctaaaca

SEQ ID NO: 3827965 - DNA, 25 bp, Homo sapien
catgaaagaatatcagtggctatac

SEQ ID NO: 3827966 - DNA, 25 bp, Homo sapien
gaatatcagtggctataccttaaaa

SEQ ID NO: 3827967 - DNA, 25 bp, Homo sapien
tcaagacccgataggaaatgtgagt

SEQ ID NO: 3827968 - DNA, 25 bp, Homo sapien
tactatttgggtactcctgaagcca

SEQ ID NO: 3827969 - DNA, 25 bp, Homo sapien
tatggttggaggcactcacggattc

SEQ ID NO: 3827970 - DNA, 25 bp, Homo sapien
catctagtggaatggtgacacacca

SEQ ID NO: 3827971 - DNA, 25 bp, Homo sapien
caaggcagctttattgtactttggg

SEQ ID NO: 3827972 - DNA, 25 bp, Homo sapien
gggaaaaaagccattgacactcagt

SEQ ID NO: 3827973 - DNA, 25 bp, Homo sapien
aaaagccattgacactcagtaagca

SEQ ID NO: 3827974 - DNA, 25 bp, Homo sapien
cattgacactcagtaagcaacactg

SEQ ID NO: 3827975 - DNA, 25 bp, Homo sapien
cactttaggagcttaaaatgcaggt

SEQ ID NO: 3827976 - DNA, 25 bp, Homo sapien
acaagggataaatgactaagggcac

SEQ ID NO: 3827977 - DNA, 25 bp, Homo sapien
taagggcactgtacctcctttcctc

SEQ ID NO: 3827978 - DNA, 25 bp, Homo sapien
taaaagccaaccatgtaaaaactga

SEQ ID NO: 3827979 - DNA, 25 bp, Homo sapien
ttttagcagattggtcaaaaggact

SEQ ID NO: 3827980 - DNA, 25 bp, Homo sapien
gatttggaggtcgatagctttctct

SEQ ID NO: 3827981 - DNA, 25 bp, Homo sapien
ctttttccagcgagaaactgcagcc

SEQ ID NO: 3827982 - DNA, 25 bp, Homo sapien
gatctggttttcattaaaggcactt

SEQ ID NO: 3827983 - DNA, 25 bp, Homo sapien
gagtatgtcgtaggttcctgagaca

SEQ ID NO: 3827984 - DNA, 25 bp, Homo sapien
tataactcgacactccatggctcag

SEQ ID NO: 3827985 - DNA, 25 bp, Homo sapien
aaagggagtatgtcgtaggttcctg

SEQ ID NO: 3827986 - DNA, 25 bp, Homo sapien
ctggaatttggcactgtataactcg

SEQ ID NO: 3827987 - DNA, 25 bp, Homo sapien
gccatgttttgcaacaatggatgca

SEQ ID NO: 3827988 - DNA, 25 bp, Homo sapien
atgttttgcaacaatggatgcaaat

SEQ ID NO: 3827989 - DNA, 25 bp, Homo sapien
ccatgttttgcaacaatggatgcaa

SEQ ID NO: 3827990 - DNA, 25 bp, Homo sapien
cgccatgttttgcaacaatggatgc

SEQ ID NO: 3827991 - DNA, 25 bp, Homo sapien
agatagcttccatctattatttctt

SEQ ID NO: 3827992 - DNA, 25 bp, Homo sapien
ttcagatagcttccatctattattt

SEQ ID NO: 3827993 - DNA, 25 bp, Homo sapien
cattcagatagcttccatctattat

SEQ ID NO: 3827994 - DNA, 25 bp, Homo sapien
tcagatagcttccatctattatttc

SEQ ID NO: 3827995 - DNA, 25 bp, Homo sapien
ctttgaaactgtatgagatccagca

SEQ ID NO: 3827996 - DNA, 25 bp, Homo sapien
ttgaaactgtatgagatccagcagt

SEQ ID NO: 3827997 - DNA, 25 bp, Homo sapien
tttgaaactgtatgagatccagcag

SEQ ID NO: 3827998 - DNA, 25 bp, Homo sapien
tgaaactgtatgagatccagcagtg

SEQ ID NO: 3827999 - DNA, 25 bp, Homo sapien
gatggtgaaggcaacattccgggaa

SEQ ID NO: 3828000 - DNA, 25 bp, Homo sapien
aacattccgggaattcagataggcc

SEQ ID NO: 3828001 - DNA, 25 bp, Homo sapien
ccaggactctgtgggacaggtcatc

SEQ ID NO: 3828002 - DNA, 25 bp, Homo sapien
ctctgtgggacaggtcatccgtcca

SEQ ID NO: 3828003 - DNA, 25 bp, Homo sapien
tggcactgtgcccaaacccaagcta

SEQ ID NO: 3828004 - DNA, 25 bp, Homo sapien
gtccctgtaggtgattgagtttccc

SEQ ID NO: 3828005 - DNA, 25 bp, Homo sapien
aggtgattgagtttcccatcagcag

SEQ ID NO: 3828006 - DNA, 25 bp, Homo sapien
tccaggaagtttagaaccccagatg

SEQ ID NO: 3828007 - DNA, 25 bp, Homo sapien
agaaagagcaggagcacatggtcag

SEQ ID NO: 3828008 - DNA, 25 bp, Homo sapien
gagcaggagcacatggtcagcacca

SEQ ID NO: 3828009 - DNA, 25 bp, Homo sapien
aagagcaggagcacatggtcagcac

SEQ ID NO: 3828010 - DNA, 25 bp, Homo sapien
aaagagcaggagcacatggtcagca

SEQ ID NO: 3828011 - DNA, 25 bp, Homo sapien
tgctgggcgtctgtcttcctcaggt

SEQ ID NO: 3828012 - DNA, 25 bp, Homo sapien
tttcatggcagtgcggaactgctgg

SEQ ID NO: 3828013 - DNA, 25 bp, Homo sapien
tgggcgtctgtcttcctcaggtcct

SEQ ID NO: 3828014 - DNA, 25 bp, Homo sapien
gtgcagacgctgctccaggtggttt

SEQ ID NO: 3828015 - DNA, 25 bp, Homo sapien
ggctcgttctcgaatctctcctaag

SEQ ID NO: 3828016 - DNA, 25 bp, Homo sapien
ctctcctaagtcgatgatgatgtct

SEQ ID NO: 3828017 - DNA, 25 bp, Homo sapien
tcttaaaggcatcctcgcgcaggtc

SEQ ID NO: 3828018 - DNA, 25 bp, Homo sapien
cggttcacgccagggctctgcaagg

SEQ ID NO: 3828019 - DNA, 25 bp, Homo sapien
ccagtcatccaggaatagagagctc

SEQ ID NO: 3828020 - DNA, 25 bp, Homo sapien
gtctgcagtattccagtcatccagg

SEQ ID NO: 3828021 - DNA, 25 bp, Homo sapien
cgtagagatctttgaacactgcaga

SEQ ID NO: 3828022 - DNA, 25 bp, Homo sapien
ctctgggaatgagccgaggttttgt

SEQ ID NO: 3828023 - DNA, 25 bp, Homo sapien
acgataggtgaaccatgtatctgcc

SEQ ID NO: 3828024 - DNA, 25 bp, Homo sapien
tgtatctgcccaaaacccataagtg

SEQ ID NO: 3828025 - DNA, 25 bp, Homo sapien
taatttcttcaaacgataggtgaac

SEQ ID NO: 3828026 - DNA, 25 bp, Homo sapien
tgttccgcactgacccatgaagcag

SEQ ID NO: 3828027 - DNA, 25 bp, Homo sapien
gtccagctgcttggtggcgttgtca

SEQ ID NO: 3828028 - DNA, 25 bp, Homo sapien
tggcgttgtcatagctgataaacag

SEQ ID NO: 3828029 - DNA, 25 bp, Homo sapien
ccagctgcttggtggcgttgtcata

SEQ ID NO: 3828030 - DNA, 25 bp, Homo sapien
cttggtggcgttgtcatagctgata

SEQ ID NO: 3828031 - DNA, 25 bp, Homo sapien
gaggtattcctcatgttaaagttgg

SEQ ID NO: 3828032 - DNA, 25 bp, Homo sapien
tgtggatggtggaggtattcctcat

SEQ ID NO: 3828033 - DNA, 25 bp, Homo sapien
tcctctccagaaacgcctgggccag

SEQ ID NO: 3828034 - DNA, 25 bp, Homo sapien
taaagttggaggagctgatcctctc

SEQ ID NO: 3828035 - DNA, 25 bp, Homo sapien
tcttgggaaagggctccaaggccca

SEQ ID NO: 3828036 - DNA, 25 bp, Homo sapien
ctccaaggcccagagctcatgcgct

SEQ ID NO: 3828037 - DNA, 25 bp, Homo sapien
caaggcccagagctcatgcgcttgc

SEQ ID NO: 3828038 - DNA, 25 bp, Homo sapien
ggctccaaggcccagagctcatgcg

SEQ ID NO: 3828039 - DNA, 25 bp, Homo sapien
ctgacacccctggaatgtagagttc

SEQ ID NO: 3828040 - DNA, 25 bp, Homo sapien
gacacccctggaatgtagagttcct

SEQ ID NO: 3828041 - DNA, 25 bp, Homo sapien
cccctggaatgtagagttcctgtcc

SEQ ID NO: 3828042 - DNA, 25 bp, Homo sapien
tcctgacacccctggaatgtagagt

SEQ ID NO: 3828043 - DNA, 25 bp, Homo sapien
ctctctgagcctctaataaatggga

SEQ ID NO: 3828044 - DNA, 25 bp, Homo sapien
tgagcctctaataaatgggaggttt

SEQ ID NO: 3828045 - DNA, 25 bp, Homo sapien
tacagagacagggtgcctctccctc

SEQ ID NO: 3828046 - DNA, 25 bp, Homo sapien
gtacagagacagggtgcctctccct

SEQ ID NO: 3828047 - DNA, 25 bp, Homo sapien
gaacctaactgctcagacgagacca

SEQ ID NO: 3828048 - DNA, 25 bp, Homo sapien
aaccacaggcggaacctaactgctc

SEQ ID NO: 3828049 - DNA, 25 bp, Homo sapien
caaatgtgcaaccacaggcggaacc

SEQ ID NO: 3828050 - DNA, 25 bp, Homo sapien
ggcggaacctaactgctcagacgag

SEQ ID NO: 3828051 - DNA, 25 bp, Homo sapien
tttttcagttgccacggactcccag

SEQ ID NO: 3828052 - DNA, 25 bp, Homo sapien
taaccgcagaaccagcccattctgg

SEQ ID NO: 3828053 - DNA, 25 bp, Homo sapien
cagttgccacggactcccaggttga

SEQ ID NO: 3828054 - DNA, 25 bp, Homo sapien
tggtggaggtgtaaccgcagaacca

SEQ ID NO: 3828055 - DNA, 25 bp, Homo sapien
gcaattccaggtcattgtagaaaca

SEQ ID NO: 3828056 - DNA, 25 bp, Homo sapien
ctcaggtggctgcacttgatcatct

SEQ ID NO: 3828057 - DNA, 25 bp, Homo sapien
cagcaattccaggtcattgtagaaa

SEQ ID NO: 3828058 - DNA, 25 bp, Homo sapien
ggctgcacttgatcatctggtaaag

SEQ ID NO: 3828059 - DNA, 25 bp, Homo sapien
gattccagttggctgtaggtcaaac

SEQ ID NO: 3828060 - DNA, 25 bp, Homo sapien
gcatccgacaaagaacccagggtct

SEQ ID NO: 3828061 - DNA, 25 bp, Homo sapien
aaacctacaactgcatccgacaaag

SEQ ID NO: 3828062 - DNA, 25 bp, Homo sapien
tctcatgggccaagtatttggcaga

SEQ ID NO: 3828063 - DNA, 25 bp, Homo sapien
gatgtccttgcgtttcatgctgcag

SEQ ID NO: 3828064 - DNA, 25 bp, Homo sapien
tgggagacggcacttctcaggacct

SEQ ID NO: 3828065 - DNA, 25 bp, Homo sapien
tcaggacctgcgagatgtccttgcg

SEQ ID NO: 3828066 - DNA, 25 bp, Homo sapien
tgggcaggtgacaagtcggatacat

SEQ ID NO: 3828067 - DNA, 25 bp, Homo sapien
tgacatgtggctgagcaccagacat

SEQ ID NO: 3828068 - DNA, 25 bp, Homo sapien
tggctgagcaccagacatcttcctc

SEQ ID NO: 3828069 - DNA, 25 bp, Homo sapien
acatgtggctgagcaccagacatct

SEQ ID NO: 3828070 - DNA, 25 bp, Homo sapien
cccctgtgacatgtggctgagcacc

SEQ ID NO: 3828071 - DNA, 25 bp, Homo sapien
tccaggttgcctccttaaatcaaag

SEQ ID NO: 3828072 - DNA, 25 bp, Homo sapien
gggcagtgtcttccgcttggaccat

SEQ ID NO: 3828073 - DNA, 25 bp, Homo sapien
tcaggactgtagagttgaatccagg

SEQ ID NO: 3828074 - DNA, 25 bp, Homo sapien
gaaagccccttgtatctccacgatg

SEQ ID NO: 3828075 - DNA, 25 bp, Homo sapien
tctggtggtctttaacagaagctca

SEQ ID NO: 3828076 - DNA, 25 bp, Homo sapien
caggccttctggtggtctttaacag

SEQ ID NO: 3828077 - DNA, 25 bp, Homo sapien
tcctcaggccttctggtggtcttta

SEQ ID NO: 3828078 - DNA, 25 bp, Homo sapien
tggtctttaacagaagctcatacag

SEQ ID NO: 3828079 - DNA, 25 bp, Homo sapien
agatgtgactgcctaactctcccac

SEQ ID NO: 3828080 - DNA, 25 bp, Homo sapien
gcacccaggccgagttacattttcc

SEQ ID NO: 3828081 - DNA, 25 bp, Homo sapien
gcagatatgatcagatacaagctac

SEQ ID NO: 3828082 - DNA, 25 bp, Homo sapien
aacaaaacaaggcactcgggagagg

SEQ ID NO: 3828083 - DNA, 25 bp, Homo sapien
tcatggcatcaatgtgtgagcaggt

SEQ ID NO: 3828084 - DNA, 25 bp, Homo sapien
tgctcatggcatcaatgtgtgagca

SEQ ID NO: 3828085 - DNA, 25 bp, Homo sapien
agtgctcatggcatcaatgtgtgag

SEQ ID NO: 3828086 - DNA, 25 bp, Homo sapien
cagtgctcatggcatcaatgtgtga

SEQ ID NO: 3828087 - DNA, 25 bp, Homo sapien
tagggtgaaagcagggcgaagttgt

SEQ ID NO: 3828088 - DNA, 25 bp, Homo sapien
tgaaagcagggcgaagttgttctga

SEQ ID NO: 3828089 - DNA, 25 bp, Homo sapien
ctgatagggtgaaagcagggcgaag

SEQ ID NO: 3828090 - DNA, 25 bp, Homo sapien
gcagggcgaagttgttctgaaaatc

SEQ ID NO: 3828091 - DNA, 25 bp, Homo sapien
gattctggcataaagatctttagat

SEQ ID NO: 3828092 - DNA, 25 bp, Homo sapien
attctggcataaagatctttagatg

SEQ ID NO: 3828093 - DNA, 25 bp, Homo sapien
ttctggcataaagatctttagatgc

SEQ ID NO: 3828094 - DNA, 25 bp, Homo sapien
attgacattttcgaccaggtacctc

SEQ ID NO: 3828095 - DNA, 25 bp, Homo sapien
cctctgtgtagtggtgctgtcctac

SEQ ID NO: 3828096 - DNA, 25 bp, Homo sapien
gtattattgacattttcgaccaggt

SEQ ID NO: 3828097 - DNA, 25 bp, Homo sapien
agtggtgctgtcctacgcattgtag

SEQ ID NO: 3828098 - DNA, 25 bp, Homo sapien
ggtggcatagacaatctggaaactt

SEQ ID NO: 3828099 - DNA, 25 bp, Homo sapien
ttcccagtatttccacgccaaacaa

SEQ ID NO: 3828100 - DNA, 25 bp, Homo sapien
aagaggaaaggtggcatagacaatc

SEQ ID NO: 3828101 - DNA, 25 bp, Homo sapien
ccagtatttccacgccaaacaatta

SEQ ID NO: 3828102 - DNA, 25 bp, Homo sapien
ccaggctgatcagaaagggcacaca

SEQ ID NO: 3828103 - DNA, 25 bp, Homo sapien
caggctgatcagaaagggcacacac

SEQ ID NO: 3828104 - DNA, 25 bp, Homo sapien
ctcttccccaggctgatcagaaagg

SEQ ID NO: 3828105 - DNA, 25 bp, Homo sapien
gctgatcagaaagggcacacactgg

SEQ ID NO: 3828106 - DNA, 25 bp, Homo sapien
cacagtgtactcatcagcaatggag

SEQ ID NO: 3828107 - DNA, 25 bp, Homo sapien
tgccggcaagtgacacagcaggttc

SEQ ID NO: 3828108 - DNA, 25 bp, Homo sapien
ggttccccatgatgtccacagtgta

SEQ ID NO: 3828109 - DNA, 25 bp, Homo sapien
cctgtcgatgatggctgccggcaag

SEQ ID NO: 3828110 - DNA, 25 bp, Homo sapien
catactgtcccaggagcttgagcct

SEQ ID NO: 3828111 - DNA, 25 bp, Homo sapien
actgtcccaggagcttgagcctcac

SEQ ID NO: 3828112 - DNA, 25 bp, Homo sapien
ccatactgtcccaggagcttgagcc

SEQ ID NO: 3828113 - DNA, 25 bp, Homo sapien
tactgtcccaggagcttgagcctca

SEQ ID NO: 3828114 - DNA, 25 bp, Homo sapien
aagtccttcgtggtctcggctgtcc

SEQ ID NO: 3828115 - DNA, 25 bp, Homo sapien
tcccaagtccttcgtggtctcggct

SEQ ID NO: 3828116 - DNA, 25 bp, Homo sapien
gtcccaagtccttcgtggtctcggc

SEQ ID NO: 3828117 - DNA, 25 bp, Homo sapien
ccaagtccttcgtggtctcggctgt

SEQ ID NO: 3828118 - DNA, 25 bp, Homo sapien
gaagctgcttgcagaaggatctcag

SEQ ID NO: 3828119 - DNA, 25 bp, Homo sapien
gctgcttgcagaaggatctcaggaa

SEQ ID NO: 3828120 - DNA, 25 bp, Homo sapien
ctgcttgcagaaggatctcaggaaa

SEQ ID NO: 3828121 - DNA, 25 bp, Homo sapien
cttggaagctgcttgcagaaggatc

SEQ ID NO: 3828122 - DNA, 25 bp, Homo sapien
gctggggatcttatcactgctgttc

SEQ ID NO: 3828123 - DNA, 25 bp, Homo sapien
gatcttatcactgctgttccgaaca

SEQ ID NO: 3828124 - DNA, 25 bp, Homo sapien
tccgaacagactgaaagacagccca

SEQ ID NO: 3828125 - DNA, 25 bp, Homo sapien
tgttccgaacagactgaaagacagc

SEQ ID NO: 3828126 - DNA, 25 bp, Homo sapien
tgtcatcagaagagggggccacgac

SEQ ID NO: 3828127 - DNA, 25 bp, Homo sapien
tcccagcagttccacggtcctgatg

SEQ ID NO: 3828128 - DNA, 25 bp, Homo sapien
caggcgttggcttcggccaacttga

SEQ ID NO: 3828129 - DNA, 25 bp, Homo sapien
tgaggccggctgaaaccctggacag

SEQ ID NO: 3828130 - DNA, 25 bp, Homo sapien
tcattaagagccagagcaatgcgcc

SEQ ID NO: 3828131 - DNA, 25 bp, Homo sapien
cacagtgtctatggagctgaggtcc

SEQ ID NO: 3828132 - DNA, 25 bp, Homo sapien
gcaatgcgccccagggagacgatat

SEQ ID NO: 3828133 - DNA, 25 bp, Homo sapien
tctctccagtaagatggcatgtccc

SEQ ID NO: 3828134 - DNA, 25 bp, Homo sapien
taagcagggtgtgatgatgcatgcc

SEQ ID NO: 3828135 - DNA, 25 bp, Homo sapien
ccttgagtgacgagaccagtgtata

SEQ ID NO: 3828136 - DNA, 25 bp, Homo sapien
aatgatcgttctggccaggcgccgt

SEQ ID NO: 3828137 - DNA, 25 bp, Homo sapien
ccttcatgtaatagactggcttcag

SEQ ID NO: 3828138 - DNA, 25 bp, Homo sapien
ttttgtctgtatcaccaagtaggct

SEQ ID NO: 3828139 - DNA, 25 bp, Homo sapien
aaagaaaaggaccatatccaggtag

SEQ ID NO: 3828140 - DNA, 25 bp, Homo sapien
gtagtttaccaatgagtccccagca

SEQ ID NO: 3828141 - DNA, 25 bp, Homo sapien
ttgtctgtatcaccaagtaggctcc

SEQ ID NO: 3828142 - DNA, 25 bp, Homo sapien
caggtacccttgcaaaatggattca

SEQ ID NO: 3828143 - DNA, 25 bp, Homo sapien
ggatactgtatcctgaatcatccag

SEQ ID NO: 3828144 - DNA, 25 bp, Homo sapien
atctttataagtgggatttcagtga

SEQ ID NO: 3828145 - DNA, 25 bp, Homo sapien
ggttgcaccaagtcctaccaaatga

SEQ ID NO: 3828146 - DNA, 25 bp, Homo sapien
gccttcctcttaaactcggctaaga

SEQ ID NO: 3828147 - DNA, 25 bp, Homo sapien
aatggtcccaagctcctgcaagaca

SEQ ID NO: 3828148 - DNA, 25 bp, Homo sapien
gacagaactggtccactcagtggga

SEQ ID NO: 3828149 - DNA, 25 bp, Homo sapien
ttaaactcggctaagacatgtgtgc

SEQ ID NO: 3828150 - DNA, 25 bp, Homo sapien
tcaagcatccggagctctgccttag

SEQ ID NO: 3828151 - DNA, 25 bp, Homo sapien
caaatccttgtcaagcatccggagc

SEQ ID NO: 3828152 - DNA, 25 bp, Homo sapien
ggctggaaatatggcatcaaatcct

SEQ ID NO: 3828153 - DNA, 25 bp, Homo sapien
cggagctctgccttagttaatccag

SEQ ID NO: 3828154 - DNA, 25 bp, Homo sapien
tccctgtgtgatttgaaatggggtc

SEQ ID NO: 3828155 - DNA, 25 bp, Homo sapien
ttccctgtgtgatttgaaatggggt

SEQ ID NO: 3828156 - DNA, 25 bp, Homo sapien
gaggcgatctgctccgcggacagct

SEQ ID NO: 3828157 - DNA, 25 bp, Homo sapien
tgaggttctagtgggaccggcgcta

SEQ ID NO: 3828158 - DNA, 25 bp, Homo sapien
gctgcagtggactgagccgccggcg

SEQ ID NO: 3828159 - DNA, 25 bp, Homo sapien
tggcgccatctagcgcctgctggag

SEQ ID NO: 3828160 - DNA, 25 bp, Homo sapien
aaatacaaaataagagtacacatga

SEQ ID NO: 3828161 - DNA, 25 bp, Homo sapien
acaaaataagagtacacatgaagtt

SEQ ID NO: 3828162 - DNA, 25 bp, Homo sapien
agcaaatacaaaataagagtacaca

SEQ ID NO: 3828163 - DNA, 25 bp, Homo sapien
atacaaaataagagtacacatgaag

SEQ ID NO: 3828164 - DNA, 25 bp, Homo sapien
gagcttggccattagaaccagcagg

SEQ ID NO: 3828165 - DNA, 25 bp, Homo sapien
caggagcttggccattagaaccagc

SEQ ID NO: 3828166 - DNA, 25 bp, Homo sapien
gccaaagaccccacgactggagagc

SEQ ID NO: 3828167 - DNA, 25 bp, Homo sapien
cacaggagcttggccattagaacca

SEQ ID NO: 3828168 - DNA, 25 bp, Homo sapien
cttggggcaacacaggacgatgcgc

SEQ ID NO: 3828169 - DNA, 25 bp, Homo sapien
tggggcaacacaggacgatgcgctc

SEQ ID NO: 3828170 - DNA, 25 bp, Homo sapien
tgcttggggcaacacaggacgatgc

SEQ ID NO: 3828171 - DNA, 25 bp, Homo sapien
ggcaacacaggacgatgcgctcagg

SEQ ID NO: 3828172 - DNA, 25 bp, Homo sapien
tgagggcagcaacttgattgtaagg

SEQ ID NO: 3828173 - DNA, 25 bp, Homo sapien
tcttgcactgcctctctctggtatc

SEQ ID NO: 3828174 - DNA, 25 bp, Homo sapien
tgctgttaacagaaaacacccttcc

SEQ ID NO: 3828175 - DNA, 25 bp, Homo sapien
caacttgattgtaagggtctcgtgc

SEQ ID NO: 3828176 - DNA, 25 bp, Homo sapien
tcaggagagctgacattgaaaggtg

SEQ ID NO: 3828177 - DNA, 25 bp, Homo sapien
atcaggagagctgacattgaaaggt

SEQ ID NO: 3828178 - DNA, 25 bp, Homo sapien
catcaggagagctgacattgaaagg

SEQ ID NO: 3828179 - DNA, 25 bp, Homo sapien
ccatcaggagagctgacattgaaag

SEQ ID NO: 3828180 - DNA, 25 bp, Homo sapien
gaagcaaaagatcctagagggagag

SEQ ID NO: 3828181 - DNA, 25 bp, Homo sapien
tggttgatctgaatatgtaaagttc

SEQ ID NO: 3828182 - DNA, 25 bp, Homo sapien
taaagttcagccttcaaacccagca

SEQ ID NO: 3828183 - DNA, 25 bp, Homo sapien
gctataggatagagttcaggtgctg

SEQ ID NO: 3828184 - DNA, 25 bp, Homo sapien
tggctgctacgttgggaaccctggt

SEQ ID NO: 3828185 - DNA, 25 bp, Homo sapien
caccgtgaccggctgagattgagtt

SEQ ID NO: 3828186 - DNA, 25 bp, Homo sapien
tgaccggctgagattgagttagtac

SEQ ID NO: 3828187 - DNA, 25 bp, Homo sapien
agcgatctacccgtctccacctcgc

SEQ ID NO: 3828188 - DNA, 25 bp, Homo sapien
ccgtgaccggctgagattgagttag

SEQ ID NO: 3828189 - DNA, 25 bp, Homo sapien
gagctcattcctcctaactgggtaa

SEQ ID NO: 3828190 - DNA, 25 bp, Homo sapien
cgcgtcgaggactgggtaagattca

SEQ ID NO: 3828191 - DNA, 25 bp, Homo sapien
tatcagccgaacgttgtcactcatg

SEQ ID NO: 3828192 - DNA, 25 bp, Homo sapien
ttctgcgcgtctgggaccaaagctc

SEQ ID NO: 3828193 - DNA, 25 bp, Homo sapien
ggcttcaaggtatcctcctgcctca

SEQ ID NO: 3828194 - DNA, 25 bp, Homo sapien
taaaagtgttatttgtagagacgga

SEQ ID NO: 3828195 - DNA, 25 bp, Homo sapien
ctggtctcaaactcctggcttcaag

SEQ ID NO: 3828196 - DNA, 25 bp, Homo sapien
acggagtctggctgtgttgcctggg

SEQ ID NO: 3828197 - DNA, 25 bp, Homo sapien
caccacatcccgctactttttatag

SEQ ID NO: 3828198 - DNA, 25 bp, Homo sapien
gagctggaccttggctcagtccaac

SEQ ID NO: 3828199 - DNA, 25 bp, Homo sapien
aactaccatagaggacataaagatg

SEQ ID NO: 3828200 - DNA, 25 bp, Homo sapien
tctactaagtgccaactaccataga

SEQ ID NO: 3828201 - DNA, 25 bp, Homo sapien
gaaccatcatcacccgaacccaaga

SEQ ID NO: 3828202 - DNA, 25 bp, Homo sapien
gcggagggccgctgacgtggaacca

SEQ ID NO: 3828203 - DNA, 25 bp, Homo sapien
gaggcggagggtcggtgatgtggaa

SEQ ID NO: 3828204 - DNA, 25 bp, Homo sapien
ggccgctgacgtggaaccatcatca

SEQ ID NO: 3828205 - DNA, 25 bp, Homo sapien
ttccgagcgtcagctcactcccctt

SEQ ID NO: 3828206 - DNA, 25 bp, Homo sapien
cttccgagcgtcagctcactcccct

SEQ ID NO: 3828207 - DNA, 25 bp, Homo sapien
cttccgagcgtcagctcactcccct

SEQ ID NO: 3828208 - DNA, 25 bp, Homo sapien
tgcggggagcgtctgcgggggccgc

SEQ ID NO: 3828209 - DNA, 25 bp, Homo sapien
ttccgagcgtcagctcactcccctt

SEQ ID NO: 3828210 - DNA, 25 bp, Homo sapien
gcgtctgcggattccgcttccacca

SEQ ID NO: 3828211 - DNA, 25 bp, Homo sapien
agcgtctgcggattccgcttccacc

SEQ ID NO: 3828212 - DNA, 25 bp, Homo sapien
tgctgagcgtctgcggattccgctt

SEQ ID NO: 3828213 - DNA, 25 bp, Homo sapien
ctgctgagcgtctgcggattccgct

SEQ ID NO: 3828214 - DNA, 25 bp, Homo sapien
acacgtgccgagtgtctgctccatc

SEQ ID NO: 3828215 - DNA, 25 bp, Homo sapien
aagacacgtgccgagtgtctgctcc

SEQ ID NO: 3828216 - DNA, 25 bp, Homo sapien
aagacaccttccgagcgtcagctca

SEQ ID NO: 3828217 - DNA, 25 bp, Homo sapien
ttccgagcgtcagctcactcccctt

SEQ ID NO: 3828218 - DNA, 25 bp, Homo sapien
gataactccctgagcctcaagacac

SEQ ID NO: 3828219 - DNA, 25 bp, Homo sapien
tgataactccctgagcctcaagaca

SEQ ID NO: 3828220 - DNA, 25 bp, Homo sapien
gcggcgagcagaggactaccacaaa

SEQ ID NO: 3828221 - DNA, 25 bp, Homo sapien
gagcagaggactaccacaaatgcaa

SEQ ID NO: 3828222 - DNA, 25 bp, Homo sapien
ggcgagcagaggactaccacaaatg

SEQ ID NO: 3828223 - DNA, 25 bp, Homo sapien
cgagcagaggactaccacaaatgca

SEQ ID NO: 3828224 - DNA, 25 bp, Homo sapien
tacagctttatgataaaagatgctc

SEQ ID NO: 3828225 - DNA, 25 bp, Homo sapien
gagaatacagctttatgataaaaga

SEQ ID NO: 3828226 - DNA, 25 bp, Homo sapien
aatacagcaacagtttggatcagac

SEQ ID NO: 3828227 - DNA, 25 bp, Homo sapien
caatacagcaacagtttggatcaga

SEQ ID NO: 3828228 - DNA, 25 bp, Homo sapien
aaactaagcgtgaaagaatgtgagc

SEQ ID NO: 3828229 - DNA, 25 bp, Homo sapien
gtgagcatgcagaaaaggagaggca

SEQ ID NO: 3828230 - DNA, 25 bp, Homo sapien
ggaaactaagcgtgaaagaatgtga

SEQ ID NO: 3828231 - DNA, 25 bp, Homo sapien
gaaactaagcgtgaaagaatgtgag

SEQ ID NO: 3828232 - DNA, 25 bp, Homo sapien
agatgcgcccagcattcagattgcc

SEQ ID NO: 3828233 - DNA, 25 bp, Homo sapien
aattcaatagatgcgcccagcattc

SEQ ID NO: 3828234 - DNA, 25 bp, Homo sapien
aatagatgcgcccagcattcagatt

SEQ ID NO: 3828235 - DNA, 25 bp, Homo sapien
ttctaattcaatagatgcgcccagc

SEQ ID NO: 3828236 - DNA, 25 bp, Homo sapien
tcacctattttcaggacataacacc

SEQ ID NO: 3828237 - DNA, 25 bp, Homo sapien
gacataacaccctgacttaggagcc

SEQ ID NO: 3828238 - DNA, 25 bp, Homo sapien
cataacaccctgacttaggagccat

SEQ ID NO: 3828239 - DNA, 25 bp, Homo sapien
gtttgccgttgtcacctattttcag

SEQ ID NO: 3828240 - DNA, 25 bp, Homo sapien
accatgaatcaagtggtgtgagggc

SEQ ID NO: 3828241 - DNA, 25 bp, Homo sapien
caagtggtgtgagggcaacacagca

SEQ ID NO: 3828242 - DNA, 25 bp, Homo sapien
aatcaagtggtgtgagggcaacaca

SEQ ID NO: 3828243 - DNA, 25 bp, Homo sapien
tgaatcaagtggtgtgagggcaaca

SEQ ID NO: 3828244 - DNA, 25 bp, Homo sapien
tccagacagcatgtgctgaaggatg

SEQ ID NO: 3828245 - DNA, 25 bp, Homo sapien
gacaggaccctgctcccattgcatt

SEQ ID NO: 3828246 - DNA, 25 bp, Homo sapien
gcttctttagcgtggggacaggacc

SEQ ID NO: 3828247 - DNA, 25 bp, Homo sapien
accacacactccttgtttgaggcca

SEQ ID NO: 3828248 - DNA, 25 bp, Homo sapien
ttcagatgcacttatgtcaactcaa

SEQ ID NO: 3828249 - DNA, 25 bp, Homo sapien
tgcacttatgtcaactcaagagtag

SEQ ID NO: 3828250 - DNA, 25 bp, Homo sapien
tctgtttggtgtcccccattgttct

SEQ ID NO: 3828251 - DNA, 25 bp, Homo sapien
tattctgtttggtgtcccccattgt

SEQ ID NO: 3828252 - DNA, 25 bp, Homo sapien
gattgttgaattcaatgcttgggtc

SEQ ID NO: 3828253 - DNA, 25 bp, Homo sapien
cagcctggattgttgaattcaatgc

SEQ ID NO: 3828254 - DNA, 25 bp, Homo sapien
gcacccagcctggattgttgaattc

SEQ ID NO: 3828255 - DNA, 25 bp, Homo sapien
cccagcctggattgttgaattcaat

SEQ ID NO: 3828256 - DNA, 25 bp, Homo sapien
tcctgacatgatccgcacacctcgg

SEQ ID NO: 3828257 - DNA, 25 bp, Homo sapien
tgacatgatccgcacacctcggcct

SEQ ID NO: 3828258 - DNA, 25 bp, Homo sapien
tgtgtgccaccacatttgaccaatt

SEQ ID NO: 3828259 - DNA, 25 bp, Homo sapien
actcctgacatgatccgcacacctc

SEQ ID NO: 3828260 - DNA, 25 bp, Homo sapien
ggtgacaacgaaaatcaaccatcat

SEQ ID NO: 3828261 - DNA, 25 bp, Homo sapien
gctaaaatccgtaagaggaaggtga

SEQ ID NO: 3828262 - DNA, 25 bp, Homo sapien
taagaggaaggtgacaacgaaaatc

SEQ ID NO: 3828263 - DNA, 25 bp, Homo sapien
accatcatgacaaaatcaatggaaa

SEQ ID NO: 3828264 - DNA, 25 bp, Homo sapien
cacaagcttttcctgctgggttcaa

SEQ ID NO: 3828265 - DNA, 25 bp, Homo sapien
cccagcttcaaacggttctctgcct

SEQ ID NO: 3828266 - DNA, 25 bp, Homo sapien
caccgtgccagcctcatgtcattct

SEQ ID NO: 3828267 - DNA, 25 bp, Homo sapien
cgtgccagcctcatgtcattcttgt

SEQ ID NO: 3828268 - DNA, 25 bp, Homo sapien
catctaaccgtgttgaagtgtacag

SEQ ID NO: 3828269 - DNA, 25 bp, Homo sapien
taattaccatctaaccgtgttgaag

SEQ ID NO: 3828270 - DNA, 25 bp, Homo sapien
taccatctaaccgtgttgaagtgta

SEQ ID NO: 3828271 - DNA, 25 bp, Homo sapien
gatgataattaccatctaaccgtgt

SEQ ID NO: 3828272 - DNA, 25 bp, Homo sapien
tatgccacttagtcctgaacagaga

SEQ ID NO: 3828273 - DNA, 25 bp, Homo sapien
ttttctcaccccgaagacgagtctc

SEQ ID NO: 3828274 - DNA, 25 bp, Homo sapien
gataattacacgtcatttggcactg

SEQ ID NO: 3828275 - DNA, 25 bp, Homo sapien
ttggcactgcctttcaagatatgta

SEQ ID NO: 3828276 - DNA, 25 bp, Homo sapien
atgggaaccagctgaaaaatgagac

SEQ ID NO: 3828277 - DNA, 25 bp, Homo sapien
cggatggctgatgcttaaagagcac

SEQ ID NO: 3828278 - DNA, 25 bp, Homo sapien
aatgagactgctagaagggccggat

SEQ ID NO: 3828279 - DNA, 25 bp, Homo sapien
gccggatggctgatgcttaaagagc

SEQ ID NO: 3828280 - DNA, 25 bp, Homo sapien
tatacttagcttgtcttacccatga

SEQ ID NO: 3828281 - DNA, 25 bp, Homo sapien
tgtcttacccatgagtgacgggctg

SEQ ID NO: 3828282 - DNA, 25 bp, Homo sapien
cattaggagattttggccaggtaca

SEQ ID NO: 3828283 - DNA, 25 bp, Homo sapien
ggacagttttgaatgcagttcaaca

SEQ ID NO: 3828284 - DNA, 25 bp, Homo sapien
catccaatgttatacatcaatttaa

SEQ ID NO: 3828285 - DNA, 25 bp, Homo sapien
aatgcatccaatgttatacatcaat

SEQ ID NO: 3828286 - DNA, 25 bp, Homo sapien
gcatccaatgttatacatcaattta

SEQ ID NO: 3828287 - DNA, 25 bp, Homo sapien
tgcatccaatgttatacatcaattt

SEQ ID NO: 3828288 - DNA, 25 bp, Homo sapien
actgtccattgtgaggcaccaccgg

SEQ ID NO: 3828289 - DNA, 25 bp, Homo sapien
aatcaggtttgtgaaggttccagag

SEQ ID NO: 3828290 - DNA, 25 bp, Homo sapien
tcattggaatgatgcgggcgctact

SEQ ID NO: 3828291 - DNA, 25 bp, Homo sapien
cttggcattgtccattgtgaggcac

SEQ ID NO: 3828292 - DNA, 25 bp, Homo sapien
taagatgatatagataaggacgtca

SEQ ID NO: 3828293 - DNA, 25 bp, Homo sapien
cactcggtttcggatgttaaaatgt

SEQ ID NO: 3828294 - DNA, 25 bp, Homo sapien
cacacacacaggcagtaagatgata

SEQ ID NO: 3828295 - DNA, 25 bp, Homo sapien
tcagtcatgaaagtcaacttggttt

SEQ ID NO: 3828296 - DNA, 25 bp, Homo sapien
atttatggtaaaggcattggctttc

SEQ ID NO: 3828297 - DNA, 25 bp, Homo sapien
tctatttatggtaaaggcattggct

SEQ ID NO: 3828298 - DNA, 25 bp, Homo sapien
aaccttatgtcatagtaaatggtaa

SEQ ID NO: 3828299 - DNA, 25 bp, Homo sapien
tcctgtttacaataaccttatgtca

SEQ ID NO: 3828300 - DNA, 25 bp, Homo sapien
cccagccaaatctagggcaggaaca

SEQ ID NO: 3828301 - DNA, 25 bp, Homo sapien
tggctgcagcatataaaaagaattg

SEQ ID NO: 3828302 - DNA, 25 bp, Homo sapien
atgcccagccaaatctagggcagga

SEQ ID NO: 3828303 - DNA, 25 bp, Homo sapien
gaattgaattccatacttttgttaa

SEQ ID NO: 3828304 - DNA, 25 bp, Homo sapien
cattctgtcacccaggctggagtgc

SEQ ID NO: 3828305 - DNA, 25 bp, Homo sapien
aacctcgtgatccgcctgcctcagc

SEQ ID NO: 3828306 - DNA, 25 bp, Homo sapien
ctcccgggtccaagggattgtcctg

SEQ ID NO: 3828307 - DNA, 25 bp, Homo sapien
taacctcgtgatccgcctgcctcag

SEQ ID NO: 3828308 - DNA, 25 bp, Homo sapien
ggtacacgggtgctcaacagattgc

SEQ ID NO: 3828309 - DNA, 25 bp, Homo sapien
tttcctgggctgcacgaataacctc

SEQ ID NO: 3828310 - DNA, 25 bp, Homo sapien
ctggtctcaaatctaaggtgcctga

SEQ ID NO: 3828311 - DNA, 25 bp, Homo sapien
gaccgcctccaagggaggttgatcc

SEQ ID NO: 3828312 - DNA, 25 bp, Homo sapien
ccaagggccttccaaggtgccagct

SEQ ID NO: 3828313 - DNA, 25 bp, Homo sapien
gtgaccaagggccttccaaggtgcc

SEQ ID NO: 3828314 - DNA, 25 bp, Homo sapien
atcatcactgccttcagtgaccaag

SEQ ID NO: 3828315 - DNA, 25 bp, Homo sapien
tcatcactgccttcagtgaccaagg

SEQ ID NO: 3828316 - DNA, 25 bp, Homo sapien
taaacactctcccaaaacatcgtgg

SEQ ID NO: 3828317 - DNA, 25 bp, Homo sapien
gaggttgtaaaccattgctcccaca

SEQ ID NO: 3828318 - DNA, 25 bp, Homo sapien
tctttgttccaatggccctgggtga

SEQ ID NO: 3828319 - DNA, 25 bp, Homo sapien
ggtgactcaagtgcccattcaatga

SEQ ID NO: 3828320 - DNA, 25 bp, Homo sapien
tcccatgggtacatccactttcaag

SEQ ID NO: 3828321 - DNA, 25 bp, Homo sapien
tccactttcaagtggcccaggagag

SEQ ID NO: 3828322 - DNA, 25 bp, Homo sapien
gacaggaggactaagtcaccgcaga

SEQ ID NO: 3828323 - DNA, 25 bp, Homo sapien
caggagagaacctgaaatactcggt

SEQ ID NO: 3828324 - DNA, 25 bp, Homo sapien
caccagttcgtgttctgacggcagg

SEQ ID NO: 3828325 - DNA, 25 bp, Homo sapien
caggccctgggttcaatgctctaca

SEQ ID NO: 3828326 - DNA, 25 bp, Homo sapien
tgcattatgaagctacctggctaac

SEQ ID NO: 3828327 - DNA, 25 bp, Homo sapien
gcaacctgagatggtatagccacct

SEQ ID NO: 3828328 - DNA, 25 bp, Homo sapien
tattatcttgccaagtttaggctgg

SEQ ID NO: 3828329 - DNA, 25 bp, Homo sapien
tcattgctggcatggtaacctaaag

SEQ ID NO: 3828330 - DNA, 25 bp, Homo sapien
gaaaaccactatcttctgtcagaaa

SEQ ID NO: 3828331 - DNA, 25 bp, Homo sapien
ttctttccatacaagtggcttaggg

SEQ ID NO: 3828332 - DNA, 25 bp, Homo sapien
aaatggtgaagctctctattgtcct

SEQ ID NO: 3828333 - DNA, 25 bp, Homo sapien
gttcctgtcccatgaccagggccag

SEQ ID NO: 3828334 - DNA, 25 bp, Homo sapien
gaagctctctattgtcctgacccca

SEQ ID NO: 3828335 - DNA, 25 bp, Homo sapien
ctaataggttggcactcatcatgag

SEQ ID NO: 3828336 - DNA, 25 bp, Homo sapien
cattctttagactccccaagggatg

SEQ ID NO: 3828337 - DNA, 25 bp, Homo sapien
tgcagtatcgccacatttgacaatg

SEQ ID NO: 3828338 - DNA, 25 bp, Homo sapien
cagtgcccagccattcgtgacatgt

SEQ ID NO: 3828339 - DNA, 25 bp, Homo sapien
agcatcatatcagggccagcagact

SEQ ID NO: 3828340 - DNA, 25 bp, Homo sapien
ggtgctttagtcaactgaatctgcc

SEQ ID NO: 3828341 - DNA, 25 bp, Homo sapien
tcttagatggaatttgccgaaactt

SEQ ID NO: 3828342 - DNA, 25 bp, Homo sapien
aagatgacattggagacaacagaac

SEQ ID NO: 3828343 - DNA, 25 bp, Homo sapien
caacttgaaatctgtggaagatgac

SEQ ID NO: 3828344 - DNA, 25 bp, Homo sapien
taaacacacacaaactctcaagtgg

SEQ ID NO: 3828345 - DNA, 25 bp, Homo sapien
aagtggcctaattccctctcaccaa

SEQ ID NO: 3828346 - DNA, 25 bp, Homo sapien
tctcaccaaaccaatcacaatacag

SEQ ID NO: 3828347 - DNA, 25 bp, Homo sapien
gatataaattgtgaatgatgcatga

SEQ ID NO: 3828348 - DNA, 25 bp, Homo sapien
cattttggcaaacatactgtagaaa

SEQ ID NO: 3828349 - DNA, 25 bp, Homo sapien
tccagcctggacagaagtgcatttc

SEQ ID NO: 3828350 - DNA, 25 bp, Homo sapien
gctaaaacttatgggtgaaagtgga

SEQ ID NO: 3828351 - DNA, 25 bp, Homo sapien
tgtagccaaatgcaacatcaaaatc

SEQ ID NO: 3828352 - DNA, 25 bp, Homo sapien
gacattgtggtgcacgtctgtcatc

SEQ ID NO: 3828353 - DNA, 25 bp, Homo sapien
cggacattgtggtgcacgtctgtca

SEQ ID NO: 3828354 - DNA, 25 bp, Homo sapien
ggacattgtggtgcacgtctgtcat

SEQ ID NO: 3828355 - DNA, 25 bp, Homo sapien
acattgtggtgcacgtctgtcatcc

SEQ ID NO: 3828356 - DNA, 25 bp, Homo sapien
ttatttatttaagacagagtttcgc

SEQ ID NO: 3828357 - DNA, 25 bp, Homo sapien
tatttatttaagacagagtttcgct

SEQ ID NO: 3828358 - DNA, 25 bp, Homo sapien
atgctgtgatagtttgtttgtttgt

SEQ ID NO: 3828359 - DNA, 25 bp, Homo sapien
ggctccagctgaaagaaagcccgtg

SEQ ID NO: 3828360 - DNA, 25 bp, Homo sapien
agctgaaagaaagcccgtgcagtca

SEQ ID NO: 3828361 - DNA, 25 bp, Homo sapien
cgtgcagtcatatcacgcgtaaaca

SEQ ID NO: 3828362 - DNA, 25 bp, Homo sapien
aaagcccgtgcagtcatatcacgcg

SEQ ID NO: 3828363 - DNA, 25 bp, Homo sapien
gacatgatcattgcccactgcggct

SEQ ID NO: 3828364 - DNA, 25 bp, Homo sapien
tcattgcccactgcggcttccacct

SEQ ID NO: 3828365 - DNA, 25 bp, Homo sapien
atcattgcccactgcggcttccacc

SEQ ID NO: 3828366 - DNA, 25 bp, Homo sapien
tgcagtagcatgatagttacaggaa

SEQ ID NO: 3828367 - DNA, 25 bp, Homo sapien
gcagtagcatgatagttacaggaaa

SEQ ID NO: 3828368 - DNA, 25 bp, Homo sapien
cagtagcatgatagttacaggaaag

SEQ ID NO: 3828369 - DNA, 25 bp, Homo sapien
agtagcatgatagttacaggaaagg

SEQ ID NO: 3828370 - DNA, 25 bp, Homo sapien
gagcttcctttgcactagcatctga

SEQ ID NO: 3828371 - DNA, 25 bp, Homo sapien
tcataaaagtgttgatcctcacacc

SEQ ID NO: 3828372 - DNA, 25 bp, Homo sapien
acctctttatagtcttgcacctagc

SEQ ID NO: 3828373 - DNA, 25 bp, Homo sapien
gaagtattgataagtgctcagctaa

SEQ ID NO: 3828374 - DNA, 25 bp, Homo sapien
tggaattcctgaggtcaagctgtct

SEQ ID NO: 3828375 - DNA, 25 bp, Homo sapien
tctggaattcctgaggtcaagctgt

SEQ ID NO: 3828376 - DNA, 25 bp, Homo sapien
cacctggcctgaaacccagatttta

SEQ ID NO: 3828377 - DNA, 25 bp, Homo sapien
attcctgaggtcaagctgtctgccc

SEQ ID NO: 3828378 - DNA, 25 bp, Homo sapien
caggttggagtgtaggagggcgatc

SEQ ID NO: 3828379 - DNA, 25 bp, Homo sapien
ttggagtgtaggagggcgatctcag

SEQ ID NO: 3828380 - DNA, 25 bp, Homo sapien
cactgtaacatcaacctcccaggct

SEQ ID NO: 3828381 - DNA, 25 bp, Homo sapien
tcactgtaacatcaacctcccaggc

SEQ ID NO: 3828382 - DNA, 25 bp, Homo sapien
cctataaggcagaacgtaagacggt

SEQ ID NO: 3828383 - DNA, 25 bp, Homo sapien
taggaagcaaagtctatagggagct

SEQ ID NO: 3828384 - DNA, 25 bp, Homo sapien
tagggagctatataatagaggctgc

SEQ ID NO: 3828385 - DNA, 25 bp, Homo sapien
gattcatggcagattctaaagcaca

SEQ ID NO: 3828386 - DNA, 25 bp, Homo sapien
tcgaactcctgtctcacgtgtctgt

SEQ ID NO: 3828387 - DNA, 25 bp, Homo sapien
agagacatagagtttcaccagattg

SEQ ID NO: 3828388 - DNA, 25 bp, Homo sapien
agaggcctgacagtgtgatcttggc

SEQ ID NO: 3828389 - DNA, 25 bp, Homo sapien
gaactcctgtctcacgtgtctgtgt

SEQ ID NO: 3828390 - DNA, 25 bp, Homo sapien
acaagatggtaagatagagaaggaa

SEQ ID NO: 3828391 - DNA, 25 bp, Homo sapien
ctgggacagaaacaagatggtaaga

SEQ ID NO: 3828392 - DNA, 25 bp, Homo sapien
tggtaagatagagaaggaagagtgg

SEQ ID NO: 3828393 - DNA, 25 bp, Homo sapien
taagatagagaaggaagagtggcct

SEQ ID NO: 3828394 - DNA, 25 bp, Homo sapien
gagacgcactaaacagtaaagggac

SEQ ID NO: 3828395 - DNA, 25 bp, Homo sapien
tttcatggagcttctagtcaagcga

SEQ ID NO: 3828396 - DNA, 25 bp, Homo sapien
ggtctagtggcgaaggaggcaggta

SEQ ID NO: 3828397 - DNA, 25 bp, Homo sapien
gaaaatgggccctgagcgatcacca

SEQ ID NO: 3828398 - DNA, 25 bp, Homo sapien
tctgcccagcaactcaggcctggat

SEQ ID NO: 3828399 - DNA, 25 bp, Homo sapien
tggatttagtccaagggccctcagt

SEQ ID NO: 3828400 - DNA, 25 bp, Homo sapien
ttagttctgtggtgacccacctgtc

SEQ ID NO: 3828401 - DNA, 25 bp, Homo sapien
ccatttgcaggctggattagttctg

SEQ ID NO: 3828402 - DNA, 25 bp, Homo sapien
gcattgaggccttcaaattggattg

SEQ ID NO: 3828403 - DNA, 25 bp, Homo sapien
ggccttcaaattggattgttctcaa

SEQ ID NO: 3828404 - DNA, 25 bp, Homo sapien
ttcaaattggattgttctcaatgtc

SEQ ID NO: 3828405 - DNA, 25 bp, Homo sapien
ttgaggccttcaaattggattgttc

SEQ ID NO: 3828406 - DNA, 25 bp, Homo sapien
tgtgcttgcctcttgtgagtagaag

SEQ ID NO: 3828407 - DNA, 25 bp, Homo sapien
tatattgcagtcttggacttaagac

SEQ ID NO: 3828408 - DNA, 25 bp, Homo sapien
caggcattaaggtatactgtgtacc

SEQ ID NO: 3828409 - DNA, 25 bp, Homo sapien
gcaatcaatctgaagtagccaaact

SEQ ID NO: 3828410 - DNA, 25 bp, Homo sapien
tggagaccacagtttctaacagact

SEQ ID NO: 3828411 - DNA, 25 bp, Homo sapien
ccgcatcgctattggacctctgaga

SEQ ID NO: 3828412 - DNA, 25 bp, Homo sapien
taagtaccttgcagctgtattgctc

SEQ ID NO: 3828413 - DNA, 25 bp, Homo sapien
tacttgaagcaaacatcccgcatcg

SEQ ID NO: 3828414 - DNA, 25 bp, Homo sapien
attttcataacacttactggtgagc

SEQ ID NO: 3828415 - DNA, 25 bp, Homo sapien
ccatgcccagccggagtttggaata

SEQ ID NO: 3828416 - DNA, 25 bp, Homo sapien
tcataacacttactggtgagcatcc

SEQ ID NO: 3828417 - DNA, 25 bp, Homo sapien
tgcccagccggagtttggaatattt

SEQ ID NO: 3828418 - DNA, 25 bp, Homo sapien
tgtgtaatgacatgtttcccctatt

SEQ ID NO: 3828419 - DNA, 25 bp, Homo sapien
cccctattaccagtatcatacagga

SEQ ID NO: 3828420 - DNA, 25 bp, Homo sapien
tgtattctatggactttaacatgtg

SEQ ID NO: 3828421 - DNA, 25 bp, Homo sapien
tcttttatgttctacccactccttc

SEQ ID NO: 3828422 - DNA, 25 bp, Homo sapien
cccacttttattatggacgttctga

SEQ ID NO: 3828423 - DNA, 25 bp, Homo sapien
taattagaaacaaatggcccatctg

SEQ ID NO: 3828424 - DNA, 25 bp, Homo sapien
cccatctggtttcatctaggcctct

SEQ ID NO: 3828425 - DNA, 25 bp, Homo sapien
gacgttctgaagcacataaaaatag

SEQ ID NO: 3828426 - DNA, 25 bp, Homo sapien
aaaactacagaatctatttttcttg

SEQ ID NO: 3828427 - DNA, 25 bp, Homo sapien
cactcttaggttggatgatttgcca

SEQ ID NO: 3828428 - DNA, 25 bp, Homo sapien
tgcctggccaagaccactcttaggt

SEQ ID NO: 3828429 - DNA, 25 bp, Homo sapien
tcttaggttggatgatttgccagga

SEQ ID NO: 3828430 - DNA, 25 bp, Homo sapien
caagaccactcttaggttggatgat

SEQ ID NO: 3828431 - DNA, 25 bp, Homo sapien
taaataggatcaatgaatttctttg

SEQ ID NO: 3828432 - DNA, 25 bp, Homo sapien
gataaataggatcaatgaatttctt

SEQ ID NO: 3828433 - DNA, 25 bp, Homo sapien
acctgataaataggatcaatgaatt

SEQ ID NO: 3828434 - DNA, 25 bp, Homo sapien
cctgataaataggatcaatgaattt

SEQ ID NO: 3828435 - DNA, 25 bp, Homo sapien
gactccagttccagtgaattcaaac

SEQ ID NO: 3828436 - DNA, 25 bp, Homo sapien
tgataagcctggcagcatgagactc

SEQ ID NO: 3828437 - DNA, 25 bp, Homo sapien
ttgttcacatacagcccaatctggg

SEQ ID NO: 3828438 - DNA, 25 bp, Homo sapien
gacagtagccaattcttgacctcac

SEQ ID NO: 3828439 - DNA, 25 bp, Homo sapien
ttcccattagggcaatagcagtact

SEQ ID NO: 3828440 - DNA, 25 bp, Homo sapien
ggcaatagcagtactcagcctacgt

SEQ ID NO: 3828441 - DNA, 25 bp, Homo sapien
tagcagtactcagcctacgtttgtt

SEQ ID NO: 3828442 - DNA, 25 bp, Homo sapien
actcagcctacgtttgtttccttca

SEQ ID NO: 3828443 - DNA, 25 bp, Homo sapien
cacgtgtctttgtcaccatgttcca

SEQ ID NO: 3828444 - DNA, 25 bp, Homo sapien
tactgggtccatgccagttgatggc

SEQ ID NO: 3828445 - DNA, 25 bp, Homo sapien
ctgtgggaggtcataacgatggctt

SEQ ID NO: 3828446 - DNA, 25 bp, Homo sapien
tgttccagagcaggcgtctggctac

SEQ ID NO: 3828447 - DNA, 25 bp, Homo sapien
tacagagggcgtcacattcctccat

SEQ ID NO: 3828448 - DNA, 25 bp, Homo sapien
gaacttcccttgcaccatgatggct

SEQ ID NO: 3828449 - DNA, 25 bp, Homo sapien
catgatggctagactggtacagagg

SEQ ID NO: 3828450 - DNA, 25 bp, Homo sapien
ccaagcaagtgaacttcccttgcac

SEQ ID NO: 3828451 - DNA, 25 bp, Homo sapien
catcactggatgctttctctgggtt

SEQ ID NO: 3828452 - DNA, 25 bp, Homo sapien
ttagcaaaggtcaggaagacctgtt

SEQ ID NO: 3828453 - DNA, 25 bp, Homo sapien
tagtcttctaaatcgaattgctctt

SEQ ID NO: 3828454 - DNA, 25 bp, Homo sapien
tgatctgactgacagaatagtcttc

SEQ ID NO: 3828455 - DNA, 25 bp, Homo sapien
gacaataaccaattcttgaccttaa

SEQ ID NO: 3828456 - DNA, 25 bp, Homo sapien
ggacaataaccaattcttgacctta

SEQ ID NO: 3828457 - DNA, 25 bp, Homo sapien
tcaggacaataaccaattcttgacc

SEQ ID NO: 3828458 - DNA, 25 bp, Homo sapien
caggacaataaccaattcttgacct

SEQ ID NO: 3828459 - DNA, 25 bp, Homo sapien
gaatctggggcttagggactcccca

SEQ ID NO: 3828460 - DNA, 25 bp, Homo sapien
ggcttagggactccccataatctgg

SEQ ID NO: 3828461 - DNA, 25 bp, Homo sapien
tcttcacatacagttgaatctgggg

SEQ ID NO: 3828462 - DNA, 25 bp, Homo sapien
tgttgataagctcatcagcatgagg

SEQ ID NO: 3828463 - DNA, 25 bp, Homo sapien
tgatctgccttactactcgtatctg

SEQ ID NO: 3828464 - DNA, 25 bp, Homo sapien
attgatctgccttactactcgtatc

SEQ ID NO: 3828465 - DNA, 25 bp, Homo sapien
ctgccttactactcgtatctgaaac

SEQ ID NO: 3828466 - DNA, 25 bp, Homo sapien
gatctgccttactactcgtatctga

SEQ ID NO: 3828467 - DNA, 25 bp, Homo sapien
ggatctttagctccgtgaaacaggg

SEQ ID NO: 3828468 - DNA, 25 bp, Homo sapien
tcgttcaacgtattcgccgctgtgt

SEQ ID NO: 3828469 - DNA, 25 bp, Homo sapien
gcctctcgctgggtgaagtccttac

SEQ ID NO: 3828470 - DNA, 25 bp, Homo sapien
tattgggtatcgaagcccggcgtag

SEQ ID NO: 3828471 - DNA, 25 bp, Homo sapien
tgcgccctccgggatgacacctgca

SEQ ID NO: 3828472 - DNA, 25 bp, Homo sapien
tatcttgggctcttccgctcagcat

SEQ ID NO: 3828473 - DNA, 25 bp, Homo sapien
gcattgtccaatgggacgcgcctct

SEQ ID NO: 3828474 - DNA, 25 bp, Homo sapien
atgggacgcgcctctcttgggactc

SEQ ID NO: 3828475 - DNA, 25 bp, Homo sapien
cagaatagggagacgcacaatttcc

SEQ ID NO: 3828476 - DNA, 25 bp, Homo sapien
tgaggtactctctatactgccgcgc

SEQ ID NO: 3828477 - DNA, 25 bp, Homo sapien
ttttctaagtacgtctgcagcagcc

SEQ ID NO: 3828478 - DNA, 25 bp, Homo sapien
cggtcactgccggattaaaggaaag

SEQ ID NO: 3828479 - DNA, 25 bp, Homo sapien
agaaagagccggctctggttagtag

SEQ ID NO: 3828480 - DNA, 25 bp, Homo sapien
aaagagccggctctggttagtagct

SEQ ID NO: 3828481 - DNA, 25 bp, Homo sapien
gagccggctctggttagtagcttca

SEQ ID NO: 3828482 - DNA, 25 bp, Homo sapien
cgagaaagagccggctctggttagt

SEQ ID NO: 3828483 - DNA, 25 bp, Homo sapien
caaacagagacgtcttggaggaacc

SEQ ID NO: 3828484 - DNA, 25 bp, Homo sapien
tgtaaggcgaagtttagcagcatcc

SEQ ID NO: 3828485 - DNA, 25 bp, Homo sapien
gctccgccggtaatgtgcttcttaa

SEQ ID NO: 3828486 - DNA, 25 bp, Homo sapien
tgagtaccggagtgaccttcagaag

SEQ ID NO: 3828487 - DNA, 25 bp, Homo sapien
gctgcataacttattatggacttac

SEQ ID NO: 3828488 - DNA, 25 bp, Homo sapien
actgcaccccgcctagctgcataac

SEQ ID NO: 3828489 - DNA, 25 bp, Homo sapien
tattatggacttactaacccaccag

SEQ ID NO: 3828490 - DNA, 25 bp, Homo sapien
gcaccccgcctagctgcataactta

SEQ ID NO: 3828491 - DNA, 25 bp, Homo sapien
gaggttgtggcggtgctcctgcagg

SEQ ID NO: 3828492 - DNA, 25 bp, Homo sapien
ctcaaggtcctgaggttgtggcggt

SEQ ID NO: 3828493 - DNA, 25 bp, Homo sapien
gcgcagctgtggctttaactttggg

SEQ ID NO: 3828494 - DNA, 25 bp, Homo sapien
tgcaggcgcagctgtggctttaact

SEQ ID NO: 3828495 - DNA, 25 bp, Homo sapien
aaatgggtggttcctaaattgctga

SEQ ID NO: 3828496 - DNA, 25 bp, Homo sapien
cagactggatgtaagacgcagcaaa

SEQ ID NO: 3828497 - DNA, 25 bp, Homo sapien
aagcaatcaccaagccatttggtaa

SEQ ID NO: 3828498 - DNA, 25 bp, Homo sapien
gctttaatgaacaaaccaattcttg

SEQ ID NO: 3828499 - DNA, 25 bp, Homo sapien
actgcttcaattccacgggttatct

SEQ ID NO: 3828500 - DNA, 25 bp, Homo sapien
caactgcttcaattccacgggttat

SEQ ID NO: 3828501 - DNA, 25 bp, Homo sapien
caccaactgcttcaattccacgggt

SEQ ID NO: 3828502 - DNA, 25 bp, Homo sapien
gcttcaattccacgggttatcttga

SEQ ID NO: 3828503 - DNA, 25 bp, Homo sapien
aagaaactgcaactatggtgggagt

SEQ ID NO: 3828504 - DNA, 25 bp, Homo sapien
ggctacagctaccacagatagtgaa

SEQ ID NO: 3828505 - DNA, 25 bp, Homo sapien
taaagcttgaacagatgaggagatg

SEQ ID NO: 3828506 - DNA, 25 bp, Homo sapien
atagtgaagacgctgatggatctgg

SEQ ID NO: 3828507 - DNA, 25 bp, Homo sapien
tatgttgacgtatggatctagttca

SEQ ID NO: 3828508 - DNA, 25 bp, Homo sapien
gcccttcagttgtgctatgttgacg

SEQ ID NO: 3828509 - DNA, 25 bp, Homo sapien
ccgtaatggctgtatagtggtctca

SEQ ID NO: 3828510 - DNA, 25 bp, Homo sapien
tgcttgttcacactctattttgccc

SEQ ID NO: 3828511 - DNA, 25 bp, Homo sapien
caaaactccacatattaaccaacta

SEQ ID NO: 3828512 - DNA, 25 bp, Homo sapien
tgaatcaggatagtaagctttccct

SEQ ID NO: 3828513 - DNA, 25 bp, Homo sapien
tctgaagtataaaaggtgcgaacaa

SEQ ID NO: 3828514 - DNA, 25 bp, Homo sapien
gagtgaaatctggtcacatgttaca

SEQ ID NO: 3828515 - DNA, 25 bp, Homo sapien
acatcaccccgcaggcattccacag

SEQ ID NO: 3828516 - DNA, 25 bp, Homo sapien
cccgcaggcattccacagtataagc

SEQ ID NO: 3828517 - DNA, 25 bp, Homo sapien
accccgcaggcattccacagtataa

SEQ ID NO: 3828518 - DNA, 25 bp, Homo sapien
cgcaggcattccacagtataagcca

SEQ ID NO: 3828519 - DNA, 25 bp, Homo sapien
ttgagattctacatagctgtaatgc

SEQ ID NO: 3828520 - DNA, 25 bp, Homo sapien
gaaactttaggtcttgtggtaagca

SEQ ID NO: 3828521 - DNA, 25 bp, Homo sapien
tacagaagacatcgagataagaatt

SEQ ID NO: 3828522 - DNA, 25 bp, Homo sapien
gacgcattacaaagaccagaagtga

SEQ ID NO: 3828523 - DNA, 25 bp, Homo sapien
ctgtggtgacattgagcaggaactc

SEQ ID NO: 3828524 - DNA, 25 bp, Homo sapien
attgagcaggaactccattagaata

SEQ ID NO: 3828525 - DNA, 25 bp, Homo sapien
gtggtgacattgagcaggaactcca

SEQ ID NO: 3828526 - DNA, 25 bp, Homo sapien
tgagcaggaactccattagaatatc

SEQ ID NO: 3828527 - DNA, 25 bp, Homo sapien
acttcccaacgacgaaattctggtg

SEQ ID NO: 3828528 - DNA, 25 bp, Homo sapien
tcagctacttcccaacgacgaaatt

SEQ ID NO: 3828529 - DNA, 25 bp, Homo sapien
gagtctgcggattctgaaaggccac

SEQ ID NO: 3828530 - DNA, 25 bp, Homo sapien
ggccacagctttgtcaatctttagc

SEQ ID NO: 3828531 - DNA, 25 bp, Homo sapien
tgatgtcacttttccaatcctatag

SEQ ID NO: 3828532 - DNA, 25 bp, Homo sapien
caatacaagggattagccaaggcat

SEQ ID NO: 3828533 - DNA, 25 bp, Homo sapien
gcattccggtaagctgctgcatgca

SEQ ID NO: 3828534 - DNA, 25 bp, Homo sapien
tatagtcaggacaatacaagggatt

SEQ ID NO: 3828535 - DNA, 25 bp, Homo sapien
catttcaaaatatgttttattggta

SEQ ID NO: 3828536 - DNA, 25 bp, Homo sapien
acatttcaaaatatgttttattggt

SEQ ID NO: 3828537 - DNA, 25 bp, Homo sapien
cacatttcaaaatatgttttattgg

SEQ ID NO: 3828538 - DNA, 25 bp, Homo sapien
taaataggttgtatagtatggtgaa

SEQ ID NO: 3828539 - DNA, 25 bp, Homo sapien
aacctaattgtggtcatggttgcac

SEQ ID NO: 3828540 - DNA, 25 bp, Homo sapien
tactaactgaggtgaattaccctgg

SEQ ID NO: 3828541 - DNA, 25 bp, Homo sapien
gctgtaatgaactacaaggtactaa

SEQ ID NO: 3828542 - DNA, 25 bp, Homo sapien
gtgaaatggttctgaacgaagtaat

SEQ ID NO: 3828543 - DNA, 25 bp, Homo sapien
aatggttctgaacgaagtaatgtaa

SEQ ID NO: 3828544 - DNA, 25 bp, Homo sapien
caggcaggcaatactctaaacttac

SEQ ID NO: 3828545 - DNA, 25 bp, Homo sapien
caatcctatgttcacgtaattacag

SEQ ID NO: 3828546 - DNA, 25 bp, Homo sapien
taaggaagcaaactgacaggcaggc

SEQ ID NO: 3828547 - DNA, 25 bp, Homo sapien
cctatgatatattgcctgtctgaca

SEQ ID NO: 3828548 - DNA, 25 bp, Homo sapien
gatgatgaacacaccctgaaattag

SEQ ID NO: 3828549 - DNA, 25 bp, Homo sapien
cctaagaaaaatgtacacgtgaatg

SEQ ID NO: 3828550 - DNA, 25 bp, Homo sapien
cagaactattcacttcaaaagggtg

SEQ ID NO: 3828551 - DNA, 25 bp, Homo sapien
tatatttacgacagccaaaaggtag

SEQ ID NO: 3828552 - DNA, 25 bp, Homo sapien
tccacggtagttggcctttgcacca

SEQ ID NO: 3828553 - DNA, 25 bp, Homo sapien
caagcccacccctcatgttgagaaa

SEQ ID NO: 3828554 - DNA, 25 bp, Homo sapien
tgctttagaacaggatgactcacac

SEQ ID NO: 3828555 - DNA, 25 bp, Homo sapien
cagcaacttgctttagaacaggatg

SEQ ID NO: 3828556 - DNA, 25 bp, Homo sapien
tgttgctgcccctcttgacatgtgg

SEQ ID NO: 3828557 - DNA, 25 bp, Homo sapien
aaatggctgctgagttgccttggca

SEQ ID NO: 3828558 - DNA, 25 bp, Homo sapien
gacatgctgaagaacactaaatgca

SEQ ID NO: 3828559 - DNA, 25 bp, Homo sapien
tggcccagcaccgaggacatgctga

SEQ ID NO: 3828560 - DNA, 25 bp, Homo sapien
tagtataaatcccaaagagtccaga

SEQ ID NO: 3828561 - DNA, 25 bp, Homo sapien
ctgtggcctgggagatagtataaat

SEQ ID NO: 3828562 - DNA, 25 bp, Homo sapien
gagatagtataaatcccaaagagtc

SEQ ID NO: 3828563 - DNA, 25 bp, Homo sapien
tggcctgggagatagtataaatccc

SEQ ID NO: 3828564 - DNA, 25 bp, Homo sapien
caaggatacatctacactacagcga

SEQ ID NO: 3828565 - DNA, 25 bp, Homo sapien
gaagccctcaattctaagaccccga

SEQ ID NO: 3828566 - DNA, 25 bp, Homo sapien
aatttgcatacctctgaagccctca

SEQ ID NO: 3828567 - DNA, 25 bp, Homo sapien
tattgagcctagatccctgaatcat

SEQ ID NO: 3828568 - DNA, 25 bp, Homo sapien
agcttggacatctgtgttggaaagg

SEQ ID NO: 3828569 - DNA, 25 bp, Homo sapien
tacttgattataggcagccttgata

SEQ ID NO: 3828570 - DNA, 25 bp, Homo sapien
gacatctgtgttggaaaggtttcct

SEQ ID NO: 3828571 - DNA, 25 bp, Homo sapien
tgtttttacttgattataggcagcc

SEQ ID NO: 3828572 - DNA, 25 bp, Homo sapien
tatgcgcatttctcaggacgtaacc

SEQ ID NO: 3828573 - DNA, 25 bp, Homo sapien
caacggcagcttaaatatgggcaca

SEQ ID NO: 3828574 - DNA, 25 bp, Homo sapien
tacaggtcttgtaagcaacggcagc

SEQ ID NO: 3828575 - DNA, 25 bp, Homo sapien
taaccccagtgtaagtcaagcagca

SEQ ID NO: 3828576 - DNA, 25 bp, Homo sapien
ttttcaccaagggtgaagtagtcaa

SEQ ID NO: 3828577 - DNA, 25 bp, Homo sapien
gtttcgggggtgtctgaagagcttc

SEQ ID NO: 3828578 - DNA, 25 bp, Homo sapien
tctgtgatatccacttcagctgttg

SEQ ID NO: 3828579 - DNA, 25 bp, Homo sapien
tcaccaagggtgaagtagtcaagcc

SEQ ID NO: 3828580 - DNA, 25 bp, Homo sapien
ttccttgtatgaagtgggttctctt

SEQ ID NO: 3828581 - DNA, 25 bp, Homo sapien
tgttataaaggtcacagtcttgacc

SEQ ID NO: 3828582 - DNA, 25 bp, Homo sapien
ttttccttgtatgaagtgggttctc

SEQ ID NO: 3828583 - DNA, 25 bp, Homo sapien
gggtcacagtgttataaaggtcaca

SEQ ID NO: 3828584 - DNA, 25 bp, Homo sapien
tgaagagccttctgtcaaaccaggg

SEQ ID NO: 3828585 - DNA, 25 bp, Homo sapien
cttttggctgctacagtgtgaagac

SEQ ID NO: 3828586 - DNA, 25 bp, Homo sapien
gaagaccagggatcttgaagagcct

SEQ ID NO: 3828587 - DNA, 25 bp, Homo sapien
accagggtgtcaggcctgtacttgg

SEQ ID NO: 3828588 - DNA, 25 bp, Homo sapien
gagagctccctaatgcttcccaagg

SEQ ID NO: 3828589 - DNA, 25 bp, Homo sapien
ttgccaaagtgtccaattgagggcc

SEQ ID NO: 3828590 - DNA, 25 bp, Homo sapien
gactcactcgaaagcaggagctatg

SEQ ID NO: 3828591 - DNA, 25 bp, Homo sapien
tcgaacatcatagcttggcccaggt

SEQ ID NO: 3828592 - DNA, 25 bp, Homo sapien
tgtaagaaccagcaactagagcctg

SEQ ID NO: 3828593 - DNA, 25 bp, Homo sapien
tagagcctgggacccgacttcttcc

SEQ ID NO: 3828594 - DNA, 25 bp, Homo sapien
actgtggatggtggcatgtaagaac

SEQ ID NO: 3828595 - DNA, 25 bp, Homo sapien
tttatgatatcagcattagccactg

SEQ ID NO: 3828596 - DNA, 25 bp, Homo sapien
tatcatcaagcaggcgaacttattt

SEQ ID NO: 3828597 - DNA, 25 bp, Homo sapien
caagcaggcgaacttattttgtcat

SEQ ID NO: 3828598 - DNA, 25 bp, Homo sapien
aaatatatatcatcaagcaggcgaa

SEQ ID NO: 3828599 - DNA, 25 bp, Homo sapien
tatatatcatcaagcaggcgaactt

SEQ ID NO: 3828600 - DNA, 25 bp, Homo sapien
caactcatcaacaaaaggtgtatgt

SEQ ID NO: 3828601 - DNA, 25 bp, Homo sapien
gacttctggccagaaacaaacttct

SEQ ID NO: 3828602 - DNA, 25 bp, Homo sapien
tgctgccattgacttctggccagaa

SEQ ID NO: 3828603 - DNA, 25 bp, Homo sapien
aggtgtatgtcccaaatttccactt

SEQ ID NO: 3828604 - DNA, 25 bp, Homo sapien
gttttattgactttaggtcagctgg

SEQ ID NO: 3828605 - DNA, 25 bp, Homo sapien
ctctgggctgagagaacgttcagct

SEQ ID NO: 3828606 - DNA, 25 bp, Homo sapien
tctgactttcatgtgtttgctgctc

SEQ ID NO: 3828607 - DNA, 25 bp, Homo sapien
gaataattacctgcatttatgcctt

SEQ ID NO: 3828608 - DNA, 25 bp, Homo sapien
tagctgttgacacccaaaatgacaa

SEQ ID NO: 3828609 - DNA, 25 bp, Homo sapien
tagtttctgatgcttctatactcaa

SEQ ID NO: 3828610 - DNA, 25 bp, Homo sapien
ttaaacgccaccaatagtaatctgg

SEQ ID NO: 3828611 - DNA, 25 bp, Homo sapien
tatttaccccgatagccacttagcc

SEQ ID NO: 3828612 - DNA, 25 bp, Homo sapien
aagtgctttaaagtagtgacttcat

SEQ ID NO: 3828613 - DNA, 25 bp, Homo sapien
taaagtagtgacttcatatggctga

SEQ ID NO: 3828614 - DNA, 25 bp, Homo sapien
ccttgtcgtggttttcatcctctaa

SEQ ID NO: 3828615 - DNA, 25 bp, Homo sapien
catatggctgataacctgtgaagct

SEQ ID NO: 3828616 - DNA, 25 bp, Homo sapien
gcttttttccgcacagcatcaggat

SEQ ID NO: 3828617 - DNA, 25 bp, Homo sapien
gcagactcctgcactgagcaattct

SEQ ID NO: 3828618 - DNA, 25 bp, Homo sapien
ttatggcttttttccgcacagcatc

SEQ ID NO: 3828619 - DNA, 25 bp, Homo sapien
gaaggatgcagactcctgcactgag

SEQ ID NO: 3828620 - DNA, 25 bp, Homo sapien
caccccccgagccccggacaggcag

SEQ ID NO: 3828621 - DNA, 25 bp, Homo sapien
tgttgatccagtccgggttggcgat

SEQ ID NO: 3828622 - DNA, 25 bp, Homo sapien
atatcggcggccagaaagagacatc

SEQ ID NO: 3828623 - DNA, 25 bp, Homo sapien
gcagactccccggtgttgatccagt

SEQ ID NO: 3828624 - DNA, 25 bp, Homo sapien
cctgagatgatggtcagtttatcca

SEQ ID NO: 3828625 - DNA, 25 bp, Homo sapien
tactattaagagctctccagcgttt

SEQ ID NO: 3828626 - DNA, 25 bp, Homo sapien
gctccgtggtggtacagcaagcact

SEQ ID NO: 3828627 - DNA, 25 bp, Homo sapien
gcccacagctccgtggtggtacagc

SEQ ID NO: 3828628 - DNA, 25 bp, Homo sapien
ggctgcctgcaactgtaatgtgtta

SEQ ID NO: 3828629 - DNA, 25 bp, Homo sapien
gatgcccgcctctttcccgagggca

SEQ ID NO: 3828630 - DNA, 25 bp, Homo sapien
aagatgcccgcctctttcccgaggg

SEQ ID NO: 3828631 - DNA, 25 bp, Homo sapien
gcccgcctctttcccgagggcacca

SEQ ID NO: 3828632 - DNA, 25 bp, Homo sapien
aaagatgcccgcctctttcccgagg

SEQ ID NO: 3828633 - DNA, 25 bp, Homo sapien
aacaagaccattccttaaatcggag

SEQ ID NO: 3828634 - DNA, 25 bp, Homo sapien
aattatccatggagggagcttgaca

SEQ ID NO: 3828635 - DNA, 25 bp, Homo sapien
tccttaaatcggagcagctctcctg

SEQ ID NO: 3828636 - DNA, 25 bp, Homo sapien
ccaaaagttccttcacctgcactga

SEQ ID NO: 3828637 - DNA, 25 bp, Homo sapien
ggtcacgaactggatgtcatacatg

SEQ ID NO: 3828638 - DNA, 25 bp, Homo sapien
ggataaaaacatcaacaggtcacga

SEQ ID NO: 3828639 - DNA, 25 bp, Homo sapien
catcttaggaacgttatgctatcac

SEQ ID NO: 3828640 - DNA, 25 bp, Homo sapien
tcccctaagtacgtgaagcctgaaa

SEQ ID NO: 3828641 - DNA, 25 bp, Homo sapien
cttagtaccaaaatgacatagcact

SEQ ID NO: 3828642 - DNA, 25 bp, Homo sapien
ttagtaccaaaatgacatagcacta

SEQ ID NO: 3828643 - DNA, 25 bp, Homo sapien
gctcaagcacaacggtaaaccaagg

SEQ ID NO: 3828644 - DNA, 25 bp, Homo sapien
gctcaggtgagactgtacagcatac

SEQ ID NO: 3828645 - DNA, 25 bp, Homo sapien
tattgggtcccctattctactggcc

SEQ ID NO: 3828646 - DNA, 25 bp, Homo sapien
taatatttaacggagtggtatcctg

SEQ ID NO: 3828647 - DNA, 25 bp, Homo sapien
aaatgtttgacatgggttaactcag

SEQ ID NO: 3828648 - DNA, 25 bp, Homo sapien
caaaatatcccagtgagatggatac

SEQ ID NO: 3828649 - DNA, 25 bp, Homo sapien
tcaagtagaagctgagaacagagat

SEQ ID NO: 3828650 - DNA, 25 bp, Homo sapien
ggaagaacagcacggaagtgacaga

SEQ ID NO: 3828651 - DNA, 25 bp, Homo sapien
tttcttacttgacccacccaactgc

SEQ ID NO: 3828652 - DNA, 25 bp, Homo sapien
tcttacttgacccacccaactgcat

SEQ ID NO: 3828653 - DNA, 25 bp, Homo sapien
ttcttacttgacccacccaactgca

SEQ ID NO: 3828654 - DNA, 25 bp, Homo sapien
taggctgtctgatactcttagtgca

SEQ ID NO: 3828655 - DNA, 25 bp, Homo sapien
ttggataggctgtctgatactctta

SEQ ID NO: 3828656 - DNA, 25 bp, Homo sapien
gctgtctgatactcttagtgcactg

SEQ ID NO: 3828657 - DNA, 25 bp, Homo sapien
tgtctgatactcttagtgcactgag

SEQ ID NO: 3828658 - DNA, 25 bp, Homo sapien
tttcatctgggtatgaactgcttga

SEQ ID NO: 3828659 - DNA, 25 bp, Homo sapien
ttcatctgggtatgaactgcttgaa

SEQ ID NO: 3828660 - DNA, 25 bp, Homo sapien
tcatctgggtatgaactgcttgaat

SEQ ID NO: 3828661 - DNA, 25 bp, Homo sapien
cactgagaatggctgatatctgtac

SEQ ID NO: 3828662 - DNA, 25 bp, Homo sapien
tatggctcccgaaaagactatagct

SEQ ID NO: 3828663 - DNA, 25 bp, Homo sapien
aaacactgtggccagttgtccatgg

SEQ ID NO: 3828664 - DNA, 25 bp, Homo sapien
taaacagtagaatcggtatggtaac

SEQ ID NO: 3828665 - DNA, 25 bp, Homo sapien
gactatagctaaggatcttcaaaag

SEQ ID NO: 3828666 - DNA, 25 bp, Homo sapien
ctcatatctgcccaaagtagataac

SEQ ID NO: 3828667 - DNA, 25 bp, Homo sapien
gttccaaacctcttcacactcttag

SEQ ID NO: 3828668 - DNA, 25 bp, Homo sapien
gctgctcagcgatgcttatgttcat

SEQ ID NO: 3828669 - DNA, 25 bp, Homo sapien
aaatcaaggtcatacaaatgaagca

SEQ ID NO: 3828670 - DNA, 25 bp, Homo sapien
cagaaccacctagactttatcagat

SEQ ID NO: 3828671 - DNA, 25 bp, Homo sapien
cacagtaggctttccttgggatacc

SEQ ID NO: 3828672 - DNA, 25 bp, Homo sapien
ggctagaataaaagaggtgctcaat

SEQ ID NO: 3828673 - DNA, 25 bp, Homo sapien
tcaactgctggtatacagaaccacc

SEQ ID NO: 3828674 - DNA, 25 bp, Homo sapien
actgatcatatatttaaggcaagtc

SEQ ID NO: 3828675 - DNA, 25 bp, Homo sapien
ctaaactgatcatatatttaaggca

SEQ ID NO: 3828676 - DNA, 25 bp, Homo sapien
aaactgatcatatatttaaggcaag

SEQ ID NO: 3828677 - DNA, 25 bp, Homo sapien
ctgatcatatatttaaggcaagtct

SEQ ID NO: 3828678 - DNA, 25 bp, Homo sapien
gagttactcttaacatgagggccca

SEQ ID NO: 3828679 - DNA, 25 bp, Homo sapien
aacacttctggctacctaacttggg

SEQ ID NO: 3828680 - DNA, 25 bp, Homo sapien
tatggtgtggtttggctctatcccc

SEQ ID NO: 3828681 - DNA, 25 bp, Homo sapien
ggaagcttaggaacaatccctggca

SEQ ID NO: 3828682 - DNA, 25 bp, Homo sapien
gaataagcaattcatataagatggc

SEQ ID NO: 3828683 - DNA, 25 bp, Homo sapien
taagatggcatacagaacatcaaaa

SEQ ID NO: 3828684 - DNA, 25 bp, Homo sapien
gcaattcatataagatggcatacag

SEQ ID NO: 3828685 - DNA, 25 bp, Homo sapien
catataagatggcatacagaacatc

SEQ ID NO: 3828686 - DNA, 25 bp, Homo sapien
ggcatggatacaacagccacgataa

SEQ ID NO: 3828687 - DNA, 25 bp, Homo sapien
ttaccatgcagcaaaataagatggc

SEQ ID NO: 3828688 - DNA, 25 bp, Homo sapien
gatggcattacaaatcagaggaaag

SEQ ID NO: 3828689 - DNA, 25 bp, Homo sapien
tacggaatcaaacaccccaagagag

SEQ ID NO: 3828690 - DNA, 25 bp, Homo sapien
tttccaaggtgagctctccaaccat

SEQ ID NO: 3828691 - DNA, 25 bp, Homo sapien
tgaaatgatacttccacagagtgct

SEQ ID NO: 3828692 - DNA, 25 bp, Homo sapien
acagaatgttgacagaggaacccag

SEQ ID NO: 3828693 - DNA, 25 bp, Homo sapien
ggaacccaggcaggatccaagtcaa

SEQ ID NO: 3828694 - DNA, 25 bp, Homo sapien
cacttactctagcttaagaagggtt

SEQ ID NO: 3828695 - DNA, 25 bp, Homo sapien
taacctccatggtttgtacacagaa

SEQ ID NO: 3828696 - DNA, 25 bp, Homo sapien
gaataacctccatggtttgtacaca

SEQ ID NO: 3828697 - DNA, 25 bp, Homo sapien
gaatgaataacctccatggtttgta

SEQ ID NO: 3828698 - DNA, 25 bp, Homo sapien
acctgaatgaataacctccatggtt

SEQ ID NO: 3828699 - DNA, 25 bp, Homo sapien
cccagattaatctggcagaagtaac

SEQ ID NO: 3828700 - DNA, 25 bp, Homo sapien
gattaatctggcagaagtaacccat

SEQ ID NO: 3828701 - DNA, 25 bp, Homo sapien
tcttcccagattaatctggcagaag

SEQ ID NO: 3828702 - DNA, 25 bp, Homo sapien
tgtttcttcccagattaatctggca

SEQ ID NO: 3828703 - DNA, 25 bp, Homo sapien
gagggatgcacgtccggtctcgtcc

SEQ ID NO: 3828704 - DNA, 25 bp, Homo sapien
ggtctcgtccatggattgtttgaca

SEQ ID NO: 3828705 - DNA, 25 bp, Homo sapien
cacgtccggtctcgtccatggattg

SEQ ID NO: 3828706 - DNA, 25 bp, Homo sapien
gatgcacgtccggtctcgtccatgg

SEQ ID NO: 3828707 - DNA, 25 bp, Homo sapien
accacatgtgacagtcaatgaaatg

SEQ ID NO: 3828708 - DNA, 25 bp, Homo sapien
aaaccacatgtgacagtcaatgaaa

SEQ ID NO: 3828709 - DNA, 25 bp, Homo sapien
aaccacatgtgacagtcaatgaaat

SEQ ID NO: 3828710 - DNA, 25 bp, Homo sapien
aagactcaggctactggtaactctg

SEQ ID NO: 3828711 - DNA, 25 bp, Homo sapien
ggaacacttatgtcacaatctgagc

SEQ ID NO: 3828712 - DNA, 25 bp, Homo sapien
actgtgtagagtctatctcacggcc

SEQ ID NO: 3828713 - DNA, 25 bp, Homo sapien
ggtaactctgagtcacaaacctgga

SEQ ID NO: 3828714 - DNA, 25 bp, Homo sapien
ccaattttgcaaagtacaagagaat

SEQ ID NO: 3828715 - DNA, 25 bp, Homo sapien
tgggcagagcttaatggagtaagaa

SEQ ID NO: 3828716 - DNA, 25 bp, Homo sapien
tggttacaacatacagcagaaactc

SEQ ID NO: 3828717 - DNA, 25 bp, Homo sapien
tataagcttatacccttgggcagag

SEQ ID NO: 3828718 - DNA, 25 bp, Homo sapien
tgtttctacgattgcttctggaccc

SEQ ID NO: 3828719 - DNA, 25 bp, Homo sapien
gggtgacagggccaaatatgatttc

SEQ ID NO: 3828720 - DNA, 25 bp, Homo sapien
tgaatacctctagtaggaaacccca

SEQ ID NO: 3828721 - DNA, 25 bp, Homo sapien
tcatgagagcatataacgtttcgac

SEQ ID NO: 3828722 - DNA, 25 bp, Homo sapien
ggcgcccaatccctctcagaactgt

SEQ ID NO: 3828723 - DNA, 25 bp, Homo sapien
tgaaaactatagcttaacgggaata

SEQ ID NO: 3828724 - DNA, 25 bp, Homo sapien
tgtgcacggccatcagaagatatca

SEQ ID NO: 3828725 - DNA, 25 bp, Homo sapien
gatatcacccttacattattatgaa

SEQ ID NO: 3828726 - DNA, 25 bp, Homo sapien
gtgcactggtaggtgagggtggaaa

SEQ ID NO: 3828727 - DNA, 25 bp, Homo sapien
ttgaagaacaggacgactcatcttg

SEQ ID NO: 3828728 - DNA, 25 bp, Homo sapien
gaagaacaggacgactcatcttggt

SEQ ID NO: 3828729 - DNA, 25 bp, Homo sapien
acttgaagaacaggacgactcatct

SEQ ID NO: 3828730 - DNA, 25 bp, Homo sapien
cttcctgggagcagatttaatgcag

SEQ ID NO: 3828731 - DNA, 25 bp, Homo sapien
aatttcatatcctccatggcacaga

SEQ ID NO: 3828732 - DNA, 25 bp, Homo sapien
taactattagtgctgccaatgccca

SEQ ID NO: 3828733 - DNA, 25 bp, Homo sapien
cacagatttcttggtggcgagagtc

SEQ ID NO: 3828734 - DNA, 25 bp, Homo sapien
caatgtccgggtaaaagtgattcca

SEQ ID NO: 3828735 - DNA, 25 bp, Homo sapien
gctcaagtgttcattgtccttcaac

SEQ ID NO: 3828736 - DNA, 25 bp, Homo sapien
caaactatttacagataggctagct

SEQ ID NO: 3828737 - DNA, 25 bp, Homo sapien
gaggacagattactaggcactgtac

SEQ ID NO: 3828738 - DNA, 25 bp, Homo sapien
tagctgtgtaatcttaagcctctgg

SEQ ID NO: 3828739 - DNA, 25 bp, Homo sapien
caatacagtaaaagctaggttaggc

SEQ ID NO: 3828740 - DNA, 25 bp, Homo sapien
taattaagggcactagctagagtca

SEQ ID NO: 3828741 - DNA, 25 bp, Homo sapien
ttagtcaggcgtagaggtgcaagcc

SEQ ID NO: 3828742 - DNA, 25 bp, Homo sapien
aaacacaacattagtaacatggttt

SEQ ID NO: 3828743 - DNA, 25 bp, Homo sapien
ttagtaacatggtttggtgatttca

SEQ ID NO: 3828744 - DNA, 25 bp, Homo sapien
cattagtaacatggtttggtgattt

SEQ ID NO: 3828745 - DNA, 25 bp, Homo sapien
agtaacatggtttggtgatttcaaa

SEQ ID NO: 3828746 - DNA, 25 bp, Homo sapien
tgatgtaaaatcctattggaaatat

SEQ ID NO: 3828747 - DNA, 25 bp, Homo sapien
tagaagtcctactattgtaaagaaa

SEQ ID NO: 3828748 - DNA, 25 bp, Homo sapien
gcaaatagaagtcctactattgtaa

SEQ ID NO: 3828749 - DNA, 25 bp, Homo sapien
tacatatgatgacccaactactgtg

SEQ ID NO: 3828750 - DNA, 25 bp, Homo sapien
ccaaagtgcatagtgagaacaaacc

SEQ ID NO: 3828751 - DNA, 25 bp, Homo sapien
ctaatttcttaggaggtgaggccag

SEQ ID NO: 3828752 - DNA, 25 bp, Homo sapien
tctctaggttgctatcacagtgcag

SEQ ID NO: 3828753 - DNA, 25 bp, Homo sapien
agggccacatgcttttcggtataaa

SEQ ID NO: 3828754 - DNA, 25 bp, Homo sapien
tgcagtaatgcaacggcaatccatt

SEQ ID NO: 3828755 - DNA, 25 bp, Homo sapien
cttggtgcagtaatgcaacggcaat

SEQ ID NO: 3828756 - DNA, 25 bp, Homo sapien
gatctattggcttcttggtgcagta

SEQ ID NO: 3828757 - DNA, 25 bp, Homo sapien
caagttttgatctattggcttcttg

SEQ ID NO: 3828758 - DNA, 25 bp, Homo sapien
gtacacagagagagggaatttcaga

SEQ ID NO: 3828759 - DNA, 25 bp, Homo sapien
ttgtacacagagagagggaatttca

SEQ ID NO: 3828760 - DNA, 25 bp, Homo sapien
ttttgtacacagagagagggaattt

SEQ ID NO: 3828761 - DNA, 25 bp, Homo sapien
cacagagagagggaatttcagaatt

SEQ ID NO: 3828762 - DNA, 25 bp, Homo sapien
tgggccacatgggactctactgaca

SEQ ID NO: 3828763 - DNA, 25 bp, Homo sapien
gaaacttagctccactgccatgaaa

SEQ ID NO: 3828764 - DNA, 25 bp, Homo sapien
taatcctgggttagagtgctgactg

SEQ ID NO: 3828765 - DNA, 25 bp, Homo sapien
ggttctaggtttgcacaccacagtg

SEQ ID NO: 3828766 - DNA, 25 bp, Homo sapien
taggtatgagaagaatgcacacact

SEQ ID NO: 3828767 - DNA, 25 bp, Homo sapien
ttaggtatgagaagaatgcacacac

SEQ ID NO: 3828768 - DNA, 25 bp, Homo sapien
ttcagtcttgtgcaaataaaaccta

SEQ ID NO: 3828769 - DNA, 25 bp, Homo sapien
tgtttacagatgtttgggtatgttc

SEQ ID NO: 3828770 - DNA, 25 bp, Homo sapien
ttacagatgtttgggtatgttcaat

SEQ ID NO: 3828771 - DNA, 25 bp, Homo sapien
taattcagtcttgtgcaaataaaac

SEQ ID NO: 3828772 - DNA, 25 bp, Homo sapien
tcagagtaacttgtggctagtagtc

SEQ ID NO: 3828773 - DNA, 25 bp, Homo sapien
gggatatcaaagctttaggcaaaag

SEQ ID NO: 3828774 - DNA, 25 bp, Homo sapien
tagggaatcctacctacacgggcca

SEQ ID NO: 3828775 - DNA, 25 bp, Homo sapien
caactaaaagtcctgtgtagggaat

SEQ ID NO: 3828776 - DNA, 25 bp, Homo sapien
ttattattattattcggttgggcta

SEQ ID NO: 3828777 - DNA, 25 bp, Homo sapien
tattcggttgggctaatcttgacac

SEQ ID NO: 3828778 - DNA, 25 bp, Homo sapien
tcggttgggctaatcttgacacccc

SEQ ID NO: 3828779 - DNA, 25 bp, Homo sapien
tattattattcggttgggctaatct

SEQ ID NO: 3828780 - DNA, 25 bp, Homo sapien
tgtcttaatcctccaattccccagg

SEQ ID NO: 3828781 - DNA, 25 bp, Homo sapien
ggaggctcctcaaaaggccacacaa

SEQ ID NO: 3828782 - DNA, 25 bp, Homo sapien
cccaggaggctcctcaaaaggccac

SEQ ID NO: 3828783 - DNA, 25 bp, Homo sapien
ccacacaaggaagaatcagcagcaa

SEQ ID NO: 3828784 - DNA, 25 bp, Homo sapien
tatttttgttgctgggtaactgtga

SEQ ID NO: 3828785 - DNA, 25 bp, Homo sapien
atttttgttgctgggtaactgtgac

SEQ ID NO: 3828786 - DNA, 25 bp, Homo sapien
tttttgttgctgggtaactgtgacc

SEQ ID NO: 3828787 - DNA, 25 bp, Homo sapien
aaaatatacattgtgctttctatct

SEQ ID NO: 3828788 - DNA, 25 bp, Homo sapien
tggaactggggctgatttgtaaaac

SEQ ID NO: 3828789 - DNA, 25 bp, Homo sapien
ataccaacccacagtgttttcttct

SEQ ID NO: 3828790 - DNA, 25 bp, Homo sapien
tgaatgtgcttgaaaataccaaccc

SEQ ID NO: 3828791 - DNA, 25 bp, Homo sapien
tgccaggtttctagtgagtacacaa

SEQ ID NO: 3828792 - DNA, 25 bp, Homo sapien
gaggaagccatactctttgcattca

SEQ ID NO: 3828793 - DNA, 25 bp, Homo sapien
gaagttcactgaaacaaacctggca

SEQ ID NO: 3828794 - DNA, 25 bp, Homo sapien
aaccaaggctcacgtaagttacatg

SEQ ID NO: 3828795 - DNA, 25 bp, Homo sapien
ttaatagtgaccaaatacactggcc

SEQ ID NO: 3828796 - DNA, 25 bp, Homo sapien
gattaaaaccatcttggcaggacca

SEQ ID NO: 3828797 - DNA, 25 bp, Homo sapien
tatttagttcactgagttgccctga

SEQ ID NO: 3828798 - DNA, 25 bp, Homo sapien
acaagcttgaagaggcctccggaga

SEQ ID NO: 3828799 - DNA, 25 bp, Homo sapien
caagctcctccaagcaactcagcag

SEQ ID NO: 3828800 - DNA, 25 bp, Homo sapien
aagcaactcagcagcgaagcttgcc

SEQ ID NO: 3828801 - DNA, 25 bp, Homo sapien
tggatctcacttctggtttctccaa

SEQ ID NO: 3828802 - DNA, 25 bp, Homo sapien
ttctcctggatctcacttctggttt

SEQ ID NO: 3828803 - DNA, 25 bp, Homo sapien
ttctccatctttgggagaagggctc

SEQ ID NO: 3828804 - DNA, 25 bp, Homo sapien
aagggctcctggcactccagggcct

SEQ ID NO: 3828805 - DNA, 25 bp, Homo sapien
tttatttctccatctttgggagaag

SEQ ID NO: 3828806 - DNA, 25 bp, Homo sapien
gggctcctggcactccagggcctta

SEQ ID NO: 3828807 - DNA, 25 bp, Homo sapien
tgcaaaacacccaatgcttattttc

SEQ ID NO: 3828808 - DNA, 25 bp, Homo sapien
gaagacatgactagtttgtgtagcc

SEQ ID NO: 3828809 - DNA, 25 bp, Homo sapien
agacatgactagtttgtgtagccat

SEQ ID NO: 3828810 - DNA, 25 bp, Homo sapien
tggaagacatgactagtttgtgtag

SEQ ID NO: 3828811 - DNA, 25 bp, Homo sapien
aagacatgactagtttgtgtagcca

SEQ ID NO: 3828812 - DNA, 25 bp, Homo sapien
aataatccattgtccgaattttgcc

SEQ ID NO: 3828813 - DNA, 25 bp, Homo sapien
ccattgtccgaattttgcccaagtc

SEQ ID NO: 3828814 - DNA, 25 bp, Homo sapien
gtgtaaccaataatccattgtccga

SEQ ID NO: 3828815 - DNA, 25 bp, Homo sapien
gtgtctggttaacatgtgtaaccaa

SEQ ID NO: 3828816 - DNA, 25 bp, Homo sapien
gtttgtccgtgttagagacagggcc

SEQ ID NO: 3828817 - DNA, 25 bp, Homo sapien
ctgctgtacccagccccctggtttg

SEQ ID NO: 3828818 - DNA, 25 bp, Homo sapien
ccctggtttgtccgtgttagagaca

SEQ ID NO: 3828819 - DNA, 25 bp, Homo sapien
cagccccctggtttgtccgtgttag

SEQ ID NO: 3828820 - DNA, 25 bp, Homo sapien
tctgtgccctggcttatcaggtcag

SEQ ID NO: 3828821 - DNA, 25 bp, Homo sapien
ttttaaactgtgagccgaaagccag

SEQ ID NO: 3828822 - DNA, 25 bp, Homo sapien
cagccaaggtgagtttctgacattt

SEQ ID NO: 3828823 - DNA, 25 bp, Homo sapien
gagtcctcccaatctgaagactggg

SEQ ID NO: 3828824 - DNA, 25 bp, Homo sapien
ggggtgcggggaacagcttcagact

SEQ ID NO: 3828825 - DNA, 25 bp, Homo sapien
gtggggggtgcggggaacagcttca

SEQ ID NO: 3828826 - DNA, 25 bp, Homo sapien
ggggggtgcggggaacagcttcaga

SEQ ID NO: 3828827 - DNA, 25 bp, Homo sapien
gtgcggggaacagcttcagacttac

SEQ ID NO: 3828828 - DNA, 25 bp, Homo sapien
ttgactcaaaatggcggatgatctg

SEQ ID NO: 3828829 - DNA, 25 bp, Homo sapien
atctgggtggagaaacatattttct

SEQ ID NO: 3828830 - DNA, 25 bp, Homo sapien
ttatgaggggatctctcgggcccag

SEQ ID NO: 3828831 - DNA, 25 bp, Homo sapien
tattttctgcacgacattggtgccc

SEQ ID NO: 3828832 - DNA, 25 bp, Homo sapien
ccatgcccggactgaaatgacataa

SEQ ID NO: 3828833 - DNA, 25 bp, Homo sapien
catgcccggactgaaatgacataat

SEQ ID NO: 3828834 - DNA, 25 bp, Homo sapien
accatgcccggactgaaatgacata

SEQ ID NO: 3828835 - DNA, 25 bp, Homo sapien
ctcactctgcccggtgagggcaggt

SEQ ID NO: 3828836 - DNA, 25 bp, Homo sapien
gctcactctgcccggtgagggcagg

SEQ ID NO: 3828837 - DNA, 25 bp, Homo sapien
tgctcactctgcccggtgagggcag

SEQ ID NO: 3828838 - DNA, 25 bp, Homo sapien
gtgctcactctgcccggtgagggca

SEQ ID NO: 3828839 - DNA, 25 bp, Homo sapien
tgttttctgtgagccactgaattct

SEQ ID NO: 3828840 - DNA, 25 bp, Homo sapien
ttttctgtgagccactgaattctct

SEQ ID NO: 3828841 - DNA, 25 bp, Homo sapien
ctgttttctgtgagccactgaattc

SEQ ID NO: 3828842 - DNA, 25 bp, Homo sapien
cagatgtgttaggttcgccagctgc

SEQ ID NO: 3828843 - DNA, 25 bp, Homo sapien
gtttgactctgcacataaatgttca

SEQ ID NO: 3828844 - DNA, 25 bp, Homo sapien
cgccagctgcaatggtatctctgag

SEQ ID NO: 3828845 - DNA, 25 bp, Homo sapien
tgggctcaagcaaccatgtgccacc

SEQ ID NO: 3828846 - DNA, 25 bp, Homo sapien
gatggctgacacatctatgaggatg

SEQ ID NO: 3828847 - DNA, 25 bp, Homo sapien
acacatctatgaggatgctgactct

SEQ ID NO: 3828848 - DNA, 25 bp, Homo sapien
actgctgatggctgacacatctatg

SEQ ID NO: 3828849 - DNA, 25 bp, Homo sapien
ggctgacacatctatgaggatgctg

SEQ ID NO: 3828850 - DNA, 25 bp, Homo sapien
agagggacccggcattggtgccaaa

SEQ ID NO: 3828851 - DNA, 25 bp, Homo sapien
tggccagagggacccggcattggtg

SEQ ID NO: 3828852 - DNA, 25 bp, Homo sapien
ttgtggctcagctgctcatcgatga

SEQ ID NO: 3828853 - DNA, 25 bp, Homo sapien
cccggcattggtgccaaaggacagg

SEQ ID NO: 3828854 - DNA, 25 bp, Homo sapien
gcgtctttacccagagcttaagttc

SEQ ID NO: 3828855 - DNA, 25 bp, Homo sapien
gcctccatcaggctgcagcgtcttt

SEQ ID NO: 3828856 - DNA, 25 bp, Homo sapien
cagggaatccagtcccttgagagtg

SEQ ID NO: 3828857 - DNA, 25 bp, Homo sapien
caggctgcagcgtctttacccagag

SEQ ID NO: 3828858 - DNA, 25 bp, Homo sapien
gaggtctcttcccatggtggactgc

SEQ ID NO: 3828859 - DNA, 25 bp, Homo sapien
catcgcatctgtaggtgatgaagtg

SEQ ID NO: 3828860 - DNA, 25 bp, Homo sapien
gggcatctgatcatcgcatctgtag

SEQ ID NO: 3828861 - DNA, 25 bp, Homo sapien
gtctcttcccatggtggactgctgg

SEQ ID NO: 3828862 - DNA, 25 bp, Homo sapien
gtagcagtggtagtagcccctaaca

SEQ ID NO: 3828863 - DNA, 25 bp, Homo sapien
gcagtggtagtagcccctaacagct

SEQ ID NO: 3828864 - DNA, 25 bp, Homo sapien
tggtagtagcccctaacagcttctg

SEQ ID NO: 3828865 - DNA, 25 bp, Homo sapien
agtagcccctaacagcttctgcaag

SEQ ID NO: 3828866 - DNA, 25 bp, Homo sapien
catccatgtcccggctggtgtagtg

SEQ ID NO: 3828867 - DNA, 25 bp, Homo sapien
ccatggtgcaggtgagcgcctcaca

SEQ ID NO: 3828868 - DNA, 25 bp, Homo sapien
catggtgcaggtgagcgcctcacag

SEQ ID NO: 3828869 - DNA, 25 bp, Homo sapien
agctcatccatgtcccggctggtgt

SEQ ID NO: 3828870 - DNA, 25 bp, Homo sapien
cattgaccttaagccactctgcaga

SEQ ID NO: 3828871 - DNA, 25 bp, Homo sapien
tgaccttaagccactctgcagaagt

SEQ ID NO: 3828872 - DNA, 25 bp, Homo sapien
gtttggaaactcaatggtgagagga

SEQ ID NO: 3828873 - DNA, 25 bp, Homo sapien
aagtttggaaactcaatggtgagag

SEQ ID NO: 3828874 - DNA, 25 bp, Homo sapien
tgccaggacctgatatagacttaat

SEQ ID NO: 3828875 - DNA, 25 bp, Homo sapien
catggatggtcgatgatactgtttt

SEQ ID NO: 3828876 - DNA, 25 bp, Homo sapien
cacaggagagaatgcattgggtgcc

SEQ ID NO: 3828877 - DNA, 25 bp, Homo sapien
gagaataggtacaaattcctccaca

SEQ ID NO: 3828878 - DNA, 25 bp, Homo sapien
aggactggagagaattatgaatctg

SEQ ID NO: 3828879 - DNA, 25 bp, Homo sapien
ggaggactggagagaattatgaatc

SEQ ID NO: 3828880 - DNA, 25 bp, Homo sapien
tggaggactggagagaattatgaat

SEQ ID NO: 3828881 - DNA, 25 bp, Homo sapien
gtggaggactggagagaattatgaa

SEQ ID NO: 3828882 - DNA, 25 bp, Homo sapien
ctgtcccgtcgtgccattcaaattg

SEQ ID NO: 3828883 - DNA, 25 bp, Homo sapien
aagggtgggtccacatgaatgttct

SEQ ID NO: 3828884 - DNA, 25 bp, Homo sapien
gaagggtgggtccacatgaatgttc

SEQ ID NO: 3828885 - DNA, 25 bp, Homo sapien
tgttcttcactgtcccgtcgtgcca

SEQ ID NO: 3828886 - DNA, 25 bp, Homo sapien
gctcaaaggctgagcaaccaagggg

SEQ ID NO: 3828887 - DNA, 25 bp, Homo sapien
tgctcaaaggctgagcaaccaaggg

SEQ ID NO: 3828888 - DNA, 25 bp, Homo sapien
agggagagccactcaatccgcctct

SEQ ID NO: 3828889 - DNA, 25 bp, Homo sapien
gccagggagagccactcaatccgcc

SEQ ID NO: 3828890 - DNA, 25 bp, Homo sapien
cctctcatacatccgcatagctctg

SEQ ID NO: 3828891 - DNA, 25 bp, Homo sapien
aatccgcctctcatacatccgcata

SEQ ID NO: 3828892 - DNA, 25 bp, Homo sapien
gaattggtcgcagagatatcgagca

SEQ ID NO: 3828893 - DNA, 25 bp, Homo sapien
ccgcagggagtgctggatatgaata

SEQ ID NO: 3828894 - DNA, 25 bp, Homo sapien
gaaacagtccttgttggataactgc

SEQ ID NO: 3828895 - DNA, 25 bp, Homo sapien
taatgtacatggaattggtcgcaga

SEQ ID NO: 3828896 - DNA, 25 bp, Homo sapien
cccccaggagccaggagacacatac

SEQ ID NO: 3828897 - DNA, 25 bp, Homo sapien
ttgcccccaggagccaggagacaca

SEQ ID NO: 3828898 - DNA, 25 bp, Homo sapien
ccttgcccccaggagccaggagaca

SEQ ID NO: 3828899 - DNA, 25 bp, Homo sapien
gcccccaggagccaggagacacata

SEQ ID NO: 3828900 - DNA, 25 bp, Homo sapien
tgtaaattgttgtgactcacgggaa

SEQ ID NO: 3828901 - DNA, 25 bp, Homo sapien
tgttgtgactcacgggaaccatctc

SEQ ID NO: 3828902 - DNA, 25 bp, Homo sapien
gtgactcacgggaaccatctcaggc

SEQ ID NO: 3828903 - DNA, 25 bp, Homo sapien
taaattgttgtgactcacgggaacc

SEQ ID NO: 3828904 - DNA, 25 bp, Homo sapien
ttccgcagggcgctgagaacgttcc

SEQ ID NO: 3828905 - DNA, 25 bp, Homo sapien
gaagaggtagattccctgcgattgg

SEQ ID NO: 3828906 - DNA, 25 bp, Homo sapien
gccccgacaccgcaggttcagggcc

SEQ ID NO: 3828907 - DNA, 25 bp, Homo sapien
tgaagtctacttccacagccttccg

SEQ ID NO: 3828908 - DNA, 25 bp, Homo sapien
tccagggccttctctgtgcctggtc

SEQ ID NO: 3828909 - DNA, 25 bp, Homo sapien
gagaaggtaggaggggccagcagct

SEQ ID NO: 3828910 - DNA, 25 bp, Homo sapien
cagctgagggccttgaagctgtggg

SEQ ID NO: 3828911 - DNA, 25 bp, Homo sapien
cctggccatgtttctccagggcctt

SEQ ID NO: 3828912 - DNA, 25 bp, Homo sapien
cagccatgtaggcactgagtgtagg

SEQ ID NO: 3828913 - DNA, 25 bp, Homo sapien
gaagagacacacgttcagctggagg

SEQ ID NO: 3828914 - DNA, 25 bp, Homo sapien
tgtgtctccaaaccagtggaagcgg

SEQ ID NO: 3828915 - DNA, 25 bp, Homo sapien
gtggtgtccatctttggctcgccca

SEQ ID NO: 3828916 - DNA, 25 bp, Homo sapien
gatggagttgatgtcatcgctctca

SEQ ID NO: 3828917 - DNA, 25 bp, Homo sapien
gagttgatgtcatcgctctcataaa

SEQ ID NO: 3828918 - DNA, 25 bp, Homo sapien
gacatgatggagttgatgtcatcgc

SEQ ID NO: 3828919 - DNA, 25 bp, Homo sapien
tccatctcagacatgatggagttga

SEQ ID NO: 3828920 - DNA, 25 bp, Homo sapien
tcgggagggctgaacttcccagtac

SEQ ID NO: 3828921 - DNA, 25 bp, Homo sapien
gaatggttcttcagggaggccatga

SEQ ID NO: 3828922 - DNA, 25 bp, Homo sapien
cttcttgggctgacttcttagctga

SEQ ID NO: 3828923 - DNA, 25 bp, Homo sapien
tcctgaatggttcttcagggaggcc

SEQ ID NO: 3828924 - DNA, 25 bp, Homo sapien
gaaatctgctacctactgtctggga

SEQ ID NO: 3828925 - DNA, 25 bp, Homo sapien
cattctcagccacgactggagtgtg

SEQ ID NO: 3828926 - DNA, 25 bp, Homo sapien
tggcggtcattaaacagtcactgtc

SEQ ID NO: 3828927 - DNA, 25 bp, Homo sapien
gagctggctcctgaaacctggcaga

SEQ ID NO: 3828928 - DNA, 25 bp, Homo sapien
tttcagagatttcagcggggggctc

SEQ ID NO: 3828929 - DNA, 25 bp, Homo sapien
tctgctactgagtggacgccatttc

SEQ ID NO: 3828930 - DNA, 25 bp, Homo sapien
tgctactgagtggacgccatttcag

SEQ ID NO: 3828931 - DNA, 25 bp, Homo sapien
ctactgagtggacgccatttcagag

SEQ ID NO: 3828932 - DNA, 25 bp, Homo sapien
ctctgtgtagaacagtaaaagagat

SEQ ID NO: 3828933 - DNA, 25 bp, Homo sapien
tccatcatcccttctttcgttggct

SEQ ID NO: 3828934 - DNA, 25 bp, Homo sapien
ccttctttcgttggctgggccgcag

SEQ ID NO: 3828935 - DNA, 25 bp, Homo sapien
tgtgtagaacagtaaaagagatgtc

SEQ ID NO: 3828936 - DNA, 25 bp, Homo sapien
gacacctgtatagcctctaacttac

SEQ ID NO: 3828937 - DNA, 25 bp, Homo sapien
tccagacacctgtatagcctctaac

SEQ ID NO: 3828938 - DNA, 25 bp, Homo sapien
gggctgtccagacacctgtatagcc

SEQ ID NO: 3828939 - DNA, 25 bp, Homo sapien
tgtccagacacctgtatagcctcta

SEQ ID NO: 3828940 - DNA, 25 bp, Homo sapien
ggagaactgagttgagtacggcttg

SEQ ID NO: 3828941 - DNA, 25 bp, Homo sapien
ctgggagaactgagttgagtacggc

SEQ ID NO: 3828942 - DNA, 25 bp, Homo sapien
ctcattccctggttgttgtcaaaac

SEQ ID NO: 3828943 - DNA, 25 bp, Homo sapien
cagggctgggagaactgagttgagt

SEQ ID NO: 3828944 - DNA, 25 bp, Homo sapien
taagtcaatagaagagctagtcctt

SEQ ID NO: 3828945 - DNA, 25 bp, Homo sapien
aagtcaatagaagagctagtccttc

SEQ ID NO: 3828946 - DNA, 25 bp, Homo sapien
tcctttctgggtaagtcaatagaag

SEQ ID NO: 3828947 - DNA, 25 bp, Homo sapien
gttacttccctaacatccatttcaa

SEQ ID NO: 3828948 - DNA, 25 bp, Homo sapien
agaacaaaatctatcgcgcacctcc

SEQ ID NO: 3828949 - DNA, 25 bp, Homo sapien
accctagtctagtggacactgttac

SEQ ID NO: 3828950 - DNA, 25 bp, Homo sapien
acctcccagaccctagtctagtgga

SEQ ID NO: 3828951 - DNA, 25 bp, Homo sapien
gtgcagttgggacccatgcatctgg

SEQ ID NO: 3828952 - DNA, 25 bp, Homo sapien
tgggacccatgcatctggaaatctc

SEQ ID NO: 3828953 - DNA, 25 bp, Homo sapien
ctgacttttgatgagtgcagttggg

SEQ ID NO: 3828954 - DNA, 25 bp, Homo sapien
tgatgagtgcagttgggacccatgc

SEQ ID NO: 3828955 - DNA, 25 bp, Homo sapien
ctgcagtgtttggcggatgctgacc

SEQ ID NO: 3828956 - DNA, 25 bp, Homo sapien
tggatctcaacgctggggaagatgc

SEQ ID NO: 3828957 - DNA, 25 bp, Homo sapien
ggatctcaacgctggggaagatgct

SEQ ID NO: 3828958 - DNA, 25 bp, Homo sapien
gatgctgcagtgtttggcggatgct

SEQ ID NO: 3828959 - DNA, 25 bp, Homo sapien
ctccctgggcgtccactggatgtgt

SEQ ID NO: 3828960 - DNA, 25 bp, Homo sapien
ggcgtccactggatgtgtctcacca

SEQ ID NO: 3828961 - DNA, 25 bp, Homo sapien
tgggcgtccactggatgtgtctcac

SEQ ID NO: 3828962 - DNA, 25 bp, Homo sapien
cctgggcgtccactggatgtgtctc

SEQ ID NO: 3828963 - DNA, 25 bp, Homo sapien
ttctccaagtgcctgatgtacacct

SEQ ID NO: 3828964 - DNA, 25 bp, Homo sapien
catagcgccttaacaccttctccaa

SEQ ID NO: 3828965 - DNA, 25 bp, Homo sapien
gcctctggacatagcgccttaacac

SEQ ID NO: 3828966 - DNA, 25 bp, Homo sapien
ccttctccaagtgcctgatgtacac

SEQ ID NO: 3828967 - DNA, 25 bp, Homo sapien
tcatgacgcccctgtccatggactg

SEQ ID NO: 3828968 - DNA, 25 bp, Homo sapien
ggactgtctataccaggtcctactg

SEQ ID NO: 3828969 - DNA, 25 bp, Homo sapien
ctataccaggtcctactgcagagga

SEQ ID NO: 3828970 - DNA, 25 bp, Homo sapien
tgtccatggactgtctataccaggt

SEQ ID NO: 3828971 - DNA, 25 bp, Homo sapien
cgtgtccagcaatatgcatactttg

SEQ ID NO: 3828972 - DNA, 25 bp, Homo sapien
tctccaaaacggtgccaaacagtcg

SEQ ID NO: 3828973 - DNA, 25 bp, Homo sapien
tgtcacagcacttccgcagctgttc

SEQ ID NO: 3828974 - DNA, 25 bp, Homo sapien
ggcccatggaccctgacgtgtccag

SEQ ID NO: 3828975 - DNA, 25 bp, Homo sapien
ctctctgcaaagctgagcaggttaa

SEQ ID NO: 3828976 - DNA, 25 bp, Homo sapien
ctgaaagctctctgcaaagctgagc

SEQ ID NO: 3828977 - DNA, 25 bp, Homo sapien
agctctctgcaaagctgagcaggtt

SEQ ID NO: 3828978 - DNA, 25 bp, Homo sapien
ctctgcaaagctgagcaggttaaaa

SEQ ID NO: 3828979 - DNA, 25 bp, Homo sapien
gcatctgtggtctccaccagcgtgt

SEQ ID NO: 3828980 - DNA, 25 bp, Homo sapien
gcatagcctcatgacacgctgcatc

SEQ ID NO: 3828981 - DNA, 25 bp, Homo sapien
ccattgcatagcctcatgacacgct

SEQ ID NO: 3828982 - DNA, 25 bp, Homo sapien
atctgtggtctccaccagcgtgtcc

SEQ ID NO: 3828983 - DNA, 25 bp, Homo sapien
tgccctgagcttgcaggtgggtcac

SEQ ID NO: 3828984 - DNA, 25 bp, Homo sapien
cagcaatgcttgcaagatggaggtg

SEQ ID NO: 3828985 - DNA, 25 bp, Homo sapien
gaggtgctgccctgagcttgcaggt

SEQ ID NO: 3828986 - DNA, 25 bp, Homo sapien
caatgcttgcaagatggaggtgctg

SEQ ID NO: 3828987 - DNA, 25 bp, Homo sapien
cagttcaaggaaatggtgtgcactt

SEQ ID NO: 3828988 - DNA, 25 bp, Homo sapien
ggctttccgtcggtcaggaggtaca

SEQ ID NO: 3828989 - DNA, 25 bp, Homo sapien
tgtctgagcagttcaaggaaatggt

SEQ ID NO: 3828990 - DNA, 25 bp, Homo sapien
gaggtacaatccttccagatcatgg

SEQ ID NO: 3828991 - DNA, 25 bp, Homo sapien
gaattttggagagtgtgtcctcacc

SEQ ID NO: 3828992 - DNA, 25 bp, Homo sapien
ttttcattgatgaagcctttggtca

SEQ ID NO: 3828993 - DNA, 25 bp, Homo sapien
tagcgtccgccggtgaaggaagcca

SEQ ID NO: 3828994 - DNA, 25 bp, Homo sapien
cccacagggcagtgatagcgtccgc

SEQ ID NO: 3828995 - DNA, 25 bp, Homo sapien
aatttgttgcgctgggaatgttatc

SEQ ID NO: 3828996 - DNA, 25 bp, Homo sapien
ttgcgctgggaatgttatcactgac

SEQ ID NO: 3828997 - DNA, 25 bp, Homo sapien
gaatgttatcactgacaacattgca

SEQ ID NO: 3828998 - DNA, 25 bp, Homo sapien
ttgataatttgttgcgctgggaatg

SEQ ID NO: 3828999 - DNA, 25 bp, Homo sapien
cttaaatcatctccttcaaatggtg

SEQ ID NO: 3829000 - DNA, 25 bp, Homo sapien
tcatctccttcaaatggtggcaatg

SEQ ID NO: 3829001 - DNA, 25 bp, Homo sapien
ccttcaaatggtggcaatgtgggat

SEQ ID NO: 3829002 - DNA, 25 bp, Homo sapien
gggccaggatccttaaatcatctcc

SEQ ID NO: 3829003 - DNA, 25 bp, Homo sapien
tcatgggtgcggcccttctcgatgg

SEQ ID NO: 3829004 - DNA, 25 bp, Homo sapien
ctgtagccacatggcaggccggaga

SEQ ID NO: 3829005 - DNA, 25 bp, Homo sapien
cggagaggctgcgtgaagggcatac

SEQ ID NO: 3829006 - DNA, 25 bp, Homo sapien
gggtccggggtctgcatgggctgta

SEQ ID NO: 3829007 - DNA, 25 bp, Homo sapien
ggaaagagtgacctttggttctgca

SEQ ID NO: 3829008 - DNA, 25 bp, Homo sapien
ctggaggcccctcgctctagatagg

SEQ ID NO: 3829009 - DNA, 25 bp, Homo sapien
tggcccctcacacaaaagacaaagt

SEQ ID NO: 3829010 - DNA, 25 bp, Homo sapien
gaaaatgaacccagatgagcagcct

SEQ ID NO: 3829011 - DNA, 25 bp, Homo sapien
cctcttatgaaccagggtggagacc

SEQ ID NO: 3829012 - DNA, 25 bp, Homo sapien
aattctttattatggtatgagtctt

SEQ ID NO: 3829013 - DNA, 25 bp, Homo sapien
acacacacgccaatgatcacttcaa

SEQ ID NO: 3829014 - DNA, 25 bp, Homo sapien
tcacttcaaacagttaaagtcatgt

SEQ ID NO: 3829015 - DNA, 25 bp, Homo sapien
cagttaaagtcatgttgatcctatt

SEQ ID NO: 3829016 - DNA, 25 bp, Homo sapien
tcccgcggcgctgcgtgctccccgc

SEQ ID NO: 3829017 - DNA, 25 bp, Homo sapien
ctcccgcggcgctgcgtgctccccg

SEQ ID NO: 3829018 - DNA, 25 bp, Homo sapien
cccgcggcgctgcgtgctccccgcg

SEQ ID NO: 3829019 - DNA, 25 bp, Homo sapien
ccgcggcgctgcgtgctccccgcgc

SEQ ID NO: 3829020 - DNA, 25 bp, Homo sapien
gccccgtataagcacgaacactcat

SEQ ID NO: 3829021 - DNA, 25 bp, Homo sapien
cagtcctgccccgtataagcacgaa

SEQ ID NO: 3829022 - DNA, 25 bp, Homo sapien
gaatacagtcctgccccgtataagc

SEQ ID NO: 3829023 - DNA, 25 bp, Homo sapien
gtcctgccccgtataagcacgaaca

SEQ ID NO: 3829024 - DNA, 25 bp, Homo sapien
ctggtgttggggttgttgttgactc

SEQ ID NO: 3829025 - DNA, 25 bp, Homo sapien
ttggggttgttgttgactcactggg

SEQ ID NO: 3829026 - DNA, 25 bp, Homo sapien
gttggggttgttgttgactcactgg

SEQ ID NO: 3829027 - DNA, 25 bp, Homo sapien
gtgttggggttgttgttgactcact

SEQ ID NO: 3829028 - DNA, 25 bp, Homo sapien
cagtcactagaaccttctgcctggc

SEQ ID NO: 3829029 - DNA, 25 bp, Homo sapien
ctgcggcggtcaagcagaatgacgg

SEQ ID NO: 3829030 - DNA, 25 bp, Homo sapien
ccgctcttggctaggtgggatccca

SEQ ID NO: 3829031 - DNA, 25 bp, Homo sapien
gcctggcagcctttgtaggtttggc

SEQ ID NO: 3829032 - DNA, 25 bp, Homo sapien
tggatgaacttggtttccggggaca

SEQ ID NO: 3829033 - DNA, 25 bp, Homo sapien
ttctcagccccggacattccatagg

SEQ ID NO: 3829034 - DNA, 25 bp, Homo sapien
ggaagacacagtccaccccttcgaa

SEQ ID NO: 3829035 - DNA, 25 bp, Homo sapien
tcgaaggcacggtacagggcttctt

SEQ ID NO: 3829036 - DNA, 25 bp, Homo sapien
ggacattccataggaagccacgtgg

SEQ ID NO: 3829037 - DNA, 25 bp, Homo sapien
caggtgttgtgtgtgaggagcccac

SEQ ID NO: 3829038 - DNA, 25 bp, Homo sapien
tctgtctaactccaggtgttgtgtg

SEQ ID NO: 3829039 - DNA, 25 bp, Homo sapien
taactccaggtgttgtgtgtgagga

SEQ ID NO: 3829040 - DNA, 25 bp, Homo sapien
tctaactccaggtgttgtgtgtgag

SEQ ID NO: 3829041 - DNA, 25 bp, Homo sapien
aatcactagtttggtgcctccaaca

SEQ ID NO: 3829042 - DNA, 25 bp, Homo sapien
catcaatcactagtttggtgcctcc

SEQ ID NO: 3829043 - DNA, 25 bp, Homo sapien
ttatagactcaatctgctctttctg

SEQ ID NO: 3829044 - DNA, 25 bp, Homo sapien
tggtgcctccaacatttatagactc

SEQ ID NO: 3829045 - DNA, 25 bp, Homo sapien
atgagccttggaacccgccggcgaa

SEQ ID NO: 3829046 - DNA, 25 bp, Homo sapien
gagtcctcatcgccctgctctatgg

SEQ ID NO: 3829047 - DNA, 25 bp, Homo sapien
cgtccaatgggaaatatggcacaga

SEQ ID NO: 3829048 - DNA, 25 bp, Homo sapien
aaatgcaacattgacagtgctggta

SEQ ID NO: 3829049 - DNA, 25 bp, Homo sapien
ccatgagggtcaattggtcggcgat

SEQ ID NO: 3829050 - DNA, 25 bp, Homo sapien
gctttggttcgggagtagtggtcta

SEQ ID NO: 3829051 - DNA, 25 bp, Homo sapien
aattggtcggcgatggctttggttc

SEQ ID NO: 3829052 - DNA, 25 bp, Homo sapien
aggcatcccattggccatgagggtc

SEQ ID NO: 3829053 - DNA, 25 bp, Homo sapien
ggaggccggagcacacacgtccgaa

SEQ ID NO: 3829054 - DNA, 25 bp, Homo sapien
ccggagcacacacgtccgaagagtg

SEQ ID NO: 3829055 - DNA, 25 bp, Homo sapien
gagcacacacgtccgaagagtgcct

SEQ ID NO: 3829056 - DNA, 25 bp, Homo sapien
aggccggagcacacacgtccgaaga

SEQ ID NO: 3829057 - DNA, 25 bp, Homo sapien
gcctctgctcttcagggccgtagat

SEQ ID NO: 3829058 - DNA, 25 bp, Homo sapien
ctctgctcttcagggccgtagatcc

SEQ ID NO: 3829059 - DNA, 25 bp, Homo sapien
ggtgcctctgctcttcagggccgta

SEQ ID NO: 3829060 - DNA, 25 bp, Homo sapien
tgcctctgctcttcagggccgtaga

SEQ ID NO: 3829061 - DNA, 25 bp, Homo sapien
ggaacatcttgtagaactgagggtt

SEQ ID NO: 3829062 - DNA, 25 bp, Homo sapien
gaccagtgtacacctcagccaggat

SEQ ID NO: 3829063 - DNA, 25 bp, Homo sapien
tctctgacttgggtcctgaaggcgg

SEQ ID NO: 3829064 - DNA, 25 bp, Homo sapien
tcaggacacttagcctcgagactga

SEQ ID NO: 3829065 - DNA, 25 bp, Homo sapien
caccagattgtgtacgtggacccag

SEQ ID NO: 3829066 - DNA, 25 bp, Homo sapien
ccaaatcggaacatgaacagcctct

SEQ ID NO: 3829067 - DNA, 25 bp, Homo sapien
gtggacccagttcatccgtgccttg

SEQ ID NO: 3829068 - DNA, 25 bp, Homo sapien
cgtgccttgtggtccccaaatcgga

SEQ ID NO: 3829069 - DNA, 25 bp, Homo sapien
gacgctctccccatcgttgatgtag

SEQ ID NO: 3829070 - DNA, 25 bp, Homo sapien
caaagaggttgacgctctccccatc

SEQ ID NO: 3829071 - DNA, 25 bp, Homo sapien
gggccatccactcaaagaggttgac

SEQ ID NO: 3829072 - DNA, 25 bp, Homo sapien
cgttgatgtagtacgcctgcccact

SEQ ID NO: 3829073 - DNA, 25 bp, Homo sapien
tccagggctggctgtaccccagctt

SEQ ID NO: 3829074 - DNA, 25 bp, Homo sapien
cccaggaagtaggcacctggatcca

SEQ ID NO: 3829075 - DNA, 25 bp, Homo sapien
tggatccagggctggctgtacccca

SEQ ID NO: 3829076 - DNA, 25 bp, Homo sapien
ctgtcaggtaaacccaggaagtagg

SEQ ID NO: 3829077 - DNA, 25 bp, Homo sapien
agggccagatggaggcgctccataa

SEQ ID NO: 3829078 - DNA, 25 bp, Homo sapien
tgggaggctgcagatgggtctcagg

SEQ ID NO: 3829079 - DNA, 25 bp, Homo sapien
agatggaggcgctccataactgctg

SEQ ID NO: 3829080 - DNA, 25 bp, Homo sapien
agcggtgggaggctgcagatgggtc

SEQ ID NO: 3829081 - DNA, 25 bp, Homo sapien
gcgagcaagccgaggaacagcagca

SEQ ID NO: 3829082 - DNA, 25 bp, Homo sapien
tatctggaaggtgtgcgtcacggcc

SEQ ID NO: 3829083 - DNA, 25 bp, Homo sapien
cttatccggcgcgtagccgagctgg

SEQ ID NO: 3829084 - DNA, 25 bp, Homo sapien
gactgcacgtatagctccacggcgt

SEQ ID NO: 3829085 - DNA, 25 bp, Homo sapien
ggagtgcgggcgctcgatccaggaa

SEQ ID NO: 3829086 - DNA, 25 bp, Homo sapien
gcgggcgctcgatccaggaaggagg

SEQ ID NO: 3829087 - DNA, 25 bp, Homo sapien
agtgcgggcgctcgatccaggaagg

SEQ ID NO: 3829088 - DNA, 25 bp, Homo sapien
tgcgggcgctcgatccaggaaggag

SEQ ID NO: 3829089 - DNA, 25 bp, Homo sapien
gccgttgggacgatcccgggatgtg

SEQ ID NO: 3829090 - DNA, 25 bp, Homo sapien
cgggatgtgggagcgcgtgccaggg

SEQ ID NO: 3829091 - DNA, 25 bp, Homo sapien
gggactcgcgtgcaggcgacagcga

SEQ ID NO: 3829092 - DNA, 25 bp, Homo sapien
gcagtcggagtgatcccaggaaggg

SEQ ID NO: 3829093 - DNA, 25 bp, Homo sapien
gcggggtagatggaccgatcccagg

SEQ ID NO: 3829094 - DNA, 25 bp, Homo sapien
gggtagatggaccgatcccagggcg

SEQ ID NO: 3829095 - DNA, 25 bp, Homo sapien
cgcggggtagatggaccgatcccag

SEQ ID NO: 3829096 - DNA, 25 bp, Homo sapien
ggggtagatggaccgatcccagggc

SEQ ID NO: 3829097 - DNA, 25 bp, Homo sapien
gggagcgctagctggcgctccgggc

SEQ ID NO: 3829098 - DNA, 25 bp, Homo sapien
agcgctagctggcgctccgggcaag

SEQ ID NO: 3829099 - DNA, 25 bp, Homo sapien
agcggggagcgctagctggcgctcc

SEQ ID NO: 3829100 - DNA, 25 bp, Homo sapien
cgctagctggcgctccgggcaagca

SEQ ID NO: 3829101 - DNA, 25 bp, Homo sapien
acggccgcgagggtccagaggagtt

SEQ ID NO: 3829102 - DNA, 25 bp, Homo sapien
ccacggccgcgagggtccagaggag

SEQ ID NO: 3829103 - DNA, 25 bp, Homo sapien
agccgctgcccacggccgcgagggt

SEQ ID NO: 3829104 - DNA, 25 bp, Homo sapien
gcagccgctgcccacggccgcgagg

SEQ ID NO: 3829105 - DNA, 25 bp, Homo sapien
cgggctgacgcaggcctctagttca

SEQ ID NO: 3829106 - DNA, 25 bp, Homo sapien
tcccgcagccaacaatgcagcaagg

SEQ ID NO: 3829107 - DNA, 25 bp, Homo sapien
cagcaagggcgcgtctatacagtcc

SEQ ID NO: 3829108 - DNA, 25 bp, Homo sapien
cagtcctggaggttccgggaattcg

SEQ ID NO: 3829109 - DNA, 25 bp, Homo sapien
caccgaggtcccagaggtcgggctc

SEQ ID NO: 3829110 - DNA, 25 bp, Homo sapien
cccaccaccgaggtcccagaggtcg

SEQ ID NO: 3829111 - DNA, 25 bp, Homo sapien
caccaccgaggtcccagaggtcggg

SEQ ID NO: 3829112 - DNA, 25 bp, Homo sapien
cgtccccctgggcagatctcacttc

SEQ ID NO: 3829113 - DNA, 25 bp, Homo sapien
tggggatcactctgaccctcggttt

SEQ ID NO: 3829114 - DNA, 25 bp, Homo sapien
gggcctggggatcactctgaccctc

SEQ ID NO: 3829115 - DNA, 25 bp, Homo sapien
ggatcactctgaccctcggtttcct

SEQ ID NO: 3829116 - DNA, 25 bp, Homo sapien
cctggggatcactctgaccctcggt

SEQ ID NO: 3829117 - DNA, 25 bp, Homo sapien
tgtaaacagcaacctgctgcagaag

SEQ ID NO: 3829118 - DNA, 25 bp, Homo sapien
atgtaaacagcaacctgctgcagaa

SEQ ID NO: 3829119 - DNA, 25 bp, Homo sapien
gatgtaaacagcaacctgctgcaga

SEQ ID NO: 3829120 - DNA, 25 bp, Homo sapien
cgatgtaaacagcaacctgctgcag

SEQ ID NO: 3829121 - DNA, 25 bp, Homo sapien
gtgtctgggatagacttgactctca

SEQ ID NO: 3829122 - DNA, 25 bp, Homo sapien
tcattataacctgaggccagactgt

SEQ ID NO: 3829123 - DNA, 25 bp, Homo sapien
tgactctcaaaagtactagctgctg

SEQ ID NO: 3829124 - DNA, 25 bp, Homo sapien
aacatggctcccctaagatggctac

SEQ ID NO: 3829125 - DNA, 25 bp, Homo sapien
gacctggacgtctggctcgtagcaa

SEQ ID NO: 3829126 - DNA, 25 bp, Homo sapien
tgcaatgctcaggtcaaggcctgcg

SEQ ID NO: 3829127 - DNA, 25 bp, Homo sapien
tctctggcgacggaaaccactgtct

SEQ ID NO: 3829128 - DNA, 25 bp, Homo sapien
gagtgtgtcacaagatccaggccta

SEQ ID NO: 3829129 - DNA, 25 bp, Homo sapien
cagagttactggacaaatgcagagg

SEQ ID NO: 3829130 - DNA, 25 bp, Homo sapien
tccggcacagccagagttactggac

SEQ ID NO: 3829131 - DNA, 25 bp, Homo sapien
tttacccaagcagtatccggcacag

SEQ ID NO: 3829132 - DNA, 25 bp, Homo sapien
gtgcccgttttacccaagcagtatc

SEQ ID NO: 3829133 - DNA, 25 bp, Homo sapien
ggacccgctggagctataccgctca

SEQ ID NO: 3829134 - DNA, 25 bp, Homo sapien
gaagtaaccttcctcatcgtcgctg

SEQ ID NO: 3829135 - DNA, 25 bp, Homo sapien
cattctggttcgagcttgggtcatc

SEQ ID NO: 3829136 - DNA, 25 bp, Homo sapien
ccttccaggcggaagatgagatctt

SEQ ID NO: 3829137 - DNA, 25 bp, Homo sapien
tttgaggagcaaccgacaacaccta

SEQ ID NO: 3829138 - DNA, 25 bp, Homo sapien
ccaaagttggccaaataagggcatg

SEQ ID NO: 3829139 - DNA, 25 bp, Homo sapien
cacacgatggtgtaacctctttgag

SEQ ID NO: 3829140 - DNA, 25 bp, Homo sapien
gaagcaggtgtacccacccatcatg

SEQ ID NO: 3829141 - DNA, 25 bp, Homo sapien
aaggatgaagaaggttttggctgct

SEQ ID NO: 3829142 - DNA, 25 bp, Homo sapien
gctgtgggaacctccatttccttgt

SEQ ID NO: 3829143 - DNA, 25 bp, Homo sapien
gctggtggtccacttttttgtggcc

SEQ ID NO: 3829144 - DNA, 25 bp, Homo sapien
gactggctgtgggaacctccatttc

SEQ ID NO: 3829145 - DNA, 25 bp, Homo sapien
tgtcgagtagcacgttcggtggcaa

SEQ ID NO: 3829146 - DNA, 25 bp, Homo sapien
tctggattgcgtgcttccaggcttc

SEQ ID NO: 3829147 - DNA, 25 bp, Homo sapien
acgttcggtggcaatatcttccagg

SEQ ID NO: 3829148 - DNA, 25 bp, Homo sapien
cttctggattgcgtgcttccaggct

SEQ ID NO: 3829149 - DNA, 25 bp, Homo sapien
acttcatcatccagccattccccgg

SEQ ID NO: 3829150 - DNA, 25 bp, Homo sapien
gccatcttgatcagaacttcatcat

SEQ ID NO: 3829151 - DNA, 25 bp, Homo sapien
tgagatgccatcttgatcagaactt

SEQ ID NO: 3829152 - DNA, 25 bp, Homo sapien
gccattccccggtgacggcgttgta

SEQ ID NO: 3829153 - DNA, 25 bp, Homo sapien
cggaagcactccctcattgctcctc

SEQ ID NO: 3829154 - DNA, 25 bp, Homo sapien
tctacgggctcgatgtagcgcttcg

SEQ ID NO: 3829155 - DNA, 25 bp, Homo sapien
caaagtacacatcccggtctacggg

SEQ ID NO: 3829156 - DNA, 25 bp, Homo sapien
gggcttgtgccgattatactcctcc

SEQ ID NO: 3829157 - DNA, 25 bp, Homo sapien
ttggcctccatctgtagacgcacgt

SEQ ID NO: 3829158 - DNA, 25 bp, Homo sapien
gagaagcggcaaggggagggctcag

SEQ ID NO: 3829159 - DNA, 25 bp, Homo sapien
tctgagaagcggcaaggggagggct

SEQ ID NO: 3829160 - DNA, 25 bp, Homo sapien
gaagcggcaaggggagggctcagag

SEQ ID NO: 3829161 - DNA, 25 bp, Homo sapien
ctctgagaagcggcaaggggagggc

SEQ ID NO: 3829162 - DNA, 25 bp, Homo sapien
tgtcatcgcggacaaagccagagtt

SEQ ID NO: 3829163 - DNA, 25 bp, Homo sapien
gggcttgcccggtctgtccttcagc

SEQ ID NO: 3829164 - DNA, 25 bp, Homo sapien
acttgccctcgatgtagtgctccag

SEQ ID NO: 3829165 - DNA, 25 bp, Homo sapien
cagagttggagttgtacttgatgta

SEQ ID NO: 3829166 - DNA, 25 bp, Homo sapien
gaaggaaaacgagatgtcaagagac

SEQ ID NO: 3829167 - DNA, 25 bp, Homo sapien
ggtgacgggtctccttctgaatgct

SEQ ID NO: 3829168 - DNA, 25 bp, Homo sapien
tgtggccaccttaggtgacagaagc

SEQ ID NO: 3829169 - DNA, 25 bp, Homo sapien
aaaaggcctcttcagttgggcaggg

SEQ ID NO: 3829170 - DNA, 25 bp, Homo sapien
tcagtgcccgtctccgtgtggatct

SEQ ID NO: 3829171 - DNA, 25 bp, Homo sapien
caccactatcagctgatggccggaa

SEQ ID NO: 3829172 - DNA, 25 bp, Homo sapien
ggtcagtgtagagatccccaactcc

SEQ ID NO: 3829173 - DNA, 25 bp, Homo sapien
tggccggaacgctcaaaagtgaagt

SEQ ID NO: 3829174 - DNA, 25 bp, Homo sapien
gagcgggggtgtctggagtgttgct

SEQ ID NO: 3829175 - DNA, 25 bp, Homo sapien
agcgggggtgtctggagtgttgctt

SEQ ID NO: 3829176 - DNA, 25 bp, Homo sapien
gctctcgcaaatccggttgcaggca

SEQ ID NO: 3829177 - DNA, 25 bp, Homo sapien
gagagtagaagaagagcgccatccc

SEQ ID NO: 3829178 - DNA, 25 bp, Homo sapien
aagaagagcgccatcccgcggacac

SEQ ID NO: 3829179 - DNA, 25 bp, Homo sapien
tcaaagggagcaaggcccatgctct

SEQ ID NO: 3829180 - DNA, 25 bp, Homo sapien
gaagaagggagagagtcgaaggtca

SEQ ID NO: 3829181 - DNA, 25 bp, Homo sapien
ggtcacgtcgctcatgttctcgtct

SEQ ID NO: 3829182 - DNA, 25 bp, Homo sapien
cagagagggtccttacttgggggct

SEQ ID NO: 3829183 - DNA, 25 bp, Homo sapien
gaggtggtctagcttctggctgtgt

SEQ ID NO: 3829184 - DNA, 25 bp, Homo sapien
tgtctagatgatcatggtctctgga

SEQ ID NO: 3829185 - DNA, 25 bp, Homo sapien
catgttatcgaggtcactgaacact

SEQ ID NO: 3829186 - DNA, 25 bp, Homo sapien
ccggtggttgtctagatgatcatgg

SEQ ID NO: 3829187 - DNA, 25 bp, Homo sapien
tggtctctggatgccatgttatcga

SEQ ID NO: 3829188 - DNA, 25 bp, Homo sapien
agggtcctggtggtcccctgagcac

SEQ ID NO: 3829189 - DNA, 25 bp, Homo sapien
tagggtcctggtggtcccctgagca

SEQ ID NO: 3829190 - DNA, 25 bp, Homo sapien
ttagggtcctggtggtcccctgagc

SEQ ID NO: 3829191 - DNA, 25 bp, Homo sapien
cttagggtcctggtggtcccctgag

SEQ ID NO: 3829192 - DNA, 25 bp, Homo sapien
ctcaccccgcttctcactggggtat

SEQ ID NO: 3829193 - DNA, 25 bp, Homo sapien
cagatactgtctgaggttgccctca

SEQ ID NO: 3829194 - DNA, 25 bp, Homo sapien
tcagaggtgtcctggcaagactggc

SEQ ID NO: 3829195 - DNA, 25 bp, Homo sapien
catgaccggcctgaaatactcttta

SEQ ID NO: 3829196 - DNA, 25 bp, Homo sapien
tgggaggctacccaaggaaactgac

SEQ ID NO: 3829197 - DNA, 25 bp, Homo sapien
caggctgtcttcgtcagactcgtac

SEQ ID NO: 3829198 - DNA, 25 bp, Homo sapien
acttccgattactgtatgagtggcc

SEQ ID NO: 3829199 - DNA, 25 bp, Homo sapien
gctgcccaggctgtcttcgtcagac

SEQ ID NO: 3829200 - DNA, 25 bp, Homo sapien
gtcagactcgtacttccgattactg

SEQ ID NO: 3829201 - DNA, 25 bp, Homo sapien
ggtggacgcagcatcacagctgtca

SEQ ID NO: 3829202 - DNA, 25 bp, Homo sapien
gcattaagcctttgcacttccaggg

SEQ ID NO: 3829203 - DNA, 25 bp, Homo sapien
cgggaggagttgaggagattccact

SEQ ID NO: 3829204 - DNA, 25 bp, Homo sapien
tttcttttcgaggtccagagcatta

SEQ ID NO: 3829205 - DNA, 25 bp, Homo sapien
ttttcgaggtccagagcattaagcc

SEQ ID NO: 3829206 - DNA, 25 bp, Homo sapien
tggcgggccaaagccgcacccaaga

SEQ ID NO: 3829207 - DNA, 25 bp, Homo sapien
tgccacacagactacggtgtcggcc

SEQ ID NO: 3829208 - DNA, 25 bp, Homo sapien
gcctggctgtctggcgggccaaagc

SEQ ID NO: 3829209 - DNA, 25 bp, Homo sapien
aggaagtgattagcggaggagaggc

SEQ ID NO: 3829210 - DNA, 25 bp, Homo sapien
agaagcgcccaccctcgtggtagcg

SEQ ID NO: 3829211 - DNA, 25 bp, Homo sapien
gcaactgcgagtacatgagtcccag

SEQ ID NO: 3829212 - DNA, 25 bp, Homo sapien
cttcagagagacatcggctaggatg

SEQ ID NO: 3829213 - DNA, 25 bp, Homo sapien
ccagctcgcccaggttggctgcgtg

SEQ ID NO: 3829214 - DNA, 25 bp, Homo sapien
ccagccactagggatacacacagaa

SEQ ID NO: 3829215 - DNA, 25 bp, Homo sapien
tctaccaagcatctactcagtgcca

SEQ ID NO: 3829216 - DNA, 25 bp, Homo sapien
cattctacgaatctctaccaagcat

SEQ ID NO: 3829217 - DNA, 25 bp, Homo sapien
tggcctgaggtaggtatcccttcat

SEQ ID NO: 3829218 - DNA, 25 bp, Homo sapien
cacactggatgttaggtgggcccta

SEQ ID NO: 3829219 - DNA, 25 bp, Homo sapien
gtgagccaagccaagaacgctgaag

SEQ ID NO: 3829220 - DNA, 25 bp, Homo sapien
tgggccctaaatcctatatgactgc

SEQ ID NO: 3829221 - DNA, 25 bp, Homo sapien
ggaaggcatggctctactgacacct

SEQ ID NO: 3829222 - DNA, 25 bp, Homo sapien
gtcgccagcttcagcggcctttagt

SEQ ID NO: 3829223 - DNA, 25 bp, Homo sapien
aaaagctcgcgccactaggatcatg

SEQ ID NO: 3829224 - DNA, 25 bp, Homo sapien
taggatcatggactgcctgtcgcca

SEQ ID NO: 3829225 - DNA, 25 bp, Homo sapien
ctttagtaagtaatcaaatcctttg

SEQ ID NO: 3829226 - DNA, 25 bp, Homo sapien
ctgcagcccaggttcctaccagctc

SEQ ID NO: 3829227 - DNA, 25 bp, Homo sapien
aggttcctaccagctcctcctgggt

SEQ ID NO: 3829228 - DNA, 25 bp, Homo sapien
ccaggttcctaccagctcctcctgg

SEQ ID NO: 3829229 - DNA, 25 bp, Homo sapien
tcctcctgggtgacagctgcagtac

SEQ ID NO: 3829230 - DNA, 25 bp, Homo sapien
atcacagtccgtcatctccagggca

SEQ ID NO: 3829231 - DNA, 25 bp, Homo sapien
gccagcatcatgtaccggggctcgt

SEQ ID NO: 3829232 - DNA, 25 bp, Homo sapien
tgttgtaccagtgcagggcctctag

SEQ ID NO: 3829233 - DNA, 25 bp, Homo sapien
gtcctgcattccgtcgtactcaccg

SEQ ID NO: 3829234 - DNA, 25 bp, Homo sapien
tctgctgcctgggtatacaagtccc

SEQ ID NO: 3829235 - DNA, 25 bp, Homo sapien
ttcatggcttccatcgctgcctctg

SEQ ID NO: 3829236 - DNA, 25 bp, Homo sapien
tggttggccagtcggcccttcatgg

SEQ ID NO: 3829237 - DNA, 25 bp, Homo sapien
cttcagccttttggtagtactggtt

SEQ ID NO: 3829238 - DNA, 25 bp, Homo sapien
gactagccggcagtgattttcctgg

SEQ ID NO: 3829239 - DNA, 25 bp, Homo sapien
tagcccgtttgcttgggactagccg

SEQ ID NO: 3829240 - DNA, 25 bp, Homo sapien
tatagagtctctgctggtagctgcc

SEQ ID NO: 3829241 - DNA, 25 bp, Homo sapien
tactgccctaagagacagctataga

SEQ ID NO: 3829242 - DNA, 25 bp, Homo sapien
gaatgctttgcactaagccacggca

SEQ ID NO: 3829243 - DNA, 25 bp, Homo sapien
tttgaaaagcccaccgtagaaagca

SEQ ID NO: 3829244 - DNA, 25 bp, Homo sapien
gacattgcagtcacgttgtgggagc

SEQ ID NO: 3829245 - DNA, 25 bp, Homo sapien
tacacgccccgtgacttaggaaagc

SEQ ID NO: 3829246 - DNA, 25 bp, Homo sapien
cctcccaccttggccctcctcaaag

SEQ ID NO: 3829247 - DNA, 25 bp, Homo sapien
aggcgggagccaccgcacctagcat

SEQ ID NO: 3829248 - DNA, 25 bp, Homo sapien
tacaggcgggagccaccgcacctag

SEQ ID NO: 3829249 - DNA, 25 bp, Homo sapien
tcaaagtgctgagattacaggcggg

SEQ ID NO: 3829250 - DNA, 25 bp, Homo sapien
taggctgcttttgcatttagggttg

SEQ ID NO: 3829251 - DNA, 25 bp, Homo sapien
tgaaggacccattttaatgaatagt

SEQ ID NO: 3829252 - DNA, 25 bp, Homo sapien
aagaatggtttgtatgttatactct

SEQ ID NO: 3829253 - DNA, 25 bp, Homo sapien
cccactaaggtgttgaaggacccat

SEQ ID NO: 3829254 - DNA, 25 bp, Homo sapien
agactgaggcgggaggctcacttaa

SEQ ID NO: 3829255 - DNA, 25 bp, Homo sapien
ttaagtccaggagttcgagaccagc

SEQ ID NO: 3829256 - DNA, 25 bp, Homo sapien
acttaagtccaggagttcgagacca

SEQ ID NO: 3829257 - DNA, 25 bp, Homo sapien
actgaggcgggaggctcacttaagt

SEQ ID NO: 3829258 - DNA, 25 bp, Homo sapien
gaactttggaactaacgcttgcatg

SEQ ID NO: 3829259 - DNA, 25 bp, Homo sapien
ttttacattacaacagcagggctga

SEQ ID NO: 3829260 - DNA, 25 bp, Homo sapien
catttgcagcagaggctatatggcc

SEQ ID NO: 3829261 - DNA, 25 bp, Homo sapien
gacaaaagggtgatcagttccaact

SEQ ID NO: 3829262 - DNA, 25 bp, Homo sapien
taagggcccttaaagaagcatttgc

SEQ ID NO: 3829263 - DNA, 25 bp, Homo sapien
tgagtgcactgactagggctggctc

SEQ ID NO: 3829264 - DNA, 25 bp, Homo sapien
caacgaatcattgtttggaggaacc

SEQ ID NO: 3829265 - DNA, 25 bp, Homo sapien
catttgcttagctctgtatccaggc

SEQ ID NO: 3829266 - DNA, 25 bp, Homo sapien
ctgaaagggccattaaactccagtt

SEQ ID NO: 3829267 - DNA, 25 bp, Homo sapien
ttcccaagatcctctaaatagcagc

SEQ ID NO: 3829268 - DNA, 25 bp, Homo sapien
gagcagtttacttggcttggaggtc

SEQ ID NO: 3829269 - DNA, 25 bp, Homo sapien
gcatttgataaattcccagagtggt

SEQ ID NO: 3829270 - DNA, 25 bp, Homo sapien
tgtaacgcaggccacttctctgggc

SEQ ID NO: 3829271 - DNA, 25 bp, Homo sapien
catcttgagtaggttaaagggtcac

SEQ ID NO: 3829272 - DNA, 25 bp, Homo sapien
gaaaatggaacttagtacatatgcc

SEQ ID NO: 3829273 - DNA, 25 bp, Homo sapien
agggtcaccttagagactagaaaca

SEQ ID NO: 3829274 - DNA, 25 bp, Homo sapien
caagatagaggtcagaagagtggcc

SEQ ID NO: 3829275 - DNA, 25 bp, Homo sapien
cccagtgggtttacacttgcagcaa

SEQ ID NO: 3829276 - DNA, 25 bp, Homo sapien
tagaaaatgtccctaccaagtataa

SEQ ID NO: 3829277 - DNA, 25 bp, Homo sapien
gagcgtgcagtttaatctacatagg

SEQ ID NO: 3829278 - DNA, 25 bp, Homo sapien
ggtattagacttttcagggccatga

SEQ ID NO: 3829279 - DNA, 25 bp, Homo sapien
gaacgctggtgatgctttagacaca

SEQ ID NO: 3829280 - DNA, 25 bp, Homo sapien
tagttctgttcaacacagggagtgg

SEQ ID NO: 3829281 - DNA, 25 bp, Homo sapien
taggcaggaactctacgaacgctgg

SEQ ID NO: 3829282 - DNA, 25 bp, Homo sapien
gagactggagccttaatccagcgcc

SEQ ID NO: 3829283 - DNA, 25 bp, Homo sapien
cccgaagagactggagccttaatcc

SEQ ID NO: 3829284 - DNA, 25 bp, Homo sapien
acgcccccgaagagactggagcctt

SEQ ID NO: 3829285 - DNA, 25 bp, Homo sapien
agagactggagccttaatccagcgc

SEQ ID NO: 3829286 - DNA, 25 bp, Homo sapien
acaatgccccgccccggtgcacgcg

SEQ ID NO: 3829287 - DNA, 25 bp, Homo sapien
cccgccccggtgcacgcggctccgc

SEQ ID NO: 3829288 - DNA, 25 bp, Homo sapien
ccgccccggtgcacgcggctccgcc

SEQ ID NO: 3829289 - DNA, 25 bp, Homo sapien
tgccccgccccggtgcacgcggctc

SEQ ID NO: 3829290 - DNA, 25 bp, Homo sapien
caggcggcggccatgttgctggtgg

SEQ ID NO: 3829291 - DNA, 25 bp, Homo sapien
tggagaaactccggcggacacgtgg

SEQ ID NO: 3829292 - DNA, 25 bp, Homo sapien
gtggagaaactccggcggacacgtg

SEQ ID NO: 3829293 - DNA, 25 bp, Homo sapien
tggtggagaaactccggcggacacg

SEQ ID NO: 3829294 - DNA, 25 bp, Homo sapien
gcggacggcggcaacggcccagtta

SEQ ID NO: 3829295 - DNA, 25 bp, Homo sapien
cgcggacggcggcaacggcccagtt

SEQ ID NO: 3829296 - DNA, 25 bp, Homo sapien
gcgcggacggcggcaacggcccagt

SEQ ID NO: 3829297 - DNA, 25 bp, Homo sapien
caagtagctgcaataattggcatgc

SEQ ID NO: 3829298 - DNA, 25 bp, Homo sapien
cccaggttgaagtgctctgccgtga

SEQ ID NO: 3829299 - DNA, 25 bp, Homo sapien
gccaaagtctttatcatcccatgta

SEQ ID NO: 3829300 - DNA, 25 bp, Homo sapien
attggcatgcaccatccgctcagct

SEQ ID NO: 3829301 - DNA, 25 bp, Homo sapien
gaaacactcaagcagcgggtgcaag

SEQ ID NO: 3829302 - DNA, 25 bp, Homo sapien
cactgccagacagaaggatagaggt

SEQ ID NO: 3829303 - DNA, 25 bp, Homo sapien
cgggtagaccaagccaacaagtgtg

SEQ ID NO: 3829304 - DNA, 25 bp, Homo sapien
tggtcccagccatgattaaaacact

SEQ ID NO: 3829305 - DNA, 25 bp, Homo sapien
agccagccgcgcagtccttcagctc

SEQ ID NO: 3829306 - DNA, 25 bp, Homo sapien
ggagagccagccgcgcagtccttca

SEQ ID NO: 3829307 - DNA, 25 bp, Homo sapien
ctagaggagagccagccgcgcagtc

SEQ ID NO: 3829308 - DNA, 25 bp, Homo sapien
agaggagagccagccgcgcagtcct

SEQ ID NO: 3829309 - DNA, 25 bp, Homo sapien
gtacaactgggtcatcctcttcatt

SEQ ID NO: 3829310 - DNA, 25 bp, Homo sapien
ctcctgtacaactgggtcatcctct

SEQ ID NO: 3829311 - DNA, 25 bp, Homo sapien
ctgggtcatcctcttcattggccat

SEQ ID NO: 3829312 - DNA, 25 bp, Homo sapien
ctgtacaactgggtcatcctcttca

SEQ ID NO: 3829313 - DNA, 25 bp, Homo sapien
tagatacagcttttccgccagactc

SEQ ID NO: 3829314 - DNA, 25 bp, Homo sapien
gcttttccgccagactcttggccaa

SEQ ID NO: 3829315 - DNA, 25 bp, Homo sapien
gactcttggccaagtacacatcgat

SEQ ID NO: 3829316 - DNA, 25 bp, Homo sapien
tccgccagactcttggccaagtaca

SEQ ID NO: 3829317 - DNA, 25 bp, Homo sapien
ggcaggtgggaattcgtgaatccat

SEQ ID NO: 3829318 - DNA, 25 bp, Homo sapien
tggttgtgtgagcttcctcacaaga

SEQ ID NO: 3829319 - DNA, 25 bp, Homo sapien
gaatccattcgctctccttatctgg

SEQ ID NO: 3829320 - DNA, 25 bp, Homo sapien
ctgaggccagacgacgggcaggtgg

SEQ ID NO: 3829321 - DNA, 25 bp, Homo sapien
gaatgtcatcgtaggtcatcgaggc

SEQ ID NO: 3829322 - DNA, 25 bp, Homo sapien
ctgagaggtgcggaatgtcatcgta

SEQ ID NO: 3829323 - DNA, 25 bp, Homo sapien
tcatcgaggctggacgcacagggta

SEQ ID NO: 3829324 - DNA, 25 bp, Homo sapien
tcgtaggtcatcgaggctggacgca

SEQ ID NO: 3829325 - DNA, 25 bp, Homo sapien
ggttcagggtgtcgatggccatctc

SEQ ID NO: 3829326 - DNA, 25 bp, Homo sapien
cgtccacgttcagcgcaatctgctc

SEQ ID NO: 3829327 - DNA, 25 bp, Homo sapien
aatctgctcccctttgctgcggcaa

SEQ ID NO: 3829328 - DNA, 25 bp, Homo sapien
gaatacgtgctggtctcgtcggcgc

SEQ ID NO: 3829329 - DNA, 25 bp, Homo sapien
gggatgagaaaacccatggccttgt

SEQ ID NO: 3829330 - DNA, 25 bp, Homo sapien
ctgtgtgaacgcagggaaaccggac

SEQ ID NO: 3829331 - DNA, 25 bp, Homo sapien
cacagggagaagcaacgtcacaggg

SEQ ID NO: 3829332 - DNA, 25 bp, Homo sapien
gctctgggaccagctagttcaggag

SEQ ID NO: 3829333 - DNA, 25 bp, Homo sapien
agtgcagcggcataacgggatgtgt

SEQ ID NO: 3829334 - DNA, 25 bp, Homo sapien
taacgggatgtgttactggtggtct

SEQ ID NO: 3829335 - DNA, 25 bp, Homo sapien
cggcataacgggatgtgttactggt

SEQ ID NO: 3829336 - DNA, 25 bp, Homo sapien
gcagcggcataacgggatgtgttac

SEQ ID NO: 3829337 - DNA, 25 bp, Homo sapien
acaaaattctgtccctaaacttatg

SEQ ID NO: 3829338 - DNA, 25 bp, Homo sapien
accccatctggtcaggcagtgtcca

SEQ ID NO: 3829339 - DNA, 25 bp, Homo sapien
cttccagtcccctgacaatgtgtca

SEQ ID NO: 3829340 - DNA, 25 bp, Homo sapien
tgtcccgggaggacaaatgaacttg

SEQ ID NO: 3829341 - DNA, 25 bp, Homo sapien
cagggtcaggctcattaagacatca

SEQ ID NO: 3829342 - DNA, 25 bp, Homo sapien
tcaaggctcatctgcgtggtagcat

SEQ ID NO: 3829343 - DNA, 25 bp, Homo sapien
tatgtggtcggtcgctgactgagac

SEQ ID NO: 3829344 - DNA, 25 bp, Homo sapien
gactgagacgtaatcacacagcgcg

SEQ ID NO: 3829345 - DNA, 25 bp, Homo sapien
caggatgccatgtaaaggtgtcagg

SEQ ID NO: 3829346 - DNA, 25 bp, Homo sapien
tgcttggcgtcagccttatccaggt

SEQ ID NO: 3829347 - DNA, 25 bp, Homo sapien
caggtaggagaagctgggccgcagc

SEQ ID NO: 3829348 - DNA, 25 bp, Homo sapien
ctcccggtgcttggcgtcagcctta

SEQ ID NO: 3829349 - DNA, 25 bp, Homo sapien
tgcttaacatcgtcttccgcctcat

SEQ ID NO: 3829350 - DNA, 25 bp, Homo sapien
cgtgatctgcttaacatcgtcttcc

SEQ ID NO: 3829351 - DNA, 25 bp, Homo sapien
cttccgcctcatcctgtgaagagtc

SEQ ID NO: 3829352 - DNA, 25 bp, Homo sapien
atcgtcttccgcctcatcctgtgaa

SEQ ID NO: 3829353 - DNA, 25 bp, Homo sapien
ggccatagtaatgcaggtggaccca

SEQ ID NO: 3829354 - DNA, 25 bp, Homo sapien
cctcaggccatagtaatgcaggtgg

SEQ ID NO: 3829355 - DNA, 25 bp, Homo sapien
tcataggactgcacacggcgctggc

SEQ ID NO: 3829356 - DNA, 25 bp, Homo sapien
gcaggaactcataggactgcacacg

SEQ ID NO: 3829357 - DNA, 25 bp, Homo sapien
gcacagcaggtactgacgctcatgc

SEQ ID NO: 3829358 - DNA, 25 bp, Homo sapien
gacgctcatgctcagagcgactgtc

SEQ ID NO: 3829359 - DNA, 25 bp, Homo sapien
ctgggtgacttgacgagctccgtgt

SEQ ID NO: 3829360 - DNA, 25 bp, Homo sapien
tgacttgacgagctccgtgttctcc

SEQ ID NO: 3829361 - DNA, 25 bp, Homo sapien
tggcatcagcatcatcaggtactca

SEQ ID NO: 3829362 - DNA, 25 bp, Homo sapien
ggtggcatcagcatcatcaggtact

SEQ ID NO: 3829363 - DNA, 25 bp, Homo sapien
tcctggctgggtggcatcagcatca

SEQ ID NO: 3829364 - DNA, 25 bp, Homo sapien
tgggtggcatcagcatcatcaggta

SEQ ID NO: 3829365 - DNA, 25 bp, Homo sapien
ctgggccatcgacaggacgttgctg

SEQ ID NO: 3829366 - DNA, 25 bp, Homo sapien
ttcatcaggatcttgatctgatcgg

SEQ ID NO: 3829367 - DNA, 25 bp, Homo sapien
tcaggatcttgatctgatcggccag

SEQ ID NO: 3829368 - DNA, 25 bp, Homo sapien
cgcagctgggccatcgacaggacgt

SEQ ID NO: 3829369 - DNA, 25 bp, Homo sapien
cagccacggaatcgatggaggggcc

SEQ ID NO: 3829370 - DNA, 25 bp, Homo sapien
aggctcatcaagttggcaaaaggca

SEQ ID NO: 3829371 - DNA, 25 bp, Homo sapien
ttggaccaacatcgccaccttctgg

SEQ ID NO: 3829372 - DNA, 25 bp, Homo sapien
tggatgccccgcagaacagccacgg

SEQ ID NO: 3829373 - DNA, 25 bp, Homo sapien
gccattgcaaaagccttccatgatg

SEQ ID NO: 3829374 - DNA, 25 bp, Homo sapien
aaggtgctgacaaactgcgctgggc

SEQ ID NO: 3829375 - DNA, 25 bp, Homo sapien
tggtcctatgtaatacgcgatgcgc

SEQ ID NO: 3829376 - DNA, 25 bp, Homo sapien
cgtgtaacaaaggacaacagccgca

SEQ ID NO: 3829377 - DNA, 25 bp, Homo sapien
actgaatggaggcatggattttgca

SEQ ID NO: 3829378 - DNA, 25 bp, Homo sapien
tgaatggaggcatggattttgcatt

SEQ ID NO: 3829379 - DNA, 25 bp, Homo sapien
tgactgaatggaggcatggattttg

SEQ ID NO: 3829380 - DNA, 25 bp, Homo sapien
gtgactgaatggaggcatggatttt

SEQ ID NO: 3829381 - DNA, 25 bp, Homo sapien
cattcagggagctcaaatgtaacag

SEQ ID NO: 3829382 - DNA, 25 bp, Homo sapien
ggtccatgccatgatctctgcattc

SEQ ID NO: 3829383 - DNA, 25 bp, Homo sapien
ggagctcaaatgtaacagccgccat

SEQ ID NO: 3829384 - DNA, 25 bp, Homo sapien
gtgtctgaatgagagcccggtccat

SEQ ID NO: 3829385 - DNA, 25 bp, Homo sapien
tgcacgtgacaccaagagaaccagg

SEQ ID NO: 3829386 - DNA, 25 bp, Homo sapien
ggaagacaactggtccctgcacgtg

SEQ ID NO: 3829387 - DNA, 25 bp, Homo sapien
tgacaccaagagaaccagggatgaa

SEQ ID NO: 3829388 - DNA, 25 bp, Homo sapien
tggtccctgcacgtgacaccaagag

SEQ ID NO: 3829389 - DNA, 25 bp, Homo sapien
agcaggcacgccgctgtgagggctg

SEQ ID NO: 3829390 - DNA, 25 bp, Homo sapien
tttggtcacggttgccacctctttc

SEQ ID NO: 3829391 - DNA, 25 bp, Homo sapien
ctttcctaaccacccagcggctctg

SEQ ID NO: 3829392 - DNA, 25 bp, Homo sapien
agcggctctgcgtgaacttccacat

SEQ ID NO: 3829393 - DNA, 25 bp, Homo sapien
gtcacggttgccacctctttcctaa

SEQ ID NO: 3829394 - DNA, 25 bp, Homo sapien
tcttgatgaactccccatcataagg

SEQ ID NO: 3829395 - DNA, 25 bp, Homo sapien
agcatgtgctgccgctggaccacat

SEQ ID NO: 3829396 - DNA, 25 bp, Homo sapien
cacatccgggtgcttcttgatgaac

SEQ ID NO: 3829397 - DNA, 25 bp, Homo sapien
tggatacccgtccacagcatgtgct

SEQ ID NO: 3829398 - DNA, 25 bp, Homo sapien
tgcatccggcttctttggcatggtt

SEQ ID NO: 3829399 - DNA, 25 bp, Homo sapien
tgtgcatccggcttctttggcatgg

SEQ ID NO: 3829400 - DNA, 25 bp, Homo sapien
ctgattgtgcatccggcttctttgg

SEQ ID NO: 3829401 - DNA, 25 bp, Homo sapien
gattgtgcatccggcttctttggca

SEQ ID NO: 3829402 - DNA, 25 bp, Homo sapien
tgctgctgggcaagcgaccagctgc

SEQ ID NO: 3829403 - DNA, 25 bp, Homo sapien
cccgcttgttgacccaagagggtga

SEQ ID NO: 3829404 - DNA, 25 bp, Homo sapien
tcccagcgtgccgagagtcatgcgg

SEQ ID NO: 3829405 - DNA, 25 bp, Homo sapien
gtggaagagagaaccgtcccagcgt

SEQ ID NO: 3829406 - DNA, 25 bp, Homo sapien
caacgcgtggttctgctgggccttg

SEQ ID NO: 3829407 - DNA, 25 bp, Homo sapien
ggttttggctacttggatccgctgg

SEQ ID NO: 3829408 - DNA, 25 bp, Homo sapien
acttggatccgctggtccccacaga

SEQ ID NO: 3829409 - DNA, 25 bp, Homo sapien
ctccagcaacgcgtggttctgctgg

SEQ ID NO: 3829410 - DNA, 25 bp, Homo sapien
cgtcctcctcgccctcctcgctcac

SEQ ID NO: 3829411 - DNA, 25 bp, Homo sapien
ctcctgctcctcgtcctcctcgccc

SEQ ID NO: 3829412 - DNA, 25 bp, Homo sapien
tcctgctcctcgtcctcctcgccct

SEQ ID NO: 3829413 - DNA, 25 bp, Homo sapien
cctcgtcctcctcgccctcctcgct

SEQ ID NO: 3829414 - DNA, 25 bp, Homo sapien
ctgggggaagtgtccatgggctcct

SEQ ID NO: 3829415 - DNA, 25 bp, Homo sapien
ggggaagtgtccatgggctcctcct

SEQ ID NO: 3829416 - DNA, 25 bp, Homo sapien
tgggggaagtgtccatgggctcctc

SEQ ID NO: 3829417 - DNA, 25 bp, Homo sapien
ggaagtgtccatgggctcctcctcc

SEQ ID NO: 3829418 - DNA, 25 bp, Homo sapien
gcccgagaggcagcccgttggccag

SEQ ID NO: 3829419 - DNA, 25 bp, Homo sapien
cagcccgcccgagaggcagcccgtt

SEQ ID NO: 3829420 - DNA, 25 bp, Homo sapien
tgtgcccgcagcccgcccgagaggc

SEQ ID NO: 3829421 - DNA, 25 bp, Homo sapien
ccgcccgagaggcagcccgttggcc

SEQ ID NO: 3829422 - DNA, 25 bp, Homo sapien
tggggcgggtgcccgttgaagctgt

SEQ ID NO: 3829423 - DNA, 25 bp, Homo sapien
ctggggcgggtgcccgttgaagctg

SEQ ID NO: 3829424 - DNA, 25 bp, Homo sapien
accagtatctgcttgcaaccggcgg

SEQ ID NO: 3829425 - DNA, 25 bp, Homo sapien
tccgagatgccgctgaagagtgtgt

SEQ ID NO: 3829426 - DNA, 25 bp, Homo sapien
acaaactgtctctgaaaggtggcct

SEQ ID NO: 3829427 - DNA, 25 bp, Homo sapien
tgtcctgtagcatgcggtccgagat

SEQ ID NO: 3829428 - DNA, 25 bp, Homo sapien
cagtaaaagccctgtgaggcctcca

SEQ ID NO: 3829429 - DNA, 25 bp, Homo sapien
taggcccacgtgagagcagatgctc

SEQ ID NO: 3829430 - DNA, 25 bp, Homo sapien
aaatgcccggcttcgagtctgcaga

SEQ ID NO: 3829431 - DNA, 25 bp, Homo sapien
tacagttagggccatggtgtctcct

SEQ ID NO: 3829432 - DNA, 25 bp, Homo sapien
ccttctgctcatccggggaagcagc

SEQ ID NO: 3829433 - DNA, 25 bp, Homo sapien
caccttctgctcatccggggaagca

SEQ ID NO: 3829434 - DNA, 25 bp, Homo sapien
aacaccttctgctcatccggggaag

SEQ ID NO: 3829435 - DNA, 25 bp, Homo sapien
aaacaccttctgctcatccggggaa

SEQ ID NO: 3829436 - DNA, 25 bp, Homo sapien
tttgttagcgtacagagttggagca

SEQ ID NO: 3829437 - DNA, 25 bp, Homo sapien
tcagcctcccacgactatgggcatt

SEQ ID NO: 3829438 - DNA, 25 bp, Homo sapien
taaaaccgagtgtgccagaaaatct

SEQ ID NO: 3829439 - DNA, 25 bp, Homo sapien
ttggagcaggatatttaaaaccgag

SEQ ID NO: 3829440 - DNA, 25 bp, Homo sapien
tcaagcttgctcaggaaaaggcccc

SEQ ID NO: 3829441 - DNA, 25 bp, Homo sapien
catcaaattaggtacgttcacggcc

SEQ ID NO: 3829442 - DNA, 25 bp, Homo sapien
ggcagtcaggtccagcagtgcaaga

SEQ ID NO: 3829443 - DNA, 25 bp, Homo sapien
gaccgactggcgtttcgaccatcaa

SEQ ID NO: 3829444 - DNA, 25 bp, Homo sapien
gaagcgacaatctaagctgcacgga

SEQ ID NO: 3829445 - DNA, 25 bp, Homo sapien
ttaaagatgcttcatgccgggcgca

SEQ ID NO: 3829446 - DNA, 25 bp, Homo sapien
gcacagctgaaatggcactgactga

SEQ ID NO: 3829447 - DNA, 25 bp, Homo sapien
tgcaggcgtgcatcggacttagcaa

SEQ ID NO: 3829448 - DNA, 25 bp, Homo sapien
ctttagtagcaaaaacacgttatga

SEQ ID NO: 3829449 - DNA, 25 bp, Homo sapien
aaacacgttatgatgggaaacagtg

SEQ ID NO: 3829450 - DNA, 25 bp, Homo sapien
tagcaaaaacacgttatgatgggaa

SEQ ID NO: 3829451 - DNA, 25 bp, Homo sapien
caaaaacacgttatgatgggaaaca

SEQ ID NO: 3829452 - DNA, 25 bp, Homo sapien
actttatccacctcctgtttactga

SEQ ID NO: 3829453 - DNA, 25 bp, Homo sapien
tgtttactgagatcttctccacact

SEQ ID NO: 3829454 - DNA, 25 bp, Homo sapien
tggatcatgtttcggcgtacccggt

SEQ ID NO: 3829455 - DNA, 25 bp, Homo sapien
cactcttgagtcaaccgagactgga

SEQ ID NO: 3829456 - DNA, 25 bp, Homo sapien
ttgcaggaaaaggagctaattacat

SEQ ID NO: 3829457 - DNA, 25 bp, Homo sapien
aaactgcctaaccataccaccatgg

SEQ ID NO: 3829458 - DNA, 25 bp, Homo sapien
caacactcgatttatgattagtgaa

SEQ ID NO: 3829459 - DNA, 25 bp, Homo sapien
ttctgtccacaatgtcaacactcga

SEQ ID NO: 3829460 - DNA, 25 bp, Homo sapien
tcaagactgtactgtccctttaagg

SEQ ID NO: 3829461 - DNA, 25 bp, Homo sapien
tgtccctttaaggtaccacatgcca

SEQ ID NO: 3829462 - DNA, 25 bp, Homo sapien
aaggtaccacatgccaccatagctt

SEQ ID NO: 3829463 - DNA, 25 bp, Homo sapien
tgccaccatagcttacacagcagtc

SEQ ID NO: 3829464 - DNA, 25 bp, Homo sapien
tctgaagcaagtcgaggccctactt

SEQ ID NO: 3829465 - DNA, 25 bp, Homo sapien
ctcttgctctgtgtcgtctgaagca

SEQ ID NO: 3829466 - DNA, 25 bp, Homo sapien
agtcgaggccctacttctggttccg

SEQ ID NO: 3829467 - DNA, 25 bp, Homo sapien
tagatttgctgggttagtagtttgc

SEQ ID NO: 3829468 - DNA, 25 bp, Homo sapien
caatgccacaggtcatgagatggtc

SEQ ID NO: 3829469 - DNA, 25 bp, Homo sapien
taacttaagctgaccctgcgactgg

SEQ ID NO: 3829470 - DNA, 25 bp, Homo sapien
ctgcgactggctgaggataatccct

SEQ ID NO: 3829471 - DNA, 25 bp, Homo sapien
tgtactgcaaagaaggtcccagctg

SEQ ID NO: 3829472 - DNA, 25 bp, Homo sapien
gaggtcttagcagatagataatcca

SEQ ID NO: 3829473 - DNA, 25 bp, Homo sapien
agataatccaagactaaatattgtc

SEQ ID NO: 3829474 - DNA, 25 bp, Homo sapien
gaccttgttggcattaagtttacaa

SEQ ID NO: 3829475 - DNA, 25 bp, Homo sapien
taaacataacttagaccttgttggc

SEQ ID NO: 3829476 - DNA, 25 bp, Homo sapien
catgtaaacagttgagactgctaca

SEQ ID NO: 3829477 - DNA, 25 bp, Homo sapien
tgtcaaaggtgaagtggccacagaa

SEQ ID NO: 3829478 - DNA, 25 bp, Homo sapien
cataaagtaggttgttgtcaaaggt

SEQ ID NO: 3829479 - DNA, 25 bp, Homo sapien
tacacattgttccatacttacctgg

SEQ ID NO: 3829480 - DNA, 25 bp, Homo sapien
caaaattatgtacgtgactcgcctc

SEQ ID NO: 3829481 - DNA, 25 bp, Homo sapien
gcctctttctagtggacagtgctgc

SEQ ID NO: 3829482 - DNA, 25 bp, Homo sapien
tactgtcgcaaatagccccatgtgg

SEQ ID NO: 3829483 - DNA, 25 bp, Homo sapien
tctagatacacgtaacgctgagccc

SEQ ID NO: 3829484 - DNA, 25 bp, Homo sapien
tcttgcagagttcttaccattcctg

SEQ ID NO: 3829485 - DNA, 25 bp, Homo sapien
gcttgttagcatatgccctagaggg

SEQ ID NO: 3829486 - DNA, 25 bp, Homo sapien
aatgtttttactcaaagctctagcc

SEQ ID NO: 3829487 - DNA, 25 bp, Homo sapien
ccatccctgtattctaatgttttta

SEQ ID NO: 3829488 - DNA, 25 bp, Homo sapien
gtgagacgatcctcagcagcttggc

SEQ ID NO: 3829489 - DNA, 25 bp, Homo sapien
ggcatctcccttctgcacgaagtgg

SEQ ID NO: 3829490 - DNA, 25 bp, Homo sapien
gaacaggactccctgtcacacaagg

SEQ ID NO: 3829491 - DNA, 25 bp, Homo sapien
cacgaagtggacacgcagtacagcg

SEQ ID NO: 3829492 - DNA, 25 bp, Homo sapien
gctgtggtacagttaaaatataacc

SEQ ID NO: 3829493 - DNA, 25 bp, Homo sapien
cagggaattaatgattgttaagaac

SEQ ID NO: 3829494 - DNA, 25 bp, Homo sapien
agcgttatgatgatgaatgctgctg

SEQ ID NO: 3829495 - DNA, 25 bp, Homo sapien
caaagtgaagcgttatgatgatgaa

SEQ ID NO: 3829496 - DNA, 25 bp, Homo sapien
ctgctggaggcgtcagtttaactga

SEQ ID NO: 3829497 - DNA, 25 bp, Homo sapien
gaggcgtcagtttaactgaatttta

SEQ ID NO: 3829498 - DNA, 25 bp, Homo sapien
tggaggcgtcagtttaactgaattt

SEQ ID NO: 3829499 - DNA, 25 bp, Homo sapien
gctggaggcgtcagtttaactgaat

SEQ ID NO: 3829500 - DNA, 25 bp, Homo sapien
cccaggaatccaaggctacagtcag

SEQ ID NO: 3829501 - DNA, 25 bp, Homo sapien
ggaatccaaggctacagtcagccat

SEQ ID NO: 3829502 - DNA, 25 bp, Homo sapien
ccaggaatccaaggctacagtcagc

SEQ ID NO: 3829503 - DNA, 25 bp, Homo sapien
catgagtgcaccactgcactccagc

SEQ ID NO: 3829504 - DNA, 25 bp, Homo sapien
catgttgagccatacatagttcctt

SEQ ID NO: 3829505 - DNA, 25 bp, Homo sapien
gcagagcaggcaataaaaacccaaa

SEQ ID NO: 3829506 - DNA, 25 bp, Homo sapien
tctttaatacagtgtggtagcttcc

SEQ ID NO: 3829507 - DNA, 25 bp, Homo sapien
gtatgtgctttcactagcagagcag

SEQ ID NO: 3829508 - DNA, 25 bp, Homo sapien
gacccagccgagatgctggcggaaa

SEQ ID NO: 3829509 - DNA, 25 bp, Homo sapien
tttgagatgaaggaggacgagccgt

SEQ ID NO: 3829510 - DNA, 25 bp, Homo sapien
agccgtggtacgaccaccaggacct

SEQ ID NO: 3829511 - DNA, 25 bp, Homo sapien
ctggcggaaaacctggtagaggagt

SEQ ID NO: 3829512 - DNA, 25 bp, Homo sapien
tggtgcccaccgttttatgtagcgt

SEQ ID NO: 3829513 - DNA, 25 bp, Homo sapien
acaattttcgccctccaagtggaca

SEQ ID NO: 3829514 - DNA, 25 bp, Homo sapien
tgcctcgctggctactaagtgctgg

SEQ ID NO: 3829515 - DNA, 25 bp, Homo sapien
ggtgcaatgtcacgtccccagatgc

SEQ ID NO: 3829516 - DNA, 25 bp, Homo sapien
tccagcctcggaaaactcttaattg

SEQ ID NO: 3829517 - DNA, 25 bp, Homo sapien
aaagttagttagatattggccctgt

SEQ ID NO: 3829518 - DNA, 25 bp, Homo sapien
tgtaaggtattatctgtcgactcac

SEQ ID NO: 3829519 - DNA, 25 bp, Homo sapien
gcaagatcacagaagggtttataac

SEQ ID NO: 3829520 - DNA, 25 bp, Homo sapien
taaggtaaccctggagtcaagtgct

SEQ ID NO: 3829521 - DNA, 25 bp, Homo sapien
ttcaggtaacaactccacagtggga

SEQ ID NO: 3829522 - DNA, 25 bp, Homo sapien
gatgctcataattggtcctcaaggg

SEQ ID NO: 3829523 - DNA, 25 bp, Homo sapien
caagggtacctgcacttctacagta

SEQ ID NO: 3829524 - DNA, 25 bp, Homo sapien
gattactgtcatcccaattacaatg

SEQ ID NO: 3829525 - DNA, 25 bp, Homo sapien
ttactgtcatcccaattacaatggc

SEQ ID NO: 3829526 - DNA, 25 bp, Homo sapien
ttagattactgtcatcccaattaca

SEQ ID NO: 3829527 - DNA, 25 bp, Homo sapien
tactgtcatcccaattacaatggca

SEQ ID NO: 3829528 - DNA, 25 bp, Homo sapien
ctgaaatcttgtacagatgtagaaa

SEQ ID NO: 3829529 - DNA, 25 bp, Homo sapien
cttctgaaatcttgtacagatgtag

SEQ ID NO: 3829530 - DNA, 25 bp, Homo sapien
cacttctgaaatcttgtacagatgt

SEQ ID NO: 3829531 - DNA, 25 bp, Homo sapien
gccacttctgaaatcttgtacagat

SEQ ID NO: 3829532 - DNA, 25 bp, Homo sapien
tgaagtaaccgaaggtgatcagtag

SEQ ID NO: 3829533 - DNA, 25 bp, Homo sapien
gtgaagtaaccgaaggtgatcagta

SEQ ID NO: 3829534 - DNA, 25 bp, Homo sapien
catttggctttagagttgttgggaa

SEQ ID NO: 3829535 - DNA, 25 bp, Homo sapien
tggctttagagttgttgggaaaata

SEQ ID NO: 3829536 - DNA, 25 bp, Homo sapien
cagcatttggctttagagttgttgg

SEQ ID NO: 3829537 - DNA, 25 bp, Homo sapien
cttgaacagcatttggctttagagt

SEQ ID NO: 3829538 - DNA, 25 bp, Homo sapien
aaggctgctgcatagaaagggacac

SEQ ID NO: 3829539 - DNA, 25 bp, Homo sapien
caggtgaagtccactaagccagtca

SEQ ID NO: 3829540 - DNA, 25 bp, Homo sapien
tggtagagcccacaagtgatgccac

SEQ ID NO: 3829541 - DNA, 25 bp, Homo sapien
tatttccaagggaaccacgggagca

SEQ ID NO: 3829542 - DNA, 25 bp, Homo sapien
ggaaagcaatgacgatggcaacagc

SEQ ID NO: 3829543 - DNA, 25 bp, Homo sapien
aggaaagcaatgacgatggcaacag

SEQ ID NO: 3829544 - DNA, 25 bp, Homo sapien
ggataaaatgacaggagtccaggcg

SEQ ID NO: 3829545 - DNA, 25 bp, Homo sapien
gataaaatgacaggagtccaggcga

SEQ ID NO: 3829546 - DNA, 25 bp, Homo sapien
aaagcctgccccgtacataatgctc

SEQ ID NO: 3829547 - DNA, 25 bp, Homo sapien
gaagaagatagtacatctctgggaa

SEQ ID NO: 3829548 - DNA, 25 bp, Homo sapien
caaagatcatcatgaagttgctgaa

SEQ ID NO: 3829549 - DNA, 25 bp, Homo sapien
tacataatgctccttatagaagaag

SEQ ID NO: 3829550 - DNA, 25 bp, Homo sapien
tccacgcattattaagcttacttac

SEQ ID NO: 3829551 - DNA, 25 bp, Homo sapien
taatgatctatgatcacacccactg

SEQ ID NO: 3829552 - DNA, 25 bp, Homo sapien
aagcttacttactcttgctgatgac

SEQ ID NO: 3829553 - DNA, 25 bp, Homo sapien
agatggaactccacgcattattaag

SEQ ID NO: 3829554 - DNA, 25 bp, Homo sapien
caggactgactgataagtacaaggc

SEQ ID NO: 3829555 - DNA, 25 bp, Homo sapien
tacaatggaggctgttccttctaca

SEQ ID NO: 3829556 - DNA, 25 bp, Homo sapien
taatagtattgctttcccaggagta

SEQ ID NO: 3829557 - DNA, 25 bp, Homo sapien
atcaaactttttcagccaggactga

SEQ ID NO: 3829558 - DNA, 25 bp, Homo sapien
tattacagtctccactaccagtttg

SEQ ID NO: 3829559 - DNA, 25 bp, Homo sapien
cagggccacccttacagacttatag

SEQ ID NO: 3829560 - DNA, 25 bp, Homo sapien
cagcagggacctggaatagaatgta

SEQ ID NO: 3829561 - DNA, 25 bp, Homo sapien
tacatattatacagccagggccacc

SEQ ID NO: 3829562 - DNA, 25 bp, Homo sapien
tcagctagtggcagggtaaacaagg

SEQ ID NO: 3829563 - DNA, 25 bp, Homo sapien
gctagtggcagggtaaacaaggaaa

SEQ ID NO: 3829564 - DNA, 25 bp, Homo sapien
cagctagtggcagggtaaacaagga

SEQ ID NO: 3829565 - DNA, 25 bp, Homo sapien
gtcagctagtggcagggtaaacaag

SEQ ID NO: 3829566 - DNA, 25 bp, Homo sapien
tgctgattaaactttagtaaatctg

SEQ ID NO: 3829567 - DNA, 25 bp, Homo sapien
gagactctgataggtcctgcctaca

SEQ ID NO: 3829568 - DNA, 25 bp, Homo sapien
gcccagggcaaacaagcatgaatat

SEQ ID NO: 3829569 - DNA, 25 bp, Homo sapien
tgtcccctggttcctagcaatgcct

SEQ ID NO: 3829570 - DNA, 25 bp, Homo sapien
ggtcattttacctaatcgtcccatg

SEQ ID NO: 3829571 - DNA, 25 bp, Homo sapien
tgggcgctaaagactgggcagattt

SEQ ID NO: 3829572 - DNA, 25 bp, Homo sapien
ttacctgctatttgtgtttccatat

SEQ ID NO: 3829573 - DNA, 25 bp, Homo sapien
catattcatactggtttagcctaga

SEQ ID NO: 3829574 - DNA, 25 bp, Homo sapien
ttagcctagagagtatcaccatggg

SEQ ID NO: 3829575 - DNA, 25 bp, Homo sapien
caaaggtcaagataattgcttagta

SEQ ID NO: 3829576 - DNA, 25 bp, Homo sapien
caagttagtgactaataatatacaa

SEQ ID NO: 3829577 - DNA, 25 bp, Homo sapien
ttataccttactcaagatacaagtt

SEQ ID NO: 3829578 - DNA, 25 bp, Homo sapien
tacaaaggtcaagataattgcttag

SEQ ID NO: 3829579 - DNA, 25 bp, Homo sapien
cttaccagagagttcataaccatct

SEQ ID NO: 3829580 - DNA, 25 bp, Homo sapien
cactgccatatcacagagctcagca

SEQ ID NO: 3829581 - DNA, 25 bp, Homo sapien
gagagttcataaccatctaacatac

SEQ ID NO: 3829582 - DNA, 25 bp, Homo sapien
tgtttactgctacgcctcactgcca

SEQ ID NO: 3829583 - DNA, 25 bp, Homo sapien
tcctaactcctttcagtctattcgt

SEQ ID NO: 3829584 - DNA, 25 bp, Homo sapien
catcaattgtgctgtaactcatgtc

SEQ ID NO: 3829585 - DNA, 25 bp, Homo sapien
gtctattcgttacacagcaccccaa

SEQ ID NO: 3829586 - DNA, 25 bp, Homo sapien
tgtcactaatcaacaggttcttcca

SEQ ID NO: 3829587 - DNA, 25 bp, Homo sapien
tgatttccctttacctagagtggtc

SEQ ID NO: 3829588 - DNA, 25 bp, Homo sapien
tcagtgatttccctttacctagagt

SEQ ID NO: 3829589 - DNA, 25 bp, Homo sapien
ctggctcagatgatgtttgtctcat

SEQ ID NO: 3829590 - DNA, 25 bp, Homo sapien
gatgatgtttgtctcatgcattcaa

SEQ ID NO: 3829591 - DNA, 25 bp, Homo sapien
taccatgagactagtgtgccaacgt

SEQ ID NO: 3829592 - DNA, 25 bp, Homo sapien
gactcaagggatccaatgacaggcg

SEQ ID NO: 3829593 - DNA, 25 bp, Homo sapien
ccaacgtgtctatagctgagccaat

SEQ ID NO: 3829594 - DNA, 25 bp, Homo sapien
taacctgtggacttcagttggacac

SEQ ID NO: 3829595 - DNA, 25 bp, Homo sapien
gatggttttggatagcgataagtgc

SEQ ID NO: 3829596 - DNA, 25 bp, Homo sapien
caggtgataagccagcgatgactcc

SEQ ID NO: 3829597 - DNA, 25 bp, Homo sapien
gaagcattccagtatcaccgtttta

SEQ ID NO: 3829598 - DNA, 25 bp, Homo sapien
tgagcgttacacaacatggtcagaa

SEQ ID NO: 3829599 - DNA, 25 bp, Homo sapien
aagagtcctgatacaagcaaataaa

SEQ ID NO: 3829600 - DNA, 25 bp, Homo sapien
gagtcctgatacaagcaaataaaag

SEQ ID NO: 3829601 - DNA, 25 bp, Homo sapien
tgatacaagcaaataaaagtggcca

SEQ ID NO: 3829602 - DNA, 25 bp, Homo sapien
tcctgatacaagcaaataaaagtgg

SEQ ID NO: 3829603 - DNA, 25 bp, Homo sapien
tgcagatagaagacccatagaacgg

SEQ ID NO: 3829604 - DNA, 25 bp, Homo sapien
catgcagctcacatccgcagagtca

SEQ ID NO: 3829605 - DNA, 25 bp, Homo sapien
cagagtcactccagcatgttaatgc

SEQ ID NO: 3829606 - DNA, 25 bp, Homo sapien
tgctacaccatcatcgagaggaaca

SEQ ID NO: 3829607 - DNA, 25 bp, Homo sapien
acaaggccactgctaacccgcctcc

SEQ ID NO: 3829608 - DNA, 25 bp, Homo sapien
aaggccactgctaacccgcctcccg

SEQ ID NO: 3829609 - DNA, 25 bp, Homo sapien
tcacaaggccactgctaacccgcct

SEQ ID NO: 3829610 - DNA, 25 bp, Homo sapien
gcctcccggctccgctggccgcgcc

SEQ ID NO: 3829611 - DNA, 25 bp, Homo sapien
tgaaggggaggcgacgtctcttcca

SEQ ID NO: 3829612 - DNA, 25 bp, Homo sapien
agagaagcgcgagtcgccgcccgaa

SEQ ID NO: 3829613 - DNA, 25 bp, Homo sapien
cccgcagcacaggacgaggaggcgg

SEQ ID NO: 3829614 - DNA, 25 bp, Homo sapien
aggcgacgtctcttccagggccgtg

SEQ ID NO: 3829615 - DNA, 25 bp, Homo sapien
atagttggtgccgttggtgccgccg

SEQ ID NO: 3829616 - DNA, 25 bp, Homo sapien
aatagttggtgccgttggtgccgcc

SEQ ID NO: 3829617 - DNA, 25 bp, Homo sapien
gaatagttggtgccgttggtgccgc

SEQ ID NO: 3829618 - DNA, 25 bp, Homo sapien
agtcagctggccctagcacgtggct

SEQ ID NO: 3829619 - DNA, 25 bp, Homo sapien
taagtggtacaagacaagtcaacgc

SEQ ID NO: 3829620 - DNA, 25 bp, Homo sapien
ctgtaggactatttgggaagggcac

SEQ ID NO: 3829621 - DNA, 25 bp, Homo sapien
gcacgtggctgcgactcttctctat

SEQ ID NO: 3829622 - DNA, 25 bp, Homo sapien
cacaatttgctgaaattttccttag

SEQ ID NO: 3829623 - DNA, 25 bp, Homo sapien
taaattctatttgactctagttcca

SEQ ID NO: 3829624 - DNA, 25 bp, Homo sapien
gaaatctgtggaacagaactggcaa

SEQ ID NO: 3829625 - DNA, 25 bp, Homo sapien
tgctgaaattttccttagtgtactt

SEQ ID NO: 3829626 - DNA, 25 bp, Homo sapien
taatccatgagtatggtcgcacacc

SEQ ID NO: 3829627 - DNA, 25 bp, Homo sapien
taaggttagccacatgggcatgcaa

SEQ ID NO: 3829628 - DNA, 25 bp, Homo sapien
ggcatgcaaccatggaaccccagta

SEQ ID NO: 3829629 - DNA, 25 bp, Homo sapien
tacccttggctcgttctaatctgaa

SEQ ID NO: 3829630 - DNA, 25 bp, Homo sapien
gtttattaagggattttgctctcat

SEQ ID NO: 3829631 - DNA, 25 bp, Homo sapien
ggtttattaagggattttgctctca

SEQ ID NO: 3829632 - DNA, 25 bp, Homo sapien
tagttgaactatggtcccattaggg

SEQ ID NO: 3829633 - DNA, 25 bp, Homo sapien
gacactctgtgccttacaggataaa

SEQ ID NO: 3829634 - DNA, 25 bp, Homo sapien
aaatatcattcatgagttaggtgcc

SEQ ID NO: 3829635 - DNA, 25 bp, Homo sapien
cccattagggttcatacattaaagc

SEQ ID NO: 3829636 - DNA, 25 bp, Homo sapien
aatattagtgaagacagtgggttaa

SEQ ID NO: 3829637 - DNA, 25 bp, Homo sapien
gcatcaagtcaatctgtaagacagt

SEQ ID NO: 3829638 - DNA, 25 bp, Homo sapien
gacagtagttacaatattagtgaag

SEQ ID NO: 3829639 - DNA, 25 bp, Homo sapien
tcaatctgtaagacagtagttacaa

SEQ ID NO: 3829640 - DNA, 25 bp, Homo sapien
gataataagaataattctttctaaa

SEQ ID NO: 3829641 - DNA, 25 bp, Homo sapien
taagaataattctttctaaattctc

SEQ ID NO: 3829642 - DNA, 25 bp, Homo sapien
acttgataataagaataattctttc

SEQ ID NO: 3829643 - DNA, 25 bp, Homo sapien
tgggtcggctgatgcactatcagtt

SEQ ID NO: 3829644 - DNA, 25 bp, Homo sapien
ctgggtcggctgatgcactatcagt

SEQ ID NO: 3829645 - DNA, 25 bp, Homo sapien
tatcatcgtgcctttgccgagacac

SEQ ID NO: 3829646 - DNA, 25 bp, Homo sapien
cattctgtatgtcagcgtggactct

SEQ ID NO: 3829647 - DNA, 25 bp, Homo sapien
cgtggactctggtatcatcgtgcct

SEQ ID NO: 3829648 - DNA, 25 bp, Homo sapien
gacaccacagctgaatttgaaggtt

SEQ ID NO: 3829649 - DNA, 25 bp, Homo sapien
acattgttaaccctcagctcttgcc

SEQ ID NO: 3829650 - DNA, 25 bp, Homo sapien
tcagggctggtcacattgttaaccc

SEQ ID NO: 3829651 - DNA, 25 bp, Homo sapien
tccgaccataagtattttccccaga

SEQ ID NO: 3829652 - DNA, 25 bp, Homo sapien
ctcatgtctttggtggctaaagcac

SEQ ID NO: 3829653 - DNA, 25 bp, Homo sapien
cattttcaactgtgctatttaccat

SEQ ID NO: 3829654 - DNA, 25 bp, Homo sapien
tacatacgtaaacaacaaatcacaa

SEQ ID NO: 3829655 - DNA, 25 bp, Homo sapien
ttagccaatacatacgtaaacaaca

SEQ ID NO: 3829656 - DNA, 25 bp, Homo sapien
caaagggtctgacagtttcatttct

SEQ ID NO: 3829657 - DNA, 25 bp, Homo sapien
cagtccactggtcaataaaagctca

SEQ ID NO: 3829658 - DNA, 25 bp, Homo sapien
tatcatctaggtatcccactggagg

SEQ ID NO: 3829659 - DNA, 25 bp, Homo sapien
caagaaatgaataaccctaggccaa

SEQ ID NO: 3829660 - DNA, 25 bp, Homo sapien
catgcaggtaaagagcccgggtgta

SEQ ID NO: 3829661 - DNA, 25 bp, Homo sapien
tcccgggtgatcctccgaagaagat

SEQ ID NO: 3829662 - DNA, 25 bp, Homo sapien
gtacagcagccaagatatccaattg

SEQ ID NO: 3829663 - DNA, 25 bp, Homo sapien
catgtacagcagccaagatatccaa

SEQ ID NO: 3829664 - DNA, 25 bp, Homo sapien
atcatgtacagcagccaagatatcc

SEQ ID NO: 3829665 - DNA, 25 bp, Homo sapien
acagcagccaagatatccaattgtt

SEQ ID NO: 3829666 - DNA, 25 bp, Homo sapien
aagaaggccgagacagcaagctccc

SEQ ID NO: 3829667 - DNA, 25 bp, Homo sapien
aagcacaaagaaggccgagacagca

SEQ ID NO: 3829668 - DNA, 25 bp, Homo sapien
acaaagaaggccgagacagcaagct

SEQ ID NO: 3829669 - DNA, 25 bp, Homo sapien
gagaagcacaaagaaggccgagaca

SEQ ID NO: 3829670 - DNA, 25 bp, Homo sapien
ttgcagatgagctaaatttgctaaa

SEQ ID NO: 3829671 - DNA, 25 bp, Homo sapien
tgctttgtaggtggcacataagtag

SEQ ID NO: 3829672 - DNA, 25 bp, Homo sapien
ctttgtaggtggcacataagtagag

SEQ ID NO: 3829673 - DNA, 25 bp, Homo sapien
gtgctttgtaggtggcacataagta

SEQ ID NO: 3829674 - DNA, 25 bp, Homo sapien
tatgcatgcagaataagcccaagct

SEQ ID NO: 3829675 - DNA, 25 bp, Homo sapien
tattttactggtgcatctatctttc

SEQ ID NO: 3829676 - DNA, 25 bp, Homo sapien
ggtggcattctgttcagttacaggt

SEQ ID NO: 3829677 - DNA, 25 bp, Homo sapien
agaattttcacaagagctgggaaaa

SEQ ID NO: 3829678 - DNA, 25 bp, Homo sapien
gagggtaacatcgagccaccaaaag

SEQ ID NO: 3829679 - DNA, 25 bp, Homo sapien
aatatgagggtaacatcgagccacc

SEQ ID NO: 3829680 - DNA, 25 bp, Homo sapien
caccaaaagaatgcacttaacacat

SEQ ID NO: 3829681 - DNA, 25 bp, Homo sapien
tcgagccaccaaaagaatgcactta

SEQ ID NO: 3829682 - DNA, 25 bp, Homo sapien
tgatctgaacagcggaatgaggaac

SEQ ID NO: 3829683 - DNA, 25 bp, Homo sapien
cccatgatctgaacagcggaatgag

SEQ ID NO: 3829684 - DNA, 25 bp, Homo sapien
ctcaccccatgatctgaacagcgga

SEQ ID NO: 3829685 - DNA, 25 bp, Homo sapien
ctgaacagcggaatgaggaactcac

SEQ ID NO: 3829686 - DNA, 25 bp, Homo sapien
tcacagcaaaagatcctaaaaggag

SEQ ID NO: 3829687 - DNA, 25 bp, Homo sapien
gcatctatgttctacctacttgaca

SEQ ID NO: 3829688 - DNA, 25 bp, Homo sapien
ttaagatattactgcaatccacctg

SEQ ID NO: 3829689 - DNA, 25 bp, Homo sapien
aatccacctgtggaccatttcacag

SEQ ID NO: 3829690 - DNA, 25 bp, Homo sapien
ctgcgtgagcgaaggtttctgagta

SEQ ID NO: 3829691 - DNA, 25 bp, Homo sapien
ctgctgcgtgagcgaaggtttctga

SEQ ID NO: 3829692 - DNA, 25 bp, Homo sapien
cgtgagcgaaggtttctgagtatga

SEQ ID NO: 3829693 - DNA, 25 bp, Homo sapien
gagcgaaggtttctgagtatgatct

SEQ ID NO: 3829694 - DNA, 25 bp, Homo sapien
taacttgggtaagtcctgtctgtac

SEQ ID NO: 3829695 - DNA, 25 bp, Homo sapien
aaataactggtataggctgcaagac

SEQ ID NO: 3829696 - DNA, 25 bp, Homo sapien
aatggtattgatagatggtcactgg

SEQ ID NO: 3829697 - DNA, 25 bp, Homo sapien
tccacttcagggtattgccactgca

SEQ ID NO: 3829698 - DNA, 25 bp, Homo sapien
ctgaccaagtagaggcgtagaaaat

SEQ ID NO: 3829699 - DNA, 25 bp, Homo sapien
catatgcttccatgtcttctagaaa

SEQ ID NO: 3829700 - DNA, 25 bp, Homo sapien
cagcatatgcttccatgtcttctag

SEQ ID NO: 3829701 - DNA, 25 bp, Homo sapien
gcatatgcttccatgtcttctagaa

SEQ ID NO: 3829702 - DNA, 25 bp, Homo sapien
ctcagcatatgcttccatgtcttct

SEQ ID NO: 3829703 - DNA, 25 bp, Homo sapien
cagtactaaatacccggagaagcgc

SEQ ID NO: 3829704 - DNA, 25 bp, Homo sapien
actgattccccagcggccacatggc

SEQ ID NO: 3829705 - DNA, 25 bp, Homo sapien
ctttggtaatgacactgatggagga

SEQ ID NO: 3829706 - DNA, 25 bp, Homo sapien
gaggagggacgtcttcatccactga

SEQ ID NO: 3829707 - DNA, 25 bp, Homo sapien
gcccgaattgggctgaggctttccc

SEQ ID NO: 3829708 - DNA, 25 bp, Homo sapien
ggagggcccgaattgggctgaggct

SEQ ID NO: 3829709 - DNA, 25 bp, Homo sapien
tctgttacgtatgcctcagtaattg

SEQ ID NO: 3829710 - DNA, 25 bp, Homo sapien
gcctcagtaattggagggcccgaat

SEQ ID NO: 3829711 - DNA, 25 bp, Homo sapien
caatgtatagtcatgctaggatcca

SEQ ID NO: 3829712 - DNA, 25 bp, Homo sapien
aaaaacacctggtttgcagccgtca

SEQ ID NO: 3829713 - DNA, 25 bp, Homo sapien
taggatccaagctgccgagcaaaac

SEQ ID NO: 3829714 - DNA, 25 bp, Homo sapien
ggtaccacaagtctggcaattctcc

SEQ ID NO: 3829715 - DNA, 25 bp, Homo sapien
catacccagacaaagcccttaattt

SEQ ID NO: 3829716 - DNA, 25 bp, Homo sapien
ctgggcttaatcgatcctcctccat

SEQ ID NO: 3829717 - DNA, 25 bp, Homo sapien
ttacatatccatttaagggcctgaa

SEQ ID NO: 3829718 - DNA, 25 bp, Homo sapien
cattgcccaagctgtgccagaattc

SEQ ID NO: 3829719 - DNA, 25 bp, Homo sapien
ggccagcctagacaatgtagcgaga

SEQ ID NO: 3829720 - DNA, 25 bp, Homo sapien
ttgagaccaagaatttaaggccagc

SEQ ID NO: 3829721 - DNA, 25 bp, Homo sapien
taaaggaggccaggcatgattgctc

SEQ ID NO: 3829722 - DNA, 25 bp, Homo sapien
ctagacaatgtagcgagaccccttc

SEQ ID NO: 3829723 - DNA, 25 bp, Homo sapien
catgggcattttttcacattagcaa

SEQ ID NO: 3829724 - DNA, 25 bp, Homo sapien
gagatgaaaggatagcaaagaggcc

SEQ ID NO: 3829725 - DNA, 25 bp, Homo sapien
tttagacacctaaataggacacacg

SEQ ID NO: 3829726 - DNA, 25 bp, Homo sapien
gcctagatgaaaccagatgggccat

SEQ ID NO: 3829727 - DNA, 25 bp, Homo sapien
actccaactacatggcattctggaa

SEQ ID NO: 3829728 - DNA, 25 bp, Homo sapien
tgttaaagtccatagaatacataac

SEQ ID NO: 3829729 - DNA, 25 bp, Homo sapien
atcctgtatgatactggtaataggg

SEQ ID NO: 3829730 - DNA, 25 bp, Homo sapien
catgtcattacacatgttaaagtcc

SEQ ID NO: 3829731 - DNA, 25 bp, Homo sapien
gatgatggcagtttcgtatttatct

SEQ ID NO: 3829732 - DNA, 25 bp, Homo sapien
taacgcaagaatagtagtttagatg

SEQ ID NO: 3829733 - DNA, 25 bp, Homo sapien
tgatggcagtttcgtatttatctgt

SEQ ID NO: 3829734 - DNA, 25 bp, Homo sapien
ctctttttctttatgataacgcaag

SEQ ID NO: 3829735 - DNA, 25 bp, Homo sapien
ccaggaaagtctgtggtggatttga

SEQ ID NO: 3829736 - DNA, 25 bp, Homo sapien
aagacatatgcaaacagcagtttaa

SEQ ID NO: 3829737 - DNA, 25 bp, Homo sapien
tcaatttcacttatatagcctgggg

SEQ ID NO: 3829738 - DNA, 25 bp, Homo sapien
cactatattctaaatcaaacatttc

SEQ ID NO: 3829739 - DNA, 25 bp, Homo sapien
gtttagggcacaagtcatttctccc

SEQ ID NO: 3829740 - DNA, 25 bp, Homo sapien
ttctcccaatattaacttataggca

SEQ ID NO: 3829741 - DNA, 25 bp, Homo sapien
aatattaacttataggcagtctcca

SEQ ID NO: 3829742 - DNA, 25 bp, Homo sapien
tagggcacaagtcatttctcccaat

SEQ ID NO: 3829743 - DNA, 25 bp, Homo sapien
ttgcattgtctacattgaacacatg

SEQ ID NO: 3829744 - DNA, 25 bp, Homo sapien
ttttgcattgtctacattgaacaca

SEQ ID NO: 3829745 - DNA, 25 bp, Homo sapien
attgtctacattgaacacatgattc

SEQ ID NO: 3829746 - DNA, 25 bp, Homo sapien
gcattgtctacattgaacacatgat

SEQ ID NO: 3829747 - DNA, 25 bp, Homo sapien
attcttactcagaagtgcaaagaca

SEQ ID NO: 3829748 - DNA, 25 bp, Homo sapien
tgaacagccaggtcactgtgcacaa

SEQ ID NO: 3829749 - DNA, 25 bp, Homo sapien
gtgtagagcacagcatactgaatgg

SEQ ID NO: 3829750 - DNA, 25 bp, Homo sapien
aagacagttggagatagcgcccaca

SEQ ID NO: 3829751 - DNA, 25 bp, Homo sapien
ctcgtgtcctggttatctttcttaa

SEQ ID NO: 3829752 - DNA, 25 bp, Homo sapien
tctttgtggccatagttacagtgcc

SEQ ID NO: 3829753 - DNA, 25 bp, Homo sapien
gaaatgtttctttgtggccatagtt

SEQ ID NO: 3829754 - DNA, 25 bp, Homo sapien
ggccatagttacagtgccaatcaca

SEQ ID NO: 3829755 - DNA, 25 bp, Homo sapien
ttaatttgtatgtctccattgacta

SEQ ID NO: 3829756 - DNA, 25 bp, Homo sapien
gtatgtctccattgactaatgatgt

SEQ ID NO: 3829757 - DNA, 25 bp, Homo sapien
taatttgtatgtctccattgactaa

SEQ ID NO: 3829758 - DNA, 25 bp, Homo sapien
tttgtatgtctccattgactaatga

SEQ ID NO: 3829759 - DNA, 25 bp, Homo sapien
ctaaaaggcctttgcaaaatttatg

SEQ ID NO: 3829760 - DNA, 25 bp, Homo sapien
tccaaagcccaagtcattaacagtt

SEQ ID NO: 3829761 - DNA, 25 bp, Homo sapien
gcatgcctgcagacagatattcaca

SEQ ID NO: 3829762 - DNA, 25 bp, Homo sapien
tgtgttaacagttccaggttattag

SEQ ID NO: 3829763 - DNA, 25 bp, Homo sapien
gtgtgttaacagttccaggttatta

SEQ ID NO: 3829764 - DNA, 25 bp, Homo sapien
ctagttggacacggcaaacatcaac

SEQ ID NO: 3829765 - DNA, 25 bp, Homo sapien
ttggacacggcaaacatcaacacat

SEQ ID NO: 3829766 - DNA, 25 bp, Homo sapien
agttggacacggcaaacatcaacac

SEQ ID NO: 3829767 - DNA, 25 bp, Homo sapien
gttggacacggcaaacatcaacaca

SEQ ID NO: 3829768 - DNA, 25 bp, Homo sapien
agttttccaaatgcttgtcgaatac

SEQ ID NO: 3829769 - DNA, 25 bp, Homo sapien
cagttttccaaatgcttgtcgaata

SEQ ID NO: 3829770 - DNA, 25 bp, Homo sapien
gctctaataggtgatctgtcttctc

SEQ ID NO: 3829771 - DNA, 25 bp, Homo sapien
tgtgtcattaatgctctaataggtg

SEQ ID NO: 3829772 - DNA, 25 bp, Homo sapien
aaccagtagaggctgtaaatatcac

SEQ ID NO: 3829773 - DNA, 25 bp, Homo sapien
tcttctcctaaagtagacaaccagt

SEQ ID NO: 3829774 - DNA, 25 bp, Homo sapien
ctcatgtgacttcttaatgctaaag

SEQ ID NO: 3829775 - DNA, 25 bp, Homo sapien
cttggtgctttactcatgtgacttc

SEQ ID NO: 3829776 - DNA, 25 bp, Homo sapien
acttggtgctttactcatgtgactt

SEQ ID NO: 3829777 - DNA, 25 bp, Homo sapien
tgtgacttcttaatgctaaagaaat

SEQ ID NO: 3829778 - DNA, 25 bp, Homo sapien
taatgacatcacatcagttaactgt

SEQ ID NO: 3829779 - DNA, 25 bp, Homo sapien
gattagggtaaacggctcatgccag

SEQ ID NO: 3829780 - DNA, 25 bp, Homo sapien
gaatgttacttgatactctgccacc

SEQ ID NO: 3829781 - DNA, 25 bp, Homo sapien
tatgaaattgagaagcattatgtcc

SEQ ID NO: 3829782 - DNA, 25 bp, Homo sapien
agattgcgtggaattgttgactggt

SEQ ID NO: 3829783 - DNA, 25 bp, Homo sapien
acagtgaattgtgcagcttcccata

SEQ ID NO: 3829784 - DNA, 25 bp, Homo sapien
gcatctgtcttcaggagattgcgtg

SEQ ID NO: 3829785 - DNA, 25 bp, Homo sapien
cccagtggggttctcagcttagaaa

SEQ ID NO: 3829786 - DNA, 25 bp, Homo sapien
agaagaagaacaagtctaagttggt

SEQ ID NO: 3829787 - DNA, 25 bp, Homo sapien
taacatcctgatcagggtttaatgt

SEQ ID NO: 3829788 - DNA, 25 bp, Homo sapien
ctgactaacatcctgatcagggttt

SEQ ID NO: 3829789 - DNA, 25 bp, Homo sapien
tgtctgcagttgtccactgactaac

SEQ ID NO: 3829790 - DNA, 25 bp, Homo sapien
ctgccagctgtgaccattaaactgc

SEQ ID NO: 3829791 - DNA, 25 bp, Homo sapien
tctgcacatactgccagctgtgacc

SEQ ID NO: 3829792 - DNA, 25 bp, Homo sapien
taaaccaaatacacaagtctattgt

SEQ ID NO: 3829793 - DNA, 25 bp, Homo sapien
ggatgtctcacctatatataaacca

SEQ ID NO: 3829794 - DNA, 25 bp, Homo sapien
ggagagtcgaatccgcgttagccag

SEQ ID NO: 3829795 - DNA, 25 bp, Homo sapien
tcaaagccatgtctcactgtcactg

SEQ ID NO: 3829796 - DNA, 25 bp, Homo sapien
aggctggcctgccaacaatcctacc

SEQ ID NO: 3829797 - DNA, 25 bp, Homo sapien
atcctaccctcatgatggagagtcg

SEQ ID NO: 3829798 - DNA, 25 bp, Homo sapien
tgttgagccactgagttaatccaca

SEQ ID NO: 3829799 - DNA, 25 bp, Homo sapien
ttttccaacaatagatgatgaccag

SEQ ID NO: 3829800 - DNA, 25 bp, Homo sapien
atagcttcaggacaatgaagttcac

SEQ ID NO: 3829801 - DNA, 25 bp, Homo sapien
gatgatgaccagacagcaattccct

SEQ ID NO: 3829802 - DNA, 25 bp, Homo sapien
cagacaatgtttcaggctggcactc

SEQ ID NO: 3829803 - DNA, 25 bp, Homo sapien
gatgcagcaatcaacacctgtcatg

SEQ ID NO: 3829804 - DNA, 25 bp, Homo sapien
ttcaggctggcactcttacacccag

SEQ ID NO: 3829805 - DNA, 25 bp, Homo sapien
cttacacccagcactggctaaggtg

SEQ ID NO: 3829806 - DNA, 25 bp, Homo sapien
cctaaaaacatgataagatcatcag

SEQ ID NO: 3829807 - DNA, 25 bp, Homo sapien
agatcatcagtacgaaatatattac

SEQ ID NO: 3829808 - DNA, 25 bp, Homo sapien
aaaacatgataagatcatcagtacg

SEQ ID NO: 3829809 - DNA, 25 bp, Homo sapien
gataagatcatcagtacgaaatata

SEQ ID NO: 3829810 - DNA, 25 bp, Homo sapien
ataatttataacctcaggggaagag

SEQ ID NO: 3829811 - DNA, 25 bp, Homo sapien
taacctcaggggaagagtcagtcgg

SEQ ID NO: 3829812 - DNA, 25 bp, Homo sapien
ggaagagtcagtcggtttggacagc

SEQ ID NO: 3829813 - DNA, 25 bp, Homo sapien
agagtcagtcggtttggacagcaca

SEQ ID NO: 3829814 - DNA, 25 bp, Homo sapien
ggaagtgctactggtactctttttc

SEQ ID NO: 3829815 - DNA, 25 bp, Homo sapien
agtgctactggtactctttttcaag

SEQ ID NO: 3829816 - DNA, 25 bp, Homo sapien
tactggtactctttttcaagtcatg

SEQ ID NO: 3829817 - DNA, 25 bp, Homo sapien
gctactggtactctttttcaagtca

SEQ ID NO: 3829818 - DNA, 25 bp, Homo sapien
ttataactggaaacagaaagcctta

SEQ ID NO: 3829819 - DNA, 25 bp, Homo sapien
tataactggaaacagaaagccttac

SEQ ID NO: 3829820 - DNA, 25 bp, Homo sapien
tgttttataactggaaacagaaagc

SEQ ID NO: 3829821 - DNA, 25 bp, Homo sapien
gaggtccaattagtccttctatcaa

SEQ ID NO: 3829822 - DNA, 25 bp, Homo sapien
cacatgctcagtgaagcaattacac

SEQ ID NO: 3829823 - DNA, 25 bp, Homo sapien
acagcacatgctcagtgaagcaatt

SEQ ID NO: 3829824 - DNA, 25 bp, Homo sapien
tctgttttatgtgctgcctgggtca

SEQ ID NO: 3829825 - DNA, 25 bp, Homo sapien
cagcaagtagattgatattttctcc

SEQ ID NO: 3829826 - DNA, 25 bp, Homo sapien
cctccagcaagtagattgatatttt

SEQ ID NO: 3829827 - DNA, 25 bp, Homo sapien
atattttctcctggtaacaattcta

SEQ ID NO: 3829828 - DNA, 25 bp, Homo sapien
tgatattttctcctggtaacaattc

SEQ ID NO: 3829829 - DNA, 25 bp, Homo sapien
acatgttacgaagcagttttttcat

SEQ ID NO: 3829830 - DNA, 25 bp, Homo sapien
tcacatgttacgaagcagttttttc

SEQ ID NO: 3829831 - DNA, 25 bp, Homo sapien
cacatgttacgaagcagttttttca

SEQ ID NO: 3829832 - DNA, 25 bp, Homo sapien
atgttacgaagcagttttttcatgt

SEQ ID NO: 3829833 - DNA, 25 bp, Homo sapien
cttctgatcttgttctatcgggttt

SEQ ID NO: 3829834 - DNA, 25 bp, Homo sapien
ttctatcgggtttaaagcagttgcc

SEQ ID NO: 3829835 - DNA, 25 bp, Homo sapien
aagcagttgccaaacaaacagaact

SEQ ID NO: 3829836 - DNA, 25 bp, Homo sapien
gatcttgttctatcgggtttaaagc

SEQ ID NO: 3829837 - DNA, 25 bp, Homo sapien
gatgcgggatgtttgcttcaagtac

SEQ ID NO: 3829838 - DNA, 25 bp, Homo sapien
gcctaaaggaactgtctttacatac

SEQ ID NO: 3829839 - DNA, 25 bp, Homo sapien
tttgccatccttgcgattatctcag

SEQ ID NO: 3829840 - DNA, 25 bp, Homo sapien
taaggtctttgttctacagtaatga

SEQ ID NO: 3829841 - DNA, 25 bp, Homo sapien
tctggatttaccagcttgcccaact

SEQ ID NO: 3829842 - DNA, 25 bp, Homo sapien
catgctgtttacatgaacgtaaagc

SEQ ID NO: 3829843 - DNA, 25 bp, Homo sapien
gctgtttacatgaacgtaaagcttc

SEQ ID NO: 3829844 - DNA, 25 bp, Homo sapien
tgctgtttacatgaacgtaaagctt

SEQ ID NO: 3829845 - DNA, 25 bp, Homo sapien
tcatgctgtttacatgaacgtaaag

SEQ ID NO: 3829846 - DNA, 25 bp, Homo sapien
ttaatgcctgcatccacggcctcac

SEQ ID NO: 3829847 - DNA, 25 bp, Homo sapien
cttaatgcctgcatccacggcctca

SEQ ID NO: 3829848 - DNA, 25 bp, Homo sapien
cattatatcccaacgaagagctcag

SEQ ID NO: 3829849 - DNA, 25 bp, Homo sapien
ggtctcactatgtcgggtcgccgtg

SEQ ID NO: 3829850 - DNA, 25 bp, Homo sapien
caatccaatttgaaggcctcaatgc

SEQ ID NO: 3829851 - DNA, 25 bp, Homo sapien
cacaaaaataagtcgtacgtcttca

SEQ ID NO: 3829852 - DNA, 25 bp, Homo sapien
ttgagctagaaaataattcgcattg

SEQ ID NO: 3829853 - DNA, 25 bp, Homo sapien
taatgcccatacaacaggtcactgt

SEQ ID NO: 3829854 - DNA, 25 bp, Homo sapien
ttctgagcctcccaccaatgttggt

SEQ ID NO: 3829855 - DNA, 25 bp, Homo sapien
gccagccaccggaaagttttatgta

SEQ ID NO: 3829856 - DNA, 25 bp, Homo sapien
caaggcatccacattctaggaaaga

SEQ ID NO: 3829857 - DNA, 25 bp, Homo sapien
gactccagagtctagatttataacc

SEQ ID NO: 3829858 - DNA, 25 bp, Homo sapien
taaccactatgttacggctgccagt

SEQ ID NO: 3829859 - DNA, 25 bp, Homo sapien
ccagatgccattctaggttctaggg

SEQ ID NO: 3829860 - DNA, 25 bp, Homo sapien
ctgtaattaagtgctccgggaggcc

SEQ ID NO: 3829861 - DNA, 25 bp, Homo sapien
ctccagaaagtataggcacaacagc

SEQ ID NO: 3829862 - DNA, 25 bp, Homo sapien
tcctaacaacgtatctccagaaagt

SEQ ID NO: 3829863 - DNA, 25 bp, Homo sapien
gattgaactcaggagctcgggacca

SEQ ID NO: 3829864 - DNA, 25 bp, Homo sapien
gggctacctccagtaatcctatttg

SEQ ID NO: 3829865 - DNA, 25 bp, Homo sapien
tagtgcgtctcgcttgactagaagc

SEQ ID NO: 3829866 - DNA, 25 bp, Homo sapien
tgaaagcaagagaccctacctgcct

SEQ ID NO: 3829867 - DNA, 25 bp, Homo sapien
tcttgtttctgtcccagtagttagg

SEQ ID NO: 3829868 - DNA, 25 bp, Homo sapien
cctgcctgcaaaacatggctcttca

SEQ ID NO: 3829869 - DNA, 25 bp, Homo sapien
ctgcctgcaaaacatggctcttcac

SEQ ID NO: 3829870 - DNA, 25 bp, Homo sapien
tgcctgcaaaacatggctcttcacc

SEQ ID NO: 3829871 - DNA, 25 bp, Homo sapien
ccaatctggtgaaactctatgtctc

SEQ ID NO: 3829872 - DNA, 25 bp, Homo sapien
cacagacacgtgagacaggagttcg

SEQ ID NO: 3829873 - DNA, 25 bp, Homo sapien
caatgtactttatgagatccacctc

SEQ ID NO: 3829874 - DNA, 25 bp, Homo sapien
gtaattctcctcacctttgacaatg

SEQ ID NO: 3829875 - DNA, 25 bp, Homo sapien
taatattaaactgggctgatgagag

SEQ ID NO: 3829876 - DNA, 25 bp, Homo sapien
gaattgtaaacctggtggtccgaga

SEQ ID NO: 3829877 - DNA, 25 bp, Homo sapien
ttcaaccacagaaataccgggcagt

SEQ ID NO: 3829878 - DNA, 25 bp, Homo sapien
gttactgcggatcaaaattagactc

SEQ ID NO: 3829879 - DNA, 25 bp, Homo sapien
tgacctcaacggaataacgtgacat

SEQ ID NO: 3829880 - DNA, 25 bp, Homo sapien
ttagttggtgatgacctcaacggaa

SEQ ID NO: 3829881 - DNA, 25 bp, Homo sapien
tgatgacctcaacggaataacgtga

SEQ ID NO: 3829882 - DNA, 25 bp, Homo sapien
ttggtgatgacctcaacggaataac

SEQ ID NO: 3829883 - DNA, 25 bp, Homo sapien
tcatcccaagaccattaccatcctg

SEQ ID NO: 3829884 - DNA, 25 bp, Homo sapien
ttgaagcttcgtctgtatttctggc

SEQ ID NO: 3829885 - DNA, 25 bp, Homo sapien
agaccattaccatcctgcgccccat

SEQ ID NO: 3829886 - DNA, 25 bp, Homo sapien
gtgaatggtgggtaacaattgaagc

SEQ ID NO: 3829887 - DNA, 25 bp, Homo sapien
gccgcagtgggcaatgatcatgtca

SEQ ID NO: 3829888 - DNA, 25 bp, Homo sapien
gaccctaggttgttgctacccgata

SEQ ID NO: 3829889 - DNA, 25 bp, Homo sapien
cctacaactatcttggtaaatggct

SEQ ID NO: 3829890 - DNA, 25 bp, Homo sapien
gacagctaatcacaaacaacctgcg

SEQ ID NO: 3829891 - DNA, 25 bp, Homo sapien
gaaggtagaatgaggcatgttgaca

SEQ ID NO: 3829892 - DNA, 25 bp, Homo sapien
cattcagtcggactgggtggcttag

SEQ ID NO: 3829893 - DNA, 25 bp, Homo sapien
tccttgctcaacaggaagggtccat

SEQ ID NO: 3829894 - DNA, 25 bp, Homo sapien
acatctcaactatcacagcagccgg

SEQ ID NO: 3829895 - DNA, 25 bp, Homo sapien
aatggcatgatcctggctcactgca

SEQ ID NO: 3829896 - DNA, 25 bp, Homo sapien
tttttttaatgaggcggagtctcgc

SEQ ID NO: 3829897 - DNA, 25 bp, Homo sapien
gcaatggcatgatcctggctcactg

SEQ ID NO: 3829898 - DNA, 25 bp, Homo sapien
tggcatgatcctggctcactgcaac

SEQ ID NO: 3829899 - DNA, 25 bp, Homo sapien
taaatcactgctaatgcaattaaaa

SEQ ID NO: 3829900 - DNA, 25 bp, Homo sapien
ttaaatcactgctaatgcaattaaa

SEQ ID NO: 3829901 - DNA, 25 bp, Homo sapien
aattaaatcactgctaatgcaatta

SEQ ID NO: 3829902 - DNA, 25 bp, Homo sapien
aaaattaaatcactgctaatgcaat

SEQ ID NO: 3829903 - DNA, 25 bp, Homo sapien
caattataataaggctgggcgctgt

SEQ ID NO: 3829904 - DNA, 25 bp, Homo sapien
tctctcttgaaggagagagcaaaag

SEQ ID NO: 3829905 - DNA, 25 bp, Homo sapien
ctgaatgggatgaggtctctcttga

SEQ ID NO: 3829906 - DNA, 25 bp, Homo sapien
aaattagctgagtgccgtggcttgc

SEQ ID NO: 3829907 - DNA, 25 bp, Homo sapien
cagattcagttgactaaagcacctc

SEQ ID NO: 3829908 - DNA, 25 bp, Homo sapien
ttcacttggatgtaatgcttcacgc

SEQ ID NO: 3829909 - DNA, 25 bp, Homo sapien
tagtgtatggttggcgtattctgtg

SEQ ID NO: 3829910 - DNA, 25 bp, Homo sapien
gacattatgtaaccatctcaagaag

SEQ ID NO: 3829911 - DNA, 25 bp, Homo sapien
ctgatctcgtgatctccgcgcctcg

SEQ ID NO: 3829912 - DNA, 25 bp, Homo sapien
accacatccagctaattttttgtat

SEQ ID NO: 3829913 - DNA, 25 bp, Homo sapien
actacaagtgctgccaccacatcca

SEQ ID NO: 3829914 - DNA, 25 bp, Homo sapien
cgtgcccagcctaatttttgcattt

SEQ ID NO: 3829915 - DNA, 25 bp, Homo sapien
ggccctgatatgatgctgtcagtca

SEQ ID NO: 3829916 - DNA, 25 bp, Homo sapien
gatactgcatgggagggcactgtca

SEQ ID NO: 3829917 - DNA, 25 bp, Homo sapien
cattgtcaaatgtggcgatactgca

SEQ ID NO: 3829918 - DNA, 25 bp, Homo sapien
aatttataaaagtctgctggccctg

SEQ ID NO: 3829919 - DNA, 25 bp, Homo sapien
cccatatgtccgcatgttttagaaa

SEQ ID NO: 3829920 - DNA, 25 bp, Homo sapien
gaaaaatcggtattgtaggacaatg

SEQ ID NO: 3829921 - DNA, 25 bp, Homo sapien
tacatgccagccatgattcatggtc

SEQ ID NO: 3829922 - DNA, 25 bp, Homo sapien
caagactgccaaatacttgttgaac

SEQ ID NO: 3829923 - DNA, 25 bp, Homo sapien
tgtgaaacaggaacaatagtttcat

SEQ ID NO: 3829924 - DNA, 25 bp, Homo sapien
gtgtgaaacaggaacaatagtttca

SEQ ID NO: 3829925 - DNA, 25 bp, Homo sapien
tgaaacaggaacaatagtttcattc

SEQ ID NO: 3829926 - DNA, 25 bp, Homo sapien
tgtgtgaaacaggaacaatagtttc

SEQ ID NO: 3829927 - DNA, 25 bp, Homo sapien
ttgaatgagtggaaaaacaaggtga

SEQ ID NO: 3829928 - DNA, 25 bp, Homo sapien
gttgaatgagtggaaaaacaaggtg

SEQ ID NO: 3829929 - DNA, 25 bp, Homo sapien
ttgcagaatgagaacaggggctcat

SEQ ID NO: 3829930 - DNA, 25 bp, Homo sapien
cagaatgagaacaggggctcatgat

SEQ ID NO: 3829931 - DNA, 25 bp, Homo sapien
acaggggctcatgatgagtgccaac

SEQ ID NO: 3829932 - DNA, 25 bp, Homo sapien
agaacaggggctcatgatgagtgcc

SEQ ID NO: 3829933 - DNA, 25 bp, Homo sapien
ctgtggggtcaggacaatagagagc

SEQ ID NO: 3829934 - DNA, 25 bp, Homo sapien
gggtcaggacaatagagagcttcac

SEQ ID NO: 3829935 - DNA, 25 bp, Homo sapien
ggtcaggacaatagagagcttcacc

SEQ ID NO: 3829936 - DNA, 25 bp, Homo sapien
tggggtcaggacaatagagagcttc

SEQ ID NO: 3829937 - DNA, 25 bp, Homo sapien
aggtactcgcatgggcatgtcactg

SEQ ID NO: 3829938 - DNA, 25 bp, Homo sapien
ctcaggtactcgcatgggcatgtca

SEQ ID NO: 3829939 - DNA, 25 bp, Homo sapien
tcctcaggtactcgcatgggcatgt

SEQ ID NO: 3829940 - DNA, 25 bp, Homo sapien
cttcctcaggtactcgcatgggcat

SEQ ID NO: 3829941 - DNA, 25 bp, Homo sapien
catcaccggctatgagatgtgtggc

SEQ ID NO: 3829942 - DNA, 25 bp, Homo sapien
cctaagccacttgtatggaaagaaa

SEQ ID NO: 3829943 - DNA, 25 bp, Homo sapien
tcacctttttaagtgtcgttgggca

SEQ ID NO: 3829944 - DNA, 25 bp, Homo sapien
ctttaggttaccatgccagcaatga

SEQ ID NO: 3829945 - DNA, 25 bp, Homo sapien
gattttgtgcggctctgggacaaac

SEQ ID NO: 3829946 - DNA, 25 bp, Homo sapien
gaagtctactccgtttaatcatgct

SEQ ID NO: 3829947 - DNA, 25 bp, Homo sapien
tgatgattttgtgcggctctgggac

SEQ ID NO: 3829948 - DNA, 25 bp, Homo sapien
ctccgtttaatcatgctggtgatga

SEQ ID NO: 3829949 - DNA, 25 bp, Homo sapien
gcgcagaatacacgcacgacacggg

SEQ ID NO: 3829950 - DNA, 25 bp, Homo sapien
atgcgcagaatacacgcacgacacg

SEQ ID NO: 3829951 - DNA, 25 bp, Homo sapien
gcagaatacacgcacgacacggggg

SEQ ID NO: 3829952 - DNA, 25 bp, Homo sapien
tgcgcagaatacacgcacgacacgg

SEQ ID NO: 3829953 - DNA, 25 bp, Homo sapien
cctaggtcctggataagaatgaggg

SEQ ID NO: 3829954 - DNA, 25 bp, Homo sapien
gggctcctaggtcctggataagaat

SEQ ID NO: 3829955 - DNA, 25 bp, Homo sapien
taggtcctggataagaatgagggtc

SEQ ID NO: 3829956 - DNA, 25 bp, Homo sapien
tggataagaatgagggtctgggcac

SEQ ID NO: 3829957 - DNA, 25 bp, Homo sapien
acatccatgtagccatccgtccatc

SEQ ID NO: 3829958 - DNA, 25 bp, Homo sapien
gaaggtcccgatagtaaaccatctc

SEQ ID NO: 3829959 - DNA, 25 bp, Homo sapien
aggtcccgatagtaaaccatctcca

SEQ ID NO: 3829960 - DNA, 25 bp, Homo sapien
ataaaaaacaaatgatggcaggatg

SEQ ID NO: 3829961 - DNA, 25 bp, Homo sapien
aaaaaacaaatgatggcaggatggc

SEQ ID NO: 3829962 - DNA, 25 bp, Homo sapien
taaaaaacaaatgatggcaggatgg

SEQ ID NO: 3829963 - DNA, 25 bp, Homo sapien
ctttcagggcgccctgaggcggcca

SEQ ID NO: 3829964 - DNA, 25 bp, Homo sapien
tcctttcagggcgccctgaggcggc

SEQ ID NO: 3829965 - DNA, 25 bp, Homo sapien
tcctggtcctttcagggcgccctga

SEQ ID NO: 3829966 - DNA, 25 bp, Homo sapien
ttcagggcgccctgaggcggccagg

SEQ ID NO: 3829967 - DNA, 25 bp, Homo sapien
attccagtaggagcccaaagaggag

SEQ ID NO: 3829968 - DNA, 25 bp, Homo sapien
ggctgataaattccagtaggagccc

SEQ ID NO: 3829969 - DNA, 25 bp, Homo sapien
gataaattccagtaggagcccaaag

SEQ ID NO: 3829970 - DNA, 25 bp, Homo sapien
taaattccagtaggagcccaaagag

SEQ ID NO: 3829971 - DNA, 25 bp, Homo sapien
ctgagctgtgtaatttcatgccacg

SEQ ID NO: 3829972 - DNA, 25 bp, Homo sapien
gccacgtgatacagcccagtaaaaa

SEQ ID NO: 3829973 - DNA, 25 bp, Homo sapien
taatttcatgccacgtgatacagcc

SEQ ID NO: 3829974 - DNA, 25 bp, Homo sapien
accccacgggtccagcgtctactca

SEQ ID NO: 3829975 - DNA, 25 bp, Homo sapien
ttgttaaaaacaagagtgcagcggg

SEQ ID NO: 3829976 - DNA, 25 bp, Homo sapien
ttaaaaacaagagtgcagcggggcc

SEQ ID NO: 3829977 - DNA, 25 bp, Homo sapien
aggcccgactaatctttattggaat

SEQ ID NO: 3829978 - DNA, 25 bp, Homo sapien
ccaggcccgactaatctttattgga

SEQ ID NO: 3829979 - DNA, 25 bp, Homo sapien
cacatgcagcccgtcactcatgggt

SEQ ID NO: 3829980 - DNA, 25 bp, Homo sapien
cactcatgggtaagacaagctaagt

SEQ ID NO: 3829981 - DNA, 25 bp, Homo sapien
aaattgatgtataacattggatgca

SEQ ID NO: 3829982 - DNA, 25 bp, Homo sapien
tatatatcacatggtaaaagaatcc

SEQ ID NO: 3829983 - DNA, 25 bp, Homo sapien
tcctgacaggcgatctgcctacctc

SEQ ID NO: 3829984 - DNA, 25 bp, Homo sapien
ttccgctccactcagtcgcccaggc

SEQ ID NO: 3829985 - DNA, 25 bp, Homo sapien
gtgagccaccgtgcccagccatttt

SEQ ID NO: 3829986 - DNA, 25 bp, Homo sapien
gagccaccgtgcccagccatttttt

SEQ ID NO: 3829987 - DNA, 25 bp, Homo sapien
tttcactcagaaagaatcatcctta

SEQ ID NO: 3829988 - DNA, 25 bp, Homo sapien
cggaaacgcaataatgacatgtaac

SEQ ID NO: 3829989 - DNA, 25 bp, Homo sapien
ggtaaactatccagagggtaatgac

SEQ ID NO: 3829990 - DNA, 25 bp, Homo sapien
aacttgtcggaaacgcaataatgac

SEQ ID NO: 3829991 - DNA, 25 bp, Homo sapien
gtaatgacaactttataacttgtcg

SEQ ID NO: 3829992 - DNA, 25 bp, Homo sapien
ctctacagaaagttagtatactcac

SEQ ID NO: 3829993 - DNA, 25 bp, Homo sapien
gtatacctctacagaaagttagtat

SEQ ID NO: 3829994 - DNA, 25 bp, Homo sapien
cctctacagaaagttagtatactca

SEQ ID NO: 3829995 - DNA, 25 bp, Homo sapien
tacctctacagaaagttagtatact

SEQ ID NO: 3829996 - DNA, 25 bp, Homo sapien
tatactaataaatcatttccctgat

SEQ ID NO: 3829997 - DNA, 25 bp, Homo sapien
gttttcataattcttatactaataa

SEQ ID NO: 3829998 - DNA, 25 bp, Homo sapien
ggcagtgccaaatgacgtgtaatta

SEQ ID NO: 3829999 - DNA, 25 bp, Homo sapien
cattgttcagaaggaggttcagccc

SEQ ID NO: 3830000 - DNA, 25 bp, Homo sapien
gacaaattatggcacaacttagcag

SEQ ID NO: 3830001 - DNA, 25 bp, Homo sapien
gaatggcaagacaaaatgtagagct

SEQ ID NO: 3830002 - DNA, 25 bp, Homo sapien
cagatacctatgaatctcctgaggt

SEQ ID NO: 3830003 - DNA, 25 bp, Homo sapien
tcagatacctatgaatctcctgagg

SEQ ID NO: 3830004 - DNA, 25 bp, Homo sapien
atttcgagaccagaagatagtcttc

SEQ ID NO: 3830005 - DNA, 25 bp, Homo sapien
ttcgagaccagaagatagtcttcag

SEQ ID NO: 3830006 - DNA, 25 bp, Homo sapien
tccatttcgagaccagaagatagtc

SEQ ID NO: 3830007 - DNA, 25 bp, Homo sapien
ccatcatgtccatttcgagaccaga

SEQ ID NO: 3830008 - DNA, 25 bp, Homo sapien
aaactcatttccacactatgcggat

SEQ ID NO: 3830009 - DNA, 25 bp, Homo sapien
cacactatgcggattccaacagagc

SEQ ID NO: 3830010 - DNA, 25 bp, Homo sapien
tatgcggattccaacagagccatac

SEQ ID NO: 3830011 - DNA, 25 bp, Homo sapien
tcatttccacactatgcggattcca

SEQ ID NO: 3830012 - DNA, 25 bp, Homo sapien
tttgtgtgcatacaaatggacctca

SEQ ID NO: 3830013 - DNA, 25 bp, Homo sapien
tcttttctttgtgtgcatacaaatg

SEQ ID NO: 3830014 - DNA, 25 bp, Homo sapien
tctttgtgtgcatacaaatggacct

SEQ ID NO: 3830015 - DNA, 25 bp, Homo sapien
tttctttgtgtgcatacaaatggac

SEQ ID NO: 3830016 - DNA, 25 bp, Homo sapien
gagtaatgacgtctttcaggccaat

SEQ ID NO: 3830017 - DNA, 25 bp, Homo sapien
tgacgtctttcaggccaattttatt

SEQ ID NO: 3830018 - DNA, 25 bp, Homo sapien
tagagtaatgacgtctttcaggcca

SEQ ID NO: 3830019 - DNA, 25 bp, Homo sapien
gtaatgacgtctttcaggccaattt

SEQ ID NO: 3830020 - DNA, 25 bp, Homo sapien
caacagtatttgtgtcaaggcacat

SEQ ID NO: 3830021 - DNA, 25 bp, Homo sapien
acaacagtatttgtgtcaaggcaca

SEQ ID NO: 3830022 - DNA, 25 bp, Homo sapien
gaggcagaattgcttcaaactggga

SEQ ID NO: 3830023 - DNA, 25 bp, Homo sapien
aaaaaattggtcaaatgtggtggca

SEQ ID NO: 3830024 - DNA, 25 bp, Homo sapien
aggcagaattgcttcaaactgggag

SEQ ID NO: 3830025 - DNA, 25 bp, Homo sapien
aattggtcaaatgtggtggcacaca

SEQ ID NO: 3830026 - DNA, 25 bp, Homo sapien
ctcaagaggctgagggataagaatc

SEQ ID NO: 3830027 - DNA, 25 bp, Homo sapien
aggccgaggtgtgcggatcatgtca

SEQ ID NO: 3830028 - DNA, 25 bp, Homo sapien
tcaagaggctgagggataagaatcg

SEQ ID NO: 3830029 - DNA, 25 bp, Homo sapien
ccgaggtgtgcggatcatgtcagga

SEQ ID NO: 3830030 - DNA, 25 bp, Homo sapien
ccttccagaataaccccgcagttca

SEQ ID NO: 3830031 - DNA, 25 bp, Homo sapien
tccttccagaataaccccgcagttc

SEQ ID NO: 3830032 - DNA, 25 bp, Homo sapien
gaaatgcacacacatgatccaccag

SEQ ID NO: 3830033 - DNA, 25 bp, Homo sapien
tccttttctgcatgctcacattctt

SEQ ID NO: 3830034 - DNA, 25 bp, Homo sapien
catgctcacattctttcacgcttag

SEQ ID NO: 3830035 - DNA, 25 bp, Homo sapien
ctctccttttctgcatgctcacatt

SEQ ID NO: 3830036 - DNA, 25 bp, Homo sapien
ttctgcatgctcacattctttcacg

SEQ ID NO: 3830037 - DNA, 25 bp, Homo sapien
tttcctaaggatgacaacaactcac

SEQ ID NO: 3830038 - DNA, 25 bp, Homo sapien
tcctaaggatgacaacaactcaccc

SEQ ID NO: 3830039 - DNA, 25 bp, Homo sapien
ctaaggatgacaacaactcacccca

SEQ ID NO: 3830040 - DNA, 25 bp, Homo sapien
taaggatgacaacaactcaccccac

SEQ ID NO: 3830041 - DNA, 25 bp, Homo sapien
aatctatctctacctagaaaacgta

SEQ ID NO: 3830042 - DNA, 25 bp, Homo sapien
gaagagtacagtctgagccggtcac

SEQ ID NO: 3830043 - DNA, 25 bp, Homo sapien
caactgtacccttacacaatctatc

SEQ ID NO: 3830044 - DNA, 25 bp, Homo sapien
gaaaacgtatttcagatggctagaa

SEQ ID NO: 3830045 - DNA, 25 bp, Homo sapien
ctcttgcgcacgttgaaacattttc

SEQ ID NO: 3830046 - DNA, 25 bp, Homo sapien
tcgccgccgcaactcttgcgcacgt

SEQ ID NO: 3830047 - DNA, 25 bp, Homo sapien
tctgctcgccgccgcaactcttgcg

SEQ ID NO: 3830048 - DNA, 25 bp, Homo sapien
tttgcatttgtggtagtcctctgct

SEQ ID NO: 3830049 - DNA, 25 bp, Homo sapien
tcagcactgaactatcctgcaactg

SEQ ID NO: 3830050 - DNA, 25 bp, Homo sapien
ctgcatcagcactgaactatcctgc

SEQ ID NO: 3830051 - DNA, 25 bp, Homo sapien
gcatcagcactgaactatcctgcaa

SEQ ID NO: 3830052 - DNA, 25 bp, Homo sapien
cagcactgaactatcctgcaactgc

SEQ ID NO: 3830053 - DNA, 25 bp, Homo sapien
aacacatgagaaattgaatgttgag

SEQ ID NO: 3830054 - DNA, 25 bp, Homo sapien
ccaacacatgagaaattgaatgttg

SEQ ID NO: 3830055 - DNA, 25 bp, Homo sapien
gccaacacatgagaaattgaatgtt

SEQ ID NO: 3830056 - DNA, 25 bp, Homo sapien
caacacatgagaaattgaatgttga

SEQ ID NO: 3830057 - DNA, 25 bp, Homo sapien
ccagttgcaaagagcctttcttgca

SEQ ID NO: 3830058 - DNA, 25 bp, Homo sapien
gcaaagagcctttcttgcagaaggg

SEQ ID NO: 3830059 - DNA, 25 bp, Homo sapien
tgcaaagagcctttcttgcagaagg

SEQ ID NO: 3830060 - DNA, 25 bp, Homo sapien
gttgcaaagagcctttcttgcagaa

SEQ ID NO: 3830061 - DNA, 25 bp, Homo sapien
aatgtatccatgtcctgacctggca

SEQ ID NO: 3830062 - DNA, 25 bp, Homo sapien
aaaatgtatccatgtcctgacctgg

SEQ ID NO: 3830063 - DNA, 25 bp, Homo sapien
atgtatccatgtcctgacctggcag

SEQ ID NO: 3830064 - DNA, 25 bp, Homo sapien
aaatgtatccatgtcctgacctggc

SEQ ID NO: 3830065 - DNA, 25 bp, Homo sapien
ttcactcccaggtaataccaaattg

SEQ ID NO: 3830066 - DNA, 25 bp, Homo sapien
ctcccaggtaataccaaattgtaag

SEQ ID NO: 3830067 - DNA, 25 bp, Homo sapien
tcactcccaggtaataccaaattgt

SEQ ID NO: 3830068 - DNA, 25 bp, Homo sapien
cactcccaggtaataccaaattgta

SEQ ID NO: 3830069 - DNA, 25 bp, Homo sapien
tgagcagacactcgggaggtgtctt

SEQ ID NO: 3830070 - DNA, 25 bp, Homo sapien
actcgggaggtgtcttgagattatc

SEQ ID NO: 3830071 - DNA, 25 bp, Homo sapien
ggctcagggagttatcagttataga

SEQ ID NO: 3830072 - DNA, 25 bp, Homo sapien
gaagaatgacgatgctccgctgccg

SEQ ID NO: 3830073 - DNA, 25 bp, Homo sapien
ctgagggtggagctgagggtagagc

SEQ ID NO: 3830074 - DNA, 25 bp, Homo sapien
agggtggagctgagggtagagctga

SEQ ID NO: 3830075 - DNA, 25 bp, Homo sapien
gtggagctgagggtagagctgaggg

SEQ ID NO: 3830076 - DNA, 25 bp, Homo sapien
gattatcatccgctgagggtggagc

SEQ ID NO: 3830077 - DNA, 25 bp, Homo sapien
ggagtgagctgacgctcggaaggtg

SEQ ID NO: 3830078 - DNA, 25 bp, Homo sapien
aggggagtgagctgacgctcggaag

SEQ ID NO: 3830079 - DNA, 25 bp, Homo sapien
tgagctgacgctcggaaggtgtctt

SEQ ID NO: 3830080 - DNA, 25 bp, Homo sapien
gaaggggagtgagctgacgctcgga

SEQ ID NO: 3830081 - DNA, 25 bp, Homo sapien
atattatcatctgctgagggtggag

SEQ ID NO: 3830082 - DNA, 25 bp, Homo sapien
cttgatattatcatctgctgagggt

SEQ ID NO: 3830083 - DNA, 25 bp, Homo sapien
gctcggcaggtgtcttgatattatc

SEQ ID NO: 3830084 - DNA, 25 bp, Homo sapien
tgatattatcatctgctgagggtgg

SEQ ID NO: 3830085 - DNA, 25 bp, Homo sapien
tgagctgacgctcggaaggtgtctt

SEQ ID NO: 3830086 - DNA, 25 bp, Homo sapien
ctgagggtggaagcggcccccgcag

SEQ ID NO: 3830087 - DNA, 25 bp, Homo sapien
gaaggggagtgagctgacgctcgga

SEQ ID NO: 3830088 - DNA, 25 bp, Homo sapien
cgctgagggtggaagcggcccccgc

SEQ ID NO: 3830089 - DNA, 25 bp, Homo sapien
cagacgctcagcaggtgtcttgata

SEQ ID NO: 3830090 - DNA, 25 bp, Homo sapien
cccgcagacgctcagcaggtgtctt

SEQ ID NO: 3830091 - DNA, 25 bp, Homo sapien
cgcagacgctcagcaggtgtcttga

SEQ ID NO: 3830092 - DNA, 25 bp, Homo sapien
acgctcagcaggtgtcttgatatta

SEQ ID NO: 3830093 - DNA, 25 bp, Homo sapien
ttgatattatcatctgctgagggtg

SEQ ID NO: 3830094 - DNA, 25 bp, Homo sapien
gtgtcttgatattatcatctgctga

SEQ ID NO: 3830095 - DNA, 25 bp, Homo sapien
tgtcttgatattatcatctgctgag

SEQ ID NO: 3830096 - DNA, 25 bp, Homo sapien
atattatcatctgctgagggtggag

SEQ ID NO: 3830097 - DNA, 25 bp, Homo sapien
gctgagggtggaagcggcccccgca

SEQ ID NO: 3830098 - DNA, 25 bp, Homo sapien
gaagggcagtgagctgacgctcgga

SEQ ID NO: 3830099 - DNA, 25 bp, Homo sapien
tggaagggcagtgagctgacgctcg

SEQ ID NO: 3830100 - DNA, 25 bp, Homo sapien
agggcagtgagctgacgctcggaag

SEQ ID NO: 3830101 - DNA, 25 bp, Homo sapien
atccgctgagggtggaagcggcccc

SEQ ID NO: 3830102 - DNA, 25 bp, Homo sapien
ctgagggtggaagcggcccccgcag

SEQ ID NO: 3830103 - DNA, 25 bp, Homo sapien
atcatccgctgagggtggaagcggc

SEQ ID NO: 3830104 - DNA, 25 bp, Homo sapien
cgctgagggtggaagcggcccccgc

SEQ ID NO: 3830105 - DNA, 25 bp, Homo sapien
gtggaaggcaggtgtcttgatatta

SEQ ID NO: 3830106 - DNA, 25 bp, Homo sapien
aaggggagtgagctgacgctcggaa

SEQ ID NO: 3830107 - DNA, 25 bp, Homo sapien
gaaggcaggtgtcttgatattatca

SEQ ID NO: 3830108 - DNA, 25 bp, Homo sapien
gctcggaaggtgtcttgagatcatc

SEQ ID NO: 3830109 - DNA, 25 bp, Homo sapien
ctgatggtggaagcggaatccgcag

SEQ ID NO: 3830110 - DNA, 25 bp, Homo sapien
ggtggaagcggaatccgcagacgct

SEQ ID NO: 3830111 - DNA, 25 bp, Homo sapien
ggctgatggtggaagcggaatccgc

SEQ ID NO: 3830112 - DNA, 25 bp, Homo sapien
atggtggaagcggaatccgcagacg

SEQ ID NO: 3830113 - DNA, 25 bp, Homo sapien
gcaggtgtcttgatattatcatctg

SEQ ID NO: 3830114 - DNA, 25 bp, Homo sapien
ctcggcaggtgtcttgatattatca

SEQ ID NO: 3830115 - DNA, 25 bp, Homo sapien
ctgctgagggtggagctgagggtgg

SEQ ID NO: 3830116 - DNA, 25 bp, Homo sapien
ctgagggtggagctgagggtggaag

SEQ ID NO: 3830117 - DNA, 25 bp, Homo sapien
tgagctgacgctcggaaggtgtctt

SEQ ID NO: 3830118 - DNA, 25 bp, Homo sapien
gaaggggagtgagctgacgctcgga

SEQ ID NO: 3830119 - DNA, 25 bp, Homo sapien
atcatccgctcagggtggaagcggc

SEQ ID NO: 3830120 - DNA, 25 bp, Homo sapien
attatcatccgctcagggtggaagc

SEQ ID NO: 3830121 - DNA, 25 bp, Homo sapien
tgctgagggtggaagcggcccccgc

SEQ ID NO: 3830122 - DNA, 25 bp, Homo sapien
cccccgcagacgctcggcaggtgtc

SEQ ID NO: 3830123 - DNA, 25 bp, Homo sapien
cccgcagacgctcggcaggtgtctt

SEQ ID NO: 3830124 - DNA, 25 bp, Homo sapien
catctgctgagggtggaagcggccc

SEQ ID NO: 3830125 - DNA, 25 bp, Homo sapien
aaggggagtgagctgacgctcggaa

SEQ ID NO: 3830126 - DNA, 25 bp, Homo sapien
gggtggaaggggagtgagctgacgc

SEQ ID NO: 3830127 - DNA, 25 bp, Homo sapien
tggaaggggagtgagctgacgctcg

SEQ ID NO: 3830128 - DNA, 25 bp, Homo sapien
gaaggggagtgagctgacgctcgga

SEQ ID NO: 3830129 - DNA, 25 bp, Homo sapien
cccccgcagacgctcggcaggtgtc

SEQ ID NO: 3830130 - DNA, 25 bp, Homo sapien
ctgagggtggaagcggcccccgcag

SEQ ID NO: 3830131 - DNA, 25 bp, Homo sapien
cccgcagacgctcggcaggtgtctt

SEQ ID NO: 3830132 - DNA, 25 bp, Homo sapien
cgctgagggtggaagcggcccccgc

SEQ ID NO: 3830133 - DNA, 25 bp, Homo sapien
aaggggagtgagctgacgctcggaa

SEQ ID NO: 3830134 - DNA, 25 bp, Homo sapien
ggtggaaggggagtgagctgacgct

SEQ ID NO: 3830135 - DNA, 25 bp, Homo sapien
gcaggtgtcttgatattatcatctg

SEQ ID NO: 3830136 - DNA, 25 bp, Homo sapien
ggaaggggagtgagctgacgctcgg

SEQ ID NO: 3830137 - DNA, 25 bp, Homo sapien
ctgctgagggtggaagcggcccccg

SEQ ID NO: 3830138 - DNA, 25 bp, Homo sapien
tgagctgacgctcggaaggtgtctt

SEQ ID NO: 3830139 - DNA, 25 bp, Homo sapien
aaggggagtgagctgacgctcggaa

SEQ ID NO: 3830140 - DNA, 25 bp, Homo sapien
cccgcagacgctcggcaggtgtctt

SEQ ID NO: 3830141 - DNA, 25 bp, Homo sapien
gattatcatccgctgagggtggaag

SEQ ID NO: 3830142 - DNA, 25 bp, Homo sapien
gtcttgagattatcatccgctgagg

SEQ ID NO: 3830143 - DNA, 25 bp, Homo sapien
gagattatcatccgctgagggtgga

SEQ ID NO: 3830144 - DNA, 25 bp, Homo sapien
gtgtcttgagattatcatccgctga

SEQ ID NO: 3830145 - DNA, 25 bp, Homo sapien
ggtggaaagggagtgagctgacgct

SEQ ID NO: 3830146 - DNA, 25 bp, Homo sapien
aagggagtgagctgacgctcggaag

SEQ ID NO: 3830147 - DNA, 25 bp, Homo sapien
tccccgcagacgctcggcaggtgtc

SEQ ID NO: 3830148 - DNA, 25 bp, Homo sapien
tggaaagggagtgagctgacgctcg

SEQ ID NO: 3830149 - DNA, 25 bp, Homo sapien
ctgagggtggaagcggcccccgcag

SEQ ID NO: 3830150 - DNA, 25 bp, Homo sapien
aaggggagtgagctgacgctcggaa

SEQ ID NO: 3830151 - DNA, 25 bp, Homo sapien
cccgcagacgctcggcaggtgtctt

SEQ ID NO: 3830152 - DNA, 25 bp, Homo sapien
cgctgagggtggaagcggcccccgc

SEQ ID NO: 3830153 - DNA, 25 bp, Homo sapien
cccgcagacgctcggcaggtgtctt

SEQ ID NO: 3830154 - DNA, 25 bp, Homo sapien
cccccgcagacgctcggcaggtgtc

SEQ ID NO: 3830155 - DNA, 25 bp, Homo sapien
ctgagggtggaagcggcccccgcag

SEQ ID NO: 3830156 - DNA, 25 bp, Homo sapien
cgctgagggtggaagcggcccccgc

SEQ ID NO: 3830157 - DNA, 25 bp, Homo sapien
aaggggagtgagctgacgctcggaa

SEQ ID NO: 3830158 - DNA, 25 bp, Homo sapien
atcggctgagggtggaagcggcccc

SEQ ID NO: 3830159 - DNA, 25 bp, Homo sapien
atcatcggctgagggtggaagcggc

SEQ ID NO: 3830160 - DNA, 25 bp, Homo sapien
cccgcagacgctcggcaggtgtctt

SEQ ID NO: 3830161 - DNA, 25 bp, Homo sapien
tctgcctcttgggtttgcgtggttt

SEQ ID NO: 3830162 - DNA, 25 bp, Homo sapien
gggtttgcgtggtttttctgcctca

SEQ ID NO: 3830163 - DNA, 25 bp, Homo sapien
gttccatctcagccgccctctgcct

SEQ ID NO: 3830164 - DNA, 25 bp, Homo sapien
ctcttgggtttgcgtggtttttctg

SEQ ID NO: 3830165 - DNA, 25 bp, Homo sapien
ctcttgggtttgcgtgacggttcca

SEQ ID NO: 3830166 - DNA, 25 bp, Homo sapien
tgggtttgcgtgacggttccacgtc

SEQ ID NO: 3830167 - DNA, 25 bp, Homo sapien
tttgcgtgacggttccacgtcaccg

SEQ ID NO: 3830168 - DNA, 25 bp, Homo sapien
tgcgtgacggttccacgtcaccgac

SEQ ID NO: 3830169 - DNA, 25 bp, Homo sapien
ttgcgtgacggttccacatcaccga

SEQ ID NO: 3830170 - DNA, 25 bp, Homo sapien
gtttgcgtgacggttccacatcacc

SEQ ID NO: 3830171 - DNA, 25 bp, Homo sapien
cttgggtttgcgtgacggttccaca

SEQ ID NO: 3830172 - DNA, 25 bp, Homo sapien
gggtttgcgtgacggttccacatca

SEQ ID NO: 3830173 - DNA, 25 bp, Homo sapien
actcggttttattcttattgctcag

SEQ ID NO: 3830174 - DNA, 25 bp, Homo sapien
tcggttttattcttattgctcaggc

SEQ ID NO: 3830175 - DNA, 25 bp, Homo sapien
caggcttgagtgcactggcctcttc

SEQ ID NO: 3830176 - DNA, 25 bp, Homo sapien
ctcaggcttgagtgcactggcctct

SEQ ID NO: 3830177 - DNA, 25 bp, Homo sapien
attctttgttagtttttggagtgtg

SEQ ID NO: 3830178 - DNA, 25 bp, Homo sapien
cctcaggcaatcataccagatatcg

SEQ ID NO: 3830179 - DNA, 25 bp, Homo sapien
tcaggtccctcaggcaatcatacca

SEQ ID NO: 3830180 - DNA, 25 bp, Homo sapien
ctatgattaaaaacctcaggtccct

SEQ ID NO: 3830181 - DNA, 25 bp, Homo sapien
ccagatatcgaaacaaagcaataac

SEQ ID NO: 3830182 - DNA, 25 bp, Homo sapien
gacagagcgctactcctggcagtgc

SEQ ID NO: 3830183 - DNA, 25 bp, Homo sapien
caatcagagcgtcctgtgcggtgag

SEQ ID NO: 3830184 - DNA, 25 bp, Homo sapien
actcctggcagtgcgtcaatcagag

SEQ ID NO: 3830185 - DNA, 25 bp, Homo sapien
ggcagtgcgtcaatcagagcgtcct

SEQ ID NO: 3830186 - DNA, 25 bp, Homo sapien
tcctgcccatgtgacatccgcaggt

SEQ ID NO: 3830187 - DNA, 25 bp, Homo sapien
gcccatgtgacatccgcaggtgctg

SEQ ID NO: 3830188 - DNA, 25 bp, Homo sapien
tgtcctgcccatgtgacatccgcag

SEQ ID NO: 3830189 - DNA, 25 bp, Homo sapien
ctgcccatgtgacatccgcaggtgc

SEQ ID NO: 3830190 - DNA, 25 bp, Homo sapien
acagtcatatcaaggcgcttccagt

SEQ ID NO: 3830191 - DNA, 25 bp, Homo sapien
gtccagctaaaatcagggtccagct

SEQ ID NO: 3830192 - DNA, 25 bp, Homo sapien
gcagtcatgtcagtccaaccacagt

SEQ ID NO: 3830193 - DNA, 25 bp, Homo sapien
caaggcgcttccagtcattgagtgc

SEQ ID NO: 3830194 - DNA, 25 bp, Homo sapien
gatatcattggagacacgggattca

SEQ ID NO: 3830195 - DNA, 25 bp, Homo sapien
tctctaaaggaggtctgcccaatta

SEQ ID NO: 3830196 - DNA, 25 bp, Homo sapien
acttccttgaccgagaaaattggca

SEQ ID NO: 3830197 - DNA, 25 bp, Homo sapien
tgcccaattagcagtgacagctggt

SEQ ID NO: 3830198 - DNA, 25 bp, Homo sapien
tcccaagtccttcgtggtctcagct

SEQ ID NO: 3830199 - DNA, 25 bp, Homo sapien
ggtcccaagtccttcgtggtctcag

SEQ ID NO: 3830200 - DNA, 25 bp, Homo sapien
gggtcccaagtccttcgtggtctca

SEQ ID NO: 3830201 - DNA, 25 bp, Homo sapien
gtcccaagtccttcgtggtctcagc

SEQ ID NO: 3830202 - DNA, 25 bp, Homo sapien
gaagctgcttgcagaaggatctcag

SEQ ID NO: 3830203 - DNA, 25 bp, Homo sapien
tgaaagacagcccagaggaattatt

SEQ ID NO: 3830204 - DNA, 25 bp, Homo sapien
ctgcttgcagaaggatctcaggaaa

SEQ ID NO: 3830205 - DNA, 25 bp, Homo sapien
aagacagcccagaggaattatttag

SEQ ID NO: 3830206 - DNA, 25 bp, Homo sapien
gatcttatcactgctgttccgaaca

SEQ ID NO: 3830207 - DNA, 25 bp, Homo sapien
gctggggatcttatcactgctgttc

SEQ ID NO: 3830208 - DNA, 25 bp, Homo sapien
gggatcttatcactgctgttccgaa

SEQ ID NO: 3830209 - DNA, 25 bp, Homo sapien
tcttatcactgctgttccgaacaga

SEQ ID NO: 3830210 - DNA, 25 bp, Homo sapien
tgtcatcagaagagggggccacgac

SEQ ID NO: 3830211 - DNA, 25 bp, Homo sapien
caggcgttggcttcggccaacttga

SEQ ID NO: 3830212 - DNA, 25 bp, Homo sapien
tcccagcagttccacggtcctgatg

SEQ ID NO: 3830213 - DNA, 25 bp, Homo sapien
tgaggccggctgaaaccctggacag

SEQ ID NO: 3830214 - DNA, 25 bp, Homo sapien
tcattaagagccagagcaatgcgcc

SEQ ID NO: 3830215 - DNA, 25 bp, Homo sapien
cacagtgtctatggagctgaggtcc

SEQ ID NO: 3830216 - DNA, 25 bp, Homo sapien
gcaatgcgccccagggagacgatat

SEQ ID NO: 3830217 - DNA, 25 bp, Homo sapien
tctctccagtaagatggcatgtccc

SEQ ID NO: 3830218 - DNA, 25 bp, Homo sapien
caggtacccttgcaaaatggattca

SEQ ID NO: 3830219 - DNA, 25 bp, Homo sapien
ggatactgtatcctgaatcatccag

SEQ ID NO: 3830220 - DNA, 25 bp, Homo sapien
atctttataagtgggatttcagtga

SEQ ID NO: 3830221 - DNA, 25 bp, Homo sapien
ggttgcaccaagtcctaccaaatga

SEQ ID NO: 3830222 - DNA, 25 bp, Homo sapien
gccttcctcttaaactcggctaaga

SEQ ID NO: 3830223 - DNA, 25 bp, Homo sapien
aatggtcccaagctcctgcaagaca

SEQ ID NO: 3830224 - DNA, 25 bp, Homo sapien
gacagaactggtccactcagtggga

SEQ ID NO: 3830225 - DNA, 25 bp, Homo sapien
ttaaactcggctaagacatgtgtgc

SEQ ID NO: 3830226 - DNA, 25 bp, Homo sapien
tcaagcatccggagctctgccttag

SEQ ID NO: 3830227 - DNA, 25 bp, Homo sapien
caaatccttgtcaagcatccggagc

SEQ ID NO: 3830228 - DNA, 25 bp, Homo sapien
ggctggaaatatggcatcaaatcct

SEQ ID NO: 3830229 - DNA, 25 bp, Homo sapien
cggagctctgccttagttaatccag

SEQ ID NO: 3830230 - DNA, 25 bp, Homo sapien
tccctgtgtgatttgaaatggggtc

SEQ ID NO: 3830231 - DNA, 25 bp, Homo sapien
ttccctgtgtgatttgaaatggggt

SEQ ID NO: 3830232 - DNA, 25 bp, Homo sapien
ggatttcccacatctcgggcgtccg

SEQ ID NO: 3830233 - DNA, 25 bp, Homo sapien
tagatcactcttgcactaccaaagt

SEQ ID NO: 3830234 - DNA, 25 bp, Homo sapien
caaaaatggaaagccggcagacttg

SEQ ID NO: 3830235 - DNA, 25 bp, Homo sapien
gcaagcattaaataggagccgcaaa

SEQ ID NO: 3830236 - DNA, 25 bp, Homo sapien
tggcgccatctagcgcctgctggag

SEQ ID NO: 3830237 - DNA, 25 bp, Homo sapien
tgaggttctagtgggaccggcgcta

SEQ ID NO: 3830238 - DNA, 25 bp, Homo sapien
gaggcgatctgctccgcggacagct

SEQ ID NO: 3830239 - DNA, 25 bp, Homo sapien
gctgcagtggactgagccgccggcg

SEQ ID NO: 3830240 - DNA, 25 bp, Homo sapien
gccaaagaccccacgactggagagc

SEQ ID NO: 3830241 - DNA, 25 bp, Homo sapien
caggagcttggccattagaaccagc

SEQ ID NO: 3830242 - DNA, 25 bp, Homo sapien
cacaggagcttggccattagaacca

SEQ ID NO: 3830243 - DNA, 25 bp, Homo sapien
gagcttggccattagaaccagcagg

SEQ ID NO: 3830244 - DNA, 25 bp, Homo sapien
tttttcatttggggtgcattttcac

SEQ ID NO: 3830245 - DNA, 25 bp, Homo sapien
ggtttccctgccctagatgagggtc

SEQ ID NO: 3830246 - DNA, 25 bp, Homo sapien
ctgcttggggcaacacaggacgatg

SEQ ID NO: 3830247 - DNA, 25 bp, Homo sapien
tttcatttggggtgcattttcacca

SEQ ID NO: 3830248 - DNA, 25 bp, Homo sapien
tggaacgttcttccctaaggatgag

SEQ ID NO: 3830249 - DNA, 25 bp, Homo sapien
ggccttgactgcaccagggagagaa

SEQ ID NO: 3830250 - DNA, 25 bp, Homo sapien
tcagatggcttcttcaattggaacg

SEQ ID NO: 3830251 - DNA, 25 bp, Homo sapien
gacctgaaaatccttctgggagact

SEQ ID NO: 3830252 - DNA, 25 bp, Homo sapien
gccccactccttgcaggaagcaaaa

SEQ ID NO: 3830253 - DNA, 25 bp, Homo sapien
cactccttgcaggaagcaaaagatc

SEQ ID NO: 3830254 - DNA, 25 bp, Homo sapien
ggccccactccttgcaggaagcaaa

SEQ ID NO: 3830255 - DNA, 25 bp, Homo sapien
cccactccttgcaggaagcaaaaga

SEQ ID NO: 3830256 - DNA, 25 bp, Homo sapien
aaaataggcagcattcattgacctg

SEQ ID NO: 3830257 - DNA, 25 bp, Homo sapien
tcacgacctcaatgacaaacttgat

SEQ ID NO: 3830258 - DNA, 25 bp, Homo sapien
cattgacctggttcaggctacgccg

SEQ ID NO: 3830259 - DNA, 25 bp, Homo sapien
gaagtaagaggtatgcatcttcacg

SEQ ID NO: 3830260 - DNA, 25 bp, Homo sapien
gttcagtttgtcctctctctcagag

SEQ ID NO: 3830261 - DNA, 25 bp, Homo sapien
aacatcatatatcaggttcagtttg

SEQ ID NO: 3830262 - DNA, 25 bp, Homo sapien
ctaatcaatatacctcaccaagtct

SEQ ID NO: 3830263 - DNA, 25 bp, Homo sapien
tgccaatggcaggaacaacaatttc

SEQ ID NO: 3830264 - DNA, 25 bp, Homo sapien
gatgccttggctaataatcagcccg

SEQ ID NO: 3830265 - DNA, 25 bp, Homo sapien
tgatagggcttgctagaaagctgct

SEQ ID NO: 3830266 - DNA, 25 bp, Homo sapien
gaagtaatcttagcccaggatgcct

SEQ ID NO: 3830267 - DNA, 25 bp, Homo sapien
gatcactgctaaggtactggtcttc

SEQ ID NO: 3830268 - DNA, 25 bp, Homo sapien
ccagttgtacagatactctgcattt

SEQ ID NO: 3830269 - DNA, 25 bp, Homo sapien
tcaagatatccccagttgtacagat

SEQ ID NO: 3830270 - DNA, 25 bp, Homo sapien
tactggtcttcctcaagatatcccc

SEQ ID NO: 3830271 - DNA, 25 bp, Homo sapien
cactgaaaggcgtcgacagttgcac

SEQ ID NO: 3830272 - DNA, 25 bp, Homo sapien
ggtgtcagaatgcacatagtggatg

SEQ ID NO: 3830273 - DNA, 25 bp, Homo sapien
agagtactacctccgcactgaaagg

SEQ ID NO: 3830274 - DNA, 25 bp, Homo sapien
cacatagtggatgaagagtacataa

SEQ ID NO: 3830275 - DNA, 25 bp, Homo sapien
gatttttctgcactgaccataatag

SEQ ID NO: 3830276 - DNA, 25 bp, Homo sapien
tagtaactgaaggaccttgcatgga

SEQ ID NO: 3830277 - DNA, 25 bp, Homo sapien
ttcttccaagtaagtccagtggtaa

SEQ ID NO: 3830278 - DNA, 25 bp, Homo sapien
tggcttcattctggtgaacaataat

SEQ ID NO: 3830279 - DNA, 25 bp, Homo sapien
ggagtgatgatgaatggtgccaggc

SEQ ID NO: 3830280 - DNA, 25 bp, Homo sapien
tactcgattatcatgtccctcatct

SEQ ID NO: 3830281 - DNA, 25 bp, Homo sapien
cctggacccaagactcaacacatta

SEQ ID NO: 3830282 - DNA, 25 bp, Homo sapien
tcccgccagccgaggatgggagtga

SEQ ID NO: 3830283 - DNA, 25 bp, Homo sapien
tgctgtgctgcatagactccaatgc

SEQ ID NO: 3830284 - DNA, 25 bp, Homo sapien
ttatttacccagcatcaagcagatg

SEQ ID NO: 3830285 - DNA, 25 bp, Homo sapien
gacaaatgcctagaagaatcctctg

SEQ ID NO: 3830286 - DNA, 25 bp, Homo sapien
gaatcctctgtgaattggcagcctc

SEQ ID NO: 3830287 - DNA, 25 bp, Homo sapien
catctgctatagcttgagatctgct

SEQ ID NO: 3830288 - DNA, 25 bp, Homo sapien
ctatagcttgagatctgctccttcc

SEQ ID NO: 3830289 - DNA, 25 bp, Homo sapien
tctgctatagcttgagatctgctcc

SEQ ID NO: 3830290 - DNA, 25 bp, Homo sapien
tgctatagcttgagatctgctcctt

SEQ ID NO: 3830291 - DNA, 25 bp, Homo sapien
tggtaatgttggatgctgcatgctg

SEQ ID NO: 3830292 - DNA, 25 bp, Homo sapien
gaagtattttcagggctttgtgcaa

SEQ ID NO: 3830293 - DNA, 25 bp, Homo sapien
cagataaaacacaattcgtagaagt

SEQ ID NO: 3830294 - DNA, 25 bp, Homo sapien
cctgggaaagagttctcaatagatg

SEQ ID NO: 3830295 - DNA, 25 bp, Homo sapien
cagagccattaagtcagcaggcaca

SEQ ID NO: 3830296 - DNA, 25 bp, Homo sapien
gagccattaagtcagcaggcacagt

SEQ ID NO: 3830297 - DNA, 25 bp, Homo sapien
ttcagagccattaagtcagcaggca

SEQ ID NO: 3830298 - DNA, 25 bp, Homo sapien
tcagagccattaagtcagcaggcac

SEQ ID NO: 3830299 - DNA, 25 bp, Homo sapien
tatcaaggtccagtttgggttctgt

SEQ ID NO: 3830300 - DNA, 25 bp, Homo sapien
tctgtttgttttgccatccaagttc

SEQ ID NO: 3830301 - DNA, 25 bp, Homo sapien
gtttgttttgccatccaagttctct

SEQ ID NO: 3830302 - DNA, 25 bp, Homo sapien
ctggtgctggttttatcaaggtcca

SEQ ID NO: 3830303 - DNA, 25 bp, Homo sapien
ttagaagagctcataagcctcaggt

SEQ ID NO: 3830304 - DNA, 25 bp, Homo sapien
gctcataagcctcaggtaagaggag

SEQ ID NO: 3830305 - DNA, 25 bp, Homo sapien
taagcctcaggtaagaggagatgtt

SEQ ID NO: 3830306 - DNA, 25 bp, Homo sapien
ctcaggtaagaggagatgtttttgc

SEQ ID NO: 3830307 - DNA, 25 bp, Homo sapien
acaaggttgttcacacctccttgcc

SEQ ID NO: 3830308 - DNA, 25 bp, Homo sapien
tcacaaggttgttcacacctccttg

SEQ ID NO: 3830309 - DNA, 25 bp, Homo sapien
cacaaggttgttcacacctccttgc

SEQ ID NO: 3830310 - DNA, 25 bp, Homo sapien
gaccattgactgtgatgataaccag

SEQ ID NO: 3830311 - DNA, 25 bp, Homo sapien
taaatcagacttccccacatcaggg

SEQ ID NO: 3830312 - DNA, 25 bp, Homo sapien
tgtgaaattggctggacacagacca

SEQ ID NO: 3830313 - DNA, 25 bp, Homo sapien
tctcgtatattaagccagcagggcc

SEQ ID NO: 3830314 - DNA, 25 bp, Homo sapien
atttccctccggaaggagcagccca

SEQ ID NO: 3830315 - DNA, 25 bp, Homo sapien
tataaaaaggctctgcagagcagct

SEQ ID NO: 3830316 - DNA, 25 bp, Homo sapien
cactgggcaggcgaggctttaacta

SEQ ID NO: 3830317 - DNA, 25 bp, Homo sapien
gatggccccaatccgcagcactggg

SEQ ID NO: 3830318 - DNA, 25 bp, Homo sapien
gcgttcatgttgaggactgcccaat

SEQ ID NO: 3830319 - DNA, 25 bp, Homo sapien
atgttgaggactgcccaatgccaca

SEQ ID NO: 3830320 - DNA, 25 bp, Homo sapien
taagcgttcatgttgaggactgccc

SEQ ID NO: 3830321 - DNA, 25 bp, Homo sapien
tcaataagcgttcatgttgaggact

SEQ ID NO: 3830322 - DNA, 25 bp, Homo sapien
tggagacatctgaacgtggagggtt

SEQ ID NO: 3830323 - DNA, 25 bp, Homo sapien
agacatctgaacgtggagggttgtt

SEQ ID NO: 3830324 - DNA, 25 bp, Homo sapien
gaacgtggagggttgttatatctcc

SEQ ID NO: 3830325 - DNA, 25 bp, Homo sapien
catctgaacgtggagggttgttata

SEQ ID NO: 3830326 - DNA, 25 bp, Homo sapien
gatcacaatcacgtagggtgctgaa

SEQ ID NO: 3830327 - DNA, 25 bp, Homo sapien
cacgtagggtgctgaaataccaatt

SEQ ID NO: 3830328 - DNA, 25 bp, Homo sapien
acatccagagttgccagatgatcac

SEQ ID NO: 3830329 - DNA, 25 bp, Homo sapien
tagtatcctgacatccagagttgcc

SEQ ID NO: 3830330 - DNA, 25 bp, Homo sapien
tcgtcgctcttttctctcatactct

SEQ ID NO: 3830331 - DNA, 25 bp, Homo sapien
tctcgtcgctcttttctctcatact

SEQ ID NO: 3830332 - DNA, 25 bp, Homo sapien
ctcgtcgctcttttctctcatactc

SEQ ID NO: 3830333 - DNA, 25 bp, Homo sapien
tagtgacccagtaatcagttttaaa

SEQ ID NO: 3830334 - DNA, 25 bp, Homo sapien
tcaataggctccataattagtgacc

SEQ ID NO: 3830335 - DNA, 25 bp, Homo sapien
taattgcttccctaagctgaaatac

SEQ ID NO: 3830336 - DNA, 25 bp, Homo sapien
tgaaatacactgtcaataggctcca

SEQ ID NO: 3830337 - DNA, 25 bp, Homo sapien
tatctctgagaattgcccctatacc

SEQ ID NO: 3830338 - DNA, 25 bp, Homo sapien
tgagaattgcccctatacccaaaac

SEQ ID NO: 3830339 - DNA, 25 bp, Homo sapien
tccattagaggattcgcctgaccct

SEQ ID NO: 3830340 - DNA, 25 bp, Homo sapien
gcctgacccttatctctgagaattg

SEQ ID NO: 3830341 - DNA, 25 bp, Homo sapien
ttctggggttgttgtaacagaagca

SEQ ID NO: 3830342 - DNA, 25 bp, Homo sapien
ggttgttgtaacagaagcataaaat

SEQ ID NO: 3830343 - DNA, 25 bp, Homo sapien
taacagaagcataaaatgtccattc

SEQ ID NO: 3830344 - DNA, 25 bp, Homo sapien
agtgcccagcatgacttcccttctg

SEQ ID NO: 3830345 - DNA, 25 bp, Homo sapien
gatacaccgacaaggacactccccc

SEQ ID NO: 3830346 - DNA, 25 bp, Homo sapien
tgggcccagatacaccgacaaggac

SEQ ID NO: 3830347 - DNA, 25 bp, Homo sapien
ccagatacaccgacaaggacactcc

SEQ ID NO: 3830348 - DNA, 25 bp, Homo sapien
ctgggcccagatacaccgacaagga

SEQ ID NO: 3830349 - DNA, 25 bp, Homo sapien
cacgcacgcacaggcacagaagcac

SEQ ID NO: 3830350 - DNA, 25 bp, Homo sapien
caggcacagaagcacacgcgcccta

SEQ ID NO: 3830351 - DNA, 25 bp, Homo sapien
gcacacgcacgcacaggcacagaag

SEQ ID NO: 3830352 - DNA, 25 bp, Homo sapien
gcacgcacaggcacagaagcacacg

SEQ ID NO: 3830353 - DNA, 25 bp, Homo sapien
taaggagtggcctgacgtcagccgc

SEQ ID NO: 3830354 - DNA, 25 bp, Homo sapien
tggcctgacgtcagccgcgcgggtc

SEQ ID NO: 3830355 - DNA, 25 bp, Homo sapien
ctatttaaggagtggcctgacgtca

SEQ ID NO: 3830356 - DNA, 25 bp, Homo sapien
tttaaggagtggcctgacgtcagcc

SEQ ID NO: 3830357 - DNA, 25 bp, Homo sapien
ctcttcgggaaatgccgagcggagc

SEQ ID NO: 3830358 - DNA, 25 bp, Homo sapien
gacggtggcgctggcgccggccgcg

SEQ ID NO: 3830359 - DNA, 25 bp, Homo sapien
cgatctggctcttcgggaaatgccg

SEQ ID NO: 3830360 - DNA, 25 bp, Homo sapien
ccggccgcgatctggctcttcggga

SEQ ID NO: 3830361 - DNA, 25 bp, Homo sapien
gatcctcggagcgccgctcacgaaa

SEQ ID NO: 3830362 - DNA, 25 bp, Homo sapien
ctcacgaaacgctcggcggcggcgc

SEQ ID NO: 3830363 - DNA, 25 bp, Homo sapien
tcctgatcctcggagcgccgctcac

SEQ ID NO: 3830364 - DNA, 25 bp, Homo sapien
ggagcgccgctcacgaaacgctcgg

SEQ ID NO: 3830365 - DNA, 25 bp, Homo sapien
ggagcgcgcccagcgcccgaagccc

SEQ ID NO: 3830366 - DNA, 25 bp, Homo sapien
gtgcgccgggttcggagcgcgccca

SEQ ID NO: 3830367 - DNA, 25 bp, Homo sapien
gcgccgggttcggagcgcgcccagc

SEQ ID NO: 3830368 - DNA, 25 bp, Homo sapien
gccgggttcggagcgcgcccagcgc

SEQ ID NO: 3830369 - DNA, 25 bp, Homo sapien
gggaacaggcggttgcatttccagc

SEQ ID NO: 3830370 - DNA, 25 bp, Homo sapien
gcatctcccggtcctaggcgatggg

SEQ ID NO: 3830371 - DNA, 25 bp, Homo sapien
ctgctgaccagggtgcgcacagtgc

SEQ ID NO: 3830372 - DNA, 25 bp, Homo sapien
tgcggtcgcctagagggctcgcgtg

SEQ ID NO: 3830373 - DNA, 25 bp, Homo sapien
cgcgccgggggtcatggtttccgag

SEQ ID NO: 3830374 - DNA, 25 bp, Homo sapien
ccaggtcgtcgcagcagcacaggaa

SEQ ID NO: 3830375 - DNA, 25 bp, Homo sapien
cacaggtaagtgcaggagagcgaga

SEQ ID NO: 3830376 - DNA, 25 bp, Homo sapien
cagcacaggaagctgtaacacaggt

SEQ ID NO: 3830377 - DNA, 25 bp, Homo sapien
agcgagagcgtgaaggcgaagagca

SEQ ID NO: 3830378 - DNA, 25 bp, Homo sapien
tgagccggagtggttggaaccggag

SEQ ID NO: 3830379 - DNA, 25 bp, Homo sapien
ctcgctgggcgtcggcccggaggga

SEQ ID NO: 3830380 - DNA, 25 bp, Homo sapien
gcgtcggcccggagggatcacaggg

SEQ ID NO: 3830381 - DNA, 25 bp, Homo sapien
gcgggacttctggagaagtttctgg

SEQ ID NO: 3830382 - DNA, 25 bp, Homo sapien
cttggggcaaccgcttggtacccag

SEQ ID NO: 3830383 - DNA, 25 bp, Homo sapien
cgcggccgtagttcctgtcaaagaa

SEQ ID NO: 3830384 - DNA, 25 bp, Homo sapien
agcccgcggccgtagttcctgtcaa

SEQ ID NO: 3830385 - DNA, 25 bp, Homo sapien
ataaactccagcacggcccgggtgc

SEQ ID NO: 3830386 - DNA, 25 bp, Homo sapien
cgcacgtccgggtgtactcggataa

SEQ ID NO: 3830387 - DNA, 25 bp, Homo sapien
tgactcagacagtgtccacatgcac

SEQ ID NO: 3830388 - DNA, 25 bp, Homo sapien
ctgactcagacagtgtccacatgca

SEQ ID NO: 3830389 - DNA, 25 bp, Homo sapien
cctgcattcgaatgtggtcatggct

SEQ ID NO: 3830390 - DNA, 25 bp, Homo sapien
caatgtgtttgcctcctccatcccg

SEQ ID NO: 3830391 - DNA, 25 bp, Homo sapien
gattttccatcgaggaaatgctggc

SEQ ID NO: 3830392 - DNA, 25 bp, Homo sapien
tccatcgaggaaatgctggcctgca

SEQ ID NO: 3830393 - DNA, 25 bp, Homo sapien
gcacttaaaaggcacttcgcattgg

SEQ ID NO: 3830394 - DNA, 25 bp, Homo sapien
taaaaggcacttcgcattggcaaaa

SEQ ID NO: 3830395 - DNA, 25 bp, Homo sapien
gcacttcgcattggcaaaaggtgtc

SEQ ID NO: 3830396 - DNA, 25 bp, Homo sapien
ttttgcacttaaaaggcacttcgca

SEQ ID NO: 3830397 - DNA, 25 bp, Homo sapien
gacaattcttgttgcccattccgaa

SEQ ID NO: 3830398 - DNA, 25 bp, Homo sapien
tgcattaactacgtcatggcaggag

SEQ ID NO: 3830399 - DNA, 25 bp, Homo sapien
taaaggcctaagtctgcatagatgc

SEQ ID NO: 3830400 - DNA, 25 bp, Homo sapien
catactgtgtgacgttcgcctggac

SEQ ID NO: 3830401 - DNA, 25 bp, Homo sapien
gtgtagctggaaagtactggggctg

SEQ ID NO: 3830402 - DNA, 25 bp, Homo sapien
tagctggaaagtactggggctgtca

SEQ ID NO: 3830403 - DNA, 25 bp, Homo sapien
aatgtgtgtagctggaaagtactgg

SEQ ID NO: 3830404 - DNA, 25 bp, Homo sapien
caatgtgtgtagctggaaagtactg

SEQ ID NO: 3830405 - DNA, 25 bp, Homo sapien
gatgtgtctccagatatgtgcaagg

SEQ ID NO: 3830406 - DNA, 25 bp, Homo sapien
tatgtgcaaggtacagcaagtgcct

SEQ ID NO: 3830407 - DNA, 25 bp, Homo sapien
gcttcaaatccgctagggccctttg

SEQ ID NO: 3830408 - DNA, 25 bp, Homo sapien
tccgctagggccctttggatgtgtc

SEQ ID NO: 3830409 - DNA, 25 bp, Homo sapien
gtgaacctcacagtgcttcagccca

SEQ ID NO: 3830410 - DNA, 25 bp, Homo sapien
tgaaccggcctacagcagcctggca

SEQ ID NO: 3830411 - DNA, 25 bp, Homo sapien
aaagtggcagctgaaccggcctaca

SEQ ID NO: 3830412 - DNA, 25 bp, Homo sapien
aagctgcttgtgaacctcacagtgc

SEQ ID NO: 3830413 - DNA, 25 bp, Homo sapien
gaacatctaatagcctcaccaaaca

SEQ ID NO: 3830414 - DNA, 25 bp, Homo sapien
agctctccttgtatctctaatatgg

SEQ ID NO: 3830415 - DNA, 25 bp, Homo sapien
taatatggtacctattctcatctga

SEQ ID NO: 3830416 - DNA, 25 bp, Homo sapien
agcccagaggctctgtgttatattc

SEQ ID NO: 3830417 - DNA, 25 bp, Homo sapien
agccacctccccatacatgctgatg

SEQ ID NO: 3830418 - DNA, 25 bp, Homo sapien
aggcccttaattttggcagtgtcat

SEQ ID NO: 3830419 - DNA, 25 bp, Homo sapien
aaggcccttaattttggcagtgtca

SEQ ID NO: 3830420 - DNA, 25 bp, Homo sapien
ttcagagagtttaaccaaccacttc

SEQ ID NO: 3830421 - DNA, 25 bp, Homo sapien
gggattgatcctaggaaatgctacc

SEQ ID NO: 3830422 - DNA, 25 bp, Homo sapien
gaaatgctacctccactttaagcca

SEQ ID NO: 3830423 - DNA, 25 bp, Homo sapien
gccatctcgcctgagcaaaatgaaa

SEQ ID NO: 3830424 - DNA, 25 bp, Homo sapien
ccaagtgtgtgcaccgacaaccaca

SEQ ID NO: 3830425 - DNA, 25 bp, Homo sapien
ttgtctccagtccaggtagcttcag

SEQ ID NO: 3830426 - DNA, 25 bp, Homo sapien
tcttctccagctatacgtgctcctg

SEQ ID NO: 3830427 - DNA, 25 bp, Homo sapien
accacacaggtagtgtctgagtcac

SEQ ID NO: 3830428 - DNA, 25 bp, Homo sapien
tatgagcaaaacgagggtaagacgc

SEQ ID NO: 3830429 - DNA, 25 bp, Homo sapien
gaaagcaatcgtcttccacggaaat

SEQ ID NO: 3830430 - DNA, 25 bp, Homo sapien
tgcctgtcaccatcaaaaccaaaag

SEQ ID NO: 3830431 - DNA, 25 bp, Homo sapien
cacggaaataggatgcattctctgc

SEQ ID NO: 3830432 - DNA, 25 bp, Homo sapien
tcaggttgggtccaagcctgctcca

SEQ ID NO: 3830433 - DNA, 25 bp, Homo sapien
gggcttgggtctaagcttcaggttg

SEQ ID NO: 3830434 - DNA, 25 bp, Homo sapien
ttcaggttgggtccaagcctgctcc

SEQ ID NO: 3830435 - DNA, 25 bp, Homo sapien
cttgggtctaagcttcaggttgggt

SEQ ID NO: 3830436 - DNA, 25 bp, Homo sapien
cactgcacccaagcttgaatgacag

SEQ ID NO: 3830437 - DNA, 25 bp, Homo sapien
tccactgcacccaagcttgaatgac

SEQ ID NO: 3830438 - DNA, 25 bp, Homo sapien
tgcacccaagcttgaatgacagagt

SEQ ID NO: 3830439 - DNA, 25 bp, Homo sapien
cacccaagcttgaatgacagagtga

SEQ ID NO: 3830440 - DNA, 25 bp, Homo sapien
aattcccactctactaagagaatgt

SEQ ID NO: 3830441 - DNA, 25 bp, Homo sapien
tttgagacttcaattcccactctac

SEQ ID NO: 3830442 - DNA, 25 bp, Homo sapien
gacttcaattcccactctactaaga

SEQ ID NO: 3830443 - DNA, 25 bp, Homo sapien
tatgttactttgagacttcaattcc

SEQ ID NO: 3830444 - DNA, 25 bp, Homo sapien
tggactgaataacccagccctcttg

SEQ ID NO: 3830445 - DNA, 25 bp, Homo sapien
cctcaactgaaagggcagggtggtt

SEQ ID NO: 3830446 - DNA, 25 bp, Homo sapien
tgtttctactctttgcagccagagg

SEQ ID NO: 3830447 - DNA, 25 bp, Homo sapien
tgagcatatgggtgcagcctcaact

SEQ ID NO: 3830448 - DNA, 25 bp, Homo sapien
acagggcgatgcagccctttaaggt

SEQ ID NO: 3830449 - DNA, 25 bp, Homo sapien
aatggtctaggaatgtaggatccag

SEQ ID NO: 3830450 - DNA, 25 bp, Homo sapien
ttaaggttaatggtctaggaatgta

SEQ ID NO: 3830451 - DNA, 25 bp, Homo sapien
cagggcgatgcagccctttaaggtt

SEQ ID NO: 3830452 - DNA, 25 bp, Homo sapien
tcaccagtgatatagctgacatttt

SEQ ID NO: 3830453 - DNA, 25 bp, Homo sapien
caataagcttttggggaacggctgg

SEQ ID NO: 3830454 - DNA, 25 bp, Homo sapien
cagccacattcaccagtgatatagc

SEQ ID NO: 3830455 - DNA, 25 bp, Homo sapien
gaacttaagtcatatctcccagcca

SEQ ID NO: 3830456 - DNA, 25 bp, Homo sapien
tggtcagacaagcaacaccttgagg

SEQ ID NO: 3830457 - DNA, 25 bp, Homo sapien
tagacactctcctttgcacagcctg

SEQ ID NO: 3830458 - DNA, 25 bp, Homo sapien
gaatatttaaggtttctcccagcac

SEQ ID NO: 3830459 - DNA, 25 bp, Homo sapien
gagcagtgcacttggacctttccag

SEQ ID NO: 3830460 - DNA, 25 bp, Homo sapien
tgtgtggccatataacaaaagacac

SEQ ID NO: 3830461 - DNA, 25 bp, Homo sapien
tttgtgttcatacgaccaccccaga

SEQ ID NO: 3830462 - DNA, 25 bp, Homo sapien
tgaaattccacggaaagtagaatcc

SEQ ID NO: 3830463 - DNA, 25 bp, Homo sapien
cattcaatattgaaaaaggtgcctg

SEQ ID NO: 3830464 - DNA, 25 bp, Homo sapien
cgtaccaggatacattaagctccat

SEQ ID NO: 3830465 - DNA, 25 bp, Homo sapien
taatggttttgcagggatgagttcc

SEQ ID NO: 3830466 - DNA, 25 bp, Homo sapien
cccgaatgttgttgtcgtaccagga

SEQ ID NO: 3830467 - DNA, 25 bp, Homo sapien
tggttggagccaacacctgttgcct

SEQ ID NO: 3830468 - DNA, 25 bp, Homo sapien
catcctttcccaccagatctgaatg

SEQ ID NO: 3830469 - DNA, 25 bp, Homo sapien
tgtttgttaacaccaagctttacaa

SEQ ID NO: 3830470 - DNA, 25 bp, Homo sapien
ccagatctgaatgtttcccaggcaa

SEQ ID NO: 3830471 - DNA, 25 bp, Homo sapien
tcctcagccaacaactgcatgagtc

SEQ ID NO: 3830472 - DNA, 25 bp, Homo sapien
tactctccgaacacaaccctaaatg

SEQ ID NO: 3830473 - DNA, 25 bp, Homo sapien
tcgtcttctgaagcggtactctccg

SEQ ID NO: 3830474 - DNA, 25 bp, Homo sapien
caccccatcgtcttctgaagcggta

SEQ ID NO: 3830475 - DNA, 25 bp, Homo sapien
gaagcggtactctccgaacacaacc

SEQ ID NO: 3830476 - DNA, 25 bp, Homo sapien
acaccactgattattactgatagga

SEQ ID NO: 3830477 - DNA, 25 bp, Homo sapien
tatatgtgttctggaagacccggct

SEQ ID NO: 3830478 - DNA, 25 bp, Homo sapien
ctgattattactgataggattctct

SEQ ID NO: 3830479 - DNA, 25 bp, Homo sapien
gctaaatttgtacactctttatatg

SEQ ID NO: 3830480 - DNA, 25 bp, Homo sapien
caaggtgcagtgcagagttacaatc

SEQ ID NO: 3830481 - DNA, 25 bp, Homo sapien
tgtctcccaaggtgcagtgcagagt

SEQ ID NO: 3830482 - DNA, 25 bp, Homo sapien
cactcctggctgattcttaataatt

SEQ ID NO: 3830483 - DNA, 25 bp, Homo sapien
atctctcaagaagccgggactacag

SEQ ID NO: 3830484 - DNA, 25 bp, Homo sapien
tgggatcaggctatcttcccatctt

SEQ ID NO: 3830485 - DNA, 25 bp, Homo sapien
gggatcaggctatcttcccatcttc

SEQ ID NO: 3830486 - DNA, 25 bp, Homo sapien
ctgtgtgggcagaaggaatacatca

SEQ ID NO: 3830487 - DNA, 25 bp, Homo sapien
tgtgtgggcagaaggaatacatcat

SEQ ID NO: 3830488 - DNA, 25 bp, Homo sapien
tgcagcacgtacatgccgatgcgga

SEQ ID NO: 3830489 - DNA, 25 bp, Homo sapien
catgttgaagatgcgtcgaggagcc

SEQ ID NO: 3830490 - DNA, 25 bp, Homo sapien
cacgatcagcttggtgtctcgggac

SEQ ID NO: 3830491 - DNA, 25 bp, Homo sapien
gaatctgagctagcgggaagtactg

SEQ ID NO: 3830492 - DNA, 25 bp, Homo sapien
tggaattaacaaggccactcctggg

SEQ ID NO: 3830493 - DNA, 25 bp, Homo sapien
tacccgtaacagcagaattatgtgc

SEQ ID NO: 3830494 - DNA, 25 bp, Homo sapien
cagagggtctgggagcaaatctcac

SEQ ID NO: 3830495 - DNA, 25 bp, Homo sapien
gattctggaatttactggacgtgcc

SEQ ID NO: 3830496 - DNA, 25 bp, Homo sapien
tatttcaaaatatcatgctggccaa

SEQ ID NO: 3830497 - DNA, 25 bp, Homo sapien
caaccttcggaccttcagtgtagca

SEQ ID NO: 3830498 - DNA, 25 bp, Homo sapien
aattaatgaattgtgctgcagaacc

SEQ ID NO: 3830499 - DNA, 25 bp, Homo sapien
tgtttcagatagagggtgtccccac

SEQ ID NO: 3830500 - DNA, 25 bp, Homo sapien
tccattagctggagacgtgtcaggg

SEQ ID NO: 3830501 - DNA, 25 bp, Homo sapien
catgcgggaggatttgggctttaca

SEQ ID NO: 3830502 - DNA, 25 bp, Homo sapien
cacaaatcagcaagggagggtgcct

SEQ ID NO: 3830503 - DNA, 25 bp, Homo sapien
gtcttactgggagcatgggtttcca

SEQ ID NO: 3830504 - DNA, 25 bp, Homo sapien
agccggatgccccacttctaatgag

SEQ ID NO: 3830505 - DNA, 25 bp, Homo sapien
tctgaatcaatgacctctgcttgct

SEQ ID NO: 3830506 - DNA, 25 bp, Homo sapien
tacctccaatcaggcacccctgaag

SEQ ID NO: 3830507 - DNA, 25 bp, Homo sapien
tttgctagggcaagctctgaatcaa

SEQ ID NO: 3830508 - DNA, 25 bp, Homo sapien
ggtcactggattgaaggtgacctta

SEQ ID NO: 3830509 - DNA, 25 bp, Homo sapien
gattgaaggtgaccttaaggtcacc

SEQ ID NO: 3830510 - DNA, 25 bp, Homo sapien
ctggattgaaggtgaccttaaggtc

SEQ ID NO: 3830511 - DNA, 25 bp, Homo sapien
tcactggattgaaggtgaccttaag

SEQ ID NO: 3830512 - DNA, 25 bp, Homo sapien
cattgaatgaagtccatactttctc

SEQ ID NO: 3830513 - DNA, 25 bp, Homo sapien
tcattgaatgaagtccatactttct

SEQ ID NO: 3830514 - DNA, 25 bp, Homo sapien
tgaagtccatactttctccttcacc

SEQ ID NO: 3830515 - DNA, 25 bp, Homo sapien
ttcattgaatgaagtccatactttc

SEQ ID NO: 3830516 - DNA, 25 bp, Homo sapien
gccttggcactggataagatcccgg

SEQ ID NO: 3830517 - DNA, 25 bp, Homo sapien
tggcactggataagatcccggatct

SEQ ID NO: 3830518 - DNA, 25 bp, Homo sapien
gatcccggatctttggcagtacaga

SEQ ID NO: 3830519 - DNA, 25 bp, Homo sapien
tagatctcacactccatgccttggc

SEQ ID NO: 3830520 - DNA, 25 bp, Homo sapien
gtccgctggggatcggccatgccaa

SEQ ID NO: 3830521 - DNA, 25 bp, Homo sapien
gggatcggccatgccaaaaggcatg

SEQ ID NO: 3830522 - DNA, 25 bp, Homo sapien
tgcacgaccctgagtgcagtgcggt

SEQ ID NO: 3830523 - DNA, 25 bp, Homo sapien
ggacaggactggagtgctggacctg

SEQ ID NO: 3830524 - DNA, 25 bp, Homo sapien
aggagtagacaggcagaccggttgc

SEQ ID NO: 3830525 - DNA, 25 bp, Homo sapien
gaaggagtagacaggcagaccggtt

SEQ ID NO: 3830526 - DNA, 25 bp, Homo sapien
agaaggcaggccgccatgcaggaag

SEQ ID NO: 3830527 - DNA, 25 bp, Homo sapien
aaggcaggccgccatgcaggaagga

SEQ ID NO: 3830528 - DNA, 25 bp, Homo sapien
agtttagacataaatgccgtgttcc

SEQ ID NO: 3830529 - DNA, 25 bp, Homo sapien
gatctgttggtaattatccggctcc

SEQ ID NO: 3830530 - DNA, 25 bp, Homo sapien
gacttgtttccactgagtccatacg

SEQ ID NO: 3830531 - DNA, 25 bp, Homo sapien
gccgtgttcctgattgacttgtttc

SEQ ID NO: 3830532 - DNA, 25 bp, Homo sapien
attttgagaggtcatcacattgaat

SEQ ID NO: 3830533 - DNA, 25 bp, Homo sapien
tttgagaggtcatcacattgaatag

SEQ ID NO: 3830534 - DNA, 25 bp, Homo sapien
ttttgagaggtcatcacattgaata

SEQ ID NO: 3830535 - DNA, 25 bp, Homo sapien
aattgtcttttggatgctccacccc

SEQ ID NO: 3830536 - DNA, 25 bp, Homo sapien
ggccttcaggattgtcgctgttgaa

SEQ ID NO: 3830537 - DNA, 25 bp, Homo sapien
tgttgatggcccacggccgtttgtg

SEQ ID NO: 3830538 - DNA, 25 bp, Homo sapien
tctgagcgtgaaggtggcctctgca

SEQ ID NO: 3830539 - DNA, 25 bp, Homo sapien
caacagaacagagatagtccatgcc

SEQ ID NO: 3830540 - DNA, 25 bp, Homo sapien
gggcaatgactgttcctcaagcaga

SEQ ID NO: 3830541 - DNA, 25 bp, Homo sapien
tagacatgcatactagggctggaat

SEQ ID NO: 3830542 - DNA, 25 bp, Homo sapien
tcaggtcccatggatcaccaggaaa

SEQ ID NO: 3830543 - DNA, 25 bp, Homo sapien
ctgtttaatgcattcttgggtactc

SEQ ID NO: 3830544 - DNA, 25 bp, Homo sapien
taatgcattcttgggtactcttgct

SEQ ID NO: 3830545 - DNA, 25 bp, Homo sapien
ggtactcttgctagccatggagggc

SEQ ID NO: 3830546 - DNA, 25 bp, Homo sapien
tcttgggtactcttgctagccatgg

SEQ ID NO: 3830547 - DNA, 25 bp, Homo sapien
gttgatgcatacttgaataacccac

SEQ ID NO: 3830548 - DNA, 25 bp, Homo sapien
tgcatacttgaataacccacacact

SEQ ID NO: 3830549 - DNA, 25 bp, Homo sapien
ggactgttgatgcatacttgaataa

SEQ ID NO: 3830550 - DNA, 25 bp, Homo sapien
gaacaagggactgttgatgcatact

SEQ ID NO: 3830551 - DNA, 25 bp, Homo sapien
gagagccaagattcagtttttcttc

SEQ ID NO: 3830552 - DNA, 25 bp, Homo sapien
tggtgctaacgctctcccccatcct

SEQ ID NO: 3830553 - DNA, 25 bp, Homo sapien
atgagagccaagattcagtttttct

SEQ ID NO: 3830554 - DNA, 25 bp, Homo sapien
tgttgctggtgctaacgctctcccc

SEQ ID NO: 3830555 - DNA, 25 bp, Homo sapien
aagtatgttctcaccattcacggct

SEQ ID NO: 3830556 - DNA, 25 bp, Homo sapien
catgccttggagttgctttccccag

SEQ ID NO: 3830557 - DNA, 25 bp, Homo sapien
gataccaagtctgttcttgcttcag

SEQ ID NO: 3830558 - DNA, 25 bp, Homo sapien
ttcagggcttttgctgttcccatgc

SEQ ID NO: 3830559 - DNA, 25 bp, Homo sapien
gaattttcactaggtggctctatct

SEQ ID NO: 3830560 - DNA, 25 bp, Homo sapien
catagctaaggtttagcagcacaga

SEQ ID NO: 3830561 - DNA, 25 bp, Homo sapien
gcacagacagctgcggtatttaagg

SEQ ID NO: 3830562 - DNA, 25 bp, Homo sapien
aatacataggcaatggaagttggaa

SEQ ID NO: 3830563 - DNA, 25 bp, Homo sapien
gggtgctattgctaagctggtgtcc

SEQ ID NO: 3830564 - DNA, 25 bp, Homo sapien
aagctggtgtcccacgatgatgcct

SEQ ID NO: 3830565 - DNA, 25 bp, Homo sapien
gctattgctaagctggtgtcccacg

SEQ ID NO: 3830566 - DNA, 25 bp, Homo sapien
gtcccacgatgatgccttgtcatca

SEQ ID NO: 3830567 - DNA, 25 bp, Homo sapien
tgagctgaggagagcaggtcacaga

SEQ ID NO: 3830568 - DNA, 25 bp, Homo sapien
tcaaacgccacgctggctttctctg

SEQ ID NO: 3830569 - DNA, 25 bp, Homo sapien
tctgagctgaggagagcaggtcaca

SEQ ID NO: 3830570 - DNA, 25 bp, Homo sapien
caaacgccacgctggctttctctga

SEQ ID NO: 3830571 - DNA, 25 bp, Homo sapien
tctgctcctggccatagtgactaat

SEQ ID NO: 3830572 - DNA, 25 bp, Homo sapien
gcggccacagaccagttctgtctag

SEQ ID NO: 3830573 - DNA, 25 bp, Homo sapien
aacgtctatgtcaggaaactttgcc

SEQ ID NO: 3830574 - DNA, 25 bp, Homo sapien
caaatggaacaggaacgtctatgtc

SEQ ID NO: 3830575 - DNA, 25 bp, Homo sapien
gctgaacccatcagtcccacaagac

SEQ ID NO: 3830576 - DNA, 25 bp, Homo sapien
ggggcatgtgagtgctgaacccatc

SEQ ID NO: 3830577 - DNA, 25 bp, Homo sapien
gtcccacaagactgaggaggggtcc

SEQ ID NO: 3830578 - DNA, 25 bp, Homo sapien
catgtgagtgctgaacccatcagtc

SEQ ID NO: 3830579 - DNA, 25 bp, Homo sapien
ttccctcttgttgatcttactaagg

SEQ ID NO: 3830580 - DNA, 25 bp, Homo sapien
tgttgatcttactaaggaggacaac

SEQ ID NO: 3830581 - DNA, 25 bp, Homo sapien
gatcttactaaggaggacaaccttg

SEQ ID NO: 3830582 - DNA, 25 bp, Homo sapien
tcttgttgatcttactaaggaggac

SEQ ID NO: 3830583 - DNA, 25 bp, Homo sapien
cagtccaagctctgctcaacaacgg

SEQ ID NO: 3830584 - DNA, 25 bp, Homo sapien
caacaacgggagtcattagtgaatc

SEQ ID NO: 3830585 - DNA, 25 bp, Homo sapien
tctgctcaacaacgggagtcattag

SEQ ID NO: 3830586 - DNA, 25 bp, Homo sapien
cattagtgaatctatgaccctggaa

SEQ ID NO: 3830587 - DNA, 25 bp, Homo sapien
ggtgatggagctacatactcaggct

SEQ ID NO: 3830588 - DNA, 25 bp, Homo sapien
tacccatcagtaccacagataggag

SEQ ID NO: 3830589 - DNA, 25 bp, Homo sapien
tccccaccacgtagaagtagtgtgc

SEQ ID NO: 3830590 - DNA, 25 bp, Homo sapien
cagatgctgtagctctgaaaggacc

SEQ ID NO: 3830591 - DNA, 25 bp, Homo sapien
tctctggatgagtggtgtgcatgct

SEQ ID NO: 3830592 - DNA, 25 bp, Homo sapien
tgttagcacagatggttgaccactg

SEQ ID NO: 3830593 - DNA, 25 bp, Homo sapien
cagagccgcccttgtgttgtggtga

SEQ ID NO: 3830594 - DNA, 25 bp, Homo sapien
gagttgacaccactagagctgcaga

SEQ ID NO: 3830595 - DNA, 25 bp, Homo sapien
cagggggaacaggacgtgattcctt

SEQ ID NO: 3830596 - DNA, 25 bp, Homo sapien
ttaccaccaggaaacagttatctgc

SEQ ID NO: 3830597 - DNA, 25 bp, Homo sapien
tgcagccagactccatgctctgttc

SEQ ID NO: 3830598 - DNA, 25 bp, Homo sapien
aggacgtgattccttggcccctttg

SEQ ID NO: 3830599 - DNA, 25 bp, Homo sapien
tcgatcacaattgccacgtcacact

SEQ ID NO: 3830600 - DNA, 25 bp, Homo sapien
gctcaggttctaggtttgttgtaca

SEQ ID NO: 3830601 - DNA, 25 bp, Homo sapien
tgatctacagcatcgatcacaattg

SEQ ID NO: 3830602 - DNA, 25 bp, Homo sapien
tcctgcaggtgtgctttcaatgggc

SEQ ID NO: 3830603 - DNA, 25 bp, Homo sapien
tccttgactcagtgaccaggccaac

SEQ ID NO: 3830604 - DNA, 25 bp, Homo sapien
tccaaccacactatcaaatgcctct

SEQ ID NO: 3830605 - DNA, 25 bp, Homo sapien
tactgaatctgaatcccaagtccca

SEQ ID NO: 3830606 - DNA, 25 bp, Homo sapien
ccaagtcccaagaaagctttccttg

SEQ ID NO: 3830607 - DNA, 25 bp, Homo sapien
tataaacggtgtggtgtcataccaa

SEQ ID NO: 3830608 - DNA, 25 bp, Homo sapien
gcattccatagaggtctgctcacca

SEQ ID NO: 3830609 - DNA, 25 bp, Homo sapien
tatctgttgcagtcgtccaaatgca

SEQ ID NO: 3830610 - DNA, 25 bp, Homo sapien
tacagtatttccgaagttggagttc

SEQ ID NO: 3830611 - DNA, 25 bp, Homo sapien
tctgatggtttcattctgtcgagcc

SEQ ID NO: 3830612 - DNA, 25 bp, Homo sapien
cttcgaagtaatctgatggtttcat

SEQ ID NO: 3830613 - DNA, 25 bp, Homo sapien
tgatggtttcattctgtcgagcctc

SEQ ID NO: 3830614 - DNA, 25 bp, Homo sapien
atggtttcattctgtcgagcctcat

SEQ ID NO: 3830615 - DNA, 25 bp, Homo sapien
tctgtggtgagctgaatgcactaca

SEQ ID NO: 3830616 - DNA, 25 bp, Homo sapien
gcactctgtgttaactgtggaggca

SEQ ID NO: 3830617 - DNA, 25 bp, Homo sapien
ttggcactctgtgttaactgtggag

SEQ ID NO: 3830618 - DNA, 25 bp, Homo sapien
aatttagttttaatctgtggtgagc

SEQ ID NO: 3830619 - DNA, 25 bp, Homo sapien
ctgggtcccagtccctagcttttga

SEQ ID NO: 3830620 - DNA, 25 bp, Homo sapien
tagactaagcccatggaatttctgg

SEQ ID NO: 3830621 - DNA, 25 bp, Homo sapien
gaagacccacattaactagaatcag

SEQ ID NO: 3830622 - DNA, 25 bp, Homo sapien
ggtgcacagcaaatttgagagactt

SEQ ID NO: 3830623 - DNA, 25 bp, Homo sapien
gaatctctgaaacaattatagtttg

SEQ ID NO: 3830624 - DNA, 25 bp, Homo sapien
tgaaaaagatgcaccaaataagaga

SEQ ID NO: 3830625 - DNA, 25 bp, Homo sapien
tgaatgtctaactcaaacctctcat

SEQ ID NO: 3830626 - DNA, 25 bp, Homo sapien
taggtagatctcatttgaagtctcc

SEQ ID NO: 3830627 - DNA, 25 bp, Homo sapien
tacatctgcggcaactggctgcctt

SEQ ID NO: 3830628 - DNA, 25 bp, Homo sapien
tctggagaccacttactgttgaggg

SEQ ID NO: 3830629 - DNA, 25 bp, Homo sapien
cattagccggtaacttgcaagtctg

SEQ ID NO: 3830630 - DNA, 25 bp, Homo sapien
gatgctgtcattgcgttcagcccag

SEQ ID NO: 3830631 - DNA, 25 bp, Homo sapien
ggtgcacagatccatatataacctc

SEQ ID NO: 3830632 - DNA, 25 bp, Homo sapien
taaatattagcgtttttcgtcagac

SEQ ID NO: 3830633 - DNA, 25 bp, Homo sapien
ctttgccagtaaatacagcatgcta

SEQ ID NO: 3830634 - DNA, 25 bp, Homo sapien
gaatagcatttgtcactttgccagt

SEQ ID NO: 3830635 - DNA, 25 bp, Homo sapien
agatttcatctcatgcccagaactc

SEQ ID NO: 3830636 - DNA, 25 bp, Homo sapien
gggctgcctttcagtaactcattta

SEQ ID NO: 3830637 - DNA, 25 bp, Homo sapien
ccagaactcacaagcaggttttgga

SEQ ID NO: 3830638 - DNA, 25 bp, Homo sapien
agggctgcctttcagtaactcattt

SEQ ID NO: 3830639 - DNA, 25 bp, Homo sapien
tttccgttagaggtgggaagctcca

SEQ ID NO: 3830640 - DNA, 25 bp, Homo sapien
agctccacgatgccctgtgtctgtg

SEQ ID NO: 3830641 - DNA, 25 bp, Homo sapien
gttaacacctttgacagattcctgg

SEQ ID NO: 3830642 - DNA, 25 bp, Homo sapien
taaactgggtgaaagactggacatc

SEQ ID NO: 3830643 - DNA, 25 bp, Homo sapien
tcacagatcgtggtgtttaacaacc

SEQ ID NO: 3830644 - DNA, 25 bp, Homo sapien
gcttgcctttgatgcgtagatactc

SEQ ID NO: 3830645 - DNA, 25 bp, Homo sapien
cactgggtctagctttgcaagtctg

SEQ ID NO: 3830646 - DNA, 25 bp, Homo sapien
gatgagaagtacgttccacctctac

SEQ ID NO: 3830647 - DNA, 25 bp, Homo sapien
tctgtcgtgggcttgggtcagacct

SEQ ID NO: 3830648 - DNA, 25 bp, Homo sapien
tctgaaaataggatgagttgcctca

SEQ ID NO: 3830649 - DNA, 25 bp, Homo sapien
gactgtgattactcttgggctttaa

SEQ ID NO: 3830650 - DNA, 25 bp, Homo sapien
aaatggcgggcctcgtatacaggat

SEQ ID NO: 3830651 - DNA, 25 bp, Homo sapien
tcatggcaaaaggtactggtttccc

SEQ ID NO: 3830652 - DNA, 25 bp, Homo sapien
aaaggtcatctagctgaggatctgc

SEQ ID NO: 3830653 - DNA, 25 bp, Homo sapien
ttcttgctgacgaactacatggcca

SEQ ID NO: 3830654 - DNA, 25 bp, Homo sapien
gcattggcaggtaacagtagctaga

SEQ ID NO: 3830655 - DNA, 25 bp, Homo sapien
cgccgcccgcttgcgccgccgagcc

SEQ ID NO: 3830656 - DNA, 25 bp, Homo sapien
gcaaccacggcaacacgtgcttcat

SEQ ID NO: 3830657 - DNA, 25 bp, Homo sapien
ccgagccggtgcccggcgtggcggg

SEQ ID NO: 3830658 - DNA, 25 bp, Homo sapien
ggcaacacgtgcttcatgaacgcca

SEQ ID NO: 3830659 - DNA, 25 bp, Homo sapien
agctcttgcacggtctggtaactga

SEQ ID NO: 3830660 - DNA, 25 bp, Homo sapien
cacccagagggtaggtatctgcaac

SEQ ID NO: 3830661 - DNA, 25 bp, Homo sapien
tctgcaacgtcccttgggagccaga

SEQ ID NO: 3830662 - DNA, 25 bp, Homo sapien
atgtccaaggtaacggcgcctgggt

SEQ ID NO: 3830663 - DNA, 25 bp, Homo sapien
catgcttcggcataggtcttttaaa

SEQ ID NO: 3830664 - DNA, 25 bp, Homo sapien
ttaaacgtaactctgtggcctgtgc

SEQ ID NO: 3830665 - DNA, 25 bp, Homo sapien
taatctggacgctcatgttcttcag

SEQ ID NO: 3830666 - DNA, 25 bp, Homo sapien
ctatcaaatctttagtctgggtgcg

SEQ ID NO: 3830667 - DNA, 25 bp, Homo sapien
aaggcgcctcaaagcgcctgctgcc

SEQ ID NO: 3830668 - DNA, 25 bp, Homo sapien
accagcgtccggctgtaggcagcag

SEQ ID NO: 3830669 - DNA, 25 bp, Homo sapien
tagcaccagcagtaatcccacgcag

SEQ ID NO: 3830670 - DNA, 25 bp, Homo sapien
actcccgtccagatggcaggtgcct

SEQ ID NO: 3830671 - DNA, 25 bp, Homo sapien
gctcgtgcgggtgcgctgctcctct

SEQ ID NO: 3830672 - DNA, 25 bp, Homo sapien
ctctcgggctagcatcccctggcag

SEQ ID NO: 3830673 - DNA, 25 bp, Homo sapien
ttccaaagggtccaaggctcgtgcg

SEQ ID NO: 3830674 - DNA, 25 bp, Homo sapien
ctctgctcgctctcgggctagcatc

SEQ ID NO: 3830675 - DNA, 25 bp, Homo sapien
ttgaggacgggactctgaggacggg

SEQ ID NO: 3830676 - DNA, 25 bp, Homo sapien
ggacgggactctgaggacgggcgtg

SEQ ID NO: 3830677 - DNA, 25 bp, Homo sapien
aggacgggactctgaggacgggcgt

SEQ ID NO: 3830678 - DNA, 25 bp, Homo sapien
tgaggacgggactctgaggacgggc

SEQ ID NO: 3830679 - DNA, 25 bp, Homo sapien
tccagcttccggaagtggactttga

SEQ ID NO: 3830680 - DNA, 25 bp, Homo sapien
cagctctttaatggtcggcgcctga

SEQ ID NO: 3830681 - DNA, 25 bp, Homo sapien
gcagtcagtgtgaacccgatccaga

SEQ ID NO: 3830682 - DNA, 25 bp, Homo sapien
gtgttgaggcagtaccaccgcatca

SEQ ID NO: 3830683 - DNA, 25 bp, Homo sapien
tcacttctgagtcagccttgagctc

SEQ ID NO: 3830684 - DNA, 25 bp, Homo sapien
tgtcacttctgagtcagccttgagc

SEQ ID NO: 3830685 - DNA, 25 bp, Homo sapien
gtgtcacttctgagtcagccttgag

SEQ ID NO: 3830686 - DNA, 25 bp, Homo sapien
gggtgtcacttctgagtcagccttg

SEQ ID NO: 3830687 - DNA, 25 bp, Homo sapien
aatccggtgggagaatctaggctgc

SEQ ID NO: 3830688 - DNA, 25 bp, Homo sapien
caagtcagctagaaggtggcgaacg

SEQ ID NO: 3830689 - DNA, 25 bp, Homo sapien
tcaaagatcagcagcggaatccggt

SEQ ID NO: 3830690 - DNA, 25 bp, Homo sapien
tttccctctgagacggagttccagg

SEQ ID NO: 3830691 - DNA, 25 bp, Homo sapien
tccatcaaagaagcaggtcaccagc

SEQ ID NO: 3830692 - DNA, 25 bp, Homo sapien
tgtagcttataccactcctgaatgg

SEQ ID NO: 3830693 - DNA, 25 bp, Homo sapien
cacagtcggaggtgtcatttgagca

SEQ ID NO: 3830694 - DNA, 25 bp, Homo sapien
tgaatggcattgattcccgagctga

SEQ ID NO: 3830695 - DNA, 25 bp, Homo sapien
cccatgcatcgggtggtggaaaagc

SEQ ID NO: 3830696 - DNA, 25 bp, Homo sapien
tgttgaaagtatagcaattcccatg

SEQ ID NO: 3830697 - DNA, 25 bp, Homo sapien
catggaggtgctgagaatggtctca

SEQ ID NO: 3830698 - DNA, 25 bp, Homo sapien
ccccatggaggtgctgagaatggtc

SEQ ID NO: 3830699 - DNA, 25 bp, Homo sapien
gacaacctgctgtgatccaaggcta

SEQ ID NO: 3830700 - DNA, 25 bp, Homo sapien
gaggataagacaacctgctgtgatc

SEQ ID NO: 3830701 - DNA, 25 bp, Homo sapien
atccaaggctaggaaaacatttcct

SEQ ID NO: 3830702 - DNA, 25 bp, Homo sapien
ctgggaggataagacaacctgctgt

SEQ ID NO: 3830703 - DNA, 25 bp, Homo sapien
gacgaagggatactcatcctgccga

SEQ ID NO: 3830704 - DNA, 25 bp, Homo sapien
tgatcaccttagctccagtggagga

SEQ ID NO: 3830705 - DNA, 25 bp, Homo sapien
tgttcccacatcttcgacgaaggga

SEQ ID NO: 3830706 - DNA, 25 bp, Homo sapien
caggtgcattcctatagaggtgacc

SEQ ID NO: 3830707 - DNA, 25 bp, Homo sapien
ctctccaagcctatggaaatgagaa

SEQ ID NO: 3830708 - DNA, 25 bp, Homo sapien
ccaagcctatggaaatgagaatatt

SEQ ID NO: 3830709 - DNA, 25 bp, Homo sapien
ctccaagcctatggaaatgagaata

SEQ ID NO: 3830710 - DNA, 25 bp, Homo sapien
caagcctatggaaatgagaatattc

SEQ ID NO: 3830711 - DNA, 25 bp, Homo sapien
cagattgagggttcgagatagtttt

SEQ ID NO: 3830712 - DNA, 25 bp, Homo sapien
aacaaaagaatgagttgcccagctg

SEQ ID NO: 3830713 - DNA, 25 bp, Homo sapien
cagctgcttaagtggctatctctta

SEQ ID NO: 3830714 - DNA, 25 bp, Homo sapien
gctcaagctgatacacattacttcc

SEQ ID NO: 3830715 - DNA, 25 bp, Homo sapien
aaaagtgtgtgggacatgtctgacc

SEQ ID NO: 3830716 - DNA, 25 bp, Homo sapien
taagggaaggatgcgctgcaaatcc

SEQ ID NO: 3830717 - DNA, 25 bp, Homo sapien
tgggtatttccaagctcagagcaag

SEQ ID NO: 3830718 - DNA, 25 bp, Homo sapien
ggatcctacttcagggtgcagataa

SEQ ID NO: 3830719 - DNA, 25 bp, Homo sapien
tgtagatgttcctgattggcacgtc

SEQ ID NO: 3830720 - DNA, 25 bp, Homo sapien
cgagtaggcagcgttgtagatgttc

SEQ ID NO: 3830721 - DNA, 25 bp, Homo sapien
gactgtagggctcactcagcttgaa

SEQ ID NO: 3830722 - DNA, 25 bp, Homo sapien
gtcactcccgtcctccgtgcactga

SEQ ID NO: 3830723 - DNA, 25 bp, Homo sapien
tggtagttgcagtagttggctgcag

SEQ ID NO: 3830724 - DNA, 25 bp, Homo sapien
gtagttgcagtagttggctgcagga

SEQ ID NO: 3830725 - DNA, 25 bp, Homo sapien
agttgcagtagttggctgcaggagg

SEQ ID NO: 3830726 - DNA, 25 bp, Homo sapien
tgtactgggcacacccacatttctc

SEQ ID NO: 3830727 - DNA, 25 bp, Homo sapien
cgatgcagttggtagtaacaataca

SEQ ID NO: 3830728 - DNA, 25 bp, Homo sapien
aaaggctcgatgcagttggtagtaa

SEQ ID NO: 3830729 - DNA, 25 bp, Homo sapien
ggctcgatgcagttggtagtaacaa

SEQ ID NO: 3830730 - DNA, 25 bp, Homo sapien
ctcgatgcagttggtagtaacaata

SEQ ID NO: 3830731 - DNA, 25 bp, Homo sapien
gaaaccacagatggccattgtgcca

SEQ ID NO: 3830732 - DNA, 25 bp, Homo sapien
tccgaaaccacagatggccattgtg

SEQ ID NO: 3830733 - DNA, 25 bp, Homo sapien
gcttgtggttagtgtccactcttta

SEQ ID NO: 3830734 - DNA, 25 bp, Homo sapien
attgtgccaggcttgtggttagtgt

SEQ ID NO: 3830735 - DNA, 25 bp, Homo sapien
ccttggtcccaagtgagaacaggca

SEQ ID NO: 3830736 - DNA, 25 bp, Homo sapien
ccggccttggtcccaagtgagaaca

SEQ ID NO: 3830737 - DNA, 25 bp, Homo sapien
gccggccttggtcccaagtgagaac

SEQ ID NO: 3830738 - DNA, 25 bp, Homo sapien
gccttggtcccaagtgagaacaggc

SEQ ID NO: 3830739 - DNA, 25 bp, Homo sapien
tgatggatctctggttcaggtcttt

SEQ ID NO: 3830740 - DNA, 25 bp, Homo sapien
ggatctctggttcaggtctttgtag

SEQ ID NO: 3830741 - DNA, 25 bp, Homo sapien
ctctggttcaggtctttgtagaata

SEQ ID NO: 3830742 - DNA, 25 bp, Homo sapien
gggctctccatgatggatctctggt

SEQ ID NO: 3830743 - DNA, 25 bp, Homo sapien
gctggccaccgaagttggacagaag

SEQ ID NO: 3830744 - DNA, 25 bp, Homo sapien
gaagaagtcaatgaagaagacctcg

SEQ ID NO: 3830745 - DNA, 25 bp, Homo sapien
gaagacctcgatgatctcgatgacg

SEQ ID NO: 3830746 - DNA, 25 bp, Homo sapien
tctcgatgacgcagacaacagagca

SEQ ID NO: 3830747 - DNA, 25 bp, Homo sapien
ctggacatgggggagcctgtttcca

SEQ ID NO: 3830748 - DNA, 25 bp, Homo sapien
acatgggggagcctgtttccaggcc

SEQ ID NO: 3830749 - DNA, 25 bp, Homo sapien
ggagcttctggacatgggggagcct

SEQ ID NO: 3830750 - DNA, 25 bp, Homo sapien
gcttctggacatgggggagcctgtt

SEQ ID NO: 3830751 - DNA, 25 bp, Homo sapien
gagctggttggaaaaggccctctcc

SEQ ID NO: 3830752 - DNA, 25 bp, Homo sapien
gtcatcgtctatatccagggctgga

SEQ ID NO: 3830753 - DNA, 25 bp, Homo sapien
ggccctctccaagcgcaaggtattg

SEQ ID NO: 3830754 - DNA, 25 bp, Homo sapien
gcatctgggtatctgtgagctggtt

SEQ ID NO: 3830755 - DNA, 25 bp, Homo sapien
cgtgctaatagttcaggtcccggga

SEQ ID NO: 3830756 - DNA, 25 bp, Homo sapien
aacaggatttgctttgcggaacacc

SEQ ID NO: 3830757 - DNA, 25 bp, Homo sapien
tgttgctgcgtagtacccgatggct

SEQ ID NO: 3830758 - DNA, 25 bp, Homo sapien
tcaagacccgtaaagagctgcatca

SEQ ID NO: 3830759 - DNA, 25 bp, Homo sapien
gcccacttcacaggggagctccctc

SEQ ID NO: 3830760 - DNA, 25 bp, Homo sapien
gagcccacttcacaggggagctccc

SEQ ID NO: 3830761 - DNA, 25 bp, Homo sapien
agcccacttcacaggggagctccct

SEQ ID NO: 3830762 - DNA, 25 bp, Homo sapien
cccacttcacaggggagctccctcc

SEQ ID NO: 3830763 - DNA, 25 bp, Homo sapien
ctcctttcatactcagtgtaaagac

SEQ ID NO: 3830764 - DNA, 25 bp, Homo sapien
aggccccatgccaagctctgatcct

SEQ ID NO: 3830765 - DNA, 25 bp, Homo sapien
ttcatactcagtgtaaagaccctgg

SEQ ID NO: 3830766 - DNA, 25 bp, Homo sapien
tactcagtgtaaagaccctggtgca

SEQ ID NO: 3830767 - DNA, 25 bp, Homo sapien
ggatgatgctgggtggtgttggcaa

SEQ ID NO: 3830768 - DNA, 25 bp, Homo sapien
aatgtaaggagcaaacagggcagca

SEQ ID NO: 3830769 - DNA, 25 bp, Homo sapien
ggatgtaaacggtcctggatgatgc

SEQ ID NO: 3830770 - DNA, 25 bp, Homo sapien
ttggcaagggtgaaagaagtggtat

SEQ ID NO: 3830771 - DNA, 25 bp, Homo sapien
cctggagtatccgatgagctttgca

SEQ ID NO: 3830772 - DNA, 25 bp, Homo sapien
gaagagatgaagacccctggagtat

SEQ ID NO: 3830773 - DNA, 25 bp, Homo sapien
ggtattccatcaggccagttacaag

SEQ ID NO: 3830774 - DNA, 25 bp, Homo sapien
actgaggcgtttctgggtattccat

SEQ ID NO: 3830775 - DNA, 25 bp, Homo sapien
tggaacaactgggtgagtccagact

SEQ ID NO: 3830776 - DNA, 25 bp, Homo sapien
catcctggaacaactgggtgagtcc

SEQ ID NO: 3830777 - DNA, 25 bp, Homo sapien
ctccatcctggaacaactgggtgag

SEQ ID NO: 3830778 - DNA, 25 bp, Homo sapien
aactgggtgagtccagactgcggtc

SEQ ID NO: 3830779 - DNA, 25 bp, Homo sapien
ctgccccttgtcgtttgctgccaca

SEQ ID NO: 3830780 - DNA, 25 bp, Homo sapien
ggcagctgccccttgtcgtttgctg

SEQ ID NO: 3830781 - DNA, 25 bp, Homo sapien
gccccttgtcgtttgctgccacact

SEQ ID NO: 3830782 - DNA, 25 bp, Homo sapien
agctgccccttgtcgtttgctgcca

SEQ ID NO: 3830783 - DNA, 25 bp, Homo sapien
agaaggctgaaatcttgggtgcttt

SEQ ID NO: 3830784 - DNA, 25 bp, Homo sapien
atctctggggttggtttcgggcttg

SEQ ID NO: 3830785 - DNA, 25 bp, Homo sapien
tgcaggaactgtgtcagccaacgtc

SEQ ID NO: 3830786 - DNA, 25 bp, Homo sapien
ttcgggcttgtggcccccaggaata

SEQ ID NO: 3830787 - DNA, 25 bp, Homo sapien
aactgtgtcagccaacgtctaccct

SEQ ID NO: 3830788 - DNA, 25 bp, Homo sapien
tgtccagtaggtaccacaaacctga

SEQ ID NO: 3830789 - DNA, 25 bp, Homo sapien
tcttggctaatggaatcaccaacca

SEQ ID NO: 3830790 - DNA, 25 bp, Homo sapien
aagcaagattctgtcctccctacaa

SEQ ID NO: 3830791 - DNA, 25 bp, Homo sapien
gacaagtccaaagtgaactaatccc

SEQ ID NO: 3830792 - DNA, 25 bp, Homo sapien
ccaccagggacagccagggacttct

SEQ ID NO: 3830793 - DNA, 25 bp, Homo sapien
gacagccagggacttctttctctgt

SEQ ID NO: 3830794 - DNA, 25 bp, Homo sapien
cagggacagccagggacttctttct

SEQ ID NO: 3830795 - DNA, 25 bp, Homo sapien
cagggacttctttctctgtgcctcc

SEQ ID NO: 3830796 - DNA, 25 bp, Homo sapien
tgtcccgttcacctaggcgaagcat

SEQ ID NO: 3830797 - DNA, 25 bp, Homo sapien
ctgtcccgttcacctaggcgaagca

SEQ ID NO: 3830798 - DNA, 25 bp, Homo sapien
cggcggccgagtgttggtgacactg

SEQ ID NO: 3830799 - DNA, 25 bp, Homo sapien
ggcggcggccgagtgttggtgacac

SEQ ID NO: 3830800 - DNA, 25 bp, Homo sapien
ggagcggggacacggaggatgcgcg

SEQ ID NO: 3830801 - DNA, 25 bp, Homo sapien
agcggggacacggaggatgcgcgct

SEQ ID NO: 3830802 - DNA, 25 bp, Homo sapien
gcctcccaagggttgcatcatttct

SEQ ID NO: 3830803 - DNA, 25 bp, Homo sapien
tgcatggaattacacagctcaatgg

SEQ ID NO: 3830804 - DNA, 25 bp, Homo sapien
gaagaagaatggatccctgtgttct

SEQ ID NO: 3830805 - DNA, 25 bp, Homo sapien
ttgggtcactcacggatgctgggat

SEQ ID NO: 3830806 - DNA, 25 bp, Homo sapien
tgtcacctaaattcccatcggtagg

SEQ ID NO: 3830807 - DNA, 25 bp, Homo sapien
tgcagcagcatggataactggtgat

SEQ ID NO: 3830808 - DNA, 25 bp, Homo sapien
tcggtaggcattatccacggcggga

SEQ ID NO: 3830809 - DNA, 25 bp, Homo sapien
gcgggaatccatgcagcagtttaaa

SEQ ID NO: 3830810 - DNA, 25 bp, Homo sapien
tcccctcagcccctacaaaggccat

SEQ ID NO: 3830811 - DNA, 25 bp, Homo sapien
catctggcagtaggaagccaggcct

SEQ ID NO: 3830812 - DNA, 25 bp, Homo sapien
aaggccatctggcagtaggaagcca

SEQ ID NO: 3830813 - DNA, 25 bp, Homo sapien
gccatctggcagtaggaagccaggc

SEQ ID NO: 3830814 - DNA, 25 bp, Homo sapien
cttgggagggaggcccagggtccat

SEQ ID NO: 3830815 - DNA, 25 bp, Homo sapien
ttgggctggcatagtagatggcctt

SEQ ID NO: 3830816 - DNA, 25 bp, Homo sapien
ccagagttgggctggcatagtagat

SEQ ID NO: 3830817 - DNA, 25 bp, Homo sapien
cttgtgccagagttgggctggcata

SEQ ID NO: 3830818 - DNA, 25 bp, Homo sapien
tagtagatggccttggatccaaaac

SEQ ID NO: 3830819 - DNA, 25 bp, Homo sapien
cctctctgtgccctggtttccccat

SEQ ID NO: 3830820 - DNA, 25 bp, Homo sapien
agcctgacacatgtcttgccaactg

SEQ ID NO: 3830821 - DNA, 25 bp, Homo sapien
gtcttgccaactgatccggaagacc

SEQ ID NO: 3830822 - DNA, 25 bp, Homo sapien
gcagcctgacacatgtcttgccaac

SEQ ID NO: 3830823 - DNA, 25 bp, Homo sapien
caactgatccggaagaccccaaact

SEQ ID NO: 3830824 - DNA, 25 bp, Homo sapien
tccactgctggctctaggatgatat

SEQ ID NO: 3830825 - DNA, 25 bp, Homo sapien
ctgctggctctaggatgatataggc

SEQ ID NO: 3830826 - DNA, 25 bp, Homo sapien
tggctctaggatgatataggcctcc

SEQ ID NO: 3830827 - DNA, 25 bp, Homo sapien
gctctaggatgatataggcctccat

SEQ ID NO: 3830828 - DNA, 25 bp, Homo sapien
ctgggttcttgagtccagctcatgc

SEQ ID NO: 3830829 - DNA, 25 bp, Homo sapien
tcatgcttgttaagaagctctgaga

SEQ ID NO: 3830830 - DNA, 25 bp, Homo sapien
ctcctgggttcttgagtccagctca

SEQ ID NO: 3830831 - DNA, 25 bp, Homo sapien
tgcttgttaagaagctctgagaagc

SEQ ID NO: 3830832 - DNA, 25 bp, Homo sapien
ggaaaaccttgtctggtctccagat

SEQ ID NO: 3830833 - DNA, 25 bp, Homo sapien
tccagatgtgaagccataacccggg

SEQ ID NO: 3830834 - DNA, 25 bp, Homo sapien
gatgtgaagccataacccgggttat

SEQ ID NO: 3830835 - DNA, 25 bp, Homo sapien
tgtctggtctccagatgtgaagcca

SEQ ID NO: 3830836 - DNA, 25 bp, Homo sapien
tggtgataaagaacgctggccacac

SEQ ID NO: 3830837 - DNA, 25 bp, Homo sapien
gctgctggctggtgataaagaacgc

SEQ ID NO: 3830838 - DNA, 25 bp, Homo sapien
gctggtgataaagaacgctggccac

SEQ ID NO: 3830839 - DNA, 25 bp, Homo sapien
ctggctggtgataaagaacgctggc

SEQ ID NO: 3830840 - DNA, 25 bp, Homo sapien
gtcccacggtttcattccatggtgt

SEQ ID NO: 3830841 - DNA, 25 bp, Homo sapien
ctgccccacgtgttgggtggtgtct

SEQ ID NO: 3830842 - DNA, 25 bp, Homo sapien
agtgttgaggcggtagccacactcc

SEQ ID NO: 3830843 - DNA, 25 bp, Homo sapien
cacaccacgtggagatgttctctgg

SEQ ID NO: 3830844 - DNA, 25 bp, Homo sapien
gggtcgctgccccacgtgttgggtg

SEQ ID NO: 3830845 - DNA, 25 bp, Homo sapien
ctcacagatgatgcgcttggggccg

SEQ ID NO: 3830846 - DNA, 25 bp, Homo sapien
ggccgtgggtgttggtgttgtcgca

SEQ ID NO: 3830847 - DNA, 25 bp, Homo sapien
ttctgcagccgatgcaggcccttca

SEQ ID NO: 3830848 - DNA, 25 bp, Homo sapien
ttgtcgcagtaccacaccagcagct

SEQ ID NO: 3830849 - DNA, 25 bp, Homo sapien
tcttgaagcctacggagagggagac

SEQ ID NO: 3830850 - DNA, 25 bp, Homo sapien
ctagcattgcagatggtgacggcag

SEQ ID NO: 3830851 - DNA, 25 bp, Homo sapien
gggctagcattgcagatggtgacgg

SEQ ID NO: 3830852 - DNA, 25 bp, Homo sapien
ccatggtcttgaagcctacggagag

SEQ ID NO: 3830853 - DNA, 25 bp, Homo sapien
tttatgaagtttgaatcttagttgc

SEQ ID NO: 3830854 - DNA, 25 bp, Homo sapien
tatgaagtttgaatcttagttgctg

SEQ ID NO: 3830855 - DNA, 25 bp, Homo sapien
tgaagtttgaatcttagttgctgca

SEQ ID NO: 3830856 - DNA, 25 bp, Homo sapien
atgaagtttgaatcttagttgctgc

SEQ ID NO: 3830857 - DNA, 25 bp, Homo sapien
ttcaggttcctggtggcattggcat

SEQ ID NO: 3830858 - DNA, 25 bp, Homo sapien
tctccaaagagatcaaggaccatgg

SEQ ID NO: 3830859 - DNA, 25 bp, Homo sapien
taagccattgtggttgtctccaaag

SEQ ID NO: 3830860 - DNA, 25 bp, Homo sapien
ggccattttgcacccgtgggcatta

SEQ ID NO: 3830861 - DNA, 25 bp, Homo sapien
gagactcaaattactacagaaaaga

SEQ ID NO: 3830862 - DNA, 25 bp, Homo sapien
tgcttgatatgtgcccagggaccac

SEQ ID NO: 3830863 - DNA, 25 bp, Homo sapien
cccagcgagactcaaattactacag

SEQ ID NO: 3830864 - DNA, 25 bp, Homo sapien
ttgcttgatatgtgcccagggacca

SEQ ID NO: 3830865 - DNA, 25 bp, Homo sapien
cctgggtagcactggtgaagttccg

SEQ ID NO: 3830866 - DNA, 25 bp, Homo sapien
tgcctgggtagcactggtgaagttc

SEQ ID NO: 3830867 - DNA, 25 bp, Homo sapien
caatgcctgggtagcactggtgaag

SEQ ID NO: 3830868 - DNA, 25 bp, Homo sapien
aatgcctgggtagcactggtgaagt

SEQ ID NO: 3830869 - DNA, 25 bp, Homo sapien
ctactagctcctgctgtggcacctg

SEQ ID NO: 3830870 - DNA, 25 bp, Homo sapien
tgctcgccggggtagctcatctcta

SEQ ID NO: 3830871 - DNA, 25 bp, Homo sapien
caggatcatctgctcgccggggtag

SEQ ID NO: 3830872 - DNA, 25 bp, Homo sapien
gttgcagggctcagctccgaatagg

SEQ ID NO: 3830873 - DNA, 25 bp, Homo sapien
gaggataccatcgaatctcagaaac

SEQ ID NO: 3830874 - DNA, 25 bp, Homo sapien
aggataccatcgaatctcagaaaca

SEQ ID NO: 3830875 - DNA, 25 bp, Homo sapien
cagatcaaggaggataccatcgaat

SEQ ID NO: 3830876 - DNA, 25 bp, Homo sapien
ggataccatcgaatctcagaaacag

SEQ ID NO: 3830877 - DNA, 25 bp, Homo sapien
cacatggcagaagttatgtggccaa

SEQ ID NO: 3830878 - DNA, 25 bp, Homo sapien
cacacagcttgtaagatggagccag

SEQ ID NO: 3830879 - DNA, 25 bp, Homo sapien
gttttagtggcccatcagccagcta

SEQ ID NO: 3830880 - DNA, 25 bp, Homo sapien
gatttgagtctaggtggtctaaccc

SEQ ID NO: 3830881 - DNA, 25 bp, Homo sapien
tctgggcaggttacagcaactataa

SEQ ID NO: 3830882 - DNA, 25 bp, Homo sapien
ggcctggcccagactgctagctctg

SEQ ID NO: 3830883 - DNA, 25 bp, Homo sapien
tgaggcaatagagtgatgcggggtg

SEQ ID NO: 3830884 - DNA, 25 bp, Homo sapien
aggcaatagagtgatgcggggtggg

SEQ ID NO: 3830885 - DNA, 25 bp, Homo sapien
ggagaggcgagcaacaggtcattct

SEQ ID NO: 3830886 - DNA, 25 bp, Homo sapien
gaggcgagcaacaggtcattctgtc

SEQ ID NO: 3830887 - DNA, 25 bp, Homo sapien
ggcgagcaacaggtcattctgtcca

SEQ ID NO: 3830888 - DNA, 25 bp, Homo sapien
aagggagaggcgagcaacaggtcat

SEQ ID NO: 3830889 - DNA, 25 bp, Homo sapien
aatgcctcccccgactgtctgccgt

SEQ ID NO: 3830890 - DNA, 25 bp, Homo sapien
actgtctgccgtccacctttcattt

SEQ ID NO: 3830891 - DNA, 25 bp, Homo sapien
ccccgactgtctgccgtccaccttt

SEQ ID NO: 3830892 - DNA, 25 bp, Homo sapien
cacaggcaatgcctcccccgactgt

SEQ ID NO: 3830893 - DNA, 25 bp, Homo sapien
gccttctctgtcatgccccagttga

SEQ ID NO: 3830894 - DNA, 25 bp, Homo sapien
tgaagatgtaacagttgccatagtg

SEQ ID NO: 3830895 - DNA, 25 bp, Homo sapien
tgagggtagaagatggacgtgaagt

SEQ ID NO: 3830896 - DNA, 25 bp, Homo sapien
ggttggccgaaggaagtgccttctc

SEQ ID NO: 3830897 - DNA, 25 bp, Homo sapien
agcggccccgatggtcgctgaatga

SEQ ID NO: 3830898 - DNA, 25 bp, Homo sapien
gatggtcgctgaatgagagcctgcc

SEQ ID NO: 3830899 - DNA, 25 bp, Homo sapien
cggccccgatggtcgctgaatgaga

SEQ ID NO: 3830900 - DNA, 25 bp, Homo sapien
cccgatggtcgctgaatgagagcct

SEQ ID NO: 3830901 - DNA, 25 bp, Homo sapien
gatggacgtctctgtccccgacatg

SEQ ID NO: 3830902 - DNA, 25 bp, Homo sapien
cgacatggcgtagatgccctcatct

SEQ ID NO: 3830903 - DNA, 25 bp, Homo sapien
tgaccccggccgtggacgcaaggaa

SEQ ID NO: 3830904 - DNA, 25 bp, Homo sapien
tatgacctctgctcgtgaagcatca

SEQ ID NO: 3830905 - DNA, 25 bp, Homo sapien
gggctcccccatgcgctgaagcttg

SEQ ID NO: 3830906 - DNA, 25 bp, Homo sapien
atggagtaggtcgtgttgtagtcac

SEQ ID NO: 3830907 - DNA, 25 bp, Homo sapien
tcactgtagaagttttggacgggga

SEQ ID NO: 3830908 - DNA, 25 bp, Homo sapien
acggtgcacgggctgtagggctccc

SEQ ID NO: 3830909 - DNA, 25 bp, Homo sapien
tctcccggagtactgaggccttggc

SEQ ID NO: 3830910 - DNA, 25 bp, Homo sapien
gtggcaacctacaaaggcccagcag

SEQ ID NO: 3830911 - DNA, 25 bp, Homo sapien
aaccctaggccctggtgagagagcc

SEQ ID NO: 3830912 - DNA, 25 bp, Homo sapien
gaaaccccagagtaagatccccata

SEQ ID NO: 3830913 - DNA, 25 bp, Homo sapien
taactctggagatcaggatgagaag

SEQ ID NO: 3830914 - DNA, 25 bp, Homo sapien
aggaagcctccagctacagcaaggg

SEQ ID NO: 3830915 - DNA, 25 bp, Homo sapien
ctagtggcaggtctgggttaactct

SEQ ID NO: 3830916 - DNA, 25 bp, Homo sapien
tgcaaggattcagtctgccctctcc

SEQ ID NO: 3830917 - DNA, 25 bp, Homo sapien
cagtcctggacgcttttgggcttcc

SEQ ID NO: 3830918 - DNA, 25 bp, Homo sapien
gaagagcggcttgcccctaataata

SEQ ID NO: 3830919 - DNA, 25 bp, Homo sapien
taataaagccaatgctcagagagct

SEQ ID NO: 3830920 - DNA, 25 bp, Homo sapien
tgatctctgggcgtcttaatgcaca

SEQ ID NO: 3830921 - DNA, 25 bp, Homo sapien
tagtggccacagttgcagttacgga

SEQ ID NO: 3830922 - DNA, 25 bp, Homo sapien
tgggaagtcccggttgttgcagtat

SEQ ID NO: 3830923 - DNA, 25 bp, Homo sapien
cagtgggtacaggtagtggccacag

SEQ ID NO: 3830924 - DNA, 25 bp, Homo sapien
tacggatcatgtggtcttggaagca

SEQ ID NO: 3830925 - DNA, 25 bp, Homo sapien
gagagacccaatgagcccacataga

SEQ ID NO: 3830926 - DNA, 25 bp, Homo sapien
ccaggtttcgagtccttggaggcta

SEQ ID NO: 3830927 - DNA, 25 bp, Homo sapien
tggaggctaccatcatgctaatggc

SEQ ID NO: 3830928 - DNA, 25 bp, Homo sapien
cacacatgctgaagatggacacgtg

SEQ ID NO: 3830929 - DNA, 25 bp, Homo sapien
aggtctctctctgcgccacgctcat

SEQ ID NO: 3830930 - DNA, 25 bp, Homo sapien
cacatgccaatgcaggtctctctct

SEQ ID NO: 3830931 - DNA, 25 bp, Homo sapien
cttgcacatgccaatgcaggtctct

SEQ ID NO: 3830932 - DNA, 25 bp, Homo sapien
caggtctctctctgcgccacgctca

SEQ ID NO: 3830933 - DNA, 25 bp, Homo sapien
gaggcctcagaaggccagtcagcca

SEQ ID NO: 3830934 - DNA, 25 bp, Homo sapien
gcctcagaaggccagtcagccatgg

SEQ ID NO: 3830935 - DNA, 25 bp, Homo sapien
ctcggaggcctcagaaggccagtca

SEQ ID NO: 3830936 - DNA, 25 bp, Homo sapien
tcggaggcctcagaaggccagtcag

SEQ ID NO: 3830937 - DNA, 25 bp, Homo sapien
ccccgggggaatcacaatttggatg

SEQ ID NO: 3830938 - DNA, 25 bp, Homo sapien
gaaggtcgtagtggaagctgtggct

SEQ ID NO: 3830939 - DNA, 25 bp, Homo sapien
tggttgcaaaagttgccatctgcag

SEQ ID NO: 3830940 - DNA, 25 bp, Homo sapien
tcccagtcatggctctgttccctgg

SEQ ID NO: 3830941 - DNA, 25 bp, Homo sapien
gagacaagacgtggaaaatccagtc

SEQ ID NO: 3830942 - DNA, 25 bp, Homo sapien
ctgctcagggtgatattggtgcttt

SEQ ID NO: 3830943 - DNA, 25 bp, Homo sapien
ttggtgctttggtcccgctcctgag

SEQ ID NO: 3830944 - DNA, 25 bp, Homo sapien
gtcccgctcctgagacaagacgtgg

SEQ ID NO: 3830945 - DNA, 25 bp, Homo sapien
tagttaaattcttggaagtagatgt

SEQ ID NO: 3830946 - DNA, 25 bp, Homo sapien
gtagatgttgagcttgacaattccc

SEQ ID NO: 3830947 - DNA, 25 bp, Homo sapien
gatgttgagcttgacaattcccttc

SEQ ID NO: 3830948 - DNA, 25 bp, Homo sapien
cttggaagtagatgttgagcttgac

SEQ ID NO: 3830949 - DNA, 25 bp, Homo sapien
gccgctgccgtaggctcttggccaa

SEQ ID NO: 3830950 - DNA, 25 bp, Homo sapien
aaggccaccagcttgatgatggtga

SEQ ID NO: 3830951 - DNA, 25 bp, Homo sapien
gatggtgatccacacaaagtcgatg

SEQ ID NO: 3830952 - DNA, 25 bp, Homo sapien
tggccacccagattcgagagcagcc

SEQ ID NO: 3830953 - DNA, 25 bp, Homo sapien
tacagagcccttggccagtaacgga

SEQ ID NO: 3830954 - DNA, 25 bp, Homo sapien
tagagtaaatcaggtgccacttggc

SEQ ID NO: 3830955 - DNA, 25 bp, Homo sapien
tgaggcctcgggcaacagtcttggc

SEQ ID NO: 3830956 - DNA, 25 bp, Homo sapien
ctgttgaaggacacaagctctggcc

SEQ ID NO: 3830957 - DNA, 25 bp, Homo sapien
cgattccgtgttcctgcgcatcaaa

SEQ ID NO: 3830958 - DNA, 25 bp, Homo sapien
gcatactgagtgtgggcttaaccct

SEQ ID NO: 3830959 - DNA, 25 bp, Homo sapien
tcgaagatggacgtgagtttctcac

SEQ ID NO: 3830960 - DNA, 25 bp, Homo sapien
gagctttgggaagatcccgctttaa

SEQ ID NO: 3830961 - DNA, 25 bp, Homo sapien
ccttgattcaggctctagagaagca

SEQ ID NO: 3830962 - DNA, 25 bp, Homo sapien
gatgcgtcagattcaccaatggcct

SEQ ID NO: 3830963 - DNA, 25 bp, Homo sapien
tactacagatgagaaggcttggagg

SEQ ID NO: 3830964 - DNA, 25 bp, Homo sapien
gagctgagccactccgtgaacaagc

SEQ ID NO: 3830965 - DNA, 25 bp, Homo sapien
tacgagtggtttagtgtcacgttcc

SEQ ID NO: 3830966 - DNA, 25 bp, Homo sapien
tagagagctattgaaatagattgca

SEQ ID NO: 3830967 - DNA, 25 bp, Homo sapien
tcatctacgagtggtttagtgtcac

SEQ ID NO: 3830968 - DNA, 25 bp, Homo sapien
gagagctattgaaatagattgcagt

SEQ ID NO: 3830969 - DNA, 25 bp, Homo sapien
ttctgtcttctagtgcgaatgcatt

SEQ ID NO: 3830970 - DNA, 25 bp, Homo sapien
atatacttctgtaaaggcaaaaggt

SEQ ID NO: 3830971 - DNA, 25 bp, Homo sapien
ggcaaaaggtgaaatgctacttctg

SEQ ID NO: 3830972 - DNA, 25 bp, Homo sapien
attctgtcttctagtgcgaatgcat

SEQ ID NO: 3830973 - DNA, 25 bp, Homo sapien
ttaagttctggacgccaggcctgag

SEQ ID NO: 3830974 - DNA, 25 bp, Homo sapien
ttcatccaagaggtgaaccacgccg

SEQ ID NO: 3830975 - DNA, 25 bp, Homo sapien
tcactatggtaacggccaacgactt

SEQ ID NO: 3830976 - DNA, 25 bp, Homo sapien
tcctggcagacgacttcgacgtgaa

SEQ ID NO: 3830977 - DNA, 25 bp, Homo sapien
ggcaggctagtcttgtatggaactc

SEQ ID NO: 3830978 - DNA, 25 bp, Homo sapien
tacaatcacggcttcctccaacctc

SEQ ID NO: 3830979 - DNA, 25 bp, Homo sapien
caatcacggcttcctccaacctccg

SEQ ID NO: 3830980 - DNA, 25 bp, Homo sapien
ggtacaatcacggcttcctccaacc

SEQ ID NO: 3830981 - DNA, 25 bp, Homo sapien
tcacggcttcctccaacctccgctt

SEQ ID NO: 3830982 - DNA, 25 bp, Homo sapien
acttccttagcctgtagctgcataa

SEQ ID NO: 3830983 - DNA, 25 bp, Homo sapien
cgcaagctgggtggtttaagtcaac

SEQ ID NO: 3830984 - DNA, 25 bp, Homo sapien
ctttgccttcattgtcacgtggtgt

SEQ ID NO: 3830985 - DNA, 25 bp, Homo sapien
tagaactgctatgacaacgtgccgc

SEQ ID NO: 3830986 - DNA, 25 bp, Homo sapien
tcttaactgttgtaacagtggtgac

SEQ ID NO: 3830987 - DNA, 25 bp, Homo sapien
tttcttaactgttgtaacagtggtg

SEQ ID NO: 3830988 - DNA, 25 bp, Homo sapien
ttcttaactgttgtaacagtggtga

SEQ ID NO: 3830989 - DNA, 25 bp, Homo sapien
catgttgggcaagtcagtggtctct

SEQ ID NO: 3830990 - DNA, 25 bp, Homo sapien
caagcaggccggacttttccctggc

SEQ ID NO: 3830991 - DNA, 25 bp, Homo sapien
cagccctgtgcgctagagtgaacca

SEQ ID NO: 3830992 - DNA, 25 bp, Homo sapien
aagtgctgcatgttaaaactctggg

SEQ ID NO: 3830993 - DNA, 25 bp, Homo sapien
tacattgccactgctctgatttggg

SEQ ID NO: 3830994 - DNA, 25 bp, Homo sapien
caaattcaagttgcacgctggcact

SEQ ID NO: 3830995 - DNA, 25 bp, Homo sapien
gcttcctgatgcctgactttatggg

SEQ ID NO: 3830996 - DNA, 25 bp, Homo sapien
gagtaacagctctggttcttgccac

SEQ ID NO: 3830997 - DNA, 25 bp, Homo sapien
tatccgcagagtagttgcatgtcat

SEQ ID NO: 3830998 - DNA, 25 bp, Homo sapien
ggtccctgattcctgcttcgtctgt

SEQ ID NO: 3830999 - DNA, 25 bp, Homo sapien
ttgaaagcacctgagacttattggg

SEQ ID NO: 3831000 - DNA, 25 bp, Homo sapien
cacctgagacttattgggtccctga

SEQ ID NO: 3831001 - DNA, 25 bp, Homo sapien
ggttatctgtatctggaggttccac

SEQ ID NO: 3831002 - DNA, 25 bp, Homo sapien
cagttacttagaatggaacccagag

SEQ ID NO: 3831003 - DNA, 25 bp, Homo sapien
cacaggcctggtagtcaggtggctc

SEQ ID NO: 3831004 - DNA, 25 bp, Homo sapien
tgctgtcgccagatcgtatttcagt

SEQ ID NO: 3831005 - DNA, 25 bp, Homo sapien
ccctatagttaggaggtgaactcac

SEQ ID NO: 3831006 - DNA, 25 bp, Homo sapien
cgtagtcttgaagaggtacccatca

SEQ ID NO: 3831007 - DNA, 25 bp, Homo sapien
tctaatcagcaagtccagtggccac

SEQ ID NO: 3831008 - DNA, 25 bp, Homo sapien
tactatgcttaggtgttggacagga

SEQ ID NO: 3831009 - DNA, 25 bp, Homo sapien
ctaggcggagggctttgaagtccaa

SEQ ID NO: 3831010 - DNA, 25 bp, Homo sapien
tgaagtccaagcagctgaactggct

SEQ ID NO: 3831011 - DNA, 25 bp, Homo sapien
aagatctgaggcaagctggacagga

SEQ ID NO: 3831012 - DNA, 25 bp, Homo sapien
gaaggatgtagaagcttagctgcct

SEQ ID NO: 3831013 - DNA, 25 bp, Homo sapien
gagctctttgtgacacaccatgtca

SEQ ID NO: 3831014 - DNA, 25 bp, Homo sapien
agctctttgtgacacaccatgtcag

SEQ ID NO: 3831015 - DNA, 25 bp, Homo sapien
ggagctctttgtgacacaccatgtc

SEQ ID NO: 3831016 - DNA, 25 bp, Homo sapien
gccatgagacctgaggaccacactt

SEQ ID NO: 3831017 - DNA, 25 bp, Homo sapien
actgtgccttagaatcgcccctgga

SEQ ID NO: 3831018 - DNA, 25 bp, Homo sapien
gaaaggcttggttgctcccaggctg

SEQ ID NO: 3831019 - DNA, 25 bp, Homo sapien
gaatgcttgttgcactgttcccagg

SEQ ID NO: 3831020 - DNA, 25 bp, Homo sapien
cacaagatccagtctccgcaagaga

SEQ ID NO: 3831021 - DNA, 25 bp, Homo sapien
gaagctctttatgccttaacggtga

SEQ ID NO: 3831022 - DNA, 25 bp, Homo sapien
tatagagagccgagaggcgctttgc

SEQ ID NO: 3831023 - DNA, 25 bp, Homo sapien
gaggtttaccttcacagcaggttgg

SEQ ID NO: 3831024 - DNA, 25 bp, Homo sapien
cacactgagtgtaggcctttgtctc

SEQ ID NO: 3831025 - DNA, 25 bp, Homo sapien
tctctaggcaaggatcggtggctca

SEQ ID NO: 3831026 - DNA, 25 bp, Homo sapien
catgtcggaacaggattggtcagct

SEQ ID NO: 3831027 - DNA, 25 bp, Homo sapien
aagccacagacccaagcatgtcgga

SEQ ID NO: 3831028 - DNA, 25 bp, Homo sapien
ggtgattacctgtccgttgaccctc

SEQ ID NO: 3831029 - DNA, 25 bp, Homo sapien
cttgggactcaagggtagataggat

SEQ ID NO: 3831030 - DNA, 25 bp, Homo sapien
gattttaagatacggaacatgggag

SEQ ID NO: 3831031 - DNA, 25 bp, Homo sapien
aggaaaaattcaactcggactgtgc

SEQ ID NO: 3831032 - DNA, 25 bp, Homo sapien
tgcagagctcagcacttatacctct

SEQ ID NO: 3831033 - DNA, 25 bp, Homo sapien
gcagagctcagcacttatacctctt

SEQ ID NO: 3831034 - DNA, 25 bp, Homo sapien
agagctcagcacttatacctcttcc

SEQ ID NO: 3831035 - DNA, 25 bp, Homo sapien
cagagctcagcacttatacctcttc

SEQ ID NO: 3831036 - DNA, 25 bp, Homo sapien
agcatgttccccgtgaggcagctcg

SEQ ID NO: 3831037 - DNA, 25 bp, Homo sapien
gcatgttccccgtgaggcagctcgg

SEQ ID NO: 3831038 - DNA, 25 bp, Homo sapien
gtacagctccgcagacccccctggg

SEQ ID NO: 3831039 - DNA, 25 bp, Homo sapien
cagtacagctccgcagacccccctg

SEQ ID NO: 3831040 - DNA, 25 bp, Homo sapien
gccacagtacagctccgcagacccc

SEQ ID NO: 3831041 - DNA, 25 bp, Homo sapien
cacagtacagctccgcagacccccc

SEQ ID NO: 3831042 - DNA, 25 bp, Homo sapien
tgacgctgcctcatagatgtcagca

SEQ ID NO: 3831043 - DNA, 25 bp, Homo sapien
tccgcctgcgtgatgttatagctgc

SEQ ID NO: 3831044 - DNA, 25 bp, Homo sapien
gtatgttccatctgcgacgcctctg

SEQ ID NO: 3831045 - DNA, 25 bp, Homo sapien
gggctcctaaatccgactgggcagg

SEQ ID NO: 3831046 - DNA, 25 bp, Homo sapien
tgctgacagccctttatagcagcgg

SEQ ID NO: 3831047 - DNA, 25 bp, Homo sapien
caattagtaggacacagagcgatgc

SEQ ID NO: 3831048 - DNA, 25 bp, Homo sapien
tattcacacggccatgacacagcct

SEQ ID NO: 3831049 - DNA, 25 bp, Homo sapien
taaaagtcgttcgatgtacaccaaa

SEQ ID NO: 3831050 - DNA, 25 bp, Homo sapien
aattagtcactcttggatgagccat

SEQ ID NO: 3831051 - DNA, 25 bp, Homo sapien
acgtgggatggtttggcttctgaat

SEQ ID NO: 3831052 - DNA, 25 bp, Homo sapien
ccttgctagcacaggcggctgctgg

SEQ ID NO: 3831053 - DNA, 25 bp, Homo sapien
tcatgaccccggtggttggttggca

SEQ ID NO: 3831054 - DNA, 25 bp, Homo sapien
gatgaagtgaacgatgggttaagtc

SEQ ID NO: 3831055 - DNA, 25 bp, Homo sapien
aggactgcagaatgctgactggaca

SEQ ID NO: 3831056 - DNA, 25 bp, Homo sapien
tcaggaatgtgggttgcagtcttca

SEQ ID NO: 3831057 - DNA, 25 bp, Homo sapien
tctccccgctgagttcctgagtgag

SEQ ID NO: 3831058 - DNA, 25 bp, Homo sapien
caatggctacgtgacctgcgctttc

SEQ ID NO: 3831059 - DNA, 25 bp, Homo sapien
tgctcacagcggcttagtcctgctt

SEQ ID NO: 3831060 - DNA, 25 bp, Homo sapien
gagacgcagtcgtgcaagacatgca

SEQ ID NO: 3831061 - DNA, 25 bp, Homo sapien
gaaagatctctatctggctaccgcg

SEQ ID NO: 3831062 - DNA, 25 bp, Homo sapien
cggcggctgtggcgggaaccgagtc

SEQ ID NO: 3831063 - DNA, 25 bp, Homo sapien
ctgtggcgggaaccgagtcggccca

SEQ ID NO: 3831064 - DNA, 25 bp, Homo sapien
cggcagcgtcgctggagctgtggct

SEQ ID NO: 3831065 - DNA, 25 bp, Homo sapien
gcccggcagcgtcgctggagctgtg

SEQ ID NO: 3831066 - DNA, 25 bp, Homo sapien
acttccgaggttatagtacgaggca

SEQ ID NO: 3831067 - DNA, 25 bp, Homo sapien
tacgtcctaatgctttgtgaggcaa

SEQ ID NO: 3831068 - DNA, 25 bp, Homo sapien
taaactcagatctgtgccgatccag

SEQ ID NO: 3831069 - DNA, 25 bp, Homo sapien
gaatggttaaaaggagcttcttggc

SEQ ID NO: 3831070 - DNA, 25 bp, Homo sapien
tgatctcgcttgtgacctctatggg

SEQ ID NO: 3831071 - DNA, 25 bp, Homo sapien
tccacatgacaagggatcgaggcct

SEQ ID NO: 3831072 - DNA, 25 bp, Homo sapien
tttgttgagccccatagagtcctag

SEQ ID NO: 3831073 - DNA, 25 bp, Homo sapien
tatgggagaccctaagccagaacca

SEQ ID NO: 3831074 - DNA, 25 bp, Homo sapien
cttccctaaacgtcatctgttccgt

SEQ ID NO: 3831075 - DNA, 25 bp, Homo sapien
ggctttctcttcaaatccacctcgt

SEQ ID NO: 3831076 - DNA, 25 bp, Homo sapien
tattcttgaaccttggggcagcctg

SEQ ID NO: 3831077 - DNA, 25 bp, Homo sapien
tgtggctttctcttcaaatccacct

SEQ ID NO: 3831078 - DNA, 25 bp, Homo sapien
gggctgaactggacaccagactttc

SEQ ID NO: 3831079 - DNA, 25 bp, Homo sapien
cccaaggactcagagcagcaaagga

SEQ ID NO: 3831080 - DNA, 25 bp, Homo sapien
gagcagcaaaggatacgtgacacaa

SEQ ID NO: 3831081 - DNA, 25 bp, Homo sapien
tacgtgacacaagcagggctgaact

SEQ ID NO: 3831082 - DNA, 25 bp, Homo sapien
ggtgcaggagcggaaataattcaaa

SEQ ID NO: 3831083 - DNA, 25 bp, Homo sapien
aactgaggtgcaggagcggaaataa

SEQ ID NO: 3831084 - DNA, 25 bp, Homo sapien
caaattgccaggagtttcttgtgtt

SEQ ID NO: 3831085 - DNA, 25 bp, Homo sapien
cggaaataattcaaattgccaggag

SEQ ID NO: 3831086 - DNA, 25 bp, Homo sapien
tgtgctattccatcccacatggcgg

SEQ ID NO: 3831087 - DNA, 25 bp, Homo sapien
gccccacgaatgttcccgaatgaat

SEQ ID NO: 3831088 - DNA, 25 bp, Homo sapien
gaatcctttccggtggtgtcagagt

SEQ ID NO: 3831089 - DNA, 25 bp, Homo sapien
cacaggtaaccctggcggacgtgac

SEQ ID NO: 3831090 - DNA, 25 bp, Homo sapien
tgattgtgtacaacacccaccgctc

SEQ ID NO: 3831091 - DNA, 25 bp, Homo sapien
aagaggcgagctggctgagattggc

SEQ ID NO: 3831092 - DNA, 25 bp, Homo sapien
agctggctgagattggcccccgcag

SEQ ID NO: 3831093 - DNA, 25 bp, Homo sapien
gtggaggtttctatggagacccgcc

SEQ ID NO: 3831094 - DNA, 25 bp, Homo sapien
ccaggcagttgacgggccgcgcggg

SEQ ID NO: 3831095 - DNA, 25 bp, Homo sapien
ggcagttgacgggccgcgcgggagc

SEQ ID NO: 3831096 - DNA, 25 bp, Homo sapien
cctcagtagccacagtctcggcctc

SEQ ID NO: 3831097 - DNA, 25 bp, Homo sapien
cctccaggcagttgacgggccgcgc

SEQ ID NO: 3831098 - DNA, 25 bp, Homo sapien
tcttctgtttcagctcggagcctgt

SEQ ID NO: 3831099 - DNA, 25 bp, Homo sapien
gatgatcttcaagtccaccagctcc

SEQ ID NO: 3831100 - DNA, 25 bp, Homo sapien
gggaacttcacgtcatgcttggtct

SEQ ID NO: 3831101 - DNA, 25 bp, Homo sapien
cgcgtcttcgccgttgctgaccgag

SEQ ID NO: 3831102 - DNA, 25 bp, Homo sapien
gggcatccaagtatccttcagaaga

SEQ ID NO: 3831103 - DNA, 25 bp, Homo sapien
gacctgatgcaaggaaagccaccag

SEQ ID NO: 3831104 - DNA, 25 bp, Homo sapien
gcctagtagggtgcaagggccatca

SEQ ID NO: 3831105 - DNA, 25 bp, Homo sapien
gctgtaaaacaagcgccttaggtga

SEQ ID NO: 3831106 - DNA, 25 bp, Homo sapien
cattcacatattaagtgagaatcca

SEQ ID NO: 3831107 - DNA, 25 bp, Homo sapien
gccaatagggacaaaactcctgttc

SEQ ID NO: 3831108 - DNA, 25 bp, Homo sapien
agtactagctctcattctttccaag

SEQ ID NO: 3831109 - DNA, 25 bp, Homo sapien
taatggagattacaaggctacatgt

SEQ ID NO: 3831110 - DNA, 25 bp, Homo sapien
tagaactgtagaagatttattagag

SEQ ID NO: 3831111 - DNA, 25 bp, Homo sapien
gtaacagaccaaaaagtgaatactg

SEQ ID NO: 3831112 - DNA, 25 bp, Homo sapien
gaccaaaaagtgaatactgcctcca

SEQ ID NO: 3831113 - DNA, 25 bp, Homo sapien
tatggatactacacagctctttggt

SEQ ID NO: 3831114 - DNA, 25 bp, Homo sapien
gatggtggagccaaccaccatgatc

SEQ ID NO: 3831115 - DNA, 25 bp, Homo sapien
ggtggagccaaccaccatgatcttg

SEQ ID NO: 3831116 - DNA, 25 bp, Homo sapien
ttgggtgtgtttactgctaaaacat

SEQ ID NO: 3831117 - DNA, 25 bp, Homo sapien
tctttgggtgtgtttactgctaaaa

SEQ ID NO: 3831118 - DNA, 25 bp, Homo sapien
aactgctgccataaatttccatcat

SEQ ID NO: 3831119 - DNA, 25 bp, Homo sapien
ctgccataaatttccatcatgggcc

SEQ ID NO: 3831120 - DNA, 25 bp, Homo sapien
cccaactgctgccataaatttccat

SEQ ID NO: 3831121 - DNA, 25 bp, Homo sapien
ctgctgccataaatttccatcatgg

SEQ ID NO: 3831122 - DNA, 25 bp, Homo sapien
gacgacagactatggatcctttgaa

SEQ ID NO: 3831123 - DNA, 25 bp, Homo sapien
gaatatgttcgtacctgtgctagcc

SEQ ID NO: 3831124 - DNA, 25 bp, Homo sapien
gttctacagcaaacgggatttccag

SEQ ID NO: 3831125 - DNA, 25 bp, Homo sapien
gcagaactttctgggagggcgaata

SEQ ID NO: 3831126 - DNA, 25 bp, Homo sapien
cttaacagatggcatcacatcttca

SEQ ID NO: 3831127 - DNA, 25 bp, Homo sapien
ctgggcccccttaacagatggcatc

SEQ ID NO: 3831128 - DNA, 25 bp, Homo sapien
acagatggcatcacatcttcaggtt

SEQ ID NO: 3831129 - DNA, 25 bp, Homo sapien
taacagatggcatcacatcttcagg

SEQ ID NO: 3831130 - DNA, 25 bp, Homo sapien
ccagatttattgtacatgccggaca

SEQ ID NO: 3831131 - DNA, 25 bp, Homo sapien
gttctagtttaaaggtgagtctcac

SEQ ID NO: 3831132 - DNA, 25 bp, Homo sapien
acagcggtaccgttggcaggcgctc

SEQ ID NO: 3831133 - DNA, 25 bp, Homo sapien
ggtgagtctcacttttcctccagat

SEQ ID NO: 3831134 - DNA, 25 bp, Homo sapien
gaaacaggtgatttaggcatgttcg

SEQ ID NO: 3831135 - DNA, 25 bp, Homo sapien
gaacactgaatacctacagtgctgg

SEQ ID NO: 3831136 - DNA, 25 bp, Homo sapien
tacagtgctggtcagaaacaggtga

SEQ ID NO: 3831137 - DNA, 25 bp, Homo sapien
taggcatgttcggttccctccagga

SEQ ID NO: 3831138 - DNA, 25 bp, Homo sapien
aaagtagaggtccagcaagaggcag

SEQ ID NO: 3831139 - DNA, 25 bp, Homo sapien
ggctgggcagcttactactgataaa

SEQ ID NO: 3831140 - DNA, 25 bp, Homo sapien
tgcacctatcttcatggcagggtct

SEQ ID NO: 3831141 - DNA, 25 bp, Homo sapien
ggtctttccaggtcagccgtagcaa

SEQ ID NO: 3831142 - DNA, 25 bp, Homo sapien
taaactcaagtgactggcgccatgc

SEQ ID NO: 3831143 - DNA, 25 bp, Homo sapien
tcttctgaccagtgcacatagggct

SEQ ID NO: 3831144 - DNA, 25 bp, Homo sapien
cagattcaactttcctacgagcagg

SEQ ID NO: 3831145 - DNA, 25 bp, Homo sapien
taagggtcacttactcagcaaagcg

SEQ ID NO: 3831146 - DNA, 25 bp, Homo sapien
cccatgggcaatttctcagtccgct

SEQ ID NO: 3831147 - DNA, 25 bp, Homo sapien
tgggatggacactgaaaggcctgcc

SEQ ID NO: 3831148 - DNA, 25 bp, Homo sapien
tgtcttgggaaagagtagcctgctc

SEQ ID NO: 3831149 - DNA, 25 bp, Homo sapien
gaaaagaggctgtctggtgccctca

SEQ ID NO: 3831150 - DNA, 25 bp, Homo sapien
tcaacttcgtggtcaatgtggctcc

SEQ ID NO: 3831151 - DNA, 25 bp, Homo sapien
gtctgcaatccttgtaataaagact

SEQ ID NO: 3831152 - DNA, 25 bp, Homo sapien
aataactgaccaggccaaaccaatt

SEQ ID NO: 3831153 - DNA, 25 bp, Homo sapien
ttgtctgcaatccttgtaataaaga

SEQ ID NO: 3831154 - DNA, 25 bp, Homo sapien
aaataactgaccaggccaaaccaat

SEQ ID NO: 3831155 - DNA, 25 bp, Homo sapien
caccacactgcttgaaaagtcaggc

SEQ ID NO: 3831156 - DNA, 25 bp, Homo sapien
gtcaggctacaaaccctacagggtg

SEQ ID NO: 3831157 - DNA, 25 bp, Homo sapien
gcatctgcccaaagagataactaag

SEQ ID NO: 3831158 - DNA, 25 bp, Homo sapien
gggtgtgactggcaacacaaactat

SEQ ID NO: 3831159 - DNA, 25 bp, Homo sapien
tttgattgcatccacatattgagtt

SEQ ID NO: 3831160 - DNA, 25 bp, Homo sapien
cacatattgagttggaacccagtac

SEQ ID NO: 3831161 - DNA, 25 bp, Homo sapien
tgcatccacatattgagttggaacc

SEQ ID NO: 3831162 - DNA, 25 bp, Homo sapien
tccacatattgagttggaacccagt

SEQ ID NO: 3831163 - DNA, 25 bp, Homo sapien
cacatcacctcagattgaatataga

SEQ ID NO: 3831164 - DNA, 25 bp, Homo sapien
caccacatcacctcagattgaatat

SEQ ID NO: 3831165 - DNA, 25 bp, Homo sapien
catcacctcagattgaatatagatt

SEQ ID NO: 3831166 - DNA, 25 bp, Homo sapien
cacctcagattgaatatagattttt

SEQ ID NO: 3831167 - DNA, 25 bp, Homo sapien
tcagcagatgggtggaaagcaagcc

SEQ ID NO: 3831168 - DNA, 25 bp, Homo sapien
tcttgggcgaacacatgctaatacg

SEQ ID NO: 3831169 - DNA, 25 bp, Homo sapien
gatgttctgcatgcgagagggctcc

SEQ ID NO: 3831170 - DNA, 25 bp, Homo sapien
gagatgatggaacgctgtcaccggc

SEQ ID NO: 3831171 - DNA, 25 bp, Homo sapien
cagtgaggacacattttggcattct

SEQ ID NO: 3831172 - DNA, 25 bp, Homo sapien
tgtcacttatcattagtaagaatac

SEQ ID NO: 3831173 - DNA, 25 bp, Homo sapien
ttctgatggacttgtatttaaattg

SEQ ID NO: 3831174 - DNA, 25 bp, Homo sapien
gaaagatgtcacttatcattagtaa

SEQ ID NO: 3831175 - DNA, 25 bp, Homo sapien
tagacaggatggcggccgggaaggg

SEQ ID NO: 3831176 - DNA, 25 bp, Homo sapien
acgggatggtggccgggaagaggcg

SEQ ID NO: 3831177 - DNA, 25 bp, Homo sapien
tcctagacaggatggcggccgggaa

SEQ ID NO: 3831178 - DNA, 25 bp, Homo sapien
ctagacgggatggtggccgggaaga

SEQ ID NO: 3831179 - DNA, 25 bp, Homo sapien
tttctattcgaaacaaccgccatcg

SEQ ID NO: 3831180 - DNA, 25 bp, Homo sapien
tctattcgaaacaaccgccatcgtc

SEQ ID NO: 3831181 - DNA, 25 bp, Homo sapien
tattcgaaacaaccgccatcgtcat

SEQ ID NO: 3831182 - DNA, 25 bp, Homo sapien
cttttctattcgaaacaaccgccat

SEQ ID NO: 3831183 - DNA, 25 bp, Homo sapien
catctgtaaaaaggagggtgatagt

SEQ ID NO: 3831184 - DNA, 25 bp, Homo sapien
tcaccagaatactggagagctgaag

SEQ ID NO: 3831185 - DNA, 25 bp, Homo sapien
gatagtatcatggatctcaccagaa

SEQ ID NO: 3831186 - DNA, 25 bp, Homo sapien
gtaaagtgcaatatcatagcctgag

SEQ ID NO: 3831187 - DNA, 25 bp, Homo sapien
gaagatcctgctgcgggtgttcctt

SEQ ID NO: 3831188 - DNA, 25 bp, Homo sapien
tacaaagtggttttgactaagttca

SEQ ID NO: 3831189 - DNA, 25 bp, Homo sapien
aaatgttccactatggcggcttggc

SEQ ID NO: 3831190 - DNA, 25 bp, Homo sapien
gctttgaatggcaaggagctcagaa

SEQ ID NO: 3831191 - DNA, 25 bp, Homo sapien
gctggcggattcactgtctggtgag

SEQ ID NO: 3831192 - DNA, 25 bp, Homo sapien
gtgctggcggattcactgtctggtg

SEQ ID NO: 3831193 - DNA, 25 bp, Homo sapien
tgctggcggattcactgtctggtga

SEQ ID NO: 3831194 - DNA, 25 bp, Homo sapien
tgtttggtaccaatcctgtaggaag

SEQ ID NO: 3831195 - DNA, 25 bp, Homo sapien
aacttgcttccttggatttgaagag

SEQ ID NO: 3831196 - DNA, 25 bp, Homo sapien
gaacgatagtcgttggccctagaga

SEQ ID NO: 3831197 - DNA, 25 bp, Homo sapien
aactcatctgttcaggaatccttga

SEQ ID NO: 3831198 - DNA, 25 bp, Homo sapien
actcaagcctggcaacagagcaaga

SEQ ID NO: 3831199 - DNA, 25 bp, Homo sapien
tcaagcctggcaacagagcaagacc

SEQ ID NO: 3831200 - DNA, 25 bp, Homo sapien
ctgaaatcataccacttcactcaag

SEQ ID NO: 3831201 - DNA, 25 bp, Homo sapien
agctgaaatcataccacttcactca

SEQ ID NO: 3831202 - DNA, 25 bp, Homo sapien
tttaatagtgtttattcaagccctg

SEQ ID NO: 3831203 - DNA, 25 bp, Homo sapien
gacttgagtcaaaccccagattccc

SEQ ID NO: 3831204 - DNA, 25 bp, Homo sapien
gcatcctgatctctactagtatggg

SEQ ID NO: 3831205 - DNA, 25 bp, Homo sapien
tgtgtcacttagaagaatggaaaac

SEQ ID NO: 3831206 - DNA, 25 bp, Homo sapien
tacttcagagcctatcggtcattgc

SEQ ID NO: 3831207 - DNA, 25 bp, Homo sapien
catactcttgacagtctatttggga

SEQ ID NO: 3831208 - DNA, 25 bp, Homo sapien
caaagagagtgagtcgttgcgaagc

SEQ ID NO: 3831209 - DNA, 25 bp, Homo sapien
tctcaacagttcctagacggcaggg

SEQ ID NO: 3831210 - DNA, 25 bp, Homo sapien
ttccttctccgaattcatactgcct

SEQ ID NO: 3831211 - DNA, 25 bp, Homo sapien
ccttctccgaattcatactgccttg

SEQ ID NO: 3831212 - DNA, 25 bp, Homo sapien
tgagttctgttgtactattccagcc

SEQ ID NO: 3831213 - DNA, 25 bp, Homo sapien
tctgttgtactattccagccttcat

SEQ ID NO: 3831214 - DNA, 25 bp, Homo sapien
aatctcgtgtgtgtagctttgggaa

SEQ ID NO: 3831215 - DNA, 25 bp, Homo sapien
cctaggcttgagtcttgaaagaatc

SEQ ID NO: 3831216 - DNA, 25 bp, Homo sapien
cagtattacagatagttccagtgcc

SEQ ID NO: 3831217 - DNA, 25 bp, Homo sapien
gagagatcaggtatgtaattcccaa

SEQ ID NO: 3831218 - DNA, 25 bp, Homo sapien
tcagccccggatcctgtcagagtca

SEQ ID NO: 3831219 - DNA, 25 bp, Homo sapien
gtggcccactgggactcatcgacag

SEQ ID NO: 3831220 - DNA, 25 bp, Homo sapien
ctttcagagattccggctacttccg

SEQ ID NO: 3831221 - DNA, 25 bp, Homo sapien
gagtcagtcggtcagtctttcagag

SEQ ID NO: 3831222 - DNA, 25 bp, Homo sapien
cttgttgtagagcagctcgcccaac

SEQ ID NO: 3831223 - DNA, 25 bp, Homo sapien
gtactcagacttgttgtagagcagc

SEQ ID NO: 3831224 - DNA, 25 bp, Homo sapien
tgtagagcagctcgcccaactccat

SEQ ID NO: 3831225 - DNA, 25 bp, Homo sapien
cgtctcgatgtactcagacttgttg

SEQ ID NO: 3831226 - DNA, 25 bp, Homo sapien
gataatccgggactaatggccaaag

SEQ ID NO: 3831227 - DNA, 25 bp, Homo sapien
gccaagcgcggagtaaacagcaaag

SEQ ID NO: 3831228 - DNA, 25 bp, Homo sapien
gaaggcactttacccctatgagaaa

SEQ ID NO: 3831229 - DNA, 25 bp, Homo sapien
ggaggatacatatctggacccgcgc

SEQ ID NO: 3831230 - DNA, 25 bp, Homo sapien
cttgccattgagaacgatgttctgg

SEQ ID NO: 3831231 - DNA, 25 bp, Homo sapien
ttgccattgagaacgatgttctggc

SEQ ID NO: 3831232 - DNA, 25 bp, Homo sapien
tgccattgagaacgatgttctggct

SEQ ID NO: 3831233 - DNA, 25 bp, Homo sapien
gacatctgatatatgggctcaggaa

SEQ ID NO: 3831234 - DNA, 25 bp, Homo sapien
cagcttgggcttagattggtcacat

SEQ ID NO: 3831235 - DNA, 25 bp, Homo sapien
cctacaggaaggacacgtggcattt

SEQ ID NO: 3831236 - DNA, 25 bp, Homo sapien
ctgattgttgccacgtgggcctgta

SEQ ID NO: 3831237 - DNA, 25 bp, Homo sapien
caactttcgctttgttgcaattgct

SEQ ID NO: 3831238 - DNA, 25 bp, Homo sapien
ttgtcaactttcgctttgttgcaat

SEQ ID NO: 3831239 - DNA, 25 bp, Homo sapien
taatacagtcattcatcacaatggt

SEQ ID NO: 3831240 - DNA, 25 bp, Homo sapien
ttacatttgccagatcccctcggat

SEQ ID NO: 3831241 - DNA, 25 bp, Homo sapien
tcccctcggataatacagtcattca

SEQ ID NO: 3831242 - DNA, 25 bp, Homo sapien
cacaacacaatgacgtccaactctt

SEQ ID NO: 3831243 - DNA, 25 bp, Homo sapien
acatgaacataggaaccaatctgtg

SEQ ID NO: 3831244 - DNA, 25 bp, Homo sapien
acagttcttcccaacatgaacatag

SEQ ID NO: 3831245 - DNA, 25 bp, Homo sapien
cagttcttcccaacatgaacatagg

SEQ ID NO: 3831246 - DNA, 25 bp, Homo sapien
agttcttcccaacatgaacatagga

SEQ ID NO: 3831247 - DNA, 25 bp, Homo sapien
gggaaagtgaagctgctttgccagc

SEQ ID NO: 3831248 - DNA, 25 bp, Homo sapien
gatgggagctgaagggaaagtgaag

SEQ ID NO: 3831249 - DNA, 25 bp, Homo sapien
tgctttgccagccaagtcatcatac

SEQ ID NO: 3831250 - DNA, 25 bp, Homo sapien
gctgaagggaaagtgaagctgcttt

SEQ ID NO: 3831251 - DNA, 25 bp, Homo sapien
gcttagtcacagaaacagggtccca

SEQ ID NO: 3831252 - DNA, 25 bp, Homo sapien
cttagtcacagaaacagggtcccac

SEQ ID NO: 3831253 - DNA, 25 bp, Homo sapien
cctgcttagtcacagaaacagggtc

SEQ ID NO: 3831254 - DNA, 25 bp, Homo sapien
tgcttagtcacagaaacagggtccc

SEQ ID NO: 3831255 - DNA, 25 bp, Homo sapien
gccagggacggtgacaagagggttg

SEQ ID NO: 3831256 - DNA, 25 bp, Homo sapien
tgacaagagggttggttgcaacttc

SEQ ID NO: 3831257 - DNA, 25 bp, Homo sapien
ggttggttgcaacttcctgcttcag

SEQ ID NO: 3831258 - DNA, 25 bp, Homo sapien
tgcaacttcctgcttcaggtggtac

SEQ ID NO: 3831259 - DNA, 25 bp, Homo sapien
cagtctttcaacacacatcggcgcc

SEQ ID NO: 3831260 - DNA, 25 bp, Homo sapien
agtctttcaacacacatcggcgccc

SEQ ID NO: 3831261 - DNA, 25 bp, Homo sapien
gcagtctttcaacacacatcggcgc

SEQ ID NO: 3831262 - DNA, 25 bp, Homo sapien
agcagtctttcaacacacatcggcg

SEQ ID NO: 3831263 - DNA, 25 bp, Homo sapien
tggggaaagaaagacccagctctaa

SEQ ID NO: 3831264 - DNA, 25 bp, Homo sapien
ctggggaaagaaagacccagctcta

SEQ ID NO: 3831265 - DNA, 25 bp, Homo sapien
gaaagaaagacccagctctaaggag

SEQ ID NO: 3831266 - DNA, 25 bp, Homo sapien
ggaaagaaagacccagctctaagga

SEQ ID NO: 3831267 - DNA, 25 bp, Homo sapien
gtagctcttggtgacgtcaatcatc

SEQ ID NO: 3831268 - DNA, 25 bp, Homo sapien
ggtagtagctcttggtgacgtcaat

SEQ ID NO: 3831269 - DNA, 25 bp, Homo sapien
tctggtagtagctcttggtgacgtc

SEQ ID NO: 3831270 - DNA, 25 bp, Homo sapien
cttctggtagtagctcttggtgacg

SEQ ID NO: 3831271 - DNA, 25 bp, Homo sapien
tcatagataaggtgtaagcacagca

SEQ ID NO: 3831272 - DNA, 25 bp, Homo sapien
gcaggtccgtttcaggcgggatcca

SEQ ID NO: 3831273 - DNA, 25 bp, Homo sapien
catagcctccacaccggaagggtgc

SEQ ID NO: 3831274 - DNA, 25 bp, Homo sapien
cagtgaatggccgtgagcagcgcac

SEQ ID NO: 3831275 - DNA, 25 bp, Homo sapien
taatagacaacaggaatctgggctc

SEQ ID NO: 3831276 - DNA, 25 bp, Homo sapien
tgatgagcaactgcaacaactggcc

SEQ ID NO: 3831277 - DNA, 25 bp, Homo sapien
gtcacaaacacctttcccaagatga

SEQ ID NO: 3831278 - DNA, 25 bp, Homo sapien
tcaagttttaatagacaacaggaat

SEQ ID NO: 3831279 - DNA, 25 bp, Homo sapien
taactatcctaggacagctaaggtc

SEQ ID NO: 3831280 - DNA, 25 bp, Homo sapien
aacacttggcaaaattacaatctgg

SEQ ID NO: 3831281 - DNA, 25 bp, Homo sapien
cttgaagcaaggagtaaccacctga

SEQ ID NO: 3831282 - DNA, 25 bp, Homo sapien
taatgcatccacatgagagactcaa

SEQ ID NO: 3831283 - DNA, 25 bp, Homo sapien
taagagcccttcctgtatatatgcg

SEQ ID NO: 3831284 - DNA, 25 bp, Homo sapien
tgatgacatcatggaccagcccctt

SEQ ID NO: 3831285 - DNA, 25 bp, Homo sapien
gactatcactgcactgttatgggag

SEQ ID NO: 3831286 - DNA, 25 bp, Homo sapien
tcatggctccaaatgcacggcgaag

SEQ ID NO: 3831287 - DNA, 25 bp, Homo sapien
ccagtggagtatcctcagaaggcaa

SEQ ID NO: 3831288 - DNA, 25 bp, Homo sapien
catgccaggcctgtccatttggtgt

SEQ ID NO: 3831289 - DNA, 25 bp, Homo sapien
caatgatgacttgaggctggatacc

SEQ ID NO: 3831290 - DNA, 25 bp, Homo sapien
tggataccttcctcgtctggaccaa

SEQ ID NO: 3831291 - DNA, 25 bp, Homo sapien
aactctattgataagggcgcctcgg

SEQ ID NO: 3831292 - DNA, 25 bp, Homo sapien
gcaagggtagtgttcaaagccagct

SEQ ID NO: 3831293 - DNA, 25 bp, Homo sapien
taggctctcactggatagaacagga

SEQ ID NO: 3831294 - DNA, 25 bp, Homo sapien
gagatccctatgagaaagaactggc

SEQ ID NO: 3831295 - DNA, 25 bp, Homo sapien
aaactccgggttcaaatgctagctc

SEQ ID NO: 3831296 - DNA, 25 bp, Homo sapien
gataaagtgcccattatagtgccca

SEQ ID NO: 3831297 - DNA, 25 bp, Homo sapien
ggacagcactccaaatagtacaggc

SEQ ID NO: 3831298 - DNA, 25 bp, Homo sapien
cctaggattctatccaggagatgat

SEQ ID NO: 3831299 - DNA, 25 bp, Homo sapien
agcttgaattccaacccaactctgc

SEQ ID NO: 3831300 - DNA, 25 bp, Homo sapien
cccaaccaaggtttatagccagcag

SEQ ID NO: 3831301 - DNA, 25 bp, Homo sapien
ggcacaaggctaagagttttacaga

SEQ ID NO: 3831302 - DNA, 25 bp, Homo sapien
tactaacagtgaacccttattaagc

SEQ ID NO: 3831303 - DNA, 25 bp, Homo sapien
tttgagtagctttatttgattaggg

SEQ ID NO: 3831304 - DNA, 25 bp, Homo sapien
tcattcacacactcaaggcctgctg

SEQ ID NO: 3831305 - DNA, 25 bp, Homo sapien
ccactgcgtccagctaaggtatgtt

SEQ ID NO: 3831306 - DNA, 25 bp, Homo sapien
gattagggtgatccctctagcattt

SEQ ID NO: 3831307 - DNA, 25 bp, Homo sapien
tagagacaaagagcctatcagcagc

SEQ ID NO: 3831308 - DNA, 25 bp, Homo sapien
taagcccttttcagccaggttccag

SEQ ID NO: 3831309 - DNA, 25 bp, Homo sapien
tcaaggcagacagtagcaggtttca

SEQ ID NO: 3831310 - DNA, 25 bp, Homo sapien
tttcatagtttagcgctccacggag

SEQ ID NO: 3831311 - DNA, 25 bp, Homo sapien
taaagctgtcgacaccttgtcctgg

SEQ ID NO: 3831312 - DNA, 25 bp, Homo sapien
gacagagggaccatacaaggacaca

SEQ ID NO: 3831313 - DNA, 25 bp, Homo sapien
gataggccctgaagaggtaactaag

SEQ ID NO: 3831314 - DNA, 25 bp, Homo sapien
gagcagactagaaaagcctaatacc

SEQ ID NO: 3831315 - DNA, 25 bp, Homo sapien
gtgctgggatcatatgcatccatca

SEQ ID NO: 3831316 - DNA, 25 bp, Homo sapien
ctgggatcatatgcatccatcactg

SEQ ID NO: 3831317 - DNA, 25 bp, Homo sapien
tgctgggatcatatgcatccatcac

SEQ ID NO: 3831318 - DNA, 25 bp, Homo sapien
gctgggatcatatgcatccatcact

SEQ ID NO: 3831319 - DNA, 25 bp, Homo sapien
tagtaggaccacatgcaaaagggtg

SEQ ID NO: 3831320 - DNA, 25 bp, Homo sapien
tatacaagggaagctcattacagac

SEQ ID NO: 3831321 - DNA, 25 bp, Homo sapien
tattagggcacctcaagcaggacat

SEQ ID NO: 3831322 - DNA, 25 bp, Homo sapien
tcatgtacagaagcacagtcccagg

SEQ ID NO: 3831323 - DNA, 25 bp, Homo sapien
gcagacctcgatccgagcagagcct

SEQ ID NO: 3831324 - DNA, 25 bp, Homo sapien
tccccgaattcaaacgcggcgctgg

SEQ ID NO: 3831325 - DNA, 25 bp, Homo sapien
ccgaagctgcgctgcagacctcgat

SEQ ID NO: 3831326 - DNA, 25 bp, Homo sapien
cccgaattcaaacgcggcgctggga

SEQ ID NO: 3831327 - DNA, 25 bp, Homo sapien
cgggatctctttcgccggtggagcc

SEQ ID NO: 3831328 - DNA, 25 bp, Homo sapien
tccactaggacctccgggatctctt

SEQ ID NO: 3831329 - DNA, 25 bp, Homo sapien
gccgccggctgcgtgggtccactag

SEQ ID NO: 3831330 - DNA, 25 bp, Homo sapien
cagggtcggccggtgcccgtgccag

SEQ ID NO: 3831331 - DNA, 25 bp, Homo sapien
gtgcggcttgagcagcagagactta

SEQ ID NO: 3831332 - DNA, 25 bp, Homo sapien
ctggtgcggcttgagcagcagagac

SEQ ID NO: 3831333 - DNA, 25 bp, Homo sapien
cacctccttggtgtccgcgtccgag

SEQ ID NO: 3831334 - DNA, 25 bp, Homo sapien
cctccttggtgtccgcgtccgagat

SEQ ID NO: 3831335 - DNA, 25 bp, Homo sapien
aatcctacgacgtgctggtgggcga

SEQ ID NO: 3831336 - DNA, 25 bp, Homo sapien
tcgaaaaagccgtggaatcctacga

SEQ ID NO: 3831337 - DNA, 25 bp, Homo sapien
cacgaagtcgttgtcctcgaaaaag

SEQ ID NO: 3831338 - DNA, 25 bp, Homo sapien
gaggctgcggtgaatggatatttcc

SEQ ID NO: 3831339 - DNA, 25 bp, Homo sapien
gtctgggcgctccaactgccccgca

SEQ ID NO: 3831340 - DNA, 25 bp, Homo sapien
aggcagttccagttccccagcagcg

SEQ ID NO: 3831341 - DNA, 25 bp, Homo sapien
tacgtaagcgggaggctcccagcac

SEQ ID NO: 3831342 - DNA, 25 bp, Homo sapien
aagacactttccatacgtaagcggg

SEQ ID NO: 3831343 - DNA, 25 bp, Homo sapien
agggccctagcgtccattaccagca

SEQ ID NO: 3831344 - DNA, 25 bp, Homo sapien
ctgggtactccagggccctagcgtc

SEQ ID NO: 3831345 - DNA, 25 bp, Homo sapien
cctgggtactccagggccctagcgt

SEQ ID NO: 3831346 - DNA, 25 bp, Homo sapien
tactccagggccctagcgtccatta

SEQ ID NO: 3831347 - DNA, 25 bp, Homo sapien
cgtaggtagtatcgggcctcaggct

SEQ ID NO: 3831348 - DNA, 25 bp, Homo sapien
tgaggtctcgatgaataactcggtt

SEQ ID NO: 3831349 - DNA, 25 bp, Homo sapien
gcacaatttgccgtaggtagtatcg

SEQ ID NO: 3831350 - DNA, 25 bp, Homo sapien
cctccagatcttcattcaggaaaag

SEQ ID NO: 3831351 - DNA, 25 bp, Homo sapien
cagcacctcgggagctatgtaatta

SEQ ID NO: 3831352 - DNA, 25 bp, Homo sapien
gaaactgtgccctttcttgctcagc

SEQ ID NO: 3831353 - DNA, 25 bp, Homo sapien
tgatacacccaatggaccacacatc

SEQ ID NO: 3831354 - DNA, 25 bp, Homo sapien
tctccccgtcatattcgactttggt

SEQ ID NO: 3831355 - DNA, 25 bp, Homo sapien
ttcattcttcttgatccggaggtag

SEQ ID NO: 3831356 - DNA, 25 bp, Homo sapien
cattcttcttgatccggaggtaggt

SEQ ID NO: 3831357 - DNA, 25 bp, Homo sapien
tcttgatccggaggtaggtctcttt

SEQ ID NO: 3831358 - DNA, 25 bp, Homo sapien
gaagtctcaaaaggtggtttgccca

SEQ ID NO: 3831359 - DNA, 25 bp, Homo sapien
gagagggacagccataagcagaatg

SEQ ID NO: 3831360 - DNA, 25 bp, Homo sapien
agagagagggacagccataagcaga

SEQ ID NO: 3831361 - DNA, 25 bp, Homo sapien
gacagccataagcagaatgtgaagg

SEQ ID NO: 3831362 - DNA, 25 bp, Homo sapien
acagccataagcagaatgtgaaggg

SEQ ID NO: 3831363 - DNA, 25 bp, Homo sapien
atcgaaaaccttggtggaatggtca

SEQ ID NO: 3831364 - DNA, 25 bp, Homo sapien
agctcgttaatggttgggcgggcag

SEQ ID NO: 3831365 - DNA, 25 bp, Homo sapien
gaactcgtcattaagcagctcgtta

SEQ ID NO: 3831366 - DNA, 25 bp, Homo sapien
cgggcagggatatagccagaagtaa

SEQ ID NO: 3831367 - DNA, 25 bp, Homo sapien
ctgacccaacggtgtggccctgcag

SEQ ID NO: 3831368 - DNA, 25 bp, Homo sapien
agaagccgtggcctctgacccaacg

SEQ ID NO: 3831369 - DNA, 25 bp, Homo sapien
acctgccactcaggcaaacagcttg

SEQ ID NO: 3831370 - DNA, 25 bp, Homo sapien
tgacctgccactcaggcaaacagct

SEQ ID NO: 3831371 - DNA, 25 bp, Homo sapien
tcacctgtctctcgaaccactggtt

SEQ ID NO: 3831372 - DNA, 25 bp, Homo sapien
cttgcctgaccagcccacgctccga

SEQ ID NO: 3831373 - DNA, 25 bp, Homo sapien
ggtggcagtcgaccacctcacctgt

SEQ ID NO: 3831374 - DNA, 25 bp, Homo sapien
tctttttcccggggacgctcaggca

SEQ ID NO: 3831375 - DNA, 25 bp, Homo sapien
gtacttgtccgaatagtccacccac

SEQ ID NO: 3831376 - DNA, 25 bp, Homo sapien
gccgtacttgtccgaatagtccacc

SEQ ID NO: 3831377 - DNA, 25 bp, Homo sapien
caaggccgtacttgtccgaatagtc

SEQ ID NO: 3831378 - DNA, 25 bp, Homo sapien
aggccgtacttgtccgaatagtcca

SEQ ID NO: 3831379 - DNA, 25 bp, Homo sapien
tgggagctcaaaaaggccagagtct

SEQ ID NO: 3831380 - DNA, 25 bp, Homo sapien
ctgggagctcaaaaaggccagagtc

SEQ ID NO: 3831381 - DNA, 25 bp, Homo sapien
tcaaggagttgggatgggaactcac

SEQ ID NO: 3831382 - DNA, 25 bp, Homo sapien
ggctgtcaccatcattgtagaggat

SEQ ID NO: 3831383 - DNA, 25 bp, Homo sapien
cgtgttgagtcattgaagagcaccc

SEQ ID NO: 3831384 - DNA, 25 bp, Homo sapien
tgaggtaggactcagtgccgtcacg

SEQ ID NO: 3831385 - DNA, 25 bp, Homo sapien
caccccccatgggccggacggcact

SEQ ID NO: 3831386 - DNA, 25 bp, Homo sapien
ccccccatgggccggacggcactca

SEQ ID NO: 3831387 - DNA, 25 bp, Homo sapien
cccccatgggccggacggcactcac

SEQ ID NO: 3831388 - DNA, 25 bp, Homo sapien
tgaggtgcaggatgatggcgctgcg

SEQ ID NO: 3831389 - DNA, 25 bp, Homo sapien
gtgcaggatgatggcgctgcgggtg

SEQ ID NO: 3831390 - DNA, 25 bp, Homo sapien
ccttcgcgcggcgtgatgttggcac

SEQ ID NO: 3831391 - DNA, 25 bp, Homo sapien
ttcgcgcggcgtgatgttggcacct

SEQ ID NO: 3831392 - DNA, 25 bp, Homo sapien
cagctctctcctgcgcctggtgacc

SEQ ID NO: 3831393 - DNA, 25 bp, Homo sapien
cctgcgcctggtgacctccagctca

SEQ ID NO: 3831394 - DNA, 25 bp, Homo sapien
ctgagccgctcactccacattcaac

SEQ ID NO: 3831395 - DNA, 25 bp, Homo sapien
ggcatgcggagcctaccccagctct

SEQ ID NO: 3831396 - DNA, 25 bp, Homo sapien
ttgcagcagccgtactcctccagga

SEQ ID NO: 3831397 - DNA, 25 bp, Homo sapien
tgtccaccatagtgcgggcgtagcg

SEQ ID NO: 3831398 - DNA, 25 bp, Homo sapien
tactcctccaggagactcaggcggt

SEQ ID NO: 3831399 - DNA, 25 bp, Homo sapien
ctcaggcggtatgtgcggaagtccc

SEQ ID NO: 3831400 - DNA, 25 bp, Homo sapien
accgcgggagccaaccagtatgggc

SEQ ID NO: 3831401 - DNA, 25 bp, Homo sapien
acactgcagacatggcaccgcggga

SEQ ID NO: 3831402 - DNA, 25 bp, Homo sapien
caaggatgatgcagctctgcccagc

SEQ ID NO: 3831403 - DNA, 25 bp, Homo sapien
caaggaaaggacagttccgaattca

SEQ ID NO: 3831404 - DNA, 25 bp, Homo sapien
aggagctgcgcctctgagagcctct

SEQ ID NO: 3831405 - DNA, 25 bp, Homo sapien
gaggagctgcgcctctgagagcctc

SEQ ID NO: 3831406 - DNA, 25 bp, Homo sapien
cgagccatgaggagctgcgcctctg

SEQ ID NO: 3831407 - DNA, 25 bp, Homo sapien
ccatgaggagctgcgcctctgagag

SEQ ID NO: 3831408 - DNA, 25 bp, Homo sapien
tggagcccgaggtcgtgctgcagca

SEQ ID NO: 3831409 - DNA, 25 bp, Homo sapien
gtattgattctaaatggtatttgag

SEQ ID NO: 3831410 - DNA, 25 bp, Homo sapien
ggcagaataggattacaaattgagt

SEQ ID NO: 3831411 - DNA, 25 bp, Homo sapien
gaataggattacaaattgagttgta

SEQ ID NO: 3831412 - DNA, 25 bp, Homo sapien
cagaataggattacaaattgagttg

SEQ ID NO: 3831413 - DNA, 25 bp, Homo sapien
ttttgcgatccgcacgggagaggct

SEQ ID NO: 3831414 - DNA, 25 bp, Homo sapien
cgacccgggcgaatggaaaacaatg

SEQ ID NO: 3831415 - DNA, 25 bp, Homo sapien
tccccggcgtcgacgctgaggaagc

SEQ ID NO: 3831416 - DNA, 25 bp, Homo sapien
gaacaacgggctgtttcagctccga

SEQ ID NO: 3831417 - DNA, 25 bp, Homo sapien
cggcgtgggagctgcgcgaccccat

SEQ ID NO: 3831418 - DNA, 25 bp, Homo sapien
agccggtctctcgccgaatactgtc

SEQ ID NO: 3831419 - DNA, 25 bp, Homo sapien
tcgccgaatactgtccccgtcggga

SEQ ID NO: 3831420 - DNA, 25 bp, Homo sapien
tgtccccgtcgggaatgaccgcggc

SEQ ID NO: 3831421 - DNA, 25 bp, Homo sapien
tcctgtccagtgcccggaaccggtg

SEQ ID NO: 3831422 - DNA, 25 bp, Homo sapien
ccggaaccggtggtgcaggcggagc

SEQ ID NO: 3831423 - DNA, 25 bp, Homo sapien
cccggaaccggtggtgcaggcggag

SEQ ID NO: 3831424 - DNA, 25 bp, Homo sapien
tccagtgcccggaaccggtggtgca

SEQ ID NO: 3831425 - DNA, 25 bp, Homo sapien
gggttcacggcgagcgcccctatct

SEQ ID NO: 3831426 - DNA, 25 bp, Homo sapien
aagaagctttctataattcggtctc

SEQ ID NO: 3831427 - DNA, 25 bp, Homo sapien
gcgagcgcccctatctgctggagat

SEQ ID NO: 3831428 - DNA, 25 bp, Homo sapien
ctttctataattcggtctcccaggg

SEQ ID NO: 3831429 - DNA, 25 bp, Homo sapien
ctgttgagaggttcaggtttcttgg

SEQ ID NO: 3831430 - DNA, 25 bp, Homo sapien
tcatcttctacagggcgaaaatgag

SEQ ID NO: 3831431 - DNA, 25 bp, Homo sapien
aaatgagccaagaccctgacaaagc

SEQ ID NO: 3831432 - DNA, 25 bp, Homo sapien
cttctgctgttgagaggttcaggtt

SEQ ID NO: 3831433 - DNA, 25 bp, Homo sapien
ggagatcttcccatcgcgatccagg

SEQ ID NO: 3831434 - DNA, 25 bp, Homo sapien
tggagatcttcccatcgcgatccag

SEQ ID NO: 3831435 - DNA, 25 bp, Homo sapien
ctggagatcttcccatcgcgatcca

SEQ ID NO: 3831436 - DNA, 25 bp, Homo sapien
atctcttgctctcgctttctgccaa

SEQ ID NO: 3831437 - DNA, 25 bp, Homo sapien
acatctcttgctctcgctttctgcc

SEQ ID NO: 3831438 - DNA, 25 bp, Homo sapien
tctcttgctctcgctttctgccaac

SEQ ID NO: 3831439 - DNA, 25 bp, Homo sapien
tcacatctcttgctctcgctttctg

SEQ ID NO: 3831440 - DNA, 25 bp, Homo sapien
tgagagatgagtgaagaggcagcca

SEQ ID NO: 3831441 - DNA, 25 bp, Homo sapien
gagagatgagtgaagaggcagccat

SEQ ID NO: 3831442 - DNA, 25 bp, Homo sapien
ctgagagatgagtgaagaggcagcc

SEQ ID NO: 3831443 - DNA, 25 bp, Homo sapien
gtaccccaaccatcagacggagaac

SEQ ID NO: 3831444 - DNA, 25 bp, Homo sapien
ctgtaccccaaccatcagacggaga

SEQ ID NO: 3831445 - DNA, 25 bp, Homo sapien
ctgcaccgtgcggtcagcgatgttc

SEQ ID NO: 3831446 - DNA, 25 bp, Homo sapien
gtgcggtcagcgatgttctccagct

SEQ ID NO: 3831447 - DNA, 25 bp, Homo sapien
ttcaggatccggatgctcatttttt

SEQ ID NO: 3831448 - DNA, 25 bp, Homo sapien
tgctcaacgtccatcttctctaagg

SEQ ID NO: 3831449 - DNA, 25 bp, Homo sapien
gatccggatgctcattttttgctca

SEQ ID NO: 3831450 - DNA, 25 bp, Homo sapien
ttttttgctcaacgtccatcttctc

SEQ ID NO: 3831451 - DNA, 25 bp, Homo sapien
caagggtccctcacagtaatgggca

SEQ ID NO: 3831452 - DNA, 25 bp, Homo sapien
cttgttttgcccgagcagagcagac

SEQ ID NO: 3831453 - DNA, 25 bp, Homo sapien
caaggagatactggttgcaggagca

SEQ ID NO: 3831454 - DNA, 25 bp, Homo sapien
taggaattagcacatgacacaggcc

SEQ ID NO: 3831455 - DNA, 25 bp, Homo sapien
cccaggtgaggtggattctgcacag

SEQ ID NO: 3831456 - DNA, 25 bp, Homo sapien
tgcccacaaggtgaccagttctggg

SEQ ID NO: 3831457 - DNA, 25 bp, Homo sapien
ccctagtgcccacaaggtgaccagt

SEQ ID NO: 3831458 - DNA, 25 bp, Homo sapien
tagtgcccacaaggtgaccagttct

SEQ ID NO: 3831459 - DNA, 25 bp, Homo sapien
tgggcttgaaattggatagaagaag

SEQ ID NO: 3831460 - DNA, 25 bp, Homo sapien
ttaagagatggtgggcttgaaattg

SEQ ID NO: 3831461 - DNA, 25 bp, Homo sapien
aaatttaagagatggtgggcttgaa

SEQ ID NO: 3831462 - DNA, 25 bp, Homo sapien
gaaattggatagaagaaggtgcagt

SEQ ID NO: 3831463 - DNA, 25 bp, Homo sapien
tatccaccttcagccctttgttgag

SEQ ID NO: 3831464 - DNA, 25 bp, Homo sapien
cctgtgagtaatatcttgatggaga

SEQ ID NO: 3831465 - DNA, 25 bp, Homo sapien
tactctcgggaccacagttttcctg

SEQ ID NO: 3831466 - DNA, 25 bp, Homo sapien
acttttgtgttcctgtactctcggg

SEQ ID NO: 3831467 - DNA, 25 bp, Homo sapien
tttgagtggctttcttgcctgcacc

SEQ ID NO: 3831468 - DNA, 25 bp, Homo sapien
gaatttgagtggctttcttgcctgc

SEQ ID NO: 3831469 - DNA, 25 bp, Homo sapien
gagtggctttcttgcctgcacccca

SEQ ID NO: 3831470 - DNA, 25 bp, Homo sapien
tggaatttgagtggctttcttgcct

SEQ ID NO: 3831471 - DNA, 25 bp, Homo sapien
gaattattggtcacagggatgttca

SEQ ID NO: 3831472 - DNA, 25 bp, Homo sapien
gttcatttcactaaccacagactcc

SEQ ID NO: 3831473 - DNA, 25 bp, Homo sapien
ggtcacagggatgttcatttcacta

SEQ ID NO: 3831474 - DNA, 25 bp, Homo sapien
ggaggaactggaattattggtcaca

SEQ ID NO: 3831475 - DNA, 25 bp, Homo sapien
caggaacttgaacaggaagtaatcg

SEQ ID NO: 3831476 - DNA, 25 bp, Homo sapien
aagtaatcgtgggtaaaatgctgcg

SEQ ID NO: 3831477 - DNA, 25 bp, Homo sapien
aattgaacccagtattcaggtcagg

SEQ ID NO: 3831478 - DNA, 25 bp, Homo sapien
taatgaacacagcacaattgaaccc

SEQ ID NO: 3831479 - DNA, 25 bp, Homo sapien
taccgcgggcctcgcggctaagcgt

SEQ ID NO: 3831480 - DNA, 25 bp, Homo sapien
ccggggctgcgttcaggagatgtgc

SEQ ID NO: 3831481 - DNA, 25 bp, Homo sapien
gagcgagagtggaaagacctacggg

SEQ ID NO: 3831482 - DNA, 25 bp, Homo sapien
ctttacatatcggcgcccgggctac

SEQ ID NO: 3831483 - DNA, 25 bp, Homo sapien
ctgccgctcgtccagctgcgcttgg

SEQ ID NO: 3831484 - DNA, 25 bp, Homo sapien
ccgctggccccagctgcgggggagg

SEQ ID NO: 3831485 - DNA, 25 bp, Homo sapien
gccgctcgtccagctgcgcttggca

SEQ ID NO: 3831486 - DNA, 25 bp, Homo sapien
ctcctcatttgcatcgcgcccaggc

SEQ ID NO: 3831487 - DNA, 25 bp, Homo sapien
cccctgcgccggctctggcggccgc

SEQ ID NO: 3831488 - DNA, 25 bp, Homo sapien
cttgcgcgcggggagccggagcccg

SEQ ID NO: 3831489 - DNA, 25 bp, Homo sapien
cgcgggaccgcgggctgcgggccgg

SEQ ID NO: 3831490 - DNA, 25 bp, Homo sapien
agccggagcccgagaggtgccggcc

SEQ ID NO: 3831491 - DNA, 25 bp, Homo sapien
ccggagggcgcctttgcgggcgaag

SEQ ID NO: 3831492 - DNA, 25 bp, Homo sapien
tcttctgccggagggcgcctttgcg

SEQ ID NO: 3831493 - DNA, 25 bp, Homo sapien
cgggcgaagcgcacggtgctctcct

SEQ ID NO: 3831494 - DNA, 25 bp, Homo sapien
agaagcgggcggtgaatttgtggtt

SEQ ID NO: 3831495 - DNA, 25 bp, Homo sapien
cttggcactggaatccctgcttccc

SEQ ID NO: 3831496 - DNA, 25 bp, Homo sapien
gcactggaatccctgcttcccgaag

SEQ ID NO: 3831497 - DNA, 25 bp, Homo sapien
ctggaatccctgcttcccgaagccc

SEQ ID NO: 3831498 - DNA, 25 bp, Homo sapien
tggcactggaatccctgcttcccga

SEQ ID NO: 3831499 - DNA, 25 bp, Homo sapien
aggcccaggcgacaaacacagtcgc

SEQ ID NO: 3831500 - DNA, 25 bp, Homo sapien
gtcgcctttctaggggatgcaccat

SEQ ID NO: 3831501 - DNA, 25 bp, Homo sapien
agaggaggcccaggcgacaaacaca

SEQ ID NO: 3831502 - DNA, 25 bp, Homo sapien
cacagtcgcctttctaggggatgca

SEQ ID NO: 3831503 - DNA, 25 bp, Homo sapien
gtaacctctaaacttgcagcctgac

SEQ ID NO: 3831504 - DNA, 25 bp, Homo sapien
gtgaaacaatagaagtaacctctaa

SEQ ID NO: 3831505 - DNA, 25 bp, Homo sapien
aagtgaaacaatagaagtaacctct

SEQ ID NO: 3831506 - DNA, 25 bp, Homo sapien
cctctaaacttgcagcctgacttgg

SEQ ID NO: 3831507 - DNA, 25 bp, Homo sapien
gttgcccagtgacaaagcttcagac

SEQ ID NO: 3831508 - DNA, 25 bp, Homo sapien
gcatctggttgtgggcagtatctct

SEQ ID NO: 3831509 - DNA, 25 bp, Homo sapien
aaatgaattcgttgttgcctctcca

SEQ ID NO: 3831510 - DNA, 25 bp, Homo sapien
gactcaatgttaacccactcaaaga

SEQ ID NO: 3831511 - DNA, 25 bp, Homo sapien
tctgagttattaactaagaggagat

SEQ ID NO: 3831512 - DNA, 25 bp, Homo sapien
ggaagtcagctcattatctgagtta

SEQ ID NO: 3831513 - DNA, 25 bp, Homo sapien
aagaagccatctcaaggtaacaggc

SEQ ID NO: 3831514 - DNA, 25 bp, Homo sapien
taacaggctagttctaccaaatact

SEQ ID NO: 3831515 - DNA, 25 bp, Homo sapien
gctagccaccaaaagatgaatatcc

SEQ ID NO: 3831516 - DNA, 25 bp, Homo sapien
tgtcaatcctgtttccctaagtgca

SEQ ID NO: 3831517 - DNA, 25 bp, Homo sapien
gaaacaattatcaataccctcagcc

SEQ ID NO: 3831518 - DNA, 25 bp, Homo sapien
gcagcactcactaaactctaaagaa

SEQ ID NO: 3831519 - DNA, 25 bp, Homo sapien
tgtggtgggttccaaaaaatatcac

SEQ ID NO: 3831520 - DNA, 25 bp, Homo sapien
ttgcgaggaccacactgaaattagt

SEQ ID NO: 3831521 - DNA, 25 bp, Homo sapien
tatgaccatgctcaggatagcccac

SEQ ID NO: 3831522 - DNA, 25 bp, Homo sapien
tttagacagccaagcaattgcgagg

SEQ ID NO: 3831523 - DNA, 25 bp, Homo sapien
gaggcctgaacccatgctcttgacc

SEQ ID NO: 3831524 - DNA, 25 bp, Homo sapien
ccacatgtgattggggaggaactga

SEQ ID NO: 3831525 - DNA, 25 bp, Homo sapien
gaccagtaagtcatcagacctcatc

SEQ ID NO: 3831526 - DNA, 25 bp, Homo sapien
cacagctctgtgatcacactgacca

SEQ ID NO: 3831527 - DNA, 25 bp, Homo sapien
ggtgctgtggacattcaatgagatc

SEQ ID NO: 3831528 - DNA, 25 bp, Homo sapien
cagtcacttcatgaagttaataatg

SEQ ID NO: 3831529 - DNA, 25 bp, Homo sapien
taataatgagatcaacctcctaggg

SEQ ID NO: 3831530 - DNA, 25 bp, Homo sapien
gctcagtgcctcaataaattagtgc

SEQ ID NO: 3831531 - DNA, 25 bp, Homo sapien
tttgggcacctacacccggatatgg

SEQ ID NO: 3831532 - DNA, 25 bp, Homo sapien
cacacgcggcctacaagagaatttc

SEQ ID NO: 3831533 - DNA, 25 bp, Homo sapien
gtgccaccagtaacatacttcagat

SEQ ID NO: 3831534 - DNA, 25 bp, Homo sapien
aatgcacccctgtattaacaactcc

SEQ ID NO: 3831535 - DNA, 25 bp, Homo sapien
gcactcagaatagggaagtccttgc

SEQ ID NO: 3831536 - DNA, 25 bp, Homo sapien
gcttcccattctgcaaaacgggtca

SEQ ID NO: 3831537 - DNA, 25 bp, Homo sapien
taatgccagtacatgtcccagagaa

SEQ ID NO: 3831538 - DNA, 25 bp, Homo sapien
tgtataacttatcatctgcctgccc

SEQ ID NO: 3831539 - DNA, 25 bp, Homo sapien
gctccacatcagtgggaaggaaagt

SEQ ID NO: 3831540 - DNA, 25 bp, Homo sapien
taaaccacacaatagcttctcaaag

SEQ ID NO: 3831541 - DNA, 25 bp, Homo sapien
agctgaggcaacagccctttcttgg

SEQ ID NO: 3831542 - DNA, 25 bp, Homo sapien
ccattggccaatgctccacatcagt

SEQ ID NO: 3831543 - DNA, 25 bp, Homo sapien
gaaatgctatctgtcccagttggga

SEQ ID NO: 3831544 - DNA, 25 bp, Homo sapien
gctgaaatcgcacagctgcctgcat

SEQ ID NO: 3831545 - DNA, 25 bp, Homo sapien
tatccactggcttctgactcaatga

SEQ ID NO: 3831546 - DNA, 25 bp, Homo sapien
taagtgtgaagtatggccagaaagc

SEQ ID NO: 3831547 - DNA, 25 bp, Homo sapien
tagttcaactcttctggcccagatg

SEQ ID NO: 3831548 - DNA, 25 bp, Homo sapien
aattcaatccttggacacccgctgg

SEQ ID NO: 3831549 - DNA, 25 bp, Homo sapien
gatggagacatatcggactaacccc

SEQ ID NO: 3831550 - DNA, 25 bp, Homo sapien
tattttgaagggacagagcagaaca

SEQ ID NO: 3831551 - DNA, 25 bp, Homo sapien
tcctgagttgagtggcccagacaaa

SEQ ID NO: 3831552 - DNA, 25 bp, Homo sapien
taaataagctgataccactaaggca

SEQ ID NO: 3831553 - DNA, 25 bp, Homo sapien
agagttttgacagtgcggcatgcca

SEQ ID NO: 3831554 - DNA, 25 bp, Homo sapien
tgaggccgacttttgggaacaccca

SEQ ID NO: 3831555 - DNA, 25 bp, Homo sapien
cacagaataagcttacgggttgatc

SEQ ID NO: 3831556 - DNA, 25 bp, Homo sapien
caaggagtccgagatgtgtcatgcg

SEQ ID NO: 3831557 - DNA, 25 bp, Homo sapien
aatgacaagaagtgacaggccgggt

SEQ ID NO: 3831558 - DNA, 25 bp, Homo sapien
tatataagctttgatcaggcacgag

SEQ ID NO: 3831559 - DNA, 25 bp, Homo sapien
caaaaatgttaacaacgccggatgg

SEQ ID NO: 3831560 - DNA, 25 bp, Homo sapien
gacatgaatgttagaaaatcctcct

SEQ ID NO: 3831561 - DNA, 25 bp, Homo sapien
taaaccagcctaagcatggtgcttg

SEQ ID NO: 3831562 - DNA, 25 bp, Homo sapien
gcatgagggccattgtaagttcacc

SEQ ID NO: 3831563 - DNA, 25 bp, Homo sapien
tggtgccacatgctccacacaggtg

SEQ ID NO: 3831564 - DNA, 25 bp, Homo sapien
aggacgctcaggtggtgccacatgc

SEQ ID NO: 3831565 - DNA, 25 bp, Homo sapien
gggaggacgctcaggtggtgccaca

SEQ ID NO: 3831566 - DNA, 25 bp, Homo sapien
ctcaggtggtgccacatgctccaca

SEQ ID NO: 3831567 - DNA, 25 bp, Homo sapien
taaagaggaaggtgacactgtcagc

SEQ ID NO: 3831568 - DNA, 25 bp, Homo sapien
ggcactgcttcctgctatggactga

SEQ ID NO: 3831569 - DNA, 25 bp, Homo sapien
gcaaaaggtttcacgacaatgctct

SEQ ID NO: 3831570 - DNA, 25 bp, Homo sapien
gactgaacgtgtttgtcctctacag

SEQ ID NO: 3831571 - DNA, 25 bp, Homo sapien
aaaaatgtgggtcgcgcatatccca

SEQ ID NO: 3831572 - DNA, 25 bp, Homo sapien
ccaggacaagacaaacggcagtatc

SEQ ID NO: 3831573 - DNA, 25 bp, Homo sapien
gacgtttgtcatgtccacacaccat

SEQ ID NO: 3831574 - DNA, 25 bp, Homo sapien
tgtaagacagttcagaggccagcgt

SEQ ID NO: 3831575 - DNA, 25 bp, Homo sapien
cactgctgcaggacttcatggtgaa

SEQ ID NO: 3831576 - DNA, 25 bp, Homo sapien
ggcaaggcaatggctctgacactgc

SEQ ID NO: 3831577 - DNA, 25 bp, Homo sapien
tcatggtgaattccttatttggagg

SEQ ID NO: 3831578 - DNA, 25 bp, Homo sapien
ataggggccgccagaaaatatcgcc

SEQ ID NO: 3831579 - DNA, 25 bp, Homo sapien
tgtcagggctggtctagacctcttg

SEQ ID NO: 3831580 - DNA, 25 bp, Homo sapien
catcctacttcagtgtccactagta

SEQ ID NO: 3831581 - DNA, 25 bp, Homo sapien
tcatcctacttcagtgtccactagt

SEQ ID NO: 3831582 - DNA, 25 bp, Homo sapien
tagtttataacgatcaggctgtctc

SEQ ID NO: 3831583 - DNA, 25 bp, Homo sapien
tcttcaaggacaagcactaagtccc

SEQ ID NO: 3831584 - DNA, 25 bp, Homo sapien
taatcacttataaggtaccagcacc

SEQ ID NO: 3831585 - DNA, 25 bp, Homo sapien
tcacgagaccgaaagctcttcaagg

SEQ ID NO: 3831586 - DNA, 25 bp, Homo sapien
ttaacgagaggagggtcacgtccag

SEQ ID NO: 3831587 - DNA, 25 bp, Homo sapien
cagatacccaatgaccagtcaggtc

SEQ ID NO: 3831588 - DNA, 25 bp, Homo sapien
catcctggttaacgagaggagggtc

SEQ ID NO: 3831589 - DNA, 25 bp, Homo sapien
ctgaaagagccccaatgggcaagtc

SEQ ID NO: 3831590 - DNA, 25 bp, Homo sapien
gaaatgggatgcaagctctctgtcc

SEQ ID NO: 3831591 - DNA, 25 bp, Homo sapien
aaatgggatgcaagctctctgtcct

SEQ ID NO: 3831592 - DNA, 25 bp, Homo sapien
tcagtcttcccgtattcattgctag

SEQ ID NO: 3831593 - DNA, 25 bp, Homo sapien
gatacgcatgtcgtttgcaaataaa

SEQ ID NO: 3831594 - DNA, 25 bp, Homo sapien
tatgtttcccctgtatctggcaacc

SEQ ID NO: 3831595 - DNA, 25 bp, Homo sapien
ggtattttctgcacagatacgcatg

SEQ ID NO: 3831596 - DNA, 25 bp, Homo sapien
gcaaggtaccggcatctgtcatcca

SEQ ID NO: 3831597 - DNA, 25 bp, Homo sapien
ggtaactgacaactgatatgatgga

SEQ ID NO: 3831598 - DNA, 25 bp, Homo sapien
caactgatatgatggatgacagcaa

SEQ ID NO: 3831599 - DNA, 25 bp, Homo sapien
atggatgacagcaaggtaccggcat

SEQ ID NO: 3831600 - DNA, 25 bp, Homo sapien
tagaacggttgcctctgattaccac

SEQ ID NO: 3831601 - DNA, 25 bp, Homo sapien
gccaaagccaagtgtttacgcctga

SEQ ID NO: 3831602 - DNA, 25 bp, Homo sapien
tggcatccacctacagactccggaa

SEQ ID NO: 3831603 - DNA, 25 bp, Homo sapien
cagcccaggtgtagatctcatgaaa

SEQ ID NO: 3831604 - DNA, 25 bp, Homo sapien
cactccttcacagacagcaaccttg

SEQ ID NO: 3831605 - DNA, 25 bp, Homo sapien
ctccttcacagacagcaaccttgcc

SEQ ID NO: 3831606 - DNA, 25 bp, Homo sapien
actccttcacagacagcaaccttgc

SEQ ID NO: 3831607 - DNA, 25 bp, Homo sapien
ccactccttcacagacagcaacctt

SEQ ID NO: 3831608 - DNA, 25 bp, Homo sapien
taaatatttactattttttcacaca

SEQ ID NO: 3831609 - DNA, 25 bp, Homo sapien
tgttccacaaaaggtacagtaaata

SEQ ID NO: 3831610 - DNA, 25 bp, Homo sapien
ctgttccacaaaaggtacagtaaat

SEQ ID NO: 3831611 - DNA, 25 bp, Homo sapien
aaatatttactattttttcacacat

SEQ ID NO: 3831612 - DNA, 25 bp, Homo sapien
tcctaaacctgccaattcaggcggc

SEQ ID NO: 3831613 - DNA, 25 bp, Homo sapien
tggtatccaaacactcccatagctc

SEQ ID NO: 3831614 - DNA, 25 bp, Homo sapien
tccatcatccagattcgtgtacagt

SEQ ID NO: 3831615 - DNA, 25 bp, Homo sapien
cagattcgtgtacagtgcatttcca

SEQ ID NO: 3831616 - DNA, 25 bp, Homo sapien
tgtgattctaaacccacggcactca

SEQ ID NO: 3831617 - DNA, 25 bp, Homo sapien
ctgtgattctaaacccacggcactc

SEQ ID NO: 3831618 - DNA, 25 bp, Homo sapien
gtgattctaaacccacggcactcac

SEQ ID NO: 3831619 - DNA, 25 bp, Homo sapien
actgtgattctaaacccacggcact

SEQ ID NO: 3831620 - DNA, 25 bp, Homo sapien
aggactcttgtctcttatgccacag

SEQ ID NO: 3831621 - DNA, 25 bp, Homo sapien
agaggcactttcgtgcgctgttggt

SEQ ID NO: 3831622 - DNA, 25 bp, Homo sapien
taatacattaagctcccctgcatcc

SEQ ID NO: 3831623 - DNA, 25 bp, Homo sapien
taaattggcacaacatttgagagca

SEQ ID NO: 3831624 - DNA, 25 bp, Homo sapien
aaggggagttccttatgtggcagcc

SEQ ID NO: 3831625 - DNA, 25 bp, Homo sapien
aacaagccccttgctaaccttaatg

SEQ ID NO: 3831626 - DNA, 25 bp, Homo sapien
caggcggtccttagaacttcccagg

SEQ ID NO: 3831627 - DNA, 25 bp, Homo sapien
ttgctaaccttaatgaggctcttcc

SEQ ID NO: 3831628 - DNA, 25 bp, Homo sapien
ccacggctggtaagaaagagaaaca

SEQ ID NO: 3831629 - DNA, 25 bp, Homo sapien
agaggatggcccattcccacggctg

SEQ ID NO: 3831630 - DNA, 25 bp, Homo sapien
tgatggtaacgttcaaggcaacagt

SEQ ID NO: 3831631 - DNA, 25 bp, Homo sapien
tcatgacttcatggcaacggtggtg

SEQ ID NO: 3831632 - DNA, 25 bp, Homo sapien
gacacccaataaaccagagccaatg

SEQ ID NO: 3831633 - DNA, 25 bp, Homo sapien
tttaatccccgcagtagccctggag

SEQ ID NO: 3831634 - DNA, 25 bp, Homo sapien
tagccctactactgtccatggtaga

SEQ ID NO: 3831635 - DNA, 25 bp, Homo sapien
tatctcagtaggcacacatggctag

SEQ ID NO: 3831636 - DNA, 25 bp, Homo sapien
ggggcagagctttgtggtgccacag

SEQ ID NO: 3831637 - DNA, 25 bp, Homo sapien
acttggctgatctacttggactcaa

SEQ ID NO: 3831638 - DNA, 25 bp, Homo sapien
aagccccagggtgccacaaagcagc

SEQ ID NO: 3831639 - DNA, 25 bp, Homo sapien
ttgtggtgccacagcaccagaaatg

SEQ ID NO: 3831640 - DNA, 25 bp, Homo sapien
caataacctccacgcaggagaggga

SEQ ID NO: 3831641 - DNA, 25 bp, Homo sapien
accaacgaccttgaaatccgaccag

SEQ ID NO: 3831642 - DNA, 25 bp, Homo sapien
gccctccacaccaacgaccttgaaa

SEQ ID NO: 3831643 - DNA, 25 bp, Homo sapien
ggagagggaggaggcgccctccaca

SEQ ID NO: 3831644 - DNA, 25 bp, Homo sapien
ctatcaatcactccctgaaatatca

SEQ ID NO: 3831645 - DNA, 25 bp, Homo sapien
cacacacacctatcaatcactccct

SEQ ID NO: 3831646 - DNA, 25 bp, Homo sapien
acacctatcaatcactccctgaaat

SEQ ID NO: 3831647 - DNA, 25 bp, Homo sapien
tcaatcactccctgaaatatcatat

SEQ ID NO: 3831648 - DNA, 25 bp, Homo sapien
catcttctcagtaggtgcctttagg

SEQ ID NO: 3831649 - DNA, 25 bp, Homo sapien
catccacctcgctgatgcaacagcg

SEQ ID NO: 3831650 - DNA, 25 bp, Homo sapien
tgcctttaggataggcacatccacc

SEQ ID NO: 3831651 - DNA, 25 bp, Homo sapien
gatttagaccctttgctactaccag

SEQ ID NO: 3831652 - DNA, 25 bp, Homo sapien
gaccagaagcaggcctaaccccaaa

SEQ ID NO: 3831653 - DNA, 25 bp, Homo sapien
ctgcctgacagcacccatcctccat

SEQ ID NO: 3831654 - DNA, 25 bp, Homo sapien
ttctgcctgacagcacccatcctcc

SEQ ID NO: 3831655 - DNA, 25 bp, Homo sapien
cagaccagaagcaggcctaacccca

SEQ ID NO: 3831656 - DNA, 25 bp, Homo sapien
gaggtccttcctctaatttgcccag

SEQ ID NO: 3831657 - DNA, 25 bp, Homo sapien
caattgcatctgttccaccgtatag

SEQ ID NO: 3831658 - DNA, 25 bp, Homo sapien
cactaacacatctgggagggtctgt

SEQ ID NO: 3831659 - DNA, 25 bp, Homo sapien
tctccatatgtagagaataacccca

SEQ ID NO: 3831660 - DNA, 25 bp, Homo sapien
tctgggatagaaattctagcgctag

SEQ ID NO: 3831661 - DNA, 25 bp, Homo sapien
gaaattctagcgctagttgcagata

SEQ ID NO: 3831662 - DNA, 25 bp, Homo sapien
ccttaaatccatgtcaatctgggat

SEQ ID NO: 3831663 - DNA, 25 bp, Homo sapien
ccatgtcaatctgggatagaaattc

SEQ ID NO: 3831664 - DNA, 25 bp, Homo sapien
tgcacacatggcctgtttaaaaggg

SEQ ID NO: 3831665 - DNA, 25 bp, Homo sapien
gaaaaagatgtctccggctctatcc

SEQ ID NO: 3831666 - DNA, 25 bp, Homo sapien
tgaaaatgtctgacggccaggtagg

SEQ ID NO: 3831667 - DNA, 25 bp, Homo sapien
tcccttattacaggcaagatcagaa

SEQ ID NO: 3831668 - DNA, 25 bp, Homo sapien
atggcaccgcttgtgcaccacaaag

SEQ ID NO: 3831669 - DNA, 25 bp, Homo sapien
gaggctggacccttgtcagcgccag

SEQ ID NO: 3831670 - DNA, 25 bp, Homo sapien
ccagggcaggagaatgtgacaaatt

SEQ ID NO: 3831671 - DNA, 25 bp, Homo sapien
gcaccgcttgtgcaccacaaagcag

SEQ ID NO: 3831672 - DNA, 25 bp, Homo sapien
caaggcagcattgactgtggacaga

SEQ ID NO: 3831673 - DNA, 25 bp, Homo sapien
taatcacaaggcagcattgactgtg

SEQ ID NO: 3831674 - DNA, 25 bp, Homo sapien
aaagcaatcgatgcccattacttac

SEQ ID NO: 3831675 - DNA, 25 bp, Homo sapien
cagagaaaagcaatcgatgcccatt

SEQ ID NO: 3831676 - DNA, 25 bp, Homo sapien
gagtggtatcaacagctcatcagca

SEQ ID NO: 3831677 - DNA, 25 bp, Homo sapien
tcattgacccaaaagggctgccaca

SEQ ID NO: 3831678 - DNA, 25 bp, Homo sapien
caggatgtcggcaatgtgtccctca

SEQ ID NO: 3831679 - DNA, 25 bp, Homo sapien
gcatcatcatggacccacggttctt

SEQ ID NO: 3831680 - DNA, 25 bp, Homo sapien
gggtagaggatgcaaccaagcacat

SEQ ID NO: 3831681 - DNA, 25 bp, Homo sapien
tcctttatcgtggatggagccttgt

SEQ ID NO: 3831682 - DNA, 25 bp, Homo sapien
tttctgcttcacgaacttgctgcac

SEQ ID NO: 3831683 - DNA, 25 bp, Homo sapien
cttgtccaaggtcaccgcctgtgtg

SEQ ID NO: 3831684 - DNA, 25 bp, Homo sapien
taatttatagatgggacgcatcagc

SEQ ID NO: 3831685 - DNA, 25 bp, Homo sapien
gcaggctccagaaattacggtcttc

SEQ ID NO: 3831686 - DNA, 25 bp, Homo sapien
tctgggaaattgtgaggctggtcct

SEQ ID NO: 3831687 - DNA, 25 bp, Homo sapien
tagaatcctagaccactggaggtgg

SEQ ID NO: 3831688 - DNA, 25 bp, Homo sapien
tgcagatctcactggacacgaagag

SEQ ID NO: 3831689 - DNA, 25 bp, Homo sapien
gatctcactggacacgaagagggtg

SEQ ID NO: 3831690 - DNA, 25 bp, Homo sapien
cagatctcactggacacgaagaggg

SEQ ID NO: 3831691 - DNA, 25 bp, Homo sapien
ctgcagatctcactggacacgaaga

SEQ ID NO: 3831692 - DNA, 25 bp, Homo sapien
tcatgcagcatcctaggtgtggagt

SEQ ID NO: 3831693 - DNA, 25 bp, Homo sapien
tgaacagacaggtattgaagagcta

SEQ ID NO: 3831694 - DNA, 25 bp, Homo sapien
tttaccaagaacctcactaggacgc

SEQ ID NO: 3831695 - DNA, 25 bp, Homo sapien
tgtggagtgatcaaacaacggatgc

SEQ ID NO: 3831696 - DNA, 25 bp, Homo sapien
gccagcagctcttagcccgggtatg

SEQ ID NO: 3831697 - DNA, 25 bp, Homo sapien
ccatccatgttaagcgagtcttttc

SEQ ID NO: 3831698 - DNA, 25 bp, Homo sapien
ccgggtatgccagcctctgtagcat

SEQ ID NO: 3831699 - DNA, 25 bp, Homo sapien
gatcttagttcattagccaggccag

SEQ ID NO: 3831700 - DNA, 25 bp, Homo sapien
taacacatcagtactgccatgccca

SEQ ID NO: 3831701 - DNA, 25 bp, Homo sapien
ctaccaccgtgagtaacacatcagt

SEQ ID NO: 3831702 - DNA, 25 bp, Homo sapien
agtaacacatcagtactgccatgcc

SEQ ID NO: 3831703 - DNA, 25 bp, Homo sapien
ctcttgtactaccaccgtgagtaac

SEQ ID NO: 3831704 - DNA, 25 bp, Homo sapien
ctgtgcccagaaacggtgctggata

SEQ ID NO: 3831705 - DNA, 25 bp, Homo sapien
gacaaagacagatgattgttccctt

SEQ ID NO: 3831706 - DNA, 25 bp, Homo sapien
cggtgctggataaatagttgtggaa

SEQ ID NO: 3831707 - DNA, 25 bp, Homo sapien
aaggacaaagacagatgattgttcc

SEQ ID NO: 3831708 - DNA, 25 bp, Homo sapien
ccccagaggtcattgtacctgttgg

SEQ ID NO: 3831709 - DNA, 25 bp, Homo sapien
cttggtccccagaggtcattgtacc

SEQ ID NO: 3831710 - DNA, 25 bp, Homo sapien
ggtccccagaggtcattgtacctgt

SEQ ID NO: 3831711 - DNA, 25 bp, Homo sapien
gaggtcattgtacctgttgggacca

SEQ ID NO: 3831712 - DNA, 25 bp, Homo sapien
catcctacatcgagaggcactggag

SEQ ID NO: 3831713 - DNA, 25 bp, Homo sapien
gagccagcgtcagtggagcatgcca

SEQ ID NO: 3831714 - DNA, 25 bp, Homo sapien
tcagtggagcatgccaacggttcat

SEQ ID NO: 3831715 - DNA, 25 bp, Homo sapien
tgccaacggttcatcctacatcgag

SEQ ID NO: 3831716 - DNA, 25 bp, Homo sapien
ggctggagtacgtgtggatcttaaa

SEQ ID NO: 3831717 - DNA, 25 bp, Homo sapien
cacagtggtcacaaaacgtggggct

SEQ ID NO: 3831718 - DNA, 25 bp, Homo sapien
tacgtgtggatcttaaacttgtgtt

SEQ ID NO: 3831719 - DNA, 25 bp, Homo sapien
gtggatgagtccatacagcagtgac

SEQ ID NO: 3831720 - DNA, 25 bp, Homo sapien
ccaaaccaagtggaagcagcccttc

SEQ ID NO: 3831721 - DNA, 25 bp, Homo sapien
agatgcccccagagagaaaaagtac

SEQ ID NO: 3831722 - DNA, 25 bp, Homo sapien
tggaccccaaaccaagtggaagcag

SEQ ID NO: 3831723 - DNA, 25 bp, Homo sapien
gcagcccttcccattgcttctgcca

SEQ ID NO: 3831724 - DNA, 25 bp, Homo sapien
gcagcgcttgtgcacattcatcatg

SEQ ID NO: 3831725 - DNA, 25 bp, Homo sapien
ggcgctccgtgtggtccgtgccaca

SEQ ID NO: 3831726 - DNA, 25 bp, Homo sapien
ccctgtcgatgtgggcctggatgta

SEQ ID NO: 3831727 - DNA, 25 bp, Homo sapien
tgggaacattcatcacgcagcgctt

SEQ ID NO: 3831728 - DNA, 25 bp, Homo sapien
gaaaagtttgcggaagaagcaagct

SEQ ID NO: 3831729 - DNA, 25 bp, Homo sapien
ggaactcagacgtctcctctctgaa

SEQ ID NO: 3831730 - DNA, 25 bp, Homo sapien
tctgctatctgagtaaaggaaatgc

SEQ ID NO: 3831731 - DNA, 25 bp, Homo sapien
gatcctgaggaagttagaagtccaa

SEQ ID NO: 3831732 - DNA, 25 bp, Homo sapien
ggtttggagagaaagtcttctccat

SEQ ID NO: 3831733 - DNA, 25 bp, Homo sapien
ctaacacagggaggtttggagagaa

SEQ ID NO: 3831734 - DNA, 25 bp, Homo sapien
ggaggtttggagagaaagtcttctc

SEQ ID NO: 3831735 - DNA, 25 bp, Homo sapien
cacagggaggtttggagagaaagtc

SEQ ID NO: 3831736 - DNA, 25 bp, Homo sapien
taagcgtgcatgtcccagatgtgcc

SEQ ID NO: 3831737 - DNA, 25 bp, Homo sapien
gtgggacagggttgccagattcaca

SEQ ID NO: 3831738 - DNA, 25 bp, Homo sapien
gcatgtcccggttgtgccagggtaa

SEQ ID NO: 3831739 - DNA, 25 bp, Homo sapien
tcccggatgatgctagagtagtggt

SEQ ID NO: 3831740 - DNA, 25 bp, Homo sapien
tctctgctcgccagatgaggacact

SEQ ID NO: 3831741 - DNA, 25 bp, Homo sapien
gacttgaacacctatcttcctgaag

SEQ ID NO: 3831742 - DNA, 25 bp, Homo sapien
aggtacaggctactctctctgctcg

SEQ ID NO: 3831743 - DNA, 25 bp, Homo sapien
gaagacaaagcctaggaccgcttct

SEQ ID NO: 3831744 - DNA, 25 bp, Homo sapien
cataccagatatgcagagttctgag

SEQ ID NO: 3831745 - DNA, 25 bp, Homo sapien
agatgggagaagcattgaatcggct

SEQ ID NO: 3831746 - DNA, 25 bp, Homo sapien
ggttgagaccgaataaatgagatgg

SEQ ID NO: 3831747 - DNA, 25 bp, Homo sapien
tgaatcggctaccaggatcaagctg

SEQ ID NO: 3831748 - DNA, 25 bp, Homo sapien
tacactcaaacagctgaccattgct

SEQ ID NO: 3831749 - DNA, 25 bp, Homo sapien
gtttaagcaccaagcagtgacagct

SEQ ID NO: 3831750 - DNA, 25 bp, Homo sapien
tttaagcaccaagcagtgacagctg

SEQ ID NO: 3831751 - DNA, 25 bp, Homo sapien
aaaagcagtttttgcattaatactg

SEQ ID NO: 3831752 - DNA, 25 bp, Homo sapien
gaaaaagcagtttttgcattaatac

SEQ ID NO: 3831753 - DNA, 25 bp, Homo sapien
agcagtttttgcattaatactgtcc

SEQ ID NO: 3831754 - DNA, 25 bp, Homo sapien
agtttttgcattaatactgtccaac

SEQ ID NO: 3831755 - DNA, 25 bp, Homo sapien
tgctctcacttttgggatcgggaat

SEQ ID NO: 3831756 - DNA, 25 bp, Homo sapien
tcagtttcagttttacgtagggatc

SEQ ID NO: 3831757 - DNA, 25 bp, Homo sapien
gagcatttgatggttttggtcttct

SEQ ID NO: 3831758 - DNA, 25 bp, Homo sapien
tacgtagggatctgacaggccattg

SEQ ID NO: 3831759 - DNA, 25 bp, Homo sapien
caaaggacaaagatcccatgaagtc

SEQ ID NO: 3831760 - DNA, 25 bp, Homo sapien
aatcccaaatctctactgacagtct

SEQ ID NO: 3831761 - DNA, 25 bp, Homo sapien
gtctttgtccgattctttcagctga

SEQ ID NO: 3831762 - DNA, 25 bp, Homo sapien
ctgctggtcaaatcccaatcccaaa

SEQ ID NO: 3831763 - DNA, 25 bp, Homo sapien
tggccagacttgctaaggactccca

SEQ ID NO: 3831764 - DNA, 25 bp, Homo sapien
tctcccaaagttatagtgccaggtt

SEQ ID NO: 3831765 - DNA, 25 bp, Homo sapien
ctttcaggtgaagtgtacaagccac

SEQ ID NO: 3831766 - DNA, 25 bp, Homo sapien
aggactcccaaggaagcggtagctt

SEQ ID NO: 3831767 - DNA, 25 bp, Homo sapien
tcctcggtcaccaggagctcacaaa

SEQ ID NO: 3831768 - DNA, 25 bp, Homo sapien
tcagaaagtaccacatgcagcatat

SEQ ID NO: 3831769 - DNA, 25 bp, Homo sapien
taagccccatttaaagctatcctgc

SEQ ID NO: 3831770 - DNA, 25 bp, Homo sapien
gtgcatgagaaagtctaagtccatt

SEQ ID NO: 3831771 - DNA, 25 bp, Homo sapien
gaagacaatttgagcctctacgcct

SEQ ID NO: 3831772 - DNA, 25 bp, Homo sapien
tcttacgcagcttccaaaaatgggc

SEQ ID NO: 3831773 - DNA, 25 bp, Homo sapien
tatctttgctggaaatcgagaaggg

SEQ ID NO: 3831774 - DNA, 25 bp, Homo sapien
tcgagaagggtgctatccacacagc

SEQ ID NO: 3831775 - DNA, 25 bp, Homo sapien
ggcacaggcacattgaagtactcgc

SEQ ID NO: 3831776 - DNA, 25 bp, Homo sapien
gcacaggcacattgaagtactcgcc

SEQ ID NO: 3831777 - DNA, 25 bp, Homo sapien
gtggcacaggcacattgaagtactc

SEQ ID NO: 3831778 - DNA, 25 bp, Homo sapien
tggcacaggcacattgaagtactcg

SEQ ID NO: 3831779 - DNA, 25 bp, Homo sapien
aaatccttgggatatcacgcctgta

SEQ ID NO: 3831780 - DNA, 25 bp, Homo sapien
tcttgctgtgtacgatgtgccctca

SEQ ID NO: 3831781 - DNA, 25 bp, Homo sapien
taactgggctcttgggataaatgct

SEQ ID NO: 3831782 - DNA, 25 bp, Homo sapien
ggaatacactcactaatggctgcct

SEQ ID NO: 3831783 - DNA, 25 bp, Homo sapien
taaaatcggtcagtttcatccggtc

SEQ ID NO: 3831784 - DNA, 25 bp, Homo sapien
ggagacagtgttggtcgtcttttct

SEQ ID NO: 3831785 - DNA, 25 bp, Homo sapien
tttggagacagtgttggtcgtcttt

SEQ ID NO: 3831786 - DNA, 25 bp, Homo sapien
cggtcagtttcatccggtctctgtt

SEQ ID NO: 3831787 - DNA, 25 bp, Homo sapien
atgtgcctgtgttgttagatgttcc

SEQ ID NO: 3831788 - DNA, 25 bp, Homo sapien
tgtgcctgtgttgttagatgttcct

SEQ ID NO: 3831789 - DNA, 25 bp, Homo sapien
ctaggacgtccgtcccataggaaca

SEQ ID NO: 3831790 - DNA, 25 bp, Homo sapien
tccgtcccataggaacagcaaatgt

SEQ ID NO: 3831791 - DNA, 25 bp, Homo sapien
ttggggactcccataaggctgaagc

SEQ ID NO: 3831792 - DNA, 25 bp, Homo sapien
tgcggaagagcagtaagtcacttca

SEQ ID NO: 3831793 - DNA, 25 bp, Homo sapien
gcggaagagcagtaagtcacttcat

SEQ ID NO: 3831794 - DNA, 25 bp, Homo sapien
ggaagagcagtaagtcacttcattg

SEQ ID NO: 3831795 - DNA, 25 bp, Homo sapien
gctgcggaagagcagtaagtcactt

SEQ ID NO: 3831796 - DNA, 25 bp, Homo sapien
taccacgtggcaggtatcctgacca

SEQ ID NO: 3831797 - DNA, 25 bp, Homo sapien
caaatggaggttaacttctgcatcc

SEQ ID NO: 3831798 - DNA, 25 bp, Homo sapien
tgcaccgaagctaatcaaatggagg

SEQ ID NO: 3831799 - DNA, 25 bp, Homo sapien
ggatttcgagagaaacctgggtgca

SEQ ID NO: 3831800 - DNA, 25 bp, Homo sapien
ctggggctatctcctgcatggattc

SEQ ID NO: 3831801 - DNA, 25 bp, Homo sapien
ctctttgaggatccccttgatctct

SEQ ID NO: 3831802 - DNA, 25 bp, Homo sapien
ccatctctttgaggatccccttgat

SEQ ID NO: 3831803 - DNA, 25 bp, Homo sapien
tctcctgcatggattcttcccagtc

SEQ ID NO: 3831804 - DNA, 25 bp, Homo sapien
ctccaccatagtgcactccacgtca

SEQ ID NO: 3831805 - DNA, 25 bp, Homo sapien
aggcagggccaacacccgcttctcc

SEQ ID NO: 3831806 - DNA, 25 bp, Homo sapien
catctgtgccttttcgttctgaaag

SEQ ID NO: 3831807 - DNA, 25 bp, Homo sapien
tcaggatcttcacagcatagagctc

SEQ ID NO: 3831808 - DNA, 25 bp, Homo sapien
tatctaagttgagacagcatctgtc

SEQ ID NO: 3831809 - DNA, 25 bp, Homo sapien
tgctaagatagctttggccaaagcc

SEQ ID NO: 3831810 - DNA, 25 bp, Homo sapien
caaaggtctagagggctgaatggaa

SEQ ID NO: 3831811 - DNA, 25 bp, Homo sapien
gaaccatctagatccacaagctgtg

SEQ ID NO: 3831812 - DNA, 25 bp, Homo sapien
tggacggagactgtcctttgcctga

SEQ ID NO: 3831813 - DNA, 25 bp, Homo sapien
tgcctgatgatgtcaatgaatccat

SEQ ID NO: 3831814 - DNA, 25 bp, Homo sapien
acggagactgtcctttgcctgatga

SEQ ID NO: 3831815 - DNA, 25 bp, Homo sapien
ttagttgatttactggacggagact

SEQ ID NO: 3831816 - DNA, 25 bp, Homo sapien
gaagtaacttctgtccttcaatgac

SEQ ID NO: 3831817 - DNA, 25 bp, Homo sapien
ctgcctgtgcccactggcagttggg

SEQ ID NO: 3831818 - DNA, 25 bp, Homo sapien
cgggctgacaattgtccctgagaaa

SEQ ID NO: 3831819 - DNA, 25 bp, Homo sapien
aattgcatgaatgtgccgggctgac

SEQ ID NO: 3831820 - DNA, 25 bp, Homo sapien
cccctccatagcacccttaaatttg

SEQ ID NO: 3831821 - DNA, 25 bp, Homo sapien
ccatagcacccttaaatttgccttt

SEQ ID NO: 3831822 - DNA, 25 bp, Homo sapien
ctccatagcacccttaaatttgcct

SEQ ID NO: 3831823 - DNA, 25 bp, Homo sapien
ccctccatagcacccttaaatttgc

SEQ ID NO: 3831824 - DNA, 25 bp, Homo sapien
gttcctgatttgatggctattattg

SEQ ID NO: 3831825 - DNA, 25 bp, Homo sapien
ctttctgcttggaagaactcggctt

SEQ ID NO: 3831826 - DNA, 25 bp, Homo sapien
tctgcttggaagaactcggcttgcc

SEQ ID NO: 3831827 - DNA, 25 bp, Homo sapien
cgttgaagagaaccaaaacacttgt

SEQ ID NO: 3831828 - DNA, 25 bp, Homo sapien
tgcacgttgaagagaaccaaaacac

SEQ ID NO: 3831829 - DNA, 25 bp, Homo sapien
gctgtgtaagccctgtttctgatag

SEQ ID NO: 3831830 - DNA, 25 bp, Homo sapien
tggcccttgggcaacaccaatatgt

SEQ ID NO: 3831831 - DNA, 25 bp, Homo sapien
ttggagaagttattcaacacctggg

SEQ ID NO: 3831832 - DNA, 25 bp, Homo sapien
gatagcacaactagcacatagcagg

SEQ ID NO: 3831833 - DNA, 25 bp, Homo sapien
aagaggacagcaaacagcaacatta

SEQ ID NO: 3831834 - DNA, 25 bp, Homo sapien
ctggaagaggacagcaaacagcaac

SEQ ID NO: 3831835 - DNA, 25 bp, Homo sapien
gaggacagcaaacagcaacattagc

SEQ ID NO: 3831836 - DNA, 25 bp, Homo sapien
ggacagcaaacagcaacattagcat

SEQ ID NO: 3831837 - DNA, 25 bp, Homo sapien
cattcacgtactccatcacaaagta

SEQ ID NO: 3831838 - DNA, 25 bp, Homo sapien
cggccgacttgctggatgtgataca

SEQ ID NO: 3831839 - DNA, 25 bp, Homo sapien
gggctccttgaaccggccgacttgc

SEQ ID NO: 3831840 - DNA, 25 bp, Homo sapien
tggatgtgatacatgaggtcgcccc

SEQ ID NO: 3831841 - DNA, 25 bp, Homo sapien
tgtaagaagaacagaccgatggcaa

SEQ ID NO: 3831842 - DNA, 25 bp, Homo sapien
agaacagaccgatggcaatttctgc

SEQ ID NO: 3831843 - DNA, 25 bp, Homo sapien
tgcccttactctgtaagaagaacag

SEQ ID NO: 3831844 - DNA, 25 bp, Homo sapien
cgatggcaatttctgcagcgtaaaa

SEQ ID NO: 3831845 - DNA, 25 bp, Homo sapien
tatcccgcagttaaggcaaaaggcc

SEQ ID NO: 3831846 - DNA, 25 bp, Homo sapien
tctggagctcctagcttgaagcacc

SEQ ID NO: 3831847 - DNA, 25 bp, Homo sapien
acccagaagagtgcctagaatatag

SEQ ID NO: 3831848 - DNA, 25 bp, Homo sapien
caaaaggcccaggactctcaagtca

SEQ ID NO: 3831849 - DNA, 25 bp, Homo sapien
agatgaggtttcaccatgttagcca

SEQ ID NO: 3831850 - DNA, 25 bp, Homo sapien
gacctcaggcaatccgcctgcctcg

SEQ ID NO: 3831851 - DNA, 25 bp, Homo sapien
agctaatattcgtattttttagtag

SEQ ID NO: 3831852 - DNA, 25 bp, Homo sapien
ttagccaggctggtcaccaactcct

SEQ ID NO: 3831853 - DNA, 25 bp, Homo sapien
ttacacatgccaaaatcggcaatct

SEQ ID NO: 3831854 - DNA, 25 bp, Homo sapien
gaatgtcttggttgtcaccccatcc

SEQ ID NO: 3831855 - DNA, 25 bp, Homo sapien
gtgtccctcagaatcgagcatcacg

SEQ ID NO: 3831856 - DNA, 25 bp, Homo sapien
ggcgatgtagtctggagtgccacag

SEQ ID NO: 3831857 - DNA, 25 bp, Homo sapien
cccaccaatccacggacttcccata

SEQ ID NO: 3831858 - DNA, 25 bp, Homo sapien
tgcccaccaatccacggacttccca

SEQ ID NO: 3831859 - DNA, 25 bp, Homo sapien
agccaacatttcatacagcaggact

SEQ ID NO: 3831860 - DNA, 25 bp, Homo sapien
cccagccaacatttcatacagcagg

SEQ ID NO: 3831861 - DNA, 25 bp, Homo sapien
cgttgtgttccatgatggattggaa

SEQ ID NO: 3831862 - DNA, 25 bp, Homo sapien
cttgggataggctacgttgtgttcc

SEQ ID NO: 3831863 - DNA, 25 bp, Homo sapien
agcttccttggacatagacttggga

SEQ ID NO: 3831864 - DNA, 25 bp, Homo sapien
catagacttgggataggctacgttg

SEQ ID NO: 3831865 - DNA, 25 bp, Homo sapien
gaacccactgattaaggcacggcca

SEQ ID NO: 3831866 - DNA, 25 bp, Homo sapien
tgggttcctaatgcacctctgggac

SEQ ID NO: 3831867 - DNA, 25 bp, Homo sapien
tgaaaagtctgcaagcatcccacag

SEQ ID NO: 3831868 - DNA, 25 bp, Homo sapien
tgttctaacctgtaccactgggtgg

SEQ ID NO: 3831869 - DNA, 25 bp, Homo sapien
gaattggccaaatgagaacgtctga

SEQ ID NO: 3831870 - DNA, 25 bp, Homo sapien
gagggcaagctccaactacagaggg

SEQ ID NO: 3831871 - DNA, 25 bp, Homo sapien
gataacacaatagcgtcagcactag

SEQ ID NO: 3831872 - DNA, 25 bp, Homo sapien
tgtaagaatgacaggccaatgtggc

SEQ ID NO: 3831873 - DNA, 25 bp, Homo sapien
cagaagcccagagatgcaaaggaag

SEQ ID NO: 3831874 - DNA, 25 bp, Homo sapien
aagtggcttaagatcttgcacctag

SEQ ID NO: 3831875 - DNA, 25 bp, Homo sapien
aagcccagagatgcaaaggaagtgg

SEQ ID NO: 3831876 - DNA, 25 bp, Homo sapien
aaggaagtggcttaagatcttgcac

SEQ ID NO: 3831877 - DNA, 25 bp, Homo sapien
aaactgctaattggagcaggagctg

SEQ ID NO: 3831878 - DNA, 25 bp, Homo sapien
tcctccatgacccatttagaacccc

SEQ ID NO: 3831879 - DNA, 25 bp, Homo sapien
tccatgacccatttagaacccccag

SEQ ID NO: 3831880 - DNA, 25 bp, Homo sapien
agggaaactgctaattggagcagga

SEQ ID NO: 3831881 - DNA, 25 bp, Homo sapien
aataacatcaataacggcttccgtg

SEQ ID NO: 3831882 - DNA, 25 bp, Homo sapien
gatgccaagcaaagaaaaggtactg

SEQ ID NO: 3831883 - DNA, 25 bp, Homo sapien
ttcaggctccgtgctaaaggcttcc

SEQ ID NO: 3831884 - DNA, 25 bp, Homo sapien
tctgtctaagcaggaggatgccaag

SEQ ID NO: 3831885 - DNA, 25 bp, Homo sapien
gagagaaagaaaaacattgaatttg

SEQ ID NO: 3831886 - DNA, 25 bp, Homo sapien
ttcgagagaaagaaaaacattgaat

SEQ ID NO: 3831887 - DNA, 25 bp, Homo sapien
tcgagagaaagaaaaacattgaatt

SEQ ID NO: 3831888 - DNA, 25 bp, Homo sapien
cttcgagagaaagaaaaacattgaa

SEQ ID NO: 3831889 - DNA, 25 bp, Homo sapien
tgatatcacgttcgccttcaggtcc

SEQ ID NO: 3831890 - DNA, 25 bp, Homo sapien
aatataccggaaaaatgcatgctct

SEQ ID NO: 3831891 - DNA, 25 bp, Homo sapien
cagacgtttgcctgggtgtttggtc

SEQ ID NO: 3831892 - DNA, 25 bp, Homo sapien
ggatctctttgcgttcaagtttctc

SEQ ID NO: 3831893 - DNA, 25 bp, Homo sapien
cccctcagggagcatttggaaaaca

SEQ ID NO: 3831894 - DNA, 25 bp, Homo sapien
tctttatagagactaagctgggcca

SEQ ID NO: 3831895 - DNA, 25 bp, Homo sapien
gaataccttgtgtgtgaatacccgg

SEQ ID NO: 3831896 - DNA, 25 bp, Homo sapien
aattcaataggcatcgtcgtttcca

SEQ ID NO: 3831897 - DNA, 25 bp, Homo sapien
gaggtgagagcatcgcatgagccct

SEQ ID NO: 3831898 - DNA, 25 bp, Homo sapien
gtgagagcatcgcatgagccctgga

SEQ ID NO: 3831899 - DNA, 25 bp, Homo sapien
attaggcagacatggtggtacactc

SEQ ID NO: 3831900 - DNA, 25 bp, Homo sapien
agagcatcgcatgagccctggaggt

SEQ ID NO: 3831901 - DNA, 25 bp, Homo sapien
gaagtatgtagcacagcctgatcac

SEQ ID NO: 3831902 - DNA, 25 bp, Homo sapien
cagaacagttgagggatctcgttga

SEQ ID NO: 3831903 - DNA, 25 bp, Homo sapien
taacagctaccttttcctgagtgct

SEQ ID NO: 3831904 - DNA, 25 bp, Homo sapien
tgctatcacgcccaccaacgtttgt

SEQ ID NO: 3831905 - DNA, 25 bp, Homo sapien
tgatgttctactgatttgatgaggg

SEQ ID NO: 3831906 - DNA, 25 bp, Homo sapien
tcaggaatcaacaagagcctccctg

SEQ ID NO: 3831907 - DNA, 25 bp, Homo sapien
agagcctccctgagcggttgatgtt

SEQ ID NO: 3831908 - DNA, 25 bp, Homo sapien
agagcataggaaagggcttcgggca

SEQ ID NO: 3831909 - DNA, 25 bp, Homo sapien
agactaagacagacacacaatgtca

SEQ ID NO: 3831910 - DNA, 25 bp, Homo sapien
tgcagcaagctgtgaccacgacact

SEQ ID NO: 3831911 - DNA, 25 bp, Homo sapien
caagctgtgaccacgacactgcagc

SEQ ID NO: 3831912 - DNA, 25 bp, Homo sapien
tgtgtgtgtaaagacagattttgcc

SEQ ID NO: 3831913 - DNA, 25 bp, Homo sapien
caggatcactggtgtggtgtacaag

SEQ ID NO: 3831914 - DNA, 25 bp, Homo sapien
ggtgaccctggcatttttggcctga

SEQ ID NO: 3831915 - DNA, 25 bp, Homo sapien
ggacaatagtggaaacagtacaacc

SEQ ID NO: 3831916 - DNA, 25 bp, Homo sapien
gaggaacacgaggaggagatcctat

SEQ ID NO: 3831917 - DNA, 25 bp, Homo sapien
ggagtgagagtgatgccattttcag

SEQ ID NO: 3831918 - DNA, 25 bp, Homo sapien
aggaaatggcctttgagcaagacct

SEQ ID NO: 3831919 - DNA, 25 bp, Homo sapien
cattttcagcttggaggaaatggcc

SEQ ID NO: 3831920 - DNA, 25 bp, Homo sapien
ggaggactgtggtggggggatcact

SEQ ID NO: 3831921 - DNA, 25 bp, Homo sapien
caactggggtgatactgatgagaaa

SEQ ID NO: 3831922 - DNA, 25 bp, Homo sapien
aggatcattgcaattggcaactggg

SEQ ID NO: 3831923 - DNA, 25 bp, Homo sapien
gagttgccgaaaaaggatcattgca

SEQ ID NO: 3831924 - DNA, 25 bp, Homo sapien
cagaggtcaaataggagagttgccg

SEQ ID NO: 3831925 - DNA, 25 bp, Homo sapien
aaaaccagtgagcactttcaatgaa

SEQ ID NO: 3831926 - DNA, 25 bp, Homo sapien
tcagccaagctaaggactgggagaa

SEQ ID NO: 3831927 - DNA, 25 bp, Homo sapien
tccttaaagtgtcttaggacagcag

SEQ ID NO: 3831928 - DNA, 25 bp, Homo sapien
gaaccaggagagaacagtatcagcc

SEQ ID NO: 3831929 - DNA, 25 bp, Homo sapien
ccttctggccagtcaggagatggat

SEQ ID NO: 3831930 - DNA, 25 bp, Homo sapien
aaattctcatgacctttggtgcacg

SEQ ID NO: 3831931 - DNA, 25 bp, Homo sapien
taaaacagaacctagcataattggg

SEQ ID NO: 3831932 - DNA, 25 bp, Homo sapien
tggtgcacgaccttgggttcccgac

SEQ ID NO: 3831933 - DNA, 25 bp, Homo sapien
ggaaaatccttcgaattctgattgg

SEQ ID NO: 3831934 - DNA, 25 bp, Homo sapien
atgacttcctggtcgggaggtgtta

SEQ ID NO: 3831935 - DNA, 25 bp, Homo sapien
taggactggtggatggcgggtgaaa

SEQ ID NO: 3831936 - DNA, 25 bp, Homo sapien
gaaaaatcggtcgaagttttcagca

SEQ ID NO: 3831937 - DNA, 25 bp, Homo sapien
tccaggcccggaagtggaagagtac

SEQ ID NO: 3831938 - DNA, 25 bp, Homo sapien
ttaggcaaagcaaccatacacttgg

SEQ ID NO: 3831939 - DNA, 25 bp, Homo sapien
tgaggtagcacccaagctggttgcc

SEQ ID NO: 3831940 - DNA, 25 bp, Homo sapien
tagagatgctccaaactacctgagg

SEQ ID NO: 3831941 - DNA, 25 bp, Homo sapien
cacaggcctgagtctgctaggctcc

SEQ ID NO: 3831942 - DNA, 25 bp, Homo sapien
aggcctgagtctgctaggctccgca

SEQ ID NO: 3831943 - DNA, 25 bp, Homo sapien
tgtaacaaatcccattcccacaggc

SEQ ID NO: 3831944 - DNA, 25 bp, Homo sapien
ttgtaacaaatcccattcccacagg

SEQ ID NO: 3831945 - DNA, 25 bp, Homo sapien
tcaagaaacggtgtctttttcagag

SEQ ID NO: 3831946 - DNA, 25 bp, Homo sapien
gagcacttaattagctttctgaagc

SEQ ID NO: 3831947 - DNA, 25 bp, Homo sapien
ggcacataacagagatccagataca

SEQ ID NO: 3831948 - DNA, 25 bp, Homo sapien
tcaaagtgaggaatacaaccatctt

SEQ ID NO: 3831949 - DNA, 25 bp, Homo sapien
ggccaagattaaagctccgcagtta

SEQ ID NO: 3831950 - DNA, 25 bp, Homo sapien
gaatatttagtccaagctgggagga

SEQ ID NO: 3831951 - DNA, 25 bp, Homo sapien
ttgataagaaaatcaagagccccat

SEQ ID NO: 3831952 - DNA, 25 bp, Homo sapien
cagtatcctcgttggctctggccag

SEQ ID NO: 3831953 - DNA, 25 bp, Homo sapien
ggaaatcacttgaactgtgataaga

SEQ ID NO: 3831954 - DNA, 25 bp, Homo sapien
gaaatcacttgaactgtgataagaa

SEQ ID NO: 3831955 - DNA, 25 bp, Homo sapien
aaatcacttgaactgtgataagaat

SEQ ID NO: 3831956 - DNA, 25 bp, Homo sapien
tgtgataagaattctccttagagct

SEQ ID NO: 3831957 - DNA, 25 bp, Homo sapien
tgagagcatgtccaagcaaaatggg

SEQ ID NO: 3831958 - DNA, 25 bp, Homo sapien
tgatccaaccaccagataagggcct

SEQ ID NO: 3831959 - DNA, 25 bp, Homo sapien
ttaggtcctgattgccaccacagtg

SEQ ID NO: 3831960 - DNA, 25 bp, Homo sapien
aaacagtagcactcatccaaggagg

SEQ ID NO: 3831961 - DNA, 25 bp, Homo sapien
aaagccctgccccgtttgttgtgct

SEQ ID NO: 3831962 - DNA, 25 bp, Homo sapien
gtgctggtgatggctaatgcttcag

SEQ ID NO: 3831963 - DNA, 25 bp, Homo sapien
gaaagccctgccccgtttgttgtgc

SEQ ID NO: 3831964 - DNA, 25 bp, Homo sapien
gaacccctgtatgaactgaactgtg

SEQ ID NO: 3831965 - DNA, 25 bp, Homo sapien
tgacatatgagagaaccgaggcaca

SEQ ID NO: 3831966 - DNA, 25 bp, Homo sapien
tatgatgctccgacctcttcagggt

SEQ ID NO: 3831967 - DNA, 25 bp, Homo sapien
caacttataattgtccccgagccag

SEQ ID NO: 3831968 - DNA, 25 bp, Homo sapien
aagttggaggtgtctctcttgtctc

SEQ ID NO: 3831969 - DNA, 25 bp, Homo sapien
ggctgtctggtgaactctttgtcga

SEQ ID NO: 3831970 - DNA, 25 bp, Homo sapien
atgaagagtttatcagtgggggtca

SEQ ID NO: 3831971 - DNA, 25 bp, Homo sapien
tttatcagtgggggtcagttccaca

SEQ ID NO: 3831972 - DNA, 25 bp, Homo sapien
cccaggctcaacgatggagtttgca

SEQ ID NO: 3831973 - DNA, 25 bp, Homo sapien
tgaatgccagcatgtgcaccgtgaa

SEQ ID NO: 3831974 - DNA, 25 bp, Homo sapien
gcaccgtgaatcctggaagactaga

SEQ ID NO: 3831975 - DNA, 25 bp, Homo sapien
tggcttgaagtcttacaccccaggc

SEQ ID NO: 3831976 - DNA, 25 bp, Homo sapien
tgaggtcatctcaaaggctttccca

SEQ ID NO: 3831977 - DNA, 25 bp, Homo sapien
caaggagtgatcaagttttacagga

SEQ ID NO: 3831978 - DNA, 25 bp, Homo sapien
ttctggaaattaactgggatcagct

SEQ ID NO: 3831979 - DNA, 25 bp, Homo sapien
gggttatcagaaggagcacctctcc

SEQ ID NO: 3831980 - DNA, 25 bp, Homo sapien
ctatgctggagtacaagtgcaaaag

SEQ ID NO: 3831981 - DNA, 25 bp, Homo sapien
tttgctatgctggagtacaagtgca

SEQ ID NO: 3831982 - DNA, 25 bp, Homo sapien
ctgtttgctatgctggagtacaagt

SEQ ID NO: 3831983 - DNA, 25 bp, Homo sapien
tgctatgctggagtacaagtgcaaa

SEQ ID NO: 3831984 - DNA, 25 bp, Homo sapien
cagactttgctagcacgtaggtgac

SEQ ID NO: 3831985 - DNA, 25 bp, Homo sapien
cagatcagccatgttgttgcataag

SEQ ID NO: 3831986 - DNA, 25 bp, Homo sapien
gaggtacgtaaacaggcaagtgcac

SEQ ID NO: 3831987 - DNA, 25 bp, Homo sapien
acttaatggtggagtcagatcagcc

SEQ ID NO: 3831988 - DNA, 25 bp, Homo sapien
tcttacataagactccaattgtgac

SEQ ID NO: 3831989 - DNA, 25 bp, Homo sapien
ttgtgactggggacactctctctag

SEQ ID NO: 3831990 - DNA, 25 bp, Homo sapien
ttacataagactccaattgtgactg

SEQ ID NO: 3831991 - DNA, 25 bp, Homo sapien
acataagactccaattgtgactggg

SEQ ID NO: 3831992 - DNA, 25 bp, Homo sapien
gactaaagagtgtcatccccgccat

SEQ ID NO: 3831993 - DNA, 25 bp, Homo sapien
gagcatcatcagttagaagagaaaa

SEQ ID NO: 3831994 - DNA, 25 bp, Homo sapien
cacccacatgtgtgtaagtcaagga

SEQ ID NO: 3831995 - DNA, 25 bp, Homo sapien
aagtcttcagaggtaaaggcaccca

SEQ ID NO: 3831996 - DNA, 25 bp, Homo sapien
agaggttcaatcaggccttggcagg

SEQ ID NO: 3831997 - DNA, 25 bp, Homo sapien
tagtgagttcactttgactgtaaat

SEQ ID NO: 3831998 - DNA, 25 bp, Homo sapien
gaatatgacgatgtttcaaggaacc

SEQ ID NO: 3831999 - DNA, 25 bp, Homo sapien
ggcaaaaacttaccagagctagctt

SEQ ID NO: 3832000 - DNA, 25 bp, Homo sapien
gcaagtttgccttttgctgcgggca

SEQ ID NO: 3832001 - DNA, 25 bp, Homo sapien
tgcagccgggtaacctagtacaggc

SEQ ID NO: 3832002 - DNA, 25 bp, Homo sapien
cattcctcaggagcgtggtaaagac

SEQ ID NO: 3832003 - DNA, 25 bp, Homo sapien
catccacagggactttgggaaagct

SEQ ID NO: 3832004 - DNA, 25 bp, Homo sapien
cttcatggtactctggacggctggg

SEQ ID NO: 3832005 - DNA, 25 bp, Homo sapien
tcttcatggtactctggacggctgg

SEQ ID NO: 3832006 - DNA, 25 bp, Homo sapien
gagggggagagtcagtgccggaggg

SEQ ID NO: 3832007 - DNA, 25 bp, Homo sapien
agtcagtgccggaggggaaaatcac

SEQ ID NO: 3832008 - DNA, 25 bp, Homo sapien
tcctacagtggtgatcaacatctgg

SEQ ID NO: 3832009 - DNA, 25 bp, Homo sapien
cagtggtgatcaacatctggatacc

SEQ ID NO: 3832010 - DNA, 25 bp, Homo sapien
gatcaacatctggatacctctgtca

SEQ ID NO: 3832011 - DNA, 25 bp, Homo sapien
aacatctggatacctctgtcacaca

SEQ ID NO: 3832012 - DNA, 25 bp, Homo sapien
tatcacttgtagatttagtcctgca

SEQ ID NO: 3832013 - DNA, 25 bp, Homo sapien
cacagccccgaatgggtcattactt

SEQ ID NO: 3832014 - DNA, 25 bp, Homo sapien
gcacacacctctggaatataaccag

SEQ ID NO: 3832015 - DNA, 25 bp, Homo sapien
accagtagtccgtgcccactgcaat

SEQ ID NO: 3832016 - DNA, 25 bp, Homo sapien
gaatatcagaactggattattcaga

SEQ ID NO: 3832017 - DNA, 25 bp, Homo sapien
cagaatatcagaactggattattca

SEQ ID NO: 3832018 - DNA, 25 bp, Homo sapien
aatatcagaactggattattcagag

SEQ ID NO: 3832019 - DNA, 25 bp, Homo sapien
atatcagaactggattattcagagc

SEQ ID NO: 3832020 - DNA, 25 bp, Homo sapien
agaaacagaatcaattgtagtagcg

SEQ ID NO: 3832021 - DNA, 25 bp, Homo sapien
atcattgctaggcacatagaaggtg

SEQ ID NO: 3832022 - DNA, 25 bp, Homo sapien
acaataatcattgctaggcacatag

SEQ ID NO: 3832023 - DNA, 25 bp, Homo sapien
acaaatgaatgcacaatctaccaca

SEQ ID NO: 3832024 - DNA, 25 bp, Homo sapien
ctggcccagatatgaggccgggcac

SEQ ID NO: 3832025 - DNA, 25 bp, Homo sapien
tagtgagccgcagatgttccatgga

SEQ ID NO: 3832026 - DNA, 25 bp, Homo sapien
aatttgaataactgccaccaaggcc

SEQ ID NO: 3832027 - DNA, 25 bp, Homo sapien
tatgtgtggccatgagacaggatgc

SEQ ID NO: 3832028 - DNA, 25 bp, Homo sapien
tcacttccaaagcacgagcgatact

SEQ ID NO: 3832029 - DNA, 25 bp, Homo sapien
gacaggagcaatatccagcaagggt

SEQ ID NO: 3832030 - DNA, 25 bp, Homo sapien
aggataaaatcgctgcacttgaaag

SEQ ID NO: 3832031 - DNA, 25 bp, Homo sapien
cacttgaaagtttgttggaccgcac

SEQ ID NO: 3832032 - DNA, 25 bp, Homo sapien
gtggttcatactcaactggcaggat

SEQ ID NO: 3832033 - DNA, 25 bp, Homo sapien
caggaagtacatcggggctccagtt

SEQ ID NO: 3832034 - DNA, 25 bp, Homo sapien
ctccaggaagtacatcggggctcca

SEQ ID NO: 3832035 - DNA, 25 bp, Homo sapien
ccaggaagtacatcggggctccagt

SEQ ID NO: 3832036 - DNA, 25 bp, Homo sapien
gaagtacatcggggctccagttcag

SEQ ID NO: 3832037 - DNA, 25 bp, Homo sapien
gcaagaaagacagttgctatgcagg

SEQ ID NO: 3832038 - DNA, 25 bp, Homo sapien
gcagctctaatctcaactgtaattg

SEQ ID NO: 3832039 - DNA, 25 bp, Homo sapien
ctccagagaatggttcaggagtgtc

SEQ ID NO: 3832040 - DNA, 25 bp, Homo sapien
tcagagataacggtagtatcgccac

SEQ ID NO: 3832041 - DNA, 25 bp, Homo sapien
aattacaggtcagctccatttgcac

SEQ ID NO: 3832042 - DNA, 25 bp, Homo sapien
ttgcacacccaaaataactggcagg

SEQ ID NO: 3832043 - DNA, 25 bp, Homo sapien
actgaggatcattgcttgtggctgc

SEQ ID NO: 3832044 - DNA, 25 bp, Homo sapien
caaaatagataatgaagccctttct

SEQ ID NO: 3832045 - DNA, 25 bp, Homo sapien
gagtcattcacaggcactggctggg

SEQ ID NO: 3832046 - DNA, 25 bp, Homo sapien
ctgatagagtcattcacaggcactg

SEQ ID NO: 3832047 - DNA, 25 bp, Homo sapien
cactggctgggcggtgttctcccgg

SEQ ID NO: 3832048 - DNA, 25 bp, Homo sapien
gcactggctgggcggtgttctcccg

SEQ ID NO: 3832049 - DNA, 25 bp, Homo sapien
tccagctgatgtacgccagcactgg

SEQ ID NO: 3832050 - DNA, 25 bp, Homo sapien
tgtgaatcaccagcccgtgctgcat

SEQ ID NO: 3832051 - DNA, 25 bp, Homo sapien
ggcttgcgctcagcaatgcattcca

SEQ ID NO: 3832052 - DNA, 25 bp, Homo sapien
tgcataacagtactgggcaccttct

SEQ ID NO: 3832053 - DNA, 25 bp, Homo sapien
ggtgagcacatgacccagatctggc

SEQ ID NO: 3832054 - DNA, 25 bp, Homo sapien
tgaggtgagcatagggtgactccat

SEQ ID NO: 3832055 - DNA, 25 bp, Homo sapien
gagggcaagtgaccaagtttgtcca

SEQ ID NO: 3832056 - DNA, 25 bp, Homo sapien
tactggtctgtaccaggcatctgga

SEQ ID NO: 3832057 - DNA, 25 bp, Homo sapien
gctccagcagatgtgagggatgctc

SEQ ID NO: 3832058 - DNA, 25 bp, Homo sapien
tccagcagatgtgagggatgctcat

SEQ ID NO: 3832059 - DNA, 25 bp, Homo sapien
ggtcactgggatgctccagcagatg

SEQ ID NO: 3832060 - DNA, 25 bp, Homo sapien
actgggatgctccagcagatgtgag

SEQ ID NO: 3832061 - DNA, 25 bp, Homo sapien
gagtttgacatggttccctaatgca

SEQ ID NO: 3832062 - DNA, 25 bp, Homo sapien
ggttccctaatgcagctacgcacat

SEQ ID NO: 3832063 - DNA, 25 bp, Homo sapien
gggccaacagagtttgacatggttc

SEQ ID NO: 3832064 - DNA, 25 bp, Homo sapien
ggcttcactttcatgggccaacaga

SEQ ID NO: 3832065 - DNA, 25 bp, Homo sapien
tcacagccatggtgagtcctgagtc

SEQ ID NO: 3832066 - DNA, 25 bp, Homo sapien
cacagccatggtgagtcctgagtcc

SEQ ID NO: 3832067 - DNA, 25 bp, Homo sapien
actcatcctgtttccagaccacaga

SEQ ID NO: 3832068 - DNA, 25 bp, Homo sapien
gggaagtgagactatcatccaaggc

SEQ ID NO: 3832069 - DNA, 25 bp, Homo sapien
gtgagactatcatccaaggcccaat

SEQ ID NO: 3832070 - DNA, 25 bp, Homo sapien
ggcccaatctttccaagtttgcagt

SEQ ID NO: 3832071 - DNA, 25 bp, Homo sapien
gactatcatccaaggcccaatcttt

SEQ ID NO: 3832072 - DNA, 25 bp, Homo sapien
acttcaagtcaagaaatactggatc

SEQ ID NO: 3832073 - DNA, 25 bp, Homo sapien
agctctgaatttagtggatctgact

SEQ ID NO: 3832074 - DNA, 25 bp, Homo sapien
gaaatactggatccagagcagagag

SEQ ID NO: 3832075 - DNA, 25 bp, Homo sapien
aatttagtggatctgacttcaagtc

SEQ ID NO: 3832076 - DNA, 25 bp, Homo sapien
ttactgagggaattcggaactacat

SEQ ID NO: 3832077 - DNA, 25 bp, Homo sapien
agaccagtcagaattactgagggaa

SEQ ID NO: 3832078 - DNA, 25 bp, Homo sapien
aattcggaactacatacacgtgggc

SEQ ID NO: 3832079 - DNA, 25 bp, Homo sapien
gagggaattcggaactacatacacg

SEQ ID NO: 3832080 - DNA, 25 bp, Homo sapien
gtggaaacagataagggttctgagc

SEQ ID NO: 3832081 - DNA, 25 bp, Homo sapien
tgtggaaacagataagggttctgag

SEQ ID NO: 3832082 - DNA, 25 bp, Homo sapien
ctgtggaaacagataagggttctga

SEQ ID NO: 3832083 - DNA, 25 bp, Homo sapien
ttttcttgcacacgcctcggaaagc

SEQ ID NO: 3832084 - DNA, 25 bp, Homo sapien
tcctgttcgtagtcagcatcttcag

SEQ ID NO: 3832085 - DNA, 25 bp, Homo sapien
gcaggagatattcggctgtgtcctg

SEQ ID NO: 3832086 - DNA, 25 bp, Homo sapien
agtgatcgattttcttgcacacgcc

SEQ ID NO: 3832087 - DNA, 25 bp, Homo sapien
ccgaagaacagcagcgtgacactga

SEQ ID NO: 3832088 - DNA, 25 bp, Homo sapien
tgagaatgacgttgtgtctgctgcg

SEQ ID NO: 3832089 - DNA, 25 bp, Homo sapien
tgtctgctgcggtggaactcactgg

SEQ ID NO: 3832090 - DNA, 25 bp, Homo sapien
agacaaaaaagatgcccgcgctgag

SEQ ID NO: 3832091 - DNA, 25 bp, Homo sapien
ggtggagcgagaacttgaccgcctc

SEQ ID NO: 3832092 - DNA, 25 bp, Homo sapien
ctgtagaaaagcgtggtcccggtcg

SEQ ID NO: 3832093 - DNA, 25 bp, Homo sapien
ttcaatatagatgtgcacggcaacc

SEQ ID NO: 3832094 - DNA, 25 bp, Homo sapien
tccggaatcgatacctgtagggtgg

SEQ ID NO: 3832095 - DNA, 25 bp, Homo sapien
cgcctgatggagattcggaaatccc

SEQ ID NO: 3832096 - DNA, 25 bp, Homo sapien
ggacaactatgagcgcgcctgatgg

SEQ ID NO: 3832097 - DNA, 25 bp, Homo sapien
taataccatcacaaggaccatgcca

SEQ ID NO: 3832098 - DNA, 25 bp, Homo sapien
taacacataaaggtgaatgcctccc

SEQ ID NO: 3832099 - DNA, 25 bp, Homo sapien
tactagcttccaaaggtgcagggag

SEQ ID NO: 3832100 - DNA, 25 bp, Homo sapien
cagggagatccttcctagtggctca

SEQ ID NO: 3832101 - DNA, 25 bp, Homo sapien
caaagttagatcttgaaaaccagca

SEQ ID NO: 3832102 - DNA, 25 bp, Homo sapien
caaggttctagagctattgcatgcc

SEQ ID NO: 3832103 - DNA, 25 bp, Homo sapien
cctgagattaacttcttatcaaaga

SEQ ID NO: 3832104 - DNA, 25 bp, Homo sapien
ttcctgagattaacttcttatcaaa

SEQ ID NO: 3832105 - DNA, 25 bp, Homo sapien
tgagattaacttcttatcaaagacc

SEQ ID NO: 3832106 - DNA, 25 bp, Homo sapien
gagattaacttcttatcaaagacca

SEQ ID NO: 3832107 - DNA, 25 bp, Homo sapien
ggcaggtagagctcagcttgaggac

SEQ ID NO: 3832108 - DNA, 25 bp, Homo sapien
gcaggtagagctcagcttgaggaca

SEQ ID NO: 3832109 - DNA, 25 bp, Homo sapien
cagggcatgtggagcactgaacaga

SEQ ID NO: 3832110 - DNA, 25 bp, Homo sapien
gaggacagggcatgtggagcactga

SEQ ID NO: 3832111 - DNA, 25 bp, Homo sapien
ggtccgaaggtcaagtcatcagctt

SEQ ID NO: 3832112 - DNA, 25 bp, Homo sapien
agattcctgcatgtactgacactcg

SEQ ID NO: 3832113 - DNA, 25 bp, Homo sapien
tggaccaatggggaacaagaggttc

SEQ ID NO: 3832114 - DNA, 25 bp, Homo sapien
gcatgtactgacactcgctcctctt

SEQ ID NO: 3832115 - DNA, 25 bp, Homo sapien
ggatctcagatctcatctgggaaag

SEQ ID NO: 3832116 - DNA, 25 bp, Homo sapien
tggatctcagatctcatctgggaaa

SEQ ID NO: 3832117 - DNA, 25 bp, Homo sapien
tagaattacaggaacagatgatgga

SEQ ID NO: 3832118 - DNA, 25 bp, Homo sapien
aagtagaattacaggaacagatgat

SEQ ID NO: 3832119 - DNA, 25 bp, Homo sapien
tcaaagtagaattacaggaacagat

SEQ ID NO: 3832120 - DNA, 25 bp, Homo sapien
gtagaattacaggaacagatgatgg

SEQ ID NO: 3832121 - DNA, 25 bp, Homo sapien
tttctctttgcaatgttcagcaatt

SEQ ID NO: 3832122 - DNA, 25 bp, Homo sapien
tctttgcaatgttcagcaatttcat

SEQ ID NO: 3832123 - DNA, 25 bp, Homo sapien
ttctcaatatctggttgggctttct

SEQ ID NO: 3832124 - DNA, 25 bp, Homo sapien
tctctttgcaatgttcagcaatttc

SEQ ID NO: 3832125 - DNA, 25 bp, Homo sapien
caaagaaggtgcaaagtttggattt

SEQ ID NO: 3832126 - DNA, 25 bp, Homo sapien
ctgccccttcttgctactgcatttc

SEQ ID NO: 3832127 - DNA, 25 bp, Homo sapien
catgcatgactacggtttctgagca

SEQ ID NO: 3832128 - DNA, 25 bp, Homo sapien
ctactgcatttcatggctgccacca

SEQ ID NO: 3832129 - DNA, 25 bp, Homo sapien
tgccaccatagcatgcatgactacg

SEQ ID NO: 3832130 - DNA, 25 bp, Homo sapien
tcagtcggagattatttgttttttc

SEQ ID NO: 3832131 - DNA, 25 bp, Homo sapien
tatacccaatgaccctcttccattt

SEQ ID NO: 3832132 - DNA, 25 bp, Homo sapien
tccatttgggctgtcggaaatgaag

SEQ ID NO: 3832133 - DNA, 25 bp, Homo sapien
tttcttcctatacccaatgaccctc

SEQ ID NO: 3832134 - DNA, 25 bp, Homo sapien
gggctgtcggaaatgaagcatctgt

SEQ ID NO: 3832135 - DNA, 25 bp, Homo sapien
gacaaccatctcatgttgagaattc

SEQ ID NO: 3832136 - DNA, 25 bp, Homo sapien
gaccagggttggtgcaatgactccc

SEQ ID NO: 3832137 - DNA, 25 bp, Homo sapien
gggttggtgcaatgactcccaggct

SEQ ID NO: 3832138 - DNA, 25 bp, Homo sapien
aggaccagggttggtgcaatgactc

SEQ ID NO: 3832139 - DNA, 25 bp, Homo sapien
tggtgaggaccagggttggtgcaat

SEQ ID NO: 3832140 - DNA, 25 bp, Homo sapien
tcaagttgcttatacagtcagcagc

SEQ ID NO: 3832141 - DNA, 25 bp, Homo sapien
tctatcaacaggacgatgaactggg

SEQ ID NO: 3832142 - DNA, 25 bp, Homo sapien
gaggcaagcagaagtgtcaagttgc

SEQ ID NO: 3832143 - DNA, 25 bp, Homo sapien
cagagtgaagagaggcattggtggt

SEQ ID NO: 3832144 - DNA, 25 bp, Homo sapien
ccgtgcaaggttcagagtttgagaa

SEQ ID NO: 3832145 - DNA, 25 bp, Homo sapien
tctaggcaggttagagtgcttgtgc

SEQ ID NO: 3832146 - DNA, 25 bp, Homo sapien
gggctccgtgcaaggttcagagttt

SEQ ID NO: 3832147 - DNA, 25 bp, Homo sapien
aaggaggagattctgggtctaggca

SEQ ID NO: 3832148 - DNA, 25 bp, Homo sapien
actgcatcctgctgtgagcagctgc

SEQ ID NO: 3832149 - DNA, 25 bp, Homo sapien
tgactgcatcctgctgtgagcagct

SEQ ID NO: 3832150 - DNA, 25 bp, Homo sapien
tgtcccttttcatgctgactgcatc

SEQ ID NO: 3832151 - DNA, 25 bp, Homo sapien
tgcatcctgctgtgagcagctgcat

SEQ ID NO: 3832152 - DNA, 25 bp, Homo sapien
ctctgccaggtcactcaggcaggtg

SEQ ID NO: 3832153 - DNA, 25 bp, Homo sapien
ctggggaatccaggaggtgatattt

SEQ ID NO: 3832154 - DNA, 25 bp, Homo sapien
atccaggaggtgatatttggagacc

SEQ ID NO: 3832155 - DNA, 25 bp, Homo sapien
tcaaaaggcggccatctctgccagg

SEQ ID NO: 3832156 - DNA, 25 bp, Homo sapien
ccagaggccacatgaccagagttac

SEQ ID NO: 3832157 - DNA, 25 bp, Homo sapien
tacagcttcagccacgcaggtatgg

SEQ ID NO: 3832158 - DNA, 25 bp, Homo sapien
tgaccagagttacagcttcagccac

SEQ ID NO: 3832159 - DNA, 25 bp, Homo sapien
gccacgcaggtatggatgatccaag

SEQ ID NO: 3832160 - DNA, 25 bp, Homo sapien
ggtcccgattccattcctaagcgca

SEQ ID NO: 3832161 - DNA, 25 bp, Homo sapien
tgatcgcataacaacattgccaggc

SEQ ID NO: 3832162 - DNA, 25 bp, Homo sapien
catagtctaagaccatgccggtgca

SEQ ID NO: 3832163 - DNA, 25 bp, Homo sapien
tgacgtggctcaatgcaccgaaata

SEQ ID NO: 3832164 - DNA, 25 bp, Homo sapien
tcagtccacacgttaagagtccgag

SEQ ID NO: 3832165 - DNA, 25 bp, Homo sapien
ttcagcgaggagacgtggacactct

SEQ ID NO: 3832166 - DNA, 25 bp, Homo sapien
ggtgcagtcagtagcggtcagtcca

SEQ ID NO: 3832167 - DNA, 25 bp, Homo sapien
gaaatcgagaatccgccaacgggca

SEQ ID NO: 3832168 - DNA, 25 bp, Homo sapien
gagcccatcaaaggtgacggtatca

SEQ ID NO: 3832169 - DNA, 25 bp, Homo sapien
gtcgcagtcggcagctttcagcttc

SEQ ID NO: 3832170 - DNA, 25 bp, Homo sapien
attggtgatctgcaggtcgcagtcg

SEQ ID NO: 3832171 - DNA, 25 bp, Homo sapien
gcttctttaagtcgcagagggagat

SEQ ID NO: 3832172 - DNA, 25 bp, Homo sapien
caaatatcttaagaccaagcggccc

SEQ ID NO: 3832173 - DNA, 25 bp, Homo sapien
tatcttaagaccaagcggcccttac

SEQ ID NO: 3832174 - DNA, 25 bp, Homo sapien
ccaaatatcttaagaccaagcggcc

SEQ ID NO: 3832175 - DNA, 25 bp, Homo sapien
aatatcttaagaccaagcggccctt

SEQ ID NO: 3832176 - DNA, 25 bp, Homo sapien
tccccactagagacataatggcggt

SEQ ID NO: 3832177 - DNA, 25 bp, Homo sapien
gaataatcaggcttccacgttttgg

SEQ ID NO: 3832178 - DNA, 25 bp, Homo sapien
tccaaagtactagaacgaacagtcc

SEQ ID NO: 3832179 - DNA, 25 bp, Homo sapien
cacgttttgggttagcctgttacag

SEQ ID NO: 3832180 - DNA, 25 bp, Homo sapien
tgaatttccatttggggatttgagt

SEQ ID NO: 3832181 - DNA, 25 bp, Homo sapien
ctgtaaataaaaagacagaattgaa

SEQ ID NO: 3832182 - DNA, 25 bp, Homo sapien
ataaaaagacagaattgaatttcca

SEQ ID NO: 3832183 - DNA, 25 bp, Homo sapien
aatttccatttggggatttgagtgc

SEQ ID NO: 3832184 - DNA, 25 bp, Homo sapien
cttgcttgtagatttaacacctcca

SEQ ID NO: 3832185 - DNA, 25 bp, Homo sapien
aacacctccaataggaattcttcta

SEQ ID NO: 3832186 - DNA, 25 bp, Homo sapien
cctccaataggaattcttctaacaa

SEQ ID NO: 3832187 - DNA, 25 bp, Homo sapien
gcttgtagatttaacacctccaata

SEQ ID NO: 3832188 - DNA, 25 bp, Homo sapien
gaagttgagttgctagattatagcc

SEQ ID NO: 3832189 - DNA, 25 bp, Homo sapien
gaaatgttagcatctaacaggagtt

SEQ ID NO: 3832190 - DNA, 25 bp, Homo sapien
aaaactgagctttgattttctagta

SEQ ID NO: 3832191 - DNA, 25 bp, Homo sapien
cttaaatggctgtgtagaactggac

SEQ ID NO: 3832192 - DNA, 25 bp, Homo sapien
ccatactagggaattcaaaaatagg

SEQ ID NO: 3832193 - DNA, 25 bp, Homo sapien
tgttttctgaaaggtagtataggga

SEQ ID NO: 3832194 - DNA, 25 bp, Homo sapien
aaattgctgtgctcccaaaactaat

SEQ ID NO: 3832195 - DNA, 25 bp, Homo sapien
taggtgtaccctgccacttaaaaca

SEQ ID NO: 3832196 - DNA, 25 bp, Homo sapien
tagttgccatcgctggttcagttcg

SEQ ID NO: 3832197 - DNA, 25 bp, Homo sapien
tgccatcgctggttcagttcgactt

SEQ ID NO: 3832198 - DNA, 25 bp, Homo sapien
ttttgtagttgccatcgctggttca

SEQ ID NO: 3832199 - DNA, 25 bp, Homo sapien
tgtagttgccatcgctggttcagtt

SEQ ID NO: 3832200 - DNA, 25 bp, Homo sapien
gcaatgtgtagaaaaagtgtgagat

SEQ ID NO: 3832201 - DNA, 25 bp, Homo sapien
aaagcaatgtgtagaaaaagtgtga

SEQ ID NO: 3832202 - DNA, 25 bp, Homo sapien
tgtgtagaaaaagtgtgagattgtg

SEQ ID NO: 3832203 - DNA, 25 bp, Homo sapien
tgtagaaaaagtgtgagattgtgtt

SEQ ID NO: 3832204 - DNA, 25 bp, Homo sapien
ctatgatcagttggatattaagttc

SEQ ID NO: 3832205 - DNA, 25 bp, Homo sapien
agttggatattaagttctaaaatga

SEQ ID NO: 3832206 - DNA, 25 bp, Homo sapien
taaaatgatttacttcactgctaca

SEQ ID NO: 3832207 - DNA, 25 bp, Homo sapien
tatttacaatatgtactatgatcag

SEQ ID NO: 3832208 - DNA, 25 bp, Homo sapien
catgtcatcatgttccttagtgtaa

SEQ ID NO: 3832209 - DNA, 25 bp, Homo sapien
cagtgttacgggcacaaattaccca

SEQ ID NO: 3832210 - DNA, 25 bp, Homo sapien
tacaacacagtgtcatacagggata

SEQ ID NO: 3832211 - DNA, 25 bp, Homo sapien
tgtgcaagtgatgccacatattatc

SEQ ID NO: 3832212 - DNA, 25 bp, Homo sapien
taatttggacatctgcactaactag

SEQ ID NO: 3832213 - DNA, 25 bp, Homo sapien
tacagaacccaattatgatagacct

SEQ ID NO: 3832214 - DNA, 25 bp, Homo sapien
gatccaatgatccaaggttagtgaa

SEQ ID NO: 3832215 - DNA, 25 bp, Homo sapien
tcaatggcctaaaattaacgcagca

SEQ ID NO: 3832216 - DNA, 25 bp, Homo sapien
tgatttgtgtttatacacatgctaa

SEQ ID NO: 3832217 - DNA, 25 bp, Homo sapien
ccagcaaaacataagcttggacagt

SEQ ID NO: 3832218 - DNA, 25 bp, Homo sapien
ccaggatagtcaatctaatttatgc

SEQ ID NO: 3832219 - DNA, 25 bp, Homo sapien
taactactacagtcaccaggatagt

SEQ ID NO: 3832220 - DNA, 25 bp, Homo sapien
taaatgccagcaaatgtaccccaag

SEQ ID NO: 3832221 - DNA, 25 bp, Homo sapien
ttagttagcaagaagaacatccagc

SEQ ID NO: 3832222 - DNA, 25 bp, Homo sapien
gaatgtgtacaatccacgtgactct

SEQ ID NO: 3832223 - DNA, 25 bp, Homo sapien
gactctaaatctcctaagatgggca

SEQ ID NO: 3832224 - DNA, 25 bp, Homo sapien
gaactaatctcaagtggtaagtaga

SEQ ID NO: 3832225 - DNA, 25 bp, Homo sapien
gtaacaaggactagacaaattgctg

SEQ ID NO: 3832226 - DNA, 25 bp, Homo sapien
cctacatatagcaaggtgttcagaa

SEQ ID NO: 3832227 - DNA, 25 bp, Homo sapien
tatgcaactgcacctaaatcacctt

SEQ ID NO: 3832228 - DNA, 25 bp, Homo sapien
tcctgcaaggccattatacaacatt

SEQ ID NO: 3832229 - DNA, 25 bp, Homo sapien
ggagaaggccaacagagctgtcact

SEQ ID NO: 3832230 - DNA, 25 bp, Homo sapien
tgccaattctctaacactgaagagg

SEQ ID NO: 3832231 - DNA, 25 bp, Homo sapien
gcccctattgacaccttaatgttga

SEQ ID NO: 3832232 - DNA, 25 bp, Homo sapien
cagagaaatagacgcggaagagtca

SEQ ID NO: 3832233 - DNA, 25 bp, Homo sapien
aaatagacgcggaagagtcatcaat

SEQ ID NO: 3832234 - DNA, 25 bp, Homo sapien
gccagagaaatagacgcggaagagt

SEQ ID NO: 3832235 - DNA, 25 bp, Homo sapien
gctgggccagagaaatagacgcgga

SEQ ID NO: 3832236 - DNA, 25 bp, Homo sapien
tgaacaatactccaatacgctgagg

SEQ ID NO: 3832237 - DNA, 25 bp, Homo sapien
gaggctgacaaagtattcccctatc

SEQ ID NO: 3832238 - DNA, 25 bp, Homo sapien
gaaataaccatgcaatcgtccgtgt

SEQ ID NO: 3832239 - DNA, 25 bp, Homo sapien
tttcctaatgcagacagactacaag

SEQ ID NO: 3832240 - DNA, 25 bp, Homo sapien
gcaatcttatcgcaaaacatggcat

SEQ ID NO: 3832241 - DNA, 25 bp, Homo sapien
gattcaggaggtaacaatttgcccc

SEQ ID NO: 3832242 - DNA, 25 bp, Homo sapien
gcttagttttcccagaacaggagct

SEQ ID NO: 3832243 - DNA, 25 bp, Homo sapien
cattttgtcgggatacagtctaggg

SEQ ID NO: 3832244 - DNA, 25 bp, Homo sapien
tgtttaggtgtctgcaaggctgaag

SEQ ID NO: 3832245 - DNA, 25 bp, Homo sapien
caaggtctagatgtaagcagggtct

SEQ ID NO: 3832246 - DNA, 25 bp, Homo sapien
gcactcatatcagccattcattggg

SEQ ID NO: 3832247 - DNA, 25 bp, Homo sapien
tacacgtataacctggaagaggcac

SEQ ID NO: 3832248 - DNA, 25 bp, Homo sapien
cagaagcattggcttcagccagatt

SEQ ID NO: 3832249 - DNA, 25 bp, Homo sapien
tcttcagaagcattggcttcagcca

SEQ ID NO: 3832250 - DNA, 25 bp, Homo sapien
gcattggcttcagccagattggcag

SEQ ID NO: 3832251 - DNA, 25 bp, Homo sapien
gaagcattggcttcagccagattgg

SEQ ID NO: 3832252 - DNA, 25 bp, Homo sapien
tgggtcgtattcatggccagattgc

SEQ ID NO: 3832253 - DNA, 25 bp, Homo sapien
cgtattcatggccagattgcgacat

SEQ ID NO: 3832254 - DNA, 25 bp, Homo sapien
ttgattgggtcgtattcatggccag

SEQ ID NO: 3832255 - DNA, 25 bp, Homo sapien
tattcatggccagattgcgacatca

SEQ ID NO: 3832256 - DNA, 25 bp, Homo sapien
aatataatgtccaggtttaccacaa

SEQ ID NO: 3832257 - DNA, 25 bp, Homo sapien
acggaaacacgtgtaagatggaggt

SEQ ID NO: 3832258 - DNA, 25 bp, Homo sapien
taatgtccaggtttaccacaacgga

SEQ ID NO: 3832259 - DNA, 25 bp, Homo sapien
taccacaacggaaacacgtgtaaga

SEQ ID NO: 3832260 - DNA, 25 bp, Homo sapien
gctctttttaatcctaggaccagat

SEQ ID NO: 3832261 - DNA, 25 bp, Homo sapien
tcatgaaacttctgggaattccagt

SEQ ID NO: 3832262 - DNA, 25 bp, Homo sapien
gcatctatagttggtattgcatatt

SEQ ID NO: 3832263 - DNA, 25 bp, Homo sapien
atcctaggaccagattcaaagtttt

SEQ ID NO: 3832264 - DNA, 25 bp, Homo sapien
taagtatcaatttgcttatgcccca

SEQ ID NO: 3832265 - DNA, 25 bp, Homo sapien
cccaatttgtgaaagaggagtctcc

SEQ ID NO: 3832266 - DNA, 25 bp, Homo sapien
tgttgcagttgctccatagacatca

SEQ ID NO: 3832267 - DNA, 25 bp, Homo sapien
tagacatcaccacgattccagaaat

SEQ ID NO: 3832268 - DNA, 25 bp, Homo sapien
tgttctactataacataatgggaac

SEQ ID NO: 3832269 - DNA, 25 bp, Homo sapien
ttttaccattgttaagaaggcagag

SEQ ID NO: 3832270 - DNA, 25 bp, Homo sapien
gaacacataattcagcgcaatgcca

SEQ ID NO: 3832271 - DNA, 25 bp, Homo sapien
gaaggcagagtactcatgctacatg

SEQ ID NO: 3832272 - DNA, 25 bp, Homo sapien
tcatcacagtaactgtttccacagc

SEQ ID NO: 3832273 - DNA, 25 bp, Homo sapien
ccttgcagatgagacacaacaattc

SEQ ID NO: 3832274 - DNA, 25 bp, Homo sapien
tccacagcagggaatcacaacagca

SEQ ID NO: 3832275 - DNA, 25 bp, Homo sapien
aacagcatcagtcataatatccttg

SEQ ID NO: 3832276 - DNA, 25 bp, Homo sapien
aaacatatgaggttgggaagagcca

SEQ ID NO: 3832277 - DNA, 25 bp, Homo sapien
acatatgaggttgggaagagccatt

SEQ ID NO: 3832278 - DNA, 25 bp, Homo sapien
tattaaaacatatgaggttgggaag

SEQ ID NO: 3832279 - DNA, 25 bp, Homo sapien
taaaacatatgaggttgggaagagc

SEQ ID NO: 3832280 - DNA, 25 bp, Homo sapien
aaatgctgggtaataaatatgtcta

SEQ ID NO: 3832281 - DNA, 25 bp, Homo sapien
tatgtctacagatgtcgggcgcggt

SEQ ID NO: 3832282 - DNA, 25 bp, Homo sapien
taataaatatgtctacagatgtcgg

SEQ ID NO: 3832283 - DNA, 25 bp, Homo sapien
gctgggtaataaatatgtctacaga

SEQ ID NO: 3832284 - DNA, 25 bp, Homo sapien
gaaatgagagacctacagcacagta

SEQ ID NO: 3832285 - DNA, 25 bp, Homo sapien
agtaaaactccagtaataccaagtg

SEQ ID NO: 3832286 - DNA, 25 bp, Homo sapien
cgtgggagcaacactaaattacaga

SEQ ID NO: 3832287 - DNA, 25 bp, Homo sapien
ttacagatacgaagattaagcttca

SEQ ID NO: 3832288 - DNA, 25 bp, Homo sapien
gatgacacgtcggacatgtgtgctc

SEQ ID NO: 3832289 - DNA, 25 bp, Homo sapien
ctgtcgtaaaaatttattggcaatt

SEQ ID NO: 3832290 - DNA, 25 bp, Homo sapien
ttgatgacacgtcggacatgtgtgc

SEQ ID NO: 3832291 - DNA, 25 bp, Homo sapien
tgtcgtaaaaatttattggcaatta

SEQ ID NO: 3832292 - DNA, 25 bp, Homo sapien
ttcgtagtctttttgtatagccagt

SEQ ID NO: 3832293 - DNA, 25 bp, Homo sapien
tttgtatagccagtttcatttttga

SEQ ID NO: 3832294 - DNA, 25 bp, Homo sapien
tagtctttttgtatagccagtttca

SEQ ID NO: 3832295 - DNA, 25 bp, Homo sapien
gtctttttgtatagccagtttcatt

SEQ ID NO: 3832296 - DNA, 25 bp, Homo sapien
tgtcactggaatcataagaggatct

SEQ ID NO: 3832297 - DNA, 25 bp, Homo sapien
ggatcttgttgtcttgatatcggag

SEQ ID NO: 3832298 - DNA, 25 bp, Homo sapien
aatcagtggtctcggaggtggtatt

SEQ ID NO: 3832299 - DNA, 25 bp, Homo sapien
tctcatcagaggttgtaggttcctc

SEQ ID NO: 3832300 - DNA, 25 bp, Homo sapien
tggagcagaagacggatttccagac

SEQ ID NO: 3832301 - DNA, 25 bp, Homo sapien
gactgattagaagttaatgaagata

SEQ ID NO: 3832302 - DNA, 25 bp, Homo sapien
ctggagcagaagacggatttccaga

SEQ ID NO: 3832303 - DNA, 25 bp, Homo sapien
aagactgattagaagttaatgaaga

SEQ ID NO: 3832304 - DNA, 25 bp, Homo sapien
gatactgttgcagttatatcaggta

SEQ ID NO: 3832305 - DNA, 25 bp, Homo sapien
tgaactgatatggatactgttgcag

SEQ ID NO: 3832306 - DNA, 25 bp, Homo sapien
gttgcagttatatcaggtacaggag

SEQ ID NO: 3832307 - DNA, 25 bp, Homo sapien
gaactgatatggatactgttgcagt

SEQ ID NO: 3832308 - DNA, 25 bp, Homo sapien
tggcaacctgtgtagtatttgacct

SEQ ID NO: 3832309 - DNA, 25 bp, Homo sapien
catttctgaagtggtaggctgtgag

SEQ ID NO: 3832310 - DNA, 25 bp, Homo sapien
cacattactgagcacagtggtccac

SEQ ID NO: 3832311 - DNA, 25 bp, Homo sapien
tcagagctgttatggtatatggaac

SEQ ID NO: 3832312 - DNA, 25 bp, Homo sapien
ctggcaatattttattatcagaatc

SEQ ID NO: 3832313 - DNA, 25 bp, Homo sapien
tggcaatattttattatcagaatcc

SEQ ID NO: 3832314 - DNA, 25 bp, Homo sapien
cggtaattgcaattgaggaggttcc

SEQ ID NO: 3832315 - DNA, 25 bp, Homo sapien
agagcggtaattgcaattgaggagg

SEQ ID NO: 3832316 - DNA, 25 bp, Homo sapien
agcggtaattgcaattgaggaggtt

SEQ ID NO: 3832317 - DNA, 25 bp, Homo sapien
gcggtaattgcaattgaggaggttc

SEQ ID NO: 3832318 - DNA, 25 bp, Homo sapien
ctgtccaagcaaagatggggttcca

SEQ ID NO: 3832319 - DNA, 25 bp, Homo sapien
ccaagcaaagatggggttccaagaa

SEQ ID NO: 3832320 - DNA, 25 bp, Homo sapien
gcaaagatggggttccaagaacagg

SEQ ID NO: 3832321 - DNA, 25 bp, Homo sapien
tgtccaagcaaagatggggttccaa

SEQ ID NO: 3832322 - DNA, 25 bp, Homo sapien
acctggacgagcagtatttattctt

SEQ ID NO: 3832323 - DNA, 25 bp, Homo sapien
cctggacgagcagtatttattctta

SEQ ID NO: 3832324 - DNA, 25 bp, Homo sapien
cacctggacgagcagtatttattct

SEQ ID NO: 3832325 - DNA, 25 bp, Homo sapien
caccacctggacgagcagtatttat

SEQ ID NO: 3832326 - DNA, 25 bp, Homo sapien
gtggtggagaaaccagatagccaag

SEQ ID NO: 3832327 - DNA, 25 bp, Homo sapien
tgtggtggagaaaccagatagccaa

SEQ ID NO: 3832328 - DNA, 25 bp, Homo sapien
cctctgtgatctttcgctgtggtgt

SEQ ID NO: 3832329 - DNA, 25 bp, Homo sapien
gtagtgacgggccttgagtcctctg

SEQ ID NO: 3832330 - DNA, 25 bp, Homo sapien
tgtggtgtcgcccacggtttatact

SEQ ID NO: 3832331 - DNA, 25 bp, Homo sapien
aaagactggagttgctggtagtgac

SEQ ID NO: 3832332 - DNA, 25 bp, Homo sapien
tcttcttttagtcgtcgctgctctc

SEQ ID NO: 3832333 - DNA, 25 bp, Homo sapien
tgctctctatagaattcttccctgg

SEQ ID NO: 3832334 - DNA, 25 bp, Homo sapien
cccaaggtgttgataaattggcagg

SEQ ID NO: 3832335 - DNA, 25 bp, Homo sapien
tgtctgcactcctgatgatacccaa

SEQ ID NO: 3832336 - DNA, 25 bp, Homo sapien
taagaaaactaacaagacaaatgta

SEQ ID NO: 3832337 - DNA, 25 bp, Homo sapien
atccctgagaagttgcttgtatggc

SEQ ID NO: 3832338 - DNA, 25 bp, Homo sapien
ggtgaatttctcatactaactggaa

SEQ ID NO: 3832339 - DNA, 25 bp, Homo sapien
acaagacaaatgtaattagatcatg

SEQ ID NO: 3832340 - DNA, 25 bp, Homo sapien
gcgcctacgctccttttgaatcttt

SEQ ID NO: 3832341 - DNA, 25 bp, Homo sapien
ctggaaaatgagcgcctacgctcct

SEQ ID NO: 3832342 - DNA, 25 bp, Homo sapien
gaaaatgagcgcctacgctcctttt

SEQ ID NO: 3832343 - DNA, 25 bp, Homo sapien
aatgagcgcctacgctccttttgaa

SEQ ID NO: 3832344 - DNA, 25 bp, Homo sapien
gcaagaagctgtagccttatggtaa

SEQ ID NO: 3832345 - DNA, 25 bp, Homo sapien
gtacacaaatcggagcaatcacttg

SEQ ID NO: 3832346 - DNA, 25 bp, Homo sapien
tacgcaggttaatgttccagcaaga

SEQ ID NO: 3832347 - DNA, 25 bp, Homo sapien
ttgtcctatactggccaacagccta

SEQ ID NO: 3832348 - DNA, 25 bp, Homo sapien
gagcgtgaacgtgttgaaccagatc

SEQ ID NO: 3832349 - DNA, 25 bp, Homo sapien
accagatcttgatttagaataagta

SEQ ID NO: 3832350 - DNA, 25 bp, Homo sapien
tacgaagaaccactatagggagatt

SEQ ID NO: 3832351 - DNA, 25 bp, Homo sapien
ctgaatgatcgagaataagagcgtg

SEQ ID NO: 3832352 - DNA, 25 bp, Homo sapien
tatttgctgagggtctaggctgtgc

SEQ ID NO: 3832353 - DNA, 25 bp, Homo sapien
ggagactgtcccctaaacgcttgag

SEQ ID NO: 3832354 - DNA, 25 bp, Homo sapien
cgtgaacggtaattgcggctcttgc

SEQ ID NO: 3832355 - DNA, 25 bp, Homo sapien
tgatatccatgagatctagaccgtg

SEQ ID NO: 3832356 - DNA, 25 bp, Homo sapien
aagcacaagcatggataaaactgaa

SEQ ID NO: 3832357 - DNA, 25 bp, Homo sapien
aaagcacaagcatggataaaactga

SEQ ID NO: 3832358 - DNA, 25 bp, Homo sapien
actgaagaaaatccttctcccaaca

SEQ ID NO: 3832359 - DNA, 25 bp, Homo sapien
tctcccaacaaagttccacacccac

SEQ ID NO: 3832360 - DNA, 25 bp, Homo sapien
cttcttcaaagacaacaaaagacta

SEQ ID NO: 3832361 - DNA, 25 bp, Homo sapien
tcccttcttcaaagacaacaaaaga

SEQ ID NO: 3832362 - DNA, 25 bp, Homo sapien
ttcaaagacaacaaaagactacata

SEQ ID NO: 3832363 - DNA, 25 bp, Homo sapien
caaagacaacaaaagactacataaa

SEQ ID NO: 3832364 - DNA, 25 bp, Homo sapien
taagattatgattgtatcaacacaa

SEQ ID NO: 3832365 - DNA, 25 bp, Homo sapien
gacacacaatttaagattatgattg

SEQ ID NO: 3832366 - DNA, 25 bp, Homo sapien
tgccctaaggaagacacacaattta

SEQ ID NO: 3832367 - DNA, 25 bp, Homo sapien
tctgccctaaggaagacacacaatt

SEQ ID NO: 3832368 - DNA, 25 bp, Homo sapien
tcagatttccgcacaggactgcctc

SEQ ID NO: 3832369 - DNA, 25 bp, Homo sapien
gatttcatggctcacgtccttggtg

SEQ ID NO: 3832370 - DNA, 25 bp, Homo sapien
tatctgacgttctagcctctttgga

SEQ ID NO: 3832371 - DNA, 25 bp, Homo sapien
aatgataacatcttcagctggcgcg

SEQ ID NO: 3832372 - DNA, 25 bp, Homo sapien
gtgtccaggctctcttttgctttct

SEQ ID NO: 3832373 - DNA, 25 bp, Homo sapien
gctgtgtccaggctctcttttgctt

SEQ ID NO: 3832374 - DNA, 25 bp, Homo sapien
tgctgtgtccaggctctcttttgct

SEQ ID NO: 3832375 - DNA, 25 bp, Homo sapien
ctggacaactgctgctgtgtccagg

SEQ ID NO: 3832376 - DNA, 25 bp, Homo sapien
gtggcttcgggtctggcttccagaa

SEQ ID NO: 3832377 - DNA, 25 bp, Homo sapien
gctactgtggcttcgggtctggctt

SEQ ID NO: 3832378 - DNA, 25 bp, Homo sapien
ttcgggtctggcttccagaaggact

SEQ ID NO: 3832379 - DNA, 25 bp, Homo sapien
tgctactgtggcttcgggtctggct

SEQ ID NO: 3832380 - DNA, 25 bp, Homo sapien
gcttttttccaattccacttcagtg

SEQ ID NO: 3832381 - DNA, 25 bp, Homo sapien
caattccacttcagtgcctgcatgt

SEQ ID NO: 3832382 - DNA, 25 bp, Homo sapien
tggcttttttccaattccacttcag

SEQ ID NO: 3832383 - DNA, 25 bp, Homo sapien
ttccaattccacttcagtgcctgca

SEQ ID NO: 3832384 - DNA, 25 bp, Homo sapien
taataggccctagcaaaacctctca

SEQ ID NO: 3832385 - DNA, 25 bp, Homo sapien
caaaagttcgtgttataaagctctg

SEQ ID NO: 3832386 - DNA, 25 bp, Homo sapien
acatggtcacaactcacaattctgt

SEQ ID NO: 3832387 - DNA, 25 bp, Homo sapien
taagtgcagcacagggtcttccatg

SEQ ID NO: 3832388 - DNA, 25 bp, Homo sapien
gttaggagctggcttgaatatccaa

SEQ ID NO: 3832389 - DNA, 25 bp, Homo sapien
agttggattagttaggagctggctt

SEQ ID NO: 3832390 - DNA, 25 bp, Homo sapien
tggactgagccttcactggcagtgg

SEQ ID NO: 3832391 - DNA, 25 bp, Homo sapien
gcttgaatatccaaggctggactga

SEQ ID NO: 3832392 - DNA, 25 bp, Homo sapien
caacatcaccggagccatcacatga

SEQ ID NO: 3832393 - DNA, 25 bp, Homo sapien
tcaccggagccatcacatgatacag

SEQ ID NO: 3832394 - DNA, 25 bp, Homo sapien
acatgccgcctccaacatcaccgga

SEQ ID NO: 3832395 - DNA, 25 bp, Homo sapien
gagccatcacatgatacaggtcccc

SEQ ID NO: 3832396 - DNA, 25 bp, Homo sapien
agtcaggcactgaacccagcgatgg

SEQ ID NO: 3832397 - DNA, 25 bp, Homo sapien
ctgcaagacgacgggttttccattc

SEQ ID NO: 3832398 - DNA, 25 bp, Homo sapien
ttcagtcaggcactgaacccagcga

SEQ ID NO: 3832399 - DNA, 25 bp, Homo sapien
gagagccagaccaaaggcaaaggag

SEQ ID NO: 3832400 - DNA, 25 bp, Homo sapien
aaaatgatggggcaccgctcctggg

SEQ ID NO: 3832401 - DNA, 25 bp, Homo sapien
ggctgcaaaatgatggggcaccgct

SEQ ID NO: 3832402 - DNA, 25 bp, Homo sapien
ctggtctccaggtacccggcgctca

SEQ ID NO: 3832403 - DNA, 25 bp, Homo sapien
caggtacccggcgctcacaggttag

SEQ ID NO: 3832404 - DNA, 25 bp, Homo sapien
gtctgtttggcagggcccgagagcc

SEQ ID NO: 3832405 - DNA, 25 bp, Homo sapien
gaaggctgcgtctgtttggcagggc

SEQ ID NO: 3832406 - DNA, 25 bp, Homo sapien
gcgtctgtttggcagggcccgagag

SEQ ID NO: 3832407 - DNA, 25 bp, Homo sapien
cgctgctccttaggaaggctgcgtc

SEQ ID NO: 3832408 - DNA, 25 bp, Homo sapien
tcggagccagctctacgagatgcct

SEQ ID NO: 3832409 - DNA, 25 bp, Homo sapien
cgagcgcatccagcactagattttt

SEQ ID NO: 3832410 - DNA, 25 bp, Homo sapien
gaactaaatcgctcacatgctgcct

SEQ ID NO: 3832411 - DNA, 25 bp, Homo sapien
tgcctcattctgcaaaggtgtggcc

SEQ ID NO: 3832412 - DNA, 25 bp, Homo sapien
ctcatccgtggatatgaactgtttc

SEQ ID NO: 3832413 - DNA, 25 bp, Homo sapien
cgtggatatgaactgtttcattctc

SEQ ID NO: 3832414 - DNA, 25 bp, Homo sapien
tcctcatccgtggatatgaactgtt

SEQ ID NO: 3832415 - DNA, 25 bp, Homo sapien
catccgtggatatgaactgtttcat

SEQ ID NO: 3832416 - DNA, 25 bp, Homo sapien
agggacattctctgacgttcctctc

SEQ ID NO: 3832417 - DNA, 25 bp, Homo sapien
gacattctctgacgttcctctcctt

SEQ ID NO: 3832418 - DNA, 25 bp, Homo sapien
gtcttgttccccgtgtcagggacat

SEQ ID NO: 3832419 - DNA, 25 bp, Homo sapien
ccctgtacccgtggctgtcttgttc

SEQ ID NO: 3832420 - DNA, 25 bp, Homo sapien
ggcaaatcacatcacctctccgggc

SEQ ID NO: 3832421 - DNA, 25 bp, Homo sapien
aggcaaatcacatcacctctccggg

SEQ ID NO: 3832422 - DNA, 25 bp, Homo sapien
tcaggttgacatgaagatattttag

SEQ ID NO: 3832423 - DNA, 25 bp, Homo sapien
tctttggaacaacctgcatatgctg

SEQ ID NO: 3832424 - DNA, 25 bp, Homo sapien
tgaactagcttcaccaatgtggaag

SEQ ID NO: 3832425 - DNA, 25 bp, Homo sapien
gaatatttacaattacgtgtgtggt

SEQ ID NO: 3832426 - DNA, 25 bp, Homo sapien
tagcaatctaaccatgtgcctattt

SEQ ID NO: 3832427 - DNA, 25 bp, Homo sapien
gacctggcatctatcatcaattttt

SEQ ID NO: 3832428 - DNA, 25 bp, Homo sapien
tttcctccccacctagtaatatgtc

SEQ ID NO: 3832429 - DNA, 25 bp, Homo sapien
gtaatatgtcttagcaatctaacca

SEQ ID NO: 3832430 - DNA, 25 bp, Homo sapien
gcctgtccagtttgattatgcattc

SEQ ID NO: 3832431 - DNA, 25 bp, Homo sapien
tgagcttagccattaagcacagtgt

SEQ ID NO: 3832432 - DNA, 25 bp, Homo sapien
gattcttatagggactattactaaa

SEQ ID NO: 3832433 - DNA, 25 bp, Homo sapien
cctggtctacaggtgattcttatag

SEQ ID NO: 3832434 - DNA, 25 bp, Homo sapien
gatcttgttgtgtcacctagactag

SEQ ID NO: 3832435 - DNA, 25 bp, Homo sapien
tggcacgatcacttctcactatagc

SEQ ID NO: 3832436 - DNA, 25 bp, Homo sapien
agggcaccaggcctatatttcttgc

SEQ ID NO: 3832437 - DNA, 25 bp, Homo sapien
gactgttccccttatctaaggccta

SEQ ID NO: 3832438 - DNA, 25 bp, Homo sapien
cttaatagaaacacttaacataaca

SEQ ID NO: 3832439 - DNA, 25 bp, Homo sapien
aatgtctgcttttattaggtttgat

SEQ ID NO: 3832440 - DNA, 25 bp, Homo sapien
tattaggtttgattctgtctacctg

SEQ ID NO: 3832441 - DNA, 25 bp, Homo sapien
tgtctacctgctactttgggtcatt

SEQ ID NO: 3832442 - DNA, 25 bp, Homo sapien
ggtacaatgtacactcctcctttga

SEQ ID NO: 3832443 - DNA, 25 bp, Homo sapien
aaagacataccagataaaggttaag

SEQ ID NO: 3832444 - DNA, 25 bp, Homo sapien
tttgacaggcgcactaaaatctcag

SEQ ID NO: 3832445 - DNA, 25 bp, Homo sapien
gctacataattcatccacataacaa

SEQ ID NO: 3832446 - DNA, 25 bp, Homo sapien
cctctgatgttagaatctggctgca

SEQ ID NO: 3832447 - DNA, 25 bp, Homo sapien
tgtggagcctcgtgccttacttctg

SEQ ID NO: 3832448 - DNA, 25 bp, Homo sapien
tctggctgcaaccatcccgtgattc

SEQ ID NO: 3832449 - DNA, 25 bp, Homo sapien
tggcttctgtctgtcgtcacttccg

SEQ ID NO: 3832450 - DNA, 25 bp, Homo sapien
gtgccaatagctcattggcagcctt

SEQ ID NO: 3832451 - DNA, 25 bp, Homo sapien
agtgccaatagctcattggcagcct

SEQ ID NO: 3832452 - DNA, 25 bp, Homo sapien
atacccagcctatatatatgtaatg

SEQ ID NO: 3832453 - DNA, 25 bp, Homo sapien
tatatgtaatgttttaagacacagg

SEQ ID NO: 3832454 - DNA, 25 bp, Homo sapien
gcctcaaaattctgggcccaagaga

SEQ ID NO: 3832455 - DNA, 25 bp, Homo sapien
cacgcccagctaactcaaaaaattt

SEQ ID NO: 3832456 - DNA, 25 bp, Homo sapien
gtatatctacaagtaagttacaggc

SEQ ID NO: 3832457 - DNA, 25 bp, Homo sapien
gttacaggcatcatgacacttctct

SEQ ID NO: 3832458 - DNA, 25 bp, Homo sapien
ctgtatcatctaagaagaacaggcc

SEQ ID NO: 3832459 - DNA, 25 bp, Homo sapien
cccagccagaatagtactattgatg

SEQ ID NO: 3832460 - DNA, 25 bp, Homo sapien
tcctaaattggatgtctggacttgg

SEQ ID NO: 3832461 - DNA, 25 bp, Homo sapien
gggcataacaaggattccaggctgg

SEQ ID NO: 3832462 - DNA, 25 bp, Homo sapien
ggtgaacaaaggctctggtgacatg

SEQ ID NO: 3832463 - DNA, 25 bp, Homo sapien
caggctggattccatgatgtcatcc

SEQ ID NO: 3832464 - DNA, 25 bp, Homo sapien
cactaagaacagctcctggtgaggt

SEQ ID NO: 3832465 - DNA, 25 bp, Homo sapien
tgtctagtgcctacaggaactgtga

SEQ ID NO: 3832466 - DNA, 25 bp, Homo sapien
tttggctcaaatcggagacctctga

SEQ ID NO: 3832467 - DNA, 25 bp, Homo sapien
gactacagtgaggaatatattaccg

SEQ ID NO: 3832468 - DNA, 25 bp, Homo sapien
ctcatttctgatccattgtatttga

SEQ ID NO: 3832469 - DNA, 25 bp, Homo sapien
cctcatttctgatccattgtatttg

SEQ ID NO: 3832470 - DNA, 25 bp, Homo sapien
cccctcatttctgatccattgtatt

SEQ ID NO: 3832471 - DNA, 25 bp, Homo sapien
acccctcatttctgatccattgtat

SEQ ID NO: 3832472 - DNA, 25 bp, Homo sapien
gaaataaatcgagtgggtttccatc

SEQ ID NO: 3832473 - DNA, 25 bp, Homo sapien
tggaaataaatcgagtgggtttcca

SEQ ID NO: 3832474 - DNA, 25 bp, Homo sapien
ggctctggaaataaatcgagtgggt

SEQ ID NO: 3832475 - DNA, 25 bp, Homo sapien
tctggaaataaatcgagtgggtttc

SEQ ID NO: 3832476 - DNA, 25 bp, Homo sapien
aaccatcgtgccctagtgtgctgag

SEQ ID NO: 3832477 - DNA, 25 bp, Homo sapien
tagcatctagctcaaagggttgttg

SEQ ID NO: 3832478 - DNA, 25 bp, Homo sapien
tttccctgaaacatagaagtgctgt

SEQ ID NO: 3832479 - DNA, 25 bp, Homo sapien
taatgtgcttcaatacctaggaggg

SEQ ID NO: 3832480 - DNA, 25 bp, Homo sapien
tgcctttcaaggagagtgcgtcact

SEQ ID NO: 3832481 - DNA, 25 bp, Homo sapien
cacacttacgtttatggcagcacaa

SEQ ID NO: 3832482 - DNA, 25 bp, Homo sapien
tactactgagccacgaagagaaaca

SEQ ID NO: 3832483 - DNA, 25 bp, Homo sapien
tcatcgaagtggaatagccgagtca

SEQ ID NO: 3832484 - DNA, 25 bp, Homo sapien
aaagacatcctctacaccttcatag

SEQ ID NO: 3832485 - DNA, 25 bp, Homo sapien
tacagacggacactaccacactcaa

SEQ ID NO: 3832486 - DNA, 25 bp, Homo sapien
caaaaggtctccctcccagttatat

SEQ ID NO: 3832487 - DNA, 25 bp, Homo sapien
tcaatccaaatgtaacttcctcagg

SEQ ID NO: 3832488 - DNA, 25 bp, Homo sapien
aaggaggctcgcgagcctcaagccc

SEQ ID NO: 3832489 - DNA, 25 bp, Homo sapien
ctcaagccctccgcagcgccgcggg

SEQ ID NO: 3832490 - DNA, 25 bp, Homo sapien
tgcaccagcgccattttctacaccg

SEQ ID NO: 3832491 - DNA, 25 bp, Homo sapien
ggagaggcccgagccgctgcaccag

SEQ ID NO: 3832492 - DNA, 25 bp, Homo sapien
gcgggttgcgggccctgcggcagcg

SEQ ID NO: 3832493 - DNA, 25 bp, Homo sapien
tgcgccctcccgccgaggcccgaag

SEQ ID NO: 3832494 - DNA, 25 bp, Homo sapien
ggagggaggcccttgttccgctcac

SEQ ID NO: 3832495 - DNA, 25 bp, Homo sapien
cggagggaggcccttgttccgctca

SEQ ID NO: 3832496 - DNA, 25 bp, Homo sapien
aacgagatgcgcgtgaaaacggagc

SEQ ID NO: 3832497 - DNA, 25 bp, Homo sapien
acacacaaaaacgagatgcgcgtga

SEQ ID NO: 3832498 - DNA, 25 bp, Homo sapien
caaaaacgagatgcgcgtgaaaacg

SEQ ID NO: 3832499 - DNA, 25 bp, Homo sapien
acgagatgcgcgtgaaaacggagct

SEQ ID NO: 3832500 - DNA, 25 bp, Homo sapien
ctacgtctttggtagctttagcttc

SEQ ID NO: 3832501 - DNA, 25 bp, Homo sapien
ttctacgtctttggtagctttagct

SEQ ID NO: 3832502 - DNA, 25 bp, Homo sapien
acgtctttggtagctttagcttcca

SEQ ID NO: 3832503 - DNA, 25 bp, Homo sapien
tacgtctttggtagctttagcttcc

SEQ ID NO: 3832504 - DNA, 25 bp, Homo sapien
gcgtaattacgcatctccccgcaat

SEQ ID NO: 3832505 - DNA, 25 bp, Homo sapien
tgctctccgggtgcggaagaaaatg

SEQ ID NO: 3832506 - DNA, 25 bp, Homo sapien
caacccagaaaaggcgaatcggagt

SEQ ID NO: 3832507 - DNA, 25 bp, Homo sapien
gagtagaaatatacgattatcgtgg

SEQ ID NO: 3832508 - DNA, 25 bp, Homo sapien
cactcccagggacatctagcaatat

SEQ ID NO: 3832509 - DNA, 25 bp, Homo sapien
ctcagccagggtcgattctgcgcca

SEQ ID NO: 3832510 - DNA, 25 bp, Homo sapien
ggtccaaaatgtcaagtgcccagat

SEQ ID NO: 3832511 - DNA, 25 bp, Homo sapien
gagccacagcactcgaccaaaagat

SEQ ID NO: 3832512 - DNA, 25 bp, Homo sapien
taagaaagcgtattacaagcccagc

SEQ ID NO: 3832513 - DNA, 25 bp, Homo sapien
tggcatcgggatgagaacccttggt

SEQ ID NO: 3832514 - DNA, 25 bp, Homo sapien
tcctaccagggttatcagttcatca

SEQ ID NO: 3832515 - DNA, 25 bp, Homo sapien
gacaacctcctcataaagaagcagt

SEQ ID NO: 3832516 - DNA, 25 bp, Homo sapien
ctgtgcacacatgttttagggaaac

SEQ ID NO: 3832517 - DNA, 25 bp, Homo sapien
aaatccaatcagtcactgtttgcag

SEQ ID NO: 3832518 - DNA, 25 bp, Homo sapien
taactaccattctctcccgtctgtg

SEQ ID NO: 3832519 - DNA, 25 bp, Homo sapien
tccctgactgaaaaccactaataag

SEQ ID NO: 3832520 - DNA, 25 bp, Homo sapien
aatcaattggctgacacacgctaca

SEQ ID NO: 3832521 - DNA, 25 bp, Homo sapien
gcacagccgcagaacacagtatcaa

SEQ ID NO: 3832522 - DNA, 25 bp, Homo sapien
cagaaggtggaattgtggctgccaa

SEQ ID NO: 3832523 - DNA, 25 bp, Homo sapien
gactccactaatgaggtatctagaa

SEQ ID NO: 3832524 - DNA, 25 bp, Homo sapien
tagatactccaccataaggacagaa

SEQ ID NO: 3832525 - DNA, 25 bp, Homo sapien
gaaacatagcactggtattattccc

SEQ ID NO: 3832526 - DNA, 25 bp, Homo sapien
aaactcagtttgctacatctaccca

SEQ ID NO: 3832527 - DNA, 25 bp, Homo sapien
tgtcagatggtacaaggctgtggta

SEQ ID NO: 3832528 - DNA, 25 bp, Homo sapien
tagcctatcagtcagcaacacacca

SEQ ID NO: 3832529 - DNA, 25 bp, Homo sapien
caagctagctcatcctcacatagaa

SEQ ID NO: 3832530 - DNA, 25 bp, Homo sapien
gccagctgtatgttacaagctagaa

SEQ ID NO: 3832531 - DNA, 25 bp, Homo sapien
ttcctgagggcccaactagcctatc

SEQ ID NO: 3832532 - DNA, 25 bp, Homo sapien
gtaaacttcatcatttaagctggag

SEQ ID NO: 3832533 - DNA, 25 bp, Homo sapien
tcaattagtagctaatggcaatgcc

SEQ ID NO: 3832534 - DNA, 25 bp, Homo sapien
taagctggagttaccttgctactgg

SEQ ID NO: 3832535 - DNA, 25 bp, Homo sapien
gctactggccccaagtatcaattag

SEQ ID NO: 3832536 - DNA, 25 bp, Homo sapien
ttccatcaactgttcttcttcttgc

SEQ ID NO: 3832537 - DNA, 25 bp, Homo sapien
ttcttttgagcagcttccttctttt

SEQ ID NO: 3832538 - DNA, 25 bp, Homo sapien
cttttcttccatcaactgttcttct

SEQ ID NO: 3832539 - DNA, 25 bp, Homo sapien
tttcttccatcaactgttcttcttc

SEQ ID NO: 3832540 - DNA, 25 bp, Homo sapien
tacaggctaccaagtatttctgagt

SEQ ID NO: 3832541 - DNA, 25 bp, Homo sapien
tcttcagagttctacccttggttcc

SEQ ID NO: 3832542 - DNA, 25 bp, Homo sapien
ggaacctgcgagtcaatctaagctg

SEQ ID NO: 3832543 - DNA, 25 bp, Homo sapien
ttgacatagtaggagatgagtgccc

SEQ ID NO: 3832544 - DNA, 25 bp, Homo sapien
gagacacctagtgctcagagagctt

SEQ ID NO: 3832545 - DNA, 25 bp, Homo sapien
tcagcactcagtctagaatccagat

SEQ ID NO: 3832546 - DNA, 25 bp, Homo sapien
gactgtaagagaacacctaactgcc

SEQ ID NO: 3832547 - DNA, 25 bp, Homo sapien
catgttaccaccaaggttactgaga

SEQ ID NO: 3832548 - DNA, 25 bp, Homo sapien
ggagtcttgctccaccacgtaagtg

SEQ ID NO: 3832549 - DNA, 25 bp, Homo sapien
tgccaaacaaccagtcaactagcta

SEQ ID NO: 3832550 - DNA, 25 bp, Homo sapien
tagtaactccctaatattgaagcca

SEQ ID NO: 3832551 - DNA, 25 bp, Homo sapien
tatgggtaaaagctatagtaactcc

SEQ ID NO: 3832552 - DNA, 25 bp, Homo sapien
taatgggtgctgttcaaacctgaca

SEQ ID NO: 3832553 - DNA, 25 bp, Homo sapien
tatcactccgatgtcttttgcttgg

SEQ ID NO: 3832554 - DNA, 25 bp, Homo sapien
tgcctgtgccccaagagtcaaaaca

SEQ ID NO: 3832555 - DNA, 25 bp, Homo sapien
ggcttaataagttcagcacctgaga

SEQ ID NO: 3832556 - DNA, 25 bp, Homo sapien
caaggtcctttatactctgaaacac

SEQ ID NO: 3832557 - DNA, 25 bp, Homo sapien
catccaatttgttgtggtatcccac

SEQ ID NO: 3832558 - DNA, 25 bp, Homo sapien
aaaattagtgagaagcatggcactg

SEQ ID NO: 3832559 - DNA, 25 bp, Homo sapien
taggtggattatcacatatgcgcct

SEQ ID NO: 3832560 - DNA, 25 bp, Homo sapien
cagggaccttcggccaagacaacaa

SEQ ID NO: 3832561 - DNA, 25 bp, Homo sapien
ggaccttcggccaagacaacaactc

SEQ ID NO: 3832562 - DNA, 25 bp, Homo sapien
accttcggccaagacaacaactcat

SEQ ID NO: 3832563 - DNA, 25 bp, Homo sapien
ggcccagggaccttcggccaagaca

SEQ ID NO: 3832564 - DNA, 25 bp, Homo sapien
gcattattattagtgctggttgctg

SEQ ID NO: 3832565 - DNA, 25 bp, Homo sapien
ggctgtagctcgcttggcattatta

SEQ ID NO: 3832566 - DNA, 25 bp, Homo sapien
ctggttgctgtggaagtgccgttat

SEQ ID NO: 3832567 - DNA, 25 bp, Homo sapien
tacactgggctttatctgttctggc

SEQ ID NO: 3832568 - DNA, 25 bp, Homo sapien
cacgaggataccgaggcaaggcctg

SEQ ID NO: 3832569 - DNA, 25 bp, Homo sapien
acgaggataccgaggcaaggcctgt

SEQ ID NO: 3832570 - DNA, 25 bp, Homo sapien
cttcacgaggataccgaggcaaggc

SEQ ID NO: 3832571 - DNA, 25 bp, Homo sapien
ttcacgaggataccgaggcaaggcc

SEQ ID NO: 3832572 - DNA, 25 bp, Homo sapien
ctataacaggaaaatgctgacccct

SEQ ID NO: 3832573 - DNA, 25 bp, Homo sapien
aatgctgacccctctttagaagctg

SEQ ID NO: 3832574 - DNA, 25 bp, Homo sapien
gacccctctttagaagctgtttgtg

SEQ ID NO: 3832575 - DNA, 25 bp, Homo sapien
aggaaaatgctgacccctctttaga

SEQ ID NO: 3832576 - DNA, 25 bp, Homo sapien
tctgactggctgtttaacaccttaa

SEQ ID NO: 3832577 - DNA, 25 bp, Homo sapien
tggctgtttaacaccttaacagcag

SEQ ID NO: 3832578 - DNA, 25 bp, Homo sapien
gactggctgtttaacaccttaacag

SEQ ID NO: 3832579 - DNA, 25 bp, Homo sapien
ctgtttaacaccttaacagcagatc

SEQ ID NO: 3832580 - DNA, 25 bp, Homo sapien
acagcatggtggttacaagcatatc

SEQ ID NO: 3832581 - DNA, 25 bp, Homo sapien
ttcctcattaccaatcacatcctgt

SEQ ID NO: 3832582 - DNA, 25 bp, Homo sapien
ggagtcagacagatcttgatgtgag

SEQ ID NO: 3832583 - DNA, 25 bp, Homo sapien
tcacatcctgtatgttgccaaagca

SEQ ID NO: 3832584 - DNA, 25 bp, Homo sapien
tcatcaatactactatttggtccag

SEQ ID NO: 3832585 - DNA, 25 bp, Homo sapien
catcaatactactatttggtccagt

SEQ ID NO: 3832586 - DNA, 25 bp, Homo sapien
tcaatactactatttggtccagttt

SEQ ID NO: 3832587 - DNA, 25 bp, Homo sapien
tgtcatcaatactactatttggtcc

SEQ ID NO: 3832588 - DNA, 25 bp, Homo sapien
caggtaaggagaagtgaatagccaa

SEQ ID NO: 3832589 - DNA, 25 bp, Homo sapien
catggaaagacaggtaaggagaagt

SEQ ID NO: 3832590 - DNA, 25 bp, Homo sapien
caacccaggcatagaagcctgacat

SEQ ID NO: 3832591 - DNA, 25 bp, Homo sapien
taggaggcagctacgcattaggata

SEQ ID NO: 3832592 - DNA, 25 bp, Homo sapien
gatcctagaggacataacagcccct

SEQ ID NO: 3832593 - DNA, 25 bp, Homo sapien
tgtggctcctcaatttaacaagcta

SEQ ID NO: 3832594 - DNA, 25 bp, Homo sapien
cagaatggtgacaagggcactggtt

SEQ ID NO: 3832595 - DNA, 25 bp, Homo sapien
gcactggttatcttctagccaccaa

SEQ ID NO: 3832596 - DNA, 25 bp, Homo sapien
ttctgaagccaactccggatcactg

SEQ ID NO: 3832597 - DNA, 25 bp, Homo sapien
caggtccccgctgggaattttcata

SEQ ID NO: 3832598 - DNA, 25 bp, Homo sapien
tttccgacaagtcacttacaacagc

SEQ ID NO: 3832599 - DNA, 25 bp, Homo sapien
tgctagaatcacttgtagaagacac

SEQ ID NO: 3832600 - DNA, 25 bp, Homo sapien
tgtgttccctgaagccatgatagtg

SEQ ID NO: 3832601 - DNA, 25 bp, Homo sapien
gattcattgtgctcacacgccaggc

SEQ ID NO: 3832602 - DNA, 25 bp, Homo sapien
ggtagaaccaccactcactttagag

SEQ ID NO: 3832603 - DNA, 25 bp, Homo sapien
caagtccagtgctattccgaaggcc

SEQ ID NO: 3832604 - DNA, 25 bp, Homo sapien
taggaccatttacgccaggctgcat

SEQ ID NO: 3832605 - DNA, 25 bp, Homo sapien
cagagttggacaggacacgtggatc

SEQ ID NO: 3832606 - DNA, 25 bp, Homo sapien
cattagggcctgaacatttgtctcc

SEQ ID NO: 3832607 - DNA, 25 bp, Homo sapien
gattagactttggagggtctcccca

SEQ ID NO: 3832608 - DNA, 25 bp, Homo sapien
gttatacaaatcttataataacagt

SEQ ID NO: 3832609 - DNA, 25 bp, Homo sapien
tttgtgtgcatatccaagtactttg

SEQ ID NO: 3832610 - DNA, 25 bp, Homo sapien
cagcctttgtgtgcatatccaagta

SEQ ID NO: 3832611 - DNA, 25 bp, Homo sapien
gtaagaacagcctttgtgtgcatat

SEQ ID NO: 3832612 - DNA, 25 bp, Homo sapien
cactgccaaaagtggagttctgttc

SEQ ID NO: 3832613 - DNA, 25 bp, Homo sapien
tgtgcaggactcaaacaacactgcc

SEQ ID NO: 3832614 - DNA, 25 bp, Homo sapien
aattcagtgccaaaaagttagctca

SEQ ID NO: 3832615 - DNA, 25 bp, Homo sapien
aaacaacttggagaagtgtacagca

SEQ ID NO: 3832616 - DNA, 25 bp, Homo sapien
ggcttcatcttagatacatacttct

SEQ ID NO: 3832617 - DNA, 25 bp, Homo sapien
gctaacaataatgggtcacctactt

SEQ ID NO: 3832618 - DNA, 25 bp, Homo sapien
acaccacctacactggaaaaacaat

SEQ ID NO: 3832619 - DNA, 25 bp, Homo sapien
aacaatttactacccagctaacaat

SEQ ID NO: 3832620 - DNA, 25 bp, Homo sapien
catatgctgaacaatgcttatttta

SEQ ID NO: 3832621 - DNA, 25 bp, Homo sapien
caaaccttgtaaattggagcaggtg

SEQ ID NO: 3832622 - DNA, 25 bp, Homo sapien
atcagtttaattcctgaaaaagtca

SEQ ID NO: 3832623 - DNA, 25 bp, Homo sapien
catcagtttaattcctgaaaaagtc

SEQ ID NO: 3832624 - DNA, 25 bp, Homo sapien
agcatcagtttaattcctgaaaaag

SEQ ID NO: 3832625 - DNA, 25 bp, Homo sapien
tcccattaatataaggtgagaattt

SEQ ID NO: 3832626 - DNA, 25 bp, Homo sapien
aaagatggcatctgttttatgttaa

SEQ ID NO: 3832627 - DNA, 25 bp, Homo sapien
ggtgcagtggaataagggacaataa

SEQ ID NO: 3832628 - DNA, 25 bp, Homo sapien
caaactatttcccattaatataagg

SEQ ID NO: 3832629 - DNA, 25 bp, Homo sapien
tggatgccgcagcaatgggttcccc

SEQ ID NO: 3832630 - DNA, 25 bp, Homo sapien
gctgaagtaccattatccacagttg

SEQ ID NO: 3832631 - DNA, 25 bp, Homo sapien
ggaccactgtctatgggcttacccc

SEQ ID NO: 3832632 - DNA, 25 bp, Homo sapien
gccccacgtggatgtgctggatgcc

SEQ ID NO: 3832633 - DNA, 25 bp, Homo sapien
tatttaattatagtcagtgagtgtt

SEQ ID NO: 3832634 - DNA, 25 bp, Homo sapien
ctgctacataacagctaccaggcat

SEQ ID NO: 3832635 - DNA, 25 bp, Homo sapien
cagctaccaggcattgtcaataact

SEQ ID NO: 3832636 - DNA, 25 bp, Homo sapien
tacataacagctaccaggcattgtc

SEQ ID NO: 3832637 - DNA, 25 bp, Homo sapien
gctacactagttggcctctcaggct

SEQ ID NO: 3832638 - DNA, 25 bp, Homo sapien
tatttttagggagaatggccagaga

SEQ ID NO: 3832639 - DNA, 25 bp, Homo sapien
tgaacatggacaatggtagcactct

SEQ ID NO: 3832640 - DNA, 25 bp, Homo sapien
ccttgggattcctaccgggcatctt

SEQ ID NO: 3832641 - DNA, 25 bp, Homo sapien
ttgtgatataaagagaaacatactt

SEQ ID NO: 3832642 - DNA, 25 bp, Homo sapien
ctgattgtggatttgtgatataaag

SEQ ID NO: 3832643 - DNA, 25 bp, Homo sapien
tggatttgtgatataaagagaaaca

SEQ ID NO: 3832644 - DNA, 25 bp, Homo sapien
gatttgtgatataaagagaaacata

SEQ ID NO: 3832645 - DNA, 25 bp, Homo sapien
atatggtggccaatttaaagatgag

SEQ ID NO: 3832646 - DNA, 25 bp, Homo sapien
tactattccacattccaatctccac

SEQ ID NO: 3832647 - DNA, 25 bp, Homo sapien
taaagatgagttaagctcttgagat

SEQ ID NO: 3832648 - DNA, 25 bp, Homo sapien
gggcgatttccaggcaatggcatat

SEQ ID NO: 3832649 - DNA, 25 bp, Homo sapien
gaagagagaaatcccaagctgtagc

SEQ ID NO: 3832650 - DNA, 25 bp, Homo sapien
ttatgtttctctaggtggctgccca

SEQ ID NO: 3832651 - DNA, 25 bp, Homo sapien
tgtactgaccgccagaaatgggcag

SEQ ID NO: 3832652 - DNA, 25 bp, Homo sapien
catgggatttcgatgtacagccagc

SEQ ID NO: 3832653 - DNA, 25 bp, Homo sapien
ccttctcctttttttgccactcaga

SEQ ID NO: 3832654 - DNA, 25 bp, Homo sapien
tcccttctcctttttttgccactca

SEQ ID NO: 3832655 - DNA, 25 bp, Homo sapien
ttctcctttttttgccactcagacc

SEQ ID NO: 3832656 - DNA, 25 bp, Homo sapien
cttctcctttttttgccactcagac

SEQ ID NO: 3832657 - DNA, 25 bp, Homo sapien
ccgaaaggtgaaactcatatcttag

SEQ ID NO: 3832658 - DNA, 25 bp, Homo sapien
taatgccccatactagactgtgagc

SEQ ID NO: 3832659 - DNA, 25 bp, Homo sapien
tgacacttctatgaagctctcctaa

SEQ ID NO: 3832660 - DNA, 25 bp, Homo sapien
tgtgagctcccgaaaggtgaaactc

SEQ ID NO: 3832661 - DNA, 25 bp, Homo sapien
atggatttatccacgcttcttcttg

SEQ ID NO: 3832662 - DNA, 25 bp, Homo sapien
taacaaatggatttatccacgcttc

SEQ ID NO: 3832663 - DNA, 25 bp, Homo sapien
tttatccacgcttcttcttgtttgt

SEQ ID NO: 3832664 - DNA, 25 bp, Homo sapien
caaatggatttatccacgcttcttc

SEQ ID NO: 3832665 - DNA, 25 bp, Homo sapien
aaggtccatcttattgctttgtaca

SEQ ID NO: 3832666 - DNA, 25 bp, Homo sapien
ccagaaaggtccatcttattgcttt

SEQ ID NO: 3832667 - DNA, 25 bp, Homo sapien
ggtccatcttattgctttgtacatt

SEQ ID NO: 3832668 - DNA, 25 bp, Homo sapien
gaaaggtccatcttattgctttgta

SEQ ID NO: 3832669 - DNA, 25 bp, Homo sapien
ggatgtgcgtgtccctcaatgagga

SEQ ID NO: 3832670 - DNA, 25 bp, Homo sapien
tgtcctgatctacgtcagggctctt

SEQ ID NO: 3832671 - DNA, 25 bp, Homo sapien
tgtacgtctattggagagcacagcc

SEQ ID NO: 3832672 - DNA, 25 bp, Homo sapien
gctctttcagtagaatcatgtcatg

SEQ ID NO: 3832673 - DNA, 25 bp, Homo sapien
tttttccttcgccagctagcactga

SEQ ID NO: 3832674 - DNA, 25 bp, Homo sapien
ccattgtaccggacaaatgcgtgca

SEQ ID NO: 3832675 - DNA, 25 bp, Homo sapien
tctgtgcggatgactgacttatttc

SEQ ID NO: 3832676 - DNA, 25 bp, Homo sapien
cagaaatacagagttgcgttgccat

SEQ ID NO: 3832677 - DNA, 25 bp, Homo sapien
gtgtctccggtgagatacctctcca

SEQ ID NO: 3832678 - DNA, 25 bp, Homo sapien
ttttcccaggactctagagggcaga

SEQ ID NO: 3832679 - DNA, 25 bp, Homo sapien
aggttccaccagcacgacatcatag

SEQ ID NO: 3832680 - DNA, 25 bp, Homo sapien
aaaaggttcacattctggacacaga

SEQ ID NO: 3832681 - DNA, 25 bp, Homo sapien
agaaactcaaatgtggcaatctccc

SEQ ID NO: 3832682 - DNA, 25 bp, Homo sapien
ccttttgaaagagtagtagcagctg

SEQ ID NO: 3832683 - DNA, 25 bp, Homo sapien
aaaagagagtagcatgttacatttt

SEQ ID NO: 3832684 - DNA, 25 bp, Homo sapien
tagttaccaatgactacccctgagc

SEQ ID NO: 3832685 - DNA, 25 bp, Homo sapien
atctccctattcctcattcttgacg

SEQ ID NO: 3832686 - DNA, 25 bp, Homo sapien
tagctaagaagtactgttccagtca

SEQ ID NO: 3832687 - DNA, 25 bp, Homo sapien
ttacctttactactctcattccagg

SEQ ID NO: 3832688 - DNA, 25 bp, Homo sapien
tcattgtcactgttaacacaggttt

SEQ ID NO: 3832689 - DNA, 25 bp, Homo sapien
catgctgagctcacctcgggtgctt

SEQ ID NO: 3832690 - DNA, 25 bp, Homo sapien
tgacaaagtagactcagggtctcag

SEQ ID NO: 3832691 - DNA, 25 bp, Homo sapien
cgggtgcttcttcaatgctgggata

SEQ ID NO: 3832692 - DNA, 25 bp, Homo sapien
gctgggatactctgcggctgacaaa

SEQ ID NO: 3832693 - DNA, 25 bp, Homo sapien
tattattagtagagatgtaggtttc

SEQ ID NO: 3832694 - DNA, 25 bp, Homo sapien
tagacagtctcgctttgtggcccag

SEQ ID NO: 3832695 - DNA, 25 bp, Homo sapien
ttacaggagtgtaccactacacctg

SEQ ID NO: 3832696 - DNA, 25 bp, Homo sapien
tacacctgactattttttgtattat

SEQ ID NO: 3832697 - DNA, 25 bp, Homo sapien
gaaatgacttcagccaagacaaggg

SEQ ID NO: 3832698 - DNA, 25 bp, Homo sapien
tgaagtcgcaattaggagatactgt

SEQ ID NO: 3832699 - DNA, 25 bp, Homo sapien
tgcattcctcacaaatgaagtcgca

SEQ ID NO: 3832700 - DNA, 25 bp, Homo sapien
ggaagacaacccaattggtttcaga

SEQ ID NO: 3832701 - DNA, 25 bp, Homo sapien
tgcgctccatggaagactctttgga

SEQ ID NO: 3832702 - DNA, 25 bp, Homo sapien
cttatcaaaataaggattgcgctcc

SEQ ID NO: 3832703 - DNA, 25 bp, Homo sapien
ccgaccgttcgattgtaatcaccaa

SEQ ID NO: 3832704 - DNA, 25 bp, Homo sapien
aatcaccaatatttaggctatgttt

SEQ ID NO: 3832705 - DNA, 25 bp, Homo sapien
tgcaacctctatgataaattgagac

SEQ ID NO: 3832706 - DNA, 25 bp, Homo sapien
gaaaacagaagagatcggattagtg

SEQ ID NO: 3832707 - DNA, 25 bp, Homo sapien
ttctagagcacacaaaaagagccaa

SEQ ID NO: 3832708 - DNA, 25 bp, Homo sapien
gacagaaagatgtgcaacaccagcc

SEQ ID NO: 3832709 - DNA, 25 bp, Homo sapien
gttaggtagtgcactatttgaaggg

SEQ ID NO: 3832710 - DNA, 25 bp, Homo sapien
catgttttgggattcatctgctaca

SEQ ID NO: 3832711 - DNA, 25 bp, Homo sapien
taaactgcatgttttgggattcatc

SEQ ID NO: 3832712 - DNA, 25 bp, Homo sapien
agggcctggttaggtagtgcactat

SEQ ID NO: 3832713 - DNA, 25 bp, Homo sapien
taccacactgtactatgatttaaac

SEQ ID NO: 3832714 - DNA, 25 bp, Homo sapien
tactaatacaaatcattcaactgag

SEQ ID NO: 3832715 - DNA, 25 bp, Homo sapien
gtaacagtgggattctttagggaca

SEQ ID NO: 3832716 - DNA, 25 bp, Homo sapien
cagtaactacatgtaagagagatct

SEQ ID NO: 3832717 - DNA, 25 bp, Homo sapien
acttgagcacggagattaggctgag

SEQ ID NO: 3832718 - DNA, 25 bp, Homo sapien
caccaaacatactgggattgccatt

SEQ ID NO: 3832719 - DNA, 25 bp, Homo sapien
gattaggctgagatgaactaagagg

SEQ ID NO: 3832720 - DNA, 25 bp, Homo sapien
agtaatggaggaggcacttgagcac

SEQ ID NO: 3832721 - DNA, 25 bp, Homo sapien
tcgtgggttaagtaaaagatgacag

SEQ ID NO: 3832722 - DNA, 25 bp, Homo sapien
gaggtgcatcttaaactagtcaatt

SEQ ID NO: 3832723 - DNA, 25 bp, Homo sapien
taactcacactaactacacgtactg

SEQ ID NO: 3832724 - DNA, 25 bp, Homo sapien
cctttttgcaggtaaacaggagaat

SEQ ID NO: 3832725 - DNA, 25 bp, Homo sapien
tcaggccaccgttgtttggtgcata

SEQ ID NO: 3832726 - DNA, 25 bp, Homo sapien
caaagagtggattcaggccaccgtt

SEQ ID NO: 3832727 - DNA, 25 bp, Homo sapien
agagtggattcaggccaccgttgtt

SEQ ID NO: 3832728 - DNA, 25 bp, Homo sapien
tggattcaggccaccgttgtttggt

SEQ ID NO: 3832729 - DNA, 25 bp, Homo sapien
agaaagctggtttagctgggatagc

SEQ ID NO: 3832730 - DNA, 25 bp, Homo sapien
gaaagctggtttagctgggatagct

SEQ ID NO: 3832731 - DNA, 25 bp, Homo sapien
aaagctggtttagctgggatagctg

SEQ ID NO: 3832732 - DNA, 25 bp, Homo sapien
aagctccatgaggactatgactacg

SEQ ID NO: 3832733 - DNA, 25 bp, Homo sapien
tagtgcactatgtcccgcacagagt

SEQ ID NO: 3832734 - DNA, 25 bp, Homo sapien
gactacgcctgttttgtttagtgca

SEQ ID NO: 3832735 - DNA, 25 bp, Homo sapien
tgtcccgcacagagtctagtgtttg

SEQ ID NO: 3832736 - DNA, 25 bp, Homo sapien
ctgcggccggttcccagaaggcacg

SEQ ID NO: 3832737 - DNA, 25 bp, Homo sapien
ttctctgactctgcgccctttgctg

SEQ ID NO: 3832738 - DNA, 25 bp, Homo sapien
ccctttgctgctgcgctaacaatcg

SEQ ID NO: 3832739 - DNA, 25 bp, Homo sapien
gccggttcccagaaggcacgcttct

SEQ ID NO: 3832740 - DNA, 25 bp, Homo sapien
ttgacgagattgttgcatcatttgc

SEQ ID NO: 3832741 - DNA, 25 bp, Homo sapien
tttgctgctgcacactaagaggtcg

SEQ ID NO: 3832742 - DNA, 25 bp, Homo sapien
tggatcaagttgacgagattgttgc

SEQ ID NO: 3832743 - DNA, 25 bp, Homo sapien
gaaagcatttattggtgatggccct

SEQ ID NO: 3832744 - DNA, 25 bp, Homo sapien
atttacattcaagtttgagttcaag

SEQ ID NO: 3832745 - DNA, 25 bp, Homo sapien
tttacattcaagtttgagttcaagc

SEQ ID NO: 3832746 - DNA, 25 bp, Homo sapien
gaaatgctgtccactgtcgtccact

SEQ ID NO: 3832747 - DNA, 25 bp, Homo sapien
gactgtggctctttaatactgttca

SEQ ID NO: 3832748 - DNA, 25 bp, Homo sapien
gtccacttccttagtcttgactgtg

SEQ ID NO: 3832749 - DNA, 25 bp, Homo sapien
ttgatccaaagatgtgttcacagaa

SEQ ID NO: 3832750 - DNA, 25 bp, Homo sapien
ggtggccaattaacactgctagagc

SEQ ID NO: 3832751 - DNA, 25 bp, Homo sapien
ctagagccgttaggcgatttggcac

SEQ ID NO: 3832752 - DNA, 25 bp, Homo sapien
catagggaacaaatggagactcttc

SEQ ID NO: 3832753 - DNA, 25 bp, Homo sapien
cagcctgaaaccacttgaaatagca

SEQ ID NO: 3832754 - DNA, 25 bp, Homo sapien
aacacagtctcatgaaagaaagtgt

SEQ ID NO: 3832755 - DNA, 25 bp, Homo sapien
cttaatggaaacacagtctcatgaa

SEQ ID NO: 3832756 - DNA, 25 bp, Homo sapien
tggaaacacagtctcatgaaagaaa

SEQ ID NO: 3832757 - DNA, 25 bp, Homo sapien
taatggaaacacagtctcatgaaag

SEQ ID NO: 3832758 - DNA, 25 bp, Homo sapien
tcagtagtaagtccagatgtaacaa

SEQ ID NO: 3832759 - DNA, 25 bp, Homo sapien
tctcatccgcacacgtcagtctaag

SEQ ID NO: 3832760 - DNA, 25 bp, Homo sapien
taagcacgccgatctgggctacatc

SEQ ID NO: 3832761 - DNA, 25 bp, Homo sapien
tctgggctacatcagtagtaagtcc

SEQ ID NO: 3832762 - DNA, 25 bp, Homo sapien
cataaaggcataggtaacaggctga

SEQ ID NO: 3832763 - DNA, 25 bp, Homo sapien
tcacaaagctactgcaactcaggta

SEQ ID NO: 3832764 - DNA, 25 bp, Homo sapien
gaatgaaaatactgcaagttactcc

SEQ ID NO: 3832765 - DNA, 25 bp, Homo sapien
gacacaacttacgagaaacagcgaa

SEQ ID NO: 3832766 - DNA, 25 bp, Homo sapien
actgaaatcatctcactgaatgtga

SEQ ID NO: 3832767 - DNA, 25 bp, Homo sapien
ctaagaggatggttcagttaataca

SEQ ID NO: 3832768 - DNA, 25 bp, Homo sapien
caatttacactaatactctaagagg

SEQ ID NO: 3832769 - DNA, 25 bp, Homo sapien
tcctgaatcctatgcaactctcaaa

SEQ ID NO: 3832770 - DNA, 25 bp, Homo sapien
tgaggtggtcaacttcccgcacagt

SEQ ID NO: 3832771 - DNA, 25 bp, Homo sapien
gataacctttccatggctcaccagg

SEQ ID NO: 3832772 - DNA, 25 bp, Homo sapien
cgtaagggtcagtttcagggtcaat

SEQ ID NO: 3832773 - DNA, 25 bp, Homo sapien
agattgtttatgacactgccaggag

SEQ ID NO: 3832774 - DNA, 25 bp, Homo sapien
taaactgtgttaagtgtcactcaga

SEQ ID NO: 3832775 - DNA, 25 bp, Homo sapien
tcaagtgatcccagagtaccctggg

SEQ ID NO: 3832776 - DNA, 25 bp, Homo sapien
gagtagctgggtactacatgagcca

SEQ ID NO: 3832777 - DNA, 25 bp, Homo sapien
tacatgagccattcttaaactgtgt

SEQ ID NO: 3832778 - DNA, 25 bp, Homo sapien
taaggcacctggtcacagacactac

SEQ ID NO: 3832779 - DNA, 25 bp, Homo sapien
cattacgcgatatattcaggctccc

SEQ ID NO: 3832780 - DNA, 25 bp, Homo sapien
tctagttgagctctagacccgacca

SEQ ID NO: 3832781 - DNA, 25 bp, Homo sapien
gcttagtgttcccatagcgggcaga

SEQ ID NO: 3832782 - DNA, 25 bp, Homo sapien
cagagaaatcaaagctaacagtatg

SEQ ID NO: 3832783 - DNA, 25 bp, Homo sapien
ggaagagtccaatcagccaccagag

SEQ ID NO: 3832784 - DNA, 25 bp, Homo sapien
gaaatcaaagctaacagtatgccac

SEQ ID NO: 3832785 - DNA, 25 bp, Homo sapien
tgggggaagagtccaatcagccacc

SEQ ID NO: 3832786 - DNA, 25 bp, Homo sapien
gaacgttgtagttggaggcacgaat

SEQ ID NO: 3832787 - DNA, 25 bp, Homo sapien
tttgtgctgtactgctgaggggaac

SEQ ID NO: 3832788 - DNA, 25 bp, Homo sapien
actagttgaaggcagcgtggtgttc

SEQ ID NO: 3832789 - DNA, 25 bp, Homo sapien
gaggcacgaatggatgaccaggcac

SEQ ID NO: 3832790 - DNA, 25 bp, Homo sapien
catttaattacagagctgctgtggc

SEQ ID NO: 3832791 - DNA, 25 bp, Homo sapien
tagatgactgctgggtacagtaagt

SEQ ID NO: 3832792 - DNA, 25 bp, Homo sapien
tcctccgctgcagatagtctgagaa

SEQ ID NO: 3832793 - DNA, 25 bp, Homo sapien
attaaaacaacagccgcggctctgg

SEQ ID NO: 3832794 - DNA, 25 bp, Homo sapien
caagggtggcttctgaccagtcagt

SEQ ID NO: 3832795 - DNA, 25 bp, Homo sapien
ggagaattatcccacgtagacaagg

SEQ ID NO: 3832796 - DNA, 25 bp, Homo sapien
cagctcatgagccagagaggtgttt

SEQ ID NO: 3832797 - DNA, 25 bp, Homo sapien
gtaactgaaccaggagaccatgtca

SEQ ID NO: 3832798 - DNA, 25 bp, Homo sapien
ctggggtatatctggcgtcagaatt

SEQ ID NO: 3832799 - DNA, 25 bp, Homo sapien
agaatttcagctcgccctagccatg

SEQ ID NO: 3832800 - DNA, 25 bp, Homo sapien
tacagttacttagcagatcacctgg

SEQ ID NO: 3832801 - DNA, 25 bp, Homo sapien
tgcacttctacatgggaggctttct

SEQ ID NO: 3832802 - DNA, 25 bp, Homo sapien
tttccaggactgaaagagcccaact

SEQ ID NO: 3832803 - DNA, 25 bp, Homo sapien
gaacaagccaatttgttattctccc

SEQ ID NO: 3832804 - DNA, 25 bp, Homo sapien
tttagaacaagccaatttgttattc

SEQ ID NO: 3832805 - DNA, 25 bp, Homo sapien
caatttgttattctccctgagctgc

SEQ ID NO: 3832806 - DNA, 25 bp, Homo sapien
gccaatttgttattctccctgagct

SEQ ID NO: 3832807 - DNA, 25 bp, Homo sapien
cacagagtgcgcagagttgagccat

SEQ ID NO: 3832808 - DNA, 25 bp, Homo sapien
cagagtgcgcagagttgagccatcg

SEQ ID NO: 3832809 - DNA, 25 bp, Homo sapien
gagtgcgcagagttgagccatcgat

SEQ ID NO: 3832810 - DNA, 25 bp, Homo sapien
gcacagagtgcgcagagttgagcca

SEQ ID NO: 3832811 - DNA, 25 bp, Homo sapien
acctcttcttttgaactgtagcgga

SEQ ID NO: 3832812 - DNA, 25 bp, Homo sapien
tagcggaccagagcatttccgtgag

SEQ ID NO: 3832813 - DNA, 25 bp, Homo sapien
cagagcatttccgtgagggaggttc

SEQ ID NO: 3832814 - DNA, 25 bp, Homo sapien
tggaatgtgatcagcgggccgtgct

SEQ ID NO: 3832815 - DNA, 25 bp, Homo sapien
gcaagaatagtagtgttccccagta

SEQ ID NO: 3832816 - DNA, 25 bp, Homo sapien
gagactggctttgtgcaaagaaacg

SEQ ID NO: 3832817 - DNA, 25 bp, Homo sapien
aaacgactgatctcctcttcactgg

SEQ ID NO: 3832818 - DNA, 25 bp, Homo sapien
gagagactgccagccgggagaaggg

SEQ ID NO: 3832819 - DNA, 25 bp, Homo sapien
cccagagtgaagtgccgtgaaggtc

SEQ ID NO: 3832820 - DNA, 25 bp, Homo sapien
cgttaatgggagatgggctgctaat

SEQ ID NO: 3832821 - DNA, 25 bp, Homo sapien
gaaggtctccacagttagttcccga

SEQ ID NO: 3832822 - DNA, 25 bp, Homo sapien
tccagtgattgagatcggtccggct

SEQ ID NO: 3832823 - DNA, 25 bp, Homo sapien
gtgctcctttccctcgcgtctgagg

SEQ ID NO: 3832824 - DNA, 25 bp, Homo sapien
ggcgagccccacttagtgctccttt

SEQ ID NO: 3832825 - DNA, 25 bp, Homo sapien
gtcccggtcggtgagtctgcatcta

SEQ ID NO: 3832826 - DNA, 25 bp, Homo sapien
gagaatagctgttcccacaggcggc

SEQ ID NO: 3832827 - DNA, 25 bp, Homo sapien
tctacggtttagcatgtatggcgct

SEQ ID NO: 3832828 - DNA, 25 bp, Homo sapien
tcaaggcatagtagagagcgcacgc

SEQ ID NO: 3832829 - DNA, 25 bp, Homo sapien
caataaggtaggcaacatcaaggca

SEQ ID NO: 3832830 - DNA, 25 bp, Homo sapien
catgatgaatagacacaagcgagct

SEQ ID NO: 3832831 - DNA, 25 bp, Homo sapien
gttttcctgagaaccatgctctttg

SEQ ID NO: 3832832 - DNA, 25 bp, Homo sapien
gaaacatatggagccacttgatggg

SEQ ID NO: 3832833 - DNA, 25 bp, Homo sapien
cagtcacgagagagcagaaacatat

SEQ ID NO: 3832834 - DNA, 25 bp, Homo sapien
tgcatcttaggacacaaacagttag

SEQ ID NO: 3832835 - DNA, 25 bp, Homo sapien
gatttttaatcggttgctctatgag

SEQ ID NO: 3832836 - DNA, 25 bp, Homo sapien
gagttttgagcaacaagatcccaaa

SEQ ID NO: 3832837 - DNA, 25 bp, Homo sapien
ggcgtttctcgctttgtaacagagg

SEQ ID NO: 3832838 - DNA, 25 bp, Homo sapien
taacagaggtatgagagtttaacac

SEQ ID NO: 3832839 - DNA, 25 bp, Homo sapien
catgatctgaagtcatacactgaaa

SEQ ID NO: 3832840 - DNA, 25 bp, Homo sapien
ctggcaagttggagcatgatctgaa

SEQ ID NO: 3832841 - DNA, 25 bp, Homo sapien
tgaaatccatacacaggtttcgccc

SEQ ID NO: 3832842 - DNA, 25 bp, Homo sapien
gaaatccatacacaggtttcgcccc

SEQ ID NO: 3832843 - DNA, 25 bp, Homo sapien
gcttatagtaaggtgtccgacaaca

SEQ ID NO: 3832844 - DNA, 25 bp, Homo sapien
ccaaggtcagaaggtcaatcagctt

SEQ ID NO: 3832845 - DNA, 25 bp, Homo sapien
tatatactactcaaagccccaaggt

SEQ ID NO: 3832846 - DNA, 25 bp, Homo sapien
agcttaacgctccaaacatttccag

SEQ ID NO: 3832847 - DNA, 25 bp, Homo sapien
gccactatcatcgatctgagaaggt

SEQ ID NO: 3832848 - DNA, 25 bp, Homo sapien
tacaaagactagagagagcctattc

SEQ ID NO: 3832849 - DNA, 25 bp, Homo sapien
gagcctattcagcatgtggtggcct

SEQ ID NO: 3832850 - DNA, 25 bp, Homo sapien
tcctcaggtgtcaataggtgacagc

SEQ ID NO: 3832851 - DNA, 25 bp, Homo sapien
aatttgatcctctgggtcaagggcc

SEQ ID NO: 3832852 - DNA, 25 bp, Homo sapien
cctgaatttgatcctctgggtcaag

SEQ ID NO: 3832853 - DNA, 25 bp, Homo sapien
gaccttgtcgtcattccccggttca

SEQ ID NO: 3832854 - DNA, 25 bp, Homo sapien
caagggccccaatttgaccttgtcg

SEQ ID NO: 3832855 - DNA, 25 bp, Homo sapien
tcaaggtccatatgggttccagttc

SEQ ID NO: 3832856 - DNA, 25 bp, Homo sapien
cgagacacccctctgcacatttgaa

SEQ ID NO: 3832857 - DNA, 25 bp, Homo sapien
tggtctctgtcaaggtccatatggg

SEQ ID NO: 3832858 - DNA, 25 bp, Homo sapien
ttccagttctggcttttgttccgag

SEQ ID NO: 3832859 - DNA, 25 bp, Homo sapien
cccccattcatctcccagcctcttg

SEQ ID NO: 3832860 - DNA, 25 bp, Homo sapien
ggtgggttccgagcaggggtgacca

SEQ ID NO: 3832861 - DNA, 25 bp, Homo sapien
tgccagtgtgccacggggtcccact

SEQ ID NO: 3832862 - DNA, 25 bp, Homo sapien
catctttggtgggttccgagcaggg

SEQ ID NO: 3832863 - DNA, 25 bp, Homo sapien
gaccatcttccgtattcctagtagg

SEQ ID NO: 3832864 - DNA, 25 bp, Homo sapien
catcttgcaggtgttttgcccagca

SEQ ID NO: 3832865 - DNA, 25 bp, Homo sapien
cataaattgccacctgttgaagttg

SEQ ID NO: 3832866 - DNA, 25 bp, Homo sapien
tcctagtagggagcagatcataaat

SEQ ID NO: 3832867 - DNA, 25 bp, Homo sapien
atgctggcggcggatggaggggaca

SEQ ID NO: 3832868 - DNA, 25 bp, Homo sapien
gccaggagggacgtccagccacagc

SEQ ID NO: 3832869 - DNA, 25 bp, Homo sapien
aagtgccaggagggacgtccagcca

SEQ ID NO: 3832870 - DNA, 25 bp, Homo sapien
gtgccaggagggacgtccagccaca

SEQ ID NO: 3832871 - DNA, 25 bp, Homo sapien
cactgtcccgcctccacgctgggga

SEQ ID NO: 3832872 - DNA, 25 bp, Homo sapien
agtcttccactgtcccgcctccacg

SEQ ID NO: 3832873 - DNA, 25 bp, Homo sapien
ctccacgctggggacaggcaggctt

SEQ ID NO: 3832874 - DNA, 25 bp, Homo sapien
tggggacaggcaggcttgggacgag

SEQ ID NO: 3832875 - DNA, 25 bp, Homo sapien
ggggttggggagacgctggagccca

SEQ ID NO: 3832876 - DNA, 25 bp, Homo sapien
gttggggagacgctggagcccaagg

SEQ ID NO: 3832877 - DNA, 25 bp, Homo sapien
tggggagacgctggagcccaaggca

SEQ ID NO: 3832878 - DNA, 25 bp, Homo sapien
gggagacgctggagcccaaggcacc

SEQ ID NO: 3832879 - DNA, 25 bp, Homo sapien
cgtgaatgatctccccagggcagaa

SEQ ID NO: 3832880 - DNA, 25 bp, Homo sapien
attaaaggaagcgtgaatgatctcc

SEQ ID NO: 3832881 - DNA, 25 bp, Homo sapien
gaaggtgacatgtcccacgctctgc

SEQ ID NO: 3832882 - DNA, 25 bp, Homo sapien
ccaggacccttgaactctgagcagg

SEQ ID NO: 3832883 - DNA, 25 bp, Homo sapien
tacccgggatcctctctctttgcag

SEQ ID NO: 3832884 - DNA, 25 bp, Homo sapien
cttattccagatgcagggctcacct

SEQ ID NO: 3832885 - DNA, 25 bp, Homo sapien
gcttccggagacagcagtgaccctt

SEQ ID NO: 3832886 - DNA, 25 bp, Homo sapien
tccaagcgggtcaaactccaaactc

SEQ ID NO: 3832887 - DNA, 25 bp, Homo sapien
cccgggcaccctttgtcccttgcat

SEQ ID NO: 3832888 - DNA, 25 bp, Homo sapien
cactcggtgaagtgaccccgggcac

SEQ ID NO: 3832889 - DNA, 25 bp, Homo sapien
ccactcggtgaagtgaccccgggca

SEQ ID NO: 3832890 - DNA, 25 bp, Homo sapien
gaaacgcatccaggggatctaactg

SEQ ID NO: 3832891 - DNA, 25 bp, Homo sapien
gtacagaactagcaccgcgatgtcc

SEQ ID NO: 3832892 - DNA, 25 bp, Homo sapien
tccaggggatctaactgtggaggct

SEQ ID NO: 3832893 - DNA, 25 bp, Homo sapien
aaagaggaagtacagaactagcacc

SEQ ID NO: 3832894 - DNA, 25 bp, Homo sapien
ccaagaagtcgaggccggagtgagc

SEQ ID NO: 3832895 - DNA, 25 bp, Homo sapien
caccactgcgttctagtaccctgag

SEQ ID NO: 3832896 - DNA, 25 bp, Homo sapien
cgttctagtaccctgagcaacagag

SEQ ID NO: 3832897 - DNA, 25 bp, Homo sapien
tgagcccaagaagtcgaggccggag

SEQ ID NO: 3832898 - DNA, 25 bp, Homo sapien
cctcgtagatagtacctcctctgtg

SEQ ID NO: 3832899 - DNA, 25 bp, Homo sapien
aatatcaaggcaccgagaggtttgg

SEQ ID NO: 3832900 - DNA, 25 bp, Homo sapien
tatcaaggcaccgagaggtttggtg

SEQ ID NO: 3832901 - DNA, 25 bp, Homo sapien
tggtgagagcctgttcctcgtagat

SEQ ID NO: 3832902 - DNA, 25 bp, Homo sapien
gtgtctcttttggtcttcactgtgg

SEQ ID NO: 3832903 - DNA, 25 bp, Homo sapien
aggaagtagcctttcactgtgtctc

SEQ ID NO: 3832904 - DNA, 25 bp, Homo sapien
ctccagccaggaagtagcctttcac

SEQ ID NO: 3832905 - DNA, 25 bp, Homo sapien
gtcccctccagccaggaagtagcct

SEQ ID NO: 3832906 - DNA, 25 bp, Homo sapien
tattgggcagctaatgactgaaaag

SEQ ID NO: 3832907 - DNA, 25 bp, Homo sapien
tgtgtggccaccaaaatctatgctc

SEQ ID NO: 3832908 - DNA, 25 bp, Homo sapien
tcagggacactttctattgactgct

SEQ ID NO: 3832909 - DNA, 25 bp, Homo sapien
aaatgatgtcactggtaactctaga

SEQ ID NO: 3832910 - DNA, 25 bp, Homo sapien
gccaatgaaatgtccacttccaaca

SEQ ID NO: 3832911 - DNA, 25 bp, Homo sapien
cctgccaggccaatgaaatgtccac

SEQ ID NO: 3832912 - DNA, 25 bp, Homo sapien
agaaatgcccgtagcagcacctgac

SEQ ID NO: 3832913 - DNA, 25 bp, Homo sapien
tgctggcaaacaaggatgcacccac

SEQ ID NO: 3832914 - DNA, 25 bp, Homo sapien
caatgtagatgggtaggaagatcca

SEQ ID NO: 3832915 - DNA, 25 bp, Homo sapien
ctgaccagcaatgtagatgggtagg

SEQ ID NO: 3832916 - DNA, 25 bp, Homo sapien
tagatgggtaggaagatccaggcca

SEQ ID NO: 3832917 - DNA, 25 bp, Homo sapien
ggtaggaagatccaggccaacatca

SEQ ID NO: 3832918 - DNA, 25 bp, Homo sapien
ggattctgatgccaccgaagcgctt

SEQ ID NO: 3832919 - DNA, 25 bp, Homo sapien
tgatggggattctgatgccaccgaa

SEQ ID NO: 3832920 - DNA, 25 bp, Homo sapien
aagcgcttccgtaggtattctggca

SEQ ID NO: 3832921 - DNA, 25 bp, Homo sapien
tgatgccaccgaagcgcttccgtag

SEQ ID NO: 3832922 - DNA, 25 bp, Homo sapien
gtgaagatgtagataaataggtaga

SEQ ID NO: 3832923 - DNA, 25 bp, Homo sapien
tggtgaagatgtagataaataggta

SEQ ID NO: 3832924 - DNA, 25 bp, Homo sapien
agatgtagataaataggtagagtac

SEQ ID NO: 3832925 - DNA, 25 bp, Homo sapien
gaagatgtagataaataggtagagt

SEQ ID NO: 3832926 - DNA, 25 bp, Homo sapien
gggcctagcctagatgctgacaaac

SEQ ID NO: 3832927 - DNA, 25 bp, Homo sapien
atgaatgagtggacatttgcagcac

SEQ ID NO: 3832928 - DNA, 25 bp, Homo sapien
gaaaggaggttgatggatgaacaaa

SEQ ID NO: 3832929 - DNA, 25 bp, Homo sapien
agcacaggttccctgggatcagggc

SEQ ID NO: 3832930 - DNA, 25 bp, Homo sapien
gctggatgaagatggcacctgcata

SEQ ID NO: 3832931 - DNA, 25 bp, Homo sapien
ctgctggatgaagatggcacctgca

SEQ ID NO: 3832932 - DNA, 25 bp, Homo sapien
tgctggatgaagatggcacctgcat

SEQ ID NO: 3832933 - DNA, 25 bp, Homo sapien
ctggatgaagatggcacctgcatac

SEQ ID NO: 3832934 - DNA, 25 bp, Homo sapien
ccaggtacagatccaggtgcaaaga

SEQ ID NO: 3832935 - DNA, 25 bp, Homo sapien
cagcaaccgtgtatacagcagtgat

SEQ ID NO: 3832936 - DNA, 25 bp, Homo sapien
accgtgtatacagcagtgatggcca

SEQ ID NO: 3832937 - DNA, 25 bp, Homo sapien
gtgatggccagtagcccaactatgg

SEQ ID NO: 3832938 - DNA, 25 bp, Homo sapien
gagaaggggttactctgggtcacca

SEQ ID NO: 3832939 - DNA, 25 bp, Homo sapien
gggatgagcacggaggtgagggtca

SEQ ID NO: 3832940 - DNA, 25 bp, Homo sapien
gtgggatgagcacggaggtgagggt

SEQ ID NO: 3832941 - DNA, 25 bp, Homo sapien
ctggtgggatgagcacggaggtgag

SEQ ID NO: 3832942 - DNA, 25 bp, Homo sapien
tggtgggatgagcacggaggtgagg

SEQ ID NO: 3832943 - DNA, 25 bp, Homo sapien
gagcgctcctataagcatgatcagc

SEQ ID NO: 3832944 - DNA, 25 bp, Homo sapien
tgtagcccatcaaggtgagcgctcc

SEQ ID NO: 3832945 - DNA, 25 bp, Homo sapien
caaggtgagcgctcctataagcatg

SEQ ID NO: 3832946 - DNA, 25 bp, Homo sapien
tataagcatgatcagcgtctgcagg

SEQ ID NO: 3832947 - DNA, 25 bp, Homo sapien
tcacagtgtggagagcagatatccc

SEQ ID NO: 3832948 - DNA, 25 bp, Homo sapien
cagtgtggagagcagatatccctgc

SEQ ID NO: 3832949 - DNA, 25 bp, Homo sapien
gagagaggtgctgttgtccgcccca

SEQ ID NO: 3832950 - DNA, 25 bp, Homo sapien
aggtgctgttgtccgccccagtgac

SEQ ID NO: 3832951 - DNA, 25 bp, Homo sapien
cccggccacgggagatcagatgtca

SEQ ID NO: 3832952 - DNA, 25 bp, Homo sapien
tccgtgcaccagtaccagagggatg

SEQ ID NO: 3832953 - DNA, 25 bp, Homo sapien
ggatggacattccaaataggacccc

SEQ ID NO: 3832954 - DNA, 25 bp, Homo sapien
gcggatctcggaaaatatggaaggc

SEQ ID NO: 3832955 - DNA, 25 bp, Homo sapien
acttgctcaggccactgtcctgtac

SEQ ID NO: 3832956 - DNA, 25 bp, Homo sapien
aaacttgctcaggccactgtcctgt

SEQ ID NO: 3832957 - DNA, 25 bp, Homo sapien
ggaaaaacttgctcaggccactgtc

SEQ ID NO: 3832958 - DNA, 25 bp, Homo sapien
aaggaaaaacttgctcaggccactg

SEQ ID NO: 3832959 - DNA, 25 bp, Homo sapien
tacctgagatgtgctaaggaggaga

SEQ ID NO: 3832960 - DNA, 25 bp, Homo sapien
tgaagtctcctgcatcaaatcaatg

SEQ ID NO: 3832961 - DNA, 25 bp, Homo sapien
aaagcccatgatgttagcccggatc

SEQ ID NO: 3832962 - DNA, 25 bp, Homo sapien
tccgctcaaaggagggctggcctat

SEQ ID NO: 3832963 - DNA, 25 bp, Homo sapien
atgcggctgaccatcccagggaaca

SEQ ID NO: 3832964 - DNA, 25 bp, Homo sapien
acaccattatgaagaggggcagcac

SEQ ID NO: 3832965 - DNA, 25 bp, Homo sapien
aggatgcggctgaccatcccaggga

SEQ ID NO: 3832966 - DNA, 25 bp, Homo sapien
ccattatgaagaggggcagcacctt

SEQ ID NO: 3832967 - DNA, 25 bp, Homo sapien
ccagcacgagtttgggatacgcgat

SEQ ID NO: 3832968 - DNA, 25 bp, Homo sapien
ttgggatacgcgatgtccgaacagc

SEQ ID NO: 3832969 - DNA, 25 bp, Homo sapien
acgcgatgtccgaacagcctgaggg

SEQ ID NO: 3832970 - DNA, 25 bp, Homo sapien
cctgaggggttgctgcagatcttct

SEQ ID NO: 3832971 - DNA, 25 bp, Homo sapien
ccaaagcagccgatcccagtgggct

SEQ ID NO: 3832972 - DNA, 25 bp, Homo sapien
ggaagggaggtcatgggcctcggtc

SEQ ID NO: 3832973 - DNA, 25 bp, Homo sapien
ttctgccaaagcagccgatcccagt

SEQ ID NO: 3832974 - DNA, 25 bp, Homo sapien
aagggaggtcatgggcctcggtcct

SEQ ID NO: 3832975 - DNA, 25 bp, Homo sapien
tgagggaggacatgagagccgccac

SEQ ID NO: 3832976 - DNA, 25 bp, Homo sapien
gaggtgagggaggacatgagagccg

SEQ ID NO: 3832977 - DNA, 25 bp, Homo sapien
gaggacatgagagccgccaccatca

SEQ ID NO: 3832978 - DNA, 25 bp, Homo sapien
tcacagccatcatcagcccacggag

SEQ ID NO: 3832979 - DNA, 25 bp, Homo sapien
ccttctcagatgcccgaggccggag

SEQ ID NO: 3832980 - DNA, 25 bp, Homo sapien
cttctcagatgcccgaggccggagg

SEQ ID NO: 3832981 - DNA, 25 bp, Homo sapien
tccttctcagatgcccgaggccgga

SEQ ID NO: 3832982 - DNA, 25 bp, Homo sapien
ctccttctcagatgcccgaggccgg

SEQ ID NO: 3832983 - DNA, 25 bp, Homo sapien
ccatgatgaagaccaccgccacagg

SEQ ID NO: 3832984 - DNA, 25 bp, Homo sapien
ctggaccacagggatccagaggatg

SEQ ID NO: 3832985 - DNA, 25 bp, Homo sapien
gctgatggactggatatagatgaag

SEQ ID NO: 3832986 - DNA, 25 bp, Homo sapien
tgatgaagaccaccgccacaggcgg

SEQ ID NO: 3832987 - DNA, 25 bp, Homo sapien
tagaggtagtgaatgctcttcacca

SEQ ID NO: 3832988 - DNA, 25 bp, Homo sapien
tcatctggctggtcgcatcgaggct

SEQ ID NO: 3832989 - DNA, 25 bp, Homo sapien
ggctgcacgtaaataaagtccagga

SEQ ID NO: 3832990 - DNA, 25 bp, Homo sapien
ccgtggacaggatcatggagaagta

SEQ ID NO: 3832991 - DNA, 25 bp, Homo sapien
agggtggctctgtgaaccagctcac

SEQ ID NO: 3832992 - DNA, 25 bp, Homo sapien
tttagacgtgttttcttgaaccatc

SEQ ID NO: 3832993 - DNA, 25 bp, Homo sapien
gacgagtaaaccaggtcaggtggct

SEQ ID NO: 3832994 - DNA, 25 bp, Homo sapien
ttgaaccatctcgaactggacgctg

SEQ ID NO: 3832995 - DNA, 25 bp, Homo sapien
tctggcatcccgttctgagagaggg

SEQ ID NO: 3832996 - DNA, 25 bp, Homo sapien
ccccagataaagatggcgcagctca

SEQ ID NO: 3832997 - DNA, 25 bp, Homo sapien
gcgcagctcacgcagaaaatgaggt

SEQ ID NO: 3832998 - DNA, 25 bp, Homo sapien
caggatggccttcaccactttggac

SEQ ID NO: 3832999 - DNA, 25 bp, Homo sapien
ctctggccgggagctcttccttgcc

SEQ ID NO: 3833000 - DNA, 25 bp, Homo sapien
aaaaatggagcactgaagagaaaca

SEQ ID NO: 3833001 - DNA, 25 bp, Homo sapien
tgaagagaaacagagtttggacccc

SEQ ID NO: 3833002 - DNA, 25 bp, Homo sapien
attaaaaaaatggagcactgaagag

SEQ ID NO: 3833003 - DNA, 25 bp, Homo sapien
agagaaacagagtttggacccctgg

SEQ ID NO: 3833004 - DNA, 25 bp, Homo sapien
ggcgttgtactgtgttggcactgta

SEQ ID NO: 3833005 - DNA, 25 bp, Homo sapien
tgctggaggcgttgtactgtgttgg

SEQ ID NO: 3833006 - DNA, 25 bp, Homo sapien
tactgtgttggcactgtacgttagg

SEQ ID NO: 3833007 - DNA, 25 bp, Homo sapien
tggcactgtacgttaggcacaccat

SEQ ID NO: 3833008 - DNA, 25 bp, Homo sapien
atgagaaacatccatgctgacatcc

SEQ ID NO: 3833009 - DNA, 25 bp, Homo sapien
gcccagcatatagcatgtgttcatc

SEQ ID NO: 3833010 - DNA, 25 bp, Homo sapien
tgagaaacatccatgctgacatcct

SEQ ID NO: 3833011 - DNA, 25 bp, Homo sapien
tatagcatgtgttcatcattgctga

SEQ ID NO: 3833012 - DNA, 25 bp, Homo sapien
tcttatgtattaggagggaggctgc

SEQ ID NO: 3833013 - DNA, 25 bp, Homo sapien
gaggctgcgctccttcagacttgct

SEQ ID NO: 3833014 - DNA, 25 bp, Homo sapien
cgcctcgttggattgtcggaatgta

SEQ ID NO: 3833015 - DNA, 25 bp, Homo sapien
taattgctacttgataaggaccgaa

SEQ ID NO: 3833016 - DNA, 25 bp, Homo sapien
agtgcctgggttctgtccatttcgc

SEQ ID NO: 3833017 - DNA, 25 bp, Homo sapien
gatcctggcatttgacccggcatgg

SEQ ID NO: 3833018 - DNA, 25 bp, Homo sapien
tagaaatccccttacttggacagct

SEQ ID NO: 3833019 - DNA, 25 bp, Homo sapien
gcctcctaagcatcggttccctttg

SEQ ID NO: 3833020 - DNA, 25 bp, Homo sapien
gggaaaggccttatccacctcacag

SEQ ID NO: 3833021 - DNA, 25 bp, Homo sapien
gaaacatcccttgatttgccctgtg

SEQ ID NO: 3833022 - DNA, 25 bp, Homo sapien
taatgagttaagcaggaacagcact

SEQ ID NO: 3833023 - DNA, 25 bp, Homo sapien
ggttcgaatctcacgtctgcgctgg

SEQ ID NO: 3833024 - DNA, 25 bp, Homo sapien
gattaccccgctcttaggtggtgaa

SEQ ID NO: 3833025 - DNA, 25 bp, Homo sapien
gagggcaccttctgaacatgcttta

SEQ ID NO: 3833026 - DNA, 25 bp, Homo sapien
tctgttctgctttccgagttgtggg

SEQ ID NO: 3833027 - DNA, 25 bp, Homo sapien
tacaaggagctagcaccttgcttgg

SEQ ID NO: 3833028 - DNA, 25 bp, Homo sapien
gcctcctccgccacaccgcggggtc

SEQ ID NO: 3833029 - DNA, 25 bp, Homo sapien
ctccgccacaccgcggggtcccctg

SEQ ID NO: 3833030 - DNA, 25 bp, Homo sapien
tgcccgagaccagcggggcacgggc

SEQ ID NO: 3833031 - DNA, 25 bp, Homo sapien
cctgcccgagaccagcggggcacgg

SEQ ID NO: 3833032 - DNA, 25 bp, Homo sapien
caggcggcccgcctgtctctcagcg

SEQ ID NO: 3833033 - DNA, 25 bp, Homo sapien
ctgtctctcagcgccgccgggctcc

SEQ ID NO: 3833034 - DNA, 25 bp, Homo sapien
cgagtgcgccgggcagcacgggggt

SEQ ID NO: 3833035 - DNA, 25 bp, Homo sapien
gcgagtgcgccgggcagcacggggg

SEQ ID NO: 3833036 - DNA, 25 bp, Homo sapien
ggcgagtgcgccgggcagcacgggg

SEQ ID NO: 3833037 - DNA, 25 bp, Homo sapien
aggcctagtggtcttctcgcccggg

SEQ ID NO: 3833038 - DNA, 25 bp, Homo sapien
catacgttgaaataaacgagagggt

SEQ ID NO: 3833039 - DNA, 25 bp, Homo sapien
attacaacgttgaaccactgcgccc

SEQ ID NO: 3833040 - DNA, 25 bp, Homo sapien
tcttcgcccgtgtcaggtaaggcac

SEQ ID NO: 3833041 - DNA, 25 bp, Homo sapien
gatggtcatcagtatcctgacttct

SEQ ID NO: 3833042 - DNA, 25 bp, Homo sapien
tctgtaatactgataattcaagctg

SEQ ID NO: 3833043 - DNA, 25 bp, Homo sapien
tactgataattcaagctgatggtca

SEQ ID NO: 3833044 - DNA, 25 bp, Homo sapien
tttcatcaaaactagttgttcctcc

SEQ ID NO: 3833045 - DNA, 25 bp, Homo sapien
attgcttagattttcttgatgctta

SEQ ID NO: 3833046 - DNA, 25 bp, Homo sapien
ttgcttagattttcttgatgcttac

SEQ ID NO: 3833047 - DNA, 25 bp, Homo sapien
taattgcttagattttcttgatgct

SEQ ID NO: 3833048 - DNA, 25 bp, Homo sapien
ctaattgcttagattttcttgatgc

SEQ ID NO: 3833049 - DNA, 25 bp, Homo sapien
ctctagctgtaaggcagagctctcc

SEQ ID NO: 3833050 - DNA, 25 bp, Homo sapien
taattacacactcttgctctagctg

SEQ ID NO: 3833051 - DNA, 25 bp, Homo sapien
tattgggacattcaacttctgttgc

SEQ ID NO: 3833052 - DNA, 25 bp, Homo sapien
tagtatctaccattctaggctcagc

SEQ ID NO: 3833053 - DNA, 25 bp, Homo sapien
ctgctgaaggtgagcaacgccctgg

SEQ ID NO: 3833054 - DNA, 25 bp, Homo sapien
accccattgatggacagctgatcca

SEQ ID NO: 3833055 - DNA, 25 bp, Homo sapien
ctgaccaaccccattgatggacagc

SEQ ID NO: 3833056 - DNA, 25 bp, Homo sapien
gaccaaccccattgatggacagctg

SEQ ID NO: 3833057 - DNA, 25 bp, Homo sapien
cttatgggggcctgtttcattacca

SEQ ID NO: 3833058 - DNA, 25 bp, Homo sapien
ttatgggggcctgtttcattaccag

SEQ ID NO: 3833059 - DNA, 25 bp, Homo sapien
agtttgacattcctgacttaatgca

SEQ ID NO: 3833060 - DNA, 25 bp, Homo sapien
tgcaaaattgtcactaaagtttgac

SEQ ID NO: 3833061 - DNA, 25 bp, Homo sapien
aatttctcctgaccattactagtgg

SEQ ID NO: 3833062 - DNA, 25 bp, Homo sapien
tgagacatgatgacttctgaaaagt

SEQ ID NO: 3833063 - DNA, 25 bp, Homo sapien
atttattaggtccttgtggaagctc

SEQ ID NO: 3833064 - DNA, 25 bp, Homo sapien
ccatgctgcacccactgtggtcgcc

SEQ ID NO: 3833065 - DNA, 25 bp, Homo sapien
ccactgtggtcgccagctgctcttt

SEQ ID NO: 3833066 - DNA, 25 bp, Homo sapien
cttggagttgggctgccccatgctg

SEQ ID NO: 3833067 - DNA, 25 bp, Homo sapien
ccccatgctgcacccactgtggtcg

SEQ ID NO: 3833068 - DNA, 25 bp, Homo sapien
ctggagtttaaaatcattatcactg

SEQ ID NO: 3833069 - DNA, 25 bp, Homo sapien
aaaatcattatcactgtcagttaaa

SEQ ID NO: 3833070 - DNA, 25 bp, Homo sapien
cattatcactgtcagttaaaagctt

SEQ ID NO: 3833071 - DNA, 25 bp, Homo sapien
tttaaaatcattatcactgtcagtt

SEQ ID NO: 3833072 - DNA, 25 bp, Homo sapien
tgtccttgccgtgacagagctgtct

SEQ ID NO: 3833073 - DNA, 25 bp, Homo sapien
cacttgcgtgaggagattctgcggc

SEQ ID NO: 3833074 - DNA, 25 bp, Homo sapien
tttcttagctcttcaatatcttgga

SEQ ID NO: 3833075 - DNA, 25 bp, Homo sapien
cccctaagtaacctgtctaagacat

SEQ ID NO: 3833076 - DNA, 25 bp, Homo sapien
gataactctgccctcgtggcctgat

SEQ ID NO: 3833077 - DNA, 25 bp, Homo sapien
acttggtcaaaggagcgaggtgtct

SEQ ID NO: 3833078 - DNA, 25 bp, Homo sapien
tggcctgatcgcttcacaagagccc

SEQ ID NO: 3833079 - DNA, 25 bp, Homo sapien
tatttatagcaaactcttgggccat

SEQ ID NO: 3833080 - DNA, 25 bp, Homo sapien
gagaggaaagtagggctccacctgg

SEQ ID NO: 3833081 - DNA, 25 bp, Homo sapien
gaggaaagtagggctccacctggct

SEQ ID NO: 3833082 - DNA, 25 bp, Homo sapien
agaggaaagtagggctccacctggc

SEQ ID NO: 3833083 - DNA, 25 bp, Homo sapien
aggaaagtagggctccacctggctc

SEQ ID NO: 3833084 - DNA, 25 bp, Homo sapien
tgaaggaagactccctctgtctagt

SEQ ID NO: 3833085 - DNA, 25 bp, Homo sapien
cgacaggcgcttcttgcacaaggaa

SEQ ID NO: 3833086 - DNA, 25 bp, Homo sapien
tcgcccgcgtcgcaattccaggtgg

SEQ ID NO: 3833087 - DNA, 25 bp, Homo sapien
ccgcgtcgcaattccaggtggaaaa

SEQ ID NO: 3833088 - DNA, 25 bp, Homo sapien
cagaaacgattcgttaaataaatga

SEQ ID NO: 3833089 - DNA, 25 bp, Homo sapien
tgggaagcgagggtcgtgcgaggcg

SEQ ID NO: 3833090 - DNA, 25 bp, Homo sapien
agctcagaaacgattcgttaaataa

SEQ ID NO: 3833091 - DNA, 25 bp, Homo sapien
gagcgtattcttcagatgcaggccc

SEQ ID NO: 3833092 - DNA, 25 bp, Homo sapien
tatgtctggcagcacgtctgtcttg

SEQ ID NO: 3833093 - DNA, 25 bp, Homo sapien
gtttagctccgagaacgccaagacc

SEQ ID NO: 3833094 - DNA, 25 bp, Homo sapien
tatgtggccctagacaggtcatttc

SEQ ID NO: 3833095 - DNA, 25 bp, Homo sapien
taaaccgtgagttccagtatgtctg

SEQ ID NO: 3833096 - DNA, 25 bp, Homo sapien
tttctcagtgcacaacaccaaattt

SEQ ID NO: 3833097 - DNA, 25 bp, Homo sapien
ggttcgcctaacacacagttccgct

SEQ ID NO: 3833098 - DNA, 25 bp, Homo sapien
tgaccttccacggttcactgtgtga

SEQ ID NO: 3833099 - DNA, 25 bp, Homo sapien
tttggcacccacagtgaggccgtgt

SEQ ID NO: 3833100 - DNA, 25 bp, Homo sapien
gatcatgtcagttccccacttaaaa

SEQ ID NO: 3833101 - DNA, 25 bp, Homo sapien
cagatattaaaagggcagttcctgg

SEQ ID NO: 3833102 - DNA, 25 bp, Homo sapien
gggtaactgattgcacaaggcagat

SEQ ID NO: 3833103 - DNA, 25 bp, Homo sapien
tgcacaaggcagatattaaaagggc

SEQ ID NO: 3833104 - DNA, 25 bp, Homo sapien
aagaagtctgggtaactgattgcac

SEQ ID NO: 3833105 - DNA, 25 bp, Homo sapien
tggcagagatgaacactaggcactt

SEQ ID NO: 3833106 - DNA, 25 bp, Homo sapien
catggtctgtgctcggtattgtgtc

SEQ ID NO: 3833107 - DNA, 25 bp, Homo sapien
tcagccttataagccctggtctgct

SEQ ID NO: 3833108 - DNA, 25 bp, Homo sapien
tgttctagctctgaagtggcatgcc

SEQ ID NO: 3833109 - DNA, 25 bp, Homo sapien
aagggtcgtgccagcagcccaacct

SEQ ID NO: 3833110 - DNA, 25 bp, Homo sapien
tggatgtaagggtcgtgccagcagc

SEQ ID NO: 3833111 - DNA, 25 bp, Homo sapien
aaagtggtggatgtaagggtcgtgc

SEQ ID NO: 3833112 - DNA, 25 bp, Homo sapien
taagggtcgtgccagcagcccaacc

SEQ ID NO: 3833113 - DNA, 25 bp, Homo sapien
cacaacacttgatgcaggacggatg

SEQ ID NO: 3833114 - DNA, 25 bp, Homo sapien
taacaaaagtgcagagtgagccctg

SEQ ID NO: 3833115 - DNA, 25 bp, Homo sapien
tggtcacagatactccagtccaggg

SEQ ID NO: 3833116 - DNA, 25 bp, Homo sapien
tggaggctacactccggaacacggt

SEQ ID NO: 3833117 - DNA, 25 bp, Homo sapien
gatgttctcaatagtcctggccgcc

SEQ ID NO: 3833118 - DNA, 25 bp, Homo sapien
cctcaatcaaggatgggccacactg

SEQ ID NO: 3833119 - DNA, 25 bp, Homo sapien
tcattagctgaagggcaagctggcc

SEQ ID NO: 3833120 - DNA, 25 bp, Homo sapien
taaaaccagctacttaggccgggca

SEQ ID NO: 3833121 - DNA, 25 bp, Homo sapien
ctaaatcttcccaggtgatggttcc

SEQ ID NO: 3833122 - DNA, 25 bp, Homo sapien
tcttcccaggtgatggttccaaaaa

SEQ ID NO: 3833123 - DNA, 25 bp, Homo sapien
taaatcttcccaggtgatggttcca

SEQ ID NO: 3833124 - DNA, 25 bp, Homo sapien
aatcttcccaggtgatggttccaaa

SEQ ID NO: 3833125 - DNA, 25 bp, Homo sapien
acgttcattttgtctagggtccagg

SEQ ID NO: 3833126 - DNA, 25 bp, Homo sapien
gcagcttctcgaaccatggacagat

SEQ ID NO: 3833127 - DNA, 25 bp, Homo sapien
tgggtggccatgtatctcggtcctg

SEQ ID NO: 3833128 - DNA, 25 bp, Homo sapien
tgagagttgaaaaccgctcggcgcg

SEQ ID NO: 3833129 - DNA, 25 bp, Homo sapien
tgaatcattgtaaaacaatgaaaag

SEQ ID NO: 3833130 - DNA, 25 bp, Homo sapien
tgttacctgtgtaagtaacatctac

SEQ ID NO: 3833131 - DNA, 25 bp, Homo sapien
taagtaacatctacatcaaccctca

SEQ ID NO: 3833132 - DNA, 25 bp, Homo sapien
atatcacaattatatgttagagaga

SEQ ID NO: 3833133 - DNA, 25 bp, Homo sapien
tggtggttgctctcagttttgtcca

SEQ ID NO: 3833134 - DNA, 25 bp, Homo sapien
ttatgtgcttaaatctacaggtgct

SEQ ID NO: 3833135 - DNA, 25 bp, Homo sapien
aacagacaaaagtgtagttattatg

SEQ ID NO: 3833136 - DNA, 25 bp, Homo sapien
tgtccagttagtcattcatcataaa

SEQ ID NO: 3833137 - DNA, 25 bp, Homo sapien
gatatctgctcattagagcggagtt

SEQ ID NO: 3833138 - DNA, 25 bp, Homo sapien
tttctgtgatatctgctcattagag

SEQ ID NO: 3833139 - DNA, 25 bp, Homo sapien
tctgtgatatctgctcattagagcg

SEQ ID NO: 3833140 - DNA, 25 bp, Homo sapien
tgtgatatctgctcattagagcgga

SEQ ID NO: 3833141 - DNA, 25 bp, Homo sapien
gacagaaaatgagccaagcgctgga

SEQ ID NO: 3833142 - DNA, 25 bp, Homo sapien
ggatggcagcgttcattcagcccag

SEQ ID NO: 3833143 - DNA, 25 bp, Homo sapien
gactgcagggtctttctgggccacg

SEQ ID NO: 3833144 - DNA, 25 bp, Homo sapien
ccaaaaagaggaacgaatcaggctg

SEQ ID NO: 3833145 - DNA, 25 bp, Homo sapien
taagacaattcggtaccctgtgaaa

SEQ ID NO: 3833146 - DNA, 25 bp, Homo sapien
taggctgacaagtccgaagacattt

SEQ ID NO: 3833147 - DNA, 25 bp, Homo sapien
cacccagacaaaaaggtaggctgac

SEQ ID NO: 3833148 - DNA, 25 bp, Homo sapien
catgaacttggaaaatgactggact

SEQ ID NO: 3833149 - DNA, 25 bp, Homo sapien
tggccctgcgtctcatgaaagcatt

SEQ ID NO: 3833150 - DNA, 25 bp, Homo sapien
tagccggccagaagttgaaatcttg

SEQ ID NO: 3833151 - DNA, 25 bp, Homo sapien
aatacttgtaattactggccctgcg

SEQ ID NO: 3833152 - DNA, 25 bp, Homo sapien
tccccaactgtaagatccaatgaag

SEQ ID NO: 3833153 - DNA, 25 bp, Homo sapien
gaaacctgcattcaggagtcttcca

SEQ ID NO: 3833154 - DNA, 25 bp, Homo sapien
tcagttcagtcctctattagctcag

SEQ ID NO: 3833155 - DNA, 25 bp, Homo sapien
gagtcttccaaggagcaaattttgg

SEQ ID NO: 3833156 - DNA, 25 bp, Homo sapien
tggactgtagttgactgtaagccgc

SEQ ID NO: 3833157 - DNA, 25 bp, Homo sapien
tgaagacagctcaagaccgtcaaac

SEQ ID NO: 3833158 - DNA, 25 bp, Homo sapien
tctatggcggctttcaggctacaac

SEQ ID NO: 3833159 - DNA, 25 bp, Homo sapien
caggctcctgtgtttatgtgctatc

SEQ ID NO: 3833160 - DNA, 25 bp, Homo sapien
tctcaaaccaggcaaatcggatagg

SEQ ID NO: 3833161 - DNA, 25 bp, Homo sapien
gccattctgtggatataccatgttc

SEQ ID NO: 3833162 - DNA, 25 bp, Homo sapien
tatgtggagcatctttacaggtcag

SEQ ID NO: 3833163 - DNA, 25 bp, Homo sapien
tatccacacgtacatgcattataca

SEQ ID NO: 3833164 - DNA, 25 bp, Homo sapien
cacacatacctgtacacatttagac

SEQ ID NO: 3833165 - DNA, 25 bp, Homo sapien
aaggtggacgggcaagagggcatgc

SEQ ID NO: 3833166 - DNA, 25 bp, Homo sapien
cgggcaagagggcatgcttgcctgc

SEQ ID NO: 3833167 - DNA, 25 bp, Homo sapien
cctcctgcgataactaacgctttca

SEQ ID NO: 3833168 - DNA, 25 bp, Homo sapien
taactaacgctttcatgagggcagg

SEQ ID NO: 3833169 - DNA, 25 bp, Homo sapien
ggaacggcctaagccagagccaggg

SEQ ID NO: 3833170 - DNA, 25 bp, Homo sapien
tgaaggaagtcacattgttgcccac

SEQ ID NO: 3833171 - DNA, 25 bp, Homo sapien
catttgagatgtggttgatgaagga

SEQ ID NO: 3833172 - DNA, 25 bp, Homo sapien
ccttatctgttccctgtatcagcac

SEQ ID NO: 3833173 - DNA, 25 bp, Homo sapien
ccctgtatcagcacatttgagatgt

SEQ ID NO: 3833174 - DNA, 25 bp, Homo sapien
tagtctcgttttccacacaggtggg

SEQ ID NO: 3833175 - DNA, 25 bp, Homo sapien
ataattggatctgctctaggcttgg

SEQ ID NO: 3833176 - DNA, 25 bp, Homo sapien
gcttggccataggtgcggtttgact

SEQ ID NO: 3833177 - DNA, 25 bp, Homo sapien
aaagcgctgggtgtgtgtgatattc

SEQ ID NO: 3833178 - DNA, 25 bp, Homo sapien
acctcactgatggacggctcatcca

SEQ ID NO: 3833179 - DNA, 25 bp, Homo sapien
tattcttgtcatgtagaactttaat

SEQ ID NO: 3833180 - DNA, 25 bp, Homo sapien
ctggatgatgtgagtgagtttgccc

SEQ ID NO: 3833181 - DNA, 25 bp, Homo sapien
cagtttccagtttacatgaatcagg

SEQ ID NO: 3833182 - DNA, 25 bp, Homo sapien
agcagttacatccattccatggtga

SEQ ID NO: 3833183 - DNA, 25 bp, Homo sapien
cacaggcctccttcgttgtcagcag

SEQ ID NO: 3833184 - DNA, 25 bp, Homo sapien
tccatggtgatactctctttctaga

SEQ ID NO: 3833185 - DNA, 25 bp, Homo sapien
ctttccaaacagctgatagttcttc

SEQ ID NO: 3833186 - DNA, 25 bp, Homo sapien
gttacaatgttatgaccagtgctgg

SEQ ID NO: 3833187 - DNA, 25 bp, Homo sapien
aaagttcctcttgggattgggctgc

SEQ ID NO: 3833188 - DNA, 25 bp, Homo sapien
ggaagcccctcatactgattgttag

SEQ ID NO: 3833189 - DNA, 25 bp, Homo sapien
gcagaattgtcgctaaaggctgaca

SEQ ID NO: 3833190 - DNA, 25 bp, Homo sapien
ggatcagatctctgtggttcatctg

SEQ ID NO: 3833191 - DNA, 25 bp, Homo sapien
gtgggaagagactgtctttgccgtc

SEQ ID NO: 3833192 - DNA, 25 bp, Homo sapien
cacttgcatgaagagattctgcggt

SEQ ID NO: 3833193 - DNA, 25 bp, Homo sapien
gtctttgccgtcacagagctgcctg

SEQ ID NO: 3833194 - DNA, 25 bp, Homo sapien
ctcagcttctcgatctcttgctgga

SEQ ID NO: 3833195 - DNA, 25 bp, Homo sapien
tctttctcgttctgcgatggcagca

SEQ ID NO: 3833196 - DNA, 25 bp, Homo sapien
tctgaatgcatttgctcgtgttctt

SEQ ID NO: 3833197 - DNA, 25 bp, Homo sapien
cctgaagtaacctatctaaggcatt

SEQ ID NO: 3833198 - DNA, 25 bp, Homo sapien
tcctcccttgtgatacccaggatgc

SEQ ID NO: 3833199 - DNA, 25 bp, Homo sapien
cgacttttgcttctgtgctgctggc

SEQ ID NO: 3833200 - DNA, 25 bp, Homo sapien
gattcagccccagtggtgttttagg

SEQ ID NO: 3833201 - DNA, 25 bp, Homo sapien
gctgctggctaactgtatgcatttc

SEQ ID NO: 3833202 - DNA, 25 bp, Homo sapien
gttgccttgacagcctatcagccca

SEQ ID NO: 3833203 - DNA, 25 bp, Homo sapien
gcatttgacagatgatgccccgacc

SEQ ID NO: 3833204 - DNA, 25 bp, Homo sapien
ccaaaaggccattagtgataaagta

SEQ ID NO: 3833205 - DNA, 25 bp, Homo sapien
taaagtagatacacagcatggcttg

SEQ ID NO: 3833206 - DNA, 25 bp, Homo sapien
gagctggatttatcccttttgtcat

SEQ ID NO: 3833207 - DNA, 25 bp, Homo sapien
gcactcataattgtcatccagctgg

SEQ ID NO: 3833208 - DNA, 25 bp, Homo sapien
taattgtcatccagctggctttgct

SEQ ID NO: 3833209 - DNA, 25 bp, Homo sapien
gtttgagctggatttatcccttttg

SEQ ID NO: 3833210 - DNA, 25 bp, Homo sapien
gagtcctttaagtgcatggtagcaa

SEQ ID NO: 3833211 - DNA, 25 bp, Homo sapien
gctgccctgtgctaaaactccgatg

SEQ ID NO: 3833212 - DNA, 25 bp, Homo sapien
gcagcattgtcagactttccgggtt

SEQ ID NO: 3833213 - DNA, 25 bp, Homo sapien
gatgacttctgtccctaacgctgtg

SEQ ID NO: 3833214 - DNA, 25 bp, Homo sapien
tccctgaagatccacaccacgagtg

SEQ ID NO: 3833215 - DNA, 25 bp, Homo sapien
acttccctgaagatccacaccacga

SEQ ID NO: 3833216 - DNA, 25 bp, Homo sapien
ttccctgaagatccacaccacgagt

SEQ ID NO: 3833217 - DNA, 25 bp, Homo sapien
taacttccctgaagatccacaccac

SEQ ID NO: 3833218 - DNA, 25 bp, Homo sapien
cccacgccggctaccccagcaacct

SEQ ID NO: 3833219 - DNA, 25 bp, Homo sapien
ccagcaacctctccgcttattggct

SEQ ID NO: 3833220 - DNA, 25 bp, Homo sapien
agctggcgcggctcagtgacgccgc

SEQ ID NO: 3833221 - DNA, 25 bp, Homo sapien
acctctccgcttattggctcctctt

SEQ ID NO: 3833222 - DNA, 25 bp, Homo sapien
ccagggacatggaagcggggtcgac

SEQ ID NO: 3833223 - DNA, 25 bp, Homo sapien
gggacggcgcgagccacagggagaa

SEQ ID NO: 3833224 - DNA, 25 bp, Homo sapien
ggcgggggacggcgcgagccacagg

SEQ ID NO: 3833225 - DNA, 25 bp, Homo sapien
cgccagggacatggaagcggggtcg

SEQ ID NO: 3833226 - DNA, 25 bp, Homo sapien
cgtcgcagctcgaggtggaacagca

SEQ ID NO: 3833227 - DNA, 25 bp, Homo sapien
tcgtcgtctgcgtcgcagctcgagg

SEQ ID NO: 3833228 - DNA, 25 bp, Homo sapien
gaggattccctctgcctagtggcca

SEQ ID NO: 3833229 - DNA, 25 bp, Homo sapien
gaggtgatagaggattccctctgcc

SEQ ID NO: 3833230 - DNA, 25 bp, Homo sapien
cgcgccccagatgccggccccgaac

SEQ ID NO: 3833231 - DNA, 25 bp, Homo sapien
gcgccccagatgccggccccgaacc

SEQ ID NO: 3833232 - DNA, 25 bp, Homo sapien
gaagcccaaggcctcgtctgtctgg

SEQ ID NO: 3833233 - DNA, 25 bp, Homo sapien
gcatccctgccagccttgagcgtat

SEQ ID NO: 3833234 - DNA, 25 bp, Homo sapien
cagcgtttagctccaagaagcccaa

SEQ ID NO: 3833235 - DNA, 25 bp, Homo sapien
aacccatcgaggctggagctactat

SEQ ID NO: 3833236 - DNA, 25 bp, Homo sapien
ttacaaactctaatggcactgccgt

SEQ ID NO: 3833237 - DNA, 25 bp, Homo sapien
ttttccaacaaagctgtgagttcca

SEQ ID NO: 3833238 - DNA, 25 bp, Homo sapien
tcataggtaattatttgcttcctgt

SEQ ID NO: 3833239 - DNA, 25 bp, Homo sapien
gccgtatttgtcagcactcaacaca

SEQ ID NO: 3833240 - DNA, 25 bp, Homo sapien
tttaactacaggtgtgtttctggtg

SEQ ID NO: 3833241 - DNA, 25 bp, Homo sapien
ttaactacaggtgtgtttctggtgg

SEQ ID NO: 3833242 - DNA, 25 bp, Homo sapien
tgtttaactacaggtgtgtttctgg

SEQ ID NO: 3833243 - DNA, 25 bp, Homo sapien
tttattggaggaattcacaactgta

SEQ ID NO: 3833244 - DNA, 25 bp, Homo sapien
catgcaccgcgacactggttaattt

SEQ ID NO: 3833245 - DNA, 25 bp, Homo sapien
tggcatgcaccgcgacactggttaa

SEQ ID NO: 3833246 - DNA, 25 bp, Homo sapien
ctactggcatgcaccgcgacactgg

SEQ ID NO: 3833247 - DNA, 25 bp, Homo sapien
tactggcatgcaccgcgacactggt

SEQ ID NO: 3833248 - DNA, 25 bp, Homo sapien
aatggcagggagaacacgaggagct

SEQ ID NO: 3833249 - DNA, 25 bp, Homo sapien
gagaacacgaggagctgatatgaag

SEQ ID NO: 3833250 - DNA, 25 bp, Homo sapien
caggccttaacttgtgaactgaata

SEQ ID NO: 3833251 - DNA, 25 bp, Homo sapien
gcagtagcacgatcccagtactctg

SEQ ID NO: 3833252 - DNA, 25 bp, Homo sapien
tggctttgtggagagaccttgtgac

SEQ ID NO: 3833253 - DNA, 25 bp, Homo sapien
tgtcatcaggatgccggaaaggccc

SEQ ID NO: 3833254 - DNA, 25 bp, Homo sapien
gggcatagctaagaagatgtcatca

SEQ ID NO: 3833255 - DNA, 25 bp, Homo sapien
gctaagccgtgaggaaaaacttggc

SEQ ID NO: 3833256 - DNA, 25 bp, Homo sapien
tccatgcgccctaggaagaaggacc

SEQ ID NO: 3833257 - DNA, 25 bp, Homo sapien
tccgcaaacccaggtgactgcaaca

SEQ ID NO: 3833258 - DNA, 25 bp, Homo sapien
aaagatttgccacccagtgttgggc

SEQ ID NO: 3833259 - DNA, 25 bp, Homo sapien
tgtccagcctatcagagtggccaag

SEQ ID NO: 3833260 - DNA, 25 bp, Homo sapien
actgttcaatacgactagtgtagcc

SEQ ID NO: 3833261 - DNA, 25 bp, Homo sapien
tctttacactgttcaatacgactag

SEQ ID NO: 3833262 - DNA, 25 bp, Homo sapien
tacgactagtgtagccaaggaacat

SEQ ID NO: 3833263 - DNA, 25 bp, Homo sapien
ctccagattctttacactgttcaat

SEQ ID NO: 3833264 - DNA, 25 bp, Homo sapien
accaaggcagcaacatcaagtcact

SEQ ID NO: 3833265 - DNA, 25 bp, Homo sapien
acatcccgtgcaagaaccaaggcag

SEQ ID NO: 3833266 - DNA, 25 bp, Homo sapien
gcttgactactagttccccaaggaa

SEQ ID NO: 3833267 - DNA, 25 bp, Homo sapien
tctggaagccataacttgctggact

SEQ ID NO: 3833268 - DNA, 25 bp, Homo sapien
ccagtagccaatgcttactgcaaac

SEQ ID NO: 3833269 - DNA, 25 bp, Homo sapien
catgccagtagccaatgcttactgc

SEQ ID NO: 3833270 - DNA, 25 bp, Homo sapien
aagtgctgtatgtaagggtcatgcc

SEQ ID NO: 3833271 - DNA, 25 bp, Homo sapien
agtgctgtatgtaagggtcatgcca

SEQ ID NO: 3833272 - DNA, 25 bp, Homo sapien
ctgtactataaagcagtttctccat

SEQ ID NO: 3833273 - DNA, 25 bp, Homo sapien
tacaggatccaacttgagagccaag

SEQ ID NO: 3833274 - DNA, 25 bp, Homo sapien
gatccaacttgagagccaagattcc

SEQ ID NO: 3833275 - DNA, 25 bp, Homo sapien
caggatccaacttgagagccaagat

SEQ ID NO: 3833276 - DNA, 25 bp, Homo sapien
ctacaggatccaacttgagagccaa

SEQ ID NO: 3833277 - DNA, 25 bp, Homo sapien
gacattctgtcttccgtagaaatgc

SEQ ID NO: 3833278 - DNA, 25 bp, Homo sapien
gaaatgcctttataagctgactgac

SEQ ID NO: 3833279 - DNA, 25 bp, Homo sapien
aggttgacaatttgacaatgacatt

SEQ ID NO: 3833280 - DNA, 25 bp, Homo sapien
aaggtggtatccatgcctgccccaa

SEQ ID NO: 3833281 - DNA, 25 bp, Homo sapien
accaccacacccagctaatttctgt

SEQ ID NO: 3833282 - DNA, 25 bp, Homo sapien
cgactcactgcaaccacaatctcct

SEQ ID NO: 3833283 - DNA, 25 bp, Homo sapien
catgtagctaggattacgggtgccc

SEQ ID NO: 3833284 - DNA, 25 bp, Homo sapien
tctcctgggttcaagcaattctcct

SEQ ID NO: 3833285 - DNA, 25 bp, Homo sapien
aaaatctggagaaatgcacgttccc

SEQ ID NO: 3833286 - DNA, 25 bp, Homo sapien
taagtgggtcttggtcaacatccgc

SEQ ID NO: 3833287 - DNA, 25 bp, Homo sapien
gaagaaccaagcaaaatctgtacaa

SEQ ID NO: 3833288 - DNA, 25 bp, Homo sapien
catgacggacctgacagaagaacca

SEQ ID NO: 3833289 - DNA, 25 bp, Homo sapien
ggccttcagcccaatataattacca

SEQ ID NO: 3833290 - DNA, 25 bp, Homo sapien
aagcctcaggttactttgctcataa

SEQ ID NO: 3833291 - DNA, 25 bp, Homo sapien
cctgggctacagtttgtaacacctg

SEQ ID NO: 3833292 - DNA, 25 bp, Homo sapien
aagaactttcagacactatacagtc

SEQ ID NO: 3833293 - DNA, 25 bp, Homo sapien
actaggcacctaagagcaatagtgt

SEQ ID NO: 3833294 - DNA, 25 bp, Homo sapien
tccacatatcaagcactaggcacct

SEQ ID NO: 3833295 - DNA, 25 bp, Homo sapien
tttactcttacatgtgctgatcatc

SEQ ID NO: 3833296 - DNA, 25 bp, Homo sapien
gctgatcatcttccacatatcaagc

SEQ ID NO: 3833297 - DNA, 25 bp, Homo sapien
ttgatactgtgcagctttctcgtga

SEQ ID NO: 3833298 - DNA, 25 bp, Homo sapien
tactgtgcagctttctcgtgacaat

SEQ ID NO: 3833299 - DNA, 25 bp, Homo sapien
gcagctttctcgtgacaatcattgg

SEQ ID NO: 3833300 - DNA, 25 bp, Homo sapien
gctttctcgtgacaatcattggaaa

SEQ ID NO: 3833301 - DNA, 25 bp, Homo sapien
tgtagaacatgctggaatgagtgcc

SEQ ID NO: 3833302 - DNA, 25 bp, Homo sapien
cagtgaacggaaggcaacaccctaa

SEQ ID NO: 3833303 - DNA, 25 bp, Homo sapien
gagccatagagcctgtgatctgtaa

SEQ ID NO: 3833304 - DNA, 25 bp, Homo sapien
agagctggatctgaattctcgctgg

SEQ ID NO: 3833305 - DNA, 25 bp, Homo sapien
tctcgccttgtgtaagtttgtgcac

SEQ ID NO: 3833306 - DNA, 25 bp, Homo sapien
gccttgtgtaagtttgtgcacccat

SEQ ID NO: 3833307 - DNA, 25 bp, Homo sapien
ctgaactcctctcgccttgtgtaag

SEQ ID NO: 3833308 - DNA, 25 bp, Homo sapien
actcctctcgccttgtgtaagtttg

SEQ ID NO: 3833309 - DNA, 25 bp, Homo sapien
tttcattgacgtggcaggatgttat

SEQ ID NO: 3833310 - DNA, 25 bp, Homo sapien
ctaaatcttgccttttcattgacgt

SEQ ID NO: 3833311 - DNA, 25 bp, Homo sapien
cagaggatcctggtaagtttagaga

SEQ ID NO: 3833312 - DNA, 25 bp, Homo sapien
ggatcctggtaagtttagagatgaa

SEQ ID NO: 3833313 - DNA, 25 bp, Homo sapien
taccgcccgacctattctgtgaatg

SEQ ID NO: 3833314 - DNA, 25 bp, Homo sapien
gccctagtacacattagatcaagaa

SEQ ID NO: 3833315 - DNA, 25 bp, Homo sapien
ggagagatacctagctacaagcttt

SEQ ID NO: 3833316 - DNA, 25 bp, Homo sapien
tttatgaagttatgctaggacccag

SEQ ID NO: 3833317 - DNA, 25 bp, Homo sapien
gaaggaactactgggtgccctggct

SEQ ID NO: 3833318 - DNA, 25 bp, Homo sapien
ttttaacttcattggctcgaactga

SEQ ID NO: 3833319 - DNA, 25 bp, Homo sapien
ggactgacacggctggaaggaacta

SEQ ID NO: 3833320 - DNA, 25 bp, Homo sapien
agacacccgtgcaggacggactgac

SEQ ID NO: 3833321 - DNA, 25 bp, Homo sapien
tgtctttttccttcttcctttctgc

SEQ ID NO: 3833322 - DNA, 25 bp, Homo sapien
cttcttcctttctgctttccttcct

SEQ ID NO: 3833323 - DNA, 25 bp, Homo sapien
tccttcttcctttctgctttccttc

SEQ ID NO: 3833324 - DNA, 25 bp, Homo sapien
ttcctttctgctttccttccttcac

SEQ ID NO: 3833325 - DNA, 25 bp, Homo sapien
cctgggcaaggccaggtaactttct

SEQ ID NO: 3833326 - DNA, 25 bp, Homo sapien
gaaaccatctctggacttaacctag

SEQ ID NO: 3833327 - DNA, 25 bp, Homo sapien
agagttctaaccagccagtactttg

SEQ ID NO: 3833328 - DNA, 25 bp, Homo sapien
tataaggatcagacttttctaaagg

SEQ ID NO: 3833329 - DNA, 25 bp, Homo sapien
aaatatatcaggaaagggtgatcca

SEQ ID NO: 3833330 - DNA, 25 bp, Homo sapien
tagaatggggctggataggggaggc

SEQ ID NO: 3833331 - DNA, 25 bp, Homo sapien
ccatctgaagtgtgtcctctgaatg

SEQ ID NO: 3833332 - DNA, 25 bp, Homo sapien
atctgaagtgtgtcctctgaatgca

SEQ ID NO: 3833333 - DNA, 25 bp, Homo sapien
cctctgaatgcagttctagaatggg

SEQ ID NO: 3833334 - DNA, 25 bp, Homo sapien
tgagttcttggccacgtcaggatgg

SEQ ID NO: 3833335 - DNA, 25 bp, Homo sapien
tctggccagtctccgaaagatgtgg

SEQ ID NO: 3833336 - DNA, 25 bp, Homo sapien
gatgggatgtgaagctcaactgcac

SEQ ID NO: 3833337 - DNA, 25 bp, Homo sapien
tgctcactaactgcctgtaggcgtt

SEQ ID NO: 3833338 - DNA, 25 bp, Homo sapien
cagaggcctaatgaacaacatgggt

SEQ ID NO: 3833339 - DNA, 25 bp, Homo sapien
gctgtgaccaattgcaccactgtcc

SEQ ID NO: 3833340 - DNA, 25 bp, Homo sapien
gaaagtaaaatcaggaggcacgcag

SEQ ID NO: 3833341 - DNA, 25 bp, Homo sapien
caacatgggtcctatccgataggga

SEQ ID NO: 3833342 - DNA, 25 bp, Homo sapien
tgctcttcttaagtcaggggctact

SEQ ID NO: 3833343 - DNA, 25 bp, Homo sapien
cttcttaagtcaggggctactcaag

SEQ ID NO: 3833344 - DNA, 25 bp, Homo sapien
tcttcttaagtcaggggctactcaa

SEQ ID NO: 3833345 - DNA, 25 bp, Homo sapien
gctcttcttaagtcaggggctactc

SEQ ID NO: 3833346 - DNA, 25 bp, Homo sapien
gacgaccttgagatccctttgaatg

SEQ ID NO: 3833347 - DNA, 25 bp, Homo sapien
ggaagcactggacaagacgaccttg

SEQ ID NO: 3833348 - DNA, 25 bp, Homo sapien
gaatttgatgacttgagtaactcac

SEQ ID NO: 3833349 - DNA, 25 bp, Homo sapien
tggcccagccgtatgtggtggcata

SEQ ID NO: 3833350 - DNA, 25 bp, Homo sapien
cctgtgtaacttcttgcaaataaca

SEQ ID NO: 3833351 - DNA, 25 bp, Homo sapien
catttggaatgagtttttccatccc

SEQ ID NO: 3833352 - DNA, 25 bp, Homo sapien
cacattaggatctaacattagcatg

SEQ ID NO: 3833353 - DNA, 25 bp, Homo sapien
aagtctagtaccatgtagttcaggg

SEQ ID NO: 3833354 - DNA, 25 bp, Homo sapien
ccagggtgtcacgagtcaggaaagt

SEQ ID NO: 3833355 - DNA, 25 bp, Homo sapien
ggtacaaaccattgcaggagctgaa

SEQ ID NO: 3833356 - DNA, 25 bp, Homo sapien
gatgtcaggaaagcaataaagggca

SEQ ID NO: 3833357 - DNA, 25 bp, Homo sapien
gcaagcagggaacccaaagttggcc

SEQ ID NO: 3833358 - DNA, 25 bp, Homo sapien
gaattaagagatcagagggtaagcc

SEQ ID NO: 3833359 - DNA, 25 bp, Homo sapien
gaatcaactgggtggcgtgctaaac

SEQ ID NO: 3833360 - DNA, 25 bp, Homo sapien
gcacccttgtatagacatcatgaag

SEQ ID NO: 3833361 - DNA, 25 bp, Homo sapien
cagattgataggctccaccccaaat

SEQ ID NO: 3833362 - DNA, 25 bp, Homo sapien
gacaggtctcggagatctgctccaa

SEQ ID NO: 3833363 - DNA, 25 bp, Homo sapien
caataacggcatatctctttgaatc

SEQ ID NO: 3833364 - DNA, 25 bp, Homo sapien
tccagttcagacaggtctcggagat

SEQ ID NO: 3833365 - DNA, 25 bp, Homo sapien
ggagatctgctccaataacggcata

SEQ ID NO: 3833366 - DNA, 25 bp, Homo sapien
aagtggcctatcagatgcttcccgg

SEQ ID NO: 3833367 - DNA, 25 bp, Homo sapien
tcaaagcagataccccaagagtaat

SEQ ID NO: 3833368 - DNA, 25 bp, Homo sapien
cagctaagcccaacaagaaactggt

SEQ ID NO: 3833369 - DNA, 25 bp, Homo sapien
tggtatgccctacccaatgaactgc

SEQ ID NO: 3833370 - DNA, 25 bp, Homo sapien
tcgtagtttatgaacatggctctct

SEQ ID NO: 3833371 - DNA, 25 bp, Homo sapien
tctggagtcatgtaaaccagcacac

SEQ ID NO: 3833372 - DNA, 25 bp, Homo sapien
gcccacttcaggaggtttgcggact

SEQ ID NO: 3833373 - DNA, 25 bp, Homo sapien
cattcagctatcaggagtgttggca

SEQ ID NO: 3833374 - DNA, 25 bp, Homo sapien
ttcaatcatgatctgcccaaaccga

SEQ ID NO: 3833375 - DNA, 25 bp, Homo sapien
tgcccaaaccgatcacccatgttca

SEQ ID NO: 3833376 - DNA, 25 bp, Homo sapien
cactcccgccaggtcacactggcgt

SEQ ID NO: 3833377 - DNA, 25 bp, Homo sapien
cgcaggttttcaatcatgatctgcc

SEQ ID NO: 3833378 - DNA, 25 bp, Homo sapien
tatatcttggttgactaagggtcca

SEQ ID NO: 3833379 - DNA, 25 bp, Homo sapien
ggtccaaatggatatcccagtccct

SEQ ID NO: 3833380 - DNA, 25 bp, Homo sapien
gaaatgtgatggtgaagcaggactt

SEQ ID NO: 3833381 - DNA, 25 bp, Homo sapien
tggtcttcccagcatcatgaactag

SEQ ID NO: 3833382 - DNA, 25 bp, Homo sapien
tgtttcccacccattcgacaggagc

SEQ ID NO: 3833383 - DNA, 25 bp, Homo sapien
acccattcgacaggagccgttcttt

SEQ ID NO: 3833384 - DNA, 25 bp, Homo sapien
tcccacccattcgacaggagccgtt

SEQ ID NO: 3833385 - DNA, 25 bp, Homo sapien
ccacccattcgacaggagccgttct

SEQ ID NO: 3833386 - DNA, 25 bp, Homo sapien
tcgaggtaacctgttgtacaactcc

SEQ ID NO: 3833387 - DNA, 25 bp, Homo sapien
gctcgaggtaacctgttgtacaact

SEQ ID NO: 3833388 - DNA, 25 bp, Homo sapien
cagctcgaggtaacctgttgtacaa

SEQ ID NO: 3833389 - DNA, 25 bp, Homo sapien
ttcagctcgaggtaacctgttgtac

SEQ ID NO: 3833390 - DNA, 25 bp, Homo sapien
tatggtgtggctccattttaatgtc

SEQ ID NO: 3833391 - DNA, 25 bp, Homo sapien
tgatagattaagtggaaagaaggcg

SEQ ID NO: 3833392 - DNA, 25 bp, Homo sapien
aagatcatggcccatagctacggat

SEQ ID NO: 3833393 - DNA, 25 bp, Homo sapien
gaacgatgcaagtgtctgcattgaa

SEQ ID NO: 3833394 - DNA, 25 bp, Homo sapien
cagtaatgccgcatgagctgctcca

SEQ ID NO: 3833395 - DNA, 25 bp, Homo sapien
tccagcagctccatttcatccagga

SEQ ID NO: 3833396 - DNA, 25 bp, Homo sapien
ttggttgcccagcaaaggcagtaat

SEQ ID NO: 3833397 - DNA, 25 bp, Homo sapien
cagcagctccatttcatccaggaat

SEQ ID NO: 3833398 - DNA, 25 bp, Homo sapien
gctacaaggcttaaacagttctctt

SEQ ID NO: 3833399 - DNA, 25 bp, Homo sapien
tgggctacaaggcttaaacagttct

SEQ ID NO: 3833400 - DNA, 25 bp, Homo sapien
gggctacaaggcttaaacagttctc

SEQ ID NO: 3833401 - DNA, 25 bp, Homo sapien
ttgggctacaaggcttaaacagttc

SEQ ID NO: 3833402 - DNA, 25 bp, Homo sapien
cagggagcttgcaggtctcctccag

SEQ ID NO: 3833403 - DNA, 25 bp, Homo sapien
tggctcggcataagccttcgacaga

SEQ ID NO: 3833404 - DNA, 25 bp, Homo sapien
gcttctggctcggcataagccttcg

SEQ ID NO: 3833405 - DNA, 25 bp, Homo sapien
ttctggctcggcataagccttcgac

SEQ ID NO: 3833406 - DNA, 25 bp, Homo sapien
aagaggaacatgtgcgaccactgta

SEQ ID NO: 3833407 - DNA, 25 bp, Homo sapien
atgagacctgcggacgaggcccgcc

SEQ ID NO: 3833408 - DNA, 25 bp, Homo sapien
tgcgaccactgtagtgaccaaggct

SEQ ID NO: 3833409 - DNA, 25 bp, Homo sapien
tgggatgagacctgcggacgaggcc

SEQ ID NO: 3833410 - DNA, 25 bp, Homo sapien
atttaaacaacgacatgtcaacagg

SEQ ID NO: 3833411 - DNA, 25 bp, Homo sapien
aaacaacgacatgtcaacaggaaca

SEQ ID NO: 3833412 - DNA, 25 bp, Homo sapien
tttatttaaacaacgacatgtcaac

SEQ ID NO: 3833413 - DNA, 25 bp, Homo sapien
taaacaacgacatgtcaacaggaac

SEQ ID NO: 3833414 - DNA, 25 bp, Homo sapien
gagtaagccaaggtcaaagcagact

SEQ ID NO: 3833415 - DNA, 25 bp, Homo sapien
caagccatggggcacggaacgagca

SEQ ID NO: 3833416 - DNA, 25 bp, Homo sapien
gcagccagcagaggtccaaccacag

SEQ ID NO: 3833417 - DNA, 25 bp, Homo sapien
tttagctaacacagaggtgaaccct

SEQ ID NO: 3833418 - DNA, 25 bp, Homo sapien
acatgcaggttcaggctcgcagcgc

SEQ ID NO: 3833419 - DNA, 25 bp, Homo sapien
ttcaggctcgcagcgccagtcacat

SEQ ID NO: 3833420 - DNA, 25 bp, Homo sapien
cgcagcgccagtcacataacttaag

SEQ ID NO: 3833421 - DNA, 25 bp, Homo sapien
tgcagtgccaccctgcacatgcagg

SEQ ID NO: 3833422 - DNA, 25 bp, Homo sapien
ttatggaaactgaatcatgtttcaa

SEQ ID NO: 3833423 - DNA, 25 bp, Homo sapien
gcgaatcacagggatctcactgagg

SEQ ID NO: 3833424 - DNA, 25 bp, Homo sapien
tggctggctgtaattttatggaaac

SEQ ID NO: 3833425 - DNA, 25 bp, Homo sapien
cccaggtccacgaacatgcgaatca

SEQ ID NO: 3833426 - DNA, 25 bp, Homo sapien
ccagatgtgacgctgctgctgtggc

SEQ ID NO: 3833427 - DNA, 25 bp, Homo sapien
cactgttgtgccagatgtgacgctg

SEQ ID NO: 3833428 - DNA, 25 bp, Homo sapien
tcttgccttgatggctgcactgttg

SEQ ID NO: 3833429 - DNA, 25 bp, Homo sapien
tgtgccagatgtgacgctgctgctg

SEQ ID NO: 3833430 - DNA, 25 bp, Homo sapien
cccacagcacatcatacaagatgtt

SEQ ID NO: 3833431 - DNA, 25 bp, Homo sapien
gatgtttcttagacccttccttcca

SEQ ID NO: 3833432 - DNA, 25 bp, Homo sapien
gcacatcatacaagatgtttcttag

SEQ ID NO: 3833433 - DNA, 25 bp, Homo sapien
cacagcacatcatacaagatgtttc

SEQ ID NO: 3833434 - DNA, 25 bp, Homo sapien
caggactgagtgtatagatgacgat

SEQ ID NO: 3833435 - DNA, 25 bp, Homo sapien
ggactgagtgtatagatgacgatcc

SEQ ID NO: 3833436 - DNA, 25 bp, Homo sapien
gccaggactgagtgtatagatgacg

SEQ ID NO: 3833437 - DNA, 25 bp, Homo sapien
tgagccaggactgagtgtatagatg

SEQ ID NO: 3833438 - DNA, 25 bp, Homo sapien
caggacctgctgatcacactatggg

SEQ ID NO: 3833439 - DNA, 25 bp, Homo sapien
ggacaggacctgctgatcacactat

SEQ ID NO: 3833440 - DNA, 25 bp, Homo sapien
cctgctgatcacactatgggctctg

SEQ ID NO: 3833441 - DNA, 25 bp, Homo sapien
gctgatcacactatgggctctgccc

SEQ ID NO: 3833442 - DNA, 25 bp, Homo sapien
tcagatggcacaaacatcggactct

SEQ ID NO: 3833443 - DNA, 25 bp, Homo sapien
tcggactcttgcctgagctgctggg

SEQ ID NO: 3833444 - DNA, 25 bp, Homo sapien
aacatcggactcttgcctgagctgc

SEQ ID NO: 3833445 - DNA, 25 bp, Homo sapien
gcacaaacatcggactcttgcctga

SEQ ID NO: 3833446 - DNA, 25 bp, Homo sapien
acgctcggctccctggccttgtcat

SEQ ID NO: 3833447 - DNA, 25 bp, Homo sapien
gctcggctccctggccttgtcattg

SEQ ID NO: 3833448 - DNA, 25 bp, Homo sapien
cctggccttgtcattgccaaattca

SEQ ID NO: 3833449 - DNA, 25 bp, Homo sapien
ggctccctggccttgtcattgccaa

SEQ ID NO: 3833450 - DNA, 25 bp, Homo sapien
tattccccagcgtggcaatcacgag

SEQ ID NO: 3833451 - DNA, 25 bp, Homo sapien
gacatggctgcacaaaccgttcgta

SEQ ID NO: 3833452 - DNA, 25 bp, Homo sapien
gacaggcacccgatgaagatgaaga

SEQ ID NO: 3833453 - DNA, 25 bp, Homo sapien
cccagcagttcgaccagacatggct

SEQ ID NO: 3833454 - DNA, 25 bp, Homo sapien
caccgcagggttgaagtgtccacca

SEQ ID NO: 3833455 - DNA, 25 bp, Homo sapien
tgtgagacccagtacgggaggagca

SEQ ID NO: 3833456 - DNA, 25 bp, Homo sapien
atcaccaggttgaggcctccgatca

SEQ ID NO: 3833457 - DNA, 25 bp, Homo sapien
cttggccaaggcagccccgagcatc

SEQ ID NO: 3833458 - DNA, 25 bp, Homo sapien
agcagcgtcgtcaggatgatctctg

SEQ ID NO: 3833459 - DNA, 25 bp, Homo sapien
aaaggccgccccagatgcattccag

SEQ ID NO: 3833460 - DNA, 25 bp, Homo sapien
tggactgtcacaaaggccgccccag

SEQ ID NO: 3833461 - DNA, 25 bp, Homo sapien
tatccacggtgacggcaaagccgat

SEQ ID NO: 3833462 - DNA, 25 bp, Homo sapien
ccagtggttggccaccaccgcaggt

SEQ ID NO: 3833463 - DNA, 25 bp, Homo sapien
gggcccagccagtagatccagtgga

SEQ ID NO: 3833464 - DNA, 25 bp, Homo sapien
caggtccaaaagcacgggcgggatt

SEQ ID NO: 3833465 - DNA, 25 bp, Homo sapien
taatgagcagtccaacaagcaggcc

SEQ ID NO: 3833466 - DNA, 25 bp, Homo sapien
aggatgaggcgggtcttcccatctc

SEQ ID NO: 3833467 - DNA, 25 bp, Homo sapien
ttcaggatgaggcgggtcttcccat

SEQ ID NO: 3833468 - DNA, 25 bp, Homo sapien
atgaggcgggtcttcccatctccaa

SEQ ID NO: 3833469 - DNA, 25 bp, Homo sapien
cttcaggatgaggcgggtcttccca

SEQ ID NO: 3833470 - DNA, 25 bp, Homo sapien
gcaggaactcccctgtcctcagtct

SEQ ID NO: 3833471 - DNA, 25 bp, Homo sapien
ctggagcagcaggaatcccacgagc

SEQ ID NO: 3833472 - DNA, 25 bp, Homo sapien
aggaactcccctgtcctcagtctgg

SEQ ID NO: 3833473 - DNA, 25 bp, Homo sapien
agaacctagagcctcctcagcagtc

SEQ ID NO: 3833474 - DNA, 25 bp, Homo sapien
tcagcagtcagtctatctgagaaag

SEQ ID NO: 3833475 - DNA, 25 bp, Homo sapien
tcctctcaagaaacacgctcgtgtt

SEQ ID NO: 3833476 - DNA, 25 bp, Homo sapien
tctgagaaagcaggcccaagcagtg

SEQ ID NO: 3833477 - DNA, 25 bp, Homo sapien
gaattgtcagcttgagaagcaagga

SEQ ID NO: 3833478 - DNA, 25 bp, Homo sapien
aattgtcagcttgagaagcaaggaa

SEQ ID NO: 3833479 - DNA, 25 bp, Homo sapien
tggactatttattgcaaagtgagaa

SEQ ID NO: 3833480 - DNA, 25 bp, Homo sapien
aacactggactatttattgcaaagt

SEQ ID NO: 3833481 - DNA, 25 bp, Homo sapien
gccataagccttgcttggatacatg

SEQ ID NO: 3833482 - DNA, 25 bp, Homo sapien
tgagaacctcttccaacagcggcac

SEQ ID NO: 3833483 - DNA, 25 bp, Homo sapien
tccatggcgcatgcaagtgtgcttg

SEQ ID NO: 3833484 - DNA, 25 bp, Homo sapien
gacaccaatgtgacttggctatagc

SEQ ID NO: 3833485 - DNA, 25 bp, Homo sapien
ccattgtcccagtaatggtcatctc

SEQ ID NO: 3833486 - DNA, 25 bp, Homo sapien
cattgtcccagtaatggtcatctcc

SEQ ID NO: 3833487 - DNA, 25 bp, Homo sapien
gccattgtcccagtaatggtcatct

SEQ ID NO: 3833488 - DNA, 25 bp, Homo sapien
attgtcccagtaatggtcatctcca

SEQ ID NO: 3833489 - DNA, 25 bp, Homo sapien
ccccagtggcaggaaagggtcaagc

SEQ ID NO: 3833490 - DNA, 25 bp, Homo sapien
tgcagaagagttgcgctaagttgcc

SEQ ID NO: 3833491 - DNA, 25 bp, Homo sapien
tacaccatggcagttacagaaggcc

SEQ ID NO: 3833492 - DNA, 25 bp, Homo sapien
cacagtttgatagaggaagcatcac

SEQ ID NO: 3833493 - DNA, 25 bp, Homo sapien
tgtgttgtccaagttatagatttct

SEQ ID NO: 3833494 - DNA, 25 bp, Homo sapien
aatgctaagtacagttccatgttgg

SEQ ID NO: 3833495 - DNA, 25 bp, Homo sapien
tccatgttggtagtgtgcgtagcac

SEQ ID NO: 3833496 - DNA, 25 bp, Homo sapien
cagtaagatgtttgtggtgccagtg

SEQ ID NO: 3833497 - DNA, 25 bp, Homo sapien
gagtcagtggcgtttattcccttag

SEQ ID NO: 3833498 - DNA, 25 bp, Homo sapien
tcaggtctggctgttaaatctccca

SEQ ID NO: 3833499 - DNA, 25 bp, Homo sapien
gaaacctaactgtagtgtgccaagt

SEQ ID NO: 3833500 - DNA, 25 bp, Homo sapien
tcagcttagaccagcgctctcaggt

SEQ ID NO: 3833501 - DNA, 25 bp, Homo sapien
gaagacttaaatcccctggctgctg

SEQ ID NO: 3833502 - DNA, 25 bp, Homo sapien
gcctgctcgtggtgtgtctcactaa

SEQ ID NO: 3833503 - DNA, 25 bp, Homo sapien
catgccctcctcagatagaatagga

SEQ ID NO: 3833504 - DNA, 25 bp, Homo sapien
tctccagcctataagtaatcccagg

SEQ ID NO: 3833505 - DNA, 25 bp, Homo sapien
tagggcagaatccctgtattgtcac

SEQ ID NO: 3833506 - DNA, 25 bp, Homo sapien
ctagggcagaatccctgtattgtca

SEQ ID NO: 3833507 - DNA, 25 bp, Homo sapien
caatcagctagaatcacaggcgtgt

SEQ ID NO: 3833508 - DNA, 25 bp, Homo sapien
cattacgtgacaaaaagaaagtcaa

SEQ ID NO: 3833509 - DNA, 25 bp, Homo sapien
ctcccaatcagctagaatcacaggc

SEQ ID NO: 3833510 - DNA, 25 bp, Homo sapien
cacgaccagcctaaactcttgattt

SEQ ID NO: 3833511 - DNA, 25 bp, Homo sapien
caaaaggcagtgcactagcattcaa

SEQ ID NO: 3833512 - DNA, 25 bp, Homo sapien
gaggctacagcgaaccaacatcact

SEQ ID NO: 3833513 - DNA, 25 bp, Homo sapien
gaaacattcttgtgaatcatgcgca

SEQ ID NO: 3833514 - DNA, 25 bp, Homo sapien
caatgccttgtgactagactgtgca

SEQ ID NO: 3833515 - DNA, 25 bp, Homo sapien
taatgacttcaaactctgtggcacc

SEQ ID NO: 3833516 - DNA, 25 bp, Homo sapien
tgcagttgcatctaggagctcaaat

SEQ ID NO: 3833517 - DNA, 25 bp, Homo sapien
gggaaatgacccactagtgtaagag

SEQ ID NO: 3833518 - DNA, 25 bp, Homo sapien
gggtctagtttcaggtgcagttgca

SEQ ID NO: 3833519 - DNA, 25 bp, Homo sapien
aataattccctgactaaattctgga

SEQ ID NO: 3833520 - DNA, 25 bp, Homo sapien
tgtgccagaccttagcttttcactg

SEQ ID NO: 3833521 - DNA, 25 bp, Homo sapien
tgtatacacaacaactcaagtcagc

SEQ ID NO: 3833522 - DNA, 25 bp, Homo sapien
gattcaagatcaaccttgtgccaga

SEQ ID NO: 3833523 - DNA, 25 bp, Homo sapien
ttcattacggtggtggatttaaatc

SEQ ID NO: 3833524 - DNA, 25 bp, Homo sapien
tgtgtgtgtgcgtttcattacggtg

SEQ ID NO: 3833525 - DNA, 25 bp, Homo sapien
gtgtgtgtgcgtttcattacggtgg

SEQ ID NO: 3833526 - DNA, 25 bp, Homo sapien
cattacggtggtggatttaaatcac

SEQ ID NO: 3833527 - DNA, 25 bp, Homo sapien
gcatctattacatgtctctactcaa

SEQ ID NO: 3833528 - DNA, 25 bp, Homo sapien
catgtctctactcaaggattgcttc

SEQ ID NO: 3833529 - DNA, 25 bp, Homo sapien
tactcaaggattgcttcttacgcgt

SEQ ID NO: 3833530 - DNA, 25 bp, Homo sapien
gattgcttcttacgcgttgggaaga

SEQ ID NO: 3833531 - DNA, 25 bp, Homo sapien
cagaatagaatacaggaatagaccc

SEQ ID NO: 3833532 - DNA, 25 bp, Homo sapien
gacaaggactcaacgtaaggataga

SEQ ID NO: 3833533 - DNA, 25 bp, Homo sapien
gatatacagaaggagtcaacaaact

SEQ ID NO: 3833534 - DNA, 25 bp, Homo sapien
caaaggtaccaggtcaatgcaatgg

SEQ ID NO: 3833535 - DNA, 25 bp, Homo sapien
tgggcacaaactgccctctgctgtt

SEQ ID NO: 3833536 - DNA, 25 bp, Homo sapien
tattataatccctggccccatattc

SEQ ID NO: 3833537 - DNA, 25 bp, Homo sapien
gcagtattagtggactctacatgaa

SEQ ID NO: 3833538 - DNA, 25 bp, Homo sapien
cagccaccattatcacctgaagaag

SEQ ID NO: 3833539 - DNA, 25 bp, Homo sapien
tacacgctgttgtgttgtctagcaa

SEQ ID NO: 3833540 - DNA, 25 bp, Homo sapien
tattttgcccactgaaccaatgagg

SEQ ID NO: 3833541 - DNA, 25 bp, Homo sapien
tcatgagattgagagtcgcggtgct

SEQ ID NO: 3833542 - DNA, 25 bp, Homo sapien
tactgagcatttgcaccatgctagg

SEQ ID NO: 3833543 - DNA, 25 bp, Homo sapien
gtagtgtgtaccactagtctgttcc

SEQ ID NO: 3833544 - DNA, 25 bp, Homo sapien
aatcatggtttgcttagtcattcac

SEQ ID NO: 3833545 - DNA, 25 bp, Homo sapien
gacatctgcgctgttttaaatctag

SEQ ID NO: 3833546 - DNA, 25 bp, Homo sapien
cactcaacataattccctagattca

SEQ ID NO: 3833547 - DNA, 25 bp, Homo sapien
ggtaccttgaaaatagcaagctcag

SEQ ID NO: 3833548 - DNA, 25 bp, Homo sapien
taccttgaaaatagcaagctcagct

SEQ ID NO: 3833549 - DNA, 25 bp, Homo sapien
ttgaaaatagcaagctcagcttcca

SEQ ID NO: 3833550 - DNA, 25 bp, Homo sapien
ccttgaaaatagcaagctcagcttc

SEQ ID NO: 3833551 - DNA, 25 bp, Homo sapien
tggtaccttccatgtaagtggccag

SEQ ID NO: 3833552 - DNA, 25 bp, Homo sapien
taagtggccaggttccacatgtcct

SEQ ID NO: 3833553 - DNA, 25 bp, Homo sapien
gaagacgtgggttgatggtaccttc

SEQ ID NO: 3833554 - DNA, 25 bp, Homo sapien
tgatggtaccttccatgtaagtggc

SEQ ID NO: 3833555 - DNA, 25 bp, Homo sapien
tgccttgagccctagaaatgaacct

SEQ ID NO: 3833556 - DNA, 25 bp, Homo sapien
caggtgaacaaacgaacatgcagaa

SEQ ID NO: 3833557 - DNA, 25 bp, Homo sapien
tcatttattgtagcctctaaagacc

SEQ ID NO: 3833558 - DNA, 25 bp, Homo sapien
tattatgattcagaggaaacacgaa

SEQ ID NO: 3833559 - DNA, 25 bp, Homo sapien
caacgggccatgcagtctttgagta

SEQ ID NO: 3833560 - DNA, 25 bp, Homo sapien
gctataagttgatgcacaatctctc

SEQ ID NO: 3833561 - DNA, 25 bp, Homo sapien
gcagtctttgagtaaatctctggag

SEQ ID NO: 3833562 - DNA, 25 bp, Homo sapien
tctctggagtgaagcttttgaagtt

SEQ ID NO: 3833563 - DNA, 25 bp, Homo sapien
ggccagagtgatcaatccaaaagtg

SEQ ID NO: 3833564 - DNA, 25 bp, Homo sapien
gattcattggccaggagtatctgct

SEQ ID NO: 3833565 - DNA, 25 bp, Homo sapien
tccctgaaactgcagaagatgctgg

SEQ ID NO: 3833566 - DNA, 25 bp, Homo sapien
tacgtgaggccctgtgattcattgg

SEQ ID NO: 3833567 - DNA, 25 bp, Homo sapien
gagaccgactccaaaggggcaagat

SEQ ID NO: 3833568 - DNA, 25 bp, Homo sapien
gagcagagttggagaccgactccaa

SEQ ID NO: 3833569 - DNA, 25 bp, Homo sapien
cagagttggagaccgactccaaagg

SEQ ID NO: 3833570 - DNA, 25 bp, Homo sapien
gaccgactccaaaggggcaagatgt

SEQ ID NO: 3833571 - DNA, 25 bp, Homo sapien
ccaactgacagcaaattgtatgcac

SEQ ID NO: 3833572 - DNA, 25 bp, Homo sapien
gccaactgacagcaaattgtatgca

SEQ ID NO: 3833573 - DNA, 25 bp, Homo sapien
cagccctgggcaatgaagacaacaa

SEQ ID NO: 3833574 - DNA, 25 bp, Homo sapien
aacactcctatttgtccaggttgcg

SEQ ID NO: 3833575 - DNA, 25 bp, Homo sapien
ccttaattcttcagttggccgggag

SEQ ID NO: 3833576 - DNA, 25 bp, Homo sapien
gcgatctcatattcactctgggcca

SEQ ID NO: 3833577 - DNA, 25 bp, Homo sapien
tgcaaattatgcatataagcaaaga

SEQ ID NO: 3833578 - DNA, 25 bp, Homo sapien
aagtcactgtgccatagccttcatg

SEQ ID NO: 3833579 - DNA, 25 bp, Homo sapien
aagagatttcccacaaagggtgttg

SEQ ID NO: 3833580 - DNA, 25 bp, Homo sapien
ttcacagcgccttccaaccgtgtgg

SEQ ID NO: 3833581 - DNA, 25 bp, Homo sapien
tcttgtgtagttttatcattaacaa

SEQ ID NO: 3833582 - DNA, 25 bp, Homo sapien
tacatcggtctcacttaagtctttt

SEQ ID NO: 3833583 - DNA, 25 bp, Homo sapien
atatgtacatcggtctcacttaagt

SEQ ID NO: 3833584 - DNA, 25 bp, Homo sapien
attatatgtacatcggtctcactta

SEQ ID NO: 3833585 - DNA, 25 bp, Homo sapien
ttaaatggccactgctcaggggtga

SEQ ID NO: 3833586 - DNA, 25 bp, Homo sapien
tatctctgtcactagctaccattag

SEQ ID NO: 3833587 - DNA, 25 bp, Homo sapien
tgtcactgtgaacatccttaaatgg

SEQ ID NO: 3833588 - DNA, 25 bp, Homo sapien
ttctttcacctggagcaagtttgag

SEQ ID NO: 3833589 - DNA, 25 bp, Homo sapien
gcctcaatctggctacagactctgt

SEQ ID NO: 3833590 - DNA, 25 bp, Homo sapien
cagactctgtgccatagactaggat

SEQ ID NO: 3833591 - DNA, 25 bp, Homo sapien
tcattgagtatgttcaggctgccaa

SEQ ID NO: 3833592 - DNA, 25 bp, Homo sapien
tagactaggatctgtggctcattcc

SEQ ID NO: 3833593 - DNA, 25 bp, Homo sapien
caagatgtatacaaaataacagttc

SEQ ID NO: 3833594 - DNA, 25 bp, Homo sapien
cagttccttcggtaatcatgattgg

SEQ ID NO: 3833595 - DNA, 25 bp, Homo sapien
caaggacaaatcgttgtttagacag

SEQ ID NO: 3833596 - DNA, 25 bp, Homo sapien
tagagttgcctccaaaacgggagca

SEQ ID NO: 3833597 - DNA, 25 bp, Homo sapien
actcatggttttcaggatatgccat

SEQ ID NO: 3833598 - DNA, 25 bp, Homo sapien
cgagccactcatggttttcaggata

SEQ ID NO: 3833599 - DNA, 25 bp, Homo sapien
gccactcatggttttcaggatatgc

SEQ ID NO: 3833600 - DNA, 25 bp, Homo sapien
ccactcatggttttcaggatatgcc

SEQ ID NO: 3833601 - DNA, 25 bp, Homo sapien
gagattgcattgtgtacagagatag

SEQ ID NO: 3833602 - DNA, 25 bp, Homo sapien
caggaaaagctaggggagattgcat

SEQ ID NO: 3833603 - DNA, 25 bp, Homo sapien
ggctattagaatgacacagtgtcac

SEQ ID NO: 3833604 - DNA, 25 bp, Homo sapien
taaagcagtattctccttcatgcac

SEQ ID NO: 3833605 - DNA, 25 bp, Homo sapien
ttcgatgcatgaagggcataccgcc

SEQ ID NO: 3833606 - DNA, 25 bp, Homo sapien
ttcatgttgctgaggcccttcgatg

SEQ ID NO: 3833607 - DNA, 25 bp, Homo sapien
ggcataccgcctgcctttcacttga

SEQ ID NO: 3833608 - DNA, 25 bp, Homo sapien
ctttcacttgaacctccttctgctg

SEQ ID NO: 3833609 - DNA, 25 bp, Homo sapien
gctttacacatgagacctgcaataa

SEQ ID NO: 3833610 - DNA, 25 bp, Homo sapien
gactcgacaatcaagtaatgagcta

SEQ ID NO: 3833611 - DNA, 25 bp, Homo sapien
taatgagctattgacgagggaaatg

SEQ ID NO: 3833612 - DNA, 25 bp, Homo sapien
gcttatagcgtctgtgactcgacaa

SEQ ID NO: 3833613 - DNA, 25 bp, Homo sapien
gaccaactggcaaaatgaatggctt

SEQ ID NO: 3833614 - DNA, 25 bp, Homo sapien
caacgagcagttggatccacttagg

SEQ ID NO: 3833615 - DNA, 25 bp, Homo sapien
tcataatcaacactgaagctgcttc

SEQ ID NO: 3833616 - DNA, 25 bp, Homo sapien
ggaaagctgcgttgcttcataatca

SEQ ID NO: 3833617 - DNA, 25 bp, Homo sapien
cagaaccgaaaacctccacagcttg

SEQ ID NO: 3833618 - DNA, 25 bp, Homo sapien
gcagaaccgaaaacctccacagctt

SEQ ID NO: 3833619 - DNA, 25 bp, Homo sapien
agaaccgaaaacctccacagcttgt

SEQ ID NO: 3833620 - DNA, 25 bp, Homo sapien
agcagaaccgaaaacctccacagct

SEQ ID NO: 3833621 - DNA, 25 bp, Homo sapien
aagccacagcttggaatcctagaag

SEQ ID NO: 3833622 - DNA, 25 bp, Homo sapien
tggaatcctagaaggacgaaggcct

SEQ ID NO: 3833623 - DNA, 25 bp, Homo sapien
cacagcttggaatcctagaaggacg

SEQ ID NO: 3833624 - DNA, 25 bp, Homo sapien
cagcttggaatcctagaaggacgaa

SEQ ID NO: 3833625 - DNA, 25 bp, Homo sapien
agtgtcctcacacccgtgaccaaca

SEQ ID NO: 3833626 - DNA, 25 bp, Homo sapien
gtgtcctcacacccgtgaccaacac

SEQ ID NO: 3833627 - DNA, 25 bp, Homo sapien
tcagagtgtcctcacacccgtgacc

SEQ ID NO: 3833628 - DNA, 25 bp, Homo sapien
agagtgtcctcacacccgtgaccaa

SEQ ID NO: 3833629 - DNA, 25 bp, Homo sapien
tgctcatcgaaaccggccaaaggca

SEQ ID NO: 3833630 - DNA, 25 bp, Homo sapien
ggcgacatctgctcatcgaaaccgg

SEQ ID NO: 3833631 - DNA, 25 bp, Homo sapien
tgagctacagtcaggcgacatctgc

SEQ ID NO: 3833632 - DNA, 25 bp, Homo sapien
aatgaggctgagctacagtcaggcg

SEQ ID NO: 3833633 - DNA, 25 bp, Homo sapien
gctgttctaactttccacatctctt

SEQ ID NO: 3833634 - DNA, 25 bp, Homo sapien
cagctctgctgttctaactttccac

SEQ ID NO: 3833635 - DNA, 25 bp, Homo sapien
aagcagtgcagctctgctgttctaa

SEQ ID NO: 3833636 - DNA, 25 bp, Homo sapien
ctctggaaactggagaagcagtgca

SEQ ID NO: 3833637 - DNA, 25 bp, Homo sapien
ggtcaccaaccatctcagatatctc

SEQ ID NO: 3833638 - DNA, 25 bp, Homo sapien
ggagttatagtatgccgatatagtg

SEQ ID NO: 3833639 - DNA, 25 bp, Homo sapien
aaaatatctaacagctggcatggag

SEQ ID NO: 3833640 - DNA, 25 bp, Homo sapien
ttcaaaatatctaacagctggcatg

SEQ ID NO: 3833641 - DNA, 25 bp, Homo sapien
cgtttcgagtgcatatccaacccat

SEQ ID NO: 3833642 - DNA, 25 bp, Homo sapien
cagtgagaaattgtgatagatgccg

SEQ ID NO: 3833643 - DNA, 25 bp, Homo sapien
tccgtgtgccgtatactcagtgaga

SEQ ID NO: 3833644 - DNA, 25 bp, Homo sapien
gcaacatctgtggtaatagcatccg

SEQ ID NO: 3833645 - DNA, 25 bp, Homo sapien
ggatgggtcttcctgtcctccgtca

SEQ ID NO: 3833646 - DNA, 25 bp, Homo sapien
ccagaagtggatgggtcttcctgtc

SEQ ID NO: 3833647 - DNA, 25 bp, Homo sapien
agccagcccagaagtggatgggtct

SEQ ID NO: 3833648 - DNA, 25 bp, Homo sapien
cagcccagaagtggatgggtcttcc

SEQ ID NO: 3833649 - DNA, 25 bp, Homo sapien
cctcttgtgccggtgcagatatccg

SEQ ID NO: 3833650 - DNA, 25 bp, Homo sapien
ctgtctgatccattgcttgctgatc

SEQ ID NO: 3833651 - DNA, 25 bp, Homo sapien
cttgctgatcaagctgcaaagagcc

SEQ ID NO: 3833652 - DNA, 25 bp, Homo sapien
ttaaatcaacggttcagctgtctga

SEQ ID NO: 3833653 - DNA, 25 bp, Homo sapien
tgttgaccccttgttcctactgatc

SEQ ID NO: 3833654 - DNA, 25 bp, Homo sapien
tcctactgatccatggatcctgctg

SEQ ID NO: 3833655 - DNA, 25 bp, Homo sapien
tgatccatggatcctgctgacccat

SEQ ID NO: 3833656 - DNA, 25 bp, Homo sapien
acccacagtttctgttgaccccttg

SEQ ID NO: 3833657 - DNA, 25 bp, Homo sapien
ccattggcaatgagtcccatgaccc

SEQ ID NO: 3833658 - DNA, 25 bp, Homo sapien
gtctttctggtgatgtatggttccc

SEQ ID NO: 3833659 - DNA, 25 bp, Homo sapien
cctgcttacccgtggtgccaagaaa

SEQ ID NO: 3833660 - DNA, 25 bp, Homo sapien
gtcaccttcaaatctagcactgcca

SEQ ID NO: 3833661 - DNA, 25 bp, Homo sapien
ttgttgtggttgcagtaactcacgt

SEQ ID NO: 3833662 - DNA, 25 bp, Homo sapien
tgtggttgcagtaactcacgtacag

SEQ ID NO: 3833663 - DNA, 25 bp, Homo sapien
tcggcactgacttgttgtggttgca

SEQ ID NO: 3833664 - DNA, 25 bp, Homo sapien
gttgcagtaactcacgtacaggcat

SEQ ID NO: 3833665 - DNA, 25 bp, Homo sapien
ttttctctgtagtgccacacatatt

SEQ ID NO: 3833666 - DNA, 25 bp, Homo sapien
gggactctcgttcttgctcttcggt

SEQ ID NO: 3833667 - DNA, 25 bp, Homo sapien
taattaccagggactctcgttcttg

SEQ ID NO: 3833668 - DNA, 25 bp, Homo sapien
agtctgcccgcagaattttctctgt

SEQ ID NO: 3833669 - DNA, 25 bp, Homo sapien
agagctctatggagcctgggccact

SEQ ID NO: 3833670 - DNA, 25 bp, Homo sapien
gccactgaagtaggcttgacataga

SEQ ID NO: 3833671 - DNA, 25 bp, Homo sapien
gatggagtctgccacacaagcctga

SEQ ID NO: 3833672 - DNA, 25 bp, Homo sapien
gctgcatggtcatgcctgattgcca

SEQ ID NO: 3833673 - DNA, 25 bp, Homo sapien
cagaagcctagtgcagatacagcca

SEQ ID NO: 3833674 - DNA, 25 bp, Homo sapien
gccagaagcctagtgcagatacagc

SEQ ID NO: 3833675 - DNA, 25 bp, Homo sapien
aggccagaagcctagtgcagataca

SEQ ID NO: 3833676 - DNA, 25 bp, Homo sapien
gaagcctagtgcagatacagccagc

SEQ ID NO: 3833677 - DNA, 25 bp, Homo sapien
aggaaagcctttggcaggcatggca

SEQ ID NO: 3833678 - DNA, 25 bp, Homo sapien
gaaagcctttggcaggcatggcact

SEQ ID NO: 3833679 - DNA, 25 bp, Homo sapien
aaagcctttggcaggcatggcactg

SEQ ID NO: 3833680 - DNA, 25 bp, Homo sapien
ctaggaaagcctttggcaggcatgg

SEQ ID NO: 3833681 - DNA, 25 bp, Homo sapien
ctttggtgtatctcgcagtcctgcc

SEQ ID NO: 3833682 - DNA, 25 bp, Homo sapien
tgtatctcgcagtcctgccaaacca

SEQ ID NO: 3833683 - DNA, 25 bp, Homo sapien
tggtgtatctcgcagtcctgccaaa

SEQ ID NO: 3833684 - DNA, 25 bp, Homo sapien
tatctcgcagtcctgccaaaccaaa

SEQ ID NO: 3833685 - DNA, 25 bp, Homo sapien
ccagccacagctgggtgcctgacgg

SEQ ID NO: 3833686 - DNA, 25 bp, Homo sapien
gggctgcttttcccttgttggctgc

SEQ ID NO: 3833687 - DNA, 25 bp, Homo sapien
agctgggtgcctgacggggctgctt

SEQ ID NO: 3833688 - DNA, 25 bp, Homo sapien
gcttttcccttgttggctgctgtgg

SEQ ID NO: 3833689 - DNA, 25 bp, Homo sapien
taacggagttcatggtttcctggac

SEQ ID NO: 3833690 - DNA, 25 bp, Homo sapien
gaaatagtgtgggaccactgtcgct

SEQ ID NO: 3833691 - DNA, 25 bp, Homo sapien
gaagacagcgggtgacgaagctctc

SEQ ID NO: 3833692 - DNA, 25 bp, Homo sapien
tgccttcggtccaggagtgaatcct

SEQ ID NO: 3833693 - DNA, 25 bp, Homo sapien
cctggccgctgtcccgctgcgccag

SEQ ID NO: 3833694 - DNA, 25 bp, Homo sapien
gccggcggcacctgctccgtctgca

SEQ ID NO: 3833695 - DNA, 25 bp, Homo sapien
cggcgctgcccggacatggtttcag

SEQ ID NO: 3833696 - DNA, 25 bp, Homo sapien
ccggctgcatgaagcgacgccgctg

SEQ ID NO: 3833697 - DNA, 25 bp, Homo sapien
taaaaagcagcttgcgcgccggcgg

SEQ ID NO: 3833698 - DNA, 25 bp, Homo sapien
ccggcggccccttagcagaggcgcc

SEQ ID NO: 3833699 - DNA, 25 bp, Homo sapien
gggaattgcagggagcccgagccgc

SEQ ID NO: 3833700 - DNA, 25 bp, Homo sapien
ccaggaggctgtagcacaggtaggt

SEQ ID NO: 3833701 - DNA, 25 bp, Homo sapien
ggctcgcgttgtccagcggcggcgg

SEQ ID NO: 3833702 - DNA, 25 bp, Homo sapien
gggcggctccccgtggctcgcgttg

SEQ ID NO: 3833703 - DNA, 25 bp, Homo sapien
gctccccgtggctcgcgttgtccag

SEQ ID NO: 3833704 - DNA, 25 bp, Homo sapien
aggcgcacgggggtaggcagcagag

SEQ ID NO: 3833705 - DNA, 25 bp, Homo sapien
cgccgctcggcagcccccagccgtc

SEQ ID NO: 3833706 - DNA, 25 bp, Homo sapien
tccgccgccgctcggcagcccccag

SEQ ID NO: 3833707 - DNA, 25 bp, Homo sapien
ccaggcgtcctgggcgcctccgccg

SEQ ID NO: 3833708 - DNA, 25 bp, Homo sapien
cggcagcccccagccgtcggtcccg

SEQ ID NO: 3833709 - DNA, 25 bp, Homo sapien
agcgcgctctgagccgtgatcatct

SEQ ID NO: 3833710 - DNA, 25 bp, Homo sapien
cctgcgagatcctcgtcggtggtgc

SEQ ID NO: 3833711 - DNA, 25 bp, Homo sapien
gtgctggactcctgcgcttccctct

SEQ ID NO: 3833712 - DNA, 25 bp, Homo sapien
tcccgttggccgctctccggcctgc

SEQ ID NO: 3833713 - DNA, 25 bp, Homo sapien
tttcttgaccccgatgatgagcgcc

SEQ ID NO: 3833714 - DNA, 25 bp, Homo sapien
acgtccgggtgcacgcggatcgcct

SEQ ID NO: 3833715 - DNA, 25 bp, Homo sapien
atgatgagcgcctgtggcagcttct

SEQ ID NO: 3833716 - DNA, 25 bp, Homo sapien
cttcttctccccatagtcgggggtg

SEQ ID NO: 3833717 - DNA, 25 bp, Homo sapien
gtcgaagaagtgcggctctacgccc

SEQ ID NO: 3833718 - DNA, 25 bp, Homo sapien
cgaagaagtgcggctctacgcccac

SEQ ID NO: 3833719 - DNA, 25 bp, Homo sapien
ctgtcgaagaagtgcggctctacgc

SEQ ID NO: 3833720 - DNA, 25 bp, Homo sapien
tgtcgaagaagtgcggctctacgcc

SEQ ID NO: 3833721 - DNA, 25 bp, Homo sapien
cctggatgctcgaagggcgtggaaa

SEQ ID NO: 3833722 - DNA, 25 bp, Homo sapien
cctctcgggacggtgcctggatgct

SEQ ID NO: 3833723 - DNA, 25 bp, Homo sapien
gagcaacgccgccagggtttgcaga

SEQ ID NO: 3833724 - DNA, 25 bp, Homo sapien
cgccagggtttgcagagccctcgcg

SEQ ID NO: 3833725 - DNA, 25 bp, Homo sapien
cctccttggatgaggagcgcgggag

SEQ ID NO: 3833726 - DNA, 25 bp, Homo sapien
tcccctcgccctgaaataaagtgac

SEQ ID NO: 3833727 - DNA, 25 bp, Homo sapien
ctccttggatgaggagcgcgggagg

SEQ ID NO: 3833728 - DNA, 25 bp, Homo sapien
ctcccctcgccctgaaataaagtga

SEQ ID NO: 3833729 - DNA, 25 bp, Homo sapien
gatgttgcaatatatccgggaggta

SEQ ID NO: 3833730 - DNA, 25 bp, Homo sapien
caggcttttgtggatgttgcaatat

SEQ ID NO: 3833731 - DNA, 25 bp, Homo sapien
tttgtggatgttgcaatatatccgg

SEQ ID NO: 3833732 - DNA, 25 bp, Homo sapien
atatccgggaggtatttcccccatg

SEQ ID NO: 3833733 - DNA, 25 bp, Homo sapien
ctctccaaactcctcatattcagtc

SEQ ID NO: 3833734 - DNA, 25 bp, Homo sapien
gaggattctgcattgaaggaggaat

SEQ ID NO: 3833735 - DNA, 25 bp, Homo sapien
tgcataatatgtgatgctctctgag

SEQ ID NO: 3833736 - DNA, 25 bp, Homo sapien
ggattctgcattgaaggaggaattc

SEQ ID NO: 3833737 - DNA, 25 bp, Homo sapien
tttgcataatatgtgatgctctctg

SEQ ID NO: 3833738 - DNA, 25 bp, Homo sapien
tgtttccctggctacagctatttag

SEQ ID NO: 3833739 - DNA, 25 bp, Homo sapien
ttcttcatttgcacctggaaggccc

SEQ ID NO: 3833740 - DNA, 25 bp, Homo sapien
ttagatcatccacatcaaacacttc

SEQ ID NO: 3833741 - DNA, 25 bp, Homo sapien
ttcatttgcacctggaaggcccctc

SEQ ID NO: 3833742 - DNA, 25 bp, Homo sapien
tcctggcacctgtcgacatggtatg

SEQ ID NO: 3833743 - DNA, 25 bp, Homo sapien
tgatacacagcccttaacacagtgc

SEQ ID NO: 3833744 - DNA, 25 bp, Homo sapien
tttcaagtttgcaccactagactgc

SEQ ID NO: 3833745 - DNA, 25 bp, Homo sapien
gtcacaactcggacctcctgatggg

SEQ ID NO: 3833746 - DNA, 25 bp, Homo sapien
tagtggcagccttcttagcaggcag

SEQ ID NO: 3833747 - DNA, 25 bp, Homo sapien
ggggtagtggcagccttcttagcag

SEQ ID NO: 3833748 - DNA, 25 bp, Homo sapien
ggtagtggcagccttcttagcaggc

SEQ ID NO: 3833749 - DNA, 25 bp, Homo sapien
agtggcagccttcttagcaggcagc

SEQ ID NO: 3833750 - DNA, 25 bp, Homo sapien
tctgctagggggagacttgggagac

SEQ ID NO: 3833751 - DNA, 25 bp, Homo sapien
tgcaaaccccattctcataatctgg

SEQ ID NO: 3833752 - DNA, 25 bp, Homo sapien
tttgcaaaccccattctcataatct

SEQ ID NO: 3833753 - DNA, 25 bp, Homo sapien
cataatctggtagaagtctgctagg

SEQ ID NO: 3833754 - DNA, 25 bp, Homo sapien
ctgcactccccaagagccctgcttg

SEQ ID NO: 3833755 - DNA, 25 bp, Homo sapien
taaacccattctgaattggcccttg

SEQ ID NO: 3833756 - DNA, 25 bp, Homo sapien
ggctcctggcgattgggtcttgaca

SEQ ID NO: 3833757 - DNA, 25 bp, Homo sapien
gcggcgtctccgcattttcataaca

SEQ ID NO: 3833758 - DNA, 25 bp, Homo sapien
caccttggcccactgaacaggagta

SEQ ID NO: 3833759 - DNA, 25 bp, Homo sapien
aacatccattccccaaataaccagc

SEQ ID NO: 3833760 - DNA, 25 bp, Homo sapien
actgttgctaacatccattccccaa

SEQ ID NO: 3833761 - DNA, 25 bp, Homo sapien
catccattccccaaataaccagcat

SEQ ID NO: 3833762 - DNA, 25 bp, Homo sapien
tgttgctaacatccattccccaaat

SEQ ID NO: 3833763 - DNA, 25 bp, Homo sapien
aaaaagatgcttcgcctccacttca

SEQ ID NO: 3833764 - DNA, 25 bp, Homo sapien
aagtaacattatactgcaatgcggg

SEQ ID NO: 3833765 - DNA, 25 bp, Homo sapien
ggccaggaatagacaagacaaccat

SEQ ID NO: 3833766 - DNA, 25 bp, Homo sapien
tgagcaaacctaaagggcttagact

SEQ ID NO: 3833767 - DNA, 25 bp, Homo sapien
caaatcagctctatctatgatggtc

SEQ ID NO: 3833768 - DNA, 25 bp, Homo sapien
ctatctatgatggtctgagatgcct

SEQ ID NO: 3833769 - DNA, 25 bp, Homo sapien
tcagctctatctatgatggtctgag

SEQ ID NO: 3833770 - DNA, 25 bp, Homo sapien
ctcaaatcagctctatctatgatgg

SEQ ID NO: 3833771 - DNA, 25 bp, Homo sapien
aaggctggcctttgcaccaacccta

SEQ ID NO: 3833772 - DNA, 25 bp, Homo sapien
acaaatgcactagtcctgagatgga

SEQ ID NO: 3833773 - DNA, 25 bp, Homo sapien
tgagatggatgtgcgaaggctggcc

SEQ ID NO: 3833774 - DNA, 25 bp, Homo sapien
accaaccctagcatgaagatgcgtc

SEQ ID NO: 3833775 - DNA, 25 bp, Homo sapien
caccttgcgtctggaggattttaga

SEQ ID NO: 3833776 - DNA, 25 bp, Homo sapien
atggcaaaggtatcgatcgcctctg

SEQ ID NO: 3833777 - DNA, 25 bp, Homo sapien
gactgtcaatggaagctttcggaag

SEQ ID NO: 3833778 - DNA, 25 bp, Homo sapien
taagacagtccacgagtctggacgg

SEQ ID NO: 3833779 - DNA, 25 bp, Homo sapien
ctgcaattccttttacctgggggtg

SEQ ID NO: 3833780 - DNA, 25 bp, Homo sapien
tcctccttttggacaaataagcagt

SEQ ID NO: 3833781 - DNA, 25 bp, Homo sapien
tccttttggacaaataagcagtcat

SEQ ID NO: 3833782 - DNA, 25 bp, Homo sapien
cttcctccttttggacaaataagca

SEQ ID NO: 3833783 - DNA, 25 bp, Homo sapien
aactgcttgcatgtcctgcagacgt

SEQ ID NO: 3833784 - DNA, 25 bp, Homo sapien
ttgcatgtcctgcagacgtccagct

SEQ ID NO: 3833785 - DNA, 25 bp, Homo sapien
agctgcaagatctacaccatcacca

SEQ ID NO: 3833786 - DNA, 25 bp, Homo sapien
gctgcaagatctacaccatcaccat

SEQ ID NO: 3833787 - DNA, 25 bp, Homo sapien
aggagttgaacagcctccagcagta

SEQ ID NO: 3833788 - DNA, 25 bp, Homo sapien
aaaggagttgaacagcctccagcag

SEQ ID NO: 3833789 - DNA, 25 bp, Homo sapien
tgaacagcctccagcagtaagctca

SEQ ID NO: 3833790 - DNA, 25 bp, Homo sapien
ctaaaggagttgaacagcctccagc

SEQ ID NO: 3833791 - DNA, 25 bp, Homo sapien
ccagagcctgaataaggtgaacaca

SEQ ID NO: 3833792 - DNA, 25 bp, Homo sapien
tatggcagtcttacgttcacacagg

SEQ ID NO: 3833793 - DNA, 25 bp, Homo sapien
tgttgagtgggttccaaaagaccaa

SEQ ID NO: 3833794 - DNA, 25 bp, Homo sapien
tgcatccagagaccaaatcctagag

SEQ ID NO: 3833795 - DNA, 25 bp, Homo sapien
tgatcccttactggctcggacaagg

SEQ ID NO: 3833796 - DNA, 25 bp, Homo sapien
ccaaatggctccaagaaagagtctg

SEQ ID NO: 3833797 - DNA, 25 bp, Homo sapien
cagtttgtaggaccgtgtggctttc

SEQ ID NO: 3833798 - DNA, 25 bp, Homo sapien
tattggtcctagtgtctcgtccctg

SEQ ID NO: 3833799 - DNA, 25 bp, Homo sapien
cattacgatggccagtgttactgat

SEQ ID NO: 3833800 - DNA, 25 bp, Homo sapien
caaaatgagtcccaagagaagaggt

SEQ ID NO: 3833801 - DNA, 25 bp, Homo sapien
tgtcctttctcattacgatggccag

SEQ ID NO: 3833802 - DNA, 25 bp, Homo sapien
ctgatgaaccagttgtcgagtacat

SEQ ID NO: 3833803 - DNA, 25 bp, Homo sapien
tggctgaccctagtccccaaggtaa

SEQ ID NO: 3833804 - DNA, 25 bp, Homo sapien
tgaatgagctgaatggcatccaatg

SEQ ID NO: 3833805 - DNA, 25 bp, Homo sapien
gacacaatgatcgtctgcagcagaa

SEQ ID NO: 3833806 - DNA, 25 bp, Homo sapien
tgaactgcggattggaaaatcaacc

SEQ ID NO: 3833807 - DNA, 25 bp, Homo sapien
ggcatcccaggctctttcatgtgta

SEQ ID NO: 3833808 - DNA, 25 bp, Homo sapien
cccatggattgggtttggcatccca

SEQ ID NO: 3833809 - DNA, 25 bp, Homo sapien
gcttctaccaataaaaactccacag

SEQ ID NO: 3833810 - DNA, 25 bp, Homo sapien
taatatttgggtgctgcttctacca

SEQ ID NO: 3833811 - DNA, 25 bp, Homo sapien
catagagatgggaacgactggaaac

SEQ ID NO: 3833812 - DNA, 25 bp, Homo sapien
aaggaatgctcatagagatgggaac

SEQ ID NO: 3833813 - DNA, 25 bp, Homo sapien
aagagcccgctctgtaatatcacat

SEQ ID NO: 3833814 - DNA, 25 bp, Homo sapien
gatgacagccacttgcaacatgccg

SEQ ID NO: 3833815 - DNA, 25 bp, Homo sapien
aaacaagacaagcaaggcgggcaga

SEQ ID NO: 3833816 - DNA, 25 bp, Homo sapien
gaaacaagacaagcaaggcgggcag

SEQ ID NO: 3833817 - DNA, 25 bp, Homo sapien
agaaacaagacaagcaaggcgggca

SEQ ID NO: 3833818 - DNA, 25 bp, Homo sapien
tcttctccaatttaaacagtggttg

SEQ ID NO: 3833819 - DNA, 25 bp, Homo sapien
caaatggtctctgtttacacaatat

SEQ ID NO: 3833820 - DNA, 25 bp, Homo sapien
ctgaaatctagcaggctgttgctct

SEQ ID NO: 3833821 - DNA, 25 bp, Homo sapien
tcaaggtgctactgggcgtctgctg

SEQ ID NO: 3833822 - DNA, 25 bp, Homo sapien
cttacagagaagatgccgtgtttat

SEQ ID NO: 3833823 - DNA, 25 bp, Homo sapien
ttctcttacagagaagatgccgtgt

SEQ ID NO: 3833824 - DNA, 25 bp, Homo sapien
gatgccgtgtttattaaccatttca

SEQ ID NO: 3833825 - DNA, 25 bp, Homo sapien
gagaagatgccgtgtttattaacca

SEQ ID NO: 3833826 - DNA, 25 bp, Homo sapien
taatcttcacagactgtatgaccca

SEQ ID NO: 3833827 - DNA, 25 bp, Homo sapien
aataatcttcacagactgtatgacc

SEQ ID NO: 3833828 - DNA, 25 bp, Homo sapien
ctggcaataatcttcacagactgta

SEQ ID NO: 3833829 - DNA, 25 bp, Homo sapien
ggcaataatcttcacagactgtatg

SEQ ID NO: 3833830 - DNA, 25 bp, Homo sapien
acgatgataagagactgcaggagcc

SEQ ID NO: 3833831 - DNA, 25 bp, Homo sapien
gataagagccccacgatgataagag

SEQ ID NO: 3833832 - DNA, 25 bp, Homo sapien
gatggtgctttcatcgcccacaaca

SEQ ID NO: 3833833 - DNA, 25 bp, Homo sapien
acaacaaatccttctgataagagcc

SEQ ID NO: 3833834 - DNA, 25 bp, Homo sapien
ctacaccaacagagaatgaccatct

SEQ ID NO: 3833835 - DNA, 25 bp, Homo sapien
caccaacagagaatgaccatctagg

SEQ ID NO: 3833836 - DNA, 25 bp, Homo sapien
cagagaatgaccatctaggaagcca

SEQ ID NO: 3833837 - DNA, 25 bp, Homo sapien
atctaggaagccaagtgaccatcta

SEQ ID NO: 3833838 - DNA, 25 bp, Homo sapien
tctaacaactaccttgaccaagaag

SEQ ID NO: 3833839 - DNA, 25 bp, Homo sapien
aatgtgttcatcctgggttgccctc

SEQ ID NO: 3833840 - DNA, 25 bp, Homo sapien
tccagaaatcttttacagcagctct

SEQ ID NO: 3833841 - DNA, 25 bp, Homo sapien
caaaggtgtattcacttcagggaat

SEQ ID NO: 3833842 - DNA, 25 bp, Homo sapien
catcattcacatgagcacggttcat

SEQ ID NO: 3833843 - DNA, 25 bp, Homo sapien
ggtcagagcagtagaacaggaatga

SEQ ID NO: 3833844 - DNA, 25 bp, Homo sapien
aggaagaagcgagtttgcctgcctt

SEQ ID NO: 3833845 - DNA, 25 bp, Homo sapien
gagtttgcctgccttccatcattca

SEQ ID NO: 3833846 - DNA, 25 bp, Homo sapien
tggtgtcaaagctgaaactgaaagt

SEQ ID NO: 3833847 - DNA, 25 bp, Homo sapien
ggacaaacagtcagctccatgctgg

SEQ ID NO: 3833848 - DNA, 25 bp, Homo sapien
ctggtgtcaaagctgaaactgaaag

SEQ ID NO: 3833849 - DNA, 25 bp, Homo sapien
ccagagcaaaggacaaacagtcagc

SEQ ID NO: 3833850 - DNA, 25 bp, Homo sapien
gcaagtctggcgatgggaagtccct

SEQ ID NO: 3833851 - DNA, 25 bp, Homo sapien
tcaatcttctctagcaagtctggcg

SEQ ID NO: 3833852 - DNA, 25 bp, Homo sapien
tcttctctagcaagtctggcgatgg

SEQ ID NO: 3833853 - DNA, 25 bp, Homo sapien
ggagagccccgactttcttgttctc

SEQ ID NO: 3833854 - DNA, 25 bp, Homo sapien
atagtaaacccttgccttgagttgg

SEQ ID NO: 3833855 - DNA, 25 bp, Homo sapien
tgctatgagttcatgtaatcttcat

SEQ ID NO: 3833856 - DNA, 25 bp, Homo sapien
tcattttggccactaaattccttgc

SEQ ID NO: 3833857 - DNA, 25 bp, Homo sapien
ttttgaggtcagattttctaacagg

SEQ ID NO: 3833858 - DNA, 25 bp, Homo sapien
gccacttcagcttgccgcatgcctg

SEQ ID NO: 3833859 - DNA, 25 bp, Homo sapien
tctctgggatcagctctgaccccaa

SEQ ID NO: 3833860 - DNA, 25 bp, Homo sapien
tctgggatcagctctgaccccaaag

SEQ ID NO: 3833861 - DNA, 25 bp, Homo sapien
tgcaggggccacttcagcttgccgc

SEQ ID NO: 3833862 - DNA, 25 bp, Homo sapien
atgttttggaagtgacagaatcagc

SEQ ID NO: 3833863 - DNA, 25 bp, Homo sapien
gacagaatcagctcctctactcttg

SEQ ID NO: 3833864 - DNA, 25 bp, Homo sapien
ctctactcttgctgtgcctggggcc

SEQ ID NO: 3833865 - DNA, 25 bp, Homo sapien
tcataatgttttggaagtgacagaa

SEQ ID NO: 3833866 - DNA, 25 bp, Homo sapien
gccgtggacattagttccccccatc

SEQ ID NO: 3833867 - DNA, 25 bp, Homo sapien
ggacattagttccccccatctccca

SEQ ID NO: 3833868 - DNA, 25 bp, Homo sapien
gtggacattagttccccccatctcc

SEQ ID NO: 3833869 - DNA, 25 bp, Homo sapien
cgtggacattagttccccccatctc

SEQ ID NO: 3833870 - DNA, 25 bp, Homo sapien
tcacacatagcgagagtcctcatct

SEQ ID NO: 3833871 - DNA, 25 bp, Homo sapien
cacacatagcgagagtcctcatctg

SEQ ID NO: 3833872 - DNA, 25 bp, Homo sapien
taaagtataccccaagcttttcagc

SEQ ID NO: 3833873 - DNA, 25 bp, Homo sapien
tgtcctgacattgcactggacagaa

SEQ ID NO: 3833874 - DNA, 25 bp, Homo sapien
gcactggacagaactgggtcatagg

SEQ ID NO: 3833875 - DNA, 25 bp, Homo sapien
tgacattgcactggacagaactggg

SEQ ID NO: 3833876 - DNA, 25 bp, Homo sapien
caagggagaaatttgtcacaggtaa

SEQ ID NO: 3833877 - DNA, 25 bp, Homo sapien
caggggcaagggagaaatttgtcac

SEQ ID NO: 3833878 - DNA, 25 bp, Homo sapien
ggagaaatttgtcacaggtaacttc

SEQ ID NO: 3833879 - DNA, 25 bp, Homo sapien
atttgtcacaggtaacttcaccagg

SEQ ID NO: 3833880 - DNA, 25 bp, Homo sapien
ctaaagttaaggttgactcagcact

SEQ ID NO: 3833881 - DNA, 25 bp, Homo sapien
tgttctggggatttataactcagcc

SEQ ID NO: 3833882 - DNA, 25 bp, Homo sapien
catttgcactgctaaagttaaggtt

SEQ ID NO: 3833883 - DNA, 25 bp, Homo sapien
tgtggcaccatttgcactgctaaag

SEQ ID NO: 3833884 - DNA, 25 bp, Homo sapien
tgagatgccttgtttgtaaggatct

SEQ ID NO: 3833885 - DNA, 25 bp, Homo sapien
ccttgtttgtaaggatctggaccat

SEQ ID NO: 3833886 - DNA, 25 bp, Homo sapien
gatgccttgtttgtaaggatctgga

SEQ ID NO: 3833887 - DNA, 25 bp, Homo sapien
tgccttgtttgtaaggatctggacc

SEQ ID NO: 3833888 - DNA, 25 bp, Homo sapien
caatgtaaagagtattcgacctcac

SEQ ID NO: 3833889 - DNA, 25 bp, Homo sapien
acaatgtaaagagtattcgacctca

SEQ ID NO: 3833890 - DNA, 25 bp, Homo sapien
cttagcaataacattaccataataa

SEQ ID NO: 3833891 - DNA, 25 bp, Homo sapien
ttcttagcaataacattaccataat

SEQ ID NO: 3833892 - DNA, 25 bp, Homo sapien
tagcaataacattaccataataata

SEQ ID NO: 3833893 - DNA, 25 bp, Homo sapien
tcttagcaataacattaccataata

SEQ ID NO: 3833894 - DNA, 25 bp, Homo sapien
ttcccaccacctctttcaacacctg

SEQ ID NO: 3833895 - DNA, 25 bp, Homo sapien
gctggcttggcctctatgctgaaaa

SEQ ID NO: 3833896 - DNA, 25 bp, Homo sapien
tcccaccacctctttcaacacctgc

SEQ ID NO: 3833897 - DNA, 25 bp, Homo sapien
agtggcaccaaaaagttttcctgct

SEQ ID NO: 3833898 - DNA, 25 bp, Homo sapien
tgttgggttccttcacatctggaga

SEQ ID NO: 3833899 - DNA, 25 bp, Homo sapien
catctggagaactagaagtggcacc

SEQ ID NO: 3833900 - DNA, 25 bp, Homo sapien
tctccataaggcaaagtaatgttgc

SEQ ID NO: 3833901 - DNA, 25 bp, Homo sapien
gcttctttgctgagacgacacaaga

SEQ ID NO: 3833902 - DNA, 25 bp, Homo sapien
gcatttggtttgtgtttcaacagcg

SEQ ID NO: 3833903 - DNA, 25 bp, Homo sapien
gcgtcgcggcgtaatctgtgacact

SEQ ID NO: 3833904 - DNA, 25 bp, Homo sapien
tctctgatgtttccccagtcaaagc

SEQ ID NO: 3833905 - DNA, 25 bp, Homo sapien
catgaggaaccccaaactcatggcc

SEQ ID NO: 3833906 - DNA, 25 bp, Homo sapien
tcatgaggaaccccaaactcatggc

SEQ ID NO: 3833907 - DNA, 25 bp, Homo sapien
gggtcatgaggaaccccaaactcat

SEQ ID NO: 3833908 - DNA, 25 bp, Homo sapien
ggtcatgaggaaccccaaactcatg

SEQ ID NO: 3833909 - DNA, 25 bp, Homo sapien
aagaggcttgggctgcatcgattct

SEQ ID NO: 3833910 - DNA, 25 bp, Homo sapien
cagttcccatgctcagatacaacgt

SEQ ID NO: 3833911 - DNA, 25 bp, Homo sapien
tgaacttctcaagcgctttcagggc

SEQ ID NO: 3833912 - DNA, 25 bp, Homo sapien
agttctctaaatgctctctcccagt

SEQ ID NO: 3833913 - DNA, 25 bp, Homo sapien
tcagggggacattcgttcactgttt

SEQ ID NO: 3833914 - DNA, 25 bp, Homo sapien
cagggggacattcgttcactgtttt

SEQ ID NO: 3833915 - DNA, 25 bp, Homo sapien
tttcctacacttctgagcacaggct

SEQ ID NO: 3833916 - DNA, 25 bp, Homo sapien
gggtttcatgaactcgcaggctttc

SEQ ID NO: 3833917 - DNA, 25 bp, Homo sapien
gccctttctttgctacaaccaacca

SEQ ID NO: 3833918 - DNA, 25 bp, Homo sapien
gagcacaggctttcctacgctcctg

SEQ ID NO: 3833919 - DNA, 25 bp, Homo sapien
gatctgtgcatagttcttgcaaatc

SEQ ID NO: 3833920 - DNA, 25 bp, Homo sapien
atctgtgcatagttcttgcaaatct

SEQ ID NO: 3833921 - DNA, 25 bp, Homo sapien
gtcggccaccttgtaagacttctga

SEQ ID NO: 3833922 - DNA, 25 bp, Homo sapien
gaaggcttggcaccatctgcttttg

SEQ ID NO: 3833923 - DNA, 25 bp, Homo sapien
ttttgtgccttgagggaagtcggcc

SEQ ID NO: 3833924 - DNA, 25 bp, Homo sapien
tacgatacaatgtggtgaacgtgac

SEQ ID NO: 3833925 - DNA, 25 bp, Homo sapien
ctgaggtctggagtacaactgaact

SEQ ID NO: 3833926 - DNA, 25 bp, Homo sapien
tgtacatgtgcagagtatagtgtgt

SEQ ID NO: 3833927 - DNA, 25 bp, Homo sapien
cctccccttgtaggccccagtatct

SEQ ID NO: 3833928 - DNA, 25 bp, Homo sapien
tcgtcaccctgacagtcagcacagt

SEQ ID NO: 3833929 - DNA, 25 bp, Homo sapien
gcacatgaccataacagagctcaca

SEQ ID NO: 3833930 - DNA, 25 bp, Homo sapien
gctgtctgaactcagggcacatgac

SEQ ID NO: 3833931 - DNA, 25 bp, Homo sapien
tcagggcacatgaccataacagagc

SEQ ID NO: 3833932 - DNA, 25 bp, Homo sapien
atgaccataacagagctcacactga

SEQ ID NO: 3833933 - DNA, 25 bp, Homo sapien
tcactgaaggggtctattgctgagc

SEQ ID NO: 3833934 - DNA, 25 bp, Homo sapien
cactgaaggggtctattgctgagcc

SEQ ID NO: 3833935 - DNA, 25 bp, Homo sapien
aagttgtgggcccagacatccatca

SEQ ID NO: 3833936 - DNA, 25 bp, Homo sapien
gccagccggcagacattttaaccag

SEQ ID NO: 3833937 - DNA, 25 bp, Homo sapien
caagcctgagatgtagcgcagtggc

SEQ ID NO: 3833938 - DNA, 25 bp, Homo sapien
tatggcttatgtttccctgttaatg

SEQ ID NO: 3833939 - DNA, 25 bp, Homo sapien
gagcccattcagcagtattgcttta

SEQ ID NO: 3833940 - DNA, 25 bp, Homo sapien
cacagagcccattcagcagtattgc

SEQ ID NO: 3833941 - DNA, 25 bp, Homo sapien
cccattcagcagtattgctttaatg

SEQ ID NO: 3833942 - DNA, 25 bp, Homo sapien
cagcagtattgctttaatgggctac

SEQ ID NO: 3833943 - DNA, 25 bp, Homo sapien
caggcgtgcagacgaagtcagatga

SEQ ID NO: 3833944 - DNA, 25 bp, Homo sapien
cagacaaggttaataggatgtgagc

SEQ ID NO: 3833945 - DNA, 25 bp, Homo sapien
tgaattagccggcagcctggtcatg

SEQ ID NO: 3833946 - DNA, 25 bp, Homo sapien
tctgctcatggaagacaggcgtgca

SEQ ID NO: 3833947 - DNA, 25 bp, Homo sapien
tcatcttttccaagtttccgaataa

SEQ ID NO: 3833948 - DNA, 25 bp, Homo sapien
ctaaatcggtttcatcttttccaag

SEQ ID NO: 3833949 - DNA, 25 bp, Homo sapien
cctaaggtctaaatcggtttcatct

SEQ ID NO: 3833950 - DNA, 25 bp, Homo sapien
gtctaaatcggtttcatcttttcca

SEQ ID NO: 3833951 - DNA, 25 bp, Homo sapien
tagagtgcacctgagccatcttggc

SEQ ID NO: 3833952 - DNA, 25 bp, Homo sapien
aggctagagtgcacctgagccatct

SEQ ID NO: 3833953 - DNA, 25 bp, Homo sapien
ccaggctagagtgcacctgagccat

SEQ ID NO: 3833954 - DNA, 25 bp, Homo sapien
gctagagtgcacctgagccatcttg

SEQ ID NO: 3833955 - DNA, 25 bp, Homo sapien
ccctgcttagtttccaagatcagac

SEQ ID NO: 3833956 - DNA, 25 bp, Homo sapien
cgagatcgggtatgttcagggtagt

SEQ ID NO: 3833957 - DNA, 25 bp, Homo sapien
gaccctgcttagtttccaagatcag

SEQ ID NO: 3833958 - DNA, 25 bp, Homo sapien
tcagacgagatcgggtatgttcagg

SEQ ID NO: 3833959 - DNA, 25 bp, Homo sapien
tggattgatgtggagaaaacacctt

SEQ ID NO: 3833960 - DNA, 25 bp, Homo sapien
catatgtcactaatagaatgtctcc

SEQ ID NO: 3833961 - DNA, 25 bp, Homo sapien
gacctgacccctagtcattggttac

SEQ ID NO: 3833962 - DNA, 25 bp, Homo sapien
gcacacagaacacttcattgttgtt

SEQ ID NO: 3833963 - DNA, 25 bp, Homo sapien
ccgcgtccagcacctacgtcctgct

SEQ ID NO: 3833964 - DNA, 25 bp, Homo sapien
gcgtccagcacctacgtcctgctgc

SEQ ID NO: 3833965 - DNA, 25 bp, Homo sapien
agcacctacgtcctgctgccgtcgc

SEQ ID NO: 3833966 - DNA, 25 bp, Homo sapien
gtccagcacctacgtcctgctgccg

SEQ ID NO: 3833967 - DNA, 25 bp, Homo sapien
gaatgggtcccacctcgtatatacc

SEQ ID NO: 3833968 - DNA, 25 bp, Homo sapien
tgtcgttcaggtcttaatgaatggg

SEQ ID NO: 3833969 - DNA, 25 bp, Homo sapien
aatttcgcagtctgtcgttcaggtc

SEQ ID NO: 3833970 - DNA, 25 bp, Homo sapien
tctttccacttaatttcgcagtctg

SEQ ID NO: 3833971 - DNA, 25 bp, Homo sapien
tccttcaatgggacatggatgattg

SEQ ID NO: 3833972 - DNA, 25 bp, Homo sapien
caggttgtatccttcaatgggacat

SEQ ID NO: 3833973 - DNA, 25 bp, Homo sapien
acatggatgattgacactatggtcc

SEQ ID NO: 3833974 - DNA, 25 bp, Homo sapien
tgattgacactatggtcctgcaaca

SEQ ID NO: 3833975 - DNA, 25 bp, Homo sapien
cacaggacataataaagctctcggt

SEQ ID NO: 3833976 - DNA, 25 bp, Homo sapien
ttccctgccactctggtgccggtga

SEQ ID NO: 3833977 - DNA, 25 bp, Homo sapien
taataaagctctcggtcccagcttc

SEQ ID NO: 3833978 - DNA, 25 bp, Homo sapien
tctggtgccggtgaccacaggacat

SEQ ID NO: 3833979 - DNA, 25 bp, Homo sapien
gacctccggatgtagacctccggac

SEQ ID NO: 3833980 - DNA, 25 bp, Homo sapien
ctccggatgtagacctccggacttc

SEQ ID NO: 3833981 - DNA, 25 bp, Homo sapien
tccggatgtagacctccggacttcc

SEQ ID NO: 3833982 - DNA, 25 bp, Homo sapien
cggatgtagacctccggacttccca

SEQ ID NO: 3833983 - DNA, 25 bp, Homo sapien
gagaggatacctgctcatgagcaca

SEQ ID NO: 3833984 - DNA, 25 bp, Homo sapien
gggccccaaatagcatttgcagttg

SEQ ID NO: 3833985 - DNA, 25 bp, Homo sapien
cattagaagcttcagggaactgaga

SEQ ID NO: 3833986 - DNA, 25 bp, Homo sapien
tgtgcagacttgacccaaatttgct

SEQ ID NO: 3833987 - DNA, 25 bp, Homo sapien
tagtggttacatcattgaaactcat

SEQ ID NO: 3833988 - DNA, 25 bp, Homo sapien
ctagtggttacatcattgaaactca

SEQ ID NO: 3833989 - DNA, 25 bp, Homo sapien
acccaaagaggccacaagcagatgg

SEQ ID NO: 3833990 - DNA, 25 bp, Homo sapien
acaagcagatgggtgtgctaagcag

SEQ ID NO: 3833991 - DNA, 25 bp, Homo sapien
tttgtacacccaaagaggccacaag

SEQ ID NO: 3833992 - DNA, 25 bp, Homo sapien
ccacaagcagatgggtgtgctaagc

SEQ ID NO: 3833993 - DNA, 25 bp, Homo sapien
tttagcccatgtgcatccttaaaat

SEQ ID NO: 3833994 - DNA, 25 bp, Homo sapien
tcatttttagcccatgtgcatcctt

SEQ ID NO: 3833995 - DNA, 25 bp, Homo sapien
cctgtgccaatagtgaggtcatttc

SEQ ID NO: 3833996 - DNA, 25 bp, Homo sapien
tctcagagaatgtaatcttaggacc

SEQ ID NO: 3833997 - DNA, 25 bp, Homo sapien
ggtgcctgaaaggaattaactgctc

SEQ ID NO: 3833998 - DNA, 25 bp, Homo sapien
tttcatcaggatcaaaaggcttagt

SEQ ID NO: 3833999 - DNA, 25 bp, Homo sapien
gcttagtggttaggatgcacttagc

SEQ ID NO: 3834000 - DNA, 25 bp, Homo sapien
tcagtacgcgtgttaattattgtcg

SEQ ID NO: 3834001 - DNA, 25 bp, Homo sapien
ttggaagacctccttaaccgcctca

SEQ ID NO: 3834002 - DNA, 25 bp, Homo sapien
tgccatcctctctcgaaataacttt

SEQ ID NO: 3834003 - DNA, 25 bp, Homo sapien
ccttaaccgcctcaagcctgagttt

SEQ ID NO: 3834004 - DNA, 25 bp, Homo sapien
catcctctctcgaaataactttgga

SEQ ID NO: 3834005 - DNA, 25 bp, Homo sapien
tctgcagaacctcacacaccaatgt

SEQ ID NO: 3834006 - DNA, 25 bp, Homo sapien
tgattgcaacgtctcacttcagggt

SEQ ID NO: 3834007 - DNA, 25 bp, Homo sapien
cagcgttttaaagggcaggtgcaac

SEQ ID NO: 3834008 - DNA, 25 bp, Homo sapien
cacctggagtgtacttcgctgatac

SEQ ID NO: 3834009 - DNA, 25 bp, Homo sapien
cctcagatttcatcactgtcctcat

SEQ ID NO: 3834010 - DNA, 25 bp, Homo sapien
ctataacctcagatttcatcactgt

SEQ ID NO: 3834011 - DNA, 25 bp, Homo sapien
taacctcagatttcatcactgtcct

SEQ ID NO: 3834012 - DNA, 25 bp, Homo sapien
tataacctcagatttcatcactgtc

SEQ ID NO: 3834013 - DNA, 25 bp, Homo sapien
cacaggttgggtagcgtggatctaa

SEQ ID NO: 3834014 - DNA, 25 bp, Homo sapien
tgtggaggtctcttgcaataattct

SEQ ID NO: 3834015 - DNA, 25 bp, Homo sapien
aataattcttaagtccacaggttgg

SEQ ID NO: 3834016 - DNA, 25 bp, Homo sapien
tcaatgtttagtatccatagggatg

SEQ ID NO: 3834017 - DNA, 25 bp, Homo sapien
cacacagtcctgaagcgagaatcat

SEQ ID NO: 3834018 - DNA, 25 bp, Homo sapien
tatcttgggcgctcagagcagccgt

SEQ ID NO: 3834019 - DNA, 25 bp, Homo sapien
cacagctcgttaacagtatcttggg

SEQ ID NO: 3834020 - DNA, 25 bp, Homo sapien
gagcagccgtgacatcagcgtcaac

SEQ ID NO: 3834021 - DNA, 25 bp, Homo sapien
gtaactacttccaaaccatgctggt

SEQ ID NO: 3834022 - DNA, 25 bp, Homo sapien
tggggctccgatccagtaactactt

SEQ ID NO: 3834023 - DNA, 25 bp, Homo sapien
cttcctgtaagattagaggaggcat

SEQ ID NO: 3834024 - DNA, 25 bp, Homo sapien
tccctcttcctgtaagattagagga

SEQ ID NO: 3834025 - DNA, 25 bp, Homo sapien
tccttttccccactttcatctctca

SEQ ID NO: 3834026 - DNA, 25 bp, Homo sapien
ccttttccccactttcatctctcac

SEQ ID NO: 3834027 - DNA, 25 bp, Homo sapien
atcttccttttccccactttcatct

SEQ ID NO: 3834028 - DNA, 25 bp, Homo sapien
cttccttttccccactttcatctct

SEQ ID NO: 3834029 - DNA, 25 bp, Homo sapien
aaggaaataagagaaggcattgcag

SEQ ID NO: 3834030 - DNA, 25 bp, Homo sapien
ggaaataagagaaggcattgcagaa

SEQ ID NO: 3834031 - DNA, 25 bp, Homo sapien
aaataagagaaggcattgcagaagg

SEQ ID NO: 3834032 - DNA, 25 bp, Homo sapien
tgcttgttgcaaaaggaaataagag

SEQ ID NO: 3834033 - DNA, 25 bp, Homo sapien
ttatttgcccatccaaagtcttggg

SEQ ID NO: 3834034 - DNA, 25 bp, Homo sapien
tatttgcccatccaaagtcttgggc

SEQ ID NO: 3834035 - DNA, 25 bp, Homo sapien
ggttatttgcccatccaaagtcttg

SEQ ID NO: 3834036 - DNA, 25 bp, Homo sapien
tttgcccatccaaagtcttgggcat

SEQ ID NO: 3834037 - DNA, 25 bp, Homo sapien
gccagttttccagatgcagcgcata

SEQ ID NO: 3834038 - DNA, 25 bp, Homo sapien
tccttggccatggagtgaatgcgct

SEQ ID NO: 3834039 - DNA, 25 bp, Homo sapien
gagtcgctcaccactgacaaagagg

SEQ ID NO: 3834040 - DNA, 25 bp, Homo sapien
cacaacacgtttgaggcctagaaaa

SEQ ID NO: 3834041 - DNA, 25 bp, Homo sapien
aaacatcaagttgaagggtttgtag

SEQ ID NO: 3834042 - DNA, 25 bp, Homo sapien
ccactgaaaatcttgaccagtcatt

SEQ ID NO: 3834043 - DNA, 25 bp, Homo sapien
catcaagttgaagggtttgtagaat

SEQ ID NO: 3834044 - DNA, 25 bp, Homo sapien
agggtttgtagaatttcctcagtct

SEQ ID NO: 3834045 - DNA, 25 bp, Homo sapien
gagtgagacccaaccccatttagag

SEQ ID NO: 3834046 - DNA, 25 bp, Homo sapien
tgatccgaacacaagggcatatgct

SEQ ID NO: 3834047 - DNA, 25 bp, Homo sapien
tctactctttgagcagccctgtggg

SEQ ID NO: 3834048 - DNA, 25 bp, Homo sapien
caacacggttttcatttagcgggag

SEQ ID NO: 3834049 - DNA, 25 bp, Homo sapien
gagccagccacttcgtggttttact

SEQ ID NO: 3834050 - DNA, 25 bp, Homo sapien
tacttcagtcactaccctgctttgg

SEQ ID NO: 3834051 - DNA, 25 bp, Homo sapien
gaaaagtctcttgcaaacccaagtc

SEQ ID NO: 3834052 - DNA, 25 bp, Homo sapien
tcatgttgactgctattattagggc

SEQ ID NO: 3834053 - DNA, 25 bp, Homo sapien
ctatctctcgcctttgatttgcaaa

SEQ ID NO: 3834054 - DNA, 25 bp, Homo sapien
atcttcaaacgcgtcctgctctttt

SEQ ID NO: 3834055 - DNA, 25 bp, Homo sapien
tatctctcgcctttgatttgcaaag

SEQ ID NO: 3834056 - DNA, 25 bp, Homo sapien
agcctcatcttcaaacgcgtcctgc

SEQ ID NO: 3834057 - DNA, 25 bp, Homo sapien
ccaatagcctgtgccgtctggatgg

SEQ ID NO: 3834058 - DNA, 25 bp, Homo sapien
ttcaagaaattccattgggcaaaaa

SEQ ID NO: 3834059 - DNA, 25 bp, Homo sapien
cattgggcaaaaatggccaatagcc

SEQ ID NO: 3834060 - DNA, 25 bp, Homo sapien
caaaaatggccaatagcctgtgccg

SEQ ID NO: 3834061 - DNA, 25 bp, Homo sapien
acgtctttccttaatgagcttatag

SEQ ID NO: 3834062 - DNA, 25 bp, Homo sapien
tatagaaatactcattacaacgcat

SEQ ID NO: 3834063 - DNA, 25 bp, Homo sapien
tgggctctcttaaccttagcagtgg

SEQ ID NO: 3834064 - DNA, 25 bp, Homo sapien
tgtgttctcattagccccgatacgt

SEQ ID NO: 3834065 - DNA, 25 bp, Homo sapien
ttctaattcaataacgggttcatca

SEQ ID NO: 3834066 - DNA, 25 bp, Homo sapien
gattctgtgggtccattatccagat

SEQ ID NO: 3834067 - DNA, 25 bp, Homo sapien
ccagataggcattatacagtccaaa

SEQ ID NO: 3834068 - DNA, 25 bp, Homo sapien
gatgtgtgtctcaggaccttgattc

SEQ ID NO: 3834069 - DNA, 25 bp, Homo sapien
ggtatttccgctagtacatgtggtc

SEQ ID NO: 3834070 - DNA, 25 bp, Homo sapien
gcacttgctggggtatttccgctag

SEQ ID NO: 3834071 - DNA, 25 bp, Homo sapien
tctctttctcggcattttggtcggg

SEQ ID NO: 3834072 - DNA, 25 bp, Homo sapien
ttggtcgggaacacgggcacttgct

SEQ ID NO: 3834073 - DNA, 25 bp, Homo sapien
ccttcaagcgattgatgcagtacct

SEQ ID NO: 3834074 - DNA, 25 bp, Homo sapien
attttcctgcgatgaggttgttagc

SEQ ID NO: 3834075 - DNA, 25 bp, Homo sapien
gaatctcagagataccagcgattag

SEQ ID NO: 3834076 - DNA, 25 bp, Homo sapien
gtagtaggcgtgagaagatgttcca

SEQ ID NO: 3834077 - DNA, 25 bp, Homo sapien
ctcctgcagtgctccgtgtggaact

SEQ ID NO: 3834078 - DNA, 25 bp, Homo sapien
tcacttaggctgacagactgctctc

SEQ ID NO: 3834079 - DNA, 25 bp, Homo sapien
cttaggctgacagactgctctcctg

SEQ ID NO: 3834080 - DNA, 25 bp, Homo sapien
ctccgtgtggaactcggggccatct

SEQ ID NO: 3834081 - DNA, 25 bp, Homo sapien
ggactccactgacacagctaaaaac

SEQ ID NO: 3834082 - DNA, 25 bp, Homo sapien
cacagctaaaaaccattaatgcaga

SEQ ID NO: 3834083 - DNA, 25 bp, Homo sapien
tctcaggactccactgacacagcta

SEQ ID NO: 3834084 - DNA, 25 bp, Homo sapien
ccactgacacagctaaaaaccatta

SEQ ID NO: 3834085 - DNA, 25 bp, Homo sapien
tcagatcattgctgttatggcagaa

SEQ ID NO: 3834086 - DNA, 25 bp, Homo sapien
ggcagctctttggccgttccttggg

SEQ ID NO: 3834087 - DNA, 25 bp, Homo sapien
gcctgtgtatctctggtgtctgcat

SEQ ID NO: 3834088 - DNA, 25 bp, Homo sapien
cgataatattcagtcttttcaggtg

SEQ ID NO: 3834089 - DNA, 25 bp, Homo sapien
tacttctggcatttccgtctcagag

SEQ ID NO: 3834090 - DNA, 25 bp, Homo sapien
tcaggttgcctgttcatctcggagc

SEQ ID NO: 3834091 - DNA, 25 bp, Homo sapien
caggttgcctgttcatctcggagca

SEQ ID NO: 3834092 - DNA, 25 bp, Homo sapien
aggttgcctgttcatctcggagcac

SEQ ID NO: 3834093 - DNA, 25 bp, Homo sapien
aaccattgttccctgcgcactgagg

SEQ ID NO: 3834094 - DNA, 25 bp, Homo sapien
ccattctgaagggttgcccatattt

SEQ ID NO: 3834095 - DNA, 25 bp, Homo sapien
ccctgagctgaaaaaccattgttcc

SEQ ID NO: 3834096 - DNA, 25 bp, Homo sapien
ttctgaagggttgcccatatttctg

SEQ ID NO: 3834097 - DNA, 25 bp, Homo sapien
catgtcaggccagttgatgtgggta

SEQ ID NO: 3834098 - DNA, 25 bp, Homo sapien
tgtgtgctatcattcatggtgcttc

SEQ ID NO: 3834099 - DNA, 25 bp, Homo sapien
tggctacagcaattatgcaagtcac

SEQ ID NO: 3834100 - DNA, 25 bp, Homo sapien
ttttgtgtgctatcattcatggtgc

SEQ ID NO: 3834101 - DNA, 25 bp, Homo sapien
aactggtttcagaatctagcttgca

SEQ ID NO: 3834102 - DNA, 25 bp, Homo sapien
atggaactggtttcagaatctagct

SEQ ID NO: 3834103 - DNA, 25 bp, Homo sapien
tggtttcagaatctagcttgcacat

SEQ ID NO: 3834104 - DNA, 25 bp, Homo sapien
ggaactggtttcagaatctagcttg

SEQ ID NO: 3834105 - DNA, 25 bp, Homo sapien
taagataattctcagatcggaatgt

SEQ ID NO: 3834106 - DNA, 25 bp, Homo sapien
gatcggaatgtgtcagctgtatttc

SEQ ID NO: 3834107 - DNA, 25 bp, Homo sapien
tcttacccctcaaaatctcgctttg

SEQ ID NO: 3834108 - DNA, 25 bp, Homo sapien
caaaatctcgctttgtgtcaccata

SEQ ID NO: 3834109 - DNA, 25 bp, Homo sapien
tctggtgagaagcactcggcacaca

SEQ ID NO: 3834110 - DNA, 25 bp, Homo sapien
attcagagttctggtgagaagcact

SEQ ID NO: 3834111 - DNA, 25 bp, Homo sapien
gtgtaaggatgacttagcaaggtga

SEQ ID NO: 3834112 - DNA, 25 bp, Homo sapien
tgaagcacaagggtagccatgaagg

SEQ ID NO: 3834113 - DNA, 25 bp, Homo sapien
caagccctcctaatcttattaaaat

SEQ ID NO: 3834114 - DNA, 25 bp, Homo sapien
ctcacttggcagaaaagcaagccct

SEQ ID NO: 3834115 - DNA, 25 bp, Homo sapien
tcacttggcagaaaagcaagccctc

SEQ ID NO: 3834116 - DNA, 25 bp, Homo sapien
agcaagccctcctaatcttattaaa

SEQ ID NO: 3834117 - DNA, 25 bp, Homo sapien
tatttcactgtatccttggcagcag

SEQ ID NO: 3834118 - DNA, 25 bp, Homo sapien
ggagtctccttggttcgtgacatat

SEQ ID NO: 3834119 - DNA, 25 bp, Homo sapien
caatttatcgctcctgtgaaagcgg

SEQ ID NO: 3834120 - DNA, 25 bp, Homo sapien
tccattctgtcaccactggcagagt

SEQ ID NO: 3834121 - DNA, 25 bp, Homo sapien
tgctgctatagctaacaccataatg

SEQ ID NO: 3834122 - DNA, 25 bp, Homo sapien
tgtgggacacctggatagaatcatg

SEQ ID NO: 3834123 - DNA, 25 bp, Homo sapien
gcatggtggtaatcttcaggctttc

SEQ ID NO: 3834124 - DNA, 25 bp, Homo sapien
tatttctttggaattggctctcata

SEQ ID NO: 3834125 - DNA, 25 bp, Homo sapien
ctggatatttcatgctgtctgtcat

SEQ ID NO: 3834126 - DNA, 25 bp, Homo sapien
ttccatgtaaacttagtgactttca

SEQ ID NO: 3834127 - DNA, 25 bp, Homo sapien
gcctgtcttttggtctctatgaatt

SEQ ID NO: 3834128 - DNA, 25 bp, Homo sapien
gctgcagaatatcctactgggaaaa

SEQ ID NO: 3834129 - DNA, 25 bp, Homo sapien
aataacaggaactggagagatcagc

SEQ ID NO: 3834130 - DNA, 25 bp, Homo sapien
aaatgtgggcaatgtaaggggaata

SEQ ID NO: 3834131 - DNA, 25 bp, Homo sapien
tcttcattctggcaagatgcaatga

SEQ ID NO: 3834132 - DNA, 25 bp, Homo sapien
cattctggcaagatgcaatgaaaag

SEQ ID NO: 3834133 - DNA, 25 bp, Homo sapien
tgtgaagactgactcactcttttgg

SEQ ID NO: 3834134 - DNA, 25 bp, Homo sapien
gaagactgactcactcttttggttg

SEQ ID NO: 3834135 - DNA, 25 bp, Homo sapien
tggactgtgaagactgactcactct

SEQ ID NO: 3834136 - DNA, 25 bp, Homo sapien
gactgtgaagactgactcactcttt

SEQ ID NO: 3834137 - DNA, 25 bp, Homo sapien
gggtcattggccacatacccagtcc

SEQ ID NO: 3834138 - DNA, 25 bp, Homo sapien
acattggtgtaacaaccaagagcca

SEQ ID NO: 3834139 - DNA, 25 bp, Homo sapien
caccttggctagaacactctgttct

SEQ ID NO: 3834140 - DNA, 25 bp, Homo sapien
gttctaagccataggcacacattgg

SEQ ID NO: 3834141 - DNA, 25 bp, Homo sapien
atccatcccacaaccaagaccttct

SEQ ID NO: 3834142 - DNA, 25 bp, Homo sapien
aattccccgacaagactgaaatcca

SEQ ID NO: 3834143 - DNA, 25 bp, Homo sapien
tgcaattccccgacaagactgaaat

SEQ ID NO: 3834144 - DNA, 25 bp, Homo sapien
ttattgcaattccccgacaagactg

SEQ ID NO: 3834145 - DNA, 25 bp, Homo sapien
aatccccattcctgatatagtcaaa

SEQ ID NO: 3834146 - DNA, 25 bp, Homo sapien
catgaatatgcaaatgcacgcagcc

SEQ ID NO: 3834147 - DNA, 25 bp, Homo sapien
cccattggaggactcctgcaagcct

SEQ ID NO: 3834148 - DNA, 25 bp, Homo sapien
caaatgcacgcagccattgaattca

SEQ ID NO: 3834149 - DNA, 25 bp, Homo sapien
tcagagccccattggaggactcctg

SEQ ID NO: 3834150 - DNA, 25 bp, Homo sapien
tctctctggtacaagggactggaag

SEQ ID NO: 3834151 - DNA, 25 bp, Homo sapien
cctttctctctggtacaagggactg

SEQ ID NO: 3834152 - DNA, 25 bp, Homo sapien
gaaggcagaggctataactgtagca

SEQ ID NO: 3834153 - DNA, 25 bp, Homo sapien
aggattatccagctcagggcagctc

SEQ ID NO: 3834154 - DNA, 25 bp, Homo sapien
ctttgccccagaacagagcttagca

SEQ ID NO: 3834155 - DNA, 25 bp, Homo sapien
cagaacagagcttagcacattcttt

SEQ ID NO: 3834156 - DNA, 25 bp, Homo sapien
cacattctttactccgtatggctga

SEQ ID NO: 3834157 - DNA, 25 bp, Homo sapien
tactccgtatggctgatcccttggg

SEQ ID NO: 3834158 - DNA, 25 bp, Homo sapien
gttggccgtgccaagagactctcca

SEQ ID NO: 3834159 - DNA, 25 bp, Homo sapien
ctggaccaacttgggttggccgtgc

SEQ ID NO: 3834160 - DNA, 25 bp, Homo sapien
ccaagagactctccaaggtgggttt

SEQ ID NO: 3834161 - DNA, 25 bp, Homo sapien
ttgggttggccgtgccaagagactc

SEQ ID NO: 3834162 - DNA, 25 bp, Homo sapien
tcattcctgatgctccatggtgtca

SEQ ID NO: 3834163 - DNA, 25 bp, Homo sapien
cattcctgatgctccatggtgtcac

SEQ ID NO: 3834164 - DNA, 25 bp, Homo sapien
tcagcaccactcagcgttttccaag

SEQ ID NO: 3834165 - DNA, 25 bp, Homo sapien
ttttccaagtcccagacacaaaggc

SEQ ID NO: 3834166 - DNA, 25 bp, Homo sapien
caagtcccagacacaaaggctttct

SEQ ID NO: 3834167 - DNA, 25 bp, Homo sapien
tcccagacacaaaggctttctgcat

SEQ ID NO: 3834168 - DNA, 25 bp, Homo sapien
ggctatctcattcactcttagaggg

SEQ ID NO: 3834169 - DNA, 25 bp, Homo sapien
tagagggtaaaccatgagaagggca

SEQ ID NO: 3834170 - DNA, 25 bp, Homo sapien
caacctttgaggatggatggatcaa

SEQ ID NO: 3834171 - DNA, 25 bp, Homo sapien
gatcaaaatgttcggcagttgtctc

SEQ ID NO: 3834172 - DNA, 25 bp, Homo sapien
aatggcttaccacctgattttattg

SEQ ID NO: 3834173 - DNA, 25 bp, Homo sapien
actgaagaatggcttaccacctgat

SEQ ID NO: 3834174 - DNA, 25 bp, Homo sapien
tattgactctaaccccaaatcatct

SEQ ID NO: 3834175 - DNA, 25 bp, Homo sapien
ttttattgactctaaccccaaatca

SEQ ID NO: 3834176 - DNA, 25 bp, Homo sapien
gagacagtggtcagtaaaaaatgtc

SEQ ID NO: 3834177 - DNA, 25 bp, Homo sapien
cacagccacagagcatctctcaggc

SEQ ID NO: 3834178 - DNA, 25 bp, Homo sapien
ctgacaaggagacagtggtcagtaa

SEQ ID NO: 3834179 - DNA, 25 bp, Homo sapien
caaggagacagtggtcagtaaaaaa

SEQ ID NO: 3834180 - DNA, 25 bp, Homo sapien
gcgatgaactgcttgaaaagtacct

SEQ ID NO: 3834181 - DNA, 25 bp, Homo sapien
caactttgctctgtactctgcgatg

SEQ ID NO: 3834182 - DNA, 25 bp, Homo sapien
ggtggtaactgacttccaacatgat

SEQ ID NO: 3834183 - DNA, 25 bp, Homo sapien
aaagtacctctctggtggtaactga

SEQ ID NO: 3834184 - DNA, 25 bp, Homo sapien
ctgttttgccattccaagccccaaa

SEQ ID NO: 3834185 - DNA, 25 bp, Homo sapien
ccatatatttcctactgttttgcca

SEQ ID NO: 3834186 - DNA, 25 bp, Homo sapien
ttcctactgttttgccattccaagc

SEQ ID NO: 3834187 - DNA, 25 bp, Homo sapien
tccctaaattcctccatatatttcc

SEQ ID NO: 3834188 - DNA, 25 bp, Homo sapien
tctcctaagacattcagtctgatgt

SEQ ID NO: 3834189 - DNA, 25 bp, Homo sapien
aggaggaatagcactgagccacctg

SEQ ID NO: 3834190 - DNA, 25 bp, Homo sapien
ggatattcctctatactccctaacg

SEQ ID NO: 3834191 - DNA, 25 bp, Homo sapien
gctgaggagcccactcatctgtcct

SEQ ID NO: 3834192 - DNA, 25 bp, Homo sapien
tgttgctttggaatctagggtcatt

SEQ ID NO: 3834193 - DNA, 25 bp, Homo sapien
ctctctcactgtcattaacgaatga

SEQ ID NO: 3834194 - DNA, 25 bp, Homo sapien
tagggtcattcctgacaatgagtta

SEQ ID NO: 3834195 - DNA, 25 bp, Homo sapien
taacgaatgacttagagaagatccc

SEQ ID NO: 3834196 - DNA, 25 bp, Homo sapien
taaactaaatgtggcgtgtcactgg

SEQ ID NO: 3834197 - DNA, 25 bp, Homo sapien
gcaactttgagagccatcagataaa

SEQ ID NO: 3834198 - DNA, 25 bp, Homo sapien
ggaggtataattgcaactttgagag

SEQ ID NO: 3834199 - DNA, 25 bp, Homo sapien
agataaactaaatgtggcgtgtcac

SEQ ID NO: 3834200 - DNA, 25 bp, Homo sapien
gcttctcttttagtgaagcatagaa

SEQ ID NO: 3834201 - DNA, 25 bp, Homo sapien
tagaaacaacaatccttggctcagt

SEQ ID NO: 3834202 - DNA, 25 bp, Homo sapien
gaagaagggccgtgagacacttctc

SEQ ID NO: 3834203 - DNA, 25 bp, Homo sapien
cacaaagaacccggatctgaaagga

SEQ ID NO: 3834204 - DNA, 25 bp, Homo sapien
tggcactggactgttttgatttcca

SEQ ID NO: 3834205 - DNA, 25 bp, Homo sapien
ctgctccctcgtatcagctgcggag

SEQ ID NO: 3834206 - DNA, 25 bp, Homo sapien
tatcagctgcggagccttcttgggt

SEQ ID NO: 3834207 - DNA, 25 bp, Homo sapien
gcactggactgttttgatttccaag

SEQ ID NO: 3834208 - DNA, 25 bp, Homo sapien
ctgatgaatccctgttgtaggctcc

SEQ ID NO: 3834209 - DNA, 25 bp, Homo sapien
ttggttttgatgtgggaaattccca

SEQ ID NO: 3834210 - DNA, 25 bp, Homo sapien
tgatgaatccctgttgtaggctcca

SEQ ID NO: 3834211 - DNA, 25 bp, Homo sapien
actgatgaatccctgttgtaggctc

SEQ ID NO: 3834212 - DNA, 25 bp, Homo sapien
aaaccatttgttaaatgcacttgtt

SEQ ID NO: 3834213 - DNA, 25 bp, Homo sapien
tccactttgattatctcccggcatc

SEQ ID NO: 3834214 - DNA, 25 bp, Homo sapien
tttgattatctcccggcatccccag

SEQ ID NO: 3834215 - DNA, 25 bp, Homo sapien
ttccactttgattatctcccggcat

SEQ ID NO: 3834216 - DNA, 25 bp, Homo sapien
cactttgattatctcccggcatccc

SEQ ID NO: 3834217 - DNA, 25 bp, Homo sapien
tgtcacattgggtgcgacctctgat

SEQ ID NO: 3834218 - DNA, 25 bp, Homo sapien
gacctctgatcctttagcatatccg

SEQ ID NO: 3834219 - DNA, 25 bp, Homo sapien
tcttttctgccccaccgtgacagat

SEQ ID NO: 3834220 - DNA, 25 bp, Homo sapien
gatcatatttataccaacacagcct

SEQ ID NO: 3834221 - DNA, 25 bp, Homo sapien
gggtctcccttatgtgccgcgtcat

SEQ ID NO: 3834222 - DNA, 25 bp, Homo sapien
gaaatgcaccttcagagcacacgag

SEQ ID NO: 3834223 - DNA, 25 bp, Homo sapien
ttgtaagcagaaggcaagattcctc

SEQ ID NO: 3834224 - DNA, 25 bp, Homo sapien
gataattggatactttagccgcttg

SEQ ID NO: 3834225 - DNA, 25 bp, Homo sapien
ctaaagccttctcgcttcacttgtg

SEQ ID NO: 3834226 - DNA, 25 bp, Homo sapien
agccttctcgcttcacttgtgcatg

SEQ ID NO: 3834227 - DNA, 25 bp, Homo sapien
gcttcacttgtgcatgcttttctgc

SEQ ID NO: 3834228 - DNA, 25 bp, Homo sapien
aatttctaaagccttctcgcttcac

SEQ ID NO: 3834229 - DNA, 25 bp, Homo sapien
ctcccttttccagtagagtatcatt

SEQ ID NO: 3834230 - DNA, 25 bp, Homo sapien
tccagtagagtatcattatatcttt

SEQ ID NO: 3834231 - DNA, 25 bp, Homo sapien
ttttccagtagagtatcattatatc

SEQ ID NO: 3834232 - DNA, 25 bp, Homo sapien
ccttttccagtagagtatcattata

SEQ ID NO: 3834233 - DNA, 25 bp, Homo sapien
gcttacaatggattctagcatctga

SEQ ID NO: 3834234 - DNA, 25 bp, Homo sapien
ccactgaacacggatttaatgaggg

SEQ ID NO: 3834235 - DNA, 25 bp, Homo sapien
cttgttttggcttacaatggattct

SEQ ID NO: 3834236 - DNA, 25 bp, Homo sapien
tagcatctgaattaagcattggccc

SEQ ID NO: 3834237 - DNA, 25 bp, Homo sapien
aaggttcttgcaaggctcgtctctt

SEQ ID NO: 3834238 - DNA, 25 bp, Homo sapien
cagacttttgtggtgctggctccat

SEQ ID NO: 3834239 - DNA, 25 bp, Homo sapien
cattactgctctgagaaggttcttg

SEQ ID NO: 3834240 - DNA, 25 bp, Homo sapien
tggtggaaacactctggcgccagat

SEQ ID NO: 3834241 - DNA, 25 bp, Homo sapien
attgaatgacaccaagcccatccag

SEQ ID NO: 3834242 - DNA, 25 bp, Homo sapien
gacaccaagcccatccagtcccttt

SEQ ID NO: 3834243 - DNA, 25 bp, Homo sapien
caccaagcccatccagtcccttttt

SEQ ID NO: 3834244 - DNA, 25 bp, Homo sapien
tgaatgacaccaagcccatccagtc

SEQ ID NO: 3834245 - DNA, 25 bp, Homo sapien
gaagcaggggtggataccttgcaga

SEQ ID NO: 3834246 - DNA, 25 bp, Homo sapien
gcaggggtggataccttgcagaatt

SEQ ID NO: 3834247 - DNA, 25 bp, Homo sapien
aagcaggggtggataccttgcagaa

SEQ ID NO: 3834248 - DNA, 25 bp, Homo sapien
ctgaagcaggggtggataccttgca

SEQ ID NO: 3834249 - DNA, 25 bp, Homo sapien
ctggtcatcattcaactcaaggtga

SEQ ID NO: 3834250 - DNA, 25 bp, Homo sapien
gtcatcattcaactcaaggtgatgg

SEQ ID NO: 3834251 - DNA, 25 bp, Homo sapien
gatggctattctcacagttcctcct

SEQ ID NO: 3834252 - DNA, 25 bp, Homo sapien
tgatggctattctcacagttcctcc

SEQ ID NO: 3834253 - DNA, 25 bp, Homo sapien
gatacttgatagtctctccagtgcc

SEQ ID NO: 3834254 - DNA, 25 bp, Homo sapien
acttgtctggaccaactccgtgtaa

SEQ ID NO: 3834255 - DNA, 25 bp, Homo sapien
tctgacttgtggttcagaccacggg

SEQ ID NO: 3834256 - DNA, 25 bp, Homo sapien
tccattttcaaagagcgtaggtctg

SEQ ID NO: 3834257 - DNA, 25 bp, Homo sapien
atgcttcggaatggaggaatagctg

SEQ ID NO: 3834258 - DNA, 25 bp, Homo sapien
tggaggaatagctgagtctctgatg

SEQ ID NO: 3834259 - DNA, 25 bp, Homo sapien
ttcctctgggatgcttcggaatgga

SEQ ID NO: 3834260 - DNA, 25 bp, Homo sapien
ggaggaatagctgagtctctgatga

SEQ ID NO: 3834261 - DNA, 25 bp, Homo sapien
ttcttgagttcctttacctatagct

SEQ ID NO: 3834262 - DNA, 25 bp, Homo sapien
tacctatagcttgtctgcatctgct

SEQ ID NO: 3834263 - DNA, 25 bp, Homo sapien
tgagttcctttacctatagcttgtc

SEQ ID NO: 3834264 - DNA, 25 bp, Homo sapien
cctttacctatagcttgtctgcatc

SEQ ID NO: 3834265 - DNA, 25 bp, Homo sapien
cttaagctgaggctgacttgggtag

SEQ ID NO: 3834266 - DNA, 25 bp, Homo sapien
ctggtgagtctgtggccctgtctta

SEQ ID NO: 3834267 - DNA, 25 bp, Homo sapien
tctgctcagatcttgccatgctctt

SEQ ID NO: 3834268 - DNA, 25 bp, Homo sapien
gtagggctgtgatactctgctcaga

SEQ ID NO: 3834269 - DNA, 25 bp, Homo sapien
ttcatttttgtgggacttagacagt

SEQ ID NO: 3834270 - DNA, 25 bp, Homo sapien
aataatttctgcttcatggctcttg

SEQ ID NO: 3834271 - DNA, 25 bp, Homo sapien
ttctgtggccccagaataatttctg

SEQ ID NO: 3834272 - DNA, 25 bp, Homo sapien
gatgtcattgtgtcaatcaatgtcc

SEQ ID NO: 3834273 - DNA, 25 bp, Homo sapien
ggactctcttctctgataacgctct

SEQ ID NO: 3834274 - DNA, 25 bp, Homo sapien
ctgcctggtgagttggtcctaatct

SEQ ID NO: 3834275 - DNA, 25 bp, Homo sapien
tgccgttgtttagcattgacactgc

SEQ ID NO: 3834276 - DNA, 25 bp, Homo sapien
ccattggcaattctcatggcactgt

SEQ ID NO: 3834277 - DNA, 25 bp, Homo sapien
tcctaatcttgggagggtagaattc

SEQ ID NO: 3834278 - DNA, 25 bp, Homo sapien
ctatgggagatggacctaggcttcc

SEQ ID NO: 3834279 - DNA, 25 bp, Homo sapien
ttatatccactgatgatgtcagggc

SEQ ID NO: 3834280 - DNA, 25 bp, Homo sapien
cttctgcagactgggttatatccac

SEQ ID NO: 3834281 - DNA, 25 bp, Homo sapien
cttgaggcaaagtggataaaccttc

SEQ ID NO: 3834282 - DNA, 25 bp, Homo sapien
cagggtttattggagtctgctgctg

SEQ ID NO: 3834283 - DNA, 25 bp, Homo sapien
gactctttgaagcagggtttattgg

SEQ ID NO: 3834284 - DNA, 25 bp, Homo sapien
atgcttggcatctgctagactcttt

SEQ ID NO: 3834285 - DNA, 25 bp, Homo sapien
gcttggcatctgctagactctttga

SEQ ID NO: 3834286 - DNA, 25 bp, Homo sapien
gagtattaggcttccactgtcaata

SEQ ID NO: 3834287 - DNA, 25 bp, Homo sapien
aatgctgtttgagtattaggcttcc

SEQ ID NO: 3834288 - DNA, 25 bp, Homo sapien
tgtcaataccccaactccttgattc

SEQ ID NO: 3834289 - DNA, 25 bp, Homo sapien
taggcttccactgtcaataccccaa

SEQ ID NO: 3834290 - DNA, 25 bp, Homo sapien
tatcaacagggtattctatggcaat

SEQ ID NO: 3834291 - DNA, 25 bp, Homo sapien
gactttcagaggttgcattcactag

SEQ ID NO: 3834292 - DNA, 25 bp, Homo sapien
cggtgtgcttggagatccaagcaca

SEQ ID NO: 3834293 - DNA, 25 bp, Homo sapien
gacaaatgaaatggctgggacccgg

SEQ ID NO: 3834294 - DNA, 25 bp, Homo sapien
tgaggacaggcatttgaggccgctc

SEQ ID NO: 3834295 - DNA, 25 bp, Homo sapien
agccgtctctgtaaaagttcccgtg

SEQ ID NO: 3834296 - DNA, 25 bp, Homo sapien
cgggatgtgggtcctctacagagct

SEQ ID NO: 3834297 - DNA, 25 bp, Homo sapien
caggttctccaatcgggagccgtct

SEQ ID NO: 3834298 - DNA, 25 bp, Homo sapien
tagacagcactaattcaggatgcat

SEQ ID NO: 3834299 - DNA, 25 bp, Homo sapien
ctagacagcactaattcaggatgca

SEQ ID NO: 3834300 - DNA, 25 bp, Homo sapien
gatcgcattggagatctaacagccc

SEQ ID NO: 3834301 - DNA, 25 bp, Homo sapien
ccacagtgatggagacgatcgcatt

SEQ ID NO: 3834302 - DNA, 25 bp, Homo sapien
ccttctggctgacgaagagcatggg

SEQ ID NO: 3834303 - DNA, 25 bp, Homo sapien
tctggctgacgaagagcatgggaaa

SEQ ID NO: 3834304 - DNA, 25 bp, Homo sapien
tgagcaacggcaagatgaaagtctc

SEQ ID NO: 3834305 - DNA, 25 bp, Homo sapien
agcaacggcaagatgaaagtctcca

SEQ ID NO: 3834306 - DNA, 25 bp, Homo sapien
tgtgagcaacggcaagatgaaagtc

SEQ ID NO: 3834307 - DNA, 25 bp, Homo sapien
agcctgtgagcaacggcaagatgaa

SEQ ID NO: 3834308 - DNA, 25 bp, Homo sapien
ttgctcagcattgataaaatagagc

SEQ ID NO: 3834309 - DNA, 25 bp, Homo sapien
ttgaccaagtagtatagcagctggc

SEQ ID NO: 3834310 - DNA, 25 bp, Homo sapien
ttttctttggcttgaccaagtagta

SEQ ID NO: 3834311 - DNA, 25 bp, Homo sapien
tttggcttgaccaagtagtatagca

SEQ ID NO: 3834312 - DNA, 25 bp, Homo sapien
gcttgaccaagtagtatagcagctg

SEQ ID NO: 3834313 - DNA, 25 bp, Homo sapien
catccggatgtaaaagtatgcagct

SEQ ID NO: 3834314 - DNA, 25 bp, Homo sapien
caagcaaccagaagttcatccaatt

SEQ ID NO: 3834315 - DNA, 25 bp, Homo sapien
tgcagctatcatatactggtgaagg

SEQ ID NO: 3834316 - DNA, 25 bp, Homo sapien
tatttatttgcttcgagtcatccgg

SEQ ID NO: 3834317 - DNA, 25 bp, Homo sapien
tcatcggtgtcttgtctgatgcttc

SEQ ID NO: 3834318 - DNA, 25 bp, Homo sapien
gacatgaagcctttctgcgtcatcg

SEQ ID NO: 3834319 - DNA, 25 bp, Homo sapien
gcctgcagtggctgacatgaagcct

SEQ ID NO: 3834320 - DNA, 25 bp, Homo sapien
gcctttctgcgtcatcggtgtcttg

SEQ ID NO: 3834321 - DNA, 25 bp, Homo sapien
tcaggaccgtccagacatactccat

SEQ ID NO: 3834322 - DNA, 25 bp, Homo sapien
gcttgaccattacttgtgattcctt

SEQ ID NO: 3834323 - DNA, 25 bp, Homo sapien
ccctagtcaggaccgtccagacata

SEQ ID NO: 3834324 - DNA, 25 bp, Homo sapien
tagtcaggaccgtccagacatactc

SEQ ID NO: 3834325 - DNA, 25 bp, Homo sapien
ttccaggctccttcaacctttttca

SEQ ID NO: 3834326 - DNA, 25 bp, Homo sapien
tcttgctctggaccccatccagtga

SEQ ID NO: 3834327 - DNA, 25 bp, Homo sapien
ccatccagtgatttccaggctcctt

SEQ ID NO: 3834328 - DNA, 25 bp, Homo sapien
gtgatttccaggctccttcaacctt

SEQ ID NO: 3834329 - DNA, 25 bp, Homo sapien
gactgtctagtttcatctgttgacg

SEQ ID NO: 3834330 - DNA, 25 bp, Homo sapien
tcatctgttgacgataagttctacg

SEQ ID NO: 3834331 - DNA, 25 bp, Homo sapien
tgttgacgataagttctacgtccag

SEQ ID NO: 3834332 - DNA, 25 bp, Homo sapien
tgctgcttgactgtctagtttcatc

SEQ ID NO: 3834333 - DNA, 25 bp, Homo sapien
tgcattgagcgggagatcaaaatgg

SEQ ID NO: 3834334 - DNA, 25 bp, Homo sapien
ctaaggtgctctgcattgagcggga

SEQ ID NO: 3834335 - DNA, 25 bp, Homo sapien
taaagaatctgaggcccttttgttg

SEQ ID NO: 3834336 - DNA, 25 bp, Homo sapien
tgagcgggagatcaaaatggatttt

SEQ ID NO: 3834337 - DNA, 25 bp, Homo sapien
gcgatgtgtcgatctggtttaagca

SEQ ID NO: 3834338 - DNA, 25 bp, Homo sapien
aatgcaaaacaggtatgcgatgtgt

SEQ ID NO: 3834339 - DNA, 25 bp, Homo sapien
tttgcagactcctggatctaccagc

SEQ ID NO: 3834340 - DNA, 25 bp, Homo sapien
atctggtttaagcagggatttgcag

SEQ ID NO: 3834341 - DNA, 25 bp, Homo sapien
tgacaggcaggattgcaagcccctg

SEQ ID NO: 3834342 - DNA, 25 bp, Homo sapien
taatttagttccaagtgaggctccc

SEQ ID NO: 3834343 - DNA, 25 bp, Homo sapien
gcattgcagacaggatcccgcttaa

SEQ ID NO: 3834344 - DNA, 25 bp, Homo sapien
agtgaatgctaacgtggccctccag

SEQ ID NO: 3834345 - DNA, 25 bp, Homo sapien
gaactagctcctttacagagcgcct

SEQ ID NO: 3834346 - DNA, 25 bp, Homo sapien
ccttcgccctggctgagcacgaggg

SEQ ID NO: 3834347 - DNA, 25 bp, Homo sapien
cagagcgcctgtctgataggcatgt

SEQ ID NO: 3834348 - DNA, 25 bp, Homo sapien
acaaccaaccacaggagagtgtgtg

SEQ ID NO: 3834349 - DNA, 25 bp, Homo sapien
ccaatggggaacagtcaaggtcaga

SEQ ID NO: 3834350 - DNA, 25 bp, Homo sapien
gggaacagtcaaggtcagaacaaac

SEQ ID NO: 3834351 - DNA, 25 bp, Homo sapien
tcaaggtcagaacaaacaaacatat

SEQ ID NO: 3834352 - DNA, 25 bp, Homo sapien
catcccaatggggaacagtcaaggt

SEQ ID NO: 3834353 - DNA, 25 bp, Homo sapien
tctcctcctatattcaatgctgctt

SEQ ID NO: 3834354 - DNA, 25 bp, Homo sapien
atctcctcctatattcaatgctgct

SEQ ID NO: 3834355 - DNA, 25 bp, Homo sapien
ctagggctcccacgtgtcgtcttgg

SEQ ID NO: 3834356 - DNA, 25 bp, Homo sapien
ggctcccacgtgtcgtcttgggcag

SEQ ID NO: 3834357 - DNA, 25 bp, Homo sapien
cccacgtgtcgtcttgggcagctca

SEQ ID NO: 3834358 - DNA, 25 bp, Homo sapien
catcagagcagccatttgtaaagat

SEQ ID NO: 3834359 - DNA, 25 bp, Homo sapien
tgaaggctccatgttagaaggtgca

SEQ ID NO: 3834360 - DNA, 25 bp, Homo sapien
tgaaatgaacgccactgcaggaggg

SEQ ID NO: 3834361 - DNA, 25 bp, Homo sapien
caggagggcttcttttagtcggtgc

SEQ ID NO: 3834362 - DNA, 25 bp, Homo sapien
tagtcggtgctttgaacaacccgcg

SEQ ID NO: 3834363 - DNA, 25 bp, Homo sapien
ctggacagtcttgaaactggtttct

SEQ ID NO: 3834364 - DNA, 25 bp, Homo sapien
acccatattcattacccttgcatct

SEQ ID NO: 3834365 - DNA, 25 bp, Homo sapien
cattacccttgcatctctagtcaca

SEQ ID NO: 3834366 - DNA, 25 bp, Homo sapien
ccatattcattacccttgcatctct

SEQ ID NO: 3834367 - DNA, 25 bp, Homo sapien
tattcattacccttgcatctctagt

SEQ ID NO: 3834368 - DNA, 25 bp, Homo sapien
agagcatcgctgaaaatgtgtgaga

SEQ ID NO: 3834369 - DNA, 25 bp, Homo sapien
aaacacttggcgcagatctgagccg

SEQ ID NO: 3834370 - DNA, 25 bp, Homo sapien
aaagagcatcgctgaaaatgtgtga

SEQ ID NO: 3834371 - DNA, 25 bp, Homo sapien
gatctgagccggctctctctgttcc

SEQ ID NO: 3834372 - DNA, 25 bp, Homo sapien
tcctgctggaccacgactgtgttta

SEQ ID NO: 3834373 - DNA, 25 bp, Homo sapien
catgtgcccgttcagtgggctgagt

SEQ ID NO: 3834374 - DNA, 25 bp, Homo sapien
gctgagtggacccaataaggatgta

SEQ ID NO: 3834375 - DNA, 25 bp, Homo sapien
tgtagtggtcacaatttggactctt

SEQ ID NO: 3834376 - DNA, 25 bp, Homo sapien
agagagctgtggcagcccagtcttc

SEQ ID NO: 3834377 - DNA, 25 bp, Homo sapien
gataacaaagagagctgtggcagcc

SEQ ID NO: 3834378 - DNA, 25 bp, Homo sapien
caaagagagctgtggcagcccagtc

SEQ ID NO: 3834379 - DNA, 25 bp, Homo sapien
ctgataacaaagagagctgtggcag

SEQ ID NO: 3834380 - DNA, 25 bp, Homo sapien
tgctgatgctagaggcaccgtcctc

SEQ ID NO: 3834381 - DNA, 25 bp, Homo sapien
gctgctgatgctagaggcaccgtcc

SEQ ID NO: 3834382 - DNA, 25 bp, Homo sapien
tgatgctagaggcaccgtcctcaga

SEQ ID NO: 3834383 - DNA, 25 bp, Homo sapien
gctgatgctagaggcaccgtcctca

SEQ ID NO: 3834384 - DNA, 25 bp, Homo sapien
gtggggtcaataaatccactgcagc

SEQ ID NO: 3834385 - DNA, 25 bp, Homo sapien
tgcttaacagctggggaccccagga

SEQ ID NO: 3834386 - DNA, 25 bp, Homo sapien
aggagaggggagtcttcatgttttc

SEQ ID NO: 3834387 - DNA, 25 bp, Homo sapien
gttggcctgcttaacagctggggac

SEQ ID NO: 3834388 - DNA, 25 bp, Homo sapien
gcagacggcacacaaagaggggcat

SEQ ID NO: 3834389 - DNA, 25 bp, Homo sapien
atgcttatggctagattgacactac

SEQ ID NO: 3834390 - DNA, 25 bp, Homo sapien
aatgcttatggctagattgacacta

SEQ ID NO: 3834391 - DNA, 25 bp, Homo sapien
aaatgcttatggctagattgacact

SEQ ID NO: 3834392 - DNA, 25 bp, Homo sapien
ctaaatgcttatggctagattgaca

SEQ ID NO: 3834393 - DNA, 25 bp, Homo sapien
tttcagcacaacacagggaagagca

SEQ ID NO: 3834394 - DNA, 25 bp, Homo sapien
ctttcagcacaacacagggaagagc

SEQ ID NO: 3834395 - DNA, 25 bp, Homo sapien
ttcagcacaacacagggaagagcag

SEQ ID NO: 3834396 - DNA, 25 bp, Homo sapien
tcagcacaacacagggaagagcagg

SEQ ID NO: 3834397 - DNA, 25 bp, Homo sapien
aggccaggagaaaaattcaagtcag

SEQ ID NO: 3834398 - DNA, 25 bp, Homo sapien
agtcagccacctgcttaatctgctc

SEQ ID NO: 3834399 - DNA, 25 bp, Homo sapien
tttcaggccaggagaaaaattcaag

SEQ ID NO: 3834400 - DNA, 25 bp, Homo sapien
tcaggccaggagaaaaattcaagtc

SEQ ID NO: 3834401 - DNA, 25 bp, Homo sapien
gcagtaattgactgtgtaagaggaa

SEQ ID NO: 3834402 - DNA, 25 bp, Homo sapien
ggcatcacagctgagcagtaattga

SEQ ID NO: 3834403 - DNA, 25 bp, Homo sapien
tgctaataagacatcgtctcctgaa

SEQ ID NO: 3834404 - DNA, 25 bp, Homo sapien
ctcctgaaatgtgcccgggcagcaa

SEQ ID NO: 3834405 - DNA, 25 bp, Homo sapien
tctggtaccccagtttgcattccga

SEQ ID NO: 3834406 - DNA, 25 bp, Homo sapien
aagcggtaggagccacgcagagaac

SEQ ID NO: 3834407 - DNA, 25 bp, Homo sapien
cagtgtggaaggcttctggtacccc

SEQ ID NO: 3834408 - DNA, 25 bp, Homo sapien
ttccgaggcaggttttggaatatgt

SEQ ID NO: 3834409 - DNA, 25 bp, Homo sapien
caagggggctggactctgcaaccat

SEQ ID NO: 3834410 - DNA, 25 bp, Homo sapien
gggctggccacactgtagcatctca

SEQ ID NO: 3834411 - DNA, 25 bp, Homo sapien
catttaagcaaaagcttgggctggc

SEQ ID NO: 3834412 - DNA, 25 bp, Homo sapien
gcctgcctgaagctgaggttcccaa

SEQ ID NO: 3834413 - DNA, 25 bp, Homo sapien
gctcagtactgtgaagggtgcattt

SEQ ID NO: 3834414 - DNA, 25 bp, Homo sapien
ggtatagtggcaagctcattgactt

SEQ ID NO: 3834415 - DNA, 25 bp, Homo sapien
acattcagctgctccgttggtatag

SEQ ID NO: 3834416 - DNA, 25 bp, Homo sapien
ggaagtgagtgatttcgttctcgaa

SEQ ID NO: 3834417 - DNA, 25 bp, Homo sapien
tccgttggtatagtggcaagctcat

SEQ ID NO: 3834418 - DNA, 25 bp, Homo sapien
ccgaggaagcatgggttaactttat

SEQ ID NO: 3834419 - DNA, 25 bp, Homo sapien
ctcggaagccgaggaagcatgggtt

SEQ ID NO: 3834420 - DNA, 25 bp, Homo sapien
gaagccgaggaagcatgggttaact

SEQ ID NO: 3834421 - DNA, 25 bp, Homo sapien
gccgaggaagcatgggttaacttta

SEQ ID NO: 3834422 - DNA, 25 bp, Homo sapien
tactcctccaactggacagctcttt

SEQ ID NO: 3834423 - DNA, 25 bp, Homo sapien
gggctactcctccaactggacagct

SEQ ID NO: 3834424 - DNA, 25 bp, Homo sapien
gctactcctccaactggacagctct

SEQ ID NO: 3834425 - DNA, 25 bp, Homo sapien
ctgggctactcctccaactggacag

SEQ ID NO: 3834426 - DNA, 25 bp, Homo sapien
tgttctgggtcacaggtgtgcgacc

SEQ ID NO: 3834427 - DNA, 25 bp, Homo sapien
cccacttggtcataggttagcagct

SEQ ID NO: 3834428 - DNA, 25 bp, Homo sapien
gagtgactgtgctctttcgaagccg

SEQ ID NO: 3834429 - DNA, 25 bp, Homo sapien
ggtaagctgctgctaaccgtgctca

SEQ ID NO: 3834430 - DNA, 25 bp, Homo sapien
tactccggtaacattttatcccatc

SEQ ID NO: 3834431 - DNA, 25 bp, Homo sapien
ggttccgtaaattgtagctctctga

SEQ ID NO: 3834432 - DNA, 25 bp, Homo sapien
cagccaaaagggctatctaacctat

SEQ ID NO: 3834433 - DNA, 25 bp, Homo sapien
tctttccagagtagcggttccgtaa

SEQ ID NO: 3834434 - DNA, 25 bp, Homo sapien
atttgggatactccagctcttgtaa

SEQ ID NO: 3834435 - DNA, 25 bp, Homo sapien
ctccagctcttgtaacattggacac

SEQ ID NO: 3834436 - DNA, 25 bp, Homo sapien
tgggatactccagctcttgtaacat

SEQ ID NO: 3834437 - DNA, 25 bp, Homo sapien
gatactccagctcttgtaacattgg

SEQ ID NO: 3834438 - DNA, 25 bp, Homo sapien
gatgtgatgaaagccctctaagacg

SEQ ID NO: 3834439 - DNA, 25 bp, Homo sapien
cagtgaggaagtaccattgtgcctg

SEQ ID NO: 3834440 - DNA, 25 bp, Homo sapien
tatagatgaagagagagtggcgtgg

SEQ ID NO: 3834441 - DNA, 25 bp, Homo sapien
gagagtggcacaatgcgtggaaaac

SEQ ID NO: 3834442 - DNA, 25 bp, Homo sapien
tgatgtacaaaggaccatgcaggca

SEQ ID NO: 3834443 - DNA, 25 bp, Homo sapien
cttcagtgatgtacaaaggaccatg

SEQ ID NO: 3834444 - DNA, 25 bp, Homo sapien
ttaggacacagtaaatgtcttcagt

SEQ ID NO: 3834445 - DNA, 25 bp, Homo sapien
tagattaggacacagtaaatgtctt

SEQ ID NO: 3834446 - DNA, 25 bp, Homo sapien
ccaaagagtggcaatggtgttccca

SEQ ID NO: 3834447 - DNA, 25 bp, Homo sapien
gattgttcgttgtttccctgcctac

SEQ ID NO: 3834448 - DNA, 25 bp, Homo sapien
ctccaggattcacactgagtgttat

SEQ ID NO: 3834449 - DNA, 25 bp, Homo sapien
ctgcctacacgtttggagccagggc

SEQ ID NO: 3834450 - DNA, 25 bp, Homo sapien
caggataggttgtattactttgcag

SEQ ID NO: 3834451 - DNA, 25 bp, Homo sapien
taaccgcatgcaagtttatttccct

SEQ ID NO: 3834452 - DNA, 25 bp, Homo sapien
tccagtgccttaaccgcatgcaagt

SEQ ID NO: 3834453 - DNA, 25 bp, Homo sapien
tactttgcagtaacaaatagccctc

SEQ ID NO: 3834454 - DNA, 25 bp, Homo sapien
gaagcggcatctgggctatcgacat

SEQ ID NO: 3834455 - DNA, 25 bp, Homo sapien
ctgcagaagcggcatctgggctatc

SEQ ID NO: 3834456 - DNA, 25 bp, Homo sapien
cagaagcggcatctgggctatcgac

SEQ ID NO: 3834457 - DNA, 25 bp, Homo sapien
tgcagaagcggcatctgggctatcg

SEQ ID NO: 3834458 - DNA, 25 bp, Homo sapien
gtcgatgcactgtgcgctgccctgg

SEQ ID NO: 3834459 - DNA, 25 bp, Homo sapien
gcctgaactcttggtggaggccaaa

SEQ ID NO: 3834460 - DNA, 25 bp, Homo sapien
aaccaggaaagggtggtcgatgcac

SEQ ID NO: 3834461 - DNA, 25 bp, Homo sapien
ggctctatgcccagcgtctgtggaa

SEQ ID NO: 3834462 - DNA, 25 bp, Homo sapien
tctgcagggtggcaaccaaaactaa

SEQ ID NO: 3834463 - DNA, 25 bp, Homo sapien
gagagaaagcaagcgaactcccact

SEQ ID NO: 3834464 - DNA, 25 bp, Homo sapien
tatgggatgtgctcattccttctga

SEQ ID NO: 3834465 - DNA, 25 bp, Homo sapien
cacatgtggcaggataatatttata

SEQ ID NO: 3834466 - DNA, 25 bp, Homo sapien
gtgaggatgctgagctggcaggctt

SEQ ID NO: 3834467 - DNA, 25 bp, Homo sapien
gggtgaggatgctgagctggcaggc

SEQ ID NO: 3834468 - DNA, 25 bp, Homo sapien
gaggatgctgagctggcaggcttag

SEQ ID NO: 3834469 - DNA, 25 bp, Homo sapien
cttaagagaactgggtgaggatgct

SEQ ID NO: 3834470 - DNA, 25 bp, Homo sapien
gagctagcaaattcagcacttggga

SEQ ID NO: 3834471 - DNA, 25 bp, Homo sapien
catgatacaagaaggtggaaacact

SEQ ID NO: 3834472 - DNA, 25 bp, Homo sapien
cctcaatgcgtgattgggttccaca

SEQ ID NO: 3834473 - DNA, 25 bp, Homo sapien
gggttccacaacgtacatgatacaa

SEQ ID NO: 3834474 - DNA, 25 bp, Homo sapien
tagcagaattgcattgggagaacag

SEQ ID NO: 3834475 - DNA, 25 bp, Homo sapien
ccttatgggtggcaagaaaatacct

SEQ ID NO: 3834476 - DNA, 25 bp, Homo sapien
gcttggagagtcttgccccgaaatt

SEQ ID NO: 3834477 - DNA, 25 bp, Homo sapien
tgcttctcaaatccttgggtgtggc

SEQ ID NO: 3834478 - DNA, 25 bp, Homo sapien
tgatcttcatcactccgcttattcc

SEQ ID NO: 3834479 - DNA, 25 bp, Homo sapien
cactccgcttattcctcttgcagaa

SEQ ID NO: 3834480 - DNA, 25 bp, Homo sapien
ctcttgcagaatccgttctctggga

SEQ ID NO: 3834481 - DNA, 25 bp, Homo sapien
cgttctctgggacccgtaactccat

SEQ ID NO: 3834482 - DNA, 25 bp, Homo sapien
aacaatagggaggatgccgtgctga

SEQ ID NO: 3834483 - DNA, 25 bp, Homo sapien
taaggccaggaagctaacaataggg

SEQ ID NO: 3834484 - DNA, 25 bp, Homo sapien
aggcaagtgcggctaaggccaggaa

SEQ ID NO: 3834485 - DNA, 25 bp, Homo sapien
gaagctaacaatagggaggatgccg

SEQ ID NO: 3834486 - DNA, 25 bp, Homo sapien
gctgacacttctggtgcaactctgg

SEQ ID NO: 3834487 - DNA, 25 bp, Homo sapien
tgacacttctggtgcaactctggca

SEQ ID NO: 3834488 - DNA, 25 bp, Homo sapien
tgctgacacttctggtgcaactctg

SEQ ID NO: 3834489 - DNA, 25 bp, Homo sapien
gacacttctggtgcaactctggcag

SEQ ID NO: 3834490 - DNA, 25 bp, Homo sapien
tggtaaaagtttcggcacatgcata

SEQ ID NO: 3834491 - DNA, 25 bp, Homo sapien
cacttttcctacccctgcaaaagtg

SEQ ID NO: 3834492 - DNA, 25 bp, Homo sapien
agtggtaaaagtttcggcacatgca

SEQ ID NO: 3834493 - DNA, 25 bp, Homo sapien
aaagtggtaaaagtttcggcacatg

SEQ ID NO: 3834494 - DNA, 25 bp, Homo sapien
ctctggcattcacctacttctttca

SEQ ID NO: 3834495 - DNA, 25 bp, Homo sapien
tctggcattcacctacttctttcat

SEQ ID NO: 3834496 - DNA, 25 bp, Homo sapien
tggtcatagttgacacaagaatagg

SEQ ID NO: 3834497 - DNA, 25 bp, Homo sapien
ggcaggacagctcctacatgagtag

SEQ ID NO: 3834498 - DNA, 25 bp, Homo sapien
tgagtagatacccaagttctgctgt

SEQ ID NO: 3834499 - DNA, 25 bp, Homo sapien
catagttgacacaagaatagggcag

SEQ ID NO: 3834500 - DNA, 25 bp, Homo sapien
gacgcttgattcagtcagtgtatct

SEQ ID NO: 3834501 - DNA, 25 bp, Homo sapien
agtttgacagggcaattaaaaatgt

SEQ ID NO: 3834502 - DNA, 25 bp, Homo sapien
tacataaaaactcggttgacgcttg

SEQ ID NO: 3834503 - DNA, 25 bp, Homo sapien
cagtgtatctgttattgtctcctca

SEQ ID NO: 3834504 - DNA, 25 bp, Homo sapien
cacagtatccatatccacactctcc

SEQ ID NO: 3834505 - DNA, 25 bp, Homo sapien
cagtatccatatccacactctccat

SEQ ID NO: 3834506 - DNA, 25 bp, Homo sapien
atccacagtatccatatccacactc

SEQ ID NO: 3834507 - DNA, 25 bp, Homo sapien
cctatatccacagtatccatatcca

SEQ ID NO: 3834508 - DNA, 25 bp, Homo sapien
ctgcagaaatgcaatggagatggag

SEQ ID NO: 3834509 - DNA, 25 bp, Homo sapien
aaatgcaatggagatggagcagtca

SEQ ID NO: 3834510 - DNA, 25 bp, Homo sapien
cagtcagggcccccgtgcccaagaa

SEQ ID NO: 3834511 - DNA, 25 bp, Homo sapien
atggagcagtcagggcccccgtgcc

SEQ ID NO: 3834512 - DNA, 25 bp, Homo sapien
tgtctccccatttctcgcttggggc

SEQ ID NO: 3834513 - DNA, 25 bp, Homo sapien
ctccccatttctcgcttggggctgg

SEQ ID NO: 3834514 - DNA, 25 bp, Homo sapien
tctctgttgatgagggttcttcatt

SEQ ID NO: 3834515 - DNA, 25 bp, Homo sapien
cttctctgttgatgagggttcttca

SEQ ID NO: 3834516 - DNA, 25 bp, Homo sapien
gggtcaccctgctgagtgatcttgc

SEQ ID NO: 3834517 - DNA, 25 bp, Homo sapien
gtcaccctgctgagtgatcttgctt

SEQ ID NO: 3834518 - DNA, 25 bp, Homo sapien
ggtcaccctgctgagtgatcttgct

SEQ ID NO: 3834519 - DNA, 25 bp, Homo sapien
agggtcaccctgctgagtgatcttg

SEQ ID NO: 3834520 - DNA, 25 bp, Homo sapien
tggggaatacagaggaagggaagga

SEQ ID NO: 3834521 - DNA, 25 bp, Homo sapien
caagggggcagagctttggggaata

SEQ ID NO: 3834522 - DNA, 25 bp, Homo sapien
ctgtgttgggaggcaagggggcaga

SEQ ID NO: 3834523 - DNA, 25 bp, Homo sapien
gggaggcaagggggcagagctttgg

SEQ ID NO: 3834524 - DNA, 25 bp, Homo sapien
gagcaatttggtgagccagaggaga

SEQ ID NO: 3834525 - DNA, 25 bp, Homo sapien
cagagcaatttggtgagccagagga

SEQ ID NO: 3834526 - DNA, 25 bp, Homo sapien
agcagagcaatttggtgagccagag

SEQ ID NO: 3834527 - DNA, 25 bp, Homo sapien
agcaatttggtgagccagaggagag

SEQ ID NO: 3834528 - DNA, 25 bp, Homo sapien
ctttgggaggccgagacgggcagat

SEQ ID NO: 3834529 - DNA, 25 bp, Homo sapien
gtggctcactcctgtaatcccagca

SEQ ID NO: 3834530 - DNA, 25 bp, Homo sapien
cacaaggtcaggagatggagaccat

SEQ ID NO: 3834531 - DNA, 25 bp, Homo sapien
ttaaaaatcttgagaggccgggcgc

SEQ ID NO: 3834532 - DNA, 25 bp, Homo sapien
gaggtcatgatatttgttttgctgt

SEQ ID NO: 3834533 - DNA, 25 bp, Homo sapien
cttcctacgaatgggtgtgaatgag

SEQ ID NO: 3834534 - DNA, 25 bp, Homo sapien
aggtccttcttcctacgaatgggtg

SEQ ID NO: 3834535 - DNA, 25 bp, Homo sapien
ccttcttcctacgaatgggtgtgaa

SEQ ID NO: 3834536 - DNA, 25 bp, Homo sapien
gagagaatgatgactgtgatggctt

SEQ ID NO: 3834537 - DNA, 25 bp, Homo sapien
agagagaatgatgactgtgatggct

SEQ ID NO: 3834538 - DNA, 25 bp, Homo sapien
agaaagctgccaatcatggaaggtg

SEQ ID NO: 3834539 - DNA, 25 bp, Homo sapien
gggccccagaaagctgccaatcatg

SEQ ID NO: 3834540 - DNA, 25 bp, Homo sapien
cccagaaagctgccaatcatggaag

SEQ ID NO: 3834541 - DNA, 25 bp, Homo sapien
gagggccccagaaagctgccaatca

SEQ ID NO: 3834542 - DNA, 25 bp, Homo sapien
tccatttagggtcatcaaggtcttt

SEQ ID NO: 3834543 - DNA, 25 bp, Homo sapien
caaatgcttcgtgagtggagaaatt

SEQ ID NO: 3834544 - DNA, 25 bp, Homo sapien
tggacattggcagcccaaatgcttc

SEQ ID NO: 3834545 - DNA, 25 bp, Homo sapien
ttcagagctgtgacattccttctgt

SEQ ID NO: 3834546 - DNA, 25 bp, Homo sapien
ctttctcttgccagaacaccttctt

SEQ ID NO: 3834547 - DNA, 25 bp, Homo sapien
cagaacaccttcttatccttgtctg

SEQ ID NO: 3834548 - DNA, 25 bp, Homo sapien
caagaattgtgaggaactgttcttc

SEQ ID NO: 3834549 - DNA, 25 bp, Homo sapien
cttcaagaattgtgaggaactgttc

SEQ ID NO: 3834550 - DNA, 25 bp, Homo sapien
caattttatctacaggtatcatcat

SEQ ID NO: 3834551 - DNA, 25 bp, Homo sapien
tctacaggtatcatcatggtgtaaa

SEQ ID NO: 3834552 - DNA, 25 bp, Homo sapien
tttatctacaggtatcatcatggtg

SEQ ID NO: 3834553 - DNA, 25 bp, Homo sapien
tacaggtatcatcatggtgtaaaga

SEQ ID NO: 3834554 - DNA, 25 bp, Homo sapien
gggcacagagaaagccataatggct

SEQ ID NO: 3834555 - DNA, 25 bp, Homo sapien
gataatgattgttgtcttcactgtg

SEQ ID NO: 3834556 - DNA, 25 bp, Homo sapien
ccacagtgtcatggagataatgatt

SEQ ID NO: 3834557 - DNA, 25 bp, Homo sapien
cacagagaaagccataatggctgcc

SEQ ID NO: 3834558 - DNA, 25 bp, Homo sapien
atgtgggtttctcgtcccagaagga

SEQ ID NO: 3834559 - DNA, 25 bp, Homo sapien
cttctgatggagtatgtgggtttct

SEQ ID NO: 3834560 - DNA, 25 bp, Homo sapien
gagtatgtgggtttctcgtcccaga

SEQ ID NO: 3834561 - DNA, 25 bp, Homo sapien
gatggagtatgtgggtttctcgtcc

SEQ ID NO: 3834562 - DNA, 25 bp, Homo sapien
tcctcctcctcctgttcctcatatt

SEQ ID NO: 3834563 - DNA, 25 bp, Homo sapien
cctcctcctgttcctcatatttttc

SEQ ID NO: 3834564 - DNA, 25 bp, Homo sapien
cactcttcattatcattctcctcct

SEQ ID NO: 3834565 - DNA, 25 bp, Homo sapien
tcctcctcctgttcctcatattttt

SEQ ID NO: 3834566 - DNA, 25 bp, Homo sapien
gagacatagtagaggttagctattt

SEQ ID NO: 3834567 - DNA, 25 bp, Homo sapien
catggtaaaaggtatcccttccaag

SEQ ID NO: 3834568 - DNA, 25 bp, Homo sapien
gagacatagaaagagacatagtaga

SEQ ID NO: 3834569 - DNA, 25 bp, Homo sapien
ggtatcccttccaaggagacataga

SEQ ID NO: 3834570 - DNA, 25 bp, Homo sapien
tccttgcccagaaacatgcccgtga

SEQ ID NO: 3834571 - DNA, 25 bp, Homo sapien
tgcccagaaacatgcccgtgaagtt

SEQ ID NO: 3834572 - DNA, 25 bp, Homo sapien
gtgaagttggcagtggatatcccga

SEQ ID NO: 3834573 - DNA, 25 bp, Homo sapien
ggcagtggatatcccgagtgtgaca

SEQ ID NO: 3834574 - DNA, 25 bp, Homo sapien
taaaggtagagcaagcagaattggc

SEQ ID NO: 3834575 - DNA, 25 bp, Homo sapien
gattgggtctgtgctatgcaagaga

SEQ ID NO: 3834576 - DNA, 25 bp, Homo sapien
tcagaaattagccattctgggctgg

SEQ ID NO: 3834577 - DNA, 25 bp, Homo sapien
tccagttctggatatatcttaaagg

SEQ ID NO: 3834578 - DNA, 25 bp, Homo sapien
tgagccgttcacatcccttaggaca

SEQ ID NO: 3834579 - DNA, 25 bp, Homo sapien
cagttccgtgcctgtggccagcgtt

SEQ ID NO: 3834580 - DNA, 25 bp, Homo sapien
tcagcacacggagatggacagttcc

SEQ ID NO: 3834581 - DNA, 25 bp, Homo sapien
gttgctcagaagaaaggcctgtgct

SEQ ID NO: 3834582 - DNA, 25 bp, Homo sapien
ttcttccctggcgtcacatcgtgct

SEQ ID NO: 3834583 - DNA, 25 bp, Homo sapien
cctggcgtcacatcgtgcttgctga

SEQ ID NO: 3834584 - DNA, 25 bp, Homo sapien
cgtgcttgctgatggcacaaagctc

SEQ ID NO: 3834585 - DNA, 25 bp, Homo sapien
cacatcgtgcttgctgatggcacaa

SEQ ID NO: 3834586 - DNA, 25 bp, Homo sapien
aagaaccaataaggacagttgtatt

SEQ ID NO: 3834587 - DNA, 25 bp, Homo sapien
taagaaccaataaggacagttgtat

SEQ ID NO: 3834588 - DNA, 25 bp, Homo sapien
ctaagaaccaataaggacagttgta

SEQ ID NO: 3834589 - DNA, 25 bp, Homo sapien
acagctgtttaaccaactcagggct

SEQ ID NO: 3834590 - DNA, 25 bp, Homo sapien
ccatgcacctggataaatggcctct

SEQ ID NO: 3834591 - DNA, 25 bp, Homo sapien
ttactgatctttcctgacatttgcc

SEQ ID NO: 3834592 - DNA, 25 bp, Homo sapien
ttctcagccccatgcacctggataa

SEQ ID NO: 3834593 - DNA, 25 bp, Homo sapien
catcggaccccttggctgtcagaga

SEQ ID NO: 3834594 - DNA, 25 bp, Homo sapien
gatcttcatcggaccccttggctgt

SEQ ID NO: 3834595 - DNA, 25 bp, Homo sapien
taagcgatcttcatcggaccccttg

SEQ ID NO: 3834596 - DNA, 25 bp, Homo sapien
tgtgcttaagcgatcttcatcggac

SEQ ID NO: 3834597 - DNA, 25 bp, Homo sapien
tcagttggggtcttctcctttctgt

SEQ ID NO: 3834598 - DNA, 25 bp, Homo sapien
cagttggggtcttctcctttctgtt

SEQ ID NO: 3834599 - DNA, 25 bp, Homo sapien
ctcctttctgttcctcatcagcatg

SEQ ID NO: 3834600 - DNA, 25 bp, Homo sapien
ctttctgttcctcatcagcatgtct

SEQ ID NO: 3834601 - DNA, 25 bp, Homo sapien
ctgcccacacgctgaaccaggttag

SEQ ID NO: 3834602 - DNA, 25 bp, Homo sapien
accacctggtatccagagtgtggag

SEQ ID NO: 3834603 - DNA, 25 bp, Homo sapien
tccaggtgccaggatagacaccggg

SEQ ID NO: 3834604 - DNA, 25 bp, Homo sapien
cctggtatccagagtgtggagaagt

SEQ ID NO: 3834605 - DNA, 25 bp, Homo sapien
ctggatttgatcatgcttctgccac

SEQ ID NO: 3834606 - DNA, 25 bp, Homo sapien
tctgagggtcagttgtagttctggc

SEQ ID NO: 3834607 - DNA, 25 bp, Homo sapien
gctaggctggctgggcttatctctc

SEQ ID NO: 3834608 - DNA, 25 bp, Homo sapien
cagctggtggccttagcttgcctga

SEQ ID NO: 3834609 - DNA, 25 bp, Homo sapien
ctgtcctgaatccataggtgcatga

SEQ ID NO: 3834610 - DNA, 25 bp, Homo sapien
cctgaatccataggtgcatgactgc

SEQ ID NO: 3834611 - DNA, 25 bp, Homo sapien
aatccataggtgcatgactgcatgg

SEQ ID NO: 3834612 - DNA, 25 bp, Homo sapien
cataggtgcatgactgcatggcagg

SEQ ID NO: 3834613 - DNA, 25 bp, Homo sapien
ggcagaccatgacctgcattgtcca

SEQ ID NO: 3834614 - DNA, 25 bp, Homo sapien
tccatacagtggcatgaggcatcag

SEQ ID NO: 3834615 - DNA, 25 bp, Homo sapien
gatgacctgggaccaatagtcttct

SEQ ID NO: 3834616 - DNA, 25 bp, Homo sapien
gaggaatgtagcagaagcagaatcc

SEQ ID NO: 3834617 - DNA, 25 bp, Homo sapien
gcctctgttgttccatttcaatgaa

SEQ ID NO: 3834618 - DNA, 25 bp, Homo sapien
ctgggctgagacagctgggtttctg

SEQ ID NO: 3834619 - DNA, 25 bp, Homo sapien
aatgaaatgtcagatcctgcctcca

SEQ ID NO: 3834620 - DNA, 25 bp, Homo sapien
gagacagctgggtttctgctgtgat

SEQ ID NO: 3834621 - DNA, 25 bp, Homo sapien
tcgattgtaaaggaaggcaacggtc

SEQ ID NO: 3834622 - DNA, 25 bp, Homo sapien
gaaggcaacggtcaactgtgcccct

SEQ ID NO: 3834623 - DNA, 25 bp, Homo sapien
cagtttcctcgattgtaaaggaagg

SEQ ID NO: 3834624 - DNA, 25 bp, Homo sapien
tgtaaaggaaggcaacggtcaactg

SEQ ID NO: 3834625 - DNA, 25 bp, Homo sapien
aacttctatccccagccctatgctc

SEQ ID NO: 3834626 - DNA, 25 bp, Homo sapien
catctccttgctgtctaacttctat

SEQ ID NO: 3834627 - DNA, 25 bp, Homo sapien
ttgctgcacgcagcagcatcccttt

SEQ ID NO: 3834628 - DNA, 25 bp, Homo sapien
cagggcagcgcggcatccctttgct

SEQ ID NO: 3834629 - DNA, 25 bp, Homo sapien
ggtgtcaccctctcgggagcctttc

SEQ ID NO: 3834630 - DNA, 25 bp, Homo sapien
accctctcgggagcctttctgagga

SEQ ID NO: 3834631 - DNA, 25 bp, Homo sapien
tcgggagcctttctgaggagtctgt

SEQ ID NO: 3834632 - DNA, 25 bp, Homo sapien
gcagaaaggggctcatggccagagg

SEQ ID NO: 3834633 - DNA, 25 bp, Homo sapien
gagaacaatgctgtcctggcaccag

SEQ ID NO: 3834634 - DNA, 25 bp, Homo sapien
gaacaatgctgtcctggcaccagtg

SEQ ID NO: 3834635 - DNA, 25 bp, Homo sapien
aacaatgctgtcctggcaccagtga

SEQ ID NO: 3834636 - DNA, 25 bp, Homo sapien
caatgctgtcctggcaccagtgaca

SEQ ID NO: 3834637 - DNA, 25 bp, Homo sapien
aaggctgccctttgaaaactctgtg

SEQ ID NO: 3834638 - DNA, 25 bp, Homo sapien
ggtgactccgtatataaggctgccc

SEQ ID NO: 3834639 - DNA, 25 bp, Homo sapien
cattctggacagaggattccccttt

SEQ ID NO: 3834640 - DNA, 25 bp, Homo sapien
cagctgaagtggtttatccagggag

SEQ ID NO: 3834641 - DNA, 25 bp, Homo sapien
tgttcagccgcactctccggtggct

SEQ ID NO: 3834642 - DNA, 25 bp, Homo sapien
tgctgcacgctggaaacatgactct

SEQ ID NO: 3834643 - DNA, 25 bp, Homo sapien
gtcactgaggtagctgctggacact

SEQ ID NO: 3834644 - DNA, 25 bp, Homo sapien
gccgcctgggtgttgagccttctgt

SEQ ID NO: 3834645 - DNA, 25 bp, Homo sapien
agagagctgggagggtctatggagc

SEQ ID NO: 3834646 - DNA, 25 bp, Homo sapien
tcagccggctctttagagagctggg

SEQ ID NO: 3834647 - DNA, 25 bp, Homo sapien
tgtgggcggggccagtcagccggct

SEQ ID NO: 3834648 - DNA, 25 bp, Homo sapien
ccagtcagccggctctttagagagc

SEQ ID NO: 3834649 - DNA, 25 bp, Homo sapien
taggtgagggcactgctgcccaagc

SEQ ID NO: 3834650 - DNA, 25 bp, Homo sapien
agctggcgctggacaggatgctgct

SEQ ID NO: 3834651 - DNA, 25 bp, Homo sapien
cttgtaggtgagggcactgctgccc

SEQ ID NO: 3834652 - DNA, 25 bp, Homo sapien
cccaagctgatgaagctggcgctgg

SEQ ID NO: 3834653 - DNA, 25 bp, Homo sapien
gctgtggaagtcagcagcccgctgc

SEQ ID NO: 3834654 - DNA, 25 bp, Homo sapien
tggaagtcagcagcccgctgctcac

SEQ ID NO: 3834655 - DNA, 25 bp, Homo sapien
ctgggtggagggaaggctggctgtg

SEQ ID NO: 3834656 - DNA, 25 bp, Homo sapien
tgtggaagtcagcagcccgctgctc

SEQ ID NO: 3834657 - DNA, 25 bp, Homo sapien
cagccggacgctctgacggctgctg

SEQ ID NO: 3834658 - DNA, 25 bp, Homo sapien
tcctgcacgctggtgtggctgctct

SEQ ID NO: 3834659 - DNA, 25 bp, Homo sapien
gttgccgcccgtcttgtcctcctgc

SEQ ID NO: 3834660 - DNA, 25 bp, Homo sapien
ctcactggttttcacgttgccgccc

SEQ ID NO: 3834661 - DNA, 25 bp, Homo sapien
ttgacacaggtggactcagcattgg

SEQ ID NO: 3834662 - DNA, 25 bp, Homo sapien
gatccttcctgctacatgtggcctg

SEQ ID NO: 3834663 - DNA, 25 bp, Homo sapien
ggaatatccactctgggtgcagcct

SEQ ID NO: 3834664 - DNA, 25 bp, Homo sapien
tgttctcaggataggcggtgctcag

SEQ ID NO: 3834665 - DNA, 25 bp, Homo sapien
agatggcttgtcactgaagttcaca

SEQ ID NO: 3834666 - DNA, 25 bp, Homo sapien
tgactacagatggttttgccattga

SEQ ID NO: 3834667 - DNA, 25 bp, Homo sapien
caggatgctgctgactacagatggt

SEQ ID NO: 3834668 - DNA, 25 bp, Homo sapien
tatagatggcttgtcactgaagttc

SEQ ID NO: 3834669 - DNA, 25 bp, Homo sapien
gagaacatctgtcgccactgatgag

SEQ ID NO: 3834670 - DNA, 25 bp, Homo sapien
actcgtgacagttcttaatatcgtc

SEQ ID NO: 3834671 - DNA, 25 bp, Homo sapien
tcatggaaggttctaactcgtgaca

SEQ ID NO: 3834672 - DNA, 25 bp, Homo sapien
aatatcgtcagcgtttgccatcgag

SEQ ID NO: 3834673 - DNA, 25 bp, Homo sapien
tatggacagtcccaaccatggttgc

SEQ ID NO: 3834674 - DNA, 25 bp, Homo sapien
catggcgctcactgcagatggttct

SEQ ID NO: 3834675 - DNA, 25 bp, Homo sapien
tccagtaagagacgggcagagactt

SEQ ID NO: 3834676 - DNA, 25 bp, Homo sapien
tctgcgggcagtgacaatgatggac

SEQ ID NO: 3834677 - DNA, 25 bp, Homo sapien
cccagcagatacagtggctcttttt

SEQ ID NO: 3834678 - DNA, 25 bp, Homo sapien
ttagcagtgactagcctttctgtgc

SEQ ID NO: 3834679 - DNA, 25 bp, Homo sapien
tccattattagcagtgactagcctt

SEQ ID NO: 3834680 - DNA, 25 bp, Homo sapien
cagcagatacagtggctcttttttc

SEQ ID NO: 3834681 - DNA, 25 bp, Homo sapien
ccgttcatccgtcgcatctattttc

SEQ ID NO: 3834682 - DNA, 25 bp, Homo sapien
ctgctttcttgtttccgttcatccg

SEQ ID NO: 3834683 - DNA, 25 bp, Homo sapien
gaagtccatccaatctcaagctgct

SEQ ID NO: 3834684 - DNA, 25 bp, Homo sapien
gtttctgaagtccatccaatctcaa

SEQ ID NO: 3834685 - DNA, 25 bp, Homo sapien
tcatggggccgatgcccacgaagac

SEQ ID NO: 3834686 - DNA, 25 bp, Homo sapien
ctaagacactacctcaagctgattt

SEQ ID NO: 3834687 - DNA, 25 bp, Homo sapien
tgaataattcatggggccgatgccc

SEQ ID NO: 3834688 - DNA, 25 bp, Homo sapien
gacactacctcaagctgatttcctg

SEQ ID NO: 3834689 - DNA, 25 bp, Homo sapien
ttgaaacacctcctcagcaagttga

SEQ ID NO: 3834690 - DNA, 25 bp, Homo sapien
ctgtctccgtgtggacctgatgttc

SEQ ID NO: 3834691 - DNA, 25 bp, Homo sapien
tgtggacctgatgttctcagtctgg

SEQ ID NO: 3834692 - DNA, 25 bp, Homo sapien
cagccgaacagacccgtgacccctt

SEQ ID NO: 3834693 - DNA, 25 bp, Homo sapien
ggctccgcaccagtgagagcccagg

SEQ ID NO: 3834694 - DNA, 25 bp, Homo sapien
agagccgcgggcaggatcgaaccgg

SEQ ID NO: 3834695 - DNA, 25 bp, Homo sapien
gatcgaaccggacagtcgcagaaga

SEQ ID NO: 3834696 - DNA, 25 bp, Homo sapien
ggacagtcgcagaagagccttgcac

SEQ ID NO: 3834697 - DNA, 25 bp, Homo sapien
acaaactctgccttcgagctgtcat

SEQ ID NO: 3834698 - DNA, 25 bp, Homo sapien
accagatcaactctgctgccttccc

SEQ ID NO: 3834699 - DNA, 25 bp, Homo sapien
aagcaccagatcaactctgctgcct

SEQ ID NO: 3834700 - DNA, 25 bp, Homo sapien
aaactctgccttcgagctgtcatac

SEQ ID NO: 3834701 - DNA, 25 bp, Homo sapien
gctgtggcgctgtgtataactgcat

SEQ ID NO: 3834702 - DNA, 25 bp, Homo sapien
tccttgctgccctcgaatgccaact

SEQ ID NO: 3834703 - DNA, 25 bp, Homo sapien
caagtctgagggatgctccttgctg

SEQ ID NO: 3834704 - DNA, 25 bp, Homo sapien
gctgctgtggcgctgtgtataactg

SEQ ID NO: 3834705 - DNA, 25 bp, Homo sapien
ccagaggggcaagaaagccacattc

SEQ ID NO: 3834706 - DNA, 25 bp, Homo sapien
actccacaaggaacatcaccctgct

SEQ ID NO: 3834707 - DNA, 25 bp, Homo sapien
cattcaccatgaggacggtgggcat

SEQ ID NO: 3834708 - DNA, 25 bp, Homo sapien
acaaggaacatcaccctgctcccgg

SEQ ID NO: 3834709 - DNA, 25 bp, Homo sapien
cattggggttgcttgaggtcccagt

SEQ ID NO: 3834710 - DNA, 25 bp, Homo sapien
tgggtgccacgatctttagggcctt

SEQ ID NO: 3834711 - DNA, 25 bp, Homo sapien
cttccaggatggaagctgcattggg

SEQ ID NO: 3834712 - DNA, 25 bp, Homo sapien
ctgcattggggttgcttgaggtccc

SEQ ID NO: 3834713 - DNA, 25 bp, Homo sapien
ggtttggtgtcaccagagagtacat

SEQ ID NO: 3834714 - DNA, 25 bp, Homo sapien
tggtttggtgtcaccagagagtaca

SEQ ID NO: 3834715 - DNA, 25 bp, Homo sapien
gtttggtgtcaccagagagtacatt

SEQ ID NO: 3834716 - DNA, 25 bp, Homo sapien
tttggtttggtgtcaccagagagta

SEQ ID NO: 3834717 - DNA, 25 bp, Homo sapien
ttgtgcatttcagccgaagtggtgg

SEQ ID NO: 3834718 - DNA, 25 bp, Homo sapien
gacttctagtgaccaaagggtaaga

SEQ ID NO: 3834719 - DNA, 25 bp, Homo sapien
tccatagcctgatgacgccgatgct

SEQ ID NO: 3834720 - DNA, 25 bp, Homo sapien
agggtaagaaatggaactaagctct

SEQ ID NO: 3834721 - DNA, 25 bp, Homo sapien
tgtgatggggttccggcctaacttc

SEQ ID NO: 3834722 - DNA, 25 bp, Homo sapien
agcctgcctcttgtgacctgctgag

SEQ ID NO: 3834723 - DNA, 25 bp, Homo sapien
tgcagcggctgctgtgcaagcagcc

SEQ ID NO: 3834724 - DNA, 25 bp, Homo sapien
agccagaggcaaaccagcttgactc

SEQ ID NO: 3834725 - DNA, 25 bp, Homo sapien
gcagggccacgtgacgactattctt

SEQ ID NO: 3834726 - DNA, 25 bp, Homo sapien
ctctgggtggaagatttaaacgtca

SEQ ID NO: 3834727 - DNA, 25 bp, Homo sapien
tattcttggcccgtggactctgggt

SEQ ID NO: 3834728 - DNA, 25 bp, Homo sapien
gatttaaacgtcagcgagtggccct

SEQ ID NO: 3834729 - DNA, 25 bp, Homo sapien
ctgctggtaatggcacaggctgccc

SEQ ID NO: 3834730 - DNA, 25 bp, Homo sapien
gcccttccggttctgtgtccaagga

SEQ ID NO: 3834731 - DNA, 25 bp, Homo sapien
gcacaggctgcccttccggttctgt

SEQ ID NO: 3834732 - DNA, 25 bp, Homo sapien
gctgcccttccggttctgtgtccaa

SEQ ID NO: 3834733 - DNA, 25 bp, Homo sapien
tgggatgctggtgtttgaactcagc

SEQ ID NO: 3834734 - DNA, 25 bp, Homo sapien
gggatgctggtgtttgaactcagca

SEQ ID NO: 3834735 - DNA, 25 bp, Homo sapien
gcagccacaggtttagaatcctcat

SEQ ID NO: 3834736 - DNA, 25 bp, Homo sapien
cgccgagtgatcgatgccgtggccc

SEQ ID NO: 3834737 - DNA, 25 bp, Homo sapien
gagcgccgagtgatcgatgccgtgg

SEQ ID NO: 3834738 - DNA, 25 bp, Homo sapien
cgagtgatcgatgccgtggccccgc

SEQ ID NO: 3834739 - DNA, 25 bp, Homo sapien
tggaggagcgccgagtgatcgatgc

SEQ ID NO: 3834740 - DNA, 25 bp, Homo sapien
tcttcagctgggacggtgtcgagtc

SEQ ID NO: 3834741 - DNA, 25 bp, Homo sapien
gcataggagtatcgatcgctcaccg

SEQ ID NO: 3834742 - DNA, 25 bp, Homo sapien
ctttgggctggcgaagactcgttgc

SEQ ID NO: 3834743 - DNA, 25 bp, Homo sapien
gtttggtccgaccactcggctgtgt

SEQ ID NO: 3834744 - DNA, 25 bp, Homo sapien
taaaagcagcggacacacatatagc

SEQ ID NO: 3834745 - DNA, 25 bp, Homo sapien
gtaagggcctgccctcacgcatgcg

SEQ ID NO: 3834746 - DNA, 25 bp, Homo sapien
cagagtataaaacccgcgcaggcgc

SEQ ID NO: 3834747 - DNA, 25 bp, Homo sapien
aacgcgacgccaagaaccgctaaag

SEQ ID NO: 3834748 - DNA, 25 bp, Homo sapien
tatttgggacctgacggcggaatcg

SEQ ID NO: 3834749 - DNA, 25 bp, Homo sapien
gcggaatcgtttccagcctgccttg

SEQ ID NO: 3834750 - DNA, 25 bp, Homo sapien
gggctgcatttctcgcggctcatat

SEQ ID NO: 3834751 - DNA, 25 bp, Homo sapien
catttctcgcggctcatatttggga

SEQ ID NO: 3834752 - DNA, 25 bp, Homo sapien
cttagggcagtcacacacccaggcc

SEQ ID NO: 3834753 - DNA, 25 bp, Homo sapien
tttccttagggcagtcacacaccca

SEQ ID NO: 3834754 - DNA, 25 bp, Homo sapien
ctttccttagggcagtcacacaccc

SEQ ID NO: 3834755 - DNA, 25 bp, Homo sapien
tccttagggcagtcacacacccagg

SEQ ID NO: 3834756 - DNA, 25 bp, Homo sapien
tgtttgggtcgtccgtgtggcccca

SEQ ID NO: 3834757 - DNA, 25 bp, Homo sapien
cgagtcctcctgagcacggcgattc

SEQ ID NO: 3834758 - DNA, 25 bp, Homo sapien
cacagggatccctttggctctctaa

SEQ ID NO: 3834759 - DNA, 25 bp, Homo sapien
ttggctctctaaggggcacacagtc

SEQ ID NO: 3834760 - DNA, 25 bp, Homo sapien
gaaggtcagaatataggctgttatg

SEQ ID NO: 3834761 - DNA, 25 bp, Homo sapien
tgttatgtgctaacctctgagtggt

SEQ ID NO: 3834762 - DNA, 25 bp, Homo sapien
tcctggatttataaataagactaaa

SEQ ID NO: 3834763 - DNA, 25 bp, Homo sapien
tgtctgctggtgtatgaaatgatct

SEQ ID NO: 3834764 - DNA, 25 bp, Homo sapien
ccaccaccagctggttcagtcccgt

SEQ ID NO: 3834765 - DNA, 25 bp, Homo sapien
ggccaccaccagctggttcagtccc

SEQ ID NO: 3834766 - DNA, 25 bp, Homo sapien
cgggccaccaccagctggttcagtc

SEQ ID NO: 3834767 - DNA, 25 bp, Homo sapien
accaccagctggttcagtcccgtgc

SEQ ID NO: 3834768 - DNA, 25 bp, Homo sapien
agtgccttctctggccaggggctct

SEQ ID NO: 3834769 - DNA, 25 bp, Homo sapien
caggtcttctttactgtgcggcagg

SEQ ID NO: 3834770 - DNA, 25 bp, Homo sapien
tgccatgtgcccgtgttgagcttct

SEQ ID NO: 3834771 - DNA, 25 bp, Homo sapien
tcagtggctcgctgcaacaatgtca

SEQ ID NO: 3834772 - DNA, 25 bp, Homo sapien
tcctgccctcgtagaagagctcagt

SEQ ID NO: 3834773 - DNA, 25 bp, Homo sapien
ctaacttcacatctggaatcaaacc

SEQ ID NO: 3834774 - DNA, 25 bp, Homo sapien
tcaaaccatggtccgcccttgcttt

SEQ ID NO: 3834775 - DNA, 25 bp, Homo sapien
taacttcacatctggaatcaaacca

SEQ ID NO: 3834776 - DNA, 25 bp, Homo sapien
ctggaatcaaaccatggtccgccct

SEQ ID NO: 3834777 - DNA, 25 bp, Homo sapien
tggagggacggacggtgcagccggg

SEQ ID NO: 3834778 - DNA, 25 bp, Homo sapien
ctggagggacggacggtgcagccgg

SEQ ID NO: 3834779 - DNA, 25 bp, Homo sapien
tccacttctgcatgcacggccagtg

SEQ ID NO: 3834780 - DNA, 25 bp, Homo sapien
acggccagtggtcagccacgccttt

SEQ ID NO: 3834781 - DNA, 25 bp, Homo sapien
tcagccacgcctttcaggatcacgg

SEQ ID NO: 3834782 - DNA, 25 bp, Homo sapien
ttcaggatcacgggcctccctggaa

SEQ ID NO: 3834783 - DNA, 25 bp, Homo sapien
tcctcggaaaacctcacgtgcagag

SEQ ID NO: 3834784 - DNA, 25 bp, Homo sapien
gctttgcagacagggccggtaagtc

SEQ ID NO: 3834785 - DNA, 25 bp, Homo sapien
cactgatgaggaaccggcatggaga

SEQ ID NO: 3834786 - DNA, 25 bp, Homo sapien
tgtggtcccctttcatcctcggaaa

SEQ ID NO: 3834787 - DNA, 25 bp, Homo sapien
tcctcatctgtgtacctcgaaccaa

SEQ ID NO: 3834788 - DNA, 25 bp, Homo sapien
tgagggtctgggaccattcctcatc

SEQ ID NO: 3834789 - DNA, 25 bp, Homo sapien
atgaactcgttgaccgtcatgaggg

SEQ ID NO: 3834790 - DNA, 25 bp, Homo sapien
ctcattcacgatgtatttgctgatg

SEQ ID NO: 3834791 - DNA, 25 bp, Homo sapien
tgctctctgccttgcaagtactagg

SEQ ID NO: 3834792 - DNA, 25 bp, Homo sapien
gtccctccgaccacagacttacaga

SEQ ID NO: 3834793 - DNA, 25 bp, Homo sapien
gggttatttgcctaaatgtactatg

SEQ ID NO: 3834794 - DNA, 25 bp, Homo sapien
tcccattacaacacatggggggtta

SEQ ID NO: 3834795 - DNA, 25 bp, Homo sapien
tggcaacaaacagtgcaggcaaaga

SEQ ID NO: 3834796 - DNA, 25 bp, Homo sapien
aaataaattgtcctatcctgtcctg

SEQ ID NO: 3834797 - DNA, 25 bp, Homo sapien
tttgtaaagcactgatctcatccat

SEQ ID NO: 3834798 - DNA, 25 bp, Homo sapien
acagggcctggttctattgtccaag

SEQ ID NO: 3834799 - DNA, 25 bp, Homo sapien
gtgctgagcaaggtacccgacgtcc

SEQ ID NO: 3834800 - DNA, 25 bp, Homo sapien
ggtgctgagcaaggtacccgacgtc

SEQ ID NO: 3834801 - DNA, 25 bp, Homo sapien
ggtcaaagagctggtgctgagcaag

SEQ ID NO: 3834802 - DNA, 25 bp, Homo sapien
ctgagcaaggtacccgacgtccctt

SEQ ID NO: 3834803 - DNA, 25 bp, Homo sapien
ccaggctgcagtagtcggggatgct

SEQ ID NO: 3834804 - DNA, 25 bp, Homo sapien
gcattgatggtgatttcctcctcct

SEQ ID NO: 3834805 - DNA, 25 bp, Homo sapien
tgatgtcctgcttcaactccgggat

SEQ ID NO: 3834806 - DNA, 25 bp, Homo sapien
gggatgctgatgtcctgcttcaact

SEQ ID NO: 3834807 - DNA, 25 bp, Homo sapien
gagaccctgacagtcagctggtggc

SEQ ID NO: 3834808 - DNA, 25 bp, Homo sapien
tcagctggtggcctcactccactgc

SEQ ID NO: 3834809 - DNA, 25 bp, Homo sapien
gggagagagaccctgacagtcagct

SEQ ID NO: 3834810 - DNA, 25 bp, Homo sapien
agctggtggcctcactccactgctg

SEQ ID NO: 3834811 - DNA, 25 bp, Homo sapien
tgcgtgtcatgagggtacagagccc

SEQ ID NO: 3834812 - DNA, 25 bp, Homo sapien
cctgcggggaatacagccggatgta

SEQ ID NO: 3834813 - DNA, 25 bp, Homo sapien
gcccctgactcctgcggggaataca

SEQ ID NO: 3834814 - DNA, 25 bp, Homo sapien
gctcgtgttatggagaaggtgcgtg

SEQ ID NO: 3834815 - DNA, 25 bp, Homo sapien
gatgaacaggatctctccaggagac

SEQ ID NO: 3834816 - DNA, 25 bp, Homo sapien
gagacaggatgcaggacaggaatgg

SEQ ID NO: 3834817 - DNA, 25 bp, Homo sapien
tccaggtcgggattctccacgtcaa

SEQ ID NO: 3834818 - DNA, 25 bp, Homo sapien
gcccgcacgtaatgccagtatttca

SEQ ID NO: 3834819 - DNA, 25 bp, Homo sapien
gacagcggctaaggttcatgcagca

SEQ ID NO: 3834820 - DNA, 25 bp, Homo sapien
agtattcaggctgtggcgtccagca

SEQ ID NO: 3834821 - DNA, 25 bp, Homo sapien
tccagcaggccgttatgggaaggaa

SEQ ID NO: 3834822 - DNA, 25 bp, Homo sapien
gccgggtttgaatcaggtagccaac

SEQ ID NO: 3834823 - DNA, 25 bp, Homo sapien
tttcaggggtgttgacatctggtgt

SEQ ID NO: 3834824 - DNA, 25 bp, Homo sapien
ttcaggggtgttgacatctggtgta

SEQ ID NO: 3834825 - DNA, 25 bp, Homo sapien
gctccggactgtcccagttgtcctg

SEQ ID NO: 3834826 - DNA, 25 bp, Homo sapien
gatggacgccagaaggcaaaaagcc

SEQ ID NO: 3834827 - DNA, 25 bp, Homo sapien
tctttgagctcgagtcagtcctggc

SEQ ID NO: 3834828 - DNA, 25 bp, Homo sapien
aatgcagtcagcgtgccgttctgga

SEQ ID NO: 3834829 - DNA, 25 bp, Homo sapien
aattctgtcactgcgggcgctgctg

SEQ ID NO: 3834830 - DNA, 25 bp, Homo sapien
cacgccctcaagatgccggtccagg

SEQ ID NO: 3834831 - DNA, 25 bp, Homo sapien
acaattctgtcactgcgggcgctgc

SEQ ID NO: 3834832 - DNA, 25 bp, Homo sapien
tgagctcctcccgacacgccctcaa

SEQ ID NO: 3834833 - DNA, 25 bp, Homo sapien
tgaagtcacctgttatcccagaccc

SEQ ID NO: 3834834 - DNA, 25 bp, Homo sapien
caccattgtgcatggcttgcagggc

SEQ ID NO: 3834835 - DNA, 25 bp, Homo sapien
ggaaatatctgctcattacaggagg

SEQ ID NO: 3834836 - DNA, 25 bp, Homo sapien
gctgcaggcgcttgtactctgtgcc

SEQ ID NO: 3834837 - DNA, 25 bp, Homo sapien
ggaatcacaagcatgcgccatcaca

SEQ ID NO: 3834838 - DNA, 25 bp, Homo sapien
gaggttgcagaggaacagcatttaa

SEQ ID NO: 3834839 - DNA, 25 bp, Homo sapien
gacctcttcatggctggtccccatt

SEQ ID NO: 3834840 - DNA, 25 bp, Homo sapien
cattgcagaatgtagtgcctggcac

SEQ ID NO: 3834841 - DNA, 25 bp, Homo sapien
gaagcagcgatctggtgcaacctta

SEQ ID NO: 3834842 - DNA, 25 bp, Homo sapien
catcataaggatcttgggagcaagc

SEQ ID NO: 3834843 - DNA, 25 bp, Homo sapien
gagcaagcaagagaccccagttctg

SEQ ID NO: 3834844 - DNA, 25 bp, Homo sapien
caaccttagcgcttagtggacatca

SEQ ID NO: 3834845 - DNA, 25 bp, Homo sapien
aagcctctctcccgtcccctgcaga

SEQ ID NO: 3834846 - DNA, 25 bp, Homo sapien
cagagcgccacagaaggtatcagag

SEQ ID NO: 3834847 - DNA, 25 bp, Homo sapien
ccagagcgccacagaaggtatcaga

SEQ ID NO: 3834848 - DNA, 25 bp, Homo sapien
accagagcgccacagaaggtatcag

SEQ ID NO: 3834849 - DNA, 25 bp, Homo sapien
acatcttcctcggttcgtggacgga

SEQ ID NO: 3834850 - DNA, 25 bp, Homo sapien
ttttatagaccacagggctgaattc

SEQ ID NO: 3834851 - DNA, 25 bp, Homo sapien
gacggatacgtcttgagtgtcagct

SEQ ID NO: 3834852 - DNA, 25 bp, Homo sapien
tgtggtgaataggatgagcagatcc

SEQ ID NO: 3834853 - DNA, 25 bp, Homo sapien
acaagtccgcagccgcttatgttac

SEQ ID NO: 3834854 - DNA, 25 bp, Homo sapien
tgtacaagtccgcagccgcttatgt

SEQ ID NO: 3834855 - DNA, 25 bp, Homo sapien
tttgtacaagtccgcagccgcttat

SEQ ID NO: 3834856 - DNA, 25 bp, Homo sapien
tacaagtccgcagccgcttatgtta

SEQ ID NO: 3834857 - DNA, 25 bp, Homo sapien
cattattaaggatcgagagcgggcg

SEQ ID NO: 3834858 - DNA, 25 bp, Homo sapien
tttgggatctaacccacgaggcgga

SEQ ID NO: 3834859 - DNA, 25 bp, Homo sapien
tcctccttggtcagggaagtcactg

SEQ ID NO: 3834860 - DNA, 25 bp, Homo sapien
cacatttttgacgtcgaggccacac

SEQ ID NO: 3834861 - DNA, 25 bp, Homo sapien
gagtgctgtggtacgatctggctca

SEQ ID NO: 3834862 - DNA, 25 bp, Homo sapien
cgagtgctgtggtacgatctggctc

SEQ ID NO: 3834863 - DNA, 25 bp, Homo sapien
ggctcgagtgctgtggtacgatctg

SEQ ID NO: 3834864 - DNA, 25 bp, Homo sapien
ctcgagtgctgtggtacgatctggc

SEQ ID NO: 3834865 - DNA, 25 bp, Homo sapien
tccttgcctaggaacgggtctgcct

SEQ ID NO: 3834866 - DNA, 25 bp, Homo sapien
tatggtttaggaggtcacgcaagct

SEQ ID NO: 3834867 - DNA, 25 bp, Homo sapien
aaaactgtggtctcctgttcagcca

SEQ ID NO: 3834868 - DNA, 25 bp, Homo sapien
tgttctaatgcaccagctgacgcca

SEQ ID NO: 3834869 - DNA, 25 bp, Homo sapien
gagcattgacgattctgaccacacc

SEQ ID NO: 3834870 - DNA, 25 bp, Homo sapien
cactcttggagttcgatctggcttc

SEQ ID NO: 3834871 - DNA, 25 bp, Homo sapien
ctctattaagatggcctttgttggc

SEQ ID NO: 3834872 - DNA, 25 bp, Homo sapien
tcaaattctaaatcagtggcgcatc

SEQ ID NO: 3834873 - DNA, 25 bp, Homo sapien
ttcatttaagcttcctttgtggccc

SEQ ID NO: 3834874 - DNA, 25 bp, Homo sapien
ttttctaaaatacaagcctgatctc

SEQ ID NO: 3834875 - DNA, 25 bp, Homo sapien
cattgcggtttgtgaatgtggtcta

SEQ ID NO: 3834876 - DNA, 25 bp, Homo sapien
tgtggcccagtacatagtcaatttc

SEQ ID NO: 3834877 - DNA, 25 bp, Homo sapien
ggaggggcctcagtcaactccttag

SEQ ID NO: 3834878 - DNA, 25 bp, Homo sapien
atgcagattccgcttcagtatgtca

SEQ ID NO: 3834879 - DNA, 25 bp, Homo sapien
agattccgcttcagtatgtcaggga

SEQ ID NO: 3834880 - DNA, 25 bp, Homo sapien
gggcctcagtcaactccttagatgt

SEQ ID NO: 3834881 - DNA, 25 bp, Homo sapien
gacagtaatgctcgccaatgattcc

SEQ ID NO: 3834882 - DNA, 25 bp, Homo sapien
tctctggtccacattcagtcccaaa

SEQ ID NO: 3834883 - DNA, 25 bp, Homo sapien
tttgagtctacgagccaccctggag

SEQ ID NO: 3834884 - DNA, 25 bp, Homo sapien
cattttcatttgagtctacgagcca

SEQ ID NO: 3834885 - DNA, 25 bp, Homo sapien
gttatcatcgcacttcttcttccct

SEQ ID NO: 3834886 - DNA, 25 bp, Homo sapien
ttccctcctgattaattcaggctgc

SEQ ID NO: 3834887 - DNA, 25 bp, Homo sapien
tcccactgtgtatcactggccagtt

SEQ ID NO: 3834888 - DNA, 25 bp, Homo sapien
cttccctcctgattaattcaggctg

SEQ ID NO: 3834889 - DNA, 25 bp, Homo sapien
tgtttccccggatctattctggccc

SEQ ID NO: 3834890 - DNA, 25 bp, Homo sapien
tgtccaatccgatttcccagatgga

SEQ ID NO: 3834891 - DNA, 25 bp, Homo sapien
tgaccaccatcaaagcttccacaat

SEQ ID NO: 3834892 - DNA, 25 bp, Homo sapien
cccagatggaacctctgtgagcatt

SEQ ID NO: 3834893 - DNA, 25 bp, Homo sapien
tgcaccttgtacaggttgatgtaat

SEQ ID NO: 3834894 - DNA, 25 bp, Homo sapien
caggttgatgtaatgcttacttctt

SEQ ID NO: 3834895 - DNA, 25 bp, Homo sapien
catgatgcaggatgttgcaggaatc

SEQ ID NO: 3834896 - DNA, 25 bp, Homo sapien
tgcaggaatcactgatgtgcacctt

SEQ ID NO: 3834897 - DNA, 25 bp, Homo sapien
ctgtggaagagagtgagtacatgaa

SEQ ID NO: 3834898 - DNA, 25 bp, Homo sapien
gtggaagagagtgagtacatgaaaa

SEQ ID NO: 3834899 - DNA, 25 bp, Homo sapien
tgtggaagagagtgagtacatgaaa

SEQ ID NO: 3834900 - DNA, 25 bp, Homo sapien
tggctgccgacttaggccatggatg

SEQ ID NO: 3834901 - DNA, 25 bp, Homo sapien
ttggtctactaataggtgcttggcc

SEQ ID NO: 3834902 - DNA, 25 bp, Homo sapien
catggatgggtgatgcttcttggtc

SEQ ID NO: 3834903 - DNA, 25 bp, Homo sapien
tcagatgagaacaatagctggctgc

SEQ ID NO: 3834904 - DNA, 25 bp, Homo sapien
ctgttgaaagaaagtagccgggtca

SEQ ID NO: 3834905 - DNA, 25 bp, Homo sapien
ggatggaaatcctgaactcccagac

SEQ ID NO: 3834906 - DNA, 25 bp, Homo sapien
tagctgaaagtattcggaaatttac

SEQ ID NO: 3834907 - DNA, 25 bp, Homo sapien
ttaattgggtacactgggattagta

SEQ ID NO: 3834908 - DNA, 25 bp, Homo sapien
tggaaacacaagattggcctggcag

SEQ ID NO: 3834909 - DNA, 25 bp, Homo sapien
tgggagatgcttccacaactgaggc

SEQ ID NO: 3834910 - DNA, 25 bp, Homo sapien
tgggcactttgaggcaacacagcat

SEQ ID NO: 3834911 - DNA, 25 bp, Homo sapien
cctggaaggtgggtgtcctcgctac

SEQ ID NO: 3834912 - DNA, 25 bp, Homo sapien
gattgttctatattttgatggttgt

SEQ ID NO: 3834913 - DNA, 25 bp, Homo sapien
tttgatagagatttgcattgcacca

SEQ ID NO: 3834914 - DNA, 25 bp, Homo sapien
cacaccctactagattgttctatat

SEQ ID NO: 3834915 - DNA, 25 bp, Homo sapien
caccacaccctactagattgttcta

SEQ ID NO: 3834916 - DNA, 25 bp, Homo sapien
tccattcgccgtccgggcgcccaag

SEQ ID NO: 3834917 - DNA, 25 bp, Homo sapien
cgtccgggcgcccaagcgggaagtg

SEQ ID NO: 3834918 - DNA, 25 bp, Homo sapien
gcggggctttcctgggcgcggagac

SEQ ID NO: 3834919 - DNA, 25 bp, Homo sapien
tgcgcgcccctgctccattcgccgt

SEQ ID NO: 3834920 - DNA, 25 bp, Homo sapien
gcgtgcccgggcgataccttcgcaa

SEQ ID NO: 3834921 - DNA, 25 bp, Homo sapien
ggcaaggacggaaccgggcgctgct

SEQ ID NO: 3834922 - DNA, 25 bp, Homo sapien
ttcccgaacgccctcagccggcgtg

SEQ ID NO: 3834923 - DNA, 25 bp, Homo sapien
gcgcaccgagagtcgcgggctcggg

SEQ ID NO: 3834924 - DNA, 25 bp, Homo sapien
tgcgcccagcttgtcacttctttga

SEQ ID NO: 3834925 - DNA, 25 bp, Homo sapien
cctgggcattttgcaaccgggattg

SEQ ID NO: 3834926 - DNA, 25 bp, Homo sapien
gacctgccggtaactgcatgtgttg

SEQ ID NO: 3834927 - DNA, 25 bp, Homo sapien
ccttaggttatctcggacctgccgg

SEQ ID NO: 3834928 - DNA, 25 bp, Homo sapien
ccacatagtgacataacaaatatag

SEQ ID NO: 3834929 - DNA, 25 bp, Homo sapien
tgaacccttattctactcatatggc

SEQ ID NO: 3834930 - DNA, 25 bp, Homo sapien
ggagaacttaacaaagcctctatta

SEQ ID NO: 3834931 - DNA, 25 bp, Homo sapien
tcatatggctatgcacttaacaaca

SEQ ID NO: 3834932 - DNA, 25 bp, Homo sapien
tcactgcggccttgaattcctggtc

SEQ ID NO: 3834933 - DNA, 25 bp, Homo sapien
gctcactgcggccttgaattcctgg

SEQ ID NO: 3834934 - DNA, 25 bp, Homo sapien
tcaagtgattctcccacctcgccct

SEQ ID NO: 3834935 - DNA, 25 bp, Homo sapien
cccacctcgccctcccaagtagctg

SEQ ID NO: 3834936 - DNA, 25 bp, Homo sapien
tctgcaacctgttatcttgctttat

SEQ ID NO: 3834937 - DNA, 25 bp, Homo sapien
caatctttgtggcatattgcacact

SEQ ID NO: 3834938 - DNA, 25 bp, Homo sapien
aactccatccgggatcctggaagcc

SEQ ID NO: 3834939 - DNA, 25 bp, Homo sapien
gcatattgcacactcgggccttatg

SEQ ID NO: 3834940 - DNA, 25 bp, Homo sapien
tgttgaagacagagcccacaggatt

SEQ ID NO: 3834941 - DNA, 25 bp, Homo sapien
ctgtgttgaagacagagcccacagg

SEQ ID NO: 3834942 - DNA, 25 bp, Homo sapien
gtgttgaagacagagcccacaggat

SEQ ID NO: 3834943 - DNA, 25 bp, Homo sapien
tgtgttgaagacagagcccacagga

SEQ ID NO: 3834944 - DNA, 25 bp, Homo sapien
tggttctcccaacgaccctatgagg

SEQ ID NO: 3834945 - DNA, 25 bp, Homo sapien
ggagcctagctttgtcaccagtctg

SEQ ID NO: 3834946 - DNA, 25 bp, Homo sapien
gcagcaaagtcagtgaaggccgcag

SEQ ID NO: 3834947 - DNA, 25 bp, Homo sapien
aagcatgggcctgggaaaacacgcc

SEQ ID NO: 3834948 - DNA, 25 bp, Homo sapien
tccatcagatgtgaaatagccacct

SEQ ID NO: 3834949 - DNA, 25 bp, Homo sapien
agcaggcgtacatggtgacagccag

SEQ ID NO: 3834950 - DNA, 25 bp, Homo sapien
ggaagcatagcacccgtatctactt

SEQ ID NO: 3834951 - DNA, 25 bp, Homo sapien
caacaagagatttagagaggatgac

SEQ ID NO: 3834952 - DNA, 25 bp, Homo sapien
tccagctgtgtgtaaatctttaatt

SEQ ID NO: 3834953 - DNA, 25 bp, Homo sapien
tcttccagctgtgtgtaaatcttta

SEQ ID NO: 3834954 - DNA, 25 bp, Homo sapien
cttccagctgtgtgtaaatctttaa

SEQ ID NO: 3834955 - DNA, 25 bp, Homo sapien
ccagctgtgtgtaaatctttaatta

SEQ ID NO: 3834956 - DNA, 25 bp, Homo sapien
gctacatttcaggagagatcacaga

SEQ ID NO: 3834957 - DNA, 25 bp, Homo sapien
ggatgtgtgggtgctacatttcagg

SEQ ID NO: 3834958 - DNA, 25 bp, Homo sapien
gcacacacacgtgccgcagctagct

SEQ ID NO: 3834959 - DNA, 25 bp, Homo sapien
acacacgtgccgcagctagcttctc

SEQ ID NO: 3834960 - DNA, 25 bp, Homo sapien
catgaggcctggctaagtgtttgta

SEQ ID NO: 3834961 - DNA, 25 bp, Homo sapien
ccatgaggcctggctaagtgtttgt

SEQ ID NO: 3834962 - DNA, 25 bp, Homo sapien
accatgaggcctggctaagtgtttg

SEQ ID NO: 3834963 - DNA, 25 bp, Homo sapien
cagagcttgccacctgcagcaggac

SEQ ID NO: 3834964 - DNA, 25 bp, Homo sapien
agctcacagggaacaggagcccaga

SEQ ID NO: 3834965 - DNA, 25 bp, Homo sapien
gcaggaccaggcagctcacagggaa

SEQ ID NO: 3834966 - DNA, 25 bp, Homo sapien
agagcttgccacctgcagcaggacc

SEQ ID NO: 3834967 - DNA, 25 bp, Homo sapien
agtagtttaggtcagaaatcttgga

SEQ ID NO: 3834968 - DNA, 25 bp, Homo sapien
tttcagaaatgacaaccgcgtcctt

SEQ ID NO: 3834969 - DNA, 25 bp, Homo sapien
ttcagaaatgacaaccgcgtccttc

SEQ ID NO: 3834970 - DNA, 25 bp, Homo sapien
cccagtagtttaggtcagaaatctt

SEQ ID NO: 3834971 - DNA, 25 bp, Homo sapien
ctcaatgcgtgagggggacttgcac

SEQ ID NO: 3834972 - DNA, 25 bp, Homo sapien
acttgcacccaaacaggaccaaggg

SEQ ID NO: 3834973 - DNA, 25 bp, Homo sapien
cctgagcggcccaggaactcaatgc

SEQ ID NO: 3834974 - DNA, 25 bp, Homo sapien
gaccaaggggaatagcacaaaagca

SEQ ID NO: 3834975 - DNA, 25 bp, Homo sapien
gatgctcatgtagtcggagacgcag

SEQ ID NO: 3834976 - DNA, 25 bp, Homo sapien
tgctcatgtagtcggagacgcaggt

SEQ ID NO: 3834977 - DNA, 25 bp, Homo sapien
agatgctcatgtagtcggagacgca

SEQ ID NO: 3834978 - DNA, 25 bp, Homo sapien
tcatgtagtcggagacgcaggtggg

SEQ ID NO: 3834979 - DNA, 25 bp, Homo sapien
gctgcaattggtgggaccattcatc

SEQ ID NO: 3834980 - DNA, 25 bp, Homo sapien
aaccagctggtacaacaggcggagc

SEQ ID NO: 3834981 - DNA, 25 bp, Homo sapien
gaaaaaccagctggtacaacaggcg

SEQ ID NO: 3834982 - DNA, 25 bp, Homo sapien
acaggcggagctcggtgctgcaatt

SEQ ID NO: 3834983 - DNA, 25 bp, Homo sapien
tcatggaataccacctttactggtg

SEQ ID NO: 3834984 - DNA, 25 bp, Homo sapien
gaacgctgcatgctggtgtgccgta

SEQ ID NO: 3834985 - DNA, 25 bp, Homo sapien
tcctgggcaccagtgtaacgaagca

SEQ ID NO: 3834986 - DNA, 25 bp, Homo sapien
gccccgtaactgtgtgtcttgtgta

SEQ ID NO: 3834987 - DNA, 25 bp, Homo sapien
aaacataaaggagggccatgcagtt

SEQ ID NO: 3834988 - DNA, 25 bp, Homo sapien
cagtgggccggatttggctcacggg

SEQ ID NO: 3834989 - DNA, 25 bp, Homo sapien
ggccggatttggctcacgggccata

SEQ ID NO: 3834990 - DNA, 25 bp, Homo sapien
cggatttggctcacgggccatagtt

SEQ ID NO: 3834991 - DNA, 25 bp, Homo sapien
ctgaaagcccatgaaagggaagaac

SEQ ID NO: 3834992 - DNA, 25 bp, Homo sapien
ccatgaaagggaagaaccggtggca

SEQ ID NO: 3834993 - DNA, 25 bp, Homo sapien
tgaaagcccatgaaagggaagaacc

SEQ ID NO: 3834994 - DNA, 25 bp, Homo sapien
agcccatgaaagggaagaaccggtg

SEQ ID NO: 3834995 - DNA, 25 bp, Homo sapien
atgcaccaaggatgctcctcacacc

SEQ ID NO: 3834996 - DNA, 25 bp, Homo sapien
acatgcaccaaggatgctcctcaca

SEQ ID NO: 3834997 - DNA, 25 bp, Homo sapien
cacctgcctagctgccggccctggt

SEQ ID NO: 3834998 - DNA, 25 bp, Homo sapien
cacatgcaccaaggatgctcctcac

SEQ ID NO: 3834999 - DNA, 25 bp, Homo sapien
gcactgaccacgtcatccatgagca

SEQ ID NO: 3835000 - DNA, 25 bp, Homo sapien
caggtccagtgtatagttatccgca

SEQ ID NO: 3835001 - DNA, 25 bp, Homo sapien
gcgcctccgttgttctcagggatac

SEQ ID NO: 3835002 - DNA, 25 bp, Homo sapien
gttatccgcactgaccacgtcatcc

SEQ ID NO: 3835003 - DNA, 25 bp, Homo sapien
caggggcaggaatcccatcagattt

SEQ ID NO: 3835004 - DNA, 25 bp, Homo sapien
tactgcgaccagctccgtttcaaag

SEQ ID NO: 3835005 - DNA, 25 bp, Homo sapien
cagctccgtttcaaaggtgggagga

SEQ ID NO: 3835006 - DNA, 25 bp, Homo sapien
gcttggtggtctactgcgaccagct

SEQ ID NO: 3835007 - DNA, 25 bp, Homo sapien
tggtggtctactgcgaccagctccg

SEQ ID NO: 3835008 - DNA, 25 bp, Homo sapien
gcatcactggaatacaacgcatgtt

SEQ ID NO: 3835009 - DNA, 25 bp, Homo sapien
gaaggtcagccttccacggtcaaga

SEQ ID NO: 3835010 - DNA, 25 bp, Homo sapien
tgttttaaactcctgtcaccacagc

SEQ ID NO: 3835011 - DNA, 25 bp, Homo sapien
ttcccagttcggttttcaatcagca

SEQ ID NO: 3835012 - DNA, 25 bp, Homo sapien
tgggttcaagccattctcctacctc

SEQ ID NO: 3835013 - DNA, 25 bp, Homo sapien
cactgcaacctccttctcctgggtt

SEQ ID NO: 3835014 - DNA, 25 bp, Homo sapien
tggagggcagtagcatgatctaagc

SEQ ID NO: 3835015 - DNA, 25 bp, Homo sapien
ctgccaccatgccagactaattttt

SEQ ID NO: 3835016 - DNA, 25 bp, Homo sapien
tcagcagcagagtgtcggagacatt

SEQ ID NO: 3835017 - DNA, 25 bp, Homo sapien
tgccgggtcgttttcactccaaatg

SEQ ID NO: 3835018 - DNA, 25 bp, Homo sapien
ttggtgtgaactgtcaggtttcctg

SEQ ID NO: 3835019 - DNA, 25 bp, Homo sapien
caaatgttgactgcataggtgagat

SEQ ID NO: 3835020 - DNA, 25 bp, Homo sapien
ggttctaggtaggtcacgttataga

SEQ ID NO: 3835021 - DNA, 25 bp, Homo sapien
acccgtgccctgtaggaaatcccag

SEQ ID NO: 3835022 - DNA, 25 bp, Homo sapien
gctgcgatgcggagggagggttcta

SEQ ID NO: 3835023 - DNA, 25 bp, Homo sapien
ggtggtgttatagcactgagcccag

SEQ ID NO: 3835024 - DNA, 25 bp, Homo sapien
ttgtgccacttggtgctggggctcc

SEQ ID NO: 3835025 - DNA, 25 bp, Homo sapien
gttgtgccacttggtgctggggctc

SEQ ID NO: 3835026 - DNA, 25 bp, Homo sapien
agttgtgccacttggtgctggggct

SEQ ID NO: 3835027 - DNA, 25 bp, Homo sapien
cagatttctacagggagggaaacca

SEQ ID NO: 3835028 - DNA, 25 bp, Homo sapien
tccccagatttctacagggagggaa

SEQ ID NO: 3835029 - DNA, 25 bp, Homo sapien
gaatctttgtcctggagaatgacgg

SEQ ID NO: 3835030 - DNA, 25 bp, Homo sapien
ggagaatgacggcaccacaagatgg

SEQ ID NO: 3835031 - DNA, 25 bp, Homo sapien
cattgagtttttacgacagccctta

SEQ ID NO: 3835032 - DNA, 25 bp, Homo sapien
gagacacgtggctcaactgatatcc

SEQ ID NO: 3835033 - DNA, 25 bp, Homo sapien
catggagaccctgcctatggagctc

SEQ ID NO: 3835034 - DNA, 25 bp, Homo sapien
cactgcacctaccacgttgaagaat

SEQ ID NO: 3835035 - DNA, 25 bp, Homo sapien
tctttccggaagcacagaagtcaaa

SEQ ID NO: 3835036 - DNA, 25 bp, Homo sapien
tagctgccatcatctcaacacggtt

SEQ ID NO: 3835037 - DNA, 25 bp, Homo sapien
tcaaatgcaccaacttaggagccgg

SEQ ID NO: 3835038 - DNA, 25 bp, Homo sapien
tgaggtcagccatggtacagcctgg

SEQ ID NO: 3835039 - DNA, 25 bp, Homo sapien
gctgacatagcacaacaggcagacg

SEQ ID NO: 3835040 - DNA, 25 bp, Homo sapien
gccaggatgacaatgcaggaaacgc

SEQ ID NO: 3835041 - DNA, 25 bp, Homo sapien
aggatgacaatgcaggaaacgctga

SEQ ID NO: 3835042 - DNA, 25 bp, Homo sapien
acaacaggcagacggccaggatgac

SEQ ID NO: 3835043 - DNA, 25 bp, Homo sapien
tattatagccacgaggcggctgcgg

SEQ ID NO: 3835044 - DNA, 25 bp, Homo sapien
ctgagcatcctggattattatagcc

SEQ ID NO: 3835045 - DNA, 25 bp, Homo sapien
tggattattatagccacgaggcggc

SEQ ID NO: 3835046 - DNA, 25 bp, Homo sapien
tcctggattattatagccacgaggc

SEQ ID NO: 3835047 - DNA, 25 bp, Homo sapien
tgtcctcatccacgcctactcctac

SEQ ID NO: 3835048 - DNA, 25 bp, Homo sapien
atgtcctcatccacgcctactccta

SEQ ID NO: 3835049 - DNA, 25 bp, Homo sapien
aagccagtgaaggtccttaacagcc

SEQ ID NO: 3835050 - DNA, 25 bp, Homo sapien
gccagtgaaggtccttaacagccca

SEQ ID NO: 3835051 - DNA, 25 bp, Homo sapien
ccagtgaaggtccttaacagcccag

SEQ ID NO: 3835052 - DNA, 25 bp, Homo sapien
cagtgaaggtccttaacagcccagg

SEQ ID NO: 3835053 - DNA, 25 bp, Homo sapien
cgggaccgcttctcccactgtgacc

SEQ ID NO: 3835054 - DNA, 25 bp, Homo sapien
gggaccgcttctcccactgtgaccc

SEQ ID NO: 3835055 - DNA, 25 bp, Homo sapien
ctcgggaccgcttctcccactgtga

SEQ ID NO: 3835056 - DNA, 25 bp, Homo sapien
tcgggaccgcttctcccactgtgac

SEQ ID NO: 3835057 - DNA, 25 bp, Homo sapien
aaacagggcaagagcttggtaagac

SEQ ID NO: 3835058 - DNA, 25 bp, Homo sapien
gctccagaaaacagggcaagagctt

SEQ ID NO: 3835059 - DNA, 25 bp, Homo sapien
aagagcttggtaagacaattcttcc

SEQ ID NO: 3835060 - DNA, 25 bp, Homo sapien
agaaaacagggcaagagcttggtaa

SEQ ID NO: 3835061 - DNA, 25 bp, Homo sapien
ctctttggcagccttgtgaggatct

SEQ ID NO: 3835062 - DNA, 25 bp, Homo sapien
gcctcaaacaactccacacatcgca

SEQ ID NO: 3835063 - DNA, 25 bp, Homo sapien
tctggccagaggactgtcttgctga

SEQ ID NO: 3835064 - DNA, 25 bp, Homo sapien
acgctgatgctctctggccagagga

SEQ ID NO: 3835065 - DNA, 25 bp, Homo sapien
ccactgggcaccatgctgattttcc

SEQ ID NO: 3835066 - DNA, 25 bp, Homo sapien
ccatgctggaggacatttcggcgga

SEQ ID NO: 3835067 - DNA, 25 bp, Homo sapien
tgagcactcgtacttcccgaaggtg

SEQ ID NO: 3835068 - DNA, 25 bp, Homo sapien
gacactgtttcaggtggccgcacag

SEQ ID NO: 3835069 - DNA, 25 bp, Homo sapien
tgctctcaggcgatgcacagaagct

SEQ ID NO: 3835070 - DNA, 25 bp, Homo sapien
gggaggccggacacagactggcctc

SEQ ID NO: 3835071 - DNA, 25 bp, Homo sapien
accctcatgtatgtgggtcccacgg

SEQ ID NO: 3835072 - DNA, 25 bp, Homo sapien
cggagacaaagttcacgattttggg

SEQ ID NO: 3835073 - DNA, 25 bp, Homo sapien
gtatgtgggtcccacggagacaaag

SEQ ID NO: 3835074 - DNA, 25 bp, Homo sapien
gactcagcaacaagaggacatgcac

SEQ ID NO: 3835075 - DNA, 25 bp, Homo sapien
gcagcccagtgttaggccaacgtca

SEQ ID NO: 3835076 - DNA, 25 bp, Homo sapien
gataagccctagtcctcatctgcag

SEQ ID NO: 3835077 - DNA, 25 bp, Homo sapien
tctcatgggatgtggcgagcccagc

SEQ ID NO: 3835078 - DNA, 25 bp, Homo sapien
gaatgagcacctctaggcaatgacc

SEQ ID NO: 3835079 - DNA, 25 bp, Homo sapien
taactggtgccttatgcctgctgtc

SEQ ID NO: 3835080 - DNA, 25 bp, Homo sapien
tcgttcacaagtcgaggtgcccaag

SEQ ID NO: 3835081 - DNA, 25 bp, Homo sapien
tgggccaacatgcagggtaactggt

SEQ ID NO: 3835082 - DNA, 25 bp, Homo sapien
gaagcgcagatcactacagagagcc

SEQ ID NO: 3835083 - DNA, 25 bp, Homo sapien
catgcctggcgcaaggaggtgtttc

SEQ ID NO: 3835084 - DNA, 25 bp, Homo sapien
taaaatggccaagcccctcaagtgt

SEQ ID NO: 3835085 - DNA, 25 bp, Homo sapien
caaaagtgatacagacataggagct

SEQ ID NO: 3835086 - DNA, 25 bp, Homo sapien
catgggggagtgtttgataaagaca

SEQ ID NO: 3835087 - DNA, 25 bp, Homo sapien
ggacagactcacagtaccggaagtt

SEQ ID NO: 3835088 - DNA, 25 bp, Homo sapien
gggtcccagggacagactcacagta

SEQ ID NO: 3835089 - DNA, 25 bp, Homo sapien
agacactaccggcataaacccaggg

SEQ ID NO: 3835090 - DNA, 25 bp, Homo sapien
gctaaagagctgaacggcgtgtggg

SEQ ID NO: 3835091 - DNA, 25 bp, Homo sapien
ctggagcgaggctaaagagctgaac

SEQ ID NO: 3835092 - DNA, 25 bp, Homo sapien
gaggctaaagagctgaacggcgtgt

SEQ ID NO: 3835093 - DNA, 25 bp, Homo sapien
cgaggctaaagagctgaacggcgtg

SEQ ID NO: 3835094 - DNA, 25 bp, Homo sapien
ctgcctaatagggtctgagcttggg

SEQ ID NO: 3835095 - DNA, 25 bp, Homo sapien
tagggtctgagcttgggaccctctg

SEQ ID NO: 3835096 - DNA, 25 bp, Homo sapien
aatagggtctgagcttgggaccctc

SEQ ID NO: 3835097 - DNA, 25 bp, Homo sapien
cctaatagggtctgagcttgggacc

SEQ ID NO: 3835098 - DNA, 25 bp, Homo sapien
ttacggtcactcagcagagagacgc

SEQ ID NO: 3835099 - DNA, 25 bp, Homo sapien
cagagagacgccagtgggtctgtct

SEQ ID NO: 3835100 - DNA, 25 bp, Homo sapien
agacgccgagcttacggtcactcag

SEQ ID NO: 3835101 - DNA, 25 bp, Homo sapien
gcagagggccagacgccgagcttac

SEQ ID NO: 3835102 - DNA, 25 bp, Homo sapien
gggtgagaatccacacccagcccga

SEQ ID NO: 3835103 - DNA, 25 bp, Homo sapien
acctgtcactctgatgacgggcagc

SEQ ID NO: 3835104 - DNA, 25 bp, Homo sapien
tcaggctgtcataagacctgtcact

SEQ ID NO: 3835105 - DNA, 25 bp, Homo sapien
ccagcccgagtcaccaatcaggctg

SEQ ID NO: 3835106 - DNA, 25 bp, Homo sapien
cttctgtttcggcttctttctcaga

SEQ ID NO: 3835107 - DNA, 25 bp, Homo sapien
ctcagaaatccattccgtgtgctgg

SEQ ID NO: 3835108 - DNA, 25 bp, Homo sapien
ttctgtttcggcttctttctcagaa

SEQ ID NO: 3835109 - DNA, 25 bp, Homo sapien
aaatccattccgtgtgctgggggca

SEQ ID NO: 3835110 - DNA, 25 bp, Homo sapien
gacccgttccccgtgcttcatgaga

SEQ ID NO: 3835111 - DNA, 25 bp, Homo sapien
gcagcgacagctcatggggtcacct

SEQ ID NO: 3835112 - DNA, 25 bp, Homo sapien
ccgacctgctacgtcccagttgagt

SEQ ID NO: 3835113 - DNA, 25 bp, Homo sapien
gggtcacctggcttgactgcccgac

SEQ ID NO: 3835114 - DNA, 25 bp, Homo sapien
cagttaatcagtagaagacgaaggt

SEQ ID NO: 3835115 - DNA, 25 bp, Homo sapien
cctagctgtggagcatgaggtccca

SEQ ID NO: 3835116 - DNA, 25 bp, Homo sapien
gggacctcaggcttacagttaatca

SEQ ID NO: 3835117 - DNA, 25 bp, Homo sapien
tagccaggcagcaaatctctattag

SEQ ID NO: 3835118 - DNA, 25 bp, Homo sapien
tcacacgattgaggaatgggatgcg

SEQ ID NO: 3835119 - DNA, 25 bp, Homo sapien
caatgtgacccaggtagggacatgg

SEQ ID NO: 3835120 - DNA, 25 bp, Homo sapien
tgcaatgtgacccaggtagggacat

SEQ ID NO: 3835121 - DNA, 25 bp, Homo sapien
gatgcgtctagttcctcaagtcggc

SEQ ID NO: 3835122 - DNA, 25 bp, Homo sapien
aatgtatgactgtttccatatgacc

SEQ ID NO: 3835123 - DNA, 25 bp, Homo sapien
tgtatcctcgtcattaagcaatgta

SEQ ID NO: 3835124 - DNA, 25 bp, Homo sapien
tgaccaagaaatttcacacctagtt

SEQ ID NO: 3835125 - DNA, 25 bp, Homo sapien
gccaattataggctgtaagatacag

SEQ ID NO: 3835126 - DNA, 25 bp, Homo sapien
cacgggtttcctgccattactggct

SEQ ID NO: 3835127 - DNA, 25 bp, Homo sapien
ttcctgccattactggctgactgcc

SEQ ID NO: 3835128 - DNA, 25 bp, Homo sapien
ggtttcctgccattactggctgact

SEQ ID NO: 3835129 - DNA, 25 bp, Homo sapien
tgccattactggctgactgccctga

SEQ ID NO: 3835130 - DNA, 25 bp, Homo sapien
ccaaagagctcctctatctgagctg

SEQ ID NO: 3835131 - DNA, 25 bp, Homo sapien
gctcctctatctgagctgcctctag

SEQ ID NO: 3835132 - DNA, 25 bp, Homo sapien
tctgcctacatcacagagccctagg

SEQ ID NO: 3835133 - DNA, 25 bp, Homo sapien
cacagagccctagggatgtggaggg

SEQ ID NO: 3835134 - DNA, 25 bp, Homo sapien
agcagcagcaggagcaagggggcgg

SEQ ID NO: 3835135 - DNA, 25 bp, Homo sapien
cagcaggagcaagggggcggcccag

SEQ ID NO: 3835136 - DNA, 25 bp, Homo sapien
cagcagcaggagcaagggggcggcc

SEQ ID NO: 3835137 - DNA, 25 bp, Homo sapien
gcagcaggagcaagggggcggccca

SEQ ID NO: 3835138 - DNA, 25 bp, Homo sapien
ggcttgggactgcagagcttcctct

SEQ ID NO: 3835139 - DNA, 25 bp, Homo sapien
cttgggactgcagagcttcctctcc

SEQ ID NO: 3835140 - DNA, 25 bp, Homo sapien
ggtggcttgggactgcagagcttcc

SEQ ID NO: 3835141 - DNA, 25 bp, Homo sapien
ggggggtggcttgggactgcagagc

SEQ ID NO: 3835142 - DNA, 25 bp, Homo sapien
tctggaggtaatcggtgtagcagac

SEQ ID NO: 3835143 - DNA, 25 bp, Homo sapien
caggtaagggtgagcgtgctggggt

SEQ ID NO: 3835144 - DNA, 25 bp, Homo sapien
ggtaatcggtgtagcagacgaggtc

SEQ ID NO: 3835145 - DNA, 25 bp, Homo sapien
aatcggtgtagcagacgaggtcggg

SEQ ID NO: 3835146 - DNA, 25 bp, Homo sapien
ccagtgttctgtccttgatatagca

SEQ ID NO: 3835147 - DNA, 25 bp, Homo sapien
tgttctgtccttgatatagcaccca

SEQ ID NO: 3835148 - DNA, 25 bp, Homo sapien
tctgtccttgatatagcacccagta

SEQ ID NO: 3835149 - DNA, 25 bp, Homo sapien
ctgaggtccagtgttctgtccttga

SEQ ID NO: 3835150 - DNA, 25 bp, Homo sapien
tggaatacatccatgtggcaggtgt

SEQ ID NO: 3835151 - DNA, 25 bp, Homo sapien
cactgaaaatgtcgtcggccatgaa

SEQ ID NO: 3835152 - DNA, 25 bp, Homo sapien
acactcctgggagtagttgccagac

SEQ ID NO: 3835153 - DNA, 25 bp, Homo sapien
gactggtctgtgatgttgacactga

SEQ ID NO: 3835154 - DNA, 25 bp, Homo sapien
tcacagtcacgttgaaagggggagc

SEQ ID NO: 3835155 - DNA, 25 bp, Homo sapien
ctgagaaggtcacagtcacgttgaa

SEQ ID NO: 3835156 - DNA, 25 bp, Homo sapien
gaaggtcacagtcacgttgaaaggg

SEQ ID NO: 3835157 - DNA, 25 bp, Homo sapien
cacagtcacgttgaaagggggagcc

SEQ ID NO: 3835158 - DNA, 25 bp, Homo sapien
gggtctccccggttcctgtactgca

SEQ ID NO: 3835159 - DNA, 25 bp, Homo sapien
gctcatactgaagcttgcccttcag

SEQ ID NO: 3835160 - DNA, 25 bp, Homo sapien
taatctgagcgccaggagatattat

SEQ ID NO: 3835161 - DNA, 25 bp, Homo sapien
tagaaggcagggtcttcgtaatctg

SEQ ID NO: 3835162 - DNA, 25 bp, Homo sapien
gatgaccgggtcactccattcactc

SEQ ID NO: 3835163 - DNA, 25 bp, Homo sapien
cctgcagctcatagctcgagtcttt

SEQ ID NO: 3835164 - DNA, 25 bp, Homo sapien
tgggtctgaaagatgaccgggtcac

SEQ ID NO: 3835165 - DNA, 25 bp, Homo sapien
atagctcgagtctttgcggaactcc

SEQ ID NO: 3835166 - DNA, 25 bp, Homo sapien
ctccacaatggatgggtcttcaggc

SEQ ID NO: 3835167 - DNA, 25 bp, Homo sapien
gcaggaatgaagactatgacaagca

SEQ ID NO: 3835168 - DNA, 25 bp, Homo sapien
tgaagactatgacaagcaggaggag

SEQ ID NO: 3835169 - DNA, 25 bp, Homo sapien
aatggatgggtcttcaggctccaga

SEQ ID NO: 3835170 - DNA, 25 bp, Homo sapien
gaagaaccgctcagggctggggacg

SEQ ID NO: 3835171 - DNA, 25 bp, Homo sapien
ctggggacggcccatatcttcttcc

SEQ ID NO: 3835172 - DNA, 25 bp, Homo sapien
gggacggcccatatcttcttccata

SEQ ID NO: 3835173 - DNA, 25 bp, Homo sapien
cttgtacaggggcatgaagaaccgc

SEQ ID NO: 3835174 - DNA, 25 bp, Homo sapien
aagaatgactgtctacactttgcac

SEQ ID NO: 3835175 - DNA, 25 bp, Homo sapien
gctcatcacagggtcgggagctcac

SEQ ID NO: 3835176 - DNA, 25 bp, Homo sapien
gagacctggatgctctaggcctgtg

SEQ ID NO: 3835177 - DNA, 25 bp, Homo sapien
ggcagcctctgaacgatcgtcctgc

SEQ ID NO: 3835178 - DNA, 25 bp, Homo sapien
ggtctaggtctacactgtctgactt

SEQ ID NO: 3835179 - DNA, 25 bp, Homo sapien
cagcaggagctcaatcaatggtcta

SEQ ID NO: 3835180 - DNA, 25 bp, Homo sapien
ccaacccagattaaggacacctaag

SEQ ID NO: 3835181 - DNA, 25 bp, Homo sapien
tagcaagtgctatatgagtattggt

SEQ ID NO: 3835182 - DNA, 25 bp, Homo sapien
ccgagttctgggctgtcggccagaa

SEQ ID NO: 3835183 - DNA, 25 bp, Homo sapien
ggcttgggcacaccgtcagactcca

SEQ ID NO: 3835184 - DNA, 25 bp, Homo sapien
tctgctggttcttgtagctccgtga

SEQ ID NO: 3835185 - DNA, 25 bp, Homo sapien
tagctccgtgagctgcagcctcttg

SEQ ID NO: 3835186 - DNA, 25 bp, Homo sapien
tgtcaatggacaccaggccgtatgg

SEQ ID NO: 3835187 - DNA, 25 bp, Homo sapien
tgggtagccgtcatcctcacagctg

SEQ ID NO: 3835188 - DNA, 25 bp, Homo sapien
tgcatccaagagtgggtcctctagg

SEQ ID NO: 3835189 - DNA, 25 bp, Homo sapien
tgtcaaacgtgtccatatccaggcc

SEQ ID NO: 3835190 - DNA, 25 bp, Homo sapien
ccggggctggtgaagtcacactcca

SEQ ID NO: 3835191 - DNA, 25 bp, Homo sapien
cggggctggtgaagtcacactccac

SEQ ID NO: 3835192 - DNA, 25 bp, Homo sapien
acccactggcggaggtagctccggg

SEQ ID NO: 3835193 - DNA, 25 bp, Homo sapien
cacccactggcggaggtagctccgg

SEQ ID NO: 3835194 - DNA, 25 bp, Homo sapien
cactggcggaggtagctccgggggg

SEQ ID NO: 3835195 - DNA, 25 bp, Homo sapien
cccactggcggaggtagctccgggg

SEQ ID NO: 3835196 - DNA, 25 bp, Homo sapien
tccagggctcgaaagtggcggagga

SEQ ID NO: 3835197 - DNA, 25 bp, Homo sapien
gggctcgaaagtggcggaggaatga

SEQ ID NO: 3835198 - DNA, 25 bp, Homo sapien
gggtccagggctcgaaagtggcgga

SEQ ID NO: 3835199 - DNA, 25 bp, Homo sapien
cagggctcgaaagtggcggaggaat

SEQ ID NO: 3835200 - DNA, 25 bp, Homo sapien
caaaaaattgccattcccgaggtca

SEQ ID NO: 3835201 - DNA, 25 bp, Homo sapien
cacatgggtgagctccgtgagtcca

SEQ ID NO: 3835202 - DNA, 25 bp, Homo sapien
tagcacagccagaaggtatcagagt

SEQ ID NO: 3835203 - DNA, 25 bp, Homo sapien
tcgggattcagaccttcgtccaggg

SEQ ID NO: 3835204 - DNA, 25 bp, Homo sapien
gagccatggcctgctacgtaattgg

SEQ ID NO: 3835205 - DNA, 25 bp, Homo sapien
gagctgtttccaagagacgaaacgg

SEQ ID NO: 3835206 - DNA, 25 bp, Homo sapien
acgaaacggactgattttaagcctg

SEQ ID NO: 3835207 - DNA, 25 bp, Homo sapien
tgcccaggctgtcgctgacgattga

SEQ ID NO: 3835208 - DNA, 25 bp, Homo sapien
aatcattgacaaacaacttgacctc

SEQ ID NO: 3835209 - DNA, 25 bp, Homo sapien
cattgacaaacaacttgacctccct

SEQ ID NO: 3835210 - DNA, 25 bp, Homo sapien
gacaaatcattgacaaacaacttga

SEQ ID NO: 3835211 - DNA, 25 bp, Homo sapien
gacaaacaacttgacctcccttcaa

SEQ ID NO: 3835212 - DNA, 25 bp, Homo sapien
aatagagttgctggcctggtataac

SEQ ID NO: 3835213 - DNA, 25 bp, Homo sapien
caaatcaggctttattgagtgccta

SEQ ID NO: 3835214 - DNA, 25 bp, Homo sapien
taatccctcctttcaggtgagccag

SEQ ID NO: 3835215 - DNA, 25 bp, Homo sapien
ttataagctgagttcccttcaaagg

SEQ ID NO: 3835216 - DNA, 25 bp, Homo sapien
agaaatgaagagtccctgtaggttt

SEQ ID NO: 3835217 - DNA, 25 bp, Homo sapien
cagaaatgaagagtccctgtaggtt

SEQ ID NO: 3835218 - DNA, 25 bp, Homo sapien
ccagaaatgaagagtccctgtaggt

SEQ ID NO: 3835219 - DNA, 25 bp, Homo sapien
agctgggctggctgtccgtgtccct

SEQ ID NO: 3835220 - DNA, 25 bp, Homo sapien
ccagctgggctggctgtccgtgtcc

SEQ ID NO: 3835221 - DNA, 25 bp, Homo sapien
tgggctggctgtccgtgtccctcag

SEQ ID NO: 3835222 - DNA, 25 bp, Homo sapien
ctgggctggctgtccgtgtccctca

SEQ ID NO: 3835223 - DNA, 25 bp, Homo sapien
agagcggagcggctcccttttcagc

SEQ ID NO: 3835224 - DNA, 25 bp, Homo sapien
ggagcggctcccttttcagccttgt

SEQ ID NO: 3835225 - DNA, 25 bp, Homo sapien
tgggactgaaccacccagagcggag

SEQ ID NO: 3835226 - DNA, 25 bp, Homo sapien
aggacatcccaacccctggctggga

SEQ ID NO: 3835227 - DNA, 25 bp, Homo sapien
gtcgcccggactggagtgcggcggc

SEQ ID NO: 3835228 - DNA, 25 bp, Homo sapien
cttgtcgcccggactggagtgcggc

SEQ ID NO: 3835229 - DNA, 25 bp, Homo sapien
gtgcggcggcatgatctcagttcac

SEQ ID NO: 3835230 - DNA, 25 bp, Homo sapien
tcttgtcgcccggactggagtgcgg

SEQ ID NO: 3835231 - DNA, 25 bp, Homo sapien
catacttcccctcctgattgcttaa

SEQ ID NO: 3835232 - DNA, 25 bp, Homo sapien
gatagttcttgctcatgtccacagt

SEQ ID NO: 3835233 - DNA, 25 bp, Homo sapien
tcccagtgcccgagccttcagatag

SEQ ID NO: 3835234 - DNA, 25 bp, Homo sapien
gtccacagtcccgaaagtctccttg

SEQ ID NO: 3835235 - DNA, 25 bp, Homo sapien
cgtccatccctagaggcggcggttc

SEQ ID NO: 3835236 - DNA, 25 bp, Homo sapien
gcctcctggattcaaatgattctcc

SEQ ID NO: 3835237 - DNA, 25 bp, Homo sapien
ctggattcaaatgattctcccacct

SEQ ID NO: 3835238 - DNA, 25 bp, Homo sapien
ctcctggattcaaatgattctccca

SEQ ID NO: 3835239 - DNA, 25 bp, Homo sapien
cctggattcaaatgattctcccacc

SEQ ID NO: 3835240 - DNA, 25 bp, Homo sapien
cctatggcagccatataaaaaccag

SEQ ID NO: 3835241 - DNA, 25 bp, Homo sapien
tgcatgcagaaaagaatccaagcct

SEQ ID NO: 3835242 - DNA, 25 bp, Homo sapien
ggatattttggacctctcctccctc

SEQ ID NO: 3835243 - DNA, 25 bp, Homo sapien
tcaacagccacctagtaggtatccc

SEQ ID NO: 3835244 - DNA, 25 bp, Homo sapien
tgacaaagccgcatgggtcacagaa

SEQ ID NO: 3835245 - DNA, 25 bp, Homo sapien
gccgcatgggtcacagaagcaaagc

SEQ ID NO: 3835246 - DNA, 25 bp, Homo sapien
aaagccgcatgggtcacagaagcaa

SEQ ID NO: 3835247 - DNA, 25 bp, Homo sapien
tttgcaatgacaaagccgcatgggt

SEQ ID NO: 3835248 - DNA, 25 bp, Homo sapien
tctctcggcctttcgcagagtctga

SEQ ID NO: 3835249 - DNA, 25 bp, Homo sapien
ctctcggcctttcgcagagtctgac

SEQ ID NO: 3835250 - DNA, 25 bp, Homo sapien
ttctctcggcctttcgcagagtctg

SEQ ID NO: 3835251 - DNA, 25 bp, Homo sapien
tcaaatagagttgcctcccatcagc

SEQ ID NO: 3835252 - DNA, 25 bp, Homo sapien
tatttagggacacttattcgccacc

SEQ ID NO: 3835253 - DNA, 25 bp, Homo sapien
tcaagcttgggaccccaagagaaaa

SEQ ID NO: 3835254 - DNA, 25 bp, Homo sapien
ggttggtaagtctagttgctcacta

SEQ ID NO: 3835255 - DNA, 25 bp, Homo sapien
ggtagcggatttcaagaatggccac

SEQ ID NO: 3835256 - DNA, 25 bp, Homo sapien
tgtttcacttaacctctagtcctgg

SEQ ID NO: 3835257 - DNA, 25 bp, Homo sapien
catactctgagatcaaggactgtgt

SEQ ID NO: 3835258 - DNA, 25 bp, Homo sapien
cttcccatcaagaggtgagatctat

SEQ ID NO: 3835259 - DNA, 25 bp, Homo sapien
gacgctgagtgcagttcagccccag

SEQ ID NO: 3835260 - DNA, 25 bp, Homo sapien
ctcatcctagatgggctgattgaaa

SEQ ID NO: 3835261 - DNA, 25 bp, Homo sapien
gctgagcctgacaaatgccctttca

SEQ ID NO: 3835262 - DNA, 25 bp, Homo sapien
gaaggtcatgtaactcacacgacgc

SEQ ID NO: 3835263 - DNA, 25 bp, Homo sapien
tttgcccctagactgcccacttggg

SEQ ID NO: 3835264 - DNA, 25 bp, Homo sapien
ttgcccctagactgcccacttgggc

SEQ ID NO: 3835265 - DNA, 25 bp, Homo sapien
gcccctagactgcccacttgggcga

SEQ ID NO: 3835266 - DNA, 25 bp, Homo sapien
tgcccctagactgcccacttgggcg

SEQ ID NO: 3835267 - DNA, 25 bp, Homo sapien
aatgatctgaaatgctctcgggcga

SEQ ID NO: 3835268 - DNA, 25 bp, Homo sapien
tcactacaagcacttcccaggagag

SEQ ID NO: 3835269 - DNA, 25 bp, Homo sapien
caaaaggcctgaaaccaagtgaaat

SEQ ID NO: 3835270 - DNA, 25 bp, Homo sapien
gaaatatctttccaggttaagcctg

SEQ ID NO: 3835271 - DNA, 25 bp, Homo sapien
aatttggcctggtgagttcattgac

SEQ ID NO: 3835272 - DNA, 25 bp, Homo sapien
taagatccctcaaagaagtacccga

SEQ ID NO: 3835273 - DNA, 25 bp, Homo sapien
aaaattataacagggtacgagctag

SEQ ID NO: 3835274 - DNA, 25 bp, Homo sapien
aacatatctttgggctgaatttggc

SEQ ID NO: 3835275 - DNA, 25 bp, Homo sapien
tcaaatatccagatgttgctaagta

SEQ ID NO: 3835276 - DNA, 25 bp, Homo sapien
tgctaagtaccgtggttggcaatgt

SEQ ID NO: 3835277 - DNA, 25 bp, Homo sapien
gatgttgctaagtaccgtggttggc

SEQ ID NO: 3835278 - DNA, 25 bp, Homo sapien
cgtggttggcaatgtttaaatgtgg

SEQ ID NO: 3835279 - DNA, 25 bp, Homo sapien
gcaatcttctcgcctcagtctccca

SEQ ID NO: 3835280 - DNA, 25 bp, Homo sapien
tcaagcaatcttctcgcctcagtct

SEQ ID NO: 3835281 - DNA, 25 bp, Homo sapien
ggcgtgagccaccacactcggctac

SEQ ID NO: 3835282 - DNA, 25 bp, Homo sapien
aggcgtgagccaccacactcggcta

SEQ ID NO: 3835283 - DNA, 25 bp, Homo sapien
actagggaactataggagtggtcac

SEQ ID NO: 3835284 - DNA, 25 bp, Homo sapien
gacaagtgaactagggaactatagg

SEQ ID NO: 3835285 - DNA, 25 bp, Homo sapien
ccccacaagacaagtgaactaggga

SEQ ID NO: 3835286 - DNA, 25 bp, Homo sapien
taggagtggtcactgaatgggtcca

SEQ ID NO: 3835287 - DNA, 25 bp, Homo sapien
cctgagtaacttgcaggaacctcct

SEQ ID NO: 3835288 - DNA, 25 bp, Homo sapien
ctgagtaacttgcaggaacctcctc

SEQ ID NO: 3835289 - DNA, 25 bp, Homo sapien
tcctgagtaacttgcaggaacctcc

SEQ ID NO: 3835290 - DNA, 25 bp, Homo sapien
ctggctgtaaaccagtagcaagggc

SEQ ID NO: 3835291 - DNA, 25 bp, Homo sapien
gactggaccatggtaggtgacacaa

SEQ ID NO: 3835292 - DNA, 25 bp, Homo sapien
cactggccagacgtgagtcacggac

SEQ ID NO: 3835293 - DNA, 25 bp, Homo sapien
taagtaaaccgaccaggaatctcag

SEQ ID NO: 3835294 - DNA, 25 bp, Homo sapien
ccagggccgaggtgactttcaagtc

SEQ ID NO: 3835295 - DNA, 25 bp, Homo sapien
aaacaccaagctttattgaactcca

SEQ ID NO: 3835296 - DNA, 25 bp, Homo sapien
gctttggacaggcacggtctcacac

SEQ ID NO: 3835297 - DNA, 25 bp, Homo sapien
ccaagctttattgaactccagtgtc

SEQ ID NO: 3835298 - DNA, 25 bp, Homo sapien
agaatttaaacctagctttggacag

SEQ ID NO: 3835299 - DNA, 25 bp, Homo sapien
ctgatggccccatgggtcttaggca

SEQ ID NO: 3835300 - DNA, 25 bp, Homo sapien
tctgatggccccatgggtcttaggc

SEQ ID NO: 3835301 - DNA, 25 bp, Homo sapien
tgatggccccatgggtcttaggcat

SEQ ID NO: 3835302 - DNA, 25 bp, Homo sapien
tgtctgatggccccatgggtcttag

SEQ ID NO: 3835303 - DNA, 25 bp, Homo sapien
cttgacgaaggcccaacaccccagg

SEQ ID NO: 3835304 - DNA, 25 bp, Homo sapien
acgaaggcccaacaccccaggcgca

SEQ ID NO: 3835305 - DNA, 25 bp, Homo sapien
cgaaggcccaacaccccaggcgcat

SEQ ID NO: 3835306 - DNA, 25 bp, Homo sapien
tgacgaaggcccaacaccccaggcg

SEQ ID NO: 3835307 - DNA, 25 bp, Homo sapien
cggttcctctgctgaagcaatatta

SEQ ID NO: 3835308 - DNA, 25 bp, Homo sapien
tactcatcatgtttctcatcaaagt

SEQ ID NO: 3835309 - DNA, 25 bp, Homo sapien
ggttcctctgctgaagcaatattaa

SEQ ID NO: 3835310 - DNA, 25 bp, Homo sapien
ttcctctgctgaagcaatattaaat

SEQ ID NO: 3835311 - DNA, 25 bp, Homo sapien
agtgtttcctagctgcttaagtcca

SEQ ID NO: 3835312 - DNA, 25 bp, Homo sapien
ctcctgcatagttggggttacaagc

SEQ ID NO: 3835313 - DNA, 25 bp, Homo sapien
catagttggggttacaagcagaagc

SEQ ID NO: 3835314 - DNA, 25 bp, Homo sapien
tcctaagtagtgagtagctagaact

SEQ ID NO: 3835315 - DNA, 25 bp, Homo sapien
agtgctccagcctcaattgcacggg

SEQ ID NO: 3835316 - DNA, 25 bp, Homo sapien
agagaaaccttgctccaagtgctcc

SEQ ID NO: 3835317 - DNA, 25 bp, Homo sapien
gaagtcagagtgaatagctttccgc

SEQ ID NO: 3835318 - DNA, 25 bp, Homo sapien
gatgatttcagctccgaattggcac

SEQ ID NO: 3835319 - DNA, 25 bp, Homo sapien
gggctgtccgtgaactgcgtcttaa

SEQ ID NO: 3835320 - DNA, 25 bp, Homo sapien
catcctcggcgctggactttactgg

SEQ ID NO: 3835321 - DNA, 25 bp, Homo sapien
tggtgccatcctcggcgctggactt

SEQ ID NO: 3835322 - DNA, 25 bp, Homo sapien
cgtgaactgcgtcttaaggcttctt

SEQ ID NO: 3835323 - DNA, 25 bp, Homo sapien
tgggctggggccacagtctccagac

SEQ ID NO: 3835324 - DNA, 25 bp, Homo sapien
ctaaagcgtgggctggggccacagt

SEQ ID NO: 3835325 - DNA, 25 bp, Homo sapien
gcgtgggctggggccacagtctcca

SEQ ID NO: 3835326 - DNA, 25 bp, Homo sapien
taaagcgtgggctggggccacagtc

SEQ ID NO: 3835327 - DNA, 25 bp, Homo sapien
gattgcataaaggagccactgtgcc

SEQ ID NO: 3835328 - DNA, 25 bp, Homo sapien
cacagtgagggtttccgtgtctccc

SEQ ID NO: 3835329 - DNA, 25 bp, Homo sapien
tcagatcctgctaatgccgccattt

SEQ ID NO: 3835330 - DNA, 25 bp, Homo sapien
ccctctatagaggatgcacagtgag

SEQ ID NO: 3835331 - DNA, 25 bp, Homo sapien
ccgattcgccttttgacatcagaag

SEQ ID NO: 3835332 - DNA, 25 bp, Homo sapien
gcattttggtaaacgacggctctgt

SEQ ID NO: 3835333 - DNA, 25 bp, Homo sapien
gctctgttgattaggccgctgtcca

SEQ ID NO: 3835334 - DNA, 25 bp, Homo sapien
gccgatgacgttcatcaaatctgac

SEQ ID NO: 3835335 - DNA, 25 bp, Homo sapien
atctgacagcattttggtaaacgac

SEQ ID NO: 3835336 - DNA, 25 bp, Homo sapien
ccaggctggcaggttccaacccagc

SEQ ID NO: 3835337 - DNA, 25 bp, Homo sapien
ctccagtgagcagcccaggctggca

SEQ ID NO: 3835338 - DNA, 25 bp, Homo sapien
agcccaggctggcaggttccaaccc

SEQ ID NO: 3835339 - DNA, 25 bp, Homo sapien
aggctggcaggttccaacccagccc

SEQ ID NO: 3835340 - DNA, 25 bp, Homo sapien
gctcacccatcaacgctttcacact

SEQ ID NO: 3835341 - DNA, 25 bp, Homo sapien
actctagtagtttggacagaactcc

SEQ ID NO: 3835342 - DNA, 25 bp, Homo sapien
tgatccaagttcacaatgccccgct

SEQ ID NO: 3835343 - DNA, 25 bp, Homo sapien
tcaacgctttcacactacgtgccat

SEQ ID NO: 3835344 - DNA, 25 bp, Homo sapien
tgtcagctgcctgactctactgagg

SEQ ID NO: 3835345 - DNA, 25 bp, Homo sapien
gaggtggccatgtgccccactaaga

SEQ ID NO: 3835346 - DNA, 25 bp, Homo sapien
ctagggatggccacgagatccaggt

SEQ ID NO: 3835347 - DNA, 25 bp, Homo sapien
ccactaagacggtcacattgctggg

SEQ ID NO: 3835348 - DNA, 25 bp, Homo sapien
ctggcacgcaaggttccctaccatg

SEQ ID NO: 3835349 - DNA, 25 bp, Homo sapien
gcacgcaaggttccctaccatgtgg

SEQ ID NO: 3835350 - DNA, 25 bp, Homo sapien
cgcaaggttccctaccatgtggcca

SEQ ID NO: 3835351 - DNA, 25 bp, Homo sapien
aaggttccctaccatgtggccacag

SEQ ID NO: 3835352 - DNA, 25 bp, Homo sapien
tgtttgcctggagagtcacatcccc

SEQ ID NO: 3835353 - DNA, 25 bp, Homo sapien
tccacaggaggttcgatgtggagcc

SEQ ID NO: 3835354 - DNA, 25 bp, Homo sapien
ctgcggacgatcctcagaagtgttg

SEQ ID NO: 3835355 - DNA, 25 bp, Homo sapien
atagtccacaggaggttcgatgtgg

SEQ ID NO: 3835356 - DNA, 25 bp, Homo sapien
ccaggtcactcctaatccatcaggt

SEQ ID NO: 3835357 - DNA, 25 bp, Homo sapien
caggtcactcctaatccatcaggtt

SEQ ID NO: 3835358 - DNA, 25 bp, Homo sapien
ggtcactcctaatccatcaggtttc

SEQ ID NO: 3835359 - DNA, 25 bp, Homo sapien
aggtcactcctaatccatcaggttt

SEQ ID NO: 3835360 - DNA, 25 bp, Homo sapien
ttgaagggtcagaatgtccacatgc

SEQ ID NO: 3835361 - DNA, 25 bp, Homo sapien
catgcattcagaagggagaagttaa

SEQ ID NO: 3835362 - DNA, 25 bp, Homo sapien
catcacatcctgaatagttaagagg

SEQ ID NO: 3835363 - DNA, 25 bp, Homo sapien
gaggatcctttctttgtccacgctg

SEQ ID NO: 3835364 - DNA, 25 bp, Homo sapien
tctgagctgtccagttggtcatccc

SEQ ID NO: 3835365 - DNA, 25 bp, Homo sapien
atgccacaagccagccgtcttttgg

SEQ ID NO: 3835366 - DNA, 25 bp, Homo sapien
ccgtcttttggtctgagctgtccag

SEQ ID NO: 3835367 - DNA, 25 bp, Homo sapien
caagccagccgtcttttggtctgag

SEQ ID NO: 3835368 - DNA, 25 bp, Homo sapien
tgccttgaggccactaaacatgttc

SEQ ID NO: 3835369 - DNA, 25 bp, Homo sapien
tctccagagagggatgaaagtcagg

SEQ ID NO: 3835370 - DNA, 25 bp, Homo sapien
agctgggtctaagttctgggcctca

SEQ ID NO: 3835371 - DNA, 25 bp, Homo sapien
caaaattgataaacctgcccgtaag

SEQ ID NO: 3835372 - DNA, 25 bp, Homo sapien
atttcatttcaacctcctaacacgc

SEQ ID NO: 3835373 - DNA, 25 bp, Homo sapien
cctggaggacttaagtacaagttca

SEQ ID NO: 3835374 - DNA, 25 bp, Homo sapien
aacacgccagtgcagtaggtctcct

SEQ ID NO: 3835375 - DNA, 25 bp, Homo sapien
taggtctcctcatcttacaggcctg

SEQ ID NO: 3835376 - DNA, 25 bp, Homo sapien
gtggctcatgcctgtaatctcggca

SEQ ID NO: 3835377 - DNA, 25 bp, Homo sapien
agcggaggtgggaagattgcttgag

SEQ ID NO: 3835378 - DNA, 25 bp, Homo sapien
ctcggcactttgggaagcggaggtg

SEQ ID NO: 3835379 - DNA, 25 bp, Homo sapien
gccatgattgtatttgcaaaatata

SEQ ID NO: 3835380 - DNA, 25 bp, Homo sapien
tgtagatttacactaagttccaggc

SEQ ID NO: 3835381 - DNA, 25 bp, Homo sapien
gagtcatactcatcgctggaacaat

SEQ ID NO: 3835382 - DNA, 25 bp, Homo sapien
ctcaggctcagagagtatgtcttcc

SEQ ID NO: 3835383 - DNA, 25 bp, Homo sapien
tctttctgagtccagtcgccactgg

SEQ ID NO: 3835384 - DNA, 25 bp, Homo sapien
ctctcctggtctgggaatacagcag

SEQ ID NO: 3835385 - DNA, 25 bp, Homo sapien
cagcattgtccttccgctttgcaga

SEQ ID NO: 3835386 - DNA, 25 bp, Homo sapien
gctttgcagacaaattcctttccct

SEQ ID NO: 3835387 - DNA, 25 bp, Homo sapien
tcctggtctgggaatacagcaggag

SEQ ID NO: 3835388 - DNA, 25 bp, Homo sapien
tcagctgccacttgcacgttgtgtg

SEQ ID NO: 3835389 - DNA, 25 bp, Homo sapien
tcattagaacatagacaaagctggt

SEQ ID NO: 3835390 - DNA, 25 bp, Homo sapien
gggacaattgcagaacctaccttaa

SEQ ID NO: 3835391 - DNA, 25 bp, Homo sapien
aaaagcttacgatagtggctgggtc

SEQ ID NO: 3835392 - DNA, 25 bp, Homo sapien
tacaagcaaaaggttacacttctgg

SEQ ID NO: 3835393 - DNA, 25 bp, Homo sapien
aagagatcgtttgaaggcatggaga

SEQ ID NO: 3835394 - DNA, 25 bp, Homo sapien
tgctggaacacaactaggaaaccta

SEQ ID NO: 3835395 - DNA, 25 bp, Homo sapien
taattcagaccaacctcttgctgga

SEQ ID NO: 3835396 - DNA, 25 bp, Homo sapien
ttttgggacttttcttgatggcagg

SEQ ID NO: 3835397 - DNA, 25 bp, Homo sapien
ttgttaaggcctgtgttcttctcat

SEQ ID NO: 3835398 - DNA, 25 bp, Homo sapien
gcttgttaaggcctgtgttcttctc

SEQ ID NO: 3835399 - DNA, 25 bp, Homo sapien
catctctaaagctgcttttgggact

SEQ ID NO: 3835400 - DNA, 25 bp, Homo sapien
tcattcaccatttcccgcatgaagc

SEQ ID NO: 3835401 - DNA, 25 bp, Homo sapien
ttggtagaaggcttgggcagcacca

SEQ ID NO: 3835402 - DNA, 25 bp, Homo sapien
catttcccgcatgaagcacttataa

SEQ ID NO: 3835403 - DNA, 25 bp, Homo sapien
gggtgcaaacaccagcattggtaga

SEQ ID NO: 3835404 - DNA, 25 bp, Homo sapien
cttactcagtgcaaaaaggatcagg

SEQ ID NO: 3835405 - DNA, 25 bp, Homo sapien
ttactcagtgcaaaaaggatcaggt

SEQ ID NO: 3835406 - DNA, 25 bp, Homo sapien
tactcagtgcaaaaaggatcaggtc

SEQ ID NO: 3835407 - DNA, 25 bp, Homo sapien
cctttctgctgaggagcgccctctg

SEQ ID NO: 3835408 - DNA, 25 bp, Homo sapien
gcaaagagttttgcgggttgcagac

SEQ ID NO: 3835409 - DNA, 25 bp, Homo sapien
gggtctctctcgccggcttccaggt

SEQ ID NO: 3835410 - DNA, 25 bp, Homo sapien
ttcctctgggtactcagcctcgcaa

SEQ ID NO: 3835411 - DNA, 25 bp, Homo sapien
gggaccttctcaagctaccatagat

SEQ ID NO: 3835412 - DNA, 25 bp, Homo sapien
gctaccatagatataaagttcaggg

SEQ ID NO: 3835413 - DNA, 25 bp, Homo sapien
gcagggaccttctcaagctaccata

SEQ ID NO: 3835414 - DNA, 25 bp, Homo sapien
ggaccttctcaagctaccatagata

SEQ ID NO: 3835415 - DNA, 25 bp, Homo sapien
tggaaggatgtgatcacatgatgtg

SEQ ID NO: 3835416 - DNA, 25 bp, Homo sapien
aaggatgtgatcacatgatgtgatg

SEQ ID NO: 3835417 - DNA, 25 bp, Homo sapien
ggaaggatgtgatcacatgatgtga

SEQ ID NO: 3835418 - DNA, 25 bp, Homo sapien
ttctcctccagcagactggtccatg

SEQ ID NO: 3835419 - DNA, 25 bp, Homo sapien
cagactggtccatggttttgctggt

SEQ ID NO: 3835420 - DNA, 25 bp, Homo sapien
agactggtccatggttttgctggtg

SEQ ID NO: 3835421 - DNA, 25 bp, Homo sapien
tggtccatggttttgctggtggtcc

SEQ ID NO: 3835422 - DNA, 25 bp, Homo sapien
cctgagtagtagtcgccgtggtgat

SEQ ID NO: 3835423 - DNA, 25 bp, Homo sapien
ccggctcctgagtagtagtcgccgt

SEQ ID NO: 3835424 - DNA, 25 bp, Homo sapien
gctcctgagtagtagtcgccgtggt

SEQ ID NO: 3835425 - DNA, 25 bp, Homo sapien
cccggccggctcctgagtagtagtc

SEQ ID NO: 3835426 - DNA, 25 bp, Homo sapien
gagtcactttcgacggcctggagga

SEQ ID NO: 3835427 - DNA, 25 bp, Homo sapien
gaggactttcagaagcttctgctgt

SEQ ID NO: 3835428 - DNA, 25 bp, Homo sapien
ggtgaaaccaccctgccgagatggg

SEQ ID NO: 3835429 - DNA, 25 bp, Homo sapien
gatacttgctccttggttggtgaaa

SEQ ID NO: 3835430 - DNA, 25 bp, Homo sapien
acaatctctcaatgatggtgccaga

SEQ ID NO: 3835431 - DNA, 25 bp, Homo sapien
caaagctggaactctagtccaggcc

SEQ ID NO: 3835432 - DNA, 25 bp, Homo sapien
tattgaccctatctgagagccagga

SEQ ID NO: 3835433 - DNA, 25 bp, Homo sapien
gagccaggaccagacagcttaagag

SEQ ID NO: 3835434 - DNA, 25 bp, Homo sapien
aagctcggaggattcctcgaggcca

SEQ ID NO: 3835435 - DNA, 25 bp, Homo sapien
agctcggaggattcctcgaggccag

SEQ ID NO: 3835436 - DNA, 25 bp, Homo sapien
caagctcggaggattcctcgaggcc

SEQ ID NO: 3835437 - DNA, 25 bp, Homo sapien
cacgagttgccccagttggacagga

SEQ ID NO: 3835438 - DNA, 25 bp, Homo sapien
aaagaactcgacttctgtgagaccc

SEQ ID NO: 3835439 - DNA, 25 bp, Homo sapien
taagttcctgttgacgaggcggccc

SEQ ID NO: 3835440 - DNA, 25 bp, Homo sapien
gacaggatctccatggtcacgtaga

SEQ ID NO: 3835441 - DNA, 25 bp, Homo sapien
gccaatgtgttaatcctctcaaaga

SEQ ID NO: 3835442 - DNA, 25 bp, Homo sapien
actggggatatagtgtaaacaggac

SEQ ID NO: 3835443 - DNA, 25 bp, Homo sapien
attttacaaattcctgtgagtctat

SEQ ID NO: 3835444 - DNA, 25 bp, Homo sapien
caggcctcctccagattgttgggtg

SEQ ID NO: 3835445 - DNA, 25 bp, Homo sapien
gttaagtatctttaatgtgctcatt

SEQ ID NO: 3835446 - DNA, 25 bp, Homo sapien
gatgttaagtatctttaatgtgctc

SEQ ID NO: 3835447 - DNA, 25 bp, Homo sapien
gtatctttaatgtgctcattagcca

SEQ ID NO: 3835448 - DNA, 25 bp, Homo sapien
agtctgacttatccgttttttcttg

SEQ ID NO: 3835449 - DNA, 25 bp, Homo sapien
ttgagtctgcagtccttgtttaggg

SEQ ID NO: 3835450 - DNA, 25 bp, Homo sapien
ctggcccctgtaggcattgagtctg

SEQ ID NO: 3835451 - DNA, 25 bp, Homo sapien
gacactggctgagttgtccctttta

SEQ ID NO: 3835452 - DNA, 25 bp, Homo sapien
agcaacctctgcaggcctgacactg

SEQ ID NO: 3835453 - DNA, 25 bp, Homo sapien
gagaaggaaatcattaggcacattt

SEQ ID NO: 3835454 - DNA, 25 bp, Homo sapien
ctagaaggccagcaagagaaggaaa

SEQ ID NO: 3835455 - DNA, 25 bp, Homo sapien
gaaggccagcaagagaaggaaatca

SEQ ID NO: 3835456 - DNA, 25 bp, Homo sapien
ggaaatcattaggcacatttctgcc

SEQ ID NO: 3835457 - DNA, 25 bp, Homo sapien
catcagctgtccagtaattccgaac

SEQ ID NO: 3835458 - DNA, 25 bp, Homo sapien
atcttggccagatggaagtccccca

SEQ ID NO: 3835459 - DNA, 25 bp, Homo sapien
caggtccacggggaggagtctttct

SEQ ID NO: 3835460 - DNA, 25 bp, Homo sapien
cccagctgtcttgtgtttcgaataa

SEQ ID NO: 3835461 - DNA, 25 bp, Homo sapien
ccattgcccattccagaagagggtg

SEQ ID NO: 3835462 - DNA, 25 bp, Homo sapien
cattgcccattccagaagagggtga

SEQ ID NO: 3835463 - DNA, 25 bp, Homo sapien
gtgtggaaagacctcggctctcaaa

SEQ ID NO: 3835464 - DNA, 25 bp, Homo sapien
cggtgccctggcaggaaccgcagtc

SEQ ID NO: 3835465 - DNA, 25 bp, Homo sapien
cagattgggtttgtgttacataagc

SEQ ID NO: 3835466 - DNA, 25 bp, Homo sapien
cctgggtgtggaaagacctcggctc

SEQ ID NO: 3835467 - DNA, 25 bp, Homo sapien
tgcgcttttctgctcctggtaaatt

SEQ ID NO: 3835468 - DNA, 25 bp, Homo sapien
tgtttgcgcttttctgctcctggta

SEQ ID NO: 3835469 - DNA, 25 bp, Homo sapien
tttgcgcttttctgctcctggtaaa

SEQ ID NO: 3835470 - DNA, 25 bp, Homo sapien
atttgtttgcgcttttctgctcctg

SEQ ID NO: 3835471 - DNA, 25 bp, Homo sapien
taaattcctcaatcaggaccgggcg

SEQ ID NO: 3835472 - DNA, 25 bp, Homo sapien
taaagtgcaccccaagagcactgac

SEQ ID NO: 3835473 - DNA, 25 bp, Homo sapien
gaagcaggtgatggatacacgcctc

SEQ ID NO: 3835474 - DNA, 25 bp, Homo sapien
gggatacgtgaaacaacaatagcag

SEQ ID NO: 3835475 - DNA, 25 bp, Homo sapien
ggagttctggtttcattgggaagtg

SEQ ID NO: 3835476 - DNA, 25 bp, Homo sapien
tcattgggaagtgaccttcattcat

SEQ ID NO: 3835477 - DNA, 25 bp, Homo sapien
gtttcattgggaagtgaccttcatt

SEQ ID NO: 3835478 - DNA, 25 bp, Homo sapien
agggagttctggtttcattgggaag

SEQ ID NO: 3835479 - DNA, 25 bp, Homo sapien
tctttacagttggtgagaatcaact

SEQ ID NO: 3835480 - DNA, 25 bp, Homo sapien
aacacctttcctggcccacattttg

SEQ ID NO: 3835481 - DNA, 25 bp, Homo sapien
atgctgcctcaaacaccctttgcaa

SEQ ID NO: 3835482 - DNA, 25 bp, Homo sapien
gaaactctgtggctggtttgtagtt

SEQ ID NO: 3835483 - DNA, 25 bp, Homo sapien
cagaggtgccagaaacgctgtctct

SEQ ID NO: 3835484 - DNA, 25 bp, Homo sapien
tgcagaggtgccagaaacgctgtct

SEQ ID NO: 3835485 - DNA, 25 bp, Homo sapien
aatttgagaccgctctgcagaggtg

SEQ ID NO: 3835486 - DNA, 25 bp, Homo sapien
aggaatttgagaccgctctgcagag

SEQ ID NO: 3835487 - DNA, 25 bp, Homo sapien
ccggatgatttcttcacacgacggg

SEQ ID NO: 3835488 - DNA, 25 bp, Homo sapien
gaccactgcctcaaggcagcctgta

SEQ ID NO: 3835489 - DNA, 25 bp, Homo sapien
gactcagaacaagttctccggatga

SEQ ID NO: 3835490 - DNA, 25 bp, Homo sapien
agcctgtaggtaacttctggactca

SEQ ID NO: 3835491 - DNA, 25 bp, Homo sapien
tgtccacatgcggggactgtcccat

SEQ ID NO: 3835492 - DNA, 25 bp, Homo sapien
cactgtccacatgcggggactgtcc

SEQ ID NO: 3835493 - DNA, 25 bp, Homo sapien
tgaggcagggcactgtccacatgcg

SEQ ID NO: 3835494 - DNA, 25 bp, Homo sapien
ctgaggcagggcactgtccacatgc

SEQ ID NO: 3835495 - DNA, 25 bp, Homo sapien
tgggagtcttctgcttaaatgcatg

SEQ ID NO: 3835496 - DNA, 25 bp, Homo sapien
caagactgggacatttatccactgc

SEQ ID NO: 3835497 - DNA, 25 bp, Homo sapien
atgccccaacacatgcacgagctga

SEQ ID NO: 3835498 - DNA, 25 bp, Homo sapien
gagtgtgctcccacggcagagcacc

SEQ ID NO: 3835499 - DNA, 25 bp, Homo sapien
gaagaaagctttgcatccgctaatg

SEQ ID NO: 3835500 - DNA, 25 bp, Homo sapien
ttccgagtgagcgttcatggcctcc

SEQ ID NO: 3835501 - DNA, 25 bp, Homo sapien
ctaatgtttcagctggcggtgagca

SEQ ID NO: 3835502 - DNA, 25 bp, Homo sapien
tgagcaaccgagaccaagctccttg

SEQ ID NO: 3835503 - DNA, 25 bp, Homo sapien
tccttggtgttgacactccggctgg

SEQ ID NO: 3835504 - DNA, 25 bp, Homo sapien
tgacatcgtctgatgggagcctgcc

SEQ ID NO: 3835505 - DNA, 25 bp, Homo sapien
actgtggactttggtggttgccctc

SEQ ID NO: 3835506 - DNA, 25 bp, Homo sapien
cccgggtggctcacagatttttctg

SEQ ID NO: 3835507 - DNA, 25 bp, Homo sapien
tccggtcccctgtgatgagtggcta

SEQ ID NO: 3835508 - DNA, 25 bp, Homo sapien
tgggcatagtcactccagggctgtg

SEQ ID NO: 3835509 - DNA, 25 bp, Homo sapien
gagtggacacctgacccaagtagac

SEQ ID NO: 3835510 - DNA, 25 bp, Homo sapien
ccagaagaaatagaaagaagcgtcc

SEQ ID NO: 3835511 - DNA, 25 bp, Homo sapien
tcactgcgccaccttgaccgtgacg

SEQ ID NO: 3835512 - DNA, 25 bp, Homo sapien
gtgacggcgtcctggaagaccaggt

SEQ ID NO: 3835513 - DNA, 25 bp, Homo sapien
tgcgccaccttgaccgtgacggcgt

SEQ ID NO: 3835514 - DNA, 25 bp, Homo sapien
actgcgccaccttgaccgtgacggc

SEQ ID NO: 3835515 - DNA, 25 bp, Homo sapien
caaattctgatcagggcaacgtggc

SEQ ID NO: 3835516 - DNA, 25 bp, Homo sapien
tatttctattccgttgaggccgaca

SEQ ID NO: 3835517 - DNA, 25 bp, Homo sapien
aaatattgatatcgggagggtctgc

SEQ ID NO: 3835518 - DNA, 25 bp, Homo sapien
tgtgatgtccttcacgcctcggaag

SEQ ID NO: 3835519 - DNA, 25 bp, Homo sapien
tggttccaatgactgcctggtaggt

SEQ ID NO: 3835520 - DNA, 25 bp, Homo sapien
gatttgcaaatggaatgcacggacc

SEQ ID NO: 3835521 - DNA, 25 bp, Homo sapien
tatgcaagacgctgttggtacccca

SEQ ID NO: 3835522 - DNA, 25 bp, Homo sapien
gcatcacatggatctaaggaaggga

SEQ ID NO: 3835523 - DNA, 25 bp, Homo sapien
agcctgggtgaagggccgctcatcc

SEQ ID NO: 3835524 - DNA, 25 bp, Homo sapien
cggttgtgaataagatcgtgtctcc

SEQ ID NO: 3835525 - DNA, 25 bp, Homo sapien
cgagaatgtcatcatcggttgtgaa

SEQ ID NO: 3835526 - DNA, 25 bp, Homo sapien
catcagaatagaatatggcctcgag

SEQ ID NO: 3835527 - DNA, 25 bp, Homo sapien
gagcacctttgtcatttggaaaacg

SEQ ID NO: 3835528 - DNA, 25 bp, Homo sapien
ctggatgggagctctagctccggga

SEQ ID NO: 3835529 - DNA, 25 bp, Homo sapien
tggatgggagctctagctccgggat

SEQ ID NO: 3835530 - DNA, 25 bp, Homo sapien
ggtagatgcctggctctggcgtggt

SEQ ID NO: 3835531 - DNA, 25 bp, Homo sapien
ctctggcgtggtgacttgggggaca

SEQ ID NO: 3835532 - DNA, 25 bp, Homo sapien
tgtctgggagatgaaaccaagcctc

SEQ ID NO: 3835533 - DNA, 25 bp, Homo sapien
caggcttctgatgtgaggtgctctc

SEQ ID NO: 3835534 - DNA, 25 bp, Homo sapien
gaaagtaattgagagtgcgccctgg

SEQ ID NO: 3835535 - DNA, 25 bp, Homo sapien
ttttgggacctcacagcttcatggg

SEQ ID NO: 3835536 - DNA, 25 bp, Homo sapien
cccactaagacggaagttccctgag

SEQ ID NO: 3835537 - DNA, 25 bp, Homo sapien
gcttcctgacaatcgagtctacatt

SEQ ID NO: 3835538 - DNA, 25 bp, Homo sapien
agaggccttccctaataaccagagc

SEQ ID NO: 3835539 - DNA, 25 bp, Homo sapien
gcttgttcggcagcaaaagctagct

SEQ ID NO: 3835540 - DNA, 25 bp, Homo sapien
tactcggggagctcatttaagtctc

SEQ ID NO: 3835541 - DNA, 25 bp, Homo sapien
gtcgtcagagtactcggggagctca

SEQ ID NO: 3835542 - DNA, 25 bp, Homo sapien
gagtactcggggagctcatttaagt

SEQ ID NO: 3835543 - DNA, 25 bp, Homo sapien
ggcccgggagtcgtcagagtactcg

SEQ ID NO: 3835544 - DNA, 25 bp, Homo sapien
aaggatccataagccgcactgtgcg

SEQ ID NO: 3835545 - DNA, 25 bp, Homo sapien
ccacatcggtatagtagggctcata

SEQ ID NO: 3835546 - DNA, 25 bp, Homo sapien
tcagggccaccttatagaaaagcag

SEQ ID NO: 3835547 - DNA, 25 bp, Homo sapien
gacatgccatgggaatgactcctca

SEQ ID NO: 3835548 - DNA, 25 bp, Homo sapien
agaccttatctggatctcaaatcaa

SEQ ID NO: 3835549 - DNA, 25 bp, Homo sapien
cacatagaccttatctggatctcaa

SEQ ID NO: 3835550 - DNA, 25 bp, Homo sapien
caacacatagaccttatctggatct

SEQ ID NO: 3835551 - DNA, 25 bp, Homo sapien
cacaacacatagaccttatctggat

SEQ ID NO: 3835552 - DNA, 25 bp, Homo sapien
tgctttcggccctgtccaggcggat

SEQ ID NO: 3835553 - DNA, 25 bp, Homo sapien
ggtgtcctcgggagatttattgtag

SEQ ID NO: 3835554 - DNA, 25 bp, Homo sapien
gaagcgcaggcctgcgatgctttcg

SEQ ID NO: 3835555 - DNA, 25 bp, Homo sapien
ggatcgtgaccacatggtccagccc

SEQ ID NO: 3835556 - DNA, 25 bp, Homo sapien
tggccccttccggatgagaaagccc

SEQ ID NO: 3835557 - DNA, 25 bp, Homo sapien
gcagctgagcccgtaggtagtccac

SEQ ID NO: 3835558 - DNA, 25 bp, Homo sapien
ggtagtccacgaagaggatttcttg

SEQ ID NO: 3835559 - DNA, 25 bp, Homo sapien
tcaaagtggcagttgcctggcccct

SEQ ID NO: 3835560 - DNA, 25 bp, Homo sapien
atcagcggtgcctcgtagtccatgc

SEQ ID NO: 3835561 - DNA, 25 bp, Homo sapien
agggcatcagcggtgcctcgtagtc

SEQ ID NO: 3835562 - DNA, 25 bp, Homo sapien
tcgtagtccatgcttgcacactcca

SEQ ID NO: 3835563 - DNA, 25 bp, Homo sapien
gtgcctcgtagtccatgcttgcaca

SEQ ID NO: 3835564 - DNA, 25 bp, Homo sapien
ggggattttttctcctcgctcgtca

SEQ ID NO: 3835565 - DNA, 25 bp, Homo sapien
tcctcgctcgtcatacagctccagg

SEQ ID NO: 3835566 - DNA, 25 bp, Homo sapien
cagctggtgagaagctgaaactgga

SEQ ID NO: 3835567 - DNA, 25 bp, Homo sapien
ggccggtgaggccgatgtagtaggg

SEQ ID NO: 3835568 - DNA, 25 bp, Homo sapien
gctcccttcagtctgggtggagccc

SEQ ID NO: 3835569 - DNA, 25 bp, Homo sapien
ctttgggcagccgcagcagtgacag

SEQ ID NO: 3835570 - DNA, 25 bp, Homo sapien
cataacccaaatctgtgtgctcggg

SEQ ID NO: 3835571 - DNA, 25 bp, Homo sapien
gccaccctcaggctgatggcgtggc

SEQ ID NO: 3835572 - DNA, 25 bp, Homo sapien
ctgaggagacgtctaagttgccata

SEQ ID NO: 3835573 - DNA, 25 bp, Homo sapien
taagttgccataacccaaatctgtg

SEQ ID NO: 3835574 - DNA, 25 bp, Homo sapien
cacttggtcgatgagcttgtctggg

SEQ ID NO: 3835575 - DNA, 25 bp, Homo sapien
cgttcacttggtcgatgagcttgtc

SEQ ID NO: 3835576 - DNA, 25 bp, Homo sapien
cactggtgtcgttcacttggtcgat

SEQ ID NO: 3835577 - DNA, 25 bp, Homo sapien
gccacatgtgccggccatcactggt

SEQ ID NO: 3835578 - DNA, 25 bp, Homo sapien
gggtgttttcgcataattccacagt

SEQ ID NO: 3835579 - DNA, 25 bp, Homo sapien
tcgaaaatcacataaacccggttca

SEQ ID NO: 3835580 - DNA, 25 bp, Homo sapien
ccacagtttgatcattgacacggtg

SEQ ID NO: 3835581 - DNA, 25 bp, Homo sapien
cacggtggtaggcagatcgaaaatc

SEQ ID NO: 3835582 - DNA, 25 bp, Homo sapien
acacaagcaggtcgtccaccaggag

SEQ ID NO: 3835583 - DNA, 25 bp, Homo sapien
ggccaggatcccattgtacacaagc

SEQ ID NO: 3835584 - DNA, 25 bp, Homo sapien
cattgtacacaagcaggtcgtccac

SEQ ID NO: 3835585 - DNA, 25 bp, Homo sapien
caggatcccattgtacacaagcagg

SEQ ID NO: 3835586 - DNA, 25 bp, Homo sapien
ccctgtcctcggtgaagaggatggt

SEQ ID NO: 3835587 - DNA, 25 bp, Homo sapien
ggcggatgtccctgtcctcggtgaa

SEQ ID NO: 3835588 - DNA, 25 bp, Homo sapien
tgtgtttctcctggtggcggatgtc

SEQ ID NO: 3835589 - DNA, 25 bp, Homo sapien
tcctggtggcggatgtccctgtcct

SEQ ID NO: 3835590 - DNA, 25 bp, Homo sapien
ggacatcttgatcctcggcctgatt

SEQ ID NO: 3835591 - DNA, 25 bp, Homo sapien
gggtcaacaacgctctgcttccgtt

SEQ ID NO: 3835592 - DNA, 25 bp, Homo sapien
tcatctggacatcttgatcctcggc

SEQ ID NO: 3835593 - DNA, 25 bp, Homo sapien
tcgcgttggtaatgatttggttttc

SEQ ID NO: 3835594 - DNA, 25 bp, Homo sapien
tccttctcgctgatgcaggttttgg

SEQ ID NO: 3835595 - DNA, 25 bp, Homo sapien
gtcgtctcgtctccttctcgctgat

SEQ ID NO: 3835596 - DNA, 25 bp, Homo sapien
agcagcgccgtcgtctcgtctcctt

SEQ ID NO: 3835597 - DNA, 25 bp, Homo sapien
tcgtctccttctcgctgatgcaggt

SEQ ID NO: 3835598 - DNA, 25 bp, Homo sapien
ccaccatagtgggaggaccagctct

SEQ ID NO: 3835599 - DNA, 25 bp, Homo sapien
ctgggcgccagaaaaacaacggatt

SEQ ID NO: 3835600 - DNA, 25 bp, Homo sapien
aaggcacatttccaactcgctggga

SEQ ID NO: 3835601 - DNA, 25 bp, Homo sapien
gagaggcccctataccgggatgaga

SEQ ID NO: 3835602 - DNA, 25 bp, Homo sapien
gaagccacaagctgccaacactcac

SEQ ID NO: 3835603 - DNA, 25 bp, Homo sapien
tattgccggtgcctgaactgcagtg

SEQ ID NO: 3835604 - DNA, 25 bp, Homo sapien
gctgccagtgctattgccggtgcct

SEQ ID NO: 3835605 - DNA, 25 bp, Homo sapien
cagtgtgaccctcctcaactgagcc

SEQ ID NO: 3835606 - DNA, 25 bp, Homo sapien
tgagtgtgggggctgccgcctccag

SEQ ID NO: 3835607 - DNA, 25 bp, Homo sapien
ctgatggtcgtcctgtctctgccca

SEQ ID NO: 3835608 - DNA, 25 bp, Homo sapien
cctgatggtcgtcctgtctctgccc

SEQ ID NO: 3835609 - DNA, 25 bp, Homo sapien
acctgatggtcgtcctgtctctgcc

SEQ ID NO: 3835610 - DNA, 25 bp, Homo sapien
tcaccctggtaattgctccttgggc

SEQ ID NO: 3835611 - DNA, 25 bp, Homo sapien
accctggtaattgctccttgggcca

SEQ ID NO: 3835612 - DNA, 25 bp, Homo sapien
tccttgggccacatgtagtcttgga

SEQ ID NO: 3835613 - DNA, 25 bp, Homo sapien
catgtagtcttggactgacattgag

SEQ ID NO: 3835614 - DNA, 25 bp, Homo sapien
tcatggagattcatctgcggcagcc

SEQ ID NO: 3835615 - DNA, 25 bp, Homo sapien
catggagattcatctgcggcagcca

SEQ ID NO: 3835616 - DNA, 25 bp, Homo sapien
ggagattcatctgcggcagccaggc

SEQ ID NO: 3835617 - DNA, 25 bp, Homo sapien
tggagattcatctgcggcagccagg

SEQ ID NO: 3835618 - DNA, 25 bp, Homo sapien
ctttccatgcaccaaatatttgctt

SEQ ID NO: 3835619 - DNA, 25 bp, Homo sapien
tacattgcctgcttgggcccacaag

SEQ ID NO: 3835620 - DNA, 25 bp, Homo sapien
agattcccaatctacagcacaaggc

SEQ ID NO: 3835621 - DNA, 25 bp, Homo sapien
tgcttgggcccacaagacattttga

SEQ ID NO: 3835622 - DNA, 25 bp, Homo sapien
aagacattttgagttgagattccca

SEQ ID NO: 3835623 - DNA, 25 bp, Homo sapien
ggaggcgatgttgccatatggccca

SEQ ID NO: 3835624 - DNA, 25 bp, Homo sapien
cagacgtgacatttgatggaggcga

SEQ ID NO: 3835625 - DNA, 25 bp, Homo sapien
tgggctccacgagaggctgtcgcat

SEQ ID NO: 3835626 - DNA, 25 bp, Homo sapien
cagttgattgcagctgtcaagttca

SEQ ID NO: 3835627 - DNA, 25 bp, Homo sapien
ttcatgtctgtgctagcttggaggg

SEQ ID NO: 3835628 - DNA, 25 bp, Homo sapien
gaaaccaggggatggatgtgtttgg

SEQ ID NO: 3835629 - DNA, 25 bp, Homo sapien
tcatgtctgtgctagcttggagggc

SEQ ID NO: 3835630 - DNA, 25 bp, Homo sapien
tcagaaaccaggggatggatgtgtt

SEQ ID NO: 3835631 - DNA, 25 bp, Homo sapien
tttgcacgccatcacccagtgttgg

SEQ ID NO: 3835632 - DNA, 25 bp, Homo sapien
catgtgatcggatcgtcagccagca

SEQ ID NO: 3835633 - DNA, 25 bp, Homo sapien
gcaccgtggagattcagagccttca

SEQ ID NO: 3835634 - DNA, 25 bp, Homo sapien
cattcttgagaggaacgcgatgccc

SEQ ID NO: 3835635 - DNA, 25 bp, Homo sapien
cagactgaacataagtgtcgctgta

SEQ ID NO: 3835636 - DNA, 25 bp, Homo sapien
agactgaacataagtgtcgctgtat

SEQ ID NO: 3835637 - DNA, 25 bp, Homo sapien
gcagtaagctatgatcgcaccattg

SEQ ID NO: 3835638 - DNA, 25 bp, Homo sapien
cttcagcctgggcaacagagcgaat

SEQ ID NO: 3835639 - DNA, 25 bp, Homo sapien
agtaagctatgatcgcaccattgca

SEQ ID NO: 3835640 - DNA, 25 bp, Homo sapien
tcagcctgggcaacagagcgaatcc

SEQ ID NO: 3835641 - DNA, 25 bp, Homo sapien
ggtaaagtgagagggacactcaagc

SEQ ID NO: 3835642 - DNA, 25 bp, Homo sapien
gggtaaagtgagagggacactcaag

SEQ ID NO: 3835643 - DNA, 25 bp, Homo sapien
gtaaagtgagagggacactcaagcc

SEQ ID NO: 3835644 - DNA, 25 bp, Homo sapien
catttctctgttgaggtgtacacat

SEQ ID NO: 3835645 - DNA, 25 bp, Homo sapien
acagcccgaatttccgcctcatggg

SEQ ID NO: 3835646 - DNA, 25 bp, Homo sapien
catgggggtctcttgaattgtattc

SEQ ID NO: 3835647 - DNA, 25 bp, Homo sapien
tctgttgaggtgtacacatcacccc

SEQ ID NO: 3835648 - DNA, 25 bp, Homo sapien
tcgcagagccagacactatcatggg

SEQ ID NO: 3835649 - DNA, 25 bp, Homo sapien
gagctcttagcactcgccggaggat

SEQ ID NO: 3835650 - DNA, 25 bp, Homo sapien
tatggcctaggtcccaatcttgaag

SEQ ID NO: 3835651 - DNA, 25 bp, Homo sapien
tccaaatgggataaggcagacagtg

SEQ ID NO: 3835652 - DNA, 25 bp, Homo sapien
tgagacgcatgagatgccctgggct

SEQ ID NO: 3835653 - DNA, 25 bp, Homo sapien
taacagatgagaagagctgacggtc

SEQ ID NO: 3835654 - DNA, 25 bp, Homo sapien
tcctgctcaaggaatgtaacagatg

SEQ ID NO: 3835655 - DNA, 25 bp, Homo sapien
gctgacggtctttggcagggactct

SEQ ID NO: 3835656 - DNA, 25 bp, Homo sapien
gcatgtcaaccttccataggggtca

SEQ ID NO: 3835657 - DNA, 25 bp, Homo sapien
atgtcaaccttccataggggtcatg

SEQ ID NO: 3835658 - DNA, 25 bp, Homo sapien
tgcatgtcaaccttccataggggtc

SEQ ID NO: 3835659 - DNA, 25 bp, Homo sapien
ttgcatgtcaaccttccataggggt

SEQ ID NO: 3835660 - DNA, 25 bp, Homo sapien
gaatgattttcacgtactcgctgtc

SEQ ID NO: 3835661 - DNA, 25 bp, Homo sapien
cttgaggttggcagggtttggtcca

SEQ ID NO: 3835662 - DNA, 25 bp, Homo sapien
aaacactgtagctctcgcttgaggt

SEQ ID NO: 3835663 - DNA, 25 bp, Homo sapien
ctgaatgattttcacgtactcgctg

SEQ ID NO: 3835664 - DNA, 25 bp, Homo sapien
ccagcagcctcttggcagtcaggac

SEQ ID NO: 3835665 - DNA, 25 bp, Homo sapien
tggcagtcaggaccgcctcctccat

SEQ ID NO: 3835666 - DNA, 25 bp, Homo sapien
ttggcagtcaggaccgcctcctcca

SEQ ID NO: 3835667 - DNA, 25 bp, Homo sapien
agcctcttggcagtcaggaccgcct

SEQ ID NO: 3835668 - DNA, 25 bp, Homo sapien
aagttgggccatgatttgctcagtg

SEQ ID NO: 3835669 - DNA, 25 bp, Homo sapien
agttgggccatgatttgctcagtgc

SEQ ID NO: 3835670 - DNA, 25 bp, Homo sapien
gttgggccatgatttgctcagtgct

SEQ ID NO: 3835671 - DNA, 25 bp, Homo sapien
gaagttgggccatgatttgctcagt

SEQ ID NO: 3835672 - DNA, 25 bp, Homo sapien
gctggcaaccacgttttcctgcaag

SEQ ID NO: 3835673 - DNA, 25 bp, Homo sapien
tggccggcccagttcttctcctctg

SEQ ID NO: 3835674 - DNA, 25 bp, Homo sapien
ctggccggcccagttcttctcctct

SEQ ID NO: 3835675 - DNA, 25 bp, Homo sapien
ctctgggagcttccccaacatcagt

SEQ ID NO: 3835676 - DNA, 25 bp, Homo sapien
ggagcttccccaacatcagtcacgg

SEQ ID NO: 3835677 - DNA, 25 bp, Homo sapien
aggcctggctggtgcgtgacactca

SEQ ID NO: 3835678 - DNA, 25 bp, Homo sapien
tgagtgggaaactcccaactcccta

SEQ ID NO: 3835679 - DNA, 25 bp, Homo sapien
aaggtccgaggaaccctgtggtctg

SEQ ID NO: 3835680 - DNA, 25 bp, Homo sapien
cactggggaacggacactttggaga

SEQ ID NO: 3835681 - DNA, 25 bp, Homo sapien
ccctttgcaattaaactgtggatag

SEQ ID NO: 3835682 - DNA, 25 bp, Homo sapien
ggatgcccacaccggctgttcttgg

SEQ ID NO: 3835683 - DNA, 25 bp, Homo sapien
taaactgtggatagaccaaggccca

SEQ ID NO: 3835684 - DNA, 25 bp, Homo sapien
tggatagaccaaggcccagatgcca

SEQ ID NO: 3835685 - DNA, 25 bp, Homo sapien
atgccttaacgtggcgcttggggtc

SEQ ID NO: 3835686 - DNA, 25 bp, Homo sapien
cttgatgccttaacgtggcgcttgg

SEQ ID NO: 3835687 - DNA, 25 bp, Homo sapien
ccccatgctgtgggagatgaaatgc

SEQ ID NO: 3835688 - DNA, 25 bp, Homo sapien
tgatgccttaacgtggcgcttgggg

SEQ ID NO: 3835689 - DNA, 25 bp, Homo sapien
tcatctgagaattgtccactgattg

SEQ ID NO: 3835690 - DNA, 25 bp, Homo sapien
tgattggcatcatgaagtgtttcac

SEQ ID NO: 3835691 - DNA, 25 bp, Homo sapien
ctctgtgcaggtcgcagctgggctt

SEQ ID NO: 3835692 - DNA, 25 bp, Homo sapien
gaagtgtttcactctgtgcaggtcg

SEQ ID NO: 3835693 - DNA, 25 bp, Homo sapien
gcatagccattttgcatgtctgctt

SEQ ID NO: 3835694 - DNA, 25 bp, Homo sapien
gacagtagggccgattttgatctct

SEQ ID NO: 3835695 - DNA, 25 bp, Homo sapien
tgggaacaggcattgagtctttgac

SEQ ID NO: 3835696 - DNA, 25 bp, Homo sapien
gggtggactgagtcgccaatgccca

SEQ ID NO: 3835697 - DNA, 25 bp, Homo sapien
gcctcctcatctctagccactgcct

SEQ ID NO: 3835698 - DNA, 25 bp, Homo sapien
tcatctctagccactgcctttctgg

SEQ ID NO: 3835699 - DNA, 25 bp, Homo sapien
cctcctcatctctagccactgcctt

SEQ ID NO: 3835700 - DNA, 25 bp, Homo sapien
ctcctcatctctagccactgccttt

SEQ ID NO: 3835701 - DNA, 25 bp, Homo sapien
tacccaagagatacagttcccctgt

SEQ ID NO: 3835702 - DNA, 25 bp, Homo sapien
tccgtgtctcctgaatacccaagag

SEQ ID NO: 3835703 - DNA, 25 bp, Homo sapien
tcccctgtgatcttgctgtaatgaa

SEQ ID NO: 3835704 - DNA, 25 bp, Homo sapien
taattccttgttggagccccagggc

SEQ ID NO: 3835705 - DNA, 25 bp, Homo sapien
gctcctctgagttggtgaaggctaa

SEQ ID NO: 3835706 - DNA, 25 bp, Homo sapien
ggctcttgacagcataagccataac

SEQ ID NO: 3835707 - DNA, 25 bp, Homo sapien
ttgacagcataagccataacctctt

SEQ ID NO: 3835708 - DNA, 25 bp, Homo sapien
tgaaggctaataggctcttgacagc

SEQ ID NO: 3835709 - DNA, 25 bp, Homo sapien
ctcttcaggaatttccacaccggca

SEQ ID NO: 3835710 - DNA, 25 bp, Homo sapien
cgctctacagctgggagaccggcga

SEQ ID NO: 3835711 - DNA, 25 bp, Homo sapien
ggcgacgaccgcttcctcttcagga

SEQ ID NO: 3835712 - DNA, 25 bp, Homo sapien
acaccggcatctggtactcgtgcga

SEQ ID NO: 3835713 - DNA, 25 bp, Homo sapien
ccacaggagtaaggcaattcataat

SEQ ID NO: 3835714 - DNA, 25 bp, Homo sapien
tgcaaggcctgccactcggcaagcc

SEQ ID NO: 3835715 - DNA, 25 bp, Homo sapien
gcttgggcagaattcaaatgagctc

SEQ ID NO: 3835716 - DNA, 25 bp, Homo sapien
taatcggttaaccttgaattctgca

SEQ ID NO: 3835717 - DNA, 25 bp, Homo sapien
gagccgccttccagaaacgcagcgt

SEQ ID NO: 3835718 - DNA, 25 bp, Homo sapien
ttccagaaacgcagcgtcgtgcgcc

SEQ ID NO: 3835719 - DNA, 25 bp, Homo sapien
agaaacgcagcgtcgtgcgcctgct

SEQ ID NO: 3835720 - DNA, 25 bp, Homo sapien
cgccttccagaaacgcagcgtcgtg

SEQ ID NO: 3835721 - DNA, 25 bp, Homo sapien
tggcccacgacaggtagaggggacc

SEQ ID NO: 3835722 - DNA, 25 bp, Homo sapien
ctgcatttatccgaagatgacacag

SEQ ID NO: 3835723 - DNA, 25 bp, Homo sapien
gcatttatccgaagatgacacagag

SEQ ID NO: 3835724 - DNA, 25 bp, Homo sapien
agctggcccacgacaggtagagggg

SEQ ID NO: 3835725 - DNA, 25 bp, Homo sapien
tcattttgagcggtggggctttaac

SEQ ID NO: 3835726 - DNA, 25 bp, Homo sapien
cccaaggctcattttgagcggtggg

SEQ ID NO: 3835727 - DNA, 25 bp, Homo sapien
aggctcattttgagcggtggggctt

SEQ ID NO: 3835728 - DNA, 25 bp, Homo sapien
gctcattttgagcggtggggcttta

SEQ ID NO: 3835729 - DNA, 25 bp, Homo sapien
tggaggggacgctcttactggtcca

SEQ ID NO: 3835730 - DNA, 25 bp, Homo sapien
cagttttcgtgtcttggtggtggat

SEQ ID NO: 3835731 - DNA, 25 bp, Homo sapien
tcaagactggcggtcccactcttgg

SEQ ID NO: 3835732 - DNA, 25 bp, Homo sapien
cttactggtccaggggatcaagact

SEQ ID NO: 3835733 - DNA, 25 bp, Homo sapien
tagcctgggacttgggtgtatcttt

SEQ ID NO: 3835734 - DNA, 25 bp, Homo sapien
caaccacagtcctggacccaaattt

SEQ ID NO: 3835735 - DNA, 25 bp, Homo sapien
tcctggacccaaatttgcgagaact

SEQ ID NO: 3835736 - DNA, 25 bp, Homo sapien
aatttgcgagaactcacagtgtctt

SEQ ID NO: 3835737 - DNA, 25 bp, Homo sapien
taccagcacaaagggctggtgttcc

SEQ ID NO: 3835738 - DNA, 25 bp, Homo sapien
ggtgttccctgtcaccttcagtcac

SEQ ID NO: 3835739 - DNA, 25 bp, Homo sapien
aagccatgccgtctggtagaccttg

SEQ ID NO: 3835740 - DNA, 25 bp, Homo sapien
agggacaaagccatgcgggaccttc

SEQ ID NO: 3835741 - DNA, 25 bp, Homo sapien
tcagagatgccaaactgggtgtggg

SEQ ID NO: 3835742 - DNA, 25 bp, Homo sapien
atgccaaactgggtgtgggtgacct

SEQ ID NO: 3835743 - DNA, 25 bp, Homo sapien
agatgccaaactgggtgtgggtgac

SEQ ID NO: 3835744 - DNA, 25 bp, Homo sapien
cagagatgccaaactgggtgtgggt

SEQ ID NO: 3835745 - DNA, 25 bp, Homo sapien
ctatccattgggccctaaatcctgt

SEQ ID NO: 3835746 - DNA, 25 bp, Homo sapien
atccattgggccctaaatcctgtga

SEQ ID NO: 3835747 - DNA, 25 bp, Homo sapien
tgggccctaaatcctgtgacaagtg

SEQ ID NO: 3835748 - DNA, 25 bp, Homo sapien
ggccctaaatcctgtgacaagtgtc

SEQ ID NO: 3835749 - DNA, 25 bp, Homo sapien
tgctgttgcagaaacgtcacttgct

SEQ ID NO: 3835750 - DNA, 25 bp, Homo sapien
tgaaaacaggaccatccgccggtcc

SEQ ID NO: 3835751 - DNA, 25 bp, Homo sapien
tattccatctggactaggctgcgtt

SEQ ID NO: 3835752 - DNA, 25 bp, Homo sapien
caatgaccctccttgaatgtgaaaa

SEQ ID NO: 3835753 - DNA, 25 bp, Homo sapien
tgtgacgttggaactgctctggcac

SEQ ID NO: 3835754 - DNA, 25 bp, Homo sapien
tactaggaggcaccaggaaatcccg

SEQ ID NO: 3835755 - DNA, 25 bp, Homo sapien
ccagccaaggagagatgtgacgttg

SEQ ID NO: 3835756 - DNA, 25 bp, Homo sapien
ggcagaattgccaaggacagctcac

SEQ ID NO: 3835757 - DNA, 25 bp, Homo sapien
tgggacttgttctctcctaagcctc

SEQ ID NO: 3835758 - DNA, 25 bp, Homo sapien
tcctttttctagaggccagatccta

SEQ ID NO: 3835759 - DNA, 25 bp, Homo sapien
gcttgtccacggctccaccgtagtg

SEQ ID NO: 3835760 - DNA, 25 bp, Homo sapien
caccgtagtgctcagatgcacacac

SEQ ID NO: 3835761 - DNA, 25 bp, Homo sapien
tttttggactatctgacaagtaaaa

SEQ ID NO: 3835762 - DNA, 25 bp, Homo sapien
gatatctggacgctgtttttggact

SEQ ID NO: 3835763 - DNA, 25 bp, Homo sapien
aattaaaagtcgtcttggagacaag

SEQ ID NO: 3835764 - DNA, 25 bp, Homo sapien
gtcttggagacaaggaagcagttct

SEQ ID NO: 3835765 - DNA, 25 bp, Homo sapien
tcagggagataggtcccaggagcaa

SEQ ID NO: 3835766 - DNA, 25 bp, Homo sapien
tagtagggaattgagtgcaccttcc

SEQ ID NO: 3835767 - DNA, 25 bp, Homo sapien
gtttttcgagtacttggccccatga

SEQ ID NO: 3835768 - DNA, 25 bp, Homo sapien
aaagctgcaaataagctcggccgca

SEQ ID NO: 3835769 - DNA, 25 bp, Homo sapien
gataagatggaaatccgtagctgtc

SEQ ID NO: 3835770 - DNA, 25 bp, Homo sapien
gggtcccatctcaggataagatgga

SEQ ID NO: 3835771 - DNA, 25 bp, Homo sapien
tatccggaacaagctctgcaaagtt

SEQ ID NO: 3835772 - DNA, 25 bp, Homo sapien
caaactccttttggctcaccataaa

SEQ ID NO: 3835773 - DNA, 25 bp, Homo sapien
caccattgagtgctatggcgtccta

SEQ ID NO: 3835774 - DNA, 25 bp, Homo sapien
tcatggtttcatagccccacgagcc

SEQ ID NO: 3835775 - DNA, 25 bp, Homo sapien
agagctcatggtttcatagccccac

SEQ ID NO: 3835776 - DNA, 25 bp, Homo sapien
ccattgagtgctatggcgtcctata

SEQ ID NO: 3835777 - DNA, 25 bp, Homo sapien
gtaactgactgcaaacagtccagtg

SEQ ID NO: 3835778 - DNA, 25 bp, Homo sapien
actgactgcaaacagtccagtgaga

SEQ ID NO: 3835779 - DNA, 25 bp, Homo sapien
ctgtaactgactgcaaacagtccag

SEQ ID NO: 3835780 - DNA, 25 bp, Homo sapien
aactgactgcaaacagtccagtgag

SEQ ID NO: 3835781 - DNA, 25 bp, Homo sapien
gatgtaactgctaggccaccttcag

SEQ ID NO: 3835782 - DNA, 25 bp, Homo sapien
tatggcgagtgacattgaatcaggc

SEQ ID NO: 3835783 - DNA, 25 bp, Homo sapien
gctgtttatatgtacgccaggacta

SEQ ID NO: 3835784 - DNA, 25 bp, Homo sapien
tagggaccgtcttactcatcattgt

SEQ ID NO: 3835785 - DNA, 25 bp, Homo sapien
catgaacctgaatataggagaccca

SEQ ID NO: 3835786 - DNA, 25 bp, Homo sapien
ttttaaccttcgttggcagcaggga

SEQ ID NO: 3835787 - DNA, 25 bp, Homo sapien
gaatggtactctgggatactagtcc

SEQ ID NO: 3835788 - DNA, 25 bp, Homo sapien
gagacccatatgattcacctcctag

SEQ ID NO: 3835789 - DNA, 25 bp, Homo sapien
ttatggtcggtgtcatgttgaagcc

SEQ ID NO: 3835790 - DNA, 25 bp, Homo sapien
tcattatggtcggtgtcatgttgaa

SEQ ID NO: 3835791 - DNA, 25 bp, Homo sapien
tcagttcattatggtcggtgtcatg

SEQ ID NO: 3835792 - DNA, 25 bp, Homo sapien
catgttgaagcccacaaggagtgag

SEQ ID NO: 3835793 - DNA, 25 bp, Homo sapien
tcatccacagcattgcattgtaccc

SEQ ID NO: 3835794 - DNA, 25 bp, Homo sapien
tccacagcattgcattgtaccccat

SEQ ID NO: 3835795 - DNA, 25 bp, Homo sapien
tccacttgttcatccacagcattgc

SEQ ID NO: 3835796 - DNA, 25 bp, Homo sapien
ggcatgtcatccacttgttcatcca

SEQ ID NO: 3835797 - DNA, 25 bp, Homo sapien
gctgagccatcgctgctctccccat

SEQ ID NO: 3835798 - DNA, 25 bp, Homo sapien
tgctgagccatcgctgctctcccca

SEQ ID NO: 3835799 - DNA, 25 bp, Homo sapien
cgatgaggcgacccgggcggccctg

SEQ ID NO: 3835800 - DNA, 25 bp, Homo sapien
cgggtgggtctggatgaattgtctc

SEQ ID NO: 3835801 - DNA, 25 bp, Homo sapien
ctgggccgcgcggtcgaggcctgtc

SEQ ID NO: 3835802 - DNA, 25 bp, Homo sapien
gccggcatccgagcctcatttcctg

SEQ ID NO: 3835803 - DNA, 25 bp, Homo sapien
ggcggcggcagtggccgtgtgggtt

SEQ ID NO: 3835804 - DNA, 25 bp, Homo sapien
gcggcagtggccgtgtgggttgagg

SEQ ID NO: 3835805 - DNA, 25 bp, Homo sapien
gggcggcggcagtggccgtgtgggt

SEQ ID NO: 3835806 - DNA, 25 bp, Homo sapien
cggcggcagtggccgtgtgggttga

SEQ ID NO: 3835807 - DNA, 25 bp, Homo sapien
cgctcgccacttccggcgcgttggg

SEQ ID NO: 3835808 - DNA, 25 bp, Homo sapien
ggattggtccggttccagcgccgca

SEQ ID NO: 3835809 - DNA, 25 bp, Homo sapien
tcgccccgctcgattccggattggt

SEQ ID NO: 3835810 - DNA, 25 bp, Homo sapien
caagagagggcgtggtaagaaggcg

SEQ ID NO: 3835811 - DNA, 25 bp, Homo sapien
atggctgccggcccgcgtggacgca

SEQ ID NO: 3835812 - DNA, 25 bp, Homo sapien
tggctgccggcccgcgtggacgcac

SEQ ID NO: 3835813 - DNA, 25 bp, Homo sapien
caagatggctgccggcccgcgtgga

SEQ ID NO: 3835814 - DNA, 25 bp, Homo sapien
agatggctgccggcccgcgtggacg

SEQ ID NO: 3835815 - DNA, 25 bp, Homo sapien
ttcttcttcaactgttaagagtcca

SEQ ID NO: 3835816 - DNA, 25 bp, Homo sapien
ggcgttttacgagacaatacattct

SEQ ID NO: 3835817 - DNA, 25 bp, Homo sapien
caactgttaagagtccaaactttag

SEQ ID NO: 3835818 - DNA, 25 bp, Homo sapien
ctttggatggcgttttacgagacaa

SEQ ID NO: 3835819 - DNA, 25 bp, Homo sapien
ttaatgtaaaggtcctttgctttgc

SEQ ID NO: 3835820 - DNA, 25 bp, Homo sapien
taatgtaaaggtcctttgctttgct

SEQ ID NO: 3835821 - DNA, 25 bp, Homo sapien
aaaggtcctttgctttgctgagcac

SEQ ID NO: 3835822 - DNA, 25 bp, Homo sapien
tgtaaaggtcctttgctttgctgag

SEQ ID NO: 3835823 - DNA, 25 bp, Homo sapien
aaatggatttctcggaaggaaatag

SEQ ID NO: 3835824 - DNA, 25 bp, Homo sapien
tcaactctggccaactcgagcaaaa

SEQ ID NO: 3835825 - DNA, 25 bp, Homo sapien
acagcaaggttggaaatgagcagct

SEQ ID NO: 3835826 - DNA, 25 bp, Homo sapien
gaaatagaatgctcataaagttgac

SEQ ID NO: 3835827 - DNA, 25 bp, Homo sapien
ggaaaaacctgtcgaatatgacgac

SEQ ID NO: 3835828 - DNA, 25 bp, Homo sapien
cctgtcgaatatgacgacatcaaga

SEQ ID NO: 3835829 - DNA, 25 bp, Homo sapien
tggtgaagtgggcatctgacgcccc

SEQ ID NO: 3835830 - DNA, 25 bp, Homo sapien
tgccgcctggaaaaacctgtcgaat

SEQ ID NO: 3835831 - DNA, 25 bp, Homo sapien
gaaactgtgatgtgacagccacggg

SEQ ID NO: 3835832 - DNA, 25 bp, Homo sapien
aactgtgatgtgacagccacggggc

SEQ ID NO: 3835833 - DNA, 25 bp, Homo sapien
aaactgtgatgtgacagccacgggg

SEQ ID NO: 3835834 - DNA, 25 bp, Homo sapien
agtatgacaacggcctcaagatcgt

SEQ ID NO: 3835835 - DNA, 25 bp, Homo sapien
gtatgacaacggcctcaagatcgtc

SEQ ID NO: 3835836 - DNA, 25 bp, Homo sapien
ccagtatgattgcatccgtagcaaa

SEQ ID NO: 3835837 - DNA, 25 bp, Homo sapien
tgttccagtatgattgcatccgtag

SEQ ID NO: 3835838 - DNA, 25 bp, Homo sapien
gctgagaacggggaaatcccatcat

SEQ ID NO: 3835839 - DNA, 25 bp, Homo sapien
attgcatccgtagcaaattccatgg

SEQ ID NO: 3835840 - DNA, 25 bp, Homo sapien
ttcattgaccttgactacatggtct

SEQ ID NO: 3835841 - DNA, 25 bp, Homo sapien
cttcattgaccttgactacatggtc

SEQ ID NO: 3835842 - DNA, 25 bp, Homo sapien
cattgaccttgactacatggtctac

SEQ ID NO: 3835843 - DNA, 25 bp, Homo sapien
tcattgaccttgactacatggtcta

SEQ ID NO: 3835844 - DNA, 25 bp, Homo sapien
tgaaggtcggaacaaatggatttgg

SEQ ID NO: 3835845 - DNA, 25 bp, Homo sapien
caaatggatttggtcgtattgggcg

SEQ ID NO: 3835846 - DNA, 25 bp, Homo sapien
cctgagagcatggtgaaggtcggaa

SEQ ID NO: 3835847 - DNA, 25 bp, Homo sapien
aaatggatttggtcgtattgggcgc

SEQ ID NO: 3835848 - DNA, 25 bp, Homo sapien
tcctctgggatagaaggggctcagg

SEQ ID NO: 3835849 - DNA, 25 bp, Homo sapien
ctcctctgggatagaaggggctcag

SEQ ID NO: 3835850 - DNA, 25 bp, Homo sapien
cctctgggatagaaggggctcaggg

SEQ ID NO: 3835851 - DNA, 25 bp, Homo sapien
tgtcttgacccgtgggggttccagc

SEQ ID NO: 3835852 - DNA, 25 bp, Homo sapien
gggctgggccgtgggaagcggtgtc

SEQ ID NO: 3835853 - DNA, 25 bp, Homo sapien
gggccgtgggaagcggtgtccagcc

SEQ ID NO: 3835854 - DNA, 25 bp, Homo sapien
gctgggccgtgggaagcggtgtcca

SEQ ID NO: 3835855 - DNA, 25 bp, Homo sapien
ccttctcactcaggttgcccgtcgc

SEQ ID NO: 3835856 - DNA, 25 bp, Homo sapien
aagcagacgaagcagaaggccggca

SEQ ID NO: 3835857 - DNA, 25 bp, Homo sapien
gcagcccgtcggcttcagggctctg

SEQ ID NO: 3835858 - DNA, 25 bp, Homo sapien
gtggcctccgcagcatcatcgccag

SEQ ID NO: 3835859 - DNA, 25 bp, Homo sapien
ccactggccacccacgagcactgac

SEQ ID NO: 3835860 - DNA, 25 bp, Homo sapien
tcctgaaggaggaagcgttgcagct

SEQ ID NO: 3835861 - DNA, 25 bp, Homo sapien
acagggacatccaggagggcttcct

SEQ ID NO: 3835862 - DNA, 25 bp, Homo sapien
gaaggaggaagcgttgcagctgggc

SEQ ID NO: 3835863 - DNA, 25 bp, Homo sapien
gggtgggacagggacatccaggagg

SEQ ID NO: 3835864 - DNA, 25 bp, Homo sapien
ggttcagccccagctttactctcat

SEQ ID NO: 3835865 - DNA, 25 bp, Homo sapien
tattaatgccagcacctttcaggga

SEQ ID NO: 3835866 - DNA, 25 bp, Homo sapien
tatagattatactccttggcctgtc

SEQ ID NO: 3835867 - DNA, 25 bp, Homo sapien
cagaggtacttaggctattaatgcc

SEQ ID NO: 3835868 - DNA, 25 bp, Homo sapien
aatatactataactatgaaacaaaa

SEQ ID NO: 3835869 - DNA, 25 bp, Homo sapien
gaaaatatactataactatgaaaca

SEQ ID NO: 3835870 - DNA, 25 bp, Homo sapien
aaaaactggatgctatttgacaggg

SEQ ID NO: 3835871 - DNA, 25 bp, Homo sapien
aacaaaaactggatgctatttgaca

SEQ ID NO: 3835872 - DNA, 25 bp, Homo sapien
gcctggggagggctgggcggaggag

SEQ ID NO: 3835873 - DNA, 25 bp, Homo sapien
agtctctctcccgggaccggatgtg

SEQ ID NO: 3835874 - DNA, 25 bp, Homo sapien
tctctctcccgggaccggatgtggc

SEQ ID NO: 3835875 - DNA, 25 bp, Homo sapien
tcagtctctctcccgggaccggatg

SEQ ID NO: 3835876 - DNA, 25 bp, Homo sapien
agactgtcccggtctgtgctagtgg

SEQ ID NO: 3835877 - DNA, 25 bp, Homo sapien
tcgggggagtctgagagggtcacct

SEQ ID NO: 3835878 - DNA, 25 bp, Homo sapien
gcgagaacgaggttacagaggactc

SEQ ID NO: 3835879 - DNA, 25 bp, Homo sapien
gcgggacgagactgccccagactgt

SEQ ID NO: 3835880 - DNA, 25 bp, Homo sapien
gtcgccgccgctacgagcagcccgg

SEQ ID NO: 3835881 - DNA, 25 bp, Homo sapien
cgccgctacgagcagcccggccctg

SEQ ID NO: 3835882 - DNA, 25 bp, Homo sapien
ggctcggtcgccgccgctacgagca

SEQ ID NO: 3835883 - DNA, 25 bp, Homo sapien
tggggggctcggtcgccgccgctac

SEQ ID NO: 3835884 - DNA, 25 bp, Homo sapien
ggctcagtcgcccaagtcctggagc

SEQ ID NO: 3835885 - DNA, 25 bp, Homo sapien
ccgaggcttcttgctggtgagagtg

SEQ ID NO: 3835886 - DNA, 25 bp, Homo sapien
cacgaccatggaccggggtgcaagc

SEQ ID NO: 3835887 - DNA, 25 bp, Homo sapien
aagcggtgccgccaggggctcagtc

SEQ ID NO: 3835888 - DNA, 25 bp, Homo sapien
tggggccgcggggacgccgcggcag

SEQ ID NO: 3835889 - DNA, 25 bp, Homo sapien
gcctgggcgccgtcgcggtcttcgt

SEQ ID NO: 3835890 - DNA, 25 bp, Homo sapien
gcagggggcctgggcgccgtcgcgg

SEQ ID NO: 3835891 - DNA, 25 bp, Homo sapien
ctggggccgcggggacgccgcggca

SEQ ID NO: 3835892 - DNA, 25 bp, Homo sapien
tgccgcccctcacctgggcccggct

SEQ ID NO: 3835893 - DNA, 25 bp, Homo sapien
ctgccgcccctcacctgggcccggc

SEQ ID NO: 3835894 - DNA, 25 bp, Homo sapien
caggtgggggtgggggcacttggtg

SEQ ID NO: 3835895 - DNA, 25 bp, Homo sapien
ttgggtcagtgccagcagcaggtgg

SEQ ID NO: 3835896 - DNA, 25 bp, Homo sapien
ccttgggtcagtgccagcagcaggt

SEQ ID NO: 3835897 - DNA, 25 bp, Homo sapien
ggtcagtgccagcagcaggtggggg

SEQ ID NO: 3835898 - DNA, 25 bp, Homo sapien
gaactcaaagtcatcggaaatctct

SEQ ID NO: 3835899 - DNA, 25 bp, Homo sapien
gctttaggcatgcttggccccagaa

SEQ ID NO: 3835900 - DNA, 25 bp, Homo sapien
ttcaagagtataattggctttaggc

SEQ ID NO: 3835901 - DNA, 25 bp, Homo sapien
gctttattctcaagcgggctctccc

SEQ ID NO: 3835902 - DNA, 25 bp, Homo sapien
tagagaattattcacccagcgtttg

SEQ ID NO: 3835903 - DNA, 25 bp, Homo sapien
tgacttcctacgtaactttcggcaa

SEQ ID NO: 3835904 - DNA, 25 bp, Homo sapien
tcctgatttaggaagccgcccagat

SEQ ID NO: 3835905 - DNA, 25 bp, Homo sapien
aatgttggagccctgaccattgccc

SEQ ID NO: 3835906 - DNA, 25 bp, Homo sapien
tgttgaatacctcagctgtgtccct

SEQ ID NO: 3835907 - DNA, 25 bp, Homo sapien
gcaagattcacaggggctgcctgtc

SEQ ID NO: 3835908 - DNA, 25 bp, Homo sapien
gggcccttgttgaatacctcagctg

SEQ ID NO: 3835909 - DNA, 25 bp, Homo sapien
tcagggcccttgttgaatacctcag

SEQ ID NO: 3835910 - DNA, 25 bp, Homo sapien
aggatggtatagatgtggccacacc

SEQ ID NO: 3835911 - DNA, 25 bp, Homo sapien
ctggcaggatggtatagatgtggcc

SEQ ID NO: 3835912 - DNA, 25 bp, Homo sapien
ggcaggatggtatagatgtggccac

SEQ ID NO: 3835913 - DNA, 25 bp, Homo sapien
aaactggcaggatggtatagatgtg

SEQ ID NO: 3835914 - DNA, 25 bp, Homo sapien
gtactgacgaagcacctgctgttcc

SEQ ID NO: 3835915 - DNA, 25 bp, Homo sapien
tgtgcccagcttattcacaagtact

SEQ ID NO: 3835916 - DNA, 25 bp, Homo sapien
ttcacaagtactgacgaagcacctg

SEQ ID NO: 3835917 - DNA, 25 bp, Homo sapien
tgcccagcttattcacaagtactga

SEQ ID NO: 3835918 - DNA, 25 bp, Homo sapien
gctcccggactagttcgtagtgctt

SEQ ID NO: 3835919 - DNA, 25 bp, Homo sapien
caggtcaaccttcccataggtgcct

SEQ ID NO: 3835920 - DNA, 25 bp, Homo sapien
tagtgcttggtgacgtcgctggcgg

SEQ ID NO: 3835921 - DNA, 25 bp, Homo sapien
tgtgcccttgtagaccaccaggtca

SEQ ID NO: 3835922 - DNA, 25 bp, Homo sapien
aaagaccacgtcaaagaccttgatg

SEQ ID NO: 3835923 - DNA, 25 bp, Homo sapien
cagcaggtgcgtactcctgggcaaa

SEQ ID NO: 3835924 - DNA, 25 bp, Homo sapien
gtgatgctcacctcccgtaggaagt

SEQ ID NO: 3835925 - DNA, 25 bp, Homo sapien
gacgtagcagtcctctgtctcaaag

SEQ ID NO: 3835926 - DNA, 25 bp, Homo sapien
gccgaagtcggccagctttacgcgg

SEQ ID NO: 3835927 - DNA, 25 bp, Homo sapien
tcgcggtcgaacagcagcacgttct

SEQ ID NO: 3835928 - DNA, 25 bp, Homo sapien
cttgatgtcgcggtgcaccagctgc

SEQ ID NO: 3835929 - DNA, 25 bp, Homo sapien
ccgtgtaagggatggtgccgctcac

SEQ ID NO: 3835930 - DNA, 25 bp, Homo sapien
tgagcacgcagaagatgagcacgcc

SEQ ID NO: 3835931 - DNA, 25 bp, Homo sapien
ggaagttgccggtgagcacgcagaa

SEQ ID NO: 3835932 - DNA, 25 bp, Homo sapien
cccacgggaagttgccggtgagcac

SEQ ID NO: 3835933 - DNA, 25 bp, Homo sapien
ctcccacgggaagttgccggtgagc

SEQ ID NO: 3835934 - DNA, 25 bp, Homo sapien
gcagcgcgggctcggtgaagcggcg

SEQ ID NO: 3835935 - DNA, 25 bp, Homo sapien
aagcggcgccactgcgaaggcagcc

SEQ ID NO: 3835936 - DNA, 25 bp, Homo sapien
cgctgccagcgcacgaactcctcga

SEQ ID NO: 3835937 - DNA, 25 bp, Homo sapien
ctcgaagaaggcgtcggcgcccgac

SEQ ID NO: 3835938 - DNA, 25 bp, Homo sapien
gctcgtgcttgaggaagcggaacac

SEQ ID NO: 3835939 - DNA, 25 bp, Homo sapien
cttgcgcgcgcggtgcgagggccgg

SEQ ID NO: 3835940 - DNA, 25 bp, Homo sapien
gcccaggcgcctcgaggcgcagtgg

SEQ ID NO: 3835941 - DNA, 25 bp, Homo sapien
accgtccgcttgagcggcccaggcg

SEQ ID NO: 3835942 - DNA, 25 bp, Homo sapien
accggcaccggcacgggcaagggca

SEQ ID NO: 3835943 - DNA, 25 bp, Homo sapien
agacgcagatctcgatggccgtggc

SEQ ID NO: 3835944 - DNA, 25 bp, Homo sapien
acgcagatctcgatggccgtggcca

SEQ ID NO: 3835945 - DNA, 25 bp, Homo sapien
gcagatctcgatggccgtggccagc

SEQ ID NO: 3835946 - DNA, 25 bp, Homo sapien
gccctttgctcttgtccgcgcggcc

SEQ ID NO: 3835947 - DNA, 25 bp, Homo sapien
cggctcggggcgggcccgggctgct

SEQ ID NO: 3835948 - DNA, 25 bp, Homo sapien
gctcggggcgggcccgggctgctcc

SEQ ID NO: 3835949 - DNA, 25 bp, Homo sapien
gctgctcccgggtccgagggcggcg

SEQ ID NO: 3835950 - DNA, 25 bp, Homo sapien
cgggctgctcccgggtccgagggcg

SEQ ID NO: 3835951 - DNA, 25 bp, Homo sapien
ggaagcccaggctactacgtctagg

SEQ ID NO: 3835952 - DNA, 25 bp, Homo sapien
ggtctggacgcacagtcactgaacg

SEQ ID NO: 3835953 - DNA, 25 bp, Homo sapien
tgtgcaggagtcactagcttctcgg

SEQ ID NO: 3835954 - DNA, 25 bp, Homo sapien
ctgaacgcaaaggatggcacccatg

SEQ ID NO: 3835955 - DNA, 25 bp, Homo sapien
tgttttgctacctgggggcctgaac

SEQ ID NO: 3835956 - DNA, 25 bp, Homo sapien
ggggcctgaaccaacctgcaggggc

SEQ ID NO: 3835957 - DNA, 25 bp, Homo sapien
ctgttttgctacctgggggcctgaa

SEQ ID NO: 3835958 - DNA, 25 bp, Homo sapien
ctgggggcctgaaccaacctgcagg

SEQ ID NO: 3835959 - DNA, 25 bp, Homo sapien
gcaggggacctatagccctttttca

SEQ ID NO: 3835960 - DNA, 25 bp, Homo sapien
gccaccccacactgtttgtaaactg

SEQ ID NO: 3835961 - DNA, 25 bp, Homo sapien
aaagagcccctcaaatggcccagaa

SEQ ID NO: 3835962 - DNA, 25 bp, Homo sapien
cagccagaaagtgctcggagttcac

SEQ ID NO: 3835963 - DNA, 25 bp, Homo sapien
ctggcatgtggagggcccataccca

SEQ ID NO: 3835964 - DNA, 25 bp, Homo sapien
ctaaggcaaaaggagaagtcgcggc

SEQ ID NO: 3835965 - DNA, 25 bp, Homo sapien
caagggacgtctactgtggaatctc

SEQ ID NO: 3835966 - DNA, 25 bp, Homo sapien
gagatcaggatgtcgcgaggcctaa

SEQ ID NO: 3835967 - DNA, 25 bp, Homo sapien
ttacaaacacatggaggaagggcgg

SEQ ID NO: 3835968 - DNA, 25 bp, Homo sapien
tgctcatgtgactggttcttgctga

SEQ ID NO: 3835969 - DNA, 25 bp, Homo sapien
ccttcattgctgttagatgtgctca

SEQ ID NO: 3835970 - DNA, 25 bp, Homo sapien
ggaaatgacgcggtcccctgtctgg

SEQ ID NO: 3835971 - DNA, 25 bp, Homo sapien
caaggccctagaattactgatgtga

SEQ ID NO: 3835972 - DNA, 25 bp, Homo sapien
cgctctgattgacgcactgccagga

SEQ ID NO: 3835973 - DNA, 25 bp, Homo sapien
tgattgacgcactgccaggagtagc

SEQ ID NO: 3835974 - DNA, 25 bp, Homo sapien
aggacgctctgattgacgcactgcc

SEQ ID NO: 3835975 - DNA, 25 bp, Homo sapien
tctgattgacgcactgccaggagta

SEQ ID NO: 3835976 - DNA, 25 bp, Homo sapien
gcaatcctctgcttccgatggagtt

SEQ ID NO: 3835977 - DNA, 25 bp, Homo sapien
tgaactgcggggttaatgacaccat

SEQ ID NO: 3835978 - DNA, 25 bp, Homo sapien
aaggatctctctatggctgatggtc

SEQ ID NO: 3835979 - DNA, 25 bp, Homo sapien
cttccgatggagttagttgtgatga

SEQ ID NO: 3835980 - DNA, 25 bp, Homo sapien
tctgccctcaatgtctgtgaagtga

SEQ ID NO: 3835981 - DNA, 25 bp, Homo sapien
ttttctgccctcaatgtctgtgaag

SEQ ID NO: 3835982 - DNA, 25 bp, Homo sapien
ccctcaatgtctgtgaagtgaacct

SEQ ID NO: 3835983 - DNA, 25 bp, Homo sapien
caatgtctgtgaagtgaaccttgtt

SEQ ID NO: 3835984 - DNA, 25 bp, Homo sapien
aatcaagtggtgtgagggcaacaca

SEQ ID NO: 3835985 - DNA, 25 bp, Homo sapien
caagtggtgtgagggcaacacagca

SEQ ID NO: 3835986 - DNA, 25 bp, Homo sapien
accatgaatcaagtggtgtgagggc

SEQ ID NO: 3835987 - DNA, 25 bp, Homo sapien
tgaatcaagtggtgtgagggcaaca

SEQ ID NO: 3835988 - DNA, 25 bp, Homo sapien
agctcaccacaaccttttcctgctg

SEQ ID NO: 3835989 - DNA, 25 bp, Homo sapien
ccacaaccttttcctgctgggttca

SEQ ID NO: 3835990 - DNA, 25 bp, Homo sapien
tcaccacaaccttttcctgctgggt

SEQ ID NO: 3835991 - DNA, 25 bp, Homo sapien
agctaccgcacctgggctatttttt

SEQ ID NO: 3835992 - DNA, 25 bp, Homo sapien
aatttcgcgtatacagatgcatgcc

SEQ ID NO: 3835993 - DNA, 25 bp, Homo sapien
ctggaatttcgcgtatacagatgca

SEQ ID NO: 3835994 - DNA, 25 bp, Homo sapien
cttattctggaatttcgcgtataca

SEQ ID NO: 3835995 - DNA, 25 bp, Homo sapien
tattctggaatttcgcgtatacaga

SEQ ID NO: 3835996 - DNA, 25 bp, Homo sapien
gcccagccaagatctacactattat

SEQ ID NO: 3835997 - DNA, 25 bp, Homo sapien
tttattgccatgttatgatcttatc

SEQ ID NO: 3835998 - DNA, 25 bp, Homo sapien
cattgagttgaaaggcaatcttgtt

SEQ ID NO: 3835999 - DNA, 25 bp, Homo sapien
gatcttatcattgagttgaaaggca

SEQ ID NO: 3836000 - DNA, 25 bp, Homo sapien
tattgccatgttatgatcttatcat

SEQ ID NO: 3836001 - DNA, 25 bp, Homo sapien
cagccaaatctagggctggaacatg

SEQ ID NO: 3836002 - DNA, 25 bp, Homo sapien
tggctgcagcatataaatagaattg

SEQ ID NO: 3836003 - DNA, 25 bp, Homo sapien
atgcccagccaaatctagggctgga

SEQ ID NO: 3836004 - DNA, 25 bp, Homo sapien
gaattgaattccatagttttgttaa

SEQ ID NO: 3836005 - DNA, 25 bp, Homo sapien
acacacacatatagagagagagaca

SEQ ID NO: 3836006 - DNA, 25 bp, Homo sapien
agagacagagtttcactctgtcgcc

SEQ ID NO: 3836007 - DNA, 25 bp, Homo sapien
acacacacacatatagagagagaga

SEQ ID NO: 3836008 - DNA, 25 bp, Homo sapien
gtgcgccatcatgcccagctaattt

SEQ ID NO: 3836009 - DNA, 25 bp, Homo sapien
catgtaaagtcagtgacatgcccat

SEQ ID NO: 3836010 - DNA, 25 bp, Homo sapien
agcatgtaaagtcagtgacatgccc

SEQ ID NO: 3836011 - DNA, 25 bp, Homo sapien
ctgcagcagcatgtaaagtcagtga

SEQ ID NO: 3836012 - DNA, 25 bp, Homo sapien
cagcagcatgtaaagtcagtgacat

SEQ ID NO: 3836013 - DNA, 25 bp, Homo sapien
acctgccacggacaaggccttgtgt

SEQ ID NO: 3836014 - DNA, 25 bp, Homo sapien
tgtatatccaataatagtgaaatgg

SEQ ID NO: 3836015 - DNA, 25 bp, Homo sapien
tgaaatggatcccactaattatgac

SEQ ID NO: 3836016 - DNA, 25 bp, Homo sapien
tttttgtaggtttcaggcacagaac

SEQ ID NO: 3836017 - DNA, 25 bp, Homo sapien
agtcggcggtgcagcaactgacgcc

SEQ ID NO: 3836018 - DNA, 25 bp, Homo sapien
tgtgggcactgcctagaggttgctg

SEQ ID NO: 3836019 - DNA, 25 bp, Homo sapien
ccgtctggaggttgccgtggctctc

SEQ ID NO: 3836020 - DNA, 25 bp, Homo sapien
tgcgaggggcgccacctgtaggctg

SEQ ID NO: 3836021 - DNA, 25 bp, Homo sapien
gagagggagactgtggggagggaga

SEQ ID NO: 3836022 - DNA, 25 bp, Homo sapien
gaaagagggggagagggagactgtg

SEQ ID NO: 3836023 - DNA, 25 bp, Homo sapien
aagagggggagagggagactgtggg

SEQ ID NO: 3836024 - DNA, 25 bp, Homo sapien
aaagagggggagagggagactgtgg

SEQ ID NO: 3836025 - DNA, 25 bp, Homo sapien
tttacataagtatgggtccacagta

SEQ ID NO: 3836026 - DNA, 25 bp, Homo sapien
ttttacataagtatgggtccacagt

SEQ ID NO: 3836027 - DNA, 25 bp, Homo sapien
ttacataagtatgggtccacagtag

SEQ ID NO: 3836028 - DNA, 25 bp, Homo sapien
cccgaggctgacaaagtccgcacca

SEQ ID NO: 3836029 - DNA, 25 bp, Homo sapien
cgaggctgacaaagtccgcaccatg

SEQ ID NO: 3836030 - DNA, 25 bp, Homo sapien
ccccgaggctgacaaagtccgcacc

SEQ ID NO: 3836031 - DNA, 25 bp, Homo sapien
ccgaggctgacaaagtccgcaccat

SEQ ID NO: 3836032 - DNA, 25 bp, Homo sapien
agttgctatgggtgttagcttttac

SEQ ID NO: 3836033 - DNA, 25 bp, Homo sapien
aacctttgcctaactgaaattcatg

SEQ ID NO: 3836034 - DNA, 25 bp, Homo sapien
ttattttctggatcctgtctaaaaa

SEQ ID NO: 3836035 - DNA, 25 bp, Homo sapien
tttacatttagtcttatagttggtc

SEQ ID NO: 3836036 - DNA, 25 bp, Homo sapien
tgctgagcgaggatgaagaagatac

SEQ ID NO: 3836037 - DNA, 25 bp, Homo sapien
cgaggatgaagaagataccaagaga

SEQ ID NO: 3836038 - DNA, 25 bp, Homo sapien
gatgaagaagataccaagagagttg

SEQ ID NO: 3836039 - DNA, 25 bp, Homo sapien
aagaagataccaagagagttgtccg

SEQ ID NO: 3836040 - DNA, 25 bp, Homo sapien
gagacaccagactgatcaaagctct

SEQ ID NO: 3836041 - DNA, 25 bp, Homo sapien
agtgaggtagtactgccccctaggg

SEQ ID NO: 3836042 - DNA, 25 bp, Homo sapien
gcgacccagctaactccctgaacag

SEQ ID NO: 3836043 - DNA, 25 bp, Homo sapien
aacattttgcctctgcgacccagct

SEQ ID NO: 3836044 - DNA, 25 bp, Homo sapien
ctgccagcggaagaggttagcccgg

SEQ ID NO: 3836045 - DNA, 25 bp, Homo sapien
cagctcagctcctcgtgtagccact

SEQ ID NO: 3836046 - DNA, 25 bp, Homo sapien
tggcactcggccatcttgcacttgt

SEQ ID NO: 3836047 - DNA, 25 bp, Homo sapien
actcggccatcttgcacttgtactc

SEQ ID NO: 3836048 - DNA, 25 bp, Homo sapien
agctcctcgtgtagccactccacct

SEQ ID NO: 3836049 - DNA, 25 bp, Homo sapien
cacccagcctgaaactgcttttgct

SEQ ID NO: 3836050 - DNA, 25 bp, Homo sapien
cctgaaactgcttttgctgagcgtg

SEQ ID NO: 3836051 - DNA, 25 bp, Homo sapien
cagcctgaaactgcttttgctgagc

SEQ ID NO: 3836052 - DNA, 25 bp, Homo sapien
tgaaactgcttttgctgagcgtgtc

SEQ ID NO: 3836053 - DNA, 25 bp, Homo sapien
ctccacgggttccaggccatcaggg

SEQ ID NO: 3836054 - DNA, 25 bp, Homo sapien
gccatcagggccaagctgcttcttg

SEQ ID NO: 3836055 - DNA, 25 bp, Homo sapien
ccaggccatcagggccaagctgctt

SEQ ID NO: 3836056 - DNA, 25 bp, Homo sapien
ggccatcagggccaagctgcttctt

SEQ ID NO: 3836057 - DNA, 25 bp, Homo sapien
attgaagcccttttggagttcctca

SEQ ID NO: 3836058 - DNA, 25 bp, Homo sapien
tttgcgcgtccttcgcattgaagcc

SEQ ID NO: 3836059 - DNA, 25 bp, Homo sapien
gcgtccttcgcattgaagccctttt

SEQ ID NO: 3836060 - DNA, 25 bp, Homo sapien
cttgctgcatttgcgcgtccttcgc

SEQ ID NO: 3836061 - DNA, 25 bp, Homo sapien
tgcatggggaacttggccttggtgg

SEQ ID NO: 3836062 - DNA, 25 bp, Homo sapien
gcatggggaacttggccttggtggg

SEQ ID NO: 3836063 - DNA, 25 bp, Homo sapien
ctgcatggggaacttggccttggtg

SEQ ID NO: 3836064 - DNA, 25 bp, Homo sapien
catggggaacttggccttggtgggg

SEQ ID NO: 3836065 - DNA, 25 bp, Homo sapien
gggtgggtcacgcactgacatcccc

SEQ ID NO: 3836066 - DNA, 25 bp, Homo sapien
tgacatccccgcctgtcttgggaac

SEQ ID NO: 3836067 - DNA, 25 bp, Homo sapien
acccggaggccggcgtcgatacact

SEQ ID NO: 3836068 - DNA, 25 bp, Homo sapien
ctcagagttggggacccggaggccg

SEQ ID NO: 3836069 - DNA, 25 bp, Homo sapien
tgtgtcaatgtcaaaacaaggtttg

SEQ ID NO: 3836070 - DNA, 25 bp, Homo sapien
tttgagggaggtgcaactcacgcat

SEQ ID NO: 3836071 - DNA, 25 bp, Homo sapien
aacacagtcatcacgtttatgaact

SEQ ID NO: 3836072 - DNA, 25 bp, Homo sapien
cacgcatgagcatgaaaacacagtc

SEQ ID NO: 3836073 - DNA, 25 bp, Homo sapien
cgaagtctggtcgtggctgacatca

SEQ ID NO: 3836074 - DNA, 25 bp, Homo sapien
ccgaagtctggtcgtggctgacatc

SEQ ID NO: 3836075 - DNA, 25 bp, Homo sapien
acgccggtgcacacataatatcctg

SEQ ID NO: 3836076 - DNA, 25 bp, Homo sapien
cggtgcacacataatatcctggagg

SEQ ID NO: 3836077 - DNA, 25 bp, Homo sapien
tagggaccaacacaacccacaattc

SEQ ID NO: 3836078 - DNA, 25 bp, Homo sapien
atcccacgccggtgcacacataata

SEQ ID NO: 3836079 - DNA, 25 bp, Homo sapien
aaggaaccatatttcgtataggcga

SEQ ID NO: 3836080 - DNA, 25 bp, Homo sapien
aagccacaaaaggaaccatatttcg

SEQ ID NO: 3836081 - DNA, 25 bp, Homo sapien
catatttcgtataggcgatgggagt

SEQ ID NO: 3836082 - DNA, 25 bp, Homo sapien
aaccatatttcgtataggcgatggg

SEQ ID NO: 3836083 - DNA, 25 bp, Homo sapien
ctgcggatgtcacatgggcaggaca

SEQ ID NO: 3836084 - DNA, 25 bp, Homo sapien
agccggcctcctcagctcgagtgta

SEQ ID NO: 3836085 - DNA, 25 bp, Homo sapien
cctcagctcgagtgtaacaacagtc

SEQ ID NO: 3836086 - DNA, 25 bp, Homo sapien
gagtgtaacaacagtcgtggccatg

SEQ ID NO: 3836087 - DNA, 25 bp, Homo sapien
gctcgagtgtaacaacagtcgtggc

SEQ ID NO: 3836088 - DNA, 25 bp, Homo sapien
aaatatcacttacatgagatatacc

SEQ ID NO: 3836089 - DNA, 25 bp, Homo sapien
cacttacatgagatatacccaaggg

SEQ ID NO: 3836090 - DNA, 25 bp, Homo sapien
tggttattgcaacaggggcacggaa

SEQ ID NO: 3836091 - DNA, 25 bp, Homo sapien
cccaaggggtggtctacagagactt

SEQ ID NO: 3836092 - DNA, 25 bp, Homo sapien
agtgaaaagaaatattacagccatg

SEQ ID NO: 3836093 - DNA, 25 bp, Homo sapien
ctgggagtgaaaagaaatattacag

SEQ ID NO: 3836094 - DNA, 25 bp, Homo sapien
gggagtgaaaagaaatattacagcc

SEQ ID NO: 3836095 - DNA, 25 bp, Homo sapien
ggagtgaaaagaaatattacagcca

SEQ ID NO: 3836096 - DNA, 25 bp, Homo sapien
gcaatcctctgcttccgatggagtt

SEQ ID NO: 3836097 - DNA, 25 bp, Homo sapien
cttccgatggagttagttgtgatga

SEQ ID NO: 3836098 - DNA, 25 bp, Homo sapien
aaggatctctctatggctgatggtc

SEQ ID NO: 3836099 - DNA, 25 bp, Homo sapien
tgaactgcggggttaatgacaccat

SEQ ID NO: 3836100 - DNA, 25 bp, Homo sapien
agctcaccacaaccttttcctgctg

SEQ ID NO: 3836101 - DNA, 25 bp, Homo sapien
ccacaaccttttcctgctgggttca

SEQ ID NO: 3836102 - DNA, 25 bp, Homo sapien
tcaccacaaccttttcctgctgggt

SEQ ID NO: 3836103 - DNA, 25 bp, Homo sapien
agctaccgcacctgggctatttttt

SEQ ID NO: 3836104 - DNA, 25 bp, Homo sapien
catctaaccgtgttgaagtgtacag

SEQ ID NO: 3836105 - DNA, 25 bp, Homo sapien
taattaccatctaaccgtgttgaag

SEQ ID NO: 3836106 - DNA, 25 bp, Homo sapien
gatgataattaccatctaaccgtgt

SEQ ID NO: 3836107 - DNA, 25 bp, Homo sapien
taccatctaaccgtgttgaagtgta

SEQ ID NO: 3836108 - DNA, 25 bp, Homo sapien
tcagccgtaaatgatgatttactgc

SEQ ID NO: 3836109 - DNA, 25 bp, Homo sapien
ccctcatcagccgtaaatgatgatt

SEQ ID NO: 3836110 - DNA, 25 bp, Homo sapien
taaatgatgatttactgctgttacc

SEQ ID NO: 3836111 - DNA, 25 bp, Homo sapien
cttctggccttccctcatcagccgt

SEQ ID NO: 3836112 - DNA, 25 bp, Homo sapien
atatggtgtcagcctgcatgggaga

SEQ ID NO: 3836113 - DNA, 25 bp, Homo sapien
catatggtgtcagcctgcatgggag

SEQ ID NO: 3836114 - DNA, 25 bp, Homo sapien
tcatatggtgtcagcctgcatggga

SEQ ID NO: 3836115 - DNA, 25 bp, Homo sapien
agctctctggcatcctgtgaccttt

SEQ ID NO: 3836116 - DNA, 25 bp, Homo sapien
ctgtgtccggcagcctgaaccccat

SEQ ID NO: 3836117 - DNA, 25 bp, Homo sapien
ccttggacttttagcatagtgtgtc

SEQ ID NO: 3836118 - DNA, 25 bp, Homo sapien
tagcatagtgtgtcaggtcttcata

SEQ ID NO: 3836119 - DNA, 25 bp, Homo sapien
agacttggtggtgcgcactgatagt

SEQ ID NO: 3836120 - DNA, 25 bp, Homo sapien
tgcgcactgatagtctcagctactg

SEQ ID NO: 3836121 - DNA, 25 bp, Homo sapien
cagacttggtggtgcgcactgatag

SEQ ID NO: 3836122 - DNA, 25 bp, Homo sapien
cttggtggtgcgcactgatagtctc

SEQ ID NO: 3836123 - DNA, 25 bp, Homo sapien
gtgggcgcccgcgatcaggagcccg

SEQ ID NO: 3836124 - DNA, 25 bp, Homo sapien
tccgcgctgtgggcgcccgcgatca

SEQ ID NO: 3836125 - DNA, 25 bp, Homo sapien
ccgcgatcaggagcccgcgtggtcg

SEQ ID NO: 3836126 - DNA, 25 bp, Homo sapien
gcccgcgatcaggagcccgcgtggt

SEQ ID NO: 3836127 - DNA, 25 bp, Homo sapien
gcgcgacaacgccggccaccagccc

SEQ ID NO: 3836128 - DNA, 25 bp, Homo sapien
cgcgacaacgccggccaccagcccg

SEQ ID NO: 3836129 - DNA, 25 bp, Homo sapien
cgacaacgccggccaccagcccgcc

SEQ ID NO: 3836130 - DNA, 25 bp, Homo sapien
tggtgggccacgggtggcgccgggc

SEQ ID NO: 3836131 - DNA, 25 bp, Homo sapien
gttgctgcagcacgtccccggcgga

SEQ ID NO: 3836132 - DNA, 25 bp, Homo sapien
cgtagagctacgttgctcgagcaac

SEQ ID NO: 3836133 - DNA, 25 bp, Homo sapien
gagacgagcgagctacggcacgctc

SEQ ID NO: 3836134 - DNA, 25 bp, Homo sapien
tacggcacgctcgtagagcgtagag

SEQ ID NO: 3836135 - DNA, 25 bp, Homo sapien
gttgaagttggcgtggaaggtcacc

SEQ ID NO: 3836136 - DNA, 25 bp, Homo sapien
acgtagttgaagttggcgtggaagg

SEQ ID NO: 3836137 - DNA, 25 bp, Homo sapien
tgaagttggcgtggaaggtcaccac

SEQ ID NO: 3836138 - DNA, 25 bp, Homo sapien
aagttggcgtggaaggtcaccacca

SEQ ID NO: 3836139 - DNA, 25 bp, Homo sapien
tggtcgcacagcaacttggccagca

SEQ ID NO: 3836140 - DNA, 25 bp, Homo sapien
gcgatgggcgcaccgaccacctggt

SEQ ID NO: 3836141 - DNA, 25 bp, Homo sapien
tagaaggccgagaccgcgatgggcg

SEQ ID NO: 3836142 - DNA, 25 bp, Homo sapien
accacctggtcgcacagcaacttgg

SEQ ID NO: 3836143 - DNA, 25 bp, Homo sapien
tttcaggtccaaaaatatgtcatcc

SEQ ID NO: 3836144 - DNA, 25 bp, Homo sapien
gtttcaggtccaaaaatatgtcatc

SEQ ID NO: 3836145 - DNA, 25 bp, Homo sapien
ttctgtttcaggtccaaaaatatgt

SEQ ID NO: 3836146 - DNA, 25 bp, Homo sapien
ctgtttcaggtccaaaaatatgtca

SEQ ID NO: 3836147 - DNA, 25 bp, Homo sapien
gggtatcttccactaacacctagga

SEQ ID NO: 3836148 - DNA, 25 bp, Homo sapien
ggacaacagacgcttgccactatgc

SEQ ID NO: 3836149 - DNA, 25 bp, Homo sapien
gctgggctttagactgctggtatac

SEQ ID NO: 3836150 - DNA, 25 bp, Homo sapien
tcgctgtgctgagtacccatgggct

SEQ ID NO: 3836151 - DNA, 25 bp, Homo sapien
cggtggaaggccaaccccgagacag

SEQ ID NO: 3836152 - DNA, 25 bp, Homo sapien
caggttgacacaagcccctctacca

SEQ ID NO: 3836153 - DNA, 25 bp, Homo sapien
aggttgacacaagcccctctaccac

SEQ ID NO: 3836154 - DNA, 25 bp, Homo sapien
gcatccccacccggccacaggttga

SEQ ID NO: 3836155 - DNA, 25 bp, Homo sapien
aaggagcatccccacccggccacag

SEQ ID NO: 3836156 - DNA, 25 bp, Homo sapien
aaggcaaagcgtgagtgtccaggcc

SEQ ID NO: 3836157 - DNA, 25 bp, Homo sapien
tccacactcccctacagggactgtg

SEQ ID NO: 3836158 - DNA, 25 bp, Homo sapien
gaaaaactccacagagcgtgctgtg

SEQ ID NO: 3836159 - DNA, 25 bp, Homo sapien
tatgaggtagatgacattgatgaag

SEQ ID NO: 3836160 - DNA, 25 bp, Homo sapien
gacagtgaaccccatataaacgtgg

SEQ ID NO: 3836161 - DNA, 25 bp, Homo sapien
tcaggccgtagagcaggtagatgct

SEQ ID NO: 3836162 - DNA, 25 bp, Homo sapien
ccatataaacgtggccctgatgacg

SEQ ID NO: 3836163 - DNA, 25 bp, Homo sapien
gcagggctgacagtgaaccccatat

SEQ ID NO: 3836164 - DNA, 25 bp, Homo sapien
gccgtgcacgacgagcactttctcc

SEQ ID NO: 3836165 - DNA, 25 bp, Homo sapien
ggcgggcgggaagccgtgcacgacg

SEQ ID NO: 3836166 - DNA, 25 bp, Homo sapien
gggaagccgtgcacgacgagcactt

SEQ ID NO: 3836167 - DNA, 25 bp, Homo sapien
ttgccacggcgggcgggaagccgtg

SEQ ID NO: 3836168 - DNA, 25 bp, Homo sapien
tcaagggctcgcagggcgcacaggc

SEQ ID NO: 3836169 - DNA, 25 bp, Homo sapien
gcgcatagaggtcccggcggaggtc

SEQ ID NO: 3836170 - DNA, 25 bp, Homo sapien
aggcccgaaggccatcgcccgtgcg

SEQ ID NO: 3836171 - DNA, 25 bp, Homo sapien
ggtgcagcgggagtaggaggcgcgc

SEQ ID NO: 3836172 - DNA, 25 bp, Homo sapien
gtattcaggtaaagaagcagacggg

SEQ ID NO: 3836173 - DNA, 25 bp, Homo sapien
tgccctcgggcaatgtagtgcaaag

SEQ ID NO: 3836174 - DNA, 25 bp, Homo sapien
tttaaatcgggagatagagaagacc

SEQ ID NO: 3836175 - DNA, 25 bp, Homo sapien
agtcataaagcacctagccggtgag

SEQ ID NO: 3836176 - DNA, 25 bp, Homo sapien
ggcagatcacgtgggctcttagcca

SEQ ID NO: 3836177 - DNA, 25 bp, Homo sapien
gatcacgtgggctcttagccaacag

SEQ ID NO: 3836178 - DNA, 25 bp, Homo sapien
aggcagatcacgtgggctcttagcc

SEQ ID NO: 3836179 - DNA, 25 bp, Homo sapien
cacgtgggctcttagccaacagcca

SEQ ID NO: 3836180 - DNA, 25 bp, Homo sapien
caaccagacacaacatggcgctgta

SEQ ID NO: 3836181 - DNA, 25 bp, Homo sapien
ttctggctaaggtgccaagagcctg

SEQ ID NO: 3836182 - DNA, 25 bp, Homo sapien
atatgaaaccgtacacccaccagtg

SEQ ID NO: 3836183 - DNA, 25 bp, Homo sapien
tgtggcaccacggtcttgagaaatc

SEQ ID NO: 3836184 - DNA, 25 bp, Homo sapien
cacaacccgtggcaggtggttttat

SEQ ID NO: 3836185 - DNA, 25 bp, Homo sapien
caaggtcaagctgtgcacgagacag

SEQ ID NO: 3836186 - DNA, 25 bp, Homo sapien
agatcctagaagaaccacaacccgt

SEQ ID NO: 3836187 - DNA, 25 bp, Homo sapien
ggacactgcagtcccattgccctgg

SEQ ID NO: 3836188 - DNA, 25 bp, Homo sapien
ctgggataggcaggccctggaaagg

SEQ ID NO: 3836189 - DNA, 25 bp, Homo sapien
aacagacaagctctctctaattgac

SEQ ID NO: 3836190 - DNA, 25 bp, Homo sapien
ctgccaggcagccaacagacaagct

SEQ ID NO: 3836191 - DNA, 25 bp, Homo sapien
gagaaagctgggataggcaggccct

SEQ ID NO: 3836192 - DNA, 25 bp, Homo sapien
agcttaaagtgatctccaaagccac

SEQ ID NO: 3836193 - DNA, 25 bp, Homo sapien
cttaaagtgatctccaaagccacga

SEQ ID NO: 3836194 - DNA, 25 bp, Homo sapien
agctggagacaagcttaaagtgatc

SEQ ID NO: 3836195 - DNA, 25 bp, Homo sapien
gcttaaagtgatctccaaagccacg

SEQ ID NO: 3836196 - DNA, 25 bp, Homo sapien
ggaatgcagggttgttctctgagct

SEQ ID NO: 3836197 - DNA, 25 bp, Homo sapien
ttctctgagctgagggtttcctagg

SEQ ID NO: 3836198 - DNA, 25 bp, Homo sapien
cctcgcccgcagtggctgattgtgg

SEQ ID NO: 3836199 - DNA, 25 bp, Homo sapien
tcctcgcccgcagtggctgattgtg

SEQ ID NO: 3836200 - DNA, 25 bp, Homo sapien
cgccctgggccgttccactgtgtca

SEQ ID NO: 3836201 - DNA, 25 bp, Homo sapien
agggcgccctgggccgttccactgt

SEQ ID NO: 3836202 - DNA, 25 bp, Homo sapien
ggcgccctgggccgttccactgtgt

SEQ ID NO: 3836203 - DNA, 25 bp, Homo sapien
ccctgggccgttccactgtgtcact

SEQ ID NO: 3836204 - DNA, 25 bp, Homo sapien
gtccagctgcactgaggaagctcta

SEQ ID NO: 3836205 - DNA, 25 bp, Homo sapien
accctcgtcgggcaaggcccagatg

SEQ ID NO: 3836206 - DNA, 25 bp, Homo sapien
ccagctgcactgaggaagctctagg

SEQ ID NO: 3836207 - DNA, 25 bp, Homo sapien
gcagaccagtgaaagcaccctcgtc

SEQ ID NO: 3836208 - DNA, 25 bp, Homo sapien
aaccaggtcgggctctaatgcggtg

SEQ ID NO: 3836209 - DNA, 25 bp, Homo sapien
aaaaccaggtcgggctctaatgcgg

SEQ ID NO: 3836210 - DNA, 25 bp, Homo sapien
accaggtcgggctctaatgcggtgg

SEQ ID NO: 3836211 - DNA, 25 bp, Homo sapien
caggtcgggctctaatgcggtggtt

SEQ ID NO: 3836212 - DNA, 25 bp, Homo sapien
tcaggggccagagccaggcccgttc

SEQ ID NO: 3836213 - DNA, 25 bp, Homo sapien
tgcgtcaggggccagagccaggccc

SEQ ID NO: 3836214 - DNA, 25 bp, Homo sapien
ctgcgtcaggggccagagccaggcc

SEQ ID NO: 3836215 - DNA, 25 bp, Homo sapien
cgtcaggggccagagccaggcccgt

SEQ ID NO: 3836216 - DNA, 25 bp, Homo sapien
ctgcaaagtacttgatgagcgggac

SEQ ID NO: 3836217 - DNA, 25 bp, Homo sapien
caaagtacttgatgagcgggacccc

SEQ ID NO: 3836218 - DNA, 25 bp, Homo sapien
ccttcacgtactccagtggcgggcg

SEQ ID NO: 3836219 - DNA, 25 bp, Homo sapien
ccccttcacgtactccagtggcggg

SEQ ID NO: 3836220 - DNA, 25 bp, Homo sapien
gatgggagctcggtgacacttctcc

SEQ ID NO: 3836221 - DNA, 25 bp, Homo sapien
gaagatgggagctcggtgacacttc

SEQ ID NO: 3836222 - DNA, 25 bp, Homo sapien
aagatgggagctcggtgacacttct

SEQ ID NO: 3836223 - DNA, 25 bp, Homo sapien
ctccactccccttgcacccaggaca

SEQ ID NO: 3836224 - DNA, 25 bp, Homo sapien
ttcaggagtcgtggggccggtgtgt

SEQ ID NO: 3836225 - DNA, 25 bp, Homo sapien
gtgtcttcaggagtcgtggggccgg

SEQ ID NO: 3836226 - DNA, 25 bp, Homo sapien
tgtcttcaggagtcgtggggccggt

SEQ ID NO: 3836227 - DNA, 25 bp, Homo sapien
tcttcaggagtcgtggggccggtgt

SEQ ID NO: 3836228 - DNA, 25 bp, Homo sapien
cctccttccctggattcacatgccc

SEQ ID NO: 3836229 - DNA, 25 bp, Homo sapien
cagtgagccaccacaggtgccacag

SEQ ID NO: 3836230 - DNA, 25 bp, Homo sapien
ccctggattcacatgccccacacct

SEQ ID NO: 3836231 - DNA, 25 bp, Homo sapien
gagccaccacaggtgccacagtttt

SEQ ID NO: 3836232 - DNA, 25 bp, Homo sapien
ctgcatcaatgcgtcacaccccaat

SEQ ID NO: 3836233 - DNA, 25 bp, Homo sapien
gccaccaaattttgtgggcctgtga

SEQ ID NO: 3836234 - DNA, 25 bp, Homo sapien
ctgtgaggacccaccctctagcttt

SEQ ID NO: 3836235 - DNA, 25 bp, Homo sapien
ggccagctcatctcttggattggca

SEQ ID NO: 3836236 - DNA, 25 bp, Homo sapien
cacatcctttgcgttgcgggcaaca

SEQ ID NO: 3836237 - DNA, 25 bp, Homo sapien
catcctttgcgttgcgggcaacata

SEQ ID NO: 3836238 - DNA, 25 bp, Homo sapien
atcctttgcgttgcgggcaacatag

SEQ ID NO: 3836239 - DNA, 25 bp, Homo sapien
acatcctttgcgttgcgggcaacat

SEQ ID NO: 3836240 - DNA, 25 bp, Homo sapien
gaacagggtgggtgcggctcagctc

SEQ ID NO: 3836241 - DNA, 25 bp, Homo sapien
agctgactcaggtgcgagagatgag

SEQ ID NO: 3836242 - DNA, 25 bp, Homo sapien
gagtcacatggagggaagcatcgca

SEQ ID NO: 3836243 - DNA, 25 bp, Homo sapien
agggaagcatcgcacgtggtctcac

SEQ ID NO: 3836244 - DNA, 25 bp, Homo sapien
ctcaggtgcgagagatgagagctgt

SEQ ID NO: 3836245 - DNA, 25 bp, Homo sapien
ggaggctcggattactgattcagga

SEQ ID NO: 3836246 - DNA, 25 bp, Homo sapien
cccctcagtggaggctcggattact

SEQ ID NO: 3836247 - DNA, 25 bp, Homo sapien
cctcagtggaggctcggattactga

SEQ ID NO: 3836248 - DNA, 25 bp, Homo sapien
agtggaggctcggattactgattca

SEQ ID NO: 3836249 - DNA, 25 bp, Homo sapien
ccaggatcttttgaatctccctttt

SEQ ID NO: 3836250 - DNA, 25 bp, Homo sapien
tccaggatcttttgaatctcccttt

SEQ ID NO: 3836251 - DNA, 25 bp, Homo sapien
tcatctccttgaacgacgtgtgctg

SEQ ID NO: 3836252 - DNA, 25 bp, Homo sapien
catctccttgaacgacgtgtgctga

SEQ ID NO: 3836253 - DNA, 25 bp, Homo sapien
tccttgaacgacgtgtgctgaacca

SEQ ID NO: 3836254 - DNA, 25 bp, Homo sapien
tctccttgaacgacgtgtgctgaac

SEQ ID NO: 3836255 - DNA, 25 bp, Homo sapien
gaagcgctcattctgcgccacggtg

SEQ ID NO: 3836256 - DNA, 25 bp, Homo sapien
gcatcgaagcgctcattctgcgcca

SEQ ID NO: 3836257 - DNA, 25 bp, Homo sapien
gcgccacggtgaaggtggtcttcca

SEQ ID NO: 3836258 - DNA, 25 bp, Homo sapien
cgcatagtccgcatcgaagcgctca

SEQ ID NO: 3836259 - DNA, 25 bp, Homo sapien
ttgagccgcttggtcaggtttgatt

SEQ ID NO: 3836260 - DNA, 25 bp, Homo sapien
gcttggtcaggtttgattcgcacac

SEQ ID NO: 3836261 - DNA, 25 bp, Homo sapien
tcatattttattcttgagccgcttg

SEQ ID NO: 3836262 - DNA, 25 bp, Homo sapien
tcccgggccctcaattcatatttta

SEQ ID NO: 3836263 - DNA, 25 bp, Homo sapien
ctgggattacagacatgacctaccg

SEQ ID NO: 3836264 - DNA, 25 bp, Homo sapien
gctgggattacagacatgacctacc

SEQ ID NO: 3836265 - DNA, 25 bp, Homo sapien
tttttaacagaatctcactatgttg

SEQ ID NO: 3836266 - DNA, 25 bp, Homo sapien
tatttttttaacagaatctcactat

SEQ ID NO: 3836267 - DNA, 25 bp, Homo sapien
tgccttcacttgtcaagtagctggg

SEQ ID NO: 3836268 - DNA, 25 bp, Homo sapien
tgatgtcttgtaatgttgaacaggc

SEQ ID NO: 3836269 - DNA, 25 bp, Homo sapien
tccctcaggcttgagtggattagcc

SEQ ID NO: 3836270 - DNA, 25 bp, Homo sapien
agactggtcctgaatcataatttat

SEQ ID NO: 3836271 - DNA, 25 bp, Homo sapien
cggtggaaggccaaccccgagacag

SEQ ID NO: 3836272 - DNA, 25 bp, Homo sapien
gcatccccacccggccacaggttga

SEQ ID NO: 3836273 - DNA, 25 bp, Homo sapien
aggttgacacaagcccctctaccac

SEQ ID NO: 3836274 - DNA, 25 bp, Homo sapien
caggttgacacaagcccctctacca

SEQ ID NO: 3836275 - DNA, 25 bp, Homo sapien
aaggagcatccccacccggccacag

SEQ ID NO: 3836276 - DNA, 25 bp, Homo sapien
aggtatgaggtagatgacattgatg

SEQ ID NO: 3836277 - DNA, 25 bp, Homo sapien
tatgaggtagatgacattgatgaag

SEQ ID NO: 3836278 - DNA, 25 bp, Homo sapien
gaaggcaaagcgtgagtgtccaggc

SEQ ID NO: 3836279 - DNA, 25 bp, Homo sapien
aggcaaagcgtgagtgtccaggcca

SEQ ID NO: 3836280 - DNA, 25 bp, Homo sapien
tccacactcccctacagggactgtg

SEQ ID NO: 3836281 - DNA, 25 bp, Homo sapien
ccacactcccctacagggactgtgc

SEQ ID NO: 3836282 - DNA, 25 bp, Homo sapien
cacactcccctacagggactgtgcc

SEQ ID NO: 3836283 - DNA, 25 bp, Homo sapien
gaaaaactccacagagcgtgctgtg

SEQ ID NO: 3836284 - DNA, 25 bp, Homo sapien
gccgtgcacgacgagcactttctcc

SEQ ID NO: 3836285 - DNA, 25 bp, Homo sapien
ggcgggcgggaagccgtgcacgacg

SEQ ID NO: 3836286 - DNA, 25 bp, Homo sapien
gggaagccgtgcacgacgagcactt

SEQ ID NO: 3836287 - DNA, 25 bp, Homo sapien
ttgccacggcgggcgggaagccgtg

SEQ ID NO: 3836288 - DNA, 25 bp, Homo sapien
gcgcatagaggtcccggcggaggtc

SEQ ID NO: 3836289 - DNA, 25 bp, Homo sapien
aggcccgaaggccatcgcccgtgcg

SEQ ID NO: 3836290 - DNA, 25 bp, Homo sapien
cccgtgcggcgcggcgcatagaggt

SEQ ID NO: 3836291 - DNA, 25 bp, Homo sapien
ggtgcagcgggagtaggaggcgcgc

SEQ ID NO: 3836292 - DNA, 25 bp, Homo sapien
tcaagggctcgcagggcgcacaggc

SEQ ID NO: 3836293 - DNA, 25 bp, Homo sapien
agtcataaagcacctagccggtgag

SEQ ID NO: 3836294 - DNA, 25 bp, Homo sapien
gtattcaggtaaagaagcagacggg

SEQ ID NO: 3836295 - DNA, 25 bp, Homo sapien
tttaaatcgggagatagagaagacc

SEQ ID NO: 3836296 - DNA, 25 bp, Homo sapien
tgccctcgggcaatgtagtgcaaag

SEQ ID NO: 3836297 - DNA, 25 bp, Homo sapien
cctcgcccgcagtggctgagtgtgg

SEQ ID NO: 3836298 - DNA, 25 bp, Homo sapien
cgtcctgggccattccggtgtgtca

SEQ ID NO: 3836299 - DNA, 25 bp, Homo sapien
cctgatgtgggaatgagcaaaactg

SEQ ID NO: 3836300 - DNA, 25 bp, Homo sapien
agtaggctcctctccccgatgttcc

SEQ ID NO: 3836301 - DNA, 25 bp, Homo sapien
taaaactatccaggcaggatggtga

SEQ ID NO: 3836302 - DNA, 25 bp, Homo sapien
gtgcagaccagtgaaagcaccctcg

SEQ ID NO: 3836303 - DNA, 25 bp, Homo sapien
tgcagaccagtgaaagcaccctcgt

SEQ ID NO: 3836304 - DNA, 25 bp, Homo sapien
ccatggtgcagaccagtgaaagcac

SEQ ID NO: 3836305 - DNA, 25 bp, Homo sapien
tggtgcagaccagtgaaagcaccct

SEQ ID NO: 3836306 - DNA, 25 bp, Homo sapien
aaccaggtcgggctctaatgtggtg

SEQ ID NO: 3836307 - DNA, 25 bp, Homo sapien
ccaggtcgggctctaatgtggtggt

SEQ ID NO: 3836308 - DNA, 25 bp, Homo sapien
aaaaccaggtcgggctctaatgtgg

SEQ ID NO: 3836309 - DNA, 25 bp, Homo sapien
caggtcgggctctaatgtggtggtt

SEQ ID NO: 3836310 - DNA, 25 bp, Homo sapien
tcaggggccagagccaggcccgttc

SEQ ID NO: 3836311 - DNA, 25 bp, Homo sapien
tgcgtcaggggccagagccaggccc

SEQ ID NO: 3836312 - DNA, 25 bp, Homo sapien
ctgcgtcaggggccagagccaggcc

SEQ ID NO: 3836313 - DNA, 25 bp, Homo sapien
cgtcaggggccagagccaggcccgt

SEQ ID NO: 3836314 - DNA, 25 bp, Homo sapien
ctgcaaagtacttgatgagcgggac

SEQ ID NO: 3836315 - DNA, 25 bp, Homo sapien
caaagtacttgatgagcgggacccc

SEQ ID NO: 3836316 - DNA, 25 bp, Homo sapien
ccttcacgtactccagtggcgggcg

SEQ ID NO: 3836317 - DNA, 25 bp, Homo sapien
ccccttcacgtactccagtggcggg

SEQ ID NO: 3836318 - DNA, 25 bp, Homo sapien
tgggagctcggtgacacttttccag

SEQ ID NO: 3836319 - DNA, 25 bp, Homo sapien
ggagctcggtgacacttttccaggt

SEQ ID NO: 3836320 - DNA, 25 bp, Homo sapien
gaagatgggagctcggtgacacttt

SEQ ID NO: 3836321 - DNA, 25 bp, Homo sapien
gatgggagctcggtgacacttttcc

SEQ ID NO: 3836322 - DNA, 25 bp, Homo sapien
ctccactccccttgcacccaggaca

SEQ ID NO: 3836323 - DNA, 25 bp, Homo sapien
ggtgtgtttttcagagtctccatcc

SEQ ID NO: 3836324 - DNA, 25 bp, Homo sapien
tggtgtgtttttcagagtctccatc

SEQ ID NO: 3836325 - DNA, 25 bp, Homo sapien
ctggtgtgtttttcagagtctccat

SEQ ID NO: 3836326 - DNA, 25 bp, Homo sapien
aggggcaggtgtgtcttcaggagtc

SEQ ID NO: 3836327 - DNA, 25 bp, Homo sapien
gggcaggtgtgtcttcaggagtcgt

SEQ ID NO: 3836328 - DNA, 25 bp, Homo sapien
gaccttctgatccaacagagtctgg

SEQ ID NO: 3836329 - DNA, 25 bp, Homo sapien
caggtgtgtcttcaggagtcgtggg

SEQ ID NO: 3836330 - DNA, 25 bp, Homo sapien
ctttctattcatcgttttttgagac

SEQ ID NO: 3836331 - DNA, 25 bp, Homo sapien
aagagacttatctggaacttctggc

SEQ ID NO: 3836332 - DNA, 25 bp, Homo sapien
gccaccgcactggtgggacactctt

SEQ ID NO: 3836333 - DNA, 25 bp, Homo sapien
tttttggaagagacttatctggaac

SEQ ID NO: 3836334 - DNA, 25 bp, Homo sapien
catgccctgctgattatttgcatct

SEQ ID NO: 3836335 - DNA, 25 bp, Homo sapien
cagcggtgagccacccaggtggcaa

SEQ ID NO: 3836336 - DNA, 25 bp, Homo sapien
cctccaaccttagacttttgagtag

SEQ ID NO: 3836337 - DNA, 25 bp, Homo sapien
aacaatgtctcgttgtgtctcccag

SEQ ID NO: 3836338 - DNA, 25 bp, Homo sapien
aggtctacccggaagagtctcatgt

SEQ ID NO: 3836339 - DNA, 25 bp, Homo sapien
agagcaaaaggcagacagtcccccc

SEQ ID NO: 3836340 - DNA, 25 bp, Homo sapien
agacagtcccccccgtggaagatga

SEQ ID NO: 3836341 - DNA, 25 bp, Homo sapien
gtctcatgtttttggtcatcagagc

SEQ ID NO: 3836342 - DNA, 25 bp, Homo sapien
ttctatagtaatataatctgcatca

SEQ ID NO: 3836343 - DNA, 25 bp, Homo sapien
aatataatctgcatcaatgcgtcac

SEQ ID NO: 3836344 - DNA, 25 bp, Homo sapien
gtccctgagaccatcatattctata

SEQ ID NO: 3836345 - DNA, 25 bp, Homo sapien
cctgagaccatcatattctatagta

SEQ ID NO: 3836346 - DNA, 25 bp, Homo sapien
agaagactcaaccccagcaccatca

SEQ ID NO: 3836347 - DNA, 25 bp, Homo sapien
caggggcagaagactcaaccccagc

SEQ ID NO: 3836348 - DNA, 25 bp, Homo sapien
gcagaagactcaaccccagcaccat

SEQ ID NO: 3836349 - DNA, 25 bp, Homo sapien
ctgcaggggcagaagactcaacccc

SEQ ID NO: 3836350 - DNA, 25 bp, Homo sapien
cagggtgagggtacactttggccat

SEQ ID NO: 3836351 - DNA, 25 bp, Homo sapien
aagtggtagtaggaaaccgccacat

SEQ ID NO: 3836352 - DNA, 25 bp, Homo sapien
gaagtggtagtaggaaaccgccaca

SEQ ID NO: 3836353 - DNA, 25 bp, Homo sapien
agggtgagggtacactttggccatg

SEQ ID NO: 3836354 - DNA, 25 bp, Homo sapien
gtgcggctcagctcccaccactctt

SEQ ID NO: 3836355 - DNA, 25 bp, Homo sapien
gaacagggtgggtgcggctcagctc

SEQ ID NO: 3836356 - DNA, 25 bp, Homo sapien
tcttgcacgtgctggtaccaggacc

SEQ ID NO: 3836357 - DNA, 25 bp, Homo sapien
ccactcttgcacgtgctggtaccag

SEQ ID NO: 3836358 - DNA, 25 bp, Homo sapien
agggctcctcagtggaggcttggat

SEQ ID NO: 3836359 - DNA, 25 bp, Homo sapien
ggctcctcagtggaggcttggattg

SEQ ID NO: 3836360 - DNA, 25 bp, Homo sapien
gagcagcagagggctcctcagtgga

SEQ ID NO: 3836361 - DNA, 25 bp, Homo sapien
ctgagcagcagagggctcctcagtg

SEQ ID NO: 3836362 - DNA, 25 bp, Homo sapien
acgtgtgctcaaccatgaggtccac

SEQ ID NO: 3836363 - DNA, 25 bp, Homo sapien
tgtgctcaaccatgaggtccacagt

SEQ ID NO: 3836364 - DNA, 25 bp, Homo sapien
cgtgtgctcaaccatgaggtccaca

SEQ ID NO: 3836365 - DNA, 25 bp, Homo sapien
gtgctcaaccatgaggtccacagtc

SEQ ID NO: 3836366 - DNA, 25 bp, Homo sapien
ctgctccaaacccccgtgctggccg

SEQ ID NO: 3836367 - DNA, 25 bp, Homo sapien
tccaaacccccgtgctggccggcac

SEQ ID NO: 3836368 - DNA, 25 bp, Homo sapien
caaacccccgtgctggccggcacct

SEQ ID NO: 3836369 - DNA, 25 bp, Homo sapien
ctccaaacccccgtgctggccggca

SEQ ID NO: 3836370 - DNA, 25 bp, Homo sapien
gcatcgaagcgctcattctgcgcca

SEQ ID NO: 3836371 - DNA, 25 bp, Homo sapien
gcgccacggtgaaggtggtcttcca

SEQ ID NO: 3836372 - DNA, 25 bp, Homo sapien
gaagcgctcattctgcgccacggtg

SEQ ID NO: 3836373 - DNA, 25 bp, Homo sapien
cgcatagtccgcatcgaagcgctca

SEQ ID NO: 3836374 - DNA, 25 bp, Homo sapien
tcacagctcagagcggaagctgagg

SEQ ID NO: 3836375 - DNA, 25 bp, Homo sapien
gagcggaagctgaggctgcagcctg

SEQ ID NO: 3836376 - DNA, 25 bp, Homo sapien
ctcagagcggaagctgaggctgcag

SEQ ID NO: 3836377 - DNA, 25 bp, Homo sapien
cagagcggaagctgaggctgcagcc

SEQ ID NO: 3836378 - DNA, 25 bp, Homo sapien
ggagcctcttggtcaggcttgattc

SEQ ID NO: 3836379 - DNA, 25 bp, Homo sapien
tcttggtcaggcttgattcgcacac

SEQ ID NO: 3836380 - DNA, 25 bp, Homo sapien
ttgaacacaaatcatactttattct

SEQ ID NO: 3836381 - DNA, 25 bp, Homo sapien
actttattctggagcctcttggtca

SEQ ID NO: 3836382 - DNA, 25 bp, Homo sapien
atgggacacaagccacctgaggcca

SEQ ID NO: 3836383 - DNA, 25 bp, Homo sapien
tgggacacaagccacctgaggccag

SEQ ID NO: 3836384 - DNA, 25 bp, Homo sapien
gggacacaagccacctgaggccagg

SEQ ID NO: 3836385 - DNA, 25 bp, Homo sapien
tacaggcagattacgcattccattc

SEQ ID NO: 3836386 - DNA, 25 bp, Homo sapien
tacaaccagggtgtccctcagacag

SEQ ID NO: 3836387 - DNA, 25 bp, Homo sapien
tcagtcatccacagttagaacagtt

SEQ ID NO: 3836388 - DNA, 25 bp, Homo sapien
aaagcaggcgtggtcctgacagaca

SEQ ID NO: 3836389 - DNA, 25 bp, Homo sapien
ccaagactttagcaacagcctgcat

SEQ ID NO: 3836390 - DNA, 25 bp, Homo sapien
agtctctagcctcatcagttcccaa

SEQ ID NO: 3836391 - DNA, 25 bp, Homo sapien
agttcccaagactttagcaacagcc

SEQ ID NO: 3836392 - DNA, 25 bp, Homo sapien
tagcagatagtctctagcctcatca

SEQ ID NO: 3836393 - DNA, 25 bp, Homo sapien
tgggtggccggcgaactgccaggag

SEQ ID NO: 3836394 - DNA, 25 bp, Homo sapien
ggccggcgaactgccaggagggagg

SEQ ID NO: 3836395 - DNA, 25 bp, Homo sapien
aggtgggtggccggcgaactgccag

SEQ ID NO: 3836396 - DNA, 25 bp, Homo sapien
cctgggggggtgtaagagatagcca

SEQ ID NO: 3836397 - DNA, 25 bp, Homo sapien
tcatccgcagactccgaaaaagggt

SEQ ID NO: 3836398 - DNA, 25 bp, Homo sapien
aaaaaagcgtgtgcggttctcgacg

SEQ ID NO: 3836399 - DNA, 25 bp, Homo sapien
gaacgcaggtctgtgatcatccgca

SEQ ID NO: 3836400 - DNA, 25 bp, Homo sapien
tcacagaggaacgactacgcatgcg

SEQ ID NO: 3836401 - DNA, 25 bp, Homo sapien
tattttccatagaggaggtcccgct

SEQ ID NO: 3836402 - DNA, 25 bp, Homo sapien
cctcacctgatcgagggcttcacct

SEQ ID NO: 3836403 - DNA, 25 bp, Homo sapien
ggatctgggctaaaacactcgttgg

SEQ ID NO: 3836404 - DNA, 25 bp, Homo sapien
aggtcccgcttctcggcagaaagca

SEQ ID NO: 3836405 - DNA, 25 bp, Homo sapien
tcaggccctgtctgatgcaatctgg

SEQ ID NO: 3836406 - DNA, 25 bp, Homo sapien
caaaatccagcccagtaaacacagt

SEQ ID NO: 3836407 - DNA, 25 bp, Homo sapien
tcttcttctcctaacgctttgtctg

SEQ ID NO: 3836408 - DNA, 25 bp, Homo sapien
tccctcagcttataaggctgtgtct

SEQ ID NO: 3836409 - DNA, 25 bp, Homo sapien
cgaggtaggaatgggccaggctata

SEQ ID NO: 3836410 - DNA, 25 bp, Homo sapien
atgggccaggctatagaggtcagat

SEQ ID NO: 3836411 - DNA, 25 bp, Homo sapien
gctggggggcgctggttgctggtgg

SEQ ID NO: 3836412 - DNA, 25 bp, Homo sapien
tatagaggtcagattcatccaggct

SEQ ID NO: 3836413 - DNA, 25 bp, Homo sapien
gtgggtcctgatttcgggagaggag

SEQ ID NO: 3836414 - DNA, 25 bp, Homo sapien
tgggtcctgatttcgggagaggagg

SEQ ID NO: 3836415 - DNA, 25 bp, Homo sapien
gaggaggaaggaccgtggagatggc

SEQ ID NO: 3836416 - DNA, 25 bp, Homo sapien
aggaaggaccgtggagatggctgag

SEQ ID NO: 3836417 - DNA, 25 bp, Homo sapien
gaggctgcggtgagttgtttgagtt

SEQ ID NO: 3836418 - DNA, 25 bp, Homo sapien
ggctgcggtgagttgtttgagttgt

SEQ ID NO: 3836419 - DNA, 25 bp, Homo sapien
cgaggctgcggtgagttgtttgagt

SEQ ID NO: 3836420 - DNA, 25 bp, Homo sapien
gtggtgtacacctgaagttccagcc

SEQ ID NO: 3836421 - DNA, 25 bp, Homo sapien
taagggattagacaggggtgacgtg

SEQ ID NO: 3836422 - DNA, 25 bp, Homo sapien
tgagggtccaaggaacaggttggct

SEQ ID NO: 3836423 - DNA, 25 bp, Homo sapien
caggttggctagaaaagggtgagtg

SEQ ID NO: 3836424 - DNA, 25 bp, Homo sapien
ggtgacgtgagggtccaaggaacag

SEQ ID NO: 3836425 - DNA, 25 bp, Homo sapien
agtgggcataggcatgatgagaggc

SEQ ID NO: 3836426 - DNA, 25 bp, Homo sapien
gtgggcataggcatgatgagaggcc

SEQ ID NO: 3836427 - DNA, 25 bp, Homo sapien
aagtgggcataggcatgatgagagg

SEQ ID NO: 3836428 - DNA, 25 bp, Homo sapien
ggtcaccagtttcctctcgtgcccg

SEQ ID NO: 3836429 - DNA, 25 bp, Homo sapien
cgtgcccctcgcttcttcctctctg

SEQ ID NO: 3836430 - DNA, 25 bp, Homo sapien
tctcttggtgcgacctttccggcct

SEQ ID NO: 3836431 - DNA, 25 bp, Homo sapien
gtttcctctcgtgcccgccagggct

SEQ ID NO: 3836432 - DNA, 25 bp, Homo sapien
cagggaaggacccaccctctctatc

SEQ ID NO: 3836433 - DNA, 25 bp, Homo sapien
gggttctaattctgcctctcccact

SEQ ID NO: 3836434 - DNA, 25 bp, Homo sapien
caggtggtaaaagggacagagatct

SEQ ID NO: 3836435 - DNA, 25 bp, Homo sapien
cacttgatttgtgactccagggaag

SEQ ID NO: 3836436 - DNA, 25 bp, Homo sapien
tgtagtgtccatggtctggcctcat

SEQ ID NO: 3836437 - DNA, 25 bp, Homo sapien
tttgctagggttggaggcgctttcc

SEQ ID NO: 3836438 - DNA, 25 bp, Homo sapien
cagtcagcgggaataagtcctaggg

SEQ ID NO: 3836439 - DNA, 25 bp, Homo sapien
gtcccgtctctattgctgggtgtag

SEQ ID NO: 3836440 - DNA, 25 bp, Homo sapien
tatttattgttgctgccaccctgga

SEQ ID NO: 3836441 - DNA, 25 bp, Homo sapien
cgtgcgtgtctatttattgttgctg

SEQ ID NO: 3836442 - DNA, 25 bp, Homo sapien
gtctatttattgttgctgccaccct

SEQ ID NO: 3836443 - DNA, 25 bp, Homo sapien
ctatttattgttgctgccaccctgg

SEQ ID NO: 3836444 - DNA, 25 bp, Homo sapien
acacatgcccgaacaaaaacacaca

SEQ ID NO: 3836445 - DNA, 25 bp, Homo sapien
aagaacaaggatgaacacacaccca

SEQ ID NO: 3836446 - DNA, 25 bp, Homo sapien
agcacacacatgcccgaacaaaaac

SEQ ID NO: 3836447 - DNA, 25 bp, Homo sapien
caaagaacaaggatgaacacacacc

SEQ ID NO: 3836448 - DNA, 25 bp, Homo sapien
agagctgatggtggccctattcctg

SEQ ID NO: 3836449 - DNA, 25 bp, Homo sapien
taattccaagtcctacaggatgtgg

SEQ ID NO: 3836450 - DNA, 25 bp, Homo sapien
gattctatttgtccctctcagcagc

SEQ ID NO: 3836451 - DNA, 25 bp, Homo sapien
ggagctccaaacacagcagagatgt

SEQ ID NO: 3836452 - DNA, 25 bp, Homo sapien
tctgttggggcctaaagtgcagcag

SEQ ID NO: 3836453 - DNA, 25 bp, Homo sapien
gaattggtacagctttcattctaca

SEQ ID NO: 3836454 - DNA, 25 bp, Homo sapien
tacactgactcaggttgactggaat

SEQ ID NO: 3836455 - DNA, 25 bp, Homo sapien
gcaaaggggaccaatattacactga

SEQ ID NO: 3836456 - DNA, 25 bp, Homo sapien
gtgggattggagctcagtttgtaac

SEQ ID NO: 3836457 - DNA, 25 bp, Homo sapien
gtcagggctggataaaaccaggtcc

SEQ ID NO: 3836458 - DNA, 25 bp, Homo sapien
tcagtttgtaactagggtcagggct

SEQ ID NO: 3836459 - DNA, 25 bp, Homo sapien
aaccaggtccgaggccatatctggg

SEQ ID NO: 3836460 - DNA, 25 bp, Homo sapien
ccaaggtcgcctgccgtctggccca

SEQ ID NO: 3836461 - DNA, 25 bp, Homo sapien
ggtcattggctctggcctttgaagg

SEQ ID NO: 3836462 - DNA, 25 bp, Homo sapien
tgggtcattggctctggcctttgaa

SEQ ID NO: 3836463 - DNA, 25 bp, Homo sapien
tgatcctgggtcattggctctggcc

SEQ ID NO: 3836464 - DNA, 25 bp, Homo sapien
cctgggtcattggctctggcctttg

SEQ ID NO: 3836465 - DNA, 25 bp, Homo sapien
agcaagggaagcagcaacaggctga

SEQ ID NO: 3836466 - DNA, 25 bp, Homo sapien
gcaagggaagcagcaacaggctgag

SEQ ID NO: 3836467 - DNA, 25 bp, Homo sapien
aggagcaagggaagcagcaacaggc

SEQ ID NO: 3836468 - DNA, 25 bp, Homo sapien
cttgaaccaggagcaagggaagcag

SEQ ID NO: 3836469 - DNA, 25 bp, Homo sapien
tggccccgaacctcggagagcagct

SEQ ID NO: 3836470 - DNA, 25 bp, Homo sapien
gagagcagcttcctggcgagatgca

SEQ ID NO: 3836471 - DNA, 25 bp, Homo sapien
cagcttcctggcgagatgcaggctg

SEQ ID NO: 3836472 - DNA, 25 bp, Homo sapien
tcctggcgagatgcaggctgactgt

SEQ ID NO: 3836473 - DNA, 25 bp, Homo sapien
ggccagaagggattgggggtctgcc

SEQ ID NO: 3836474 - DNA, 25 bp, Homo sapien
gggccagaagggattgggggtctgc

SEQ ID NO: 3836475 - DNA, 25 bp, Homo sapien
gccagaagggattgggggtctgccc

SEQ ID NO: 3836476 - DNA, 25 bp, Homo sapien
aggtctgttagtgggggccagaagg

SEQ ID NO: 3836477 - DNA, 25 bp, Homo sapien
gtcagggaaacatcagggagctgct

SEQ ID NO: 3836478 - DNA, 25 bp, Homo sapien
aaggtcagggaaacatcagggagct

SEQ ID NO: 3836479 - DNA, 25 bp, Homo sapien
tcactcctggcaggtgagattccgc

SEQ ID NO: 3836480 - DNA, 25 bp, Homo sapien
ggcaggaggtacaggttcactcctg

SEQ ID NO: 3836481 - DNA, 25 bp, Homo sapien
tgccgctgcagatcgcggaggtcca

SEQ ID NO: 3836482 - DNA, 25 bp, Homo sapien
agatgaagcagagacgctccgggtc

SEQ ID NO: 3836483 - DNA, 25 bp, Homo sapien
gatcgcggaggtccagcctcatggc

SEQ ID NO: 3836484 - DNA, 25 bp, Homo sapien
catggaagggctgaagcgtggtgga

SEQ ID NO: 3836485 - DNA, 25 bp, Homo sapien
ctgttgaagatagagccccaggaga

SEQ ID NO: 3836486 - DNA, 25 bp, Homo sapien
ccccaggagaatgtgaagattgagg

SEQ ID NO: 3836487 - DNA, 25 bp, Homo sapien
agatagagccccaggagaatgtgaa

SEQ ID NO: 3836488 - DNA, 25 bp, Homo sapien
tgaagatagagccccaggagaatgt

SEQ ID NO: 3836489 - DNA, 25 bp, Homo sapien
ccgggaggttgaatcctgcagccag

SEQ ID NO: 3836490 - DNA, 25 bp, Homo sapien
ctcctccgggaggttgaatcctgca

SEQ ID NO: 3836491 - DNA, 25 bp, Homo sapien
cctccgggaggttgaatcctgcagc

SEQ ID NO: 3836492 - DNA, 25 bp, Homo sapien
tcctcctccgggaggttgaatcctg

SEQ ID NO: 3836493 - DNA, 25 bp, Homo sapien
ctggggccaggacacctgggccggg

SEQ ID NO: 3836494 - DNA, 25 bp, Homo sapien
tggggccaggacacctgggccgggc

SEQ ID NO: 3836495 - DNA, 25 bp, Homo sapien
cccgcacggcccgagataagacgag

SEQ ID NO: 3836496 - DNA, 25 bp, Homo sapien
cgagataagacgagctccaaggagt

SEQ ID NO: 3836497 - DNA, 25 bp, Homo sapien
ggcccgagataagacgagctccaag

SEQ ID NO: 3836498 - DNA, 25 bp, Homo sapien
taagacgagctccaaggagtgcagc

SEQ ID NO: 3836499 - DNA, 25 bp, Homo sapien
gctcaatgttgggaaccccaagggc

SEQ ID NO: 3836500 - DNA, 25 bp, Homo sapien
ggctgggggctcaatgttgggaacc

SEQ ID NO: 3836501 - DNA, 25 bp, Homo sapien
gggccagactgagtgcccagccttg

SEQ ID NO: 3836502 - DNA, 25 bp, Homo sapien
agggccagactgagtgcccagcctt

SEQ ID NO: 3836503 - DNA, 25 bp, Homo sapien
tcccttgtccaaggctgatgatgcg

SEQ ID NO: 3836504 - DNA, 25 bp, Homo sapien
tgatgatgcgaaggctgccctgatg

SEQ ID NO: 3836505 - DNA, 25 bp, Homo sapien
agagtgctttattgggcacccagca

SEQ ID NO: 3836506 - DNA, 25 bp, Homo sapien
gaaataaatagctggcgaggaccag

SEQ ID NO: 3836507 - DNA, 25 bp, Homo sapien
ctagaggctactggaaaagtctggg

SEQ ID NO: 3836508 - DNA, 25 bp, Homo sapien
tagaggctactggaaaagtctgggt

SEQ ID NO: 3836509 - DNA, 25 bp, Homo sapien
agaggctactggaaaagtctgggtc

SEQ ID NO: 3836510 - DNA, 25 bp, Homo sapien
tatttccaaatgtgcacctgagtcc

SEQ ID NO: 3836511 - DNA, 25 bp, Homo sapien
aatggaatcctactaacgtgcaggg

SEQ ID NO: 3836512 - DNA, 25 bp, Homo sapien
aattcagcagcgtttcatacatggc

SEQ ID NO: 3836513 - DNA, 25 bp, Homo sapien
agaaatgtgccctctctagtgtgcc

SEQ ID NO: 3836514 - DNA, 25 bp, Homo sapien
tctaggtggaaagcggcatcctgca

SEQ ID NO: 3836515 - DNA, 25 bp, Homo sapien
cttctaggtggaaagcggcatcctg

SEQ ID NO: 3836516 - DNA, 25 bp, Homo sapien
ttctaggtggaaagcggcatcctgc

SEQ ID NO: 3836517 - DNA, 25 bp, Homo sapien
tgcactatgcagaggccgtttgtcg

SEQ ID NO: 3836518 - DNA, 25 bp, Homo sapien
tttgtcggatcacgtgacagcaccc

SEQ ID NO: 3836519 - DNA, 25 bp, Homo sapien
tctcggcttcggagcgtgaaaaagg

SEQ ID NO: 3836520 - DNA, 25 bp, Homo sapien
cccatcacgtgctcagaggttttcc

SEQ ID NO: 3836521 - DNA, 25 bp, Homo sapien
gcttgtctagggcactcgcgccccg

SEQ ID NO: 3836522 - DNA, 25 bp, Homo sapien
tgggggctccatctcgagcgcccta

SEQ ID NO: 3836523 - DNA, 25 bp, Homo sapien
gccccgcgatccatcaaggaagctg

SEQ ID NO: 3836524 - DNA, 25 bp, Homo sapien
ggtgacaaggatcaacgcccgattg

SEQ ID NO: 3836525 - DNA, 25 bp, Homo sapien
catcaagttcaggtcccccgagggt

SEQ ID NO: 3836526 - DNA, 25 bp, Homo sapien
gtccagggtcatagagtgtccaaag

SEQ ID NO: 3836527 - DNA, 25 bp, Homo sapien
agggtccagggtcatagagtgtcca

SEQ ID NO: 3836528 - DNA, 25 bp, Homo sapien
ccccgagggtccagggtcatagagt

SEQ ID NO: 3836529 - DNA, 25 bp, Homo sapien
gcgccgccgcgagcctgcacagcct

SEQ ID NO: 3836530 - DNA, 25 bp, Homo sapien
tcggaatccgaaaagcgccgccgcg

SEQ ID NO: 3836531 - DNA, 25 bp, Homo sapien
cctcggaatccgaaaagcgccgccg

SEQ ID NO: 3836532 - DNA, 25 bp, Homo sapien
ggaatccgaaaagcgccgccgcgag

SEQ ID NO: 3836533 - DNA, 25 bp, Homo sapien
ggtgcacgaccgctccttgcgtgtc

SEQ ID NO: 3836534 - DNA, 25 bp, Homo sapien
gagaagagggcatgacccccaccta

SEQ ID NO: 3836535 - DNA, 25 bp, Homo sapien
cgagccagaggtggtcgttccatga

SEQ ID NO: 3836536 - DNA, 25 bp, Homo sapien
gctctcattcccctcaggtgggctg

SEQ ID NO: 3836537 - DNA, 25 bp, Homo sapien
atgcgcgccctgatggtccaacaga

SEQ ID NO: 3836538 - DNA, 25 bp, Homo sapien
ccctgatggtccaacagagggagcc

SEQ ID NO: 3836539 - DNA, 25 bp, Homo sapien
cctgatggtccaacagagggagccg

SEQ ID NO: 3836540 - DNA, 25 bp, Homo sapien
ccaatgcgcgccctgatggtccaac

SEQ ID NO: 3836541 - DNA, 25 bp, Homo sapien
caccacataagagaagttgttgcaa

SEQ ID NO: 3836542 - DNA, 25 bp, Homo sapien
gagaagttgttgcaaaggcccagca

SEQ ID NO: 3836543 - DNA, 25 bp, Homo sapien
taagagaagttgttgcaaaggccca

SEQ ID NO: 3836544 - DNA, 25 bp, Homo sapien
cataagagaagttgttgcaaaggcc

SEQ ID NO: 3836545 - DNA, 25 bp, Homo sapien
ctaaggatgtcgtgggcggcactca

SEQ ID NO: 3836546 - DNA, 25 bp, Homo sapien
tggctctggtttcccgatgtcctct

SEQ ID NO: 3836547 - DNA, 25 bp, Homo sapien
cccgatgtcctcttgtggctaagga

SEQ ID NO: 3836548 - DNA, 25 bp, Homo sapien
cctcttgtggctaaggatgtcgtgg

SEQ ID NO: 3836549 - DNA, 25 bp, Homo sapien
gggatcggcgttgggcctgggtcca

SEQ ID NO: 3836550 - DNA, 25 bp, Homo sapien
ctgttgtgggggatcggcgttgggc

SEQ ID NO: 3836551 - DNA, 25 bp, Homo sapien
atcgtgatgagctgttgtgggggat

SEQ ID NO: 3836552 - DNA, 25 bp, Homo sapien
atgagctgttgtgggggatcggcgt

SEQ ID NO: 3836553 - DNA, 25 bp, Homo sapien
ccaacaatttgatgacgagtgtggg

SEQ ID NO: 3836554 - DNA, 25 bp, Homo sapien
tgtggggaggatgtccgccaggagc

SEQ ID NO: 3836555 - DNA, 25 bp, Homo sapien
ccaagaggagccaacaatttgatga

SEQ ID NO: 3836556 - DNA, 25 bp, Homo sapien
gaggagccaacaatttgatgacgag

SEQ ID NO: 3836557 - DNA, 25 bp, Homo sapien
aaaggcaaccaggacgaagcttcca

SEQ ID NO: 3836558 - DNA, 25 bp, Homo sapien
ggaaggtgacctccccaaggcctga

SEQ ID NO: 3836559 - DNA, 25 bp, Homo sapien
aggaaggtgacctccccaaggcctg

SEQ ID NO: 3836560 - DNA, 25 bp, Homo sapien
ctgaggaccaccaggagatcacggc

SEQ ID NO: 3836561 - DNA, 25 bp, Homo sapien
gagaggccggcctgggtgaggccca

SEQ ID NO: 3836562 - DNA, 25 bp, Homo sapien
cagcagggcagggatacccagcatg

SEQ ID NO: 3836563 - DNA, 25 bp, Homo sapien
cagggcagggatacccagcatggac

SEQ ID NO: 3836564 - DNA, 25 bp, Homo sapien
tattctaatggtcgctctagctccc

SEQ ID NO: 3836565 - DNA, 25 bp, Homo sapien
tcagcaggcccttgttcggactgct

SEQ ID NO: 3836566 - DNA, 25 bp, Homo sapien
ttctagcctctagtggtcctccagc

SEQ ID NO: 3836567 - DNA, 25 bp, Homo sapien
gctggctcatacctagcgagtcagt

SEQ ID NO: 3836568 - DNA, 25 bp, Homo sapien
aggagatgtgagcaacaagaaatag

SEQ ID NO: 3836569 - DNA, 25 bp, Homo sapien
caggagatgtgagcaacaagaaata

SEQ ID NO: 3836570 - DNA, 25 bp, Homo sapien
tgccgggctgcgctctctgcttctt

SEQ ID NO: 3836571 - DNA, 25 bp, Homo sapien
cttcttcttcccctccagggtcctg

SEQ ID NO: 3836572 - DNA, 25 bp, Homo sapien
ggggctgccgggctgcgctctctgc

SEQ ID NO: 3836573 - DNA, 25 bp, Homo sapien
ttatgaggggctgccgggctgcgct

SEQ ID NO: 3836574 - DNA, 25 bp, Homo sapien
ctggcttcgactccggggcctcggt

SEQ ID NO: 3836575 - DNA, 25 bp, Homo sapien
cacctttcccgaagggagaggctgg

SEQ ID NO: 3836576 - DNA, 25 bp, Homo sapien
ctgtccacctttcccgaagggagag

SEQ ID NO: 3836577 - DNA, 25 bp, Homo sapien
cactgtccacctttcccgaagggag

SEQ ID NO: 3836578 - DNA, 25 bp, Homo sapien
cttgaacactgtccacctttcccga

SEQ ID NO: 3836579 - DNA, 25 bp, Homo sapien
gcagaagatataagcggggggcctg

SEQ ID NO: 3836580 - DNA, 25 bp, Homo sapien
ggcagaagatataagcggggggcct

SEQ ID NO: 3836581 - DNA, 25 bp, Homo sapien
ctacgaccaagggaacaatgtacca

SEQ ID NO: 3836582 - DNA, 25 bp, Homo sapien
aagtccctggttaatgaaatactcg

SEQ ID NO: 3836583 - DNA, 25 bp, Homo sapien
tactcggcaaagtaaactacgacca

SEQ ID NO: 3836584 - DNA, 25 bp, Homo sapien
gaccaagggaacaatgtaccacagc

SEQ ID NO: 3836585 - DNA, 25 bp, Homo sapien
gatggacggggctgtgtgggtccca

SEQ ID NO: 3836586 - DNA, 25 bp, Homo sapien
agccccaatcgccacctccacaccc

SEQ ID NO: 3836587 - DNA, 25 bp, Homo sapien
gagatggacggggctgtgtgggtcc

SEQ ID NO: 3836588 - DNA, 25 bp, Homo sapien
gggagatggacggggctgtgtgggt

SEQ ID NO: 3836589 - DNA, 25 bp, Homo sapien
tgagcgtgactcagggaagtgttcc

SEQ ID NO: 3836590 - DNA, 25 bp, Homo sapien
ctgagcgtgactcagggaagtgttc

SEQ ID NO: 3836591 - DNA, 25 bp, Homo sapien
gcgtgactcagggaagtgttccaga

SEQ ID NO: 3836592 - DNA, 25 bp, Homo sapien
gagcgtgactcagggaagtgttcca

SEQ ID NO: 3836593 - DNA, 25 bp, Homo sapien
gctccccccggtgcctactgggcag

SEQ ID NO: 3836594 - DNA, 25 bp, Homo sapien
ctgcatcaccacggcgccctcccag

SEQ ID NO: 3836595 - DNA, 25 bp, Homo sapien
ccggtgcctactgggcagggcagct

SEQ ID NO: 3836596 - DNA, 25 bp, Homo sapien
cccccggtgcctactgggcagggca

SEQ ID NO: 3836597 - DNA, 25 bp, Homo sapien
tgaaacggatgcgacagcagcggag

SEQ ID NO: 3836598 - DNA, 25 bp, Homo sapien
gagaagagcgggaggcaaagacgcc

SEQ ID NO: 3836599 - DNA, 25 bp, Homo sapien
aggtgaaacggatgcgacagcagcg

SEQ ID NO: 3836600 - DNA, 25 bp, Homo sapien
aggcaaagacgccagcctggtacag

SEQ ID NO: 3836601 - DNA, 25 bp, Homo sapien
gttgcagtgagccaagattgcaccg

SEQ ID NO: 3836602 - DNA, 25 bp, Homo sapien
cttgaatctgggaggcaggggttgc

SEQ ID NO: 3836603 - DNA, 25 bp, Homo sapien
tcggaaggctgaggcttgagaatcg

SEQ ID NO: 3836604 - DNA, 25 bp, Homo sapien
ggggttgcagtgagccaagattgca

SEQ ID NO: 3836605 - DNA, 25 bp, Homo sapien
tactctagcctgagctacaagagca

SEQ ID NO: 3836606 - DNA, 25 bp, Homo sapien
tgtactctagcctgagctacaagag

SEQ ID NO: 3836607 - DNA, 25 bp, Homo sapien
cattgtactctagcctgagctacaa

SEQ ID NO: 3836608 - DNA, 25 bp, Homo sapien
acgccattgtactctagcctgagct

SEQ ID NO: 3836609 - DNA, 25 bp, Homo sapien
tagatgcttggcagaaagccgaacc

SEQ ID NO: 3836610 - DNA, 25 bp, Homo sapien
atcaggaagacgaggtagatgcttg

SEQ ID NO: 3836611 - DNA, 25 bp, Homo sapien
gaaggtgttcacgtaggctgcgcct

SEQ ID NO: 3836612 - DNA, 25 bp, Homo sapien
gaaccacacgtctgccagcaggaac

SEQ ID NO: 3836613 - DNA, 25 bp, Homo sapien
cccgacagggagatccccagtgtgt

SEQ ID NO: 3836614 - DNA, 25 bp, Homo sapien
caaagccaggagccccgacagggag

SEQ ID NO: 3836615 - DNA, 25 bp, Homo sapien
cattgcaaactcccggtgctcatca

SEQ ID NO: 3836616 - DNA, 25 bp, Homo sapien
aggagccccgacagggagatcccca

SEQ ID NO: 3836617 - DNA, 25 bp, Homo sapien
ctctgcccacaggtgaatgtgacct

SEQ ID NO: 3836618 - DNA, 25 bp, Homo sapien
tgaatgtgacctgcgtcctgaggat

SEQ ID NO: 3836619 - DNA, 25 bp, Homo sapien
cacaggtgaatgtgacctgcgtcct

SEQ ID NO: 3836620 - DNA, 25 bp, Homo sapien
acctgcgtcctgaggatcccgagta

SEQ ID NO: 3836621 - DNA, 25 bp, Homo sapien
ggagcacagttcatggagggtctct

SEQ ID NO: 3836622 - DNA, 25 bp, Homo sapien
actcccagacctgccgggaaggctg

SEQ ID NO: 3836623 - DNA, 25 bp, Homo sapien
ctgcaagggaaacaaggcttcagcc

SEQ ID NO: 3836624 - DNA, 25 bp, Homo sapien
gaaacaaggcttcagcccttcccta

SEQ ID NO: 3836625 - DNA, 25 bp, Homo sapien
aaatcggcatttattcagaaggcat

SEQ ID NO: 3836626 - DNA, 25 bp, Homo sapien
gaaactccccaagtgggagacaatg

SEQ ID NO: 3836627 - DNA, 25 bp, Homo sapien
atttattcagaaggcatgatgccag

SEQ ID NO: 3836628 - DNA, 25 bp, Homo sapien
aactccccaagtgggagacaatggc

SEQ ID NO: 3836629 - DNA, 25 bp, Homo sapien
taggagcaattagagggagacaaaa

SEQ ID NO: 3836630 - DNA, 25 bp, Homo sapien
atgaggagccaaaagcgcagccgca

SEQ ID NO: 3836631 - DNA, 25 bp, Homo sapien
aagcgcagccgcatgtcctgatcct

SEQ ID NO: 3836632 - DNA, 25 bp, Homo sapien
gccaaaagcgcagccgcatgtcctg

SEQ ID NO: 3836633 - DNA, 25 bp, Homo sapien
gaggagccaaaagcgcagccgcatg

SEQ ID NO: 3836634 - DNA, 25 bp, Homo sapien
aggtacgcaccaccaggcccgacta

SEQ ID NO: 3836635 - DNA, 25 bp, Homo sapien
ctctccagtaactgggataacaggt

SEQ ID NO: 3836636 - DNA, 25 bp, Homo sapien
ataacaggtacgcaccaccaggccc

SEQ ID NO: 3836637 - DNA, 25 bp, Homo sapien
tctccagtaactgggataacaggta

SEQ ID NO: 3836638 - DNA, 25 bp, Homo sapien
tttcactcagaaagaatcatcctta

SEQ ID NO: 3836639 - DNA, 25 bp, Homo sapien
gatagacagccagactattgataac

SEQ ID NO: 3836640 - DNA, 25 bp, Homo sapien
acgatgacgatagacagccagacta

SEQ ID NO: 3836641 - DNA, 25 bp, Homo sapien
ctcgaactcctacaccaaagtcagt

SEQ ID NO: 3836642 - DNA, 25 bp, Homo sapien
cgaactcctacaccaaagtcagtct

SEQ ID NO: 3836643 - DNA, 25 bp, Homo sapien
atttcgagaccagaagatagtcttc

SEQ ID NO: 3836644 - DNA, 25 bp, Homo sapien
ttcgagaccagaagatagtcttcag

SEQ ID NO: 3836645 - DNA, 25 bp, Homo sapien
tccatttcgagaccagaagatagtc

SEQ ID NO: 3836646 - DNA, 25 bp, Homo sapien
ccatcatgtccatttcgagaccaga

SEQ ID NO: 3836647 - DNA, 25 bp, Homo sapien
gaggtcaagaagctgttctttccct

SEQ ID NO: 3836648 - DNA, 25 bp, Homo sapien
aggagaaggtgagaaacctgaggtc

SEQ ID NO: 3836649 - DNA, 25 bp, Homo sapien
aaactcatttccacactatggggac

SEQ ID NO: 3836650 - DNA, 25 bp, Homo sapien
cactatggggactccaacagagcca

SEQ ID NO: 3836651 - DNA, 25 bp, Homo sapien
tctttgtgtgcatacaaatggacct

SEQ ID NO: 3836652 - DNA, 25 bp, Homo sapien
tcttttctttgtgtgcatacaaatg

SEQ ID NO: 3836653 - DNA, 25 bp, Homo sapien
tttgtgtgcatacaaatggacctca

SEQ ID NO: 3836654 - DNA, 25 bp, Homo sapien
tttctttgtgtgcatacaaatggac

SEQ ID NO: 3836655 - DNA, 25 bp, Homo sapien
gtaatgacgtctttcaggccaattt

SEQ ID NO: 3836656 - DNA, 25 bp, Homo sapien
tgacgtctttcaggccaattttatt

SEQ ID NO: 3836657 - DNA, 25 bp, Homo sapien
gagtaatgacgtctttcaggccaat

SEQ ID NO: 3836658 - DNA, 25 bp, Homo sapien
tagagtaatgacgtctttcaggcca

SEQ ID NO: 3836659 - DNA, 25 bp, Homo sapien
aggtgtgtggatcatgatgtccaga

SEQ ID NO: 3836660 - DNA, 25 bp, Homo sapien
cgaggtgtgtggatcatgatgtcca

SEQ ID NO: 3836661 - DNA, 25 bp, Homo sapien
gtgtgtggatcatgatgtccagagt

SEQ ID NO: 3836662 - DNA, 25 bp, Homo sapien
tgtggatcatgatgtccagagttct

SEQ ID NO: 3836663 - DNA, 25 bp, Homo sapien
ccaaggtcgcctgccgtctggccca

SEQ ID NO: 3836664 - DNA, 25 bp, Homo sapien
tgggtcattggctctggcctttgaa

SEQ ID NO: 3836665 - DNA, 25 bp, Homo sapien
ggtcattggctctggcctttgaagg

SEQ ID NO: 3836666 - DNA, 25 bp, Homo sapien
tgatcctgggtcattggctctggcc

SEQ ID NO: 3836667 - DNA, 25 bp, Homo sapien
cctgggtcattggctctggcctttg

SEQ ID NO: 3836668 - DNA, 25 bp, Homo sapien
agcaagggaagcagcaacaggctga

SEQ ID NO: 3836669 - DNA, 25 bp, Homo sapien
gcaagggaagcagcaacaggctgag

SEQ ID NO: 3836670 - DNA, 25 bp, Homo sapien
aggagcaagggaagcagcaacaggc

SEQ ID NO: 3836671 - DNA, 25 bp, Homo sapien
cttgaaccaggagcaagggaagcag

SEQ ID NO: 3836672 - DNA, 25 bp, Homo sapien
tggccccgaacctcggagagcagct

SEQ ID NO: 3836673 - DNA, 25 bp, Homo sapien
gagagcagcttcctggcgagatgca

SEQ ID NO: 3836674 - DNA, 25 bp, Homo sapien
cagcttcctggcgagatgcaggctg

SEQ ID NO: 3836675 - DNA, 25 bp, Homo sapien
tcctggcgagatgcaggctgactgt

SEQ ID NO: 3836676 - DNA, 25 bp, Homo sapien
gggccagaagggattgggggtctgc

SEQ ID NO: 3836677 - DNA, 25 bp, Homo sapien
aggtctgttagtgggggccagaagg

SEQ ID NO: 3836678 - DNA, 25 bp, Homo sapien
gccagaagggattgggggtctgccc

SEQ ID NO: 3836679 - DNA, 25 bp, Homo sapien
ggccagaagggattgggggtctgcc

SEQ ID NO: 3836680 - DNA, 25 bp, Homo sapien
gtcagggaaacatcagggagctgct

SEQ ID NO: 3836681 - DNA, 25 bp, Homo sapien
aaggtcagggaaacatcagggagct

SEQ ID NO: 3836682 - DNA, 25 bp, Homo sapien
tcactcctggcaggtgagattccgc

SEQ ID NO: 3836683 - DNA, 25 bp, Homo sapien
ggcaggaggtacaggttcactcctg

SEQ ID NO: 3836684 - DNA, 25 bp, Homo sapien
catggaagggctgaagcgtggtgga

SEQ ID NO: 3836685 - DNA, 25 bp, Homo sapien
tgccgctgcagatcgcggaggtcca

SEQ ID NO: 3836686 - DNA, 25 bp, Homo sapien
agatgaagcagagacgctccgggtc

SEQ ID NO: 3836687 - DNA, 25 bp, Homo sapien
gatcgcggaggtccagcctcatggc

SEQ ID NO: 3836688 - DNA, 25 bp, Homo sapien
tggcctcctgttgaagatagagccc

SEQ ID NO: 3836689 - DNA, 25 bp, Homo sapien
aatggcctcctgttgaagatagagc

SEQ ID NO: 3836690 - DNA, 25 bp, Homo sapien
tcctgttgaagatagagccccagga

SEQ ID NO: 3836691 - DNA, 25 bp, Homo sapien
gcctcctgttgaagatagagcccca

SEQ ID NO: 3836692 - DNA, 25 bp, Homo sapien
ccgggaggttgaatcctgcagccag

SEQ ID NO: 3836693 - DNA, 25 bp, Homo sapien
ctcctccgggaggttgaatcctgca

SEQ ID NO: 3836694 - DNA, 25 bp, Homo sapien
cctccgggaggttgaatcctgcagc

SEQ ID NO: 3836695 - DNA, 25 bp, Homo sapien
tcctcctccgggaggttgaatcctg

SEQ ID NO: 3836696 - DNA, 25 bp, Homo sapien
ctggggccaggacacctgggccggg

SEQ ID NO: 3836697 - DNA, 25 bp, Homo sapien
tggggccaggacacctgggccgggc

SEQ ID NO: 3836698 - DNA, 25 bp, Homo sapien
ggcccgagataagacgagctccaag

SEQ ID NO: 3836699 - DNA, 25 bp, Homo sapien
cccgcacggcccgagataagacgag

SEQ ID NO: 3836700 - DNA, 25 bp, Homo sapien
cgagataagacgagctccaaggagt

SEQ ID NO: 3836701 - DNA, 25 bp, Homo sapien
taagacgagctccaaggagtgcagc

SEQ ID NO: 3836702 - DNA, 25 bp, Homo sapien
gctcaatgttgggaaccccaagggc

SEQ ID NO: 3836703 - DNA, 25 bp, Homo sapien
ggctgggggctcaatgttgggaacc

SEQ ID NO: 3836704 - DNA, 25 bp, Homo sapien
gggccagactgagtgcccagccttg

SEQ ID NO: 3836705 - DNA, 25 bp, Homo sapien
agggccagactgagtgcccagcctt

SEQ ID NO: 3836706 - DNA, 25 bp, Homo sapien
tcccttgtccaaggctgatgatgcg

SEQ ID NO: 3836707 - DNA, 25 bp, Homo sapien
tgatgatgcgaaggctgccctgatg

SEQ ID NO: 3836708 - DNA, 25 bp, Homo sapien
agagtgctttattgggcacccagca

SEQ ID NO: 3836709 - DNA, 25 bp, Homo sapien
gaaataaatagctggcgaggaccag

SEQ ID NO: 3836710 - DNA, 25 bp, Homo sapien
tctaggtggaaagcggcatcctgca

SEQ ID NO: 3836711 - DNA, 25 bp, Homo sapien
tatttccaaatgtgcacctgagtcc

SEQ ID NO: 3836712 - DNA, 25 bp, Homo sapien
aatggaatcctactaacgtgcaggg

SEQ ID NO: 3836713 - DNA, 25 bp, Homo sapien
aattcagcagcgtttcatacatggc

SEQ ID NO: 3836714 - DNA, 25 bp, Homo sapien
tttgtcggatcacgtgacagcaccc

SEQ ID NO: 3836715 - DNA, 25 bp, Homo sapien
tgcactatgcagaggccgtttgtcg

SEQ ID NO: 3836716 - DNA, 25 bp, Homo sapien
cccatcacgtgctcagaggttttcc

SEQ ID NO: 3836717 - DNA, 25 bp, Homo sapien
tctcggcttcggagcgtgaaaaagg

SEQ ID NO: 3836718 - DNA, 25 bp, Homo sapien
gcttgtctagggcactcgcgccccg

SEQ ID NO: 3836719 - DNA, 25 bp, Homo sapien
tgggggctccatctcgagcgcccta

SEQ ID NO: 3836720 - DNA, 25 bp, Homo sapien
gccccgcgatccatcaaggaagctg

SEQ ID NO: 3836721 - DNA, 25 bp, Homo sapien
ggtgacaaggatcaacgcccgattg

SEQ ID NO: 3836722 - DNA, 25 bp, Homo sapien
catcaagttcaggtcccccgagggt

SEQ ID NO: 3836723 - DNA, 25 bp, Homo sapien
gtccagggtcatagagtgtccaaag

SEQ ID NO: 3836724 - DNA, 25 bp, Homo sapien
ccccgagggtccagggtcatagagt

SEQ ID NO: 3836725 - DNA, 25 bp, Homo sapien
agggtccagggtcatagagtgtcca

SEQ ID NO: 3836726 - DNA, 25 bp, Homo sapien
tcggaatccgaaaagcgccgccgcg

SEQ ID NO: 3836727 - DNA, 25 bp, Homo sapien
gcgccgccgcgagcctgcacagcct

SEQ ID NO: 3836728 - DNA, 25 bp, Homo sapien
cctcggaatccgaaaagcgccgccg

SEQ ID NO: 3836729 - DNA, 25 bp, Homo sapien
ggaatccgaaaagcgccgccgcgag

SEQ ID NO: 3836730 - DNA, 25 bp, Homo sapien
ggtgcacgaccgctccttgcgtgtc

SEQ ID NO: 3836731 - DNA, 25 bp, Homo sapien
gagaagagggcatgacccccaccta

SEQ ID NO: 3836732 - DNA, 25 bp, Homo sapien
cgagccagaggtggtcgttccatga

SEQ ID NO: 3836733 - DNA, 25 bp, Homo sapien
gctctcattcccctcaggtgggctg

SEQ ID NO: 3836734 - DNA, 25 bp, Homo sapien
tccaacagagggagccggggctccg

SEQ ID NO: 3836735 - DNA, 25 bp, Homo sapien
cagagggagccggggctccgggacg

SEQ ID NO: 3836736 - DNA, 25 bp, Homo sapien
ccaacagagggagccggggctccgg

SEQ ID NO: 3836737 - DNA, 25 bp, Homo sapien
aagcccaccgcgttcttccaatgcg

SEQ ID NO: 3836738 - DNA, 25 bp, Homo sapien
gcccaccgcgttcttccaatgcgcg

SEQ ID NO: 3836739 - DNA, 25 bp, Homo sapien
cagaagcccaccgcgttcttccaat

SEQ ID NO: 3836740 - DNA, 25 bp, Homo sapien
ccaccgcgttcttccaatgcgcgcc

SEQ ID NO: 3836741 - DNA, 25 bp, Homo sapien
caccacataagagaagttgttgcaa

SEQ ID NO: 3836742 - DNA, 25 bp, Homo sapien
gagaagttgttgcaaaggcccagca

SEQ ID NO: 3836743 - DNA, 25 bp, Homo sapien
taagagaagttgttgcaaaggccca

SEQ ID NO: 3836744 - DNA, 25 bp, Homo sapien
cataagagaagttgttgcaaaggcc

SEQ ID NO: 3836745 - DNA, 25 bp, Homo sapien
ctaaggatgtcgtgggcggcactca

SEQ ID NO: 3836746 - DNA, 25 bp, Homo sapien
cccgatgtcctcttgtggctaagga

SEQ ID NO: 3836747 - DNA, 25 bp, Homo sapien
tggctctggtttcccgatgtcctct

SEQ ID NO: 3836748 - DNA, 25 bp, Homo sapien
cctcttgtggctaaggatgtcgtgg

SEQ ID NO: 3836749 - DNA, 25 bp, Homo sapien
gggatcggcgttgggcctgggtcca

SEQ ID NO: 3836750 - DNA, 25 bp, Homo sapien
atcgtgatgagctgttgtgggggat

SEQ ID NO: 3836751 - DNA, 25 bp, Homo sapien
atgagctgttgtgggggatcggcgt

SEQ ID NO: 3836752 - DNA, 25 bp, Homo sapien
ctgttgtgggggatcggcgttgggc

SEQ ID NO: 3836753 - DNA, 25 bp, Homo sapien
cgcccagcccaggtctcaactgttt

SEQ ID NO: 3836754 - DNA, 25 bp, Homo sapien
tgttttaatcatgacagtcccagct

SEQ ID NO: 3836755 - DNA, 25 bp, Homo sapien
ttaatcatgacagtcccagctgggt

SEQ ID NO: 3836756 - DNA, 25 bp, Homo sapien
caactgttttaatcatgacagtccc

SEQ ID NO: 3836757 - DNA, 25 bp, Homo sapien
tgtggggaggatgtccgccaggagc

SEQ ID NO: 3836758 - DNA, 25 bp, Homo sapien
ccaacaatttgatgacgagtgtggg

SEQ ID NO: 3836759 - DNA, 25 bp, Homo sapien
ccaagaggagccaacaatttgatga

SEQ ID NO: 3836760 - DNA, 25 bp, Homo sapien
gaggagccaacaatttgatgacgag

SEQ ID NO: 3836761 - DNA, 25 bp, Homo sapien
aaaggcaaccaggacgaagcttcca

SEQ ID NO: 3836762 - DNA, 25 bp, Homo sapien
ggaaggtgacctccccaaggcctga

SEQ ID NO: 3836763 - DNA, 25 bp, Homo sapien
aggaaggtgacctccccaaggcctg

SEQ ID NO: 3836764 - DNA, 25 bp, Homo sapien
ctgaggaccaccaggagatcacggc

SEQ ID NO: 3836765 - DNA, 25 bp, Homo sapien
gagaggccggcctgggtgaggccca

SEQ ID NO: 3836766 - DNA, 25 bp, Homo sapien
cagcagggcagggatacccagcatg

SEQ ID NO: 3836767 - DNA, 25 bp, Homo sapien
cagggcagggatacccagcatggac

SEQ ID NO: 3836768 - DNA, 25 bp, Homo sapien
tattctaatggtcgctctagctccc

SEQ ID NO: 3836769 - DNA, 25 bp, Homo sapien
tcagcaggcccttgttcggactgct

SEQ ID NO: 3836770 - DNA, 25 bp, Homo sapien
ttctagcctctagtggtcctccagc

SEQ ID NO: 3836771 - DNA, 25 bp, Homo sapien
gctggctcatacctagcgagtcagt

SEQ ID NO: 3836772 - DNA, 25 bp, Homo sapien
aggagatgtgagcaacaagaaatag

SEQ ID NO: 3836773 - DNA, 25 bp, Homo sapien
caggagatgtgagcaacaagaaata

SEQ ID NO: 3836774 - DNA, 25 bp, Homo sapien
cttcttcttcccctccagggtcctg

SEQ ID NO: 3836775 - DNA, 25 bp, Homo sapien
tgccgggctgcgctctctgcttctt

SEQ ID NO: 3836776 - DNA, 25 bp, Homo sapien
ggggctgccgggctgcgctctctgc

SEQ ID NO: 3836777 - DNA, 25 bp, Homo sapien
ttatgaggggctgccgggctgcgct

SEQ ID NO: 3836778 - DNA, 25 bp, Homo sapien
ctggcttcgactccggggcctcggt

SEQ ID NO: 3836779 - DNA, 25 bp, Homo sapien
ctgtccacctttcccgaagggagag

SEQ ID NO: 3836780 - DNA, 25 bp, Homo sapien
cacctttcccgaagggagaggctgg

SEQ ID NO: 3836781 - DNA, 25 bp, Homo sapien
cactgtccacctttcccgaagggag

SEQ ID NO: 3836782 - DNA, 25 bp, Homo sapien
cttgaacactgtccacctttcccga

SEQ ID NO: 3836783 - DNA, 25 bp, Homo sapien
ggcagaagatataagcggggggcct

SEQ ID NO: 3836784 - DNA, 25 bp, Homo sapien
gcagaagatataagcggggggcctg

SEQ ID NO: 3836785 - DNA, 25 bp, Homo sapien
aagtccctggttaatgaaatactcg

SEQ ID NO: 3836786 - DNA, 25 bp, Homo sapien
gaccaagggaacaatgtaccacagc

SEQ ID NO: 3836787 - DNA, 25 bp, Homo sapien
tactcggcaaagtaaactacgacca

SEQ ID NO: 3836788 - DNA, 25 bp, Homo sapien
ctacgaccaagggaacaatgtacca

SEQ ID NO: 3836789 - DNA, 25 bp, Homo sapien
gatggacggggctgtgtgggtccca

SEQ ID NO: 3836790 - DNA, 25 bp, Homo sapien
agccccaatcgccacctccacaccc

SEQ ID NO: 3836791 - DNA, 25 bp, Homo sapien
gagatggacggggctgtgtgggtcc

SEQ ID NO: 3836792 - DNA, 25 bp, Homo sapien
gggagatggacggggctgtgtgggt

SEQ ID NO: 3836793 - DNA, 25 bp, Homo sapien
tgagcgtgactcagggaagtgttcc

SEQ ID NO: 3836794 - DNA, 25 bp, Homo sapien
ctgagcgtgactcagggaagtgttc

SEQ ID NO: 3836795 - DNA, 25 bp, Homo sapien
gcgtgactcagggaagtgttccaga

SEQ ID NO: 3836796 - DNA, 25 bp, Homo sapien
gagcgtgactcagggaagtgttcca

SEQ ID NO: 3836797 - DNA, 25 bp, Homo sapien
gctccccccggtgcctactgggcag

SEQ ID NO: 3836798 - DNA, 25 bp, Homo sapien
ccggtgcctactgggcagggcagct

SEQ ID NO: 3836799 - DNA, 25 bp, Homo sapien
cccccggtgcctactgggcagggca

SEQ ID NO: 3836800 - DNA, 25 bp, Homo sapien
ctgcatcaccacggcgccctcccag

SEQ ID NO: 3836801 - DNA, 25 bp, Homo sapien
aggcaaagacgccagcctggtacag

SEQ ID NO: 3836802 - DNA, 25 bp, Homo sapien
tgaaacggatgcgacagcagcggag

SEQ ID NO: 3836803 - DNA, 25 bp, Homo sapien
gagaagagcgggaggcaaagacgcc

SEQ ID NO: 3836804 - DNA, 25 bp, Homo sapien
aggtgaaacggatgcgacagcagcg

SEQ ID NO: 3836805 - DNA, 25 bp, Homo sapien
gccacaacacctagcctaaagtata

SEQ ID NO: 3836806 - DNA, 25 bp, Homo sapien
cttgaatctgggaggcaggggttgc

SEQ ID NO: 3836807 - DNA, 25 bp, Homo sapien
tcggaaggctgaggcttgagaatcg

SEQ ID NO: 3836808 - DNA, 25 bp, Homo sapien
ggggttgcagtgagccaagattgca

SEQ ID NO: 3836809 - DNA, 25 bp, Homo sapien
gttgcagtgagccaagattgcaccg

SEQ ID NO: 3836810 - DNA, 25 bp, Homo sapien
cattgtactctagcctgagctacaa

SEQ ID NO: 3836811 - DNA, 25 bp, Homo sapien
tgtactctagcctgagctacaagag

SEQ ID NO: 3836812 - DNA, 25 bp, Homo sapien
tactctagcctgagctacaagagca

SEQ ID NO: 3836813 - DNA, 25 bp, Homo sapien
acgccattgtactctagcctgagct

SEQ ID NO: 3836814 - DNA, 25 bp, Homo sapien
atcaggaagacgaggtagatgcttg

SEQ ID NO: 3836815 - DNA, 25 bp, Homo sapien
gaaggtgttcacgtaggctgcgcct

SEQ ID NO: 3836816 - DNA, 25 bp, Homo sapien
tagatgcttggcagaaagccgaacc

SEQ ID NO: 3836817 - DNA, 25 bp, Homo sapien
gaaccacacgtctgccagcaggaac

SEQ ID NO: 3836818 - DNA, 25 bp, Homo sapien
caaagccaggagccccgacagggag

SEQ ID NO: 3836819 - DNA, 25 bp, Homo sapien
cccgacagggagatccccagtgtgt

SEQ ID NO: 3836820 - DNA, 25 bp, Homo sapien
aggagccccgacagggagatcccca

SEQ ID NO: 3836821 - DNA, 25 bp, Homo sapien
cattgcaaactcccggtgctcatca

SEQ ID NO: 3836822 - DNA, 25 bp, Homo sapien
ctctgcccacaggtgaatgtgacct

SEQ ID NO: 3836823 - DNA, 25 bp, Homo sapien
cacaggtgaatgtgacctgcgtcct

SEQ ID NO: 3836824 - DNA, 25 bp, Homo sapien
tgaatgtgacctgcgtcctgaggat

SEQ ID NO: 3836825 - DNA, 25 bp, Homo sapien
acctgcgtcctgaggatcccgagta

SEQ ID NO: 3836826 - DNA, 25 bp, Homo sapien
actcccagacctgccgggaaggctg

SEQ ID NO: 3836827 - DNA, 25 bp, Homo sapien
ggagcacagttcatggagggtctct

SEQ ID NO: 3836828 - DNA, 25 bp, Homo sapien
gaaacaaggcttcagcccttcccta

SEQ ID NO: 3836829 - DNA, 25 bp, Homo sapien
ctgcaagggaaacaaggcttcagcc

SEQ ID NO: 3836830 - DNA, 25 bp, Homo sapien
aaatcggcatttattcagaaggcat

SEQ ID NO: 3836831 - DNA, 25 bp, Homo sapien
gaaactccccaagtgggagacaatg

SEQ ID NO: 3836832 - DNA, 25 bp, Homo sapien
atttattcagaaggcatgatgccag

SEQ ID NO: 3836833 - DNA, 25 bp, Homo sapien
aactccccaagtgggagacaatggc

SEQ ID NO: 3836834 - DNA, 25 bp, Homo sapien
ataaaaaacaaatgatggcaggatg

SEQ ID NO: 3836835 - DNA, 25 bp, Homo sapien
aaaaaacaaatgatggcaggatggc

SEQ ID NO: 3836836 - DNA, 25 bp, Homo sapien
ggatggcaggaagaacctcataccc

SEQ ID NO: 3836837 - DNA, 25 bp, Homo sapien
ggcaggaagaacctcatacccaagc

SEQ ID NO: 3836838 - DNA, 25 bp, Homo sapien
ttagctacaggtcacggagaagatc

SEQ ID NO: 3836839 - DNA, 25 bp, Homo sapien
gtttagctacaggtcacggagaaga

SEQ ID NO: 3836840 - DNA, 25 bp, Homo sapien
ggatccggttcaaattaagttctca

SEQ ID NO: 3836841 - DNA, 25 bp, Homo sapien
ttaagttctcaagcgctggtggaag

SEQ ID NO: 3836842 - DNA, 25 bp, Homo sapien
atgaggagccaaaagcgcagccgca

SEQ ID NO: 3836843 - DNA, 25 bp, Homo sapien
aagcgcagccgcatgtcctgatcct

SEQ ID NO: 3836844 - DNA, 25 bp, Homo sapien
gccaaaagcgcagccgcatgtcctg

SEQ ID NO: 3836845 - DNA, 25 bp, Homo sapien
gaggagccaaaagcgcagccgcatg

SEQ ID NO: 3836846 - DNA, 25 bp, Homo sapien
ctctccagtaactgggataacaggt

SEQ ID NO: 3836847 - DNA, 25 bp, Homo sapien
aggtacgcaccaccaggcccgacta

SEQ ID NO: 3836848 - DNA, 25 bp, Homo sapien
ataacaggtacgcaccaccaggccc

SEQ ID NO: 3836849 - DNA, 25 bp, Homo sapien
tctccagtaactgggataacaggta

SEQ ID NO: 3836850 - DNA, 25 bp, Homo sapien
catgcagcccgtcactcatggctaa

SEQ ID NO: 3836851 - DNA, 25 bp, Homo sapien
cccgtcactcatggctaagacaagc

SEQ ID NO: 3836852 - DNA, 25 bp, Homo sapien
cactcatggctaagacaagctaagt

SEQ ID NO: 3836853 - DNA, 25 bp, Homo sapien
cgtcactcatggctaagacaagcta

SEQ ID NO: 3836854 - DNA, 25 bp, Homo sapien
tttcactcagaaagaatcatcctta

SEQ ID NO: 3836855 - DNA, 25 bp, Homo sapien
gatagacagccagactattgataac

SEQ ID NO: 3836856 - DNA, 25 bp, Homo sapien
acgatgacgatagacagccagacta

SEQ ID NO: 3836857 - DNA, 25 bp, Homo sapien
gaatgttaaatgtgtaacgtctcag

SEQ ID NO: 3836858 - DNA, 25 bp, Homo sapien
cgaactcctacaccaaagtcagtct

SEQ ID NO: 3836859 - DNA, 25 bp, Homo sapien
ttcgagaccagaagatagtcttcag

SEQ ID NO: 3836860 - DNA, 25 bp, Homo sapien
tccatttcgagaccagaagatagtc

SEQ ID NO: 3836861 - DNA, 25 bp, Homo sapien
atttcgagaccagaagatagtcttc

SEQ ID NO: 3836862 - DNA, 25 bp, Homo sapien
ccatcatgtccatttcgagaccaga

SEQ ID NO: 3836863 - DNA, 25 bp, Homo sapien
aggagaaggtgagaaacctgaggtc

SEQ ID NO: 3836864 - DNA, 25 bp, Homo sapien
cactatggggactccaacagagcca

SEQ ID NO: 3836865 - DNA, 25 bp, Homo sapien
gaggtcaagaagctgttctttccct

SEQ ID NO: 3836866 - DNA, 25 bp, Homo sapien
aaactcatttccacactatggggac

SEQ ID NO: 3836867 - DNA, 25 bp, Homo sapien
gagtaatgacgtctttcaggccaat

SEQ ID NO: 3836868 - DNA, 25 bp, Homo sapien
tgacgtctttcaggccaattttatt

SEQ ID NO: 3836869 - DNA, 25 bp, Homo sapien
gtaatgacgtctttcaggccaattt

SEQ ID NO: 3836870 - DNA, 25 bp, Homo sapien
tagagtaatgacgtctttcaggcca

SEQ ID NO: 3836871 - DNA, 25 bp, Homo sapien
aggtgtgtggatcatgatgtccaga

SEQ ID NO: 3836872 - DNA, 25 bp, Homo sapien
cgaggtgtgtggatcatgatgtcca

SEQ ID NO: 3836873 - DNA, 25 bp, Homo sapien
gtgtgtggatcatgatgtccagagt

SEQ ID NO: 3836874 - DNA, 25 bp, Homo sapien
tgtggatcatgatgtccagagttct

SEQ ID NO: 3836875 - DNA, 25 bp, Homo sapien
atggtgtcattaaccccgcagttca

SEQ ID NO: 3836876 - DNA, 25 bp, Homo sapien
tatggtgtcattaaccccgcagttc

SEQ ID NO: 3836877 - DNA, 25 bp, Homo sapien
gaatatggtgtcattaaccccgcag

SEQ ID NO: 3836878 - DNA, 25 bp, Homo sapien
aatatggtgtcattaaccccgcagt

SEQ ID NO: 3836879 - DNA, 25 bp, Homo sapien
aactgtacccttacacaatctatct

SEQ ID NO: 3836880 - DNA, 25 bp, Homo sapien
aatctatctctacctagaaaacgta

SEQ ID NO: 3836881 - DNA, 25 bp, Homo sapien
tgtacccttacacaatctatctcta

SEQ ID NO: 3836882 - DNA, 25 bp, Homo sapien
tctatctctacctagaaaacgtatt

SEQ ID NO: 3836883 - DNA, 25 bp, Homo sapien
cgccgcaactcttgcgcacgttgaa

SEQ ID NO: 3836884 - DNA, 25 bp, Homo sapien
atttgtggtagtcctctgcccgccg

SEQ ID NO: 3836885 - DNA, 25 bp, Homo sapien
tttgcatttgtggtagtcctctgcc

SEQ ID NO: 3836886 - DNA, 25 bp, Homo sapien
ctcttgcgcacgttgaaacattttc

SEQ ID NO: 3836887 - DNA, 25 bp, Homo sapien
ccagttgcaaagaggctttcttgca

SEQ ID NO: 3836888 - DNA, 25 bp, Homo sapien
caaagaggctttcttgcagaagggg

SEQ ID NO: 3836889 - DNA, 25 bp, Homo sapien
gaggctttcttgcagaaggggggat

SEQ ID NO: 3836890 - DNA, 25 bp, Homo sapien
aagaggctttcttgcagaagggggg

SEQ ID NO: 3836891 - DNA, 25 bp, Homo sapien
ttgggcttgggcgattgttccacct

SEQ ID NO: 3836892 - DNA, 25 bp, Homo sapien
cttgggcgattgttccacctcatcc

SEQ ID NO: 3836893 - DNA, 25 bp, Homo sapien
tgggtaattgttgtgcctcggcctc

SEQ ID NO: 3836894 - DNA, 25 bp, Homo sapien
gcctcttgggcttgggcgattgttc

SEQ ID NO: 3836895 - DNA, 25 bp, Homo sapien
ctgcttctcttctcgtgcttttgtg

SEQ ID NO: 3836896 - DNA, 25 bp, Homo sapien
ttcattagagacagtactttattca

SEQ ID NO: 3836897 - DNA, 25 bp, Homo sapien
cagcctaaagtacttttcattagag

SEQ ID NO: 3836898 - DNA, 25 bp, Homo sapien
tttgtgtcttgagacagtctgtctg

SEQ ID NO: 3836899 - DNA, 25 bp, Homo sapien
tgctggggaccaaaacatatctgca

SEQ ID NO: 3836900 - DNA, 25 bp, Homo sapien
caaaacatatctgcactggctcacg

SEQ ID NO: 3836901 - DNA, 25 bp, Homo sapien
catatctgcactggctcacgcatgt

SEQ ID NO: 3836902 - DNA, 25 bp, Homo sapien
gggaccaaaacatatctgcactggc

SEQ ID NO: 3836903 - DNA, 25 bp, Homo sapien
cagacctcactggagagaggtggct

SEQ ID NO: 3836904 - DNA, 25 bp, Homo sapien
tagcctcgttaaggctgggtctcag

SEQ ID NO: 3836905 - DNA, 25 bp, Homo sapien
gttgccccaggtcacggctggtcca

SEQ ID NO: 3836906 - DNA, 25 bp, Homo sapien
ctgcagcccattggacggtgaggtt

SEQ ID NO: 3836907 - DNA, 25 bp, Homo sapien
gagcgcctcttcccagccgccatca

SEQ ID NO: 3836908 - DNA, 25 bp, Homo sapien
cgcctcttcccagccgccatcacat

SEQ ID NO: 3836909 - DNA, 25 bp, Homo sapien
ttcccagccgccatcacatctagga

SEQ ID NO: 3836910 - DNA, 25 bp, Homo sapien
tcttcccagccgccatcacatctag

SEQ ID NO: 3836911 - DNA, 25 bp, Homo sapien
agcgtctccgcccggccgccatccc

SEQ ID NO: 3836912 - DNA, 25 bp, Homo sapien
ggagcgtctccgcccggccgccatc

SEQ ID NO: 3836913 - DNA, 25 bp, Homo sapien
cgtctccgcccggccgccatcccat

SEQ ID NO: 3836914 - DNA, 25 bp, Homo sapien
aggagcgtctccgcccggccgccat

SEQ ID NO: 3836915 - DNA, 25 bp, Homo sapien
tctagaggtgcaggagaaatgcgcc

SEQ ID NO: 3836916 - DNA, 25 bp, Homo sapien
caggtggtccactaggcaattgtca

SEQ ID NO: 3836917 - DNA, 25 bp, Homo sapien
ttcaaggacgagctggaagcctcca

SEQ ID NO: 3836918 - DNA, 25 bp, Homo sapien
gcaattgtcacgcagttcaacctgg

SEQ ID NO: 3836919 - DNA, 25 bp, Homo sapien
taaggtgctggcaaaaccgatttgg

SEQ ID NO: 3836920 - DNA, 25 bp, Homo sapien
gtgctggcaaaaccgatttggtgtc

SEQ ID NO: 3836921 - DNA, 25 bp, Homo sapien
attaaggtgctggcaaaaccgattt

SEQ ID NO: 3836922 - DNA, 25 bp, Homo sapien
aggtgctggcaaaaccgatttggtg

SEQ ID NO: 3836923 - DNA, 25 bp, Homo sapien
cagggccctgacagcggaaacgccg

SEQ ID NO: 3836924 - DNA, 25 bp, Homo sapien
tgacagcggaaacgccgagagagaa

SEQ ID NO: 3836925 - DNA, 25 bp, Homo sapien
tgagcccgcgagtcacaccgcaggg

SEQ ID NO: 3836926 - DNA, 25 bp, Homo sapien
gccctgacagcggaaacgccgagag

SEQ ID NO: 3836927 - DNA, 25 bp, Homo sapien
ccacgaagcacgaggcccaaaaaat

SEQ ID NO: 3836928 - DNA, 25 bp, Homo sapien
cacgaagcacgaggcccaaaaaata

SEQ ID NO: 3836929 - DNA, 25 bp, Homo sapien
gagccaacacctcccgacgcccaac

SEQ ID NO: 3836930 - DNA, 25 bp, Homo sapien
gcgtcaccggccacgcgaagaggcc

SEQ ID NO: 3836931 - DNA, 25 bp, Homo sapien
gggagccaaggcgtcaccggccacg

SEQ ID NO: 3836932 - DNA, 25 bp, Homo sapien
ggccacgcgaagaggcccgagccaa

SEQ ID NO: 3836933 - DNA, 25 bp, Homo sapien
acggcgcggaggtgctacggccgga

SEQ ID NO: 3836934 - DNA, 25 bp, Homo sapien
cgacggcgcggaggtgctacggccg

SEQ ID NO: 3836935 - DNA, 25 bp, Homo sapien
cggcgcggaggtgctacggccggac

SEQ ID NO: 3836936 - DNA, 25 bp, Homo sapien
ggcgacggcgcggaggtgctacggc

SEQ ID NO: 3836937 - DNA, 25 bp, Homo sapien
tttggtgacgagctcctccccggac

SEQ ID NO: 3836938 - DNA, 25 bp, Homo sapien
gacaaggacgactcggactcgctgt

SEQ ID NO: 3836939 - DNA, 25 bp, Homo sapien
tgtttgccatagttgcctccgacag

SEQ ID NO: 3836940 - DNA, 25 bp, Homo sapien
gactcgctgtccgaaccggtggtga

SEQ ID NO: 3836941 - DNA, 25 bp, Homo sapien
cttggcactgcggacaactctcttg

SEQ ID NO: 3836942 - DNA, 25 bp, Homo sapien
tcttcatcctcgctcagcaacaatg

SEQ ID NO: 3836943 - DNA, 25 bp, Homo sapien
gcactgcggacaactctcttggtat

SEQ ID NO: 3836944 - DNA, 25 bp, Homo sapien
ttcatcctcgctcagcaacaatggc

SEQ ID NO: 3836945 - DNA, 25 bp, Homo sapien
cacttggtgacatcacgaatcttca

SEQ ID NO: 3836946 - DNA, 25 bp, Homo sapien
ttcatggcattacggatggtccgga

SEQ ID NO: 3836947 - DNA, 25 bp, Homo sapien
ccggataaggttggtcagctcctca

SEQ ID NO: 3836948 - DNA, 25 bp, Homo sapien
tggtccggataaggttggtcagctc

SEQ ID NO: 3836949 - DNA, 25 bp, Homo sapien
agccaggatgcggatatagaaccgg

SEQ ID NO: 3836950 - DNA, 25 bp, Homo sapien
tgcggatatagaaccgggggacacc

SEQ ID NO: 3836951 - DNA, 25 bp, Homo sapien
cacaatgcttttggccttcccatat

SEQ ID NO: 3836952 - DNA, 25 bp, Homo sapien
aggtcagccaggatgcggatataga

SEQ ID NO: 3836953 - DNA, 25 bp, Homo sapien
agagccttggcattgttcttgttca

SEQ ID NO: 3836954 - DNA, 25 bp, Homo sapien
gagccttggcattgttcttgttcat

SEQ ID NO: 3836955 - DNA, 25 bp, Homo sapien
ccttggcattgttcttgttcatctt

SEQ ID NO: 3836956 - DNA, 25 bp, Homo sapien
tcagagccttggcattgttcttgtt

SEQ ID NO: 3836957 - DNA, 25 bp, Homo sapien
tgggactcgaaatcacggttgtatt

SEQ ID NO: 3836958 - DNA, 25 bp, Homo sapien
cttgtgatatgggactcgaaatcac

SEQ ID NO: 3836959 - DNA, 25 bp, Homo sapien
gaaatcacggttgtattttcggatc

SEQ ID NO: 3836960 - DNA, 25 bp, Homo sapien
tattttcggatcttctgacgcaagg

SEQ ID NO: 3836961 - DNA, 25 bp, Homo sapien
tcagcatcttcatccgcagactgct

SEQ ID NO: 3836962 - DNA, 25 bp, Homo sapien
agcatcttcatccgcagactgctcg

SEQ ID NO: 3836963 - DNA, 25 bp, Homo sapien
ctcagcatcttcatccgcagactgc

SEQ ID NO: 3836964 - DNA, 25 bp, Homo sapien
catcttcatccgcagactgctcggg

SEQ ID NO: 3836965 - DNA, 25 bp, Homo sapien
ttcaagaaagttgcagcactgactc

SEQ ID NO: 3836966 - DNA, 25 bp, Homo sapien
agttgcagcactgactccgtcctca

SEQ ID NO: 3836967 - DNA, 25 bp, Homo sapien
tctttttgaggaacttgcgactctc

SEQ ID NO: 3836968 - DNA, 25 bp, Homo sapien
ggaacttgcgactctccccagaagg

SEQ ID NO: 3836969 - DNA, 25 bp, Homo sapien
ttgaggccagcgcggtttgtttccc

SEQ ID NO: 3836970 - DNA, 25 bp, Homo sapien
catcttcggaatcttctgagtcctc

SEQ ID NO: 3836971 - DNA, 25 bp, Homo sapien
tcctctgagtcggaatcggaagatg

SEQ ID NO: 3836972 - DNA, 25 bp, Homo sapien
aatcggaagatgtggaacctgtgtc

SEQ ID NO: 3836973 - DNA, 25 bp, Homo sapien
taaaggtcatgaacacttgcggcag

SEQ ID NO: 3836974 - DNA, 25 bp, Homo sapien
ttatcaggaagggtaacacagtagc

SEQ ID NO: 3836975 - DNA, 25 bp, Homo sapien
tgtgatagacaatgtggcccagacc

SEQ ID NO: 3836976 - DNA, 25 bp, Homo sapien
gacctgaaccaatagtaacgctgat

SEQ ID NO: 3836977 - DNA, 25 bp, Homo sapien
aaattagtggttgcccagggatagg

SEQ ID NO: 3836978 - DNA, 25 bp, Homo sapien
tgtggtgagttctatgggtgtaaac

SEQ ID NO: 3836979 - DNA, 25 bp, Homo sapien
aggcagggagaagtattacaaaggg

SEQ ID NO: 3836980 - DNA, 25 bp, Homo sapien
gatattatgttttgattgtggtgag

SEQ ID NO: 3836981 - DNA, 25 bp, Homo sapien
tgaggcgagcgaatcatctaaggtc

SEQ ID NO: 3836982 - DNA, 25 bp, Homo sapien
gatgagaaaatacatgtaggctagg

SEQ ID NO: 3836983 - DNA, 25 bp, Homo sapien
gctgaggcgagcgaatcatctaagg

SEQ ID NO: 3836984 - DNA, 25 bp, Homo sapien
agaaaatacatgtaggctaggtgtg

SEQ ID NO: 3836985 - DNA, 25 bp, Homo sapien
gctgaagctcatgagaataaaccca

SEQ ID NO: 3836986 - DNA, 25 bp, Homo sapien
cagagggcctatcgtgttttctaga

SEQ ID NO: 3836987 - DNA, 25 bp, Homo sapien
tacacagaaaaacgggcaaacagaa

SEQ ID NO: 3836988 - DNA, 25 bp, Homo sapien
cctgggtggcatactcaaggagagt

SEQ ID NO: 3836989 - DNA, 25 bp, Homo sapien
gaagtcaggcctaactacactgcag

SEQ ID NO: 3836990 - DNA, 25 bp, Homo sapien
tgagagacaccaacggaagtcaggc

SEQ ID NO: 3836991 - DNA, 25 bp, Homo sapien
cacaactactgatggaaagccctag

SEQ ID NO: 3836992 - DNA, 25 bp, Homo sapien
taacaagacagagtactaaccaggc

SEQ ID NO: 3836993 - DNA, 25 bp, Homo sapien
gcttggatttcctgtcgtgcttctt

SEQ ID NO: 3836994 - DNA, 25 bp, Homo sapien
aggcgcttggatttcctgtcgtgct

SEQ ID NO: 3836995 - DNA, 25 bp, Homo sapien
gatttcctgtcgtgcttcttcttag

SEQ ID NO: 3836996 - DNA, 25 bp, Homo sapien
cactccccgccttcattgtcctcct

SEQ ID NO: 3836997 - DNA, 25 bp, Homo sapien
ttcattttacctctgaaaccctcac

SEQ ID NO: 3836998 - DNA, 25 bp, Homo sapien
ttatgtcctcccaaactgttcccca

SEQ ID NO: 3836999 - DNA, 25 bp, Homo sapien
atgtcctcccaaactgttccccaat

SEQ ID NO: 3837000 - DNA, 25 bp, Homo sapien
ctcccaaactgttccccaattcatt

SEQ ID NO: 3837001 - DNA, 25 bp, Homo sapien
ctgtatcagcacatatcccgtcatg

SEQ ID NO: 3837002 - DNA, 25 bp, Homo sapien
tgtatcagcacatatcccgtcatgt

SEQ ID NO: 3837003 - DNA, 25 bp, Homo sapien
gtatcagcacatatcccgtcatgta

SEQ ID NO: 3837004 - DNA, 25 bp, Homo sapien
tgtaggatctcattcagtttcttga

SEQ ID NO: 3837005 - DNA, 25 bp, Homo sapien
cagtttcttgataacaacagcatgg

SEQ ID NO: 3837006 - DNA, 25 bp, Homo sapien
gatcagttcccttcttgcctcgtgc

SEQ ID NO: 3837007 - DNA, 25 bp, Homo sapien
ggtgatctcagttcccttggcaaac

SEQ ID NO: 3837008 - DNA, 25 bp, Homo sapien
tgttttccgctgcaatctgaaccag

SEQ ID NO: 3837009 - DNA, 25 bp, Homo sapien
aatgacgccctctcccaggttgttt

SEQ ID NO: 3837010 - DNA, 25 bp, Homo sapien
gagaggcgatgatattgaacttgat

SEQ ID NO: 3837011 - DNA, 25 bp, Homo sapien
gaacttgatcttgacaatgacgccc

SEQ ID NO: 3837012 - DNA, 25 bp, Homo sapien
agtccaggcacttcccccacatctc

SEQ ID NO: 3837013 - DNA, 25 bp, Homo sapien
cagcgttgtgcaggttctcactctc

SEQ ID NO: 3837014 - DNA, 25 bp, Homo sapien
atcagctcattgatgcagtccaggc

SEQ ID NO: 3837015 - DNA, 25 bp, Homo sapien
tcagctcattgatgcagtccaggca

SEQ ID NO: 3837016 - DNA, 25 bp, Homo sapien
gagtgagggtcagtattttgcatta

SEQ ID NO: 3837017 - DNA, 25 bp, Homo sapien
aattcttcatccattcgttccacca

SEQ ID NO: 3837018 - DNA, 25 bp, Homo sapien
accagagttaggatgcagccacgga

SEQ ID NO: 3837019 - DNA, 25 bp, Homo sapien
ccattcgttccaccagagttaggat

SEQ ID NO: 3837020 - DNA, 25 bp, Homo sapien
cccggccatatcttactactattat

SEQ ID NO: 3837021 - DNA, 25 bp, Homo sapien
ccggccatatcttactactattatt

SEQ ID NO: 3837022 - DNA, 25 bp, Homo sapien
cgcagcaggtagatgcggcagacct

SEQ ID NO: 3837023 - DNA, 25 bp, Homo sapien
agatgcggcagacctcctcggtagt

SEQ ID NO: 3837024 - DNA, 25 bp, Homo sapien
caaacttgtagtaggtgtgcaggat

SEQ ID NO: 3837025 - DNA, 25 bp, Homo sapien
tgcacacgctcgatgatggcacaca

SEQ ID NO: 3837026 - DNA, 25 bp, Homo sapien
caggcggggtcagctgtcgctgatg

SEQ ID NO: 3837027 - DNA, 25 bp, Homo sapien
cctcaggcggggtcagctgtcgctg

SEQ ID NO: 3837028 - DNA, 25 bp, Homo sapien
gccctcaggcggggtcagctgtcgc

SEQ ID NO: 3837029 - DNA, 25 bp, Homo sapien
tcaggcggggtcagctgtcgctgat

SEQ ID NO: 3837030 - DNA, 25 bp, Homo sapien
gtcctcgccctcattttctgcctgg

SEQ ID NO: 3837031 - DNA, 25 bp, Homo sapien
tgtgcggtccttggcgtagatgtac

SEQ ID NO: 3837032 - DNA, 25 bp, Homo sapien
tagatgtacttgcacagtctctcca

SEQ ID NO: 3837033 - DNA, 25 bp, Homo sapien
ggatccggtctgtgcggtccttggc

SEQ ID NO: 3837034 - DNA, 25 bp, Homo sapien
aggtcgcgggcctggtaccagcgcg

SEQ ID NO: 3837035 - DNA, 25 bp, Homo sapien
taccagcgcgagtgcagagcatggt

SEQ ID NO: 3837036 - DNA, 25 bp, Homo sapien
gcatggtggtagatgtggcagagga

SEQ ID NO: 3837037 - DNA, 25 bp, Homo sapien
agagcatggtggtagatgtggcaga

SEQ ID NO: 3837038 - DNA, 25 bp, Homo sapien
ctgcactggcgggtctgcatgctga

SEQ ID NO: 3837039 - DNA, 25 bp, Homo sapien
tgtcctgcaagtggctcatgagcat

SEQ ID NO: 3837040 - DNA, 25 bp, Homo sapien
atgttgtcctgcaagtggctcatga

SEQ ID NO: 3837041 - DNA, 25 bp, Homo sapien
ggtctgcatgctgaatgttgtcctg

SEQ ID NO: 3837042 - DNA, 25 bp, Homo sapien
gtctacttaaatttgcaccggccag

SEQ ID NO: 3837043 - DNA, 25 bp, Homo sapien
tatgtgtttacatgcaggaggactg

SEQ ID NO: 3837044 - DNA, 25 bp, Homo sapien
ttgggctcaagcactaccaagcctg

SEQ ID NO: 3837045 - DNA, 25 bp, Homo sapien
tggcaactgggaaagaccaagtgtc

SEQ ID NO: 3837046 - DNA, 25 bp, Homo sapien
gctgcaccatggtgcggttgtaaag

SEQ ID NO: 3837047 - DNA, 25 bp, Homo sapien
cacagatgcccagctgcaccatggt

SEQ ID NO: 3837048 - DNA, 25 bp, Homo sapien
gcaccatggtgcggttgtaaaggat

SEQ ID NO: 3837049 - DNA, 25 bp, Homo sapien
ggcacagatgcccagctgcaccatg

SEQ ID NO: 3837050 - DNA, 25 bp, Homo sapien
tcggccactcgactggatgtccagc

SEQ ID NO: 3837051 - DNA, 25 bp, Homo sapien
catcgctctcatgggcggccatgta

SEQ ID NO: 3837052 - DNA, 25 bp, Homo sapien
aactgcttgctgatcatgcgtcggc

SEQ ID NO: 3837053 - DNA, 25 bp, Homo sapien
gcgttgtgtgcgtccttggtcaggc

SEQ ID NO: 3837054 - DNA, 25 bp, Homo sapien
cagtgcagggctgatggaaactggc

SEQ ID NO: 3837055 - DNA, 25 bp, Homo sapien
caaagaatatttctctataggccga

SEQ ID NO: 3837056 - DNA, 25 bp, Homo sapien
tctctataggccgaacaacagtgca

SEQ ID NO: 3837057 - DNA, 25 bp, Homo sapien
gggctcaaagaatatttctctatag

SEQ ID NO: 3837058 - DNA, 25 bp, Homo sapien
cattagcactctttaaggaggaaca

SEQ ID NO: 3837059 - DNA, 25 bp, Homo sapien
gattctcgtaagcttccttgaccta

SEQ ID NO: 3837060 - DNA, 25 bp, Homo sapien
ctcatgtacattcttcctaggaaaa

SEQ ID NO: 3837061 - DNA, 25 bp, Homo sapien
ggaggagcaaaccatactagagact

SEQ ID NO: 3837062 - DNA, 25 bp, Homo sapien
ggtcttccagtcacccatcttcatg

SEQ ID NO: 3837063 - DNA, 25 bp, Homo sapien
cacatgttcccgcatggactcaggg

SEQ ID NO: 3837064 - DNA, 25 bp, Homo sapien
taaccagcatggtgcggactttgtc

SEQ ID NO: 3837065 - DNA, 25 bp, Homo sapien
tcagcctcggggaaaaggtcccaca

SEQ ID NO: 3837066 - DNA, 25 bp, Homo sapien
ctcttcttccccgacccatcacggc

SEQ ID NO: 3837067 - DNA, 25 bp, Homo sapien
ggacagaagacacaacagggcctca

SEQ ID NO: 3837068 - DNA, 25 bp, Homo sapien
cccgacccatcacggcctctctgtc

SEQ ID NO: 3837069 - DNA, 25 bp, Homo sapien
acagaagacacaacagggcctcagg

SEQ ID NO: 3837070 - DNA, 25 bp, Homo sapien
aagaggtaggtcctcagtgactctt

SEQ ID NO: 3837071 - DNA, 25 bp, Homo sapien
ctgctgtaggtgaagaggtaggtcc

SEQ ID NO: 3837072 - DNA, 25 bp, Homo sapien
ctgtaggtgaagaggtaggtcctca

SEQ ID NO: 3837073 - DNA, 25 bp, Homo sapien
gagtcatagacactgctgtaggtga

SEQ ID NO: 3837074 - DNA, 25 bp, Homo sapien
gcagtcaggacacttgcccacaagg

SEQ ID NO: 3837075 - DNA, 25 bp, Homo sapien
gcaggggcagtcaggacacttgccc

SEQ ID NO: 3837076 - DNA, 25 bp, Homo sapien
ggcagtcaggacacttgcccacaag

SEQ ID NO: 3837077 - DNA, 25 bp, Homo sapien
ggggcagtcaggacacttgcccaca

SEQ ID NO: 3837078 - DNA, 25 bp, Homo sapien
gggcagatccagctcaaacatgtct

SEQ ID NO: 3837079 - DNA, 25 bp, Homo sapien
ggcagatccagctcaaacatgtctg

SEQ ID NO: 3837080 - DNA, 25 bp, Homo sapien
tgggcagatccagctcaaacatgtc

SEQ ID NO: 3837081 - DNA, 25 bp, Homo sapien
cagatccagctcaaacatgtctgac

SEQ ID NO: 3837082 - DNA, 25 bp, Homo sapien
cccctacgctccaatccctccatgg

SEQ ID NO: 3837083 - DNA, 25 bp, Homo sapien
gcccctacgctccaatccctccatg

SEQ ID NO: 3837084 - DNA, 25 bp, Homo sapien
ggcccctacgctccaatccctccat

SEQ ID NO: 3837085 - DNA, 25 bp, Homo sapien
ctgacaggcgccaaggcagaggagg

SEQ ID NO: 3837086 - DNA, 25 bp, Homo sapien
tgccctgcttgtggtcaaacacccg

SEQ ID NO: 3837087 - DNA, 25 bp, Homo sapien
cacccgttcgttgttctccaccagg

SEQ ID NO: 3837088 - DNA, 25 bp, Homo sapien
cactgtctgtgttggctggtccagg

SEQ ID NO: 3837089 - DNA, 25 bp, Homo sapien
agtagcccccgtaggtgccctgctt

SEQ ID NO: 3837090 - DNA, 25 bp, Homo sapien
gcaaggagaggagccgaagtactca

SEQ ID NO: 3837091 - DNA, 25 bp, Homo sapien
tcagtaggccgtctgagactgctgc

SEQ ID NO: 3837092 - DNA, 25 bp, Homo sapien
cgtttttgcggtagccgtccttctg

SEQ ID NO: 3837093 - DNA, 25 bp, Homo sapien
accgcggcgcatgtagccctcgttt

SEQ ID NO: 3837094 - DNA, 25 bp, Homo sapien
tctgagactgctgctggcggtagcc

SEQ ID NO: 3837095 - DNA, 25 bp, Homo sapien
acttcaaggttggatggcccaggcg

SEQ ID NO: 3837096 - DNA, 25 bp, Homo sapien
aacagacctttagtgactgaggtgt

SEQ ID NO: 3837097 - DNA, 25 bp, Homo sapien
ccaggcgggaaacagagtggagagc

SEQ ID NO: 3837098 - DNA, 25 bp, Homo sapien
gactgaggtgtggtttaggacttca

SEQ ID NO: 3837099 - DNA, 25 bp, Homo sapien
tgggctcaacacacctttgtggcaa

SEQ ID NO: 3837100 - DNA, 25 bp, Homo sapien
tataatcagcaaatgaatgggctca

SEQ ID NO: 3837101 - DNA, 25 bp, Homo sapien
tttgtggcaacaagcaatcaaccag

SEQ ID NO: 3837102 - DNA, 25 bp, Homo sapien
gaggtcaggaacgtgttcaattcac

SEQ ID NO: 3837103 - DNA, 25 bp, Homo sapien
agggtccaactgtcactactgtctc

SEQ ID NO: 3837104 - DNA, 25 bp, Homo sapien
cctcaatacatctgtgactttcttt

SEQ ID NO: 3837105 - DNA, 25 bp, Homo sapien
tgtctccactatgtcttcctgatgt

SEQ ID NO: 3837106 - DNA, 25 bp, Homo sapien
ccggtcacatcctcaatacatctgt

SEQ ID NO: 3837107 - DNA, 25 bp, Homo sapien
ggccggtctccagctcctaaccgct

SEQ ID NO: 3837108 - DNA, 25 bp, Homo sapien
gctcctaaccgctagtgatccacca

SEQ ID NO: 3837109 - DNA, 25 bp, Homo sapien
cggtctccagctcctaaccgctagt

SEQ ID NO: 3837110 - DNA, 25 bp, Homo sapien
ccagctcctaaccgctagtgatcca

SEQ ID NO: 3837111 - DNA, 25 bp, Homo sapien
ctctccctccccacagtctccctct

SEQ ID NO: 3837112 - DNA, 25 bp, Homo sapien
ctccccacagtctccctctccccct

SEQ ID NO: 3837113 - DNA, 25 bp, Homo sapien
ctctgatgccgagccgaagctggac

SEQ ID NO: 3837114 - DNA, 25 bp, Homo sapien
cccctctttccacggtctccctctg

SEQ ID NO: 3837115 - DNA, 25 bp, Homo sapien
tgcccagccgccgtccacgcgcgtc

SEQ ID NO: 3837116 - DNA, 25 bp, Homo sapien
tgtgattaatgtactgacgaaccga

SEQ ID NO: 3837117 - DNA, 25 bp, Homo sapien
ccgctgtgattaatgtactgacgaa

SEQ ID NO: 3837118 - DNA, 25 bp, Homo sapien
cgtgggcgaggctgcaaaggctgga

SEQ ID NO: 3837119 - DNA, 25 bp, Homo sapien
gggtgcctgtaatccccagctacta

SEQ ID NO: 3837120 - DNA, 25 bp, Homo sapien
caaataattagctggggatggtggt

SEQ ID NO: 3837121 - DNA, 25 bp, Homo sapien
gggaggctgaggcaggagaactgct

SEQ ID NO: 3837122 - DNA, 25 bp, Homo sapien
tgaacccgggaagcgaaggttgcag

SEQ ID NO: 3837123 - DNA, 25 bp, Homo sapien
ggtcaacatgcgctggctgagctta

SEQ ID NO: 3837124 - DNA, 25 bp, Homo sapien
gaaacgagaaggtgcaatgacacag

SEQ ID NO: 3837125 - DNA, 25 bp, Homo sapien
ccctaatcagagaggatcacaggag

SEQ ID NO: 3837126 - DNA, 25 bp, Homo sapien
cacagcagagcacaatgcagaatcc

SEQ ID NO: 3837127 - DNA, 25 bp, Homo sapien
ggccgccccgggtgtgaactgcgct

SEQ ID NO: 3837128 - DNA, 25 bp, Homo sapien
actgcgctgtcagcagggccgcgct

SEQ ID NO: 3837129 - DNA, 25 bp, Homo sapien
gtgaactgcgctgtcagcagggccg

SEQ ID NO: 3837130 - DNA, 25 bp, Homo sapien
gggccgcgctgacacgggtggccca

SEQ ID NO: 3837131 - DNA, 25 bp, Homo sapien
tcttggagcagcgaaagcgactcgc

SEQ ID NO: 3837132 - DNA, 25 bp, Homo sapien
gctgcaccgccgacttcttggagca

SEQ ID NO: 3837133 - DNA, 25 bp, Homo sapien
agaagacgccgccaagtggaacccg

SEQ ID NO: 3837134 - DNA, 25 bp, Homo sapien
cagcagcggcgtcagttgctgcacc

SEQ ID NO: 3837135 - DNA, 25 bp, Homo sapien
cggcccccgcgaggaatatggcgac

SEQ ID NO: 3837136 - DNA, 25 bp, Homo sapien
cgcttcctggcgtctttcttccccg

SEQ ID NO: 3837137 - DNA, 25 bp, Homo sapien
cttttcggggagcaacttggcaagg

SEQ ID NO: 3837138 - DNA, 25 bp, Homo sapien
cctcctctggctgcgggaacggaga

SEQ ID NO: 3837139 - DNA, 25 bp, Homo sapien
catttcactattattggatatacag

SEQ ID NO: 3837140 - DNA, 25 bp, Homo sapien
tgtgaaacaggaacaatagtttcat

SEQ ID NO: 3837141 - DNA, 25 bp, Homo sapien
gtgtgaaacaggaacaatagtttca

SEQ ID NO: 3837142 - DNA, 25 bp, Homo sapien
tgaaacaggaacaatagtttcattc

SEQ ID NO: 3837143 - DNA, 25 bp, Homo sapien
tgtgtgaaacaggaacaatagtttc

SEQ ID NO: 3837144 - DNA, 25 bp, Homo sapien
tactttgaatttctacttcatgcca

SEQ ID NO: 3837145 - DNA, 25 bp, Homo sapien
ccaagttcaaattcctgtactttga

SEQ ID NO: 3837146 - DNA, 25 bp, Homo sapien
ttgaatttctacttcatgccatgca

SEQ ID NO: 3837147 - DNA, 25 bp, Homo sapien
gatgtttgagtctatagtggtcaag

SEQ ID NO: 3837148 - DNA, 25 bp, Homo sapien
agaacaggggctcatcatgagtgcc

SEQ ID NO: 3837149 - DNA, 25 bp, Homo sapien
acaggggctcatcatgagtgccaac

SEQ ID NO: 3837150 - DNA, 25 bp, Homo sapien
cagaatgagaacaggggctcatcat

SEQ ID NO: 3837151 - DNA, 25 bp, Homo sapien
tgcagaatgagaacaggggctcatc

SEQ ID NO: 3837152 - DNA, 25 bp, Homo sapien
aggtactcgcatgggcatgtcactg

SEQ ID NO: 3837153 - DNA, 25 bp, Homo sapien
ctcaggtactcgcatgggcatgtca

SEQ ID NO: 3837154 - DNA, 25 bp, Homo sapien
tcctcaggtactcgcatgggcatgt

SEQ ID NO: 3837155 - DNA, 25 bp, Homo sapien
cttcctcaggtactcgcatgggcat

SEQ ID NO: 3837156 - DNA, 25 bp, Homo sapien
ttacatccgaccaaactgctttttc

SEQ ID NO: 3837157 - DNA, 25 bp, Homo sapien
tgttggtgatgattttgtgcagctc

SEQ ID NO: 3837158 - DNA, 25 bp, Homo sapien
gtgatgattttgtgcagctctggga

SEQ ID NO: 3837159 - DNA, 25 bp, Homo sapien
tgaagtctactctgtttcatcatgt

SEQ ID NO: 3837160 - DNA, 25 bp, Homo sapien
catgaagggttgctagagtcaccgt

SEQ ID NO: 3837161 - DNA, 25 bp, Homo sapien
agtcaccgtgatcatagcccaagca

SEQ ID NO: 3837162 - DNA, 25 bp, Homo sapien
tgaagtcagattagaccaaaagtga

SEQ ID NO: 3837163 - DNA, 25 bp, Homo sapien
tgatcatagcccaagcagagacagg

SEQ ID NO: 3837164 - DNA, 25 bp, Homo sapien
cttaggagcaattagagggagacaa

SEQ ID NO: 3837165 - DNA, 25 bp, Homo sapien
agcgtgaggcttaggagcaattaga

SEQ ID NO: 3837166 - DNA, 25 bp, Homo sapien
gggcaagggagcgtgaggcttagga

SEQ ID NO: 3837167 - DNA, 25 bp, Homo sapien
aagcaacaggacacgcggggcaagg

SEQ ID NO: 3837168 - DNA, 25 bp, Homo sapien
ccgcatgtcatgatcctttcagggt

SEQ ID NO: 3837169 - DNA, 25 bp, Homo sapien
catgtcatgatcctttcagggtgcc

SEQ ID NO: 3837170 - DNA, 25 bp, Homo sapien
gccaaaagcgcagccgcatgtcatg

SEQ ID NO: 3837171 - DNA, 25 bp, Homo sapien
aaagcgcagccgcatgtcatgatcc

SEQ ID NO: 3837172 - DNA, 25 bp, Homo sapien
aggtacgcaccaccaggcccgacta

SEQ ID NO: 3837173 - DNA, 25 bp, Homo sapien
ataacaggtacgcaccaccaggccc

SEQ ID NO: 3837174 - DNA, 25 bp, Homo sapien
ctctccagtaactgggataacaggt

SEQ ID NO: 3837175 - DNA, 25 bp, Homo sapien
tctccagtaactgggataacaggta

SEQ ID NO: 3837176 - DNA, 25 bp, Homo sapien
caggtgcctgacaatgcactcagca

SEQ ID NO: 3837177 - DNA, 25 bp, Homo sapien
gagtacaggtgcctgacaatgcact

SEQ ID NO: 3837178 - DNA, 25 bp, Homo sapien
gtgcctgacaatgcactcagcaaat

SEQ ID NO: 3837179 - DNA, 25 bp, Homo sapien
acaggtgcctgacaatgcactcagc

SEQ ID NO: 3837180 - DNA, 25 bp, Homo sapien
tttcactcagaaagaatcatcctta

SEQ ID NO: 3837181 - DNA, 25 bp, Homo sapien
gaatgttaaatgtgtaacgtctcag

SEQ ID NO: 3837182 - DNA, 25 bp, Homo sapien
gatagacagccagactattgataac

SEQ ID NO: 3837183 - DNA, 25 bp, Homo sapien
acgatgacgatagacagccagacta

SEQ ID NO: 3837184 - DNA, 25 bp, Homo sapien
cgaactcctacaccaaagtcagtct

SEQ ID NO: 3837185 - DNA, 25 bp, Homo sapien
cctctacagaaagttagtatactca

SEQ ID NO: 3837186 - DNA, 25 bp, Homo sapien
gtatacctctacagaaagttagtat

SEQ ID NO: 3837187 - DNA, 25 bp, Homo sapien
tacctctacagaaagttagtatact

SEQ ID NO: 3837188 - DNA, 25 bp, Homo sapien
ctctacagaaagttagtatactcac

SEQ ID NO: 3837189 - DNA, 25 bp, Homo sapien
ttcgagaccagaagatagtcttcag

SEQ ID NO: 3837190 - DNA, 25 bp, Homo sapien
tccatttcgagaccagaagatagtc

SEQ ID NO: 3837191 - DNA, 25 bp, Homo sapien
atttcgagaccagaagatagtcttc

SEQ ID NO: 3837192 - DNA, 25 bp, Homo sapien
ccatcatgtccatttcgagaccaga

SEQ ID NO: 3837193 - DNA, 25 bp, Homo sapien
gaggtcaagaagctgttctttccct

SEQ ID NO: 3837194 - DNA, 25 bp, Homo sapien
aggagaaggtgagaaacctgaggtc

SEQ ID NO: 3837195 - DNA, 25 bp, Homo sapien
aaactcatttccacactatggggac

SEQ ID NO: 3837196 - DNA, 25 bp, Homo sapien
cactatggggactccaacagagcca

SEQ ID NO: 3837197 - DNA, 25 bp, Homo sapien
tgacgtctttcaggccaattttatt

SEQ ID NO: 3837198 - DNA, 25 bp, Homo sapien
gtaatgacgtctttcaggccaattt

SEQ ID NO: 3837199 - DNA, 25 bp, Homo sapien
tagagtaatgacgtctttcaggcca

SEQ ID NO: 3837200 - DNA, 25 bp, Homo sapien
gagtaatgacgtctttcaggccaat

SEQ ID NO: 3837201 - DNA, 25 bp, Homo sapien
caacagtatttgtgtcaaggcacat

SEQ ID NO: 3837202 - DNA, 25 bp, Homo sapien
acaacagtatttgtgtcaaggcaca

SEQ ID NO: 3837203 - DNA, 25 bp, Homo sapien
atggtgtcattaaccccgcagttca

SEQ ID NO: 3837204 - DNA, 25 bp, Homo sapien
tatggtgtcattaaccccgcagttc

SEQ ID NO: 3837205 - DNA, 25 bp, Homo sapien
gaatatggtgtcattaaccccgcag

SEQ ID NO: 3837206 - DNA, 25 bp, Homo sapien
aatatggtgtcattaaccccgcagt

SEQ ID NO: 3837207 - DNA, 25 bp, Homo sapien
aactgtacccttacacaatctatct

SEQ ID NO: 3837208 - DNA, 25 bp, Homo sapien
aatctatctctacctagaaaacgta

SEQ ID NO: 3837209 - DNA, 25 bp, Homo sapien
tgtacccttacacaatctatctcta

SEQ ID NO: 3837210 - DNA, 25 bp, Homo sapien
tctatctctacctagaaaacgtatt

SEQ ID NO: 3837211 - DNA, 25 bp, Homo sapien
cgccgcaactcttgcgcacgttgaa

SEQ ID NO: 3837212 - DNA, 25 bp, Homo sapien
ctcttgcgcacgttgaaacattttc

SEQ ID NO: 3837213 - DNA, 25 bp, Homo sapien
atttgtggtagtcctctgcccgccg

SEQ ID NO: 3837214 - DNA, 25 bp, Homo sapien
tttgcatttgtggtagtcctctgcc

SEQ ID NO: 3837215 - DNA, 25 bp, Homo sapien
ccagttgcaaagaggctttcttgca

SEQ ID NO: 3837216 - DNA, 25 bp, Homo sapien
caaagaggctttcttgcagaagggg

SEQ ID NO: 3837217 - DNA, 25 bp, Homo sapien
aagaggctttcttgcagaagggggg

SEQ ID NO: 3837218 - DNA, 25 bp, Homo sapien
gaggctttcttgcagaaggggggat

SEQ ID NO: 3837219 - DNA, 25 bp, Homo sapien
aatgtatccatgtcctgacctggca

SEQ ID NO: 3837220 - DNA, 25 bp, Homo sapien
aaaatgtatccatgtcctgacctgg

SEQ ID NO: 3837221 - DNA, 25 bp, Homo sapien
atgtatccatgtcctgacctggcag

SEQ ID NO: 3837222 - DNA, 25 bp, Homo sapien
aaatgtatccatgtcctgacctggc

SEQ ID NO: 3837223 - DNA, 25 bp, Homo sapien
gattgttccacctcatccaccctcc

SEQ ID NO: 3837224 - DNA, 25 bp, Homo sapien
cttgggcgattgttccacctcatcc

SEQ ID NO: 3837225 - DNA, 25 bp, Homo sapien
tgggtaattgttgtgcctcggcctc

SEQ ID NO: 3837226 - DNA, 25 bp, Homo sapien
gcctcttgggcttgggcgattgttc

SEQ ID NO: 3837227 - DNA, 25 bp, Homo sapien
ctgcttctcttctcgtgcttttgtg

SEQ ID NO: 3837228 - DNA, 25 bp, Homo sapien
ttcattagagacagtactttattca

SEQ ID NO: 3837229 - DNA, 25 bp, Homo sapien
cagcctaaagtacttttcattagag

SEQ ID NO: 3837230 - DNA, 25 bp, Homo sapien
tttgtgtcttgagacagtctgtctg

SEQ ID NO: 3837231 - DNA, 25 bp, Homo sapien
caaaacatatctgcactggctcacg

SEQ ID NO: 3837232 - DNA, 25 bp, Homo sapien
tgctggggaccaaaacatatctgca

SEQ ID NO: 3837233 - DNA, 25 bp, Homo sapien
catatctgcactggctcacgcatgt

SEQ ID NO: 3837234 - DNA, 25 bp, Homo sapien
gggaccaaaacatatctgcactggc

SEQ ID NO: 3837235 - DNA, 25 bp, Homo sapien
tgggcgtgctgcattctttcactgc

SEQ ID NO: 3837236 - DNA, 25 bp, Homo sapien
agctacatccatgtcagagcgaaga

SEQ ID NO: 3837237 - DNA, 25 bp, Homo sapien
ccatgtcagagcgaagaacatgatt

SEQ ID NO: 3837238 - DNA, 25 bp, Homo sapien
gggcgtgctgcattctttcactgct

SEQ ID NO: 3837239 - DNA, 25 bp, Homo sapien
tagcctcgttaaggctgggtctcag

SEQ ID NO: 3837240 - DNA, 25 bp, Homo sapien
cagacctcactggagagaggtggct

SEQ ID NO: 3837241 - DNA, 25 bp, Homo sapien
ctgcagcccattggacggtgaggtt

SEQ ID NO: 3837242 - DNA, 25 bp, Homo sapien
gttgccccaggtcacggctggtcca

SEQ ID NO: 3837243 - DNA, 25 bp, Homo sapien
gaaaaacagttgaactcctggagac

SEQ ID NO: 3837244 - DNA, 25 bp, Homo sapien
tcctggaaacgctagccttttaaca

SEQ ID NO: 3837245 - DNA, 25 bp, Homo sapien
tatcctgacgttctagactttcctg

SEQ ID NO: 3837246 - DNA, 25 bp, Homo sapien
ggcacagagacaagcttcaaaagtt

SEQ ID NO: 3837247 - DNA, 25 bp, Homo sapien
gcctcttggtgcataagcttgagcc

SEQ ID NO: 3837248 - DNA, 25 bp, Homo sapien
gaagggcatgtaccattaaactccg

SEQ ID NO: 3837249 - DNA, 25 bp, Homo sapien
ggccaggcgtgaatgacttgacaga

SEQ ID NO: 3837250 - DNA, 25 bp, Homo sapien
tgagcccatttacccaacttctgag

SEQ ID NO: 3837251 - DNA, 25 bp, Homo sapien
gtaggtttcgcaaggagctaccctc

SEQ ID NO: 3837252 - DNA, 25 bp, Homo sapien
tgcagataaatttacgcctcgtcct

SEQ ID NO: 3837253 - DNA, 25 bp, Homo sapien
cagagccttaagtgccaagaaagtc

SEQ ID NO: 3837254 - DNA, 25 bp, Homo sapien
gcacgtcgtgcgtgaggctcttccg

SEQ ID NO: 3837255 - DNA, 25 bp, Homo sapien
ggcagcgtccggaaggggaattaga

SEQ ID NO: 3837256 - DNA, 25 bp, Homo sapien
cgcgggaagcgagggggatcgggca

SEQ ID NO: 3837257 - DNA, 25 bp, Homo sapien
cggcgcgaggaagcgccgcgaggcg

SEQ ID NO: 3837258 - DNA, 25 bp, Homo sapien
ggagagagaagaccgcggcgcgagg

SEQ ID NO: 3837259 - DNA, 25 bp, Homo sapien
ctgttgtagcggctgaggcttcaac

SEQ ID NO: 3837260 - DNA, 25 bp, Homo sapien
ggctgggagggctgttgtagcggct

SEQ ID NO: 3837261 - DNA, 25 bp, Homo sapien
tgttgtagcggctgaggcttcaaca

SEQ ID NO: 3837262 - DNA, 25 bp, Homo sapien
gttgtagcggctgaggcttcaacat

SEQ ID NO: 3837263 - DNA, 25 bp, Homo sapien
gccgacgggccacggcctgttgcgt

SEQ ID NO: 3837264 - DNA, 25 bp, Homo sapien
ggccgccgttgggagggctggtgcc

SEQ ID NO: 3837265 - DNA, 25 bp, Homo sapien
ccaagatgccttcggctccccggcg

SEQ ID NO: 3837266 - DNA, 25 bp, Homo sapien
tgcggcgccaagatgccttcggctc

SEQ ID NO: 3837267 - DNA, 25 bp, Homo sapien
cattggccaaactgtgggccgcgcg

SEQ ID NO: 3837268 - DNA, 25 bp, Homo sapien
ctcctactggccagaccgggaaggg

SEQ ID NO: 3837269 - DNA, 25 bp, Homo sapien
gaccgcgagacccttcgtggtaatg

SEQ ID NO: 3837270 - DNA, 25 bp, Homo sapien
agactccccattggctgaagccggg

SEQ ID NO: 3837271 - DNA, 25 bp, Homo sapien
cacactcgcacaggaaaaactgagc

SEQ ID NO: 3837272 - DNA, 25 bp, Homo sapien
tgagcagggcctccactactcatgc

SEQ ID NO: 3837273 - DNA, 25 bp, Homo sapien
tgcgcctgcgtgtgctgccactctt

SEQ ID NO: 3837274 - DNA, 25 bp, Homo sapien
cgaactagtccctgccctaggtgtt

SEQ ID NO: 3837275 - DNA, 25 bp, Homo sapien
gggacagcgcagccgcaaaagccat

SEQ ID NO: 3837276 - DNA, 25 bp, Homo sapien
aaaagccatccaccgggaggcctcg

SEQ ID NO: 3837277 - DNA, 25 bp, Homo sapien
gaggcctcgcccggtctgcgcctgc

SEQ ID NO: 3837278 - DNA, 25 bp, Homo sapien
agcgcagccgcaaaagccatccacc

SEQ ID NO: 3837279 - DNA, 25 bp, Homo sapien
tcgctggctgatgtaaccggcggtt

SEQ ID NO: 3837280 - DNA, 25 bp, Homo sapien
aatcgccaggtaaccctgctcgtcg

SEQ ID NO: 3837281 - DNA, 25 bp, Homo sapien
gggatcaccaatcgccaggtaaccc

SEQ ID NO: 3837282 - DNA, 25 bp, Homo sapien
ccctgctcgtcgctggctgatgtaa

SEQ ID NO: 3837283 - DNA, 25 bp, Homo sapien
agcctgacgcctcaaaactgtggga

SEQ ID NO: 3837284 - DNA, 25 bp, Homo sapien
ggctgcaggctaccaacagatcaat

SEQ ID NO: 3837285 - DNA, 25 bp, Homo sapien
cacgccagctgtgagggcaaaagct

SEQ ID NO: 3837286 - DNA, 25 bp, Homo sapien
gtattaaccaaaaagccacgccagc

SEQ ID NO: 3837287 - DNA, 25 bp, Homo sapien
gtgggggtccctttcctgtgctctg

SEQ ID NO: 3837288 - DNA, 25 bp, Homo sapien
ctgtgggggtccctttcctgtgctc

SEQ ID NO: 3837289 - DNA, 25 bp, Homo sapien
gactgtgggggtccctttcctgtgc

SEQ ID NO: 3837290 - DNA, 25 bp, Homo sapien
tgactgtgggggtccctttcctgtg

SEQ ID NO: 3837291 - DNA, 25 bp, Homo sapien
ggaattgttgtagacgccttcaaac

SEQ ID NO: 3837292 - DNA, 25 bp, Homo sapien
tctggaattgttgtagacgccttca

SEQ ID NO: 3837293 - DNA, 25 bp, Homo sapien
gcattctggaattgttgtagacgcc

SEQ ID NO: 3837294 - DNA, 25 bp, Homo sapien
cattctggaattgttgtagacgcct

SEQ ID NO: 3837295 - DNA, 25 bp, Homo sapien
agaaagtagatgcattacgttcctt

SEQ ID NO: 3837296 - DNA, 25 bp, Homo sapien
agagtgtctccagaaagtagatgca

SEQ ID NO: 3837297 - DNA, 25 bp, Homo sapien
taagaagagtgtctccagaaagtag

SEQ ID NO: 3837298 - DNA, 25 bp, Homo sapien
gatgcattacgttccttaaacaacc

SEQ ID NO: 3837299 - DNA, 25 bp, Homo sapien
cctcataagtggtaccatttttcac

SEQ ID NO: 3837300 - DNA, 25 bp, Homo sapien
ctttgagcttagcgtcttgaagata

SEQ ID NO: 3837301 - DNA, 25 bp, Homo sapien
ctcataagtggtaccatttttcacc

SEQ ID NO: 3837302 - DNA, 25 bp, Homo sapien
attctcctcctactctgcaactcca

SEQ ID NO: 3837303 - DNA, 25 bp, Homo sapien
ttcattctcctcctactctgcaact

SEQ ID NO: 3837304 - DNA, 25 bp, Homo sapien
aaataattaaatttgagtacactga

SEQ ID NO: 3837305 - DNA, 25 bp, Homo sapien
aataattaaatttgagtacactgac

SEQ ID NO: 3837306 - DNA, 25 bp, Homo sapien
gctcagatgctttccggtgcacagc

SEQ ID NO: 3837307 - DNA, 25 bp, Homo sapien
agatgctttccggtgcacagcatcc

SEQ ID NO: 3837308 - DNA, 25 bp, Homo sapien
tgctttccggtgcacagcatccacg

SEQ ID NO: 3837309 - DNA, 25 bp, Homo sapien
ctcagatgctttccggtgcacagca

SEQ ID NO: 3837310 - DNA, 25 bp, Homo sapien
cattcactttcgagttcatggcaat

SEQ ID NO: 3837311 - DNA, 25 bp, Homo sapien
ccattcactttcgagttcatggcaa

SEQ ID NO: 3837312 - DNA, 25 bp, Homo sapien
attcactttcgagttcatggcaatg

SEQ ID NO: 3837313 - DNA, 25 bp, Homo sapien
cccattcactttcgagttcatggca

SEQ ID NO: 3837314 - DNA, 25 bp, Homo sapien
agactcgaggtcatagtcgtcgctg

SEQ ID NO: 3837315 - DNA, 25 bp, Homo sapien
tgtcagactcgaggtcatagtcgtc

SEQ ID NO: 3837316 - DNA, 25 bp, Homo sapien
catgtcagactcgaggtcatagtcg

SEQ ID NO: 3837317 - DNA, 25 bp, Homo sapien
tcagactcgaggtcatagtcgtcgc

SEQ ID NO: 3837318 - DNA, 25 bp, Homo sapien
gaactagatctacgtacaaccatga

SEQ ID NO: 3837319 - DNA, 25 bp, Homo sapien
gagtcatagtgcaccaaagcttcaa

SEQ ID NO: 3837320 - DNA, 25 bp, Homo sapien
caaccatgagaagttcgaaaaggca

SEQ ID NO: 3837321 - DNA, 25 bp, Homo sapien
tcaacagatagtctcgctatgatgc

SEQ ID NO: 3837322 - DNA, 25 bp, Homo sapien
gtataagaagaaagactgctatcat

SEQ ID NO: 3837323 - DNA, 25 bp, Homo sapien
taggtagtcttcacaccgtagttct

SEQ ID NO: 3837324 - DNA, 25 bp, Homo sapien
gaagaaagactgctatcataggtag

SEQ ID NO: 3837325 - DNA, 25 bp, Homo sapien
ctcctcattgaacttgaacatttca

SEQ ID NO: 3837326 - DNA, 25 bp, Homo sapien
acagaccaccaccatcccagtgcca

SEQ ID NO: 3837327 - DNA, 25 bp, Homo sapien
cagtgccaggggacaaaagaggaaa

SEQ ID NO: 3837328 - DNA, 25 bp, Homo sapien
tgagacagcacccacagaccaccac

SEQ ID NO: 3837329 - DNA, 25 bp, Homo sapien
caccatcccagtgccaggggacaaa

SEQ ID NO: 3837330 - DNA, 25 bp, Homo sapien
tcgctgacgaaactcttctgagttg

SEQ ID NO: 3837331 - DNA, 25 bp, Homo sapien
gctctcgctgacgaaactcttctga

SEQ ID NO: 3837332 - DNA, 25 bp, Homo sapien
tgacgaaactcttctgagttgtcct

SEQ ID NO: 3837333 - DNA, 25 bp, Homo sapien
cagctctcgctgacgaaactcttct

SEQ ID NO: 3837334 - DNA, 25 bp, Homo sapien
aaattacataatctcgctttacctc

SEQ ID NO: 3837335 - DNA, 25 bp, Homo sapien
gacattttacatggtcacaaggctt

SEQ ID NO: 3837336 - DNA, 25 bp, Homo sapien
cagcactcatcaactctgggcccag

SEQ ID NO: 3837337 - DNA, 25 bp, Homo sapien
aagtagtcctggctgtttgcaacag

SEQ ID NO: 3837338 - DNA, 25 bp, Homo sapien
cgaccgccccgagagctgctgcatc

SEQ ID NO: 3837339 - DNA, 25 bp, Homo sapien
agggccacgaggtggcaaagagcta

SEQ ID NO: 3837340 - DNA, 25 bp, Homo sapien
ggcaaagagctaaggccaggccgac

SEQ ID NO: 3837341 - DNA, 25 bp, Homo sapien
gccagggctgctgttgtccagatgg

SEQ ID NO: 3837342 - DNA, 25 bp, Homo sapien
gaaaatgtcaggaggcagacgacct

SEQ ID NO: 3837343 - DNA, 25 bp, Homo sapien
acattcccaccgatgcagcgtcatt

SEQ ID NO: 3837344 - DNA, 25 bp, Homo sapien
agacgacctattacattcccaccga

SEQ ID NO: 3837345 - DNA, 25 bp, Homo sapien
tcttcctcaaagtcacctcataact

SEQ ID NO: 3837346 - DNA, 25 bp, Homo sapien
tgggcgaagacagagtcttggcacc

SEQ ID NO: 3837347 - DNA, 25 bp, Homo sapien
gggcgaagacagagtcttggcacct

SEQ ID NO: 3837348 - DNA, 25 bp, Homo sapien
cactgccgagccgatgggaggctct

SEQ ID NO: 3837349 - DNA, 25 bp, Homo sapien
gagaaatggagcccactccaggatc

SEQ ID NO: 3837350 - DNA, 25 bp, Homo sapien
gttggcactgccgagccgatgggag

SEQ ID NO: 3837351 - DNA, 25 bp, Homo sapien
agaaatggagcccactccaggatct

SEQ ID NO: 3837352 - DNA, 25 bp, Homo sapien
ctttcccagctatccgagccagctc

SEQ ID NO: 3837353 - DNA, 25 bp, Homo sapien
ccagctatccgagccagctcctggg

SEQ ID NO: 3837354 - DNA, 25 bp, Homo sapien
tttcccagctatccgagccagctcc

SEQ ID NO: 3837355 - DNA, 25 bp, Homo sapien
tcccagctatccgagccagctcctg

SEQ ID NO: 3837356 - DNA, 25 bp, Homo sapien
cacagtgccaatagaacagaggaca

SEQ ID NO: 3837357 - DNA, 25 bp, Homo sapien
cattctttctctaaggtggctacac

SEQ ID NO: 3837358 - DNA, 25 bp, Homo sapien
gacattgtttgcctctgaattccaa

SEQ ID NO: 3837359 - DNA, 25 bp, Homo sapien
taatccaaggactgatagacattgt

SEQ ID NO: 3837360 - DNA, 25 bp, Homo sapien
tctcagttcttccagttggaatcgt

SEQ ID NO: 3837361 - DNA, 25 bp, Homo sapien
cagttcttccagttggaatcgtttc

SEQ ID NO: 3837362 - DNA, 25 bp, Homo sapien
tcttccagttggaatcgtttctgtt

SEQ ID NO: 3837363 - DNA, 25 bp, Homo sapien
cagttggaatcgtttctgttcattc

SEQ ID NO: 3837364 - DNA, 25 bp, Homo sapien
cccctttaccctgctaatatcccag

SEQ ID NO: 3837365 - DNA, 25 bp, Homo sapien
ctcatctacgaaccactcccaaccc

SEQ ID NO: 3837366 - DNA, 25 bp, Homo sapien
ctttgcctcatctacgaaccactcc

SEQ ID NO: 3837367 - DNA, 25 bp, Homo sapien
tgcctcatctacgaaccactcccaa

SEQ ID NO: 3837368 - DNA, 25 bp, Homo sapien
tgtcttctcccttgatgaggcccac

SEQ ID NO: 3837369 - DNA, 25 bp, Homo sapien
tgaagtcaacagaccatcaacctct

SEQ ID NO: 3837370 - DNA, 25 bp, Homo sapien
gatacggactctgtcttggaggaga

SEQ ID NO: 3837371 - DNA, 25 bp, Homo sapien
tcagtgcctcctgatggtgccaggg

SEQ ID NO: 3837372 - DNA, 25 bp, Homo sapien
cttagcattagggttcaacgttgat

SEQ ID NO: 3837373 - DNA, 25 bp, Homo sapien
ctttgtaggattgaactccttagca

SEQ ID NO: 3837374 - DNA, 25 bp, Homo sapien
gctttgtaggattgaactccttagc

SEQ ID NO: 3837375 - DNA, 25 bp, Homo sapien
actccttagcattagggttcaacgt

SEQ ID NO: 3837376 - DNA, 25 bp, Homo sapien
cattaaaccctatgaggagatgagt

SEQ ID NO: 3837377 - DNA, 25 bp, Homo sapien
tctaaagttacaggtgaggcagaga

SEQ ID NO: 3837378 - DNA, 25 bp, Homo sapien
ggcagagaatgtaagtgacgtccaa

SEQ ID NO: 3837379 - DNA, 25 bp, Homo sapien
tacaagggctcaagccaagtcagct

SEQ ID NO: 3837380 - DNA, 25 bp, Homo sapien
gtattttcccctctactcctggcca

SEQ ID NO: 3837381 - DNA, 25 bp, Homo sapien
ttttcccctctactcctggccatgc

SEQ ID NO: 3837382 - DNA, 25 bp, Homo sapien
ttgtattttcccctctactcctggc

SEQ ID NO: 3837383 - DNA, 25 bp, Homo sapien
ctgcaaaaacaagggaggacaattt

SEQ ID NO: 3837384 - DNA, 25 bp, Homo sapien
ttgaatgagtccggggccccggaga

SEQ ID NO: 3837385 - DNA, 25 bp, Homo sapien
tcccatgtggatctgaggtatgtag

SEQ ID NO: 3837386 - DNA, 25 bp, Homo sapien
ggctgtatagcccactctggcctgc

SEQ ID NO: 3837387 - DNA, 25 bp, Homo sapien
cgggatggagggagttgaatgagtc

SEQ ID NO: 3837388 - DNA, 25 bp, Homo sapien
gcccaggcactgaattggatacagg

SEQ ID NO: 3837389 - DNA, 25 bp, Homo sapien
tggatacaggatatggatacatctg

SEQ ID NO: 3837390 - DNA, 25 bp, Homo sapien
cactgaattggatacaggatatgga

SEQ ID NO: 3837391 - DNA, 25 bp, Homo sapien
ttttgctccccggtacttgccctgc

SEQ ID NO: 3837392 - DNA, 25 bp, Homo sapien
gcagccgcggcggcctgcatcatcg

SEQ ID NO: 3837393 - DNA, 25 bp, Homo sapien
ggcctgcatcatcggcggggctgag

SEQ ID NO: 3837394 - DNA, 25 bp, Homo sapien
ctggtgttggtccgagcgctgcgga

SEQ ID NO: 3837395 - DNA, 25 bp, Homo sapien
tggtgttggtccgagcgctgcggag

SEQ ID NO: 3837396 - DNA, 25 bp, Homo sapien
attcaacattcataacgatcccacc

SEQ ID NO: 3837397 - DNA, 25 bp, Homo sapien
cagacactattttctctacacttca

SEQ ID NO: 3837398 - DNA, 25 bp, Homo sapien
agtcactgcgtgcacagcaccgctt

SEQ ID NO: 3837399 - DNA, 25 bp, Homo sapien
agtggttggcacagccgccagctgg

SEQ ID NO: 3837400 - DNA, 25 bp, Homo sapien
atggctgcccgacgtcagcatgcgt

SEQ ID NO: 3837401 - DNA, 25 bp, Homo sapien
gtcagcatgcgtgggttgctctgaa

SEQ ID NO: 3837402 - DNA, 25 bp, Homo sapien
tgcccgacgtcagcatgcgtgggtt

SEQ ID NO: 3837403 - DNA, 25 bp, Homo sapien
ggtagaggatgacacgatggcctgg

SEQ ID NO: 3837404 - DNA, 25 bp, Homo sapien
tggcttccagtaggcgtggtagccg

SEQ ID NO: 3837405 - DNA, 25 bp, Homo sapien
gtaggcgtggtagccggctgcggct

SEQ ID NO: 3837406 - DNA, 25 bp, Homo sapien
gcatggtgtgggtaggactggtgaa

SEQ ID NO: 3837407 - DNA, 25 bp, Homo sapien
ggcatggtgtgggtaggactggtga

SEQ ID NO: 3837408 - DNA, 25 bp, Homo sapien
cagcaactcgctggcccccagtcct

SEQ ID NO: 3837409 - DNA, 25 bp, Homo sapien
cccagtcctcgccactcagaaatga

SEQ ID NO: 3837410 - DNA, 25 bp, Homo sapien
ctagctctatcccttcttctggcca

SEQ ID NO: 3837411 - DNA, 25 bp, Homo sapien
ccacacaggccagcaactcgctggc

SEQ ID NO: 3837412 - DNA, 25 bp, Homo sapien
tggtacagattctgctgtggctgtc

SEQ ID NO: 3837413 - DNA, 25 bp, Homo sapien
tgtccactgcccaagtgtggggcct

SEQ ID NO: 3837414 - DNA, 25 bp, Homo sapien
gtggctgtccactgcccaagtgtgg

SEQ ID NO: 3837415 - DNA, 25 bp, Homo sapien
cctgggtggtacagattctgctgtg

SEQ ID NO: 3837416 - DNA, 25 bp, Homo sapien
gaaggtcccggtggcagagagggcg

SEQ ID NO: 3837417 - DNA, 25 bp, Homo sapien
ggtggtggatggcatacacagcggc

SEQ ID NO: 3837418 - DNA, 25 bp, Homo sapien
tggatggcatacacagcggctggct

SEQ ID NO: 3837419 - DNA, 25 bp, Homo sapien
tgggcagaaggtcccggtggcagag

SEQ ID NO: 3837420 - DNA, 25 bp, Homo sapien
ggccatgttggtgaagccgtggggc

SEQ ID NO: 3837421 - DNA, 25 bp, Homo sapien
catgttggtgaagccgtggggcagc

SEQ ID NO: 3837422 - DNA, 25 bp, Homo sapien
tgggccatgttggtgaagccgtggg

SEQ ID NO: 3837423 - DNA, 25 bp, Homo sapien
ccatgttggtgaagccgtggggcag

SEQ ID NO: 3837424 - DNA, 25 bp, Homo sapien
ctgtgattccagtttggacatgggc

SEQ ID NO: 3837425 - DNA, 25 bp, Homo sapien
tgctgtgattccagtttggacatgg

SEQ ID NO: 3837426 - DNA, 25 bp, Homo sapien
gctgtgattccagtttggacatggg

SEQ ID NO: 3837427 - DNA, 25 bp, Homo sapien
ctgctgtgattccagtttggacatg

SEQ ID NO: 3837428 - DNA, 25 bp, Homo sapien
tcctggaaatccaggcgcctggcca

SEQ ID NO: 3837429 - DNA, 25 bp, Homo sapien
attcccccagctaatgagaactcac

SEQ ID NO: 3837430 - DNA, 25 bp, Homo sapien
aattcccccagctaatgagaactca

SEQ ID NO: 3837431 - DNA, 25 bp, Homo sapien
aaattcccccagctaatgagaactc

SEQ ID NO: 3837432 - DNA, 25 bp, Homo sapien
cacccagaacccgtgcatcctgccc

SEQ ID NO: 3837433 - DNA, 25 bp, Homo sapien
ccagaacccgtgcatcctgccccac

SEQ ID NO: 3837434 - DNA, 25 bp, Homo sapien
tcactccccacccagaacccgtgca

SEQ ID NO: 3837435 - DNA, 25 bp, Homo sapien
ccccacccagaacccgtgcatcctg

SEQ ID NO: 3837436 - DNA, 25 bp, Homo sapien
aggtgcaggtcggcgggcgccctgt

SEQ ID NO: 3837437 - DNA, 25 bp, Homo sapien
caggtcggcgggcgccctgtgggac

SEQ ID NO: 3837438 - DNA, 25 bp, Homo sapien
caggtgcaggtcggcgggcgccctg

SEQ ID NO: 3837439 - DNA, 25 bp, Homo sapien
gtgcaggtcggcgggcgccctgtgg

SEQ ID NO: 3837440 - DNA, 25 bp, Homo sapien
tggatcacaactgagcgaggacgga

SEQ ID NO: 3837441 - DNA, 25 bp, Homo sapien
tgagcgaggacggagggaagcaaag

SEQ ID NO: 3837442 - DNA, 25 bp, Homo sapien
tgctggatcacaactgagcgaggac

SEQ ID NO: 3837443 - DNA, 25 bp, Homo sapien
actgagcgaggacggagggaagcaa

SEQ ID NO: 3837444 - DNA, 25 bp, Homo sapien
tcaggagacagtcggggtcactgag

SEQ ID NO: 3837445 - DNA, 25 bp, Homo sapien
ttcccagtaagccagagccctcact

SEQ ID NO: 3837446 - DNA, 25 bp, Homo sapien
ccttcctccaatgccgtccagtggg

SEQ ID NO: 3837447 - DNA, 25 bp, Homo sapien
gaagagagcaggagcattagaaccc

SEQ ID NO: 3837448 - DNA, 25 bp, Homo sapien
agcggcctcctcaaggtgtctcggg

SEQ ID NO: 3837449 - DNA, 25 bp, Homo sapien
gagcaggagcattagaacccaagca

SEQ ID NO: 3837450 - DNA, 25 bp, Homo sapien
gagacatagatcactcttccctcca

SEQ ID NO: 3837451 - DNA, 25 bp, Homo sapien
gaagagacatagatcactcttccct

SEQ ID NO: 3837452 - DNA, 25 bp, Homo sapien
gggaagagacatagatcactcttcc

SEQ ID NO: 3837453 - DNA, 25 bp, Homo sapien
agagacatagatcactcttccctcc

SEQ ID NO: 3837454 - DNA, 25 bp, Homo sapien
ggatggggggctgggagtggtccga

SEQ ID NO: 3837455 - DNA, 25 bp, Homo sapien
gatggggggctgggagtggtccgag

SEQ ID NO: 3837456 - DNA, 25 bp, Homo sapien
gccctgccctctgtgaggcccctcc

SEQ ID NO: 3837457 - DNA, 25 bp, Homo sapien
gcaggggcagagcaggaacccccca

SEQ ID NO: 3837458 - DNA, 25 bp, Homo sapien
ccacccctgctggaccctggccctg

SEQ ID NO: 3837459 - DNA, 25 bp, Homo sapien
tggccctgccctctgtgaggcccct

SEQ ID NO: 3837460 - DNA, 25 bp, Homo sapien
gggcccaagtctgaagttataaata

SEQ ID NO: 3837461 - DNA, 25 bp, Homo sapien
ataaaagatcttccgtctccagcgg

SEQ ID NO: 3837462 - DNA, 25 bp, Homo sapien
aataaaagatcttccgtctccagcg

SEQ ID NO: 3837463 - DNA, 25 bp, Homo sapien
ccaagtctgaagttataaataatag

SEQ ID NO: 3837464 - DNA, 25 bp, Homo sapien
cagagggcagctagatggacatttc

SEQ ID NO: 3837465 - DNA, 25 bp, Homo sapien
caatgatcttagagaaaggccagcg

SEQ ID NO: 3837466 - DNA, 25 bp, Homo sapien
gaagttcaacctaatcttgcggcag

SEQ ID NO: 3837467 - DNA, 25 bp, Homo sapien
tggacatttcccctgctcggaaggg

SEQ ID NO: 3837468 - DNA, 25 bp, Homo sapien
tatctcgcaagacccgcgtagcgag

SEQ ID NO: 3837469 - DNA, 25 bp, Homo sapien
gcagaggcggccagatatctcgcaa

SEQ ID NO: 3837470 - DNA, 25 bp, Homo sapien
acccgcgtagcgagtcggactccgg

SEQ ID NO: 3837471 - DNA, 25 bp, Homo sapien
cagatatctcgcaagacccgcgtag

SEQ ID NO: 3837472 - DNA, 25 bp, Homo sapien
tggaattagttctccagtttgcccc

SEQ ID NO: 3837473 - DNA, 25 bp, Homo sapien
tataacagacgagttgatatcctgg

SEQ ID NO: 3837474 - DNA, 25 bp, Homo sapien
tcaggtcaaatcagttctatggctt

SEQ ID NO: 3837475 - DNA, 25 bp, Homo sapien
tcaagcaatagcagaagtggtttca

SEQ ID NO: 3837476 - DNA, 25 bp, Homo sapien
gataattttgggcatttagatgcta

SEQ ID NO: 3837477 - DNA, 25 bp, Homo sapien
taaataagttcttagtgccacgagc

SEQ ID NO: 3837478 - DNA, 25 bp, Homo sapien
gtctcacacttgtaaggcacccagc

SEQ ID NO: 3837479 - DNA, 25 bp, Homo sapien
caaggtagaaacaatcatgggggcc

SEQ ID NO: 3837480 - DNA, 25 bp, Homo sapien
ttatagagtggcaccaaggacagtg

SEQ ID NO: 3837481 - DNA, 25 bp, Homo sapien
cacatcagagtgacatgggtatgac

SEQ ID NO: 3837482 - DNA, 25 bp, Homo sapien
tttggaagcacactcagggttggca

SEQ ID NO: 3837483 - DNA, 25 bp, Homo sapien
agtggtccacaagagggctgatgct

SEQ ID NO: 3837484 - DNA, 25 bp, Homo sapien
ttggctggtctttgtcccaggttcc

SEQ ID NO: 3837485 - DNA, 25 bp, Homo sapien
catgttagcaaagctggtcccgaac

SEQ ID NO: 3837486 - DNA, 25 bp, Homo sapien
gaatttggctggtctttgtcccagg

SEQ ID NO: 3837487 - DNA, 25 bp, Homo sapien
attttgaaaagaatttggctggtct

SEQ ID NO: 3837488 - DNA, 25 bp, Homo sapien
caaatgatataaagggatccgtggg

SEQ ID NO: 3837489 - DNA, 25 bp, Homo sapien
cagaggccaaatggtagtggtttga

SEQ ID NO: 3837490 - DNA, 25 bp, Homo sapien
agggtgtgctgccatggtctctaga

SEQ ID NO: 3837491 - DNA, 25 bp, Homo sapien
ttgataactaagagactgctgcgtg

SEQ ID NO: 3837492 - DNA, 25 bp, Homo sapien
gtaatcaatcccactgttatcaatc

SEQ ID NO: 3837493 - DNA, 25 bp, Homo sapien
aatcccactgttatcaatcccagca

SEQ ID NO: 3837494 - DNA, 25 bp, Homo sapien
tggagtcctaactgttggaacagaa

SEQ ID NO: 3837495 - DNA, 25 bp, Homo sapien
ctggagtcctaactgttggaacaga

SEQ ID NO: 3837496 - DNA, 25 bp, Homo sapien
ctttgggaggccgagacaggcggat

SEQ ID NO: 3837497 - DNA, 25 bp, Homo sapien
gtggctcacgcctgtaatcccagca

SEQ ID NO: 3837498 - DNA, 25 bp, Homo sapien
ctaagaatgttcaaggccgggcaca

SEQ ID NO: 3837499 - DNA, 25 bp, Homo sapien
catgaggtcaggagatcaagaccat

SEQ ID NO: 3837500 - DNA, 25 bp, Homo sapien
agaaataatgaggtcagggccgggc

SEQ ID NO: 3837501 - DNA, 25 bp, Homo sapien
tacgaccttggtttatctgaggaaa

SEQ ID NO: 3837502 - DNA, 25 bp, Homo sapien
ggaggcggagcctgaacttacgacc

SEQ ID NO: 3837503 - DNA, 25 bp, Homo sapien
caggcggtccaggagtttgcatctc

SEQ ID NO: 3837504 - DNA, 25 bp, Homo sapien
caccggaaaccagcgagatgatgag

SEQ ID NO: 3837505 - DNA, 25 bp, Homo sapien
agggctagagtagccgccgagcacc

SEQ ID NO: 3837506 - DNA, 25 bp, Homo sapien
tcgaccatagagaaccggccttagg

SEQ ID NO: 3837507 - DNA, 25 bp, Homo sapien
gtgaacggcccgctgcagcctagag

SEQ ID NO: 3837508 - DNA, 25 bp, Homo sapien
cagacgcagcgggggaagtgcttgg

SEQ ID NO: 3837509 - DNA, 25 bp, Homo sapien
acagacgcagcgggggaagtgcttg

SEQ ID NO: 3837510 - DNA, 25 bp, Homo sapien
aatctcgtagggcttcagtgccttc

SEQ ID NO: 3837511 - DNA, 25 bp, Homo sapien
gacggtgtgaatctcgtagggcttc

SEQ ID NO: 3837512 - DNA, 25 bp, Homo sapien
ccccaggagaccgaagacggtgtga

SEQ ID NO: 3837513 - DNA, 25 bp, Homo sapien
ggcgccgaccccaggagaccgaaga

SEQ ID NO: 3837514 - DNA, 25 bp, Homo sapien
tcccgtcgctgaaggaagagaccat

SEQ ID NO: 3837515 - DNA, 25 bp, Homo sapien
aagagaccatagagaacagcggcgg

SEQ ID NO: 3837516 - DNA, 25 bp, Homo sapien
atctcggtccccgaggttagctccg

SEQ ID NO: 3837517 - DNA, 25 bp, Homo sapien
ccggttccgcgcaggcgtcaggacc

SEQ ID NO: 3837518 - DNA, 25 bp, Homo sapien
tgatccctcccctcgaaatgttgag

SEQ ID NO: 3837519 - DNA, 25 bp, Homo sapien
ggtcaagtctttgctggcctcacgt

SEQ ID NO: 3837520 - DNA, 25 bp, Homo sapien
caggctgtaagtcggtgaaccctcc

SEQ ID NO: 3837521 - DNA, 25 bp, Homo sapien
tctagaccttagagagcctgcctca

SEQ ID NO: 3837522 - DNA, 25 bp, Homo sapien
gctttggatccagcagtagagggct

SEQ ID NO: 3837523 - DNA, 25 bp, Homo sapien
agatcaccccccctctacatcggat

SEQ ID NO: 3837524 - DNA, 25 bp, Homo sapien
agcgtctaacctgccccgagcctgc

SEQ ID NO: 3837525 - DNA, 25 bp, Homo sapien
gcagagagcaatggggaagggagcc

SEQ ID NO: 3837526 - DNA, 25 bp, Homo sapien
gtcactgctgagggcgcaccggagg

SEQ ID NO: 3837527 - DNA, 25 bp, Homo sapien
cactgctgagggcgcaccggaggct

SEQ ID NO: 3837528 - DNA, 25 bp, Homo sapien
ccagccagagacgtccgaccctact

SEQ ID NO: 3837529 - DNA, 25 bp, Homo sapien
cacccccagccagagacgtccgacc

SEQ ID NO: 3837530 - DNA, 25 bp, Homo sapien
gccagaagacgaggggtgggcggca

SEQ ID NO: 3837531 - DNA, 25 bp, Homo sapien
agccagaagacgaggggtgggcggc

SEQ ID NO: 3837532 - DNA, 25 bp, Homo sapien
gcagcgggggagacgagggggaggc

SEQ ID NO: 3837533 - DNA, 25 bp, Homo sapien
aggccaggtagaggcgaaaacggcg

SEQ ID NO: 3837534 - DNA, 25 bp, Homo sapien
gaaaacggcgggcaaagtccagagc

SEQ ID NO: 3837535 - DNA, 25 bp, Homo sapien
agagctcagcaaaacggcgggagaa

SEQ ID NO: 3837536 - DNA, 25 bp, Homo sapien
gcccgggcgtgggactcacagaact

SEQ ID NO: 3837537 - DNA, 25 bp, Homo sapien
gacaggtcatgtggcgaaatctccg

SEQ ID NO: 3837538 - DNA, 25 bp, Homo sapien
gtggcgaaatctccgcaccagggct

SEQ ID NO: 3837539 - DNA, 25 bp, Homo sapien
ggtcatgtggcgaaatctccgcacc

SEQ ID NO: 3837540 - DNA, 25 bp, Homo sapien
tctcaagggacaggtcatgtggcga

SEQ ID NO: 3837541 - DNA, 25 bp, Homo sapien
cctcagatgatcgagaagggcccag

SEQ ID NO: 3837542 - DNA, 25 bp, Homo sapien
cagatgatcgagaagggcccagcac

SEQ ID NO: 3837543 - DNA, 25 bp, Homo sapien
ctcagatgatcgagaagggcccagc

SEQ ID NO: 3837544 - DNA, 25 bp, Homo sapien
gccggccaggtcctcagatgatcga

SEQ ID NO: 3837545 - DNA, 25 bp, Homo sapien
gttgctgtttccacctaagactggg

SEQ ID NO: 3837546 - DNA, 25 bp, Homo sapien
cagggaaaagcgcttcttgagcttc

SEQ ID NO: 3837547 - DNA, 25 bp, Homo sapien
gcgacccactgaacgcagggaaaag

SEQ ID NO: 3837548 - DNA, 25 bp, Homo sapien
ccccgccagaggagttggagttgct

SEQ ID NO: 3837549 - DNA, 25 bp, Homo sapien
acggtgagtccatctttccccaggg

SEQ ID NO: 3837550 - DNA, 25 bp, Homo sapien
tcaaaacggtgagtccatctttccc

SEQ ID NO: 3837551 - DNA, 25 bp, Homo sapien
ccaggggacgttccatcactgacca

SEQ ID NO: 3837552 - DNA, 25 bp, Homo sapien
cagcctctcaaaacggtgagtccat

SEQ ID NO: 3837553 - DNA, 25 bp, Homo sapien
cttgggtggtacaaagaactccagg

SEQ ID NO: 3837554 - DNA, 25 bp, Homo sapien
tacaaagaactccaggcgacttcct

SEQ ID NO: 3837555 - DNA, 25 bp, Homo sapien
ttctccttcacttcgaagcagcagg

SEQ ID NO: 3837556 - DNA, 25 bp, Homo sapien
cacttcgaagcagcaggcgacactt

SEQ ID NO: 3837557 - DNA, 25 bp, Homo sapien
ttccttctacatcctcgggaagtta

SEQ ID NO: 3837558 - DNA, 25 bp, Homo sapien
tctttccttctacatcctcgggaag

SEQ ID NO: 3837559 - DNA, 25 bp, Homo sapien
cttctacatcctcgggaagttagac

SEQ ID NO: 3837560 - DNA, 25 bp, Homo sapien
agtcacactgctttctcagtcctgc

SEQ ID NO: 3837561 - DNA, 25 bp, Homo sapien
ctgtgatagaagagcaggggatgct

SEQ ID NO: 3837562 - DNA, 25 bp, Homo sapien
ggggatgctgagtcggggccgagag

SEQ ID NO: 3837563 - DNA, 25 bp, Homo sapien
tgatagaagagcaggggatgctgag

SEQ ID NO: 3837564 - DNA, 25 bp, Homo sapien
gaagagcaggggatgctgagtcggg

SEQ ID NO: 3837565 - DNA, 25 bp, Homo sapien
gtgttctcccggtcaggcatctcca

SEQ ID NO: 3837566 - DNA, 25 bp, Homo sapien
caaacgtgttctcccggtcaggcat

SEQ ID NO: 3837567 - DNA, 25 bp, Homo sapien
gttctcccggtcaggcatctccagg

SEQ ID NO: 3837568 - DNA, 25 bp, Homo sapien
accacaaacgtgttctcccggtcag

SEQ ID NO: 3837569 - DNA, 25 bp, Homo sapien
caggccttcacatgctgggcatcca

SEQ ID NO: 3837570 - DNA, 25 bp, Homo sapien
ggctcaggcattcttggatgtcaga

SEQ ID NO: 3837571 - DNA, 25 bp, Homo sapien
tccactgtctccatgatatactcgg

SEQ ID NO: 3837572 - DNA, 25 bp, Homo sapien
tgatatactcggatggaccttccac

SEQ ID NO: 3837573 - DNA, 25 bp, Homo sapien
ggggcggggactggtagcagggcag

SEQ ID NO: 3837574 - DNA, 25 bp, Homo sapien
tggggcggggactggtagcagggca

SEQ ID NO: 3837575 - DNA, 25 bp, Homo sapien
gtcatggggcggggactggtagcag

SEQ ID NO: 3837576 - DNA, 25 bp, Homo sapien
catggggcggggactggtagcaggg

SEQ ID NO: 3837577 - DNA, 25 bp, Homo sapien
tccgagtgattcaggcaggacagct

SEQ ID NO: 3837578 - DNA, 25 bp, Homo sapien
tctcgctgggtccaagcagcaggtc

SEQ ID NO: 3837579 - DNA, 25 bp, Homo sapien
tgctctcgctgggtccaagcagcag

SEQ ID NO: 3837580 - DNA, 25 bp, Homo sapien
tggctgggtagactctccgagtgat

SEQ ID NO: 3837581 - DNA, 25 bp, Homo sapien
agttccatcgagtcaaaatgggagg

SEQ ID NO: 3837582 - DNA, 25 bp, Homo sapien
caactctgggggaagcagttccatc

SEQ ID NO: 3837583 - DNA, 25 bp, Homo sapien
ggctgtttccggagtgtccaaggga

SEQ ID NO: 3837584 - DNA, 25 bp, Homo sapien
ctgagaggggatgaactgtccctgt

SEQ ID NO: 3837585 - DNA, 25 bp, Homo sapien
ttgagccgagagagcatcccgtgga

SEQ ID NO: 3837586 - DNA, 25 bp, Homo sapien
ctgtgcagccttgagccgagagagc

SEQ ID NO: 3837587 - DNA, 25 bp, Homo sapien
tcccgtggaaccaaggataccctga

SEQ ID NO: 3837588 - DNA, 25 bp, Homo sapien
gataccctgagaggggctggtcccc

SEQ ID NO: 3837589 - DNA, 25 bp, Homo sapien
tgaaggtgaggacgtattcaccccg

SEQ ID NO: 3837590 - DNA, 25 bp, Homo sapien
caggaagacaccgtgggagccagtg

SEQ ID NO: 3837591 - DNA, 25 bp, Homo sapien
tgggagccagtgccgccagtcagca

SEQ ID NO: 3837592 - DNA, 25 bp, Homo sapien
aggacgtattcaccccgccttgtct

SEQ ID NO: 3837593 - DNA, 25 bp, Homo sapien
tcctcgttcagcgacaaacgcaggt

SEQ ID NO: 3837594 - DNA, 25 bp, Homo sapien
gaagtgctcgagcatatcgaaaatg

SEQ ID NO: 3837595 - DNA, 25 bp, Homo sapien
tatcgaaaatggactggaaccacag

SEQ ID NO: 3837596 - DNA, 25 bp, Homo sapien
acaggtgctggacccggcactgacc

SEQ ID NO: 3837597 - DNA, 25 bp, Homo sapien
ggatgggacatagctgacaaggaca

SEQ ID NO: 3837598 - DNA, 25 bp, Homo sapien
ggacatagctgacaaggacaacatc

SEQ ID NO: 3837599 - DNA, 25 bp, Homo sapien
tgctgtcgctgggaggatgggacat

SEQ ID NO: 3837600 - DNA, 25 bp, Homo sapien
cgctgggaggatgggacatagctga

SEQ ID NO: 3837601 - DNA, 25 bp, Homo sapien
cttgggtgcacgggcacctcctccc

SEQ ID NO: 3837602 - DNA, 25 bp, Homo sapien
tcttgggtgcacgggcacctcctcc

SEQ ID NO: 3837603 - DNA, 25 bp, Homo sapien
ttcttgggtgcacgggcacctcctc

SEQ ID NO: 3837604 - DNA, 25 bp, Homo sapien
tccccgccccatctttctggcacac

SEQ ID NO: 3837605 - DNA, 25 bp, Homo sapien
cccgccccatctttctggcacacac

SEQ ID NO: 3837606 - DNA, 25 bp, Homo sapien
ctccccgccccatctttctggcaca

SEQ ID NO: 3837607 - DNA, 25 bp, Homo sapien
cgccccatctttctggcacacacac

SEQ ID NO: 3837608 - DNA, 25 bp, Homo sapien
caaagacgaggccaggatgggtcca

SEQ ID NO: 3837609 - DNA, 25 bp, Homo sapien
cagacagggacatgagacattgagg

SEQ ID NO: 3837610 - DNA, 25 bp, Homo sapien
caatggaacagaggatccgatggaa

SEQ ID NO: 3837611 - DNA, 25 bp, Homo sapien
atcagaccgagtgtccccgggaagg

SEQ ID NO: 3837612 - DNA, 25 bp, Homo sapien
tgcaggaggcatcggggtggcatcc

SEQ ID NO: 3837613 - DNA, 25 bp, Homo sapien
gtcactcgctccgaagggcatgagg

SEQ ID NO: 3837614 - DNA, 25 bp, Homo sapien
cactcgctccgaagggcatgagggt

SEQ ID NO: 3837615 - DNA, 25 bp, Homo sapien
acacagtcactcgctccgaagggca

SEQ ID NO: 3837616 - DNA, 25 bp, Homo sapien
tcacacgaaggagtactggttgtta

SEQ ID NO: 3837617 - DNA, 25 bp, Homo sapien
agtactggttgttaatggccctggg

SEQ ID NO: 3837618 - DNA, 25 bp, Homo sapien
tggcgccctcgacgcctcttctgcc

SEQ ID NO: 3837619 - DNA, 25 bp, Homo sapien
tgctgccgccacttctggcgccctc

SEQ ID NO: 3837620 - DNA, 25 bp, Homo sapien
ggagctcatggagcccaaatcccct

SEQ ID NO: 3837621 - DNA, 25 bp, Homo sapien
tgtaccatcaaagatgcccttggcc

SEQ ID NO: 3837622 - DNA, 25 bp, Homo sapien
cttggccaacaagggtcaggaagca

SEQ ID NO: 3837623 - DNA, 25 bp, Homo sapien
caaccaccttaatgtaactgacagc

SEQ ID NO: 3837624 - DNA, 25 bp, Homo sapien
ctccacaaagctctgacccccgtcc

SEQ ID NO: 3837625 - DNA, 25 bp, Homo sapien
tcttccctccacaaagctctgaccc

SEQ ID NO: 3837626 - DNA, 25 bp, Homo sapien
aagctctgacccccgtcccacttga

SEQ ID NO: 3837627 - DNA, 25 bp, Homo sapien
ttcttccctccacaaagctctgacc

SEQ ID NO: 3837628 - DNA, 25 bp, Homo sapien
ttcctcagtgtgtccaactgcctgt

SEQ ID NO: 3837629 - DNA, 25 bp, Homo sapien
tcccactcgtggggggtcttcctca

SEQ ID NO: 3837630 - DNA, 25 bp, Homo sapien
cactcgtggggggtcttcctcagtg

SEQ ID NO: 3837631 - DNA, 25 bp, Homo sapien
gtgtgtccaactgcctgtctgcctg

SEQ ID NO: 3837632 - DNA, 25 bp, Homo sapien
ttcctccgtggttttagcatgagcg

SEQ ID NO: 3837633 - DNA, 25 bp, Homo sapien
cagattccgcttaacttggtccggg

SEQ ID NO: 3837634 - DNA, 25 bp, Homo sapien
ccaaaataggccaaacattcctccg

SEQ ID NO: 3837635 - DNA, 25 bp, Homo sapien
atttctccagattccgcttaacttg

SEQ ID NO: 3837636 - DNA, 25 bp, Homo sapien
aaaaagaagaaaaggacagattcat

SEQ ID NO: 3837637 - DNA, 25 bp, Homo sapien
caggaaaaagaagaaaaggacagat

SEQ ID NO: 3837638 - DNA, 25 bp, Homo sapien
gaaaaagaagaaaaggacagattca

SEQ ID NO: 3837639 - DNA, 25 bp, Homo sapien
accaggaggtcttcaaactgctcta

SEQ ID NO: 3837640 - DNA, 25 bp, Homo sapien
gaggtcttcaaactgctctatcacc

SEQ ID NO: 3837641 - DNA, 25 bp, Homo sapien
caggaggtcttcaaactgctctatc

SEQ ID NO: 3837642 - DNA, 25 bp, Homo sapien
gaggagaatccgcaccaggaggtct

SEQ ID NO: 3837643 - DNA, 25 bp, Homo sapien
gcgccgggctccttggagtcatcat

SEQ ID NO: 3837644 - DNA, 25 bp, Homo sapien
cgggcgccgggctccttggagtcat

SEQ ID NO: 3837645 - DNA, 25 bp, Homo sapien
gccgggctccttggagtcatcatca

SEQ ID NO: 3837646 - DNA, 25 bp, Homo sapien
ggcgccgggctccttggagtcatca

SEQ ID NO: 3837647 - DNA, 25 bp, Homo sapien
agaggatgacaaagggttcaacaaa

SEQ ID NO: 3837648 - DNA, 25 bp, Homo sapien
atggcattggcaatgaggatcaaga

SEQ ID NO: 3837649 - DNA, 25 bp, Homo sapien
gacgatgtcccgagccttgatcctt

SEQ ID NO: 3837650 - DNA, 25 bp, Homo sapien
gacttgcggtcagcccggtagacct

SEQ ID NO: 3837651 - DNA, 25 bp, Homo sapien
cctttgcactgacttgcggtcagcc

SEQ ID NO: 3837652 - DNA, 25 bp, Homo sapien
tccacgatgtccccagggacgatgt

SEQ ID NO: 3837653 - DNA, 25 bp, Homo sapien
tctgtgtctgactcgttctcctcat

SEQ ID NO: 3837654 - DNA, 25 bp, Homo sapien
ctgtgtctgactcgttctcctcatc

SEQ ID NO: 3837655 - DNA, 25 bp, Homo sapien
tttgatggcgaggattcggatgtct

SEQ ID NO: 3837656 - DNA, 25 bp, Homo sapien
ctggtcaacccgcagcgtggtggat

SEQ ID NO: 3837657 - DNA, 25 bp, Homo sapien
aacccgcagcgtggtggatttgatg

SEQ ID NO: 3837658 - DNA, 25 bp, Homo sapien
gatgtctgcagggactttgtccccc

SEQ ID NO: 3837659 - DNA, 25 bp, Homo sapien
tgttgctcagacagtgagggttctc

SEQ ID NO: 3837660 - DNA, 25 bp, Homo sapien
catcccacccccatgcatcttccca

SEQ ID NO: 3837661 - DNA, 25 bp, Homo sapien
tcaggaacgggctccgtgtgtttga

SEQ ID NO: 3837662 - DNA, 25 bp, Homo sapien
gaacgggctccgtgtgtttgatgac

SEQ ID NO: 3837663 - DNA, 25 bp, Homo sapien
gctccgtgtgtttgatgacagatac

SEQ ID NO: 3837664 - DNA, 25 bp, Homo sapien
cgtgtgtttgatgacagatacagac

SEQ ID NO: 3837665 - DNA, 25 bp, Homo sapien
caaggccacggcaatcttaaagtag

SEQ ID NO: 3837666 - DNA, 25 bp, Homo sapien
tctgtggcagccatttggtctcgga

SEQ ID NO: 3837667 - DNA, 25 bp, Homo sapien
gttgataagccagacagccacacag

SEQ ID NO: 3837668 - DNA, 25 bp, Homo sapien
ccttgccggctgcaatgttggtgcc

SEQ ID NO: 3837669 - DNA, 25 bp, Homo sapien
ccaggcaggtggtgatgactgcagg

SEQ ID NO: 3837670 - DNA, 25 bp, Homo sapien
ccgacgggtacccagggccaggcag

SEQ ID NO: 3837671 - DNA, 25 bp, Homo sapien
gcaggtggtgatgactgcaggaaga

SEQ ID NO: 3837672 - DNA, 25 bp, Homo sapien
aggcaggtggtgatgactgcaggaa

SEQ ID NO: 3837673 - DNA, 25 bp, Homo sapien
ggagggcaagcttcttacaatggca

SEQ ID NO: 3837674 - DNA, 25 bp, Homo sapien
agcccagggtctctacggagggcaa

SEQ ID NO: 3837675 - DNA, 25 bp, Homo sapien
tgtcttgtcggaacagatgacagag

SEQ ID NO: 3837676 - DNA, 25 bp, Homo sapien
agggtgcctgtcttgtcggaacaga

SEQ ID NO: 3837677 - DNA, 25 bp, Homo sapien
caggcagccttctgactgagcgcgc

SEQ ID NO: 3837678 - DNA, 25 bp, Homo sapien
aggcagccttctgactgagcgcgct

SEQ ID NO: 3837679 - DNA, 25 bp, Homo sapien
ccttctgactgagcgcgctgcccac

SEQ ID NO: 3837680 - DNA, 25 bp, Homo sapien
acaggcagccttctgactgagcgcg

SEQ ID NO: 3837681 - DNA, 25 bp, Homo sapien
gatagtgcttagacccactgcgaga

SEQ ID NO: 3837682 - DNA, 25 bp, Homo sapien
tgcgagaactccctaattaatgcct

SEQ ID NO: 3837683 - DNA, 25 bp, Homo sapien
gaagcatgtgtgttgccaaattaca

SEQ ID NO: 3837684 - DNA, 25 bp, Homo sapien
tattagcaaaacctgtgactgtcac

SEQ ID NO: 3837685 - DNA, 25 bp, Homo sapien
gcccagcctcttgactttcaaatat

SEQ ID NO: 3837686 - DNA, 25 bp, Homo sapien
tttcaaatatatgggcaattctttt

SEQ ID NO: 3837687 - DNA, 25 bp, Homo sapien
tgactttcaaatatatgggcaattc

SEQ ID NO: 3837688 - DNA, 25 bp, Homo sapien
catgcccagcctcttgactttcaaa

SEQ ID NO: 3837689 - DNA, 25 bp, Homo sapien
gaactcattcaggaggcagatgtcc

SEQ ID NO: 3837690 - DNA, 25 bp, Homo sapien
agtggagccggtgatggagaactca

SEQ ID NO: 3837691 - DNA, 25 bp, Homo sapien
catccaccttgtcaatgataaacat

SEQ ID NO: 3837692 - DNA, 25 bp, Homo sapien
tccctctggagcgtaagtggagccg

SEQ ID NO: 3837693 - DNA, 25 bp, Homo sapien
cctggccggactggcttatcattct

SEQ ID NO: 3837694 - DNA, 25 bp, Homo sapien
tgccctggccggactggcttatcat

SEQ ID NO: 3837695 - DNA, 25 bp, Homo sapien
gccctggccggactggcttatcatt

SEQ ID NO: 3837696 - DNA, 25 bp, Homo sapien
tggccggactggcttatcattcttc

SEQ ID NO: 3837697 - DNA, 25 bp, Homo sapien
agtcattgcagagggcacagatggt

SEQ ID NO: 3837698 - DNA, 25 bp, Homo sapien
ctcgttgaagtccaaggaggagtca

SEQ ID NO: 3837699 - DNA, 25 bp, Homo sapien
aggagtcattgcagagggcacagat

SEQ ID NO: 3837700 - DNA, 25 bp, Homo sapien
agtccaaggaggagtcattgcagag

SEQ ID NO: 3837701 - DNA, 25 bp, Homo sapien
gggtggtgagtgctgtctcggtggc

SEQ ID NO: 3837702 - DNA, 25 bp, Homo sapien
cgaccttctcatagacacctttggc

SEQ ID NO: 3837703 - DNA, 25 bp, Homo sapien
tccgtgttgaacacattcatcttct

SEQ ID NO: 3837704 - DNA, 25 bp, Homo sapien
gagaggcttctcacatccgtgttga

SEQ ID NO: 3837705 - DNA, 25 bp, Homo sapien
gacatggactttctgtctcgggaga

SEQ ID NO: 3837706 - DNA, 25 bp, Homo sapien
tggactttctgtctcgggagaactc

SEQ ID NO: 3837707 - DNA, 25 bp, Homo sapien
catcttgttgcccacagcagcccgg

SEQ ID NO: 3837708 - DNA, 25 bp, Homo sapien
tagacagacatggactttctgtctc

SEQ ID NO: 3837709 - DNA, 25 bp, Homo sapien
cacatagttacagcggtcgatgacg

SEQ ID NO: 3837710 - DNA, 25 bp, Homo sapien
ggcagagtcatccaggaccatttcc

SEQ ID NO: 3837711 - DNA, 25 bp, Homo sapien
ggtggtgccaactcgcacatagtta

SEQ ID NO: 3837712 - DNA, 25 bp, Homo sapien
gccatgatcttttccttcaccggcc

SEQ ID NO: 3837713 - DNA, 25 bp, Homo sapien
gctccacgacagtgggaggctccca

SEQ ID NO: 3837714 - DNA, 25 bp, Homo sapien
gacagtgggaggctcccagctgctt

SEQ ID NO: 3837715 - DNA, 25 bp, Homo sapien
cagctccacgacagtgggaggctcc

SEQ ID NO: 3837716 - DNA, 25 bp, Homo sapien
cagtgggaggctcccagctgcttac

SEQ ID NO: 3837717 - DNA, 25 bp, Homo sapien
aggtcaggtggggatctggaaaact

SEQ ID NO: 3837718 - DNA, 25 bp, Homo sapien
tcaggtggggatctggaaaactccc

SEQ ID NO: 3837719 - DNA, 25 bp, Homo sapien
ggagatacagcagagagccacaggt

SEQ ID NO: 3837720 - DNA, 25 bp, Homo sapien
gatacagcagagagccacaggtcag

SEQ ID NO: 3837721 - DNA, 25 bp, Homo sapien
caattcgccggcagatggcaatggc

SEQ ID NO: 3837722 - DNA, 25 bp, Homo sapien
gactgcaggtactccacaatcttgg

SEQ ID NO: 3837723 - DNA, 25 bp, Homo sapien
caatcttggacttgtgcgagggctc

SEQ ID NO: 3837724 - DNA, 25 bp, Homo sapien
tgtgatctcatcgtaggactgcagg

SEQ ID NO: 3837725 - DNA, 25 bp, Homo sapien
acggcagtgccagatcccatggcaa

SEQ ID NO: 3837726 - DNA, 25 bp, Homo sapien
cagaggcagtcttggccacggcagt

SEQ ID NO: 3837727 - DNA, 25 bp, Homo sapien
cagcagctacgatggtggagaagtt

SEQ ID NO: 3837728 - DNA, 25 bp, Homo sapien
aagttgtcgtcagccagcaccatct

SEQ ID NO: 3837729 - DNA, 25 bp, Homo sapien
tgcaccgggatcagggcctcaggca

SEQ ID NO: 3837730 - DNA, 25 bp, Homo sapien
gcaccgggatcagggcctcaggcag

SEQ ID NO: 3837731 - DNA, 25 bp, Homo sapien
ctgcaccgggatcagggcctcaggc

SEQ ID NO: 3837732 - DNA, 25 bp, Homo sapien
gtcggtcaccaagttcacccatagc

SEQ ID NO: 3837733 - DNA, 25 bp, Homo sapien
tcggtcaccaagttcacccatagca

SEQ ID NO: 3837734 - DNA, 25 bp, Homo sapien
cggtcaccaagttcacccatagcag

SEQ ID NO: 3837735 - DNA, 25 bp, Homo sapien
gcggtccatgatgtccaggtctggt

SEQ ID NO: 3837736 - DNA, 25 bp, Homo sapien
tgccatgtagcggaagaagagccag

SEQ ID NO: 3837737 - DNA, 25 bp, Homo sapien
gtctggtgggttgaagcccagggct

SEQ ID NO: 3837738 - DNA, 25 bp, Homo sapien
cggggggggcggtccatgatgtcca

SEQ ID NO: 3837739 - DNA, 25 bp, Homo sapien
ctgtggtggagagaggggagtcggg

SEQ ID NO: 3837740 - DNA, 25 bp, Homo sapien
tggctgtagttgacatgaggcccat

SEQ ID NO: 3837741 - DNA, 25 bp, Homo sapien
ggcccatcctcagcgtacaggaacc

SEQ ID NO: 3837742 - DNA, 25 bp, Homo sapien
tcctcagcgtacaggaaccaccagg

SEQ ID NO: 3837743 - DNA, 25 bp, Homo sapien
catcctcagcgtacaggaaccacca

SEQ ID NO: 3837744 - DNA, 25 bp, Homo sapien
ctcacagtctatgccctcaaagtgg

SEQ ID NO: 3837745 - DNA, 25 bp, Homo sapien
tcgatggtcaccagcacggacaggg

SEQ ID NO: 3837746 - DNA, 25 bp, Homo sapien
tgtcctcggtgcactgcatgaagtg

SEQ ID NO: 3837747 - DNA, 25 bp, Homo sapien
cagtgcattgcacatctcgatggtc

SEQ ID NO: 3837748 - DNA, 25 bp, Homo sapien
gaagtgcagggacatggagaggcag

SEQ ID NO: 3837749 - DNA, 25 bp, Homo sapien
gcagccagatgttcacccagggtgg

SEQ ID NO: 3837750 - DNA, 25 bp, Homo sapien
tgttcacccagggtggcatccgcag

SEQ ID NO: 3837751 - DNA, 25 bp, Homo sapien
gggtcaacatagaggatgaggaagt

SEQ ID NO: 3837752 - DNA, 25 bp, Homo sapien
ccagggcccggagcttgaagatcat

SEQ ID NO: 3837753 - DNA, 25 bp, Homo sapien
tccgagcaacgaacttgaggatttc

SEQ ID NO: 3837754 - DNA, 25 bp, Homo sapien
cctctaggtagttccgagcaacgaa

SEQ ID NO: 3837755 - DNA, 25 bp, Homo sapien
gaacttgaggatttcgtcgagccca

SEQ ID NO: 3837756 - DNA, 25 bp, Homo sapien
cgagcccaatgactggcagtgagat

SEQ ID NO: 3837757 - DNA, 25 bp, Homo sapien
tgtgacacgggctcagagatggagg

SEQ ID NO: 3837758 - DNA, 25 bp, Homo sapien
ctgtgacacgggctcagagatggag

SEQ ID NO: 3837759 - DNA, 25 bp, Homo sapien
ggtgcatctcccaggcacgcactta

SEQ ID NO: 3837760 - DNA, 25 bp, Homo sapien
tacctggaggctcagaagcttacca

SEQ ID NO: 3837761 - DNA, 25 bp, Homo sapien
tgggagccaaactgacgcccagtgg

SEQ ID NO: 3837762 - DNA, 25 bp, Homo sapien
acaagtgaccttggatgcgacgcgc

SEQ ID NO: 3837763 - DNA, 25 bp, Homo sapien
tcacttccttctttcatcttctgga

SEQ ID NO: 3837764 - DNA, 25 bp, Homo sapien
cacttccttctttcatcttctggat

SEQ ID NO: 3837765 - DNA, 25 bp, Homo sapien
tctgcctgaagatgtgtcactatcg

SEQ ID NO: 3837766 - DNA, 25 bp, Homo sapien
agatgtgtcactatcggggtgggga

SEQ ID NO: 3837767 - DNA, 25 bp, Homo sapien
gaagatgtgtcactatcggggtggg

SEQ ID NO: 3837768 - DNA, 25 bp, Homo sapien
tgcctgaagatgtgtcactatcggg

SEQ ID NO: 3837769 - DNA, 25 bp, Homo sapien
gtttataaacagacacatgacacgg

SEQ ID NO: 3837770 - DNA, 25 bp, Homo sapien
tataaacagacacatgacacgggtg

SEQ ID NO: 3837771 - DNA, 25 bp, Homo sapien
taaacagacacatgacacgggtgtg

SEQ ID NO: 3837772 - DNA, 25 bp, Homo sapien
gtcggtcgccttgtccctgcaagcc

SEQ ID NO: 3837773 - DNA, 25 bp, Homo sapien
ttattttcaataaataagcagctca

SEQ ID NO: 3837774 - DNA, 25 bp, Homo sapien
tttcaataaataagcagctcagcgc

SEQ ID NO: 3837775 - DNA, 25 bp, Homo sapien
ttcaataaataagcagctcagcgca

SEQ ID NO: 3837776 - DNA, 25 bp, Homo sapien
attttcaataaataagcagctcagc

SEQ ID NO: 3837777 - DNA, 25 bp, Homo sapien
ctccaagcttgcacagaggcaaggc

SEQ ID NO: 3837778 - DNA, 25 bp, Homo sapien
cctccaagcttgcacagaggcaagg

SEQ ID NO: 3837779 - DNA, 25 bp, Homo sapien
agtcccgctcagtcacccaggctga

SEQ ID NO: 3837780 - DNA, 25 bp, Homo sapien
cagagggagaccctgactctctttt

SEQ ID NO: 3837781 - DNA, 25 bp, Homo sapien
ggctgaagtgcggtggcacaatctc

SEQ ID NO: 3837782 - DNA, 25 bp, Homo sapien
ctgaagtgcggtggcacaatctcgg

SEQ ID NO: 3837783 - DNA, 25 bp, Homo sapien
gtggtcagactctccggggcaccca

SEQ ID NO: 3837784 - DNA, 25 bp, Homo sapien
ggtggtcagactctccggggcaccc

SEQ ID NO: 3837785 - DNA, 25 bp, Homo sapien
accttcaccactagaggttcctcgg

SEQ ID NO: 3837786 - DNA, 25 bp, Homo sapien
ttcaccactagaggttcctcgggcc

SEQ ID NO: 3837787 - DNA, 25 bp, Homo sapien
accactagaggttcctcgggcctga

SEQ ID NO: 3837788 - DNA, 25 bp, Homo sapien
cactagaggttcctcgggcctgact

SEQ ID NO: 3837789 - DNA, 25 bp, Homo sapien
ggcactgcagcacagcgttatctcc

SEQ ID NO: 3837790 - DNA, 25 bp, Homo sapien
gactcccgagaccaggtcagctgct

SEQ ID NO: 3837791 - DNA, 25 bp, Homo sapien
gggactcccgagaccaggtcagctg

SEQ ID NO: 3837792 - DNA, 25 bp, Homo sapien
gggccatctgaggtccccttgaggc

SEQ ID NO: 3837793 - DNA, 25 bp, Homo sapien
caggccttctcagaggggggccccg

SEQ ID NO: 3837794 - DNA, 25 bp, Homo sapien
ggcacaggtagaagccccccatctg

SEQ ID NO: 3837795 - DNA, 25 bp, Homo sapien
ggtagaagccccccatctgttgaga

SEQ ID NO: 3837796 - DNA, 25 bp, Homo sapien
gggccccggctggcacaggtagaag

SEQ ID NO: 3837797 - DNA, 25 bp, Homo sapien
ctgccctccacattgactgtccagc

SEQ ID NO: 3837798 - DNA, 25 bp, Homo sapien
cgctgccctccacattgactgtcca

SEQ ID NO: 3837799 - DNA, 25 bp, Homo sapien
cctccacattgactgtccagccagg

SEQ ID NO: 3837800 - DNA, 25 bp, Homo sapien
gccctccacattgactgtccagcca

SEQ ID NO: 3837801 - DNA, 25 bp, Homo sapien
agagataaatagagacaaagacccg

SEQ ID NO: 3837802 - DNA, 25 bp, Homo sapien
acctagctccgagtttcgccctcaa

SEQ ID NO: 3837803 - DNA, 25 bp, Homo sapien
agctcatactgaagccacgaagccc

SEQ ID NO: 3837804 - DNA, 25 bp, Homo sapien
tagagactcaaagacagagataaat

SEQ ID NO: 3837805 - DNA, 25 bp, Homo sapien
tgggagacacggaggctctccctcc

SEQ ID NO: 3837806 - DNA, 25 bp, Homo sapien
gaggacctgttcttcaggccacagc

SEQ ID NO: 3837807 - DNA, 25 bp, Homo sapien
ccaggccacctaggtccgaaacatt

SEQ ID NO: 3837808 - DNA, 25 bp, Homo sapien
cagggcggtctttggcccacacata

SEQ ID NO: 3837809 - DNA, 25 bp, Homo sapien
gacacagagtcagggggtaccccac

SEQ ID NO: 3837810 - DNA, 25 bp, Homo sapien
tggacacagagtcagggggtacccc

SEQ ID NO: 3837811 - DNA, 25 bp, Homo sapien
ggacacagagtcagggggtacccca

SEQ ID NO: 3837812 - DNA, 25 bp, Homo sapien
ggcgatcgtccttcagctctaggct

SEQ ID NO: 3837813 - DNA, 25 bp, Homo sapien
tcagcaatgacttaggccccttggg

SEQ ID NO: 3837814 - DNA, 25 bp, Homo sapien
ccgggcgatcgtccttcagctctag

SEQ ID NO: 3837815 - DNA, 25 bp, Homo sapien
agctctaggctcagcaatgacttag

SEQ ID NO: 3837816 - DNA, 25 bp, Homo sapien
cggggcaacaacagacccgtctcca

SEQ ID NO: 3837817 - DNA, 25 bp, Homo sapien
tcttgagctgtggcccggggcaaca

SEQ ID NO: 3837818 - DNA, 25 bp, Homo sapien
agcgtcttgagctgtggcccggggc

SEQ ID NO: 3837819 - DNA, 25 bp, Homo sapien
ggcaacaacagacccgtctccatta

SEQ ID NO: 3837820 - DNA, 25 bp, Homo sapien
ctggccgagcagtgatctccaggtg

SEQ ID NO: 3837821 - DNA, 25 bp, Homo sapien
caggttgccacggtgacaataatac

SEQ ID NO: 3837822 - DNA, 25 bp, Homo sapien
tgccacggtgacaataatactttcc

SEQ ID NO: 3837823 - DNA, 25 bp, Homo sapien
acatggtcaggttgccacggtgaca

SEQ ID NO: 3837824 - DNA, 25 bp, Homo sapien
tatggagcctggaatagagtcacca

SEQ ID NO: 3837825 - DNA, 25 bp, Homo sapien
tgtatctgttgagcctgaggtgtcc

SEQ ID NO: 3837826 - DNA, 25 bp, Homo sapien
catggtgacccaagaagccattgag

SEQ ID NO: 3837827 - DNA, 25 bp, Homo sapien
actgggccaccaagaagactatact

SEQ ID NO: 3837828 - DNA, 25 bp, Homo sapien
gaagatcagataagccaaagtcaca

SEQ ID NO: 3837829 - DNA, 25 bp, Homo sapien
gctgagaccttccagccaccagtcc

SEQ ID NO: 3837830 - DNA, 25 bp, Homo sapien
ctgagaccttccagccaccagtcct

SEQ ID NO: 3837831 - DNA, 25 bp, Homo sapien
atcagataagccaaagtcacagctg

SEQ ID NO: 3837832 - DNA, 25 bp, Homo sapien
tggtggggtcagtcattcgctttct

SEQ ID NO: 3837833 - DNA, 25 bp, Homo sapien
ctcctggtggggtcagtcattcgct

SEQ ID NO: 3837834 - DNA, 25 bp, Homo sapien
ggtggggtcagtcattcgctttctt

SEQ ID NO: 3837835 - DNA, 25 bp, Homo sapien
cctggtggggtcagtcattcgcttt

SEQ ID NO: 3837836 - DNA, 25 bp, Homo sapien
tgggggaggcgtcactttgaagaat

SEQ ID NO: 3837837 - DNA, 25 bp, Homo sapien
ctgggggaggcgtcactttgaagaa

SEQ ID NO: 3837838 - DNA, 25 bp, Homo sapien
cagcacgttcccgtactggttctgg

SEQ ID NO: 3837839 - DNA, 25 bp, Homo sapien
gggagagacagcacgttcccgtact

SEQ ID NO: 3837840 - DNA, 25 bp, Homo sapien
gagacagcacgttcccgtactggtt

SEQ ID NO: 3837841 - DNA, 25 bp, Homo sapien
agcacgttcccgtactggttctggg

SEQ ID NO: 3837842 - DNA, 25 bp, Homo sapien
cggtcaaggctaagggtccgcgcgg

SEQ ID NO: 3837843 - DNA, 25 bp, Homo sapien
gggcggaatctaaatctagggccga

SEQ ID NO: 3837844 - DNA, 25 bp, Homo sapien
ggctctgcgaatggactctgggtct

SEQ ID NO: 3837845 - DNA, 25 bp, Homo sapien
ggggcgaagttctgctcttgattac

SEQ ID NO: 3837846 - DNA, 25 bp, Homo sapien
gtttccataagacggggcagtgccc

SEQ ID NO: 3837847 - DNA, 25 bp, Homo sapien
cctggacgtcgctgctcgggtttcc

SEQ ID NO: 3837848 - DNA, 25 bp, Homo sapien
ggaccccaaggctccatccgcctgg

SEQ ID NO: 3837849 - DNA, 25 bp, Homo sapien
atccgcctggacgtcgctgctcggg

SEQ ID NO: 3837850 - DNA, 25 bp, Homo sapien
ccaaggttggagtcgttctcataga

SEQ ID NO: 3837851 - DNA, 25 bp, Homo sapien
ggagtcgttctcatagaactcggag

SEQ ID NO: 3837852 - DNA, 25 bp, Homo sapien
tcctgcccaaggttggagtcgttct

SEQ ID NO: 3837853 - DNA, 25 bp, Homo sapien
tagaactcggagtcctcctcactgt

SEQ ID NO: 3837854 - DNA, 25 bp, Homo sapien
ggagaaggagtcttcatcctcagga

SEQ ID NO: 3837855 - DNA, 25 bp, Homo sapien
cccttctaggagtgtcacagcgctg

SEQ ID NO: 3837856 - DNA, 25 bp, Homo sapien
actccagggaccccttctaggagtg

SEQ ID NO: 3837857 - DNA, 25 bp, Homo sapien
tcacagcgctgcaattacacctaag

SEQ ID NO: 3837858 - DNA, 25 bp, Homo sapien
aattacacctaagtctctgaggtcc

SEQ ID NO: 3837859 - DNA, 25 bp, Homo sapien
ctcttcatcctcgttctcataagac

SEQ ID NO: 3837860 - DNA, 25 bp, Homo sapien
tcatcctcgttctcataagactcag

SEQ ID NO: 3837861 - DNA, 25 bp, Homo sapien
ttgcttcccggctggggtcccaggc

SEQ ID NO: 3837862 - DNA, 25 bp, Homo sapien
tgcttcccggctggggtcccaggct

SEQ ID NO: 3837863 - DNA, 25 bp, Homo sapien
ccagggaggttgcttcccggctggg

SEQ ID NO: 3837864 - DNA, 25 bp, Homo sapien
ttcccggctggggtcccaggctgac

SEQ ID NO: 3837865 - DNA, 25 bp, Homo sapien
tggaggctagggcatgggaagtaca

SEQ ID NO: 3837866 - DNA, 25 bp, Homo sapien
gaggctagggcatgggaagtacagc

SEQ ID NO: 3837867 - DNA, 25 bp, Homo sapien
tgggcgggggatggagaattggagg

SEQ ID NO: 3837868 - DNA, 25 bp, Homo sapien
agaattggaggctagggcatgggaa

SEQ ID NO: 3837869 - DNA, 25 bp, Homo sapien
ggctgcatacaggattcctctcata

SEQ ID NO: 3837870 - DNA, 25 bp, Homo sapien
ctggccccgaatggagcggagctgg

SEQ ID NO: 3837871 - DNA, 25 bp, Homo sapien
gggggctgcatacaggattcctctc

SEQ ID NO: 3837872 - DNA, 25 bp, Homo sapien
ttcctcatgattgggtccaggctgg

SEQ ID NO: 3837873 - DNA, 25 bp, Homo sapien
gaccagggaggaggagaacatgggt

SEQ ID NO: 3837874 - DNA, 25 bp, Homo sapien
gaggaggagaacatgggtggcactg

SEQ ID NO: 3837875 - DNA, 25 bp, Homo sapien
tggataggaccagggaggaggagaa

SEQ ID NO: 3837876 - DNA, 25 bp, Homo sapien
ctggataggaccagggaggaggaga

SEQ ID NO: 3837877 - DNA, 25 bp, Homo sapien
ggtctggcccatcgggattatccat

SEQ ID NO: 3837878 - DNA, 25 bp, Homo sapien
catcgggattatccatgttctcata

SEQ ID NO: 3837879 - DNA, 25 bp, Homo sapien
tgggtctggcccatcgggattatcc

SEQ ID NO: 3837880 - DNA, 25 bp, Homo sapien
ggcccatcgggattatccatgttct

SEQ ID NO: 3837881 - DNA, 25 bp, Homo sapien
cagccactgccatccgtgcctatct

SEQ ID NO: 3837882 - DNA, 25 bp, Homo sapien
gaggggtccagcagtcctccccctg

SEQ ID NO: 3837883 - DNA, 25 bp, Homo sapien
cagaagaaacggtgatggggagggg

SEQ ID NO: 3837884 - DNA, 25 bp, Homo sapien
tttccctaggggcagtcccagctca

SEQ ID NO: 3837885 - DNA, 25 bp, Homo sapien
cagaggttggcatcatctgctcgag

SEQ ID NO: 3837886 - DNA, 25 bp, Homo sapien
tggaagtgtcactggcatgtataca

SEQ ID NO: 3837887 - DNA, 25 bp, Homo sapien
tggcatcatctgctcgaggtcttca

SEQ ID NO: 3837888 - DNA, 25 bp, Homo sapien
tcaggtgtgaatcttggggacttga

SEQ ID NO: 3837889 - DNA, 25 bp, Homo sapien
tacgtccagcgtgccccgggatgga

SEQ ID NO: 3837890 - DNA, 25 bp, Homo sapien
aagtccacagacactacgtccagcg

SEQ ID NO: 3837891 - DNA, 25 bp, Homo sapien
ccgggatggagaccgctgggcccga

SEQ ID NO: 3837892 - DNA, 25 bp, Homo sapien
gcaccgctacctccggaccagcggc

SEQ ID NO: 3837893 - DNA, 25 bp, Homo sapien
accgcgagcggtggcgacctccaga

SEQ ID NO: 3837894 - DNA, 25 bp, Homo sapien
tgttgctgttatcccgggacgcgac

SEQ ID NO: 3837895 - DNA, 25 bp, Homo sapien
tcgtccgcggcaccgcgagcggtgg

SEQ ID NO: 3837896 - DNA, 25 bp, Homo sapien
gcggtggcgacctccagaatttcct

SEQ ID NO: 3837897 - DNA, 25 bp, Homo sapien
cctgcgggccgcctgtcctcccctt

SEQ ID NO: 3837898 - DNA, 25 bp, Homo sapien
gtcctgcgggccgcctgtcctcccc

SEQ ID NO: 3837899 - DNA, 25 bp, Homo sapien
ggggtcctgcgggccgcctgtcctc

SEQ ID NO: 3837900 - DNA, 25 bp, Homo sapien
gggtcctgcgggccgcctgtcctcc

SEQ ID NO: 3837901 - DNA, 25 bp, Homo sapien
tacccctgactcttagggactctca

SEQ ID NO: 3837902 - DNA, 25 bp, Homo sapien
atttgccatggaccccaacctcaaa

SEQ ID NO: 3837903 - DNA, 25 bp, Homo sapien
gactctagctcctaggaatcctaaa

SEQ ID NO: 3837904 - DNA, 25 bp, Homo sapien
ttagggactctcagcccattgctca

SEQ ID NO: 3837905 - DNA, 25 bp, Homo sapien
agggatagatcatctgggataaggc

SEQ ID NO: 3837906 - DNA, 25 bp, Homo sapien
tcctcatcccctggagggtagagtt

SEQ ID NO: 3837907 - DNA, 25 bp, Homo sapien
ggataaggcgaaggctgcttttaac

SEQ ID NO: 3837908 - DNA, 25 bp, Homo sapien
gatcatctgggataaggcgaaggct

SEQ ID NO: 3837909 - DNA, 25 bp, Homo sapien
gcttccaacggatgccatatatggc

SEQ ID NO: 3837910 - DNA, 25 bp, Homo sapien
taaagcatatatctagccaagaggc

SEQ ID NO: 3837911 - DNA, 25 bp, Homo sapien
gatagaggtaccttttacgtagcac

SEQ ID NO: 3837912 - DNA, 25 bp, Homo sapien
ggctgggcccacgttttgagtatca

SEQ ID NO: 3837913 - DNA, 25 bp, Homo sapien
gaaacaagtcagaggcttcaagaag

SEQ ID NO: 3837914 - DNA, 25 bp, Homo sapien
gataagaaaccctagatcagtggct

SEQ ID NO: 3837915 - DNA, 25 bp, Homo sapien
gcccgctgtcaataaaagatcatca

SEQ ID NO: 3837916 - DNA, 25 bp, Homo sapien
cacagggccacatgataatattggg

SEQ ID NO: 3837917 - DNA, 25 bp, Homo sapien
gagaccactcgaatctgccagctct

SEQ ID NO: 3837918 - DNA, 25 bp, Homo sapien
gggagccctcatggtagagaccact

SEQ ID NO: 3837919 - DNA, 25 bp, Homo sapien
gccctcatggtagagaccactcgaa

SEQ ID NO: 3837920 - DNA, 25 bp, Homo sapien
tggtagagaccactcgaatctgcca

SEQ ID NO: 3837921 - DNA, 25 bp, Homo sapien
ggattggaaccataccttaagctca

SEQ ID NO: 3837922 - DNA, 25 bp, Homo sapien
aagctcacattactagggtctcaga

SEQ ID NO: 3837923 - DNA, 25 bp, Homo sapien
ttttccccaagcgattcattcccca

SEQ ID NO: 3837924 - DNA, 25 bp, Homo sapien
taacctttcaggagtcacccaagag

SEQ ID NO: 3837925 - DNA, 25 bp, Homo sapien
caaatgccactattatccccaggtt

SEQ ID NO: 3837926 - DNA, 25 bp, Homo sapien
aatgccactattatccccaggtttg

SEQ ID NO: 3837927 - DNA, 25 bp, Homo sapien
tgccactattatccccaggtttggg

SEQ ID NO: 3837928 - DNA, 25 bp, Homo sapien
cacaaatgccactattatccccagg

SEQ ID NO: 3837929 - DNA, 25 bp, Homo sapien
catatgtccagtgttgcccaggctg

SEQ ID NO: 3837930 - DNA, 25 bp, Homo sapien
atatgtccagtgttgcccaggctgg

SEQ ID NO: 3837931 - DNA, 25 bp, Homo sapien
caagcatagtcggacgcaatggctc

SEQ ID NO: 3837932 - DNA, 25 bp, Homo sapien
tacatgacctgaatattagggaaga

SEQ ID NO: 3837933 - DNA, 25 bp, Homo sapien
gactggccccacaaatcctagaaat

SEQ ID NO: 3837934 - DNA, 25 bp, Homo sapien
gaaatcagatccttggacaatcaag

SEQ ID NO: 3837935 - DNA, 25 bp, Homo sapien
gagtatgcgttctgcttttggtcct

SEQ ID NO: 3837936 - DNA, 25 bp, Homo sapien
cttaacttcttgagtgcccgagtat

SEQ ID NO: 3837937 - DNA, 25 bp, Homo sapien
tcttgagtgcccgagtatgcgttct

SEQ ID NO: 3837938 - DNA, 25 bp, Homo sapien
gcccgagtatgcgttctgcttttgg

SEQ ID NO: 3837939 - DNA, 25 bp, Homo sapien
gcagtgcagacaggactctgggtca

SEQ ID NO: 3837940 - DNA, 25 bp, Homo sapien
gccaccctcccggattgccctcttc

SEQ ID NO: 3837941 - DNA, 25 bp, Homo sapien
agacaggactctgggtcaactggag

SEQ ID NO: 3837942 - DNA, 25 bp, Homo sapien
accctcccggattgccctcttccat

SEQ ID NO: 3837943 - DNA, 25 bp, Homo sapien
ggcaatctgaccaggtcagcccggc

SEQ ID NO: 3837944 - DNA, 25 bp, Homo sapien
tcagcccggcaacggattttgagtg

SEQ ID NO: 3837945 - DNA, 25 bp, Homo sapien
gggctcagacaggaacggagatcct

SEQ ID NO: 3837946 - DNA, 25 bp, Homo sapien
tgggcccttccaccaagaccacttc

SEQ ID NO: 3837947 - DNA, 25 bp, Homo sapien
atgggtagaaagtttgccagaaaga

SEQ ID NO: 3837948 - DNA, 25 bp, Homo sapien
acaggatgcttatgaggagccttga

SEQ ID NO: 3837949 - DNA, 25 bp, Homo sapien
gacacagtaagaccactttttgaag

SEQ ID NO: 3837950 - DNA, 25 bp, Homo sapien
ttgaagaatgggtagaaagtttgcc

SEQ ID NO: 3837951 - DNA, 25 bp, Homo sapien
aaaatatcaggcttcgccaggaagc

SEQ ID NO: 3837952 - DNA, 25 bp, Homo sapien
gcctctgccttagttgcttgactga

SEQ ID NO: 3837953 - DNA, 25 bp, Homo sapien
gaagacaggatgcttcacacctgga

SEQ ID NO: 3837954 - DNA, 25 bp, Homo sapien
gatgcactgtgcatcagtaatggta

SEQ ID NO: 3837955 - DNA, 25 bp, Homo sapien
cctggactcagaagatcctcttgca

SEQ ID NO: 3837956 - DNA, 25 bp, Homo sapien
ggactcagaagatcctcttgcatca

SEQ ID NO: 3837957 - DNA, 25 bp, Homo sapien
ctggactcagaagatcctcttgcat

SEQ ID NO: 3837958 - DNA, 25 bp, Homo sapien
tggactcagaagatcctcttgcatc

SEQ ID NO: 3837959 - DNA, 25 bp, Homo sapien
ttaaagcacttggtcaggcatgatg

SEQ ID NO: 3837960 - DNA, 25 bp, Homo sapien
cacaaaggtgacaacaaactcgtat

SEQ ID NO: 3837961 - DNA, 25 bp, Homo sapien
tatgaaatcacccatcacaaaggtg

SEQ ID NO: 3837962 - DNA, 25 bp, Homo sapien
gaaatctggacctttgtatgaaatc

SEQ ID NO: 3837963 - DNA, 25 bp, Homo sapien
tagacaggctggctgttacgcagct

SEQ ID NO: 3837964 - DNA, 25 bp, Homo sapien
gggtacaggcgagtaacacaaagaa

SEQ ID NO: 3837965 - DNA, 25 bp, Homo sapien
tggaattcacatgccacctagacag

SEQ ID NO: 3837966 - DNA, 25 bp, Homo sapien
gaacgtgggccagtatgacatcttc

SEQ ID NO: 3837967 - DNA, 25 bp, Homo sapien
ccaccacactctgcaggggctccga

SEQ ID NO: 3837968 - DNA, 25 bp, Homo sapien
gtccaccacactctgcaggggctcc

SEQ ID NO: 3837969 - DNA, 25 bp, Homo sapien
tggtccaccacactctgcaggggct

SEQ ID NO: 3837970 - DNA, 25 bp, Homo sapien
gtggtccaccacactctgcaggggc

SEQ ID NO: 3837971 - DNA, 25 bp, Homo sapien
cactccgagctttagggtcctggga

SEQ ID NO: 3837972 - DNA, 25 bp, Homo sapien
agtggcagtaggtgatagctctgtc

SEQ ID NO: 3837973 - DNA, 25 bp, Homo sapien
gcagtaggtgatagctctgtctctc

SEQ ID NO: 3837974 - DNA, 25 bp, Homo sapien
aatgatgtcagccactccgagcttt

SEQ ID NO: 3837975 - DNA, 25 bp, Homo sapien
ggagaacttgttagtaccacacagt

SEQ ID NO: 3837976 - DNA, 25 bp, Homo sapien
gctggagctgttgggacgtctctgt

SEQ ID NO: 3837977 - DNA, 25 bp, Homo sapien
gcctctggagaacttgttagtacca

SEQ ID NO: 3837978 - DNA, 25 bp, Homo sapien
gtggcctctggagaacttgttagta

SEQ ID NO: 3837979 - DNA, 25 bp, Homo sapien
ttgaactgtattcccctgaaaaggc

SEQ ID NO: 3837980 - DNA, 25 bp, Homo sapien
cattaaagggaatgtccctgcaggc

SEQ ID NO: 3837981 - DNA, 25 bp, Homo sapien
ttccaataaaggtggcgcaatcatg

SEQ ID NO: 3837982 - DNA, 25 bp, Homo sapien
ttttctagatttcacgggtccgcag

SEQ ID NO: 3837983 - DNA, 25 bp, Homo sapien
aatgaggtccccagattccatgccc

SEQ ID NO: 3837984 - DNA, 25 bp, Homo sapien
gcagctccctgcctgaaagctttgt

SEQ ID NO: 3837985 - DNA, 25 bp, Homo sapien
agaaggagagcttccgtcccgacag

SEQ ID NO: 3837986 - DNA, 25 bp, Homo sapien
tcctcatagtgggacatgagggtct

SEQ ID NO: 3837987 - DNA, 25 bp, Homo sapien
tatttagcaaccagtacagcccagc

SEQ ID NO: 3837988 - DNA, 25 bp, Homo sapien
tcagcatgacttgtggacggagcca

SEQ ID NO: 3837989 - DNA, 25 bp, Homo sapien
tctgttcagtgacggatacccctag

SEQ ID NO: 3837990 - DNA, 25 bp, Homo sapien
caagtaggagggtcagtcaccgttc

SEQ ID NO: 3837991 - DNA, 25 bp, Homo sapien
cttggatctcatatataaaggtgta

SEQ ID NO: 3837992 - DNA, 25 bp, Homo sapien
caaaggaatgccacatttcaataaa

SEQ ID NO: 3837993 - DNA, 25 bp, Homo sapien
tcatgcaaatattagagaaaggtta

SEQ ID NO: 3837994 - DNA, 25 bp, Homo sapien
gaagagctgtaccatgtcgtggatt

SEQ ID NO: 3837995 - DNA, 25 bp, Homo sapien
aaggagcagccctagttctcgggaa

SEQ ID NO: 3837996 - DNA, 25 bp, Homo sapien
gttggcggctttttactctcaataa

SEQ ID NO: 3837997 - DNA, 25 bp, Homo sapien
gcagccctagttctcgggaaccatc

SEQ ID NO: 3837998 - DNA, 25 bp, Homo sapien
agttctcgggaaccatcctgtcttc

SEQ ID NO: 3837999 - DNA, 25 bp, Homo sapien
gccatgttgcttaaagccggtcatg

SEQ ID NO: 3838000 - DNA, 25 bp, Homo sapien
cggcagccgccatgttgcttaaagc

SEQ ID NO: 3838001 - DNA, 25 bp, Homo sapien
cacggcagccgccatgttgcttaaa

SEQ ID NO: 3838002 - DNA, 25 bp, Homo sapien
cagccgccatgttgcttaaagccgg

SEQ ID NO: 3838003 - DNA, 25 bp, Homo sapien
gacgtgcggaatacacgtgatgtcg

SEQ ID NO: 3838004 - DNA, 25 bp, Homo sapien
gagaaaggaggatggaccgaacaca

SEQ ID NO: 3838005 - DNA, 25 bp, Homo sapien
gtctcagtagacacacagcgcggag

SEQ ID NO: 3838006 - DNA, 25 bp, Homo sapien
gaacacaggcgagggaagtgcgccc

SEQ ID NO: 3838007 - DNA, 25 bp, Homo sapien
gcgctccggtcccaccgacgatccc

SEQ ID NO: 3838008 - DNA, 25 bp, Homo sapien
ccgcgctccggtcccaccgacgatc

SEQ ID NO: 3838009 - DNA, 25 bp, Homo sapien
cccgcgctccggtcccaccgacgat

SEQ ID NO: 3838010 - DNA, 25 bp, Homo sapien
gctccggtcccaccgacgatcccac

SEQ ID NO: 3838011 - DNA, 25 bp, Homo sapien
tgaggaagggcgcggtgtcggaccc

SEQ ID NO: 3838012 - DNA, 25 bp, Homo sapien
tagttcaggagattgatgtagcaca

SEQ ID NO: 3838013 - DNA, 25 bp, Homo sapien
gccactatgagagccgaacggccgg

SEQ ID NO: 3838014 - DNA, 25 bp, Homo sapien
acggtgaagcggtccatgtagttca

SEQ ID NO: 3838015 - DNA, 25 bp, Homo sapien
atgtagcacagcaccgccactatga

SEQ ID NO: 3838016 - DNA, 25 bp, Homo sapien
aactgctcgatgtcgggaaggacgc

SEQ ID NO: 3838017 - DNA, 25 bp, Homo sapien
agcccagagctactgtccccgatgt

SEQ ID NO: 3838018 - DNA, 25 bp, Homo sapien
ccccgatgttgaagaactgctcgat

SEQ ID NO: 3838019 - DNA, 25 bp, Homo sapien
tactgtccccgatgttgaagaactg

SEQ ID NO: 3838020 - DNA, 25 bp, Homo sapien
cataacacttatccctatgggaaaa

SEQ ID NO: 3838021 - DNA, 25 bp, Homo sapien
acataacacttatccctatgggaaa

SEQ ID NO: 3838022 - DNA, 25 bp, Homo sapien
gggatgaaggatgaccccagtgtca

SEQ ID NO: 3838023 - DNA, 25 bp, Homo sapien
gcaatgcccccgcacatgagatact

SEQ ID NO: 3838024 - DNA, 25 bp, Homo sapien
tacttccgattgtacctgtcaccca

SEQ ID NO: 3838025 - DNA, 25 bp, Homo sapien
gatgaaggatgaccccagtgtcacc

SEQ ID NO: 3838026 - DNA, 25 bp, Homo sapien
gaaacaggagccagcttggggcctc

SEQ ID NO: 3838027 - DNA, 25 bp, Homo sapien
aacaggagccagcttggggcctcac

SEQ ID NO: 3838028 - DNA, 25 bp, Homo sapien
ggggtgtgggcagaaacaggagcca

SEQ ID NO: 3838029 - DNA, 25 bp, Homo sapien
ggagggggtgtgggcagaaacagga

SEQ ID NO: 3838030 - DNA, 25 bp, Homo sapien
catggaccagggaaactgcaggagt

SEQ ID NO: 3838031 - DNA, 25 bp, Homo sapien
catcgcaaaggtaggagagagtttc

SEQ ID NO: 3838032 - DNA, 25 bp, Homo sapien
tgtttagcaactaggaggccactgt

SEQ ID NO: 3838033 - DNA, 25 bp, Homo sapien
tatgtgtctaccaaaggcacctgaa

SEQ ID NO: 3838034 - DNA, 25 bp, Homo sapien
agatgctgagcatccggctccgctg

SEQ ID NO: 3838035 - DNA, 25 bp, Homo sapien
ccacaaagaggtcggcaatgagagt

SEQ ID NO: 3838036 - DNA, 25 bp, Homo sapien
cggctccgctggtcggccacaaaga

SEQ ID NO: 3838037 - DNA, 25 bp, Homo sapien
ccaccggaatggcaaagtagaagat

SEQ ID NO: 3838038 - DNA, 25 bp, Homo sapien
gggggacagccagtcagtccagtcc

SEQ ID NO: 3838039 - DNA, 25 bp, Homo sapien
aggggggacagccagtcagtccagt

SEQ ID NO: 3838040 - DNA, 25 bp, Homo sapien
gggacagccagtcagtccagtcccc

SEQ ID NO: 3838041 - DNA, 25 bp, Homo sapien
aaaggggggacagccagtcagtcca

SEQ ID NO: 3838042 - DNA, 25 bp, Homo sapien
ccagccatatccttcactttggagc

SEQ ID NO: 3838043 - DNA, 25 bp, Homo sapien
tctgtcacctgcacgcaagaattct

SEQ ID NO: 3838044 - DNA, 25 bp, Homo sapien
tccaaaggtaggaaacagggatcag

SEQ ID NO: 3838045 - DNA, 25 bp, Homo sapien
tcagtgagaacgtcgctgacctacc

SEQ ID NO: 3838046 - DNA, 25 bp, Homo sapien
cacccggcctctagggggcttacag

SEQ ID NO: 3838047 - DNA, 25 bp, Homo sapien
tcagacgctatcctggaaacacggc

SEQ ID NO: 3838048 - DNA, 25 bp, Homo sapien
acaagaggactgttaaccaccccag

SEQ ID NO: 3838049 - DNA, 25 bp, Homo sapien
tccgcagagggcacgtgatgcatgt

SEQ ID NO: 3838050 - DNA, 25 bp, Homo sapien
tggtttaaataggatcccaggcttg

SEQ ID NO: 3838051 - DNA, 25 bp, Homo sapien
gcaaatctgagtggcgctccacggc

SEQ ID NO: 3838052 - DNA, 25 bp, Homo sapien
acggctccccttggcggctcccgca

SEQ ID NO: 3838053 - DNA, 25 bp, Homo sapien
ttcttgccagagccctcagatctgc

SEQ ID NO: 3838054 - DNA, 25 bp, Homo sapien
agcagaacggccaccactcctagac

SEQ ID NO: 3838055 - DNA, 25 bp, Homo sapien
gccagggagcccgtgacaaaggcca

SEQ ID NO: 3838056 - DNA, 25 bp, Homo sapien
cagcaggaatgccggagcccacaga

SEQ ID NO: 3838057 - DNA, 25 bp, Homo sapien
ggagcccgtgacaaaggccacagca

SEQ ID NO: 3838058 - DNA, 25 bp, Homo sapien
caaggaccacgcgggaacgcagcag

SEQ ID NO: 3838059 - DNA, 25 bp, Homo sapien
ccaggactccggtcaggcaggtgat

SEQ ID NO: 3838060 - DNA, 25 bp, Homo sapien
gcggagccggcggctgatctccaca

SEQ ID NO: 3838061 - DNA, 25 bp, Homo sapien
taagtggccacgatgctaccacggg

SEQ ID NO: 3838062 - DNA, 25 bp, Homo sapien
gcaggtgatgagtccaaagatgaga

SEQ ID NO: 3838063 - DNA, 25 bp, Homo sapien
aatgtcggccacgatggcccagttc

SEQ ID NO: 3838064 - DNA, 25 bp, Homo sapien
tgtcggccacgatggcccagttcat

SEQ ID NO: 3838065 - DNA, 25 bp, Homo sapien
gaatgtcggccacgatggcccagtt

SEQ ID NO: 3838066 - DNA, 25 bp, Homo sapien
gtcggccacgatggcccagttcatg

SEQ ID NO: 3838067 - DNA, 25 bp, Homo sapien
gcctcggcggtggagcgtcgggtag

SEQ ID NO: 3838068 - DNA, 25 bp, Homo sapien
agcacgatctggaaggcctcggcgg

SEQ ID NO: 3838069 - DNA, 25 bp, Homo sapien
gtggagcgtcgggtagggatcacca

SEQ ID NO: 3838070 - DNA, 25 bp, Homo sapien
atctggaaggcctcggcggtggagc

SEQ ID NO: 3838071 - DNA, 25 bp, Homo sapien
agtgccccaacaaacgcgcagagca

SEQ ID NO: 3838072 - DNA, 25 bp, Homo sapien
gagcccggaactcggacaagaagga

SEQ ID NO: 3838073 - DNA, 25 bp, Homo sapien
cgcgcagagcatgagcgagaactgc

SEQ ID NO: 3838074 - DNA, 25 bp, Homo sapien
ccggcggtcggcctcaatgaagatg

SEQ ID NO: 3838075 - DNA, 25 bp, Homo sapien
ggagggtcagagccagggtgagctg

SEQ ID NO: 3838076 - DNA, 25 bp, Homo sapien
gggggagggtcagagccagggtgag

SEQ ID NO: 3838077 - DNA, 25 bp, Homo sapien
ctgaggggggagggtcagagccagg

SEQ ID NO: 3838078 - DNA, 25 bp, Homo sapien
tgaggggggagggtcagagccaggg

SEQ ID NO: 3838079 - DNA, 25 bp, Homo sapien
gggcaccacaatccggtcgtctgtg

SEQ ID NO: 3838080 - DNA, 25 bp, Homo sapien
tggccacgggcacgcgggtggagcg

SEQ ID NO: 3838081 - DNA, 25 bp, Homo sapien
tccggtcgtctgtggaccctgcttc

SEQ ID NO: 3838082 - DNA, 25 bp, Homo sapien
tgtggaccctgcttcgtgcagcagg

SEQ ID NO: 3838083 - DNA, 25 bp, Homo sapien
ccctgagctacccaggtagtgtctg

SEQ ID NO: 3838084 - DNA, 25 bp, Homo sapien
gttacaaatagcaccgagcccttgg

SEQ ID NO: 3838085 - DNA, 25 bp, Homo sapien
gctacccaggtagtgtctgggagct

SEQ ID NO: 3838086 - DNA, 25 bp, Homo sapien
tttattccgttacaaatagcaccga

SEQ ID NO: 3838087 - DNA, 25 bp, Homo sapien
gctggcagccgtggcctccatatcc

SEQ ID NO: 3838088 - DNA, 25 bp, Homo sapien
tatccaggacccggggaggcagcga

SEQ ID NO: 3838089 - DNA, 25 bp, Homo sapien
atatccaggacccggggaggcagcg

SEQ ID NO: 3838090 - DNA, 25 bp, Homo sapien
ctgagtgtgcgtccagctgactgtg

SEQ ID NO: 3838091 - DNA, 25 bp, Homo sapien
cagagtcaaggccagatgaagatgg

SEQ ID NO: 3838092 - DNA, 25 bp, Homo sapien
gtccctgctcccagggtggtcagac

SEQ ID NO: 3838093 - DNA, 25 bp, Homo sapien
gtcccctcttttactgggctgagtg

SEQ ID NO: 3838094 - DNA, 25 bp, Homo sapien
caggggagctcggagcaggctggct

SEQ ID NO: 3838095 - DNA, 25 bp, Homo sapien
ctgcaggggagctcggagcaggctg

SEQ ID NO: 3838096 - DNA, 25 bp, Homo sapien
agcaggctggctgcacccctaggcc

SEQ ID NO: 3838097 - DNA, 25 bp, Homo sapien
gcaggctggctgcacccctaggccc

SEQ ID NO: 3838098 - DNA, 25 bp, Homo sapien
ctggcagtctgtggcagtgcacaca

SEQ ID NO: 3838099 - DNA, 25 bp, Homo sapien
cacagtgccatcaacatggccagga

SEQ ID NO: 3838100 - DNA, 25 bp, Homo sapien
ggagccccagcacgcaggggaccag

SEQ ID NO: 3838101 - DNA, 25 bp, Homo sapien
cagtgcacacacagtgccatcaaca

SEQ ID NO: 3838102 - DNA, 25 bp, Homo sapien
acagggggtgcttagggcagaaggt

SEQ ID NO: 3838103 - DNA, 25 bp, Homo sapien
ggatgaggatcccgtcggtgtccct

SEQ ID NO: 3838104 - DNA, 25 bp, Homo sapien
cagaggcgctgggatcaggacggag

SEQ ID NO: 3838105 - DNA, 25 bp, Homo sapien
ctgggatccagggactctcagaggc

SEQ ID NO: 3838106 - DNA, 25 bp, Homo sapien
tctgaggatgtgctgtcgtaggagc

SEQ ID NO: 3838107 - DNA, 25 bp, Homo sapien
ctatctgaggatgtgctgtcgtagg

SEQ ID NO: 3838108 - DNA, 25 bp, Homo sapien
atctgaggatgtgctgtcgtaggag

SEQ ID NO: 3838109 - DNA, 25 bp, Homo sapien
tatctgaggatgtgctgtcgtagga

SEQ ID NO: 3838110 - DNA, 25 bp, Homo sapien
cgtttgaactggatgccccttggat

SEQ ID NO: 3838111 - DNA, 25 bp, Homo sapien
ccgtttgaactggatgccccttgga

SEQ ID NO: 3838112 - DNA, 25 bp, Homo sapien
tttgaactggatgccccttggatac

SEQ ID NO: 3838113 - DNA, 25 bp, Homo sapien
ggccgtttgaactggatgccccttg

SEQ ID NO: 3838114 - DNA, 25 bp, Homo sapien
aagttgaaagaaggactccggacat

SEQ ID NO: 3838115 - DNA, 25 bp, Homo sapien
ggacatcgtcaaggcctcaaagaac

SEQ ID NO: 3838116 - DNA, 25 bp, Homo sapien
ccagctcaggtcaaggccatgtggg

SEQ ID NO: 3838117 - DNA, 25 bp, Homo sapien
gggaagtctgaaggttcacgctcac

SEQ ID NO: 3838118 - DNA, 25 bp, Homo sapien
taggaggtgacaggtgggtaggcag

SEQ ID NO: 3838119 - DNA, 25 bp, Homo sapien
gtaggaggtgacaggtgggtaggca

SEQ ID NO: 3838120 - DNA, 25 bp, Homo sapien
aggaggtgacaggtgggtaggcagg

SEQ ID NO: 3838121 - DNA, 25 bp, Homo sapien
aaggggtagagagtggagtttggag

SEQ ID NO: 3838122 - DNA, 25 bp, Homo sapien
aggggtagagagtggagtttggagg

SEQ ID NO: 3838123 - DNA, 25 bp, Homo sapien
gaaggggtagagagtggagtttgga

SEQ ID NO: 3838124 - DNA, 25 bp, Homo sapien
ggaagatggcgtccggtgggagccc

SEQ ID NO: 3838125 - DNA, 25 bp, Homo sapien
tcagaatcccgccgggaagatggcg

SEQ ID NO: 3838126 - DNA, 25 bp, Homo sapien
atggcgtccggtgggagcccccaag

SEQ ID NO: 3838127 - DNA, 25 bp, Homo sapien
caccatcagaatcccgccgggaaga

SEQ ID NO: 3838128 - DNA, 25 bp, Homo sapien
gttctcgtagctcgccacactgttg

SEQ ID NO: 3838129 - DNA, 25 bp, Homo sapien
cctcgttctcgtagctcgccacact

SEQ ID NO: 3838130 - DNA, 25 bp, Homo sapien
tcgttctcgtagctcgccacactgt

SEQ ID NO: 3838131 - DNA, 25 bp, Homo sapien
ttctcgtagctcgccacactgttgg

SEQ ID NO: 3838132 - DNA, 25 bp, Homo sapien
acgacacaggggtcagcctagtcca

SEQ ID NO: 3838133 - DNA, 25 bp, Homo sapien
agcctagtccaggacggaccccaga

SEQ ID NO: 3838134 - DNA, 25 bp, Homo sapien
gggtaacgacacaggggtcagccta

SEQ ID NO: 3838135 - DNA, 25 bp, Homo sapien
gtcagcctagtccaggacggacccc

SEQ ID NO: 3838136 - DNA, 25 bp, Homo sapien
tgggttgtgatagtcgtcctcatcc

SEQ ID NO: 3838137 - DNA, 25 bp, Homo sapien
tagcctgggttgtgatagtcgtcct

SEQ ID NO: 3838138 - DNA, 25 bp, Homo sapien
gtagcctgggttgtgatagtcgtcc

SEQ ID NO: 3838139 - DNA, 25 bp, Homo sapien
gcctgggttgtgatagtcgtcctca

SEQ ID NO: 3838140 - DNA, 25 bp, Homo sapien
cagcagtgctagtggccggggtgct

SEQ ID NO: 3838141 - DNA, 25 bp, Homo sapien
agaaggcactgtctcggatgccagg

SEQ ID NO: 3838142 - DNA, 25 bp, Homo sapien
gcagcagtgctagtggccggggtgc

SEQ ID NO: 3838143 - DNA, 25 bp, Homo sapien
tggagaaggcactgtctcggatgcc

SEQ ID NO: 3838144 - DNA, 25 bp, Homo sapien
gaggccctcggtgaatcttagctat

SEQ ID NO: 3838145 - DNA, 25 bp, Homo sapien
gagccccagggcagtcagattagtg

SEQ ID NO: 3838146 - DNA, 25 bp, Homo sapien
tatccacagcattagcccagcagag

SEQ ID NO: 3838147 - DNA, 25 bp, Homo sapien
tatagaagtgatagcccaggacaag

SEQ ID NO: 3838148 - DNA, 25 bp, Homo sapien
ggcccacctcggcactgtgaccaga

SEQ ID NO: 3838149 - DNA, 25 bp, Homo sapien
actgtgaccagagacccttggccac

SEQ ID NO: 3838150 - DNA, 25 bp, Homo sapien
tccacttgactgggactgaggagag

SEQ ID NO: 3838151 - DNA, 25 bp, Homo sapien
ttagccccacagaatgaagagaggg

SEQ ID NO: 3838152 - DNA, 25 bp, Homo sapien
cagagacgcttctgcgctctccccg

SEQ ID NO: 3838153 - DNA, 25 bp, Homo sapien
ctccggaacgttcacgtaatcatca

SEQ ID NO: 3838154 - DNA, 25 bp, Homo sapien
ccgctctccggaacgttcacgtaat

SEQ ID NO: 3838155 - DNA, 25 bp, Homo sapien
tctccccgctctccggaacgttcac

SEQ ID NO: 3838156 - DNA, 25 bp, Homo sapien
ggcaggcaccgacaagcaccggtca

SEQ ID NO: 3838157 - DNA, 25 bp, Homo sapien
cactgagagcatggtggggcagcgg

SEQ ID NO: 3838158 - DNA, 25 bp, Homo sapien
cagccacgcaaaggggtcaggaggg

SEQ ID NO: 3838159 - DNA, 25 bp, Homo sapien
gggcagccacgcaaaggggtcagga

SEQ ID NO: 3838160 - DNA, 25 bp, Homo sapien
gccgctccaggatgcagttcctggg

SEQ ID NO: 3838161 - DNA, 25 bp, Homo sapien
acattcacatactcccggctgccat

SEQ ID NO: 3838162 - DNA, 25 bp, Homo sapien
caggctcagtcttagccgctccagg

SEQ ID NO: 3838163 - DNA, 25 bp, Homo sapien
cttagccgctccaggatgcagttcc

SEQ ID NO: 3838164 - DNA, 25 bp, Homo sapien
tcctgcagattctcgtaatctggag

SEQ ID NO: 3838165 - DNA, 25 bp, Homo sapien
tcagttcagctcctgcagattctcg

SEQ ID NO: 3838166 - DNA, 25 bp, Homo sapien
gcagattctcgtaatctggagcccc

SEQ ID NO: 3838167 - DNA, 25 bp, Homo sapien
tcagctcctgcagattctcgtaatc

SEQ ID NO: 3838168 - DNA, 25 bp, Homo sapien
ctcaggctgcgtcagaaggtgcaga

SEQ ID NO: 3838169 - DNA, 25 bp, Homo sapien
ggcaggtcattctcaggctgcgtca

SEQ ID NO: 3838170 - DNA, 25 bp, Homo sapien
aggacgccatgtgaggaccccagag

SEQ ID NO: 3838171 - DNA, 25 bp, Homo sapien
acacaggccgaaccccaaagtgata

SEQ ID NO: 3838172 - DNA, 25 bp, Homo sapien
gcctttattctattacacagagtag

SEQ ID NO: 3838173 - DNA, 25 bp, Homo sapien
cctttattctattacacagagtagg

SEQ ID NO: 3838174 - DNA, 25 bp, Homo sapien
cagcagctgccgtgttctgggactg

SEQ ID NO: 3838175 - DNA, 25 bp, Homo sapien
taagaactaagagagtcctcccagg

SEQ ID NO: 3838176 - DNA, 25 bp, Homo sapien
tctctgactcagactcgcacacagg

SEQ ID NO: 3838177 - DNA, 25 bp, Homo sapien
caggtcccatcccttggtctaagga

SEQ ID NO: 3838178 - DNA, 25 bp, Homo sapien
tgcaatgggcgctccctgaggagtc

SEQ ID NO: 3838179 - DNA, 25 bp, Homo sapien
gacagccacagatctaatcccaggt

SEQ ID NO: 3838180 - DNA, 25 bp, Homo sapien
taatgagcatggcaatgcaatgggc

SEQ ID NO: 3838181 - DNA, 25 bp, Homo sapien
tgaggagtcgctatcacacgcatgc

SEQ ID NO: 3838182 - DNA, 25 bp, Homo sapien
ttagctacaggtcacggagaagatc

SEQ ID NO: 3838183 - DNA, 25 bp, Homo sapien
gtttagctacaggtcacggagaaga

SEQ ID NO: 3838184 - DNA, 25 bp, Homo sapien
ggatccggttcaaattaagttctca

SEQ ID NO: 3838185 - DNA, 25 bp, Homo sapien
ttaagttctcaagcgctggtggaag

SEQ ID NO: 3838186 - DNA, 25 bp, Homo sapien
aaaagcgcagccgcatgtcctggtc

SEQ ID NO: 3838187 - DNA, 25 bp, Homo sapien
atgaggagccaaaagcgcagccgca

SEQ ID NO: 3838188 - DNA, 25 bp, Homo sapien
agccaaaagcgcagccgcatgtcct

SEQ ID NO: 3838189 - DNA, 25 bp, Homo sapien
gaggagccaaaagcgcagccgcatg

SEQ ID NO: 3838190 - DNA, 25 bp, Homo sapien
tttcactcagaaagaatcatcctta

SEQ ID NO: 3838191 - DNA, 25 bp, Homo sapien
gatagacagccagactattgataac

SEQ ID NO: 3838192 - DNA, 25 bp, Homo sapien
acgatgacgatagacagccagacta

SEQ ID NO: 3838193 - DNA, 25 bp, Homo sapien
gaatgttaaatgtgtaacgtctcag

SEQ ID NO: 3838194 - DNA, 25 bp, Homo sapien
cgaactcctacaccaaagtcagtct

SEQ ID NO: 3838195 - DNA, 25 bp, Homo sapien
ttcgagaccagaagatagtcttcag

SEQ ID NO: 3838196 - DNA, 25 bp, Homo sapien
tccatttcgagaccagaagatagtc

SEQ ID NO: 3838197 - DNA, 25 bp, Homo sapien
atttcgagaccagaagatagtcttc

SEQ ID NO: 3838198 - DNA, 25 bp, Homo sapien
ccatcatgtccatttcgagaccaga

SEQ ID NO: 3838199 - DNA, 25 bp, Homo sapien
aggagaaggtgagaaacctgaggtc

SEQ ID NO: 3838200 - DNA, 25 bp, Homo sapien
gaggtcaagaagctgttctttccct

SEQ ID NO: 3838201 - DNA, 25 bp, Homo sapien
aaactcatttccacactatggggac

SEQ ID NO: 3838202 - DNA, 25 bp, Homo sapien
cactatggggactccaacagagcca

SEQ ID NO: 3838203 - DNA, 25 bp, Homo sapien
gtaatgacgtctttcaggccaattt

SEQ ID NO: 3838204 - DNA, 25 bp, Homo sapien
tgacgtctttcaggccaattttatt

SEQ ID NO: 3838205 - DNA, 25 bp, Homo sapien
tagagtaatgacgtctttcaggcca

SEQ ID NO: 3838206 - DNA, 25 bp, Homo sapien
gagtaatgacgtctttcaggccaat

SEQ ID NO: 3838207 - DNA, 25 bp, Homo sapien
ctcttgcgcacgttgaaacattttc

SEQ ID NO: 3838208 - DNA, 25 bp, Homo sapien
cgccgcaactcttgcgcacgttgaa

SEQ ID NO: 3838209 - DNA, 25 bp, Homo sapien
atttgtggtagtcctctgcccgccg

SEQ ID NO: 3838210 - DNA, 25 bp, Homo sapien
tttgcatttgtggtagtcctctgcc

SEQ ID NO: 3838211 - DNA, 25 bp, Homo sapien
ccagttgcaaagagcctttcttgca

SEQ ID NO: 3838212 - DNA, 25 bp, Homo sapien
gcaaagagcctttcttgcagaaggg

SEQ ID NO: 3838213 - DNA, 25 bp, Homo sapien
tgcaaagagcctttcttgcagaagg

SEQ ID NO: 3838214 - DNA, 25 bp, Homo sapien
gttgcaaagagcctttcttgcagaa

SEQ ID NO: 3838215 - DNA, 25 bp, Homo sapien
agtgtgaccaccctgctccaaatct

SEQ ID NO: 3838216 - DNA, 25 bp, Homo sapien
tcagtgtgaccaccctgctccaaat

SEQ ID NO: 3838217 - DNA, 25 bp, Homo sapien
gtcagtgtgaccaccctgctccaaa

SEQ ID NO: 3838218 - DNA, 25 bp, Homo sapien
taaagtttcagctgtgaggtagggc

SEQ ID NO: 3838219 - DNA, 25 bp, Homo sapien
aagtttcagctgtgaggtagggcca

SEQ ID NO: 3838220 - DNA, 25 bp, Homo sapien
gctggcggcccatcctgttttttaa

SEQ ID NO: 3838221 - DNA, 25 bp, Homo sapien
gaagaatgacgatgctccgctgccg

SEQ ID NO: 3838222 - DNA, 25 bp, Homo sapien
ttgggcttgggcgattgttccacct

SEQ ID NO: 3838223 - DNA, 25 bp, Homo sapien
cttgggcgattgttccacctcatcc

SEQ ID NO: 3838224 - DNA, 25 bp, Homo sapien
tgggtaattgttgtgcctcggcctc

SEQ ID NO: 3838225 - DNA, 25 bp, Homo sapien
gcctcttgggcttgggcgattgttc

SEQ ID NO: 3838226 - DNA, 25 bp, Homo sapien
ctgcttctcttctcgtgcttttgtg

SEQ ID NO: 3838227 - DNA, 25 bp, Homo sapien
ttcattagagacagtactttattca

SEQ ID NO: 3838228 - DNA, 25 bp, Homo sapien
cagcctaaagtacttttcattagag

SEQ ID NO: 3838229 - DNA, 25 bp, Homo sapien
tttgtgtcttgagacagtctgtctg

SEQ ID NO: 3838230 - DNA, 25 bp, Homo sapien
tcccaaagtgtgagtacaggcgtta

SEQ ID NO: 3838231 - DNA, 25 bp, Homo sapien
ctcccaaagtgtgagtacaggcgtt

SEQ ID NO: 3838232 - DNA, 25 bp, Homo sapien
cgcatctcccggcaaacgcgtgtga

SEQ ID NO: 3838233 - DNA, 25 bp, Homo sapien
tctcccggcaaacgcgtgtgaagca

SEQ ID NO: 3838234 - DNA, 25 bp, Homo sapien
cccggcaaacgcgtgtgaagcagcg

SEQ ID NO: 3838235 - DNA, 25 bp, Homo sapien
catctcccggcaaacgcgtgtgaag

SEQ ID NO: 3838236 - DNA, 25 bp, Homo sapien
attctctaatgcacgcatatttgaa

SEQ ID NO: 3838237 - DNA, 25 bp, Homo sapien
ctttatgtctggatctaacagctgg

SEQ ID NO: 3838238 - DNA, 25 bp, Homo sapien
tatgtctggatctaacagctggttc

SEQ ID NO: 3838239 - DNA, 25 bp, Homo sapien
acaactcaaagtcatttgtttcacc

SEQ ID NO: 3838240 - DNA, 25 bp, Homo sapien
cagctggttcttcaacaactcaaag

SEQ ID NO: 3838241 - DNA, 25 bp, Homo sapien
aaaggaagcattagagcagggtttc

SEQ ID NO: 3838242 - DNA, 25 bp, Homo sapien
caaactatgtctgtataaagtggca

SEQ ID NO: 3838243 - DNA, 25 bp, Homo sapien
tgagaaccaccagattaaagtaagg

SEQ ID NO: 3838244 - DNA, 25 bp, Homo sapien
cactcttggttatgggaggctgccc

SEQ ID NO: 3838245 - DNA, 25 bp, Homo sapien
cggaattctagcagccagttgatga

SEQ ID NO: 3838246 - DNA, 25 bp, Homo sapien
tctagcagccagttgatgatctggt

SEQ ID NO: 3838247 - DNA, 25 bp, Homo sapien
gaagaacggaattctagcagccagt

SEQ ID NO: 3838248 - DNA, 25 bp, Homo sapien
gcagccagttgatgatctggtcatc

SEQ ID NO: 3838249 - DNA, 25 bp, Homo sapien
gaagcaatcatgctgagacacggtc

SEQ ID NO: 3838250 - DNA, 25 bp, Homo sapien
gatacaagattaccaagaaaagcca

SEQ ID NO: 3838251 - DNA, 25 bp, Homo sapien
aaatactcttccactactgtttgac

SEQ ID NO: 3838252 - DNA, 25 bp, Homo sapien
tgtttgacttctattcaaccaaggc

SEQ ID NO: 3838253 - DNA, 25 bp, Homo sapien
aaaagaaaatatgttgttctgtcat

SEQ ID NO: 3838254 - DNA, 25 bp, Homo sapien
gaaaaagaaaatatgttgttctgtc

SEQ ID NO: 3838255 - DNA, 25 bp, Homo sapien
gaaaatatgttgttctgtcattgat

SEQ ID NO: 3838256 - DNA, 25 bp, Homo sapien
aagaaaatatgttgttctgtcattg

SEQ ID NO: 3838257 - DNA, 25 bp, Homo sapien
tcagaatctgaaacatctacatcgc

SEQ ID NO: 3838258 - DNA, 25 bp, Homo sapien
cagaatctgaaacatctacatcgcc

SEQ ID NO: 3838259 - DNA, 25 bp, Homo sapien
gaatctgaaacatctacatcgcctt

SEQ ID NO: 3838260 - DNA, 25 bp, Homo sapien
tctgaaacatctacatcgccttcct

SEQ ID NO: 3838261 - DNA, 25 bp, Homo sapien
cttgctattatttgcaaggctctgt

SEQ ID NO: 3838262 - DNA, 25 bp, Homo sapien
tatcttgctattatttgcaaggctc

SEQ ID NO: 3838263 - DNA, 25 bp, Homo sapien
tcttgctattatttgcaaggctctg

SEQ ID NO: 3838264 - DNA, 25 bp, Homo sapien
atatcttgctattatttgcaaggct

SEQ ID NO: 3838265 - DNA, 25 bp, Homo sapien
tccaccagtattggcatgagaaacc

SEQ ID NO: 3838266 - DNA, 25 bp, Homo sapien
tttccaccagtattggcatgagaaa

SEQ ID NO: 3838267 - DNA, 25 bp, Homo sapien
ttccaccagtattggcatgagaaac

SEQ ID NO: 3838268 - DNA, 25 bp, Homo sapien
caccagtattggcatgagaaaccac

SEQ ID NO: 3838269 - DNA, 25 bp, Homo sapien
gaatttcatgcctcaaggttggaaa

SEQ ID NO: 3838270 - DNA, 25 bp, Homo sapien
ccttagtaagttatgaacgtaacat

SEQ ID NO: 3838271 - DNA, 25 bp, Homo sapien
aaaatatacactaatccttagtaag

SEQ ID NO: 3838272 - DNA, 25 bp, Homo sapien
agaatttcatgcctcaaggttggaa

SEQ ID NO: 3838273 - DNA, 25 bp, Homo sapien
caataccctgccgggatgcattcac

SEQ ID NO: 3838274 - DNA, 25 bp, Homo sapien
cttcaataccctgccgggatgcatt

SEQ ID NO: 3838275 - DNA, 25 bp, Homo sapien
tcaataccctgccgggatgcattca

SEQ ID NO: 3838276 - DNA, 25 bp, Homo sapien
atcttcaataccctgccgggatgca

SEQ ID NO: 3838277 - DNA, 25 bp, Homo sapien
acaatccttccgtggaatctgtccc

SEQ ID NO: 3838278 - DNA, 25 bp, Homo sapien
caatccttccgtggaatctgtccca

SEQ ID NO: 3838279 - DNA, 25 bp, Homo sapien
aatccttccgtggaatctgtcccac

SEQ ID NO: 3838280 - DNA, 25 bp, Homo sapien
gagcagcactagctgtttccaccct

SEQ ID NO: 3838281 - DNA, 25 bp, Homo sapien
gatgagcagcactagctgtttccac

SEQ ID NO: 3838282 - DNA, 25 bp, Homo sapien
aaagatgagcagcactagctgtttc

SEQ ID NO: 3838283 - DNA, 25 bp, Homo sapien
aagatgagcagcactagctgtttcc

SEQ ID NO: 3838284 - DNA, 25 bp, Homo sapien
aaagagagggcgtcggtgtgatatt

SEQ ID NO: 3838285 - DNA, 25 bp, Homo sapien
ctataaaaagagagggcgtcggtgt

SEQ ID NO: 3838286 - DNA, 25 bp, Homo sapien
gagagggcgtcggtgtgatattttt

SEQ ID NO: 3838287 - DNA, 25 bp, Homo sapien
gagggcgtcggtgtgatatttttta

SEQ ID NO: 3838288 - DNA, 25 bp, Homo sapien
ggttccaaaaatgcctctgcgaatc

SEQ ID NO: 3838289 - DNA, 25 bp, Homo sapien
tccaaagaggttccaaaaatgcctc

SEQ ID NO: 3838290 - DNA, 25 bp, Homo sapien
tggatcctgcaattttttccaaaga

SEQ ID NO: 3838291 - DNA, 25 bp, Homo sapien
ttggatcctgcaattttttccaaag

SEQ ID NO: 3838292 - DNA, 25 bp, Homo sapien
tccaatataatttccagcagcctgc

SEQ ID NO: 3838293 - DNA, 25 bp, Homo sapien
tttagctcttgccaaaaagcttcca

SEQ ID NO: 3838294 - DNA, 25 bp, Homo sapien
tcttgccaaaaagcttccaatataa

SEQ ID NO: 3838295 - DNA, 25 bp, Homo sapien
taagaggaataaatttagctcttgc

SEQ ID NO: 3838296 - DNA, 25 bp, Homo sapien
gaaactggcctcctagataggtcta

SEQ ID NO: 3838297 - DNA, 25 bp, Homo sapien
ttccaattacaaggcagagtagctc

SEQ ID NO: 3838298 - DNA, 25 bp, Homo sapien
gggtttcaacagcatccttgtccaa

SEQ ID NO: 3838299 - DNA, 25 bp, Homo sapien
gatgagtgcgtaggaagacaacctt

SEQ ID NO: 3838300 - DNA, 25 bp, Homo sapien
ggagagcaacatcgcagaatgcctt

SEQ ID NO: 3838301 - DNA, 25 bp, Homo sapien
tatgtgcagccagttaaccaaaaga

SEQ ID NO: 3838302 - DNA, 25 bp, Homo sapien
ttcaggtttccgctcaaaagctgct

SEQ ID NO: 3838303 - DNA, 25 bp, Homo sapien
gaatgcctttgttcccgaatcctgg

SEQ ID NO: 3838304 - DNA, 25 bp, Homo sapien
tgattgcagcaaaaaagttaaccac

SEQ ID NO: 3838305 - DNA, 25 bp, Homo sapien
ggatttagctggctcatcactatcc

SEQ ID NO: 3838306 - DNA, 25 bp, Homo sapien
ggcaggcaaatcttcaggggattta

SEQ ID NO: 3838307 - DNA, 25 bp, Homo sapien
tgtgattgcagcaaaaaagttaacc

SEQ ID NO: 3838308 - DNA, 25 bp, Homo sapien
ttttcctaatcctttactatcactg

SEQ ID NO: 3838309 - DNA, 25 bp, Homo sapien
agagaggacaccttgaaccagacgc

SEQ ID NO: 3838310 - DNA, 25 bp, Homo sapien
atgccttttcctaatcctttactat

SEQ ID NO: 3838311 - DNA, 25 bp, Homo sapien
aagagaggacaccttgaaccagacg

SEQ ID NO: 3838312 - DNA, 25 bp, Homo sapien
gtgtagcagaagacgagctggtact

SEQ ID NO: 3838313 - DNA, 25 bp, Homo sapien
gtagcagaagacgagctggtactta

SEQ ID NO: 3838314 - DNA, 25 bp, Homo sapien
gatggtgtagcagaagacgagctgg

SEQ ID NO: 3838315 - DNA, 25 bp, Homo sapien
tggtgtagcagaagacgagctggta

SEQ ID NO: 3838316 - DNA, 25 bp, Homo sapien
gataaataggatcaatgaatttctt

SEQ ID NO: 3838317 - DNA, 25 bp, Homo sapien
taaataggatcaatgaatttctttg

SEQ ID NO: 3838318 - DNA, 25 bp, Homo sapien
acctgataaataggatcaatgaatt

SEQ ID NO: 3838319 - DNA, 25 bp, Homo sapien
cctgataaataggatcaatgaattt

SEQ ID NO: 3838320 - DNA, 25 bp, Homo sapien
gggcactgccacaagcagacagtat

SEQ ID NO: 3838321 - DNA, 25 bp, Homo sapien
tggccagagatctgctctggaagac

SEQ ID NO: 3838322 - DNA, 25 bp, Homo sapien
actgcgcttggccagagatctgctc

SEQ ID NO: 3838323 - DNA, 25 bp, Homo sapien
agcagacagtatggcgagggtccct

SEQ ID NO: 3838324 - DNA, 25 bp, Homo sapien
ctggctggcattcagattctccagg

SEQ ID NO: 3838325 - DNA, 25 bp, Homo sapien
tgtggatgaagcactcctggctggc

SEQ ID NO: 3838326 - DNA, 25 bp, Homo sapien
cgatgtggatgaagcactcctggct

SEQ ID NO: 3838327 - DNA, 25 bp, Homo sapien
cctggctggcattcagattctccag

SEQ ID NO: 3838328 - DNA, 25 bp, Homo sapien
tggcaattgatttctagtcgctggc

SEQ ID NO: 3838329 - DNA, 25 bp, Homo sapien
ttatagatggatcctggcaattgat

SEQ ID NO: 3838330 - DNA, 25 bp, Homo sapien
gatggatcctggcaattgatttcta

SEQ ID NO: 3838331 - DNA, 25 bp, Homo sapien
gatcctggcaattgatttctagtcg

SEQ ID NO: 3838332 - DNA, 25 bp, Homo sapien
gcccacgtgatgacactcaatcagc

SEQ ID NO: 3838333 - DNA, 25 bp, Homo sapien
gaaccacggcatcaggtggacccaa

SEQ ID NO: 3838334 - DNA, 25 bp, Homo sapien
tcagcttatctacaaaggaggcacg

SEQ ID NO: 3838335 - DNA, 25 bp, Homo sapien
gactactctctgtttaaggcgcgtg

SEQ ID NO: 3838336 - DNA, 25 bp, Homo sapien
tcctggcaagattcaccactgggca

SEQ ID NO: 3838337 - DNA, 25 bp, Homo sapien
gcagacagaaggacactccttcggg

SEQ ID NO: 3838338 - DNA, 25 bp, Homo sapien
cagcagacagaaggacactccttcg

SEQ ID NO: 3838339 - DNA, 25 bp, Homo sapien
agcagacagaaggacactccttcgg

SEQ ID NO: 3838340 - DNA, 25 bp, Homo sapien
cagacagaaggacactccttcgggt

SEQ ID NO: 3838341 - DNA, 25 bp, Homo sapien
ctggaagtgagaaaagaccggcttt

SEQ ID NO: 3838342 - DNA, 25 bp, Homo sapien
tggaagtgagaaaagaccggcttta

SEQ ID NO: 3838343 - DNA, 25 bp, Homo sapien
ttgttgcacatctgggttgtcctga

SEQ ID NO: 3838344 - DNA, 25 bp, Homo sapien
ctttgttgcacatctgggttgtcct

SEQ ID NO: 3838345 - DNA, 25 bp, Homo sapien
tgttgcacatctgggttgtcctgag

SEQ ID NO: 3838346 - DNA, 25 bp, Homo sapien
ttgcacatctgggttgtcctgagag

SEQ ID NO: 3838347 - DNA, 25 bp, Homo sapien
taaagactagccaggtagagtagga

SEQ ID NO: 3838348 - DNA, 25 bp, Homo sapien
caaactgagccactaagctgcgggc

SEQ ID NO: 3838349 - DNA, 25 bp, Homo sapien
gcaggatgccatgtgttcggtttcg

SEQ ID NO: 3838350 - DNA, 25 bp, Homo sapien
gcttctccccaagtgacctgaaggc

SEQ ID NO: 3838351 - DNA, 25 bp, Homo sapien
gaaggctacagccaggccagggaac

SEQ ID NO: 3838352 - DNA, 25 bp, Homo sapien
ggcagaaggctacagccaggccagg

SEQ ID NO: 3838353 - DNA, 25 bp, Homo sapien
cagaaggctacagccaggccaggga

SEQ ID NO: 3838354 - DNA, 25 bp, Homo sapien
cgggcagaaggctacagccaggcca

SEQ ID NO: 3838355 - DNA, 25 bp, Homo sapien
caccagcagcggagctcggaagacg

SEQ ID NO: 3838356 - DNA, 25 bp, Homo sapien
tagcgtttccaaaacttccggcatg

SEQ ID NO: 3838357 - DNA, 25 bp, Homo sapien
gagtaacacgtgaacgatccccagc

SEQ ID NO: 3838358 - DNA, 25 bp, Homo sapien
cagctcccgcctgcgaaatgagatg

SEQ ID NO: 3838359 - DNA, 25 bp, Homo sapien
cagccgtccaccagcacacaaggtt

SEQ ID NO: 3838360 - DNA, 25 bp, Homo sapien
cccatcgcacattgtcagtggtgga

SEQ ID NO: 3838361 - DNA, 25 bp, Homo sapien
gtccaccagcacacaaggttccggg

SEQ ID NO: 3838362 - DNA, 25 bp, Homo sapien
caacccacgacagaaaccacactca

SEQ ID NO: 3838363 - DNA, 25 bp, Homo sapien
taagattacactcggacttcccagc

SEQ ID NO: 3838364 - DNA, 25 bp, Homo sapien
gaatctcattcaggtgtagaaccca

SEQ ID NO: 3838365 - DNA, 25 bp, Homo sapien
gatgcagccgcgctaaacagaaggg

SEQ ID NO: 3838366 - DNA, 25 bp, Homo sapien
ttggatccaaaatgccaagtgaggc

SEQ ID NO: 3838367 - DNA, 25 bp, Homo sapien
agtagccaactccacaggtgtgctg

SEQ ID NO: 3838368 - DNA, 25 bp, Homo sapien
cagtagccaactccacaggtgtgct

SEQ ID NO: 3838369 - DNA, 25 bp, Homo sapien
ccagtagccaactccacaggtgtgc

SEQ ID NO: 3838370 - DNA, 25 bp, Homo sapien
tatctactctacgttttgtgcctca

SEQ ID NO: 3838371 - DNA, 25 bp, Homo sapien
tctgaagggttcgtagattctgaca

SEQ ID NO: 3838372 - DNA, 25 bp, Homo sapien
acgtttcccactgacttttgagaca

SEQ ID NO: 3838373 - DNA, 25 bp, Homo sapien
gactagtgtaccagggctttctcaa

SEQ ID NO: 3838374 - DNA, 25 bp, Homo sapien
caggtgactaaggaggcaaagaccc

SEQ ID NO: 3838375 - DNA, 25 bp, Homo sapien
cgcagttctgatcacggacctcaga

SEQ ID NO: 3838376 - DNA, 25 bp, Homo sapien
taaggaggcaaagacccgaagcctg

SEQ ID NO: 3838377 - DNA, 25 bp, Homo sapien
ccgcagttctgatcacggacctcag

SEQ ID NO: 3838378 - DNA, 25 bp, Homo sapien
ctgggtccttcacccgcagtgagga

SEQ ID NO: 3838379 - DNA, 25 bp, Homo sapien
aggagcattgctgcctgtggacgcc

SEQ ID NO: 3838380 - DNA, 25 bp, Homo sapien
agggagcaccgaccgccctggatgc

SEQ ID NO: 3838381 - DNA, 25 bp, Homo sapien
aaggagcattgctgcctgtggacgc

SEQ ID NO: 3838382 - DNA, 25 bp, Homo sapien
ggaaagcagggagcaccgaccgccc

SEQ ID NO: 3838383 - DNA, 25 bp, Homo sapien
tgtctgtgcgcggagaattccgctg

SEQ ID NO: 3838384 - DNA, 25 bp, Homo sapien
ctgtctgtgcgcggagaattccgct

SEQ ID NO: 3838385 - DNA, 25 bp, Homo sapien
gtctgtgcgcggagaattccgctgt

SEQ ID NO: 3838386 - DNA, 25 bp, Homo sapien
cttctgatgggcacctcccacagcc

SEQ ID NO: 3838387 - DNA, 25 bp, Homo sapien
tcccacagcccgagcaccccagcag

SEQ ID NO: 3838388 - DNA, 25 bp, Homo sapien
gggcacctcccacagcccgagcacc

SEQ ID NO: 3838389 - DNA, 25 bp, Homo sapien
tctgatgggcacctcccacagcccg

SEQ ID NO: 3838390 - DNA, 25 bp, Homo sapien
acacacttaaccctaccttgtctgg

SEQ ID NO: 3838391 - DNA, 25 bp, Homo sapien
agagagatccaaacaaaatcaacct

SEQ ID NO: 3838392 - DNA, 25 bp, Homo sapien
taccttgtctggtcaagagagatcc

SEQ ID NO: 3838393 - DNA, 25 bp, Homo sapien
tgcgtcaagagctgtgtccggctgc

SEQ ID NO: 3838394 - DNA, 25 bp, Homo sapien
tgcccatcccctgtggtgtgtggct

SEQ ID NO: 3838395 - DNA, 25 bp, Homo sapien
ctggagcgagcaggcgtgtctgctg

SEQ ID NO: 3838396 - DNA, 25 bp, Homo sapien
aggcgtgtctgctggtgcccatccc

SEQ ID NO: 3838397 - DNA, 25 bp, Homo sapien
agcacgttggggctgcgtctccacg

SEQ ID NO: 3838398 - DNA, 25 bp, Homo sapien
acttctgacctccttaacaccagag

SEQ ID NO: 3838399 - DNA, 25 bp, Homo sapien
accccagacgccacacactgcactt

SEQ ID NO: 3838400 - DNA, 25 bp, Homo sapien
agccaccccagacgccacacactgc

SEQ ID NO: 3838401 - DNA, 25 bp, Homo sapien
acttcacttctgacctccttaacac

SEQ ID NO: 3838402 - DNA, 25 bp, Homo sapien
aacgaattcgcctttgagctcttgg

SEQ ID NO: 3838403 - DNA, 25 bp, Homo sapien
ggatggcccaatcgcatcgaatcca

SEQ ID NO: 3838404 - DNA, 25 bp, Homo sapien
agcctgaaggcatcgcgatcgtcac

SEQ ID NO: 3838405 - DNA, 25 bp, Homo sapien
gatcgtcaccatcgtcaatccggat

SEQ ID NO: 3838406 - DNA, 25 bp, Homo sapien
tagctaattgagtctgtccacggca

SEQ ID NO: 3838407 - DNA, 25 bp, Homo sapien
caacctgggcgctgagagataagcc

SEQ ID NO: 3838408 - DNA, 25 bp, Homo sapien
tcagatcaaagatgcaggcggactc

SEQ ID NO: 3838409 - DNA, 25 bp, Homo sapien
tcacctggagcgtgccacaaaaagg

SEQ ID NO: 3838410 - DNA, 25 bp, Homo sapien
tagttcttataaatatcgtaaaggc

SEQ ID NO: 3838411 - DNA, 25 bp, Homo sapien
tataaatatcgtaaaggcactttgt

SEQ ID NO: 3838412 - DNA, 25 bp, Homo sapien
gtggacttgcaagccccaaactcgt

SEQ ID NO: 3838413 - DNA, 25 bp, Homo sapien
ggcgcctgcttcagattcgctgtgg

SEQ ID NO: 3838414 - DNA, 25 bp, Homo sapien
tatccttacatgagcgagacggtgg

SEQ ID NO: 3838415 - DNA, 25 bp, Homo sapien
taaaccagggtcaactcaggaggga

SEQ ID NO: 3838416 - DNA, 25 bp, Homo sapien
cctccggagggactatggctggaaa

SEQ ID NO: 3838417 - DNA, 25 bp, Homo sapien
tatttttagcggagcccatggccat

SEQ ID NO: 3838418 - DNA, 25 bp, Homo sapien
caggtataaactggcctgagcctca

SEQ ID NO: 3838419 - DNA, 25 bp, Homo sapien
tcagtggctgagtattcagagacct

SEQ ID NO: 3838420 - DNA, 25 bp, Homo sapien
acgtggcactttccacggtccgtga

SEQ ID NO: 3838421 - DNA, 25 bp, Homo sapien
cctccacggtcggtgaaggcatgtg

SEQ ID NO: 3838422 - DNA, 25 bp, Homo sapien
gtgacagtaacaccgccgacgtcct

SEQ ID NO: 3838423 - DNA, 25 bp, Homo sapien
tgaccgtgacagtaacaccgccgac

SEQ ID NO: 3838424 - DNA, 25 bp, Homo sapien
ggtgaccgtgacagtaacaccgccg

SEQ ID NO: 3838425 - DNA, 25 bp, Homo sapien
accgtgacagtaacaccgccgacgt

SEQ ID NO: 3838426 - DNA, 25 bp, Homo sapien
cggagtgtctacactgtttatttgg

SEQ ID NO: 3838427 - DNA, 25 bp, Homo sapien
cgccgtggccgtagcgagtgacgga

SEQ ID NO: 3838428 - DNA, 25 bp, Homo sapien
ctgtacgcgttaccacgagcctctg

SEQ ID NO: 3838429 - DNA, 25 bp, Homo sapien
gtacgcgttaccacgagcctctgtt

SEQ ID NO: 3838430 - DNA, 25 bp, Homo sapien
tttattgaccaagtatccaagtggc

SEQ ID NO: 3838431 - DNA, 25 bp, Homo sapien
attgaccaagtatccaagtggctgc

SEQ ID NO: 3838432 - DNA, 25 bp, Homo sapien
ctgtggccgtagtgggtgacgggat

SEQ ID NO: 3838433 - DNA, 25 bp, Homo sapien
gctgtggccgtagtgggtgacggga

SEQ ID NO: 3838434 - DNA, 25 bp, Homo sapien
cccaggcagcttcaatttaacaaaa

SEQ ID NO: 3838435 - DNA, 25 bp, Homo sapien
ccaggcagcttcaatttaacaaaaa

SEQ ID NO: 3838436 - DNA, 25 bp, Homo sapien
gaattccaagcactgtgttgaaaga

SEQ ID NO: 3838437 - DNA, 25 bp, Homo sapien
caagcactgtgttgaaagagggtag

SEQ ID NO: 3838438 - DNA, 25 bp, Homo sapien
ctgcttccctgtgctgaacgtggcc

SEQ ID NO: 3838439 - DNA, 25 bp, Homo sapien
tgcttccctgtgctgaacgtggccc

SEQ ID NO: 3838440 - DNA, 25 bp, Homo sapien
gcttccctgtgctgaacgtggccct

SEQ ID NO: 3838441 - DNA, 25 bp, Homo sapien
cacagggaaatagcggcgggtcctt

SEQ ID NO: 3838442 - DNA, 25 bp, Homo sapien
aacgctgacgatgggcgggaggaag

SEQ ID NO: 3838443 - DNA, 25 bp, Homo sapien
tccttggtctggtgccgctggccgc

SEQ ID NO: 3838444 - DNA, 25 bp, Homo sapien
tctcggtgtccttgcgaagaggaag

SEQ ID NO: 3838445 - DNA, 25 bp, Homo sapien
ggcagggggagcccgtccatctccc

SEQ ID NO: 3838446 - DNA, 25 bp, Homo sapien
gggagcccgtccatctcccaagcat

SEQ ID NO: 3838447 - DNA, 25 bp, Homo sapien
cctcatggcctcgggccacaggagg

SEQ ID NO: 3838448 - DNA, 25 bp, Homo sapien
ctcatggcctcgggccacaggaggc

SEQ ID NO: 3838449 - DNA, 25 bp, Homo sapien
ggaagctgcaatcgctgtcccattg

SEQ ID NO: 3838450 - DNA, 25 bp, Homo sapien
caaagacaggtgaccgctggcgtac

SEQ ID NO: 3838451 - DNA, 25 bp, Homo sapien
gctggcgtacacacaacgacgaagg

SEQ ID NO: 3838452 - DNA, 25 bp, Homo sapien
ccgtctggtcagctgcgcatgggct

SEQ ID NO: 3838453 - DNA, 25 bp, Homo sapien
tatctctggctgagtgaaggccgga

SEQ ID NO: 3838454 - DNA, 25 bp, Homo sapien
gggaattatctctggctgagtgaag

SEQ ID NO: 3838455 - DNA, 25 bp, Homo sapien
gagcccacggaggtctcccatgtgg

SEQ ID NO: 3838456 - DNA, 25 bp, Homo sapien
agtgaaggccggagagcccacggag

SEQ ID NO: 3838457 - DNA, 25 bp, Homo sapien
catggctggcagacaaggcttgctg

SEQ ID NO: 3838458 - DNA, 25 bp, Homo sapien
atatgagcatccgtgaccaggacgg

SEQ ID NO: 3838459 - DNA, 25 bp, Homo sapien
tacaaactgacccaccccataggaa

SEQ ID NO: 3838460 - DNA, 25 bp, Homo sapien
catccgtgaccaggacggtgagagt

SEQ ID NO: 3838461 - DNA, 25 bp, Homo sapien
gtggtccgcacggccctgtgagcat

SEQ ID NO: 3838462 - DNA, 25 bp, Homo sapien
cgcccaccgctggtgacaagggaca

SEQ ID NO: 3838463 - DNA, 25 bp, Homo sapien
tgacaagggacagagatggctgccc

SEQ ID NO: 3838464 - DNA, 25 bp, Homo sapien
ctggtgacaagggacagagatggct

SEQ ID NO: 3838465 - DNA, 25 bp, Homo sapien
tggtgacaagggacagagatggctg

SEQ ID NO: 3838466 - DNA, 25 bp, Homo sapien
ggcagtaccgtcagttccaagcata

SEQ ID NO: 3838467 - DNA, 25 bp, Homo sapien
gaaaagtttcaatgccctcgtgagc

SEQ ID NO: 3838468 - DNA, 25 bp, Homo sapien
gaatagattctgacgagcacacgcc

SEQ ID NO: 3838469 - DNA, 25 bp, Homo sapien
tctaaacgctgagtggtgacaggca

SEQ ID NO: 3838470 - DNA, 25 bp, Homo sapien
ggcacactcgcccacaatggccctc

SEQ ID NO: 3838471 - DNA, 25 bp, Homo sapien
gcacaactgaaagccacgaagggga

SEQ ID NO: 3838472 - DNA, 25 bp, Homo sapien
ccctcaggatcatcggcatggcggg

SEQ ID NO: 3838473 - DNA, 25 bp, Homo sapien
cacgaaggggatgaaaggcacactc

SEQ ID NO: 3838474 - DNA, 25 bp, Homo sapien
cttacacacagacacgatgctttga

SEQ ID NO: 3838475 - DNA, 25 bp, Homo sapien
ctatcaagcttcttagatctgtggg

SEQ ID NO: 3838476 - DNA, 25 bp, Homo sapien
tattctacatgggatctatcaagct

SEQ ID NO: 3838477 - DNA, 25 bp, Homo sapien
tataacatgccttgatgtggctctt

SEQ ID NO: 3838478 - DNA, 25 bp, Homo sapien
tctgttctggttgggttgtctctcc

SEQ ID NO: 3838479 - DNA, 25 bp, Homo sapien
gtgttccgtgctgcatctgttctgg

SEQ ID NO: 3838480 - DNA, 25 bp, Homo sapien
tgagccagaagctgcgctgggcgtt

SEQ ID NO: 3838481 - DNA, 25 bp, Homo sapien
ctcaaggcctcttttgacccaaact

SEQ ID NO: 3838482 - DNA, 25 bp, Homo sapien
tgcttttccagtgcagcaagcttaa

SEQ ID NO: 3838483 - DNA, 25 bp, Homo sapien
agtgcagcaagcttaaacttcctta

SEQ ID NO: 3838484 - DNA, 25 bp, Homo sapien
gttttttgcttttccagtgcagcaa

SEQ ID NO: 3838485 - DNA, 25 bp, Homo sapien
tccagtgcagcaagcttaaacttcc

SEQ ID NO: 3838486 - DNA, 25 bp, Homo sapien
tcaaactctgtatgggaatcacaca

SEQ ID NO: 3838487 - DNA, 25 bp, Homo sapien
catttgtgtggctatcaagggacac

SEQ ID NO: 3838488 - DNA, 25 bp, Homo sapien
caggcccctgctggagtttctgact

SEQ ID NO: 3838489 - DNA, 25 bp, Homo sapien
cacacaggttcctggtaaaaggcag

SEQ ID NO: 3838490 - DNA, 25 bp, Homo sapien
tctggtaatattccttgttcggacg

SEQ ID NO: 3838491 - DNA, 25 bp, Homo sapien
tccttgttcggacgtctattttatc

SEQ ID NO: 3838492 - DNA, 25 bp, Homo sapien
actttcaggatcatataatgtatct

SEQ ID NO: 3838493 - DNA, 25 bp, Homo sapien
ttttatctgatactaacatctctgc

SEQ ID NO: 3838494 - DNA, 25 bp, Homo sapien
ctgttgtggccacatatttcacata

SEQ ID NO: 3838495 - DNA, 25 bp, Homo sapien
taattctgttgtggccacatatttc

SEQ ID NO: 3838496 - DNA, 25 bp, Homo sapien
gagatctgttttatggcctggaata

SEQ ID NO: 3838497 - DNA, 25 bp, Homo sapien
ctggcttaattctgttgtggccaca

SEQ ID NO: 3838498 - DNA, 25 bp, Homo sapien
tgagtgaagccacttcagacgtttg

SEQ ID NO: 3838499 - DNA, 25 bp, Homo sapien
cttcagacgtttgcgtgcaggtttg

SEQ ID NO: 3838500 - DNA, 25 bp, Homo sapien
gccacttcagacgtttgcgtgcagg

SEQ ID NO: 3838501 - DNA, 25 bp, Homo sapien
tgaagccacttcagacgtttgcgtg

SEQ ID NO: 3838502 - DNA, 25 bp, Homo sapien
tccagcccttggtactgctgagttg

SEQ ID NO: 3838503 - DNA, 25 bp, Homo sapien
cgtccagcccttggtactgctgagt

SEQ ID NO: 3838504 - DNA, 25 bp, Homo sapien
gtccagcccttggtactgctgagtt

SEQ ID NO: 3838505 - DNA, 25 bp, Homo sapien
agcagaggcggtcggaaaaccctgg

SEQ ID NO: 3838506 - DNA, 25 bp, Homo sapien
gagcagaggcggtcggaaaaccctg

SEQ ID NO: 3838507 - DNA, 25 bp, Homo sapien
gctgcgctttgggagcacccgcgcc

SEQ ID NO: 3838508 - DNA, 25 bp, Homo sapien
cagaagccccgtgtgcgactttgac

SEQ ID NO: 3838509 - DNA, 25 bp, Homo sapien
ggcccgctgcgctttgggagcaccc

SEQ ID NO: 3838510 - DNA, 25 bp, Homo sapien
ccgcgcccgacactgaggtctcggt

SEQ ID NO: 3838511 - DNA, 25 bp, Homo sapien
cattttccaacccggagcggcttca

SEQ ID NO: 3838512 - DNA, 25 bp, Homo sapien
tttccaacccggagcggcttcaaca

SEQ ID NO: 3838513 - DNA, 25 bp, Homo sapien
ttccaacccggagcggcttcaacac

SEQ ID NO: 3838514 - DNA, 25 bp, Homo sapien
tgaggtgcctcctacgtgcagaagc

SEQ ID NO: 3838515 - DNA, 25 bp, Homo sapien
tacacagacactaaggagacagcag

SEQ ID NO: 3838516 - DNA, 25 bp, Homo sapien
gatgatagtacgacaccccaggtct

SEQ ID NO: 3838517 - DNA, 25 bp, Homo sapien
tgtgctagatgctacccaagtgaga

SEQ ID NO: 3838518 - DNA, 25 bp, Homo sapien
ttaggagctacacttcctcgaggct

SEQ ID NO: 3838519 - DNA, 25 bp, Homo sapien
gatgtataattgagtcagtgcagcc

SEQ ID NO: 3838520 - DNA, 25 bp, Homo sapien
cagctctgcacttgcgaaggtccaa

SEQ ID NO: 3838521 - DNA, 25 bp, Homo sapien
ttacgatcagaagtgacagtggcag

SEQ ID NO: 3838522 - DNA, 25 bp, Homo sapien
tggataagaccttgatgtctgtctc

SEQ ID NO: 3838523 - DNA, 25 bp, Homo sapien
tgcacaaagtggataagaccttgat

SEQ ID NO: 3838524 - DNA, 25 bp, Homo sapien
tgtctgtctccgtttcccaaaagag

SEQ ID NO: 3838525 - DNA, 25 bp, Homo sapien
ttgatgtctgtctccgtttcccaaa

SEQ ID NO: 3838526 - DNA, 25 bp, Homo sapien
cctgccaggtcacggtggaatggga

SEQ ID NO: 3838527 - DNA, 25 bp, Homo sapien
tcagctgcggtctgacatctcctgc

SEQ ID NO: 3838528 - DNA, 25 bp, Homo sapien
cctcctcgtaggaaaccagcagggc

SEQ ID NO: 3838529 - DNA, 25 bp, Homo sapien
gcccttgaccgtgaggtcctcattc

SEQ ID NO: 3838530 - DNA, 25 bp, Homo sapien
gaaaagcagcagcttaggcggagca

SEQ ID NO: 3838531 - DNA, 25 bp, Homo sapien
cccagggcatttgcagaggaaaagc

SEQ ID NO: 3838532 - DNA, 25 bp, Homo sapien
gcggagcagggtgagggccgatggc

SEQ ID NO: 3838533 - DNA, 25 bp, Homo sapien
tgactgtggtttgacgtccagccca

SEQ ID NO: 3838534 - DNA, 25 bp, Homo sapien
ctctatggggttatgagacacctct

SEQ ID NO: 3838535 - DNA, 25 bp, Homo sapien
tgctctatggggttacggggcgcct

SEQ ID NO: 3838536 - DNA, 25 bp, Homo sapien
tatggggttatgagacacctctggc

SEQ ID NO: 3838537 - DNA, 25 bp, Homo sapien
gggttatgagacacctctggccact

SEQ ID NO: 3838538 - DNA, 25 bp, Homo sapien
gagggcctagcggtgctggccaagt

SEQ ID NO: 3838539 - DNA, 25 bp, Homo sapien
gacgaggagggcctagcggtgctgg

SEQ ID NO: 3838540 - DNA, 25 bp, Homo sapien
gaggagggcctagcggtgctggcca

SEQ ID NO: 3838541 - DNA, 25 bp, Homo sapien
gggcctagcggtgctggccaagtgg

SEQ ID NO: 3838542 - DNA, 25 bp, Homo sapien
acagaaatgtcaatcagagctacat

SEQ ID NO: 3838543 - DNA, 25 bp, Homo sapien
cactgagaacatgttcccatgagaa

SEQ ID NO: 3838544 - DNA, 25 bp, Homo sapien
tcagagctacattgcagtctcattt

SEQ ID NO: 3838545 - DNA, 25 bp, Homo sapien
cacctctcagattgcaacaatgtag

SEQ ID NO: 3838546 - DNA, 25 bp, Homo sapien
gcagcattttgagacccggagagca

SEQ ID NO: 3838547 - DNA, 25 bp, Homo sapien
gaaacaactttgatccaggctgtga

SEQ ID NO: 3838548 - DNA, 25 bp, Homo sapien
cacggctagcaggagatgacattct

SEQ ID NO: 3838549 - DNA, 25 bp, Homo sapien
tgtccataagcagagaagagccggg

SEQ ID NO: 3838550 - DNA, 25 bp, Homo sapien
atgagggcacagtaacacaggcgag

SEQ ID NO: 3838551 - DNA, 25 bp, Homo sapien
tgcccgagaaaacaacaggcgtctt

SEQ ID NO: 3838552 - DNA, 25 bp, Homo sapien
acacagtttacattctaacgaaggg

SEQ ID NO: 3838553 - DNA, 25 bp, Homo sapien
cacaaattgagatgagtgctgtgga

SEQ ID NO: 3838554 - DNA, 25 bp, Homo sapien
tgcagaaggagctcggctcccttca

SEQ ID NO: 3838555 - DNA, 25 bp, Homo sapien
cctgcctcgccactataatcctggg

SEQ ID NO: 3838556 - DNA, 25 bp, Homo sapien
tgtgtcctggctcaatccgcttggc

SEQ ID NO: 3838557 - DNA, 25 bp, Homo sapien
tgtggccgcgtgtcttcctccagtt

SEQ ID NO: 3838558 - DNA, 25 bp, Homo sapien
tgagagggtcgggtgatccctgcgc

SEQ ID NO: 3838559 - DNA, 25 bp, Homo sapien
gaggttcggcggagtccaaactgct

SEQ ID NO: 3838560 - DNA, 25 bp, Homo sapien
gtcgggtgatccctgcgccaggcgc

SEQ ID NO: 3838561 - DNA, 25 bp, Homo sapien
cggagtccaaactgctgagagggtc

SEQ ID NO: 3838562 - DNA, 25 bp, Homo sapien
tgacaaggacggtgaggacggcaga

SEQ ID NO: 3838563 - DNA, 25 bp, Homo sapien
cttgacaaggacggtgaggacggca

SEQ ID NO: 3838564 - DNA, 25 bp, Homo sapien
ttgacaaggacggtgaggacggcag

SEQ ID NO: 3838565 - DNA, 25 bp, Homo sapien
tcctcaccttgaagtcgtcccgcct

SEQ ID NO: 3838566 - DNA, 25 bp, Homo sapien
gaaagtctttgaacccacctgtgac

SEQ ID NO: 3838567 - DNA, 25 bp, Homo sapien
gtctttgaacccacctgtgaccagg

SEQ ID NO: 3838568 - DNA, 25 bp, Homo sapien
aagtcgtcccgcctttctgggcaga

SEQ ID NO: 3838569 - DNA, 25 bp, Homo sapien
cacaactctggattgtaaaatgaac

SEQ ID NO: 3838570 - DNA, 25 bp, Homo sapien
tcttggcaccttttatacaagtggc

SEQ ID NO: 3838571 - DNA, 25 bp, Homo sapien
aaagcagtagatgaaagaatcctgt

SEQ ID NO: 3838572 - DNA, 25 bp, Homo sapien
gctttcaacagtcaatgctagaact

SEQ ID NO: 3838573 - DNA, 25 bp, Homo sapien
ggttgtgcactacttcagagggtct

SEQ ID NO: 3838574 - DNA, 25 bp, Homo sapien
tctagtcattggcaccaagttccac

SEQ ID NO: 3838575 - DNA, 25 bp, Homo sapien
ggcatataatatgcaccagttgtca

SEQ ID NO: 3838576 - DNA, 25 bp, Homo sapien
tgactgttttatgcttacccagcca

SEQ ID NO: 3838577 - DNA, 25 bp, Homo sapien
gagtaaacaaactctgcccaccgtg

SEQ ID NO: 3838578 - DNA, 25 bp, Homo sapien
gacacgctcaatgtctggacttcag

SEQ ID NO: 3838579 - DNA, 25 bp, Homo sapien
tgatggctgcacgagggacctttga

SEQ ID NO: 3838580 - DNA, 25 bp, Homo sapien
tccaataatctttgcatggcgccca

SEQ ID NO: 3838581 - DNA, 25 bp, Homo sapien
ccatgtgaagcaaaaaaccggcaga

SEQ ID NO: 3838582 - DNA, 25 bp, Homo sapien
gaaaaggcagaagtaacgcaggcta

SEQ ID NO: 3838583 - DNA, 25 bp, Homo sapien
tgagccactgaaatacacaacagca

SEQ ID NO: 3838584 - DNA, 25 bp, Homo sapien
tatagagattcaaagagtggctgcc

SEQ ID NO: 3838585 - DNA, 25 bp, Homo sapien
gacagaagccaaaagtactaaccag

SEQ ID NO: 3838586 - DNA, 25 bp, Homo sapien
tcatggcaactcacttggaaaaggg

SEQ ID NO: 3838587 - DNA, 25 bp, Homo sapien
caattggtgatcacgtggaaggaaa

SEQ ID NO: 3838588 - DNA, 25 bp, Homo sapien
tatgaattcgcaatgcattgttgcc

SEQ ID NO: 3838589 - DNA, 25 bp, Homo sapien
gggtagtcgcagcatgctcgagcct

SEQ ID NO: 3838590 - DNA, 25 bp, Homo sapien
tgcctcctggggtagtcgcagcatg

SEQ ID NO: 3838591 - DNA, 25 bp, Homo sapien
gaccccatcccagctgtcaaccagg

SEQ ID NO: 3838592 - DNA, 25 bp, Homo sapien
cgcagcatgctcgagcctctctgga

SEQ ID NO: 3838593 - DNA, 25 bp, Homo sapien
cagctgtccctaatgaaacgtgctc

SEQ ID NO: 3838594 - DNA, 25 bp, Homo sapien
gctgtccctaatgaaacgtgctcct

SEQ ID NO: 3838595 - DNA, 25 bp, Homo sapien
cccagctgtccctaatgaaacgtgc

SEQ ID NO: 3838596 - DNA, 25 bp, Homo sapien
gtccctaatgaaacgtgctcctcca

SEQ ID NO: 3838597 - DNA, 25 bp, Homo sapien
gattttctagcagcacctcccgcag

SEQ ID NO: 3838598 - DNA, 25 bp, Homo sapien
gctgttctgcctgcgagtggtgcta

SEQ ID NO: 3838599 - DNA, 25 bp, Homo sapien
tggtgctaggggaacctcctgaggg

SEQ ID NO: 3838600 - DNA, 25 bp, Homo sapien
agtgattttctagcagcacctcccg

SEQ ID NO: 3838601 - DNA, 25 bp, Homo sapien
ttcacagacgggaacattgaggctg

SEQ ID NO: 3838602 - DNA, 25 bp, Homo sapien
agtgaggagtttgcggtccccagcc

SEQ ID NO: 3838603 - DNA, 25 bp, Homo sapien
ggtgcagagtttcgcagggcacaac

SEQ ID NO: 3838604 - DNA, 25 bp, Homo sapien
agagaaagatggtctccgctgagcc

SEQ ID NO: 3838605 - DNA, 25 bp, Homo sapien
ttctgcacaatagcttttccgcagg

SEQ ID NO: 3838606 - DNA, 25 bp, Homo sapien
tgatgacggtgactaacgtcaccat

SEQ ID NO: 3838607 - DNA, 25 bp, Homo sapien
gatgatgacggtgactaacgtcacc

SEQ ID NO: 3838608 - DNA, 25 bp, Homo sapien
tttccgcagggtctgttattaccaa

SEQ ID NO: 3838609 - DNA, 25 bp, Homo sapien
tctgagctccgtggggattcctgct

SEQ ID NO: 3838610 - DNA, 25 bp, Homo sapien
tgagctccgtggggattcctgctgt

SEQ ID NO: 3838611 - DNA, 25 bp, Homo sapien
ctctgagctccgtggggattcctgc

SEQ ID NO: 3838612 - DNA, 25 bp, Homo sapien
agctccgtggggattcctgctgttg

SEQ ID NO: 3838613 - DNA, 25 bp, Homo sapien
ccctgcgatgcctggcagtggcgat

SEQ ID NO: 3838614 - DNA, 25 bp, Homo sapien
agtggcgatgtgttcactccagggt

SEQ ID NO: 3838615 - DNA, 25 bp, Homo sapien
tgactgctgggttcctagtgcagcc

SEQ ID NO: 3838616 - DNA, 25 bp, Homo sapien
ggttcctagtgcagccgtttgctct

SEQ ID NO: 3838617 - DNA, 25 bp, Homo sapien
tgcggcagctgcctggtagctcctg

SEQ ID NO: 3838618 - DNA, 25 bp, Homo sapien
tggtagctcctggagcgcgagacct

SEQ ID NO: 3838619 - DNA, 25 bp, Homo sapien
ctgcctggtagctcctggagcgcga

SEQ ID NO: 3838620 - DNA, 25 bp, Homo sapien
cctggtagctcctggagcgcgagac

SEQ ID NO: 3838621 - DNA, 25 bp, Homo sapien
tgctgatgtgcagcatgtcggaggg

SEQ ID NO: 3838622 - DNA, 25 bp, Homo sapien
tggaagaggtagtccagcagcgtga

SEQ ID NO: 3838623 - DNA, 25 bp, Homo sapien
ggttgttctcgtcgcccagccaggt

SEQ ID NO: 3838624 - DNA, 25 bp, Homo sapien
cagctgcttcttcccgtgcttgccc

SEQ ID NO: 3838625 - DNA, 25 bp, Homo sapien
cagtcccccaagatggggcccgact

SEQ ID NO: 3838626 - DNA, 25 bp, Homo sapien
taattccttccgtctgcgctccagg

SEQ ID NO: 3838627 - DNA, 25 bp, Homo sapien
aattatctaattccttccgtctgcg

SEQ ID NO: 3838628 - DNA, 25 bp, Homo sapien
ctaattccttccgtctgcgctccag

SEQ ID NO: 3838629 - DNA, 25 bp, Homo sapien
tatctaattccttccgtctgcgctc

SEQ ID NO: 3838630 - DNA, 25 bp, Homo sapien
atgagttgggcattctccacgagaa

SEQ ID NO: 3838631 - DNA, 25 bp, Homo sapien
gatgagttgggcattctccacgaga

SEQ ID NO: 3838632 - DNA, 25 bp, Homo sapien
tgagttgggcattctccacgagaag

SEQ ID NO: 3838633 - DNA, 25 bp, Homo sapien
gtgtgaagggcgcacagggccaggc

SEQ ID NO: 3838634 - DNA, 25 bp, Homo sapien
cggccattggtggagccgccggcca

SEQ ID NO: 3838635 - DNA, 25 bp, Homo sapien
tgcagctccactgctccgtgtgcac

SEQ ID NO: 3838636 - DNA, 25 bp, Homo sapien
tccgtgtgcacctcacaagcctctg

SEQ ID NO: 3838637 - DNA, 25 bp, Homo sapien
tccgtcttctccgatctggtggatc

SEQ ID NO: 3838638 - DNA, 25 bp, Homo sapien
ctgtccgtcttctccgatctggtgg

SEQ ID NO: 3838639 - DNA, 25 bp, Homo sapien
cgtcttctccgatctggtggatctg

SEQ ID NO: 3838640 - DNA, 25 bp, Homo sapien
cttctccgatctggtggatctgcac

SEQ ID NO: 3838641 - DNA, 25 bp, Homo sapien
ttaagagctcatggccacgatgacc

SEQ ID NO: 3838642 - DNA, 25 bp, Homo sapien
cgatgacctctactttaaatgggaa

SEQ ID NO: 3838643 - DNA, 25 bp, Homo sapien
tcccgaaacacagcggaactggtgg

SEQ ID NO: 3838644 - DNA, 25 bp, Homo sapien
cctttaccaaggtgcgaggtggaga

SEQ ID NO: 3838645 - DNA, 25 bp, Homo sapien
aaggaatgactcacatcccgggctg

SEQ ID NO: 3838646 - DNA, 25 bp, Homo sapien
ccatgtggacgtcagaaaccgtgga

SEQ ID NO: 3838647 - DNA, 25 bp, Homo sapien
gatggtgctgaaccccgtatatgct

SEQ ID NO: 3838648 - DNA, 25 bp, Homo sapien
acagcaggacgaccagacttcatca

SEQ ID NO: 3838649 - DNA, 25 bp, Homo sapien
tcgctgtcctgcgtgatctggactt

SEQ ID NO: 3838650 - DNA, 25 bp, Homo sapien
ctcgctgtcctgcgtgatctggact

SEQ ID NO: 3838651 - DNA, 25 bp, Homo sapien
tgccccacgtgatggatctggaggt

SEQ ID NO: 3838652 - DNA, 25 bp, Homo sapien
ccccacgtgatggatctggaggttg

SEQ ID NO: 3838653 - DNA, 25 bp, Homo sapien
ccacgtgatggatctggaggttgcc

SEQ ID NO: 3838654 - DNA, 25 bp, Homo sapien
tcctgccccacgtgatggatctgga

SEQ ID NO: 3838655 - DNA, 25 bp, Homo sapien
ccacatgtacatggggaccagggca

SEQ ID NO: 3838656 - DNA, 25 bp, Homo sapien
agggcactcacctgaccgtcccacc

SEQ ID NO: 3838657 - DNA, 25 bp, Homo sapien
accatccgcccccttcccatgagag

SEQ ID NO: 3838658 - DNA, 25 bp, Homo sapien
gcacaatgcccacatgtacatgggg

SEQ ID NO: 3838659 - DNA, 25 bp, Homo sapien
gagaacagcaacaagtgtgagccca

SEQ ID NO: 3838660 - DNA, 25 bp, Homo sapien
caactacctggaacaagcgtgggct

SEQ ID NO: 3838661 - DNA, 25 bp, Homo sapien
tctaggaacttaaagcagccgcgtc

SEQ ID NO: 3838662 - DNA, 25 bp, Homo sapien
tagttggaactagggaatcagaagg

SEQ ID NO: 3838663 - DNA, 25 bp, Homo sapien
cacaactgtcagcaaagaagccaga

SEQ ID NO: 3838664 - DNA, 25 bp, Homo sapien
agccagaggatgcgggtgtcgtggg

SEQ ID NO: 3838665 - DNA, 25 bp, Homo sapien
aagaagccagaggatgcgggtgtcg

SEQ ID NO: 3838666 - DNA, 25 bp, Homo sapien
gaagccagaggatgcgggtgtcgtg

SEQ ID NO: 3838667 - DNA, 25 bp, Homo sapien
caattctccactttactcacaggct

SEQ ID NO: 3838668 - DNA, 25 bp, Homo sapien
gctggtctgagtgcccggcatagca

SEQ ID NO: 3838669 - DNA, 25 bp, Homo sapien
gcaactgaagcgttcctttggcccc

SEQ ID NO: 3838670 - DNA, 25 bp, Homo sapien
gcctctcctgcaagaaacgctcaaa

SEQ ID NO: 3838671 - DNA, 25 bp, Homo sapien
tccagcctagttaacagagcaaggc

SEQ ID NO: 3838672 - DNA, 25 bp, Homo sapien
cactccagcctagttaacagagcaa

SEQ ID NO: 3838673 - DNA, 25 bp, Homo sapien
ctccagcctagttaacagagcaagg

SEQ ID NO: 3838674 - DNA, 25 bp, Homo sapien
cagcctagttaacagagcaaggccc

SEQ ID NO: 3838675 - DNA, 25 bp, Homo sapien
tacacgtgcaccaaacagcattcct

SEQ ID NO: 3838676 - DNA, 25 bp, Homo sapien
tggcatataattggtgctcaatgaa

SEQ ID NO: 3838677 - DNA, 25 bp, Homo sapien
ttaatatcactactacacgtgcacc

SEQ ID NO: 3838678 - DNA, 25 bp, Homo sapien
catataattggtgctcaatgaaaac

SEQ ID NO: 3838679 - DNA, 25 bp, Homo sapien
caggacggggaatctggcgacaaca

SEQ ID NO: 3838680 - DNA, 25 bp, Homo sapien
tggcgacaacaacgccctgggccag

SEQ ID NO: 3838681 - DNA, 25 bp, Homo sapien
tcagaaaccaggacggggaatctgg

SEQ ID NO: 3838682 - DNA, 25 bp, Homo sapien
gggaatctggcgacaacaacgccct

SEQ ID NO: 3838683 - DNA, 25 bp, Homo sapien
cttcacgtagtaccagaacacgggc

SEQ ID NO: 3838684 - DNA, 25 bp, Homo sapien
ttcacgtagtaccagaacacgggct

SEQ ID NO: 3838685 - DNA, 25 bp, Homo sapien
gcagctcgtgcttgttgaggacctc

SEQ ID NO: 3838686 - DNA, 25 bp, Homo sapien
tccagggagtgttcgttgagggcac

SEQ ID NO: 3838687 - DNA, 25 bp, Homo sapien
ctccagggagtgttcgttgagggca

SEQ ID NO: 3838688 - DNA, 25 bp, Homo sapien
ccagggagtgttcgttgagggcaca

SEQ ID NO: 3838689 - DNA, 25 bp, Homo sapien
agggagtgttcgttgagggcacagc

SEQ ID NO: 3838690 - DNA, 25 bp, Homo sapien
gaggtctctgctggtttaaagcttc

SEQ ID NO: 3838691 - DNA, 25 bp, Homo sapien
gtctctgctggtttaaagcttctgg

SEQ ID NO: 3838692 - DNA, 25 bp, Homo sapien
tgaggtctctgctggtttaaagctt

SEQ ID NO: 3838693 - DNA, 25 bp, Homo sapien
ggtctctgctggtttaaagcttctg

SEQ ID NO: 3838694 - DNA, 25 bp, Homo sapien
gccatggtaggaagcatactggacc

SEQ ID NO: 3838695 - DNA, 25 bp, Homo sapien
ccatggtaggaagcatactggacct

SEQ ID NO: 3838696 - DNA, 25 bp, Homo sapien
ccacacagaggttgcagggagccga

SEQ ID NO: 3838697 - DNA, 25 bp, Homo sapien
gccacacagaggttgcagggagccg

SEQ ID NO: 3838698 - DNA, 25 bp, Homo sapien
gacacgttgatcttaaataggtata

SEQ ID NO: 3838699 - DNA, 25 bp, Homo sapien
agacaacagattacagaagaggaga

SEQ ID NO: 3838700 - DNA, 25 bp, Homo sapien
gaggagacacgttgatcttaaatag

SEQ ID NO: 3838701 - DNA, 25 bp, Homo sapien
cagaagaggagacacgttgatctta

SEQ ID NO: 3838702 - DNA, 25 bp, Homo sapien
tcactccttgcgtggactccttcag

SEQ ID NO: 3838703 - DNA, 25 bp, Homo sapien
aacggtgggagcaaacttactctgc

SEQ ID NO: 3838704 - DNA, 25 bp, Homo sapien
tactctgcccgttcaaatccttgtt

SEQ ID NO: 3838705 - DNA, 25 bp, Homo sapien
ctcctttaagaggtctgaaacggtg

SEQ ID NO: 3838706 - DNA, 25 bp, Homo sapien
tcctgatgagtttccatacacgtca

SEQ ID NO: 3838707 - DNA, 25 bp, Homo sapien
tcacatcaagcttctggtacccaaa

SEQ ID NO: 3838708 - DNA, 25 bp, Homo sapien
caaaggcggacatgatattgacaga

SEQ ID NO: 3838709 - DNA, 25 bp, Homo sapien
catcttcatcatcgatgcttttcac

SEQ ID NO: 3838710 - DNA, 25 bp, Homo sapien
cattttacactttaatggactggat

SEQ ID NO: 3838711 - DNA, 25 bp, Homo sapien
cacaaagcctaagaggtaactagct

SEQ ID NO: 3838712 - DNA, 25 bp, Homo sapien
gattaggagggcactgtgcaccaca

SEQ ID NO: 3838713 - DNA, 25 bp, Homo sapien
ttgcagtagtcatgattaggagggc

SEQ ID NO: 3838714 - DNA, 25 bp, Homo sapien
ctgggtgacagagtgtgctccgttt

SEQ ID NO: 3838715 - DNA, 25 bp, Homo sapien
tagtcgggtgtgttggtgcgcgcct

SEQ ID NO: 3838716 - DNA, 25 bp, Homo sapien
aattagtcgggtgtgttggtgcgcg

SEQ ID NO: 3838717 - DNA, 25 bp, Homo sapien
tcgggtgtgttggtgcgcgcctgta

SEQ ID NO: 3838718 - DNA, 25 bp, Homo sapien
attagtcgggtgtgttggtgcgcgc

SEQ ID NO: 3838719 - DNA, 25 bp, Homo sapien
gctgttataggacaagccccgtgga

SEQ ID NO: 3838720 - DNA, 25 bp, Homo sapien
gatactggtggctcagaggtcttac

SEQ ID NO: 3838721 - DNA, 25 bp, Homo sapien
aattggctggccctgttggtgcacg

SEQ ID NO: 3838722 - DNA, 25 bp, Homo sapien
actgcaaaattacatggccaagggc

SEQ ID NO: 3838723 - DNA, 25 bp, Homo sapien
aggcaaggcaggcgaggaggatcac

SEQ ID NO: 3838724 - DNA, 25 bp, Homo sapien
taatagagctgaaatctcattatgt

SEQ ID NO: 3838725 - DNA, 25 bp, Homo sapien
tatttttaatagagctgaaatctca

SEQ ID NO: 3838726 - DNA, 25 bp, Homo sapien
tccccagctcaagaggcagggccgg

SEQ ID NO: 3838727 - DNA, 25 bp, Homo sapien
ttgggactccttggaaccactccta

SEQ ID NO: 3838728 - DNA, 25 bp, Homo sapien
tagcagtccctgaatcgccatgtgg

SEQ ID NO: 3838729 - DNA, 25 bp, Homo sapien
cctgccagtgaaaggtagggccatt

SEQ ID NO: 3838730 - DNA, 25 bp, Homo sapien
tccaggagaggctgtaatgggccca

SEQ ID NO: 3838731 - DNA, 25 bp, Homo sapien
acctggcctcagctagttatcttca

SEQ ID NO: 3838732 - DNA, 25 bp, Homo sapien
ctgtacctggcctcagctagttatc

SEQ ID NO: 3838733 - DNA, 25 bp, Homo sapien
tgtacctggcctcagctagttatct

SEQ ID NO: 3838734 - DNA, 25 bp, Homo sapien
tggcctcagctagttatcttcatgg

SEQ ID NO: 3838735 - DNA, 25 bp, Homo sapien
tagctgtagatatcatgtcacttga

SEQ ID NO: 3838736 - DNA, 25 bp, Homo sapien
tcacttgacccctataatgacttca

SEQ ID NO: 3838737 - DNA, 25 bp, Homo sapien
tgtagatatcatgtcacttgacccc

SEQ ID NO: 3838738 - DNA, 25 bp, Homo sapien
gacccctataatgacttcaatgtga

SEQ ID NO: 3838739 - DNA, 25 bp, Homo sapien
gtctcctgctcgttcaattaggctg

SEQ ID NO: 3838740 - DNA, 25 bp, Homo sapien
ctctctgcttaaggccttcaagggt

SEQ ID NO: 3838741 - DNA, 25 bp, Homo sapien
aattaggctgtgatgcactagtccc

SEQ ID NO: 3838742 - DNA, 25 bp, Homo sapien
gaatccgaagtccttagaatgaccc

SEQ ID NO: 3838743 - DNA, 25 bp, Homo sapien
taatatctactaagtgccaactacc

SEQ ID NO: 3838744 - DNA, 25 bp, Homo sapien
caccacatcccgctactttttatag

SEQ ID NO: 3838745 - DNA, 25 bp, Homo sapien
actaagtgccaactaccatagagga

SEQ ID NO: 3838746 - DNA, 25 bp, Homo sapien
gagctggaccttggctcagtccaac

SEQ ID NO: 3838747 - DNA, 25 bp, Homo sapien
gctcgagtgtaacaacagtcgtggc

SEQ ID NO: 3838748 - DNA, 25 bp, Homo sapien
cctcagctcgagtgtaacaacagtc

SEQ ID NO: 3838749 - DNA, 25 bp, Homo sapien
agccggcctcctcagctcgagtgta

SEQ ID NO: 3838750 - DNA, 25 bp, Homo sapien
gagtgtaacaacagtcgtggccatg

SEQ ID NO: 3838751 - DNA, 25 bp, Homo sapien
gcatggtgctgctggggactcatcg

SEQ ID NO: 3838752 - DNA, 25 bp, Homo sapien
tcatctggctatgccagggtgccca

SEQ ID NO: 3838753 - DNA, 25 bp, Homo sapien
tactcggggtgggtggcatggtgct

SEQ ID NO: 3838754 - DNA, 25 bp, Homo sapien
tggtgctgctggggactcatcgcac

SEQ ID NO: 3838755 - DNA, 25 bp, Homo sapien
catcgaataattaggtttcttcagg

SEQ ID NO: 3838756 - DNA, 25 bp, Homo sapien
tcaagtgctcagtgttaaagatcac

SEQ ID NO: 3838757 - DNA, 25 bp, Homo sapien
ttccttgtcgtccagacatcgaata

SEQ ID NO: 3838758 - DNA, 25 bp, Homo sapien
cactcacattagggccagacaccat

SEQ ID NO: 3838759 - DNA, 25 bp, Homo sapien
tcggtgatgtggaaccgtcacgcaa

SEQ ID NO: 3838760 - DNA, 25 bp, Homo sapien
aaaaccacgcaaacccaagaggcag

SEQ ID NO: 3838761 - DNA, 25 bp, Homo sapien
atcatcacccgaacccaagaggcgg

SEQ ID NO: 3838762 - DNA, 25 bp, Homo sapien
ggccgctgacgtggaaccatcatca

SEQ ID NO: 3838763 - DNA, 25 bp, Homo sapien
cttccgagcgtcagctcactcccct

SEQ ID NO: 3838764 - DNA, 25 bp, Homo sapien
ttccgagcgtcagctcactcccctt

SEQ ID NO: 3838765 - DNA, 25 bp, Homo sapien
tgccgagcgtctgcgggggccgctt

SEQ ID NO: 3838766 - DNA, 25 bp, Homo sapien
gccgagcgtctgcgggggccgcttc

SEQ ID NO: 3838767 - DNA, 25 bp, Homo sapien
ctgccgagcgtctgcgggggccgct

SEQ ID NO: 3838768 - DNA, 25 bp, Homo sapien
cttccgagcgtcagctcactcccct

SEQ ID NO: 3838769 - DNA, 25 bp, Homo sapien
ttccgagcgtcagctcactcccctt

SEQ ID NO: 3838770 - DNA, 25 bp, Homo sapien
cttccgagcgtcagctcactcccct

SEQ ID NO: 3838771 - DNA, 25 bp, Homo sapien
ttccgagcgtcagctcactcccctt

SEQ ID NO: 3838772 - DNA, 25 bp, Homo sapien
aatatcaagacaactgccgagcatc

SEQ ID NO: 3838773 - DNA, 25 bp, Homo sapien
tctgagcgtcagctcactccccttc

SEQ ID NO: 3838774 - DNA, 25 bp, Homo sapien
atcaagacaactgccgagcatctgc

SEQ ID NO: 3838775 - DNA, 25 bp, Homo sapien
cttctgagcgtcagctcactcccct

SEQ ID NO: 3838776 - DNA, 25 bp, Homo sapien
ctcagcggatgataatctcaagaca

SEQ ID NO: 3838777 - DNA, 25 bp, Homo sapien
cctcagcggatgataatctcaagac

SEQ ID NO: 3838778 - DNA, 25 bp, Homo sapien
cctcagcggatgataatctcaagac

SEQ ID NO: 3838779 - DNA, 25 bp, Homo sapien
ctcagcggatgataatctcaagaca

SEQ ID NO: 3838780 - DNA, 25 bp, Homo sapien
ctcagcggatgataatctcaagaca

SEQ ID NO: 3838781 - DNA, 25 bp, Homo sapien
cctcagcggatgataatctcaagac

SEQ ID NO: 3838782 - DNA, 25 bp, Homo sapien
caccctcagcagatgataatatcaa

SEQ ID NO: 3838783 - DNA, 25 bp, Homo sapien
cagatgataatatcaagacaactgc

SEQ ID NO: 3838784 - DNA, 25 bp, Homo sapien
gctccaccctcagcagatgataata

SEQ ID NO: 3838785 - DNA, 25 bp, Homo sapien
tcagcagatgataatatcaagacaa

SEQ ID NO: 3838786 - DNA, 25 bp, Homo sapien
ctaggtagagatagattgtgtaagg

SEQ ID NO: 3838787 - DNA, 25 bp, Homo sapien
tactcttatagccatctgaaatacg

SEQ ID NO: 3838788 - DNA, 25 bp, Homo sapien
tctgaaatacgttttctaggtagag

SEQ ID NO: 3838789 - DNA, 25 bp, Homo sapien
gtgaccggctcagactgtactctta

SEQ ID NO: 3838790 - DNA, 25 bp, Homo sapien
tcaattctcccttcggttgtgagaa

SEQ ID NO: 3838791 - DNA, 25 bp, Homo sapien
tgtcaattctcccttcggttgtgag

SEQ ID NO: 3838792 - DNA, 25 bp, Homo sapien
ggtgtcaattctcccttcggttgtg

SEQ ID NO: 3838793 - DNA, 25 bp, Homo sapien
caattctcccttcggttgtgagaat

SEQ ID NO: 3838794 - DNA, 25 bp, Homo sapien
gcttctttagcgtggggacaggacc

SEQ ID NO: 3838795 - DNA, 25 bp, Homo sapien
gacaggaccctgctcccattgcatt

SEQ ID NO: 3838796 - DNA, 25 bp, Homo sapien
tccagacagcatgtgctgaaggatg

SEQ ID NO: 3838797 - DNA, 25 bp, Homo sapien
accacacactccttgtttgaggcca

SEQ ID NO: 3838798 - DNA, 25 bp, Homo sapien
ggttccaaatgcgaggctgactttc

SEQ ID NO: 3838799 - DNA, 25 bp, Homo sapien
tcttcacctcatgtctgtttactgc

SEQ ID NO: 3838800 - DNA, 25 bp, Homo sapien
tactgccatgttagcaatttgatgt

SEQ ID NO: 3838801 - DNA, 25 bp, Homo sapien
gaccctcaatccacttgttttccat

SEQ ID NO: 3838802 - DNA, 25 bp, Homo sapien
gtgcccaccatcacgcccagctaat

SEQ ID NO: 3838803 - DNA, 25 bp, Homo sapien
tgcccaccatcacgcccagctaatt

SEQ ID NO: 3838804 - DNA, 25 bp, Homo sapien
tctcagctcactgccttttgggttc

SEQ ID NO: 3838805 - DNA, 25 bp, Homo sapien
tttgggttcaagcaattctcctgcc

SEQ ID NO: 3838806 - DNA, 25 bp, Homo sapien
gtcattactctacggaggcatgtgg

SEQ ID NO: 3838807 - DNA, 25 bp, Homo sapien
gaaagacgtcattactctacggagg

SEQ ID NO: 3838808 - DNA, 25 bp, Homo sapien
gacgtcattactctacggaggcatg

SEQ ID NO: 3838809 - DNA, 25 bp, Homo sapien
aagacgtcattactctacggaggca

SEQ ID NO: 3838810 - DNA, 25 bp, Homo sapien
caggcgtgcatcaccatgctcagct

SEQ ID NO: 3838811 - DNA, 25 bp, Homo sapien
acaggcgtgcatcaccatgctcagc

SEQ ID NO: 3838812 - DNA, 25 bp, Homo sapien
aggcgtgcatcaccatgctcagcta

SEQ ID NO: 3838813 - DNA, 25 bp, Homo sapien
tgaggtttcgtcacttaaataggaa

SEQ ID NO: 3838814 - DNA, 25 bp, Homo sapien
cctctggatagtttacctttgggtg

SEQ ID NO: 3838815 - DNA, 25 bp, Homo sapien
tgctatttatcacaaatggagtatg

SEQ ID NO: 3838816 - DNA, 25 bp, Homo sapien
gatagtttacctttgggtgagtata

SEQ ID NO: 3838817 - DNA, 25 bp, Homo sapien
tcattaccattgttgtatggttctc

SEQ ID NO: 3838818 - DNA, 25 bp, Homo sapien
atgccatgccataggtactcttttg

SEQ ID NO: 3838819 - DNA, 25 bp, Homo sapien
gttgtatggttctctaacttcatca

SEQ ID NO: 3838820 - DNA, 25 bp, Homo sapien
tgttctgctcaacaccatgtttctg

SEQ ID NO: 3838821 - DNA, 25 bp, Homo sapien
caacctctgcttcccaggtttgagc

SEQ ID NO: 3838822 - DNA, 25 bp, Homo sapien
gcaatggggcaatatcagctcaccg

SEQ ID NO: 3838823 - DNA, 25 bp, Homo sapien
ccgtgcccagccaagatctacacta

SEQ ID NO: 3838824 - DNA, 25 bp, Homo sapien
tgcccagccaagatctacactatta

SEQ ID NO: 3838825 - DNA, 25 bp, Homo sapien
aggaaccctgggagctcaggaagga

SEQ ID NO: 3838826 - DNA, 25 bp, Homo sapien
aatcaggtttgtgaaggttccagag

SEQ ID NO: 3838827 - DNA, 25 bp, Homo sapien
ggaaccctgggagctcaggaaggaa

SEQ ID NO: 3838828 - DNA, 25 bp, Homo sapien
tcaggtttgtgaaggttccagagag

SEQ ID NO: 3838829 - DNA, 25 bp, Homo sapien
gaattagcttttaatcattgacttc

SEQ ID NO: 3838830 - DNA, 25 bp, Homo sapien
cttataagggcactttgaatttcca

SEQ ID NO: 3838831 - DNA, 25 bp, Homo sapien
ttattgccatgttatgatcttatca

SEQ ID NO: 3838832 - DNA, 25 bp, Homo sapien
tttattgccatgttatgatcttatc

SEQ ID NO: 3838833 - DNA, 25 bp, Homo sapien
tattgccatgttatgatcttatcat

SEQ ID NO: 3838834 - DNA, 25 bp, Homo sapien
acatccctgagaggtcaatcatgaa

SEQ ID NO: 3838835 - DNA, 25 bp, Homo sapien
agatgattatagataaggacatcat

SEQ ID NO: 3838836 - DNA, 25 bp, Homo sapien
catccctgagaggtcaatcatgaag

SEQ ID NO: 3838837 - DNA, 25 bp, Homo sapien
gtaatactttactggattgtctgaa

SEQ ID NO: 3838838 - DNA, 25 bp, Homo sapien
actttactggattgtctgaatattg

SEQ ID NO: 3838839 - DNA, 25 bp, Homo sapien
aatactttactggattgtctgaata

SEQ ID NO: 3838840 - DNA, 25 bp, Homo sapien
tttggtaatactttactggattgtc

SEQ ID NO: 3838841 - DNA, 25 bp, Homo sapien
ctacaaaaagtccaatagtaataat

SEQ ID NO: 3838842 - DNA, 25 bp, Homo sapien
aaaatgataatctcaaaaatgatct

SEQ ID NO: 3838843 - DNA, 25 bp, Homo sapien
ttgaatgctctgtttagtctacaaa

SEQ ID NO: 3838844 - DNA, 25 bp, Homo sapien
cattaagttgaacattatcttgtct

SEQ ID NO: 3838845 - DNA, 25 bp, Homo sapien
gaagcttacgcagtcacagtactgg

SEQ ID NO: 3838846 - DNA, 25 bp, Homo sapien
tacccagtcttggacctatggtgga

SEQ ID NO: 3838847 - DNA, 25 bp, Homo sapien
gaatctaaacagtgtggctccggag

SEQ ID NO: 3838848 - DNA, 25 bp, Homo sapien
tacaaaagcccttaggtgagcactg

SEQ ID NO: 3838849 - DNA, 25 bp, Homo sapien
tcttccatcgtaaaagtgataccac

SEQ ID NO: 3838850 - DNA, 25 bp, Homo sapien
gaaatttctgtactatggtcccaat

SEQ ID NO: 3838851 - DNA, 25 bp, Homo sapien
cattggagacaacagaactgtggtg

SEQ ID NO: 3838852 - DNA, 25 bp, Homo sapien
caacttgaaatctgtggaagatgac

SEQ ID NO: 3838853 - DNA, 25 bp, Homo sapien
cctctgttagtactctaatactttt

SEQ ID NO: 3838854 - DNA, 25 bp, Homo sapien
actttttatatttatcggctcacta

SEQ ID NO: 3838855 - DNA, 25 bp, Homo sapien
tttttatatttatcggctcactaca

SEQ ID NO: 3838856 - DNA, 25 bp, Homo sapien
tttcctctgttagtactctaatact

SEQ ID NO: 3838857 - DNA, 25 bp, Homo sapien
ctgttgagcaaggacattcaaaagt

SEQ ID NO: 3838858 - DNA, 25 bp, Homo sapien
gctgtgacagttgagatgtaaacca

SEQ ID NO: 3838859 - DNA, 25 bp, Homo sapien
aatccgactgaatggacccttcctg

SEQ ID NO: 3838860 - DNA, 25 bp, Homo sapien
aattctaagccacccaatccgactg

SEQ ID NO: 3838861 - DNA, 25 bp, Homo sapien
tgctctattgcctaagcttgagtgc

SEQ ID NO: 3838862 - DNA, 25 bp, Homo sapien
tctggaattcctgaggtcaagctgt

SEQ ID NO: 3838863 - DNA, 25 bp, Homo sapien
ttggagtgtaggagggcgatctcag

SEQ ID NO: 3838864 - DNA, 25 bp, Homo sapien
attcctgaggtcaagctgtctgccc

SEQ ID NO: 3838865 - DNA, 25 bp, Homo sapien
caatgagtaaattgaggccttggcg

SEQ ID NO: 3838866 - DNA, 25 bp, Homo sapien
atacagagtcgtcctttttcagcaa

SEQ ID NO: 3838867 - DNA, 25 bp, Homo sapien
ccttggcgattttggaggaaagaga

SEQ ID NO: 3838868 - DNA, 25 bp, Homo sapien
tgttgtcatataccaggccagagtg

SEQ ID NO: 3838869 - DNA, 25 bp, Homo sapien
gagctctacgttgggatataatggt

SEQ ID NO: 3838870 - DNA, 25 bp, Homo sapien
tgtaccaggtactgagctctacgtt

SEQ ID NO: 3838871 - DNA, 25 bp, Homo sapien
tgggatataatggtgatcaaggaga

SEQ ID NO: 3838872 - DNA, 25 bp, Homo sapien
tattgatcaaatgtgctttgtacca

SEQ ID NO: 3838873 - DNA, 25 bp, Homo sapien
tgggagtgccactggcctctggtgc

SEQ ID NO: 3838874 - DNA, 25 bp, Homo sapien
gggagtgccactggcctctggtgct

SEQ ID NO: 3838875 - DNA, 25 bp, Homo sapien
gctgggagtgccactggcctctggt

SEQ ID NO: 3838876 - DNA, 25 bp, Homo sapien
cgagctgggagtgccactggcctct

SEQ ID NO: 3838877 - DNA, 25 bp, Homo sapien
ctcagctggttgctgcctggagacc

SEQ ID NO: 3838878 - DNA, 25 bp, Homo sapien
tgggccctttagtcgctcagctggt

SEQ ID NO: 3838879 - DNA, 25 bp, Homo sapien
ggtgctgcattaggcccagctcctc

SEQ ID NO: 3838880 - DNA, 25 bp, Homo sapien
ggcctatcaatctgaaacctgtgtt

SEQ ID NO: 3838881 - DNA, 25 bp, Homo sapien
ctccagcctgtccaagcgcttctgg

SEQ ID NO: 3838882 - DNA, 25 bp, Homo sapien
ccagcctgtccaagcgcttctggag

SEQ ID NO: 3838883 - DNA, 25 bp, Homo sapien
tccagcctgtccaagcgcttctgga

SEQ ID NO: 3838884 - DNA, 25 bp, Homo sapien
tgagtggatgggtgtgaatggctga

SEQ ID NO: 3838885 - DNA, 25 bp, Homo sapien
catggctggtttctacccacgaagg

SEQ ID NO: 3838886 - DNA, 25 bp, Homo sapien
ttattgaggttctaagctagggcct

SEQ ID NO: 3838887 - DNA, 25 bp, Homo sapien
taaaagatgcctaccctgtaagtga

SEQ ID NO: 3838888 - DNA, 25 bp, Homo sapien
ctctgagaaggagctcggaaacgga

SEQ ID NO: 3838889 - DNA, 25 bp, Homo sapien
caacctttgcctcccggattcaagc

SEQ ID NO: 3838890 - DNA, 25 bp, Homo sapien
tggagtacaatggcatgatctcggc

SEQ ID NO: 3838891 - DNA, 25 bp, Homo sapien
aattctcttgcctcagcctcctgag

SEQ ID NO: 3838892 - DNA, 25 bp, Homo sapien
gaagtctcactcctgtcccccaggc

SEQ ID NO: 3838893 - DNA, 25 bp, Homo sapien
ggagggctggatcgctagggctgca

SEQ ID NO: 3838894 - DNA, 25 bp, Homo sapien
tgattgccgtgacctagggtccagg

SEQ ID NO: 3838895 - DNA, 25 bp, Homo sapien
gtgtagaagtccgaccgcggaagcc

SEQ ID NO: 3838896 - DNA, 25 bp, Homo sapien
gcttgcttcggaacaagctctcggg

SEQ ID NO: 3838897 - DNA, 25 bp, Homo sapien
attgtgctgctggacccgacgagca

SEQ ID NO: 3838898 - DNA, 25 bp, Homo sapien
aggtagacgccgaaaaagcgccctg

SEQ ID NO: 3838899 - DNA, 25 bp, Homo sapien
gttgacagtgaaccccacgtagacg

SEQ ID NO: 3838900 - DNA, 25 bp, Homo sapien
ttttgcggcccccattgtgctgctg

SEQ ID NO: 3838901 - DNA, 25 bp, Homo sapien
cagcgtgcccaccaagagccctatg

SEQ ID NO: 3838902 - DNA, 25 bp, Homo sapien
tgcccaccaagagccctatgctgga

SEQ ID NO: 3838903 - DNA, 25 bp, Homo sapien
aagagccctatgctggaacccagcc

SEQ ID NO: 3838904 - DNA, 25 bp, Homo sapien
accaagagccctatgctggaaccca

SEQ ID NO: 3838905 - DNA, 25 bp, Homo sapien
aggagaaccgtgatgtccctgtcgc

SEQ ID NO: 3838906 - DNA, 25 bp, Homo sapien
ttcccggcttcagccgagaagtgca

SEQ ID NO: 3838907 - DNA, 25 bp, Homo sapien
gagagcggggtcctcattcccggct

SEQ ID NO: 3838908 - DNA, 25 bp, Homo sapien
gtgatgtccctgtcgcagcccagcg

SEQ ID NO: 3838909 - DNA, 25 bp, Homo sapien
cggccacggaggacgggaagccgtg

SEQ ID NO: 3838910 - DNA, 25 bp, Homo sapien
ggccacggaggacgggaagccgtgc

SEQ ID NO: 3838911 - DNA, 25 bp, Homo sapien
ctgcgggcggcgtacaggggcatca

SEQ ID NO: 3838912 - DNA, 25 bp, Homo sapien
gcatcagggcggctcggagcgaggg

SEQ ID NO: 3838913 - DNA, 25 bp, Homo sapien
ggctcggagcgaggggcggaaccca

SEQ ID NO: 3838914 - DNA, 25 bp, Homo sapien
ggcgtacaggggcatcagggcggct

SEQ ID NO: 3838915 - DNA, 25 bp, Homo sapien
gaggtcctggcggaggtctgggcgc

SEQ ID NO: 3838916 - DNA, 25 bp, Homo sapien
tctgggcgcacccagcgcagcgtga

SEQ ID NO: 3838917 - DNA, 25 bp, Homo sapien
aggtggaaagcgaaggctgtctctc

SEQ ID NO: 3838918 - DNA, 25 bp, Homo sapien
ctcaggctccgcgtcatcaaaggga

SEQ ID NO: 3838919 - DNA, 25 bp, Homo sapien
tatgcagcaggcactgttgcgggca

SEQ ID NO: 3838920 - DNA, 25 bp, Homo sapien
caagaaaacacgtagcatgccagac

SEQ ID NO: 3838921 - DNA, 25 bp, Homo sapien
taagtgctgccctctgatagtgcag

SEQ ID NO: 3838922 - DNA, 25 bp, Homo sapien
ttaccgggagctcagtagaaggcac

SEQ ID NO: 3838923 - DNA, 25 bp, Homo sapien
agggcattggccctctaggggcaga

SEQ ID NO: 3838924 - DNA, 25 bp, Homo sapien
tcacatgggcccttagcaggcagcc

SEQ ID NO: 3838925 - DNA, 25 bp, Homo sapien
gatcacatgggcccttagcaggcag

SEQ ID NO: 3838926 - DNA, 25 bp, Homo sapien
caagggcattggccctctaggggca

SEQ ID NO: 3838927 - DNA, 25 bp, Homo sapien
acagccagatcaggtctccccaaag

SEQ ID NO: 3838928 - DNA, 25 bp, Homo sapien
gtagggagcccgccaccaaagccca

SEQ ID NO: 3838929 - DNA, 25 bp, Homo sapien
tagggagcccgccaccaaagcccac

SEQ ID NO: 3838930 - DNA, 25 bp, Homo sapien
caggtctccagcaggtctgtccagt

SEQ ID NO: 3838931 - DNA, 25 bp, Homo sapien
ggtctccagcaggtctgtccagtgt

SEQ ID NO: 3838932 - DNA, 25 bp, Homo sapien
tctccagcaggtctgtccagtgtgc

SEQ ID NO: 3838933 - DNA, 25 bp, Homo sapien
tcaggtctccagcaggtctgtccag

SEQ ID NO: 3838934 - DNA, 25 bp, Homo sapien
ggtggcacagaaaagaggtaggagg

SEQ ID NO: 3838935 - DNA, 25 bp, Homo sapien
aggtggcacagaaaagaggtaggag

SEQ ID NO: 3838936 - DNA, 25 bp, Homo sapien
gtggcacagaaaagaggtaggaggg

SEQ ID NO: 3838937 - DNA, 25 bp, Homo sapien
gactcagactttttattgtactcaa

SEQ ID NO: 3838938 - DNA, 25 bp, Homo sapien
ggagcagagcatggacatatagaac

SEQ ID NO: 3838939 - DNA, 25 bp, Homo sapien
gcagcccaggcattccaggctctga

SEQ ID NO: 3838940 - DNA, 25 bp, Homo sapien
gctctgaccacaaggccagtctgga

SEQ ID NO: 3838941 - DNA, 25 bp, Homo sapien
caggccagtcttgaaggcggcaggg

SEQ ID NO: 3838942 - DNA, 25 bp, Homo sapien
ggaagcttctctattaccctcctta

SEQ ID NO: 3838943 - DNA, 25 bp, Homo sapien
ggatctaaagtcagggctgggaact

SEQ ID NO: 3838944 - DNA, 25 bp, Homo sapien
cttggagtgatctgcaaacccaata

SEQ ID NO: 3838945 - DNA, 25 bp, Homo sapien
cccaatatgtgagtttagtgtatag

SEQ ID NO: 3838946 - DNA, 25 bp, Homo sapien
ccttgcctgcaggggctgagtatgg

SEQ ID NO: 3838947 - DNA, 25 bp, Homo sapien
cgggaacctgacctgttctctcctt

SEQ ID NO: 3838948 - DNA, 25 bp, Homo sapien
cctgcaggggctgagtatgggtgtg

SEQ ID NO: 3838949 - DNA, 25 bp, Homo sapien
ggaacctgacctgttctctccttgc

SEQ ID NO: 3838950 - DNA, 25 bp, Homo sapien
cggcaggattgcctcagcctaggaa

SEQ ID NO: 3838951 - DNA, 25 bp, Homo sapien
tgggccattccaacgtgtcactcac

SEQ ID NO: 3838952 - DNA, 25 bp, Homo sapien
gctagagcctcgtgcgggaatgaaa

SEQ ID NO: 3838953 - DNA, 25 bp, Homo sapien
ttgagcaactaagctggtaccaggg

SEQ ID NO: 3838954 - DNA, 25 bp, Homo sapien
ttcagggaagtcactgaggcctagg

SEQ ID NO: 3838955 - DNA, 25 bp, Homo sapien
gtgacttgcccgcactcacaaagtc

SEQ ID NO: 3838956 - DNA, 25 bp, Homo sapien
actcacaaagtcagtcagtggcggg

SEQ ID NO: 3838957 - DNA, 25 bp, Homo sapien
acaacagcaagaaagtgggattctc

SEQ ID NO: 3838958 - DNA, 25 bp, Homo sapien
cttcacgtactccagtggcgggcgg

SEQ ID NO: 3838959 - DNA, 25 bp, Homo sapien
ctgcaaagtacttgatgagcgggac

SEQ ID NO: 3838960 - DNA, 25 bp, Homo sapien
caaagtacttgatgagcgggacccc

SEQ ID NO: 3838961 - DNA, 25 bp, Homo sapien
ccttcacgtactccagtggcgggcg

SEQ ID NO: 3838962 - DNA, 25 bp, Homo sapien
acttctctaggtcgccgccctggta

SEQ ID NO: 3838963 - DNA, 25 bp, Homo sapien
gagggttcccctggatcattgacct

SEQ ID NO: 3838964 - DNA, 25 bp, Homo sapien
gcacccgtacgtagatgggagcccg

SEQ ID NO: 3838965 - DNA, 25 bp, Homo sapien
tgggagcccggttacacttctctag

SEQ ID NO: 3838966 - DNA, 25 bp, Homo sapien
gggaaggtctggtgagctgaagccc

SEQ ID NO: 3838967 - DNA, 25 bp, Homo sapien
ggtctggtgagctgaagccccagcc

SEQ ID NO: 3838968 - DNA, 25 bp, Homo sapien
ctgagtagtgggtcagggaaggtct

SEQ ID NO: 3838969 - DNA, 25 bp, Homo sapien
gaaggtctggtgagctgaagcccca

SEQ ID NO: 3838970 - DNA, 25 bp, Homo sapien
ccaggggcaggtgtgacttgatgag

SEQ ID NO: 3838971 - DNA, 25 bp, Homo sapien
gtgacttgatgagccgtgggggcgg

SEQ ID NO: 3838972 - DNA, 25 bp, Homo sapien
tgagccgtgggggcggtgtgtcttt

SEQ ID NO: 3838973 - DNA, 25 bp, Homo sapien
caggggcaggtgtgacttgatgagc

SEQ ID NO: 3838974 - DNA, 25 bp, Homo sapien
tgaaccgagatcacacgattgcgct

SEQ ID NO: 3838975 - DNA, 25 bp, Homo sapien
agtgaaccgagatcacacgattgcg

SEQ ID NO: 3838976 - DNA, 25 bp, Homo sapien
gtgaaccgagatcacacgattgcgc

SEQ ID NO: 3838977 - DNA, 25 bp, Homo sapien
atggtagtaggagaccgccacgtcc

SEQ ID NO: 3838978 - DNA, 25 bp, Homo sapien
cgccttttccatacggtggaaatgg

SEQ ID NO: 3838979 - DNA, 25 bp, Homo sapien
gaaatggtagtaggagaccgccacg

SEQ ID NO: 3838980 - DNA, 25 bp, Homo sapien
agggtgcgccttttccatacggtgg

SEQ ID NO: 3838981 - DNA, 25 bp, Homo sapien
accgacacagggttgctgtacgtta

SEQ ID NO: 3838982 - DNA, 25 bp, Homo sapien
gttgctgtacgttatagccaccacc

SEQ ID NO: 3838983 - DNA, 25 bp, Homo sapien
ttgctgtacgttatagccaccaccc

SEQ ID NO: 3838984 - DNA, 25 bp, Homo sapien
gggcaccgacacagggttgctgtac

SEQ ID NO: 3838985 - DNA, 25 bp, Homo sapien
gaacagggtgggtgcggctcagctc

SEQ ID NO: 3838986 - DNA, 25 bp, Homo sapien
tgaggaccgggatggtcttcttcca

SEQ ID NO: 3838987 - DNA, 25 bp, Homo sapien
tttggtgaggataagcaataggact

SEQ ID NO: 3838988 - DNA, 25 bp, Homo sapien
gagtaaaatgaattgatctctgccc

SEQ ID NO: 3838989 - DNA, 25 bp, Homo sapien
tcatgaacagggcttggcgcctatg

SEQ ID NO: 3838990 - DNA, 25 bp, Homo sapien
tagttggtcatagggttcttcttca

SEQ ID NO: 3838991 - DNA, 25 bp, Homo sapien
tccaggatcttttgaatctcccttt

SEQ ID NO: 3838992 - DNA, 25 bp, Homo sapien
ttcatctccttgaacgacgtgtgct

SEQ ID NO: 3838993 - DNA, 25 bp, Homo sapien
tccttgaacgacgtgtgctgaacca

SEQ ID NO: 3838994 - DNA, 25 bp, Homo sapien
atcttctccgcatagtccgcatcga

SEQ ID NO: 3838995 - DNA, 25 bp, Homo sapien
gaagcgctcattctgcgccacggtg

SEQ ID NO: 3838996 - DNA, 25 bp, Homo sapien
gcgccacggtgaaggtggtcttcca

SEQ ID NO: 3838997 - DNA, 25 bp, Homo sapien
cgcatagtccgcatcgaagcgctca

SEQ ID NO: 3838998 - DNA, 25 bp, Homo sapien
cattggtcagggtagattcgcacac

SEQ ID NO: 3838999 - DNA, 25 bp, Homo sapien
tcttgagcccattggtcagggtaga

SEQ ID NO: 3839000 - DNA, 25 bp, Homo sapien
atcatactttattcttgagcccatt

SEQ ID NO: 3839001 - DNA, 25 bp, Homo sapien
actttattcttgagcccattggtca

SEQ ID NO: 3839002 - DNA, 25 bp, Homo sapien
gaatgggcatgtcataactcactgt

SEQ ID NO: 3839003 - DNA, 25 bp, Homo sapien
ggtctcaaattcgtggcctattgtg

SEQ ID NO: 3839004 - DNA, 25 bp, Homo sapien
tcgtggcctattgtgatcctaccag

SEQ ID NO: 3839005 - DNA, 25 bp, Homo sapien
ccaggctgtagtgaatgggcatgtc

SEQ ID NO: 3839006 - DNA, 25 bp, Homo sapien
ggccgcaacagtgtcagggcgtttc

SEQ ID NO: 3839007 - DNA, 25 bp, Homo sapien
caggaatggccagaagtactatcat

SEQ ID NO: 3839008 - DNA, 25 bp, Homo sapien
tagagatgtggacagggccgcaaca

SEQ ID NO: 3839009 - DNA, 25 bp, Homo sapien
cagaagtactatcatccatccccat

SEQ ID NO: 3839010 - DNA, 25 bp, Homo sapien
gaaagaacaaagacgctggagtccc

SEQ ID NO: 3839011 - DNA, 25 bp, Homo sapien
gaaaaatgggtactcactagacaga

SEQ ID NO: 3839012 - DNA, 25 bp, Homo sapien
ttttctaattgacccagccaaggga

SEQ ID NO: 3839013 - DNA, 25 bp, Homo sapien
gcttctagtccagtgcagcctgcat

SEQ ID NO: 3839014 - DNA, 25 bp, Homo sapien
atagttcttaaaagtggtattacag

SEQ ID NO: 3839015 - DNA, 25 bp, Homo sapien
ctaaaatgaacaattgcaataaaag

SEQ ID NO: 3839016 - DNA, 25 bp, Homo sapien
caattgcaataaaagctttataata

SEQ ID NO: 3839017 - DNA, 25 bp, Homo sapien
tggtattacagacttattttcttct

SEQ ID NO: 3839018 - DNA, 25 bp, Homo sapien
gtactaagggccagtacatcagtcc

SEQ ID NO: 3839019 - DNA, 25 bp, Homo sapien
tactaagggccagtacatcagtccg

SEQ ID NO: 3839020 - DNA, 25 bp, Homo sapien
ctgtactaagggccagtacatcagt

SEQ ID NO: 3839021 - DNA, 25 bp, Homo sapien
ctaagggccagtacatcagtccgct

SEQ ID NO: 3839022 - DNA, 25 bp, Homo sapien
ggagagtgagtccattagggccaca

SEQ ID NO: 3839023 - DNA, 25 bp, Homo sapien
cagggagagtgagtccattagggcc

SEQ ID NO: 3839024 - DNA, 25 bp, Homo sapien
agagtgagtccattagggccacatg

SEQ ID NO: 3839025 - DNA, 25 bp, Homo sapien
gaacagggagagtgagtccattagg

SEQ ID NO: 3839026 - DNA, 25 bp, Homo sapien
ttctccattgaacaggaacaaggct

SEQ ID NO: 3839027 - DNA, 25 bp, Homo sapien
gactccagcgtaagctgttctccat

SEQ ID NO: 3839028 - DNA, 25 bp, Homo sapien
aaccacagactccagcgtaagctgt

SEQ ID NO: 3839029 - DNA, 25 bp, Homo sapien
aagctgttctccattgaacaggaac

SEQ ID NO: 3839030 - DNA, 25 bp, Homo sapien
tgtatataaaatggtgaaagctgac

SEQ ID NO: 3839031 - DNA, 25 bp, Homo sapien
ccctttgtatataaaatggtgaaag

SEQ ID NO: 3839032 - DNA, 25 bp, Homo sapien
tttgtatataaaatggtgaaagctg

SEQ ID NO: 3839033 - DNA, 25 bp, Homo sapien
cctttgtatataaaatggtgaaagc

SEQ ID NO: 3839034 - DNA, 25 bp, Homo sapien
cccaagccacaaaaggaaccatatt

SEQ ID NO: 3839035 - DNA, 25 bp, Homo sapien
agccacaaaaggaaccatatttcat

SEQ ID NO: 3839036 - DNA, 25 bp, Homo sapien
cagtcaatggcatcgcagggctggc

SEQ ID NO: 3839037 - DNA, 25 bp, Homo sapien
catggcctcccaagccacaaaagga

SEQ ID NO: 3839038 - DNA, 25 bp, Homo sapien
cctcagctcgagtgtaacaacagtc

SEQ ID NO: 3839039 - DNA, 25 bp, Homo sapien
gagtgtaacaacagtcgtggccatg

SEQ ID NO: 3839040 - DNA, 25 bp, Homo sapien
gctcgagtgtaacaacagtcgtggc

SEQ ID NO: 3839041 - DNA, 25 bp, Homo sapien
agccggcctcctcagctcgagtgta

SEQ ID NO: 3839042 - DNA, 25 bp, Homo sapien
ggtgctgctggggactcatcgcaca

SEQ ID NO: 3839043 - DNA, 25 bp, Homo sapien
gctgctggggactcatcgcacagga

SEQ ID NO: 3839044 - DNA, 25 bp, Homo sapien
tcatctggctatgccagggtgccca

SEQ ID NO: 3839045 - DNA, 25 bp, Homo sapien
ctggggactcatcgcacaggacgct

SEQ ID NO: 3839046 - DNA, 25 bp, Homo sapien
ttccttgtcgtccagacatcgaata

SEQ ID NO: 3839047 - DNA, 25 bp, Homo sapien
catcgaataattaggtttcttcagg

SEQ ID NO: 3839048 - DNA, 25 bp, Homo sapien
tcaagtgctcagtgttaaagatcac

SEQ ID NO: 3839049 - DNA, 25 bp, Homo sapien
cactcacattagggccagacaccat

SEQ ID NO: 3839050 - DNA, 25 bp, Homo sapien
ggccgctgacgtggaaccatcatca

SEQ ID NO: 3839051 - DNA, 25 bp, Homo sapien
tcggtgatgtggaaccgtcacgcaa

SEQ ID NO: 3839052 - DNA, 25 bp, Homo sapien
atcatcacccgaacccaagaggcgg

SEQ ID NO: 3839053 - DNA, 25 bp, Homo sapien
gtggaaccgtcacgcaaacccaaga

SEQ ID NO: 3839054 - DNA, 25 bp, Homo sapien
gccgcttccaccctcagccgatgat

SEQ ID NO: 3839055 - DNA, 25 bp, Homo sapien
cctcagccgatgataatctcaagac

SEQ ID NO: 3839056 - DNA, 25 bp, Homo sapien
ctgccgagcgtctgcgggggccgct

SEQ ID NO: 3839057 - DNA, 25 bp, Homo sapien
gagcgtctgcgggggccgcttccac

SEQ ID NO: 3839058 - DNA, 25 bp, Homo sapien
tctgagcgtcagctcactccccttc

SEQ ID NO: 3839059 - DNA, 25 bp, Homo sapien
caccctcagcagatgataatatcaa

SEQ ID NO: 3839060 - DNA, 25 bp, Homo sapien
gctccaccctcagcagatgataata

SEQ ID NO: 3839061 - DNA, 25 bp, Homo sapien
cttctgagcgtcagctcactcccct

SEQ ID NO: 3839062 - DNA, 25 bp, Homo sapien
ctcagcggatgataatctcaagaca

SEQ ID NO: 3839063 - DNA, 25 bp, Homo sapien
cctcagcggatgataatctcaagac

SEQ ID NO: 3839064 - DNA, 25 bp, Homo sapien
ttccgagcgtcagctcactcccctt

SEQ ID NO: 3839065 - DNA, 25 bp, Homo sapien
cttccgagcgtcagctcactcccct

SEQ ID NO: 3839066 - DNA, 25 bp, Homo sapien
tgcggggagcgtctgcgggggccgc

SEQ ID NO: 3839067 - DNA, 25 bp, Homo sapien
cttccgagcgtcagctcactcccct

SEQ ID NO: 3839068 - DNA, 25 bp, Homo sapien
ttccgagcgtcagctcactcccctt

SEQ ID NO: 3839069 - DNA, 25 bp, Homo sapien
cttccgagcgtcagctcactcccct

SEQ ID NO: 3839070 - DNA, 25 bp, Homo sapien
ttccgagcgtcagctcactcccctt

SEQ ID NO: 3839071 - DNA, 25 bp, Homo sapien
ctcagcggatgataatctcaagaca

SEQ ID NO: 3839072 - DNA, 25 bp, Homo sapien
cctcagcggatgataatctcaagac

SEQ ID NO: 3839073 - DNA, 25 bp, Homo sapien
ttacccacagggacaattccaaatg

SEQ ID NO: 3839074 - DNA, 25 bp, Homo sapien
taaactagtgaagagtgaatgtaac

SEQ ID NO: 3839075 - DNA, 25 bp, Homo sapien
tttgtaatagcagatgggccctgac

SEQ ID NO: 3839076 - DNA, 25 bp, Homo sapien
ccctgactgtaaactagtgaagagt

SEQ ID NO: 3839077 - DNA, 25 bp, Homo sapien
ctaggtagagatagattgtgtaagg

SEQ ID NO: 3839078 - DNA, 25 bp, Homo sapien
tactcttatagccatctgaaatacg

SEQ ID NO: 3839079 - DNA, 25 bp, Homo sapien
tctgaaatacgttttctaggtagag

SEQ ID NO: 3839080 - DNA, 25 bp, Homo sapien
gtgaccggctcagactgtactctta

SEQ ID NO: 3839081 - DNA, 25 bp, Homo sapien
caattctcccttcggttgtgagaat

SEQ ID NO: 3839082 - DNA, 25 bp, Homo sapien
tcaattctcccttcggttgtgagaa

SEQ ID NO: 3839083 - DNA, 25 bp, Homo sapien
tgtcaattctcccttcggttgtgag

SEQ ID NO: 3839084 - DNA, 25 bp, Homo sapien
ggtgtcaattctcccttcggttgtg

SEQ ID NO: 3839085 - DNA, 25 bp, Homo sapien
gcttctttagcgtggggacaggacc

SEQ ID NO: 3839086 - DNA, 25 bp, Homo sapien
tccagacagcatgtgctgaaggatg

SEQ ID NO: 3839087 - DNA, 25 bp, Homo sapien
gacaggaccctgctcccattgcatt

SEQ ID NO: 3839088 - DNA, 25 bp, Homo sapien
accacacactccttgtttgaggcca

SEQ ID NO: 3839089 - DNA, 25 bp, Homo sapien
ggttccaaatgcgaggctgactttc

SEQ ID NO: 3839090 - DNA, 25 bp, Homo sapien
tcttcacctcatgtctgtttactgc

SEQ ID NO: 3839091 - DNA, 25 bp, Homo sapien
tactgccatgttagcaatttgatgt

SEQ ID NO: 3839092 - DNA, 25 bp, Homo sapien
gaccctcaatccacttgttttccat

SEQ ID NO: 3839093 - DNA, 25 bp, Homo sapien
agaactcctgacatgatccgcacac

SEQ ID NO: 3839094 - DNA, 25 bp, Homo sapien
cgattcttatccctcagcctcttga

SEQ ID NO: 3839095 - DNA, 25 bp, Homo sapien
tagaactcctgacatgatccgcaca

SEQ ID NO: 3839096 - DNA, 25 bp, Homo sapien
actcctgacatgatccgcacacctc

SEQ ID NO: 3839097 - DNA, 25 bp, Homo sapien
cacaagcttttcctgctgggttcaa

SEQ ID NO: 3839098 - DNA, 25 bp, Homo sapien
cccagcttcaaacggttctctgcct

SEQ ID NO: 3839099 - DNA, 25 bp, Homo sapien
caccgtgccagcctcatgtcattct

SEQ ID NO: 3839100 - DNA, 25 bp, Homo sapien
cgtgccagcctcatgtcattcttgt

SEQ ID NO: 3839101 - DNA, 25 bp, Homo sapien
ggcgtgagctaccgcatctggcctt

SEQ ID NO: 3839102 - DNA, 25 bp, Homo sapien
cctgtggtaaaatacttataagatg

SEQ ID NO: 3839103 - DNA, 25 bp, Homo sapien
ctcagagagctgaaggtaattactt

SEQ ID NO: 3839104 - DNA, 25 bp, Homo sapien
gttacaaattctagaactcagagag

SEQ ID NO: 3839105 - DNA, 25 bp, Homo sapien
caatgaagctgatgtgagggaaggg

SEQ ID NO: 3839106 - DNA, 25 bp, Homo sapien
tccttggttacatgtcattattgcg

SEQ ID NO: 3839107 - DNA, 25 bp, Homo sapien
catgtcattattgcgtttccgacaa

SEQ ID NO: 3839108 - DNA, 25 bp, Homo sapien
attgcgtttccgacaagttataaag

SEQ ID NO: 3839109 - DNA, 25 bp, Homo sapien
ggtggaagtccttggttacatgtca

SEQ ID NO: 3839110 - DNA, 25 bp, Homo sapien
cccaggacagttttgaatgcagttc

SEQ ID NO: 3839111 - DNA, 25 bp, Homo sapien
tgtcttacccatgagtgacgggctg

SEQ ID NO: 3839112 - DNA, 25 bp, Homo sapien
cactaaaatttgatacttatttgtg

SEQ ID NO: 3839113 - DNA, 25 bp, Homo sapien
atttgtgaatgaagtaatctcttca

SEQ ID NO: 3839114 - DNA, 25 bp, Homo sapien
tcattaccattgttgtatggttctc

SEQ ID NO: 3839115 - DNA, 25 bp, Homo sapien
atgccatgccataggtactcttttg

SEQ ID NO: 3839116 - DNA, 25 bp, Homo sapien
gttgtatggttctctaacttcatca

SEQ ID NO: 3839117 - DNA, 25 bp, Homo sapien
tgttctgctcaacaccatgtttctg

SEQ ID NO: 3839118 - DNA, 25 bp, Homo sapien
tactaactttggaaagtacatacac

SEQ ID NO: 3839119 - DNA, 25 bp, Homo sapien
tttggaaagtacatacaccagcata

SEQ ID NO: 3839120 - DNA, 25 bp, Homo sapien
actttggaaagtacatacaccagca

SEQ ID NO: 3839121 - DNA, 25 bp, Homo sapien
taactttggaaagtacatacaccag

SEQ ID NO: 3839122 - DNA, 25 bp, Homo sapien
tagctcagattacaacgcctggcta

SEQ ID NO: 3839123 - DNA, 25 bp, Homo sapien
aatgcacagattccttggacgtccc

SEQ ID NO: 3839124 - DNA, 25 bp, Homo sapien
tcccatgggtacatccactttcaag

SEQ ID NO: 3839125 - DNA, 25 bp, Homo sapien
tccactttcaagtggcccaggagag

SEQ ID NO: 3839126 - DNA, 25 bp, Homo sapien
caggagagaacctgaaatactcggt

SEQ ID NO: 3839127 - DNA, 25 bp, Homo sapien
gacaggaggactaagtcaccgcaga

SEQ ID NO: 3839128 - DNA, 25 bp, Homo sapien
ataggttggcactcatcatgagccc

SEQ ID NO: 3839129 - DNA, 25 bp, Homo sapien
gttcctgtcccatgaccagggccag

SEQ ID NO: 3839130 - DNA, 25 bp, Homo sapien
aaatggtgaagctctctattgtcct

SEQ ID NO: 3839131 - DNA, 25 bp, Homo sapien
gaagctctctattgtcctgacccca

SEQ ID NO: 3839132 - DNA, 25 bp, Homo sapien
acctgccacggacaaggccttgtgt

SEQ ID NO: 3839133 - DNA, 25 bp, Homo sapien
tgtatatccaataatagtgaaatgg

SEQ ID NO: 3839134 - DNA, 25 bp, Homo sapien
tgaaatggatcccactaattatgac

SEQ ID NO: 3839135 - DNA, 25 bp, Homo sapien
tttttgtaggtttcaggcacagaac

SEQ ID NO: 3839136 - DNA, 25 bp, Homo sapien
ttgacagtgccctcccatgcagtat

SEQ ID NO: 3839137 - DNA, 25 bp, Homo sapien
tgcagtatcgccacatttgacaatg

SEQ ID NO: 3839138 - DNA, 25 bp, Homo sapien
tggaacacgcatatcaacaacatac

SEQ ID NO: 3839139 - DNA, 25 bp, Homo sapien
atgagtgacggtgcccagccattcg

SEQ ID NO: 3839140 - DNA, 25 bp, Homo sapien
cagcttaggcgacagagccagactg

SEQ ID NO: 3839141 - DNA, 25 bp, Homo sapien
cccagctacttgggtggctgaggca

SEQ ID NO: 3839142 - DNA, 25 bp, Homo sapien
tggatgtggtggcagcacttgtagt

SEQ ID NO: 3839143 - DNA, 25 bp, Homo sapien
cttaggcgacagagccagactgtgt

SEQ ID NO: 3839144 - DNA, 25 bp, Homo sapien
catgtttatcttaacgtataacgat

SEQ ID NO: 3839145 - DNA, 25 bp, Homo sapien
aacttcttgagatggttacataatg

SEQ ID NO: 3839146 - DNA, 25 bp, Homo sapien
taatgtctaaatctgctggtgtaga

SEQ ID NO: 3839147 - DNA, 25 bp, Homo sapien
tacaagcgtgaagcattacatccaa

SEQ ID NO: 3839148 - DNA, 25 bp, Homo sapien
gcgcccagccttattataattgtta

SEQ ID NO: 3839149 - DNA, 25 bp, Homo sapien
tcaagagagacctcatcccattcag

SEQ ID NO: 3839150 - DNA, 25 bp, Homo sapien
tcgagagatcctccagcgtgagtct

SEQ ID NO: 3839151 - DNA, 25 bp, Homo sapien
gagacctcatcccattcagttgctt

SEQ ID NO: 3839152 - DNA, 25 bp, Homo sapien
taaacacacacaaactctcaagtgg

SEQ ID NO: 3839153 - DNA, 25 bp, Homo sapien
tctcaccaaaccaatcacaatacag

SEQ ID NO: 3839154 - DNA, 25 bp, Homo sapien
aagtggcctaattccctctcaccaa

SEQ ID NO: 3839155 - DNA, 25 bp, Homo sapien
gatataaattgtgaatgatgcatga

SEQ ID NO: 3839156 - DNA, 25 bp, Homo sapien
aggcaaggagcaaaaaggtatgtct

SEQ ID NO: 3839157 - DNA, 25 bp, Homo sapien
caaggagcaaaaaggtatgtcttcc

SEQ ID NO: 3839158 - DNA, 25 bp, Homo sapien
gaaggcaaggagcaaaaaggtatgt

SEQ ID NO: 3839159 - DNA, 25 bp, Homo sapien
tggaaggcaaggagcaaaaaggtat

SEQ ID NO: 3839160 - DNA, 25 bp, Homo sapien
ggctccagctgaaagaaagcccgtg

SEQ ID NO: 3839161 - DNA, 25 bp, Homo sapien
agctgaaagaaagcccgtgcagtca

SEQ ID NO: 3839162 - DNA, 25 bp, Homo sapien
cgtgcagtcatatcacgcgtaaaca

SEQ ID NO: 3839163 - DNA, 25 bp, Homo sapien
aaagcccgtgcagtcatatcacgcg

SEQ ID NO: 3839164 - DNA, 25 bp, Homo sapien
tgcagtagcatgatagttacaggaa

SEQ ID NO: 3839165 - DNA, 25 bp, Homo sapien
gcagtagcatgatagttacaggaaa

SEQ ID NO: 3839166 - DNA, 25 bp, Homo sapien
agtagcatgatagttacaggaaagg

SEQ ID NO: 3839167 - DNA, 25 bp, Homo sapien
cagtagcatgatagttacaggaaag

SEQ ID NO: 3839168 - DNA, 25 bp, Homo sapien
cacctggcctgaaacccagatttta

SEQ ID NO: 3839169 - DNA, 25 bp, Homo sapien
ttggagtgtaggagggcgatctcag

SEQ ID NO: 3839170 - DNA, 25 bp, Homo sapien
tctggaattcctgaggtcaagctgt

SEQ ID NO: 3839171 - DNA, 25 bp, Homo sapien
attcctgaggtcaagctgtctgccc

SEQ ID NO: 3839172 - DNA, 25 bp, Homo sapien
cctataaggcagaacgtaagacggt

SEQ ID NO: 3839173 - DNA, 25 bp, Homo sapien
taggaagcaaagtctatagggagct

SEQ ID NO: 3839174 - DNA, 25 bp, Homo sapien
tagggagctatataatagaggctgc

SEQ ID NO: 3839175 - DNA, 25 bp, Homo sapien
gattcatggcagattctaaagcaca

SEQ ID NO: 3839176 - DNA, 25 bp, Homo sapien
tcgaactcctgtctcacgtgtctgt

SEQ ID NO: 3839177 - DNA, 25 bp, Homo sapien
agagacatagagtttcaccagattg

SEQ ID NO: 3839178 - DNA, 25 bp, Homo sapien
agaggcctgacagtgtgatcttggc

SEQ ID NO: 3839179 - DNA, 25 bp, Homo sapien
gaactcctgtctcacgtgtctgtgt

SEQ ID NO: 3839180 - DNA, 25 bp, Homo sapien
gagacgcactaaacagtaaagggac

SEQ ID NO: 3839181 - DNA, 25 bp, Homo sapien
ggtctagtggcgaaggaggcaggta

SEQ ID NO: 3839182 - DNA, 25 bp, Homo sapien
gaaaatgggccctgagcgatcacca

SEQ ID NO: 3839183 - DNA, 25 bp, Homo sapien
tttcatggagcttctagtcaagcga

SEQ ID NO: 3839184 - DNA, 25 bp, Homo sapien
gattgtagattctggcagggaaaac

SEQ ID NO: 3839185 - DNA, 25 bp, Homo sapien
aaaactgacatcaaacacggcgacc

SEQ ID NO: 3839186 - DNA, 25 bp, Homo sapien
tgatcaaggagattgtagattctgg

SEQ ID NO: 3839187 - DNA, 25 bp, Homo sapien
acacggcgacccgacatagtgagac

SEQ ID NO: 3839188 - DNA, 25 bp, Homo sapien
cacattgcgctattcagtataaacc

SEQ ID NO: 3839189 - DNA, 25 bp, Homo sapien
tgtgtgaccaccaatacgatcgaga

SEQ ID NO: 3839190 - DNA, 25 bp, Homo sapien
gcccctgtcagcagttactgatttg

SEQ ID NO: 3839191 - DNA, 25 bp, Homo sapien
gcatgatatttttacggttcaccca

SEQ ID NO: 3839192 - DNA, 25 bp, Homo sapien
catgtgttcaatgtagacaatgcaa

SEQ ID NO: 3839193 - DNA, 25 bp, Homo sapien
ggagaaatgacttgtgccctaaaca

SEQ ID NO: 3839194 - DNA, 25 bp, Homo sapien
gaaatgccaaaaactcgagtcttta

SEQ ID NO: 3839195 - DNA, 25 bp, Homo sapien
tgctgtttatcaagcaatgctcagc

SEQ ID NO: 3839196 - DNA, 25 bp, Homo sapien
acagataaatacgaaactgccatca

SEQ ID NO: 3839197 - DNA, 25 bp, Homo sapien
agataaatacgaaactgccatcatc

SEQ ID NO: 3839198 - DNA, 25 bp, Homo sapien
gaaaaactgtttataccatcatcta

SEQ ID NO: 3839199 - DNA, 25 bp, Homo sapien
actactattcttgcgttatcataaa

SEQ ID NO: 3839200 - DNA, 25 bp, Homo sapien
tgccagacttgtggtaccaattata

SEQ ID NO: 3839201 - DNA, 25 bp, Homo sapien
ttaaggactttgtctgggtatggtg

SEQ ID NO: 3839202 - DNA, 25 bp, Homo sapien
tattcaggcccttaaatcgatatgt

SEQ ID NO: 3839203 - DNA, 25 bp, Homo sapien
ggattagaccaactggagaattgcc

SEQ ID NO: 3839204 - DNA, 25 bp, Homo sapien
gtatttagtactgtgctgaggagca

SEQ ID NO: 3839205 - DNA, 25 bp, Homo sapien
aagctggctgcgcttctccgggtat

SEQ ID NO: 3839206 - DNA, 25 bp, Homo sapien
ggctgcgcttctccgggtatttagt

SEQ ID NO: 3839207 - DNA, 25 bp, Homo sapien
gcttctccgggtatttagtactgtg

SEQ ID NO: 3839208 - DNA, 25 bp, Homo sapien
tgacctcaagttcccaccttgtgct

SEQ ID NO: 3839209 - DNA, 25 bp, Homo sapien
tcccaggtacaagctgttttcctgt

SEQ ID NO: 3839210 - DNA, 25 bp, Homo sapien
caagttcccaccttgtgcttctcaa

SEQ ID NO: 3839211 - DNA, 25 bp, Homo sapien
ttaaagacatagtttcactctgtct

SEQ ID NO: 3839212 - DNA, 25 bp, Homo sapien
cggcgcttggccatgtcgtgtcggg

SEQ ID NO: 3839213 - DNA, 25 bp, Homo sapien
aatgactggcaacccaggtgggtga

SEQ ID NO: 3839214 - DNA, 25 bp, Homo sapien
ggttcgggcggcgactcgcgcttct

SEQ ID NO: 3839215 - DNA, 25 bp, Homo sapien
ggaaggtaatgagccgcagagcccc

SEQ ID NO: 3839216 - DNA, 25 bp, Homo sapien
tagaaagtgggaaaactggcgcacg

SEQ ID NO: 3839217 - DNA, 25 bp, Homo sapien
ggatatccacctctcgatcttacta

SEQ ID NO: 3839218 - DNA, 25 bp, Homo sapien
aaaccaagggcacgcctgtgtgcgc

SEQ ID NO: 3839219 - DNA, 25 bp, Homo sapien
tggaagagaagtcggcgccccttca

SEQ ID NO: 3839220 - DNA, 25 bp, Homo sapien
ccggtgcaagccctgagatggcttc

SEQ ID NO: 3839221 - DNA, 25 bp, Homo sapien
agcagcatctggaccggtgcaagcc

SEQ ID NO: 3839222 - DNA, 25 bp, Homo sapien
cctggggtggcgtaggtctttggca

SEQ ID NO: 3839223 - DNA, 25 bp, Homo sapien
atctggaccggtgcaagccctgaga

SEQ ID NO: 3839224 - DNA, 25 bp, Homo sapien
gagtgggctgcgcagacccccgagg

SEQ ID NO: 3839225 - DNA, 25 bp, Homo sapien
gtgggctgcgcagacccccgagggc

SEQ ID NO: 3839226 - DNA, 25 bp, Homo sapien
agagccaccccctgtagaggggtgt

SEQ ID NO: 3839227 - DNA, 25 bp, Homo sapien
gtagaggggtgtccaaggtagggca

SEQ ID NO: 3839228 - DNA, 25 bp, Homo sapien
ccaagcgcataggtgttcgggaagt

SEQ ID NO: 3839229 - DNA, 25 bp, Homo sapien
aagcagaagtagccccctcctgttt

SEQ ID NO: 3839230 - DNA, 25 bp, Homo sapien
agctcctccatgccttgaaagcaga

SEQ ID NO: 3839231 - DNA, 25 bp, Homo sapien
tgtgggcctcaggggcttccacctc

SEQ ID NO: 3839232 - DNA, 25 bp, Homo sapien
ggataccctgatcggtaaggtagca

SEQ ID NO: 3839233 - DNA, 25 bp, Homo sapien
ataccctgatcggtaaggtagcagt

SEQ ID NO: 3839234 - DNA, 25 bp, Homo sapien
ctggataccctgatcggtaaggtag

SEQ ID NO: 3839235 - DNA, 25 bp, Homo sapien
taccctgatcggtaaggtagcagta

SEQ ID NO: 3839236 - DNA, 25 bp, Homo sapien
tgggatctggaatcaggattcctgg

SEQ ID NO: 3839237 - DNA, 25 bp, Homo sapien
gaagtggtgatgctagggagggctg

SEQ ID NO: 3839238 - DNA, 25 bp, Homo sapien
tggaagtggtgatgctagggagggc

SEQ ID NO: 3839239 - DNA, 25 bp, Homo sapien
atggaagtggtgatgctagggaggg

SEQ ID NO: 3839240 - DNA, 25 bp, Homo sapien
ggggccaggtcactccaccacctcc

SEQ ID NO: 3839241 - DNA, 25 bp, Homo sapien
cggctcggctgataaggacgcagca

SEQ ID NO: 3839242 - DNA, 25 bp, Homo sapien
tcggctgataaggacgcagcactgg

SEQ ID NO: 3839243 - DNA, 25 bp, Homo sapien
gctcggctgataaggacgcagcact

SEQ ID NO: 3839244 - DNA, 25 bp, Homo sapien
tccaggcaaacaggcaggagcaaga

SEQ ID NO: 3839245 - DNA, 25 bp, Homo sapien
aaacaggcaggagcaagagctggga

SEQ ID NO: 3839246 - DNA, 25 bp, Homo sapien
ttccaggcaaacaggcaggagcaag

SEQ ID NO: 3839247 - DNA, 25 bp, Homo sapien
aggcaaacaggcaggagcaagagct

SEQ ID NO: 3839248 - DNA, 25 bp, Homo sapien
ctcatctgggttccggaagggcaca

SEQ ID NO: 3839249 - DNA, 25 bp, Homo sapien
gatagttttacgctagagacctggg

SEQ ID NO: 3839250 - DNA, 25 bp, Homo sapien
gagagttcgttgttatggttccacc

SEQ ID NO: 3839251 - DNA, 25 bp, Homo sapien
cagagagctagctgccgtggtaaca

SEQ ID NO: 3839252 - DNA, 25 bp, Homo sapien
cacgaggactatgaccgccagcagg

SEQ ID NO: 3839253 - DNA, 25 bp, Homo sapien
cccgttacgcttgccgcctctgctc

SEQ ID NO: 3839254 - DNA, 25 bp, Homo sapien
cagagccacgaggactatgaccgcc

SEQ ID NO: 3839255 - DNA, 25 bp, Homo sapien
gagggccccagtccgccgcttctgc

SEQ ID NO: 3839256 - DNA, 25 bp, Homo sapien
ggcgagacttccgtctgccaaagaa

SEQ ID NO: 3839257 - DNA, 25 bp, Homo sapien
tgagcgtgggccgacggctagaccc

SEQ ID NO: 3839258 - DNA, 25 bp, Homo sapien
gagacttccgtctgccaaagaaagt

SEQ ID NO: 3839259 - DNA, 25 bp, Homo sapien
agcgtgggccgacggctagacccct

SEQ ID NO: 3839260 - DNA, 25 bp, Homo sapien
cgtctcccccttcgggctcatcagg

SEQ ID NO: 3839261 - DNA, 25 bp, Homo sapien
cccgtctcccccttcgggctcatca

SEQ ID NO: 3839262 - DNA, 25 bp, Homo sapien
ccccttcgggctcatcaggagctgg

SEQ ID NO: 3839263 - DNA, 25 bp, Homo sapien
tcccccttcgggctcatcaggagct

SEQ ID NO: 3839264 - DNA, 25 bp, Homo sapien
aaaaaggagattcgggtgaggatca

SEQ ID NO: 3839265 - DNA, 25 bp, Homo sapien
cctcatgaggattcagagtgaagag

SEQ ID NO: 3839266 - DNA, 25 bp, Homo sapien
cattcagtccacagacgttgagagg

SEQ ID NO: 3839267 - DNA, 25 bp, Homo sapien
gaggctggctgagattccggcctcc

SEQ ID NO: 3839268 - DNA, 25 bp, Homo sapien
cagctacagggcaagggtgctttac

SEQ ID NO: 3839269 - DNA, 25 bp, Homo sapien
cagactctggtcaacccagggtggg

SEQ ID NO: 3839270 - DNA, 25 bp, Homo sapien
tcagcagccgtttccaggaacaaga

SEQ ID NO: 3839271 - DNA, 25 bp, Homo sapien
taagtttggccgatggagactcagc

SEQ ID NO: 3839272 - DNA, 25 bp, Homo sapien
gaaagatcacaggcccgcctgagag

SEQ ID NO: 3839273 - DNA, 25 bp, Homo sapien
tctgagaactacacccagccagaaa

SEQ ID NO: 3839274 - DNA, 25 bp, Homo sapien
agcctacagtccatgtgccctggga

SEQ ID NO: 3839275 - DNA, 25 bp, Homo sapien
gccagggccagcctacagtccatgt

SEQ ID NO: 3839276 - DNA, 25 bp, Homo sapien
gatgacacgcacgttctcagcagtc

SEQ ID NO: 3839277 - DNA, 25 bp, Homo sapien
caagcatcgccaaatcctcagctct

SEQ ID NO: 3839278 - DNA, 25 bp, Homo sapien
gctacagacagagttagattttctg

SEQ ID NO: 3839279 - DNA, 25 bp, Homo sapien
gattttctgctatgtccaccccatc

SEQ ID NO: 3839280 - DNA, 25 bp, Homo sapien
tttgtcctcgggaaataccaactgc

SEQ ID NO: 3839281 - DNA, 25 bp, Homo sapien
tgctctcagccaccgcaagctctaa

SEQ ID NO: 3839282 - DNA, 25 bp, Homo sapien
ggtctcaaaggcagcaccattgagt

SEQ ID NO: 3839283 - DNA, 25 bp, Homo sapien
agctctaactcaacaacttcctctt

SEQ ID NO: 3839284 - DNA, 25 bp, Homo sapien
cagcgacgttcgttcggtgacagta

SEQ ID NO: 3839285 - DNA, 25 bp, Homo sapien
gggattttggacatggcctctgtca

SEQ ID NO: 3839286 - DNA, 25 bp, Homo sapien
tgcagtgagtccaaatagcaatcag

SEQ ID NO: 3839287 - DNA, 25 bp, Homo sapien
tttttcaggattcgcccaggacctg

SEQ ID NO: 3839288 - DNA, 25 bp, Homo sapien
gtgcctctcttttaacacttatatt

SEQ ID NO: 3839289 - DNA, 25 bp, Homo sapien
gcctgtgcctctcttttaacactta

SEQ ID NO: 3839290 - DNA, 25 bp, Homo sapien
cggcctgtgcctctcttttaacact

SEQ ID NO: 3839291 - DNA, 25 bp, Homo sapien
ctgtgcctctcttttaacacttata

SEQ ID NO: 3839292 - DNA, 25 bp, Homo sapien
tttcgccagggcaatgcgagccctt

SEQ ID NO: 3839293 - DNA, 25 bp, Homo sapien
tgccacagtacacatgcatgggaga

SEQ ID NO: 3839294 - DNA, 25 bp, Homo sapien
tgcacacacgcatggcttggtaggc

SEQ ID NO: 3839295 - DNA, 25 bp, Homo sapien
cttggtaggcttcacctgagagtta

SEQ ID NO: 3839296 - DNA, 25 bp, Homo sapien
tatgacaaaggccacgacacactct

SEQ ID NO: 3839297 - DNA, 25 bp, Homo sapien
tcatggaggatctgcaacatgccag

SEQ ID NO: 3839298 - DNA, 25 bp, Homo sapien
cattcaaatgcatattcatggagga

SEQ ID NO: 3839299 - DNA, 25 bp, Homo sapien
aaaagacatctattgtcgggcacgg

SEQ ID NO: 3839300 - DNA, 25 bp, Homo sapien
gaaaacatttgcgatgggtcctttg

SEQ ID NO: 3839301 - DNA, 25 bp, Homo sapien
catttgcgatgggtcctttgtttcc

SEQ ID NO: 3839302 - DNA, 25 bp, Homo sapien
agatcagcatggaaaacatttgcga

SEQ ID NO: 3839303 - DNA, 25 bp, Homo sapien
catggaaaacatttgcgatgggtcc

SEQ ID NO: 3839304 - DNA, 25 bp, Homo sapien
agatatttattgtatgaaattcgga

SEQ ID NO: 3839305 - DNA, 25 bp, Homo sapien
atttattgtatgaaattcggaaaat

SEQ ID NO: 3839306 - DNA, 25 bp, Homo sapien
gatatttattgtatgaaattcggaa

SEQ ID NO: 3839307 - DNA, 25 bp, Homo sapien
ttattgtatgaaattcggaaaatac

SEQ ID NO: 3839308 - DNA, 25 bp, Homo sapien
cctgggccaccagaacgatgctact

SEQ ID NO: 3839309 - DNA, 25 bp, Homo sapien
tcctaaggcgttttgcctgggccac

SEQ ID NO: 3839310 - DNA, 25 bp, Homo sapien
cagaacgatgctactcaccactctg

SEQ ID NO: 3839311 - DNA, 25 bp, Homo sapien
ctgcacggtggtcctaaggcgtttt

SEQ ID NO: 3839312 - DNA, 25 bp, Homo sapien
ggaagggatgcaagggtcggtggaa

SEQ ID NO: 3839313 - DNA, 25 bp, Homo sapien
taggatcccggtgaggtgcgatgag

SEQ ID NO: 3839314 - DNA, 25 bp, Homo sapien
ggaagaagagccagggacttggcac

SEQ ID NO: 3839315 - DNA, 25 bp, Homo sapien
catcactagcagagagcggaaggaa

SEQ ID NO: 3839316 - DNA, 25 bp, Homo sapien
tcccattagctggtcaaaagcagac

SEQ ID NO: 3839317 - DNA, 25 bp, Homo sapien
gatatttccagacctgaccctagaa

SEQ ID NO: 3839318 - DNA, 25 bp, Homo sapien
gcagtcttgttctggccaatggagt

SEQ ID NO: 3839319 - DNA, 25 bp, Homo sapien
gggactgtatgtgcatgcctccacc

SEQ ID NO: 3839320 - DNA, 25 bp, Homo sapien
catcaagctgtcagccggcccttcc

SEQ ID NO: 3839321 - DNA, 25 bp, Homo sapien
agggcccatcaagctgtcagccggc

SEQ ID NO: 3839322 - DNA, 25 bp, Homo sapien
gggagggcccatcaagctgtcagcc

SEQ ID NO: 3839323 - DNA, 25 bp, Homo sapien
atcaagctgtcagccggcccttccc

SEQ ID NO: 3839324 - DNA, 25 bp, Homo sapien
ctgctcaggaccaaggctcccagag

SEQ ID NO: 3839325 - DNA, 25 bp, Homo sapien
gctgctcaggaccaaggctcccaga

SEQ ID NO: 3839326 - DNA, 25 bp, Homo sapien
tgacgggcggcagcagcagcgccag

SEQ ID NO: 3839327 - DNA, 25 bp, Homo sapien
ggtgacgggcggcagcagcagcgcc

SEQ ID NO: 3839328 - DNA, 25 bp, Homo sapien
ctgccagggtgacgggcggcagcag

SEQ ID NO: 3839329 - DNA, 25 bp, Homo sapien
acgggcggcagcagcagcgccaggc

SEQ ID NO: 3839330 - DNA, 25 bp, Homo sapien
gaccaaggctgcgtagttgagccct

SEQ ID NO: 3839331 - DNA, 25 bp, Homo sapien
cttggcagttgagttgggtaaatat

SEQ ID NO: 3839332 - DNA, 25 bp, Homo sapien
agcactggcaatgccactgcagcgg

SEQ ID NO: 3839333 - DNA, 25 bp, Homo sapien
taaatatggcatcgaagaaaggctg

SEQ ID NO: 3839334 - DNA, 25 bp, Homo sapien
caccggcggccaccacatggttatc

SEQ ID NO: 3839335 - DNA, 25 bp, Homo sapien
accggcggccaccacatggttatcc

SEQ ID NO: 3839336 - DNA, 25 bp, Homo sapien
ccaccggcggccaccacatggttat

SEQ ID NO: 3839337 - DNA, 25 bp, Homo sapien
agcttcgggtggaccatgaacttgg

SEQ ID NO: 3839338 - DNA, 25 bp, Homo sapien
gacatttgaaaagcttcgggtggac

SEQ ID NO: 3839339 - DNA, 25 bp, Homo sapien
gagggcgagggtgacgatagggccc

SEQ ID NO: 3839340 - DNA, 25 bp, Homo sapien
agggtgacgatagggcccagcactg

SEQ ID NO: 3839341 - DNA, 25 bp, Homo sapien
tgggcagccgggaggacaagggtga

SEQ ID NO: 3839342 - DNA, 25 bp, Homo sapien
ctgggcagccgggaggacaagggtg

SEQ ID NO: 3839343 - DNA, 25 bp, Homo sapien
gggcagccgggaggacaagggtgag

SEQ ID NO: 3839344 - DNA, 25 bp, Homo sapien
gaagttgtccagcaggacaaggtcg

SEQ ID NO: 3839345 - DNA, 25 bp, Homo sapien
gcttgaagttgtccagcaggacaag

SEQ ID NO: 3839346 - DNA, 25 bp, Homo sapien
agtcagccgcctgtctggccgcccg

SEQ ID NO: 3839347 - DNA, 25 bp, Homo sapien
cttccaccttcagagtgaagtcagc

SEQ ID NO: 3839348 - DNA, 25 bp, Homo sapien
ctgcgggacacaagccaaggggagg

SEQ ID NO: 3839349 - DNA, 25 bp, Homo sapien
acactcgggaactgggccttcagca

SEQ ID NO: 3839350 - DNA, 25 bp, Homo sapien
tgacgtctatgtgcggcccgcagaa

SEQ ID NO: 3839351 - DNA, 25 bp, Homo sapien
catccccatggagatgacgtctatg

SEQ ID NO: 3839352 - DNA, 25 bp, Homo sapien
gccacactcgggaactgggccttca

SEQ ID NO: 3839353 - DNA, 25 bp, Homo sapien
agtggattttgggcactggagccac

SEQ ID NO: 3839354 - DNA, 25 bp, Homo sapien
ctagtggattttgggcactggagcc

SEQ ID NO: 3839355 - DNA, 25 bp, Homo sapien
tagtggattttgggcactggagcca

SEQ ID NO: 3839356 - DNA, 25 bp, Homo sapien
tgaggagccacgttaacccatggcc

SEQ ID NO: 3839357 - DNA, 25 bp, Homo sapien
gctcaagctagtgccaaatgtgccc

SEQ ID NO: 3839358 - DNA, 25 bp, Homo sapien
cattggccactgaccctaaagatgt

SEQ ID NO: 3839359 - DNA, 25 bp, Homo sapien
taaagatgtgtgacccagagggtcc

SEQ ID NO: 3839360 - DNA, 25 bp, Homo sapien
tatgtgctcattatcaccgcagaac

SEQ ID NO: 3839361 - DNA, 25 bp, Homo sapien
gtttagggtatcaccaaaggcagtg

SEQ ID NO: 3839362 - DNA, 25 bp, Homo sapien
tccttcttactgtgggactggcccc

SEQ ID NO: 3839363 - DNA, 25 bp, Homo sapien
ggtcatgatatctcaagcaagcggg

SEQ ID NO: 3839364 - DNA, 25 bp, Homo sapien
tcctaaactgcgcttaaatgttccc

SEQ ID NO: 3839365 - DNA, 25 bp, Homo sapien
cactcattgctcctaaactgcgctt

SEQ ID NO: 3839366 - DNA, 25 bp, Homo sapien
aactgcgcttaaatgttcccctgtc

SEQ ID NO: 3839367 - DNA, 25 bp, Homo sapien
tcattgctcctaaactgcgcttaaa

SEQ ID NO: 3839368 - DNA, 25 bp, Homo sapien
gtttaccatctgtacaattatttgc

SEQ ID NO: 3839369 - DNA, 25 bp, Homo sapien
cagccttgaatattagtgattttgc

SEQ ID NO: 3839370 - DNA, 25 bp, Homo sapien
atactgcctgggcaggtttccaact

SEQ ID NO: 3839371 - DNA, 25 bp, Homo sapien
ttcctgggctcgagagagccactca

SEQ ID NO: 3839372 - DNA, 25 bp, Homo sapien
cttctctgtctctccagaatgttct

SEQ ID NO: 3839373 - DNA, 25 bp, Homo sapien
tttctggtccctcttgcttctctgt

SEQ ID NO: 3839374 - DNA, 25 bp, Homo sapien
cctttctggtccctcttgcttctct

SEQ ID NO: 3839375 - DNA, 25 bp, Homo sapien
tgtctctccagaatgttctttttca

SEQ ID NO: 3839376 - DNA, 25 bp, Homo sapien
gcagctgagattacaagtgcccgtc

SEQ ID NO: 3839377 - DNA, 25 bp, Homo sapien
tcaggtgacttgcccaccttgacct

SEQ ID NO: 3839378 - DNA, 25 bp, Homo sapien
cctcaggtgacttgcccaccttgac

SEQ ID NO: 3839379 - DNA, 25 bp, Homo sapien
gagattacaagtgcccgtcaccatg

SEQ ID NO: 3839380 - DNA, 25 bp, Homo sapien
ggcatccgccaacacgcctaataaa

SEQ ID NO: 3839381 - DNA, 25 bp, Homo sapien
tgagcattcgggaaacagagggttt

SEQ ID NO: 3839382 - DNA, 25 bp, Homo sapien
cgagaattcaagtgcacctgtgggc

SEQ ID NO: 3839383 - DNA, 25 bp, Homo sapien
ttcctatgtggaagggtacgccgag

SEQ ID NO: 3839384 - DNA, 25 bp, Homo sapien
acagtttcagatgcaaagcagcccc

SEQ ID NO: 3839385 - DNA, 25 bp, Homo sapien
gtttcagatgcaaagcagccccctg

SEQ ID NO: 3839386 - DNA, 25 bp, Homo sapien
ctgacagtttcagatgcaaagcagc

SEQ ID NO: 3839387 - DNA, 25 bp, Homo sapien
tgacagtttcagatgcaaagcagcc

SEQ ID NO: 3839388 - DNA, 25 bp, Homo sapien
agaagggctaggagagcgactgtca

SEQ ID NO: 3839389 - DNA, 25 bp, Homo sapien
agggctaggagagcgactgtcaaca

SEQ ID NO: 3839390 - DNA, 25 bp, Homo sapien
aagggctaggagagcgactgtcaac

SEQ ID NO: 3839391 - DNA, 25 bp, Homo sapien
gggctaggagagcgactgtcaacat

SEQ ID NO: 3839392 - DNA, 25 bp, Homo sapien
tagtatgtgttgactcggacccgga

SEQ ID NO: 3839393 - DNA, 25 bp, Homo sapien
gccgtccaactggttgccagaatga

SEQ ID NO: 3839394 - DNA, 25 bp, Homo sapien
ctccactataggaggaagacctggc

SEQ ID NO: 3839395 - DNA, 25 bp, Homo sapien
tggttgccagaatgagagaatcgct

SEQ ID NO: 3839396 - DNA, 25 bp, Homo sapien
ccagaccggccactgatgaagcgga

SEQ ID NO: 3839397 - DNA, 25 bp, Homo sapien
tggcatcgatgagagaaccagaccg

SEQ ID NO: 3839398 - DNA, 25 bp, Homo sapien
tttcccaaaagacagatagcggccc

SEQ ID NO: 3839399 - DNA, 25 bp, Homo sapien
ggatcactgattccccagggtgcag

SEQ ID NO: 3839400 - DNA, 25 bp, Homo sapien
tttttttattgagccatttggatgg

SEQ ID NO: 3839401 - DNA, 25 bp, Homo sapien
gttagtgataagggagttcttactc

SEQ ID NO: 3839402 - DNA, 25 bp, Homo sapien
agttcttactcctcatcacagtgcc

SEQ ID NO: 3839403 - DNA, 25 bp, Homo sapien
ccatttggatgggggttagtgataa

SEQ ID NO: 3839404 - DNA, 25 bp, Homo sapien
gataaattatagcacaaagcccagg

SEQ ID NO: 3839405 - DNA, 25 bp, Homo sapien
gaagtgagatttgcacgtccccggc

SEQ ID NO: 3839406 - DNA, 25 bp, Homo sapien
aatgagttcagcctagtgtcagcct

SEQ ID NO: 3839407 - DNA, 25 bp, Homo sapien
gaacaaaggctaatggtcctggcca

SEQ ID NO: 3839408 - DNA, 25 bp, Homo sapien
tagtgtgtgaacctgcctgatctga

SEQ ID NO: 3839409 - DNA, 25 bp, Homo sapien
gacatattgctagccccgtattggc

SEQ ID NO: 3839410 - DNA, 25 bp, Homo sapien
cactgcacatgaaggctggttgagc

SEQ ID NO: 3839411 - DNA, 25 bp, Homo sapien
gatagtcccaatgcaagccaatggc

SEQ ID NO: 3839412 - DNA, 25 bp, Homo sapien
tactgcaggagaccgggtcatattt

SEQ ID NO: 3839413 - DNA, 25 bp, Homo sapien
agagtggccatttgtaaacctcctc

SEQ ID NO: 3839414 - DNA, 25 bp, Homo sapien
tgatgagggcctatgttcagctgtg

SEQ ID NO: 3839415 - DNA, 25 bp, Homo sapien
aacctcctccaaggaatgcaattct

SEQ ID NO: 3839416 - DNA, 25 bp, Homo sapien
ggttccaccaatcaagactacgcgc

SEQ ID NO: 3839417 - DNA, 25 bp, Homo sapien
cagtccttaagagtacagcagtccg

SEQ ID NO: 3839418 - DNA, 25 bp, Homo sapien
tataacttggcactcagcacgtcgg

SEQ ID NO: 3839419 - DNA, 25 bp, Homo sapien
ccgttgatgtctggaagcgcgctgc

SEQ ID NO: 3839420 - DNA, 25 bp, Homo sapien
ctcgcgtcgcctctgctgcgtcgag

SEQ ID NO: 3839421 - DNA, 25 bp, Homo sapien
gtcgcctctgctgcgtcgagccgcc

SEQ ID NO: 3839422 - DNA, 25 bp, Homo sapien
ctctgctgcgtcgagccgcccgcgg

SEQ ID NO: 3839423 - DNA, 25 bp, Homo sapien
gcgtcgcctctgctgcgtcgagccg

SEQ ID NO: 3839424 - DNA, 25 bp, Homo sapien
tgagatcgccgccgctgaagctgcc

SEQ ID NO: 3839425 - DNA, 25 bp, Homo sapien
ctgagatcgccgccgctgaagctgc

SEQ ID NO: 3839426 - DNA, 25 bp, Homo sapien
tcgccgccgctgaagctgccgccat

SEQ ID NO: 3839427 - DNA, 25 bp, Homo sapien
agatcgccgccgctgaagctgccgc

SEQ ID NO: 3839428 - DNA, 25 bp, Homo sapien
ccccctctccccgcccctgcgccat

SEQ ID NO: 3839429 - DNA, 25 bp, Homo sapien
tccccctctccccgcccctgcgcca

SEQ ID NO: 3839430 - DNA, 25 bp, Homo sapien
tttctaaccccaacacctggcgcag

SEQ ID NO: 3839431 - DNA, 25 bp, Homo sapien
caacacctggcgcagagtaggccct

SEQ ID NO: 3839432 - DNA, 25 bp, Homo sapien
tggcgcagagtaggccctcaagaag

SEQ ID NO: 3839433 - DNA, 25 bp, Homo sapien
taaccccaacacctggcgcagagta

SEQ ID NO: 3839434 - DNA, 25 bp, Homo sapien
gaggtggacgacgagtagctccaat

SEQ ID NO: 3839435 - DNA, 25 bp, Homo sapien
ttgcttagccgacagcgaccagctc

SEQ ID NO: 3839436 - DNA, 25 bp, Homo sapien
gacgagtagctccaatcttgcttag

SEQ ID NO: 3839437 - DNA, 25 bp, Homo sapien
agctccaatcttgcttagccgacag

SEQ ID NO: 3839438 - DNA, 25 bp, Homo sapien
tctcctggtggttcctccagttagc

SEQ ID NO: 3839439 - DNA, 25 bp, Homo sapien
tgttccatccacaaatggccgcagt

SEQ ID NO: 3839440 - DNA, 25 bp, Homo sapien
ggatcacttgctcccgctgttccat

SEQ ID NO: 3839441 - DNA, 25 bp, Homo sapien
cagttagcaatctctagagagcagc

SEQ ID NO: 3839442 - DNA, 25 bp, Homo sapien
tgctgagtactcctctccccataga

SEQ ID NO: 3839443 - DNA, 25 bp, Homo sapien
cagctcctgtgggtccataggcaag

SEQ ID NO: 3839444 - DNA, 25 bp, Homo sapien
cttccagcaagtgccttaggatggg

SEQ ID NO: 3839445 - DNA, 25 bp, Homo sapien
gaacctgcatagatgtcctgctgag

SEQ ID NO: 3839446 - DNA, 25 bp, Homo sapien
taagacatggtgacagaaagggccc

SEQ ID NO: 3839447 - DNA, 25 bp, Homo sapien
tcccttgtgagctgcaggaggtcca

SEQ ID NO: 3839448 - DNA, 25 bp, Homo sapien
aggtccatgagagcccgcgggatca

SEQ ID NO: 3839449 - DNA, 25 bp, Homo sapien
cctggtagatctctaggtaagacat

SEQ ID NO: 3839450 - DNA, 25 bp, Homo sapien
ggtctcaccttacctccctgctaca

SEQ ID NO: 3839451 - DNA, 25 bp, Homo sapien
tgaccctttgttgctcctctcccaa

SEQ ID NO: 3839452 - DNA, 25 bp, Homo sapien
aggtctcaccttacctccctgctac

SEQ ID NO: 3839453 - DNA, 25 bp, Homo sapien
gtctcaccttacctccctgctacag

SEQ ID NO: 3839454 - DNA, 25 bp, Homo sapien
gaagtgccgctcaaaatcagcaaag

SEQ ID NO: 3839455 - DNA, 25 bp, Homo sapien
cggcagtcttctcggattaccaggt

SEQ ID NO: 3839456 - DNA, 25 bp, Homo sapien
tccgatttcgactggctggcaggaa

SEQ ID NO: 3839457 - DNA, 25 bp, Homo sapien
gggtggctcctacagtccgatttcg

SEQ ID NO: 3839458 - DNA, 25 bp, Homo sapien
cgagggaggccctgattcagcgcat

SEQ ID NO: 3839459 - DNA, 25 bp, Homo sapien
caataggcgagtgagcttgctgtcc

SEQ ID NO: 3839460 - DNA, 25 bp, Homo sapien
gctgtcccgataaggtacacgaggg

SEQ ID NO: 3839461 - DNA, 25 bp, Homo sapien
gacccagccaagtcaatcaggtaga

SEQ ID NO: 3839462 - DNA, 25 bp, Homo sapien
ctcaactgctattccccaccccaca

SEQ ID NO: 3839463 - DNA, 25 bp, Homo sapien
tcaactgctattccccaccccacag

SEQ ID NO: 3839464 - DNA, 25 bp, Homo sapien
agtgggtgggtcagaagcccagcct

SEQ ID NO: 3839465 - DNA, 25 bp, Homo sapien
gtgggtgggtcagaagcccagcctt

SEQ ID NO: 3839466 - DNA, 25 bp, Homo sapien
tggtaaaaggccgattgatcacctc

SEQ ID NO: 3839467 - DNA, 25 bp, Homo sapien
tgtctaggtagaagcgtctctcagg

SEQ ID NO: 3839468 - DNA, 25 bp, Homo sapien
caataaggatactgtgggctgagcc

SEQ ID NO: 3839469 - DNA, 25 bp, Homo sapien
gctgcaggctctcattggtaaaagg

SEQ ID NO: 3839470 - DNA, 25 bp, Homo sapien
tttgcctctggtggaccaagcaatt

SEQ ID NO: 3839471 - DNA, 25 bp, Homo sapien
ctctggtggaccaagcaattctttc

SEQ ID NO: 3839472 - DNA, 25 bp, Homo sapien
tcagggcctcgggctctctttgcct

SEQ ID NO: 3839473 - DNA, 25 bp, Homo sapien
cctctggtggaccaagcaattcttt

SEQ ID NO: 3839474 - DNA, 25 bp, Homo sapien
ggatctgacgggcattgcagctctg

SEQ ID NO: 3839475 - DNA, 25 bp, Homo sapien
tctgctcaaggatctgacgggcatt

SEQ ID NO: 3839476 - DNA, 25 bp, Homo sapien
tcaggaaggggatacacccaaggcc

SEQ ID NO: 3839477 - DNA, 25 bp, Homo sapien
gctgctaagccatacatcaggaagg

SEQ ID NO: 3839478 - DNA, 25 bp, Homo sapien
ccgtgcctagccagggttgaattca

SEQ ID NO: 3839479 - DNA, 25 bp, Homo sapien
gatcagaacatacgtgggcaaacac

SEQ ID NO: 3839480 - DNA, 25 bp, Homo sapien
ttcctatgctgtgaactggctcctg

SEQ ID NO: 3839481 - DNA, 25 bp, Homo sapien
ggcctgttcaagcagtcctgactga

SEQ ID NO: 3839482 - DNA, 25 bp, Homo sapien
tgaaatccaccgaagacctcagctg

SEQ ID NO: 3839483 - DNA, 25 bp, Homo sapien
tatcctgtagctccagaacctaatg

SEQ ID NO: 3839484 - DNA, 25 bp, Homo sapien
gaaatcaggcgaacacttgagtgcc

SEQ ID NO: 3839485 - DNA, 25 bp, Homo sapien
tatgagagacctaagacactgccct

SEQ ID NO: 3839486 - DNA, 25 bp, Homo sapien
tctactgaggaaatcaagagaccat

SEQ ID NO: 3839487 - DNA, 25 bp, Homo sapien
acggtccaagctgaggaggcgctcc

SEQ ID NO: 3839488 - DNA, 25 bp, Homo sapien
cagcatggccgggtccatgctgctt

SEQ ID NO: 3839489 - DNA, 25 bp, Homo sapien
ccaagctgaggaggcgctccagcat

SEQ ID NO: 3839490 - DNA, 25 bp, Homo sapien
gaggcaagcagacggtccaagctga

SEQ ID NO: 3839491 - DNA, 25 bp, Homo sapien
attagcaccatccgctctcgctttg

SEQ ID NO: 3839492 - DNA, 25 bp, Homo sapien
ccgctctcgctttggggtactcaac

SEQ ID NO: 3839493 - DNA, 25 bp, Homo sapien
cattagcaccatccgctctcgcttt

SEQ ID NO: 3839494 - DNA, 25 bp, Homo sapien
tcattagcaccatccgctctcgctt

SEQ ID NO: 3839495 - DNA, 25 bp, Homo sapien
gaaaggatcagggagatgtgatcca

SEQ ID NO: 3839496 - DNA, 25 bp, Homo sapien
tggaaaggatcagggagatgtgatc

SEQ ID NO: 3839497 - DNA, 25 bp, Homo sapien
aggatcagggagatgtgatccagac

SEQ ID NO: 3839498 - DNA, 25 bp, Homo sapien
ctgttggaaaggatcagggagatgt

SEQ ID NO: 3839499 - DNA, 25 bp, Homo sapien
tccagttctttttgcttcgtcttaa

SEQ ID NO: 3839500 - DNA, 25 bp, Homo sapien
ccagttctttttgcttcgtcttaag

SEQ ID NO: 3839501 - DNA, 25 bp, Homo sapien
cagttctttttgcttcgtcttaagc

SEQ ID NO: 3839502 - DNA, 25 bp, Homo sapien
tgactgtgcgatgtgaaaggggccg

SEQ ID NO: 3839503 - DNA, 25 bp, Homo sapien
gagcattgtgggacaatggttctcc

SEQ ID NO: 3839504 - DNA, 25 bp, Homo sapien
ggccggagcattgtgggacaatggt

SEQ ID NO: 3839505 - DNA, 25 bp, Homo sapien
aaaggggccggagcattgtgggaca

SEQ ID NO: 3839506 - DNA, 25 bp, Homo sapien
ttagctgtaggggcatcaccacagc

SEQ ID NO: 3839507 - DNA, 25 bp, Homo sapien
gctgtaggggcatcaccacagcctt

SEQ ID NO: 3839508 - DNA, 25 bp, Homo sapien
agctgtaggggcatcaccacagcct

SEQ ID NO: 3839509 - DNA, 25 bp, Homo sapien
tagctgtaggggcatcaccacagcc

SEQ ID NO: 3839510 - DNA, 25 bp, Homo sapien
tccggcctttattcttcaggatgtg

SEQ ID NO: 3839511 - DNA, 25 bp, Homo sapien
tcaggatgtggatctcggcatttgg

SEQ ID NO: 3839512 - DNA, 25 bp, Homo sapien
attcttcaggatgtggatctcggca

SEQ ID NO: 3839513 - DNA, 25 bp, Homo sapien
tctcttccggcctttattcttcagg

SEQ ID NO: 3839514 - DNA, 25 bp, Homo sapien
aggtgtagcctaagcccccagctac

SEQ ID NO: 3839515 - DNA, 25 bp, Homo sapien
gggctccaggtgtagcctaagcccc

SEQ ID NO: 3839516 - DNA, 25 bp, Homo sapien
tgggctccaggtgtagcctaagccc

SEQ ID NO: 3839517 - DNA, 25 bp, Homo sapien
agcctaagcccccagctactttcac

SEQ ID NO: 3839518 - DNA, 25 bp, Homo sapien
tacacagtggaacatccgctctgcg

SEQ ID NO: 3839519 - DNA, 25 bp, Homo sapien
cttgtagagggtagaagccaggcta

SEQ ID NO: 3839520 - DNA, 25 bp, Homo sapien
ggtctgttagtagctggcggccatc

SEQ ID NO: 3839521 - DNA, 25 bp, Homo sapien
tctgcgaggtacatccacatcactg

SEQ ID NO: 3839522 - DNA, 25 bp, Homo sapien
tgacacgcagggcagccaagtgctt

SEQ ID NO: 3839523 - DNA, 25 bp, Homo sapien
tgtcaagtgtgtccaaaatcccgcc

SEQ ID NO: 3839524 - DNA, 25 bp, Homo sapien
ggtaatattagcacccttctcatgg

SEQ ID NO: 3839525 - DNA, 25 bp, Homo sapien
tatgcaactagtgaaagagaggtac

SEQ ID NO: 3839526 - DNA, 25 bp, Homo sapien
gattagctgggccttcttcgggcca

SEQ ID NO: 3839527 - DNA, 25 bp, Homo sapien
ccagtattttttggcgcccatgagc

SEQ ID NO: 3839528 - DNA, 25 bp, Homo sapien
ctgaagactgcggagatctcgggct

SEQ ID NO: 3839529 - DNA, 25 bp, Homo sapien
ccatgagccagtagctccgggctga

SEQ ID NO: 3839530 - DNA, 25 bp, Homo sapien
ctggcgggacaggatcgatagggga

SEQ ID NO: 3839531 - DNA, 25 bp, Homo sapien
gcgggacaggatcgataggggacag

SEQ ID NO: 3839532 - DNA, 25 bp, Homo sapien
acaggatcgataggggacagggtct

SEQ ID NO: 3839533 - DNA, 25 bp, Homo sapien
ggacaggatcgataggggacagggt

SEQ ID NO: 3839534 - DNA, 25 bp, Homo sapien
tgtttccccgttatgccctccacgc

SEQ ID NO: 3839535 - DNA, 25 bp, Homo sapien
cccgttatgccctccacgcgttcca

SEQ ID NO: 3839536 - DNA, 25 bp, Homo sapien
ccgttatgccctccacgcgttccag

SEQ ID NO: 3839537 - DNA, 25 bp, Homo sapien
tccatctgtttccccgttatgccct

SEQ ID NO: 3839538 - DNA, 25 bp, Homo sapien
cagcgacgttagagaggggcgcggg

SEQ ID NO: 3839539 - DNA, 25 bp, Homo sapien
gggagggagacagcgacgttagaga

SEQ ID NO: 3839540 - DNA, 25 bp, Homo sapien
ggcgcggggcgcaggacaggcagag

SEQ ID NO: 3839541 - DNA, 25 bp, Homo sapien
agggagacagcgacgttagagaggg

SEQ ID NO: 3839542 - DNA, 25 bp, Homo sapien
gccggcggcgagacccaggatgttt

SEQ ID NO: 3839543 - DNA, 25 bp, Homo sapien
tcaggaggcgccacagcgctggccg

SEQ ID NO: 3839544 - DNA, 25 bp, Homo sapien
ggaggcgccacagcgctggccggcg

SEQ ID NO: 3839545 - DNA, 25 bp, Homo sapien
cggcggcgagacccaggatgtttgc

SEQ ID NO: 3839546 - DNA, 25 bp, Homo sapien
caaaaatttgaaaaggcggagtgag

SEQ ID NO: 3839547 - DNA, 25 bp, Homo sapien
caaaaactgtatttacacaacacgg

SEQ ID NO: 3839548 - DNA, 25 bp, Homo sapien
agacccctgagacggctgctgattg

SEQ ID NO: 3839549 - DNA, 25 bp, Homo sapien
gccagcggccgttatttcgcgcgca

SEQ ID NO: 3839550 - DNA, 25 bp, Homo sapien
cgctgagtcgttccccgaagatggc

SEQ ID NO: 3839551 - DNA, 25 bp, Homo sapien
tccgctttttgcgtcctgcaggcca

SEQ ID NO: 3839552 - DNA, 25 bp, Homo sapien
ttgctgggatccatggcggagggag

SEQ ID NO: 3839553 - DNA, 25 bp, Homo sapien
cagttgctgggatccatggcggagg

SEQ ID NO: 3839554 - DNA, 25 bp, Homo sapien
tccagttgctgggatccatggcgga

SEQ ID NO: 3839555 - DNA, 25 bp, Homo sapien
gctccagttgctgggatccatggcg

SEQ ID NO: 3839556 - DNA, 25 bp, Homo sapien
gagggaggaaaagagggcgccttgc

SEQ ID NO: 3839557 - DNA, 25 bp, Homo sapien
cgccgcccgcgcaccccggccggcg

SEQ ID NO: 3839558 - DNA, 25 bp, Homo sapien
cgcgggccgccccgccgcccgcgca

SEQ ID NO: 3839559 - DNA, 25 bp, Homo sapien
gaggaaaagagggcgccttgcgggc

SEQ ID NO: 3839560 - DNA, 25 bp, Homo sapien
ggccggccgggctgggccgcgccga

SEQ ID NO: 3839561 - DNA, 25 bp, Homo sapien
cggccgggctgggccgcgccgaacg

SEQ ID NO: 3839562 - DNA, 25 bp, Homo sapien
ccgggctgggccgcgccgaacgcat

SEQ ID NO: 3839563 - DNA, 25 bp, Homo sapien
gccggccgggctgggccgcgccgaa

SEQ ID NO: 3839564 - DNA, 25 bp, Homo sapien
cagcggggcccccggggctcagcgg

SEQ ID NO: 3839565 - DNA, 25 bp, Homo sapien
cgcagcggggcccccggggctcagc

SEQ ID NO: 3839566 - DNA, 25 bp, Homo sapien
gcagcggggcccccggggctcagcg

SEQ ID NO: 3839567 - DNA, 25 bp, Homo sapien
gccgcagcggggcccccggggctca

SEQ ID NO: 3839568 - DNA, 25 bp, Homo sapien
ctgaggtggcgggaaggagttcatg

SEQ ID NO: 3839569 - DNA, 25 bp, Homo sapien
tggcgggaaggagttcatgaggccg

SEQ ID NO: 3839570 - DNA, 25 bp, Homo sapien
aaggagttcatgaggccgcccaccc

SEQ ID NO: 3839571 - DNA, 25 bp, Homo sapien
cgggaaggagttcatgaggccgccc

SEQ ID NO: 3839572 - DNA, 25 bp, Homo sapien
ctggaatggactctgggcgcagccc

SEQ ID NO: 3839573 - DNA, 25 bp, Homo sapien
gctcagccccgacctgcagggggtt

SEQ ID NO: 3839574 - DNA, 25 bp, Homo sapien
aaagaagcgggactggagctcagcc

SEQ ID NO: 3839575 - DNA, 25 bp, Homo sapien
cctgggaggcaaagaagcgggactg

SEQ ID NO: 3839576 - DNA, 25 bp, Homo sapien
gcttcagggccgctgtgtccaccgt

SEQ ID NO: 3839577 - DNA, 25 bp, Homo sapien
ccgctgtgtccaccgtagaggcggc

SEQ ID NO: 3839578 - DNA, 25 bp, Homo sapien
ggcgagcaccgggagcaagtccacc

SEQ ID NO: 3839579 - DNA, 25 bp, Homo sapien
ccgcggcgatagtggcggcggaggc

SEQ ID NO: 3839580 - DNA, 25 bp, Homo sapien
cttggcgcacagagcgcagatgtag

SEQ ID NO: 3839581 - DNA, 25 bp, Homo sapien
ccggagattgtagccgttcttgaac

SEQ ID NO: 3839582 - DNA, 25 bp, Homo sapien
tgtagggccccttgctctttgtctt

SEQ ID NO: 3839583 - DNA, 25 bp, Homo sapien
tcccgtgtggatggcttcgtgcctc

SEQ ID NO: 3839584 - DNA, 25 bp, Homo sapien
catgcggtccttgcgcttgaagcgc

SEQ ID NO: 3839585 - DNA, 25 bp, Homo sapien
tcatgtgagcgcacgtggtagctca

SEQ ID NO: 3839586 - DNA, 25 bp, Homo sapien
tctcgtccgagtgcgacagcttgtg

SEQ ID NO: 3839587 - DNA, 25 bp, Homo sapien
catctcgcaggcatggttcttccgg

SEQ ID NO: 3839588 - DNA, 25 bp, Homo sapien
ccccacggcctagcgggcggccgag

SEQ ID NO: 3839589 - DNA, 25 bp, Homo sapien
ctccctccgccctgggagtggctcc

SEQ ID NO: 3839590 - DNA, 25 bp, Homo sapien
ctcctcgacaaaggaccaccccttg

SEQ ID NO: 3839591 - DNA, 25 bp, Homo sapien
tccctccgccctgggagtggctccc

SEQ ID NO: 3839592 - DNA, 25 bp, Homo sapien
tcgacaaaggaccaccccttgctcc

SEQ ID NO: 3839593 - DNA, 25 bp, Homo sapien
acaggcctttccgaggatccctgcg

SEQ ID NO: 3839594 - DNA, 25 bp, Homo sapien
ttagggcggaggtggtgcgccccaa

SEQ ID NO: 3839595 - DNA, 25 bp, Homo sapien
cacagcgacacttaagcaggaaatc

SEQ ID NO: 3839596 - DNA, 25 bp, Homo sapien
ggtggtgcgccccaaatccaccaaa

SEQ ID NO: 3839597 - DNA, 25 bp, Homo sapien
ctgacgtgactgttgaggtgatccg

SEQ ID NO: 3839598 - DNA, 25 bp, Homo sapien
ttctgttgagtgcacttgtctgacg

SEQ ID NO: 3839599 - DNA, 25 bp, Homo sapien
agggccgttctgttgagtgcacttg

SEQ ID NO: 3839600 - DNA, 25 bp, Homo sapien
gcacttgtctgacgtgactgttgag

SEQ ID NO: 3839601 - DNA, 25 bp, Homo sapien
gactgactcagacagctaccatgag

SEQ ID NO: 3839602 - DNA, 25 bp, Homo sapien
tgactcagacagctaccatgaggat

SEQ ID NO: 3839603 - DNA, 25 bp, Homo sapien
agagactgactcagacagctaccat

SEQ ID NO: 3839604 - DNA, 25 bp, Homo sapien
actcagacagctaccatgaggatca

SEQ ID NO: 3839605 - DNA, 25 bp, Homo sapien
gagagttaaagcttggtgggctggg

SEQ ID NO: 3839606 - DNA, 25 bp, Homo sapien
tcacaggagagttaaagcttggtgg

SEQ ID NO: 3839607 - DNA, 25 bp, Homo sapien
gtcacaggagagttaaagcttggtg

SEQ ID NO: 3839608 - DNA, 25 bp, Homo sapien
caggagagttaaagcttggtgggct

SEQ ID NO: 3839609 - DNA, 25 bp, Homo sapien
gaccctggctgtgcaccttcatgtg

SEQ ID NO: 3839610 - DNA, 25 bp, Homo sapien
tcatgtggtccgaaatataagccga

SEQ ID NO: 3839611 - DNA, 25 bp, Homo sapien
ccgcagccgatccttcgtggcgaaa

SEQ ID NO: 3839612 - DNA, 25 bp, Homo sapien
tcctcgtgtcgtactgtgtgcgccc

SEQ ID NO: 3839613 - DNA, 25 bp, Homo sapien
gccctgtcctcctcccacggtatcc

SEQ ID NO: 3839614 - DNA, 25 bp, Homo sapien
cctcccacggtatccttggtagcct

SEQ ID NO: 3839615 - DNA, 25 bp, Homo sapien
tgatctcctaggcgggggatgccct

SEQ ID NO: 3839616 - DNA, 25 bp, Homo sapien
ggcgggggtcagccaggcggagacc

SEQ ID NO: 3839617 - DNA, 25 bp, Homo sapien
gcttgcacaggatgcggtcagcccg

SEQ ID NO: 3839618 - DNA, 25 bp, Homo sapien
caccgcgtggatgcgcaggtatgct

SEQ ID NO: 3839619 - DNA, 25 bp, Homo sapien
gggtcttgcagtgcacgctgcacag

SEQ ID NO: 3839620 - DNA, 25 bp, Homo sapien
ccccagatgggtctgcatgtggccg

SEQ ID NO: 3839621 - DNA, 25 bp, Homo sapien
gccattggacaaacctcaccagtac

SEQ ID NO: 3839622 - DNA, 25 bp, Homo sapien
tccgcccccgagagggagcccacag

SEQ ID NO: 3839623 - DNA, 25 bp, Homo sapien
gccgccattggacaaacctcaccag

SEQ ID NO: 3839624 - DNA, 25 bp, Homo sapien
gctgccgccgccattggacaaacct

SEQ ID NO: 3839625 - DNA, 25 bp, Homo sapien
gattctcaagtaggacgatgttcag

SEQ ID NO: 3839626 - DNA, 25 bp, Homo sapien
gaagaggctcacaagtccctgggaa

SEQ ID NO: 3839627 - DNA, 25 bp, Homo sapien
tatgaaggtacaacctttgccggcc

SEQ ID NO: 3839628 - DNA, 25 bp, Homo sapien
gagaggagcttgtaccaagggactc

SEQ ID NO: 3839629 - DNA, 25 bp, Homo sapien
acaggaacacgatgacatggccagg

SEQ ID NO: 3839630 - DNA, 25 bp, Homo sapien
gggccacaacttcttctgtcgtggg

SEQ ID NO: 3839631 - DNA, 25 bp, Homo sapien
tattgtaatggggtccgcgcaaaag

SEQ ID NO: 3839632 - DNA, 25 bp, Homo sapien
tggccagggccacaacttcttctgt

SEQ ID NO: 3839633 - DNA, 25 bp, Homo sapien
cgccaacggtcaccgggattcctgg

SEQ ID NO: 3839634 - DNA, 25 bp, Homo sapien
tcaccgggattcctggaagagacgg

SEQ ID NO: 3839635 - DNA, 25 bp, Homo sapien
ctccaggagagacgcctccttctta

SEQ ID NO: 3839636 - DNA, 25 bp, Homo sapien
gagagacgcctccttcttaagtccc

SEQ ID NO: 3839637 - DNA, 25 bp, Homo sapien
ctctcccgtgtgctcatcccctcct

SEQ ID NO: 3839638 - DNA, 25 bp, Homo sapien
gccggcctccggacagctcccgctg

SEQ ID NO: 3839639 - DNA, 25 bp, Homo sapien
agcccgggagggagcaagtcagcta

SEQ ID NO: 3839640 - DNA, 25 bp, Homo sapien
ggagggagcaagtcagctagggagg

SEQ ID NO: 3839641 - DNA, 25 bp, Homo sapien
cgcagcctcagtctgcccgggtctc

SEQ ID NO: 3839642 - DNA, 25 bp, Homo sapien
cagcctcagtctgcccgggtctcac

SEQ ID NO: 3839643 - DNA, 25 bp, Homo sapien
gcagcctcagtctgcccgggtctca

SEQ ID NO: 3839644 - DNA, 25 bp, Homo sapien
ccgcagcctcagtctgcccgggtct

SEQ ID NO: 3839645 - DNA, 25 bp, Homo sapien
ggaatagcagagacagcggcaaacc

SEQ ID NO: 3839646 - DNA, 25 bp, Homo sapien
gagagagcccctatggggaggatgg

SEQ ID NO: 3839647 - DNA, 25 bp, Homo sapien
gatggaatagcagagacagcggcaa

SEQ ID NO: 3839648 - DNA, 25 bp, Homo sapien
cccctatggggaggatggaatagca

SEQ ID NO: 3839649 - DNA, 25 bp, Homo sapien
aatggccaggcccttcgcctggaac

SEQ ID NO: 3839650 - DNA, 25 bp, Homo sapien
caggcccttcgcctggaaccttggg

SEQ ID NO: 3839651 - DNA, 25 bp, Homo sapien
ttcagaatggccaggcccttcgcct

SEQ ID NO: 3839652 - DNA, 25 bp, Homo sapien
tcgcctggaaccttgggactctcct

SEQ ID NO: 3839653 - DNA, 25 bp, Homo sapien
gccgcagtggtgtttggacctggct

SEQ ID NO: 3839654 - DNA, 25 bp, Homo sapien
ccctgagtccacaggggccgcagtg

SEQ ID NO: 3839655 - DNA, 25 bp, Homo sapien
ctctggctggtctggtacccctgct

SEQ ID NO: 3839656 - DNA, 25 bp, Homo sapien
gtctggtacccctgctaggacctgg

SEQ ID NO: 3839657 - DNA, 25 bp, Homo sapien
gtcttcggggctgcagttggccttt

SEQ ID NO: 3839658 - DNA, 25 bp, Homo sapien
cggggctgcagttggcctttgattc

SEQ ID NO: 3839659 - DNA, 25 bp, Homo sapien
ctgcagttggcctttgattcccctc

SEQ ID NO: 3839660 - DNA, 25 bp, Homo sapien
gggctgcagttggcctttgattccc

SEQ ID NO: 3839661 - DNA, 25 bp, Homo sapien
cagcctggacccctggtctgcagtg

SEQ ID NO: 3839662 - DNA, 25 bp, Homo sapien
tggacccctggtctgcagtggcctc

SEQ ID NO: 3839663 - DNA, 25 bp, Homo sapien
gactccagcctggacccctggtctg

SEQ ID NO: 3839664 - DNA, 25 bp, Homo sapien
gcctggacccctggtctgcagtggc

SEQ ID NO: 3839665 - DNA, 25 bp, Homo sapien
agctctggttgaagggctggcttgg

SEQ ID NO: 3839666 - DNA, 25 bp, Homo sapien
cttgggggtaggctgggaatctggc

SEQ ID NO: 3839667 - DNA, 25 bp, Homo sapien
ggtagggagctctggttgaagggct

SEQ ID NO: 3839668 - DNA, 25 bp, Homo sapien
tggccgggggtctggttggggagca

SEQ ID NO: 3839669 - DNA, 25 bp, Homo sapien
ccctacactctcagacagaatctca

SEQ ID NO: 3839670 - DNA, 25 bp, Homo sapien
cctacactctcagacagaatctcag

SEQ ID NO: 3839671 - DNA, 25 bp, Homo sapien
tttttgagggtggtgagtgaggctc

SEQ ID NO: 3839672 - DNA, 25 bp, Homo sapien
gctacctcggggagatcctggatgc

SEQ ID NO: 3839673 - DNA, 25 bp, Homo sapien
catgacagcataagcgaaggccacg

SEQ ID NO: 3839674 - DNA, 25 bp, Homo sapien
cactgtgtgcccttctcattcgatc

SEQ ID NO: 3839675 - DNA, 25 bp, Homo sapien
gggtggcggctcaggctacctcggg

SEQ ID NO: 3839676 - DNA, 25 bp, Homo sapien
gaaggcatgattactccagaggctc

SEQ ID NO: 3839677 - DNA, 25 bp, Homo sapien
tgtgtgacacgtgtttccatatccc

SEQ ID NO: 3839678 - DNA, 25 bp, Homo sapien
caggtggaaaagtcatccagaagag

SEQ ID NO: 3839679 - DNA, 25 bp, Homo sapien
cagaggctctattgcagcgctggcg

SEQ ID NO: 3839680 - DNA, 25 bp, Homo sapien
cgcctaagttgatgacgcaggaggc

SEQ ID NO: 3839681 - DNA, 25 bp, Homo sapien
tgcttaagagcttggctacccggcc

SEQ ID NO: 3839682 - DNA, 25 bp, Homo sapien
cagcgccacgatgcttaagagcttg

SEQ ID NO: 3839683 - DNA, 25 bp, Homo sapien
cctaagttgatgacgcaggaggcga

SEQ ID NO: 3839684 - DNA, 25 bp, Homo sapien
caggggcaggggttagtaaagctgc

SEQ ID NO: 3839685 - DNA, 25 bp, Homo sapien
caggggttagtaaagctgcccttgc

SEQ ID NO: 3839686 - DNA, 25 bp, Homo sapien
gagacaaaggagaggtaaggaggac

SEQ ID NO: 3839687 - DNA, 25 bp, Homo sapien
agtaaagctgcccttgccaaccctt

SEQ ID NO: 3839688 - DNA, 25 bp, Homo sapien
aaacaaggccgctcaggctcccttg

SEQ ID NO: 3839689 - DNA, 25 bp, Homo sapien
caggcctacagttggcagaggagcc

SEQ ID NO: 3839690 - DNA, 25 bp, Homo sapien
gaggcaggcctacagttggcagagg

SEQ ID NO: 3839691 - DNA, 25 bp, Homo sapien
ggacagaagctgtaaacaaggccgc

SEQ ID NO: 3839692 - DNA, 25 bp, Homo sapien
aggggatgcaggcattagtgcaggg

SEQ ID NO: 3839693 - DNA, 25 bp, Homo sapien
ccggaggggatgcaggcattagtgc

SEQ ID NO: 3839694 - DNA, 25 bp, Homo sapien
gggccaagaggccggaggggatgca

SEQ ID NO: 3839695 - DNA, 25 bp, Homo sapien
ggccaagaggccggaggggatgcag

SEQ ID NO: 3839696 - DNA, 25 bp, Homo sapien
ttccagagtgcagggaggtttccag

SEQ ID NO: 3839697 - DNA, 25 bp, Homo sapien
cagagttggggaggtgttcagggag

SEQ ID NO: 3839698 - DNA, 25 bp, Homo sapien
ggtttccagagtgcagggaggtttc

SEQ ID NO: 3839699 - DNA, 25 bp, Homo sapien
tgttcagggaggtttccagagtgca

SEQ ID NO: 3839700 - DNA, 25 bp, Homo sapien
actgagggttgagagatgccaagac

SEQ ID NO: 3839701 - DNA, 25 bp, Homo sapien
agaggactgagggttgagagatgcc

SEQ ID NO: 3839702 - DNA, 25 bp, Homo sapien
gaggactgagggttgagagatgcca

SEQ ID NO: 3839703 - DNA, 25 bp, Homo sapien
gagggttgagagatgccaagacaat

SEQ ID NO: 3839704 - DNA, 25 bp, Homo sapien
ttcaagaaagaaactcgcggactgg

SEQ ID NO: 3839705 - DNA, 25 bp, Homo sapien
caattttgcagagtaaacggtgacg

SEQ ID NO: 3839706 - DNA, 25 bp, Homo sapien
aaaataattatagagcgcggcgccc

SEQ ID NO: 3839707 - DNA, 25 bp, Homo sapien
gcagcatccggcatacaaaaaggga

SEQ ID NO: 3839708 - DNA, 25 bp, Homo sapien
gaccctgcgacgacagatactggag

SEQ ID NO: 3839709 - DNA, 25 bp, Homo sapien
atgccgtacgcacctggagctaaga

SEQ ID NO: 3839710 - DNA, 25 bp, Homo sapien
cagacctttcagttgtgggccacgt

SEQ ID NO: 3839711 - DNA, 25 bp, Homo sapien
gccacgtcaagtcagatgccgtacg

SEQ ID NO: 3839712 - DNA, 25 bp, Homo sapien
ccgtactggccgcagtgtctccatg

SEQ ID NO: 3839713 - DNA, 25 bp, Homo sapien
ccgccgtactggccgcagtgtctcc

SEQ ID NO: 3839714 - DNA, 25 bp, Homo sapien
gccgtactggccgcagtgtctccat

SEQ ID NO: 3839715 - DNA, 25 bp, Homo sapien
cgtactggccgcagtgtctccatgg

SEQ ID NO: 3839716 - DNA, 25 bp, Homo sapien
tttggcctccggctcctcatcggat

SEQ ID NO: 3839717 - DNA, 25 bp, Homo sapien
agcagttcatagagccgctggattt

SEQ ID NO: 3839718 - DNA, 25 bp, Homo sapien
tcggatctctcctcttcgctctggg

SEQ ID NO: 3839719 - DNA, 25 bp, Homo sapien
tgcagctccagagtaccgtgggcag

SEQ ID NO: 3839720 - DNA, 25 bp, Homo sapien
tcaaaatcaaattccgtgggcatgt

SEQ ID NO: 3839721 - DNA, 25 bp, Homo sapien
gtctccggtcaatcagggagtcctt

SEQ ID NO: 3839722 - DNA, 25 bp, Homo sapien
ctggggtgcgtctccggtcaatcag

SEQ ID NO: 3839723 - DNA, 25 bp, Homo sapien
aatcaaattccgtgggcatgtgtgg

SEQ ID NO: 3839724 - DNA, 25 bp, Homo sapien
gaagagactactcccggaggatcgg

SEQ ID NO: 3839725 - DNA, 25 bp, Homo sapien
cgagtccaggctgaagaggtccctc

SEQ ID NO: 3839726 - DNA, 25 bp, Homo sapien
tccctcccggtacgaaggatctgct

SEQ ID NO: 3839727 - DNA, 25 bp, Homo sapien
cagtatttccgctgccgagggaaga

SEQ ID NO: 3839728 - DNA, 25 bp, Homo sapien
tctttcccgcaacgtgctgtttggg

SEQ ID NO: 3839729 - DNA, 25 bp, Homo sapien
ggctccagcaggtacggacactgca

SEQ ID NO: 3839730 - DNA, 25 bp, Homo sapien
tccaggtctctgaataggtgttcaa

SEQ ID NO: 3839731 - DNA, 25 bp, Homo sapien
ttcagtccaggtctctgaataggtg

SEQ ID NO: 3839732 - DNA, 25 bp, Homo sapien
ggttctcattttatcctccgggctg

SEQ ID NO: 3839733 - DNA, 25 bp, Homo sapien
gagggcacctctacccatctggctt

SEQ ID NO: 3839734 - DNA, 25 bp, Homo sapien
tagctgcaacaaacgcctcagatgg

SEQ ID NO: 3839735 - DNA, 25 bp, Homo sapien
catgggtttctaccttggagccagc

SEQ ID NO: 3839736 - DNA, 25 bp, Homo sapien
acagttatcaaaggacggagccgga

SEQ ID NO: 3839737 - DNA, 25 bp, Homo sapien
tcaaggctacatacagagggctgtc

SEQ ID NO: 3839738 - DNA, 25 bp, Homo sapien
tttcctgtaagttgggccagcgccc

SEQ ID NO: 3839739 - DNA, 25 bp, Homo sapien
cctgcatggaggagtaagaaaccct

SEQ ID NO: 3839740 - DNA, 25 bp, Homo sapien
cctcgccatctatggaggtgagcca

SEQ ID NO: 3839741 - DNA, 25 bp, Homo sapien
tgctcccttggagggttctccgcag

SEQ ID NO: 3839742 - DNA, 25 bp, Homo sapien
gatttgaactctagaaggccgtgca

SEQ ID NO: 3839743 - DNA, 25 bp, Homo sapien
gggaaaccctttgactcaggcagca

SEQ ID NO: 3839744 - DNA, 25 bp, Homo sapien
tggctggttgatcccatactggaca

SEQ ID NO: 3839745 - DNA, 25 bp, Homo sapien
gactgcccgggcttacaactctgat

SEQ ID NO: 3839746 - DNA, 25 bp, Homo sapien
tgctgttgggactagaaccctggtg

SEQ ID NO: 3839747 - DNA, 25 bp, Homo sapien
gacaatgaatcctttagggccacaa

SEQ ID NO: 3839748 - DNA, 25 bp, Homo sapien
ctgaatcctgagtagtttcacccag

SEQ ID NO: 3839749 - DNA, 25 bp, Homo sapien
ggtaggtgggggagacgacacagga

SEQ ID NO: 3839750 - DNA, 25 bp, Homo sapien
tggtaggtgggggagacgacacagg

SEQ ID NO: 3839751 - DNA, 25 bp, Homo sapien
tcctaagcccagggctcacaagaag

SEQ ID NO: 3839752 - DNA, 25 bp, Homo sapien
ctaagcccagggctcacaagaagat

SEQ ID NO: 3839753 - DNA, 25 bp, Homo sapien
aagcccagggctcacaagaagatga

SEQ ID NO: 3839754 - DNA, 25 bp, Homo sapien
ggtgactcctaagcccagggctcac

SEQ ID NO: 3839755 - DNA, 25 bp, Homo sapien
gggatgcggatgatgaactcttcag

SEQ ID NO: 3839756 - DNA, 25 bp, Homo sapien
tccacacgggacacgttgctgttct

SEQ ID NO: 3839757 - DNA, 25 bp, Homo sapien
tctcattgtcctgccggatgtaggt

SEQ ID NO: 3839758 - DNA, 25 bp, Homo sapien
ggatgtaggtctttggcccgacctc

SEQ ID NO: 3839759 - DNA, 25 bp, Homo sapien
tggcgaagccgaacttgccctgtga

SEQ ID NO: 3839760 - DNA, 25 bp, Homo sapien
ttggccactgtgcagtagtgacgtg

SEQ ID NO: 3839761 - DNA, 25 bp, Homo sapien
gaacttgccctgtgacatcaaacag

SEQ ID NO: 3839762 - DNA, 25 bp, Homo sapien
gtcagcgtggcgaagccgaacttgc

SEQ ID NO: 3839763 - DNA, 25 bp, Homo sapien
cctcaaaatcaagcagcgcctttag

SEQ ID NO: 3839764 - DNA, 25 bp, Homo sapien
atcaagcagcgcctttagatggagg

SEQ ID NO: 3839765 - DNA, 25 bp, Homo sapien
aggtccctcgaaaagccactcatct

SEQ ID NO: 3839766 - DNA, 25 bp, Homo sapien
cagaaccacctgcaggggtgtgatg

SEQ ID NO: 3839767 - DNA, 25 bp, Homo sapien
tggcctgaatgatctccacgacctc

SEQ ID NO: 3839768 - DNA, 25 bp, Homo sapien
cctggttctgcctgatgatggtggc

SEQ ID NO: 3839769 - DNA, 25 bp, Homo sapien
tccttgcgggccctgagccgcagag

SEQ ID NO: 3839770 - DNA, 25 bp, Homo sapien
cctctccttgccgtcccggtcccag

SEQ ID NO: 3839771 - DNA, 25 bp, Homo sapien
gaaaagccacatccgcatggtcatg

SEQ ID NO: 3839772 - DNA, 25 bp, Homo sapien
aatcaggtaagtcatggccactgcc

SEQ ID NO: 3839773 - DNA, 25 bp, Homo sapien
gtcacattttccagcccaagtggaa

SEQ ID NO: 3839774 - DNA, 25 bp, Homo sapien
tgcccacagctcatggtgaaggtga

SEQ ID NO: 3839775 - DNA, 25 bp, Homo sapien
gggattgacagatttcataggcaaa

SEQ ID NO: 3839776 - DNA, 25 bp, Homo sapien
ggattgacagatttcataggcaaaa

SEQ ID NO: 3839777 - DNA, 25 bp, Homo sapien
ttttccgtaaggatgacggcgtcca

SEQ ID NO: 3839778 - DNA, 25 bp, Homo sapien
caccaaatccagaacctcctcaaac

SEQ ID NO: 3839779 - DNA, 25 bp, Homo sapien
cctcaaacaccgctgggaggtacgc

SEQ ID NO: 3839780 - DNA, 25 bp, Homo sapien
ggtacgcccctactgtggtgaccag

SEQ ID NO: 3839781 - DNA, 25 bp, Homo sapien
tctcttttactctcatgccattcta

SEQ ID NO: 3839782 - DNA, 25 bp, Homo sapien
cattctctgccactcggagggttcc

SEQ ID NO: 3839783 - DNA, 25 bp, Homo sapien
ttttactctcatgccattctaccac

SEQ ID NO: 3839784 - DNA, 25 bp, Homo sapien
tctgccactcggagggttccctagc

SEQ ID NO: 3839785 - DNA, 25 bp, Homo sapien
cctcagcctcctgagtacagctggg

SEQ ID NO: 3839786 - DNA, 25 bp, Homo sapien
attacaggtgggtgacaccatgccc

SEQ ID NO: 3839787 - DNA, 25 bp, Homo sapien
cagcctcccaaaatgctaggattac

SEQ ID NO: 3839788 - DNA, 25 bp, Homo sapien
ttacaggtgggtgacaccatgccca

SEQ ID NO: 3839789 - DNA, 25 bp, Homo sapien
tccgacagggtcgagaatcacgcag

SEQ ID NO: 3839790 - DNA, 25 bp, Homo sapien
tgaagtcccggaagttccgccgagc

SEQ ID NO: 3839791 - DNA, 25 bp, Homo sapien
cagctgattcttgccatccggtccg

SEQ ID NO: 3839792 - DNA, 25 bp, Homo sapien
tggacatctggcacgtgggcctctg

SEQ ID NO: 3839793 - DNA, 25 bp, Homo sapien
ctcacttgtttacgtagtgcccaag

SEQ ID NO: 3839794 - DNA, 25 bp, Homo sapien
tttgcagataaactattccaggagc

SEQ ID NO: 3839795 - DNA, 25 bp, Homo sapien
tgcagataaactattccaggagcat

SEQ ID NO: 3839796 - DNA, 25 bp, Homo sapien
ccaggagcatggcagtactcacttg

SEQ ID NO: 3839797 - DNA, 25 bp, Homo sapien
tagctcactatacactccacttcct

SEQ ID NO: 3839798 - DNA, 25 bp, Homo sapien
gttgtagcacgtatgtcattatttt

SEQ ID NO: 3839799 - DNA, 25 bp, Homo sapien
tgttgtagcacgtatgtcattattt

SEQ ID NO: 3839800 - DNA, 25 bp, Homo sapien
catagctcactatacactccacttc

SEQ ID NO: 3839801 - DNA, 25 bp, Homo sapien
tcgttctcgtctagagggatggcct

SEQ ID NO: 3839802 - DNA, 25 bp, Homo sapien
tggtccccagcctggtgtgagacct

SEQ ID NO: 3839803 - DNA, 25 bp, Homo sapien
ctgcacatagatgccctcgttctcg

SEQ ID NO: 3839804 - DNA, 25 bp, Homo sapien
tccggtcttgacatcctgcacatag

SEQ ID NO: 3839805 - DNA, 25 bp, Homo sapien
cgggctcgcttctctcggtagtcgt

SEQ ID NO: 3839806 - DNA, 25 bp, Homo sapien
tcgtacacctgcaccgcagcgttgt

SEQ ID NO: 3839807 - DNA, 25 bp, Homo sapien
taggtgcttccaatcacagcgcgca

SEQ ID NO: 3839808 - DNA, 25 bp, Homo sapien
tcctgggtcagcatgtaggtgcttc

SEQ ID NO: 3839809 - DNA, 25 bp, Homo sapien
ggacaacactgtgaactgctcctca

SEQ ID NO: 3839810 - DNA, 25 bp, Homo sapien
tggtgatgacgtctgtgaagaagtc

SEQ ID NO: 3839811 - DNA, 25 bp, Homo sapien
ccagctgagagggacaacactgtga

SEQ ID NO: 3839812 - DNA, 25 bp, Homo sapien
tgcagcctggcatgatccgccgttt

SEQ ID NO: 3839813 - DNA, 25 bp, Homo sapien
gggtccttccggtcattcacctcaa

SEQ ID NO: 3839814 - DNA, 25 bp, Homo sapien
tacaaagtctggcactgaaaagagc

SEQ ID NO: 3839815 - DNA, 25 bp, Homo sapien
aagagcttggccgtctcttgggggt

SEQ ID NO: 3839816 - DNA, 25 bp, Homo sapien
tcttgggggtccttccggtcattca

SEQ ID NO: 3839817 - DNA, 25 bp, Homo sapien
aaagacagcagtgcgaatgatgcgg

SEQ ID NO: 3839818 - DNA, 25 bp, Homo sapien
tgatgcgggctgagttcttatggaa

SEQ ID NO: 3839819 - DNA, 25 bp, Homo sapien
tggtgatctcgatggccagctggac

SEQ ID NO: 3839820 - DNA, 25 bp, Homo sapien
gcttccgaggtctcaaagccaaaga

SEQ ID NO: 3839821 - DNA, 25 bp, Homo sapien
cagtggcctgccatgggcattatag

SEQ ID NO: 3839822 - DNA, 25 bp, Homo sapien
gtcacctgatctgttgggtagggaa

SEQ ID NO: 3839823 - DNA, 25 bp, Homo sapien
gatgccaggttatccagttcccagc

SEQ ID NO: 3839824 - DNA, 25 bp, Homo sapien
gggcattataggcagccgagctccc

SEQ ID NO: 3839825 - DNA, 25 bp, Homo sapien
gcttctgactggtccaggatcttct

SEQ ID NO: 3839826 - DNA, 25 bp, Homo sapien
tccagctccaaaagttccttgcgag

SEQ ID NO: 3839827 - DNA, 25 bp, Homo sapien
aggatcttctgccgctcaagccggc

SEQ ID NO: 3839828 - DNA, 25 bp, Homo sapien
aaagttccttgcgagctttctcggc

SEQ ID NO: 3839829 - DNA, 25 bp, Homo sapien
cctccgcacgggactcggcctccgc

SEQ ID NO: 3839830 - DNA, 25 bp, Homo sapien
gcttggcctgcagcacggacccttc

SEQ ID NO: 3839831 - DNA, 25 bp, Homo sapien
ctccgcacgggactcggcctccgcc

SEQ ID NO: 3839832 - DNA, 25 bp, Homo sapien
ttggcctgcagcacggacccttctc

SEQ ID NO: 3839833 - DNA, 25 bp, Homo sapien
agaccagttccagctctcggacctt

SEQ ID NO: 3839834 - DNA, 25 bp, Homo sapien
catagaccagttccagctctcggac

SEQ ID NO: 3839835 - DNA, 25 bp, Homo sapien
tagaccagttccagctctcggacct

SEQ ID NO: 3839836 - DNA, 25 bp, Homo sapien
ccagttccagctctcggaccttctg

SEQ ID NO: 3839837 - DNA, 25 bp, Homo sapien
cagcaaggtccctgatggtgctggg

SEQ ID NO: 3839838 - DNA, 25 bp, Homo sapien
ccacagcaaggtccctgatggtgct

SEQ ID NO: 3839839 - DNA, 25 bp, Homo sapien
cagccacagcaaggtccctgatggt

SEQ ID NO: 3839840 - DNA, 25 bp, Homo sapien
ccagccacagcaaggtccctgatgg

SEQ ID NO: 3839841 - DNA, 25 bp, Homo sapien
tcggtgatgagggttgatttcaggc

SEQ ID NO: 3839842 - DNA, 25 bp, Homo sapien
caaaggctgtgttgaagaggttgat

SEQ ID NO: 3839843 - DNA, 25 bp, Homo sapien
agcccaaaggctgtgttgaagaggt

SEQ ID NO: 3839844 - DNA, 25 bp, Homo sapien
gtgatgagggttgatttcaggccca

SEQ ID NO: 3839845 - DNA, 25 bp, Homo sapien
gggcccactggccacccttctgccc

SEQ ID NO: 3839846 - DNA, 25 bp, Homo sapien
gctgggcccactggccacccttctg

SEQ ID NO: 3839847 - DNA, 25 bp, Homo sapien
ctgggcccactggccacccttctgc

SEQ ID NO: 3839848 - DNA, 25 bp, Homo sapien
gggctgggcccactggccacccttc

SEQ ID NO: 3839849 - DNA, 25 bp, Homo sapien
tacaggcaccacgtggttgtctcca

SEQ ID NO: 3839850 - DNA, 25 bp, Homo sapien
aggcaccacgtggttgtctccagga

SEQ ID NO: 3839851 - DNA, 25 bp, Homo sapien
gcgcagtacaggcaccacgtggttg

SEQ ID NO: 3839852 - DNA, 25 bp, Homo sapien
ttagcgcagtacaggcaccacgtgg

SEQ ID NO: 3839853 - DNA, 25 bp, Homo sapien
gaaacttccattgtattaatcagga

SEQ ID NO: 3839854 - DNA, 25 bp, Homo sapien
aaacttccattgtattaatcaggag

SEQ ID NO: 3839855 - DNA, 25 bp, Homo sapien
cagaaacttccattgtattaatcag

SEQ ID NO: 3839856 - DNA, 25 bp, Homo sapien
cccagaaacttccattgtattaatc

SEQ ID NO: 3839857 - DNA, 25 bp, Homo sapien
ccaagaagaagtgacgctggagccc

SEQ ID NO: 3839858 - DNA, 25 bp, Homo sapien
tcctggcgggacttcactatttgac

SEQ ID NO: 3839859 - DNA, 25 bp, Homo sapien
caggtttcctgaaaggcgggagtca

SEQ ID NO: 3839860 - DNA, 25 bp, Homo sapien
tcagcctctctttggtgacgtcacg

SEQ ID NO: 3839861 - DNA, 25 bp, Homo sapien
ttcgggccccaaactcccctgctgc

SEQ ID NO: 3839862 - DNA, 25 bp, Homo sapien
cttcgggccccaaactcccctgctg

SEQ ID NO: 3839863 - DNA, 25 bp, Homo sapien
cacacgcctggctgagaccaggagt

SEQ ID NO: 3839864 - DNA, 25 bp, Homo sapien
taagagaagtaatatgccgagattg

SEQ ID NO: 3839865 - DNA, 25 bp, Homo sapien
gagattgtgccttcattagtgctgg

SEQ ID NO: 3839866 - DNA, 25 bp, Homo sapien
gtggcacacgcctgcctcttgctaa

SEQ ID NO: 3839867 - DNA, 25 bp, Homo sapien
tgttcgtgcccaacctcatcggtga

SEQ ID NO: 3839868 - DNA, 25 bp, Homo sapien
tctccaattttgcaacgacgggcgc

SEQ ID NO: 3839869 - DNA, 25 bp, Homo sapien
ggttatgcccggattgtcttcgcca

SEQ ID NO: 3839870 - DNA, 25 bp, Homo sapien
tggacgctttcgatggacacgctgc

SEQ ID NO: 3839871 - DNA, 25 bp, Homo sapien
ctccaggtgcctccttgagggcagt

SEQ ID NO: 3839872 - DNA, 25 bp, Homo sapien
ccctccaggtgcctccttgagggca

SEQ ID NO: 3839873 - DNA, 25 bp, Homo sapien
tccaggtgcctccttgagggcagtg

SEQ ID NO: 3839874 - DNA, 25 bp, Homo sapien
cctccaggtgcctccttgagggcag

SEQ ID NO: 3839875 - DNA, 25 bp, Homo sapien
accttgggctactcggcaaaaggag

SEQ ID NO: 3839876 - DNA, 25 bp, Homo sapien
taaggacctctggtataggtcgtgg

SEQ ID NO: 3839877 - DNA, 25 bp, Homo sapien
caaaaggagagacgtggaggcctaa

SEQ ID NO: 3839878 - DNA, 25 bp, Homo sapien
tgtcgctaccggacgctataaaacc

SEQ ID NO: 3839879 - DNA, 25 bp, Homo sapien
cccctcattccccatcggagtggac

SEQ ID NO: 3839880 - DNA, 25 bp, Homo sapien
attccccatcggagtggacgccatc

SEQ ID NO: 3839881 - DNA, 25 bp, Homo sapien
ctcattccccatcggagtggacgcc

SEQ ID NO: 3839882 - DNA, 25 bp, Homo sapien
cattccccatcggagtggacgccat

SEQ ID NO: 3839883 - DNA, 25 bp, Homo sapien
cacagggttcaagtggcagcaagca

SEQ ID NO: 3839884 - DNA, 25 bp, Homo sapien
ggatatctgagtcgcttggtcttgt

SEQ ID NO: 3839885 - DNA, 25 bp, Homo sapien
tctgcactgatctgggacaggtatt

SEQ ID NO: 3839886 - DNA, 25 bp, Homo sapien
tattcctcagaacgagataacgaag

SEQ ID NO: 3839887 - DNA, 25 bp, Homo sapien
ccttgaagcctcactcaccaggtgt

SEQ ID NO: 3839888 - DNA, 25 bp, Homo sapien
tgtgcctcaggtcttggtgaagaat

SEQ ID NO: 3839889 - DNA, 25 bp, Homo sapien
cactcaccaggtgtctgtgcctcag

SEQ ID NO: 3839890 - DNA, 25 bp, Homo sapien
aggacaaagagcatctcccttgaag

SEQ ID NO: 3839891 - DNA, 25 bp, Homo sapien
ctgtccgagcaggagatggtggaag

SEQ ID NO: 3839892 - DNA, 25 bp, Homo sapien
agatggtggaagagaggggagaggg

SEQ ID NO: 3839893 - DNA, 25 bp, Homo sapien
aggagatggtggaagagaggggaga

SEQ ID NO: 3839894 - DNA, 25 bp, Homo sapien
caggagatggtggaagagaggggag

SEQ ID NO: 3839895 - DNA, 25 bp, Homo sapien
gagttggcaggaggtatgccttgct

SEQ ID NO: 3839896 - DNA, 25 bp, Homo sapien
ggtatgccttgctgcaggtacggtt

SEQ ID NO: 3839897 - DNA, 25 bp, Homo sapien
aggagttggcaggaggtatgccttg

SEQ ID NO: 3839898 - DNA, 25 bp, Homo sapien
gtatgccttgctgcaggtacggttt

SEQ ID NO: 3839899 - DNA, 25 bp, Homo sapien
caggaggtccccacaaacggaagtg

SEQ ID NO: 3839900 - DNA, 25 bp, Homo sapien
gaagtggttaacgagtggcaaaaga

SEQ ID NO: 3839901 - DNA, 25 bp, Homo sapien
cagaacactttgaaggcttcgggat

SEQ ID NO: 3839902 - DNA, 25 bp, Homo sapien
ttcgggatgatgctgctcatgacca

SEQ ID NO: 3839903 - DNA, 25 bp, Homo sapien
cccgggaggtaaaagttgcaatgag

SEQ ID NO: 3839904 - DNA, 25 bp, Homo sapien
ccagactgggtgacagagtgagacc

SEQ ID NO: 3839905 - DNA, 25 bp, Homo sapien
gactgggtgacagagtgagaccctc

SEQ ID NO: 3839906 - DNA, 25 bp, Homo sapien
tgagctgagatcaagccactgcact

SEQ ID NO: 3839907 - DNA, 25 bp, Homo sapien
gaaaataccagcacagtggttcacg

SEQ ID NO: 3839908 - DNA, 25 bp, Homo sapien
ggagttcgagaccagcctgaccaac

SEQ ID NO: 3839909 - DNA, 25 bp, Homo sapien
cctgtaatcacagcactttgggagg

SEQ ID NO: 3839910 - DNA, 25 bp, Homo sapien
ccgaggcgggcagatcacgaggtca

SEQ ID NO: 3839911 - DNA, 25 bp, Homo sapien
ggaacccgcagcctgtcttcctccg

SEQ ID NO: 3839912 - DNA, 25 bp, Homo sapien
acccccgcttttcgctcgctctctc

SEQ ID NO: 3839913 - DNA, 25 bp, Homo sapien
ccctgggcagcggttcctaccctgc

SEQ ID NO: 3839914 - DNA, 25 bp, Homo sapien
ggcagcggttcctaccctgcctgga

SEQ ID NO: 3839915 - DNA, 25 bp, Homo sapien
cttccgcggtcctctctccacgctg

SEQ ID NO: 3839916 - DNA, 25 bp, Homo sapien
ttccgcggtcctctctccacgctga

SEQ ID NO: 3839917 - DNA, 25 bp, Homo sapien
tccttccgcggtcctctctccacgc

SEQ ID NO: 3839918 - DNA, 25 bp, Homo sapien
tccgcggtcctctctccacgctgaa

SEQ ID NO: 3839919 - DNA, 25 bp, Homo sapien
ctggctccccgctggactgtttccc

SEQ ID NO: 3839920 - DNA, 25 bp, Homo sapien
agcccaggagtagcgccttgcgtag

SEQ ID NO: 3839921 - DNA, 25 bp, Homo sapien
ggctcactaggccttccgtcctagg

SEQ ID NO: 3839922 - DNA, 25 bp, Homo sapien
ttgcgtaggcccgaagccgccggct

SEQ ID NO: 3839923 - DNA, 25 bp, Homo sapien
tagcagtaccagaggaacagggaag

SEQ ID NO: 3839924 - DNA, 25 bp, Homo sapien
gcgctgaatacctaggacccctggc

SEQ ID NO: 3839925 - DNA, 25 bp, Homo sapien
tgggcgctgaatacctaggacccct

SEQ ID NO: 3839926 - DNA, 25 bp, Homo sapien
aggcctgggcgctgaatacctagga

SEQ ID NO: 3839927 - DNA, 25 bp, Homo sapien
gcctgggcgctgaatacctaggacc

SEQ ID NO: 3839928 - DNA, 25 bp, Homo sapien
ttggcaccggcctgcttggtacagc

SEQ ID NO: 3839929 - DNA, 25 bp, Homo sapien
gcaggagaacggaaaagccggcatt

SEQ ID NO: 3839930 - DNA, 25 bp, Homo sapien
gttggcactcataaagcttcgaagc

SEQ ID NO: 3839931 - DNA, 25 bp, Homo sapien
agatggcatctgacccgggcattgg

SEQ ID NO: 3839932 - DNA, 25 bp, Homo sapien
taattacaatacagtcctggaggag

SEQ ID NO: 3839933 - DNA, 25 bp, Homo sapien
agacgcgggcatccagcactcctgc

SEQ ID NO: 3839934 - DNA, 25 bp, Homo sapien
tagcaactagctctaagtgtcttaa

SEQ ID NO: 3839935 - DNA, 25 bp, Homo sapien
gcccatcctggccagtcaattagca

SEQ ID NO: 3839936 - DNA, 25 bp, Homo sapien
cgccgaccaccagctcacagccagg

SEQ ID NO: 3839937 - DNA, 25 bp, Homo sapien
gctcacagccaggagggatctttag

SEQ ID NO: 3839938 - DNA, 25 bp, Homo sapien
cagctcacagccaggagggatcttt

SEQ ID NO: 3839939 - DNA, 25 bp, Homo sapien
tcacagccaggagggatctttaggc

SEQ ID NO: 3839940 - DNA, 25 bp, Homo sapien
aagagtcgtccaccagtagacagtg

SEQ ID NO: 3839941 - DNA, 25 bp, Homo sapien
gagtcgtccaccagtagacagtgcc

SEQ ID NO: 3839942 - DNA, 25 bp, Homo sapien
gaaaagagtcgtccaccagtagaca

SEQ ID NO: 3839943 - DNA, 25 bp, Homo sapien
agtcgtccaccagtagacagtgccc

SEQ ID NO: 3839944 - DNA, 25 bp, Homo sapien
caaacagtaaataagtggcaggcct

SEQ ID NO: 3839945 - DNA, 25 bp, Homo sapien
ttaggtacttgcacaccagagcact

SEQ ID NO: 3839946 - DNA, 25 bp, Homo sapien
taagtggcaggccttgttctaaccc

SEQ ID NO: 3839947 - DNA, 25 bp, Homo sapien
aacagcagagccactgacattaggt

SEQ ID NO: 3839948 - DNA, 25 bp, Homo sapien
acgatgaagaccactcgaggcccat

SEQ ID NO: 3839949 - DNA, 25 bp, Homo sapien
gaagaccactcgaggcccatcttcg

SEQ ID NO: 3839950 - DNA, 25 bp, Homo sapien
cgttggggtgccagaggtccacgat

SEQ ID NO: 3839951 - DNA, 25 bp, Homo sapien
gtccacgatgaagaccactcgaggc

SEQ ID NO: 3839952 - DNA, 25 bp, Homo sapien
gtccctgagcgcagtgtctctccag

SEQ ID NO: 3839953 - DNA, 25 bp, Homo sapien
agccgtccctgagcgcagtgtctct

SEQ ID NO: 3839954 - DNA, 25 bp, Homo sapien
atcaagccgtccctgagcgcagtgt

SEQ ID NO: 3839955 - DNA, 25 bp, Homo sapien
ccctgagcgcagtgtctctccagcc

SEQ ID NO: 3839956 - DNA, 25 bp, Homo sapien
tcagtgctcactagccagttcccat

SEQ ID NO: 3839957 - DNA, 25 bp, Homo sapien
gagttaggagaggattcagaattta

SEQ ID NO: 3839958 - DNA, 25 bp, Homo sapien
ttcagtgctcactagccagttccca

SEQ ID NO: 3839959 - DNA, 25 bp, Homo sapien
ctgcgaaggaagtagtcgggagtta

SEQ ID NO: 3839960 - DNA, 25 bp, Homo sapien
ctgtttggttgtactaggagaagac

SEQ ID NO: 3839961 - DNA, 25 bp, Homo sapien
agaagacataaggccctgccccagc

SEQ ID NO: 3839962 - DNA, 25 bp, Homo sapien
taggagaagacataaggccctgccc

SEQ ID NO: 3839963 - DNA, 25 bp, Homo sapien
tgtttggttgtactaggagaagaca

SEQ ID NO: 3839964 - DNA, 25 bp, Homo sapien
gttaggaggtatctggccgggcgtg

SEQ ID NO: 3839965 - DNA, 25 bp, Homo sapien
cctgtgttaggaggtatctggccgg

SEQ ID NO: 3839966 - DNA, 25 bp, Homo sapien
tgttaggaggtatctggccgggcgt

SEQ ID NO: 3839967 - DNA, 25 bp, Homo sapien
tgtgttaggaggtatctggccgggc

SEQ ID NO: 3839968 - DNA, 25 bp, Homo sapien
actttgtactagactggcctgggcc

SEQ ID NO: 3839969 - DNA, 25 bp, Homo sapien
gggcctgcccagctcagcgttatca

SEQ ID NO: 3839970 - DNA, 25 bp, Homo sapien
tcccgcgtcctgcagggtagtccgc

SEQ ID NO: 3839971 - DNA, 25 bp, Homo sapien
aagtgtgcggcccttcctgacatca

SEQ ID NO: 3839972 - DNA, 25 bp, Homo sapien
cactagaatgtaacctcctgaggac

SEQ ID NO: 3839973 - DNA, 25 bp, Homo sapien
aaatataccaagaggctaggcaggg

SEQ ID NO: 3839974 - DNA, 25 bp, Homo sapien
gtatgactgagtcctcccactagaa

SEQ ID NO: 3839975 - DNA, 25 bp, Homo sapien
ggtgcagtgcactcactcagtattt

SEQ ID NO: 3839976 - DNA, 25 bp, Homo sapien
agtttgtagatcctgagtcattaat

SEQ ID NO: 3839977 - DNA, 25 bp, Homo sapien
ggagacagagtgagccctaactcta

SEQ ID NO: 3839978 - DNA, 25 bp, Homo sapien
cagaaaggcccattgccaaaaatag

SEQ ID NO: 3839979 - DNA, 25 bp, Homo sapien
tcttaaaacctcagaatcagatgtc

SEQ ID NO: 3839980 - DNA, 25 bp, Homo sapien
tgggaatgcatccaggcccgtcttc

SEQ ID NO: 3839981 - DNA, 25 bp, Homo sapien
gctcagcgcatgtggcttcccttct

SEQ ID NO: 3839982 - DNA, 25 bp, Homo sapien
ggctctctgttgagcaccaaagccc

SEQ ID NO: 3839983 - DNA, 25 bp, Homo sapien
cttctgagacccgtttagcctggcc

SEQ ID NO: 3839984 - DNA, 25 bp, Homo sapien
cactgtgtgacctgcgatctgaatg

SEQ ID NO: 3839985 - DNA, 25 bp, Homo sapien
gatctgaatggcatgacggacacgc

SEQ ID NO: 3839986 - DNA, 25 bp, Homo sapien
caggcacaagctggatgtgtgaagc

SEQ ID NO: 3839987 - DNA, 25 bp, Homo sapien
aagcagcaaggtgtccgtgggacca

SEQ ID NO: 3839988 - DNA, 25 bp, Homo sapien
gcttttgagcaagaatgtccttact

SEQ ID NO: 3839989 - DNA, 25 bp, Homo sapien
ggagatgacctgtctctttagctca

SEQ ID NO: 3839990 - DNA, 25 bp, Homo sapien
aaatgcacttaagggctggatgcgg

SEQ ID NO: 3839991 - DNA, 25 bp, Homo sapien
ttagctcacaggtctgcagatagga

SEQ ID NO: 3839992 - DNA, 25 bp, Homo sapien
gaaatgtggtctaaaggtcaagctg

SEQ ID NO: 3839993 - DNA, 25 bp, Homo sapien
ggtgttgtctttcagcgtctcagca

SEQ ID NO: 3839994 - DNA, 25 bp, Homo sapien
gtctcagcacaagcccaaagtagag

SEQ ID NO: 3839995 - DNA, 25 bp, Homo sapien
gaaataccaacaagatgcctcagag

SEQ ID NO: 3839996 - DNA, 25 bp, Homo sapien
gacactcaggcatccctaagcagag

SEQ ID NO: 3839997 - DNA, 25 bp, Homo sapien
tggtttccaggctcttgttcagtcc

SEQ ID NO: 3839998 - DNA, 25 bp, Homo sapien
tagggcagaccttttcagatcctca

SEQ ID NO: 3839999 - DNA, 25 bp, Homo sapien
cagtgccaggtattaaacagtccag

SEQ ID NO: 3840000 - DNA, 25 bp, Homo sapien
tccagtccagggcatactccggttt

SEQ ID NO: 3840001 - DNA, 25 bp, Homo sapien
tgcttgccaaaatacaatcgtgttg

SEQ ID NO: 3840002 - DNA, 25 bp, Homo sapien
cttccaggtcgtttcctgtgtgaga

SEQ ID NO: 3840003 - DNA, 25 bp, Homo sapien
accagggtccagtctagatcttcac

SEQ ID NO: 3840004 - DNA, 25 bp, Homo sapien
tttcaaaggacgttatgttgcccag

SEQ ID NO: 3840005 - DNA, 25 bp, Homo sapien
tagagtgcaacggtccgatcacgga

SEQ ID NO: 3840006 - DNA, 25 bp, Homo sapien
caatcacgaggtggagacttcgctt

SEQ ID NO: 3840007 - DNA, 25 bp, Homo sapien
acttcgctttccacatcgggcaggg

SEQ ID NO: 3840008 - DNA, 25 bp, Homo sapien
aaaatacagaaatgatctgggcatg

SEQ ID NO: 3840009 - DNA, 25 bp, Homo sapien
aatacagaaatgatctgggcatgat

SEQ ID NO: 3840010 - DNA, 25 bp, Homo sapien
aaaaatacagaaatgatctgggcat

SEQ ID NO: 3840011 - DNA, 25 bp, Homo sapien
tacagaaatgatctgggcatgatgg

SEQ ID NO: 3840012 - DNA, 25 bp, Homo sapien
aatgacgagtcaagggtcccagtcc

SEQ ID NO: 3840013 - DNA, 25 bp, Homo sapien
gcaggttggcacctcagcgacataa

SEQ ID NO: 3840014 - DNA, 25 bp, Homo sapien
gcgacataagcagtttcaggtgtgc

SEQ ID NO: 3840015 - DNA, 25 bp, Homo sapien
caattagcttccaaccatcagcagg

SEQ ID NO: 3840016 - DNA, 25 bp, Homo sapien
tgtgagaagaagctacttcagacaa

SEQ ID NO: 3840017 - DNA, 25 bp, Homo sapien
taaggttatattccctctgcaagga

SEQ ID NO: 3840018 - DNA, 25 bp, Homo sapien
tatcactccaaaaggctaaggttat

SEQ ID NO: 3840019 - DNA, 25 bp, Homo sapien
gtagcctccacttcatggactcaaa

SEQ ID NO: 3840020 - DNA, 25 bp, Homo sapien
ggcggcacaagtccgcgaagctcag

SEQ ID NO: 3840021 - DNA, 25 bp, Homo sapien
caagtccgcgaagctcagaaagtcc

SEQ ID NO: 3840022 - DNA, 25 bp, Homo sapien
gcttaaagtcaggaggcggcacaag

SEQ ID NO: 3840023 - DNA, 25 bp, Homo sapien
cattcaattgaagcttgttccctga

SEQ ID NO: 3840024 - DNA, 25 bp, Homo sapien
tctttgcctggtccaagtcccagct

SEQ ID NO: 3840025 - DNA, 25 bp, Homo sapien
ctttgcctggtccaagtcccagctt

SEQ ID NO: 3840026 - DNA, 25 bp, Homo sapien
cgccccccgcgacgtcacgagcggg

SEQ ID NO: 3840027 - DNA, 25 bp, Homo sapien
gcgacgtcacgagcggggccgcgag

SEQ ID NO: 3840028 - DNA, 25 bp, Homo sapien
ggcgccccccgcgacgtcacgagcg

SEQ ID NO: 3840029 - DNA, 25 bp, Homo sapien
ccgcgacgtcacgagcggggccgcg

SEQ ID NO: 3840030 - DNA, 25 bp, Homo sapien
tgaggaatagttccagccagagccc

SEQ ID NO: 3840031 - DNA, 25 bp, Homo sapien
tgaggctcgcggactttaacacagg

SEQ ID NO: 3840032 - DNA, 25 bp, Homo sapien
tgcgacggcctgatggaaaagaact

SEQ ID NO: 3840033 - DNA, 25 bp, Homo sapien
taaacgtggcggatgaagcagtctg

SEQ ID NO: 3840034 - DNA, 25 bp, Homo sapien
agagggggctgagcctccggggaga

SEQ ID NO: 3840035 - DNA, 25 bp, Homo sapien
gagcagagggggctgagcctccggg

SEQ ID NO: 3840036 - DNA, 25 bp, Homo sapien
gcagagggggctgagcctccgggga

SEQ ID NO: 3840037 - DNA, 25 bp, Homo sapien
agggggctgagcctccggggagagc

SEQ ID NO: 3840038 - DNA, 25 bp, Homo sapien
ggctgcgcaggccagtcctgtgggt

SEQ ID NO: 3840039 - DNA, 25 bp, Homo sapien
cagacacaggtgcaggttgtgccct

SEQ ID NO: 3840040 - DNA, 25 bp, Homo sapien
ggccagtcctgtgggtgaggaggaa

SEQ ID NO: 3840041 - DNA, 25 bp, Homo sapien
cgcaggccagtcctgtgggtgagga

SEQ ID NO: 3840042 - DNA, 25 bp, Homo sapien
tgtctggaccgtctccgaagttcaa

SEQ ID NO: 3840043 - DNA, 25 bp, Homo sapien
aaggtggtcagcaagcccacgacgt

SEQ ID NO: 3840044 - DNA, 25 bp, Homo sapien
aatgtccgggtcttgttcctgtctg

SEQ ID NO: 3840045 - DNA, 25 bp, Homo sapien
actgtggcctggaatgtccgggtct

SEQ ID NO: 3840046 - DNA, 25 bp, Homo sapien
ctggctgtgataaggaccagttgtc

SEQ ID NO: 3840047 - DNA, 25 bp, Homo sapien
tgtggtcaccctggctgtgataagg

SEQ ID NO: 3840048 - DNA, 25 bp, Homo sapien
tgataaggaccagttgtcctgcaga

SEQ ID NO: 3840049 - DNA, 25 bp, Homo sapien
caccctggctgtgataaggaccagt

SEQ ID NO: 3840050 - DNA, 25 bp, Homo sapien
ctggaacagcactaaaatataggca

SEQ ID NO: 3840051 - DNA, 25 bp, Homo sapien
attcctcacccattctagggctcag

SEQ ID NO: 3840052 - DNA, 25 bp, Homo sapien
ggctccagacactaacacattcctc

SEQ ID NO: 3840053 - DNA, 25 bp, Homo sapien
tggagggtaggattcctggaacagc

SEQ ID NO: 3840054 - DNA, 25 bp, Homo sapien
cctggcgacccatctgaggctctta

SEQ ID NO: 3840055 - DNA, 25 bp, Homo sapien
tagtcagcaggcagtctacaaaacc

SEQ ID NO: 3840056 - DNA, 25 bp, Homo sapien
tagacacttgttctacgtcacacag

SEQ ID NO: 3840057 - DNA, 25 bp, Homo sapien
ctgggcacttcacggtcattctcat

SEQ ID NO: 3840058 - DNA, 25 bp, Homo sapien
tagccctctatcctgcattcacaga

SEQ ID NO: 3840059 - DNA, 25 bp, Homo sapien
gcctctcaacatggagtgctcccaa

SEQ ID NO: 3840060 - DNA, 25 bp, Homo sapien
cggccttcagcatcaggtcatagcc

SEQ ID NO: 3840061 - DNA, 25 bp, Homo sapien
taagcctctcaacatggagtgctcc

SEQ ID NO: 3840062 - DNA, 25 bp, Homo sapien
tcttgcccaattatcaacctgaaac

SEQ ID NO: 3840063 - DNA, 25 bp, Homo sapien
gtttaaagatgtataagtggctggg

SEQ ID NO: 3840064 - DNA, 25 bp, Homo sapien
tgaaaccccatcataactccatgag

SEQ ID NO: 3840065 - DNA, 25 bp, Homo sapien
tgcccaggctcgaacatttgtcttg

SEQ ID NO: 3840066 - DNA, 25 bp, Homo sapien
tcagagccgggttctagaccagtgg

SEQ ID NO: 3840067 - DNA, 25 bp, Homo sapien
ggtggaagcacatagcagtgacaca

SEQ ID NO: 3840068 - DNA, 25 bp, Homo sapien
cgggtggaagcacatagcagtgaca

SEQ ID NO: 3840069 - DNA, 25 bp, Homo sapien
accagtgggactcccggcgcgggtg

SEQ ID NO: 3840070 - DNA, 25 bp, Homo sapien
gagaaacaagtcgggaactaggcca

SEQ ID NO: 3840071 - DNA, 25 bp, Homo sapien
tgagaaacaagtcgggaactaggcc

SEQ ID NO: 3840072 - DNA, 25 bp, Homo sapien
ctgagaaacaagtcgggaactaggc

SEQ ID NO: 3840073 - DNA, 25 bp, Homo sapien
agaaacaagtcgggaactaggccag

SEQ ID NO: 3840074 - DNA, 25 bp, Homo sapien
aaggatctgctctaccccggttaca

SEQ ID NO: 3840075 - DNA, 25 bp, Homo sapien
cattgtcaggaaggaagggaccatg

SEQ ID NO: 3840076 - DNA, 25 bp, Homo sapien
cagcagtctttgaggaaaagtccaa

SEQ ID NO: 3840077 - DNA, 25 bp, Homo sapien
tccctaagggagagctgtggttgaa

SEQ ID NO: 3840078 - DNA, 25 bp, Homo sapien
ctagttatgagtcttaaaatcacaa

SEQ ID NO: 3840079 - DNA, 25 bp, Homo sapien
aatgttgcttgaaagaagtcagcca

SEQ ID NO: 3840080 - DNA, 25 bp, Homo sapien
cttggatgtgaactagttatgagtc

SEQ ID NO: 3840081 - DNA, 25 bp, Homo sapien
cattgttacccaaatgcttggatgt

SEQ ID NO: 3840082 - DNA, 25 bp, Homo sapien
taatcccaactaaggtagcctcagg

SEQ ID NO: 3840083 - DNA, 25 bp, Homo sapien
gctggatgcataacacatggctctc

SEQ ID NO: 3840084 - DNA, 25 bp, Homo sapien
caacaaaacaggtcgaagagctgct

SEQ ID NO: 3840085 - DNA, 25 bp, Homo sapien
gacagctagagaccaatacgggcat

SEQ ID NO: 3840086 - DNA, 25 bp, Homo sapien
caaggcccaagaagttgattcacac

SEQ ID NO: 3840087 - DNA, 25 bp, Homo sapien
tctcttccgagaatagctgaacgat

SEQ ID NO: 3840088 - DNA, 25 bp, Homo sapien
gctgtaggtcttcggccaccgactg

SEQ ID NO: 3840089 - DNA, 25 bp, Homo sapien
cccggatatctggactatgaggact

SEQ ID NO: 3840090 - DNA, 25 bp, Homo sapien
tgttacccgggtatctgagaaagga

SEQ ID NO: 3840091 - DNA, 25 bp, Homo sapien
tgaatccgatatttgaacgcccggg

SEQ ID NO: 3840092 - DNA, 25 bp, Homo sapien
gggcctgaacctgatatttgaaatt

SEQ ID NO: 3840093 - DNA, 25 bp, Homo sapien
gaatgaaccccggatactggtgcac

SEQ ID NO: 3840094 - DNA, 25 bp, Homo sapien
tggagactgaatccgatatttgaac

SEQ ID NO: 3840095 - DNA, 25 bp, Homo sapien
gcgacagctgccgaattccggattt

SEQ ID NO: 3840096 - DNA, 25 bp, Homo sapien
ctcgtcgagggcgacagctgccgaa

SEQ ID NO: 3840097 - DNA, 25 bp, Homo sapien
gattgtggggtctgaaccccgaata

SEQ ID NO: 3840098 - DNA, 25 bp, Homo sapien
cgaattccggatttctgattgtggg

SEQ ID NO: 3840099 - DNA, 25 bp, Homo sapien
ttcctcggctttcgcccttcctgag

SEQ ID NO: 3840100 - DNA, 25 bp, Homo sapien
ggcaaggagacctttccccttgcca

SEQ ID NO: 3840101 - DNA, 25 bp, Homo sapien
tcggctttcgcccttcctgaggggc

SEQ ID NO: 3840102 - DNA, 25 bp, Homo sapien
tcttcctcggctttcgcccttcctg

SEQ ID NO: 3840103 - DNA, 25 bp, Homo sapien
gtaggggtcactatggtgccccagc

SEQ ID NO: 3840104 - DNA, 25 bp, Homo sapien
ctggtaggggtcactatggtgcccc

SEQ ID NO: 3840105 - DNA, 25 bp, Homo sapien
ctccgcttccgcctggggtcctcca

SEQ ID NO: 3840106 - DNA, 25 bp, Homo sapien
aggggtcactatggtgccccagcgc

SEQ ID NO: 3840107 - DNA, 25 bp, Homo sapien
tgttagaagtgggtactggcccaga

SEQ ID NO: 3840108 - DNA, 25 bp, Homo sapien
gaggagcccgcaaagtcactctcaa

SEQ ID NO: 3840109 - DNA, 25 bp, Homo sapien
cagaggagcccgcaaagtcactctc

SEQ ID NO: 3840110 - DNA, 25 bp, Homo sapien
ccggaggcggtggaaatccgtccat

SEQ ID NO: 3840111 - DNA, 25 bp, Homo sapien
catggccaatttcccggaggtcaga

SEQ ID NO: 3840112 - DNA, 25 bp, Homo sapien
tggccaatttcccggaggtcagaga

SEQ ID NO: 3840113 - DNA, 25 bp, Homo sapien
aaagtatacggctccaaagctgcca

SEQ ID NO: 3840114 - DNA, 25 bp, Homo sapien
ccaatttcccggaggtcagagaaga

SEQ ID NO: 3840115 - DNA, 25 bp, Homo sapien
actgtaggacatcttcttgatggcc

SEQ ID NO: 3840116 - DNA, 25 bp, Homo sapien
ggccaccacctcactattccggaca

SEQ ID NO: 3840117 - DNA, 25 bp, Homo sapien
cacctcactattccggacatcccgg

SEQ ID NO: 3840118 - DNA, 25 bp, Homo sapien
cccactgtaggacatcttcttgatg

SEQ ID NO: 3840119 - DNA, 25 bp, Homo sapien
ccggagcttctgtaagaaccgcacc

SEQ ID NO: 3840120 - DNA, 25 bp, Homo sapien
ttgggatgccggagcttctgtaaga

SEQ ID NO: 3840121 - DNA, 25 bp, Homo sapien
ccccggtactgaatggtgttgggat

SEQ ID NO: 3840122 - DNA, 25 bp, Homo sapien
cctcaggtaacagccccggtactga

SEQ ID NO: 3840123 - DNA, 25 bp, Homo sapien
agcccaggcaatactccattaccag

SEQ ID NO: 3840124 - DNA, 25 bp, Homo sapien
tgagcccaggcaatactccattacc

SEQ ID NO: 3840125 - DNA, 25 bp, Homo sapien
cttctagaaggtcagaagctgagcc

SEQ ID NO: 3840126 - DNA, 25 bp, Homo sapien
gctgagcccaggcaatactccatta

SEQ ID NO: 3840127 - DNA, 25 bp, Homo sapien
ctatggatcatgttgtgggagtgca

SEQ ID NO: 3840128 - DNA, 25 bp, Homo sapien
aggccctgaagcgccccgtgggtca

SEQ ID NO: 3840129 - DNA, 25 bp, Homo sapien
tgggtcacagctgcgatctctacct

SEQ ID NO: 3840130 - DNA, 25 bp, Homo sapien
ctacctcctgaaggggtttcttgtg

SEQ ID NO: 3840131 - DNA, 25 bp, Homo sapien
aggcaaagtacagggatgagacatg

SEQ ID NO: 3840132 - DNA, 25 bp, Homo sapien
ctgccagaggcaaagtacagggatg

SEQ ID NO: 3840133 - DNA, 25 bp, Homo sapien
ggatgagacatgtgtctcaagaaag

SEQ ID NO: 3840134 - DNA, 25 bp, Homo sapien
agaggcaaagtacagggatgagaca

SEQ ID NO: 3840135 - DNA, 25 bp, Homo sapien
gaaggagttggcaggtgccatgatg

SEQ ID NO: 3840136 - DNA, 25 bp, Homo sapien
gcaggtgccatgatggacgcagaac

SEQ ID NO: 3840137 - DNA, 25 bp, Homo sapien
ccatgatggacgcagaaccaaagtc

SEQ ID NO: 3840138 - DNA, 25 bp, Homo sapien
gcagaaccaaagtcccctagcttca

SEQ ID NO: 3840139 - DNA, 25 bp, Homo sapien
tggccaggatcacctcgggtgccat

SEQ ID NO: 3840140 - DNA, 25 bp, Homo sapien
caaggaccagacgtccactttgcca

SEQ ID NO: 3840141 - DNA, 25 bp, Homo sapien
gacgtccactttgccatcgtactgc

SEQ ID NO: 3840142 - DNA, 25 bp, Homo sapien
gatgcaggttatccccaaggaccag

SEQ ID NO: 3840143 - DNA, 25 bp, Homo sapien
gcatttacgaagcaaagcctctagg

SEQ ID NO: 3840144 - DNA, 25 bp, Homo sapien
gagaagttcccatcatcctgttgcg

SEQ ID NO: 3840145 - DNA, 25 bp, Homo sapien
tcatcaactgtctgggcctggcatc

SEQ ID NO: 3840146 - DNA, 25 bp, Homo sapien
caagctaagagtcgctaagagtccc

SEQ ID NO: 3840147 - DNA, 25 bp, Homo sapien
tcgcattcatgttaaagagcggtgg

SEQ ID NO: 3840148 - DNA, 25 bp, Homo sapien
cacgggggattcgttctgtgcaatg

SEQ ID NO: 3840149 - DNA, 25 bp, Homo sapien
ggcactcatcgcattcatgttaaag

SEQ ID NO: 3840150 - DNA, 25 bp, Homo sapien
tcatgttaaagagcggtggtttccg

SEQ ID NO: 3840151 - DNA, 25 bp, Homo sapien
tttctgaagacaggagtcgacaaaa

SEQ ID NO: 3840152 - DNA, 25 bp, Homo sapien
gacaaaattccggaagtactcagac

SEQ ID NO: 3840153 - DNA, 25 bp, Homo sapien
tgaagacaggagtcgacaaaattcc

SEQ ID NO: 3840154 - DNA, 25 bp, Homo sapien
caggagtcgacaaaattccggaagt

SEQ ID NO: 3840155 - DNA, 25 bp, Homo sapien
tcatcttgcggtactgcaggttgtc

SEQ ID NO: 3840156 - DNA, 25 bp, Homo sapien
tggtcctctggatcaggtccatgat

SEQ ID NO: 3840157 - DNA, 25 bp, Homo sapien
ccatgatgactgtgggtggccgctc

SEQ ID NO: 3840158 - DNA, 25 bp, Homo sapien
cgttgggtgcctcttggaacaggat

SEQ ID NO: 3840159 - DNA, 25 bp, Homo sapien
tggctggaggcgctgatggacatgc

SEQ ID NO: 3840160 - DNA, 25 bp, Homo sapien
tggctactctcgaggctggtcagag

SEQ ID NO: 3840161 - DNA, 25 bp, Homo sapien
tcccggcccggtgcatgtagggctc

SEQ ID NO: 3840162 - DNA, 25 bp, Homo sapien
ctgggcactgagtggctactctcga

SEQ ID NO: 3840163 - DNA, 25 bp, Homo sapien
tgtctgaggcatctgctaggctgtt

SEQ ID NO: 3840164 - DNA, 25 bp, Homo sapien
gttgtctgaggcatctgctaggctg

SEQ ID NO: 3840165 - DNA, 25 bp, Homo sapien
ctgaggcatctgctaggctgttgac

SEQ ID NO: 3840166 - DNA, 25 bp, Homo sapien
tctgaggcatctgctaggctgttga

SEQ ID NO: 3840167 - DNA, 25 bp, Homo sapien
cggcagccggtggataatggagctg

SEQ ID NO: 3840168 - DNA, 25 bp, Homo sapien
gcagccggtggataatggagctgtg

SEQ ID NO: 3840169 - DNA, 25 bp, Homo sapien
ccatctcccgggcttcagggccttc

SEQ ID NO: 3840170 - DNA, 25 bp, Homo sapien
agccggtggataatggagctgtgag

SEQ ID NO: 3840171 - DNA, 25 bp, Homo sapien
gaggcggttcggatggtggcaaagt

SEQ ID NO: 3840172 - DNA, 25 bp, Homo sapien
tctcggttacggcagtaggcccggc

SEQ ID NO: 3840173 - DNA, 25 bp, Homo sapien
tggcaaagtggtctcggttacggca

SEQ ID NO: 3840174 - DNA, 25 bp, Homo sapien
ggtcatcatataggttgtcagagcc

SEQ ID NO: 3840175 - DNA, 25 bp, Homo sapien
ctggcccctagttaattaacacaag

SEQ ID NO: 3840176 - DNA, 25 bp, Homo sapien
gtcgcatccgcttatagccgctcag

SEQ ID NO: 3840177 - DNA, 25 bp, Homo sapien
tgccgccgggccagcttttctgcct

SEQ ID NO: 3840178 - DNA, 25 bp, Homo sapien
gctgcgcctcaagctcccgctgcag

SEQ ID NO: 3840179 - DNA, 25 bp, Homo sapien
gtgcactgtgctcctcccgttcacc

SEQ ID NO: 3840180 - DNA, 25 bp, Homo sapien
tcctcggcctgggcagctcgtgcct

SEQ ID NO: 3840181 - DNA, 25 bp, Homo sapien
ctcggcctgggcagctcgtgcctcc

SEQ ID NO: 3840182 - DNA, 25 bp, Homo sapien
cctcggcctgggcagctcgtgcctc

SEQ ID NO: 3840183 - DNA, 25 bp, Homo sapien
tgttccttgcgaagtttgtaggtcc

SEQ ID NO: 3840184 - DNA, 25 bp, Homo sapien
ttgtaggtccgcttctgtgcctcca

SEQ ID NO: 3840185 - DNA, 25 bp, Homo sapien
tcagctgttccttgcgaagtttgta

SEQ ID NO: 3840186 - DNA, 25 bp, Homo sapien
tgcgaagtttgtaggtccgcttctg

SEQ ID NO: 3840187 - DNA, 25 bp, Homo sapien
gccttctcccgcttgggagtgctgg

SEQ ID NO: 3840188 - DNA, 25 bp, Homo sapien
caacatcttgcgcttgtactggcga

SEQ ID NO: 3840189 - DNA, 25 bp, Homo sapien
cagctcaaagtactggcgctgccgc

SEQ ID NO: 3840190 - DNA, 25 bp, Homo sapien
gccgagccagcaacatcttgcgctt

SEQ ID NO: 3840191 - DNA, 25 bp, Homo sapien
cttgtactggcgacactgcagctca

SEQ ID NO: 3840192 - DNA, 25 bp, Homo sapien
gcagaagaaatgcagggcccggggc

SEQ ID NO: 3840193 - DNA, 25 bp, Homo sapien
ggcagaagaaatgcagggcccgggg

SEQ ID NO: 3840194 - DNA, 25 bp, Homo sapien
gtgcacactccaagtccttctgggt

SEQ ID NO: 3840195 - DNA, 25 bp, Homo sapien
cactccaagtccttctgggtctgct

SEQ ID NO: 3840196 - DNA, 25 bp, Homo sapien
cacactccaagtccttctgggtctg

SEQ ID NO: 3840197 - DNA, 25 bp, Homo sapien
tgcacactccaagtccttctgggtc

SEQ ID NO: 3840198 - DNA, 25 bp, Homo sapien
tgggccgcatgcttctgccgcaact

SEQ ID NO: 3840199 - DNA, 25 bp, Homo sapien
ttgctcacgccgcttgttgtactcc

SEQ ID NO: 3840200 - DNA, 25 bp, Homo sapien
atgcttctgccgcaactcttgctca

SEQ ID NO: 3840201 - DNA, 25 bp, Homo sapien
gcaactcttgctcacgccgcttgtt

SEQ ID NO: 3840202 - DNA, 25 bp, Homo sapien
tttgaggctcttgggctgctggcga

SEQ ID NO: 3840203 - DNA, 25 bp, Homo sapien
ttgaggctcttgggctgctggcgaa

SEQ ID NO: 3840204 - DNA, 25 bp, Homo sapien
tgaggctcttgggctgctggcgaac

SEQ ID NO: 3840205 - DNA, 25 bp, Homo sapien
caaccaggctcccatgtttttgtgg

SEQ ID NO: 3840206 - DNA, 25 bp, Homo sapien
tgcttgggctccaaagtggcccctt

SEQ ID NO: 3840207 - DNA, 25 bp, Homo sapien
tcctcctcagggacgggagtcagtg

SEQ ID NO: 3840208 - DNA, 25 bp, Homo sapien
gccaagcattctttggtccaggact

SEQ ID NO: 3840209 - DNA, 25 bp, Homo sapien
tgccatagccaccagaggtagagct

SEQ ID NO: 3840210 - DNA, 25 bp, Homo sapien
tggccaagctaagagccaggcagct

SEQ ID NO: 3840211 - DNA, 25 bp, Homo sapien
gcaaccagagtcgagatatgccccg

SEQ ID NO: 3840212 - DNA, 25 bp, Homo sapien
caagtgggatgctaaaccctggctg

SEQ ID NO: 3840213 - DNA, 25 bp, Homo sapien
gctggcgctggctgcgtggtagtag

SEQ ID NO: 3840214 - DNA, 25 bp, Homo sapien
aggcagggggccctagctggcgctg

SEQ ID NO: 3840215 - DNA, 25 bp, Homo sapien
ggtgcgtgacctccgcccggctaga

SEQ ID NO: 3840216 - DNA, 25 bp, Homo sapien
gggcccgggactggcgggtgcgtga

SEQ ID NO: 3840217 - DNA, 25 bp, Homo sapien
gaggctgcctgtctagaggtccgaa

SEQ ID NO: 3840218 - DNA, 25 bp, Homo sapien
actagggactggagaaacttcactg

SEQ ID NO: 3840219 - DNA, 25 bp, Homo sapien
aagtgctcaatgctctagatttggg

SEQ ID NO: 3840220 - DNA, 25 bp, Homo sapien
tgagtcgtgggagataaagtgctca

SEQ ID NO: 3840221 - DNA, 25 bp, Homo sapien
cacacacagcgggcgaacagcaata

SEQ ID NO: 3840222 - DNA, 25 bp, Homo sapien
acacacagcgggcgaacagcaataa

SEQ ID NO: 3840223 - DNA, 25 bp, Homo sapien
gcacacacagcgggcgaacagcaat

SEQ ID NO: 3840224 - DNA, 25 bp, Homo sapien
cccaggcctgagtcaatgagggtga

SEQ ID NO: 3840225 - DNA, 25 bp, Homo sapien
ggacaggttggaagggagacagaaa

SEQ ID NO: 3840226 - DNA, 25 bp, Homo sapien
aaaacatgactcttcccaccctcca

SEQ ID NO: 3840227 - DNA, 25 bp, Homo sapien
aggggacaggttggaagggagacag

SEQ ID NO: 3840228 - DNA, 25 bp, Homo sapien
gagaaaaaaaacatgactcttccca

SEQ ID NO: 3840229 - DNA, 25 bp, Homo sapien
ctcagatattttatttgtgtttgtc

SEQ ID NO: 3840230 - DNA, 25 bp, Homo sapien
cgctcagatattttatttgtgtttg

SEQ ID NO: 3840231 - DNA, 25 bp, Homo sapien
tcagatattttatttgtgtttgtct

SEQ ID NO: 3840232 - DNA, 25 bp, Homo sapien
cagatattttatttgtgtttgtctt

SEQ ID NO: 3840233 - DNA, 25 bp, Homo sapien
tgaagaaagcaacacgactaaggac

SEQ ID NO: 3840234 - DNA, 25 bp, Homo sapien
gagaagaaccagtcacacaaaacac

SEQ ID NO: 3840235 - DNA, 25 bp, Homo sapien
gaacgtgcacgagaacaagcgagaa

SEQ ID NO: 3840236 - DNA, 25 bp, Homo sapien
gcaaatatgagaacgtgcacgagaa

SEQ ID NO: 3840237 - DNA, 25 bp, Homo sapien
caggcaaagagggagagactgtgac

SEQ ID NO: 3840238 - DNA, 25 bp, Homo sapien
tggtcatactgctccgccaagatcg

SEQ ID NO: 3840239 - DNA, 25 bp, Homo sapien
ccagcaagtgtgctcgcagagcctt

SEQ ID NO: 3840240 - DNA, 25 bp, Homo sapien
gagctttgggcgtggtctccagcaa

SEQ ID NO: 3840241 - DNA, 25 bp, Homo sapien
ggatcttacacgtctcctggaactg

SEQ ID NO: 3840242 - DNA, 25 bp, Homo sapien
cacatgtgctcgaggtgttcacgga

SEQ ID NO: 3840243 - DNA, 25 bp, Homo sapien
cattaaactaactcaggcccaggaa

SEQ ID NO: 3840244 - DNA, 25 bp, Homo sapien
ggttcttgggaataggcacatggct

SEQ ID NO: 3840245 - DNA, 25 bp, Homo sapien
gatggtcataccctgtggcacagca

SEQ ID NO: 3840246 - DNA, 25 bp, Homo sapien
gccgcagcgcgaccctctgctccag

SEQ ID NO: 3840247 - DNA, 25 bp, Homo sapien
gcggatcttgatcttgctctggtaa

SEQ ID NO: 3840248 - DNA, 25 bp, Homo sapien
gatcttgatcttgctctggtaagcg

SEQ ID NO: 3840249 - DNA, 25 bp, Homo sapien
tgttgaagctgctgccgaagggcct

SEQ ID NO: 3840250 - DNA, 25 bp, Homo sapien
aagcgacactggtgctgcggctcag

SEQ ID NO: 3840251 - DNA, 25 bp, Homo sapien
atgctttccgcatcgaaggcctcga

SEQ ID NO: 3840252 - DNA, 25 bp, Homo sapien
agggccatggctccagtgtgcccca

SEQ ID NO: 3840253 - DNA, 25 bp, Homo sapien
aagcagactgcggattcgctcggag

SEQ ID NO: 3840254 - DNA, 25 bp, Homo sapien
agacagttacgggaagagacccagg

SEQ ID NO: 3840255 - DNA, 25 bp, Homo sapien
gaatatagtatgtctagacccaccc

SEQ ID NO: 3840256 - DNA, 25 bp, Homo sapien
ttgaggcacctatcgccaagctggc

SEQ ID NO: 3840257 - DNA, 25 bp, Homo sapien
gagacccctggcaccatggtaggga

SEQ ID NO: 3840258 - DNA, 25 bp, Homo sapien
cactgagcagtccttcacgcacacc

SEQ ID NO: 3840259 - DNA, 25 bp, Homo sapien
ccactgagcagtccttcacgcacac

SEQ ID NO: 3840260 - DNA, 25 bp, Homo sapien
cttcacgcacaccaaagacagaagg

SEQ ID NO: 3840261 - DNA, 25 bp, Homo sapien
tcacgcacaccaaagacagaagggt

SEQ ID NO: 3840262 - DNA, 25 bp, Homo sapien
caaggctgtgccgtcaggactacaa

SEQ ID NO: 3840263 - DNA, 25 bp, Homo sapien
gagttcacccgtagcttcttccgag

SEQ ID NO: 3840264 - DNA, 25 bp, Homo sapien
caatcccgggttgagcaaaatggcg

SEQ ID NO: 3840265 - DNA, 25 bp, Homo sapien
tgaccagtgagaaaggcagcgtcgc

SEQ ID NO: 3840266 - DNA, 25 bp, Homo sapien
gcttccgcttcagattccggtattt

SEQ ID NO: 3840267 - DNA, 25 bp, Homo sapien
tgaggaacttgagcttccgcttcag

SEQ ID NO: 3840268 - DNA, 25 bp, Homo sapien
cttgagcttccgcttcagattccgg

SEQ ID NO: 3840269 - DNA, 25 bp, Homo sapien
tttgtagtccacttcgccgtccgcc

SEQ ID NO: 3840270 - DNA, 25 bp, Homo sapien
ctgagatcttgtccgcgccaggcct

SEQ ID NO: 3840271 - DNA, 25 bp, Homo sapien
ctgggtaaactgagatcttgtccgc

SEQ ID NO: 3840272 - DNA, 25 bp, Homo sapien
ggtaaactgagatcttgtccgcgcc

SEQ ID NO: 3840273 - DNA, 25 bp, Homo sapien
aaactgagatcttgtccgcgccagg

SEQ ID NO: 3840274 - DNA, 25 bp, Homo sapien
gccgctcgccccacccactttacac

SEQ ID NO: 3840275 - DNA, 25 bp, Homo sapien
ccttcagtaatttcctttgcgcttt

SEQ ID NO: 3840276 - DNA, 25 bp, Homo sapien
ggacaccttcagtaatttcctttgc

SEQ ID NO: 3840277 - DNA, 25 bp, Homo sapien
caccttcagtaatttcctttgcgct

SEQ ID NO: 3840278 - DNA, 25 bp, Homo sapien
tcagtaatttcctttgcgctttcct

SEQ ID NO: 3840279 - DNA, 25 bp, Homo sapien
ttcatccacgttctcgtactgcaga

SEQ ID NO: 3840280 - DNA, 25 bp, Homo sapien
tctcgtactgcagaagtcggtctag

SEQ ID NO: 3840281 - DNA, 25 bp, Homo sapien
cacgttctcgtactgcagaagtcgg

SEQ ID NO: 3840282 - DNA, 25 bp, Homo sapien
tactgcagaagtcggtctaggagga

SEQ ID NO: 3840283 - DNA, 25 bp, Homo sapien
tcaaatgtcactctgtgaaaggcct

SEQ ID NO: 3840284 - DNA, 25 bp, Homo sapien
ggtttcttctctggtcccaactcaa

SEQ ID NO: 3840285 - DNA, 25 bp, Homo sapien
tgagtactccattcagaggttgcct

SEQ ID NO: 3840286 - DNA, 25 bp, Homo sapien
ccattcagaggttgcctgctgcctg

SEQ ID NO: 3840287 - DNA, 25 bp, Homo sapien
ctgggaccacatgtatacaccacta

SEQ ID NO: 3840288 - DNA, 25 bp, Homo sapien
agccttgacctttcaggcaagggat

SEQ ID NO: 3840289 - DNA, 25 bp, Homo sapien
ggagcacagcggtgctatcatggct

SEQ ID NO: 3840290 - DNA, 25 bp, Homo sapien
cttgacctttcaggcaagggatcct

SEQ ID NO: 3840291 - DNA, 25 bp, Homo sapien
cagacaacttgggtgtcccctccgt

SEQ ID NO: 3840292 - DNA, 25 bp, Homo sapien
cgctgttatctgatgatgcagtggc

SEQ ID NO: 3840293 - DNA, 25 bp, Homo sapien
ggtgtcccctccgtctcgctgttat

SEQ ID NO: 3840294 - DNA, 25 bp, Homo sapien
tcttaggggccggtgtgtcagacaa

SEQ ID NO: 3840295 - DNA, 25 bp, Homo sapien
ctgttgaaggaggcagggagaggct

SEQ ID NO: 3840296 - DNA, 25 bp, Homo sapien
ggcgccccccagcggagggcttctc

SEQ ID NO: 3840297 - DNA, 25 bp, Homo sapien
tgttgaaggaggcagggagaggctg

SEQ ID NO: 3840298 - DNA, 25 bp, Homo sapien
gccccccagcggagggcttctcttc

SEQ ID NO: 3840299 - DNA, 25 bp, Homo sapien
cgagctcaggtatggggaggggacc

SEQ ID NO: 3840300 - DNA, 25 bp, Homo sapien
gagctcaggtatggggaggggaccc

SEQ ID NO: 3840301 - DNA, 25 bp, Homo sapien
tgggaggcggaatggaccggggtga

SEQ ID NO: 3840302 - DNA, 25 bp, Homo sapien
gagatgggaggcggaatggaccggg

SEQ ID NO: 3840303 - DNA, 25 bp, Homo sapien
tggagatgggaggcggaatggaccg

SEQ ID NO: 3840304 - DNA, 25 bp, Homo sapien
gatggagatgggaggcggaatggac

SEQ ID NO: 3840305 - DNA, 25 bp, Homo sapien
tagtcagaagggaatggggggtagc

SEQ ID NO: 3840306 - DNA, 25 bp, Homo sapien
gggccaggtagtcagaagggaatgg

SEQ ID NO: 3840307 - DNA, 25 bp, Homo sapien
caggtagtcagaagggaatgggggg

SEQ ID NO: 3840308 - DNA, 25 bp, Homo sapien
ggccaggtagtcagaagggaatggg

SEQ ID NO: 3840309 - DNA, 25 bp, Homo sapien
caggcggggccgtttctcccgcttg

SEQ ID NO: 3840310 - DNA, 25 bp, Homo sapien
tctcccgcttgggcctcaggggact

SEQ ID NO: 3840311 - DNA, 25 bp, Homo sapien
ttctcccgcttgggcctcaggggac

SEQ ID NO: 3840312 - DNA, 25 bp, Homo sapien
cccgcttgggcctcaggggactggg

SEQ ID NO: 3840313 - DNA, 25 bp, Homo sapien
gggcgcttgctggtcacatcgagta

SEQ ID NO: 3840314 - DNA, 25 bp, Homo sapien
tataggtgccaagcctaggaggcct

SEQ ID NO: 3840315 - DNA, 25 bp, Homo sapien
tcaaggccacgtggtttctaacagg

SEQ ID NO: 3840316 - DNA, 25 bp, Homo sapien
taagccgagacttctgtgatccacc

SEQ ID NO: 3840317 - DNA, 25 bp, Homo sapien
agatggcatctgacacatccgcggc

SEQ ID NO: 3840318 - DNA, 25 bp, Homo sapien
gagactccactcgtgctcagactaa

SEQ ID NO: 3840319 - DNA, 25 bp, Homo sapien
agcctggcggcttccaaatgcgcag

SEQ ID NO: 3840320 - DNA, 25 bp, Homo sapien
tctcaggctcaagaggtgaagcctc

SEQ ID NO: 3840321 - DNA, 25 bp, Homo sapien
tcagccaggaatatccaaatccact

SEQ ID NO: 3840322 - DNA, 25 bp, Homo sapien
tttgctcccggacatgactctgctt

SEQ ID NO: 3840323 - DNA, 25 bp, Homo sapien
gtaacagacaaattcccacttcagg

SEQ ID NO: 3840324 - DNA, 25 bp, Homo sapien
accctgggcttacacgttctccttg

SEQ ID NO: 3840325 - DNA, 25 bp, Homo sapien
tctgcttggactcccttccttccat

SEQ ID NO: 3840326 - DNA, 25 bp, Homo sapien
cctcactcccctggcccttcaggga

SEQ ID NO: 3840327 - DNA, 25 bp, Homo sapien
tgtcttcacagctatccttcctctg

SEQ ID NO: 3840328 - DNA, 25 bp, Homo sapien
tggcccttcagggactcccgctccc

SEQ ID NO: 3840329 - DNA, 25 bp, Homo sapien
ggccaagtccaactcaggcctgaca

SEQ ID NO: 3840330 - DNA, 25 bp, Homo sapien
tcgcatggtgagcactggaagagct

SEQ ID NO: 3840331 - DNA, 25 bp, Homo sapien
gagtgaaatgacaacgctgaggtcg

SEQ ID NO: 3840332 - DNA, 25 bp, Homo sapien
gctgtggcttaaagagtgaaatgac

SEQ ID NO: 3840333 - DNA, 25 bp, Homo sapien
gccgagcgattttcatcccttcact

SEQ ID NO: 3840334 - DNA, 25 bp, Homo sapien
cacgggccgagcgattttcatccct

SEQ ID NO: 3840335 - DNA, 25 bp, Homo sapien
caggcacgggccgagcgattttcat

SEQ ID NO: 3840336 - DNA, 25 bp, Homo sapien
gggccgagcgattttcatcccttca

SEQ ID NO: 3840337 - DNA, 25 bp, Homo sapien
cacaagcagacatgcgtgtatgact

SEQ ID NO: 3840338 - DNA, 25 bp, Homo sapien
gacttcctcagtggcgtcctctcag

SEQ ID NO: 3840339 - DNA, 25 bp, Homo sapien
gatggggggtccaactctgaacagc

SEQ ID NO: 3840340 - DNA, 25 bp, Homo sapien
tatgactggaaaggaccatcccctc

SEQ ID NO: 3840341 - DNA, 25 bp, Homo sapien
tgtgggcacaaactgggcacctgct

SEQ ID NO: 3840342 - DNA, 25 bp, Homo sapien
gaaacgccatgcgtggtctccagtg

SEQ ID NO: 3840343 - DNA, 25 bp, Homo sapien
tgcagtccccgtgctttgtctgtgg

SEQ ID NO: 3840344 - DNA, 25 bp, Homo sapien
tgagtgtcacatttggccctgtggc

SEQ ID NO: 3840345 - DNA, 25 bp, Homo sapien
gcggtcccagcctcctaactggact

SEQ ID NO: 3840346 - DNA, 25 bp, Homo sapien
ggtcccagcctcctaactggactcc

SEQ ID NO: 3840347 - DNA, 25 bp, Homo sapien
gctgcggtcccagcctcctaactgg

SEQ ID NO: 3840348 - DNA, 25 bp, Homo sapien
tcctccgcacggcagccagagcgcg

SEQ ID NO: 3840349 - DNA, 25 bp, Homo sapien
agcttgtattatgtcttggatgggc

SEQ ID NO: 3840350 - DNA, 25 bp, Homo sapien
ccccaagaagcttgtattatgtctt

SEQ ID NO: 3840351 - DNA, 25 bp, Homo sapien
tgcccccaagaagcttgtattatgt

SEQ ID NO: 3840352 - DNA, 25 bp, Homo sapien
tgtattatgtcttggatgggcccct

SEQ ID NO: 3840353 - DNA, 25 bp, Homo sapien
ggaggtgccacctgccaccagcttc

SEQ ID NO: 3840354 - DNA, 25 bp, Homo sapien
cactcactggttcggtggagggtat

SEQ ID NO: 3840355 - DNA, 25 bp, Homo sapien
cggagtcggcctggagtgcttgcct

SEQ ID NO: 3840356 - DNA, 25 bp, Homo sapien
tgtctcacaggaaaccgggagggaa

SEQ ID NO: 3840357 - DNA, 25 bp, Homo sapien
gcctcaggagactaggctttgcccc

SEQ ID NO: 3840358 - DNA, 25 bp, Homo sapien
gaaacacagggggactagtcaggga

SEQ ID NO: 3840359 - DNA, 25 bp, Homo sapien
gggggactagtcagggaggcactgg

SEQ ID NO: 3840360 - DNA, 25 bp, Homo sapien
actggggcctcaggagactaggctt

SEQ ID NO: 3840361 - DNA, 25 bp, Homo sapien
gaaggtcagcggccctcccacaggg

SEQ ID NO: 3840362 - DNA, 25 bp, Homo sapien
cggccagggaaggtcagcggccctc

SEQ ID NO: 3840363 - DNA, 25 bp, Homo sapien
ccagggaaggtcagcggccctccca

SEQ ID NO: 3840364 - DNA, 25 bp, Homo sapien
agggaaggtcagcggccctcccaca

SEQ ID NO: 3840365 - DNA, 25 bp, Homo sapien
tgctcaggatcgtgggggggggcat

SEQ ID NO: 3840366 - DNA, 25 bp, Homo sapien
cgtgctcaggatcgtgggggggggc

SEQ ID NO: 3840367 - DNA, 25 bp, Homo sapien
ggaccgtgctcaggatcgtgggggg

SEQ ID NO: 3840368 - DNA, 25 bp, Homo sapien
gaccgtgctcaggatcgtggggggg

SEQ ID NO: 3840369 - DNA, 25 bp, Homo sapien
gtcgatcaccaggtcatcgtctcca

SEQ ID NO: 3840370 - DNA, 25 bp, Homo sapien
tcactccgggatgtcgatcaccagg

SEQ ID NO: 3840371 - DNA, 25 bp, Homo sapien
accaggtcatcgtctccatccaagg

SEQ ID NO: 3840372 - DNA, 25 bp, Homo sapien
atccaaggcatcgtccccgctacct

SEQ ID NO: 3840373 - DNA, 25 bp, Homo sapien
tgggcatcaataaacacctccgagg

SEQ ID NO: 3840374 - DNA, 25 bp, Homo sapien
ggacacccgtgcatgtttacgcctt

SEQ ID NO: 3840375 - DNA, 25 bp, Homo sapien
cagctgcccttttaaagaggtggcc

SEQ ID NO: 3840376 - DNA, 25 bp, Homo sapien
ttgaaaaaacctagccctgtacagc

SEQ ID NO: 3840377 - DNA, 25 bp, Homo sapien
tcatttcttagtgagtccctgcggg

SEQ ID NO: 3840378 - DNA, 25 bp, Homo sapien
ttctagctctcacggcctgtgtcta

SEQ ID NO: 3840379 - DNA, 25 bp, Homo sapien
gcatagggtgatcaagtgacttgcc

SEQ ID NO: 3840380 - DNA, 25 bp, Homo sapien
ctggtagtgggtcactgcggaggca

SEQ ID NO: 3840381 - DNA, 25 bp, Homo sapien
tgtatctgcgcgtgtgaggtgctct

SEQ ID NO: 3840382 - DNA, 25 bp, Homo sapien
gagagcgcccttctgattggcaggt

SEQ ID NO: 3840383 - DNA, 25 bp, Homo sapien
tcacaacgaaggtgcgtgctcagcg

SEQ ID NO: 3840384 - DNA, 25 bp, Homo sapien
tgccgcaaccctatgcagagagcag

SEQ ID NO: 3840385 - DNA, 25 bp, Homo sapien
acccacaccagcacccatggccaca

SEQ ID NO: 3840386 - DNA, 25 bp, Homo sapien
cagtttctatggcccctagtgcagc

SEQ ID NO: 3840387 - DNA, 25 bp, Homo sapien
gccacagcctcatgactcctatcat

SEQ ID NO: 3840388 - DNA, 25 bp, Homo sapien
ttctatggcccctagtgcagccagc

SEQ ID NO: 3840389 - DNA, 25 bp, Homo sapien
tctctcgaggcggaagctgacttgg

SEQ ID NO: 3840390 - DNA, 25 bp, Homo sapien
ctgacgccgtggcacgcttgggtct

SEQ ID NO: 3840391 - DNA, 25 bp, Homo sapien
cccaagcaaactctgtgacaacagc

SEQ ID NO: 3840392 - DNA, 25 bp, Homo sapien
ctaagaagcgcggagactctgtccc

SEQ ID NO: 3840393 - DNA, 25 bp, Homo sapien
ctgagtccggataatcgaagaagtc

SEQ ID NO: 3840394 - DNA, 25 bp, Homo sapien
taatgaacacgatgggtttctctcc

SEQ ID NO: 3840395 - DNA, 25 bp, Homo sapien
ttctctccaataaactgggccacag

SEQ ID NO: 3840396 - DNA, 25 bp, Homo sapien
gcctggcttggtctgagtccggata

SEQ ID NO: 3840397 - DNA, 25 bp, Homo sapien
accaggatgtgatggaagagcccgg

SEQ ID NO: 3840398 - DNA, 25 bp, Homo sapien
gagaaagaagaacgccaccaccagc

SEQ ID NO: 3840399 - DNA, 25 bp, Homo sapien
ccaggatgtgatggaagagcccggg

SEQ ID NO: 3840400 - DNA, 25 bp, Homo sapien
caggatgtgatggaagagcccgggg

SEQ ID NO: 3840401 - DNA, 25 bp, Homo sapien
catgtccctggtgctactgacctct

SEQ ID NO: 3840402 - DNA, 25 bp, Homo sapien
taaaagacgatctgcgtgaacgcca

SEQ ID NO: 3840403 - DNA, 25 bp, Homo sapien
cagggaacttttgctcatcaacagg

SEQ ID NO: 3840404 - DNA, 25 bp, Homo sapien
gaccctgggaggtgctttacagacc

SEQ ID NO: 3840405 - DNA, 25 bp, Homo sapien
tgggcttattttggcactgtatctg

SEQ ID NO: 3840406 - DNA, 25 bp, Homo sapien
ggcactgtatctgtgccttttggtc

SEQ ID NO: 3840407 - DNA, 25 bp, Homo sapien
tgtatctgtgccttttggtctgtgg

SEQ ID NO: 3840408 - DNA, 25 bp, Homo sapien
tgccttttggtctgtgggcatcttc

SEQ ID NO: 3840409 - DNA, 25 bp, Homo sapien
tgcattttccccttaacgcttggct

SEQ ID NO: 3840410 - DNA, 25 bp, Homo sapien
tgtccttggctccttttgctctgca

SEQ ID NO: 3840411 - DNA, 25 bp, Homo sapien
gctgtcttgtctattcatccatttc

SEQ ID NO: 3840412 - DNA, 25 bp, Homo sapien
tgtttactctccaagtacatggaac

SEQ ID NO: 3840413 - DNA, 25 bp, Homo sapien
ggatcatttcagcccggggaggttg

SEQ ID NO: 3840414 - DNA, 25 bp, Homo sapien
gatcatttcagcccggggaggttga

SEQ ID NO: 3840415 - DNA, 25 bp, Homo sapien
cccttgggctgcagatctatgacct

SEQ ID NO: 3840416 - DNA, 25 bp, Homo sapien
tactgacaactgcatactggccaaa

SEQ ID NO: 3840417 - DNA, 25 bp, Homo sapien
caatcgagtagttacggtggccgcc

SEQ ID NO: 3840418 - DNA, 25 bp, Homo sapien
aaacaaaacatgtctgtgggccgga

SEQ ID NO: 3840419 - DNA, 25 bp, Homo sapien
ggagtggagctggaatgtggagtca

SEQ ID NO: 3840420 - DNA, 25 bp, Homo sapien
gagtggagctggaatgtggagtcaa

SEQ ID NO: 3840421 - DNA, 25 bp, Homo sapien
agtggagctggaatgtggagtcaaa

SEQ ID NO: 3840422 - DNA, 25 bp, Homo sapien
tggagtggagctggaatgtggagtc

SEQ ID NO: 3840423 - DNA, 25 bp, Homo sapien
gaatttgatgtaaacagagccatac

SEQ ID NO: 3840424 - DNA, 25 bp, Homo sapien
gattatctgtggactctgaatttga

SEQ ID NO: 3840425 - DNA, 25 bp, Homo sapien
ttccccaagttaaacgctgttcaga

SEQ ID NO: 3840426 - DNA, 25 bp, Homo sapien
tgaagtccatgtacacccacagtag

SEQ ID NO: 3840427 - DNA, 25 bp, Homo sapien
tgcagtgcccagactcgctggtgct

SEQ ID NO: 3840428 - DNA, 25 bp, Homo sapien
tcagccctacaaaaggcctccagga

SEQ ID NO: 3840429 - DNA, 25 bp, Homo sapien
tttgttcctaccatgggctcataca

SEQ ID NO: 3840430 - DNA, 25 bp, Homo sapien
ctggacacgtccgtggcctgcagtg

SEQ ID NO: 3840431 - DNA, 25 bp, Homo sapien
gattgtcttcttaggctgtcttccg

SEQ ID NO: 3840432 - DNA, 25 bp, Homo sapien
tggaggcctccgacttcctaaacga

SEQ ID NO: 3840433 - DNA, 25 bp, Homo sapien
tcagagggcgtttcaagcccagaaa

SEQ ID NO: 3840434 - DNA, 25 bp, Homo sapien
tcccactgtcaaccatactgaggtg

SEQ ID NO: 3840435 - DNA, 25 bp, Homo sapien
aagctaggtccaatcgtccgaggga

SEQ ID NO: 3840436 - DNA, 25 bp, Homo sapien
gattccgcgccaagctaggtccaat

SEQ ID NO: 3840437 - DNA, 25 bp, Homo sapien
gggcaattcacggattccgcgccaa

SEQ ID NO: 3840438 - DNA, 25 bp, Homo sapien
tcgggccgcgggcaattcacggatt

SEQ ID NO: 3840439 - DNA, 25 bp, Homo sapien
cacactccgggcttccccagtcggt

SEQ ID NO: 3840440 - DNA, 25 bp, Homo sapien
ccgaggcggcgccttcctcgcaggc

SEQ ID NO: 3840441 - DNA, 25 bp, Homo sapien
ggcttccccagtcggtcagcaccca

SEQ ID NO: 3840442 - DNA, 25 bp, Homo sapien
gaggctgagaggcaccgttagaccg

SEQ ID NO: 3840443 - DNA, 25 bp, Homo sapien
agggcagagccagtcagtccgggag

SEQ ID NO: 3840444 - DNA, 25 bp, Homo sapien
cagcaggcagttcctagtcagcagg

SEQ ID NO: 3840445 - DNA, 25 bp, Homo sapien
ccacagcgatgaagacgatggcagg

SEQ ID NO: 3840446 - DNA, 25 bp, Homo sapien
tagtcagcaggactagacccagcag

SEQ ID NO: 3840447 - DNA, 25 bp, Homo sapien
gacccagcagcaacaaatagatgcc

SEQ ID NO: 3840448 - DNA, 25 bp, Homo sapien
cgggattcctcttccccagagccca

SEQ ID NO: 3840449 - DNA, 25 bp, Homo sapien
gggattcctcttccccagagcccac

SEQ ID NO: 3840450 - DNA, 25 bp, Homo sapien
aagtgggccgggctaggcagaggaa

SEQ ID NO: 3840451 - DNA, 25 bp, Homo sapien
ggcccggaggaaccttgcttcctgc

SEQ ID NO: 3840452 - DNA, 25 bp, Homo sapien
cggaggaaccttgcttcctgcaggg

SEQ ID NO: 3840453 - DNA, 25 bp, Homo sapien
gggagctaccgtccgcgcagcagcc

SEQ ID NO: 3840454 - DNA, 25 bp, Homo sapien
cagcagcgggggcagcgaggtgccc

SEQ ID NO: 3840455 - DNA, 25 bp, Homo sapien
aggcacagtcgcagagtgggcagca

SEQ ID NO: 3840456 - DNA, 25 bp, Homo sapien
gcagcgggggcagcgaggtgcccag

SEQ ID NO: 3840457 - DNA, 25 bp, Homo sapien
agcgggggcagcgaggtgcccagtc

SEQ ID NO: 3840458 - DNA, 25 bp, Homo sapien
tcatcggagcttgatctcgaagcag

SEQ ID NO: 3840459 - DNA, 25 bp, Homo sapien
ggagcttgatctcgaagcagagaca

SEQ ID NO: 3840460 - DNA, 25 bp, Homo sapien
gcttgatctcgaagcagagacagtt

SEQ ID NO: 3840461 - DNA, 25 bp, Homo sapien
atctcgaagcagagacagttgaggc

SEQ ID NO: 3840462 - DNA, 25 bp, Homo sapien
caaatagaatcgttgacgtgtggag

SEQ ID NO: 3840463 - DNA, 25 bp, Homo sapien
gtgtggttgaggcacccctgcgtac

SEQ ID NO: 3840464 - DNA, 25 bp, Homo sapien
tgcgtacccggtactcaagggccag

SEQ ID NO: 3840465 - DNA, 25 bp, Homo sapien
gctcggcaggccatctgtggttcca

SEQ ID NO: 3840466 - DNA, 25 bp, Homo sapien
cccttgactccctgcggtgatggtg

SEQ ID NO: 3840467 - DNA, 25 bp, Homo sapien
ccctggctccttctctaatctccct

SEQ ID NO: 3840468 - DNA, 25 bp, Homo sapien
aggggactcggatcacgtggcctcc

SEQ ID NO: 3840469 - DNA, 25 bp, Homo sapien
gctgttctgattctctggagccctg

SEQ ID NO: 3840470 - DNA, 25 bp, Homo sapien
ccagacggaggcccttggttgtcaa

SEQ ID NO: 3840471 - DNA, 25 bp, Homo sapien
ttccttggaaatccagacggaggcc

SEQ ID NO: 3840472 - DNA, 25 bp, Homo sapien
ttcttccttggaaatccagacggag

SEQ ID NO: 3840473 - DNA, 25 bp, Homo sapien
tcttccttggaaatccagacggagg

SEQ ID NO: 3840474 - DNA, 25 bp, Homo sapien
ggttataaggcagctcctgcccgcc

SEQ ID NO: 3840475 - DNA, 25 bp, Homo sapien
ttcccgggctggttataaggcagct

SEQ ID NO: 3840476 - DNA, 25 bp, Homo sapien
gccgaaggagccggcagagcctggt

SEQ ID NO: 3840477 - DNA, 25 bp, Homo sapien
agcgagtgagctaggggttcccggg

SEQ ID NO: 3840478 - DNA, 25 bp, Homo sapien
ggccacatcgcgcagtcgtgcgtta

SEQ ID NO: 3840479 - DNA, 25 bp, Homo sapien
gaacgcagccgatttagcctcggaa

SEQ ID NO: 3840480 - DNA, 25 bp, Homo sapien
cggctgcagcgcgtgtcaccatagg

SEQ ID NO: 3840481 - DNA, 25 bp, Homo sapien
cagcttccggtcttcgcggctgcag

SEQ ID NO: 3840482 - DNA, 25 bp, Homo sapien
cctcttaggatccccgccagggcta

SEQ ID NO: 3840483 - DNA, 25 bp, Homo sapien
ctcttaggatccccgccagggctaa

SEQ ID NO: 3840484 - DNA, 25 bp, Homo sapien
tcttaggatccccgccagggctaag

SEQ ID NO: 3840485 - DNA, 25 bp, Homo sapien
tgcgccttgccatggggtcaccttg

SEQ ID NO: 3840486 - DNA, 25 bp, Homo sapien
aagctggacccttctggcttgcgcc

SEQ ID NO: 3840487 - DNA, 25 bp, Homo sapien
caggtgggtcatgttgaagctggac

SEQ ID NO: 3840488 - DNA, 25 bp, Homo sapien
gctgagggtggagttgcccactggc

SEQ ID NO: 3840489 - DNA, 25 bp, Homo sapien
ccacgatgcggtgagcgatgtcaga

SEQ ID NO: 3840490 - DNA, 25 bp, Homo sapien
tgccacgatgcggtgagcgatgtca

SEQ ID NO: 3840491 - DNA, 25 bp, Homo sapien
acgatgcggtgagcgatgtcagaca

SEQ ID NO: 3840492 - DNA, 25 bp, Homo sapien
tgcggtgagcgatgtcagacagctc

SEQ ID NO: 3840493 - DNA, 25 bp, Homo sapien
actcatctgcagccaggatgccctt

SEQ ID NO: 3840494 - DNA, 25 bp, Homo sapien
cagtggactcatctgcagccaggat

SEQ ID NO: 3840495 - DNA, 25 bp, Homo sapien
tcatctgcagccaggatgcccttgc

SEQ ID NO: 3840496 - DNA, 25 bp, Homo sapien
gtggactcatctgcagccaggatgc

SEQ ID NO: 3840497 - DNA, 25 bp, Homo sapien
tgggaattaggggatcagcctgcca

SEQ ID NO: 3840498 - DNA, 25 bp, Homo sapien
acatgggaattaggggatcagcctg

SEQ ID NO: 3840499 - DNA, 25 bp, Homo sapien
tcacatgggaattaggggatcagcc

SEQ ID NO: 3840500 - DNA, 25 bp, Homo sapien
ggaattaggggatcagcctgccact

SEQ ID NO: 3840501 - DNA, 25 bp, Homo sapien
aagcgccggttctcctcggtgttct

SEQ ID NO: 3840502 - DNA, 25 bp, Homo sapien
accgcccttggatttgataacttgg

SEQ ID NO: 3840503 - DNA, 25 bp, Homo sapien
aagaggatgacacccccaatgcagg

SEQ ID NO: 3840504 - DNA, 25 bp, Homo sapien
atccgccttctggtagagtgtctca

SEQ ID NO: 3840505 - DNA, 25 bp, Homo sapien
tccatgcaagtctctaggccaccaa

SEQ ID NO: 3840506 - DNA, 25 bp, Homo sapien
tacactgggatgttatttgacaaca

SEQ ID NO: 3840507 - DNA, 25 bp, Homo sapien
taaatgccctaagcctgaagcaggc

SEQ ID NO: 3840508 - DNA, 25 bp, Homo sapien
cacttagtaacaatcctctgagaca

SEQ ID NO: 3840509 - DNA, 25 bp, Homo sapien
atttagttacttaagccgggcatgg

SEQ ID NO: 3840510 - DNA, 25 bp, Homo sapien
ttacttaatcccttaaactgcatct

SEQ ID NO: 3840511 - DNA, 25 bp, Homo sapien
gcaccctttccactgtcgccccggc

SEQ ID NO: 3840512 - DNA, 25 bp, Homo sapien
gggtcagggtaacaacattaagaca

SEQ ID NO: 3840513 - DNA, 25 bp, Homo sapien
gtctcgccatttgtccctgccaggg

SEQ ID NO: 3840514 - DNA, 25 bp, Homo sapien
tgccagggggaccacgcccttgtct

SEQ ID NO: 3840515 - DNA, 25 bp, Homo sapien
cttgggtggtagtctcgccatttgt

SEQ ID NO: 3840516 - DNA, 25 bp, Homo sapien
gtagtctcgccatttgtccctgcca

SEQ ID NO: 3840517 - DNA, 25 bp, Homo sapien
gaacattggcattttccatgatggc

SEQ ID NO: 3840518 - DNA, 25 bp, Homo sapien
ggcataacgggccagaacattggca

SEQ ID NO: 3840519 - DNA, 25 bp, Homo sapien
cttcagcacacaacgccacttggcg

SEQ ID NO: 3840520 - DNA, 25 bp, Homo sapien
tggcattttccatgatggcgagggc

SEQ ID NO: 3840521 - DNA, 25 bp, Homo sapien
tccccatcagggaggatctcaggct

SEQ ID NO: 3840522 - DNA, 25 bp, Homo sapien
gctccacgatgggcacaatgccatt

SEQ ID NO: 3840523 - DNA, 25 bp, Homo sapien
tctcggtcacatactggcagcgctt

SEQ ID NO: 3840524 - DNA, 25 bp, Homo sapien
tactggcagcgcttcaagtcatggt

SEQ ID NO: 3840525 - DNA, 25 bp, Homo sapien
ttgcactggtcaggcaggtagccat

SEQ ID NO: 3840526 - DNA, 25 bp, Homo sapien
gcactggtcaggcaggtagccattt

SEQ ID NO: 3840527 - DNA, 25 bp, Homo sapien
cttgcactggtcaggcaggtagcca

SEQ ID NO: 3840528 - DNA, 25 bp, Homo sapien
actggtcaggcaggtagccatttac

SEQ ID NO: 3840529 - DNA, 25 bp, Homo sapien
agagcaggcgcacggtgggtagtgg

SEQ ID NO: 3840530 - DNA, 25 bp, Homo sapien
gagcagagcaggcgcacggtgggta

SEQ ID NO: 3840531 - DNA, 25 bp, Homo sapien
tggagcagagcaggcgcacggtggg

SEQ ID NO: 3840532 - DNA, 25 bp, Homo sapien
gcagagcaggcgcacggtgggtagt

SEQ ID NO: 3840533 - DNA, 25 bp, Homo sapien
cactgtgcggcgcagcgctgtgacg

SEQ ID NO: 3840534 - DNA, 25 bp, Homo sapien
agcgctgtgacggtcgccatggcaa

SEQ ID NO: 3840535 - DNA, 25 bp, Homo sapien
ctgtgcggcgcagcgctgtgacggt

SEQ ID NO: 3840536 - DNA, 25 bp, Homo sapien
cgctgtgacggtcgccatggcaatc

SEQ ID NO: 3840537 - DNA, 25 bp, Homo sapien
atagagatcaagatgagtgtgggcc

SEQ ID NO: 3840538 - DNA, 25 bp, Homo sapien
tgcatagagatcaagatgagtgtgg

SEQ ID NO: 3840539 - DNA, 25 bp, Homo sapien
tagagatcaagatgagtgtgggcct

SEQ ID NO: 3840540 - DNA, 25 bp, Homo sapien
catagagatcaagatgagtgtgggc

SEQ ID NO: 3840541 - DNA, 25 bp, Homo sapien
tgtagagcaggggtgaggcgagagg

SEQ ID NO: 3840542 - DNA, 25 bp, Homo sapien
tagagcaggggtgaggcgagagggg

SEQ ID NO: 3840543 - DNA, 25 bp, Homo sapien
ctgtagagcaggggtgaggcgagag

SEQ ID NO: 3840544 - DNA, 25 bp, Homo sapien
gtagagcaggggtgaggcgagaggg

SEQ ID NO: 3840545 - DNA, 25 bp, Homo sapien
cagggctcgcttgacatactcctcc

SEQ ID NO: 3840546 - DNA, 25 bp, Homo sapien
gcttgacatactcctcctgcgcagc

SEQ ID NO: 3840547 - DNA, 25 bp, Homo sapien
gggctcgcttgacatactcctcctg

SEQ ID NO: 3840548 - DNA, 25 bp, Homo sapien
tcgcttgacatactcctcctgcgca

SEQ ID NO: 3840549 - DNA, 25 bp, Homo sapien
aggggtggagtgagaagggctcttc

SEQ ID NO: 3840550 - DNA, 25 bp, Homo sapien
gagtgagaagggctcttctccgagt

SEQ ID NO: 3840551 - DNA, 25 bp, Homo sapien
agaagggctcttctccgagtcccat

SEQ ID NO: 3840552 - DNA, 25 bp, Homo sapien
ttctccgagtcccatccacccaggc

SEQ ID NO: 3840553 - DNA, 25 bp, Homo sapien
ccagcctgaccgctcggagtgtact

SEQ ID NO: 3840554 - DNA, 25 bp, Homo sapien
cctgaccgctcggagtgtactttcc

SEQ ID NO: 3840555 - DNA, 25 bp, Homo sapien
tgaccgctcggagtgtactttcctt

SEQ ID NO: 3840556 - DNA, 25 bp, Homo sapien
accgctcggagtgtactttccttga

SEQ ID NO: 3840557 - DNA, 25 bp, Homo sapien
taggcgtggttagagacgaagaggg

SEQ ID NO: 3840558 - DNA, 25 bp, Homo sapien
gcgtggttagagacgaagagggact

SEQ ID NO: 3840559 - DNA, 25 bp, Homo sapien
taataggcgtggttagagacgaaga

SEQ ID NO: 3840560 - DNA, 25 bp, Homo sapien
ttaataggcgtggttagagacgaag

SEQ ID NO: 3840561 - DNA, 25 bp, Homo sapien
cagggcctggagtgttgggggcagc

SEQ ID NO: 3840562 - DNA, 25 bp, Homo sapien
ctcctcttcaagagtgggagggggc

SEQ ID NO: 3840563 - DNA, 25 bp, Homo sapien
cggcctcctcttcaagagtgggagg

SEQ ID NO: 3840564 - DNA, 25 bp, Homo sapien
aggcggcctcctcttcaagagtggg

SEQ ID NO: 3840565 - DNA, 25 bp, Homo sapien
tagcattcacagacgacaccacaca

SEQ ID NO: 3840566 - DNA, 25 bp, Homo sapien
ttagcattcacagacgacaccacac

SEQ ID NO: 3840567 - DNA, 25 bp, Homo sapien
cagttcaatcttgggcaaaagagcc

SEQ ID NO: 3840568 - DNA, 25 bp, Homo sapien
tatgttgcctggctcatgtcactca

SEQ ID NO: 3840569 - DNA, 25 bp, Homo sapien
ttctggacctaaaagtgctgaggct

SEQ ID NO: 3840570 - DNA, 25 bp, Homo sapien
cctaagacatgagcagttacaacca

SEQ ID NO: 3840571 - DNA, 25 bp, Homo sapien
tggctctgttgcctaggctggagtg

SEQ ID NO: 3840572 - DNA, 25 bp, Homo sapien
tattttttgggacggagtctggctc

SEQ ID NO: 3840573 - DNA, 25 bp, Homo sapien
ctggctctgttgcctaggctggagt

SEQ ID NO: 3840574 - DNA, 25 bp, Homo sapien
tgcgactccggttccggctctccgg

SEQ ID NO: 3840575 - DNA, 25 bp, Homo sapien
cgccgctgcgactccggttccggct

SEQ ID NO: 3840576 - DNA, 25 bp, Homo sapien
gccgccgccgctcctacttccggcc

SEQ ID NO: 3840577 - DNA, 25 bp, Homo sapien
tctttcactccgctttcgaccgccg

SEQ ID NO: 3840578 - DNA, 25 bp, Homo sapien
cccctccgcaccgcacaggggtctc

SEQ ID NO: 3840579 - DNA, 25 bp, Homo sapien
cgccccctccgcaccgcacaggggt

SEQ ID NO: 3840580 - DNA, 25 bp, Homo sapien
cggcgcgggtcagagtcggggccgc

SEQ ID NO: 3840581 - DNA, 25 bp, Homo sapien
gcgggtcagagtcggggccgccgcc

SEQ ID NO: 3840582 - DNA, 25 bp, Homo sapien
cggtccaggtcgctgatctccgcca

SEQ ID NO: 3840583 - DNA, 25 bp, Homo sapien
ggccttagcgcacagggccttgact

SEQ ID NO: 3840584 - DNA, 25 bp, Homo sapien
gatgagctcgcagcgacgcagctgc

SEQ ID NO: 3840585 - DNA, 25 bp, Homo sapien
gccttgacttcgctctccttgatga

SEQ ID NO: 3840586 - DNA, 25 bp, Homo sapien
ggagacaggagaagaccagggtcac

SEQ ID NO: 3840587 - DNA, 25 bp, Homo sapien
gagacaggagaagaccagggtcacc

SEQ ID NO: 3840588 - DNA, 25 bp, Homo sapien
aggagaagaccagggtcaccacagc

SEQ ID NO: 3840589 - DNA, 25 bp, Homo sapien
gacaggagaagaccagggtcaccac

SEQ ID NO: 3840590 - DNA, 25 bp, Homo sapien
tgtgactggcgagtccaccctctgc

SEQ ID NO: 3840591 - DNA, 25 bp, Homo sapien
gagtccaccctctgcacgttgctct

SEQ ID NO: 3840592 - DNA, 25 bp, Homo sapien
tggcgagtccaccctctgcacgttg

SEQ ID NO: 3840593 - DNA, 25 bp, Homo sapien
gtgactggcgagtccaccctctgca

SEQ ID NO: 3840594 - DNA, 25 bp, Homo sapien
tgtgagccaacgtgcacagcaaccc

SEQ ID NO: 3840595 - DNA, 25 bp, Homo sapien
gaagaggaaacttcatgtgcctgaa

SEQ ID NO: 3840596 - DNA, 25 bp, Homo sapien
gcctgaaagaccaggcctggctctg

SEQ ID NO: 3840597 - DNA, 25 bp, Homo sapien
tttagcagtgctccgttgaaggtga

SEQ ID NO: 3840598 - DNA, 25 bp, Homo sapien
gaggtcatagaattgtccatggatg

SEQ ID NO: 3840599 - DNA, 25 bp, Homo sapien
ttgaggtcatagaattgtccatgga

SEQ ID NO: 3840600 - DNA, 25 bp, Homo sapien
aggtcatagaattgtccatggatgt

SEQ ID NO: 3840601 - DNA, 25 bp, Homo sapien
tttgaggtcatagaattgtccatgg

SEQ ID NO: 3840602 - DNA, 25 bp, Homo sapien
agcagcaggaggaacgtttcgacgc

SEQ ID NO: 3840603 - DNA, 25 bp, Homo sapien
atagaagccacggtccacaaagtcc

SEQ ID NO: 3840604 - DNA, 25 bp, Homo sapien
ggtagttggtctcagggacgtcgcc

SEQ ID NO: 3840605 - DNA, 25 bp, Homo sapien
cacaaagtcccccatgaagaggtag

SEQ ID NO: 3840606 - DNA, 25 bp, Homo sapien
gatgagggcggaacggactaagaca

SEQ ID NO: 3840607 - DNA, 25 bp, Homo sapien
gctggtcacgataggagatgagggc

SEQ ID NO: 3840608 - DNA, 25 bp, Homo sapien
cagtgacacagctccaaggtggggc

SEQ ID NO: 3840609 - DNA, 25 bp, Homo sapien
cccaggttgggggtgcagaagccgg

SEQ ID NO: 3840610 - DNA, 25 bp, Homo sapien
gacctgccacattcgcaacagtgag

SEQ ID NO: 3840611 - DNA, 25 bp, Homo sapien
ccccaaaagcagaatcggtccatca

SEQ ID NO: 3840612 - DNA, 25 bp, Homo sapien
gcctgaatcgtgtggcatcagccac

SEQ ID NO: 3840613 - DNA, 25 bp, Homo sapien
ttcacctaccagacacagaccgggt

SEQ ID NO: 3840614 - DNA, 25 bp, Homo sapien
catcgtagaagccatagacctgcgt

SEQ ID NO: 3840615 - DNA, 25 bp, Homo sapien
aagatctcagtgcagtagcgccaca

SEQ ID NO: 3840616 - DNA, 25 bp, Homo sapien
catcgatgatggctgacaggctgag

SEQ ID NO: 3840617 - DNA, 25 bp, Homo sapien
tggttgccccggatcagtgtgatgc

SEQ ID NO: 3840618 - DNA, 25 bp, Homo sapien
ctgaagcccccctcctctccctgtc

SEQ ID NO: 3840619 - DNA, 25 bp, Homo sapien
ctccctgtcccatggagccctgggc

SEQ ID NO: 3840620 - DNA, 25 bp, Homo sapien
agcccccctcctctccctgtcccat

SEQ ID NO: 3840621 - DNA, 25 bp, Homo sapien
cctgtcccatggagccctgggctgg

SEQ ID NO: 3840622 - DNA, 25 bp, Homo sapien
agagcagggaaagaggacggggctg

SEQ ID NO: 3840623 - DNA, 25 bp, Homo sapien
ctacaggggagagcagggaaagagg

SEQ ID NO: 3840624 - DNA, 25 bp, Homo sapien
caggggagagcagggaaagaggacg

SEQ ID NO: 3840625 - DNA, 25 bp, Homo sapien
ggagagcagggaaagaggacggggc

SEQ ID NO: 3840626 - DNA, 25 bp, Homo sapien
agaggcccccgtgcacgcagaagat

SEQ ID NO: 3840627 - DNA, 25 bp, Homo sapien
gggcccatcatgaggcacctcttgc

SEQ ID NO: 3840628 - DNA, 25 bp, Homo sapien
tgggtcagaccagaggaggtcacac

SEQ ID NO: 3840629 - DNA, 25 bp, Homo sapien
tcgattgtccgaatctgatccaggg

SEQ ID NO: 3840630 - DNA, 25 bp, Homo sapien
ggacgagtgacagtgaagaccagcc

SEQ ID NO: 3840631 - DNA, 25 bp, Homo sapien
aagctgctgtcatgttctaaggccc

SEQ ID NO: 3840632 - DNA, 25 bp, Homo sapien
tggctggtcctcagaagacctgact

SEQ ID NO: 3840633 - DNA, 25 bp, Homo sapien
tccagggttccagccatttggcagg

SEQ ID NO: 3840634 - DNA, 25 bp, Homo sapien
tgtaaccttccatcaccagttggtg

SEQ ID NO: 3840635 - DNA, 25 bp, Homo sapien
gtgggcacggcagatcatgtcaatg

SEQ ID NO: 3840636 - DNA, 25 bp, Homo sapien
cacgtcactgccaaataggtagccg

SEQ ID NO: 3840637 - DNA, 25 bp, Homo sapien
gtagcagtagttgggtgccgaccac

SEQ ID NO: 3840638 - DNA, 25 bp, Homo sapien
agcagctcggctcagatgcccgccc

SEQ ID NO: 3840639 - DNA, 25 bp, Homo sapien
gatgccccgtgtctcttggggagca

SEQ ID NO: 3840640 - DNA, 25 bp, Homo sapien
cttcttggaggggatgccccgtgtc

SEQ ID NO: 3840641 - DNA, 25 bp, Homo sapien
ggagatgctcgtccagctccaagat

SEQ ID NO: 3840642 - DNA, 25 bp, Homo sapien
agtagtcggccacgggcttcttgga

SEQ ID NO: 3840643 - DNA, 25 bp, Homo sapien
cagtggtgcgagggccagaagggtt

SEQ ID NO: 3840644 - DNA, 25 bp, Homo sapien
gagtcacagtggtgcgagggccaga

SEQ ID NO: 3840645 - DNA, 25 bp, Homo sapien
cacagtggtgcgagggccagaaggg

SEQ ID NO: 3840646 - DNA, 25 bp, Homo sapien
tggtgcgagggccagaagggttgga

SEQ ID NO: 3840647 - DNA, 25 bp, Homo sapien
aggaggaacatggagctaggtctcc

SEQ ID NO: 3840648 - DNA, 25 bp, Homo sapien
cctcgaagcaccctcttgggggaca

SEQ ID NO: 3840649 - DNA, 25 bp, Homo sapien
ctccagagaagtcctcaccctcgaa

SEQ ID NO: 3840650 - DNA, 25 bp, Homo sapien
agagaagtcctcaccctcgaagcac

SEQ ID NO: 3840651 - DNA, 25 bp, Homo sapien
ccacctgccctatagttatggcctg

SEQ ID NO: 3840652 - DNA, 25 bp, Homo sapien
ccctatagttatggcctgtgttctg

SEQ ID NO: 3840653 - DNA, 25 bp, Homo sapien
ccttcttaccccacgcgtgtctgtc

SEQ ID NO: 3840654 - DNA, 25 bp, Homo sapien
tgtctgtccccctcgttctgtagcg

SEQ ID NO: 3840655 - DNA, 25 bp, Homo sapien
ctctgtgaggtggatgtcccaggca

SEQ ID NO: 3840656 - DNA, 25 bp, Homo sapien
gcaacaacatggagcttgggttcac

SEQ ID NO: 3840657 - DNA, 25 bp, Homo sapien
caggattcttcaggcgtcgcttgga

SEQ ID NO: 3840658 - DNA, 25 bp, Homo sapien
tgtctctggacaggtggcttggcca

SEQ ID NO: 3840659 - DNA, 25 bp, Homo sapien
tagctggataacctagggagccgcg

SEQ ID NO: 3840660 - DNA, 25 bp, Homo sapien
gacagtaggaattgcctggtccgac

SEQ ID NO: 3840661 - DNA, 25 bp, Homo sapien
gcccacgttgctgaaagtccggatt

SEQ ID NO: 3840662 - DNA, 25 bp, Homo sapien
cccaaatagggtagacgtgcgacaa

SEQ ID NO: 3840663 - DNA, 25 bp, Homo sapien
tgcaagagaggtaaagattgaagcc

SEQ ID NO: 3840664 - DNA, 25 bp, Homo sapien
tatgagcctttgagttaacccacga

SEQ ID NO: 3840665 - DNA, 25 bp, Homo sapien
tacaaggtatgatgcggcagcccac

SEQ ID NO: 3840666 - DNA, 25 bp, Homo sapien
tcatttgccagggtggtaaggcctt

SEQ ID NO: 3840667 - DNA, 25 bp, Homo sapien
gcaccgggcagggaacttgatctct

SEQ ID NO: 3840668 - DNA, 25 bp, Homo sapien
gcggcactacctggacaaccatgga

SEQ ID NO: 3840669 - DNA, 25 bp, Homo sapien
tacttcagaacggtgctacttgcgc

SEQ ID NO: 3840670 - DNA, 25 bp, Homo sapien
gagccactggcgtcataacggatta

SEQ ID NO: 3840671 - DNA, 25 bp, Homo sapien
gagcctgccctaggacactgtcaag

SEQ ID NO: 3840672 - DNA, 25 bp, Homo sapien
cactaagtgctgtctggtctcaaga

SEQ ID NO: 3840673 - DNA, 25 bp, Homo sapien
gcgcccggccttatacaagatttat

SEQ ID NO: 3840674 - DNA, 25 bp, Homo sapien
tctctaaagtcacccctggagtggg

SEQ ID NO: 3840675 - DNA, 25 bp, Homo sapien
ttatagcacggctgtctcagaccct

SEQ ID NO: 3840676 - DNA, 25 bp, Homo sapien
gaatactaagggaactgtgaacacc

SEQ ID NO: 3840677 - DNA, 25 bp, Homo sapien
ggtaatttatccatctcaggccatc

SEQ ID NO: 3840678 - DNA, 25 bp, Homo sapien
gaatgtctactctgtcccaggtgca

SEQ ID NO: 3840679 - DNA, 25 bp, Homo sapien
tctgaggacagacttgacttgggct

SEQ ID NO: 3840680 - DNA, 25 bp, Homo sapien
tcgctaatggcttcctgtctaactg

SEQ ID NO: 3840681 - DNA, 25 bp, Homo sapien
tagagatgtgtctatggctgaccct

SEQ ID NO: 3840682 - DNA, 25 bp, Homo sapien
gttggatgcgctggctacaagtacc

SEQ ID NO: 3840683 - DNA, 25 bp, Homo sapien
tgaagccagctatacacaggaattt

SEQ ID NO: 3840684 - DNA, 25 bp, Homo sapien
gattgcactactggacccagctctg

SEQ ID NO: 3840685 - DNA, 25 bp, Homo sapien
tttatttctggctgggtactatggc

SEQ ID NO: 3840686 - DNA, 25 bp, Homo sapien
taacacaggtaagggattggtgaga

SEQ ID NO: 3840687 - DNA, 25 bp, Homo sapien
cggctccgggaagcgaatctaaact

SEQ ID NO: 3840688 - DNA, 25 bp, Homo sapien
tggctctgagatctaagcatgggtg

SEQ ID NO: 3840689 - DNA, 25 bp, Homo sapien
gttggtccccaaccatagcgcaggc

SEQ ID NO: 3840690 - DNA, 25 bp, Homo sapien
taaaatgtcaaaacgcaagagcacc

SEQ ID NO: 3840691 - DNA, 25 bp, Homo sapien
cccgctgaagatgctcttgtcaaga

SEQ ID NO: 3840692 - DNA, 25 bp, Homo sapien
gctgaagatgctcttgtcaagacaa

SEQ ID NO: 3840693 - DNA, 25 bp, Homo sapien
acagtgatcccccaaaagccggagg

SEQ ID NO: 3840694 - DNA, 25 bp, Homo sapien
tgatcccccaaaagccggaggtgga

SEQ ID NO: 3840695 - DNA, 25 bp, Homo sapien
gaagaggctgctaggtcggcctgcc

SEQ ID NO: 3840696 - DNA, 25 bp, Homo sapien
gagcggtgaggagcgtatgtgaaga

SEQ ID NO: 3840697 - DNA, 25 bp, Homo sapien
aggctgctaggtcggcctgcccaaa

SEQ ID NO: 3840698 - DNA, 25 bp, Homo sapien
gcctgcccaaagagcggtgaggagc

SEQ ID NO: 3840699 - DNA, 25 bp, Homo sapien
cttggagggtgccatgcccagagcc

SEQ ID NO: 3840700 - DNA, 25 bp, Homo sapien
cagagcctctgcccctagcctcagc

SEQ ID NO: 3840701 - DNA, 25 bp, Homo sapien
cgcttggagggtgccatgcccagag

SEQ ID NO: 3840702 - DNA, 25 bp, Homo sapien
gagcctctgcccctagcctcagcct

SEQ ID NO: 3840703 - DNA, 25 bp, Homo sapien
tcttagttaccgtgtccagagccca

SEQ ID NO: 3840704 - DNA, 25 bp, Homo sapien
tcatcagcccagatggctccgaggg

SEQ ID NO: 3840705 - DNA, 25 bp, Homo sapien
ccccactgcatgtttgttgactgac

SEQ ID NO: 3840706 - DNA, 25 bp, Homo sapien
taatggttcagactcaggcgtcatc

SEQ ID NO: 3840707 - DNA, 25 bp, Homo sapien
gacgcgcacatcttcatagcactgg

SEQ ID NO: 3840708 - DNA, 25 bp, Homo sapien
tcccaggtggtctgtgagacgcgca

SEQ ID NO: 3840709 - DNA, 25 bp, Homo sapien
gccacaaacttagggttgacagcac

SEQ ID NO: 3840710 - DNA, 25 bp, Homo sapien
ggctgtccaaacacgtggcggaact

SEQ ID NO: 3840711 - DNA, 25 bp, Homo sapien
agcttccccgagtgaggcttccatg

SEQ ID NO: 3840712 - DNA, 25 bp, Homo sapien
tgttccagtcccaaaatggcctggg

SEQ ID NO: 3840713 - DNA, 25 bp, Homo sapien
ttttccagatggcaacacaggccct

SEQ ID NO: 3840714 - DNA, 25 bp, Homo sapien
gacagagttgctaggtcctcagaca

SEQ ID NO: 3840715 - DNA, 25 bp, Homo sapien
attgtgcgggcaccaggcgatgtct

SEQ ID NO: 3840716 - DNA, 25 bp, Homo sapien
actgtgcagtcctcggagccactgg

SEQ ID NO: 3840717 - DNA, 25 bp, Homo sapien
tgtggccacagaccgtgggcgcatt

SEQ ID NO: 3840718 - DNA, 25 bp, Homo sapien
ggagccactggcaatgacgttgtca

SEQ ID NO: 3840719 - DNA, 25 bp, Homo sapien
gccagtgagtcttcaggactccaaa

SEQ ID NO: 3840720 - DNA, 25 bp, Homo sapien
actccaaatgtcagatcccatccta

SEQ ID NO: 3840721 - DNA, 25 bp, Homo sapien
tccagggtgacgacgggctcccgca

SEQ ID NO: 3840722 - DNA, 25 bp, Homo sapien
tgtgccaggccacaatgcccacacg

SEQ ID NO: 3840723 - DNA, 25 bp, Homo sapien
catcaggcccccatctgggatctcc

SEQ ID NO: 3840724 - DNA, 25 bp, Homo sapien
actgagcagcacgttctgggctgtg

SEQ ID NO: 3840725 - DNA, 25 bp, Homo sapien
ctgccctcatccactgcaggccacg

SEQ ID NO: 3840726 - DNA, 25 bp, Homo sapien
tgcacgttccccacagtgtcagaag

SEQ ID NO: 3840727 - DNA, 25 bp, Homo sapien
tgtcagaagccatgagcctcctgcc

SEQ ID NO: 3840728 - DNA, 25 bp, Homo sapien
tccactgcaggccacgagccacccc

SEQ ID NO: 3840729 - DNA, 25 bp, Homo sapien
cacgcgcttgtcacggcaggaggta

SEQ ID NO: 3840730 - DNA, 25 bp, Homo sapien
ctttgcggggctcgatgatgcgcac

SEQ ID NO: 3840731 - DNA, 25 bp, Homo sapien
ggaggtacaaatgaggcctccatct

SEQ ID NO: 3840732 - DNA, 25 bp, Homo sapien
cagtccacactgtagatcgtgtctg

SEQ ID NO: 3840733 - DNA, 25 bp, Homo sapien
tggtaggtcaggcacccgtacatac

SEQ ID NO: 3840734 - DNA, 25 bp, Homo sapien
gataaaggctgtagggtcaaaggtc

SEQ ID NO: 3840735 - DNA, 25 bp, Homo sapien
tggaggcgagggagggcagcatcca

SEQ ID NO: 3840736 - DNA, 25 bp, Homo sapien
tcaaaggtcagggtagatggcgact

SEQ ID NO: 3840737 - DNA, 25 bp, Homo sapien
gctcactcatgcggctgaagcccgt

SEQ ID NO: 3840738 - DNA, 25 bp, Homo sapien
aggatcttcccctccgacacgaaca

SEQ ID NO: 3840739 - DNA, 25 bp, Homo sapien
ctcactcatgcggctgaagcccgtg

SEQ ID NO: 3840740 - DNA, 25 bp, Homo sapien
gaacactgcacgcacgggccgggtc

SEQ ID NO: 3840741 - DNA, 25 bp, Homo sapien
tagacacaggtgagaggtaacatcc

SEQ ID NO: 3840742 - DNA, 25 bp, Homo sapien
aaccagtgggaacaaccatctcacg

SEQ ID NO: 3840743 - DNA, 25 bp, Homo sapien
ccatctcacgcctgggtaaactgag

SEQ ID NO: 3840744 - DNA, 25 bp, Homo sapien
ggcagagcagggacgaaacctccag

SEQ ID NO: 3840745 - DNA, 25 bp, Homo sapien
tagacgatgttggtgtcagggtcaa

SEQ ID NO: 3840746 - DNA, 25 bp, Homo sapien
tgccacagaggtagacgatgttggt

SEQ ID NO: 3840747 - DNA, 25 bp, Homo sapien
cgatgttggtgtcagggtcaaagaa

SEQ ID NO: 3840748 - DNA, 25 bp, Homo sapien
agcaggacaccgctgctggtgtcca

SEQ ID NO: 3840749 - DNA, 25 bp, Homo sapien
ggagggtcaataccagcggatgccc

SEQ ID NO: 3840750 - DNA, 25 bp, Homo sapien
tggagggagggtcaataccagcgga

SEQ ID NO: 3840751 - DNA, 25 bp, Homo sapien
gggtcaataccagcggatgcccact

SEQ ID NO: 3840752 - DNA, 25 bp, Homo sapien
ggtgtggagggagggtcaataccag

SEQ ID NO: 3840753 - DNA, 25 bp, Homo sapien
aactgaacatggagagatagtgcag

SEQ ID NO: 3840754 - DNA, 25 bp, Homo sapien
ctcaaagtaccggattgagctgtca

SEQ ID NO: 3840755 - DNA, 25 bp, Homo sapien
aaaggggcctcggaagtgatctcaa

SEQ ID NO: 3840756 - DNA, 25 bp, Homo sapien
caaagtaccggattgagctgtcacc

SEQ ID NO: 3840757 - DNA, 25 bp, Homo sapien
aaggagcatgctgcggtcagggccg

SEQ ID NO: 3840758 - DNA, 25 bp, Homo sapien
cacagtctggttgggtgggcttggg

SEQ ID NO: 3840759 - DNA, 25 bp, Homo sapien
caaggagcatgctgcggtcagggcc

SEQ ID NO: 3840760 - DNA, 25 bp, Homo sapien
gggcttgggactgcccactgcccaa

SEQ ID NO: 3840761 - DNA, 25 bp, Homo sapien
cctccgctcgtgcagcttgtagaac

SEQ ID NO: 3840762 - DNA, 25 bp, Homo sapien
acacctccgctcgtgcagcttgtag

SEQ ID NO: 3840763 - DNA, 25 bp, Homo sapien
ctttcgaggcactgtcatggcaatg

SEQ ID NO: 3840764 - DNA, 25 bp, Homo sapien
tgtcatggcaatgggctcacacctc

SEQ ID NO: 3840765 - DNA, 25 bp, Homo sapien
cacaagaccgcaaagtcagtgccca

SEQ ID NO: 3840766 - DNA, 25 bp, Homo sapien
caaggccagggatagtgaggaaagc

SEQ ID NO: 3840767 - DNA, 25 bp, Homo sapien
cgcaaagtcagtgcccagcctggag

SEQ ID NO: 3840768 - DNA, 25 bp, Homo sapien
aggaaagcgcttatgccaggacacc

SEQ ID NO: 3840769 - DNA, 25 bp, Homo sapien
cactcctcagccgtgagggcagggt

SEQ ID NO: 3840770 - DNA, 25 bp, Homo sapien
tcctgcgcccggtgtccaggccccg

SEQ ID NO: 3840771 - DNA, 25 bp, Homo sapien
tgcggtgggtgggtacaggtcctcc

SEQ ID NO: 3840772 - DNA, 25 bp, Homo sapien
tcagctcccggctctttgggggtac

SEQ ID NO: 3840773 - DNA, 25 bp, Homo sapien
cacaaagattcccaatgttgtgagt

SEQ ID NO: 3840774 - DNA, 25 bp, Homo sapien
gcctcaggattaccattcccggacc

SEQ ID NO: 3840775 - DNA, 25 bp, Homo sapien
gattcccaatgttgtgagtttgagg

SEQ ID NO: 3840776 - DNA, 25 bp, Homo sapien
cccaatgttgtgagtttgaggtgcc

SEQ ID NO: 3840777 - DNA, 25 bp, Homo sapien
ggtgctgcattaggcccagctcctc

SEQ ID NO: 3840778 - DNA, 25 bp, Homo sapien
ccggtgctgcattaggcccagctcc

SEQ ID NO: 3840779 - DNA, 25 bp, Homo sapien
cggtgctgcattaggcccagctcct

SEQ ID NO: 3840780 - DNA, 25 bp, Homo sapien
ccagcctgtccaagcgcttctggag

SEQ ID NO: 3840781 - DNA, 25 bp, Homo sapien
tccagcctgtccaagcgcttctgga

SEQ ID NO: 3840782 - DNA, 25 bp, Homo sapien
ctccagcctgtccaagcgcttctgg

SEQ ID NO: 3840783 - DNA, 25 bp, Homo sapien
tgagtggatgggtgtgaatggctga

SEQ ID NO: 3840784 - DNA, 25 bp, Homo sapien
ttattgaggttctaagctagggcct

SEQ ID NO: 3840785 - DNA, 25 bp, Homo sapien
catggctggtttctacccacgaagg

SEQ ID NO: 3840786 - DNA, 25 bp, Homo sapien
taaaagatgcctaccctgtaagtga

SEQ ID NO: 3840787 - DNA, 25 bp, Homo sapien
ctctgagaaggagctcggaaacgga

SEQ ID NO: 3840788 - DNA, 25 bp, Homo sapien
caacctttgcctcccggattcaagc

SEQ ID NO: 3840789 - DNA, 25 bp, Homo sapien
aattctcttgcctcagcctcctgag

SEQ ID NO: 3840790 - DNA, 25 bp, Homo sapien
tggagtacaatggcatgatctcggc

SEQ ID NO: 3840791 - DNA, 25 bp, Homo sapien
gaagtctcactcctgtcccccaggc

SEQ ID NO: 3840792 - DNA, 25 bp, Homo sapien
ggagggctggatcgctagggctgca

SEQ ID NO: 3840793 - DNA, 25 bp, Homo sapien
tgattgccgtgacctagggtccagg

SEQ ID NO: 3840794 - DNA, 25 bp, Homo sapien
gtgtagaagtccgaccgcggaagcc

SEQ ID NO: 3840795 - DNA, 25 bp, Homo sapien
gcttgcttcggaacaagctctcggg

SEQ ID NO: 3840796 - DNA, 25 bp, Homo sapien
attgtgctgctggacccgacgagca

SEQ ID NO: 3840797 - DNA, 25 bp, Homo sapien
aggtagacgccgaaaaagcgccctg

SEQ ID NO: 3840798 - DNA, 25 bp, Homo sapien
gttgacagtgaaccccacgtagacg

SEQ ID NO: 3840799 - DNA, 25 bp, Homo sapien
ttttgcggcccccattgtgctgctg

SEQ ID NO: 3840800 - DNA, 25 bp, Homo sapien
tctgtcacagtcctggccggtcctt

SEQ ID NO: 3840801 - DNA, 25 bp, Homo sapien
cagacgccccgcctctgtcacagtc

SEQ ID NO: 3840802 - DNA, 25 bp, Homo sapien
cctctgggacgccttcctcccggca

SEQ ID NO: 3840803 - DNA, 25 bp, Homo sapien
gggacgccttcctcccggcacagaa

SEQ ID NO: 3840804 - DNA, 25 bp, Homo sapien
tgagttccgccgcggagatgccccg

SEQ ID NO: 3840805 - DNA, 25 bp, Homo sapien
agttccgccgcggagatgccccggg

SEQ ID NO: 3840806 - DNA, 25 bp, Homo sapien
ctgagttccgccgcggagatgcccc

SEQ ID NO: 3840807 - DNA, 25 bp, Homo sapien
ttccgccgcggagatgccccgggca

SEQ ID NO: 3840808 - DNA, 25 bp, Homo sapien
cggccacggaggacgggaagccgtg

SEQ ID NO: 3840809 - DNA, 25 bp, Homo sapien
ggccacggaggacgggaagccgtgc

SEQ ID NO: 3840810 - DNA, 25 bp, Homo sapien
gcatcagggcggctcggagcgaggg

SEQ ID NO: 3840811 - DNA, 25 bp, Homo sapien
ggctcggagcgaggggcggaaccca

SEQ ID NO: 3840812 - DNA, 25 bp, Homo sapien
ggcgtacaggggcatcagggcggct

SEQ ID NO: 3840813 - DNA, 25 bp, Homo sapien
ctgcgggcggcgtacaggggcatca

SEQ ID NO: 3840814 - DNA, 25 bp, Homo sapien
gaggtcctggcggaggtctgggcgc

SEQ ID NO: 3840815 - DNA, 25 bp, Homo sapien
aggtggaaagcgaaggctgtctctc

SEQ ID NO: 3840816 - DNA, 25 bp, Homo sapien
ctcaggctccgcgtcatcaaaggga

SEQ ID NO: 3840817 - DNA, 25 bp, Homo sapien
tctgggcgcacccagcgcagcgtga

SEQ ID NO: 3840818 - DNA, 25 bp, Homo sapien
taagtgctgccctctgatagtgcag

SEQ ID NO: 3840819 - DNA, 25 bp, Homo sapien
caagaaaacacgtagcatgccagac

SEQ ID NO: 3840820 - DNA, 25 bp, Homo sapien
ttaccgggagctcagtagaaggcac

SEQ ID NO: 3840821 - DNA, 25 bp, Homo sapien
tatgcagcaggcactgttgcgggca

SEQ ID NO: 3840822 - DNA, 25 bp, Homo sapien
tcacatgggcccttagcaggcagcc

SEQ ID NO: 3840823 - DNA, 25 bp, Homo sapien
gatcacatgggcccttagcaggcag

SEQ ID NO: 3840824 - DNA, 25 bp, Homo sapien
agggcattggccctctaggggcaga

SEQ ID NO: 3840825 - DNA, 25 bp, Homo sapien
caagggcattggccctctaggggca

SEQ ID NO: 3840826 - DNA, 25 bp, Homo sapien
acagccagatcaggtctccccaaag

SEQ ID NO: 3840827 - DNA, 25 bp, Homo sapien
gtagggagcccgccaccaaagccca

SEQ ID NO: 3840828 - DNA, 25 bp, Homo sapien
tagggagcccgccaccaaagcccac

SEQ ID NO: 3840829 - DNA, 25 bp, Homo sapien
caggtctccagcaggtctgtccagt

SEQ ID NO: 3840830 - DNA, 25 bp, Homo sapien
ggtctccagcaggtctgtccagtgt

SEQ ID NO: 3840831 - DNA, 25 bp, Homo sapien
tctccagcaggtctgtccagtgtgc

SEQ ID NO: 3840832 - DNA, 25 bp, Homo sapien
tcaggtctccagcaggtctgtccag

SEQ ID NO: 3840833 - DNA, 25 bp, Homo sapien
ggtggcacagaaaagaggtaggagg

SEQ ID NO: 3840834 - DNA, 25 bp, Homo sapien
aggtggcacagaaaagaggtaggag

SEQ ID NO: 3840835 - DNA, 25 bp, Homo sapien
gtggcacagaaaagaggtaggaggg

SEQ ID NO: 3840836 - DNA, 25 bp, Homo sapien
gactcagactttttattgtactcaa

SEQ ID NO: 3840837 - DNA, 25 bp, Homo sapien
ggagcagagcatggacatatagaac

SEQ ID NO: 3840838 - DNA, 25 bp, Homo sapien
gcagcccaggcattccaggctctga

SEQ ID NO: 3840839 - DNA, 25 bp, Homo sapien
gctctgaccacaaggccagtctgga

SEQ ID NO: 3840840 - DNA, 25 bp, Homo sapien
caggccagtcttgaaggcggcaggg

SEQ ID NO: 3840841 - DNA, 25 bp, Homo sapien
ggaagcttctctattaccctcctta

SEQ ID NO: 3840842 - DNA, 25 bp, Homo sapien
ggatctaaagtcagggctgggaact

SEQ ID NO: 3840843 - DNA, 25 bp, Homo sapien
cttggagtgatctgcaaacccaata

SEQ ID NO: 3840844 - DNA, 25 bp, Homo sapien
cccaatatgtgagtttagtgtatag

SEQ ID NO: 3840845 - DNA, 25 bp, Homo sapien
cgggaacctgacctgttctctcctt

SEQ ID NO: 3840846 - DNA, 25 bp, Homo sapien
ggaacctgacctgttctctccttgc

SEQ ID NO: 3840847 - DNA, 25 bp, Homo sapien
ccttgcctgcaggggctgagtatgg

SEQ ID NO: 3840848 - DNA, 25 bp, Homo sapien
cctgcaggggctgagtatgggtgtg

SEQ ID NO: 3840849 - DNA, 25 bp, Homo sapien
tgggccattccaacgtgtcactcac

SEQ ID NO: 3840850 - DNA, 25 bp, Homo sapien
gctagagcctcgtgcgggaatgaaa

SEQ ID NO: 3840851 - DNA, 25 bp, Homo sapien
cggcaggattgcctcagcctaggaa

SEQ ID NO: 3840852 - DNA, 25 bp, Homo sapien
ttgagcaactaagctggtaccaggg

SEQ ID NO: 3840853 - DNA, 25 bp, Homo sapien
gcacctttcagtcacctgcagagct

SEQ ID NO: 3840854 - DNA, 25 bp, Homo sapien
actcacaaagtcagtcagtggcggg

SEQ ID NO: 3840855 - DNA, 25 bp, Homo sapien
tgaaaccaggtcgttccccagcctg

SEQ ID NO: 3840856 - DNA, 25 bp, Homo sapien
cagcctggccgcacctttcagtcac

SEQ ID NO: 3840857 - DNA, 25 bp, Homo sapien
cttcacgtactccagtggcgggcgg

SEQ ID NO: 3840858 - DNA, 25 bp, Homo sapien
ctgcaaagtacttgatgagcgggac

SEQ ID NO: 3840859 - DNA, 25 bp, Homo sapien
caaagtacttgatgagcgggacccc

SEQ ID NO: 3840860 - DNA, 25 bp, Homo sapien
ccttcacgtactccagtggcgggcg

SEQ ID NO: 3840861 - DNA, 25 bp, Homo sapien
gcacgaccttgctgaccaaggtggg

SEQ ID NO: 3840862 - DNA, 25 bp, Homo sapien
aaggtggggactgccgcctgggaga

SEQ ID NO: 3840863 - DNA, 25 bp, Homo sapien
caggctgagggcacgaccttgctga

SEQ ID NO: 3840864 - DNA, 25 bp, Homo sapien
ctgagggcacgaccttgctgaccaa

SEQ ID NO: 3840865 - DNA, 25 bp, Homo sapien
acttctctaggtcgccgccctggta

SEQ ID NO: 3840866 - DNA, 25 bp, Homo sapien
gagggttcccctggatcattgacct

SEQ ID NO: 3840867 - DNA, 25 bp, Homo sapien
gcacccgtacgtagatgggagcccg

SEQ ID NO: 3840868 - DNA, 25 bp, Homo sapien
tgggagcccggttacacttctctag

SEQ ID NO: 3840869 - DNA, 25 bp, Homo sapien
gggaaggtctggtgagctgaagccc

SEQ ID NO: 3840870 - DNA, 25 bp, Homo sapien
ggtctggtgagctgaagccccagcc

SEQ ID NO: 3840871 - DNA, 25 bp, Homo sapien
ctgagtagtgggtcagggaaggtct

SEQ ID NO: 3840872 - DNA, 25 bp, Homo sapien
gaaggtctggtgagctgaagcccca

SEQ ID NO: 3840873 - DNA, 25 bp, Homo sapien
tgagccgtgggggcggtgtgtcttt

SEQ ID NO: 3840874 - DNA, 25 bp, Homo sapien
gtgacttgatgagccgtgggggcgg

SEQ ID NO: 3840875 - DNA, 25 bp, Homo sapien
ccaggggcaggtgtgacttgatgag

SEQ ID NO: 3840876 - DNA, 25 bp, Homo sapien
caggggcaggtgtgacttgatgagc

SEQ ID NO: 3840877 - DNA, 25 bp, Homo sapien
tgaaccgagatcacacgattgcgct

SEQ ID NO: 3840878 - DNA, 25 bp, Homo sapien
agtgaaccgagatcacacgattgcg

SEQ ID NO: 3840879 - DNA, 25 bp, Homo sapien
gtgaaccgagatcacacgattgcgc

SEQ ID NO: 3840880 - DNA, 25 bp, Homo sapien
atggtagtaggagaccgccacgtcc

SEQ ID NO: 3840881 - DNA, 25 bp, Homo sapien
agggtgcgccttttccatacggtgg

SEQ ID NO: 3840882 - DNA, 25 bp, Homo sapien
gaaatggtagtaggagaccgccacg

SEQ ID NO: 3840883 - DNA, 25 bp, Homo sapien
cgccttttccatacggtggaaatgg

SEQ ID NO: 3840884 - DNA, 25 bp, Homo sapien
accgacacagggttgctgtacgtta

SEQ ID NO: 3840885 - DNA, 25 bp, Homo sapien
gttgctgtacgttatagccaccacc

SEQ ID NO: 3840886 - DNA, 25 bp, Homo sapien
ttgctgtacgttatagccaccaccc

SEQ ID NO: 3840887 - DNA, 25 bp, Homo sapien
gggcaccgacacagggttgctgtac

SEQ ID NO: 3840888 - DNA, 25 bp, Homo sapien
gaacagggtgggtgcggctcagctc

SEQ ID NO: 3840889 - DNA, 25 bp, Homo sapien
tgaggaccgggatggtcttcttcca

SEQ ID NO: 3840890 - DNA, 25 bp, Homo sapien
tttggtgaggataagcaataggact

SEQ ID NO: 3840891 - DNA, 25 bp, Homo sapien
gagtaaaatgaattgatctctgccc

SEQ ID NO: 3840892 - DNA, 25 bp, Homo sapien
tcatgaacagggcttggcgcctatg

SEQ ID NO: 3840893 - DNA, 25 bp, Homo sapien
tccaggatcttttgaatctcccttt

SEQ ID NO: 3840894 - DNA, 25 bp, Homo sapien
tagttggtcatagggttcttcttca

SEQ ID NO: 3840895 - DNA, 25 bp, Homo sapien
ttcatctccttgaacgacgtgtgct

SEQ ID NO: 3840896 - DNA, 25 bp, Homo sapien
tccttgaacgacgtgtgctgaacca

SEQ ID NO: 3840897 - DNA, 25 bp, Homo sapien
caaacccccgtgctggccagcaccc

SEQ ID NO: 3840898 - DNA, 25 bp, Homo sapien
ccccaaacccccgtgctggccagca

SEQ ID NO: 3840899 - DNA, 25 bp, Homo sapien
cgccccaaacccccgtgctggccag

SEQ ID NO: 3840900 - DNA, 25 bp, Homo sapien
ccaaacccccgtgctggccagcacc

SEQ ID NO: 3840901 - DNA, 25 bp, Homo sapien
gaagcgctcattctgcgccacggtg

SEQ ID NO: 3840902 - DNA, 25 bp, Homo sapien
gcgccacggtgaaggtggtcttcca

SEQ ID NO: 3840903 - DNA, 25 bp, Homo sapien
cgcatagtccgcatcgaagcgctca

SEQ ID NO: 3840904 - DNA, 25 bp, Homo sapien
atcttctccgcatagtccgcatcga

SEQ ID NO: 3840905 - DNA, 25 bp, Homo sapien
cattggtcagggtagattcgcacac

SEQ ID NO: 3840906 - DNA, 25 bp, Homo sapien
atcatactttattcttgagcccatt

SEQ ID NO: 3840907 - DNA, 25 bp, Homo sapien
tcttgagcccattggtcagggtaga

SEQ ID NO: 3840908 - DNA, 25 bp, Homo sapien
actttattcttgagcccattggtca

SEQ ID NO: 3840909 - DNA, 25 bp, Homo sapien
gaatgggcatgtcataactcactgt

SEQ ID NO: 3840910 - DNA, 25 bp, Homo sapien
ggtctcaaattcgtggcctattgtg

SEQ ID NO: 3840911 - DNA, 25 bp, Homo sapien
tcgtggcctattgtgatcctaccag

SEQ ID NO: 3840912 - DNA, 25 bp, Homo sapien
ccaggctgtagtgaatgggcatgtc

SEQ ID NO: 3840913 - DNA, 25 bp, Homo sapien
caggaatgttcctgtgagccccgcc

SEQ ID NO: 3840914 - DNA, 25 bp, Homo sapien
cccgacggtcagtggccagtgccgt

SEQ ID NO: 3840915 - DNA, 25 bp, Homo sapien
ggttggagtcaaggcggctccgggc

SEQ ID NO: 3840916 - DNA, 25 bp, Homo sapien
caggatccgaagtcgtctggaggat

SEQ ID NO: 3840917 - DNA, 25 bp, Homo sapien
gaaagaacaaagacgctggagtccc

SEQ ID NO: 3840918 - DNA, 25 bp, Homo sapien
gcttctagtccagtgcagcctgcat

SEQ ID NO: 3840919 - DNA, 25 bp, Homo sapien
gaaaaatgggtactcactagacaga

SEQ ID NO: 3840920 - DNA, 25 bp, Homo sapien
ttttctaattgacccagccaaggga

SEQ ID NO: 3840921 - DNA, 25 bp, Homo sapien
ctaaaatgaacaattgcaataaaag

SEQ ID NO: 3840922 - DNA, 25 bp, Homo sapien
caattgcaataaaagctttataata

SEQ ID NO: 3840923 - DNA, 25 bp, Homo sapien
atagttcttaaaagtggtattacag

SEQ ID NO: 3840924 - DNA, 25 bp, Homo sapien
tggtattacagacttattttcttct

SEQ ID NO: 3840925 - DNA, 25 bp, Homo sapien
gtactaagggccagtacatcagtcc

SEQ ID NO: 3840926 - DNA, 25 bp, Homo sapien
tactaagggccagtacatcagtccg

SEQ ID NO: 3840927 - DNA, 25 bp, Homo sapien
ctgtactaagggccagtacatcagt

SEQ ID NO: 3840928 - DNA, 25 bp, Homo sapien
ctaagggccagtacatcagtccgct

SEQ ID NO: 3840929 - DNA, 25 bp, Homo sapien
ggagagtgagtccattagggccaca

SEQ ID NO: 3840930 - DNA, 25 bp, Homo sapien
cagggagagtgagtccattagggcc

SEQ ID NO: 3840931 - DNA, 25 bp, Homo sapien
agagtgagtccattagggccacatg

SEQ ID NO: 3840932 - DNA, 25 bp, Homo sapien
gaacagggagagtgagtccattagg

SEQ ID NO: 3840933 - DNA, 25 bp, Homo sapien
ttctccattgaacaggaacaaggct

SEQ ID NO: 3840934 - DNA, 25 bp, Homo sapien
gactccagcgtaagctgttctccat

SEQ ID NO: 3840935 - DNA, 25 bp, Homo sapien
aaccacagactccagcgtaagctgt

SEQ ID NO: 3840936 - DNA, 25 bp, Homo sapien
aagctgttctccattgaacaggaac

SEQ ID NO: 3840937 - DNA, 25 bp, Homo sapien
tgtatataaaatggtgaaagctgac

SEQ ID NO: 3840938 - DNA, 25 bp, Homo sapien
cctttgtatataaaatggtgaaagc

SEQ ID NO: 3840939 - DNA, 25 bp, Homo sapien
ccctttgtatataaaatggtgaaag

SEQ ID NO: 3840940 - DNA, 25 bp, Homo sapien
tttgtatataaaatggtgaaagctg

SEQ ID NO: 3840941 - DNA, 25 bp, Homo sapien
gctattataatctggctgggctcag

SEQ ID NO: 3840942 - DNA, 25 bp, Homo sapien
aaaaggctattataatctggctggg

SEQ ID NO: 3840943 - DNA, 25 bp, Homo sapien
gcccctggtgcatgaaaaggctatt

SEQ ID NO: 3840944 - DNA, 25 bp, Homo sapien
taatgagtataaagcccctggtgca

SEQ ID NO: 3840945 - DNA, 25 bp, Homo sapien
cccaagccacaaaaggaaccatatt

SEQ ID NO: 3840946 - DNA, 25 bp, Homo sapien
agccacaaaaggaaccatatttcat

SEQ ID NO: 3840947 - DNA, 25 bp, Homo sapien
cagtcaatggcatcgcagggctggc

SEQ ID NO: 3840948 - DNA, 25 bp, Homo sapien
catggcctcccaagccacaaaagga

SEQ ID NO: 3840949 - DNA, 25 bp, Homo sapien
cctcagctcgagtgtaacaacagtc

SEQ ID NO: 3840950 - DNA, 25 bp, Homo sapien
gagtgtaacaacagtcgtggccatg

SEQ ID NO: 3840951 - DNA, 25 bp, Homo sapien
gctcgagtgtaacaacagtcgtggc

SEQ ID NO: 3840952 - DNA, 25 bp, Homo sapien
agccggcctcctcagctcgagtgta

SEQ ID NO: 3840953 - DNA, 25 bp, Homo sapien
gctgctggggactcatcgcacagga

SEQ ID NO: 3840954 - DNA, 25 bp, Homo sapien
ggtgctgctggggactcatcgcaca

SEQ ID NO: 3840955 - DNA, 25 bp, Homo sapien
tcatctggctatgccagggtgccca

SEQ ID NO: 3840956 - DNA, 25 bp, Homo sapien
ctggggactcatcgcacaggacgct

SEQ ID NO: 3840957 - DNA, 25 bp, Homo sapien
cccaagaggcggagggtcggtgacg

SEQ ID NO: 3840958 - DNA, 25 bp, Homo sapien
aaaaccacgcaaacccaagaggcag

SEQ ID NO: 3840959 - DNA, 25 bp, Homo sapien
tcggtgacgtggaaccgtcacgcaa

SEQ ID NO: 3840960 - DNA, 25 bp, Homo sapien
tgagatggaaccacctcccgaaccc

SEQ ID NO: 3840961 - DNA, 25 bp, Homo sapien
cctcagcggatgataatctcaagac

SEQ ID NO: 3840962 - DNA, 25 bp, Homo sapien
ctcagcggatgataatctcaagaca

SEQ ID NO: 3840963 - DNA, 25 bp, Homo sapien
cttccgagcgtcagctcactcccct

SEQ ID NO: 3840964 - DNA, 25 bp, Homo sapien
ttccgagcgtcagctcactcccctt

SEQ ID NO: 3840965 - DNA, 25 bp, Homo sapien
tgcggggagcgtctgcgggggccgc

SEQ ID NO: 3840966 - DNA, 25 bp, Homo sapien
gtgaccggctcagactgtactctta

SEQ ID NO: 3840967 - DNA, 25 bp, Homo sapien
ctaggtagagatagattgtgtaagg

SEQ ID NO: 3840968 - DNA, 25 bp, Homo sapien
tctgaaatacgttttctaggtagag

SEQ ID NO: 3840969 - DNA, 25 bp, Homo sapien
tactcttatagccatctgaaatacg

SEQ ID NO: 3840970 - DNA, 25 bp, Homo sapien
tcaattctcccttcggttgtgagaa

SEQ ID NO: 3840971 - DNA, 25 bp, Homo sapien
caattctcccttcggttgtgagaat

SEQ ID NO: 3840972 - DNA, 25 bp, Homo sapien
tgtcaattctcccttcggttgtgag

SEQ ID NO: 3840973 - DNA, 25 bp, Homo sapien
ggtgtcaattctcccttcggttgtg

SEQ ID NO: 3840974 - DNA, 25 bp, Homo sapien
ggttccaaatgcgaggctgactttc

SEQ ID NO: 3840975 - DNA, 25 bp, Homo sapien
tcttcacctcatgtctgtttactgc

SEQ ID NO: 3840976 - DNA, 25 bp, Homo sapien
tactgccatgttagcaatttgatgt

SEQ ID NO: 3840977 - DNA, 25 bp, Homo sapien
gaccctcaatccacttgttttccat

SEQ ID NO: 3840978 - DNA, 25 bp, Homo sapien
ggaagaccgccagaaaacagtaaga

SEQ ID NO: 3840979 - DNA, 25 bp, Homo sapien
gatgtgccttgacacaaatactgtt

SEQ ID NO: 3840980 - DNA, 25 bp, Homo sapien
gacgtcattactctacggagacatg

SEQ ID NO: 3840981 - DNA, 25 bp, Homo sapien
gaaccatgtgccaatcaaagtagac

SEQ ID NO: 3840982 - DNA, 25 bp, Homo sapien
cctgtggtaaaatacttataagatg

SEQ ID NO: 3840983 - DNA, 25 bp, Homo sapien
gttacaaattctagaactcagagag

SEQ ID NO: 3840984 - DNA, 25 bp, Homo sapien
ctcagagagctgaaggtaattactt

SEQ ID NO: 3840985 - DNA, 25 bp, Homo sapien
caatgaagctgatgtgagggaaggg

SEQ ID NO: 3840986 - DNA, 25 bp, Homo sapien
tatgccacttagtcctgaacagaga

SEQ ID NO: 3840987 - DNA, 25 bp, Homo sapien
ttttctcaccccgaagacgagtctc

SEQ ID NO: 3840988 - DNA, 25 bp, Homo sapien
gataattacacgtcatttggcactg

SEQ ID NO: 3840989 - DNA, 25 bp, Homo sapien
ttggcactgcctttcaagatatgta

SEQ ID NO: 3840990 - DNA, 25 bp, Homo sapien
tagttctatcgtatgggtggaagga

SEQ ID NO: 3840991 - DNA, 25 bp, Homo sapien
ggtggaaggaaagcttccaatctcc

SEQ ID NO: 3840992 - DNA, 25 bp, Homo sapien
tgacaacagacagcttaacaggaaa

SEQ ID NO: 3840993 - DNA, 25 bp, Homo sapien
catagaacaggcataaacatgggaa

SEQ ID NO: 3840994 - DNA, 25 bp, Homo sapien
cacgcccagcccaccttgttaattt

SEQ ID NO: 3840995 - DNA, 25 bp, Homo sapien
cttatttgtgaatgaagtaatctct

SEQ ID NO: 3840996 - DNA, 25 bp, Homo sapien
cactaaaatttgatacttatttgtg

SEQ ID NO: 3840997 - DNA, 25 bp, Homo sapien
tttttacttatgctgagatttaaat

SEQ ID NO: 3840998 - DNA, 25 bp, Homo sapien
tactaactttggaaagtacatacac

SEQ ID NO: 3840999 - DNA, 25 bp, Homo sapien
tttggaaagtacatacaccagcata

SEQ ID NO: 3841000 - DNA, 25 bp, Homo sapien
actttggaaagtacatacaccagca

SEQ ID NO: 3841001 - DNA, 25 bp, Homo sapien
taactttggaaagtacatacaccag

SEQ ID NO: 3841002 - DNA, 25 bp, Homo sapien
tagctcagattacaacgcctggcta

SEQ ID NO: 3841003 - DNA, 25 bp, Homo sapien
ccttgtgccacaaagaggaattccc

SEQ ID NO: 3841004 - DNA, 25 bp, Homo sapien
cttataagggcactttgaatttcca

SEQ ID NO: 3841005 - DNA, 25 bp, Homo sapien
gtgatttgagatcacacaaccttgt

SEQ ID NO: 3841006 - DNA, 25 bp, Homo sapien
ggtgggttagcggtgatttgagatc

SEQ ID NO: 3841007 - DNA, 25 bp, Homo sapien
tcccatgggtacatccactttcaag

SEQ ID NO: 3841008 - DNA, 25 bp, Homo sapien
tccactttcaagtggcccaggagag

SEQ ID NO: 3841009 - DNA, 25 bp, Homo sapien
gacaggaggactaagtcaccgcaga

SEQ ID NO: 3841010 - DNA, 25 bp, Homo sapien
caggagagaacctgaaatactcggt

SEQ ID NO: 3841011 - DNA, 25 bp, Homo sapien
cagttcgtgttctgacggcaggcta

SEQ ID NO: 3841012 - DNA, 25 bp, Homo sapien
ctgaggttgcagtcaataagaggca

SEQ ID NO: 3841013 - DNA, 25 bp, Homo sapien
cggcaggctagtctgcatcacagag

SEQ ID NO: 3841014 - DNA, 25 bp, Homo sapien
tatgcattatgaagctacctggcta

SEQ ID NO: 3841015 - DNA, 25 bp, Homo sapien
ataggttggcactcatcatgagccc

SEQ ID NO: 3841016 - DNA, 25 bp, Homo sapien
gttcctgtcccatgaccagggccag

SEQ ID NO: 3841017 - DNA, 25 bp, Homo sapien
aaatggtgaagctctctattgtcct

SEQ ID NO: 3841018 - DNA, 25 bp, Homo sapien
gaagctctctattgtcctgacccca

SEQ ID NO: 3841019 - DNA, 25 bp, Homo sapien
tgtatatccaataatagtgaaatgg

SEQ ID NO: 3841020 - DNA, 25 bp, Homo sapien
tgaaatggatcccactaattatgac

SEQ ID NO: 3841021 - DNA, 25 bp, Homo sapien
tttttgtaggtttcaggcacagaac

SEQ ID NO: 3841022 - DNA, 25 bp, Homo sapien
acctgccacggacaaggccttgtgt

SEQ ID NO: 3841023 - DNA, 25 bp, Homo sapien
aacaactaccttgcaagcttgctgg

SEQ ID NO: 3841024 - DNA, 25 bp, Homo sapien
tgcaaggtctccacacttactagct

SEQ ID NO: 3841025 - DNA, 25 bp, Homo sapien
ggaatgactgcaccgtgactaacat

SEQ ID NO: 3841026 - DNA, 25 bp, Homo sapien
catgcagtgacagcttaattaatgt

SEQ ID NO: 3841027 - DNA, 25 bp, Homo sapien
ttgacagtgccctcccatgcagtat

SEQ ID NO: 3841028 - DNA, 25 bp, Homo sapien
tgcagtatcgccacatttgacaatg

SEQ ID NO: 3841029 - DNA, 25 bp, Homo sapien
tggaacacgcatatcaacaacatac

SEQ ID NO: 3841030 - DNA, 25 bp, Homo sapien
atgagtgacggtgcccagccattcg

SEQ ID NO: 3841031 - DNA, 25 bp, Homo sapien
cagcttaggcgacagagccagactg

SEQ ID NO: 3841032 - DNA, 25 bp, Homo sapien
cccagctacttgggtggctgaggca

SEQ ID NO: 3841033 - DNA, 25 bp, Homo sapien
tggatgtggtggcagcacttgtagt

SEQ ID NO: 3841034 - DNA, 25 bp, Homo sapien
cttaggcgacagagccagactgtgt

SEQ ID NO: 3841035 - DNA, 25 bp, Homo sapien
catgtttatcttaacgtataacgat

SEQ ID NO: 3841036 - DNA, 25 bp, Homo sapien
aacttcttgagatggttacataatg

SEQ ID NO: 3841037 - DNA, 25 bp, Homo sapien
taatgtctaaatctgctggtgtaga

SEQ ID NO: 3841038 - DNA, 25 bp, Homo sapien
tacaagcgtgaagcattacatccaa

SEQ ID NO: 3841039 - DNA, 25 bp, Homo sapien
gaaatttctgtactatggtcccagt

SEQ ID NO: 3841040 - DNA, 25 bp, Homo sapien
agtgataccacagcttccgtgaagt

SEQ ID NO: 3841041 - DNA, 25 bp, Homo sapien
tcgagagatcctccagcgtgagtct

SEQ ID NO: 3841042 - DNA, 25 bp, Homo sapien
agagagacctcatcccattcagttg

SEQ ID NO: 3841043 - DNA, 25 bp, Homo sapien
aggcaaggagcaaaaaggtatgtct

SEQ ID NO: 3841044 - DNA, 25 bp, Homo sapien
caaggagcaaaaaggtatgtcttcc

SEQ ID NO: 3841045 - DNA, 25 bp, Homo sapien
gaaggcaaggagcaaaaaggtatgt

SEQ ID NO: 3841046 - DNA, 25 bp, Homo sapien
tggaaggcaaggagcaaaaaggtat

SEQ ID NO: 3841047 - DNA, 25 bp, Homo sapien
agctgaaagaaagcccgtgcagtca

SEQ ID NO: 3841048 - DNA, 25 bp, Homo sapien
aaagcccgtgcagtcatatcacgcg

SEQ ID NO: 3841049 - DNA, 25 bp, Homo sapien
ggctccagctgaaagaaagcccgtg

SEQ ID NO: 3841050 - DNA, 25 bp, Homo sapien
cgtgcagtcatatcacgcgtaaaca

SEQ ID NO: 3841051 - DNA, 25 bp, Homo sapien
tgcagtagcatgatagttacaggaa

SEQ ID NO: 3841052 - DNA, 25 bp, Homo sapien
agtagcatgatagttacaggaaagg

SEQ ID NO: 3841053 - DNA, 25 bp, Homo sapien
gcagtagcatgatagttacaggaaa

SEQ ID NO: 3841054 - DNA, 25 bp, Homo sapien
cagtagcatgatagttacaggaaag

SEQ ID NO: 3841055 - DNA, 25 bp, Homo sapien
attcctgaggtcaagctgtctgccc

SEQ ID NO: 3841056 - DNA, 25 bp, Homo sapien
cacctggcctgaaacccagatttta

SEQ ID NO: 3841057 - DNA, 25 bp, Homo sapien
ttggagtgtaggagggcgatctcag

SEQ ID NO: 3841058 - DNA, 25 bp, Homo sapien
tctggaattcctgaggtcaagctgt

SEQ ID NO: 3841059 - DNA, 25 bp, Homo sapien
cctataaggcagaacgtaagacggt

SEQ ID NO: 3841060 - DNA, 25 bp, Homo sapien
tagggagctatataatagaggctgc

SEQ ID NO: 3841061 - DNA, 25 bp, Homo sapien
taggaagcaaagtctatagggagct

SEQ ID NO: 3841062 - DNA, 25 bp, Homo sapien
gattcatggcagattctaaagcaca

SEQ ID NO: 3841063 - DNA, 25 bp, Homo sapien
tattataatgtaatgctgctcggac

SEQ ID NO: 3841064 - DNA, 25 bp, Homo sapien
gctaattacacaacctatgtaggca

SEQ ID NO: 3841065 - DNA, 25 bp, Homo sapien
gtagcagccacgcagaaatcataga

SEQ ID NO: 3841066 - DNA, 25 bp, Homo sapien
gtctgtttcggtagcagtaccaggc

SEQ ID NO: 3841067 - DNA, 25 bp, Homo sapien
tcgaactcctgtctcacgtgtctgt

SEQ ID NO: 3841068 - DNA, 25 bp, Homo sapien
agagacatagagtttcaccagattg

SEQ ID NO: 3841069 - DNA, 25 bp, Homo sapien
agaggcctgacagtgtgatcttggc

SEQ ID NO: 3841070 - DNA, 25 bp, Homo sapien
gaactcctgtctcacgtgtctgtgt

SEQ ID NO: 3841071 - DNA, 25 bp, Homo sapien
gagacgcactaaacagtaaagggac

SEQ ID NO: 3841072 - DNA, 25 bp, Homo sapien
tttcatggagcttctagtcaagcga

SEQ ID NO: 3841073 - DNA, 25 bp, Homo sapien
ggtctagtggcgaaggaggcaggta

SEQ ID NO: 3841074 - DNA, 25 bp, Homo sapien
gaaaatgggccctgagcgatcacca

SEQ ID NO: 3841075 - DNA, 25 bp, Homo sapien
aaaactgacatcaaacacggcgacc

SEQ ID NO: 3841076 - DNA, 25 bp, Homo sapien
gattgtagattctggcagggaaaac

SEQ ID NO: 3841077 - DNA, 25 bp, Homo sapien
tgatcaaggagattgtagattctgg

SEQ ID NO: 3841078 - DNA, 25 bp, Homo sapien
acacggcgacccgacatagtgagac

SEQ ID NO: 3841079 - DNA, 25 bp, Homo sapien
cacattgcgctattcagtataaacc

SEQ ID NO: 3841080 - DNA, 25 bp, Homo sapien
gcccctgtcagcagttactgatttg

SEQ ID NO: 3841081 - DNA, 25 bp, Homo sapien
tgtgtgaccaccaatacgatcgaga

SEQ ID NO: 3841082 - DNA, 25 bp, Homo sapien
gcatgatatttttacggttcaccca

SEQ ID NO: 3841083 - DNA, 25 bp, Homo sapien
ggattagaccaactggagaattgcc

SEQ ID NO: 3841084 - DNA, 25 bp, Homo sapien
ttaaggactttgtctgggtatggtg

SEQ ID NO: 3841085 - DNA, 25 bp, Homo sapien
tattcaggcccttaaatcgatatgt

SEQ ID NO: 3841086 - DNA, 25 bp, Homo sapien
tgccagacttgtggtaccaattata

SEQ ID NO: 3841087 - DNA, 25 bp, Homo sapien
gtatttagtactgtgctgaggagca

SEQ ID NO: 3841088 - DNA, 25 bp, Homo sapien
aagctggctgcgcttctccgggtat

SEQ ID NO: 3841089 - DNA, 25 bp, Homo sapien
gcttctccgggtatttagtactgtg

SEQ ID NO: 3841090 - DNA, 25 bp, Homo sapien
ggctgcgcttctccgggtatttagt

SEQ ID NO: 3841091 - DNA, 25 bp, Homo sapien
aggtgagaaagaggcgggggtggtg

SEQ ID NO: 3841092 - DNA, 25 bp, Homo sapien
gaccaggaggtgagaaagaggcggg

SEQ ID NO: 3841093 - DNA, 25 bp, Homo sapien
ggtcgggaccaggaggtgagaaaga

SEQ ID NO: 3841094 - DNA, 25 bp, Homo sapien
ctagggtcgggaccaggaggtgaga

SEQ ID NO: 3841095 - DNA, 25 bp, Homo sapien
agccgggcgcggcttcctgggtctc

SEQ ID NO: 3841096 - DNA, 25 bp, Homo sapien
cggagccgggcgcggcttcctgggt

SEQ ID NO: 3841097 - DNA, 25 bp, Homo sapien
ggagccgggcgcggcttcctgggtc

SEQ ID NO: 3841098 - DNA, 25 bp, Homo sapien
gagccgggcgcggcttcctgggtct

SEQ ID NO: 3841099 - DNA, 25 bp, Homo sapien
caccgcgccgctccctcgtcctgcc

SEQ ID NO: 3841100 - DNA, 25 bp, Homo sapien
ctggaagagacgtcgcctcgccttc

SEQ ID NO: 3841101 - DNA, 25 bp, Homo sapien
gctccctcgtcctgccctgcgggct

SEQ ID NO: 3841102 - DNA, 25 bp, Homo sapien
tggaagagacgtcgcctcgccttca

SEQ ID NO: 3841103 - DNA, 25 bp, Homo sapien
ccagcttgccgtacgacagcggcgg

SEQ ID NO: 3841104 - DNA, 25 bp, Homo sapien
tcccagcttgccgtacgacagcggc

SEQ ID NO: 3841105 - DNA, 25 bp, Homo sapien
cgctcccagcttgccgtacgacagc

SEQ ID NO: 3841106 - DNA, 25 bp, Homo sapien
cagcttgccgtacgacagcggcggc

SEQ ID NO: 3841107 - DNA, 25 bp, Homo sapien
ccatgcccagcttcgccgtccaaga

SEQ ID NO: 3841108 - DNA, 25 bp, Homo sapien
tctttgccgaagagtttaggagcga

SEQ ID NO: 3841109 - DNA, 25 bp, Homo sapien
tttaggagcgatcgtgactggttag

SEQ ID NO: 3841110 - DNA, 25 bp, Homo sapien
gatcgtgactggttagtgcaagcca

SEQ ID NO: 3841111 - DNA, 25 bp, Homo sapien
gaagcgttctttgccgaagagttta

SEQ ID NO: 3841112 - DNA, 25 bp, Homo sapien
caccgacatagaaggatgaattcct

SEQ ID NO: 3841113 - DNA, 25 bp, Homo sapien
cagctggcgtctagcaagggcttcc

SEQ ID NO: 3841114 - DNA, 25 bp, Homo sapien
caagatgtaagaggacatgttgcca

SEQ ID NO: 3841115 - DNA, 25 bp, Homo sapien
tttaggtgccgatacagaatatgac

SEQ ID NO: 3841116 - DNA, 25 bp, Homo sapien
ccaacgtaatgttgctgatcacaca

SEQ ID NO: 3841117 - DNA, 25 bp, Homo sapien
ggcactgccagtgcatgccctgaaa

SEQ ID NO: 3841118 - DNA, 25 bp, Homo sapien
cacacttaggaacagatgggcactg

SEQ ID NO: 3841119 - DNA, 25 bp, Homo sapien
tgccctgaaacatgattaaaaaacg

SEQ ID NO: 3841120 - DNA, 25 bp, Homo sapien
tggccgcacgagaccccacaggtac

SEQ ID NO: 3841121 - DNA, 25 bp, Homo sapien
agaccccgagtgaggcatgagcttc

SEQ ID NO: 3841122 - DNA, 25 bp, Homo sapien
gtcttggacggatagggcagaaacc

SEQ ID NO: 3841123 - DNA, 25 bp, Homo sapien
tcctgtgtcttggacggatagggca

SEQ ID NO: 3841124 - DNA, 25 bp, Homo sapien
gggtcatagacgctgtccctccact

SEQ ID NO: 3841125 - DNA, 25 bp, Homo sapien
cagtgttccagatgtacaggcagga

SEQ ID NO: 3841126 - DNA, 25 bp, Homo sapien
gttccagatgtacaggcaggatgcc

SEQ ID NO: 3841127 - DNA, 25 bp, Homo sapien
tcatagacgctgtccctccactgga

SEQ ID NO: 3841128 - DNA, 25 bp, Homo sapien
cggagaggagaaagtcctcgagccc

SEQ ID NO: 3841129 - DNA, 25 bp, Homo sapien
cagggagcggagaggagaaagtcct

SEQ ID NO: 3841130 - DNA, 25 bp, Homo sapien
gaaagtcctcgagccccagctggca

SEQ ID NO: 3841131 - DNA, 25 bp, Homo sapien
cccagaacagggagcggagaggaga

SEQ ID NO: 3841132 - DNA, 25 bp, Homo sapien
gcctcctgggattagcactttggga

SEQ ID NO: 3841133 - DNA, 25 bp, Homo sapien
ttgcactactgctggcctcatgtga

SEQ ID NO: 3841134 - DNA, 25 bp, Homo sapien
tcggcctcctgggattagcactttg

SEQ ID NO: 3841135 - DNA, 25 bp, Homo sapien
tcttgtcctgttttccaggttggtc

SEQ ID NO: 3841136 - DNA, 25 bp, Homo sapien
gaagtctcggcactcctgacagagg

SEQ ID NO: 3841137 - DNA, 25 bp, Homo sapien
gggaaggaagtctcggcactcctga

SEQ ID NO: 3841138 - DNA, 25 bp, Homo sapien
gcctggggcgtcagactctgtcctg

SEQ ID NO: 3841139 - DNA, 25 bp, Homo sapien
aggaagtctcggcactcctgacaga

SEQ ID NO: 3841140 - DNA, 25 bp, Homo sapien
tgtgcattgtactggcacagagagg

SEQ ID NO: 3841141 - DNA, 25 bp, Homo sapien
tgtgggccaagtgtgcattgtactg

SEQ ID NO: 3841142 - DNA, 25 bp, Homo sapien
gtgcattgtactggcacagagaggg

SEQ ID NO: 3841143 - DNA, 25 bp, Homo sapien
tcaccacacggaattgggagttcgg

SEQ ID NO: 3841144 - DNA, 25 bp, Homo sapien
ttaactcgcggatgctagacccaag

SEQ ID NO: 3841145 - DNA, 25 bp, Homo sapien
ggatgtagccctggcgcaagcatct

SEQ ID NO: 3841146 - DNA, 25 bp, Homo sapien
tctaagttgtacacagcccgggaca

SEQ ID NO: 3841147 - DNA, 25 bp, Homo sapien
gactcgaagctacttccggccattt

SEQ ID NO: 3841148 - DNA, 25 bp, Homo sapien
tactgcttgaatgacggactcgaag

SEQ ID NO: 3841149 - DNA, 25 bp, Homo sapien
cagagtccaggaattcttaggttcc

SEQ ID NO: 3841150 - DNA, 25 bp, Homo sapien
ccctgggcggccctttaagcagatg

SEQ ID NO: 3841151 - DNA, 25 bp, Homo sapien
ggagctctctatgtaccacgtgcag

SEQ ID NO: 3841152 - DNA, 25 bp, Homo sapien
tttcctcggaggatgaaccatcggc

SEQ ID NO: 3841153 - DNA, 25 bp, Homo sapien
cagttctctaacaggatgaggctca

SEQ ID NO: 3841154 - DNA, 25 bp, Homo sapien
cgtgatccaatatgggaggaaaccc

SEQ ID NO: 3841155 - DNA, 25 bp, Homo sapien
gcaggacgcttacttctgacctctg

SEQ ID NO: 3841156 - DNA, 25 bp, Homo sapien
tgaatggcccgttgtcatcccaggg

SEQ ID NO: 3841157 - DNA, 25 bp, Homo sapien
tcctaggtgctgtcctgaatggccc

SEQ ID NO: 3841158 - DNA, 25 bp, Homo sapien
tttccctcagccaagaacaggcctg

SEQ ID NO: 3841159 - DNA, 25 bp, Homo sapien
tacctcccaggttactacagtgcag

SEQ ID NO: 3841160 - DNA, 25 bp, Homo sapien
taaactctgggacgaatctggaact

SEQ ID NO: 3841161 - DNA, 25 bp, Homo sapien
catctaccggcctgacgagggttac

SEQ ID NO: 3841162 - DNA, 25 bp, Homo sapien
gacctgtaccgaatcctgaaggcct

SEQ ID NO: 3841163 - DNA, 25 bp, Homo sapien
tgctgaaaactctcaagacctgggc

SEQ ID NO: 3841164 - DNA, 25 bp, Homo sapien
tccttggcggatgatgtgagctcca

SEQ ID NO: 3841165 - DNA, 25 bp, Homo sapien
ccccggacacgctgagttacttgga

SEQ ID NO: 3841166 - DNA, 25 bp, Homo sapien
gattcagagataaacgggctggccc

SEQ ID NO: 3841167 - DNA, 25 bp, Homo sapien
ggacctccagtgactacggccactt

SEQ ID NO: 3841168 - DNA, 25 bp, Homo sapien
gtcacgggcagcacggtggtggtgc

SEQ ID NO: 3841169 - DNA, 25 bp, Homo sapien
gctggagttgagacatcgagggctc

SEQ ID NO: 3841170 - DNA, 25 bp, Homo sapien
gcggcccgcggccatggagacgggc

SEQ ID NO: 3841171 - DNA, 25 bp, Homo sapien
tgggagaacacgatcattggctgac

SEQ ID NO: 3841172 - DNA, 25 bp, Homo sapien
gttgtcaccgactatccctgggctg

SEQ ID NO: 3841173 - DNA, 25 bp, Homo sapien
ccttactgaccattttgggagacct

SEQ ID NO: 3841174 - DNA, 25 bp, Homo sapien
ctcaggagctgaacgaagaataggg

SEQ ID NO: 3841175 - DNA, 25 bp, Homo sapien
agcagccctgtctaggagtatggga

SEQ ID NO: 3841176 - DNA, 25 bp, Homo sapien
tctaggagtatgggagtggcttcac

SEQ ID NO: 3841177 - DNA, 25 bp, Homo sapien
tgggagtggcttcacgagggccagg

SEQ ID NO: 3841178 - DNA, 25 bp, Homo sapien
cagccctgtctaggagtatgggagt

SEQ ID NO: 3841179 - DNA, 25 bp, Homo sapien
cccacagaacttgccttataactaa

SEQ ID NO: 3841180 - DNA, 25 bp, Homo sapien
ggcaagatgctttgtggtctcaggt

SEQ ID NO: 3841181 - DNA, 25 bp, Homo sapien
ctgtaaaagggagatgtagttccca

SEQ ID NO: 3841182 - DNA, 25 bp, Homo sapien
taatagagacaggaatgaatgcaga

SEQ ID NO: 3841183 - DNA, 25 bp, Homo sapien
gtaaccttagccctgcgggtgccca

SEQ ID NO: 3841184 - DNA, 25 bp, Homo sapien
ccagataccaaaatagcccaactca

SEQ ID NO: 3841185 - DNA, 25 bp, Homo sapien
gataccaaaatagcccaactcaggg

SEQ ID NO: 3841186 - DNA, 25 bp, Homo sapien
caaggtaaccttagccctgcgggtg

SEQ ID NO: 3841187 - DNA, 25 bp, Homo sapien
gggttatatagtcctgccccaggga

SEQ ID NO: 3841188 - DNA, 25 bp, Homo sapien
gtccctctggggttatatagtcctg

SEQ ID NO: 3841189 - DNA, 25 bp, Homo sapien
ggcagtccctctggggttatatagt

SEQ ID NO: 3841190 - DNA, 25 bp, Homo sapien
tctggggttatatagtcctgcccca

SEQ ID NO: 3841191 - DNA, 25 bp, Homo sapien
gtcttcagtctccggggggcaaggc

SEQ ID NO: 3841192 - DNA, 25 bp, Homo sapien
tcagtctccggggggcaaggcagcg

SEQ ID NO: 3841193 - DNA, 25 bp, Homo sapien
gtctccggggggcaaggcagcggct

SEQ ID NO: 3841194 - DNA, 25 bp, Homo sapien
tcttcagtctccggggggcaaggca

SEQ ID NO: 3841195 - DNA, 25 bp, Homo sapien
cctttaggccatcacacagtctgtt

SEQ ID NO: 3841196 - DNA, 25 bp, Homo sapien
tgccgagaaagagatgagcatcctt

SEQ ID NO: 3841197 - DNA, 25 bp, Homo sapien
gttttccatcagtgatgccgagaaa

SEQ ID NO: 3841198 - DNA, 25 bp, Homo sapien
gactgggaaccagctactttctttc

SEQ ID NO: 3841199 - DNA, 25 bp, Homo sapien
aaaatgggatgggagttattgcctg

SEQ ID NO: 3841200 - DNA, 25 bp, Homo sapien
atgggagttattgcctggctggtgc

SEQ ID NO: 3841201 - DNA, 25 bp, Homo sapien
tgggatgggagttattgcctggctg

SEQ ID NO: 3841202 - DNA, 25 bp, Homo sapien
ggatgggagttattgcctggctggt

SEQ ID NO: 3841203 - DNA, 25 bp, Homo sapien
tctggtcgaacatggagaagacgct

SEQ ID NO: 3841204 - DNA, 25 bp, Homo sapien
ggatctgagtctggtcgaacatgga

SEQ ID NO: 3841205 - DNA, 25 bp, Homo sapien
ggagcttccgccctctactgtcctt

SEQ ID NO: 3841206 - DNA, 25 bp, Homo sapien
tgagtctggtcgaacatggagaaga

SEQ ID NO: 3841207 - DNA, 25 bp, Homo sapien
gctgcgaaggtgtcccgaaggtcct

SEQ ID NO: 3841208 - DNA, 25 bp, Homo sapien
gaaggtcctccttgtctataatacc

SEQ ID NO: 3841209 - DNA, 25 bp, Homo sapien
gtctataataccatcacggttctgg

SEQ ID NO: 3841210 - DNA, 25 bp, Homo sapien
ggttctggtcgatcacagtgaaggc

SEQ ID NO: 3841211 - DNA, 25 bp, Homo sapien
gttgatgggaccgctggcttccttc

SEQ ID NO: 3841212 - DNA, 25 bp, Homo sapien
aagttgatgggaccgctggcttcct

SEQ ID NO: 3841213 - DNA, 25 bp, Homo sapien
gtgaagttgatgggaccgctggctt

SEQ ID NO: 3841214 - DNA, 25 bp, Homo sapien
gaagttgatgggaccgctggcttcc

SEQ ID NO: 3841215 - DNA, 25 bp, Homo sapien
ggccttggacccaggacactccact

SEQ ID NO: 3841216 - DNA, 25 bp, Homo sapien
cagagggcacatgaagctgatgggt

SEQ ID NO: 3841217 - DNA, 25 bp, Homo sapien
gggccttggacccaggacactccac

SEQ ID NO: 3841218 - DNA, 25 bp, Homo sapien
ggtcagagggcacatgaagctgatg

SEQ ID NO: 3841219 - DNA, 25 bp, Homo sapien
caagaccttgaaggctccggtgatc

SEQ ID NO: 3841220 - DNA, 25 bp, Homo sapien
tccctcagggtccaagaccttgaag

SEQ ID NO: 3841221 - DNA, 25 bp, Homo sapien
ttccctcagggtccaagaccttgaa

SEQ ID NO: 3841222 - DNA, 25 bp, Homo sapien
aaggctccggtgatcacatcctcag

SEQ ID NO: 3841223 - DNA, 25 bp, Homo sapien
ctttccactccctcgcacctcatcc

SEQ ID NO: 3841224 - DNA, 25 bp, Homo sapien
ggagttgcgattgggttcctggttc

SEQ ID NO: 3841225 - DNA, 25 bp, Homo sapien
gagagaggtgacacaaggggagttg

SEQ ID NO: 3841226 - DNA, 25 bp, Homo sapien
tgacacaaggggagttgcgattggg

SEQ ID NO: 3841227 - DNA, 25 bp, Homo sapien
ctcctgggagaagcggtcacactgc

SEQ ID NO: 3841228 - DNA, 25 bp, Homo sapien
cggtcacactgcgtggtcagcagct

SEQ ID NO: 3841229 - DNA, 25 bp, Homo sapien
gtcacactgcgtggtcagcagctcc

SEQ ID NO: 3841230 - DNA, 25 bp, Homo sapien
tcctcctgggagaagcggtcacact

SEQ ID NO: 3841231 - DNA, 25 bp, Homo sapien
ggcgtctcgcacaggcccttagtct

SEQ ID NO: 3841232 - DNA, 25 bp, Homo sapien
gacgtaggggcgtctcgcacaggcc

SEQ ID NO: 3841233 - DNA, 25 bp, Homo sapien
gggaaagacgtaggggcgtctcgca

SEQ ID NO: 3841234 - DNA, 25 bp, Homo sapien
aaagacgtaggggcgtctcgcacag

SEQ ID NO: 3841235 - DNA, 25 bp, Homo sapien
gcgtgatgacgtagcagatgttttt

SEQ ID NO: 3841236 - DNA, 25 bp, Homo sapien
tggtccttggcgtcgccgtgcgtga

SEQ ID NO: 3841237 - DNA, 25 bp, Homo sapien
tgtttttgtagtcgacgttgccgcc

SEQ ID NO: 3841238 - DNA, 25 bp, Homo sapien
ggaaggccgcccacatgttcttgat

SEQ ID NO: 3841239 - DNA, 25 bp, Homo sapien
aggtcgggccgaacagaagcgtcgg

SEQ ID NO: 3841240 - DNA, 25 bp, Homo sapien
tcgggccgaacagaagcgtcgggca

SEQ ID NO: 3841241 - DNA, 25 bp, Homo sapien
ggtggaggtcgggccgaacagaagc

SEQ ID NO: 3841242 - DNA, 25 bp, Homo sapien
cgaacagaagcgtcgggcagcggag

SEQ ID NO: 3841243 - DNA, 25 bp, Homo sapien
atcagttaaattttattgggagccg

SEQ ID NO: 3841244 - DNA, 25 bp, Homo sapien
gcctcgaacttgtaggcgcaagtga

SEQ ID NO: 3841245 - DNA, 25 bp, Homo sapien
cctcgaacttgtaggcgcaagtgat

SEQ ID NO: 3841246 - DNA, 25 bp, Homo sapien
ggggcaacaattgtgcaccacgatg

SEQ ID NO: 3841247 - DNA, 25 bp, Homo sapien
tggggcaacaattgtgcaccacgat

SEQ ID NO: 3841248 - DNA, 25 bp, Homo sapien
gctggggcaacaattgtgcaccacg

SEQ ID NO: 3841249 - DNA, 25 bp, Homo sapien
gggcaacaattgtgcaccacgatgc

SEQ ID NO: 3841250 - DNA, 25 bp, Homo sapien
ctaaaattgggttatagaaagatag

SEQ ID NO: 3841251 - DNA, 25 bp, Homo sapien
tacatatatataggcgtacgagaag

SEQ ID NO: 3841252 - DNA, 25 bp, Homo sapien
tagaaagatagtgattgggaggcca

SEQ ID NO: 3841253 - DNA, 25 bp, Homo sapien
tatataggcgtacgagaaggataaa

SEQ ID NO: 3841254 - DNA, 25 bp, Homo sapien
tagtttgtagtaatgaatctctgtg

SEQ ID NO: 3841255 - DNA, 25 bp, Homo sapien
cgatagtgtgggagaacaggaaggg

SEQ ID NO: 3841256 - DNA, 25 bp, Homo sapien
ttgtagtaatgaatctctgtgtgcc

SEQ ID NO: 3841257 - DNA, 25 bp, Homo sapien
gggttctagtttgtagtaatgaatc

SEQ ID NO: 3841258 - DNA, 25 bp, Homo sapien
ggtattaaccgtgtgcctcctgggc

SEQ ID NO: 3841259 - DNA, 25 bp, Homo sapien
ggtgaggcccgaggctcttcgtaat

SEQ ID NO: 3841260 - DNA, 25 bp, Homo sapien
acggagccgctctaggaccttggag

SEQ ID NO: 3841261 - DNA, 25 bp, Homo sapien
gggctactctaagccgaggccggcg

SEQ ID NO: 3841262 - DNA, 25 bp, Homo sapien
gacagacagcatcccgcggtcacgc

SEQ ID NO: 3841263 - DNA, 25 bp, Homo sapien
tcccggtgccccctgcccgcgccgc

SEQ ID NO: 3841264 - DNA, 25 bp, Homo sapien
caggtacgggcgcggctcccggtgc

SEQ ID NO: 3841265 - DNA, 25 bp, Homo sapien
gcatcccgcggtcacgcagccatgt

SEQ ID NO: 3841266 - DNA, 25 bp, Homo sapien
tcctccgggcggtggagatctgggc

SEQ ID NO: 3841267 - DNA, 25 bp, Homo sapien
ctcctccgggcggtggagatctggg

SEQ ID NO: 3841268 - DNA, 25 bp, Homo sapien
tcattcggctgagaaatcacgttct

SEQ ID NO: 3841269 - DNA, 25 bp, Homo sapien
aaactcattcggctgagaaatcacg

SEQ ID NO: 3841270 - DNA, 25 bp, Homo sapien
atgttcaaactcattcggctgagaa

SEQ ID NO: 3841271 - DNA, 25 bp, Homo sapien
ttcaaactcattcggctgagaaatc

SEQ ID NO: 3841272 - DNA, 25 bp, Homo sapien
cttccttgaaccccaagtcatcttc

SEQ ID NO: 3841273 - DNA, 25 bp, Homo sapien
tcatgatctggagccaaatcttctt

SEQ ID NO: 3841274 - DNA, 25 bp, Homo sapien
ttcttccttgaaccccaagtcatct

SEQ ID NO: 3841275 - DNA, 25 bp, Homo sapien
cttcatgatctggagccaaatcttc

SEQ ID NO: 3841276 - DNA, 25 bp, Homo sapien
agaactctgccggaagctcttgcca

SEQ ID NO: 3841277 - DNA, 25 bp, Homo sapien
ttgggccccaagtgactacgctggt

SEQ ID NO: 3841278 - DNA, 25 bp, Homo sapien
ctgaggctgaaggtacggtcgcatt

SEQ ID NO: 3841279 - DNA, 25 bp, Homo sapien
gtttgatccgggcagagctatcccc

SEQ ID NO: 3841280 - DNA, 25 bp, Homo sapien
agtcctgttgctgcctcctgcttga

SEQ ID NO: 3841281 - DNA, 25 bp, Homo sapien
tgctgcctcctgcttgaggggcctt

SEQ ID NO: 3841282 - DNA, 25 bp, Homo sapien
ttgctgcctcctgcttgaggggcct

SEQ ID NO: 3841283 - DNA, 25 bp, Homo sapien
tcattccagtcctgttgctgcctcc

SEQ ID NO: 3841284 - DNA, 25 bp, Homo sapien
gtctccaatccctatttctatctat

SEQ ID NO: 3841285 - DNA, 25 bp, Homo sapien
gcttcaaggttactgtctccaatcc

SEQ ID NO: 3841286 - DNA, 25 bp, Homo sapien
gaagccaggggtacagcccgtcctg

SEQ ID NO: 3841287 - DNA, 25 bp, Homo sapien
gtgctaggcagtcttctagaagcca

SEQ ID NO: 3841288 - DNA, 25 bp, Homo sapien
tccaggctggataccatgagagcac

SEQ ID NO: 3841289 - DNA, 25 bp, Homo sapien
tccggatgatcaagatacccctgcc

SEQ ID NO: 3841290 - DNA, 25 bp, Homo sapien
gtgtgtactacctgcccagcaaggg

SEQ ID NO: 3841291 - DNA, 25 bp, Homo sapien
cacagcagtatttgccccatccgga

SEQ ID NO: 3841292 - DNA, 25 bp, Homo sapien
gagttttgcgcgcagagacccctct

SEQ ID NO: 3841293 - DNA, 25 bp, Homo sapien
agggaagcacacaaaatttacagtc

SEQ ID NO: 3841294 - DNA, 25 bp, Homo sapien
gaagcacacaaaatttacagtctga

SEQ ID NO: 3841295 - DNA, 25 bp, Homo sapien
aatttacagtctgagttttgcgcgc

SEQ ID NO: 3841296 - DNA, 25 bp, Homo sapien
ggtgaaggagcaccgtttgccctcc

SEQ ID NO: 3841297 - DNA, 25 bp, Homo sapien
ccttttaagggtcgcgctggatgct

SEQ ID NO: 3841298 - DNA, 25 bp, Homo sapien
ctcatttcccgacgcataaaaaggg

SEQ ID NO: 3841299 - DNA, 25 bp, Homo sapien
ctgtgcagccgaatgactcatttcc

SEQ ID NO: 3841300 - DNA, 25 bp, Homo sapien
cgtccggcccaaacggctcggagag

SEQ ID NO: 3841301 - DNA, 25 bp, Homo sapien
gcggcgagctcagacttggcgtcct

SEQ ID NO: 3841302 - DNA, 25 bp, Homo sapien
ggaccgcagggacggccggtcattg

SEQ ID NO: 3841303 - DNA, 25 bp, Homo sapien
cattggtccgaacatatagccccac

SEQ ID NO: 3841304 - DNA, 25 bp, Homo sapien
ccgaaggttcggcactcgcggtgcc

SEQ ID NO: 3841305 - DNA, 25 bp, Homo sapien
cagccgaaggttcggcactcgcggt

SEQ ID NO: 3841306 - DNA, 25 bp, Homo sapien
aggttcggcactcgcggtgccccag

SEQ ID NO: 3841307 - DNA, 25 bp, Homo sapien
cgggcggctgggcactcagcgaggc

SEQ ID NO: 3841308 - DNA, 25 bp, Homo sapien
gcacagccccgggaccagctccgag

SEQ ID NO: 3841309 - DNA, 25 bp, Homo sapien
aagtcgccaccatccttgcgctgag

SEQ ID NO: 3841310 - DNA, 25 bp, Homo sapien
gagggctcgcgttcaccccactcat

SEQ ID NO: 3841311 - DNA, 25 bp, Homo sapien
ttgaacagttcgaatctccagcccc

SEQ ID NO: 3841312 - DNA, 25 bp, Homo sapien
gtctccgaatctggtcctctcccgt

SEQ ID NO: 3841313 - DNA, 25 bp, Homo sapien
ctgccctggtctccgaatctggtcc

SEQ ID NO: 3841314 - DNA, 25 bp, Homo sapien
gaatctggtcctctcccgtccaccc

SEQ ID NO: 3841315 - DNA, 25 bp, Homo sapien
cctggtctccgaatctggtcctctc

SEQ ID NO: 3841316 - DNA, 25 bp, Homo sapien
cttgagtttcaccacctcatacttc

SEQ ID NO: 3841317 - DNA, 25 bp, Homo sapien
accacctcatacttctcctcaccct

SEQ ID NO: 3841318 - DNA, 25 bp, Homo sapien
ttcaccacctcatacttctcctcac

SEQ ID NO: 3841319 - DNA, 25 bp, Homo sapien
gatcttgagtttcaccacctcatac

SEQ ID NO: 3841320 - DNA, 25 bp, Homo sapien
catttcctctgactgggtccatcac

SEQ ID NO: 3841321 - DNA, 25 bp, Homo sapien
catcatagaatcgaggtgcttagaa

SEQ ID NO: 3841322 - DNA, 25 bp, Homo sapien
cataagccatccttttactttgaga

SEQ ID NO: 3841323 - DNA, 25 bp, Homo sapien
aatggaataaatgctaccgacatca

SEQ ID NO: 3841324 - DNA, 25 bp, Homo sapien
taacacagtacgtcctgccctagct

SEQ ID NO: 3841325 - DNA, 25 bp, Homo sapien
tggtgccacagaacctaacacagta

SEQ ID NO: 3841326 - DNA, 25 bp, Homo sapien
aaggcttcttatggtgccacagaac

SEQ ID NO: 3841327 - DNA, 25 bp, Homo sapien
cctggctcttcccatgatttaaggc

SEQ ID NO: 3841328 - DNA, 25 bp, Homo sapien
atcctcattttaacaagacccctgg

SEQ ID NO: 3841329 - DNA, 25 bp, Homo sapien
gatgagaaaagagctactcctggag

SEQ ID NO: 3841330 - DNA, 25 bp, Homo sapien
caacatcactgggaactttttacaa

SEQ ID NO: 3841331 - DNA, 25 bp, Homo sapien
tggcccctttttgcggtcacagtct

SEQ ID NO: 3841332 - DNA, 25 bp, Homo sapien
cagtactattgtttagatgaaggta

SEQ ID NO: 3841333 - DNA, 25 bp, Homo sapien
gatatcacatgaaacccacaatttc

SEQ ID NO: 3841334 - DNA, 25 bp, Homo sapien
taaggtggtatgtgggcaaacttta

SEQ ID NO: 3841335 - DNA, 25 bp, Homo sapien
tcccagcatgaggtataaggtggta

SEQ ID NO: 3841336 - DNA, 25 bp, Homo sapien
tctgaactcacgtgaccaagatgtg

SEQ ID NO: 3841337 - DNA, 25 bp, Homo sapien
ccttggatgcccgaggaaaaatctt

SEQ ID NO: 3841338 - DNA, 25 bp, Homo sapien
cctggcacactccaagagggattca

SEQ ID NO: 3841339 - DNA, 25 bp, Homo sapien
tgagatcaaattcccagtatgaggc

SEQ ID NO: 3841340 - DNA, 25 bp, Homo sapien
gagcagggaagtgaccatatcctac

SEQ ID NO: 3841341 - DNA, 25 bp, Homo sapien
tcacggcttcttgacatatctggag

SEQ ID NO: 3841342 - DNA, 25 bp, Homo sapien
gccatttacagagatgaggacggtg

SEQ ID NO: 3841343 - DNA, 25 bp, Homo sapien
gctcagaagcgaggcctagactgga

SEQ ID NO: 3841344 - DNA, 25 bp, Homo sapien
tccagtgagataatgcgcgtaacgc

SEQ ID NO: 3841345 - DNA, 25 bp, Homo sapien
cacaaagcccagtggcgttctagct

SEQ ID NO: 3841346 - DNA, 25 bp, Homo sapien
aataggaaaggccacggtgctgcct

SEQ ID NO: 3841347 - DNA, 25 bp, Homo sapien
cagggttgtcaagacactttaccga

SEQ ID NO: 3841348 - DNA, 25 bp, Homo sapien
tcagcgccgacttctgtgagaagcg

SEQ ID NO: 3841349 - DNA, 25 bp, Homo sapien
gcgcaaatatacaggcggcgccgca

SEQ ID NO: 3841350 - DNA, 25 bp, Homo sapien
cgcagtgcgcgcatgcgtacggctt

SEQ ID NO: 3841351 - DNA, 25 bp, Homo sapien
cggccgagaagcgtttgtcgcactc

SEQ ID NO: 3841352 - DNA, 25 bp, Homo sapien
ctcaatttcccagacccggaggccg

SEQ ID NO: 3841353 - DNA, 25 bp, Homo sapien
ttattcactaacacgggccgaggga

SEQ ID NO: 3841354 - DNA, 25 bp, Homo sapien
cctgccgtcccctcaatttcccaga

SEQ ID NO: 3841355 - DNA, 25 bp, Homo sapien
ggaggagcctgggttagtgcagcca

SEQ ID NO: 3841356 - DNA, 25 bp, Homo sapien
agggccaagtgtgcgatcacctcca

SEQ ID NO: 3841357 - DNA, 25 bp, Homo sapien
aactcacttggcacctgagcctgga

SEQ ID NO: 3841358 - DNA, 25 bp, Homo sapien
tatgaggacgtaaccaagggccaag

SEQ ID NO: 3841359 - DNA, 25 bp, Homo sapien
gctgctaggtccaatcgctttgaga

SEQ ID NO: 3841360 - DNA, 25 bp, Homo sapien
cagaatagatcatgggcctgaggcc

SEQ ID NO: 3841361 - DNA, 25 bp, Homo sapien
tgttgtaccttttgcctgcagggca

SEQ ID NO: 3841362 - DNA, 25 bp, Homo sapien
cccagtaggatgtcatgtaagttcc

SEQ ID NO: 3841363 - DNA, 25 bp, Homo sapien
cacaggacttgcaactcagggtggt

SEQ ID NO: 3841364 - DNA, 25 bp, Homo sapien
gaattgcaattgtcacagccttggg

SEQ ID NO: 3841365 - DNA, 25 bp, Homo sapien
gctggaagcctctttaaacgtggaa

SEQ ID NO: 3841366 - DNA, 25 bp, Homo sapien
cgtattccctggtgtgagtggagcc

SEQ ID NO: 3841367 - DNA, 25 bp, Homo sapien
tgcaagactacacctgttctagggt

SEQ ID NO: 3841368 - DNA, 25 bp, Homo sapien
gaggacctgcaaccatctgacttgg

SEQ ID NO: 3841369 - DNA, 25 bp, Homo sapien
gagcaacttgtctgatgactgggaa

SEQ ID NO: 3841370 - DNA, 25 bp, Homo sapien
aagatgttaagtcttttgcggcaga

SEQ ID NO: 3841371 - DNA, 25 bp, Homo sapien
cctgctctggacaagaattgagcaa

SEQ ID NO: 3841372 - DNA, 25 bp, Homo sapien
tgagttcataatgccggacagcgcc

SEQ ID NO: 3841373 - DNA, 25 bp, Homo sapien
tcaaatcctccaagtacggagaggg

SEQ ID NO: 3841374 - DNA, 25 bp, Homo sapien
gcggccacagatatcacaggctttg

SEQ ID NO: 3841375 - DNA, 25 bp, Homo sapien
tttgtctgccaagagaacaggcggc

SEQ ID NO: 3841376 - DNA, 25 bp, Homo sapien
tagcttgtgccaacgtgctgagtga

SEQ ID NO: 3841377 - DNA, 25 bp, Homo sapien
tgctgagtgacctctacgccatggg

SEQ ID NO: 3841378 - DNA, 25 bp, Homo sapien
tgatgttactcagcgtcagccagag

SEQ ID NO: 3841379 - DNA, 25 bp, Homo sapien
ggcatcgggatggactcctgcgtca

SEQ ID NO: 3841380 - DNA, 25 bp, Homo sapien
gaaggaacaaagatattggtaactg

SEQ ID NO: 3841381 - DNA, 25 bp, Homo sapien
agaaggaacaaagatattggtaact

SEQ ID NO: 3841382 - DNA, 25 bp, Homo sapien
caaagatattggtaactggttgtgc

SEQ ID NO: 3841383 - DNA, 25 bp, Homo sapien
agatattggtaactggttgtgctcc

SEQ ID NO: 3841384 - DNA, 25 bp, Homo sapien
acccaagcgagagtgcactggcgcg

SEQ ID NO: 3841385 - DNA, 25 bp, Homo sapien
acctctgctcctaagtagctgaaac

SEQ ID NO: 3841386 - DNA, 25 bp, Homo sapien
ctctgctcctaagtagctgaaacca

SEQ ID NO: 3841387 - DNA, 25 bp, Homo sapien
tcacccaagcgagagtgcactggcg

SEQ ID NO: 3841388 - DNA, 25 bp, Homo sapien
cctagacagggtgaaagaggaaaat

SEQ ID NO: 3841389 - DNA, 25 bp, Homo sapien
ttccagcactcgagggacctgtggc

SEQ ID NO: 3841390 - DNA, 25 bp, Homo sapien
gaggaaaatgatcatgccctttggc

SEQ ID NO: 3841391 - DNA, 25 bp, Homo sapien
aggcccgtgggatttgctggcaacc

SEQ ID NO: 3841392 - DNA, 25 bp, Homo sapien
atggccatcacagtgatgcaggaat

SEQ ID NO: 3841393 - DNA, 25 bp, Homo sapien
cagcgccatggccatcacagtgatg

SEQ ID NO: 3841394 - DNA, 25 bp, Homo sapien
tcacagtgatgcaggaatccttcat

SEQ ID NO: 3841395 - DNA, 25 bp, Homo sapien
agacagcagcgccatggccatcaca

SEQ ID NO: 3841396 - DNA, 25 bp, Homo sapien
gaggagcagacccaaggggccccaa

SEQ ID NO: 3841397 - DNA, 25 bp, Homo sapien
cagagggtgaccaagttctcaggca

SEQ ID NO: 3841398 - DNA, 25 bp, Homo sapien
cccgagccgggtgcgcctctgccac

SEQ ID NO: 3841399 - DNA, 25 bp, Homo sapien
gaaggatgagaagttagaggctcca

SEQ ID NO: 3841400 - DNA, 25 bp, Homo sapien
cctgaggatacaacttcccgtttgg

SEQ ID NO: 3841401 - DNA, 25 bp, Homo sapien
gacttctgggaatatggaaggagca

SEQ ID NO: 3841402 - DNA, 25 bp, Homo sapien
atatggaaggagcaactcccggccc

SEQ ID NO: 3841403 - DNA, 25 bp, Homo sapien
tgaggatacaacttcccgtttggcc

SEQ ID NO: 3841404 - DNA, 25 bp, Homo sapien
gcccctgcacgtgcccagcaggtgg

SEQ ID NO: 3841405 - DNA, 25 bp, Homo sapien
gtcgtcagctgcgaccgagggaccc

SEQ ID NO: 3841406 - DNA, 25 bp, Homo sapien
atcccaggcccacccggatgtcgct

SEQ ID NO: 3841407 - DNA, 25 bp, Homo sapien
tgcccagcaggtggccgatcccagg

SEQ ID NO: 3841408 - DNA, 25 bp, Homo sapien
ggtatccaaagtgcctcccggcgcg

SEQ ID NO: 3841409 - DNA, 25 bp, Homo sapien
ctgcaggacgcggtatccaaagtgc

SEQ ID NO: 3841410 - DNA, 25 bp, Homo sapien
tccaggttgtagctcgaggccggcg

SEQ ID NO: 3841411 - DNA, 25 bp, Homo sapien
gcgcgccccgcacgtccaggttgta

SEQ ID NO: 3841412 - DNA, 25 bp, Homo sapien
ataattccaaatgctaaaatcctag

SEQ ID NO: 3841413 - DNA, 25 bp, Homo sapien
ctagaaaattaaggttcctttgcat

SEQ ID NO: 3841414 - DNA, 25 bp, Homo sapien
ctgtgagagggagtggcccagatct

SEQ ID NO: 3841415 - DNA, 25 bp, Homo sapien
gggagtggcccagatctgtacccat

SEQ ID NO: 3841416 - DNA, 25 bp, Homo sapien
agagggagtggcccagatctgtacc

SEQ ID NO: 3841417 - DNA, 25 bp, Homo sapien
gtgagagggagtggcccagatctgt

SEQ ID NO: 3841418 - DNA, 25 bp, Homo sapien
tgcccgactggcactgatagaggct

SEQ ID NO: 3841419 - DNA, 25 bp, Homo sapien
cgactggcactgatagaggcttcct

SEQ ID NO: 3841420 - DNA, 25 bp, Homo sapien
gtcctgtgcccgactggcactgata

SEQ ID NO: 3841421 - DNA, 25 bp, Homo sapien
ctcccctggagctcccacgatgacc

SEQ ID NO: 3841422 - DNA, 25 bp, Homo sapien
caagtacttggaggtatagttggaa

SEQ ID NO: 3841423 - DNA, 25 bp, Homo sapien
tcccaagtacttggaggtatagttg

SEQ ID NO: 3841424 - DNA, 25 bp, Homo sapien
caaaatgcttccatctgtggggtct

SEQ ID NO: 3841425 - DNA, 25 bp, Homo sapien
tgttgccaaggtcattcccaagtac

SEQ ID NO: 3841426 - DNA, 25 bp, Homo sapien
tctggcggaagaggtaacacaggcc

SEQ ID NO: 3841427 - DNA, 25 bp, Homo sapien
acacgttcgagacagcccagggtca

SEQ ID NO: 3841428 - DNA, 25 bp, Homo sapien
cactcagataggtgttctggtcaca

SEQ ID NO: 3841429 - DNA, 25 bp, Homo sapien
catgggaccctgcagattctggcgg

SEQ ID NO: 3841430 - DNA, 25 bp, Homo sapien
catcaaacagaaataccaggtctac

SEQ ID NO: 3841431 - DNA, 25 bp, Homo sapien
gcaagctcatcgaaccatcaaacag

SEQ ID NO: 3841432 - DNA, 25 bp, Homo sapien
ccaggtctacgttgcccttgataca

SEQ ID NO: 3841433 - DNA, 25 bp, Homo sapien
tggctgcaagctcatcgaaccatca

SEQ ID NO: 3841434 - DNA, 25 bp, Homo sapien
aacatgtgctttacatgcttcagca

SEQ ID NO: 3841435 - DNA, 25 bp, Homo sapien
taattgatggcaccaaaggtattgg

SEQ ID NO: 3841436 - DNA, 25 bp, Homo sapien
gagcatcagggtccttccgtttaac

SEQ ID NO: 3841437 - DNA, 25 bp, Homo sapien
gtattggtcaacagcaacatgtgct

SEQ ID NO: 3841438 - DNA, 25 bp, Homo sapien
tgtctttggccgcatcgatgttgcc

SEQ ID NO: 3841439 - DNA, 25 bp, Homo sapien
cccgatgatgtagcggatgatgtct

SEQ ID NO: 3841440 - DNA, 25 bp, Homo sapien
cccatccgtgatgatgataagcact

SEQ ID NO: 3841441 - DNA, 25 bp, Homo sapien
tgatgataagcactttggtggcatc

SEQ ID NO: 3841442 - DNA, 25 bp, Homo sapien
tcctgactctccttggtctgaaaat

SEQ ID NO: 3841443 - DNA, 25 bp, Homo sapien
ccttggtctgaaaatgctttccaat

SEQ ID NO: 3841444 - DNA, 25 bp, Homo sapien
ctccttggtctgaaaatgctttcca

SEQ ID NO: 3841445 - DNA, 25 bp, Homo sapien
ctgactctccttggtctgaaaatgc

SEQ ID NO: 3841446 - DNA, 25 bp, Homo sapien
gaattttcacaaactcgctcgcggg

SEQ ID NO: 3841447 - DNA, 25 bp, Homo sapien
gatctttcagcttctcaaatgtgtc

SEQ ID NO: 3841448 - DNA, 25 bp, Homo sapien
aatgacatagatcttcttctgcagc

SEQ ID NO: 3841449 - DNA, 25 bp, Homo sapien
ctgcagctcagtgaatagatctttc

SEQ ID NO: 3841450 - DNA, 25 bp, Homo sapien
gtcagcactgatgccgctggaggac

SEQ ID NO: 3841451 - DNA, 25 bp, Homo sapien
tcagcactgatgccgctggaggaca

SEQ ID NO: 3841452 - DNA, 25 bp, Homo sapien
gctccatgttgaaggaagtcaggtc

SEQ ID NO: 3841453 - DNA, 25 bp, Homo sapien
gaagtcaggtcctgtttgcttgtgc

SEQ ID NO: 3841454 - DNA, 25 bp, Homo sapien
tgcagcccattgctccagcccagca

SEQ ID NO: 3841455 - DNA, 25 bp, Homo sapien
ggagatgagcgggtcagctacccac

SEQ ID NO: 3841456 - DNA, 25 bp, Homo sapien
aaggagatgagcgggtcagctaccc

SEQ ID NO: 3841457 - DNA, 25 bp, Homo sapien
atgagcgggtcagctacccaccgac

SEQ ID NO: 3841458 - DNA, 25 bp, Homo sapien
agcccagtccttggctcctactgcc

SEQ ID NO: 3841459 - DNA, 25 bp, Homo sapien
ccaataaatgtgtcatcctgcaggt

SEQ ID NO: 3841460 - DNA, 25 bp, Homo sapien
caatggttcattcccaataaatgtg

SEQ ID NO: 3841461 - DNA, 25 bp, Homo sapien
tctggtgtcaatggttcattcccaa

SEQ ID NO: 3841462 - DNA, 25 bp, Homo sapien
gacaattcaagaggaggaagcctta

SEQ ID NO: 3841463 - DNA, 25 bp, Homo sapien
ttccaagagggagtaggcactggat

SEQ ID NO: 3841464 - DNA, 25 bp, Homo sapien
cctcaggtgctcttggacaattcaa

SEQ ID NO: 3841465 - DNA, 25 bp, Homo sapien
cattgaaagaagtttactagccaca

SEQ ID NO: 3841466 - DNA, 25 bp, Homo sapien
tcagtgtcaggctgtcttcatcttc

SEQ ID NO: 3841467 - DNA, 25 bp, Homo sapien
catgtcagtgtcaggctgtcttcat

SEQ ID NO: 3841468 - DNA, 25 bp, Homo sapien
gtcagtgtcaggctgtcttcatctt

SEQ ID NO: 3841469 - DNA, 25 bp, Homo sapien
atgtcagtgtcaggctgtcttcatc

SEQ ID NO: 3841470 - DNA, 25 bp, Homo sapien
ctcccgaggccagcaacgaagtctt

SEQ ID NO: 3841471 - DNA, 25 bp, Homo sapien
aagtcttttgccgggagggcagcca

SEQ ID NO: 3841472 - DNA, 25 bp, Homo sapien
cagcaacgaagtcttttgccgggag

SEQ ID NO: 3841473 - DNA, 25 bp, Homo sapien
ccgaggccagcaacgaagtcttttg

SEQ ID NO: 3841474 - DNA, 25 bp, Homo sapien
cactcggcccatgtgctggtatcga

SEQ ID NO: 3841475 - DNA, 25 bp, Homo sapien
tggctccagtgtcctccgccctgtg

SEQ ID NO: 3841476 - DNA, 25 bp, Homo sapien
cccatggattgtctggacctggctc

SEQ ID NO: 3841477 - DNA, 25 bp, Homo sapien
ctgggtcccatggattgtctggacc

SEQ ID NO: 3841478 - DNA, 25 bp, Homo sapien
tcttggtccacgtcgacgccacaca

SEQ ID NO: 3841479 - DNA, 25 bp, Homo sapien
ctggtagataaacacccggcctcct

SEQ ID NO: 3841480 - DNA, 25 bp, Homo sapien
ttctctggtagataaacacccggcc

SEQ ID NO: 3841481 - DNA, 25 bp, Homo sapien
gctccccaccgaaataagagccaat

SEQ ID NO: 3841482 - DNA, 25 bp, Homo sapien
ccccgtgcctcccattgaagatgta

SEQ ID NO: 3841483 - DNA, 25 bp, Homo sapien
tcccattgaagatgtacacagcccc

SEQ ID NO: 3841484 - DNA, 25 bp, Homo sapien
agtgatggcttctccaaaccgcccg

SEQ ID NO: 3841485 - DNA, 25 bp, Homo sapien
agcccatcgccgttgatgtctgtca

SEQ ID NO: 3841486 - DNA, 25 bp, Homo sapien
ctcagcacgatcatctggctctcag

SEQ ID NO: 3841487 - DNA, 25 bp, Homo sapien
agagcacttgggtcccttctatccg

SEQ ID NO: 3841488 - DNA, 25 bp, Homo sapien
gtccaaaccactgaattcctgagag

SEQ ID NO: 3841489 - DNA, 25 bp, Homo sapien
cttcaccccatggatggagcgtcca

SEQ ID NO: 3841490 - DNA, 25 bp, Homo sapien
catcttgttactggttgaataggag

SEQ ID NO: 3841491 - DNA, 25 bp, Homo sapien
agggtgaccatatccaccacgggcc

SEQ ID NO: 3841492 - DNA, 25 bp, Homo sapien
taggagcactccacttcatgcactg

SEQ ID NO: 3841493 - DNA, 25 bp, Homo sapien
gaaacagattgtgatattaactcct

SEQ ID NO: 3841494 - DNA, 25 bp, Homo sapien
tgagttcatgtctccctcctgggaa

SEQ ID NO: 3841495 - DNA, 25 bp, Homo sapien
catccagctgcagagtgtaagtgag

SEQ ID NO: 3841496 - DNA, 25 bp, Homo sapien
tgtaagtgagattggcaaccaggcg

SEQ ID NO: 3841497 - DNA, 25 bp, Homo sapien
tggtggtgacagctatattccttct

SEQ ID NO: 3841498 - DNA, 25 bp, Homo sapien
ttgcttataagcaactgaatctggg

SEQ ID NO: 3841499 - DNA, 25 bp, Homo sapien
taagcaactgaatctgggtatttca

SEQ ID NO: 3841500 - DNA, 25 bp, Homo sapien
tttttatacaggattgcttataagc

SEQ ID NO: 3841501 - DNA, 25 bp, Homo sapien
gcgcccggccatattaatcccattt

SEQ ID NO: 3841502 - DNA, 25 bp, Homo sapien
cacctgaaggttctactagccctaa

SEQ ID NO: 3841503 - DNA, 25 bp, Homo sapien
tagggctgggtcttagtcatttgct

SEQ ID NO: 3841504 - DNA, 25 bp, Homo sapien
catttgctattaccaatgcctgaca

SEQ ID NO: 3841505 - DNA, 25 bp, Homo sapien
cctaggcagccattatcaaagtttg

SEQ ID NO: 3841506 - DNA, 25 bp, Homo sapien
tgggggagatgaggtcttgaacaca

SEQ ID NO: 3841507 - DNA, 25 bp, Homo sapien
gggagatgaggtcttgaacacatac

SEQ ID NO: 3841508 - DNA, 25 bp, Homo sapien
attcagggaaacattgatgggggag

SEQ ID NO: 3841509 - DNA, 25 bp, Homo sapien
gatgggggagatgaggtcttgaaca

SEQ ID NO: 3841510 - DNA, 25 bp, Homo sapien
gcccggccatgggcggctcttcttg

SEQ ID NO: 3841511 - DNA, 25 bp, Homo sapien
ctacaggggcgcaccatcacaataa

SEQ ID NO: 3841512 - DNA, 25 bp, Homo sapien
cctggcctcaagtgcaccatcacac

SEQ ID NO: 3841513 - DNA, 25 bp, Homo sapien
ttataggagtgtgctgcccggccat

SEQ ID NO: 3841514 - DNA, 25 bp, Homo sapien
ggtctcaggatgggcggtatgtcct

SEQ ID NO: 3841515 - DNA, 25 bp, Homo sapien
gggtctcaggatgggcggtatgtcc

SEQ ID NO: 3841516 - DNA, 25 bp, Homo sapien
tcaggatgggcggtatgtccttgcc

SEQ ID NO: 3841517 - DNA, 25 bp, Homo sapien
tctcaggatgggcggtatgtccttg

SEQ ID NO: 3841518 - DNA, 25 bp, Homo sapien
gacactctcaagtttgcctcacact

SEQ ID NO: 3841519 - DNA, 25 bp, Homo sapien
tgcaggagagaaggacactctcaag

SEQ ID NO: 3841520 - DNA, 25 bp, Homo sapien
tcaagtttgcctcacacttcttgtc

SEQ ID NO: 3841521 - DNA, 25 bp, Homo sapien
gagaaggacactctcaagtttgcct

SEQ ID NO: 3841522 - DNA, 25 bp, Homo sapien
tttactgatgactgataggagttcc

SEQ ID NO: 3841523 - DNA, 25 bp, Homo sapien
caattcttgcaatctcatttactga

SEQ ID NO: 3841524 - DNA, 25 bp, Homo sapien
gggtcttaaaacagagtggatggga

SEQ ID NO: 3841525 - DNA, 25 bp, Homo sapien
caaatgacatatctggtgagtggag

SEQ ID NO: 3841526 - DNA, 25 bp, Homo sapien
tggcaaaagcagttagacgcagggc

SEQ ID NO: 3841527 - DNA, 25 bp, Homo sapien
ctggcaaaagcagttagacgcaggg

SEQ ID NO: 3841528 - DNA, 25 bp, Homo sapien
gcaaaagcagttagacgcagggctc

SEQ ID NO: 3841529 - DNA, 25 bp, Homo sapien
aaaagcagttagacgcagggctctg

SEQ ID NO: 3841530 - DNA, 25 bp, Homo sapien
gcaggtccagctggacccagtaagc

SEQ ID NO: 3841531 - DNA, 25 bp, Homo sapien
cagctcacaggtatctggctatggg

SEQ ID NO: 3841532 - DNA, 25 bp, Homo sapien
ctcgcagctcacaggtatctggcta

SEQ ID NO: 3841533 - DNA, 25 bp, Homo sapien
ttgcaagataatgccctggacagaa

SEQ ID NO: 3841534 - DNA, 25 bp, Homo sapien
gaagatgggagagctcacattgcaa

SEQ ID NO: 3841535 - DNA, 25 bp, Homo sapien
gtcacattggcgtgcaattcaaccg

SEQ ID NO: 3841536 - DNA, 25 bp, Homo sapien
ttggcgtgcaattcaaccgagtccc

SEQ ID NO: 3841537 - DNA, 25 bp, Homo sapien
cacattggcgtgcaattcaaccgag

SEQ ID NO: 3841538 - DNA, 25 bp, Homo sapien
cattggcgtgcaattcaaccgagtc

SEQ ID NO: 3841539 - DNA, 25 bp, Homo sapien
gtagtggctgagttgtcctccagga

SEQ ID NO: 3841540 - DNA, 25 bp, Homo sapien
tgatggtagtggctgagttgtcctc

SEQ ID NO: 3841541 - DNA, 25 bp, Homo sapien
tccaggaggtctgagtcctcattgt

SEQ ID NO: 3841542 - DNA, 25 bp, Homo sapien
caggaggtctgagtcctcattgtta

SEQ ID NO: 3841543 - DNA, 25 bp, Homo sapien
aactgacatagagtgtggagtcttc

SEQ ID NO: 3841544 - DNA, 25 bp, Homo sapien
gtgaaactgacatagagtgtggagt

SEQ ID NO: 3841545 - DNA, 25 bp, Homo sapien
gcttgacttggtggatcttggggcc

SEQ ID NO: 3841546 - DNA, 25 bp, Homo sapien
gacatagagtgtggagtcttcttgg

SEQ ID NO: 3841547 - DNA, 25 bp, Homo sapien
tgtgtgatgggcccctcgctgggag

SEQ ID NO: 3841548 - DNA, 25 bp, Homo sapien
tccagggtgggtatgttgtggtcgt

SEQ ID NO: 3841549 - DNA, 25 bp, Homo sapien
tgcacgctccactggtgtgtgatgg

SEQ ID NO: 3841550 - DNA, 25 bp, Homo sapien
gtatgttgtggtcgtggatggaagg

SEQ ID NO: 3841551 - DNA, 25 bp, Homo sapien
agatcctcatagtggcagggcacgg

SEQ ID NO: 3841552 - DNA, 25 bp, Homo sapien
agctgcatccgggagcctctccaga

SEQ ID NO: 3841553 - DNA, 25 bp, Homo sapien
tccagatcctcatagtggcagggca

SEQ ID NO: 3841554 - DNA, 25 bp, Homo sapien
cctctccagatcctcatagtggcag

SEQ ID NO: 3841555 - DNA, 25 bp, Homo sapien
gacgaggatctcctgcctgaagaca

SEQ ID NO: 3841556 - DNA, 25 bp, Homo sapien
tcacttggacgaggatctcctgcct

SEQ ID NO: 3841557 - DNA, 25 bp, Homo sapien
tgaagacaacagggcagcggaacag

SEQ ID NO: 3841558 - DNA, 25 bp, Homo sapien
cagctccagagtcccgatcacttgg

SEQ ID NO: 3841559 - DNA, 25 bp, Homo sapien
gaacacacaggaactatccataggc

SEQ ID NO: 3841560 - DNA, 25 bp, Homo sapien
cctaatatgtcgctccccattgttg

SEQ ID NO: 3841561 - DNA, 25 bp, Homo sapien
acagcattgcaaatatcacagaaat

SEQ ID NO: 3841562 - DNA, 25 bp, Homo sapien
cctctactgtggcaccctaatatgt

SEQ ID NO: 3841563 - DNA, 25 bp, Homo sapien
tgggccagggaggcgttgctgccat

SEQ ID NO: 3841564 - DNA, 25 bp, Homo sapien
gccagggaggcgttgctgccataga

SEQ ID NO: 3841565 - DNA, 25 bp, Homo sapien
ggaggcgttgctgccatagaggtgg

SEQ ID NO: 3841566 - DNA, 25 bp, Homo sapien
agggaggcgttgctgccatagaggt

SEQ ID NO: 3841567 - DNA, 25 bp, Homo sapien
ggctctggcagtgggaagttctgac

SEQ ID NO: 3841568 - DNA, 25 bp, Homo sapien
gctctggcagtgggaagttctgact

SEQ ID NO: 3841569 - DNA, 25 bp, Homo sapien
ctctggcagtgggaagttctgactc

SEQ ID NO: 3841570 - DNA, 25 bp, Homo sapien
ctgtgaacctggttccattccccat

SEQ ID NO: 3841571 - DNA, 25 bp, Homo sapien
tgaaagtccctgtgaacctggttcc

SEQ ID NO: 3841572 - DNA, 25 bp, Homo sapien
aagtccctgtgaacctggttccatt

SEQ ID NO: 3841573 - DNA, 25 bp, Homo sapien
tgtgaacctggttccattccccatc

SEQ ID NO: 3841574 - DNA, 25 bp, Homo sapien
ttctcatacaccacgtcaaccttca

SEQ ID NO: 3841575 - DNA, 25 bp, Homo sapien
ctgcttctcatacaccacgtcaacc

SEQ ID NO: 3841576 - DNA, 25 bp, Homo sapien
tacaccacgtcaaccttcatgacaa

SEQ ID NO: 3841577 - DNA, 25 bp, Homo sapien
tcatacaccacgtcaaccttcatga

SEQ ID NO: 3841578 - DNA, 25 bp, Homo sapien
cccgatgccgctcagcacgtagagg

SEQ ID NO: 3841579 - DNA, 25 bp, Homo sapien
tgccgctcagcacgtagaggtagag

SEQ ID NO: 3841580 - DNA, 25 bp, Homo sapien
cgatgccgctcagcacgtagaggta

SEQ ID NO: 3841581 - DNA, 25 bp, Homo sapien
cgctcagcacgtagaggtagagcat

SEQ ID NO: 3841582 - DNA, 25 bp, Homo sapien
tgggctgaatgaccgtggaaaagtc

SEQ ID NO: 3841583 - DNA, 25 bp, Homo sapien
tgtcctctcttagactgtgagcgcc

SEQ ID NO: 3841584 - DNA, 25 bp, Homo sapien
actgtgagcgccacaatggcaggga

SEQ ID NO: 3841585 - DNA, 25 bp, Homo sapien
cccagcagccaaaaggacctccaca

SEQ ID NO: 3841586 - DNA, 25 bp, Homo sapien
gacaaaatttgaacgagcaaagaat

SEQ ID NO: 3841587 - DNA, 25 bp, Homo sapien
aagacaaaatttgaacgagcaaaga

SEQ ID NO: 3841588 - DNA, 25 bp, Homo sapien
aacgagcaaagaattcactgagcac

SEQ ID NO: 3841589 - DNA, 25 bp, Homo sapien
cgagcaaagaattcactgagcactt

SEQ ID NO: 3841590 - DNA, 25 bp, Homo sapien
tctccttcaggttccgtttgaagaa

SEQ ID NO: 3841591 - DNA, 25 bp, Homo sapien
catcttctccttcaggttccgtttg

SEQ ID NO: 3841592 - DNA, 25 bp, Homo sapien
ttctccttcaggttccgtttgaaga

SEQ ID NO: 3841593 - DNA, 25 bp, Homo sapien
tcttctccttcaggttccgtttgaa

SEQ ID NO: 3841594 - DNA, 25 bp, Homo sapien
gggcttcaggcagccgggatcccca

SEQ ID NO: 3841595 - DNA, 25 bp, Homo sapien
tcttgcccagatgccagctgctcag

SEQ ID NO: 3841596 - DNA, 25 bp, Homo sapien
tctgcagggattccattcgggacac

SEQ ID NO: 3841597 - DNA, 25 bp, Homo sapien
gagtccttctcatggaggggcttca

SEQ ID NO: 3841598 - DNA, 25 bp, Homo sapien
gaggcatcacggctctagaagaggc

SEQ ID NO: 3841599 - DNA, 25 bp, Homo sapien
tctttggccaagaacaaggcgtgtg

SEQ ID NO: 3841600 - DNA, 25 bp, Homo sapien
tcaccagagcttcaacagggaggca

SEQ ID NO: 3841601 - DNA, 25 bp, Homo sapien
gaaccgtctggtaatgacaagccct

SEQ ID NO: 3841602 - DNA, 25 bp, Homo sapien
gagttgttagatgcctcgaaggcca

SEQ ID NO: 3841603 - DNA, 25 bp, Homo sapien
tcctcaattcaaagctgcgcccgag

SEQ ID NO: 3841604 - DNA, 25 bp, Homo sapien
gtgaggaaatctaacaacagggact

SEQ ID NO: 3841605 - DNA, 25 bp, Homo sapien
ggctgccagggattgagttaaactc

SEQ ID NO: 3841606 - DNA, 25 bp, Homo sapien
ggaggtcccagaatccaccgcaaga

SEQ ID NO: 3841607 - DNA, 25 bp, Homo sapien
atgctaagaggattgaggtagagaa

SEQ ID NO: 3841608 - DNA, 25 bp, Homo sapien
aatccaccgcaagagctggcctggg

SEQ ID NO: 3841609 - DNA, 25 bp, Homo sapien
gggctgaggtgagaaccccccagac

SEQ ID NO: 3841610 - DNA, 25 bp, Homo sapien
taacttctgagttcacgagggctgc

SEQ ID NO: 3841611 - DNA, 25 bp, Homo sapien
gctgctgtcgccgtttctgaggaca

SEQ ID NO: 3841612 - DNA, 25 bp, Homo sapien
taaaactaagctatgcccagaccac

SEQ ID NO: 3841613 - DNA, 25 bp, Homo sapien
tctgaggacaaaacgagacagtgat

SEQ ID NO: 3841614 - DNA, 25 bp, Homo sapien
catgtatgaagtcacgtggagcaca

SEQ ID NO: 3841615 - DNA, 25 bp, Homo sapien
ttacaggcgattctcaatctgggcc

SEQ ID NO: 3841616 - DNA, 25 bp, Homo sapien
cacagagtaggccatcaggaagtgt

SEQ ID NO: 3841617 - DNA, 25 bp, Homo sapien
taaaaggcgcgttggaggtgactct

SEQ ID NO: 3841618 - DNA, 25 bp, Homo sapien
gaaaagacagtagcttgctgggcac

SEQ ID NO: 3841619 - DNA, 25 bp, Homo sapien
caaggctccttaagactcctgcagc

SEQ ID NO: 3841620 - DNA, 25 bp, Homo sapien
caagcccaaggacataattgaatct

SEQ ID NO: 3841621 - DNA, 25 bp, Homo sapien
cagcgttttctacattgggtgccac

SEQ ID NO: 3841622 - DNA, 25 bp, Homo sapien
gacactgagaccaaggagggctaag

SEQ ID NO: 3841623 - DNA, 25 bp, Homo sapien
gatcaggtcaactcagaatccaggc

SEQ ID NO: 3841624 - DNA, 25 bp, Homo sapien
tgactttacccatcactcctgaggc

SEQ ID NO: 3841625 - DNA, 25 bp, Homo sapien
tcagactagcccagcatcagtgaag

SEQ ID NO: 3841626 - DNA, 25 bp, Homo sapien
taggctccgacaaaaccacagttgt

SEQ ID NO: 3841627 - DNA, 25 bp, Homo sapien
gatttggcaactcgacctaggctcc

SEQ ID NO: 3841628 - DNA, 25 bp, Homo sapien
agaactcacaattcaccgtggcccg

SEQ ID NO: 3841629 - DNA, 25 bp, Homo sapien
catatttattgatctgagtccaggc

SEQ ID NO: 3841630 - DNA, 25 bp, Homo sapien
cagctgtacccggagatattccagg

SEQ ID NO: 3841631 - DNA, 25 bp, Homo sapien
tatctagacattacgggaggcccga

SEQ ID NO: 3841632 - DNA, 25 bp, Homo sapien
agccgtggccaaacaccagtgggtt

SEQ ID NO: 3841633 - DNA, 25 bp, Homo sapien
cagaatctagggcaagagctggccc

SEQ ID NO: 3841634 - DNA, 25 bp, Homo sapien
cttccgccagagctcggagatggca

SEQ ID NO: 3841635 - DNA, 25 bp, Homo sapien
tggcagcccacaggcgcacccacag

SEQ ID NO: 3841636 - DNA, 25 bp, Homo sapien
actgcactgactgcggcaagggctt

SEQ ID NO: 3841637 - DNA, 25 bp, Homo sapien
tgaccagcgtcatggctgctacgtg

SEQ ID NO: 3841638 - DNA, 25 bp, Homo sapien
ctacgtgtgcgggaagagctttgcc

SEQ ID NO: 3841639 - DNA, 25 bp, Homo sapien
ctccacactggtggagcacgtctac

SEQ ID NO: 3841640 - DNA, 25 bp, Homo sapien
tacatggagggcgtggtcaaaccct

SEQ ID NO: 3841641 - DNA, 25 bp, Homo sapien
caaaccctggctaattgtcatcagc

SEQ ID NO: 3841642 - DNA, 25 bp, Homo sapien
tccagcctctgttgggagaccaagg

SEQ ID NO: 3841643 - DNA, 25 bp, Homo sapien
gatgcaggtggcacaaatccagcct

SEQ ID NO: 3841644 - DNA, 25 bp, Homo sapien
tacccagacatcttcgaggagtgcg

SEQ ID NO: 3841645 - DNA, 25 bp, Homo sapien
gagttgagcctgaccttggcacgaa

SEQ ID NO: 3841646 - DNA, 25 bp, Homo sapien
ttggcacgaaggactgacggatccc

SEQ ID NO: 3841647 - DNA, 25 bp, Homo sapien
gaactgaaattcatgccctgggctt

SEQ ID NO: 3841648 - DNA, 25 bp, Homo sapien
agccacccaaaaatgctgcctggga

SEQ ID NO: 3841649 - DNA, 25 bp, Homo sapien
cggaggaagtcccaagagccaaagg

SEQ ID NO: 3841650 - DNA, 25 bp, Homo sapien
ccaaagggcctagaaaggctcctgt

SEQ ID NO: 3841651 - DNA, 25 bp, Homo sapien
aagtgctggtggaacgcaaccctga

SEQ ID NO: 3841652 - DNA, 25 bp, Homo sapien
ctctgtaccgggacgtgatgcagga

SEQ ID NO: 3841653 - DNA, 25 bp, Homo sapien
tgcggcccgcgcagagggctctgta

SEQ ID NO: 3841654 - DNA, 25 bp, Homo sapien
acctacggccacctgggcgcgctcg

SEQ ID NO: 3841655 - DNA, 25 bp, Homo sapien
acgtgatgcaggagacctacggcca

SEQ ID NO: 3841656 - DNA, 25 bp, Homo sapien
tttgccagggtgtgcgcgtcttccc

SEQ ID NO: 3841657 - DNA, 25 bp, Homo sapien
tctaccgcgggtgtacacatggttt

SEQ ID NO: 3841658 - DNA, 25 bp, Homo sapien
ggacacaatcccgagcaccgcagat

SEQ ID NO: 3841659 - DNA, 25 bp, Homo sapien
ccatcgggaggcacggtaagagacc

SEQ ID NO: 3841660 - DNA, 25 bp, Homo sapien
ggtgaaacatctggcaaggagacac

SEQ ID NO: 3841661 - DNA, 25 bp, Homo sapien
gtaggtgttccttggtcttgaagac

SEQ ID NO: 3841662 - DNA, 25 bp, Homo sapien
ggggcggagctcatcccaggattct

SEQ ID NO: 3841663 - DNA, 25 bp, Homo sapien
tgccttttaccaatgcaggtgaaac

SEQ ID NO: 3841664 - DNA, 25 bp, Homo sapien
accattcacctaactggcttttcct

SEQ ID NO: 3841665 - DNA, 25 bp, Homo sapien
agcacacagggccccgtgttcacgt

SEQ ID NO: 3841666 - DNA, 25 bp, Homo sapien
tactcctctgagatggggtccccta

SEQ ID NO: 3841667 - DNA, 25 bp, Homo sapien
atccttcactgaaaaccattcacct

SEQ ID NO: 3841668 - DNA, 25 bp, Homo sapien
gatggcgttcacacaaactggtcag

SEQ ID NO: 3841669 - DNA, 25 bp, Homo sapien
gcaggtacctgctccagcatcagtt

SEQ ID NO: 3841670 - DNA, 25 bp, Homo sapien
tacgcgtgctcagactgcaagagtc

SEQ ID NO: 3841671 - DNA, 25 bp, Homo sapien
gcaagagtcgcttcacttaccccta

SEQ ID NO: 3841672 - DNA, 25 bp, Homo sapien
ctttttgttatacatctagaacgtt

SEQ ID NO: 3841673 - DNA, 25 bp, Homo sapien
tgttatacatctagaacgttcctct

SEQ ID NO: 3841674 - DNA, 25 bp, Homo sapien
cactacacccaactgaattcacatt

SEQ ID NO: 3841675 - DNA, 25 bp, Homo sapien
cacacccggccgaattcacatgaat

SEQ ID NO: 3841676 - DNA, 25 bp, Homo sapien
gtagcatgcatacctagggagggca

SEQ ID NO: 3841677 - DNA, 25 bp, Homo sapien
catgcatacctagggagggcatgga

SEQ ID NO: 3841678 - DNA, 25 bp, Homo sapien
ccccatatctcacccactacatctc

SEQ ID NO: 3841679 - DNA, 25 bp, Homo sapien
gttcctagaggggtagcatgcatac

SEQ ID NO: 3841680 - DNA, 25 bp, Homo sapien
gaatcggcacagaacttccatgagg

SEQ ID NO: 3841681 - DNA, 25 bp, Homo sapien
tccaacagctggagtgggtcatcct

SEQ ID NO: 3841682 - DNA, 25 bp, Homo sapien
cagcagcgtggctcaatctgatcca

SEQ ID NO: 3841683 - DNA, 25 bp, Homo sapien
agaattgggccgtacttgaccctga

SEQ ID NO: 3841684 - DNA, 25 bp, Homo sapien
tctgcaagggctccgactgcagcca

SEQ ID NO: 3841685 - DNA, 25 bp, Homo sapien
ctgcaagggctccgactgcagccac

SEQ ID NO: 3841686 - DNA, 25 bp, Homo sapien
gcaagggctccgactgcagccacct

SEQ ID NO: 3841687 - DNA, 25 bp, Homo sapien
tgcaagggctccgactgcagccacc

SEQ ID NO: 3841688 - DNA, 25 bp, Homo sapien
catgatcaaggagcataggcaccag

SEQ ID NO: 3841689 - DNA, 25 bp, Homo sapien
ggaacttcctttatgcgtcacccag

SEQ ID NO: 3841690 - DNA, 25 bp, Homo sapien
ggcatatgttcctaacccactggta

SEQ ID NO: 3841691 - DNA, 25 bp, Homo sapien
tattgattatacagaatgggctccc

SEQ ID NO: 3841692 - DNA, 25 bp, Homo sapien
aatccactctggtgaccgtccccat

SEQ ID NO: 3841693 - DNA, 25 bp, Homo sapien
aaatccactctggtgaccgtcccca

SEQ ID NO: 3841694 - DNA, 25 bp, Homo sapien
gttggtccaataccaggaaatccac

SEQ ID NO: 3841695 - DNA, 25 bp, Homo sapien
tgttggtccaataccaggaaatcca

SEQ ID NO: 3841696 - DNA, 25 bp, Homo sapien
tgccagtgcgctgaagggcaagcct

SEQ ID NO: 3841697 - DNA, 25 bp, Homo sapien
ccttatttagtaagattagcttgac

SEQ ID NO: 3841698 - DNA, 25 bp, Homo sapien
caggatccgtgacgcccgttcgggt

SEQ ID NO: 3841699 - DNA, 25 bp, Homo sapien
gaagggcgtcacactgcttttggaa

SEQ ID NO: 3841700 - DNA, 25 bp, Homo sapien
cagtctccagtctcggaacccgcgg

SEQ ID NO: 3841701 - DNA, 25 bp, Homo sapien
ccagtctccagtctcggaacccgcg

SEQ ID NO: 3841702 - DNA, 25 bp, Homo sapien
tctccagtctcggaacccgcgggcc

SEQ ID NO: 3841703 - DNA, 25 bp, Homo sapien
agtctccagtctcggaacccgcggg

SEQ ID NO: 3841704 - DNA, 25 bp, Homo sapien
actccgtggctacattgtcgggccg

SEQ ID NO: 3841705 - DNA, 25 bp, Homo sapien
atttcgaggagggatgctcggcctc

SEQ ID NO: 3841706 - DNA, 25 bp, Homo sapien
tcgggccgggatttcgcgatttcga

SEQ ID NO: 3841707 - DNA, 25 bp, Homo sapien
tcggcctcctcctactagcgtggtt

SEQ ID NO: 3841708 - DNA, 25 bp, Homo sapien
ggctttgtgagtgccaagttcgcac

SEQ ID NO: 3841709 - DNA, 25 bp, Homo sapien
aggctttgtgagtgccaagttcgca

SEQ ID NO: 3841710 - DNA, 25 bp, Homo sapien
taggctttgtgagtgccaagttcgc

SEQ ID NO: 3841711 - DNA, 25 bp, Homo sapien
taagaaccttttacaatgatctgtg

SEQ ID NO: 3841712 - DNA, 25 bp, Homo sapien
tctttgtaagaaccttttacaatga

SEQ ID NO: 3841713 - DNA, 25 bp, Homo sapien
aggttggtctcgaagtgtgatccgc

SEQ ID NO: 3841714 - DNA, 25 bp, Homo sapien
tggtctcgaagtgtgatccgctcaa

SEQ ID NO: 3841715 - DNA, 25 bp, Homo sapien
acggtccgcgcagaggtctatagga

SEQ ID NO: 3841716 - DNA, 25 bp, Homo sapien
tccgcgcagaggtctataggacagg

SEQ ID NO: 3841717 - DNA, 25 bp, Homo sapien
gggtgcccacggtccgcgcagaggt

SEQ ID NO: 3841718 - DNA, 25 bp, Homo sapien
ccacggtccgcgcagaggtctatag

SEQ ID NO: 3841719 - DNA, 25 bp, Homo sapien
tcaaagacgggctggtgcggcctgt

SEQ ID NO: 3841720 - DNA, 25 bp, Homo sapien
tgcggcctgtggctccgttgctggc

SEQ ID NO: 3841721 - DNA, 25 bp, Homo sapien
aacacccgggatcaaagacgggctg

SEQ ID NO: 3841722 - DNA, 25 bp, Homo sapien
gtggaggccctgagtccgaacaccc

SEQ ID NO: 3841723 - DNA, 25 bp, Homo sapien
ggtggtgagaaactaagtgaagcca

SEQ ID NO: 3841724 - DNA, 25 bp, Homo sapien
ctaagtgaagccacctggcggccat

SEQ ID NO: 3841725 - DNA, 25 bp, Homo sapien
ccaaccgccgatggccttcttctcg

SEQ ID NO: 3841726 - DNA, 25 bp, Homo sapien
ctggacaccgcccaatcgccggtcc

SEQ ID NO: 3841727 - DNA, 25 bp, Homo sapien
cgtggatcccgggtcttccgcagct

SEQ ID NO: 3841728 - DNA, 25 bp, Homo sapien
tcccgtggatcccgggtcttccgca

SEQ ID NO: 3841729 - DNA, 25 bp, Homo sapien
gatcccgggtcttccgcagctccca

SEQ ID NO: 3841730 - DNA, 25 bp, Homo sapien
gtggatcccgggtcttccgcagctc

SEQ ID NO: 3841731 - DNA, 25 bp, Homo sapien
ccagggatccactgtcaagcagata

SEQ ID NO: 3841732 - DNA, 25 bp, Homo sapien
cctgtaagcttcagcgccgcaaagc

SEQ ID NO: 3841733 - DNA, 25 bp, Homo sapien
ggagcatctccgaactcagcgtaga

SEQ ID NO: 3841734 - DNA, 25 bp, Homo sapien
tcttcactccaatcccgggaggtcc

SEQ ID NO: 3841735 - DNA, 25 bp, Homo sapien
ttgtccctgcagattatgccccgag

SEQ ID NO: 3841736 - DNA, 25 bp, Homo sapien
gctgccaccgcctcgatcagcggat

SEQ ID NO: 3841737 - DNA, 25 bp, Homo sapien
atgcagcggccccagttctcccgcg

SEQ ID NO: 3841738 - DNA, 25 bp, Homo sapien
tcgatcagcggatcactcgcgccct

SEQ ID NO: 3841739 - DNA, 25 bp, Homo sapien
tccgcccgcggctccccgtagccca

SEQ ID NO: 3841740 - DNA, 25 bp, Homo sapien
tccgcccttcatggtccgcccgcgg

SEQ ID NO: 3841741 - DNA, 25 bp, Homo sapien
tggggctccgcccttcatggtccgc

SEQ ID NO: 3841742 - DNA, 25 bp, Homo sapien
ggctccgcccttcatggtccgcccg

SEQ ID NO: 3841743 - DNA, 25 bp, Homo sapien
gggtccctggggaatcccaggctgc

SEQ ID NO: 3841744 - DNA, 25 bp, Homo sapien
gtccctggggaatcccaggctgcgg

SEQ ID NO: 3841745 - DNA, 25 bp, Homo sapien
ggtccctggggaatcccaggctgcg

SEQ ID NO: 3841746 - DNA, 25 bp, Homo sapien
tccctggggaatcccaggctgcggc

SEQ ID NO: 3841747 - DNA, 25 bp, Homo sapien
ggatccccatctcccggggtcaaga

SEQ ID NO: 3841748 - DNA, 25 bp, Homo sapien
tcaagacaggcgggccgcccgggta

SEQ ID NO: 3841749 - DNA, 25 bp, Homo sapien
ctgtagtttcccggcacggtcgcca

SEQ ID NO: 3841750 - DNA, 25 bp, Homo sapien
agtttcccggcacggtcgccaggat

SEQ ID NO: 3841751 - DNA, 25 bp, Homo sapien
agaagcagaggacggtcgcccgaac

SEQ ID NO: 3841752 - DNA, 25 bp, Homo sapien
aaagaagcagaggacggtcgcccga

SEQ ID NO: 3841753 - DNA, 25 bp, Homo sapien
gacggtcgcccgaacctgtcgctgg

SEQ ID NO: 3841754 - DNA, 25 bp, Homo sapien
gcagaggacggtcgcccgaacctgt

SEQ ID NO: 3841755 - DNA, 25 bp, Homo sapien
ataatgctcgagtcagaggctggcg

SEQ ID NO: 3841756 - DNA, 25 bp, Homo sapien
atgacatcttctagcaccacggcca

SEQ ID NO: 3841757 - DNA, 25 bp, Homo sapien
tcctggctccccataatgctcgagt

SEQ ID NO: 3841758 - DNA, 25 bp, Homo sapien
agcctcggccgtttcgggctcctgg

SEQ ID NO: 3841759 - DNA, 25 bp, Homo sapien
ggctagaattcactcggatcccaag

SEQ ID NO: 3841760 - DNA, 25 bp, Homo sapien
ggtaatctcatccacgctgtttaga

SEQ ID NO: 3841761 - DNA, 25 bp, Homo sapien
tattaagagtcctaaactgcaggtg

SEQ ID NO: 3841762 - DNA, 25 bp, Homo sapien
aagcagaagagtttcggcccagcgc

SEQ ID NO: 3841763 - DNA, 25 bp, Homo sapien
ggtgctgtggtatggaggtctgctt

SEQ ID NO: 3841764 - DNA, 25 bp, Homo sapien
caggatcctgatggtagctgtggtg

SEQ ID NO: 3841765 - DNA, 25 bp, Homo sapien
ctggcctgcgaggaccacccggcct

SEQ ID NO: 3841766 - DNA, 25 bp, Homo sapien
ctgcgaggaccacccggcctgccgg

SEQ ID NO: 3841767 - DNA, 25 bp, Homo sapien
gcctgcgaggaccacccggcctgcc

SEQ ID NO: 3841768 - DNA, 25 bp, Homo sapien
tggcctgcgaggaccacccggcctg

SEQ ID NO: 3841769 - DNA, 25 bp, Homo sapien
gaagattaaaatggctcagctgggc

SEQ ID NO: 3841770 - DNA, 25 bp, Homo sapien
acaggaagattaaaatggctcagct

SEQ ID NO: 3841771 - DNA, 25 bp, Homo sapien
ggccctcggcttacccccatcctgc

SEQ ID NO: 3841772 - DNA, 25 bp, Homo sapien
ctagcgagggaacaggaagattaaa

SEQ ID NO: 3841773 - DNA, 25 bp, Homo sapien
aagaggtccggtggatgcggctcaa

SEQ ID NO: 3841774 - DNA, 25 bp, Homo sapien
gcggctcaagggctcgcgacacaaa

SEQ ID NO: 3841775 - DNA, 25 bp, Homo sapien
gttgtccttgatcgccgcctcaggg

SEQ ID NO: 3841776 - DNA, 25 bp, Homo sapien
taggactggcgatgtcttccagcat

SEQ ID NO: 3841777 - DNA, 25 bp, Homo sapien
tgaagttgggggtctcatcaatgaa

SEQ ID NO: 3841778 - DNA, 25 bp, Homo sapien
ggatgatgaagttgggggtctcatc

SEQ ID NO: 3841779 - DNA, 25 bp, Homo sapien
tgatgaagttgggggtctcatcaat

SEQ ID NO: 3841780 - DNA, 25 bp, Homo sapien
atgaagttgggggtctcatcaatga

SEQ ID NO: 3841781 - DNA, 25 bp, Homo sapien
ggaacttccaggtatcccacctgag

SEQ ID NO: 3841782 - DNA, 25 bp, Homo sapien
agcaactcccctatcccttaaggct

SEQ ID NO: 3841783 - DNA, 25 bp, Homo sapien
gccagcaactcccctatcccttaag

SEQ ID NO: 3841784 - DNA, 25 bp, Homo sapien
gggaacttccaggtatcccacctga

SEQ ID NO: 3841785 - DNA, 25 bp, Homo sapien
ttggctggcgaactatcctcatggg

SEQ ID NO: 3841786 - DNA, 25 bp, Homo sapien
ctggcgaactatcctcatgggctca

SEQ ID NO: 3841787 - DNA, 25 bp, Homo sapien
ggtggaggcgttggctggcgaacta

SEQ ID NO: 3841788 - DNA, 25 bp, Homo sapien
gaggcgttggctggcgaactatcct

SEQ ID NO: 3841789 - DNA, 25 bp, Homo sapien
tgagatggcgatcttcaactccagc

SEQ ID NO: 3841790 - DNA, 25 bp, Homo sapien
tctccagcttggagcggacggaacg

SEQ ID NO: 3841791 - DNA, 25 bp, Homo sapien
tgtggtcctgagttcgccactggcg

SEQ ID NO: 3841792 - DNA, 25 bp, Homo sapien
atcagggcaggagtagcttcggccc

SEQ ID NO: 3841793 - DNA, 25 bp, Homo sapien
tggatgccgtggacgagcaagatgt

SEQ ID NO: 3841794 - DNA, 25 bp, Homo sapien
ccgccgcggccgtggtcggcttggt

SEQ ID NO: 3841795 - DNA, 25 bp, Homo sapien
tctgctggttcggagaaggaagtgg

SEQ ID NO: 3841796 - DNA, 25 bp, Homo sapien
gaagacctctttccggagacagggc

SEQ ID NO: 3841797 - DNA, 25 bp, Homo sapien
ctgcccactggatactcagggaagg

SEQ ID NO: 3841798 - DNA, 25 bp, Homo sapien
ctcctgcccactggatactcaggga

SEQ ID NO: 3841799 - DNA, 25 bp, Homo sapien
ggattcactgcattatcccccgtct

SEQ ID NO: 3841800 - DNA, 25 bp, Homo sapien
gtctcctgcccactggatactcagg

SEQ ID NO: 3841801 - DNA, 25 bp, Homo sapien
tggtctcaggttctgaaagcacctg

SEQ ID NO: 3841802 - DNA, 25 bp, Homo sapien
ttggtctcaggttctgaaagcacct

SEQ ID NO: 3841803 - DNA, 25 bp, Homo sapien
cttggtctcaggttctgaaagcacc

SEQ ID NO: 3841804 - DNA, 25 bp, Homo sapien
tcttctacccgatctgaatgcctac

SEQ ID NO: 3841805 - DNA, 25 bp, Homo sapien
gagtgacatgggctcaggcccccac

SEQ ID NO: 3841806 - DNA, 25 bp, Homo sapien
cactagtctcttctacccgatctga

SEQ ID NO: 3841807 - DNA, 25 bp, Homo sapien
gacatgggctcaggcccccactagt

SEQ ID NO: 3841808 - DNA, 25 bp, Homo sapien
ctgattggtcgaggcagtcccattg

SEQ ID NO: 3841809 - DNA, 25 bp, Homo sapien
cattggtgtaaggtttagctgagga

SEQ ID NO: 3841810 - DNA, 25 bp, Homo sapien
gacgggctggtgttctgcgtattct

SEQ ID NO: 3841811 - DNA, 25 bp, Homo sapien
gtattctgaatcgagaaacctttcc

SEQ ID NO: 3841812 - DNA, 25 bp, Homo sapien
attgaatctttcaggctggactgtg

SEQ ID NO: 3841813 - DNA, 25 bp, Homo sapien
aatctttcaggctggactgtgctcc

SEQ ID NO: 3841814 - DNA, 25 bp, Homo sapien
gaatctttcaggctggactgtgctc

SEQ ID NO: 3841815 - DNA, 25 bp, Homo sapien
cgaattgaatctttcaggctggact

SEQ ID NO: 3841816 - DNA, 25 bp, Homo sapien
cactgagaaaccttgggccagtggg

SEQ ID NO: 3841817 - DNA, 25 bp, Homo sapien
tcagggccaggagtgctacataagg

SEQ ID NO: 3841818 - DNA, 25 bp, Homo sapien
tgggacatgtcagggccaggagtgc

SEQ ID NO: 3841819 - DNA, 25 bp, Homo sapien
gaagggacaggtaaggcctggtctg

SEQ ID NO: 3841820 - DNA, 25 bp, Homo sapien
tgtgggtgattggtaattcttgttg

SEQ ID NO: 3841821 - DNA, 25 bp, Homo sapien
gttgtgggtgattggtaattcttgt

SEQ ID NO: 3841822 - DNA, 25 bp, Homo sapien
gggtgattggtaattcttgttggtg

SEQ ID NO: 3841823 - DNA, 25 bp, Homo sapien
ggttgtgggtgattggtaattcttg

SEQ ID NO: 3841824 - DNA, 25 bp, Homo sapien
agggagaggagctggttttatcagg

SEQ ID NO: 3841825 - DNA, 25 bp, Homo sapien
ggagctggttttatcagggtgctcc

SEQ ID NO: 3841826 - DNA, 25 bp, Homo sapien
ggagaggagctggttttatcagggt

SEQ ID NO: 3841827 - DNA, 25 bp, Homo sapien
agaggagctggttttatcagggtgc

SEQ ID NO: 3841828 - DNA, 25 bp, Homo sapien
aatcagagtcccattgcgctcccgg

SEQ ID NO: 3841829 - DNA, 25 bp, Homo sapien
cccacgggacggtcttcgtgatcga

SEQ ID NO: 3841830 - DNA, 25 bp, Homo sapien
tgcgctcccggggttcctcaaagat

SEQ ID NO: 3841831 - DNA, 25 bp, Homo sapien
gaaattccacagcccgccggagctt

SEQ ID NO: 3841832 - DNA, 25 bp, Homo sapien
tcttcctccaggagcaaggcatcta

SEQ ID NO: 3841833 - DNA, 25 bp, Homo sapien
tgtttcttcctccaggagcaaggca

SEQ ID NO: 3841834 - DNA, 25 bp, Homo sapien
ctccaggagcaaggcatctagctcc

SEQ ID NO: 3841835 - DNA, 25 bp, Homo sapien
ttcctccaggagcaaggcatctagc

SEQ ID NO: 3841836 - DNA, 25 bp, Homo sapien
ctaggtccagtggggctgctcccga

SEQ ID NO: 3841837 - DNA, 25 bp, Homo sapien
tccagtggggctgctcccgatctac

SEQ ID NO: 3841838 - DNA, 25 bp, Homo sapien
ggtccagtggggctgctcccgatct

SEQ ID NO: 3841839 - DNA, 25 bp, Homo sapien
taggtccagtggggctgctcccgat

SEQ ID NO: 3841840 - DNA, 25 bp, Homo sapien
cgaaaactttactagaaatatagag

SEQ ID NO: 3841841 - DNA, 25 bp, Homo sapien
gtcccttcaggatggatgaccaaca

SEQ ID NO: 3841842 - DNA, 25 bp, Homo sapien
gaaacatatcgaaaactttactaga

SEQ ID NO: 3841843 - DNA, 25 bp, Homo sapien
tcaggatggatgaccaacagatggg

SEQ ID NO: 3841844 - DNA, 25 bp, Homo sapien
tgtgactgcgtttggtaataattcc

SEQ ID NO: 3841845 - DNA, 25 bp, Homo sapien
ctgcatgagcgcttctccgcgtttg

SEQ ID NO: 3841846 - DNA, 25 bp, Homo sapien
ccgcgtttgtgactgcgtttggtaa

SEQ ID NO: 3841847 - DNA, 25 bp, Homo sapien
gcgcttctccgcgtttgtgactgcg

SEQ ID NO: 3841848 - DNA, 25 bp, Homo sapien
aggctggctgcttgcgagtcgttcc

SEQ ID NO: 3841849 - DNA, 25 bp, Homo sapien
tgcttgcgagtcgttccgcggcccg

SEQ ID NO: 3841850 - DNA, 25 bp, Homo sapien
ctgctggcagcggtcccgagtgcta

SEQ ID NO: 3841851 - DNA, 25 bp, Homo sapien
gctagcaattcgaaaacgccttgca

SEQ ID NO: 3841852 - DNA, 25 bp, Homo sapien
tctctgtccgacttgggccttaggg

SEQ ID NO: 3841853 - DNA, 25 bp, Homo sapien
aaagccccggatgtgaggcaacggt

SEQ ID NO: 3841854 - DNA, 25 bp, Homo sapien
ccctttaaggctggcgttgcagtcc

SEQ ID NO: 3841855 - DNA, 25 bp, Homo sapien
tgcagtccgccgagttcagtggcca

SEQ ID NO: 3841856 - DNA, 25 bp, Homo sapien
ttaagacgacccgacagtgtccggc

SEQ ID NO: 3841857 - DNA, 25 bp, Homo sapien
gagtccagggtccttctaacagcag

SEQ ID NO: 3841858 - DNA, 25 bp, Homo sapien
acagcaggccgtccctttaagggct

SEQ ID NO: 3841859 - DNA, 25 bp, Homo sapien
aagtgtctcaagtcctccggctcaa

SEQ ID NO: 3841860 - DNA, 25 bp, Homo sapien
ttctcctttaaagccggatctgctg

SEQ ID NO: 3841861 - DNA, 25 bp, Homo sapien
acagtgacgagagggccacggcttc

SEQ ID NO: 3841862 - DNA, 25 bp, Homo sapien
ctgcacagtgacgagagggccacgg

SEQ ID NO: 3841863 - DNA, 25 bp, Homo sapien
cacggcttctcctttaaagccggat

SEQ ID NO: 3841864 - DNA, 25 bp, Homo sapien
cgcaggcccggggtcgcaggcgcgg

SEQ ID NO: 3841865 - DNA, 25 bp, Homo sapien
ctgtccgcaggcccggggtcgcagg

SEQ ID NO: 3841866 - DNA, 25 bp, Homo sapien
gtccgcaggcccggggtcgcaggcg

SEQ ID NO: 3841867 - DNA, 25 bp, Homo sapien
caggcccggggtcgcaggcgcggcg

SEQ ID NO: 3841868 - DNA, 25 bp, Homo sapien
ccgctgctcccggtctcggtctcgg

SEQ ID NO: 3841869 - DNA, 25 bp, Homo sapien
cagcgccgcatccggaggcggcggg

SEQ ID NO: 3841870 - DNA, 25 bp, Homo sapien
cggtctcggtctcggcgcgagcagc

SEQ ID NO: 3841871 - DNA, 25 bp, Homo sapien
ggccgctgccgtctccatggcgacc

SEQ ID NO: 3841872 - DNA, 25 bp, Homo sapien
agccgcgcggggcggccaacagggc

SEQ ID NO: 3841873 - DNA, 25 bp, Homo sapien
gccgcgcggggcggccaacagggcc

SEQ ID NO: 3841874 - DNA, 25 bp, Homo sapien
cgcgcggggcggccaacagggcccg

SEQ ID NO: 3841875 - DNA, 25 bp, Homo sapien
aggccgctctccagacgaagctgac

SEQ ID NO: 3841876 - DNA, 25 bp, Homo sapien
ccaggccgctctccagacgaagctg

SEQ ID NO: 3841877 - DNA, 25 bp, Homo sapien
cccaggccgctctccagacgaagct

SEQ ID NO: 3841878 - DNA, 25 bp, Homo sapien
caggccgctctccagacgaagctga

SEQ ID NO: 3841879 - DNA, 25 bp, Homo sapien
tgcccgagccggcaggccgcttccg

SEQ ID NO: 3841880 - DNA, 25 bp, Homo sapien
ctcggcttcgccgtcgtctgcgccc

SEQ ID NO: 3841881 - DNA, 25 bp, Homo sapien
ggcgatggcgaagccatcgatcaag

SEQ ID NO: 3841882 - DNA, 25 bp, Homo sapien
gcgaagccatcgatcaagtcctcct

SEQ ID NO: 3841883 - DNA, 25 bp, Homo sapien
ctgcaaggcctcgagggtggcgaag

SEQ ID NO: 3841884 - DNA, 25 bp, Homo sapien
ggctctcgatcagagctgtcccctg

SEQ ID NO: 3841885 - DNA, 25 bp, Homo sapien
tcagccgatgttccagtcgctctgg

SEQ ID NO: 3841886 - DNA, 25 bp, Homo sapien
gcttcccagaatgcttcagccgatg

SEQ ID NO: 3841887 - DNA, 25 bp, Homo sapien
tattgggccattttcgggcccgatc

SEQ ID NO: 3841888 - DNA, 25 bp, Homo sapien
catgggcctccaggatctactctca

SEQ ID NO: 3841889 - DNA, 25 bp, Homo sapien
cattctctaaatacgccgggtcctc

SEQ ID NO: 3841890 - DNA, 25 bp, Homo sapien
cacaagcggcttcctcatgtgggtt

SEQ ID NO: 3841891 - DNA, 25 bp, Homo sapien
catgtgggtttctgtagcatctctc

SEQ ID NO: 3841892 - DNA, 25 bp, Homo sapien
cttccagagagtgacgggaggacgc

SEQ ID NO: 3841893 - DNA, 25 bp, Homo sapien
tatgtatccagcttccagagagtga

SEQ ID NO: 3841894 - DNA, 25 bp, Homo sapien
tcgtccagatcactttccgcgtcac

SEQ ID NO: 3841895 - DNA, 25 bp, Homo sapien
cctctcgtccagatcactttccgcg

SEQ ID NO: 3841896 - DNA, 25 bp, Homo sapien
tctcgtccagatcactttccgcgtc

SEQ ID NO: 3841897 - DNA, 25 bp, Homo sapien
cgtccagatcactttccgcgtcaca

SEQ ID NO: 3841898 - DNA, 25 bp, Homo sapien
tacagatttatttggtccaccagcg

SEQ ID NO: 3841899 - DNA, 25 bp, Homo sapien
gctgagatccatcaaagactgggct

SEQ ID NO: 3841900 - DNA, 25 bp, Homo sapien
taaatggaggcagcgttgaagcagc

SEQ ID NO: 3841901 - DNA, 25 bp, Homo sapien
caagaatccgataggccaagaggac

SEQ ID NO: 3841902 - DNA, 25 bp, Homo sapien
ttgagacagtaaaggatgggtcgag

SEQ ID NO: 3841903 - DNA, 25 bp, Homo sapien
aaggatgggtcgaggtcatcatcgg

SEQ ID NO: 3841904 - DNA, 25 bp, Homo sapien
ttgctggttgagacagtaaaggatg

SEQ ID NO: 3841905 - DNA, 25 bp, Homo sapien
atgggtcgaggtcatcatcggagac

SEQ ID NO: 3841906 - DNA, 25 bp, Homo sapien
ctccagccccagaccttgggaccaa

SEQ ID NO: 3841907 - DNA, 25 bp, Homo sapien
atgctcagttgaggctcatgctcac

SEQ ID NO: 3841908 - DNA, 25 bp, Homo sapien
accccactgccctcccgtgcctcca

SEQ ID NO: 3841909 - DNA, 25 bp, Homo sapien
tccagccccagaccttgggaccaac

SEQ ID NO: 3841910 - DNA, 25 bp, Homo sapien
tagggaccacggagagttttgcttc

SEQ ID NO: 3841911 - DNA, 25 bp, Homo sapien
cagttcccattgaaggcgccgtggg

SEQ ID NO: 3841912 - DNA, 25 bp, Homo sapien
cgctccaggcccgacactttaggga

SEQ ID NO: 3841913 - DNA, 25 bp, Homo sapien
gagttttgcttcacagttcccattg

SEQ ID NO: 3841914 - DNA, 25 bp, Homo sapien
acaggaggccgagggaccggtggag

SEQ ID NO: 3841915 - DNA, 25 bp, Homo sapien
gggtgagacaggaggccgagggacc

SEQ ID NO: 3841916 - DNA, 25 bp, Homo sapien
agacaggaggccgagggaccggtgg

SEQ ID NO: 3841917 - DNA, 25 bp, Homo sapien
gggagtggccggcaggggtgcaggg

SEQ ID NO: 3841918 - DNA, 25 bp, Homo sapien
gccgaagggtgagacccgaagctgc

SEQ ID NO: 3841919 - DNA, 25 bp, Homo sapien
ctgctgccatatggagaagtgcgga

SEQ ID NO: 3841920 - DNA, 25 bp, Homo sapien
gagaagtgcggaggccgaagggtga

SEQ ID NO: 3841921 - DNA, 25 bp, Homo sapien
gctgctgccatatggagaagtgcgg

SEQ ID NO: 3841922 - DNA, 25 bp, Homo sapien
tccccgccaccaaactgaccaggcc

SEQ ID NO: 3841923 - DNA, 25 bp, Homo sapien
caggcccttccggaccgcatcaatc

SEQ ID NO: 3841924 - DNA, 25 bp, Homo sapien
ggtaccatcctgtgtccccgccacc

SEQ ID NO: 3841925 - DNA, 25 bp, Homo sapien
aggcccttccggaccgcatcaatcc

SEQ ID NO: 3841926 - DNA, 25 bp, Homo sapien
catgggaatgtgtaacggactcaaa

SEQ ID NO: 3841927 - DNA, 25 bp, Homo sapien
gaacactattccgagcagacttgcc

SEQ ID NO: 3841928 - DNA, 25 bp, Homo sapien
gacgctgaatgtacacactttggga

SEQ ID NO: 3841929 - DNA, 25 bp, Homo sapien
taagcaatcgcgtgtgaaatcaagg

SEQ ID NO: 3841930 - DNA, 25 bp, Homo sapien
ccaagtctccaacattccacgccac

SEQ ID NO: 3841931 - DNA, 25 bp, Homo sapien
aagtctccaacattccacgccacct

SEQ ID NO: 3841932 - DNA, 25 bp, Homo sapien
gctttaaaagctaatccaagtctcc

SEQ ID NO: 3841933 - DNA, 25 bp, Homo sapien
tccaagtctccaacattccacgcca

SEQ ID NO: 3841934 - DNA, 25 bp, Homo sapien
tgtggcaagcacctgctgtaggcca

SEQ ID NO: 3841935 - DNA, 25 bp, Homo sapien
cctgtggcaagcacctgctgtaggc

SEQ ID NO: 3841936 - DNA, 25 bp, Homo sapien
tggcaagcacctgctgtaggccaag

SEQ ID NO: 3841937 - DNA, 25 bp, Homo sapien
ggcaagcacctgctgtaggccaagt

SEQ ID NO: 3841938 - DNA, 25 bp, Homo sapien
aagggcgttagcggctgaggcccca

SEQ ID NO: 3841939 - DNA, 25 bp, Homo sapien
gaaagggcgttagcggctgaggccc

SEQ ID NO: 3841940 - DNA, 25 bp, Homo sapien
agggcgttagcggctgaggccccag

SEQ ID NO: 3841941 - DNA, 25 bp, Homo sapien
cagaaagggcgttagcggctgaggc

SEQ ID NO: 3841942 - DNA, 25 bp, Homo sapien
accctgggcattcaggtagcgagag

SEQ ID NO: 3841943 - DNA, 25 bp, Homo sapien
ccctgggcattcaggtagcgagagt

SEQ ID NO: 3841944 - DNA, 25 bp, Homo sapien
gttcaggtcctggccgatcaggtcc

SEQ ID NO: 3841945 - DNA, 25 bp, Homo sapien
ggtggcagcaggcccgggggataag

SEQ ID NO: 3841946 - DNA, 25 bp, Homo sapien
gctggtggttgtgctggtggaactg

SEQ ID NO: 3841947 - DNA, 25 bp, Homo sapien
gctggtgctggtggttgtgctggtg

SEQ ID NO: 3841948 - DNA, 25 bp, Homo sapien
tggtggaactggaaggccaggggcc

SEQ ID NO: 3841949 - DNA, 25 bp, Homo sapien
cggaaaaggccttccatctttcctg

SEQ ID NO: 3841950 - DNA, 25 bp, Homo sapien
cttccatctttcctggatatttctc

SEQ ID NO: 3841951 - DNA, 25 bp, Homo sapien
ccatctttcctggatatttctcaaa

SEQ ID NO: 3841952 - DNA, 25 bp, Homo sapien
attatgtcggaaaaggccttccatc

SEQ ID NO: 3841953 - DNA, 25 bp, Homo sapien
cagggagccaaaggagacggccggc

SEQ ID NO: 3841954 - DNA, 25 bp, Homo sapien
ctgcgggagggaaggccgtgtacgg

SEQ ID NO: 3841955 - DNA, 25 bp, Homo sapien
cccctgcagggagccaaaggagacg

SEQ ID NO: 3841956 - DNA, 25 bp, Homo sapien
gcagcccgggcactgcgggagggaa

SEQ ID NO: 3841957 - DNA, 25 bp, Homo sapien
ttctgggagagcccgctcggcaccg

SEQ ID NO: 3841958 - DNA, 25 bp, Homo sapien
ctcggcaccggccccagtcgtggtg

SEQ ID NO: 3841959 - DNA, 25 bp, Homo sapien
gagcccgctcggcaccggccccagt

SEQ ID NO: 3841960 - DNA, 25 bp, Homo sapien
cttctgggagagcccgctcggcacc

SEQ ID NO: 3841961 - DNA, 25 bp, Homo sapien
actcagacccgagtcctgggccagg

SEQ ID NO: 3841962 - DNA, 25 bp, Homo sapien
aggcgactcagacccgagtcctggg

SEQ ID NO: 3841963 - DNA, 25 bp, Homo sapien
gactcagacccgagtcctgggccag

SEQ ID NO: 3841964 - DNA, 25 bp, Homo sapien
gggaggcgactcagacccgagtcct

SEQ ID NO: 3841965 - DNA, 25 bp, Homo sapien
ctcaaaggtggccggaaatggtcgg

SEQ ID NO: 3841966 - DNA, 25 bp, Homo sapien
tcatgtaagccacacgcacgtgcat

SEQ ID NO: 3841967 - DNA, 25 bp, Homo sapien
tctcaggatcatgtaagccacacgc

SEQ ID NO: 3841968 - DNA, 25 bp, Homo sapien
caggatcatgtaagccacacgcacg

SEQ ID NO: 3841969 - DNA, 25 bp, Homo sapien
ggtgtctcaggatcatgtaagccac

SEQ ID NO: 3841970 - DNA, 25 bp, Homo sapien
tggggcctggatgcctatcttctgc

SEQ ID NO: 3841971 - DNA, 25 bp, Homo sapien
gggcctggatgcctatcttctgcct

SEQ ID NO: 3841972 - DNA, 25 bp, Homo sapien
tcttctgcctctctcggagccttct

SEQ ID NO: 3841973 - DNA, 25 bp, Homo sapien
tctctcggagccttctctgagcagc

SEQ ID NO: 3841974 - DNA, 25 bp, Homo sapien
gaaagtcaagcttgtgggagtcacc

SEQ ID NO: 3841975 - DNA, 25 bp, Homo sapien
tcattccgaaagtcaagcttgtggg

SEQ ID NO: 3841976 - DNA, 25 bp, Homo sapien
gggcaggaggtcattccgaaagtca

SEQ ID NO: 3841977 - DNA, 25 bp, Homo sapien
cagtgaagagggaggccgggtggga

SEQ ID NO: 3841978 - DNA, 25 bp, Homo sapien
tgaaagggttggctgcagcgtggac

SEQ ID NO: 3841979 - DNA, 25 bp, Homo sapien
gggttggctgcagcgtggacggcac

SEQ ID NO: 3841980 - DNA, 25 bp, Homo sapien
tggggctcaggaagggtccgtgggc

SEQ ID NO: 3841981 - DNA, 25 bp, Homo sapien
gctgccgtgaaagggttggctgcag

SEQ ID NO: 3841982 - DNA, 25 bp, Homo sapien
tgagctttgacaagcaccctgtcgg

SEQ ID NO: 3841983 - DNA, 25 bp, Homo sapien
ggttaggatcatgcccacttgaaga

SEQ ID NO: 3841984 - DNA, 25 bp, Homo sapien
taacttcatgcatgcgtcacacagc

SEQ ID NO: 3841985 - DNA, 25 bp, Homo sapien
cagggcttccttgacatgaagtcac

SEQ ID NO: 3841986 - DNA, 25 bp, Homo sapien
gccaaagaggcgaagcttgtgggac

SEQ ID NO: 3841987 - DNA, 25 bp, Homo sapien
aggcgaagcttgtgggacgcccaaa

SEQ ID NO: 3841988 - DNA, 25 bp, Homo sapien
aagcttgtgggacgcccaaagggat

SEQ ID NO: 3841989 - DNA, 25 bp, Homo sapien
ggagagggcagccaaagaggcgaag

SEQ ID NO: 3841990 - DNA, 25 bp, Homo sapien
ctgtggccgcagcccccccacccca

SEQ ID NO: 3841991 - DNA, 25 bp, Homo sapien
ggccagaagtgggaggccctgttca

SEQ ID NO: 3841992 - DNA, 25 bp, Homo sapien
ccagaagtgggaggccctgttcagg

SEQ ID NO: 3841993 - DNA, 25 bp, Homo sapien
gccagaagtgggaggccctgttcag

SEQ ID NO: 3841994 - DNA, 25 bp, Homo sapien
aggcaggaaaggtcagaggactgcg

SEQ ID NO: 3841995 - DNA, 25 bp, Homo sapien
aggccgctccttgtctgagcctgga

SEQ ID NO: 3841996 - DNA, 25 bp, Homo sapien
tctttctgggcaaagacggcgccgg

SEQ ID NO: 3841997 - DNA, 25 bp, Homo sapien
gaaaggtcagaggactgcggtgcag

SEQ ID NO: 3841998 - DNA, 25 bp, Homo sapien
agagaatgaagttctccaggggcag

SEQ ID NO: 3841999 - DNA, 25 bp, Homo sapien
cagattccttggttggccgaggccc

SEQ ID NO: 3842000 - DNA, 25 bp, Homo sapien
accagcccgggccttgggagtagca

SEQ ID NO: 3842001 - DNA, 25 bp, Homo sapien
agtagcaggagaaactcggagctgg

SEQ ID NO: 3842002 - DNA, 25 bp, Homo sapien
ccgcacagattccttggttggccga

SEQ ID NO: 3842003 - DNA, 25 bp, Homo sapien
gcggcggcggcagcctcctccttcc

SEQ ID NO: 3842004 - DNA, 25 bp, Homo sapien
ctggggcccagtggctgctgcggcg

SEQ ID NO: 3842005 - DNA, 25 bp, Homo sapien
ggcagcctcctccttccgctcttcc

SEQ ID NO: 3842006 - DNA, 25 bp, Homo sapien
gcctcctccttccgctcttccttta

SEQ ID NO: 3842007 - DNA, 25 bp, Homo sapien
ccggggcctctcaaacagcaggtga

SEQ ID NO: 3842008 - DNA, 25 bp, Homo sapien
gggcctctcaaacagcaggtgaagg

SEQ ID NO: 3842009 - DNA, 25 bp, Homo sapien
ggcggccggggcctctcaaacagca

SEQ ID NO: 3842010 - DNA, 25 bp, Homo sapien
ggcctctcaaacagcaggtgaaggc

SEQ ID NO: 3842011 - DNA, 25 bp, Homo sapien
tcctcacccgcctcatagaagcggg

SEQ ID NO: 3842012 - DNA, 25 bp, Homo sapien
ggccccgggtccagttagctcctca

SEQ ID NO: 3842013 - DNA, 25 bp, Homo sapien
ccgcctcatagaagcggggtggcct

SEQ ID NO: 3842014 - DNA, 25 bp, Homo sapien
gccccgggtccagttagctcctcac

SEQ ID NO: 3842015 - DNA, 25 bp, Homo sapien
gtagagcaaggggtgagcaggttcc

SEQ ID NO: 3842016 - DNA, 25 bp, Homo sapien
gagcaaggggtgagcaggttccaga

SEQ ID NO: 3842017 - DNA, 25 bp, Homo sapien
ctgtagagcaaggggtgagcaggtt

SEQ ID NO: 3842018 - DNA, 25 bp, Homo sapien
tagagcaaggggtgagcaggttcca

SEQ ID NO: 3842019 - DNA, 25 bp, Homo sapien
ggccgcagcaggtggtggtggagga

SEQ ID NO: 3842020 - DNA, 25 bp, Homo sapien
aggtggtggtggaggagccaagcgg

SEQ ID NO: 3842021 - DNA, 25 bp, Homo sapien
agcaggtggtggtggaggagccaag

SEQ ID NO: 3842022 - DNA, 25 bp, Homo sapien
gtgaggggttcccggggccgcagca

SEQ ID NO: 3842023 - DNA, 25 bp, Homo sapien
ggggcgggcacaagcggaggtggtg

SEQ ID NO: 3842024 - DNA, 25 bp, Homo sapien
gggcgggcacaagcggaggtggtgc

SEQ ID NO: 3842025 - DNA, 25 bp, Homo sapien
gcgggcacaagcggaggtggtgccc

SEQ ID NO: 3842026 - DNA, 25 bp, Homo sapien
ggcgggcacaagcggaggtggtgcc

SEQ ID NO: 3842027 - DNA, 25 bp, Homo sapien
aaaggtgtacctcaggaggccccat

SEQ ID NO: 3842028 - DNA, 25 bp, Homo sapien
gaccctacactccatgtgatgcttg

SEQ ID NO: 3842029 - DNA, 25 bp, Homo sapien
tggcttaaaacctcagccctaggac

SEQ ID NO: 3842030 - DNA, 25 bp, Homo sapien
gctggtgaggttatgacctttgccc

SEQ ID NO: 3842031 - DNA, 25 bp, Homo sapien
cagtctgagggtttaattaaccagg

SEQ ID NO: 3842032 - DNA, 25 bp, Homo sapien
ccagtctgagggtttaattaaccag

SEQ ID NO: 3842033 - DNA, 25 bp, Homo sapien
gctgtcagccaagtaggaagcttct

SEQ ID NO: 3842034 - DNA, 25 bp, Homo sapien
ccttggcgggatacggacagtactg

SEQ ID NO: 3842035 - DNA, 25 bp, Homo sapien
ttttgttagattgacccctgccttc

SEQ ID NO: 3842036 - DNA, 25 bp, Homo sapien
ccccttctttggtgtgtggtacatg

SEQ ID NO: 3842037 - DNA, 25 bp, Homo sapien
tgaaaaacttcagtgcccaaccctc

SEQ ID NO: 3842038 - DNA, 25 bp, Homo sapien
ctgggttgcttgaatcctacatact

SEQ ID NO: 3842039 - DNA, 25 bp, Homo sapien
gcagacatgtgcgagaacacataga

SEQ ID NO: 3842040 - DNA, 25 bp, Homo sapien
ggacctgaagaatatacacctaatg

SEQ ID NO: 3842041 - DNA, 25 bp, Homo sapien
aacatactctgcctgtgcagacatg

SEQ ID NO: 3842042 - DNA, 25 bp, Homo sapien
acacctaatgatttacagcggttac

SEQ ID NO: 3842043 - DNA, 25 bp, Homo sapien
tgggggagtgccacgcacatcataa

SEQ ID NO: 3842044 - DNA, 25 bp, Homo sapien
cacaccttgggcttggttgatgcct

SEQ ID NO: 3842045 - DNA, 25 bp, Homo sapien
tgcccatctatgtccactgtctggg

SEQ ID NO: 3842046 - DNA, 25 bp, Homo sapien
tctcgttcactttaatgcatgccca

SEQ ID NO: 3842047 - DNA, 25 bp, Homo sapien
catggcagcccacttctgtagcgct

SEQ ID NO: 3842048 - DNA, 25 bp, Homo sapien
caagttagcagtggaacctgggcct

SEQ ID NO: 3842049 - DNA, 25 bp, Homo sapien
tgtagcgctgcttcgttttacgcga

SEQ ID NO: 3842050 - DNA, 25 bp, Homo sapien
ttacagatcacccagtaagctgcag

SEQ ID NO: 3842051 - DNA, 25 bp, Homo sapien
tcttctcgcgagagacagtaactgg

SEQ ID NO: 3842052 - DNA, 25 bp, Homo sapien
ggaaaaagggcagacgctactccca

SEQ ID NO: 3842053 - DNA, 25 bp, Homo sapien
gtgtagtctcccagaggctgcgcgc

SEQ ID NO: 3842054 - DNA, 25 bp, Homo sapien
actcgctcggaatcgctatcgccgg

SEQ ID NO: 3842055 - DNA, 25 bp, Homo sapien
tggcggaaagatgcgcgcgcagtca

SEQ ID NO: 3842056 - DNA, 25 bp, Homo sapien
ccggctgagggtgcgcgcgcagcac

SEQ ID NO: 3842057 - DNA, 25 bp, Homo sapien
agatgcgcgcgcagtcagccgtcat

SEQ ID NO: 3842058 - DNA, 25 bp, Homo sapien
gaggcggtggcggaaagatgcgcgc

SEQ ID NO: 3842059 - DNA, 25 bp, Homo sapien
cttcaggtttcgtgaccatctccct

SEQ ID NO: 3842060 - DNA, 25 bp, Homo sapien
tcaggtttcgtgaccatctccctag

SEQ ID NO: 3842061 - DNA, 25 bp, Homo sapien
atctccctagccctcccgacggact

SEQ ID NO: 3842062 - DNA, 25 bp, Homo sapien
tcccgacggactgacctcgcgtgac

SEQ ID NO: 3842063 - DNA, 25 bp, Homo sapien
gagaccacaccccctgtgaaagtct

SEQ ID NO: 3842064 - DNA, 25 bp, Homo sapien
aagtctgcacttccacggtgccgcc

SEQ ID NO: 3842065 - DNA, 25 bp, Homo sapien
tctgcacttccacggtgccgccgta

SEQ ID NO: 3842066 - DNA, 25 bp, Homo sapien
gctgagaccacaccccctgtgaaag

SEQ ID NO: 3842067 - DNA, 25 bp, Homo sapien
gggcgtcccagcctccgctcaggtc

SEQ ID NO: 3842068 - DNA, 25 bp, Homo sapien
gggctgctctgcatggtcccactcc

SEQ ID NO: 3842069 - DNA, 25 bp, Homo sapien
atgactgggttgttatcaccagtac

SEQ ID NO: 3842070 - DNA, 25 bp, Homo sapien
tatcaccagtactgctggccgaggg

SEQ ID NO: 3842071 - DNA, 25 bp, Homo sapien
gcagcctgggataagctgaacccct

SEQ ID NO: 3842072 - DNA, 25 bp, Homo sapien
ccatccagtgaggaatcttgagcta

SEQ ID NO: 3842073 - DNA, 25 bp, Homo sapien
cctgttctgcaatttcggcatggct

SEQ ID NO: 3842074 - DNA, 25 bp, Homo sapien
gggacacaggattgctgcctgtcat

SEQ ID NO: 3842075 - DNA, 25 bp, Homo sapien
ccaggcatagtggcgagcgcttagt

SEQ ID NO: 3842076 - DNA, 25 bp, Homo sapien
gcatagtggcgagcgcttagtccca

SEQ ID NO: 3842077 - DNA, 25 bp, Homo sapien
atagtggcgagcgcttagtcccagc

SEQ ID NO: 3842078 - DNA, 25 bp, Homo sapien
aggcatagtggcgagcgcttagtcc

SEQ ID NO: 3842079 - DNA, 25 bp, Homo sapien
tgagcaaagtcagcagagagccact

SEQ ID NO: 3842080 - DNA, 25 bp, Homo sapien
agctcagcaatccgagtctcgatct

SEQ ID NO: 3842081 - DNA, 25 bp, Homo sapien
ccccgtttccaacggcgctcctgag

SEQ ID NO: 3842082 - DNA, 25 bp, Homo sapien
catctcttcgcacaaatagtcccag

SEQ ID NO: 3842083 - DNA, 25 bp, Homo sapien
ggtggaagcaattcgacgcagcttg

SEQ ID NO: 3842084 - DNA, 25 bp, Homo sapien
tcgtggtgccggatcaccatgcgca

SEQ ID NO: 3842085 - DNA, 25 bp, Homo sapien
cgttcctctttctgccgctgctcct

SEQ ID NO: 3842086 - DNA, 25 bp, Homo sapien
gaagcaattcgacgcagcttggcct

SEQ ID NO: 3842087 - DNA, 25 bp, Homo sapien
tgctccagaactgcctgacatcctt

SEQ ID NO: 3842088 - DNA, 25 bp, Homo sapien
tccagaactgcctgacatccttggc

SEQ ID NO: 3842089 - DNA, 25 bp, Homo sapien
ctccagaactgcctgacatccttgg

SEQ ID NO: 3842090 - DNA, 25 bp, Homo sapien
gctccagaactgcctgacatccttg

SEQ ID NO: 3842091 - DNA, 25 bp, Homo sapien
gagggaaggtttgcaatctgaagct

SEQ ID NO: 3842092 - DNA, 25 bp, Homo sapien
gggctcactatggtctaaaggaagc

SEQ ID NO: 3842093 - DNA, 25 bp, Homo sapien
tagggagaccttctttaaccagatc

SEQ ID NO: 3842094 - DNA, 25 bp, Homo sapien
taaataaccttaggggctcactatg

SEQ ID NO: 3842095 - DNA, 25 bp, Homo sapien
ccacaatgaagtccaaatgcaggtc

SEQ ID NO: 3842096 - DNA, 25 bp, Homo sapien
ttttgcgcttttcctcaagccggga

SEQ ID NO: 3842097 - DNA, 25 bp, Homo sapien
ctctgagacagaaggtccgagtact

SEQ ID NO: 3842098 - DNA, 25 bp, Homo sapien
gagtacttttcagtttgccccacaa

SEQ ID NO: 3842099 - DNA, 25 bp, Homo sapien
cagctctggaaagggtacatgagga

SEQ ID NO: 3842100 - DNA, 25 bp, Homo sapien
aaagtccacgggccctgcaagccac

SEQ ID NO: 3842101 - DNA, 25 bp, Homo sapien
tcttcaacttcaatcgtttcctcat

SEQ ID NO: 3842102 - DNA, 25 bp, Homo sapien
tcctgttgttcttcaacttcaatcg

SEQ ID NO: 3842103 - DNA, 25 bp, Homo sapien
tgttcttcaacttcaatcgtttcct

SEQ ID NO: 3842104 - DNA, 25 bp, Homo sapien
gttgttcttcaacttcaatcgtttc

SEQ ID NO: 3842105 - DNA, 25 bp, Homo sapien
cttcaggcccatctcgggtgtcact

SEQ ID NO: 3842106 - DNA, 25 bp, Homo sapien
ggaagggaacggagcagctcttcca

SEQ ID NO: 3842107 - DNA, 25 bp, Homo sapien
aattctccctcacggcgaagcagct

SEQ ID NO: 3842108 - DNA, 25 bp, Homo sapien
catctcgggtgtcactatcatgaga

SEQ ID NO: 3842109 - DNA, 25 bp, Homo sapien
cccagggcaagaatacaatcaaggg

SEQ ID NO: 3842110 - DNA, 25 bp, Homo sapien
tgccactggtataatcccagggcaa

SEQ ID NO: 3842111 - DNA, 25 bp, Homo sapien
taatcccagggcaagaatacaatca

SEQ ID NO: 3842112 - DNA, 25 bp, Homo sapien
ctggtataatcccagggcaagaata

SEQ ID NO: 3842113 - DNA, 25 bp, Homo sapien
tcgttggcagtaaactcttcatcat

SEQ ID NO: 3842114 - DNA, 25 bp, Homo sapien
aaggctgtttgttgcgctgtgtgac

SEQ ID NO: 3842115 - DNA, 25 bp, Homo sapien
cttcctcttcgttggcagtaaactc

SEQ ID NO: 3842116 - DNA, 25 bp, Homo sapien
ctgtttgttgcgctgtgtgacagca

SEQ ID NO: 3842117 - DNA, 25 bp, Homo sapien
tgttcctcagctgctatagtatcct

SEQ ID NO: 3842118 - DNA, 25 bp, Homo sapien
tcctcagctgctatagtatcctctt

SEQ ID NO: 3842119 - DNA, 25 bp, Homo sapien
agctgctatagtatcctcttcatcc

SEQ ID NO: 3842120 - DNA, 25 bp, Homo sapien
tccatggcatgatccacctcccctt

SEQ ID NO: 3842121 - DNA, 25 bp, Homo sapien
gctattagcatcaacctcatcttca

SEQ ID NO: 3842122 - DNA, 25 bp, Homo sapien
gactgctactatcctcctgaggagg

SEQ ID NO: 3842123 - DNA, 25 bp, Homo sapien
tggttcacagtcagagctattagca

SEQ ID NO: 3842124 - DNA, 25 bp, Homo sapien
tgaggaggctcttccgcttccacgg

SEQ ID NO: 3842125 - DNA, 25 bp, Homo sapien
tgaagcactgctggatctgccctct

SEQ ID NO: 3842126 - DNA, 25 bp, Homo sapien
tgtccatggccgactctaaatccgc

SEQ ID NO: 3842127 - DNA, 25 bp, Homo sapien
caatatggcgttgtttgccaacggg

SEQ ID NO: 3842128 - DNA, 25 bp, Homo sapien
tgccaacgggcaatgagtactgctg

SEQ ID NO: 3842129 - DNA, 25 bp, Homo sapien
cagaagggccgtggtctggacggaa

SEQ ID NO: 3842130 - DNA, 25 bp, Homo sapien
agggccgtggtctggacggaatgac

SEQ ID NO: 3842131 - DNA, 25 bp, Homo sapien
ggccagggcagaagggccgtggtct

SEQ ID NO: 3842132 - DNA, 25 bp, Homo sapien
gtggtctggacggaatgactgtggg

SEQ ID NO: 3842133 - DNA, 25 bp, Homo sapien
aagatgagatcctcaaggacaaaca

SEQ ID NO: 3842134 - DNA, 25 bp, Homo sapien
gatgagatcctcaaggacaaacata

SEQ ID NO: 3842135 - DNA, 25 bp, Homo sapien
caaagatgagatcctcaaggacaaa

SEQ ID NO: 3842136 - DNA, 25 bp, Homo sapien
tgagatcctcaaggacaaacataag

SEQ ID NO: 3842137 - DNA, 25 bp, Homo sapien
tgagctggtgcctccggcttttcac

SEQ ID NO: 3842138 - DNA, 25 bp, Homo sapien
ttgccggctcacctcagacaagtga

SEQ ID NO: 3842139 - DNA, 25 bp, Homo sapien
caccagtacttgattctgtctcagc

SEQ ID NO: 3842140 - DNA, 25 bp, Homo sapien
tgtctcagcccaaataagcggatgt

SEQ ID NO: 3842141 - DNA, 25 bp, Homo sapien
gctcccagagaccttggctgggagc

SEQ ID NO: 3842142 - DNA, 25 bp, Homo sapien
ctgaggggctcccagagaccttggc

SEQ ID NO: 3842143 - DNA, 25 bp, Homo sapien
aggggctcccagagaccttggctgg

SEQ ID NO: 3842144 - DNA, 25 bp, Homo sapien
ctgagccagagggacctccagggag

SEQ ID NO: 3842145 - DNA, 25 bp, Homo sapien
tggctgctgctctgtgcctgttccc

SEQ ID NO: 3842146 - DNA, 25 bp, Homo sapien
gctggctgctgctctgtgcctgttc

SEQ ID NO: 3842147 - DNA, 25 bp, Homo sapien
ttgctggctgctgctctgtgcctgt

SEQ ID NO: 3842148 - DNA, 25 bp, Homo sapien
ggctgctgctctgtgcctgttcccc

SEQ ID NO: 3842149 - DNA, 25 bp, Homo sapien
cggtgccactgacccggagtcctgt

SEQ ID NO: 3842150 - DNA, 25 bp, Homo sapien
gagtcctgtattcctggtcccagag

SEQ ID NO: 3842151 - DNA, 25 bp, Homo sapien
agagatgccggtagggctgcccaca

SEQ ID NO: 3842152 - DNA, 25 bp, Homo sapien
tcgtttcccctctgagtgacttgca

SEQ ID NO: 3842153 - DNA, 25 bp, Homo sapien
ctggctggagctgccctcaggcaga

SEQ ID NO: 3842154 - DNA, 25 bp, Homo sapien
ctgtgcgacaggcctgtgcttgtgg

SEQ ID NO: 3842155 - DNA, 25 bp, Homo sapien
gtgcgacaggcctgtgcttgtggag

SEQ ID NO: 3842156 - DNA, 25 bp, Homo sapien
gacaggcctgtgcttgtggagtcct

SEQ ID NO: 3842157 - DNA, 25 bp, Homo sapien
cacaccagaggggagggcggaagac

SEQ ID NO: 3842158 - DNA, 25 bp, Homo sapien
aagcatgggagcaggacgctgtcct

SEQ ID NO: 3842159 - DNA, 25 bp, Homo sapien
ggaagacactccctgagagtgggct

SEQ ID NO: 3842160 - DNA, 25 bp, Homo sapien
catgggagcaggacgctgtcctctg

SEQ ID NO: 3842161 - DNA, 25 bp, Homo sapien
aagacctgtcttgatgtgacatcgg

SEQ ID NO: 3842162 - DNA, 25 bp, Homo sapien
gtcaaagacctgtcttgatgtgaca

SEQ ID NO: 3842163 - DNA, 25 bp, Homo sapien
cctgtcttgatgtgacatcggtgga

SEQ ID NO: 3842164 - DNA, 25 bp, Homo sapien
tgtcttgatgtgacatcggtggagc

SEQ ID NO: 3842165 - DNA, 25 bp, Homo sapien
ccgcatggccggcatttatgcaaat

SEQ ID NO: 3842166 - DNA, 25 bp, Homo sapien
tgatctccacctgtgcgcactggga

SEQ ID NO: 3842167 - DNA, 25 bp, Homo sapien
tcctctgtgatgacccctgtctgtc

SEQ ID NO: 3842168 - DNA, 25 bp, Homo sapien
tacccagcatgggtggtgacagcct

SEQ ID NO: 3842169 - DNA, 25 bp, Homo sapien
aattgtccaatgtcagcgagctcca

SEQ ID NO: 3842170 - DNA, 25 bp, Homo sapien
agaggtgcctcccatgaacagaaag

SEQ ID NO: 3842171 - DNA, 25 bp, Homo sapien
gctagctgtgctcctctgacgatgt

SEQ ID NO: 3842172 - DNA, 25 bp, Homo sapien
tgacacttccatgattggtcctggg

SEQ ID NO: 3842173 - DNA, 25 bp, Homo sapien
cctgacctgtcagctgttggctgac

SEQ ID NO: 3842174 - DNA, 25 bp, Homo sapien
acagccctgacctgtcagctgttgg

SEQ ID NO: 3842175 - DNA, 25 bp, Homo sapien
gtggcccggcagtcacagccctgac

SEQ ID NO: 3842176 - DNA, 25 bp, Homo sapien
gtcagctgttggctgacttgggcaa

SEQ ID NO: 3842177 - DNA, 25 bp, Homo sapien
gggagtctatggactcagcctgcag

SEQ ID NO: 3842178 - DNA, 25 bp, Homo sapien
gggcctcagtcagcgaagtaccaac

SEQ ID NO: 3842179 - DNA, 25 bp, Homo sapien
tcagcgaagtaccaactctccggga

SEQ ID NO: 3842180 - DNA, 25 bp, Homo sapien
aactctccgggagtctatggactca

SEQ ID NO: 3842181 - DNA, 25 bp, Homo sapien
gggtgcagaaggaaacatcagactc

SEQ ID NO: 3842182 - DNA, 25 bp, Homo sapien
gtgcagaaggaaacatcagactcat

SEQ ID NO: 3842183 - DNA, 25 bp, Homo sapien
gtggacatggggtgcagaaggaaac

SEQ ID NO: 3842184 - DNA, 25 bp, Homo sapien
acatggggtgcagaaggaaacatca

SEQ ID NO: 3842185 - DNA, 25 bp, Homo sapien
tcttggtatctaccccagatttcag

SEQ ID NO: 3842186 - DNA, 25 bp, Homo sapien
gatttcaggagtgttggctggatct

SEQ ID NO: 3842187 - DNA, 25 bp, Homo sapien
gatcttagggattgtgaagtcttca

SEQ ID NO: 3842188 - DNA, 25 bp, Homo sapien
cacttctcccgaattttgtggatcg

SEQ ID NO: 3842189 - DNA, 25 bp, Homo sapien
gatttgtagaaatagcagtggctct

SEQ ID NO: 3842190 - DNA, 25 bp, Homo sapien
gaaagagtatctaattgtctgacac

SEQ ID NO: 3842191 - DNA, 25 bp, Homo sapien
tattccagagattggcccggtcatc

SEQ ID NO: 3842192 - DNA, 25 bp, Homo sapien
ggcccggtcatcacctcagtctggg

SEQ ID NO: 3842193 - DNA, 25 bp, Homo sapien
gcggaacacagagtacccgcagtgc

SEQ ID NO: 3842194 - DNA, 25 bp, Homo sapien
tctgctgggttgctatggacaccag

SEQ ID NO: 3842195 - DNA, 25 bp, Homo sapien
tggacaccagaagtctagaacttga

SEQ ID NO: 3842196 - DNA, 25 bp, Homo sapien
cgcagtgccgtcctaatttacctgt

SEQ ID NO: 3842197 - DNA, 25 bp, Homo sapien
cgagactgtcagacgtatggcgaga

SEQ ID NO: 3842198 - DNA, 25 bp, Homo sapien
tgttgtcgcgagaactctgcctttg

SEQ ID NO: 3842199 - DNA, 25 bp, Homo sapien
tctgcctttgggccgtaggttagtg

SEQ ID NO: 3842200 - DNA, 25 bp, Homo sapien
ccgagcggagatctcgcgagactgt

SEQ ID NO: 3842201 - DNA, 25 bp, Homo sapien
atcgcctggagaggcactcggacct

SEQ ID NO: 3842202 - DNA, 25 bp, Homo sapien
gatcgcctggagaggcactcggacc

SEQ ID NO: 3842203 - DNA, 25 bp, Homo sapien
aaggtctcctcggatcgcctggaga

SEQ ID NO: 3842204 - DNA, 25 bp, Homo sapien
cacccaaggtctcctcggatcgcct

SEQ ID NO: 3842205 - DNA, 25 bp, Homo sapien
gccgggtggaggctcgatgaccgct

SEQ ID NO: 3842206 - DNA, 25 bp, Homo sapien
tgtgggccgggtggaggctcgatga

SEQ ID NO: 3842207 - DNA, 25 bp, Homo sapien
gggtggaggctcgatgaccgctggc

SEQ ID NO: 3842208 - DNA, 25 bp, Homo sapien
gaggctcgatgaccgctggcccgct

SEQ ID NO: 3842209 - DNA, 25 bp, Homo sapien
gtcttctccccttccggccacacgc

SEQ ID NO: 3842210 - DNA, 25 bp, Homo sapien
ggcctgtcttctccccttccggcca

SEQ ID NO: 3842211 - DNA, 25 bp, Homo sapien
ctgtcttctccccttccggccacac

SEQ ID NO: 3842212 - DNA, 25 bp, Homo sapien
ctgcccgccgggcccgggcctgtct

SEQ ID NO: 3842213 - DNA, 25 bp, Homo sapien
tgcccggccgtgggcctgtcctttc

SEQ ID NO: 3842214 - DNA, 25 bp, Homo sapien
gttctcgccttcccgccacacgccg

SEQ ID NO: 3842215 - DNA, 25 bp, Homo sapien
cgaccctcctcgtgcccggccgtgg

SEQ ID NO: 3842216 - DNA, 25 bp, Homo sapien
cgaggcgaggtctgttttgccggac

SEQ ID NO: 3842217 - DNA, 25 bp, Homo sapien
ccctctctttaggtgtgacagctcc

SEQ ID NO: 3842218 - DNA, 25 bp, Homo sapien
ctctcgcctcttgcttggatgtggg

SEQ ID NO: 3842219 - DNA, 25 bp, Homo sapien
tgttttgccggacgggcacagaaca

SEQ ID NO: 3842220 - DNA, 25 bp, Homo sapien
gtcttgatctcctgacctgacctcg

SEQ ID NO: 3842221 - DNA, 25 bp, Homo sapien
tcttgatctcctgacctgacctcgt

SEQ ID NO: 3842222 - DNA, 25 bp, Homo sapien
tgcagtgggcgatctccgctcattg

SEQ ID NO: 3842223 - DNA, 25 bp, Homo sapien
gcagtgggcgatctccgctcattgc

SEQ ID NO: 3842224 - DNA, 25 bp, Homo sapien
tgacagaactggcatagccaagctg

SEQ ID NO: 3842225 - DNA, 25 bp, Homo sapien
tagccaagctgcacaagataaacca

SEQ ID NO: 3842226 - DNA, 25 bp, Homo sapien
gacttgaaaagcagataggtaggga

SEQ ID NO: 3842227 - DNA, 25 bp, Homo sapien
ttagtgatggtgacttgaaaagcag

SEQ ID NO: 3842228 - DNA, 25 bp, Homo sapien
gggtaaagcagcctgtcgcttgccg

SEQ ID NO: 3842229 - DNA, 25 bp, Homo sapien
aaagcagcctgtcgcttgccgggca

SEQ ID NO: 3842230 - DNA, 25 bp, Homo sapien
gcagcctgtcgcttgccgggcagct

SEQ ID NO: 3842231 - DNA, 25 bp, Homo sapien
tcaggggtaaagcagcctgtcgctt

SEQ ID NO: 3842232 - DNA, 25 bp, Homo sapien
gcctgtgaggtacgtctggcagccc

SEQ ID NO: 3842233 - DNA, 25 bp, Homo sapien
ctgtgaggtacgtctggcagcccag

SEQ ID NO: 3842234 - DNA, 25 bp, Homo sapien
gccggtagccttgcagggctggcgc

SEQ ID NO: 3842235 - DNA, 25 bp, Homo sapien
gggccgtagcgggagcccttgaggc

SEQ ID NO: 3842236 - DNA, 25 bp, Homo sapien
cctgaggccgcttggaaagggcttt

SEQ ID NO: 3842237 - DNA, 25 bp, Homo sapien
gcgaccggggcgagggcaagggctc

SEQ ID NO: 3842238 - DNA, 25 bp, Homo sapien
ctgaggccgcttggaaagggctttt

SEQ ID NO: 3842239 - DNA, 25 bp, Homo sapien
ctgcgtgcgaatcggcgaccggggc

SEQ ID NO: 3842240 - DNA, 25 bp, Homo sapien
tggggctcttcatttccgctctgaa

SEQ ID NO: 3842241 - DNA, 25 bp, Homo sapien
cttcatttccgctctgaaggcttcc

SEQ ID NO: 3842242 - DNA, 25 bp, Homo sapien
ggctcttcatttccgctctgaaggc

SEQ ID NO: 3842243 - DNA, 25 bp, Homo sapien
ggttggggctcttcatttccgctct

SEQ ID NO: 3842244 - DNA, 25 bp, Homo sapien
cagtaatagagaaccccttttgagg

SEQ ID NO: 3842245 - DNA, 25 bp, Homo sapien
caaggacttggtctctccgtgccag

SEQ ID NO: 3842246 - DNA, 25 bp, Homo sapien
gcttgctattggtggagttctccgg

SEQ ID NO: 3842247 - DNA, 25 bp, Homo sapien
cacagggctgatttgagcatggcca

SEQ ID NO: 3842248 - DNA, 25 bp, Homo sapien
tagtagtatataattgattggctgt

SEQ ID NO: 3842249 - DNA, 25 bp, Homo sapien
tcttctgtaaagtatttagtagtat

SEQ ID NO: 3842250 - DNA, 25 bp, Homo sapien
gaaccattctgtaagtcctgtttcg

SEQ ID NO: 3842251 - DNA, 25 bp, Homo sapien
tgtaagtcctgtttcggtaggtaga

SEQ ID NO: 3842252 - DNA, 25 bp, Homo sapien
gaatcccataagctgcggaagcctg

SEQ ID NO: 3842253 - DNA, 25 bp, Homo sapien
gattggctagtgactccccaggaat

SEQ ID NO: 3842254 - DNA, 25 bp, Homo sapien
tcaggacccatgtaaggtagaggag

SEQ ID NO: 3842255 - DNA, 25 bp, Homo sapien
cttggaggccaagaaaccattgtcc

SEQ ID NO: 3842256 - DNA, 25 bp, Homo sapien
cacataatcgttttgctgttggagg

SEQ ID NO: 3842257 - DNA, 25 bp, Homo sapien
ggagtcaaaccatgttgctgcttta

SEQ ID NO: 3842258 - DNA, 25 bp, Homo sapien
catccatgagggtgggaatccgttt

SEQ ID NO: 3842259 - DNA, 25 bp, Homo sapien
tgagttcctccaagccatccatgag

SEQ ID NO: 3842260 - DNA, 25 bp, Homo sapien
cttagatgcaattgtagggttaata

SEQ ID NO: 3842261 - DNA, 25 bp, Homo sapien
ttgatttaaagaagagtgagagatg

SEQ ID NO: 3842262 - DNA, 25 bp, Homo sapien
gactttctcgctaagtttaatcatt

SEQ ID NO: 3842263 - DNA, 25 bp, Homo sapien
ccttttagttgaacacttagatgca

SEQ ID NO: 3842264 - DNA, 25 bp, Homo sapien
ggtgggcattcaggacatttattga

SEQ ID NO: 3842265 - DNA, 25 bp, Homo sapien
caaggctccttagattgggtcgtta

SEQ ID NO: 3842266 - DNA, 25 bp, Homo sapien
gaaatgcagcatctttgtggacgtc

SEQ ID NO: 3842267 - DNA, 25 bp, Homo sapien
tatacctgtattgggaaatgagtcg

SEQ ID NO: 3842268 - DNA, 25 bp, Homo sapien
aaatgagtcggagctttaaggcagg

SEQ ID NO: 3842269 - DNA, 25 bp, Homo sapien
cagtaccgactaagcaaataggcaa

SEQ ID NO: 3842270 - DNA, 25 bp, Homo sapien
tcttgaggccaaacacactgtattt

SEQ ID NO: 3842271 - DNA, 25 bp, Homo sapien
gaacaggccgttttcaacacttgtg

SEQ ID NO: 3842272 - DNA, 25 bp, Homo sapien
tgccatacagcttcactagagttct

SEQ ID NO: 3842273 - DNA, 25 bp, Homo sapien
gacttcagccaagattcagtgcctt

SEQ ID NO: 3842274 - DNA, 25 bp, Homo sapien
ggccctagtttactttctccaatca

SEQ ID NO: 3842275 - DNA, 25 bp, Homo sapien
tactagatgcatccgaagaggccct

SEQ ID NO: 3842276 - DNA, 25 bp, Homo sapien
tccaatcatatagccaccaggtatt

SEQ ID NO: 3842277 - DNA, 25 bp, Homo sapien
atgccaagggtacctttcactttat

SEQ ID NO: 3842278 - DNA, 25 bp, Homo sapien
tgccaagggtacctttcactttata

SEQ ID NO: 3842279 - DNA, 25 bp, Homo sapien
ttttaacacaaacacgaagatgttg

SEQ ID NO: 3842280 - DNA, 25 bp, Homo sapien
aaacacgaagatgttgttttgccca

SEQ ID NO: 3842281 - DNA, 25 bp, Homo sapien
gaagtgtcctccattcatgagttgg

SEQ ID NO: 3842282 - DNA, 25 bp, Homo sapien
tatagtactaacaagcacgacctga

SEQ ID NO: 3842283 - DNA, 25 bp, Homo sapien
cacgacctgaattctgggagtaagt

SEQ ID NO: 3842284 - DNA, 25 bp, Homo sapien
ttggcttcaactcactaatggctgg

SEQ ID NO: 3842285 - DNA, 25 bp, Homo sapien
tgactgttggagcaaggagcctttc

SEQ ID NO: 3842286 - DNA, 25 bp, Homo sapien
tcatgtgctcccagttattatatag

SEQ ID NO: 3842287 - DNA, 25 bp, Homo sapien
gctggtaagtgttagtcctgtcaga

SEQ ID NO: 3842288 - DNA, 25 bp, Homo sapien
cccagttattatatagtgcatagag

SEQ ID NO: 3842289 - DNA, 25 bp, Homo sapien
tctgtaatgtaaacaaggtgacacc

SEQ ID NO: 3842290 - DNA, 25 bp, Homo sapien
taacaacctttggactctggatggg

SEQ ID NO: 3842291 - DNA, 25 bp, Homo sapien
tgatttagaactccactagcactgt

SEQ ID NO: 3842292 - DNA, 25 bp, Homo sapien
cctatggcagtttattacggagttc

SEQ ID NO: 3842293 - DNA, 25 bp, Homo sapien
ttgaagattagtgacggccaggcat

SEQ ID NO: 3842294 - DNA, 25 bp, Homo sapien
cttgaagattagtgacggccaggca

SEQ ID NO: 3842295 - DNA, 25 bp, Homo sapien
cagtgagtgacacctagcatcatgc

SEQ ID NO: 3842296 - DNA, 25 bp, Homo sapien
aataaaaaggcctaactgcttatgg

SEQ ID NO: 3842297 - DNA, 25 bp, Homo sapien
gacgcatcaatctcccacaattaaa

SEQ ID NO: 3842298 - DNA, 25 bp, Homo sapien
caaggatttcacttgcaatggagaa

SEQ ID NO: 3842299 - DNA, 25 bp, Homo sapien
caggaatctctccagtctgaagact

SEQ ID NO: 3842300 - DNA, 25 bp, Homo sapien
gatagctgacctgcttacgttcttc

SEQ ID NO: 3842301 - DNA, 25 bp, Homo sapien
caacgagcgtcctaccagatggctt

SEQ ID NO: 3842302 - DNA, 25 bp, Homo sapien
cagctgatggattaaagggccactc

SEQ ID NO: 3842303 - DNA, 25 bp, Homo sapien
agatgtatgtcgtctcaggaccatg

SEQ ID NO: 3842304 - DNA, 25 bp, Homo sapien
aagatgtatgtcgtctcaggaccat

SEQ ID NO: 3842305 - DNA, 25 bp, Homo sapien
gaagatgtatgtcgtctcaggacca

SEQ ID NO: 3842306 - DNA, 25 bp, Homo sapien
tctgagctatctgagagtaagaggc

SEQ ID NO: 3842307 - DNA, 25 bp, Homo sapien
cacgtagcattttgactccacagac

SEQ ID NO: 3842308 - DNA, 25 bp, Homo sapien
tcagacacttgattcgctgaggaat

SEQ ID NO: 3842309 - DNA, 25 bp, Homo sapien
ttcatccaccacaaatatcacgtag

SEQ ID NO: 3842310 - DNA, 25 bp, Homo sapien
caagccagcaagagttttgttgggc

SEQ ID NO: 3842311 - DNA, 25 bp, Homo sapien
cagcactcaagccagcaagagtttt

SEQ ID NO: 3842312 - DNA, 25 bp, Homo sapien
cactcaagccagcaagagttttgtt

SEQ ID NO: 3842313 - DNA, 25 bp, Homo sapien
ttttgttgggccaaattatgttgaa

SEQ ID NO: 3842314 - DNA, 25 bp, Homo sapien
gctcaggagtttgagactagcctgg

SEQ ID NO: 3842315 - DNA, 25 bp, Homo sapien
tgggcaccatggtgaaaccccgtct

SEQ ID NO: 3842316 - DNA, 25 bp, Homo sapien
ggccaaggcagggtggatcgcttga

SEQ ID NO: 3842317 - DNA, 25 bp, Homo sapien
cctgggcaccatggtgaaaccccgt

SEQ ID NO: 3842318 - DNA, 25 bp, Homo sapien
ttaaggtgagacgtatagaacactg

SEQ ID NO: 3842319 - DNA, 25 bp, Homo sapien
gagaattatctgacccttgacagca

SEQ ID NO: 3842320 - DNA, 25 bp, Homo sapien
tctaaattgacttacagggaagcca

SEQ ID NO: 3842321 - DNA, 25 bp, Homo sapien
tgacagcaacacgttgatctcccag

SEQ ID NO: 3842322 - DNA, 25 bp, Homo sapien
atggctccccattcaacagtactca

SEQ ID NO: 3842323 - DNA, 25 bp, Homo sapien
tttaaaaagcgcacttcaagtgtat

SEQ ID NO: 3842324 - DNA, 25 bp, Homo sapien
actgcaacagagtgtaatttccttg

SEQ ID NO: 3842325 - DNA, 25 bp, Homo sapien
gtgtattaagagatggctccccatt

SEQ ID NO: 3842326 - DNA, 25 bp, Homo sapien
tatacaacatgcctgtcatggttcc

SEQ ID NO: 3842327 - DNA, 25 bp, Homo sapien
tgtcatggttccagctgctactgtg

SEQ ID NO: 3842328 - DNA, 25 bp, Homo sapien
cacctcgtgttttctcaatgatgac

SEQ ID NO: 3842329 - DNA, 25 bp, Homo sapien
actgtgttaaggtcatcttctgcac

SEQ ID NO: 3842330 - DNA, 25 bp, Homo sapien
aaagaactcacccacgtgtcaggag

SEQ ID NO: 3842331 - DNA, 25 bp, Homo sapien
caccttatgtattccttgactgggc

SEQ ID NO: 3842332 - DNA, 25 bp, Homo sapien
ccaactccagtgaaatgaaagctcc

SEQ ID NO: 3842333 - DNA, 25 bp, Homo sapien
caattttccacatgaggcccaagtg

SEQ ID NO: 3842334 - DNA, 25 bp, Homo sapien
cacatggtacacgactgactggcta

SEQ ID NO: 3842335 - DNA, 25 bp, Homo sapien
gaaagtaccgctaggaagtctcagg

SEQ ID NO: 3842336 - DNA, 25 bp, Homo sapien
taataagtaaatcagggacatgtgc

SEQ ID NO: 3842337 - DNA, 25 bp, Homo sapien
gcagagaaacgcctggaagaattca

SEQ ID NO: 3842338 - DNA, 25 bp, Homo sapien
cagagaacctagagtattagcccaa

SEQ ID NO: 3842339 - DNA, 25 bp, Homo sapien
ttgcctagtcaccatattcaaaatc

SEQ ID NO: 3842340 - DNA, 25 bp, Homo sapien
cttgcctagtcaccatattcaaaat

SEQ ID NO: 3842341 - DNA, 25 bp, Homo sapien
cctagactagaaccaagcagccaag

SEQ ID NO: 3842342 - DNA, 25 bp, Homo sapien
accagaacagtgatggacgcaactg

SEQ ID NO: 3842343 - DNA, 25 bp, Homo sapien
cagtgtaacatgatcccaggaatgg

SEQ ID NO: 3842344 - DNA, 25 bp, Homo sapien
ccaggaatggttctgtccagacagc

SEQ ID NO: 3842345 - DNA, 25 bp, Homo sapien
ccattcattgcaccaaacgcagccc

SEQ ID NO: 3842346 - DNA, 25 bp, Homo sapien
tggtttggaccaggccatgttctgg

SEQ ID NO: 3842347 - DNA, 25 bp, Homo sapien
atttcttggtttggaccaggccatg

SEQ ID NO: 3842348 - DNA, 25 bp, Homo sapien
aatcctagccgaagaccattcattg

SEQ ID NO: 3842349 - DNA, 25 bp, Homo sapien
taacaattcacccagataaagacag

SEQ ID NO: 3842350 - DNA, 25 bp, Homo sapien
ggtaaatcataacaattcacccaga

SEQ ID NO: 3842351 - DNA, 25 bp, Homo sapien
tcataacaattcacccagataaaga

SEQ ID NO: 3842352 - DNA, 25 bp, Homo sapien
ctggtaaatcataacaattcaccca

SEQ ID NO: 3842353 - DNA, 25 bp, Homo sapien
taaagaaggccagctcaaatctgcc

SEQ ID NO: 3842354 - DNA, 25 bp, Homo sapien
gcaacatcctccaatcgtaaagaag

SEQ ID NO: 3842355 - DNA, 25 bp, Homo sapien
caatcgtaaagaaggccagctcaaa

SEQ ID NO: 3842356 - DNA, 25 bp, Homo sapien
tgtcatgcaacatcctccaatcgta

SEQ ID NO: 3842357 - DNA, 25 bp, Homo sapien
gaggtatcgtggatccacatttaaa

SEQ ID NO: 3842358 - DNA, 25 bp, Homo sapien
ctgcacgaggtatcgtggatccaca

SEQ ID NO: 3842359 - DNA, 25 bp, Homo sapien
aggagacagagggttcataccagtt

SEQ ID NO: 3842360 - DNA, 25 bp, Homo sapien
ggagacagagggttcataccagtta

SEQ ID NO: 3842361 - DNA, 25 bp, Homo sapien
tataccttgatgttgcctatttccg

SEQ ID NO: 3842362 - DNA, 25 bp, Homo sapien
cattttcacaagaccgaggagaggc

SEQ ID NO: 3842363 - DNA, 25 bp, Homo sapien
ctcctaaagaaggtttcctagcctg

SEQ ID NO: 3842364 - DNA, 25 bp, Homo sapien
taaaggctttatccacgaccaactg

SEQ ID NO: 3842365 - DNA, 25 bp, Homo sapien
cagaaataatcgcaagctaggcccc

SEQ ID NO: 3842366 - DNA, 25 bp, Homo sapien
gtcagaaataatcgcaagctaggcc

SEQ ID NO: 3842367 - DNA, 25 bp, Homo sapien
agaaataatcgcaagctaggcccca

SEQ ID NO: 3842368 - DNA, 25 bp, Homo sapien
gaaataatcgcaagctaggccccat

SEQ ID NO: 3842369 - DNA, 25 bp, Homo sapien
atccgcgtgcgagtaacctgctccg

SEQ ID NO: 3842370 - DNA, 25 bp, Homo sapien
gggacgccagccaaatccgcgtgcg

SEQ ID NO: 3842371 - DNA, 25 bp, Homo sapien
gccaaatccgcgtgcgagtaacctg

SEQ ID NO: 3842372 - DNA, 25 bp, Homo sapien
gtgcgagtaacctgctccgccggct

SEQ ID NO: 3842373 - DNA, 25 bp, Homo sapien
tcaagcctgggtggtccgctgggcc

SEQ ID NO: 3842374 - DNA, 25 bp, Homo sapien
tactcctcaataacagcgggtaacc

SEQ ID NO: 3842375 - DNA, 25 bp, Homo sapien
ggtatcgcagcaaaccgagtggttc

SEQ ID NO: 3842376 - DNA, 25 bp, Homo sapien
agcaaaccgagtggttcccgccgct

SEQ ID NO: 3842377 - DNA, 25 bp, Homo sapien
caggtatatgttcaggtgtacttca

SEQ ID NO: 3842378 - DNA, 25 bp, Homo sapien
cagtcagtcctcactggttggatct

SEQ ID NO: 3842379 - DNA, 25 bp, Homo sapien
tatttgcatgtaaaggaggaggagt

SEQ ID NO: 3842380 - DNA, 25 bp, Homo sapien
tcagcttctgtgactggatagtttg

SEQ ID NO: 3842381 - DNA, 25 bp, Homo sapien
accaaatgaatacttggggctgtat

SEQ ID NO: 3842382 - DNA, 25 bp, Homo sapien
tggggctgtatttcgcatgtttaaa

SEQ ID NO: 3842383 - DNA, 25 bp, Homo sapien
gaatacttggggctgtatttcgcat

SEQ ID NO: 3842384 - DNA, 25 bp, Homo sapien
gctgtatttcgcatgtttaaatgtt

SEQ ID NO: 3842385 - DNA, 25 bp, Homo sapien
aattatcttaggacaagtaggcggg

SEQ ID NO: 3842386 - DNA, 25 bp, Homo sapien
tcttgtattgactgaaatcgctaat

SEQ ID NO: 3842387 - DNA, 25 bp, Homo sapien
ggtagcgaaatggatatttattcag

SEQ ID NO: 3842388 - DNA, 25 bp, Homo sapien
caattaacagaatgttcaaagacta

SEQ ID NO: 3842389 - DNA, 25 bp, Homo sapien
gacttgctgattaaaatatactggg

SEQ ID NO: 3842390 - DNA, 25 bp, Homo sapien
tactgggtactgaataatgttgctg

SEQ ID NO: 3842391 - DNA, 25 bp, Homo sapien
gaatgttcctttgacatgcaggtga

SEQ ID NO: 3842392 - DNA, 25 bp, Homo sapien
cacattgtgatgacgcaggtttatc

SEQ ID NO: 3842393 - DNA, 25 bp, Homo sapien
atcttagcagtttagggtgggtcag

SEQ ID NO: 3842394 - DNA, 25 bp, Homo sapien
ggctattttgttagtcctacagtgg

SEQ ID NO: 3842395 - DNA, 25 bp, Homo sapien
ctacagtggcactctagtccccagg

SEQ ID NO: 3842396 - DNA, 25 bp, Homo sapien
aaataatgggaagctgaagctgtcc

SEQ ID NO: 3842397 - DNA, 25 bp, Homo sapien
gaatatactcatcctttggctccgt

SEQ ID NO: 3842398 - DNA, 25 bp, Homo sapien
taaatttgtagctatgttggcccag

SEQ ID NO: 3842399 - DNA, 25 bp, Homo sapien
gacactgacgtctgtagcaagagaa

SEQ ID NO: 3842400 - DNA, 25 bp, Homo sapien
tatagggagcaacacatcttgtggc

SEQ ID NO: 3842401 - DNA, 25 bp, Homo sapien
gccgttggttacaatacctctgtca

SEQ ID NO: 3842402 - DNA, 25 bp, Homo sapien
tctgtcaccttgctatgaagtagtc

SEQ ID NO: 3842403 - DNA, 25 bp, Homo sapien
gagaagagtccttgcgttttcgacc

SEQ ID NO: 3842404 - DNA, 25 bp, Homo sapien
gaagcatgcctgaaacgggtaacat

SEQ ID NO: 3842405 - DNA, 25 bp, Homo sapien
ggtttcccgcaggtttgcagaagct

SEQ ID NO: 3842406 - DNA, 25 bp, Homo sapien
agaagctgcctgtgatgtggtccat

SEQ ID NO: 3842407 - DNA, 25 bp, Homo sapien
ggagggtcctccacaataaggtcaa

SEQ ID NO: 3842408 - DNA, 25 bp, Homo sapien
atctgagccagtcgctgtggttgtt

SEQ ID NO: 3842409 - DNA, 25 bp, Homo sapien
ccagagacttatgccaggatcccac

SEQ ID NO: 3842410 - DNA, 25 bp, Homo sapien
gctgtggttgttttagctccttgac

SEQ ID NO: 3842411 - DNA, 25 bp, Homo sapien
gaggattcatcttgcacatctgaga

SEQ ID NO: 3842412 - DNA, 25 bp, Homo sapien
gtgatgctcaatggatcccgcagta

SEQ ID NO: 3842413 - DNA, 25 bp, Homo sapien
gaggcctgggtgatacatggtggaa

SEQ ID NO: 3842414 - DNA, 25 bp, Homo sapien
atcatacatgactcagcatacctgc

SEQ ID NO: 3842415 - DNA, 25 bp, Homo sapien
ctccttgactccttgtggtttatgt

SEQ ID NO: 3842416 - DNA, 25 bp, Homo sapien
gcaggtatgctgagtcatgtatgat

SEQ ID NO: 3842417 - DNA, 25 bp, Homo sapien
ttgaccttattgtggaggaccctcc

SEQ ID NO: 3842418 - DNA, 25 bp, Homo sapien
atggaccacatcacaggcagcttct

SEQ ID NO: 3842419 - DNA, 25 bp, Homo sapien
agcttctgcaaacctgcgggaaacc

SEQ ID NO: 3842420 - DNA, 25 bp, Homo sapien
gtcaaggagctaaaacaaccacagc

SEQ ID NO: 3842421 - DNA, 25 bp, Homo sapien
ttccaccatgtatcacccaggcctc

SEQ ID NO: 3842422 - DNA, 25 bp, Homo sapien
gtgggatcctggcataagtctctgg

SEQ ID NO: 3842423 - DNA, 25 bp, Homo sapien
acataaaccacaaggagtcaaggag

SEQ ID NO: 3842424 - DNA, 25 bp, Homo sapien
tactgcgggatccattgagcatcac

SEQ ID NO: 3842425 - DNA, 25 bp, Homo sapien
tctcagatgtgcaagatgaatcctc

SEQ ID NO: 3842426 - DNA, 25 bp, Homo sapien
aacaaccacagcgactggctcagat

SEQ ID NO: 3842427 - DNA, 25 bp, Homo sapien
atggattaattgttgaaaggaagcc

SEQ ID NO: 3842428 - DNA, 25 bp, Homo sapien
gcctttcgtttcatccttccattgg

SEQ ID NO: 3842429 - DNA, 25 bp, Homo sapien
tactcctcttttacaacacctgtgg

SEQ ID NO: 3842430 - DNA, 25 bp, Homo sapien
gatagaaatgtataagcctttcgtt

SEQ ID NO: 3842431 - DNA, 25 bp, Homo sapien
tggacacttctatctgttgcaggca

SEQ ID NO: 3842432 - DNA, 25 bp, Homo sapien
catttttatctatggactgtggcac

SEQ ID NO: 3842433 - DNA, 25 bp, Homo sapien
ttgacatagcacctaggaaagaagc

SEQ ID NO: 3842434 - DNA, 25 bp, Homo sapien
tatgtaccaactatagtgtcagcag

SEQ ID NO: 3842435 - DNA, 25 bp, Homo sapien
ttcttatggaagaaatagaatccac

SEQ ID NO: 3842436 - DNA, 25 bp, Homo sapien
tccaaaaaagctagtgtggatagct

SEQ ID NO: 3842437 - DNA, 25 bp, Homo sapien
cattgtcattgtgtctacttcaccc

SEQ ID NO: 3842438 - DNA, 25 bp, Homo sapien
tagaatccacagagttctgtaggga

SEQ ID NO: 3842439 - DNA, 25 bp, Homo sapien
tctgtcatgttctagtgcatcaaac

SEQ ID NO: 3842440 - DNA, 25 bp, Homo sapien
caagttaaattacctccacatgctc

SEQ ID NO: 3842441 - DNA, 25 bp, Homo sapien
gctgtgttaactccgctaaaaattg

SEQ ID NO: 3842442 - DNA, 25 bp, Homo sapien
tctgaaggtagtagactggtactcc

SEQ ID NO: 3842443 - DNA, 25 bp, Homo sapien
ggaggtgttccagactatgttacta

SEQ ID NO: 3842444 - DNA, 25 bp, Homo sapien
tatgttactactgcaagaaggtcct

SEQ ID NO: 3842445 - DNA, 25 bp, Homo sapien
gaattcctcagcgaatcaagtgtct

SEQ ID NO: 3842446 - DNA, 25 bp, Homo sapien
tcttaggtctgtggagtcaaaatgc

SEQ ID NO: 3842447 - DNA, 25 bp, Homo sapien
ttttcattgcttttagtgtcagaga

SEQ ID NO: 3842448 - DNA, 25 bp, Homo sapien
caactggtgaagtactgagaagaag

SEQ ID NO: 3842449 - DNA, 25 bp, Homo sapien
cagagatggctttggattccccgtt

SEQ ID NO: 3842450 - DNA, 25 bp, Homo sapien
ggtgtgtgtcaatcccaactggtga

SEQ ID NO: 3842451 - DNA, 25 bp, Homo sapien
tttctgcaccctgaaatttctgtta

SEQ ID NO: 3842452 - DNA, 25 bp, Homo sapien
ccctgcattgaatgcctgtctgttg

SEQ ID NO: 3842453 - DNA, 25 bp, Homo sapien
aatgcctgtctgttgacattatctg

SEQ ID NO: 3842454 - DNA, 25 bp, Homo sapien
gcattgaatgcctgtctgttgacat

SEQ ID NO: 3842455 - DNA, 25 bp, Homo sapien
ggctggaccaggatcagacagtgct

SEQ ID NO: 3842456 - DNA, 25 bp, Homo sapien
tggaccaggatcagacagtgctgtc

SEQ ID NO: 3842457 - DNA, 25 bp, Homo sapien
gaccaggatcagacagtgctgtcct

SEQ ID NO: 3842458 - DNA, 25 bp, Homo sapien
ggtgatggcggtttgggctggacca

SEQ ID NO: 3842459 - DNA, 25 bp, Homo sapien
taactgcagtttcagcgggctcagg

SEQ ID NO: 3842460 - DNA, 25 bp, Homo sapien
ggaccaggctaaagggcctccaagc

SEQ ID NO: 3842461 - DNA, 25 bp, Homo sapien
gcctgggtctttcctgccgcttctt

SEQ ID NO: 3842462 - DNA, 25 bp, Homo sapien
tgtgcaatatactcccgtggcctgg

SEQ ID NO: 3842463 - DNA, 25 bp, Homo sapien
acgtgataacaactactgctgcctg

SEQ ID NO: 3842464 - DNA, 25 bp, Homo sapien
tgctgcctgggatcatgagagacct

SEQ ID NO: 3842465 - DNA, 25 bp, Homo sapien
tattgtctgccctgctgatatgtga

SEQ ID NO: 3842466 - DNA, 25 bp, Homo sapien
tcagccccaggtcgtagctattgtc

SEQ ID NO: 3842467 - DNA, 25 bp, Homo sapien
tctctgcccaagaggagcctctgac

SEQ ID NO: 3842468 - DNA, 25 bp, Homo sapien
gtgatctctgcccaagaggagcctc

SEQ ID NO: 3842469 - DNA, 25 bp, Homo sapien
gctgtgatctctgcccaagaggagc

SEQ ID NO: 3842470 - DNA, 25 bp, Homo sapien
gatctctgcccaagaggagcctctg

SEQ ID NO: 3842471 - DNA, 25 bp, Homo sapien
actcctctggaggtaccttggtctc

SEQ ID NO: 3842472 - DNA, 25 bp, Homo sapien
gaggtaccttggtctcccgatccat

SEQ ID NO: 3842473 - DNA, 25 bp, Homo sapien
ctctggaggtaccttggtctcccga

SEQ ID NO: 3842474 - DNA, 25 bp, Homo sapien
tggaggtaccttggtctcccgatcc

SEQ ID NO: 3842475 - DNA, 25 bp, Homo sapien
gcgggcctgaccaacgtgcagaaac

SEQ ID NO: 3842476 - DNA, 25 bp, Homo sapien
ttaaaaatatacgaatctggctggg

SEQ ID NO: 3842477 - DNA, 25 bp, Homo sapien
aggcgggcctgaccaacgtgcagaa

SEQ ID NO: 3842478 - DNA, 25 bp, Homo sapien
gctgaggcgggcctgaccaacgtgc

SEQ ID NO: 3842479 - DNA, 25 bp, Homo sapien
gataggtgccatctaccctcggttt

SEQ ID NO: 3842480 - DNA, 25 bp, Homo sapien
cacatgcaccacgttcgtgaccggg

SEQ ID NO: 3842481 - DNA, 25 bp, Homo sapien
ggaacatactgacctgtcgtgtgca

SEQ ID NO: 3842482 - DNA, 25 bp, Homo sapien
tagcgtcagcctcgagtttgaccag

SEQ ID NO: 3842483 - DNA, 25 bp, Homo sapien
gctggctctgccttgaattcccacc

SEQ ID NO: 3842484 - DNA, 25 bp, Homo sapien
tctgccttgaattcccaccccttag

SEQ ID NO: 3842485 - DNA, 25 bp, Homo sapien
cccaatcgcccagttcttgctctct

SEQ ID NO: 3842486 - DNA, 25 bp, Homo sapien
tggccaggaacaaaagctggctctg

SEQ ID NO: 3842487 - DNA, 25 bp, Homo sapien
aaaggagggtgtcattgtgttactc

SEQ ID NO: 3842488 - DNA, 25 bp, Homo sapien
atcaaagtagagatagtgaaatagc

SEQ ID NO: 3842489 - DNA, 25 bp, Homo sapien
atcttatgtctatacattcatttca

SEQ ID NO: 3842490 - DNA, 25 bp, Homo sapien
tttcaatggataagaatcaaagtag

SEQ ID NO: 3842491 - DNA, 25 bp, Homo sapien
gcttgtgttcgacaatattccttga

SEQ ID NO: 3842492 - DNA, 25 bp, Homo sapien
aatattccttgatgacagcacagcc

SEQ ID NO: 3842493 - DNA, 25 bp, Homo sapien
caacaatacagcttgtgttcgacaa

SEQ ID NO: 3842494 - DNA, 25 bp, Homo sapien
tgtgcgtttcagtcaacaatacagc

SEQ ID NO: 3842495 - DNA, 25 bp, Homo sapien
tgtagacgggctacgctcattgtgc

SEQ ID NO: 3842496 - DNA, 25 bp, Homo sapien
gcctttgaaagagcagagccggcag

SEQ ID NO: 3842497 - DNA, 25 bp, Homo sapien
ttttccgaatgccagaccgaggtgc

SEQ ID NO: 3842498 - DNA, 25 bp, Homo sapien
gccggcagcctgtagtcatcatttg

SEQ ID NO: 3842499 - DNA, 25 bp, Homo sapien
gtaaggactaatcatttaagggaca

SEQ ID NO: 3842500 - DNA, 25 bp, Homo sapien
taaggactaatcatttaagggacaa

SEQ ID NO: 3842501 - DNA, 25 bp, Homo sapien
tgacctcatcgaggcaggtgaagtt

SEQ ID NO: 3842502 - DNA, 25 bp, Homo sapien
ctcaggatatgctgacttgggtccc

SEQ ID NO: 3842503 - DNA, 25 bp, Homo sapien
tgattcacccttgacctcatcgagg

SEQ ID NO: 3842504 - DNA, 25 bp, Homo sapien
gagaatttatctgctcctatcaaag

SEQ ID NO: 3842505 - DNA, 25 bp, Homo sapien
gagtctttctgtgtcccccaagctg

SEQ ID NO: 3842506 - DNA, 25 bp, Homo sapien
gagtgtactggtgcgatctcggctc

SEQ ID NO: 3842507 - DNA, 25 bp, Homo sapien
aagtgatccgttcctcttggcctcc

SEQ ID NO: 3842508 - DNA, 25 bp, Homo sapien
actctaacctctgcctcctgggttc

SEQ ID NO: 3842509 - DNA, 25 bp, Homo sapien
ccagggtggcactctggcgacgagg

SEQ ID NO: 3842510 - DNA, 25 bp, Homo sapien
caccgacttgtagctgagctgcaag

SEQ ID NO: 3842511 - DNA, 25 bp, Homo sapien
ggaatgagtccaccgacttgtagct

SEQ ID NO: 3842512 - DNA, 25 bp, Homo sapien
ctgcaagggcgtcaggcagcggaaa

SEQ ID NO: 3842513 - DNA, 25 bp, Homo sapien
ccagcattctcatgagaaccccact

SEQ ID NO: 3842514 - DNA, 25 bp, Homo sapien
cagcattctcatgagaaccccactg

SEQ ID NO: 3842515 - DNA, 25 bp, Homo sapien
agcattctcatgagaaccccactga

SEQ ID NO: 3842516 - DNA, 25 bp, Homo sapien
ctcatgagaaccccactgaggaact

SEQ ID NO: 3842517 - DNA, 25 bp, Homo sapien
cttgaccttgtttctgtccggaagc

SEQ ID NO: 3842518 - DNA, 25 bp, Homo sapien
ttgaccttgtttctgtccggaagca

SEQ ID NO: 3842519 - DNA, 25 bp, Homo sapien
tgaagattgtattgacaccactggc

SEQ ID NO: 3842520 - DNA, 25 bp, Homo sapien
atatgaagattgtattgacaccact

SEQ ID NO: 3842521 - DNA, 25 bp, Homo sapien
tatgaagattgtattgacaccactg

SEQ ID NO: 3842522 - DNA, 25 bp, Homo sapien
gaagattgtattgacaccactggcc

SEQ ID NO: 3842523 - DNA, 25 bp, Homo sapien
ccgactgctccaagatgttggcctt

SEQ ID NO: 3842524 - DNA, 25 bp, Homo sapien
tgcatggtgttggccgactgctcca

SEQ ID NO: 3842525 - DNA, 25 bp, Homo sapien
ccaagatgttggccttcatgtactt

SEQ ID NO: 3842526 - DNA, 25 bp, Homo sapien
gaagataatggccaggatggccaac

SEQ ID NO: 3842527 - DNA, 25 bp, Homo sapien
agatgccatagaggaacaggatggt

SEQ ID NO: 3842528 - DNA, 25 bp, Homo sapien
gagatgccatagaggaacaggatgg

SEQ ID NO: 3842529 - DNA, 25 bp, Homo sapien
gcatctgcatgatgggggacgtcaa

SEQ ID NO: 3842530 - DNA, 25 bp, Homo sapien
gaagtagtcggcatctgcatgatgg

SEQ ID NO: 3842531 - DNA, 25 bp, Homo sapien
gatgggggacgtcaacatgaagtcg

SEQ ID NO: 3842532 - DNA, 25 bp, Homo sapien
aagtagtcggcatctgcatgatggg

SEQ ID NO: 3842533 - DNA, 25 bp, Homo sapien
ccccagctcagatcagctaatcggg

SEQ ID NO: 3842534 - DNA, 25 bp, Homo sapien
ggctgtgaacccctgtctatccttg

SEQ ID NO: 3842535 - DNA, 25 bp, Homo sapien
tgtaaaacaggcacatcctaggtgc

SEQ ID NO: 3842536 - DNA, 25 bp, Homo sapien
ctgaatcagcccttccaaggtcact

SEQ ID NO: 3842537 - DNA, 25 bp, Homo sapien
tgggcccagcctcttaatattgttt

SEQ ID NO: 3842538 - DNA, 25 bp, Homo sapien
gggcccagcctcttaatattgttta

SEQ ID NO: 3842539 - DNA, 25 bp, Homo sapien
caaggagtataatgctggtatctgc

SEQ ID NO: 3842540 - DNA, 25 bp, Homo sapien
tgtacaaggagtataatgctggtat

SEQ ID NO: 3842541 - DNA, 25 bp, Homo sapien
tttggctcacagttccgtagagtgt

SEQ ID NO: 3842542 - DNA, 25 bp, Homo sapien
cagttccgtagagtgtacaaggagt

SEQ ID NO: 3842543 - DNA, 25 bp, Homo sapien
tgagggggcaatgaagacttaaaga

SEQ ID NO: 3842544 - DNA, 25 bp, Homo sapien
tgttggaaaatgagggggcaatgaa

SEQ ID NO: 3842545 - DNA, 25 bp, Homo sapien
atgatgttggaaaatgagggggcaa

SEQ ID NO: 3842546 - DNA, 25 bp, Homo sapien
agggggcaatgaagacttaaagatg

SEQ ID NO: 3842547 - DNA, 25 bp, Homo sapien
tcctttgaactcaaatctagacagc

SEQ ID NO: 3842548 - DNA, 25 bp, Homo sapien
tcagtcttgaagaaagctcatgcct

SEQ ID NO: 3842549 - DNA, 25 bp, Homo sapien
tcaaatctagacagctgggctctct

SEQ ID NO: 3842550 - DNA, 25 bp, Homo sapien
tcatgcctaagactttcctttgaac

SEQ ID NO: 3842551 - DNA, 25 bp, Homo sapien
ccaacatctgccatgatatctcttc

SEQ ID NO: 3842552 - DNA, 25 bp, Homo sapien
caacatctgccatgatatctcttcc

SEQ ID NO: 3842553 - DNA, 25 bp, Homo sapien
tggagtccacaagccagcagcagat

SEQ ID NO: 3842554 - DNA, 25 bp, Homo sapien
ggagtccacaagccagcagcagatt

SEQ ID NO: 3842555 - DNA, 25 bp, Homo sapien
gagtccacaagccagcagcagatta

SEQ ID NO: 3842556 - DNA, 25 bp, Homo sapien
actccaatgacgaggctgtacccca

SEQ ID NO: 3842557 - DNA, 25 bp, Homo sapien
tctggagctgggatccactgtcagc

SEQ ID NO: 3842558 - DNA, 25 bp, Homo sapien
tgaaatccactagagagcatcacaa

SEQ ID NO: 3842559 - DNA, 25 bp, Homo sapien
cactgtcagcactcattaggtcttt

SEQ ID NO: 3842560 - DNA, 25 bp, Homo sapien
tgcacagctaaatctgattccctgc

SEQ ID NO: 3842561 - DNA, 25 bp, Homo sapien
cacgcccagccgcataagcttttaa

SEQ ID NO: 3842562 - DNA, 25 bp, Homo sapien
gcaactaaactaactgatttggtag

SEQ ID NO: 3842563 - DNA, 25 bp, Homo sapien
gggtatacgggacatgctacctcaa

SEQ ID NO: 3842564 - DNA, 25 bp, Homo sapien
gcagatgctttctttttggagagct

SEQ ID NO: 3842565 - DNA, 25 bp, Homo sapien
tgctgaacaacagggcagatgcttt

SEQ ID NO: 3842566 - DNA, 25 bp, Homo sapien
aacagggcagatgctttctttttgg

SEQ ID NO: 3842567 - DNA, 25 bp, Homo sapien
acagggcagatgctttctttttgga

SEQ ID NO: 3842568 - DNA, 25 bp, Homo sapien
taagttactcgcactttgagaagaa

SEQ ID NO: 3842569 - DNA, 25 bp, Homo sapien
aggcagcagagatgcaccttttaag

SEQ ID NO: 3842570 - DNA, 25 bp, Homo sapien
tcatcatcaaacagggaaaccgacg

SEQ ID NO: 3842571 - DNA, 25 bp, Homo sapien
catcaaacagggaaaccgacgtggg

SEQ ID NO: 3842572 - DNA, 25 bp, Homo sapien
cagagtcctcctgatcctaaaataa

SEQ ID NO: 3842573 - DNA, 25 bp, Homo sapien
agagtcctcctgatcctaaaataag

SEQ ID NO: 3842574 - DNA, 25 bp, Homo sapien
gagtcctcctgatcctaaaataagc

SEQ ID NO: 3842575 - DNA, 25 bp, Homo sapien
tcagagtcctcctgatcctaaaata

SEQ ID NO: 3842576 - DNA, 25 bp, Homo sapien
gatgagacaaactgtagaaagagga

SEQ ID NO: 3842577 - DNA, 25 bp, Homo sapien
agccaggacatgacatgatgagaca

SEQ ID NO: 3842578 - DNA, 25 bp, Homo sapien
acatgatgagacaaactgtagaaag

SEQ ID NO: 3842579 - DNA, 25 bp, Homo sapien
gccaggacatgacatgatgagacaa

SEQ ID NO: 3842580 - DNA, 25 bp, Homo sapien
atctgtctgactcacagtggcttct

SEQ ID NO: 3842581 - DNA, 25 bp, Homo sapien
tttcatctgtctgactcacagtggc

SEQ ID NO: 3842582 - DNA, 25 bp, Homo sapien
tattttcatctgtctgactcacagt

SEQ ID NO: 3842583 - DNA, 25 bp, Homo sapien
tcatctgtctgactcacagtggctt

SEQ ID NO: 3842584 - DNA, 25 bp, Homo sapien
gcatccgtttgcactctttctagat

SEQ ID NO: 3842585 - DNA, 25 bp, Homo sapien
tccgtttgcactctttctagattaa

SEQ ID NO: 3842586 - DNA, 25 bp, Homo sapien
cactctttctagattaactaggcta

SEQ ID NO: 3842587 - DNA, 25 bp, Homo sapien
attctgcatccgtttgcactctttc

SEQ ID NO: 3842588 - DNA, 25 bp, Homo sapien
gctagctgtggggtgtcgagaaaaa

SEQ ID NO: 3842589 - DNA, 25 bp, Homo sapien
gaacggaggcagcacatccgtgtct

SEQ ID NO: 3842590 - DNA, 25 bp, Homo sapien
ttggaaggctagctgtggggtgtcg

SEQ ID NO: 3842591 - DNA, 25 bp, Homo sapien
aacggaggcagcacatccgtgtctc

SEQ ID NO: 3842592 - DNA, 25 bp, Homo sapien
aaaaatacagaaacagctcctgctg

SEQ ID NO: 3842593 - DNA, 25 bp, Homo sapien
ttctttccaggtttggatgatgaag

SEQ ID NO: 3842594 - DNA, 25 bp, Homo sapien
aaatacagaaacagctcctgctggg

SEQ ID NO: 3842595 - DNA, 25 bp, Homo sapien
attttctttccaggtttggatgatg

SEQ ID NO: 3842596 - DNA, 25 bp, Homo sapien
cgtcatcaagccacagcagtgggtc

SEQ ID NO: 3842597 - DNA, 25 bp, Homo sapien
cttgccaatcctggggggcttccgt

SEQ ID NO: 3842598 - DNA, 25 bp, Homo sapien
ccttaacagaggctccagcttgcca

SEQ ID NO: 3842599 - DNA, 25 bp, Homo sapien
tccagcttgccaatcctggggggct

SEQ ID NO: 3842600 - DNA, 25 bp, Homo sapien
gaggctccagcttgccaatcctggg

SEQ ID NO: 3842601 - DNA, 25 bp, Homo sapien
caaatggcgagaagtcctcgtcggt

SEQ ID NO: 3842602 - DNA, 25 bp, Homo sapien
gagccaaatggcgagaagtcctcgt

SEQ ID NO: 3842603 - DNA, 25 bp, Homo sapien
agaagtcctcgtcggtcagcttggg

SEQ ID NO: 3842604 - DNA, 25 bp, Homo sapien
cacctccagagccaaatggcgagaa

SEQ ID NO: 3842605 - DNA, 25 bp, Homo sapien
ctccgcccacggcatcccccttgat

SEQ ID NO: 3842606 - DNA, 25 bp, Homo sapien
ttgtcggctcctcgtccactccgcc

SEQ ID NO: 3842607 - DNA, 25 bp, Homo sapien
ggctcctcgtccactccgcccacgg

SEQ ID NO: 3842608 - DNA, 25 bp, Homo sapien
tcctcgtccactccgcccacggcat

SEQ ID NO: 3842609 - DNA, 25 bp, Homo sapien
ctgcaaacgaagtaggtctgctttt

SEQ ID NO: 3842610 - DNA, 25 bp, Homo sapien
gtgatagcaactacagccttcctta

SEQ ID NO: 3842611 - DNA, 25 bp, Homo sapien
tgatagcaactacagccttccttac

SEQ ID NO: 3842612 - DNA, 25 bp, Homo sapien
tcctccttctcagagtcagcaaaaa

SEQ ID NO: 3842613 - DNA, 25 bp, Homo sapien
cctcatcactcacttgtgtgatgtg

SEQ ID NO: 3842614 - DNA, 25 bp, Homo sapien
cttctcagagtcagcaaaaaggtca

SEQ ID NO: 3842615 - DNA, 25 bp, Homo sapien
ttcaatgtcctcaatatctttctcc

SEQ ID NO: 3842616 - DNA, 25 bp, Homo sapien
ttctatggaaacagatatatttata

SEQ ID NO: 3842617 - DNA, 25 bp, Homo sapien
caaagaaaaagacgtggaaagacat

SEQ ID NO: 3842618 - DNA, 25 bp, Homo sapien
gcaaagaaaaagacgtggaaagaca

SEQ ID NO: 3842619 - DNA, 25 bp, Homo sapien
gatatatttataaaagcaaagaaaa

SEQ ID NO: 3842620 - DNA, 25 bp, Homo sapien
cctctagaattttagaaacgagcac

SEQ ID NO: 3842621 - DNA, 25 bp, Homo sapien
acctctagaattttagaaacgagca

SEQ ID NO: 3842622 - DNA, 25 bp, Homo sapien
ataggagggcgtttcaagtattcct

SEQ ID NO: 3842623 - DNA, 25 bp, Homo sapien
agtattcctgatactccttgtcatc

SEQ ID NO: 3842624 - DNA, 25 bp, Homo sapien
tccttgtcatcttctgcgaatctac

SEQ ID NO: 3842625 - DNA, 25 bp, Homo sapien
gtttcaagtattcctgatactcctt

SEQ ID NO: 3842626 - DNA, 25 bp, Homo sapien
ccaatgtagtggagacccttccgct

SEQ ID NO: 3842627 - DNA, 25 bp, Homo sapien
tgtgtctatctagctcgggccgaac

SEQ ID NO: 3842628 - DNA, 25 bp, Homo sapien
tccgctagccatcgaaaataactta

SEQ ID NO: 3842629 - DNA, 25 bp, Homo sapien
cgagacactaagagaccgcaggaga

SEQ ID NO: 3842630 - DNA, 25 bp, Homo sapien
ttgcctgccctcttaggaacacacg

SEQ ID NO: 3842631 - DNA, 25 bp, Homo sapien
agccagagctggtcgctggcggccg

SEQ ID NO: 3842632 - DNA, 25 bp, Homo sapien
ggtgacgcttggcttgcgcgcagga

SEQ ID NO: 3842633 - DNA, 25 bp, Homo sapien
gccgacgcgggcgtgagaggcgggc

SEQ ID NO: 3842634 - DNA, 25 bp, Homo sapien
ataaaagctgaattttggtcatttt

SEQ ID NO: 3842635 - DNA, 25 bp, Homo sapien
ttataaaagctgaattttggtcatt

SEQ ID NO: 3842636 - DNA, 25 bp, Homo sapien
gctgaattttggtcatttttccctc

SEQ ID NO: 3842637 - DNA, 25 bp, Homo sapien
agctgaattttggtcatttttccct

SEQ ID NO: 3842638 - DNA, 25 bp, Homo sapien
cccatgggtttaggtttcttagatg

SEQ ID NO: 3842639 - DNA, 25 bp, Homo sapien
gggtttaggtttcttagatgtcatg

SEQ ID NO: 3842640 - DNA, 25 bp, Homo sapien
ctgaaaagatcccatgggctttagg

SEQ ID NO: 3842641 - DNA, 25 bp, Homo sapien
catgggctttaggtcccatgggttt

SEQ ID NO: 3842642 - DNA, 25 bp, Homo sapien
cctatagttctatctccttgggaag

SEQ ID NO: 3842643 - DNA, 25 bp, Homo sapien
ccaggcctggttgcgtgctcctata

SEQ ID NO: 3842644 - DNA, 25 bp, Homo sapien
gacaaatagcccagttgaaagaagg

SEQ ID NO: 3842645 - DNA, 25 bp, Homo sapien
tctggaaagtcaaacgaccacccac

SEQ ID NO: 3842646 - DNA, 25 bp, Homo sapien
gttaccctgcagctacattgttgag

SEQ ID NO: 3842647 - DNA, 25 bp, Homo sapien
cacagtttgatttagttagccttgc

SEQ ID NO: 3842648 - DNA, 25 bp, Homo sapien
ggccataatatgcttcagggtgtgt

SEQ ID NO: 3842649 - DNA, 25 bp, Homo sapien
tactagaacagctagctcatcgttc

SEQ ID NO: 3842650 - DNA, 25 bp, Homo sapien
tgttatatggatgggaaccctaact

SEQ ID NO: 3842651 - DNA, 25 bp, Homo sapien
ctttgttatatggatgggaacccta

SEQ ID NO: 3842652 - DNA, 25 bp, Homo sapien
agtctttgttatatggatgggaacc

SEQ ID NO: 3842653 - DNA, 25 bp, Homo sapien
tctttgttatatggatgggaaccct

SEQ ID NO: 3842654 - DNA, 25 bp, Homo sapien
ctcttttcatagtctaggttcccca

SEQ ID NO: 3842655 - DNA, 25 bp, Homo sapien
taggttccccacagaccccttcatc

SEQ ID NO: 3842656 - DNA, 25 bp, Homo sapien
ttttcatagtctaggttccccacag

SEQ ID NO: 3842657 - DNA, 25 bp, Homo sapien
ttcatagtctaggttccccacagac

SEQ ID NO: 3842658 - DNA, 25 bp, Homo sapien
ccatactgtccctctatgtcatttc

SEQ ID NO: 3842659 - DNA, 25 bp, Homo sapien
ccaccaccatactgtccctctatgt

SEQ ID NO: 3842660 - DNA, 25 bp, Homo sapien
tttcccttagtaggctcatgggcaa

SEQ ID NO: 3842661 - DNA, 25 bp, Homo sapien
catttcccttagtaggctcatgggc

SEQ ID NO: 3842662 - DNA, 25 bp, Homo sapien
catgaaagtcaacatctcggagcag

SEQ ID NO: 3842663 - DNA, 25 bp, Homo sapien
tgaaagtcaacatctcggagcagtc

SEQ ID NO: 3842664 - DNA, 25 bp, Homo sapien
acatgaaagtcaacatctcggagca

SEQ ID NO: 3842665 - DNA, 25 bp, Homo sapien
atgaaagtcaacatctcggagcagt

SEQ ID NO: 3842666 - DNA, 25 bp, Homo sapien
caaggagaagaacctgtttgtcagc

SEQ ID NO: 3842667 - DNA, 25 bp, Homo sapien
tcatagaccaggtggtcatgtccta

SEQ ID NO: 3842668 - DNA, 25 bp, Homo sapien
caagctccatgagaagctgcaccac

SEQ ID NO: 3842669 - DNA, 25 bp, Homo sapien
ggccatcaaggacatatcccggcat

SEQ ID NO: 3842670 - DNA, 25 bp, Homo sapien
gagcaggaaatcttcgacaggtcca

SEQ ID NO: 3842671 - DNA, 25 bp, Homo sapien
caggagcaggaaatcttcgacaggt

SEQ ID NO: 3842672 - DNA, 25 bp, Homo sapien
gaagcaggagcaggaaatcttcgac

SEQ ID NO: 3842673 - DNA, 25 bp, Homo sapien
gcaggaaatcttcgacaggtccatg

SEQ ID NO: 3842674 - DNA, 25 bp, Homo sapien
agaagcggtaaaacagcagcatccc

SEQ ID NO: 3842675 - DNA, 25 bp, Homo sapien
cccagaagcggtaaaacagcagcat

SEQ ID NO: 3842676 - DNA, 25 bp, Homo sapien
cgcccagaagcggtaaaacagcagc

SEQ ID NO: 3842677 - DNA, 25 bp, Homo sapien
aagagcgcccagaagcggtaaaaca

SEQ ID NO: 3842678 - DNA, 25 bp, Homo sapien
gcctactccggcagagccgcactaa

SEQ ID NO: 3842679 - DNA, 25 bp, Homo sapien
gcagagccgcactaacgcgaacccg

SEQ ID NO: 3842680 - DNA, 25 bp, Homo sapien
gagccgcactaacgcgaacccgcga

SEQ ID NO: 3842681 - DNA, 25 bp, Homo sapien
tccggcagagccgcactaacgcgaa

SEQ ID NO: 3842682 - DNA, 25 bp, Homo sapien
tggggcaggagagacgccgctgtga

SEQ ID NO: 3842683 - DNA, 25 bp, Homo sapien
gcaggagagacgccgctgtgaacac

SEQ ID NO: 3842684 - DNA, 25 bp, Homo sapien
ctggggcaggagagacgccgctgtg

SEQ ID NO: 3842685 - DNA, 25 bp, Homo sapien
gggcaggagagacgccgctgtgaac

SEQ ID NO: 3842686 - DNA, 25 bp, Homo sapien
caggccggaaatgccggcttgaagc

SEQ ID NO: 3842687 - DNA, 25 bp, Homo sapien
ggtgtcatctcgcctttgtccactt

SEQ ID NO: 3842688 - DNA, 25 bp, Homo sapien
aaatgactgaaaggaattcaaatat

SEQ ID NO: 3842689 - DNA, 25 bp, Homo sapien
gtgtcatctcgcctttgtccacttc

SEQ ID NO: 3842690 - DNA, 25 bp, Homo sapien
aaggtgtcatctcgcctttgtccac

SEQ ID NO: 3842691 - DNA, 25 bp, Homo sapien
gcccaagataatcctgctccatgga

SEQ ID NO: 3842692 - DNA, 25 bp, Homo sapien
tgcaggccaattttgcgctggccca

SEQ ID NO: 3842693 - DNA, 25 bp, Homo sapien
ccagaagggcatagccctccagttg

SEQ ID NO: 3842694 - DNA, 25 bp, Homo sapien
agggcatagccctccagttgctcct

SEQ ID NO: 3842695 - DNA, 25 bp, Homo sapien
gagtaggcagggtacagcaaataaa

SEQ ID NO: 3842696 - DNA, 25 bp, Homo sapien
taaataatccattgaatattgacaa

SEQ ID NO: 3842697 - DNA, 25 bp, Homo sapien
tacccaatctgccatattccacttt

SEQ ID NO: 3842698 - DNA, 25 bp, Homo sapien
aaaaccagagtaggcagggtacagc

SEQ ID NO: 3842699 - DNA, 25 bp, Homo sapien
tggagcaagatatatgggacaaacc

SEQ ID NO: 3842700 - DNA, 25 bp, Homo sapien
aatcatgctttaggctgtagaccac

SEQ ID NO: 3842701 - DNA, 25 bp, Homo sapien
tgtagaccacaagatatatggctgc

SEQ ID NO: 3842702 - DNA, 25 bp, Homo sapien
cccaaacagggacgattatagaagt

SEQ ID NO: 3842703 - DNA, 25 bp, Homo sapien
aagtatgacagcaggcttcagaatg

SEQ ID NO: 3842704 - DNA, 25 bp, Homo sapien
aagccggggaagtgccttcaaatga

SEQ ID NO: 3842705 - DNA, 25 bp, Homo sapien
gtcctgcttccgattgtgtccaaaa

SEQ ID NO: 3842706 - DNA, 25 bp, Homo sapien
cattccactgttgcattactcagac

SEQ ID NO: 3842707 - DNA, 25 bp, Homo sapien
cgatgttgaagtagcctcatatttc

SEQ ID NO: 3842708 - DNA, 25 bp, Homo sapien
tgaagtagcctcatatttctccaca

SEQ ID NO: 3842709 - DNA, 25 bp, Homo sapien
tacacactatctgccacgatgttga

SEQ ID NO: 3842710 - DNA, 25 bp, Homo sapien
attacacactatctgccacgatgtt

SEQ ID NO: 3842711 - DNA, 25 bp, Homo sapien
tttgtactgaattcttcgggttagc

SEQ ID NO: 3842712 - DNA, 25 bp, Homo sapien
tacaaatataacttcagcaacttcc

SEQ ID NO: 3842713 - DNA, 25 bp, Homo sapien
caaatataacttcagcaacttcccc

SEQ ID NO: 3842714 - DNA, 25 bp, Homo sapien
ttcgggttagcacctacaaatataa

SEQ ID NO: 3842715 - DNA, 25 bp, Homo sapien
ggctgcaggacatccccgaaagttc

SEQ ID NO: 3842716 - DNA, 25 bp, Homo sapien
cactctgtattcaggttttgctggc

SEQ ID NO: 3842717 - DNA, 25 bp, Homo sapien
tgccttttggtgctctatccacaat

SEQ ID NO: 3842718 - DNA, 25 bp, Homo sapien
gaggttctggacctctgctcaggtt

SEQ ID NO: 3842719 - DNA, 25 bp, Homo sapien
cgtagcaatagccttagcaaggttt

SEQ ID NO: 3842720 - DNA, 25 bp, Homo sapien
gtgcggtccataaattgtcgatgct

SEQ ID NO: 3842721 - DNA, 25 bp, Homo sapien
tcgatgctgcctcatatcgctgagc

SEQ ID NO: 3842722 - DNA, 25 bp, Homo sapien
tccataaattgtcgatgctgcctca

SEQ ID NO: 3842723 - DNA, 25 bp, Homo sapien
taatgtaatgtgtatagacgttgca

SEQ ID NO: 3842724 - DNA, 25 bp, Homo sapien
gcatagacctgaaataacaacagtc

SEQ ID NO: 3842725 - DNA, 25 bp, Homo sapien
tgttctgcatcccatgagatgcaaa

SEQ ID NO: 3842726 - DNA, 25 bp, Homo sapien
tcttcataagtggtaatgtaatgtg

SEQ ID NO: 3842727 - DNA, 25 bp, Homo sapien
cttgaactgcctctcgaagtcttcg

SEQ ID NO: 3842728 - DNA, 25 bp, Homo sapien
tgcttgaactgcctctcgaagtctt

SEQ ID NO: 3842729 - DNA, 25 bp, Homo sapien
cctctcgaagtcttcgtccagacat

SEQ ID NO: 3842730 - DNA, 25 bp, Homo sapien
tgcctctcgaagtcttcgtccagac

SEQ ID NO: 3842731 - DNA, 25 bp, Homo sapien
gatggcagttatggccaaggaccca

SEQ ID NO: 3842732 - DNA, 25 bp, Homo sapien
ccaaggacccaagggtaataatctg

SEQ ID NO: 3842733 - DNA, 25 bp, Homo sapien
ggatggcagttatggccaaggaccc

SEQ ID NO: 3842734 - DNA, 25 bp, Homo sapien
ccaagggtaataatctgaacatcaa

SEQ ID NO: 3842735 - DNA, 25 bp, Homo sapien
ctggatgccaggggtgaggttttga

SEQ ID NO: 3842736 - DNA, 25 bp, Homo sapien
ggatgccaggggtgaggttttgata

SEQ ID NO: 3842737 - DNA, 25 bp, Homo sapien
tggatgccaggggtgaggttttgat

SEQ ID NO: 3842738 - DNA, 25 bp, Homo sapien
gatgccaggggtgaggttttgatag

SEQ ID NO: 3842739 - DNA, 25 bp, Homo sapien
ttctccggtgtgaagaaggatgggc

SEQ ID NO: 3842740 - DNA, 25 bp, Homo sapien
gatgggctttggtttatgacattct

SEQ ID NO: 3842741 - DNA, 25 bp, Homo sapien
ccgaatggtgtcccaaaatggatcc

SEQ ID NO: 3842742 - DNA, 25 bp, Homo sapien
aatggtgtcccaaaatggatcccct

SEQ ID NO: 3842743 - DNA, 25 bp, Homo sapien
ccaactccatcaatagtgccagctg

SEQ ID NO: 3842744 - DNA, 25 bp, Homo sapien
ccagctgcaaaactgtagcccaatg

SEQ ID NO: 3842745 - DNA, 25 bp, Homo sapien
catcaatagtgccagctgcaaaact

SEQ ID NO: 3842746 - DNA, 25 bp, Homo sapien
cctgtgtaaaattgaggcctccaac

SEQ ID NO: 3842747 - DNA, 25 bp, Homo sapien
cataaccagtgtgtctcagcagcac

SEQ ID NO: 3842748 - DNA, 25 bp, Homo sapien
ccttggggcataaccagtgtgtctc

SEQ ID NO: 3842749 - DNA, 25 bp, Homo sapien
tggggcataaccagtgtgtctcagc

SEQ ID NO: 3842750 - DNA, 25 bp, Homo sapien
gggcataaccagtgtgtctcagcag

SEQ ID NO: 3842751 - DNA, 25 bp, Homo sapien
tgcatgtgtggaattgagccagaca

SEQ ID NO: 3842752 - DNA, 25 bp, Homo sapien
gtgtgctgaagccagtggtcctgtt

SEQ ID NO: 3842753 - DNA, 25 bp, Homo sapien
catctgtcatatccacccactggtg

SEQ ID NO: 3842754 - DNA, 25 bp, Homo sapien
ctgaagccagtggtcctgttacctc

SEQ ID NO: 3842755 - DNA, 25 bp, Homo sapien
ctctgatacatggcccgtcctataa

SEQ ID NO: 3842756 - DNA, 25 bp, Homo sapien
cgtcctataatttgtgtgctgtcaa

SEQ ID NO: 3842757 - DNA, 25 bp, Homo sapien
ggcccgtcctataatttgtgtgctg

SEQ ID NO: 3842758 - DNA, 25 bp, Homo sapien
tacatggcccgtcctataatttgtg

SEQ ID NO: 3842759 - DNA, 25 bp, Homo sapien
tgggacaagtgctattggcgttatc

SEQ ID NO: 3842760 - DNA, 25 bp, Homo sapien
gggacacatctcctaggtttgatga

SEQ ID NO: 3842761 - DNA, 25 bp, Homo sapien
tcctgtgttgatgcaacgtggtcca

SEQ ID NO: 3842762 - DNA, 25 bp, Homo sapien
tattggcgttatcacaggactctcc

SEQ ID NO: 3842763 - DNA, 25 bp, Homo sapien
tctcttgctcaagcaggtaagatgc

SEQ ID NO: 3842764 - DNA, 25 bp, Homo sapien
acaagatggttactgttgttcatgc

SEQ ID NO: 3842765 - DNA, 25 bp, Homo sapien
tgctgaccgggtggatggcaaacca

SEQ ID NO: 3842766 - DNA, 25 bp, Homo sapien
ggtaagatgcatagcccacattgtc

SEQ ID NO: 3842767 - DNA, 25 bp, Homo sapien
cttcctttaggtgttctcagttcta

SEQ ID NO: 3842768 - DNA, 25 bp, Homo sapien
gcttcctttaggtgttctcagttct

SEQ ID NO: 3842769 - DNA, 25 bp, Homo sapien
ttcctttaggtgttctcagttctat

SEQ ID NO: 3842770 - DNA, 25 bp, Homo sapien
tcctttaggtgttctcagttctatt

SEQ ID NO: 3842771 - DNA, 25 bp, Homo sapien
tctccattcaaatctaccattttca

SEQ ID NO: 3842772 - DNA, 25 bp, Homo sapien
ctgataaggcccaagtcatctccat

SEQ ID NO: 3842773 - DNA, 25 bp, Homo sapien
gataaggcccaagtcatctccattc

SEQ ID NO: 3842774 - DNA, 25 bp, Homo sapien
tcaaatctaccattttcaaaactat

SEQ ID NO: 3842775 - DNA, 25 bp, Homo sapien
caagtaacagccctgtacttagatt

SEQ ID NO: 3842776 - DNA, 25 bp, Homo sapien
catattcatcaagtaacagccctgt

SEQ ID NO: 3842777 - DNA, 25 bp, Homo sapien
tattcatcaagtaacagccctgtac

SEQ ID NO: 3842778 - DNA, 25 bp, Homo sapien
taacagccctgtacttagattttgt

SEQ ID NO: 3842779 - DNA, 25 bp, Homo sapien
tctctgactgcggattttgaaggta

SEQ ID NO: 3842780 - DNA, 25 bp, Homo sapien
ttgaaggtaagaatacggacttctg

SEQ ID NO: 3842781 - DNA, 25 bp, Homo sapien
cctggtttcatatttgtgtgtgcta

SEQ ID NO: 3842782 - DNA, 25 bp, Homo sapien
ggacttctgttgatctgcacaccat

SEQ ID NO: 3842783 - DNA, 25 bp, Homo sapien
cctgcaggacctgaatgagtgtgag

SEQ ID NO: 3842784 - DNA, 25 bp, Homo sapien
cacggtatactggaaatatcctgca

SEQ ID NO: 3842785 - DNA, 25 bp, Homo sapien
tctgtacagggagccatatttactc

SEQ ID NO: 3842786 - DNA, 25 bp, Homo sapien
ttcaagataccagtgaccatgtgct

SEQ ID NO: 3842787 - DNA, 25 bp, Homo sapien
aggttctgccatgatgaaggcacga

SEQ ID NO: 3842788 - DNA, 25 bp, Homo sapien
catgcctatgtcgatgctgacaaac

SEQ ID NO: 3842789 - DNA, 25 bp, Homo sapien
gacaaacactgttcgattggaccca

SEQ ID NO: 3842790 - DNA, 25 bp, Homo sapien
gagcctttgtgataccatgcctatg

SEQ ID NO: 3842791 - DNA, 25 bp, Homo sapien
tctggccggatttgccatagcccat

SEQ ID NO: 3842792 - DNA, 25 bp, Homo sapien
ctgtgcattctggccggatttgcca

SEQ ID NO: 3842793 - DNA, 25 bp, Homo sapien
cattctggccggatttgccatagcc

SEQ ID NO: 3842794 - DNA, 25 bp, Homo sapien
gcattctggccggatttgccatagc

SEQ ID NO: 3842795 - DNA, 25 bp, Homo sapien
agctcgtccaacaccaatatggtag

SEQ ID NO: 3842796 - DNA, 25 bp, Homo sapien
ttgtcctgtgcagtcagctcgtcca

SEQ ID NO: 3842797 - DNA, 25 bp, Homo sapien
gtcctgtgcagtcagctcgtccaac

SEQ ID NO: 3842798 - DNA, 25 bp, Homo sapien
ctcgtccaacaccaatatggtagcc

SEQ ID NO: 3842799 - DNA, 25 bp, Homo sapien
actctggggttaaaggcactggaga

SEQ ID NO: 3842800 - DNA, 25 bp, Homo sapien
ctgggtggctggagggctttgggtg

SEQ ID NO: 3842801 - DNA, 25 bp, Homo sapien
gctggagggctttgggtggttgaaa

SEQ ID NO: 3842802 - DNA, 25 bp, Homo sapien
gtggctggagggctttgggtggttg

SEQ ID NO: 3842803 - DNA, 25 bp, Homo sapien
tgggtggctggagggctttgggtgg

SEQ ID NO: 3842804 - DNA, 25 bp, Homo sapien
cactggtgataaacaagaggctgag

SEQ ID NO: 3842805 - DNA, 25 bp, Homo sapien
tggtcccactggtgataaacaagag

SEQ ID NO: 3842806 - DNA, 25 bp, Homo sapien
tcaatggtcccactggtgataaaca

SEQ ID NO: 3842807 - DNA, 25 bp, Homo sapien
gtggttttcaatggtcccactggtg

SEQ ID NO: 3842808 - DNA, 25 bp, Homo sapien
aagttagagaaggtgcgtttggcca

SEQ ID NO: 3842809 - DNA, 25 bp, Homo sapien
tctccaagttagagaaggtgcgttt

SEQ ID NO: 3842810 - DNA, 25 bp, Homo sapien
tcaggaatgtctccaagttagagaa

SEQ ID NO: 3842811 - DNA, 25 bp, Homo sapien
aggaaaatcaggaatgtctccaagt

SEQ ID NO: 3842812 - DNA, 25 bp, Homo sapien
ggccctgtggtctcctccagacttc

SEQ ID NO: 3842813 - DNA, 25 bp, Homo sapien
ctttctcccttgcagtggggaggcc

SEQ ID NO: 3842814 - DNA, 25 bp, Homo sapien
gcctcttgactggccctgtggtctc

SEQ ID NO: 3842815 - DNA, 25 bp, Homo sapien
aggcctcttgactggccctgtggtc

SEQ ID NO: 3842816 - DNA, 25 bp, Homo sapien
gacgaacgttggtcaaagcatcggg

SEQ ID NO: 3842817 - DNA, 25 bp, Homo sapien
gaggaaaatgatagtaaagctcccc

SEQ ID NO: 3842818 - DNA, 25 bp, Homo sapien
tcgtggcttcctataacaacaatga

SEQ ID NO: 3842819 - DNA, 25 bp, Homo sapien
tcagtatccggagttactcgtggct

SEQ ID NO: 3842820 - DNA, 25 bp, Homo sapien
tcttaatcatgtgagatggacccat

SEQ ID NO: 3842821 - DNA, 25 bp, Homo sapien
catggtttggctgaacacttgcaga

SEQ ID NO: 3842822 - DNA, 25 bp, Homo sapien
gaggaagcagctacccgaatacctg

SEQ ID NO: 3842823 - DNA, 25 bp, Homo sapien
taatgcaaaccgagctgatgcagag

SEQ ID NO: 3842824 - DNA, 25 bp, Homo sapien
acttgaccttgcctcttagcagaga

SEQ ID NO: 3842825 - DNA, 25 bp, Homo sapien
cctctccatgatgtatttgcactgg

SEQ ID NO: 3842826 - DNA, 25 bp, Homo sapien
ctgaggaggacattaagagactggc

SEQ ID NO: 3842827 - DNA, 25 bp, Homo sapien
cacttttctcatctacgttgacttg

SEQ ID NO: 3842828 - DNA, 25 bp, Homo sapien
gcagaataccaagtcaacagctttg

SEQ ID NO: 3842829 - DNA, 25 bp, Homo sapien
caacagctttgatttgttcaaattg

SEQ ID NO: 3842830 - DNA, 25 bp, Homo sapien
gataagcagaataccaagtcaacag

SEQ ID NO: 3842831 - DNA, 25 bp, Homo sapien
taaggtgctgataagcagaatacca

SEQ ID NO: 3842832 - DNA, 25 bp, Homo sapien
tctaggtaagctgtaagataccagt

SEQ ID NO: 3842833 - DNA, 25 bp, Homo sapien
gataccagtatactctctggaataa

SEQ ID NO: 3842834 - DNA, 25 bp, Homo sapien
tttatgatctaggtaagctgtaaga

SEQ ID NO: 3842835 - DNA, 25 bp, Homo sapien
taagctgtaagataccagtatactc

SEQ ID NO: 3842836 - DNA, 25 bp, Homo sapien
tcaccaacaaaattgtcatgagagt

SEQ ID NO: 3842837 - DNA, 25 bp, Homo sapien
ctgctgcacgtaaaatacagaatgg

SEQ ID NO: 3842838 - DNA, 25 bp, Homo sapien
tgttctccacattggcaagtataga

SEQ ID NO: 3842839 - DNA, 25 bp, Homo sapien
tcatgagagtatggataactaattc

SEQ ID NO: 3842840 - DNA, 25 bp, Homo sapien
gaatatcggtgcaacaggtagaaag

SEQ ID NO: 3842841 - DNA, 25 bp, Homo sapien
taaaattgaactaccaaatcgacga

SEQ ID NO: 3842842 - DNA, 25 bp, Homo sapien
tttaagattgcctactgaccataca

SEQ ID NO: 3842843 - DNA, 25 bp, Homo sapien
tcacaatatgtgaacaggctctgac

SEQ ID NO: 3842844 - DNA, 25 bp, Homo sapien
gaaaataatacgctttatttccaga

SEQ ID NO: 3842845 - DNA, 25 bp, Homo sapien
aatacgctttatttccagatgtgac

SEQ ID NO: 3842846 - DNA, 25 bp, Homo sapien
cagaacttatgatataaaagcttac

SEQ ID NO: 3842847 - DNA, 25 bp, Homo sapien
aaagaccagaacttatgatataaaa

SEQ ID NO: 3842848 - DNA, 25 bp, Homo sapien
tgtaaatcccaaacttatgaacagg

SEQ ID NO: 3842849 - DNA, 25 bp, Homo sapien
tcatatacaaaggaacatggtggtt

SEQ ID NO: 3842850 - DNA, 25 bp, Homo sapien
tgaacaggaaatgtgtacagtgcat

SEQ ID NO: 3842851 - DNA, 25 bp, Homo sapien
atttatgctgctgcatcatatacaa

SEQ ID NO: 3842852 - DNA, 25 bp, Homo sapien
tctttattgttgtccaacgcaggtc

SEQ ID NO: 3842853 - DNA, 25 bp, Homo sapien
tcaataggttaagtcaaggtaacca

SEQ ID NO: 3842854 - DNA, 25 bp, Homo sapien
ccattgaaagataataggattaggg

SEQ ID NO: 3842855 - DNA, 25 bp, Homo sapien
cagtgctgaccaggtaactcaatag

SEQ ID NO: 3842856 - DNA, 25 bp, Homo sapien
ttcttagcacttcggacaatttgtc

SEQ ID NO: 3842857 - DNA, 25 bp, Homo sapien
gcctactgaggtggactactggcca

SEQ ID NO: 3842858 - DNA, 25 bp, Homo sapien
cctggccaggaggttcatctgggaa

SEQ ID NO: 3842859 - DNA, 25 bp, Homo sapien
aaggccaatggtaagatcgaggtac

SEQ ID NO: 3842860 - DNA, 25 bp, Homo sapien
tactgaaatggcctgtaccaccaca

SEQ ID NO: 3842861 - DNA, 25 bp, Homo sapien
tttcaaggacaatgaaagtgcgttc

SEQ ID NO: 3842862 - DNA, 25 bp, Homo sapien
ttcaaggacaatgaaagtgcgttcc

SEQ ID NO: 3842863 - DNA, 25 bp, Homo sapien
ggacaatgaaagtgcgttccttatt

SEQ ID NO: 3842864 - DNA, 25 bp, Homo sapien
caaggacaatgaaagtgcgttcctt

SEQ ID NO: 3842865 - DNA, 25 bp, Homo sapien
gagaagccagcaaatccagtgatac

SEQ ID NO: 3842866 - DNA, 25 bp, Homo sapien
tgctgattggccatagtgtgatacc

SEQ ID NO: 3842867 - DNA, 25 bp, Homo sapien
gtgtgataccaccagaagagtctcg

SEQ ID NO: 3842868 - DNA, 25 bp, Homo sapien
cacagtgtagtggtcatgcgctaag

SEQ ID NO: 3842869 - DNA, 25 bp, Homo sapien
ccttctcaaaggtcgaatggtgtca

SEQ ID NO: 3842870 - DNA, 25 bp, Homo sapien
ttagtgcaggcctttctaccttgga

SEQ ID NO: 3842871 - DNA, 25 bp, Homo sapien
agaaaagcatccagacgcctgggaa

SEQ ID NO: 3842872 - DNA, 25 bp, Homo sapien
gagcctaatacaaggactaagcagt

SEQ ID NO: 3842873 - DNA, 25 bp, Homo sapien
tattaaatctgagccatgtatgcgg

SEQ ID NO: 3842874 - DNA, 25 bp, Homo sapien
ccatggccttgttgaggacagggat

SEQ ID NO: 3842875 - DNA, 25 bp, Homo sapien
tagcatagtgccaagtgctgaaaaa

SEQ ID NO: 3842876 - DNA, 25 bp, Homo sapien
gtaccctcaggcatgtagcatagtg

SEQ ID NO: 3842877 - DNA, 25 bp, Homo sapien
tataactggctcataacacaccctg

SEQ ID NO: 3842878 - DNA, 25 bp, Homo sapien
aagcctccagtcttgcttcagcaga

SEQ ID NO: 3842879 - DNA, 25 bp, Homo sapien
tactacagatgacactccaggacac

SEQ ID NO: 3842880 - DNA, 25 bp, Homo sapien
gaaaatgagctttaccagaggacca

SEQ ID NO: 3842881 - DNA, 25 bp, Homo sapien
taagtgttagcatgaccgtgtggcc

SEQ ID NO: 3842882 - DNA, 25 bp, Homo sapien
catgttgtgagagccagtgatagac

SEQ ID NO: 3842883 - DNA, 25 bp, Homo sapien
cattattcttcgcagttgggcttcc

SEQ ID NO: 3842884 - DNA, 25 bp, Homo sapien
tgtggccgctgtacagatagtcccc

SEQ ID NO: 3842885 - DNA, 25 bp, Homo sapien
accaggtactgggagtgtagttaca

SEQ ID NO: 3842886 - DNA, 25 bp, Homo sapien
cattgtaatacaccgatacaggtac

SEQ ID NO: 3842887 - DNA, 25 bp, Homo sapien
ccaactatgcagaaaaatcttctgc

SEQ ID NO: 3842888 - DNA, 25 bp, Homo sapien
tacaggtacagcgtgccaactatgc

SEQ ID NO: 3842889 - DNA, 25 bp, Homo sapien
tgccaacaagaagatgtacagtaca

SEQ ID NO: 3842890 - DNA, 25 bp, Homo sapien
ttttcaaaatcacaacggtgctccc

SEQ ID NO: 3842891 - DNA, 25 bp, Homo sapien
caataaggtgacaagttagaagtgg

SEQ ID NO: 3842892 - DNA, 25 bp, Homo sapien
gcacttctgggcgttcacttcctta

SEQ ID NO: 3842893 - DNA, 25 bp, Homo sapien
ggactatcatttcagagtcttgtgt

SEQ ID NO: 3842894 - DNA, 25 bp, Homo sapien
aagtgttagagcactaggctcatta

SEQ ID NO: 3842895 - DNA, 25 bp, Homo sapien
cacacttggcaaggactatcatttc

SEQ ID NO: 3842896 - DNA, 25 bp, Homo sapien
agtcttgtgtttggtcgcgtttatc

SEQ ID NO: 3842897 - DNA, 25 bp, Homo sapien
tccagaatgctgtaactcacccagt

SEQ ID NO: 3842898 - DNA, 25 bp, Homo sapien
gagaaagcgctatttatgaaccagg

SEQ ID NO: 3842899 - DNA, 25 bp, Homo sapien
ggaacttggccctcactagatacta

SEQ ID NO: 3842900 - DNA, 25 bp, Homo sapien
aatccattctgtttagaaccgccag

SEQ ID NO: 3842901 - DNA, 25 bp, Homo sapien
tgaatcccactgccaagggcaaaaa

SEQ ID NO: 3842902 - DNA, 25 bp, Homo sapien
ctgtcttctcctagatgtgaatccc

SEQ ID NO: 3842903 - DNA, 25 bp, Homo sapien
gtcttctcctagatgtgaatcccac

SEQ ID NO: 3842904 - DNA, 25 bp, Homo sapien
aagagccactcattgttccctaaac

SEQ ID NO: 3842905 - DNA, 25 bp, Homo sapien
tagatggcacagttcatgaatcagg

SEQ ID NO: 3842906 - DNA, 25 bp, Homo sapien
gcctcaggtatctcaatggctacag

SEQ ID NO: 3842907 - DNA, 25 bp, Homo sapien
gcttgcctgggagatttagaactca

SEQ ID NO: 3842908 - DNA, 25 bp, Homo sapien
aatattcctaggtacccatacaggg

SEQ ID NO: 3842909 - DNA, 25 bp, Homo sapien
tattctaaacatgcggaatacagca

SEQ ID NO: 3842910 - DNA, 25 bp, Homo sapien
gaaagaggcagacaatacacaggta

SEQ ID NO: 3842911 - DNA, 25 bp, Homo sapien
aatggacaaacatcctggcttgtgg

SEQ ID NO: 3842912 - DNA, 25 bp, Homo sapien
gggtaaaactaagtgagagtctcac

SEQ ID NO: 3842913 - DNA, 25 bp, Homo sapien
aatctcttatgttggctgataccca

SEQ ID NO: 3842914 - DNA, 25 bp, Homo sapien
tcctgcaggattaacaaaaccccta

SEQ ID NO: 3842915 - DNA, 25 bp, Homo sapien
cccaagcaggatctgtggtcatcat

SEQ ID NO: 3842916 - DNA, 25 bp, Homo sapien
agttctaaaacttgatgccatggca

SEQ ID NO: 3842917 - DNA, 25 bp, Homo sapien
ggacaggcattattgttgctttcca

SEQ ID NO: 3842918 - DNA, 25 bp, Homo sapien
caggaatttttcctagtcagtggct

SEQ ID NO: 3842919 - DNA, 25 bp, Homo sapien
tgttttgcagtgaagtctgacacaa

SEQ ID NO: 3842920 - DNA, 25 bp, Homo sapien
gcttgaaagtccaattctaaatggg

SEQ ID NO: 3842921 - DNA, 25 bp, Homo sapien
cagggtggacgatgcttaggaagat

SEQ ID NO: 3842922 - DNA, 25 bp, Homo sapien
aggacagggtggacgatgcttagga

SEQ ID NO: 3842923 - DNA, 25 bp, Homo sapien
atggaccccagtagaaggacagggt

SEQ ID NO: 3842924 - DNA, 25 bp, Homo sapien
agagagacaggaaaccagcgatgga

SEQ ID NO: 3842925 - DNA, 25 bp, Homo sapien
tcgtaactgttaagacttactcaaa

SEQ ID NO: 3842926 - DNA, 25 bp, Homo sapien
tcaataagtaccaggaaaacgcaaa

SEQ ID NO: 3842927 - DNA, 25 bp, Homo sapien
tgtgaaagattctgattcgtaactg

SEQ ID NO: 3842928 - DNA, 25 bp, Homo sapien
ggacacacctgaggcctcattccag

SEQ ID NO: 3842929 - DNA, 25 bp, Homo sapien
ccaaattaaatgcagcccagaccaa

SEQ ID NO: 3842930 - DNA, 25 bp, Homo sapien
cagttaagaccgtccatccctggga

SEQ ID NO: 3842931 - DNA, 25 bp, Homo sapien
gcttaaactctaggactgtcaaacc

SEQ ID NO: 3842932 - DNA, 25 bp, Homo sapien
acactgatcagttaaatggctttct

SEQ ID NO: 3842933 - DNA, 25 bp, Homo sapien
catcagtgaagggacaatgtaggca

SEQ ID NO: 3842934 - DNA, 25 bp, Homo sapien
gaaggtgggaatccattcaggtcca

SEQ ID NO: 3842935 - DNA, 25 bp, Homo sapien
gcttcagatatgaaagccaccttgg

SEQ ID NO: 3842936 - DNA, 25 bp, Homo sapien
ttggatacacctggaactaagtggg

SEQ ID NO: 3842937 - DNA, 25 bp, Homo sapien
tagatgtttggagtgcaaatcccat

SEQ ID NO: 3842938 - DNA, 25 bp, Homo sapien
gagtgcaaatcccataatcattgaa

SEQ ID NO: 3842939 - DNA, 25 bp, Homo sapien
gtttggagtgcaaatcccataatca

SEQ ID NO: 3842940 - DNA, 25 bp, Homo sapien
cccataatcattgaatcttagagct

SEQ ID NO: 3842941 - DNA, 25 bp, Homo sapien
cagggtttctatcatgtccaggagc

SEQ ID NO: 3842942 - DNA, 25 bp, Homo sapien
ccattgtcagaggagactcggcaca

SEQ ID NO: 3842943 - DNA, 25 bp, Homo sapien
tactgagagcgctccagttctggca

SEQ ID NO: 3842944 - DNA, 25 bp, Homo sapien
cgttcgtggacgaccgagatcatca

SEQ ID NO: 3842945 - DNA, 25 bp, Homo sapien
ggcaggtcagcagtcactgttccga

SEQ ID NO: 3842946 - DNA, 25 bp, Homo sapien
tgcctcggctcgttcatcctgtggg

SEQ ID NO: 3842947 - DNA, 25 bp, Homo sapien
tcctgagcgcccaagtattaattca

SEQ ID NO: 3842948 - DNA, 25 bp, Homo sapien
ggcctcatgagcagagacttgtttg

SEQ ID NO: 3842949 - DNA, 25 bp, Homo sapien
tggaatattcttcctaccttatacc

SEQ ID NO: 3842950 - DNA, 25 bp, Homo sapien
aagtgggcaaagcagttagagtggc

SEQ ID NO: 3842951 - DNA, 25 bp, Homo sapien
gtgggcaaagcagttagagtggcga

SEQ ID NO: 3842952 - DNA, 25 bp, Homo sapien
aaatggtaaaatatgctgggtcaaa

SEQ ID NO: 3842953 - DNA, 25 bp, Homo sapien
atggtaaaatatgctgggtcaaatg

SEQ ID NO: 3842954 - DNA, 25 bp, Homo sapien
taatgataaaaggtacaccatagca

SEQ ID NO: 3842955 - DNA, 25 bp, Homo sapien
ataatgataaaaggtacaccatagc

SEQ ID NO: 3842956 - DNA, 25 bp, Homo sapien
tgtgataatgatgccttccggaatt

SEQ ID NO: 3842957 - DNA, 25 bp, Homo sapien
ataatgatgccttccggaattcctc

SEQ ID NO: 3842958 - DNA, 25 bp, Homo sapien
tatggtggagttctacaactgcaca

SEQ ID NO: 3842959 - DNA, 25 bp, Homo sapien
caaaatgtcgttatgccacgcatga

SEQ ID NO: 3842960 - DNA, 25 bp, Homo sapien
gatgggcttccagtcaatattcagg

SEQ ID NO: 3842961 - DNA, 25 bp, Homo sapien
tcaatctcaagggactggcatctag

SEQ ID NO: 3842962 - DNA, 25 bp, Homo sapien
ggtggctactggcattccgtggcat

SEQ ID NO: 3842963 - DNA, 25 bp, Homo sapien
gaatgatacattagtttcctgcggc

SEQ ID NO: 3842964 - DNA, 25 bp, Homo sapien
ggactctatcttgaactgcaatggg

SEQ ID NO: 3842965 - DNA, 25 bp, Homo sapien
ggtacgccatacttctcagctaatg

SEQ ID NO: 3842966 - DNA, 25 bp, Homo sapien
ttatgacagtcatagggcaatgtga

SEQ ID NO: 3842967 - DNA, 25 bp, Homo sapien
cacaggctaaggcagaatatatgga

SEQ ID NO: 3842968 - DNA, 25 bp, Homo sapien
caggaattccatctcttacttacag

SEQ ID NO: 3842969 - DNA, 25 bp, Homo sapien
gtataatatactttaagccccagga

SEQ ID NO: 3842970 - DNA, 25 bp, Homo sapien
ggttctgccacccatgactacagca

SEQ ID NO: 3842971 - DNA, 25 bp, Homo sapien
aaaagggtttgcctgagtcccatgg

SEQ ID NO: 3842972 - DNA, 25 bp, Homo sapien
tatgaaaaagtgatcgtgaacagtg

SEQ ID NO: 3842973 - DNA, 25 bp, Homo sapien
caaactttgggagcactgcctacac

SEQ ID NO: 3842974 - DNA, 25 bp, Homo sapien
tatcaacttagatgaggatagtaca

SEQ ID NO: 3842975 - DNA, 25 bp, Homo sapien
ttattactgtcatgacccactgtgc

SEQ ID NO: 3842976 - DNA, 25 bp, Homo sapien
gctgcaatagtacaaaaaactgagg

SEQ ID NO: 3842977 - DNA, 25 bp, Homo sapien
aaaactgaggcatacccttcaccca

SEQ ID NO: 3842978 - DNA, 25 bp, Homo sapien
cactgttcttttaagcgagttgtca

SEQ ID NO: 3842979 - DNA, 25 bp, Homo sapien
gtcatgttctgcgaaataatcacta

SEQ ID NO: 3842980 - DNA, 25 bp, Homo sapien
gaacaagttttgaatcaggtagact

SEQ ID NO: 3842981 - DNA, 25 bp, Homo sapien
taaaggaacctgagatctgattaca

SEQ ID NO: 3842982 - DNA, 25 bp, Homo sapien
cctcccaagccacggtaggctcaga

SEQ ID NO: 3842983 - DNA, 25 bp, Homo sapien
atacagtttgaacaattggccccct

SEQ ID NO: 3842984 - DNA, 25 bp, Homo sapien
agcctcccaagccacggtaggctca

SEQ ID NO: 3842985 - DNA, 25 bp, Homo sapien
catttaggtacagttcactatatac

SEQ ID NO: 3842986 - DNA, 25 bp, Homo sapien
gaggagccactatttacagcaagca

SEQ ID NO: 3842987 - DNA, 25 bp, Homo sapien
cagcattccttgaacaaagtgggac

SEQ ID NO: 3842988 - DNA, 25 bp, Homo sapien
tcagactaaagaaaccaggtcaagt

SEQ ID NO: 3842989 - DNA, 25 bp, Homo sapien
cacgttacactctctatgggagggc

SEQ ID NO: 3842990 - DNA, 25 bp, Homo sapien
gtcaagccttgtttaagagtcccag

SEQ ID NO: 3842991 - DNA, 25 bp, Homo sapien
tattttatgacacctgacaaagcag

SEQ ID NO: 3842992 - DNA, 25 bp, Homo sapien
gactttcaggctgttagaccctaat

SEQ ID NO: 3842993 - DNA, 25 bp, Homo sapien
tggagcacccagttggaaaccccat

SEQ ID NO: 3842994 - DNA, 25 bp, Homo sapien
ctgtgtacctataatttagctccca

SEQ ID NO: 3842995 - DNA, 25 bp, Homo sapien
tgtacgtccctgtgtacctataatt

SEQ ID NO: 3842996 - DNA, 25 bp, Homo sapien
atagtgaagtctgggatattagcgt

SEQ ID NO: 3842997 - DNA, 25 bp, Homo sapien
tgggatattagcgtacctgtcacca

SEQ ID NO: 3842998 - DNA, 25 bp, Homo sapien
taaattctgacgtttccagacaagg

SEQ ID NO: 3842999 - DNA, 25 bp, Homo sapien
cagacaaggttgttcataagctcac

SEQ ID NO: 3843000 - DNA, 25 bp, Homo sapien
taagctcacctgctcttaagaggct

SEQ ID NO: 3843001 - DNA, 25 bp, Homo sapien
aaaagccagatgctaccctaggtgc

SEQ ID NO: 3843002 - DNA, 25 bp, Homo sapien
ggccaagagtatgtgaccagcttga

SEQ ID NO: 3843003 - DNA, 25 bp, Homo sapien
tacttgggaggagcgagcattgctt

SEQ ID NO: 3843004 - DNA, 25 bp, Homo sapien
aacaatcagtgacctttccagagaa

SEQ ID NO: 3843005 - DNA, 25 bp, Homo sapien
ttttcccactgatgtagcaatccca

SEQ ID NO: 3843006 - DNA, 25 bp, Homo sapien
gatcgagtatcaactcaggttcaag

SEQ ID NO: 3843007 - DNA, 25 bp, Homo sapien
caaggacaaggctgagtatttctcc

SEQ ID NO: 3843008 - DNA, 25 bp, Homo sapien
tatgcattgcatggtgtatagagca

SEQ ID NO: 3843009 - DNA, 25 bp, Homo sapien
caatgcagatggagatagatcgagt

SEQ ID NO: 3843010 - DNA, 25 bp, Homo sapien
gatctgagccctgtaagtattttcc

SEQ ID NO: 3843011 - DNA, 25 bp, Homo sapien
tcaaaagtcccctagtgatgtcact

SEQ ID NO: 3843012 - DNA, 25 bp, Homo sapien
cctggtctgatcaggagtcacatca

SEQ ID NO: 3843013 - DNA, 25 bp, Homo sapien
tcagactcctgtcggatgtgcagct

SEQ ID NO: 3843014 - DNA, 25 bp, Homo sapien
ctcacctggccctaataagtcttaa

SEQ ID NO: 3843015 - DNA, 25 bp, Homo sapien
actgatgatatactccctttactag

SEQ ID NO: 3843016 - DNA, 25 bp, Homo sapien
tgtccccttgggcttaagagacact

SEQ ID NO: 3843017 - DNA, 25 bp, Homo sapien
tgctcccagactgaactgatgatat

SEQ ID NO: 3843018 - DNA, 25 bp, Homo sapien
caaaacctaattacagccaggcaca

SEQ ID NO: 3843019 - DNA, 25 bp, Homo sapien
taacagttactagacactctccaaa

SEQ ID NO: 3843020 - DNA, 25 bp, Homo sapien
gaagacgcctattgtttttggacca

SEQ ID NO: 3843021 - DNA, 25 bp, Homo sapien
gtctctcagcttttacactaaggtg

SEQ ID NO: 3843022 - DNA, 25 bp, Homo sapien
ccgcgccttgatcggtcccggcggt

SEQ ID NO: 3843023 - DNA, 25 bp, Homo sapien
cgtccccggaggcagtgtctcctgg

SEQ ID NO: 3843024 - DNA, 25 bp, Homo sapien
tcctggggcaccaagtttgcgcgcg

SEQ ID NO: 3843025 - DNA, 25 bp, Homo sapien
gggtcaactgcgagctagacgccca

SEQ ID NO: 3843026 - DNA, 25 bp, Homo sapien
ttggcttcctataagctaccagctt

SEQ ID NO: 3843027 - DNA, 25 bp, Homo sapien
tggcttcctataagctaccagcttc

SEQ ID NO: 3843028 - DNA, 25 bp, Homo sapien
ggcttcctataagctaccagcttct

SEQ ID NO: 3843029 - DNA, 25 bp, Homo sapien
tcttggcttcctataagctaccagc

SEQ ID NO: 3843030 - DNA, 25 bp, Homo sapien
gaacactggcggtatcactggaata

SEQ ID NO: 3843031 - DNA, 25 bp, Homo sapien
aacagtcatgggaaaacctggctcc

SEQ ID NO: 3843032 - DNA, 25 bp, Homo sapien
gctacccctgggtggaagaagactg

SEQ ID NO: 3843033 - DNA, 25 bp, Homo sapien
caatctggacgtatgaaccctggct

SEQ ID NO: 3843034 - DNA, 25 bp, Homo sapien
ccccatctcccctagtgctcccagg

SEQ ID NO: 3843035 - DNA, 25 bp, Homo sapien
ttttacgattgtagataagggaaga

SEQ ID NO: 3843036 - DNA, 25 bp, Homo sapien
cttttacgattgtagataagggaag

SEQ ID NO: 3843037 - DNA, 25 bp, Homo sapien
ttccctgtatttctcaaacaggcca

SEQ ID NO: 3843038 - DNA, 25 bp, Homo sapien
cctgtatttctcaaacaggccaaca

SEQ ID NO: 3843039 - DNA, 25 bp, Homo sapien
tctcaaacaggccaacacttaggga

SEQ ID NO: 3843040 - DNA, 25 bp, Homo sapien
tgtatttctcaaacaggccaacact

SEQ ID NO: 3843041 - DNA, 25 bp, Homo sapien
gatatggtctctcacaggtcaaaag

SEQ ID NO: 3843042 - DNA, 25 bp, Homo sapien
catgtgcagcaaaggagactaggca

SEQ ID NO: 3843043 - DNA, 25 bp, Homo sapien
tgatagaatcacactcgcacacgtg

SEQ ID NO: 3843044 - DNA, 25 bp, Homo sapien
tctgggatggcacacctgactgaaa

SEQ ID NO: 3843045 - DNA, 25 bp, Homo sapien
ttccccacttagatataaacaaatc

SEQ ID NO: 3843046 - DNA, 25 bp, Homo sapien
gaagagatgatctattcatactaga

SEQ ID NO: 3843047 - DNA, 25 bp, Homo sapien
gagtttccccacttagatataaaca

SEQ ID NO: 3843048 - DNA, 25 bp, Homo sapien
aatcacagactcctaaaaacaaagc

SEQ ID NO: 3843049 - DNA, 25 bp, Homo sapien
tgcaactgctaaggtgagtcgaccc

SEQ ID NO: 3843050 - DNA, 25 bp, Homo sapien
ggctcagtccgtcattcaccagaat

SEQ ID NO: 3843051 - DNA, 25 bp, Homo sapien
gagtcgaccctaattgctgctagca

SEQ ID NO: 3843052 - DNA, 25 bp, Homo sapien
gcttggtgtacgaaggatcccatca

SEQ ID NO: 3843053 - DNA, 25 bp, Homo sapien
cagtgaggttgaccacatctatctc

SEQ ID NO: 3843054 - DNA, 25 bp, Homo sapien
tattataaacctcagtgtattcatc

SEQ ID NO: 3843055 - DNA, 25 bp, Homo sapien
tgtaatcacatgagcttgggtaagt

SEQ ID NO: 3843056 - DNA, 25 bp, Homo sapien
tccggccggctctattctgtaatca

SEQ ID NO: 3843057 - DNA, 25 bp, Homo sapien
cagacatccaccaaaggtcacagga

SEQ ID NO: 3843058 - DNA, 25 bp, Homo sapien
acaggctgtgccttacaaagagagc

SEQ ID NO: 3843059 - DNA, 25 bp, Homo sapien
aatgggtgcccctgatcttgatgat

SEQ ID NO: 3843060 - DNA, 25 bp, Homo sapien
aatcctaaaggatcacggtgacata

SEQ ID NO: 3843061 - DNA, 25 bp, Homo sapien
aggcaggttctcgtcttctatttca

SEQ ID NO: 3843062 - DNA, 25 bp, Homo sapien
caggtacgcttgctgaggcaggttc

SEQ ID NO: 3843063 - DNA, 25 bp, Homo sapien
tctatttcatgtttcccaaccagac

SEQ ID NO: 3843064 - DNA, 25 bp, Homo sapien
tttcccaaccagacactttcgggca

SEQ ID NO: 3843065 - DNA, 25 bp, Homo sapien
tataattgcagcactagcctaggca

SEQ ID NO: 3843066 - DNA, 25 bp, Homo sapien
tatttatataaaagggcaccatctc

SEQ ID NO: 3843067 - DNA, 25 bp, Homo sapien
tatgggtcacttgacagaaactggc

SEQ ID NO: 3843068 - DNA, 25 bp, Homo sapien
ctagctttcgatgcttatgggtcac

SEQ ID NO: 3843069 - DNA, 25 bp, Homo sapien
tttcttcatcagtcttctttccaat

SEQ ID NO: 3843070 - DNA, 25 bp, Homo sapien
ctgaatcatgctgttatttttcttc

SEQ ID NO: 3843071 - DNA, 25 bp, Homo sapien
tttttcttcatcagtcttctttcca

SEQ ID NO: 3843072 - DNA, 25 bp, Homo sapien
tatttttcttcatcagtcttctttc

SEQ ID NO: 3843073 - DNA, 25 bp, Homo sapien
aaggttgcaagtctcttgctgcagt

SEQ ID NO: 3843074 - DNA, 25 bp, Homo sapien
tcacaagggaggactttccactaca

SEQ ID NO: 3843075 - DNA, 25 bp, Homo sapien
cagcagctggtatcactggtagctc

SEQ ID NO: 3843076 - DNA, 25 bp, Homo sapien
gctgcagtcaccctcaaagcttctt

SEQ ID NO: 3843077 - DNA, 25 bp, Homo sapien
tccatactggtttccatgatgattg

SEQ ID NO: 3843078 - DNA, 25 bp, Homo sapien
ttcccatcacctggcttagaaagaa

SEQ ID NO: 3843079 - DNA, 25 bp, Homo sapien
taggaattaggtaattaccaccaca

SEQ ID NO: 3843080 - DNA, 25 bp, Homo sapien
agactagactactacccatcctcag

SEQ ID NO: 3843081 - DNA, 25 bp, Homo sapien
tcaaacagacttatttatgacattt

SEQ ID NO: 3843082 - DNA, 25 bp, Homo sapien
cagacttatttatgacattttcaac

SEQ ID NO: 3843083 - DNA, 25 bp, Homo sapien
caaacagacttatttatgacatttt

SEQ ID NO: 3843084 - DNA, 25 bp, Homo sapien
aacagacttatttatgacattttca

SEQ ID NO: 3843085 - DNA, 25 bp, Homo sapien
cccacactggtagttcagcaaaagc

SEQ ID NO: 3843086 - DNA, 25 bp, Homo sapien
cactggtagttcagcaaaagctttc

SEQ ID NO: 3843087 - DNA, 25 bp, Homo sapien
cacatggtccacatgacattgagct

SEQ ID NO: 3843088 - DNA, 25 bp, Homo sapien
cacacccacactggtagttcagcaa

SEQ ID NO: 3843089 - DNA, 25 bp, Homo sapien
aaataaaacagcagacactccatac

SEQ ID NO: 3843090 - DNA, 25 bp, Homo sapien
tacatgataagcatgaccaatgcag

SEQ ID NO: 3843091 - DNA, 25 bp, Homo sapien
cctttatactgaatccagtgtgtta

SEQ ID NO: 3843092 - DNA, 25 bp, Homo sapien
cagacagatattacagttccttgct

SEQ ID NO: 3843093 - DNA, 25 bp, Homo sapien
caatgcagacagatattacagttcc

SEQ ID NO: 3843094 - DNA, 25 bp, Homo sapien
ctaaatttgagtagatgaggcacat

SEQ ID NO: 3843095 - DNA, 25 bp, Homo sapien
cacgctgtcttgcataaacttcaaa

SEQ ID NO: 3843096 - DNA, 25 bp, Homo sapien
catacagcttccttaccagacagaa

SEQ ID NO: 3843097 - DNA, 25 bp, Homo sapien
cgaggcacacagcactagtaaatgc

SEQ ID NO: 3843098 - DNA, 25 bp, Homo sapien
tcaagctggcagtagtacctagcac

SEQ ID NO: 3843099 - DNA, 25 bp, Homo sapien
gctggaagacatgacaaacaagctt

SEQ ID NO: 3843100 - DNA, 25 bp, Homo sapien
taaataccagatcctggccgggcgc

SEQ ID NO: 3843101 - DNA, 25 bp, Homo sapien
cccacaatagggtagccttgacaga

SEQ ID NO: 3843102 - DNA, 25 bp, Homo sapien
tgtccatatggagctgaacagaacc

SEQ ID NO: 3843103 - DNA, 25 bp, Homo sapien
tctgttgtagatttcctgggtatct

SEQ ID NO: 3843104 - DNA, 25 bp, Homo sapien
aaaaaacaagcttgatctgttgtag

SEQ ID NO: 3843105 - DNA, 25 bp, Homo sapien
aagaatctatgggaaagtctcagaa

SEQ ID NO: 3843106 - DNA, 25 bp, Homo sapien
aatctatgggaaagtctcagaaatc

SEQ ID NO: 3843107 - DNA, 25 bp, Homo sapien
aaaaagccaattgtctatgctccag

SEQ ID NO: 3843108 - DNA, 25 bp, Homo sapien
cataatgcgtttgagattcagccaa

SEQ ID NO: 3843109 - DNA, 25 bp, Homo sapien
cccagtagaggcagagtggataaaa

SEQ ID NO: 3843110 - DNA, 25 bp, Homo sapien
tatgctccagctggtatgtacaaac

SEQ ID NO: 3843111 - DNA, 25 bp, Homo sapien
gtattttattacacaccctctgctg

SEQ ID NO: 3843112 - DNA, 25 bp, Homo sapien
aaagtccacactccttcagtcgctg

SEQ ID NO: 3843113 - DNA, 25 bp, Homo sapien
ttcaaaaagtccacactccttcagt

SEQ ID NO: 3843114 - DNA, 25 bp, Homo sapien
agtccacactccttcagtcgctgaa

SEQ ID NO: 3843115 - DNA, 25 bp, Homo sapien
tcccaaacagctaggccttctggtg

SEQ ID NO: 3843116 - DNA, 25 bp, Homo sapien
aacagctaggccttctggtgcatgc

SEQ ID NO: 3843117 - DNA, 25 bp, Homo sapien
ttaaccattcactcactgtccattc

SEQ ID NO: 3843118 - DNA, 25 bp, Homo sapien
tccaggtactttttacccagattca

SEQ ID NO: 3843119 - DNA, 25 bp, Homo sapien
agcgtcccaatgtcacgcagctggg

SEQ ID NO: 3843120 - DNA, 25 bp, Homo sapien
cataataggtacttccaggcaaaag

SEQ ID NO: 3843121 - DNA, 25 bp, Homo sapien
tgaagaaagactacacagcgtccca

SEQ ID NO: 3843122 - DNA, 25 bp, Homo sapien
atcagaatccttcagaagagggtgc

SEQ ID NO: 3843123 - DNA, 25 bp, Homo sapien
tcaatgtctaaatccccactgcaca

SEQ ID NO: 3843124 - DNA, 25 bp, Homo sapien
caatgtctaaatccccactgcacat

SEQ ID NO: 3843125 - DNA, 25 bp, Homo sapien
atcaatgtctaaatccccactgcac

SEQ ID NO: 3843126 - DNA, 25 bp, Homo sapien
tatcaatgtctaaatccccactgca

SEQ ID NO: 3843127 - DNA, 25 bp, Homo sapien
gaaccagaggtaagagctagtcact

SEQ ID NO: 3843128 - DNA, 25 bp, Homo sapien
tgtcactcaaactagggcttggctc

SEQ ID NO: 3843129 - DNA, 25 bp, Homo sapien
tggtacataatcacccacaagctgg

SEQ ID NO: 3843130 - DNA, 25 bp, Homo sapien
caaaagtcttcttgaatccccacag

SEQ ID NO: 3843131 - DNA, 25 bp, Homo sapien
cccagagatatgtcccttaggttcc

SEQ ID NO: 3843132 - DNA, 25 bp, Homo sapien
taaccagcatgcaagtggtcaagcc

SEQ ID NO: 3843133 - DNA, 25 bp, Homo sapien
gtcaccatccgtgtggagtccgcaa

SEQ ID NO: 3843134 - DNA, 25 bp, Homo sapien
taggttccttggcatgtctccacgg

SEQ ID NO: 3843135 - DNA, 25 bp, Homo sapien
cagggaaccattatccatcaggagc

SEQ ID NO: 3843136 - DNA, 25 bp, Homo sapien
aatatgcccatgctgtttgacacag

SEQ ID NO: 3843137 - DNA, 25 bp, Homo sapien
aatatgacatcctctgctccggtta

SEQ ID NO: 3843138 - DNA, 25 bp, Homo sapien
ccaatcgttcaacaacagggaagcg

SEQ ID NO: 3843139 - DNA, 25 bp, Homo sapien
cagtcatattctacctagttccaaa

SEQ ID NO: 3843140 - DNA, 25 bp, Homo sapien
ctagttccaaaatacatctggattg

SEQ ID NO: 3843141 - DNA, 25 bp, Homo sapien
tacctagttccaaaatacatctgga

SEQ ID NO: 3843142 - DNA, 25 bp, Homo sapien
aaaatacatctggattggagtcaac

SEQ ID NO: 3843143 - DNA, 25 bp, Homo sapien
agactggaagcttccccatttctgc

SEQ ID NO: 3843144 - DNA, 25 bp, Homo sapien
tgccataaaaagtgaacaggttact

SEQ ID NO: 3843145 - DNA, 25 bp, Homo sapien
catttgaaggcaccatatgaccttt

SEQ ID NO: 3843146 - DNA, 25 bp, Homo sapien
aatttcatgcctgaaatatcccgga

SEQ ID NO: 3843147 - DNA, 25 bp, Homo sapien
cactctgcagcatctagtgcctgtg

SEQ ID NO: 3843148 - DNA, 25 bp, Homo sapien
gcctgtggcagtacaagatggacct

SEQ ID NO: 3843149 - DNA, 25 bp, Homo sapien
gatggacctctgagtcctcgtggtc

SEQ ID NO: 3843150 - DNA, 25 bp, Homo sapien
tctgagtcctcgtggtcggccccgg

SEQ ID NO: 3843151 - DNA, 25 bp, Homo sapien
gatatttacatatcattgcctacct

SEQ ID NO: 3843152 - DNA, 25 bp, Homo sapien
tctccagccccatattgtaagtcat

SEQ ID NO: 3843153 - DNA, 25 bp, Homo sapien
tatcattgcctacctttctttctct

SEQ ID NO: 3843154 - DNA, 25 bp, Homo sapien
ttaaaagggctacgttcacactgga

SEQ ID NO: 3843155 - DNA, 25 bp, Homo sapien
cacccagtgtgtgcccgtgacgatc

SEQ ID NO: 3843156 - DNA, 25 bp, Homo sapien
gtgacgatcaggtgctcccactcag

SEQ ID NO: 3843157 - DNA, 25 bp, Homo sapien
gttagggggcaacctcatcagggat

SEQ ID NO: 3843158 - DNA, 25 bp, Homo sapien
ggcaacctcatcagggatgctgaga

SEQ ID NO: 3843159 - DNA, 25 bp, Homo sapien
gaagtgaagccagagaagtggtaac

SEQ ID NO: 3843160 - DNA, 25 bp, Homo sapien
aaaacagatgctttctctatttgcc

SEQ ID NO: 3843161 - DNA, 25 bp, Homo sapien
aaagtatgaggtatgtttgctgaca

SEQ ID NO: 3843162 - DNA, 25 bp, Homo sapien
tactggaaggctatgggttattaaa

SEQ ID NO: 3843163 - DNA, 25 bp, Homo sapien
tgagctatgtccactacagcaccaa

SEQ ID NO: 3843164 - DNA, 25 bp, Homo sapien
agctgttttactcccagagccctag

SEQ ID NO: 3843165 - DNA, 25 bp, Homo sapien
gctatggcccaagcataaatacatt

SEQ ID NO: 3843166 - DNA, 25 bp, Homo sapien
tctcgactgtggtggtggtaataca

SEQ ID NO: 3843167 - DNA, 25 bp, Homo sapien
tcttcctttccctctggcatcactt

SEQ ID NO: 3843168 - DNA, 25 bp, Homo sapien
ctcttcctttccctctggcatcact

SEQ ID NO: 3843169 - DNA, 25 bp, Homo sapien
ctcagcggcatctgccttgcctctt

SEQ ID NO: 3843170 - DNA, 25 bp, Homo sapien
tcctttccctctggcatcacttccc

SEQ ID NO: 3843171 - DNA, 25 bp, Homo sapien
taaagggctgctactgcacagagct

SEQ ID NO: 3843172 - DNA, 25 bp, Homo sapien
tgggcaagcttccatagcaatcagc

SEQ ID NO: 3843173 - DNA, 25 bp, Homo sapien
tcatagagtaataacaggccaacgc

SEQ ID NO: 3843174 - DNA, 25 bp, Homo sapien
cccagtggtgaagttacagctatta

SEQ ID NO: 3843175 - DNA, 25 bp, Homo sapien
atgtgctcctcccaaatacgggagt

SEQ ID NO: 3843176 - DNA, 25 bp, Homo sapien
tacataggcaagatataagaaatgc

SEQ ID NO: 3843177 - DNA, 25 bp, Homo sapien
ccaatacataggcaagatataagaa

SEQ ID NO: 3843178 - DNA, 25 bp, Homo sapien
aagagaatatgcaatgagggaaact

SEQ ID NO: 3843179 - DNA, 25 bp, Homo sapien
ctggtccagcatgaggcacatgact

SEQ ID NO: 3843180 - DNA, 25 bp, Homo sapien
ccactggtccagcatgaggcacatg

SEQ ID NO: 3843181 - DNA, 25 bp, Homo sapien
ccaataggaataggccaatatacct

SEQ ID NO: 3843182 - DNA, 25 bp, Homo sapien
tgaagcacatgatctggctatccaa

SEQ ID NO: 3843183 - DNA, 25 bp, Homo sapien
ctatgctgagaataagccccatgtg

SEQ ID NO: 3843184 - DNA, 25 bp, Homo sapien
actagaagagctgacaggggatgcc

SEQ ID NO: 3843185 - DNA, 25 bp, Homo sapien
aatgcgctacctgcataactagaag

SEQ ID NO: 3843186 - DNA, 25 bp, Homo sapien
tggttggtgcacacggaaatgcgct

SEQ ID NO: 3843187 - DNA, 25 bp, Homo sapien
tctgagctacccgtgattccagaca

SEQ ID NO: 3843188 - DNA, 25 bp, Homo sapien
gacacaactccttctgaatgccagt

SEQ ID NO: 3843189 - DNA, 25 bp, Homo sapien
gagctacccgtgattccagacacaa

SEQ ID NO: 3843190 - DNA, 25 bp, Homo sapien
ctccttctgaatgccagtatctttt

SEQ ID NO: 3843191 - DNA, 25 bp, Homo sapien
taggcaggaactcattgcacgttct

SEQ ID NO: 3843192 - DNA, 25 bp, Homo sapien
tcataatatctgcaacttctacatg

SEQ ID NO: 3843193 - DNA, 25 bp, Homo sapien
tgcacgttctcttaactctcttcag

SEQ ID NO: 3843194 - DNA, 25 bp, Homo sapien
aataactgttaaagctaaggtgtag

SEQ ID NO: 3843195 - DNA, 25 bp, Homo sapien
tcaaatgatggctgtcttctttctc

SEQ ID NO: 3843196 - DNA, 25 bp, Homo sapien
ctttcaaatgatggctgtcttcttt

SEQ ID NO: 3843197 - DNA, 25 bp, Homo sapien
ttcaaatgatggctgtcttctttct

SEQ ID NO: 3843198 - DNA, 25 bp, Homo sapien
tttcaaatgatggctgtcttctttc

SEQ ID NO: 3843199 - DNA, 25 bp, Homo sapien
cccacgggcccattcagggatcgta

SEQ ID NO: 3843200 - DNA, 25 bp, Homo sapien
agggatcgtacatgctgtcgtcacg

SEQ ID NO: 3843201 - DNA, 25 bp, Homo sapien
gaatgactaaatatgcccacgggcc

SEQ ID NO: 3843202 - DNA, 25 bp, Homo sapien
aatgaatgactaaatatgcccacgg

SEQ ID NO: 3843203 - DNA, 25 bp, Homo sapien
aagaataagcaaagcaacatgcgtg

SEQ ID NO: 3843204 - DNA, 25 bp, Homo sapien
agcaacatgcgtgttatcaccaaga

SEQ ID NO: 3843205 - DNA, 25 bp, Homo sapien
taagcaaagcaacatgcgtgttatc

SEQ ID NO: 3843206 - DNA, 25 bp, Homo sapien
ttatcaccaagaatttttactctta

SEQ ID NO: 3843207 - DNA, 25 bp, Homo sapien
gagccttacagtgtagttaccattt

SEQ ID NO: 3843208 - DNA, 25 bp, Homo sapien
aaagagccttacagtgtagttacca

SEQ ID NO: 3843209 - DNA, 25 bp, Homo sapien
gaacacataaggtctactgtcttag

SEQ ID NO: 3843210 - DNA, 25 bp, Homo sapien
ttctaaaagagccttacagtgtagt

SEQ ID NO: 3843211 - DNA, 25 bp, Homo sapien
gaaggaattcagttatgcagtcaca

SEQ ID NO: 3843212 - DNA, 25 bp, Homo sapien
ggaagaaacaatggcagtagataat

SEQ ID NO: 3843213 - DNA, 25 bp, Homo sapien
aaaatcatttatcccgacaaggtag

SEQ ID NO: 3843214 - DNA, 25 bp, Homo sapien
taaaagagactcatatgtcatggga

SEQ ID NO: 3843215 - DNA, 25 bp, Homo sapien
cagtgataaggcaccctctaataaa

SEQ ID NO: 3843216 - DNA, 25 bp, Homo sapien
tgataaggcaccctctaataaaact

SEQ ID NO: 3843217 - DNA, 25 bp, Homo sapien
atgtatggggtacatctgcaatttt

SEQ ID NO: 3843218 - DNA, 25 bp, Homo sapien
gtatggggtacatctgcaattttgt

SEQ ID NO: 3843219 - DNA, 25 bp, Homo sapien
ttggtgaacatctaatatttataga

SEQ ID NO: 3843220 - DNA, 25 bp, Homo sapien
cccatctggctaaaaggctagtgca

SEQ ID NO: 3843221 - DNA, 25 bp, Homo sapien
gatttcaggggacgctactcagtgc

SEQ ID NO: 3843222 - DNA, 25 bp, Homo sapien
gaaaacccatctggctaaaaggcta

SEQ ID NO: 3843223 - DNA, 25 bp, Homo sapien
taaaaggctagtgcagagcagcctt

SEQ ID NO: 3843224 - DNA, 25 bp, Homo sapien
tactatggacttctcaagcagagca

SEQ ID NO: 3843225 - DNA, 25 bp, Homo sapien
catagtagggcccaaccagtacctt

SEQ ID NO: 3843226 - DNA, 25 bp, Homo sapien
tcttgccttggtagactaagacctg

SEQ ID NO: 3843227 - DNA, 25 bp, Homo sapien
gagcaatctcctaaaacaggtgcct

SEQ ID NO: 3843228 - DNA, 25 bp, Homo sapien
gacaggctctgggataagatcaggt

SEQ ID NO: 3843229 - DNA, 25 bp, Homo sapien
tgcagtccacgtggtgaaaatctcg

SEQ ID NO: 3843230 - DNA, 25 bp, Homo sapien
aaaatctcgacaacacacggccaga

SEQ ID NO: 3843231 - DNA, 25 bp, Homo sapien
ggaggccatctacaaaggcttccac

SEQ ID NO: 3843232 - DNA, 25 bp, Homo sapien
gcctgacttgggctgaaggccgtgg

SEQ ID NO: 3843233 - DNA, 25 bp, Homo sapien
tgggtcctctatacagactgtttct

SEQ ID NO: 3843234 - DNA, 25 bp, Homo sapien
tgcctctgtctcagatgaccaggac

SEQ ID NO: 3843235 - DNA, 25 bp, Homo sapien
tctccagcatcccaagcatctctgc

SEQ ID NO: 3843236 - DNA, 25 bp, Homo sapien
tctgttggcctcagacacactggca

SEQ ID NO: 3843237 - DNA, 25 bp, Homo sapien
gccaagcttagctgaggatcctcca

SEQ ID NO: 3843238 - DNA, 25 bp, Homo sapien
ggtgggtaccacttcagctagccct

SEQ ID NO: 3843239 - DNA, 25 bp, Homo sapien
catctgtgactattgggaactccct

SEQ ID NO: 3843240 - DNA, 25 bp, Homo sapien
gatacacgctgaaatctgagagcca

SEQ ID NO: 3843241 - DNA, 25 bp, Homo sapien
cagcatgacagtatccaggaacaca

SEQ ID NO: 3843242 - DNA, 25 bp, Homo sapien
tttcatgaggcggaaggcacttcca

SEQ ID NO: 3843243 - DNA, 25 bp, Homo sapien
aacatctgaggtcatgggaatgccc

SEQ ID NO: 3843244 - DNA, 25 bp, Homo sapien
ggctccactgtctttcagtatttac

SEQ ID NO: 3843245 - DNA, 25 bp, Homo sapien
catccaggaatgacagagaatgcac

SEQ ID NO: 3843246 - DNA, 25 bp, Homo sapien
agtctgcaacctgagcgcccactga

SEQ ID NO: 3843247 - DNA, 25 bp, Homo sapien
tgagcgcccactgaatgcctgccga

SEQ ID NO: 3843248 - DNA, 25 bp, Homo sapien
ggtcccacagcttctacacgatgag

SEQ ID NO: 3843249 - DNA, 25 bp, Homo sapien
acgatgaggctgagatccaaaccca

SEQ ID NO: 3843250 - DNA, 25 bp, Homo sapien
gttgtggttaccatgccaggcattc

SEQ ID NO: 3843251 - DNA, 25 bp, Homo sapien
gttatgacacctaccagagagttgg

SEQ ID NO: 3843252 - DNA, 25 bp, Homo sapien
ccactgtcatgggattcaatgctgg

SEQ ID NO: 3843253 - DNA, 25 bp, Homo sapien
caaaactaggcagaaacatgggctt

SEQ ID NO: 3843254 - DNA, 25 bp, Homo sapien
tgtttgggcacaatatccactgtca

SEQ ID NO: 3843255 - DNA, 25 bp, Homo sapien
catgggcttgcaaatgtagtcttag

SEQ ID NO: 3843256 - DNA, 25 bp, Homo sapien
ttaggggaggtattccaccaacata

SEQ ID NO: 3843257 - DNA, 25 bp, Homo sapien
accatacccagacagtttatgctat

SEQ ID NO: 3843258 - DNA, 25 bp, Homo sapien
tcaacctccaggctcgaacaagcct

SEQ ID NO: 3843259 - DNA, 25 bp, Homo sapien
ccagcattaggggaggtattccacc

SEQ ID NO: 3843260 - DNA, 25 bp, Homo sapien
taagtacatacccttagagcagcgg

SEQ ID NO: 3843261 - DNA, 25 bp, Homo sapien
cactttacagccaccaaacattggt

SEQ ID NO: 3843262 - DNA, 25 bp, Homo sapien
tatgtttgtacaccattactcagcc

SEQ ID NO: 3843263 - DNA, 25 bp, Homo sapien
tgcactgatgtggaacagaaagcag

SEQ ID NO: 3843264 - DNA, 25 bp, Homo sapien
gatgcctgtgtgcaaacaatccaga

SEQ ID NO: 3843265 - DNA, 25 bp, Homo sapien
gactgggagaacagcaaagcattcc

SEQ ID NO: 3843266 - DNA, 25 bp, Homo sapien
tcctaaagaccagggcattgatgcc

SEQ ID NO: 3843267 - DNA, 25 bp, Homo sapien
tgggctgatccaaaataaggtcctc

SEQ ID NO: 3843268 - DNA, 25 bp, Homo sapien
tacttaaaactgcatggcggcagca

SEQ ID NO: 3843269 - DNA, 25 bp, Homo sapien
ggcttcccttggagcactgaccaga

SEQ ID NO: 3843270 - DNA, 25 bp, Homo sapien
tttaagaggcgcagtaaggaaactc

SEQ ID NO: 3843271 - DNA, 25 bp, Homo sapien
gctgaatcaccaaacatccctgggc

SEQ ID NO: 3843272 - DNA, 25 bp, Homo sapien
agctaaaatagtcgacaggccccag

SEQ ID NO: 3843273 - DNA, 25 bp, Homo sapien
aaggtccaggaagataaatgtcaag

SEQ ID NO: 3843274 - DNA, 25 bp, Homo sapien
gcaaaataacctgtccaaacagctt

SEQ ID NO: 3843275 - DNA, 25 bp, Homo sapien
catccagggagccaactagaaacat

SEQ ID NO: 3843276 - DNA, 25 bp, Homo sapien
tcacttggtttcgtaagcgtgtacc

SEQ ID NO: 3843277 - DNA, 25 bp, Homo sapien
cttggtttcgtaagcgtgtaccgct

SEQ ID NO: 3843278 - DNA, 25 bp, Homo sapien
ggtttcgtaagcgtgtaccgctgaa

SEQ ID NO: 3843279 - DNA, 25 bp, Homo sapien
tttcgtaagcgtgtaccgctgaagt

SEQ ID NO: 3843280 - DNA, 25 bp, Homo sapien
tttgaaggtgaaaagaaacatctga

SEQ ID NO: 3843281 - DNA, 25 bp, Homo sapien
ctgtactgtttgaaggtgaaaagaa

SEQ ID NO: 3843282 - DNA, 25 bp, Homo sapien
actgtttgaaggtgaaaagaaacat

SEQ ID NO: 3843283 - DNA, 25 bp, Homo sapien
gtttgaaggtgaaaagaaacatctg

SEQ ID NO: 3843284 - DNA, 25 bp, Homo sapien
tacttcgcggcaccaaagaggaaag

SEQ ID NO: 3843285 - DNA, 25 bp, Homo sapien
ccgttagctggactagggcactcta

SEQ ID NO: 3843286 - DNA, 25 bp, Homo sapien
cgctccaggctgaatccgttagctg

SEQ ID NO: 3843287 - DNA, 25 bp, Homo sapien
gccatgacaacccttatcccgattt

SEQ ID NO: 3843288 - DNA, 25 bp, Homo sapien
gaaaagcggcgtcctggagagactg

SEQ ID NO: 3843289 - DNA, 25 bp, Homo sapien
agttctgggctgcgccgattcccct

SEQ ID NO: 3843290 - DNA, 25 bp, Homo sapien
ctgtcacggaaaagcggcgtcctgg

SEQ ID NO: 3843291 - DNA, 25 bp, Homo sapien
ccagttctgggctgcgccgattccc

SEQ ID NO: 3843292 - DNA, 25 bp, Homo sapien
tctggaccgaaggtaccaactgtca

SEQ ID NO: 3843293 - DNA, 25 bp, Homo sapien
gatcccgaaatagtgggcgcctggc

SEQ ID NO: 3843294 - DNA, 25 bp, Homo sapien
gtcacaccgccacctaggctgtggg

SEQ ID NO: 3843295 - DNA, 25 bp, Homo sapien
ctggccggctgcgatctggaccgaa

SEQ ID NO: 3843296 - DNA, 25 bp, Homo sapien
tccccgctgtgaccacccacgggag

SEQ ID NO: 3843297 - DNA, 25 bp, Homo sapien
tgcccgccaggtacgcgcgcggcac

SEQ ID NO: 3843298 - DNA, 25 bp, Homo sapien
cagctctggaggactgcccgccagg

SEQ ID NO: 3843299 - DNA, 25 bp, Homo sapien
gcgggctgcgctcacgccccctcgc

SEQ ID NO: 3843300 - DNA, 25 bp, Homo sapien
ggagtcacggcagccgccggaattc

SEQ ID NO: 3843301 - DNA, 25 bp, Homo sapien
agccgccggaattccgctcgcggag

SEQ ID NO: 3843302 - DNA, 25 bp, Homo sapien
ggctccgcaccccaatcgcgctctc

SEQ ID NO: 3843303 - DNA, 25 bp, Homo sapien
ccgccgcggaatgaaatccggggca

SEQ ID NO: 3843304 - DNA, 25 bp, Homo sapien
tgccccgctggtgcgaacgctttcg

SEQ ID NO: 3843305 - DNA, 25 bp, Homo sapien
tggtgcgaacgctttcgacttgcca

SEQ ID NO: 3843306 - DNA, 25 bp, Homo sapien
aacgctttcgacttgccaccgcgag

SEQ ID NO: 3843307 - DNA, 25 bp, Homo sapien
gccggtccttctcactcccgacctg

SEQ ID NO: 3843308 - DNA, 25 bp, Homo sapien
cacgtgactgtccgcggcgctccgg

SEQ ID NO: 3843309 - DNA, 25 bp, Homo sapien
acgtgactgtccgcggcgctccggg

SEQ ID NO: 3843310 - DNA, 25 bp, Homo sapien
tgatgtggtctacagcagtggtgcc

SEQ ID NO: 3843311 - DNA, 25 bp, Homo sapien
caaaaacctgaacggtggtcttcag

SEQ ID NO: 3843312 - DNA, 25 bp, Homo sapien
ttgatgtggtctacagcagtggtgc

SEQ ID NO: 3843313 - DNA, 25 bp, Homo sapien
tcaaaaacctgaacggtggtcttca

SEQ ID NO: 3843314 - DNA, 25 bp, Homo sapien
tcagagctgcagcaaagtttctgct

SEQ ID NO: 3843315 - DNA, 25 bp, Homo sapien
gcttgtaatgcagattcttcctcct

SEQ ID NO: 3843316 - DNA, 25 bp, Homo sapien
ctgaatgggctgcttgtaatgcaga

SEQ ID NO: 3843317 - DNA, 25 bp, Homo sapien
tctgctgcccagaaactgaatgggc

SEQ ID NO: 3843318 - DNA, 25 bp, Homo sapien
gcacttttacttaattgcagtatct

SEQ ID NO: 3843319 - DNA, 25 bp, Homo sapien
aaactgcacttttacttaattgcag

SEQ ID NO: 3843320 - DNA, 25 bp, Homo sapien
gagctgccaacgttttggatttgac

SEQ ID NO: 3843321 - DNA, 25 bp, Homo sapien
cgtaggccttcatcgccagtttgaa

SEQ ID NO: 3843322 - DNA, 25 bp, Homo sapien
agattcaacgttcttgtctccttca

SEQ ID NO: 3843323 - DNA, 25 bp, Homo sapien
tatcatgaacattagtccaagtctc

SEQ ID NO: 3843324 - DNA, 25 bp, Homo sapien
tcaagtttcgtgatattccatgcag

SEQ ID NO: 3843325 - DNA, 25 bp, Homo sapien
accagcatagtattggactcaagtt

SEQ ID NO: 3843326 - DNA, 25 bp, Homo sapien
ttcagaaaaagacactaatgcagca

SEQ ID NO: 3843327 - DNA, 25 bp, Homo sapien
aattcttgtagctgatatttctctt

SEQ ID NO: 3843328 - DNA, 25 bp, Homo sapien
ctagcagataagatttattgacaaa

SEQ ID NO: 3843329 - DNA, 25 bp, Homo sapien
aaaaagacactaatgcagcatgatt

SEQ ID NO: 3843330 - DNA, 25 bp, Homo sapien
agctcggcggccaggtgcttttgtt

SEQ ID NO: 3843331 - DNA, 25 bp, Homo sapien
tcaaaatctgttcaactgcctcatc

SEQ ID NO: 3843332 - DNA, 25 bp, Homo sapien
cttttgttttcgttctgctgcaggg

SEQ ID NO: 3843333 - DNA, 25 bp, Homo sapien
tcagctagataatgatcaggatcaa

SEQ ID NO: 3843334 - DNA, 25 bp, Homo sapien
ccatagtggcatgaggattcaaagc

SEQ ID NO: 3843335 - DNA, 25 bp, Homo sapien
agtggcatgaggattcaaagcactt

SEQ ID NO: 3843336 - DNA, 25 bp, Homo sapien
cccatagtggcatgaggattcaaag

SEQ ID NO: 3843337 - DNA, 25 bp, Homo sapien
aacccatagtggcatgaggattcaa

SEQ ID NO: 3843338 - DNA, 25 bp, Homo sapien
ggaatttcagaatcacctattgctt

SEQ ID NO: 3843339 - DNA, 25 bp, Homo sapien
caggaatttcagaatcacctattgc

SEQ ID NO: 3843340 - DNA, 25 bp, Homo sapien
gaatttcagaatcacctattgcttc

SEQ ID NO: 3843341 - DNA, 25 bp, Homo sapien
aatttcagaatcacctattgcttcc

SEQ ID NO: 3843342 - DNA, 25 bp, Homo sapien
cggaggccggggcatagggcacgcg

SEQ ID NO: 3843343 - DNA, 25 bp, Homo sapien
ggccggggcatagggcacgcggatg

SEQ ID NO: 3843344 - DNA, 25 bp, Homo sapien
aactcggaggccggggcatagggca

SEQ ID NO: 3843345 - DNA, 25 bp, Homo sapien
tgaactcggaggccggggcataggg

SEQ ID NO: 3843346 - DNA, 25 bp, Homo sapien
tagtggcaaactccttagaactcat

SEQ ID NO: 3843347 - DNA, 25 bp, Homo sapien
gaaggacatagaggagaatcagaca

SEQ ID NO: 3843348 - DNA, 25 bp, Homo sapien
tccaggtgtggtcctcagaagagga

SEQ ID NO: 3843349 - DNA, 25 bp, Homo sapien
aatatcatgtgacctgggaacttgc

SEQ ID NO: 3843350 - DNA, 25 bp, Homo sapien
gagcattggagaacttcatagggaa

SEQ ID NO: 3843351 - DNA, 25 bp, Homo sapien
agagcattggagaacttcataggga

SEQ ID NO: 3843352 - DNA, 25 bp, Homo sapien
gcattggagaacttcatagggaaac

SEQ ID NO: 3843353 - DNA, 25 bp, Homo sapien
aagagcattggagaacttcataggg

SEQ ID NO: 3843354 - DNA, 25 bp, Homo sapien
gggcctctttgccatgtctctgaaa

SEQ ID NO: 3843355 - DNA, 25 bp, Homo sapien
cacactttaggatgaacagttgacc

SEQ ID NO: 3843356 - DNA, 25 bp, Homo sapien
gaatacagccattcctaatgctcca

SEQ ID NO: 3843357 - DNA, 25 bp, Homo sapien
gaaaacatcttgtatgaatacagcc

SEQ ID NO: 3843358 - DNA, 25 bp, Homo sapien
ccagcataagaggagattggaagcc

SEQ ID NO: 3843359 - DNA, 25 bp, Homo sapien
tccggtgaccatctactcttggcat

SEQ ID NO: 3843360 - DNA, 25 bp, Homo sapien
caaaaacatccggtgaccatctact

SEQ ID NO: 3843361 - DNA, 25 bp, Homo sapien
gacatcatccaacttggagatgggc

SEQ ID NO: 3843362 - DNA, 25 bp, Homo sapien
gatatctctgtctatctaggtagat

SEQ ID NO: 3843363 - DNA, 25 bp, Homo sapien
gatagacagatataggctgaggtta

SEQ ID NO: 3843364 - DNA, 25 bp, Homo sapien
ctatagatatctctgtctatctagg

SEQ ID NO: 3843365 - DNA, 25 bp, Homo sapien
caaaatttaccatagctatctatag

SEQ ID NO: 3843366 - DNA, 25 bp, Homo sapien
aaatagtgcttcagtacaatgagga

SEQ ID NO: 3843367 - DNA, 25 bp, Homo sapien
gcattatatttggtggcaactgaaa

SEQ ID NO: 3843368 - DNA, 25 bp, Homo sapien
gacattatggaaaaggtgcaagtat

SEQ ID NO: 3843369 - DNA, 25 bp, Homo sapien
gagaaccacacaatatatttagctg

SEQ ID NO: 3843370 - DNA, 25 bp, Homo sapien
gacagcgtctttactgccctcaagg

SEQ ID NO: 3843371 - DNA, 25 bp, Homo sapien
caggtacggtgtctcacgccattaa

SEQ ID NO: 3843372 - DNA, 25 bp, Homo sapien
tcctagcaggcatgtggaacccaag

SEQ ID NO: 3843373 - DNA, 25 bp, Homo sapien
ccttgctgcttaggctcctgaatga

SEQ ID NO: 3843374 - DNA, 25 bp, Homo sapien
ctttgaggccaagcttaagctggag

SEQ ID NO: 3843375 - DNA, 25 bp, Homo sapien
ctgcagctttgaggccaagcttaag

SEQ ID NO: 3843376 - DNA, 25 bp, Homo sapien
ggccaagcttaagctggagtcactg

SEQ ID NO: 3843377 - DNA, 25 bp, Homo sapien
gaggccaagcttaagctggagtcac

SEQ ID NO: 3843378 - DNA, 25 bp, Homo sapien
tctactacccctcggtgaaggagag

SEQ ID NO: 3843379 - DNA, 25 bp, Homo sapien
gtgtgacaggccgagtgcttgcccc

SEQ ID NO: 3843380 - DNA, 25 bp, Homo sapien
atccacaactacatggaggtctact

SEQ ID NO: 3843381 - DNA, 25 bp, Homo sapien
acaggccgagtgcttgccccagctg

SEQ ID NO: 3843382 - DNA, 25 bp, Homo sapien
agaccacgtggtggacatgtaggcc

SEQ ID NO: 3843383 - DNA, 25 bp, Homo sapien
acgtggtggacatgtaggccctcac

SEQ ID NO: 3843384 - DNA, 25 bp, Homo sapien
catgtaggccctcacctagttcctg

SEQ ID NO: 3843385 - DNA, 25 bp, Homo sapien
ggtggacatgtaggccctcacctag

SEQ ID NO: 3843386 - DNA, 25 bp, Homo sapien
gtgagtttgccgtcttcctcctcca

SEQ ID NO: 3843387 - DNA, 25 bp, Homo sapien
ttccactacagcaagctgggtgagc

SEQ ID NO: 3843388 - DNA, 25 bp, Homo sapien
caggacagctgctacggggacggcg

SEQ ID NO: 3843389 - DNA, 25 bp, Homo sapien
agatcatcagcaactacacggaggt

SEQ ID NO: 3843390 - DNA, 25 bp, Homo sapien
tcccccacatgcaggaggaggaggc

SEQ ID NO: 3843391 - DNA, 25 bp, Homo sapien
ttcccccacatgcaggaggaggagg

SEQ ID NO: 3843392 - DNA, 25 bp, Homo sapien
ctacttcccccacatgcaggaggag

SEQ ID NO: 3843393 - DNA, 25 bp, Homo sapien
acttcccccacatgcaggaggagga

SEQ ID NO: 3843394 - DNA, 25 bp, Homo sapien
gtgcgcccagtgcatcaacgacaag

SEQ ID NO: 3843395 - DNA, 25 bp, Homo sapien
ccagtgcatcaacgacaagctccag

SEQ ID NO: 3843396 - DNA, 25 bp, Homo sapien
gtgcatcaacgacaagctccagggc

SEQ ID NO: 3843397 - DNA, 25 bp, Homo sapien
cggtgcgcccagtgcatcaacgaca

SEQ ID NO: 3843398 - DNA, 25 bp, Homo sapien
aaggcaagccccccacgcaacaact

SEQ ID NO: 3843399 - DNA, 25 bp, Homo sapien
gacgcgggcagcgaaggcaagcccc

SEQ ID NO: 3843400 - DNA, 25 bp, Homo sapien
aggcaagccccccacgcaacaactg

SEQ ID NO: 3843401 - DNA, 25 bp, Homo sapien
ctggacgcgggcagcgaaggcaagc

SEQ ID NO: 3843402 - DNA, 25 bp, Homo sapien
ggacagcttcaagggcgagcggtgc

SEQ ID NO: 3843403 - DNA, 25 bp, Homo sapien
atctcagtaatcagggtggaggaca

SEQ ID NO: 3843404 - DNA, 25 bp, Homo sapien
agcggtgccgctccaagaagatctg

SEQ ID NO: 3843405 - DNA, 25 bp, Homo sapien
cagcctgcccgatgacatctcagta

SEQ ID NO: 3843406 - DNA, 25 bp, Homo sapien
acaaattggagatccccagcccaac

SEQ ID NO: 3843407 - DNA, 25 bp, Homo sapien
ggacaaattggagatccccagccca

SEQ ID NO: 3843408 - DNA, 25 bp, Homo sapien
gacaaattggagatccccagcccaa

SEQ ID NO: 3843409 - DNA, 25 bp, Homo sapien
tggacaaattggagatccccagccc

SEQ ID NO: 3843410 - DNA, 25 bp, Homo sapien
cagtatctaggagagcagcctgtcc

SEQ ID NO: 3843411 - DNA, 25 bp, Homo sapien
tgcacaagcagtacagctgcagcga

SEQ ID NO: 3843412 - DNA, 25 bp, Homo sapien
gagcagcctgtccatcggcaacttc

SEQ ID NO: 3843413 - DNA, 25 bp, Homo sapien
tgctcagcaacgagcatcttcgcag

SEQ ID NO: 3843414 - DNA, 25 bp, Homo sapien
gtggtccttcaccgagcttcccagt

SEQ ID NO: 3843415 - DNA, 25 bp, Homo sapien
tggtggtccttcaccgagcttccca

SEQ ID NO: 3843416 - DNA, 25 bp, Homo sapien
ttcaccgagcttcccagtgcgctct

SEQ ID NO: 3843417 - DNA, 25 bp, Homo sapien
ggtggtccttcaccgagcttcccag

SEQ ID NO: 3843418 - DNA, 25 bp, Homo sapien
aacttccggctgcagtacaaccatt

SEQ ID NO: 3843419 - DNA, 25 bp, Homo sapien
gaaaaaatgcggcatcctcaagaaa

SEQ ID NO: 3843420 - DNA, 25 bp, Homo sapien
aacaggaaaaaatgcggcatcctca

SEQ ID NO: 3843421 - DNA, 25 bp, Homo sapien
cttccggctgcagtacaaccatttc

SEQ ID NO: 3843422 - DNA, 25 bp, Homo sapien
gagtcaagaggcctcttggatggca

SEQ ID NO: 3843423 - DNA, 25 bp, Homo sapien
gattctggaagagtcaagaggcctc

SEQ ID NO: 3843424 - DNA, 25 bp, Homo sapien
ttgtgaccatgtgcaagttttccct

SEQ ID NO: 3843425 - DNA, 25 bp, Homo sapien
aagaggcctcttggatggcagtaga

SEQ ID NO: 3843426 - DNA, 25 bp, Homo sapien
ccagggcgggtccatgtctgggcac

SEQ ID NO: 3843427 - DNA, 25 bp, Homo sapien
ccatggaaacatgtccgcagtgtct

SEQ ID NO: 3843428 - DNA, 25 bp, Homo sapien
catggttgcttgtcggagattctgg

SEQ ID NO: 3843429 - DNA, 25 bp, Homo sapien
gaagaatgtagaaagccatggaaac

SEQ ID NO: 3843430 - DNA, 25 bp, Homo sapien
ggagagagtacattccctcatataa

SEQ ID NO: 3843431 - DNA, 25 bp, Homo sapien
ggcatgcattcgttttcaggtctat

SEQ ID NO: 3843432 - DNA, 25 bp, Homo sapien
ggagatgttcagtcagcaattagat

SEQ ID NO: 3843433 - DNA, 25 bp, Homo sapien
gactatatcccatggaagtaaacag

SEQ ID NO: 3843434 - DNA, 25 bp, Homo sapien
ctttatgtagccatccatgccccag

SEQ ID NO: 3843435 - DNA, 25 bp, Homo sapien
tttatgtagccatccatgccccagt

SEQ ID NO: 3843436 - DNA, 25 bp, Homo sapien
ttaagggcttgtggtatgtaaatac

SEQ ID NO: 3843437 - DNA, 25 bp, Homo sapien
actataagtctttctggcaatttat

SEQ ID NO: 3843438 - DNA, 25 bp, Homo sapien
caactataagtctttctggcaattt

SEQ ID NO: 3843439 - DNA, 25 bp, Homo sapien
tcaactataagtctttctggcaatt

SEQ ID NO: 3843440 - DNA, 25 bp, Homo sapien
tttcaactataagtctttctggcaa

SEQ ID NO: 3843441 - DNA, 25 bp, Homo sapien
ttattgttatctgagtctgctcctt

SEQ ID NO: 3843442 - DNA, 25 bp, Homo sapien
attgttatctgagtctgctccttca

SEQ ID NO: 3843443 - DNA, 25 bp, Homo sapien
tattgttatctgagtctgctccttc

SEQ ID NO: 3843444 - DNA, 25 bp, Homo sapien
tttattgttatctgagtctgctcct

SEQ ID NO: 3843445 - DNA, 25 bp, Homo sapien
ggccccacagttgccactgccttcg

SEQ ID NO: 3843446 - DNA, 25 bp, Homo sapien
cccacagttgccactgccttcgcca

SEQ ID NO: 3843447 - DNA, 25 bp, Homo sapien
gaatacttgggattgtacctacagg

SEQ ID NO: 3843448 - DNA, 25 bp, Homo sapien
agaatacttgggattgtacctacag

SEQ ID NO: 3843449 - DNA, 25 bp, Homo sapien
gcccttccagagcaccagttgcact

SEQ ID NO: 3843450 - DNA, 25 bp, Homo sapien
cgttctcctgaacataccggaaggg

SEQ ID NO: 3843451 - DNA, 25 bp, Homo sapien
gctcattcagtgagataagtttgcc

SEQ ID NO: 3843452 - DNA, 25 bp, Homo sapien
ccttcatatggataggatgcctcag

SEQ ID NO: 3843453 - DNA, 25 bp, Homo sapien
tctggtgttgaaaaccattcatcac

SEQ ID NO: 3843454 - DNA, 25 bp, Homo sapien
gatctcaagaagcaggcgttcctgg

SEQ ID NO: 3843455 - DNA, 25 bp, Homo sapien
tgatccttcataggagtcatgtagc

SEQ ID NO: 3843456 - DNA, 25 bp, Homo sapien
ttcataggagtcatgtagcctttct

SEQ ID NO: 3843457 - DNA, 25 bp, Homo sapien
tgtattcctgattgtgctgctcaat

SEQ ID NO: 3843458 - DNA, 25 bp, Homo sapien
ctgtattcctgattgtgctgctcaa

SEQ ID NO: 3843459 - DNA, 25 bp, Homo sapien
gtctccaaaggcgttcatggccatt

SEQ ID NO: 3843460 - DNA, 25 bp, Homo sapien
tccaaaggcgttcatggccattgtg

SEQ ID NO: 3843461 - DNA, 25 bp, Homo sapien
gtggagatatgtacattctctgagc

SEQ ID NO: 3843462 - DNA, 25 bp, Homo sapien
atgtggagatatgtacattctctga

SEQ ID NO: 3843463 - DNA, 25 bp, Homo sapien
tggagatatgtacattctctgagca

SEQ ID NO: 3843464 - DNA, 25 bp, Homo sapien
tgtggagatatgtacattctctgag

SEQ ID NO: 3843465 - DNA, 25 bp, Homo sapien
cagaagtccgtgtgcttacattcag

SEQ ID NO: 3843466 - DNA, 25 bp, Homo sapien
ttcagaagtccgtgtgcttacattc

SEQ ID NO: 3843467 - DNA, 25 bp, Homo sapien
gaagtccgtgtgcttacattcagag

SEQ ID NO: 3843468 - DNA, 25 bp, Homo sapien
agaagtccgtgtgcttacattcaga

SEQ ID NO: 3843469 - DNA, 25 bp, Homo sapien
agtgacaggccacagatcccaaagt

SEQ ID NO: 3843470 - DNA, 25 bp, Homo sapien
gacaggccacagatcccaaagtatg

SEQ ID NO: 3843471 - DNA, 25 bp, Homo sapien
tgacaggccacagatcccaaagtat

SEQ ID NO: 3843472 - DNA, 25 bp, Homo sapien
acaggccacagatcccaaagtatgc

SEQ ID NO: 3843473 - DNA, 25 bp, Homo sapien
tctcaaagttagtgtattggaaaat

SEQ ID NO: 3843474 - DNA, 25 bp, Homo sapien
atttttctcaaagttagtgtattgg

SEQ ID NO: 3843475 - DNA, 25 bp, Homo sapien
tctagtttacccatcagacatagtg

SEQ ID NO: 3843476 - DNA, 25 bp, Homo sapien
tgtctacaggcttattaggtcttcc

SEQ ID NO: 3843477 - DNA, 25 bp, Homo sapien
gagattcaagtccagctccctgtgc

SEQ ID NO: 3843478 - DNA, 25 bp, Homo sapien
ctccatgagattcaagtccagctcc

SEQ ID NO: 3843479 - DNA, 25 bp, Homo sapien
gccagtccattgtcataggacatac

SEQ ID NO: 3843480 - DNA, 25 bp, Homo sapien
ccctgtgccagtccattgtcatagg

SEQ ID NO: 3843481 - DNA, 25 bp, Homo sapien
ttatttactcggcttaagtcgtctc

SEQ ID NO: 3843482 - DNA, 25 bp, Homo sapien
ttgagcatatagcaaatacaggaag

SEQ ID NO: 3843483 - DNA, 25 bp, Homo sapien
cggcttaagtcgtctccaagaataa

SEQ ID NO: 3843484 - DNA, 25 bp, Homo sapien
ttactcggcttaagtcgtctccaag

SEQ ID NO: 3843485 - DNA, 25 bp, Homo sapien
ctatcataaggatgagctgttccag

SEQ ID NO: 3843486 - DNA, 25 bp, Homo sapien
ctttgatggattgaaaggaataccc

SEQ ID NO: 3843487 - DNA, 25 bp, Homo sapien
aaaggaatacccaggtatgaagagc

SEQ ID NO: 3843488 - DNA, 25 bp, Homo sapien
ggattgaaaggaatacccaggtatg

SEQ ID NO: 3843489 - DNA, 25 bp, Homo sapien
tgatggattgaaaggaatacccagg

SEQ ID NO: 3843490 - DNA, 25 bp, Homo sapien
ctcggaaaccacagcgatttagatt

SEQ ID NO: 3843491 - DNA, 25 bp, Homo sapien
tcggaaaccacagcgatttagattt

SEQ ID NO: 3843492 - DNA, 25 bp, Homo sapien
gcaaatcctcaaggcagcgctggaa

SEQ ID NO: 3843493 - DNA, 25 bp, Homo sapien
tgtctcgagtgaagaatagcgctcc

SEQ ID NO: 3843494 - DNA, 25 bp, Homo sapien
tccggcaaatcctcaaggcagcgct

SEQ ID NO: 3843495 - DNA, 25 bp, Homo sapien
agaatagcgctccggcaaatcctca

SEQ ID NO: 3843496 - DNA, 25 bp, Homo sapien
gtgcagatcccgcaagaaatccagc

SEQ ID NO: 3843497 - DNA, 25 bp, Homo sapien
tcaccgctccctgctagcctctcat

SEQ ID NO: 3843498 - DNA, 25 bp, Homo sapien
agatcccgcaagaaatccagccgct

SEQ ID NO: 3843499 - DNA, 25 bp, Homo sapien
gctagcctctcatcctcagtggctt

SEQ ID NO: 3843500 - DNA, 25 bp, Homo sapien
taagctcgctcactagagagggaaa

SEQ ID NO: 3843501 - DNA, 25 bp, Homo sapien
gacatctccatgaagtaagaggcat

SEQ ID NO: 3843502 - DNA, 25 bp, Homo sapien
gtagcctctcttgtttagcacccag

SEQ ID NO: 3843503 - DNA, 25 bp, Homo sapien
tcacagataagggaagcatgcacca

SEQ ID NO: 3843504 - DNA, 25 bp, Homo sapien
taaagagaaggaagtcgactcccag

SEQ ID NO: 3843505 - DNA, 25 bp, Homo sapien
tttgcaccgcaccaactaatccgcg

SEQ ID NO: 3843506 - DNA, 25 bp, Homo sapien
gtcgagccatagtccatttgtcccg

SEQ ID NO: 3843507 - DNA, 25 bp, Homo sapien
acacagctgttgactagtcttccag

SEQ ID NO: 3843508 - DNA, 25 bp, Homo sapien
gaggcgtgcccgggagtcgttggga

SEQ ID NO: 3843509 - DNA, 25 bp, Homo sapien
ggcgtgcccgggagtcgttgggaga

SEQ ID NO: 3843510 - DNA, 25 bp, Homo sapien
tatttcacctttaacggaggcgtgc

SEQ ID NO: 3843511 - DNA, 25 bp, Homo sapien
cgtgcccgggagtcgttgggagagg

SEQ ID NO: 3843512 - DNA, 25 bp, Homo sapien
cgacgtggtcccagcaggcgactcg

SEQ ID NO: 3843513 - DNA, 25 bp, Homo sapien
tctgttgaccccaaattgtgctttt

SEQ ID NO: 3843514 - DNA, 25 bp, Homo sapien
tgtccgggagacgtcgtttcctggc

SEQ ID NO: 3843515 - DNA, 25 bp, Homo sapien
ggcgactcggacctgagccgaatct

SEQ ID NO: 3843516 - DNA, 25 bp, Homo sapien
tatcctagaggctgtttccttgggc

SEQ ID NO: 3843517 - DNA, 25 bp, Homo sapien
taatcagggattccaagtgttgtga

SEQ ID NO: 3843518 - DNA, 25 bp, Homo sapien
tcttttttctgatgacgccacagtc

SEQ ID NO: 3843519 - DNA, 25 bp, Homo sapien
ttccttgggccttaactgctggagg

SEQ ID NO: 3843520 - DNA, 25 bp, Homo sapien
cagtttccagtaccacttagtgtca

SEQ ID NO: 3843521 - DNA, 25 bp, Homo sapien
gatttatctgtagtctgtgtgccca

SEQ ID NO: 3843522 - DNA, 25 bp, Homo sapien
tattttcccaacaagtgaatggtgt

SEQ ID NO: 3843523 - DNA, 25 bp, Homo sapien
tcgggctgtattgcagtcagaaaca

SEQ ID NO: 3843524 - DNA, 25 bp, Homo sapien
tatagggaataacaatatcgggctg

SEQ ID NO: 3843525 - DNA, 25 bp, Homo sapien
tatagaaggacagcagacctaagcc

SEQ ID NO: 3843526 - DNA, 25 bp, Homo sapien
gaccaagcaagtgtccccaagagct

SEQ ID NO: 3843527 - DNA, 25 bp, Homo sapien
cagtcagaaagaagtagctaggctc

SEQ ID NO: 3843528 - DNA, 25 bp, Homo sapien
tctaagtggcaaaacctatcaggtg

SEQ ID NO: 3843529 - DNA, 25 bp, Homo sapien
ttaaacttatggtagcaggacttgc

SEQ ID NO: 3843530 - DNA, 25 bp, Homo sapien
catgataccagattggaggatatcc

SEQ ID NO: 3843531 - DNA, 25 bp, Homo sapien
tgacatgaggtagctttttagcagc

SEQ ID NO: 3843532 - DNA, 25 bp, Homo sapien
tatggcatggtagacacattaacac

SEQ ID NO: 3843533 - DNA, 25 bp, Homo sapien
ggaatttggtaaataacacccatgc

SEQ ID NO: 3843534 - DNA, 25 bp, Homo sapien
tccgtgttttgtagcaccgttgccc

SEQ ID NO: 3843535 - DNA, 25 bp, Homo sapien
caagtatggcaagaaagtagtgcct

SEQ ID NO: 3843536 - DNA, 25 bp, Homo sapien
gcttcaagacaaaaggactcaggta

SEQ ID NO: 3843537 - DNA, 25 bp, Homo sapien
caggctgaagagaggttgaaaccac

SEQ ID NO: 3843538 - DNA, 25 bp, Homo sapien
gatctgtgacaaatcgactggatgg

SEQ ID NO: 3843539 - DNA, 25 bp, Homo sapien
tatttctaggaagtccccatgggct

SEQ ID NO: 3843540 - DNA, 25 bp, Homo sapien
gaaaaggtcatttcatgctggcatg

SEQ ID NO: 3843541 - DNA, 25 bp, Homo sapien
taagctatacagtctctggaaaggc

SEQ ID NO: 3843542 - DNA, 25 bp, Homo sapien
tcatgattctataattggtataagc

SEQ ID NO: 3843543 - DNA, 25 bp, Homo sapien
tatttatgatcattggggaccgagt

SEQ ID NO: 3843544 - DNA, 25 bp, Homo sapien
gaataacgttcttacttcatgattc

SEQ ID NO: 3843545 - DNA, 25 bp, Homo sapien
agtcttgtccaagggttaccgcttg

SEQ ID NO: 3843546 - DNA, 25 bp, Homo sapien
caaaagttgggtagacctcataggt

SEQ ID NO: 3843547 - DNA, 25 bp, Homo sapien
tgcagttgcattagggacagcatat

SEQ ID NO: 3843548 - DNA, 25 bp, Homo sapien
ttaccgcttgcttgagctgggctgc

SEQ ID NO: 3843549 - DNA, 25 bp, Homo sapien
gatgctggttctccgcctcagagaa

SEQ ID NO: 3843550 - DNA, 25 bp, Homo sapien
tagcattgtgtctagtggatgagca

SEQ ID NO: 3843551 - DNA, 25 bp, Homo sapien
tttatgtgcagtagaagcctgccca

SEQ ID NO: 3843552 - DNA, 25 bp, Homo sapien
taatctatgcgctttcatgttagca

SEQ ID NO: 3843553 - DNA, 25 bp, Homo sapien
aagccagaattgaggtcactttcag

SEQ ID NO: 3843554 - DNA, 25 bp, Homo sapien
gccagaattgaggtcactttcagat

SEQ ID NO: 3843555 - DNA, 25 bp, Homo sapien
caaagccagaattgaggtcactttc

SEQ ID NO: 3843556 - DNA, 25 bp, Homo sapien
aacaaagccagaattgaggtcactt

SEQ ID NO: 3843557 - DNA, 25 bp, Homo sapien
ctgcagggtgtattcggctgcatac

SEQ ID NO: 3843558 - DNA, 25 bp, Homo sapien
agtagccatggtgccatcgcctcca

SEQ ID NO: 3843559 - DNA, 25 bp, Homo sapien
tcgcctccatcagtggggatgccca

SEQ ID NO: 3843560 - DNA, 25 bp, Homo sapien
agcagtagccatggtgccatcgcct

SEQ ID NO: 3843561 - DNA, 25 bp, Homo sapien
tcagctttggaggtgtgaaagggtg

SEQ ID NO: 3843562 - DNA, 25 bp, Homo sapien
ttcatccacaaaggcactcagcttt

SEQ ID NO: 3843563 - DNA, 25 bp, Homo sapien
cagctttggaggtgtgaaagggtgg

SEQ ID NO: 3843564 - DNA, 25 bp, Homo sapien
gtaaggaatttggagaagttacgca

SEQ ID NO: 3843565 - DNA, 25 bp, Homo sapien
taaggaatttggagaagttacgcac

SEQ ID NO: 3843566 - DNA, 25 bp, Homo sapien
ttttgtacaagaatagctgtctttg

SEQ ID NO: 3843567 - DNA, 25 bp, Homo sapien
gcagagtgcagctggtacactggct

SEQ ID NO: 3843568 - DNA, 25 bp, Homo sapien
ctttggtcttgtccaatagcagagt

SEQ ID NO: 3843569 - DNA, 25 bp, Homo sapien
tctggctggctagagcaggaatagt

SEQ ID NO: 3843570 - DNA, 25 bp, Homo sapien
ttttcagagttcaagctagtatctg

SEQ ID NO: 3843571 - DNA, 25 bp, Homo sapien
aaatgccacatgatttaatgactca

SEQ ID NO: 3843572 - DNA, 25 bp, Homo sapien
gttgctccaacactgtgtgtataga

SEQ ID NO: 3843573 - DNA, 25 bp, Homo sapien
ctagtatctgaagacataaaatgcc

SEQ ID NO: 3843574 - DNA, 25 bp, Homo sapien
tactaaatcttatgtgaacaaatga

SEQ ID NO: 3843575 - DNA, 25 bp, Homo sapien
catggtgcataagagaagtttacta

SEQ ID NO: 3843576 - DNA, 25 bp, Homo sapien
tttcattatatgtttacgtgtcagt

SEQ ID NO: 3843577 - DNA, 25 bp, Homo sapien
cagcacctagcgcactacatggtgc

SEQ ID NO: 3843578 - DNA, 25 bp, Homo sapien
ctccatcccaggtaaaatgtcatag

SEQ ID NO: 3843579 - DNA, 25 bp, Homo sapien
tttgacctggtatcctcgacccagg

SEQ ID NO: 3843580 - DNA, 25 bp, Homo sapien
caggtaaaatgtcatagagtttgtc

SEQ ID NO: 3843581 - DNA, 25 bp, Homo sapien
gtgtatgccaaatagccacggccgc

SEQ ID NO: 3843582 - DNA, 25 bp, Homo sapien
aatatagtaatgtccttaattattt

SEQ ID NO: 3843583 - DNA, 25 bp, Homo sapien
ccatgtattaaagaaatatagtaat

SEQ ID NO: 3843584 - DNA, 25 bp, Homo sapien
aaatatagtaatgtccttaattatt

SEQ ID NO: 3843585 - DNA, 25 bp, Homo sapien
tctccatgtattaaagaaatatagt

SEQ ID NO: 3843586 - DNA, 25 bp, Homo sapien
atcttgggattactctaaagcaaga

SEQ ID NO: 3843587 - DNA, 25 bp, Homo sapien
aatcttgggattactctaaagcaag

SEQ ID NO: 3843588 - DNA, 25 bp, Homo sapien
tcttgggattactctaaagcaagat

SEQ ID NO: 3843589 - DNA, 25 bp, Homo sapien
cttgggattactctaaagcaagatc

SEQ ID NO: 3843590 - DNA, 25 bp, Homo sapien
gggctcggataatggctctgttgct

SEQ ID NO: 3843591 - DNA, 25 bp, Homo sapien
gggatcataaacttggcccaaagag

SEQ ID NO: 3843592 - DNA, 25 bp, Homo sapien
ggtatacctaacataactgtccttg

SEQ ID NO: 3843593 - DNA, 25 bp, Homo sapien
cactggttttgctagggtgacttca

SEQ ID NO: 3843594 - DNA, 25 bp, Homo sapien
ccttttgatctgctgaacagttggg

SEQ ID NO: 3843595 - DNA, 25 bp, Homo sapien
cttttgatctgctgaacagttggga

SEQ ID NO: 3843596 - DNA, 25 bp, Homo sapien
gggaggctgttgcattgcctgccac

SEQ ID NO: 3843597 - DNA, 25 bp, Homo sapien
ttttgatctgctgaacagttgggag

SEQ ID NO: 3843598 - DNA, 25 bp, Homo sapien
tgcacaaaagcatagtctcgaattt

SEQ ID NO: 3843599 - DNA, 25 bp, Homo sapien
catagcctcaactgcatcttctcgg

SEQ ID NO: 3843600 - DNA, 25 bp, Homo sapien
tctcggttactgaagtgcacaaaag

SEQ ID NO: 3843601 - DNA, 25 bp, Homo sapien
aaaagcatagtctcgaattttcttc

SEQ ID NO: 3843602 - DNA, 25 bp, Homo sapien
tcccatgacttgttttagtaactga

SEQ ID NO: 3843603 - DNA, 25 bp, Homo sapien
cacctaggctcactggtctgttatc

SEQ ID NO: 3843604 - DNA, 25 bp, Homo sapien
cagtctttgcttggttcatatttca

SEQ ID NO: 3843605 - DNA, 25 bp, Homo sapien
gtaactgagaaggaagacgttggcc

SEQ ID NO: 3843606 - DNA, 25 bp, Homo sapien
cactttgcctggaaacttaatagaa

SEQ ID NO: 3843607 - DNA, 25 bp, Homo sapien
ggttatcagagggtcatggttcccg

SEQ ID NO: 3843608 - DNA, 25 bp, Homo sapien
tcatggttcccgaagtgtggtgccc

SEQ ID NO: 3843609 - DNA, 25 bp, Homo sapien
ccgaagtgtggtgccctgaccagca

SEQ ID NO: 3843610 - DNA, 25 bp, Homo sapien
tttgcagagggccacgaagaacaag

SEQ ID NO: 3843611 - DNA, 25 bp, Homo sapien
agactgtgccctgaaatcgctggac

SEQ ID NO: 3843612 - DNA, 25 bp, Homo sapien
tatagccctgagagttgtgccacca

SEQ ID NO: 3843613 - DNA, 25 bp, Homo sapien
gacttttccctcttaatgcagcaga

SEQ ID NO: 3843614 - DNA, 25 bp, Homo sapien
tatgcctacaactgcatcaacattc

SEQ ID NO: 3843615 - DNA, 25 bp, Homo sapien
tgttcctatgcctacaactgcatca

SEQ ID NO: 3843616 - DNA, 25 bp, Homo sapien
tcctatgcctacaactgcatcaaca

SEQ ID NO: 3843617 - DNA, 25 bp, Homo sapien
ataatgttcctatgcctacaactgc

SEQ ID NO: 3843618 - DNA, 25 bp, Homo sapien
catctcttcagaggtagacagcata

SEQ ID NO: 3843619 - DNA, 25 bp, Homo sapien
agaggtagacagcataagatttctt

SEQ ID NO: 3843620 - DNA, 25 bp, Homo sapien
cttcagaggtagacagcataagatt

SEQ ID NO: 3843621 - DNA, 25 bp, Homo sapien
tctcttcagaggtagacagcataag

SEQ ID NO: 3843622 - DNA, 25 bp, Homo sapien
ccatgtccccataactgaattcttc

SEQ ID NO: 3843623 - DNA, 25 bp, Homo sapien
aataccatgtccccataactgaatt

SEQ ID NO: 3843624 - DNA, 25 bp, Homo sapien
ctgcaataccatgtccccataactg

SEQ ID NO: 3843625 - DNA, 25 bp, Homo sapien
tgcaataccatgtccccataactga

SEQ ID NO: 3843626 - DNA, 25 bp, Homo sapien
ccttgaggtcttgaatgagcaagaa

SEQ ID NO: 3843627 - DNA, 25 bp, Homo sapien
cattaaaactggtgagtgttgatct

SEQ ID NO: 3843628 - DNA, 25 bp, Homo sapien
gaccattaaaactggtgagtgttga

SEQ ID NO: 3843629 - DNA, 25 bp, Homo sapien
gaggtcttgaatgagcaagaagacc

SEQ ID NO: 3843630 - DNA, 25 bp, Homo sapien
cagtaaaagcatccgtggccctggc

SEQ ID NO: 3843631 - DNA, 25 bp, Homo sapien
gagaagctggctcttgttaccctag

SEQ ID NO: 3843632 - DNA, 25 bp, Homo sapien
tccttgaaaagcagtcagtaaaagc

SEQ ID NO: 3843633 - DNA, 25 bp, Homo sapien
gcatgtcttaagagataactgaccc

SEQ ID NO: 3843634 - DNA, 25 bp, Homo sapien
gatgacatcgacaacaccttcagta

SEQ ID NO: 3843635 - DNA, 25 bp, Homo sapien
cagcgcttgggtagacgatgacatc

SEQ ID NO: 3843636 - DNA, 25 bp, Homo sapien
cagtaacctttttcatctccgataa

SEQ ID NO: 3843637 - DNA, 25 bp, Homo sapien
tggcagctgctcgatgactctcata

SEQ ID NO: 3843638 - DNA, 25 bp, Homo sapien
ctggcacaaacccctaagaggcgcc

SEQ ID NO: 3843639 - DNA, 25 bp, Homo sapien
cacaaacccctaagaggcgcccatt

SEQ ID NO: 3843640 - DNA, 25 bp, Homo sapien
gcacaaacccctaagaggcgcccat

SEQ ID NO: 3843641 - DNA, 25 bp, Homo sapien
tggcacaaacccctaagaggcgccc

SEQ ID NO: 3843642 - DNA, 25 bp, Homo sapien
tgtttcacttttaatctagaagagg

SEQ ID NO: 3843643 - DNA, 25 bp, Homo sapien
tcacttttaatctagaagaggcgga

SEQ ID NO: 3843644 - DNA, 25 bp, Homo sapien
acttttaatctagaagaggcggagc

SEQ ID NO: 3843645 - DNA, 25 bp, Homo sapien
tttcacttttaatctagaagaggcg

SEQ ID NO: 3843646 - DNA, 25 bp, Homo sapien
ttgcttgattgcattcttggcttcc

SEQ ID NO: 3843647 - DNA, 25 bp, Homo sapien
caaatgcatatcctctattgttgcc

SEQ ID NO: 3843648 - DNA, 25 bp, Homo sapien
catatcctctattgttgccattaaa

SEQ ID NO: 3843649 - DNA, 25 bp, Homo sapien
ttgattgcattcttggcttccactt

SEQ ID NO: 3843650 - DNA, 25 bp, Homo sapien
cagcccctttcagggggtgcagcat

SEQ ID NO: 3843651 - DNA, 25 bp, Homo sapien
taatggtataagctcatcctcaaaa

SEQ ID NO: 3843652 - DNA, 25 bp, Homo sapien
ccaaccaggtggagggccaccatat

SEQ ID NO: 3843653 - DNA, 25 bp, Homo sapien
tttcacataatggtataagctcatc

SEQ ID NO: 3843654 - DNA, 25 bp, Homo sapien
caaagtttgcaaaatgatggactgc

SEQ ID NO: 3843655 - DNA, 25 bp, Homo sapien
ttttccagcaaagtttgcaaaatga

SEQ ID NO: 3843656 - DNA, 25 bp, Homo sapien
tgcaaaatgatggactgcaaagcat

SEQ ID NO: 3843657 - DNA, 25 bp, Homo sapien
tccagcaaagtttgcaaaatgatgg

SEQ ID NO: 3843658 - DNA, 25 bp, Homo sapien
ttttttgaggccaggaattgctgtg

SEQ ID NO: 3843659 - DNA, 25 bp, Homo sapien
ttgaggccaggaattgctgtgctca

SEQ ID NO: 3843660 - DNA, 25 bp, Homo sapien
tgaggccaggaattgctgtgctcat

SEQ ID NO: 3843661 - DNA, 25 bp, Homo sapien
tccttttttgaggccaggaattgct

SEQ ID NO: 3843662 - DNA, 25 bp, Homo sapien
tcgcttctggctctgggcatgtgcc

SEQ ID NO: 3843663 - DNA, 25 bp, Homo sapien
ctgggcatgtgcccagacacactgc

SEQ ID NO: 3843664 - DNA, 25 bp, Homo sapien
gctcgcttctggctctgggcatgtg

SEQ ID NO: 3843665 - DNA, 25 bp, Homo sapien
gggcatgtgcccagacacactgctt

SEQ ID NO: 3843666 - DNA, 25 bp, Homo sapien
tgtcacccaacaccctaagcttaga

SEQ ID NO: 3843667 - DNA, 25 bp, Homo sapien
gttgtgttgtgactcttagttcccc

SEQ ID NO: 3843668 - DNA, 25 bp, Homo sapien
gagagtttgagagaagtttttggaa

SEQ ID NO: 3843669 - DNA, 25 bp, Homo sapien
gagatgactgctgttgtgttgtgac

SEQ ID NO: 3843670 - DNA, 25 bp, Homo sapien
tggccacgtgtagaaattaatgatt

SEQ ID NO: 3843671 - DNA, 25 bp, Homo sapien
gaatgtgtgtttccggggatcagag

SEQ ID NO: 3843672 - DNA, 25 bp, Homo sapien
gagtttggccacgtgtagaaattaa

SEQ ID NO: 3843673 - DNA, 25 bp, Homo sapien
ggatcagagtttggccacgtgtaga

SEQ ID NO: 3843674 - DNA, 25 bp, Homo sapien
tgattctgtgacaagttaaggttga

SEQ ID NO: 3843675 - DNA, 25 bp, Homo sapien
gcctttttgggatagtctctataac

SEQ ID NO: 3843676 - DNA, 25 bp, Homo sapien
tctgtgacaagttaaggttgaattg

SEQ ID NO: 3843677 - DNA, 25 bp, Homo sapien
gatagtctctataactgtggacact

SEQ ID NO: 3843678 - DNA, 25 bp, Homo sapien
tatcctgtgcgctggaccagtgcgc

SEQ ID NO: 3843679 - DNA, 25 bp, Homo sapien
tgcttccttctgagtgccgctcaat

SEQ ID NO: 3843680 - DNA, 25 bp, Homo sapien
ccagtgcgcggagggctgcttcctt

SEQ ID NO: 3843681 - DNA, 25 bp, Homo sapien
tccccggatttgtgatttgattcca

SEQ ID NO: 3843682 - DNA, 25 bp, Homo sapien
gagtgattatcagcaaaaaatcagg

SEQ ID NO: 3843683 - DNA, 25 bp, Homo sapien
gtgattatcagcaaaaaatcaggtt

SEQ ID NO: 3843684 - DNA, 25 bp, Homo sapien
tgagagtgattatcagcaaaaaatc

SEQ ID NO: 3843685 - DNA, 25 bp, Homo sapien
gagagtgattatcagcaaaaaatca

SEQ ID NO: 3843686 - DNA, 25 bp, Homo sapien
tctacagtcttctggccaagttgta

SEQ ID NO: 3843687 - DNA, 25 bp, Homo sapien
caagttgtagatttgttcttcgctg

SEQ ID NO: 3843688 - DNA, 25 bp, Homo sapien
tgaaggcaaagtctacagtcttctg

SEQ ID NO: 3843689 - DNA, 25 bp, Homo sapien
ttcttcgctgaacttcatcttttcc

SEQ ID NO: 3843690 - DNA, 25 bp, Homo sapien
cacaggtttttggcacagcactgtt

SEQ ID NO: 3843691 - DNA, 25 bp, Homo sapien
atccacaggtttttggcacagcact

SEQ ID NO: 3843692 - DNA, 25 bp, Homo sapien
aatccacaggtttttggcacagcac

SEQ ID NO: 3843693 - DNA, 25 bp, Homo sapien
tccacaggtttttggcacagcactg

SEQ ID NO: 3843694 - DNA, 25 bp, Homo sapien
gtacctaaaagctgatcccacatga

SEQ ID NO: 3843695 - DNA, 25 bp, Homo sapien
gagagacacaggcagtgtagtacat

SEQ ID NO: 3843696 - DNA, 25 bp, Homo sapien
gattataaccctgagctagaaagag

SEQ ID NO: 3843697 - DNA, 25 bp, Homo sapien
catggaaagaaaactaagcgaggat

SEQ ID NO: 3843698 - DNA, 25 bp, Homo sapien
tctttgccggaatgaaagtgagcta

SEQ ID NO: 3843699 - DNA, 25 bp, Homo sapien
gctattgtaatagctccttcgagga

SEQ ID NO: 3843700 - DNA, 25 bp, Homo sapien
tatggtaacttagcctctttgccgg

SEQ ID NO: 3843701 - DNA, 25 bp, Homo sapien
tcactcggacacatcaaggattgat

SEQ ID NO: 3843702 - DNA, 25 bp, Homo sapien
ggtttccttgattatggcgaattca

SEQ ID NO: 3843703 - DNA, 25 bp, Homo sapien
ggcgaattcaacgtgtcactcgggt

SEQ ID NO: 3843704 - DNA, 25 bp, Homo sapien
ggttatgctctaatcgtcatatcaa

SEQ ID NO: 3843705 - DNA, 25 bp, Homo sapien
tgtcactcgggttatgctctaatcg

SEQ ID NO: 3843706 - DNA, 25 bp, Homo sapien
aatctgcccaaaatccaaggaccca

SEQ ID NO: 3843707 - DNA, 25 bp, Homo sapien
ggacccagaggtcagtgtgatagca

SEQ ID NO: 3843708 - DNA, 25 bp, Homo sapien
tgaaaaattcatagcctctgtggca

SEQ ID NO: 3843709 - DNA, 25 bp, Homo sapien
tacagtgcctagtggataacatagc

SEQ ID NO: 3843710 - DNA, 25 bp, Homo sapien
gctgattttagccacagtctgagta

SEQ ID NO: 3843711 - DNA, 25 bp, Homo sapien
gatgaactcttgaatgaaggctggc

SEQ ID NO: 3843712 - DNA, 25 bp, Homo sapien
tatgttaccccgaggtattcctggc

SEQ ID NO: 3843713 - DNA, 25 bp, Homo sapien
gaaggctggcggtactgtgtcttcc

SEQ ID NO: 3843714 - DNA, 25 bp, Homo sapien
caacatggctggttcaggtgacaat

SEQ ID NO: 3843715 - DNA, 25 bp, Homo sapien
gctgtaattttcgtaggaccaacca

SEQ ID NO: 3843716 - DNA, 25 bp, Homo sapien
taaggaatctgcctaagggcacaca

SEQ ID NO: 3843717 - DNA, 25 bp, Homo sapien
ggtgcaaccactctttatgatcgaa

SEQ ID NO: 3843718 - DNA, 25 bp, Homo sapien
aaaccttggaactggtattgccctg

SEQ ID NO: 3843719 - DNA, 25 bp, Homo sapien
caaactggaactggtagtgtgaccc

SEQ ID NO: 3843720 - DNA, 25 bp, Homo sapien
tgcgtcatccgccagatcacatggt

SEQ ID NO: 3843721 - DNA, 25 bp, Homo sapien
ccagagaggctggagattagcactc

SEQ ID NO: 3843722 - DNA, 25 bp, Homo sapien
cattggtgtgctgtgcttttgggtc

SEQ ID NO: 3843723 - DNA, 25 bp, Homo sapien
tcattggtgtgctgtgcttttgggt

SEQ ID NO: 3843724 - DNA, 25 bp, Homo sapien
attggtgtgctgtgcttttgggtcc

SEQ ID NO: 3843725 - DNA, 25 bp, Homo sapien
tcttgattcctgacagtagatgcct

SEQ ID NO: 3843726 - DNA, 25 bp, Homo sapien
gggagctctcacttcccgtactgtc

SEQ ID NO: 3843727 - DNA, 25 bp, Homo sapien
cttcttgattcctgacagtagatgc

SEQ ID NO: 3843728 - DNA, 25 bp, Homo sapien
gtactgtctccacagcgaggcctct

SEQ ID NO: 3843729 - DNA, 25 bp, Homo sapien
cttctcacatgattgtacttcaggg

SEQ ID NO: 3843730 - DNA, 25 bp, Homo sapien
tcacccataaaagcagtcttctcac

SEQ ID NO: 3843731 - DNA, 25 bp, Homo sapien
tctcacatgattgtacttcagggct

SEQ ID NO: 3843732 - DNA, 25 bp, Homo sapien
ttcacccataaaagcagtcttctca

SEQ ID NO: 3843733 - DNA, 25 bp, Homo sapien
cctgttggggcattcaattctagtc

SEQ ID NO: 3843734 - DNA, 25 bp, Homo sapien
cattcaattctagtcattactggag

SEQ ID NO: 3843735 - DNA, 25 bp, Homo sapien
ttctagtcattactggagttctgtc

SEQ ID NO: 3843736 - DNA, 25 bp, Homo sapien
gtcctccttgaagttgtgcagaagt

SEQ ID NO: 3843737 - DNA, 25 bp, Homo sapien
ttgttcttatttggaattctcaaaa

SEQ ID NO: 3843738 - DNA, 25 bp, Homo sapien
tcaatcttctgtaacatgagctctt

SEQ ID NO: 3843739 - DNA, 25 bp, Homo sapien
tctgtaacatgagctctttgtgatg

SEQ ID NO: 3843740 - DNA, 25 bp, Homo sapien
tcttctgtaacatgagctctttgtg

SEQ ID NO: 3843741 - DNA, 25 bp, Homo sapien
gctcattttgacaggaactctccac

SEQ ID NO: 3843742 - DNA, 25 bp, Homo sapien
ttttgacaggaactctccaccctct

SEQ ID NO: 3843743 - DNA, 25 bp, Homo sapien
tcattttgacaggaactctccaccc

SEQ ID NO: 3843744 - DNA, 25 bp, Homo sapien
cagctcattttgacaggaactctcc

SEQ ID NO: 3843745 - DNA, 25 bp, Homo sapien
ttttccgtagttctggatctttcag

SEQ ID NO: 3843746 - DNA, 25 bp, Homo sapien
tcatctttttttccgtagttctgga

SEQ ID NO: 3843747 - DNA, 25 bp, Homo sapien
catctttttttccgtagttctggat

SEQ ID NO: 3843748 - DNA, 25 bp, Homo sapien
tttttccgtagttctggatctttca

SEQ ID NO: 3843749 - DNA, 25 bp, Homo sapien
agtcctcctgtggtacttctcttgg

SEQ ID NO: 3843750 - DNA, 25 bp, Homo sapien
tcgtcttctccatcaatgggtttag

SEQ ID NO: 3843751 - DNA, 25 bp, Homo sapien
tgacttgctttgagagacctctgta

SEQ ID NO: 3843752 - DNA, 25 bp, Homo sapien
cctctgtatgtggaacttgatgatg

SEQ ID NO: 3843753 - DNA, 25 bp, Homo sapien
tcttcttccagccccatgtgacaac

SEQ ID NO: 3843754 - DNA, 25 bp, Homo sapien
ttcttccagccccatgtgacaactg

SEQ ID NO: 3843755 - DNA, 25 bp, Homo sapien
tttcttcttccagccccatgtgaca

SEQ ID NO: 3843756 - DNA, 25 bp, Homo sapien
gtgacaactgctctcctctctctcc

SEQ ID NO: 3843757 - DNA, 25 bp, Homo sapien
caggcgatccgcccgactcagcctc

SEQ ID NO: 3843758 - DNA, 25 bp, Homo sapien
tgagccaccgtgcccggcccaacag

SEQ ID NO: 3843759 - DNA, 25 bp, Homo sapien
caccacgtccagctgattttttatt

SEQ ID NO: 3843760 - DNA, 25 bp, Homo sapien
gccaccgtgcccggcccaacagtct

SEQ ID NO: 3843761 - DNA, 25 bp, Homo sapien
ttaaagagtttgctagcaaaacttc

SEQ ID NO: 3843762 - DNA, 25 bp, Homo sapien
aagagtttgctagcaaaacttcagt

SEQ ID NO: 3843763 - DNA, 25 bp, Homo sapien
gagtttgctagcaaaacttcagttt

SEQ ID NO: 3843764 - DNA, 25 bp, Homo sapien
aaagagtttgctagcaaaacttcag

SEQ ID NO: 3843765 - DNA, 25 bp, Homo sapien
cagtaaaaggtgtctgcaggaattc

SEQ ID NO: 3843766 - DNA, 25 bp, Homo sapien
aattcttacaggaattgaattctga

SEQ ID NO: 3843767 - DNA, 25 bp, Homo sapien
ctgcaggaattcttacaggaattga

SEQ ID NO: 3843768 - DNA, 25 bp, Homo sapien
ggaactggtgggatgatggtaggaa

SEQ ID NO: 3843769 - DNA, 25 bp, Homo sapien
cagcgggggaattcctgagcaagaa

SEQ ID NO: 3843770 - DNA, 25 bp, Homo sapien
gaagattgttccaccctttggcatc

SEQ ID NO: 3843771 - DNA, 25 bp, Homo sapien
catgagcaatattgaacagcggggg

SEQ ID NO: 3843772 - DNA, 25 bp, Homo sapien
gctatcagaggaagattgttccacc

SEQ ID NO: 3843773 - DNA, 25 bp, Homo sapien
tgtgcaggatgagtagaggtgggag

SEQ ID NO: 3843774 - DNA, 25 bp, Homo sapien
ctgtgcaggatgagtagaggtggga

SEQ ID NO: 3843775 - DNA, 25 bp, Homo sapien
gtgcaggatgagtagaggtgggagc

SEQ ID NO: 3843776 - DNA, 25 bp, Homo sapien
gtcgtaccttctgctgtacccctag

SEQ ID NO: 3843777 - DNA, 25 bp, Homo sapien
gcttcttgtattgtacgtacatctg

SEQ ID NO: 3843778 - DNA, 25 bp, Homo sapien
tacgtacatctgtcgtaccttctgc

SEQ ID NO: 3843779 - DNA, 25 bp, Homo sapien
cctagcatcatgtcgctgctaaaca

SEQ ID NO: 3843780 - DNA, 25 bp, Homo sapien
aactagcagctctctattaaatgag

SEQ ID NO: 3843781 - DNA, 25 bp, Homo sapien
tagtccaggaacaaactagcagctc

SEQ ID NO: 3843782 - DNA, 25 bp, Homo sapien
actagcagctctctattaaatgagg

SEQ ID NO: 3843783 - DNA, 25 bp, Homo sapien
gccttagtccaggaacaaactagca

SEQ ID NO: 3843784 - DNA, 25 bp, Homo sapien
aagtgctacctagtagaagtttcga

SEQ ID NO: 3843785 - DNA, 25 bp, Homo sapien
tttcttaaacagatagactttggcc

SEQ ID NO: 3843786 - DNA, 25 bp, Homo sapien
cccgggcagtgttccaagtgttatt

SEQ ID NO: 3843787 - DNA, 25 bp, Homo sapien
ctttggccttaattatgaggtagca

SEQ ID NO: 3843788 - DNA, 25 bp, Homo sapien
tggcatacatgctctgaagcactat

SEQ ID NO: 3843789 - DNA, 25 bp, Homo sapien
gctttgacaccttctgactgggctg

SEQ ID NO: 3843790 - DNA, 25 bp, Homo sapien
cgaatgctcgcttgtctgtgtgcct

SEQ ID NO: 3843791 - DNA, 25 bp, Homo sapien
tggactgttgtctctgaagttccta

SEQ ID NO: 3843792 - DNA, 25 bp, Homo sapien
ctttcaaggccagagtcaacaccat

SEQ ID NO: 3843793 - DNA, 25 bp, Homo sapien
gaagcagacccctattaagatgagc

SEQ ID NO: 3843794 - DNA, 25 bp, Homo sapien
cattagggttctttctggtagcaac

SEQ ID NO: 3843795 - DNA, 25 bp, Homo sapien
tagcaacagtgctcctagacaaact

SEQ ID NO: 3843796 - DNA, 25 bp, Homo sapien
tgtaaacagtgatctaagccaaatg

SEQ ID NO: 3843797 - DNA, 25 bp, Homo sapien
ttcttcttgatgctaggcaagagtt

SEQ ID NO: 3843798 - DNA, 25 bp, Homo sapien
atgctaggcaagagttttgaacatc

SEQ ID NO: 3843799 - DNA, 25 bp, Homo sapien
tgatgctaggcaagagttttgaaca

SEQ ID NO: 3843800 - DNA, 25 bp, Homo sapien
ttcttgatgctaggcaagagttttg

SEQ ID NO: 3843801 - DNA, 25 bp, Homo sapien
cccaggtcaagaggctgaccttcac

SEQ ID NO: 3843802 - DNA, 25 bp, Homo sapien
ctcacccaggtcaagaggctgacct

SEQ ID NO: 3843803 - DNA, 25 bp, Homo sapien
tcacccaggtcaagaggctgacctt

SEQ ID NO: 3843804 - DNA, 25 bp, Homo sapien
aggtcaagaggctgaccttcaccat

SEQ ID NO: 3843805 - DNA, 25 bp, Homo sapien
gtcttccattcgaataaatatccaa

SEQ ID NO: 3843806 - DNA, 25 bp, Homo sapien
gaaattcacagtcggatgtaaaaac

SEQ ID NO: 3843807 - DNA, 25 bp, Homo sapien
gggaagatatttggactgcattgtg

SEQ ID NO: 3843808 - DNA, 25 bp, Homo sapien
gcctataaaacttctggcagtcttc

SEQ ID NO: 3843809 - DNA, 25 bp, Homo sapien
tatcctgtttacaggttattggacc

SEQ ID NO: 3843810 - DNA, 25 bp, Homo sapien
tcagcagctgattatcctgtttaca

SEQ ID NO: 3843811 - DNA, 25 bp, Homo sapien
atcctgtttacaggttattggacct

SEQ ID NO: 3843812 - DNA, 25 bp, Homo sapien
cagcagctgattatcctgtttacag

SEQ ID NO: 3843813 - DNA, 25 bp, Homo sapien
agtagactttactcttgctgatatt

SEQ ID NO: 3843814 - DNA, 25 bp, Homo sapien
tgttagtagactttactcttgctga

SEQ ID NO: 3843815 - DNA, 25 bp, Homo sapien
aatgaatgttagtagactttactct

SEQ ID NO: 3843816 - DNA, 25 bp, Homo sapien
gaatgttagtagactttactcttgc

SEQ ID NO: 3843817 - DNA, 25 bp, Homo sapien
cacagtaactcttcattaaagtctc

SEQ ID NO: 3843818 - DNA, 25 bp, Homo sapien
ctgttacacagtaactcttcattaa

SEQ ID NO: 3843819 - DNA, 25 bp, Homo sapien
cagtaactcttcattaaagtctctc

SEQ ID NO: 3843820 - DNA, 25 bp, Homo sapien
gtaactcttcattaaagtctctcat

SEQ ID NO: 3843821 - DNA, 25 bp, Homo sapien
aggtagttgcagctggcttagcaca

SEQ ID NO: 3843822 - DNA, 25 bp, Homo sapien
ttgaggtagttgcagctggcttagc

SEQ ID NO: 3843823 - DNA, 25 bp, Homo sapien
tttaggatgagtgaaattcatttcc

SEQ ID NO: 3843824 - DNA, 25 bp, Homo sapien
tctgatgggcctctggattctatta

SEQ ID NO: 3843825 - DNA, 25 bp, Homo sapien
ctgggtgaatagaatgaaaagacga

SEQ ID NO: 3843826 - DNA, 25 bp, Homo sapien
gcatcccatcctgcactggctctga

SEQ ID NO: 3843827 - DNA, 25 bp, Homo sapien
tgtctctcaagacatgcttcagcaa

SEQ ID NO: 3843828 - DNA, 25 bp, Homo sapien
cgagagtgtctaagtccttcaccag

SEQ ID NO: 3843829 - DNA, 25 bp, Homo sapien
cgatcgcttaactgacaacctcatc

SEQ ID NO: 3843830 - DNA, 25 bp, Homo sapien
gcttaactgacaacctcatccagtc

SEQ ID NO: 3843831 - DNA, 25 bp, Homo sapien
ttaactgacaacctcatccagtcca

SEQ ID NO: 3843832 - DNA, 25 bp, Homo sapien
tcgcttaactgacaacctcatccag

SEQ ID NO: 3843833 - DNA, 25 bp, Homo sapien
caaaggctaagcatcagaggcagaa

SEQ ID NO: 3843834 - DNA, 25 bp, Homo sapien
tgtaaatgtggcttagaggccagtc

SEQ ID NO: 3843835 - DNA, 25 bp, Homo sapien
ttatctagtccaaccagcagtgcct

SEQ ID NO: 3843836 - DNA, 25 bp, Homo sapien
ttaactttaaagtagagctcatctt

SEQ ID NO: 3843837 - DNA, 25 bp, Homo sapien
tggtgcgcccgtaatctcagcttct

SEQ ID NO: 3843838 - DNA, 25 bp, Homo sapien
aatctcttaaacctgggaggacgag

SEQ ID NO: 3843839 - DNA, 25 bp, Homo sapien
ggtgcgcccgtaatctcagcttctc

SEQ ID NO: 3843840 - DNA, 25 bp, Homo sapien
gagaatctcttaaacctgggaggac

SEQ ID NO: 3843841 - DNA, 25 bp, Homo sapien
gatagatctttcctgatgtaatcca

SEQ ID NO: 3843842 - DNA, 25 bp, Homo sapien
gatttgttgcttctgaagaccttca

SEQ ID NO: 3843843 - DNA, 25 bp, Homo sapien
tccctggactcatcgtctgtacaga

SEQ ID NO: 3843844 - DNA, 25 bp, Homo sapien
cgtctgtacagagacctaaagaaat

SEQ ID NO: 3843845 - DNA, 25 bp, Homo sapien
catggcatgggcagtttcattcccc

SEQ ID NO: 3843846 - DNA, 25 bp, Homo sapien
atggcatgggcagtttcattcccca

SEQ ID NO: 3843847 - DNA, 25 bp, Homo sapien
tggcatgggcagtttcattccccat

SEQ ID NO: 3843848 - DNA, 25 bp, Homo sapien
cactgtactgccaacagatttctct

SEQ ID NO: 3843849 - DNA, 25 bp, Homo sapien
gattcacagaccttcgcttttcctc

SEQ ID NO: 3843850 - DNA, 25 bp, Homo sapien
tagcttccctttgcttagcaacagg

SEQ ID NO: 3843851 - DNA, 25 bp, Homo sapien
tgtggcaagcactgtactgccaaca

SEQ ID NO: 3843852 - DNA, 25 bp, Homo sapien
gtgtgtcaattcaatacttctcttc

SEQ ID NO: 3843853 - DNA, 25 bp, Homo sapien
tgagcaaggtgttgtgttagacacc

SEQ ID NO: 3843854 - DNA, 25 bp, Homo sapien
ccaggcatgtagcaagatgaatgag

SEQ ID NO: 3843855 - DNA, 25 bp, Homo sapien
gacaccaggcatgtagcaagatgaa

SEQ ID NO: 3843856 - DNA, 25 bp, Homo sapien
cactgagactgaagaccttaactgt

SEQ ID NO: 3843857 - DNA, 25 bp, Homo sapien
ctgagactgaagaccttaactgtaa

SEQ ID NO: 3843858 - DNA, 25 bp, Homo sapien
ctgaagaccttaactgtaactgttg

SEQ ID NO: 3843859 - DNA, 25 bp, Homo sapien
gactgaagaccttaactgtaactgt

SEQ ID NO: 3843860 - DNA, 25 bp, Homo sapien
taaagccagcgtggttaggattttc

SEQ ID NO: 3843861 - DNA, 25 bp, Homo sapien
cttcagcagagtgtcggtagatgga

SEQ ID NO: 3843862 - DNA, 25 bp, Homo sapien
cagaggtttcgaacaaatgtctcca

SEQ ID NO: 3843863 - DNA, 25 bp, Homo sapien
gatcagcagctactcagcttcagca

SEQ ID NO: 3843864 - DNA, 25 bp, Homo sapien
gaaacaaggaaaatcgtggagaagc

SEQ ID NO: 3843865 - DNA, 25 bp, Homo sapien
caaggaaaatcgtggagaagcatag

SEQ ID NO: 3843866 - DNA, 25 bp, Homo sapien
aacaaggaaaatcgtggagaagcat

SEQ ID NO: 3843867 - DNA, 25 bp, Homo sapien
aggaaaatcgtggagaagcatagaa

SEQ ID NO: 3843868 - DNA, 25 bp, Homo sapien
taggttttctgtccacagagttcat

SEQ ID NO: 3843869 - DNA, 25 bp, Homo sapien
tttctgtccacagagttcatgctgc

SEQ ID NO: 3843870 - DNA, 25 bp, Homo sapien
ttctgtccacagagttcatgctgca

SEQ ID NO: 3843871 - DNA, 25 bp, Homo sapien
gttttctgtccacagagttcatgct

SEQ ID NO: 3843872 - DNA, 25 bp, Homo sapien
tcagcagctctgatcaactggtaac

SEQ ID NO: 3843873 - DNA, 25 bp, Homo sapien
gtaacttgtcagttggacagatcct

SEQ ID NO: 3843874 - DNA, 25 bp, Homo sapien
ctggtaacttgtcagttggacagat

SEQ ID NO: 3843875 - DNA, 25 bp, Homo sapien
gtcagttggacagatcctattttcc

SEQ ID NO: 3843876 - DNA, 25 bp, Homo sapien
gatggagtgagtcacaggactgagc

SEQ ID NO: 3843877 - DNA, 25 bp, Homo sapien
ctggggatggagtgagtcacaggac

SEQ ID NO: 3843878 - DNA, 25 bp, Homo sapien
tgagtcacaggactgagcttgcatc

SEQ ID NO: 3843879 - DNA, 25 bp, Homo sapien
gggatggagtgagtcacaggactga

SEQ ID NO: 3843880 - DNA, 25 bp, Homo sapien
agaagcctttcaattggcctttagg

SEQ ID NO: 3843881 - DNA, 25 bp, Homo sapien
tgcagaagcctttcaattggccttt

SEQ ID NO: 3843882 - DNA, 25 bp, Homo sapien
ctttcaattggcctttagggcagca

SEQ ID NO: 3843883 - DNA, 25 bp, Homo sapien
agcctttcaattggcctttagggca

SEQ ID NO: 3843884 - DNA, 25 bp, Homo sapien
catgcactcaggagaatgtgctgat

SEQ ID NO: 3843885 - DNA, 25 bp, Homo sapien
cttgagtggtccatgcactcaggag

SEQ ID NO: 3843886 - DNA, 25 bp, Homo sapien
agtggtccatgcactcaggagaatg

SEQ ID NO: 3843887 - DNA, 25 bp, Homo sapien
tggtccatgcactcaggagaatgtg

SEQ ID NO: 3843888 - DNA, 25 bp, Homo sapien
aagttgtcatgtggcttaatgggtg

SEQ ID NO: 3843889 - DNA, 25 bp, Homo sapien
ttaagttgtcatgtggcttaatggg

SEQ ID NO: 3843890 - DNA, 25 bp, Homo sapien
gtcatgtggcttaatgggtgttttt

SEQ ID NO: 3843891 - DNA, 25 bp, Homo sapien
gttgtcatgtggcttaatgggtgtt

SEQ ID NO: 3843892 - DNA, 25 bp, Homo sapien
tactggcaatgatgagttctggatc

SEQ ID NO: 3843893 - DNA, 25 bp, Homo sapien
tcaagtctggtgtactggcaatgat

SEQ ID NO: 3843894 - DNA, 25 bp, Homo sapien
ttccagcaggaaagttattgatgtt

SEQ ID NO: 3843895 - DNA, 25 bp, Homo sapien
ctggtgtactggcaatgatgagttc

SEQ ID NO: 3843896 - DNA, 25 bp, Homo sapien
tcctgagtctggttattttcgtggc

SEQ ID NO: 3843897 - DNA, 25 bp, Homo sapien
tgaatgccaatagccactgcggcca

SEQ ID NO: 3843898 - DNA, 25 bp, Homo sapien
gccacagatgaatgccaatagccac

SEQ ID NO: 3843899 - DNA, 25 bp, Homo sapien
ggttattttcgtggccacagatgaa

SEQ ID NO: 3843900 - DNA, 25 bp, Homo sapien
ttctctggtataatttctctggtat

SEQ ID NO: 3843901 - DNA, 25 bp, Homo sapien
gaagtgcaatgtcaccctgacacca

SEQ ID NO: 3843902 - DNA, 25 bp, Homo sapien
ctgctgaaggaagtgcaatgtcacc

SEQ ID NO: 3843903 - DNA, 25 bp, Homo sapien
ttctctggtatgattcctcaatcac

SEQ ID NO: 3843904 - DNA, 25 bp, Homo sapien
ctctccatcctttgactggccttac

SEQ ID NO: 3843905 - DNA, 25 bp, Homo sapien
cctatgcaccttatgctctacgaca

SEQ ID NO: 3843906 - DNA, 25 bp, Homo sapien
gctttaggaccatgtgtcccctatg

SEQ ID NO: 3843907 - DNA, 25 bp, Homo sapien
ttaggaccatgtgtcccctatgcac

SEQ ID NO: 3843908 - DNA, 25 bp, Homo sapien
caccttatgctctacgacatcatct

SEQ ID NO: 3843909 - DNA, 25 bp, Homo sapien
gatgtctcattatgagagatgctct

SEQ ID NO: 3843910 - DNA, 25 bp, Homo sapien
tatgagagatgctctgtttgcttta

SEQ ID NO: 3843911 - DNA, 25 bp, Homo sapien
tgctctgtttgctttagccttggcc

SEQ ID NO: 3843912 - DNA, 25 bp, Homo sapien
gctccaggatgtctcattatgagag

SEQ ID NO: 3843913 - DNA, 25 bp, Homo sapien
tggcccataaagttggcttcaactt

SEQ ID NO: 3843914 - DNA, 25 bp, Homo sapien
ttatggcccataaagttggcttcaa

SEQ ID NO: 3843915 - DNA, 25 bp, Homo sapien
cataaagttggcttcaactttacag

SEQ ID NO: 3843916 - DNA, 25 bp, Homo sapien
ccataaagttggcttcaactttaca

SEQ ID NO: 3843917 - DNA, 25 bp, Homo sapien
caaccttgctcccataaaaggtatc

SEQ ID NO: 3843918 - DNA, 25 bp, Homo sapien
tcttgtagacagcagtttcctgtgc

SEQ ID NO: 3843919 - DNA, 25 bp, Homo sapien
tttggctcttgtagacagcagtttc

SEQ ID NO: 3843920 - DNA, 25 bp, Homo sapien
aaaggtatccgaaatatgtggagac

SEQ ID NO: 3843921 - DNA, 25 bp, Homo sapien
gcctggtactgacaaatgcagcaga

SEQ ID NO: 3843922 - DNA, 25 bp, Homo sapien
tcaaagaatactgcctggtactgac

SEQ ID NO: 3843923 - DNA, 25 bp, Homo sapien
atactgcctggtactgacaaatgca

SEQ ID NO: 3843924 - DNA, 25 bp, Homo sapien
aagaatactgcctggtactgacaaa

SEQ ID NO: 3843925 - DNA, 25 bp, Homo sapien
cccaagtggcaatagtcgctggaaa

SEQ ID NO: 3843926 - DNA, 25 bp, Homo sapien
aagtggcaatagtcgctggaaaatg

SEQ ID NO: 3843927 - DNA, 25 bp, Homo sapien
cacccaagtggcaatagtcgctgga

SEQ ID NO: 3843928 - DNA, 25 bp, Homo sapien
tcacccaagtggcaatagtcgctgg

SEQ ID NO: 3843929 - DNA, 25 bp, Homo sapien
cttttaactagaagtgttcctcctg

SEQ ID NO: 3843930 - DNA, 25 bp, Homo sapien
tggtaactgatacatcactctcagc

SEQ ID NO: 3843931 - DNA, 25 bp, Homo sapien
cagtgctgcaactctcccagtgact

SEQ ID NO: 3843932 - DNA, 25 bp, Homo sapien
cagggattgcaaatctaatggtaac

SEQ ID NO: 3843933 - DNA, 25 bp, Homo sapien
gactgtatattcagctgaccaacac

SEQ ID NO: 3843934 - DNA, 25 bp, Homo sapien
tcatctgcagtttctatgacattca

SEQ ID NO: 3843935 - DNA, 25 bp, Homo sapien
tcctcttcatctgcagtttctatga

SEQ ID NO: 3843936 - DNA, 25 bp, Homo sapien
ctcttcatctgcagtttctatgaca

SEQ ID NO: 3843937 - DNA, 25 bp, Homo sapien
cttcatctgcagtttctatgacatt

SEQ ID NO: 3843938 - DNA, 25 bp, Homo sapien
ctctcttaggcaaattctgggccat

SEQ ID NO: 3843939 - DNA, 25 bp, Homo sapien
ctctctcttaggcaaattctgggcc

SEQ ID NO: 3843940 - DNA, 25 bp, Homo sapien
atgcttttaaagaattcgactttgt

SEQ ID NO: 3843941 - DNA, 25 bp, Homo sapien
ttaaagaattcgactttgtcttctc

SEQ ID NO: 3843942 - DNA, 25 bp, Homo sapien
gaatgcaaattataagcctaactct

SEQ ID NO: 3843943 - DNA, 25 bp, Homo sapien
tctatataatgatgttcgtctgcac

SEQ ID NO: 3843944 - DNA, 25 bp, Homo sapien
tcaggcttgtacactgcttgatact

SEQ ID NO: 3843945 - DNA, 25 bp, Homo sapien
aagctcaagaatgcatccgtgcatg

SEQ ID NO: 3843946 - DNA, 25 bp, Homo sapien
gtagctgagatcacttccttggcac

SEQ ID NO: 3843947 - DNA, 25 bp, Homo sapien
gtagaatgatggtattgtagctgag

SEQ ID NO: 3843948 - DNA, 25 bp, Homo sapien
tgtagctgagatcacttccttggca

SEQ ID NO: 3843949 - DNA, 25 bp, Homo sapien
tagaatgatggtattgtagctgaga

SEQ ID NO: 3843950 - DNA, 25 bp, Homo sapien
cacaattccactttccagtttttca

SEQ ID NO: 3843951 - DNA, 25 bp, Homo sapien
atttctcaggatacttgtattgaac

SEQ ID NO: 3843952 - DNA, 25 bp, Homo sapien
tcacatttctcaggatacttgtatt

SEQ ID NO: 3843953 - DNA, 25 bp, Homo sapien
acatttctcaggatacttgtattga

SEQ ID NO: 3843954 - DNA, 25 bp, Homo sapien
ctgagccctattagcagtttccgcg

SEQ ID NO: 3843955 - DNA, 25 bp, Homo sapien
gccctattagcagtttccgcgtaat

SEQ ID NO: 3843956 - DNA, 25 bp, Homo sapien
cagtttccgcgtaataaaagcaatc

SEQ ID NO: 3843957 - DNA, 25 bp, Homo sapien
tattagcagtttccgcgtaataaaa

SEQ ID NO: 3843958 - DNA, 25 bp, Homo sapien
cagtgttcagaccattactgatggc

SEQ ID NO: 3843959 - DNA, 25 bp, Homo sapien
tttcccaaggtgctcactgagtcat

SEQ ID NO: 3843960 - DNA, 25 bp, Homo sapien
tgttgatcagaaacgcctcagtgtt

SEQ ID NO: 3843961 - DNA, 25 bp, Homo sapien
gctgtcccttggcaaaattgaaaag

SEQ ID NO: 3843962 - DNA, 25 bp, Homo sapien
agataatcttgacggtaacaatcag

SEQ ID NO: 3843963 - DNA, 25 bp, Homo sapien
tttaagataatcttgacggtaacaa

SEQ ID NO: 3843964 - DNA, 25 bp, Homo sapien
aataggtacataatactgaagctcc

SEQ ID NO: 3843965 - DNA, 25 bp, Homo sapien
taatactgaagctccggttgtagaa

SEQ ID NO: 3843966 - DNA, 25 bp, Homo sapien
acaattttccggtctgtttcagcta

SEQ ID NO: 3843967 - DNA, 25 bp, Homo sapien
tactccatatacaattttccggtct

SEQ ID NO: 3843968 - DNA, 25 bp, Homo sapien
gtttcagctatatcatttgacttcc

SEQ ID NO: 3843969 - DNA, 25 bp, Homo sapien
gacttccctgaagtatgggacttca

SEQ ID NO: 3843970 - DNA, 25 bp, Homo sapien
tggtaaagatatcttgccaaacttc

SEQ ID NO: 3843971 - DNA, 25 bp, Homo sapien
atatcttgccaaacttcttgtggct

SEQ ID NO: 3843972 - DNA, 25 bp, Homo sapien
gatatcttgccaaacttcttgtggc

SEQ ID NO: 3843973 - DNA, 25 bp, Homo sapien
tcactgctttgttaataaccagctc

SEQ ID NO: 3843974 - DNA, 25 bp, Homo sapien
ctatagagcacgttttccttggtgg

SEQ ID NO: 3843975 - DNA, 25 bp, Homo sapien
cttggtggatggaaagcatcccttc

SEQ ID NO: 3843976 - DNA, 25 bp, Homo sapien
agctcttttcctatagagcacgttt

SEQ ID NO: 3843977 - DNA, 25 bp, Homo sapien
aaacttgaacacagtgactccatgt

SEQ ID NO: 3843978 - DNA, 25 bp, Homo sapien
aaaacttgaacacagtgactccatg

SEQ ID NO: 3843979 - DNA, 25 bp, Homo sapien
taatggctaacagtggccagtgctg

SEQ ID NO: 3843980 - DNA, 25 bp, Homo sapien
caatgcgatgatttgaaagctaggg

SEQ ID NO: 3843981 - DNA, 25 bp, Homo sapien
gcaacaccaggcactagcaagtaat

SEQ ID NO: 3843982 - DNA, 25 bp, Homo sapien
actgtaaaggcctattcaagctgaa

SEQ ID NO: 3843983 - DNA, 25 bp, Homo sapien
tttaacttttggatgaaataattca

SEQ ID NO: 3843984 - DNA, 25 bp, Homo sapien
aacttttggatgaaataattcaagt

SEQ ID NO: 3843985 - DNA, 25 bp, Homo sapien
cttttggatgaaataattcaagttt

SEQ ID NO: 3843986 - DNA, 25 bp, Homo sapien
tttggatgaaataattcaagtttat

SEQ ID NO: 3843987 - DNA, 25 bp, Homo sapien
gatggccgggactttcaaatcaact

SEQ ID NO: 3843988 - DNA, 25 bp, Homo sapien
tcactggttcttaggatactggaga

SEQ ID NO: 3843989 - DNA, 25 bp, Homo sapien
gactataaggcacactagaaacatg

SEQ ID NO: 3843990 - DNA, 25 bp, Homo sapien
tcaagctaagtgaaccccaaagttc

SEQ ID NO: 3843991 - DNA, 25 bp, Homo sapien
taatcaaactggtaactctttctga

SEQ ID NO: 3843992 - DNA, 25 bp, Homo sapien
tgacatggtggagcttgtacgtgca

SEQ ID NO: 3843993 - DNA, 25 bp, Homo sapien
ggagcttgtacgtgcaagaataatg

SEQ ID NO: 3843994 - DNA, 25 bp, Homo sapien
catggtggagcttgtacgtgcaaga

SEQ ID NO: 3843995 - DNA, 25 bp, Homo sapien
tacgtgcaagaataatgttaattga

SEQ ID NO: 3843996 - DNA, 25 bp, Homo sapien
taattgtcctgagtccctgcttctt

SEQ ID NO: 3843997 - DNA, 25 bp, Homo sapien
tgcggttgcaaatcctatgggccat

SEQ ID NO: 3843998 - DNA, 25 bp, Homo sapien
ccaccaccacattaattgtcctgag

SEQ ID NO: 3843999 - DNA, 25 bp, Homo sapien
ctgcttcttgcggttgcaaatccta

SEQ ID NO: 3844000 - DNA, 25 bp, Homo sapien
gcataactcgtagcaagagatgaat

SEQ ID NO: 3844001 - DNA, 25 bp, Homo sapien
ctataagcataactcgtagcaagag

SEQ ID NO: 3844002 - DNA, 25 bp, Homo sapien
tcttcatctataagcataactcgta

SEQ ID NO: 3844003 - DNA, 25 bp, Homo sapien
actcgtagcaagagatgaattctca

SEQ ID NO: 3844004 - DNA, 25 bp, Homo sapien
tgcttaattatttcatcaggcacaa

SEQ ID NO: 3844005 - DNA, 25 bp, Homo sapien
ggtagatgcagctgttgcttaatta

SEQ ID NO: 3844006 - DNA, 25 bp, Homo sapien
aattatttcatcaggcacaaggttc

SEQ ID NO: 3844007 - DNA, 25 bp, Homo sapien
atggtagatgcagctgttgcttaat

SEQ ID NO: 3844008 - DNA, 25 bp, Homo sapien
tcagtgttggtgttgttttaaagaa

SEQ ID NO: 3844009 - DNA, 25 bp, Homo sapien
ggaatatctggttcagaatggggca

SEQ ID NO: 3844010 - DNA, 25 bp, Homo sapien
ggatttctattgtcagtgttggtgt

SEQ ID NO: 3844011 - DNA, 25 bp, Homo sapien
aatatctggttcagaatggggcagg

SEQ ID NO: 3844012 - DNA, 25 bp, Homo sapien
tcatagctgatctcgtttcctccat

SEQ ID NO: 3844013 - DNA, 25 bp, Homo sapien
tcctcatagctgatctcgtttcctc

SEQ ID NO: 3844014 - DNA, 25 bp, Homo sapien
agaagtcctcatagctgatctcgtt

SEQ ID NO: 3844015 - DNA, 25 bp, Homo sapien
agtcctcatagctgatctcgtttcc

SEQ ID NO: 3844016 - DNA, 25 bp, Homo sapien
cagagaaatggtgaaatcatgaaac

SEQ ID NO: 3844017 - DNA, 25 bp, Homo sapien
agagaaatggtgaaatcatgaaaca

SEQ ID NO: 3844018 - DNA, 25 bp, Homo sapien
gagaaatggtgaaatcatgaaacat

SEQ ID NO: 3844019 - DNA, 25 bp, Homo sapien
gtgcttagctaatgtcccatcacag

SEQ ID NO: 3844020 - DNA, 25 bp, Homo sapien
caggaaagtccgtctagagattagc

SEQ ID NO: 3844021 - DNA, 25 bp, Homo sapien
gccacagtaggttgttgcacataat

SEQ ID NO: 3844022 - DNA, 25 bp, Homo sapien
ggcctgacacaccataggaaattat

SEQ ID NO: 3844023 - DNA, 25 bp, Homo sapien
gccttaaagaagcattagcaaatca

SEQ ID NO: 3844024 - DNA, 25 bp, Homo sapien
aaaaaacatgtactgcccaagagga

SEQ ID NO: 3844025 - DNA, 25 bp, Homo sapien
tagcaaatcactgtttcaccctgtc

SEQ ID NO: 3844026 - DNA, 25 bp, Homo sapien
caccctgtcatcttcaactattatg

SEQ ID NO: 3844027 - DNA, 25 bp, Homo sapien
taagcttaatatctgactaccgcca

SEQ ID NO: 3844028 - DNA, 25 bp, Homo sapien
gctacgaggtgctattgaaatacag

SEQ ID NO: 3844029 - DNA, 25 bp, Homo sapien
taccgccaagatgttgcttatacca

SEQ ID NO: 3844030 - DNA, 25 bp, Homo sapien
ccttatgaaggcagcatatgtgctc

SEQ ID NO: 3844031 - DNA, 25 bp, Homo sapien
ttggatgctcgaggcctggcagaac

SEQ ID NO: 3844032 - DNA, 25 bp, Homo sapien
gcaacagtaaatcaggtgcactcct

SEQ ID NO: 3844033 - DNA, 25 bp, Homo sapien
ctacctgggccttgattattcctgg

SEQ ID NO: 3844034 - DNA, 25 bp, Homo sapien
gactgggtttcatcagagcggactt

SEQ ID NO: 3844035 - DNA, 25 bp, Homo sapien
tacagaagtcagctttttgcaccca

SEQ ID NO: 3844036 - DNA, 25 bp, Homo sapien
taacttaaagtgaacagacgcactc

SEQ ID NO: 3844037 - DNA, 25 bp, Homo sapien
gcagttttcacgaagttttactcga

SEQ ID NO: 3844038 - DNA, 25 bp, Homo sapien
gaataaaatttgagactacagccaa

SEQ ID NO: 3844039 - DNA, 25 bp, Homo sapien
aagaacctgcatgatcaaagctgcc

SEQ ID NO: 3844040 - DNA, 25 bp, Homo sapien
gggcagcatggcaatctgatctgca

SEQ ID NO: 3844041 - DNA, 25 bp, Homo sapien
acctgcatgatcaaagctgccttct

SEQ ID NO: 3844042 - DNA, 25 bp, Homo sapien
tcagggggcagcatggcaatctgat

SEQ ID NO: 3844043 - DNA, 25 bp, Homo sapien
tgcatgcctgttccttgtatgcctg

SEQ ID NO: 3844044 - DNA, 25 bp, Homo sapien
tgtatacctcctccttgtatactga

SEQ ID NO: 3844045 - DNA, 25 bp, Homo sapien
tatactgactccttgtatgcctgcc

SEQ ID NO: 3844046 - DNA, 25 bp, Homo sapien
accttgcttgcttgccccctgtata

SEQ ID NO: 3844047 - DNA, 25 bp, Homo sapien
gcccctatattaatgggaccaggac

SEQ ID NO: 3844048 - DNA, 25 bp, Homo sapien
cctgaattccaccagtcatagggcc

SEQ ID NO: 3844049 - DNA, 25 bp, Homo sapien
ccaccagtcatagggcctcttgaac

SEQ ID NO: 3844050 - DNA, 25 bp, Homo sapien
gccacctgcccctatattaatggga

SEQ ID NO: 3844051 - DNA, 25 bp, Homo sapien
ggcacgagtctccatcgctcgagaa

SEQ ID NO: 3844052 - DNA, 25 bp, Homo sapien
tctggtttccatcgcacaggtctcc

SEQ ID NO: 3844053 - DNA, 25 bp, Homo sapien
aagacctcagtttccatggcacgag

SEQ ID NO: 3844054 - DNA, 25 bp, Homo sapien
tcctctccattacacgtgtctctaa

SEQ ID NO: 3844055 - DNA, 25 bp, Homo sapien
catctcatgtgaggaagggccacga

SEQ ID NO: 3844056 - DNA, 25 bp, Homo sapien
tgggctctccaattagcagtctggg

SEQ ID NO: 3844057 - DNA, 25 bp, Homo sapien
cacgtgggtcatttggagcatctcc

SEQ ID NO: 3844058 - DNA, 25 bp, Homo sapien
tataggagctctaggatctgacatc

SEQ ID NO: 3844059 - DNA, 25 bp, Homo sapien
cagggccagggccagagacagacac

SEQ ID NO: 3844060 - DNA, 25 bp, Homo sapien
ctgggcagagcccagggccagggcc

SEQ ID NO: 3844061 - DNA, 25 bp, Homo sapien
tgggcagagcccagggccagggcca

SEQ ID NO: 3844062 - DNA, 25 bp, Homo sapien
ttcagagcaatctctggatccatga

SEQ ID NO: 3844063 - DNA, 25 bp, Homo sapien
gcaatctctggatccatgattctca

SEQ ID NO: 3844064 - DNA, 25 bp, Homo sapien
cagagcaatctctggatccatgatt

SEQ ID NO: 3844065 - DNA, 25 bp, Homo sapien
atgtatcttccgatgcagaattttc

SEQ ID NO: 3844066 - DNA, 25 bp, Homo sapien
gatgggatccccatagggtgagtca

SEQ ID NO: 3844067 - DNA, 25 bp, Homo sapien
tgagtcaataatgggcgctgcaggc

SEQ ID NO: 3844068 - DNA, 25 bp, Homo sapien
ggctactgctctggtaatcgattca

SEQ ID NO: 3844069 - DNA, 25 bp, Homo sapien
tgaactcccgcccattgaggttccg

SEQ ID NO: 3844070 - DNA, 25 bp, Homo sapien
gtattcgcagaagccatagcccttg

SEQ ID NO: 3844071 - DNA, 25 bp, Homo sapien
tataccagccggaaactgacaacag

SEQ ID NO: 3844072 - DNA, 25 bp, Homo sapien
agttgcctcatatggaatgttcccc

SEQ ID NO: 3844073 - DNA, 25 bp, Homo sapien
gaacgcagtgatcgatccattgccg

SEQ ID NO: 3844074 - DNA, 25 bp, Homo sapien
tagcggattcttcgaggcgtctgtc

SEQ ID NO: 3844075 - DNA, 25 bp, Homo sapien
gtctgtcctcttgcgaccgacactt

SEQ ID NO: 3844076 - DNA, 25 bp, Homo sapien
gttgtgcagacagccgatagcggat

SEQ ID NO: 3844077 - DNA, 25 bp, Homo sapien
gattccggttgtgcagacagccgat

SEQ ID NO: 3844078 - DNA, 25 bp, Homo sapien
caagatccgggcagaaactttacta

SEQ ID NO: 3844079 - DNA, 25 bp, Homo sapien
tgagcaacggaagcggctttcaaga

SEQ ID NO: 3844080 - DNA, 25 bp, Homo sapien
cttatctaatgctttcagtccctga

SEQ ID NO: 3844081 - DNA, 25 bp, Homo sapien
tgaatcgttccgcttgcctgtggaa

SEQ ID NO: 3844082 - DNA, 25 bp, Homo sapien
gatgaccacagtaaagatggccgca

SEQ ID NO: 3844083 - DNA, 25 bp, Homo sapien
gactcttcccttgacgtcaaaggcg

SEQ ID NO: 3844084 - DNA, 25 bp, Homo sapien
tacgacacgcttggtacgagatgac

SEQ ID NO: 3844085 - DNA, 25 bp, Homo sapien
gatggccgcatagacttcaccgtag

SEQ ID NO: 3844086 - DNA, 25 bp, Homo sapien
gatgcgcgacagtttatatttgcaa

SEQ ID NO: 3844087 - DNA, 25 bp, Homo sapien
cttagctgttcacccaagatgcgcg

SEQ ID NO: 3844088 - DNA, 25 bp, Homo sapien
tatatttgcaagtgacaaggttcat

SEQ ID NO: 3844089 - DNA, 25 bp, Homo sapien
acagttctgcacttagctgttcacc

SEQ ID NO: 3844090 - DNA, 25 bp, Homo sapien
ttcttatcagcaggacttccacagg

SEQ ID NO: 3844091 - DNA, 25 bp, Homo sapien
ccaggactgggtaatagttgcaggt

SEQ ID NO: 3844092 - DNA, 25 bp, Homo sapien
tgtgttggtccatagcccttgaggg

SEQ ID NO: 3844093 - DNA, 25 bp, Homo sapien
tttctgcccatgtagtggtctggag

SEQ ID NO: 3844094 - DNA, 25 bp, Homo sapien
gaacagctgtgcctgcaaggagttt

SEQ ID NO: 3844095 - DNA, 25 bp, Homo sapien
gctgtgcctgcaaggagtttccctt

SEQ ID NO: 3844096 - DNA, 25 bp, Homo sapien
cagctgtgcctgcaaggagtttccc

SEQ ID NO: 3844097 - DNA, 25 bp, Homo sapien
aggatttatggtgctcagatttgag

SEQ ID NO: 3844098 - DNA, 25 bp, Homo sapien
gacaagatagagaatagacgatttg

SEQ ID NO: 3844099 - DNA, 25 bp, Homo sapien
tagagaatagacgatttgagcagac

SEQ ID NO: 3844100 - DNA, 25 bp, Homo sapien
gacgatttgagcagacagcttccaa

SEQ ID NO: 3844101 - DNA, 25 bp, Homo sapien
ttgagcagacagcttccaaatgcat

SEQ ID NO: 3844102 - DNA, 25 bp, Homo sapien
aaagaattgcaccatacgaaactga

SEQ ID NO: 3844103 - DNA, 25 bp, Homo sapien
tgaagttgtcttgcctttagttccc

SEQ ID NO: 3844104 - DNA, 25 bp, Homo sapien
tgcaccatacgaaactgaagttgtc

SEQ ID NO: 3844105 - DNA, 25 bp, Homo sapien
tagaggagagttatattcttctaga

SEQ ID NO: 3844106 - DNA, 25 bp, Homo sapien
aggattgagggtgggagggagtggc

SEQ ID NO: 3844107 - DNA, 25 bp, Homo sapien
gggagggagtggcaggcaatgtgaa

SEQ ID NO: 3844108 - DNA, 25 bp, Homo sapien
gagggagtggcaggcaatgtgaaca

SEQ ID NO: 3844109 - DNA, 25 bp, Homo sapien
gtgggagggagtggcaggcaatgtg

SEQ ID NO: 3844110 - DNA, 25 bp, Homo sapien
ttccagctggttcttccagtaagga

SEQ ID NO: 3844111 - DNA, 25 bp, Homo sapien
tgggcagcggaattccagctggttc

SEQ ID NO: 3844112 - DNA, 25 bp, Homo sapien
gtaaggaagccgtgaaagcaccctc

SEQ ID NO: 3844113 - DNA, 25 bp, Homo sapien
tgaaagcaccctcaggtcgacgtac

SEQ ID NO: 3844114 - DNA, 25 bp, Homo sapien
tgttcctgtgtagacatgagctctg

SEQ ID NO: 3844115 - DNA, 25 bp, Homo sapien
gttttgttcctgtgtagacatgagc

SEQ ID NO: 3844116 - DNA, 25 bp, Homo sapien
gttcctgtgtagacatgagctctga

SEQ ID NO: 3844117 - DNA, 25 bp, Homo sapien
tttgttcctgtgtagacatgagctc

SEQ ID NO: 3844118 - DNA, 25 bp, Homo sapien
tcaagttgccggaactggttgtctc

SEQ ID NO: 3844119 - DNA, 25 bp, Homo sapien
caagttgccggaactggttgtctca

SEQ ID NO: 3844120 - DNA, 25 bp, Homo sapien
gttgccggaactggttgtctcacat

SEQ ID NO: 3844121 - DNA, 25 bp, Homo sapien
agttgccggaactggttgtctcaca

SEQ ID NO: 3844122 - DNA, 25 bp, Homo sapien
cagcatttccaagagtggagaggag

SEQ ID NO: 3844123 - DNA, 25 bp, Homo sapien
actgggggtttttgcttgtcagaga

SEQ ID NO: 3844124 - DNA, 25 bp, Homo sapien
gggtttttgcttgtcagagaagtca

SEQ ID NO: 3844125 - DNA, 25 bp, Homo sapien
gagaagtcagcatttccaagagtgg

SEQ ID NO: 3844126 - DNA, 25 bp, Homo sapien
ttgaggactgacaccctttctctgc

SEQ ID NO: 3844127 - DNA, 25 bp, Homo sapien
caaatgttttgaggactgacaccct

SEQ ID NO: 3844128 - DNA, 25 bp, Homo sapien
tgttttgaggactgacaccctttct

SEQ ID NO: 3844129 - DNA, 25 bp, Homo sapien
tccaaatgttttgaggactgacacc

SEQ ID NO: 3844130 - DNA, 25 bp, Homo sapien
cagcagtggtatgtttgcctgctat

SEQ ID NO: 3844131 - DNA, 25 bp, Homo sapien
ccaggaaaattagccatggaggtga

SEQ ID NO: 3844132 - DNA, 25 bp, Homo sapien
tattgcattctaggcttaagtccag

SEQ ID NO: 3844133 - DNA, 25 bp, Homo sapien
gaagacattataaaccctccaggaa

SEQ ID NO: 3844134 - DNA, 25 bp, Homo sapien
cgttctctgggtcttgggagataca

SEQ ID NO: 3844135 - DNA, 25 bp, Homo sapien
gaagcatttccggaatttgctttcc

SEQ ID NO: 3844136 - DNA, 25 bp, Homo sapien
gctttccgttctctgggtcttggga

SEQ ID NO: 3844137 - DNA, 25 bp, Homo sapien
cggaatttgctttccgttctctggg

SEQ ID NO: 3844138 - DNA, 25 bp, Homo sapien
agtactgggatggacagagcactgc

SEQ ID NO: 3844139 - DNA, 25 bp, Homo sapien
tgaaagtactgggatggacagagca

SEQ ID NO: 3844140 - DNA, 25 bp, Homo sapien
tactgggatggacagagcactgcat

SEQ ID NO: 3844141 - DNA, 25 bp, Homo sapien
aaagtactgggatggacagagcact

SEQ ID NO: 3844142 - DNA, 25 bp, Homo sapien
tggactgagtgccaatgctatctca

SEQ ID NO: 3844143 - DNA, 25 bp, Homo sapien
ctaacaagaactctttctggtagca

SEQ ID NO: 3844144 - DNA, 25 bp, Homo sapien
tgactctaacaagaactctttctgg

SEQ ID NO: 3844145 - DNA, 25 bp, Homo sapien
aatgctatctcaaatgactctaaca

SEQ ID NO: 3844146 - DNA, 25 bp, Homo sapien
cattacactgagaagtcacgtcttt

SEQ ID NO: 3844147 - DNA, 25 bp, Homo sapien
tacactgagaagtcacgtctttcct

SEQ ID NO: 3844148 - DNA, 25 bp, Homo sapien
cactgagaagtcacgtctttcctcc

SEQ ID NO: 3844149 - DNA, 25 bp, Homo sapien
agaagtcacgtctttcctcctctgg

SEQ ID NO: 3844150 - DNA, 25 bp, Homo sapien
cattcagggcacatagtggttaggg

SEQ ID NO: 3844151 - DNA, 25 bp, Homo sapien
tggagagaacgtcattgtaagcact

SEQ ID NO: 3844152 - DNA, 25 bp, Homo sapien
gagaaagtagaccatccaccaggaa

SEQ ID NO: 3844153 - DNA, 25 bp, Homo sapien
ccagggcaatcagcggaagggaaat

SEQ ID NO: 3844154 - DNA, 25 bp, Homo sapien
gttgtcagagttaagtcatttagta

SEQ ID NO: 3844155 - DNA, 25 bp, Homo sapien
ttagtaatgtgataaatatcctctg

SEQ ID NO: 3844156 - DNA, 25 bp, Homo sapien
tataaaagacgtcttgttcctccag

SEQ ID NO: 3844157 - DNA, 25 bp, Homo sapien
tcttgttcctccagtgttgtcagag

SEQ ID NO: 3844158 - DNA, 25 bp, Homo sapien
tgtacgttcacttgaatttgaaatg

SEQ ID NO: 3844159 - DNA, 25 bp, Homo sapien
tatgttgttgatgcatactgtacgt

SEQ ID NO: 3844160 - DNA, 25 bp, Homo sapien
tttaaagcacgaatatgccaaagct

SEQ ID NO: 3844161 - DNA, 25 bp, Homo sapien
tgccaaagcttaagagcatctaaat

SEQ ID NO: 3844162 - DNA, 25 bp, Homo sapien
ttcaactctatctttcaaatgtagc

SEQ ID NO: 3844163 - DNA, 25 bp, Homo sapien
taaattcaactctatctttcaaatg

SEQ ID NO: 3844164 - DNA, 25 bp, Homo sapien
catctaattttgttactccccagag

SEQ ID NO: 3844165 - DNA, 25 bp, Homo sapien
atctaattttgttactccccagagt

SEQ ID NO: 3844166 - DNA, 25 bp, Homo sapien
cagtttctattgaaggatttattcc

SEQ ID NO: 3844167 - DNA, 25 bp, Homo sapien
gaataccaacagtttctattgaagg

SEQ ID NO: 3844168 - DNA, 25 bp, Homo sapien
gaaggagaataccaacagtttctat

SEQ ID NO: 3844169 - DNA, 25 bp, Homo sapien
ccaacagtttctattgaaggattta

SEQ ID NO: 3844170 - DNA, 25 bp, Homo sapien
tagagctggctatttggtgaattcc

SEQ ID NO: 3844171 - DNA, 25 bp, Homo sapien
taagtagctgtctctcataatgagt

SEQ ID NO: 3844172 - DNA, 25 bp, Homo sapien
ttcttcccatactgactagagctgg

SEQ ID NO: 3844173 - DNA, 25 bp, Homo sapien
tccaaatgagcttccacctaagtag

SEQ ID NO: 3844174 - DNA, 25 bp, Homo sapien
tctgaaatccgattgatgttactca

SEQ ID NO: 3844175 - DNA, 25 bp, Homo sapien
gttactcagtggaaggaatttcaca

SEQ ID NO: 3844176 - DNA, 25 bp, Homo sapien
tgggttctgaaatccgattgatgtt

SEQ ID NO: 3844177 - DNA, 25 bp, Homo sapien
tccgattgatgttactcagtggaag

SEQ ID NO: 3844178 - DNA, 25 bp, Homo sapien
cattgaataatggtctgctccactg

SEQ ID NO: 3844179 - DNA, 25 bp, Homo sapien
tccactggaattgccaggtccccat

SEQ ID NO: 3844180 - DNA, 25 bp, Homo sapien
cttcattgaataatggtctgctcca

SEQ ID NO: 3844181 - DNA, 25 bp, Homo sapien
tgaataatggtctgctccactggaa

SEQ ID NO: 3844182 - DNA, 25 bp, Homo sapien
ccttcttcaattagctttctcagtg

SEQ ID NO: 3844183 - DNA, 25 bp, Homo sapien
cttcttcaattagctttctcagtgt

SEQ ID NO: 3844184 - DNA, 25 bp, Homo sapien
tcaattagctttctcagtgttttta

SEQ ID NO: 3844185 - DNA, 25 bp, Homo sapien
tcttcaattagctttctcagtgttt

SEQ ID NO: 3844186 - DNA, 25 bp, Homo sapien
tgacctcttgaatcagggtatccaa

SEQ ID NO: 3844187 - DNA, 25 bp, Homo sapien
cctcttgaatcagggtatccaatga

SEQ ID NO: 3844188 - DNA, 25 bp, Homo sapien
cctatgacctcttgaatcagggtat

SEQ ID NO: 3844189 - DNA, 25 bp, Homo sapien
tcttgaatcagggtatccaatgact

SEQ ID NO: 3844190 - DNA, 25 bp, Homo sapien
gaaggacaaactacaaggagcatct

SEQ ID NO: 3844191 - DNA, 25 bp, Homo sapien
gattagccttgccaattgtggatga

SEQ ID NO: 3844192 - DNA, 25 bp, Homo sapien
ggagcatctctgattgcttcagtat

SEQ ID NO: 3844193 - DNA, 25 bp, Homo sapien
tctgtgacgtctggagtagtgaaag

SEQ ID NO: 3844194 - DNA, 25 bp, Homo sapien
gcttcaatagcgaccattcttctct

SEQ ID NO: 3844195 - DNA, 25 bp, Homo sapien
ttagtggcttcaatagcgaccattc

SEQ ID NO: 3844196 - DNA, 25 bp, Homo sapien
ttttcacatgccaagctttctgggg

SEQ ID NO: 3844197 - DNA, 25 bp, Homo sapien
agagctaatttagtggcttcaatag

SEQ ID NO: 3844198 - DNA, 25 bp, Homo sapien
ttcacttggtatattagttgcaatg

SEQ ID NO: 3844199 - DNA, 25 bp, Homo sapien
ttagttgcaatgttcctccatagtg

SEQ ID NO: 3844200 - DNA, 25 bp, Homo sapien
gaaatagtggactcagctctaaaca

SEQ ID NO: 3844201 - DNA, 25 bp, Homo sapien
ctctcatggatgcagaaatagtgga

SEQ ID NO: 3844202 - DNA, 25 bp, Homo sapien
tgtctactcgacgacatcgttgctg

SEQ ID NO: 3844203 - DNA, 25 bp, Homo sapien
tctcactgtctactcgacgacatcg

SEQ ID NO: 3844204 - DNA, 25 bp, Homo sapien
agatggccgactgccactctcactg

SEQ ID NO: 3844205 - DNA, 25 bp, Homo sapien
gacatcgttgctgcaagcctgcttc

SEQ ID NO: 3844206 - DNA, 25 bp, Homo sapien
tcacccaggcttgaacattaaggac

SEQ ID NO: 3844207 - DNA, 25 bp, Homo sapien
caacctctgaaacagccctctgtgt

SEQ ID NO: 3844208 - DNA, 25 bp, Homo sapien
cacccaggcttgaacattaaggaca

SEQ ID NO: 3844209 - DNA, 25 bp, Homo sapien
cctctgaaacagccctctgtgtcat

SEQ ID NO: 3844210 - DNA, 25 bp, Homo sapien
tctggtgcagcaatcccaaatgtac

SEQ ID NO: 3844211 - DNA, 25 bp, Homo sapien
ttgaaagcgaatcagatatttattg

SEQ ID NO: 3844212 - DNA, 25 bp, Homo sapien
aatcatctttttgaaagcgaatcag

SEQ ID NO: 3844213 - DNA, 25 bp, Homo sapien
tggaattttgatattcatcctctgg

SEQ ID NO: 3844214 - DNA, 25 bp, Homo sapien
caagcactttgattgatacttgatc

SEQ ID NO: 3844215 - DNA, 25 bp, Homo sapien
gagtcctgtggtgttaagagtttac

SEQ ID NO: 3844216 - DNA, 25 bp, Homo sapien
agagtttactctggcaagcactttg

SEQ ID NO: 3844217 - DNA, 25 bp, Homo sapien
gatacttgatccaacttgtgtcctc

SEQ ID NO: 3844218 - DNA, 25 bp, Homo sapien
ccatagctgtgagtggttgaagtag

SEQ ID NO: 3844219 - DNA, 25 bp, Homo sapien
tgcaaggtgctgtgggaccatagct

SEQ ID NO: 3844220 - DNA, 25 bp, Homo sapien
tacgttagtgatatgttagccttga

SEQ ID NO: 3844221 - DNA, 25 bp, Homo sapien
tgattccccagacaggtagccctgg

SEQ ID NO: 3844222 - DNA, 25 bp, Homo sapien
aacagttggacacttgcttcgacac

SEQ ID NO: 3844223 - DNA, 25 bp, Homo sapien
tgaaacaggaaaccaacttgctcct

SEQ ID NO: 3844224 - DNA, 25 bp, Homo sapien
ttttgaatcttgcactgaaacagga

SEQ ID NO: 3844225 - DNA, 25 bp, Homo sapien
tcctttaagtagactgcagttagcg

SEQ ID NO: 3844226 - DNA, 25 bp, Homo sapien
tactgatgtatgtgggtcttaggat

SEQ ID NO: 3844227 - DNA, 25 bp, Homo sapien
caattttattgtataggttggatag

SEQ ID NO: 3844228 - DNA, 25 bp, Homo sapien
ccattcatctggtggaacagttatc

SEQ ID NO: 3844229 - DNA, 25 bp, Homo sapien
tgtgtttgatgtgtcccagtgttga

SEQ ID NO: 3844230 - DNA, 25 bp, Homo sapien
tgtaggttttgtttgcgagttcaac

SEQ ID NO: 3844231 - DNA, 25 bp, Homo sapien
accagctgtccggttgtaggttttg

SEQ ID NO: 3844232 - DNA, 25 bp, Homo sapien
cctataaccagctgtccggttgtag

SEQ ID NO: 3844233 - DNA, 25 bp, Homo sapien
gcgagttcaaccgtcacttggttat

SEQ ID NO: 3844234 - DNA, 25 bp, Homo sapien
gcattgtagatagattttgattcct

SEQ ID NO: 3844235 - DNA, 25 bp, Homo sapien
cttttagtattagcttagccccaga

SEQ ID NO: 3844236 - DNA, 25 bp, Homo sapien
gcttagccccagaattagatgcagt

SEQ ID NO: 3844237 - DNA, 25 bp, Homo sapien
tagatgcagttaatacagccaggtc

SEQ ID NO: 3844238 - DNA, 25 bp, Homo sapien
tcagagtagttcacccatgggagca

SEQ ID NO: 3844239 - DNA, 25 bp, Homo sapien
tgcttccggtaaacactccttgatg

SEQ ID NO: 3844240 - DNA, 25 bp, Homo sapien
ggagcacgtgtgaaacattagcctg

SEQ ID NO: 3844241 - DNA, 25 bp, Homo sapien
gaagactcccgtccctttgatgaca

SEQ ID NO: 3844242 - DNA, 25 bp, Homo sapien
gtccagagagggatggtttttagtc

SEQ ID NO: 3844243 - DNA, 25 bp, Homo sapien
gagagggatggtttttagtcttcca

SEQ ID NO: 3844244 - DNA, 25 bp, Homo sapien
atggtttttagtcttccaataatgc

SEQ ID NO: 3844245 - DNA, 25 bp, Homo sapien
tggtttttagtcttccaataatgca

SEQ ID NO: 3844246 - DNA, 25 bp, Homo sapien
cttgggcaatagagctggatcttgt

SEQ ID NO: 3844247 - DNA, 25 bp, Homo sapien
taaatagaggtaacatcacagtgat

SEQ ID NO: 3844248 - DNA, 25 bp, Homo sapien
gacaggttccttgaccctatcaaaa

SEQ ID NO: 3844249 - DNA, 25 bp, Homo sapien
tatgtggtcattagaagggataaac

SEQ ID NO: 3844250 - DNA, 25 bp, Homo sapien
gggtagccatgccataatagtcacc

SEQ ID NO: 3844251 - DNA, 25 bp, Homo sapien
gccatgccataatagtcaccaactc

SEQ ID NO: 3844252 - DNA, 25 bp, Homo sapien
gccctgggtagccatgccataatag

SEQ ID NO: 3844253 - DNA, 25 bp, Homo sapien
cctgggtagccatgccataatagtc

SEQ ID NO: 3844254 - DNA, 25 bp, Homo sapien
gaactccctgagactgtgtacagtg

SEQ ID NO: 3844255 - DNA, 25 bp, Homo sapien
ggtattatgcttcccttaacactgg

SEQ ID NO: 3844256 - DNA, 25 bp, Homo sapien
taactgcatttcaagacggtgtggc

SEQ ID NO: 3844257 - DNA, 25 bp, Homo sapien
ccagtacagtatgtgaggaactccc

SEQ ID NO: 3844258 - DNA, 25 bp, Homo sapien
tcaagctagagaactgaataccaag

SEQ ID NO: 3844259 - DNA, 25 bp, Homo sapien
catttcaagctagagaactgaatac

SEQ ID NO: 3844260 - DNA, 25 bp, Homo sapien
actgaataccaagctgatagtgcaa

SEQ ID NO: 3844261 - DNA, 25 bp, Homo sapien
ccaagctgatagtgcaaatcttcta

SEQ ID NO: 3844262 - DNA, 25 bp, Homo sapien
ttctgagacacagctgccagcaaac

SEQ ID NO: 3844263 - DNA, 25 bp, Homo sapien
tgcttctgccttgctgaagacagct

SEQ ID NO: 3844264 - DNA, 25 bp, Homo sapien
tctgccttgctgaagacagcttttt

SEQ ID NO: 3844265 - DNA, 25 bp, Homo sapien
ttttctgagacacagctgccagcaa

SEQ ID NO: 3844266 - DNA, 25 bp, Homo sapien
gacctggctatctggcattgttgca

SEQ ID NO: 3844267 - DNA, 25 bp, Homo sapien
cattgacaatggtccaaccgaaaag

SEQ ID NO: 3844268 - DNA, 25 bp, Homo sapien
gtattcctgttttgctaagctgtgc

SEQ ID NO: 3844269 - DNA, 25 bp, Homo sapien
catagtttagaacatgacctggcta

SEQ ID NO: 3844270 - DNA, 25 bp, Homo sapien
tgcaaatcatttacgaggcaagttt

SEQ ID NO: 3844271 - DNA, 25 bp, Homo sapien
aaacaggatgctttttccgagttct

SEQ ID NO: 3844272 - DNA, 25 bp, Homo sapien
gaaaaagtcacttggtgcacctctc

SEQ ID NO: 3844273 - DNA, 25 bp, Homo sapien
tccgagttcttgtatatgcaaatca

SEQ ID NO: 3844274 - DNA, 25 bp, Homo sapien
gatgatgttgcatctacatcactca

SEQ ID NO: 3844275 - DNA, 25 bp, Homo sapien
tcttcttgatcatgaaagggttttg

SEQ ID NO: 3844276 - DNA, 25 bp, Homo sapien
cagttttgggaggagcacgcagatc

SEQ ID NO: 3844277 - DNA, 25 bp, Homo sapien
cacaatcattagaaggatagggagg

SEQ ID NO: 3844278 - DNA, 25 bp, Homo sapien
taatttgcaggaggactcttagtcc

SEQ ID NO: 3844279 - DNA, 25 bp, Homo sapien
tgatcagcatttcctcaacagtggc

SEQ ID NO: 3844280 - DNA, 25 bp, Homo sapien
gcaaacagaagctttaagagccagt

SEQ ID NO: 3844281 - DNA, 25 bp, Homo sapien
tggtatctggtacatcagtgcagga

SEQ ID NO: 3844282 - DNA, 25 bp, Homo sapien
cactggtactaaagcatgagaagca

SEQ ID NO: 3844283 - DNA, 25 bp, Homo sapien
aggccagtagaaattatgttagaca

SEQ ID NO: 3844284 - DNA, 25 bp, Homo sapien
aattcagaagcactggtactaaagc

SEQ ID NO: 3844285 - DNA, 25 bp, Homo sapien
aaattatgttagacatggaatcggg

SEQ ID NO: 3844286 - DNA, 25 bp, Homo sapien
taggaagaacatgattcttcaaggt

SEQ ID NO: 3844287 - DNA, 25 bp, Homo sapien
aggaagaacatgattcttcaaggtt

SEQ ID NO: 3844288 - DNA, 25 bp, Homo sapien
ggaagaacatgattcttcaaggttc

SEQ ID NO: 3844289 - DNA, 25 bp, Homo sapien
ctaggaagaacatgattcttcaagg

SEQ ID NO: 3844290 - DNA, 25 bp, Homo sapien
gttaggttagtcttctcatccagaa

SEQ ID NO: 3844291 - DNA, 25 bp, Homo sapien
tagttaggttagtcttctcatccag

SEQ ID NO: 3844292 - DNA, 25 bp, Homo sapien
cttagttaggttagtcttctcatcc

SEQ ID NO: 3844293 - DNA, 25 bp, Homo sapien
tacttagttaggttagtcttctcat

SEQ ID NO: 3844294 - DNA, 25 bp, Homo sapien
tctcgagtctgttgaagtagagctt

SEQ ID NO: 3844295 - DNA, 25 bp, Homo sapien
aactttatttgctctgagaacattt

SEQ ID NO: 3844296 - DNA, 25 bp, Homo sapien
agtagagctttggtttaatagccac

SEQ ID NO: 3844297 - DNA, 25 bp, Homo sapien
tctaagggaacacgggaaccatgaa

SEQ ID NO: 3844298 - DNA, 25 bp, Homo sapien
tgctagtctcttcaaaatcgacatg

SEQ ID NO: 3844299 - DNA, 25 bp, Homo sapien
catgctcagtatcagtgtcaatgat

SEQ ID NO: 3844300 - DNA, 25 bp, Homo sapien
gattattacttgatctttaggctgc

SEQ ID NO: 3844301 - DNA, 25 bp, Homo sapien
aaagaacagactccttgcaggatgt

SEQ ID NO: 3844302 - DNA, 25 bp, Homo sapien
ctgagtacaaaaggccttctcttgg

SEQ ID NO: 3844303 - DNA, 25 bp, Homo sapien
tacaaaaggccttctcttggcagtg

SEQ ID NO: 3844304 - DNA, 25 bp, Homo sapien
agtacaaaaggccttctcttggcag

SEQ ID NO: 3844305 - DNA, 25 bp, Homo sapien
gagtacaaaaggccttctcttggca

SEQ ID NO: 3844306 - DNA, 25 bp, Homo sapien
tagtacactgaaggtgcttaacgca

SEQ ID NO: 3844307 - DNA, 25 bp, Homo sapien
gcttaacgcattgattcctgacagg

SEQ ID NO: 3844308 - DNA, 25 bp, Homo sapien
acagcttgcagatttcctagtacac

SEQ ID NO: 3844309 - DNA, 25 bp, Homo sapien
tcaaagtcattcaaacttaacacag

SEQ ID NO: 3844310 - DNA, 25 bp, Homo sapien
agaattgtttagatgatcttcttaa

SEQ ID NO: 3844311 - DNA, 25 bp, Homo sapien
cttaatattacctttgaaactgaag

SEQ ID NO: 3844312 - DNA, 25 bp, Homo sapien
tcaagaattgtttagatgatcttct

SEQ ID NO: 3844313 - DNA, 25 bp, Homo sapien
attcaagaattgtttagatgatctt

SEQ ID NO: 3844314 - DNA, 25 bp, Homo sapien
gtcccgtgcaaggtaagacttggga

SEQ ID NO: 3844315 - DNA, 25 bp, Homo sapien
caatttcaatgacgtcaaattcact

SEQ ID NO: 3844316 - DNA, 25 bp, Homo sapien
tccctagaaagggtattgcgtggtc

SEQ ID NO: 3844317 - DNA, 25 bp, Homo sapien
gggagcaaaccctgcattcggaagc

SEQ ID NO: 3844318 - DNA, 25 bp, Homo sapien
cacgttggaccctgtccgctttggt

SEQ ID NO: 3844319 - DNA, 25 bp, Homo sapien
cacgcgtctgcctaatcaagttcat

SEQ ID NO: 3844320 - DNA, 25 bp, Homo sapien
cggccactttgatctcacgcgtctg

SEQ ID NO: 3844321 - DNA, 25 bp, Homo sapien
ctggcacgttggaccctgtccgctt

SEQ ID NO: 3844322 - DNA, 25 bp, Homo sapien
tctgcaaactgcgactctaaagggt

SEQ ID NO: 3844323 - DNA, 25 bp, Homo sapien
tctcagaggcgtcttgctagagcca

SEQ ID NO: 3844324 - DNA, 25 bp, Homo sapien
tgcacatttttctcgcagtggcggg

SEQ ID NO: 3844325 - DNA, 25 bp, Homo sapien
taaagtcgtctgctataacgctcgc

SEQ ID NO: 3844326 - DNA, 25 bp, Homo sapien
tacctatcaatgtaacacccattgg

SEQ ID NO: 3844327 - DNA, 25 bp, Homo sapien
caatgtaacacccattggagagtgc

SEQ ID NO: 3844328 - DNA, 25 bp, Homo sapien
tatttgtacctatcaatgtaacacc

SEQ ID NO: 3844329 - DNA, 25 bp, Homo sapien
acccattggagagtgcaaggaagga

SEQ ID NO: 3844330 - DNA, 25 bp, Homo sapien
cttctgctgacctgaacttgtccag

SEQ ID NO: 3844331 - DNA, 25 bp, Homo sapien
tctgctgacctgaacttgtccagtg

SEQ ID NO: 3844332 - DNA, 25 bp, Homo sapien
gctgacctgaacttgtccagtggag

SEQ ID NO: 3844333 - DNA, 25 bp, Homo sapien
gacctgaacttgtccagtggagtca

SEQ ID NO: 3844334 - DNA, 25 bp, Homo sapien
gaccatggctctcaacttgtatgcc

SEQ ID NO: 3844335 - DNA, 25 bp, Homo sapien
tttctcctctgaatgaccatggctc

SEQ ID NO: 3844336 - DNA, 25 bp, Homo sapien
tgtatgcctttggatatgtgccatt

SEQ ID NO: 3844337 - DNA, 25 bp, Homo sapien
tactagatgggatcttttctcctct

SEQ ID NO: 3844338 - DNA, 25 bp, Homo sapien
tccgcttaataagctcccattaggg

SEQ ID NO: 3844339 - DNA, 25 bp, Homo sapien
gaaagaatagggtacaatcattgga

SEQ ID NO: 3844340 - DNA, 25 bp, Homo sapien
tattctatgagtgttttcccagtca

SEQ ID NO: 3844341 - DNA, 25 bp, Homo sapien
tctcattagactgcaggacaccttt

SEQ ID NO: 3844342 - DNA, 25 bp, Homo sapien
ttatttgaggtatttgacggtcagc

SEQ ID NO: 3844343 - DNA, 25 bp, Homo sapien
ctttatttgaggtatttgacggtca

SEQ ID NO: 3844344 - DNA, 25 bp, Homo sapien
ataactttatttgaggtatttgacg

SEQ ID NO: 3844345 - DNA, 25 bp, Homo sapien
atttgaggtatttgacggtcagcga

SEQ ID NO: 3844346 - DNA, 25 bp, Homo sapien
ttcctggacaaccaaacacggattc

SEQ ID NO: 3844347 - DNA, 25 bp, Homo sapien
tcctggacaaccaaacacggattcg

SEQ ID NO: 3844348 - DNA, 25 bp, Homo sapien
cgagggggactcttcttgaagccca

SEQ ID NO: 3844349 - DNA, 25 bp, Homo sapien
ttctgaatcgctttgagtgcccgag

SEQ ID NO: 3844350 - DNA, 25 bp, Homo sapien
tttgagtgcccgagggggactcttc

SEQ ID NO: 3844351 - DNA, 25 bp, Homo sapien
tttctgaatcgctttgagtgcccga

SEQ ID NO: 3844352 - DNA, 25 bp, Homo sapien
atggatggggcttgtgaatgttgtt

SEQ ID NO: 3844353 - DNA, 25 bp, Homo sapien
gatggggcttgtgaatgttgttggt

SEQ ID NO: 3844354 - DNA, 25 bp, Homo sapien
ggatggggcttgtgaatgttgttgg

SEQ ID NO: 3844355 - DNA, 25 bp, Homo sapien
ggggcttgtgaatgttgttggtgta

SEQ ID NO: 3844356 - DNA, 25 bp, Homo sapien
taagaggtatgtcacatttattcct

SEQ ID NO: 3844357 - DNA, 25 bp, Homo sapien
gagtgacttttgtatgtagatacta

SEQ ID NO: 3844358 - DNA, 25 bp, Homo sapien
tgcacacctacagagttactacagg

SEQ ID NO: 3844359 - DNA, 25 bp, Homo sapien
gatataccttatatgccagtgactc

SEQ ID NO: 3844360 - DNA, 25 bp, Homo sapien
ccattactggcttactaggagataa

SEQ ID NO: 3844361 - DNA, 25 bp, Homo sapien
tgaaagtgaaccagttgtgttaacc

SEQ ID NO: 3844362 - DNA, 25 bp, Homo sapien
tcatgtaatcttatgccctagtgac

SEQ ID NO: 3844363 - DNA, 25 bp, Homo sapien
ttattagaatttgcacagaaccaga

SEQ ID NO: 3844364 - DNA, 25 bp, Homo sapien
tgagaccaagccgatttatctcaat

SEQ ID NO: 3844365 - DNA, 25 bp, Homo sapien
gaccaagccgatttatctcaattct

SEQ ID NO: 3844366 - DNA, 25 bp, Homo sapien
aatgatgagaccaagccgatttatc

SEQ ID NO: 3844367 - DNA, 25 bp, Homo sapien
tatctcaattctgaggggcttttta

SEQ ID NO: 3844368 - DNA, 25 bp, Homo sapien
aaatgtttcacattaggtctaactg

SEQ ID NO: 3844369 - DNA, 25 bp, Homo sapien
ctgtatcatccggtagccatctgaa

SEQ ID NO: 3844370 - DNA, 25 bp, Homo sapien
caaccgaccgtctgatatagatcat

SEQ ID NO: 3844371 - DNA, 25 bp, Homo sapien
taggtctaactgcaatacggtcaac

SEQ ID NO: 3844372 - DNA, 25 bp, Homo sapien
tgccaatatgaaaggagaatctccc

SEQ ID NO: 3844373 - DNA, 25 bp, Homo sapien
taagcactggactcatacaagggtg

SEQ ID NO: 3844374 - DNA, 25 bp, Homo sapien
cattagtgtaattcagttgctggca

SEQ ID NO: 3844375 - DNA, 25 bp, Homo sapien
gggtgtcccacgttgctcatttatg

SEQ ID NO: 3844376 - DNA, 25 bp, Homo sapien
taggaagttccatagctagtcttcg

SEQ ID NO: 3844377 - DNA, 25 bp, Homo sapien
tgaacatatttcgagggctactgaa

SEQ ID NO: 3844378 - DNA, 25 bp, Homo sapien
gactcaagccctgctaggcgttcca

SEQ ID NO: 3844379 - DNA, 25 bp, Homo sapien
cattttactggttgccgttgtggcc

SEQ ID NO: 3844380 - DNA, 25 bp, Homo sapien
cagtttacaatggagtgtctcaggg

SEQ ID NO: 3844381 - DNA, 25 bp, Homo sapien
tccagtttacaatggagtgtctcag

SEQ ID NO: 3844382 - DNA, 25 bp, Homo sapien
tcagtctcacggcttcaaacaacat

SEQ ID NO: 3844383 - DNA, 25 bp, Homo sapien
tcactcagtctcacggcttcaaaca

SEQ ID NO: 3844384 - DNA, 25 bp, Homo sapien
gagtctacaaggactcaggccctcc

SEQ ID NO: 3844385 - DNA, 25 bp, Homo sapien
ggccctccctaacctagactctgtc

SEQ ID NO: 3844386 - DNA, 25 bp, Homo sapien
tcagacaatcctcatcgcagtagcc

SEQ ID NO: 3844387 - DNA, 25 bp, Homo sapien
tgtgttccttctaaaccctaagcca

SEQ ID NO: 3844388 - DNA, 25 bp, Homo sapien
aatcaccttaaaagacatcagcata

SEQ ID NO: 3844389 - DNA, 25 bp, Homo sapien
aatatggatgtttgaaggctcttga

SEQ ID NO: 3844390 - DNA, 25 bp, Homo sapien
taatatggatgtttgaaggctcttg

SEQ ID NO: 3844391 - DNA, 25 bp, Homo sapien
taaaagacatcagcataatatggat

SEQ ID NO: 3844392 - DNA, 25 bp, Homo sapien
tccagcatgcagagataaactctcc

SEQ ID NO: 3844393 - DNA, 25 bp, Homo sapien
tccagggctgcttgaagggtacaat

SEQ ID NO: 3844394 - DNA, 25 bp, Homo sapien
tggcatcctcattactgactcagga

SEQ ID NO: 3844395 - DNA, 25 bp, Homo sapien
tggagcatgcacttacaagagttgg

SEQ ID NO: 3844396 - DNA, 25 bp, Homo sapien
tactcctctagaacgaggcggtgtc

SEQ ID NO: 3844397 - DNA, 25 bp, Homo sapien
aacgaggcggtgtctggaaacaact

SEQ ID NO: 3844398 - DNA, 25 bp, Homo sapien
gcttgtgttctagctactcctctag

SEQ ID NO: 3844399 - DNA, 25 bp, Homo sapien
tggtagctttgcttgtgttctagct

SEQ ID NO: 3844400 - DNA, 25 bp, Homo sapien
ccttcacaaggttgacatttaatcc

SEQ ID NO: 3844401 - DNA, 25 bp, Homo sapien
cagggatgtgtaggccatgagaaac

SEQ ID NO: 3844402 - DNA, 25 bp, Homo sapien
tgatagcattctggatgaaacaggg

SEQ ID NO: 3844403 - DNA, 25 bp, Homo sapien
tggttttaagcatagtggcagggta

SEQ ID NO: 3844404 - DNA, 25 bp, Homo sapien
ttctacttcacttgacaactgaaag

SEQ ID NO: 3844405 - DNA, 25 bp, Homo sapien
caactgaaagatgtttgcgaatccc

SEQ ID NO: 3844406 - DNA, 25 bp, Homo sapien
ctggacctcaacctgaaacattttg

SEQ ID NO: 3844407 - DNA, 25 bp, Homo sapien
tattgtttgtgtactaatatacacc

SEQ ID NO: 3844408 - DNA, 25 bp, Homo sapien
cagacactcatggaaatgatacaca

SEQ ID NO: 3844409 - DNA, 25 bp, Homo sapien
ttcctgttgggactttagaggaata

SEQ ID NO: 3844410 - DNA, 25 bp, Homo sapien
catggaaatgatacacatctctggg

SEQ ID NO: 3844411 - DNA, 25 bp, Homo sapien
ggactttagaggaatatgtatcatc

SEQ ID NO: 3844412 - DNA, 25 bp, Homo sapien
aagcaccatttttataccagctgta

SEQ ID NO: 3844413 - DNA, 25 bp, Homo sapien
tttttataccagctgtacattcaac

SEQ ID NO: 3844414 - DNA, 25 bp, Homo sapien
tacaccttcttcatgacgacaaagc

SEQ ID NO: 3844415 - DNA, 25 bp, Homo sapien
ccagccaggtggtttgatcccagaa

SEQ ID NO: 3844416 - DNA, 25 bp, Homo sapien
ttctctacttctgatttaaggccaa

SEQ ID NO: 3844417 - DNA, 25 bp, Homo sapien
gggtatgcttcctactctatctctt

SEQ ID NO: 3844418 - DNA, 25 bp, Homo sapien
tagatcctgtaggtatattacattg

SEQ ID NO: 3844419 - DNA, 25 bp, Homo sapien
tgatttaaggccaacaacccttaga

SEQ ID NO: 3844420 - DNA, 25 bp, Homo sapien
aatggtctgccaatatactgctcag

SEQ ID NO: 3844421 - DNA, 25 bp, Homo sapien
aagcagcctgctcaagtaagtatag

SEQ ID NO: 3844422 - DNA, 25 bp, Homo sapien
tccctcagtctgtaatgagtgtgtg

SEQ ID NO: 3844423 - DNA, 25 bp, Homo sapien
gccttaaagaaagacgctcagttga

SEQ ID NO: 3844424 - DNA, 25 bp, Homo sapien
tgcaaagtcctgtatgaaaagtgag

SEQ ID NO: 3844425 - DNA, 25 bp, Homo sapien
tgagcttctggatcaaatcaggaat

SEQ ID NO: 3844426 - DNA, 25 bp, Homo sapien
ctagaaaatttacatgctgaagctc

SEQ ID NO: 3844427 - DNA, 25 bp, Homo sapien
gaacaccactcttaatgttaattgc

SEQ ID NO: 3844428 - DNA, 25 bp, Homo sapien
ggtattgcatggcaaggtcatagtt

SEQ ID NO: 3844429 - DNA, 25 bp, Homo sapien
aatgtggtattgcatggcaaggtca

SEQ ID NO: 3844430 - DNA, 25 bp, Homo sapien
ttgcatggcaaggtcatagtttaaa

SEQ ID NO: 3844431 - DNA, 25 bp, Homo sapien
tgtggtattgcatggcaaggtcata

SEQ ID NO: 3844432 - DNA, 25 bp, Homo sapien
cgtctccactctggcgtcaaacagt

SEQ ID NO: 3844433 - DNA, 25 bp, Homo sapien
caacagacagccgtagagggcagct

SEQ ID NO: 3844434 - DNA, 25 bp, Homo sapien
taatgagtaggtagccaaatgacaa

SEQ ID NO: 3844435 - DNA, 25 bp, Homo sapien
ttacttttgactttgcttccaaggc

SEQ ID NO: 3844436 - DNA, 25 bp, Homo sapien
tttcccaaataacaacaactgaata

SEQ ID NO: 3844437 - DNA, 25 bp, Homo sapien
atttcccaaataacaacaactgaat

SEQ ID NO: 3844438 - DNA, 25 bp, Homo sapien
agggaatgacgttgttggaagtgtt

SEQ ID NO: 3844439 - DNA, 25 bp, Homo sapien
gaatgacgttgttggaagtgttttc

SEQ ID NO: 3844440 - DNA, 25 bp, Homo sapien
cccaagggaatgacgttgttggaag

SEQ ID NO: 3844441 - DNA, 25 bp, Homo sapien
atgacgttgttggaagtgttttctg

SEQ ID NO: 3844442 - DNA, 25 bp, Homo sapien
gaacatggcgtagagcatctgcatg

SEQ ID NO: 3844443 - DNA, 25 bp, Homo sapien
gccctagaacatggcgtagagcatc

SEQ ID NO: 3844444 - DNA, 25 bp, Homo sapien
cagaggccctagaacatggcgtaga

SEQ ID NO: 3844445 - DNA, 25 bp, Homo sapien
ctagaacatggcgtagagcatctgc

SEQ ID NO: 3844446 - DNA, 25 bp, Homo sapien
tatttttggtcgtatattaatttca

SEQ ID NO: 3844447 - DNA, 25 bp, Homo sapien
agcagatgagagctcaggatggctg

SEQ ID NO: 3844448 - DNA, 25 bp, Homo sapien
gagcagatgagagctcaggatggct

SEQ ID NO: 3844449 - DNA, 25 bp, Homo sapien
caggggctgtgctctgggtcacttt

SEQ ID NO: 3844450 - DNA, 25 bp, Homo sapien
ggggctgtgctctgggtcacttttc

SEQ ID NO: 3844451 - DNA, 25 bp, Homo sapien
tcaggggctgtgctctgggtcactt

SEQ ID NO: 3844452 - DNA, 25 bp, Homo sapien
gggctgtgctctgggtcacttttcc

SEQ ID NO: 3844453 - DNA, 25 bp, Homo sapien
cacatctgctaatgctaattggctt

SEQ ID NO: 3844454 - DNA, 25 bp, Homo sapien
acacacatctgctaatgctaattgg

SEQ ID NO: 3844455 - DNA, 25 bp, Homo sapien
catctgctaatgctaattggctttc

SEQ ID NO: 3844456 - DNA, 25 bp, Homo sapien
tctgctaatgctaattggctttctt

SEQ ID NO: 3844457 - DNA, 25 bp, Homo sapien
ggctctgaaccttttgcagggttca

SEQ ID NO: 3844458 - DNA, 25 bp, Homo sapien
ggagttggaatacatgcttcaggtc

SEQ ID NO: 3844459 - DNA, 25 bp, Homo sapien
gaaaatcaagggagttggaatacat

SEQ ID NO: 3844460 - DNA, 25 bp, Homo sapien
gaatacatgcttcaggtcttcggcc

SEQ ID NO: 3844461 - DNA, 25 bp, Homo sapien
tcctctatcattgcctgctgaagcc

SEQ ID NO: 3844462 - DNA, 25 bp, Homo sapien
taccatcctctatcattgcctgctg

SEQ ID NO: 3844463 - DNA, 25 bp, Homo sapien
tagaaataccatcctctatcattgc

SEQ ID NO: 3844464 - DNA, 25 bp, Homo sapien
aataccatcctctatcattgcctgc

SEQ ID NO: 3844465 - DNA, 25 bp, Homo sapien
tatgccacctaactacatcaagaag

SEQ ID NO: 3844466 - DNA, 25 bp, Homo sapien
tagtttggacctagagcctgagctg

SEQ ID NO: 3844467 - DNA, 25 bp, Homo sapien
ggtggaataattcagactctggacc

SEQ ID NO: 3844468 - DNA, 25 bp, Homo sapien
aatcaaggagaagcaacacaaaggg

SEQ ID NO: 3844469 - DNA, 25 bp, Homo sapien
cattgctggtaatgttgtccctgga

SEQ ID NO: 3844470 - DNA, 25 bp, Homo sapien
atgttgtccctggagtattgccaac

SEQ ID NO: 3844471 - DNA, 25 bp, Homo sapien
aactcattgctggtaatgttgtccc

SEQ ID NO: 3844472 - DNA, 25 bp, Homo sapien
ttgtccctggagtattgccaacatt

SEQ ID NO: 3844473 - DNA, 25 bp, Homo sapien
ggttctgacatgctaaactgggtca

SEQ ID NO: 3844474 - DNA, 25 bp, Homo sapien
tacgtaatttcataggctctggatc

SEQ ID NO: 3844475 - DNA, 25 bp, Homo sapien
aacaaagtatgtataggtactgaag

SEQ ID NO: 3844476 - DNA, 25 bp, Homo sapien
ggaaccagcaggatagtaaacccag

SEQ ID NO: 3844477 - DNA, 25 bp, Homo sapien
tcctaatggcaaacactctcttaag

SEQ ID NO: 3844478 - DNA, 25 bp, Homo sapien
gactactgcagcacgggcttcaaaa

SEQ ID NO: 3844479 - DNA, 25 bp, Homo sapien
tctcccagtggagaatggaatgcca

SEQ ID NO: 3844480 - DNA, 25 bp, Homo sapien
tggaatgccagaagagactactgca

SEQ ID NO: 3844481 - DNA, 25 bp, Homo sapien
gaatacttgctactgtaactgccca

SEQ ID NO: 3844482 - DNA, 25 bp, Homo sapien
gaggagaggcgctctgctttataga

SEQ ID NO: 3844483 - DNA, 25 bp, Homo sapien
tcatctgaagacttctctcaactcg

SEQ ID NO: 3844484 - DNA, 25 bp, Homo sapien
tgtagcttggagtagtttgatcatc

SEQ ID NO: 3844485 - DNA, 25 bp, Homo sapien
ggaggagaggcgctctgctttatag

SEQ ID NO: 3844486 - DNA, 25 bp, Homo sapien
taattgcaactgaggccagcggact

SEQ ID NO: 3844487 - DNA, 25 bp, Homo sapien
gtttcttcaagatggagcagtccac

SEQ ID NO: 3844488 - DNA, 25 bp, Homo sapien
cggactcagaatggagtggagacca

SEQ ID NO: 3844489 - DNA, 25 bp, Homo sapien
gctgcatcccagagtaagaagaaat

SEQ ID NO: 3844490 - DNA, 25 bp, Homo sapien
tgctcagagatgctaaatgacaacc

SEQ ID NO: 3844491 - DNA, 25 bp, Homo sapien
gctcaaggtcctagaaactctgaca

SEQ ID NO: 3844492 - DNA, 25 bp, Homo sapien
gaagaagcagtggacaaggctcaag

SEQ ID NO: 3844493 - DNA, 25 bp, Homo sapien
ggcaggcactcatcttataggtcag

SEQ ID NO: 3844494 - DNA, 25 bp, Homo sapien
aatattttctggagagaaattggta

SEQ ID NO: 3844495 - DNA, 25 bp, Homo sapien
atattttctggagagaaattggtac

SEQ ID NO: 3844496 - DNA, 25 bp, Homo sapien
tcaatattttctggagagaaattgg

SEQ ID NO: 3844497 - DNA, 25 bp, Homo sapien
caatattttctggagagaaattggt

SEQ ID NO: 3844498 - DNA, 25 bp, Homo sapien
cagaggtgttaacaggatggagaag

SEQ ID NO: 3844499 - DNA, 25 bp, Homo sapien
tgggggggttgtgggctgccctggc

SEQ ID NO: 3844500 - DNA, 25 bp, Homo sapien
ttgggtcagaggtgttaacaggatg

SEQ ID NO: 3844501 - DNA, 25 bp, Homo sapien
tgggtcagaggtgttaacaggatgg

SEQ ID NO: 3844502 - DNA, 25 bp, Homo sapien
gaccagtaaatagcccaaagactca

SEQ ID NO: 3844503 - DNA, 25 bp, Homo sapien
aagactcagcaacatgggcagagct

SEQ ID NO: 3844504 - DNA, 25 bp, Homo sapien
tgtttttcatcaatgaccagtaaat

SEQ ID NO: 3844505 - DNA, 25 bp, Homo sapien
gcatgggatccaagacacctctttg

SEQ ID NO: 3844506 - DNA, 25 bp, Homo sapien
gaggccattcggagaagcttttttc

SEQ ID NO: 3844507 - DNA, 25 bp, Homo sapien
caagaggccattcggagaagctttt

SEQ ID NO: 3844508 - DNA, 25 bp, Homo sapien
ccaagaggccattcggagaagcttt

SEQ ID NO: 3844509 - DNA, 25 bp, Homo sapien
agaggccattcggagaagctttttt

SEQ ID NO: 3844510 - DNA, 25 bp, Homo sapien
ggcctggagaggtggaaggaccatt

SEQ ID NO: 3844511 - DNA, 25 bp, Homo sapien
tggagaggtggaaggaccatttcct

SEQ ID NO: 3844512 - DNA, 25 bp, Homo sapien
gaggtggaaggaccatttccttcat

SEQ ID NO: 3844513 - DNA, 25 bp, Homo sapien
cctggggcaggagtgtgggcctgga

SEQ ID NO: 3844514 - DNA, 25 bp, Homo sapien
gaaaacaatctggagaatgctccgc

SEQ ID NO: 3844515 - DNA, 25 bp, Homo sapien
ctctcagatggccaagggtagaaat

SEQ ID NO: 3844516 - DNA, 25 bp, Homo sapien
gcaactctgtatggaagatggagac

SEQ ID NO: 3844517 - DNA, 25 bp, Homo sapien
ggaattccggtctaattgagaagct

SEQ ID NO: 3844518 - DNA, 25 bp, Homo sapien
tcattttcatggtgtggtgtgggcc

SEQ ID NO: 3844519 - DNA, 25 bp, Homo sapien
gactgggcctttatggagaagcttc

SEQ ID NO: 3844520 - DNA, 25 bp, Homo sapien
tggccctaggtagctctgcatcaga

SEQ ID NO: 3844521 - DNA, 25 bp, Homo sapien
tgtccaacccatgagacactggagg

SEQ ID NO: 3844522 - DNA, 25 bp, Homo sapien
gactcaagatcaatgaagcagcagc

SEQ ID NO: 3844523 - DNA, 25 bp, Homo sapien
tcttctatgaagagtcaggctatgt

SEQ ID NO: 3844524 - DNA, 25 bp, Homo sapien
cagagccacgtttatgtcttctatg

SEQ ID NO: 3844525 - DNA, 25 bp, Homo sapien
gctatgtcttggcaggaagacagac

SEQ ID NO: 3844526 - DNA, 25 bp, Homo sapien
tgtggttgagattaggatttgtgcc

SEQ ID NO: 3844527 - DNA, 25 bp, Homo sapien
tgagattaggatttgtgccctgatc

SEQ ID NO: 3844528 - DNA, 25 bp, Homo sapien
tcatcccagtggagcatgtggttga

SEQ ID NO: 3844529 - DNA, 25 bp, Homo sapien
catgtggatcttcatggatttgatc

SEQ ID NO: 3844530 - DNA, 25 bp, Homo sapien
tgtcagagtcttcaacggagtcatg

SEQ ID NO: 3844531 - DNA, 25 bp, Homo sapien
cagaattccggttcctgcaggctct

SEQ ID NO: 3844532 - DNA, 25 bp, Homo sapien
gaccaaggtatgtaacagaattccg

SEQ ID NO: 3844533 - DNA, 25 bp, Homo sapien
aacattcacgactgcctaccaagag

SEQ ID NO: 3844534 - DNA, 25 bp, Homo sapien
tagtttcaaatcatccctgggcagg

SEQ ID NO: 3844535 - DNA, 25 bp, Homo sapien
cagcacatgcccaggaatagacagg

SEQ ID NO: 3844536 - DNA, 25 bp, Homo sapien
caaggatgcaattgtgagccaggcc

SEQ ID NO: 3844537 - DNA, 25 bp, Homo sapien
gacaagtaccaaggcattcccagaa

SEQ ID NO: 3844538 - DNA, 25 bp, Homo sapien
tcctgtcagtaagccaacgtatgag

SEQ ID NO: 3844539 - DNA, 25 bp, Homo sapien
agtaagccaacgtatgagcagtgtg

SEQ ID NO: 3844540 - DNA, 25 bp, Homo sapien
ccatatgtcctgtcagtaagccaac

SEQ ID NO: 3844541 - DNA, 25 bp, Homo sapien
tatgtcctgtcagtaagccaacgta

SEQ ID NO: 3844542 - DNA, 25 bp, Homo sapien
actgtccttcagcttcttggaaggt

SEQ ID NO: 3844543 - DNA, 25 bp, Homo sapien
tttcactgtccttcagcttcttgga

SEQ ID NO: 3844544 - DNA, 25 bp, Homo sapien
aggtgtccacttctttttcactgtc

SEQ ID NO: 3844545 - DNA, 25 bp, Homo sapien
tcactgtccttcagcttcttggaag

SEQ ID NO: 3844546 - DNA, 25 bp, Homo sapien
cttaacaagtgtcttgccatttttc

SEQ ID NO: 3844547 - DNA, 25 bp, Homo sapien
cctggccttgtgcaggatgtctgca

SEQ ID NO: 3844548 - DNA, 25 bp, Homo sapien
gaatacatttgataaaggtggtctc

SEQ ID NO: 3844549 - DNA, 25 bp, Homo sapien
ttgataaaggtggtctccaggccct

SEQ ID NO: 3844550 - DNA, 25 bp, Homo sapien
gccaggatggctcagtgcacactgt

SEQ ID NO: 3844551 - DNA, 25 bp, Homo sapien
gtgagtggattaacctgtcctggcc

SEQ ID NO: 3844552 - DNA, 25 bp, Homo sapien
caagtgagtggattaacctgtcctg

SEQ ID NO: 3844553 - DNA, 25 bp, Homo sapien
ctcccaagtgagtggattaacctgt

SEQ ID NO: 3844554 - DNA, 25 bp, Homo sapien
cccaagtgagtggattaacctgtcc

SEQ ID NO: 3844555 - DNA, 25 bp, Homo sapien
cctatttccctccatgatcatggat

SEQ ID NO: 3844556 - DNA, 25 bp, Homo sapien
ggtcctatttccctccatgatcatg

SEQ ID NO: 3844557 - DNA, 25 bp, Homo sapien
aaaggtcctatttccctccatgatc

SEQ ID NO: 3844558 - DNA, 25 bp, Homo sapien
aaggtcctatttccctccatgatca

SEQ ID NO: 3844559 - DNA, 25 bp, Homo sapien
gggttacatgggctcattgggctcc

SEQ ID NO: 3844560 - DNA, 25 bp, Homo sapien
tacatgggctcattgggctccgaag

SEQ ID NO: 3844561 - DNA, 25 bp, Homo sapien
aagtcctgctgtgggttacatgggc

SEQ ID NO: 3844562 - DNA, 25 bp, Homo sapien
tgctgtgggttacatgggctcattg

SEQ ID NO: 3844563 - DNA, 25 bp, Homo sapien
gctccttgcccagattggccttcag

SEQ ID NO: 3844564 - DNA, 25 bp, Homo sapien
cctggtgtctgcctgagggtggcct

SEQ ID NO: 3844565 - DNA, 25 bp, Homo sapien
agattggccttcagtactgtggaga

SEQ ID NO: 3844566 - DNA, 25 bp, Homo sapien
ccttagctaaaagcctggtgtctgc

SEQ ID NO: 3844567 - DNA, 25 bp, Homo sapien
ccagaccgcagagtgactttttatg

SEQ ID NO: 3844568 - DNA, 25 bp, Homo sapien
ggtcaacgtcgaagccatcattatt

SEQ ID NO: 3844569 - DNA, 25 bp, Homo sapien
ctgtgaggtcaacgtcgaagccatc

SEQ ID NO: 3844570 - DNA, 25 bp, Homo sapien
gaatcacacacactacagtagccca

SEQ ID NO: 3844571 - DNA, 25 bp, Homo sapien
caagtttgtaggcagacgtttcaga

SEQ ID NO: 3844572 - DNA, 25 bp, Homo sapien
tgtgtgactgcgtgtccaaatttcc

SEQ ID NO: 3844573 - DNA, 25 bp, Homo sapien
gaagtctgagagcaaggtgtcacta

SEQ ID NO: 3844574 - DNA, 25 bp, Homo sapien
tataggccatcataggtaaacagcc

SEQ ID NO: 3844575 - DNA, 25 bp, Homo sapien
taatcatagaggttagtaaacacca

SEQ ID NO: 3844576 - DNA, 25 bp, Homo sapien
ccatgagtcgaagaagtcacaatga

SEQ ID NO: 3844577 - DNA, 25 bp, Homo sapien
cccacagaagatcgatacaagaaat

SEQ ID NO: 3844578 - DNA, 25 bp, Homo sapien
catatccaaacctgtggtatgcagc

SEQ ID NO: 3844579 - DNA, 25 bp, Homo sapien
aatgtaggatgcaaaagatagggcc

SEQ ID NO: 3844580 - DNA, 25 bp, Homo sapien
cacacattgccggtaggagcataaa

SEQ ID NO: 3844581 - DNA, 25 bp, Homo sapien
tgaatccagtttagataggcctgac

SEQ ID NO: 3844582 - DNA, 25 bp, Homo sapien
tggtcccagtagaaacctcatcagg

SEQ ID NO: 3844583 - DNA, 25 bp, Homo sapien
cggccagatgggaggtggagcaggg

SEQ ID NO: 3844584 - DNA, 25 bp, Homo sapien
ccagatgggaggtggagcaggggac

SEQ ID NO: 3844585 - DNA, 25 bp, Homo sapien
gacggccagatgggaggtggagcag

SEQ ID NO: 3844586 - DNA, 25 bp, Homo sapien
agacggccagatgggaggtggagca

SEQ ID NO: 3844587 - DNA, 25 bp, Homo sapien
cagtttgtgtaggtcagtctatttc

SEQ ID NO: 3844588 - DNA, 25 bp, Homo sapien
gaaccagcattgttgggttcaccct

SEQ ID NO: 3844589 - DNA, 25 bp, Homo sapien
catcagaaccagcattgttgggttc

SEQ ID NO: 3844590 - DNA, 25 bp, Homo sapien
gttcaccctcgttccagtttgtgta

SEQ ID NO: 3844591 - DNA, 25 bp, Homo sapien
tgacacacaaggccttcactttttc

SEQ ID NO: 3844592 - DNA, 25 bp, Homo sapien
ttgacacacaaggccttcacttttt

SEQ ID NO: 3844593 - DNA, 25 bp, Homo sapien
cccaacttgtttgcccagagagaag

SEQ ID NO: 3844594 - DNA, 25 bp, Homo sapien
gttcccaacttgtttgcccagagag

SEQ ID NO: 3844595 - DNA, 25 bp, Homo sapien
tttttgatacgtgccatttctgttt

SEQ ID NO: 3844596 - DNA, 25 bp, Homo sapien
actttttgatacgtgccatttctgt

SEQ ID NO: 3844597 - DNA, 25 bp, Homo sapien
gaggcagccaggctactatcaccat

SEQ ID NO: 3844598 - DNA, 25 bp, Homo sapien
ctttttgatacgtgccatttctgtt

SEQ ID NO: 3844599 - DNA, 25 bp, Homo sapien
tgtagtagatggcaaaaatggcctc

SEQ ID NO: 3844600 - DNA, 25 bp, Homo sapien
acagctcctcgcattaagacatgag

SEQ ID NO: 3844601 - DNA, 25 bp, Homo sapien
caggaaaccaagatttttgtgagtt

SEQ ID NO: 3844602 - DNA, 25 bp, Homo sapien
gcaaatcacttgttgtagtagatgg

SEQ ID NO: 3844603 - DNA, 25 bp, Homo sapien
ctttggtcctggtgacccagaaggc

SEQ ID NO: 3844604 - DNA, 25 bp, Homo sapien
cccagaaggccctggatttcctgga

SEQ ID NO: 3844605 - DNA, 25 bp, Homo sapien
ccaggggggccctgtaagcctctga

SEQ ID NO: 3844606 - DNA, 25 bp, Homo sapien
gccctgtaagcctctgagcccttgg

SEQ ID NO: 3844607 - DNA, 25 bp, Homo sapien
gtttctgagtaagacgctgccacca

SEQ ID NO: 3844608 - DNA, 25 bp, Homo sapien
ggcaggtcttttgggcatcctcaca

SEQ ID NO: 3844609 - DNA, 25 bp, Homo sapien
gagagctacaggcaatcactgcagg

SEQ ID NO: 3844610 - DNA, 25 bp, Homo sapien
tctttgcctgggaagccgttgatgc

SEQ ID NO: 3844611 - DNA, 25 bp, Homo sapien
aggagagggagtgatggaaacaggg

SEQ ID NO: 3844612 - DNA, 25 bp, Homo sapien
ttaatctcagttaatgaacacatat

SEQ ID NO: 3844613 - DNA, 25 bp, Homo sapien
aaaactcagggaaggttaatctcag

SEQ ID NO: 3844614 - DNA, 25 bp, Homo sapien
aaactcagggaaggttaatctcagt

SEQ ID NO: 3844615 - DNA, 25 bp, Homo sapien
ctcagggaaggttaatctcagttaa

SEQ ID NO: 3844616 - DNA, 25 bp, Homo sapien
tgtgcctagacacctggcgttgctg

SEQ ID NO: 3844617 - DNA, 25 bp, Homo sapien
gggttcatctgtgcctagacacctg

SEQ ID NO: 3844618 - DNA, 25 bp, Homo sapien
tcctaaggaggggttcatctgtgcc

SEQ ID NO: 3844619 - DNA, 25 bp, Homo sapien
ggatcctaaggaggggttcatctgt

SEQ ID NO: 3844620 - DNA, 25 bp, Homo sapien
tctccatgtcctcttcgggtccatc

SEQ ID NO: 3844621 - DNA, 25 bp, Homo sapien
ccaggtgtctgtaggagcttcctct

SEQ ID NO: 3844622 - DNA, 25 bp, Homo sapien
cctcttcgggtccatctgccacctg

SEQ ID NO: 3844623 - DNA, 25 bp, Homo sapien
tccatgtcctcttcgggtccatctg

SEQ ID NO: 3844624 - DNA, 25 bp, Homo sapien
gacgctggccctctagcctggggct

SEQ ID NO: 3844625 - DNA, 25 bp, Homo sapien
agaaatgacttactggtgtttctgc

SEQ ID NO: 3844626 - DNA, 25 bp, Homo sapien
aatgacttactggtgtttctgcaga

SEQ ID NO: 3844627 - DNA, 25 bp, Homo sapien
cagagcagggactcagtgacaagga

SEQ ID NO: 3844628 - DNA, 25 bp, Homo sapien
cggagcgcggtgtccctgttgggag

SEQ ID NO: 3844629 - DNA, 25 bp, Homo sapien
ccgcgggagtgggtcgtaggtgcaa

SEQ ID NO: 3844630 - DNA, 25 bp, Homo sapien
caagccgcaggtcctggccgcagtg

SEQ ID NO: 3844631 - DNA, 25 bp, Homo sapien
ttccctaagattgcgggagacacac

SEQ ID NO: 3844632 - DNA, 25 bp, Homo sapien
cccaatcaatccccacaaacacctc

SEQ ID NO: 3844633 - DNA, 25 bp, Homo sapien
gaacccaatcaatccccacaaacac

SEQ ID NO: 3844634 - DNA, 25 bp, Homo sapien
gaggaacccaatcaatccccacaaa

SEQ ID NO: 3844635 - DNA, 25 bp, Homo sapien
agaggaacccaatcaatccccacaa

SEQ ID NO: 3844636 - DNA, 25 bp, Homo sapien
gagatacaggtgagtctgtcctgga

SEQ ID NO: 3844637 - DNA, 25 bp, Homo sapien
aggaagatggagatacaggtgagtc

SEQ ID NO: 3844638 - DNA, 25 bp, Homo sapien
gaagatggagatacaggtgagtctg

SEQ ID NO: 3844639 - DNA, 25 bp, Homo sapien
ggaagatggagatacaggtgagtct

SEQ ID NO: 3844640 - DNA, 25 bp, Homo sapien
agagtgcgttgaattgattgagagt

SEQ ID NO: 3844641 - DNA, 25 bp, Homo sapien
gagtgcgttgaattgattgagagtg

SEQ ID NO: 3844642 - DNA, 25 bp, Homo sapien
ggaatacttggccccaagttgactc

SEQ ID NO: 3844643 - DNA, 25 bp, Homo sapien
ccaggaatacttggccccaagttga

SEQ ID NO: 3844644 - DNA, 25 bp, Homo sapien
gaatacttggccccaagttgactcc

SEQ ID NO: 3844645 - DNA, 25 bp, Homo sapien
caggaatacttggccccaagttgac

SEQ ID NO: 3844646 - DNA, 25 bp, Homo sapien
caagtttctgcaggattgttagcgc

SEQ ID NO: 3844647 - DNA, 25 bp, Homo sapien
agatccagcacttgtgtgaagagta

SEQ ID NO: 3844648 - DNA, 25 bp, Homo sapien
tctgcaggattgttagcgcaaaacc

SEQ ID NO: 3844649 - DNA, 25 bp, Homo sapien
tagcgcaaaaccgaagaactggcag

SEQ ID NO: 3844650 - DNA, 25 bp, Homo sapien
tgcttaaccactacttgccctgcat

SEQ ID NO: 3844651 - DNA, 25 bp, Homo sapien
acaagactccaaattaccgagtggg

SEQ ID NO: 3844652 - DNA, 25 bp, Homo sapien
gatcacgatcacaagactccaaatt

SEQ ID NO: 3844653 - DNA, 25 bp, Homo sapien
atgcttaaccactacttgccctgca

SEQ ID NO: 3844654 - DNA, 25 bp, Homo sapien
tgtgttttccgggtgaactcggaga

SEQ ID NO: 3844655 - DNA, 25 bp, Homo sapien
cgagctccaggctcgctgcaggaga

SEQ ID NO: 3844656 - DNA, 25 bp, Homo sapien
ccccatgccctgtgttttccgggtg

SEQ ID NO: 3844657 - DNA, 25 bp, Homo sapien
gctgtgatgcgagctccaggctcgc

SEQ ID NO: 3844658 - DNA, 25 bp, Homo sapien
catgtcaaacactcgataactatta

SEQ ID NO: 3844659 - DNA, 25 bp, Homo sapien
taactattaactggataccatccca

SEQ ID NO: 3844660 - DNA, 25 bp, Homo sapien
tctgcataagatgttctttgctgcc

SEQ ID NO: 3844661 - DNA, 25 bp, Homo sapien
cactcgataactattaactggatac

SEQ ID NO: 3844662 - DNA, 25 bp, Homo sapien
ggctgagtagagtatggcactgata

SEQ ID NO: 3844663 - DNA, 25 bp, Homo sapien
aattttgagaaatacggggctgagt

SEQ ID NO: 3844664 - DNA, 25 bp, Homo sapien
tagagtatggcactgataccactag

SEQ ID NO: 3844665 - DNA, 25 bp, Homo sapien
tgagtagagtatggcactgatacca

SEQ ID NO: 3844666 - DNA, 25 bp, Homo sapien
caaccccataactgactctagatct

SEQ ID NO: 3844667 - DNA, 25 bp, Homo sapien
ttcctgctttaacggcaaggtcaga

SEQ ID NO: 3844668 - DNA, 25 bp, Homo sapien
tcttcctgctttaacggcaaggtca

SEQ ID NO: 3844669 - DNA, 25 bp, Homo sapien
ataactgactctagatcttcctgct

SEQ ID NO: 3844670 - DNA, 25 bp, Homo sapien
tccttttggatctcaacatttaata

SEQ ID NO: 3844671 - DNA, 25 bp, Homo sapien
gttccttttggatctcaacatttaa

SEQ ID NO: 3844672 - DNA, 25 bp, Homo sapien
tttagttccttttggatctcaacat

SEQ ID NO: 3844673 - DNA, 25 bp, Homo sapien
tagttccttttggatctcaacattt

SEQ ID NO: 3844674 - DNA, 25 bp, Homo sapien
aagcatccaaaacctctctttgttc

SEQ ID NO: 3844675 - DNA, 25 bp, Homo sapien
cctgggtccttcctcgtgtggtcat

SEQ ID NO: 3844676 - DNA, 25 bp, Homo sapien
atgttttgtgtctcagacgcagaaa

SEQ ID NO: 3844677 - DNA, 25 bp, Homo sapien
ttggagagaaataagcacagtgcat

SEQ ID NO: 3844678 - DNA, 25 bp, Homo sapien
agagaaataagcacagtgcatatgt

SEQ ID NO: 3844679 - DNA, 25 bp, Homo sapien
aataagcacagtgcatatgtagaca

SEQ ID NO: 3844680 - DNA, 25 bp, Homo sapien
agaaataagcacagtgcatatgtag

SEQ ID NO: 3844681 - DNA, 25 bp, Homo sapien
tctgatgaatttcaactaaggtgag

SEQ ID NO: 3844682 - DNA, 25 bp, Homo sapien
gatgaatttcaactaaggtgagcat

SEQ ID NO: 3844683 - DNA, 25 bp, Homo sapien
tgatgaatttcaactaaggtgagca

SEQ ID NO: 3844684 - DNA, 25 bp, Homo sapien
attctgatgaatttcaactaaggtg

SEQ ID NO: 3844685 - DNA, 25 bp, Homo sapien
gctttactgctgactgaactgtgtc

SEQ ID NO: 3844686 - DNA, 25 bp, Homo sapien
cacggctttactgctgactgaactg

SEQ ID NO: 3844687 - DNA, 25 bp, Homo sapien
cggctttactgctgactgaactgtg

SEQ ID NO: 3844688 - DNA, 25 bp, Homo sapien
tcacggctttactgctgactgaact

SEQ ID NO: 3844689 - DNA, 25 bp, Homo sapien
cagccaatcactcctggaggggtgg

SEQ ID NO: 3844690 - DNA, 25 bp, Homo sapien
tttgacagtattagtcagccaatca

SEQ ID NO: 3844691 - DNA, 25 bp, Homo sapien
tttgggatcactaattacagctagt

SEQ ID NO: 3844692 - DNA, 25 bp, Homo sapien
actaattacagctagtcctttgaca

SEQ ID NO: 3844693 - DNA, 25 bp, Homo sapien
accagcttcagatccgagagtgggt

SEQ ID NO: 3844694 - DNA, 25 bp, Homo sapien
gagagtgggtaggtgaaatgtggac

SEQ ID NO: 3844695 - DNA, 25 bp, Homo sapien
ggtaggtgaaatgtggactgggcat

SEQ ID NO: 3844696 - DNA, 25 bp, Homo sapien
ccagcttcagatccgagagtgggta

SEQ ID NO: 3844697 - DNA, 25 bp, Homo sapien
tcataataaggaagctagatctggt

SEQ ID NO: 3844698 - DNA, 25 bp, Homo sapien
agctagatctggtcctgcagcggag

SEQ ID NO: 3844699 - DNA, 25 bp, Homo sapien
ggaagctagatctggtcctgcagcg

SEQ ID NO: 3844700 - DNA, 25 bp, Homo sapien
taaggaagctagatctggtcctgca

SEQ ID NO: 3844701 - DNA, 25 bp, Homo sapien
cggcgaccgagagacagctagaact

SEQ ID NO: 3844702 - DNA, 25 bp, Homo sapien
acagtaagtgcgttcctgaatgtgc

SEQ ID NO: 3844703 - DNA, 25 bp, Homo sapien
gtctaaaaagtggaggcggagccta

SEQ ID NO: 3844704 - DNA, 25 bp, Homo sapien
tcttaacagtaagtgcgttcctgaa

SEQ ID NO: 3844705 - DNA, 25 bp, Homo sapien
tttattagagacactgcccaagggt

SEQ ID NO: 3844706 - DNA, 25 bp, Homo sapien
catcagattcctccgcagcagggag

SEQ ID NO: 3844707 - DNA, 25 bp, Homo sapien
tgggctatctctaaaagttggctgg

SEQ ID NO: 3844708 - DNA, 25 bp, Homo sapien
tgttccgccccggtgtcaattagga

SEQ ID NO: 3844709 - DNA, 25 bp, Homo sapien
caattaggaagcgtataggctggcc

SEQ ID NO: 3844710 - DNA, 25 bp, Homo sapien
catcctagagtgtggacagagtctg

SEQ ID NO: 3844711 - DNA, 25 bp, Homo sapien
tccaaagtgtcataaccgagagagt

SEQ ID NO: 3844712 - DNA, 25 bp, Homo sapien
tatagagaaacaccacactccgaga

SEQ ID NO: 3844713 - DNA, 25 bp, Homo sapien
tgggcacaccagcagttgatccgtt

SEQ ID NO: 3844714 - DNA, 25 bp, Homo sapien
gagtcacatggctatgccaaaattc

SEQ ID NO: 3844715 - DNA, 25 bp, Homo sapien
catgtccatcctaagctacctgtga

SEQ ID NO: 3844716 - DNA, 25 bp, Homo sapien
ggtagtgatacacaacactcctgct

SEQ ID NO: 3844717 - DNA, 25 bp, Homo sapien
tgaacaatctctacaacttagggac

SEQ ID NO: 3844718 - DNA, 25 bp, Homo sapien
gcccttttcatcctgtgtaactcca

SEQ ID NO: 3844719 - DNA, 25 bp, Homo sapien
ccttatacggttaccattttgtatg

SEQ ID NO: 3844720 - DNA, 25 bp, Homo sapien
tcattctgcacattagcccttttca

SEQ ID NO: 3844721 - DNA, 25 bp, Homo sapien
tctgaagcattgataatttgagtct

SEQ ID NO: 3844722 - DNA, 25 bp, Homo sapien
tgagtcaaggagacccgacatgggt

SEQ ID NO: 3844723 - DNA, 25 bp, Homo sapien
tactacacgaggcttccactgtggg

SEQ ID NO: 3844724 - DNA, 25 bp, Homo sapien
gactgacagtggatagctcctttcc

SEQ ID NO: 3844725 - DNA, 25 bp, Homo sapien
caggcatgtcatcccgagtgtccag

SEQ ID NO: 3844726 - DNA, 25 bp, Homo sapien
gattacatgtagaggagaggtgcac

SEQ ID NO: 3844727 - DNA, 25 bp, Homo sapien
cagtgaggcaagatgatgggttccc

SEQ ID NO: 3844728 - DNA, 25 bp, Homo sapien
tggtgatgggaaacagatcaggccc

SEQ ID NO: 3844729 - DNA, 25 bp, Homo sapien
cacctgtggcttgtgcagcagtgag

SEQ ID NO: 3844730 - DNA, 25 bp, Homo sapien
tcgcaaaagtcgcatttccccaatt

SEQ ID NO: 3844731 - DNA, 25 bp, Homo sapien
ttcaaaaacaatggtcaggacctag

SEQ ID NO: 3844732 - DNA, 25 bp, Homo sapien
ttttagaggcctcttgtagccagca

SEQ ID NO: 3844733 - DNA, 25 bp, Homo sapien
tatagtgagacataatagaccagct

SEQ ID NO: 3844734 - DNA, 25 bp, Homo sapien
tatatagaatgctaaggatagctgg

SEQ ID NO: 3844735 - DNA, 25 bp, Homo sapien
tctgtaccctctgtagtcccttaag

SEQ ID NO: 3844736 - DNA, 25 bp, Homo sapien
tggaattaatagatgagaacccttt

SEQ ID NO: 3844737 - DNA, 25 bp, Homo sapien
accacactcagcttagtctgaagtt

SEQ ID NO: 3844738 - DNA, 25 bp, Homo sapien
tcagtattgcctcagagaagtccag

SEQ ID NO: 3844739 - DNA, 25 bp, Homo sapien
gattggcaaatacgctctctcagct

SEQ ID NO: 3844740 - DNA, 25 bp, Homo sapien
gtcccaaatgtgctgaagtctccta

SEQ ID NO: 3844741 - DNA, 25 bp, Homo sapien
gatgtcacttcaccagtaaccttgg

SEQ ID NO: 3844742 - DNA, 25 bp, Homo sapien
cactgtgttcaacctccaaccattt

SEQ ID NO: 3844743 - DNA, 25 bp, Homo sapien
tctgttattgcaacttttatttcag

SEQ ID NO: 3844744 - DNA, 25 bp, Homo sapien
tctgccatttgtgtatcgtttttgg

SEQ ID NO: 3844745 - DNA, 25 bp, Homo sapien
tttagatctgttattgcaactttta

SEQ ID NO: 3844746 - DNA, 25 bp, Homo sapien
tataagtgaacttgacatatttaga

SEQ ID NO: 3844747 - DNA, 25 bp, Homo sapien
tcgtagcgccatctcaactaaatga

SEQ ID NO: 3844748 - DNA, 25 bp, Homo sapien
ttgctctgtttttgcaacattcccc

SEQ ID NO: 3844749 - DNA, 25 bp, Homo sapien
taaatactctgttccaagaattgtt

SEQ ID NO: 3844750 - DNA, 25 bp, Homo sapien
gatgcattgcaattgtatatattta

SEQ ID NO: 3844751 - DNA, 25 bp, Homo sapien
cacaatcccctaaggtcttggactc

SEQ ID NO: 3844752 - DNA, 25 bp, Homo sapien
tgtgtgttggacaagcggctccaca

SEQ ID NO: 3844753 - DNA, 25 bp, Homo sapien
atcagttcctgatgcttgttctttc

SEQ ID NO: 3844754 - DNA, 25 bp, Homo sapien
attcatgggtgtacaatcttttggc

SEQ ID NO: 3844755 - DNA, 25 bp, Homo sapien
gagggccttcattctatgactccaa

SEQ ID NO: 3844756 - DNA, 25 bp, Homo sapien
gaaagtggttagcaattatgcccaa

SEQ ID NO: 3844757 - DNA, 25 bp, Homo sapien
tgtcttttaaatagtgagggccttc

SEQ ID NO: 3844758 - DNA, 25 bp, Homo sapien
tgaccccaagcctcagatgaaaatg

SEQ ID NO: 3844759 - DNA, 25 bp, Homo sapien
tgaataagatctcagcagttgggcg

SEQ ID NO: 3844760 - DNA, 25 bp, Homo sapien
catgcgtactaagcagtaaaatggc

SEQ ID NO: 3844761 - DNA, 25 bp, Homo sapien
gcgagcaggctcaagcatgcgtact

SEQ ID NO: 3844762 - DNA, 25 bp, Homo sapien
tggagttggtgatcagcagtttctg

SEQ ID NO: 3844763 - DNA, 25 bp, Homo sapien
ctttaaagcgggagatacatgaggt

SEQ ID NO: 3844764 - DNA, 25 bp, Homo sapien
gaagcttgttacaggagccggaaac

SEQ ID NO: 3844765 - DNA, 25 bp, Homo sapien
ttctagggtaattgagggaccagcg

SEQ ID NO: 3844766 - DNA, 25 bp, Homo sapien
ggtcctgaacgggtagccactgttg

SEQ ID NO: 3844767 - DNA, 25 bp, Homo sapien
tggctcgccaagatgtaacacctga

SEQ ID NO: 3844768 - DNA, 25 bp, Homo sapien
tgagtgaaagagacatggactgaga

SEQ ID NO: 3844769 - DNA, 25 bp, Homo sapien
taacacctgaggttcttgccaagcc

SEQ ID NO: 3844770 - DNA, 25 bp, Homo sapien
aagaaatggtgtggaagctgaccac

SEQ ID NO: 3844771 - DNA, 25 bp, Homo sapien
aagtgcagaaggtgacgccatagcc

SEQ ID NO: 3844772 - DNA, 25 bp, Homo sapien
gaaggtgacgccatagcccaaatgt

SEQ ID NO: 3844773 - DNA, 25 bp, Homo sapien
gatacttgcaaaatagtgcctgtgt

SEQ ID NO: 3844774 - DNA, 25 bp, Homo sapien
cccaaatgtcacttcggatacttgc

SEQ ID NO: 3844775 - DNA, 25 bp, Homo sapien
gtctcatgactatctgccttggtgg

SEQ ID NO: 3844776 - DNA, 25 bp, Homo sapien
tttactttgtagatggtctctggat

SEQ ID NO: 3844777 - DNA, 25 bp, Homo sapien
cttgaacagtctcatgactatctgc

SEQ ID NO: 3844778 - DNA, 25 bp, Homo sapien
gactatctgccttggtggtgtttac

SEQ ID NO: 3844779 - DNA, 25 bp, Homo sapien
cacgagggtcgttgatgggaggagt

SEQ ID NO: 3844780 - DNA, 25 bp, Homo sapien
tggggtcaccaatggtcactaggtc

SEQ ID NO: 3844781 - DNA, 25 bp, Homo sapien
gcttgcactagatgtccttcctttc

SEQ ID NO: 3844782 - DNA, 25 bp, Homo sapien
ctttcttggtgggagcacgagggtc

SEQ ID NO: 3844783 - DNA, 25 bp, Homo sapien
agagcagttgttatgatgggagcca

SEQ ID NO: 3844784 - DNA, 25 bp, Homo sapien
ttagaagacgggttaacattagctg

SEQ ID NO: 3844785 - DNA, 25 bp, Homo sapien
gacgggttaacattagctgaacagt

SEQ ID NO: 3844786 - DNA, 25 bp, Homo sapien
atgggagccaactgagaagccgttg

SEQ ID NO: 3844787 - DNA, 25 bp, Homo sapien
gacaggcagacagtaaggctcaaac

SEQ ID NO: 3844788 - DNA, 25 bp, Homo sapien
tgaagatactccagctgtaatagaa

SEQ ID NO: 3844789 - DNA, 25 bp, Homo sapien
gctctatgggttataaggcaaccaa

SEQ ID NO: 3844790 - DNA, 25 bp, Homo sapien
caaatagcctgatgcacaagccaac

SEQ ID NO: 3844791 - DNA, 25 bp, Homo sapien
aagtggtagtgggatctcatcagag

SEQ ID NO: 3844792 - DNA, 25 bp, Homo sapien
tttgctgctgcatttagataccaga

SEQ ID NO: 3844793 - DNA, 25 bp, Homo sapien
tgctgcatttagataccagactctg

SEQ ID NO: 3844794 - DNA, 25 bp, Homo sapien
catttagataccagactctgtggtc

SEQ ID NO: 3844795 - DNA, 25 bp, Homo sapien
tgcatttagataccagactctgtgg

SEQ ID NO: 3844796 - DNA, 25 bp, Homo sapien
ctccaagttctaaagatgttgagct

SEQ ID NO: 3844797 - DNA, 25 bp, Homo sapien
cttgaaaagttgtgagttgcggttt

SEQ ID NO: 3844798 - DNA, 25 bp, Homo sapien
tgagttgcggtttttattccatcct

SEQ ID NO: 3844799 - DNA, 25 bp, Homo sapien
cagtgtctaatgactggtggcctct

SEQ ID NO: 3844800 - DNA, 25 bp, Homo sapien
agcttgcagcagttctaacggatgc

SEQ ID NO: 3844801 - DNA, 25 bp, Homo sapien
gctctctggcattcctctgagcaga

SEQ ID NO: 3844802 - DNA, 25 bp, Homo sapien
agggtagctctctggcattcctctg

SEQ ID NO: 3844803 - DNA, 25 bp, Homo sapien
tggcctgaggacgagcacacatcac

SEQ ID NO: 3844804 - DNA, 25 bp, Homo sapien
accatccgtctttggccctgaatct

SEQ ID NO: 3844805 - DNA, 25 bp, Homo sapien
tcatcaagcatgtcctcttccaaag

SEQ ID NO: 3844806 - DNA, 25 bp, Homo sapien
aagtgaggacatcatcaagcatgtc

SEQ ID NO: 3844807 - DNA, 25 bp, Homo sapien
ctaagtgaggacatcatcaagcatg

SEQ ID NO: 3844808 - DNA, 25 bp, Homo sapien
catcaagcatgtcctcttccaaagg

SEQ ID NO: 3844809 - DNA, 25 bp, Homo sapien
atgagttggggaatagggaatagct

SEQ ID NO: 3844810 - DNA, 25 bp, Homo sapien
tgagttggggaatagggaatagctg

SEQ ID NO: 3844811 - DNA, 25 bp, Homo sapien
atgtgctggtaagaatatatgggcc

SEQ ID NO: 3844812 - DNA, 25 bp, Homo sapien
tatatgggcctttcggcattgtgca

SEQ ID NO: 3844813 - DNA, 25 bp, Homo sapien
ctatgtgctggtaagaatatatggg

SEQ ID NO: 3844814 - DNA, 25 bp, Homo sapien
ggtaagaatatatgggcctttcggc

SEQ ID NO: 3844815 - DNA, 25 bp, Homo sapien
acaggagctagcagatgtggaaccc

SEQ ID NO: 3844816 - DNA, 25 bp, Homo sapien
aagatgctgattcatcaaacagaat

SEQ ID NO: 3844817 - DNA, 25 bp, Homo sapien
gatgctgattcatcaaacagaatag

SEQ ID NO: 3844818 - DNA, 25 bp, Homo sapien
atgctgattcatcaaacagaatagg

SEQ ID NO: 3844819 - DNA, 25 bp, Homo sapien
agcaattacatgtttagaggcccat

SEQ ID NO: 3844820 - DNA, 25 bp, Homo sapien
caattacatgtttagaggcccataa

SEQ ID NO: 3844821 - DNA, 25 bp, Homo sapien
acatgtttagaggcccataatatac

SEQ ID NO: 3844822 - DNA, 25 bp, Homo sapien
aagacagcaattacatgtttagagg

SEQ ID NO: 3844823 - DNA, 25 bp, Homo sapien
ctgttcagttctctctcagtcagct

SEQ ID NO: 3844824 - DNA, 25 bp, Homo sapien
gcctgttgtggttctctccaatgtt

SEQ ID NO: 3844825 - DNA, 25 bp, Homo sapien
ttctcttcactactgttcagttctc

SEQ ID NO: 3844826 - DNA, 25 bp, Homo sapien
cctgttgtggttctctccaatgttc

SEQ ID NO: 3844827 - DNA, 25 bp, Homo sapien
gaatggttgtcgtgatgctgtgata

SEQ ID NO: 3844828 - DNA, 25 bp, Homo sapien
tgtcgtgatgctgtgatatggcttt

SEQ ID NO: 3844829 - DNA, 25 bp, Homo sapien
tctttgaatggttgtcgtgatgctg

SEQ ID NO: 3844830 - DNA, 25 bp, Homo sapien
catctttgaatggttgtcgtgatgc

SEQ ID NO: 3844831 - DNA, 25 bp, Homo sapien
ctgttaggtattgtgttacacgcat

SEQ ID NO: 3844832 - DNA, 25 bp, Homo sapien
ttctgttaggtattgtgttacacgc

SEQ ID NO: 3844833 - DNA, 25 bp, Homo sapien
ggtttcctggggcagatatctttct

SEQ ID NO: 3844834 - DNA, 25 bp, Homo sapien
atctttctgttaggtattgtgttac

SEQ ID NO: 3844835 - DNA, 25 bp, Homo sapien
gctacagatggattcagttgatggg

SEQ ID NO: 3844836 - DNA, 25 bp, Homo sapien
tgttcatattgaaaggctacagatg

SEQ ID NO: 3844837 - DNA, 25 bp, Homo sapien
ctattagacatgcactctgttcata

SEQ ID NO: 3844838 - DNA, 25 bp, Homo sapien
aaagcaatgtctcttgttggcacag

SEQ ID NO: 3844839 - DNA, 25 bp, Homo sapien
gaaacgagatgatgtgtccacttga

SEQ ID NO: 3844840 - DNA, 25 bp, Homo sapien
tcaacaccacttaaaggacatagct

SEQ ID NO: 3844841 - DNA, 25 bp, Homo sapien
tctatcgatcgaacacaggtaatct

SEQ ID NO: 3844842 - DNA, 25 bp, Homo sapien
tcttacctatgttagaaacccacca

SEQ ID NO: 3844843 - DNA, 25 bp, Homo sapien
cctttcaacaggttgcacacatatt

SEQ ID NO: 3844844 - DNA, 25 bp, Homo sapien
ctcctttcaacaggttgcacacata

SEQ ID NO: 3844845 - DNA, 25 bp, Homo sapien
tcctttcaacaggttgcacacatat

SEQ ID NO: 3844846 - DNA, 25 bp, Homo sapien
ggctctctttattgctggctgccaa

SEQ ID NO: 3844847 - DNA, 25 bp, Homo sapien
tctctttattgctggctgccaagac

SEQ ID NO: 3844848 - DNA, 25 bp, Homo sapien
ttggctctctttattgctggctgcc

SEQ ID NO: 3844849 - DNA, 25 bp, Homo sapien
gctctctttattgctggctgccaag

SEQ ID NO: 3844850 - DNA, 25 bp, Homo sapien
aatcccaacgattttgtagaggccg

SEQ ID NO: 3844851 - DNA, 25 bp, Homo sapien
cattctgatggactggttaaatccc

SEQ ID NO: 3844852 - DNA, 25 bp, Homo sapien
aaccatggcatcagtgtacacatag

SEQ ID NO: 3844853 - DNA, 25 bp, Homo sapien
tagaggccgacttcattgtagtcac

SEQ ID NO: 3844854 - DNA, 25 bp, Homo sapien
ttatgaggatatctatgaatgctgc

SEQ ID NO: 3844855 - DNA, 25 bp, Homo sapien
tatgaggatatctatgaatgctgca

SEQ ID NO: 3844856 - DNA, 25 bp, Homo sapien
atatctatgaatgctgcaagaaatc

SEQ ID NO: 3844857 - DNA, 25 bp, Homo sapien
gaggatatctatgaatgctgcaaga

SEQ ID NO: 3844858 - DNA, 25 bp, Homo sapien
ttaaaactctccttgacagcagctg

SEQ ID NO: 3844859 - DNA, 25 bp, Homo sapien
gtttaaaactctccttgacagcagc

SEQ ID NO: 3844860 - DNA, 25 bp, Homo sapien
taaaactctccttgacagcagctga

SEQ ID NO: 3844861 - DNA, 25 bp, Homo sapien
taagtttaaaactctccttgacagc

SEQ ID NO: 3844862 - DNA, 25 bp, Homo sapien
tctcatcttaccaagctgaatacct

SEQ ID NO: 3844863 - DNA, 25 bp, Homo sapien
ctcatcttaccaagctgaatacctc

SEQ ID NO: 3844864 - DNA, 25 bp, Homo sapien
cctctcatcttaccaagctgaatac

SEQ ID NO: 3844865 - DNA, 25 bp, Homo sapien
tgcctctcatcttaccaagctgaat

SEQ ID NO: 3844866 - DNA, 25 bp, Homo sapien
ctaaagtgtgaccgtaaagggagag

SEQ ID NO: 3844867 - DNA, 25 bp, Homo sapien
ggctctgtgatgtgcgtgaggcctg

SEQ ID NO: 3844868 - DNA, 25 bp, Homo sapien
tgtgatgtgcgtgaggcctgcaatc

SEQ ID NO: 3844869 - DNA, 25 bp, Homo sapien
taaagggagagtttggagaaggctc

SEQ ID NO: 3844870 - DNA, 25 bp, Homo sapien
tatcaacctgcattcttagtaaaga

SEQ ID NO: 3844871 - DNA, 25 bp, Homo sapien
taactagggatgatctatctggaag

SEQ ID NO: 3844872 - DNA, 25 bp, Homo sapien
taataccaactatgacaaggcggac

SEQ ID NO: 3844873 - DNA, 25 bp, Homo sapien
cagcgtggacataacaaggtgagac

SEQ ID NO: 3844874 - DNA, 25 bp, Homo sapien
ttttatgttgcagtctcctagaatc

SEQ ID NO: 3844875 - DNA, 25 bp, Homo sapien
tgacttatttttacctagcaaccaa

SEQ ID NO: 3844876 - DNA, 25 bp, Homo sapien
agctcaaaagttgggcctacatttt

SEQ ID NO: 3844877 - DNA, 25 bp, Homo sapien
taagctcaaaagttgggcctacatt

SEQ ID NO: 3844878 - DNA, 25 bp, Homo sapien
cataagctcaaaagttgggcctaca

SEQ ID NO: 3844879 - DNA, 25 bp, Homo sapien
cttcataagctcaaaagttgggcct

SEQ ID NO: 3844880 - DNA, 25 bp, Homo sapien
taccacagggactggtttcacagcc

SEQ ID NO: 3844881 - DNA, 25 bp, Homo sapien
ccacagggactggtttcacagccat

SEQ ID NO: 3844882 - DNA, 25 bp, Homo sapien
tctaccacagggactggtttcacag

SEQ ID NO: 3844883 - DNA, 25 bp, Homo sapien
ccttctaccacagggactggtttca

SEQ ID NO: 3844884 - DNA, 25 bp, Homo sapien
tcctgtaatacactggattgtaatg

SEQ ID NO: 3844885 - DNA, 25 bp, Homo sapien
cctgtaatacactggattgtaatgt

SEQ ID NO: 3844886 - DNA, 25 bp, Homo sapien
cacttcctgtaatacactggattgt

SEQ ID NO: 3844887 - DNA, 25 bp, Homo sapien
ttcacttcctgtaatacactggatt

SEQ ID NO: 3844888 - DNA, 25 bp, Homo sapien
ttggctgccacctttcaattgtcca

SEQ ID NO: 3844889 - DNA, 25 bp, Homo sapien
caattgtccacaaaagttccaaccg

SEQ ID NO: 3844890 - DNA, 25 bp, Homo sapien
tcattccatataggtcacaacccag

SEQ ID NO: 3844891 - DNA, 25 bp, Homo sapien
cacaacccagctcatagcttggctg

SEQ ID NO: 3844892 - DNA, 25 bp, Homo sapien
agcgcagacagggtcagtaggcaat

SEQ ID NO: 3844893 - DNA, 25 bp, Homo sapien
cagacagggtcagtaggcaatactt

SEQ ID NO: 3844894 - DNA, 25 bp, Homo sapien
acagggtcagtaggcaatacttgtc

SEQ ID NO: 3844895 - DNA, 25 bp, Homo sapien
ctgagcgcagacagggtcagtaggc

SEQ ID NO: 3844896 - DNA, 25 bp, Homo sapien
ttctgagatgtagttatgcagccta

SEQ ID NO: 3844897 - DNA, 25 bp, Homo sapien
ctgagatgtagttatgcagcctaca

SEQ ID NO: 3844898 - DNA, 25 bp, Homo sapien
tctgagatgtagttatgcagcctac

SEQ ID NO: 3844899 - DNA, 25 bp, Homo sapien
gagactggcctgactgcttgatgac

SEQ ID NO: 3844900 - DNA, 25 bp, Homo sapien
gagtcactcatgttaagctttaaac

SEQ ID NO: 3844901 - DNA, 25 bp, Homo sapien
tgccatggtggcttgatatatgtaa

SEQ ID NO: 3844902 - DNA, 25 bp, Homo sapien
tatctcatgtcatacgtagagtcct

SEQ ID NO: 3844903 - DNA, 25 bp, Homo sapien
ttaggccatgttcagaattaatcat

SEQ ID NO: 3844904 - DNA, 25 bp, Homo sapien
tgagactgattcttataaacaattc

SEQ ID NO: 3844905 - DNA, 25 bp, Homo sapien
ccgcaatgtttaggcatatttaggc

SEQ ID NO: 3844906 - DNA, 25 bp, Homo sapien
taaacaattctttgtccgcaatgtt

SEQ ID NO: 3844907 - DNA, 25 bp, Homo sapien
gctttaagcaacagagtcagccaga

SEQ ID NO: 3844908 - DNA, 25 bp, Homo sapien
taatgatgtaaaccctgtcctgaag

SEQ ID NO: 3844909 - DNA, 25 bp, Homo sapien
tcacgttgagggaagatgctagatc

SEQ ID NO: 3844910 - DNA, 25 bp, Homo sapien
ccagaaaatagaagcggatactgac

SEQ ID NO: 3844911 - DNA, 25 bp, Homo sapien
ctgatatctgcagtaaatctctgcc

SEQ ID NO: 3844912 - DNA, 25 bp, Homo sapien
tctgatatctgcagtaaatctctgc

SEQ ID NO: 3844913 - DNA, 25 bp, Homo sapien
gcttcacctttaatatctggcacca

SEQ ID NO: 3844914 - DNA, 25 bp, Homo sapien
tctggcaccagttctgcaatcattt

SEQ ID NO: 3844915 - DNA, 25 bp, Homo sapien
atgaatgaacactttctcatctctt

SEQ ID NO: 3844916 - DNA, 25 bp, Homo sapien
caattggcttcacctttaatatctg

SEQ ID NO: 3844917 - DNA, 25 bp, Homo sapien
gttttagccacgacttggagagcca

SEQ ID NO: 3844918 - DNA, 25 bp, Homo sapien
gggccagtgagatacagacatagat

SEQ ID NO: 3844919 - DNA, 25 bp, Homo sapien
aacacatctgtaatgggagtgctct

SEQ ID NO: 3844920 - DNA, 25 bp, Homo sapien
catacatcttattgtgggcagcgta

SEQ ID NO: 3844921 - DNA, 25 bp, Homo sapien
tataattaagggctctcacagtgct

SEQ ID NO: 3844922 - DNA, 25 bp, Homo sapien
tatagtagtgtatgtagttgaatac

SEQ ID NO: 3844923 - DNA, 25 bp, Homo sapien
tatgtagttgaatacagaaggcatt

SEQ ID NO: 3844924 - DNA, 25 bp, Homo sapien
aattaagggctctcacagtgctgaa

SEQ ID NO: 3844925 - DNA, 25 bp, Homo sapien
gaacttgaggcaaatatatagatta

SEQ ID NO: 3844926 - DNA, 25 bp, Homo sapien
ggcaaatatatagattaccaggaag

SEQ ID NO: 3844927 - DNA, 25 bp, Homo sapien
tgaggcaaatatatagattaccagg

SEQ ID NO: 3844928 - DNA, 25 bp, Homo sapien
caaatatatagattaccaggaagag

SEQ ID NO: 3844929 - DNA, 25 bp, Homo sapien
tgagagagggagattaacacctgtg

SEQ ID NO: 3844930 - DNA, 25 bp, Homo sapien
taggcatctgccctgagaatagatt

SEQ ID NO: 3844931 - DNA, 25 bp, Homo sapien
tgcaattctatgacaactctcagag

SEQ ID NO: 3844932 - DNA, 25 bp, Homo sapien
tgaatcacctttggaacaaccactt

SEQ ID NO: 3844933 - DNA, 25 bp, Homo sapien
acaatgtgagtgcaaatctgtctct

SEQ ID NO: 3844934 - DNA, 25 bp, Homo sapien
cagctaaatgtttaaacgataggtt

SEQ ID NO: 3844935 - DNA, 25 bp, Homo sapien
taggttatttagtgaaagtatgtcc

SEQ ID NO: 3844936 - DNA, 25 bp, Homo sapien
gcttgtgtgcatgatataaattcca

SEQ ID NO: 3844937 - DNA, 25 bp, Homo sapien
cttttaagttgtccgtgaggcaggc

SEQ ID NO: 3844938 - DNA, 25 bp, Homo sapien
gagctggtttcatactctcgatcaa

SEQ ID NO: 3844939 - DNA, 25 bp, Homo sapien
gcttcaccgctgtattgtcagtccc

SEQ ID NO: 3844940 - DNA, 25 bp, Homo sapien
tactaggatggtgaagacggtttct

SEQ ID NO: 3844941 - DNA, 25 bp, Homo sapien
ctgatcataagtcatatcaaaatct

SEQ ID NO: 3844942 - DNA, 25 bp, Homo sapien
tggcatgcttctgatcataagtcat

SEQ ID NO: 3844943 - DNA, 25 bp, Homo sapien
tgcttctgatcataagtcatatcaa

SEQ ID NO: 3844944 - DNA, 25 bp, Homo sapien
catgcttctgatcataagtcatatc

SEQ ID NO: 3844945 - DNA, 25 bp, Homo sapien
tgctcctggcgacttcttttggttt

SEQ ID NO: 3844946 - DNA, 25 bp, Homo sapien
cagagtttgctcctggcgacttctt

SEQ ID NO: 3844947 - DNA, 25 bp, Homo sapien
aaccttcagagtttgctcctggcga

SEQ ID NO: 3844948 - DNA, 25 bp, Homo sapien
tttgctcctggcgacttcttttggt

SEQ ID NO: 3844949 - DNA, 25 bp, Homo sapien
gactgactttcgctactactgctac

SEQ ID NO: 3844950 - DNA, 25 bp, Homo sapien
agggtctgtactttcttccacaggg

SEQ ID NO: 3844951 - DNA, 25 bp, Homo sapien
tccaccgaagctgattctgcactgc

SEQ ID NO: 3844952 - DNA, 25 bp, Homo sapien
tcttcagggatatcttgagcttcag

SEQ ID NO: 3844953 - DNA, 25 bp, Homo sapien
tgttcttcttgtggctcctctttcc

SEQ ID NO: 3844954 - DNA, 25 bp, Homo sapien
cttcttccatcttaggttctttttg

SEQ ID NO: 3844955 - DNA, 25 bp, Homo sapien
tttttgttcttcttgtggctcctct

SEQ ID NO: 3844956 - DNA, 25 bp, Homo sapien
tcttctgagtgttcttcttcttcca

SEQ ID NO: 3844957 - DNA, 25 bp, Homo sapien
ggattccgattcttctgattcaggg

SEQ ID NO: 3844958 - DNA, 25 bp, Homo sapien
caaccatgggccttcttcttgcaag

SEQ ID NO: 3844959 - DNA, 25 bp, Homo sapien
cctcttggtccagagtgagtttcaa

SEQ ID NO: 3844960 - DNA, 25 bp, Homo sapien
tcagtatagtcgctggaggattcct

SEQ ID NO: 3844961 - DNA, 25 bp, Homo sapien
caattgaagtgtcagcttggagata

SEQ ID NO: 3844962 - DNA, 25 bp, Homo sapien
cttggagatagctatggtatgacct

SEQ ID NO: 3844963 - DNA, 25 bp, Homo sapien
ccacgaaagctacgcaggaatgaat

SEQ ID NO: 3844964 - DNA, 25 bp, Homo sapien
gaaaatgcaattgaagtgtcagctt

SEQ ID NO: 3844965 - DNA, 25 bp, Homo sapien
gacggcgactcccatattgaggcat

SEQ ID NO: 3844966 - DNA, 25 bp, Homo sapien
gcttcaccaaccacctcaccatatt

SEQ ID NO: 3844967 - DNA, 25 bp, Homo sapien
cagctggtggtaacaatcgacggcg

SEQ ID NO: 3844968 - DNA, 25 bp, Homo sapien
gtggtaacaatcgacggcgactccc

SEQ ID NO: 3844969 - DNA, 25 bp, Homo sapien
aataatcttgtccatattcctggcc

SEQ ID NO: 3844970 - DNA, 25 bp, Homo sapien
ataatcttgtccatattcctggcca

SEQ ID NO: 3844971 - DNA, 25 bp, Homo sapien
gaaaacggtttctgataactatcaa

SEQ ID NO: 3844972 - DNA, 25 bp, Homo sapien
taatgtgtaatgcttcccaaggatg

SEQ ID NO: 3844973 - DNA, 25 bp, Homo sapien
tcatttcgcaatggaatacgagaag

SEQ ID NO: 3844974 - DNA, 25 bp, Homo sapien
ggaaaaggataggtactcacatgaa

SEQ ID NO: 3844975 - DNA, 25 bp, Homo sapien
tccaccacccatgaatgaagagcag

SEQ ID NO: 3844976 - DNA, 25 bp, Homo sapien
tgagtcaacctcaaccaacaaggga

SEQ ID NO: 3844977 - DNA, 25 bp, Homo sapien
aaaaatcgagtaaggaactgctgac

SEQ ID NO: 3844978 - DNA, 25 bp, Homo sapien
gaccagtcagatccatgagtcaacc

SEQ ID NO: 3844979 - DNA, 25 bp, Homo sapien
agaagagagggcctcagcagttgct

SEQ ID NO: 3844980 - DNA, 25 bp, Homo sapien
agagagggcctcagcagttgctgtt

SEQ ID NO: 3844981 - DNA, 25 bp, Homo sapien
ttaagaagagagggcctcagcagtt

SEQ ID NO: 3844982 - DNA, 25 bp, Homo sapien
ctctggtttaagaagagagggcctc

SEQ ID NO: 3844983 - DNA, 25 bp, Homo sapien
gatcaacccagagcctcgttccata

SEQ ID NO: 3844984 - DNA, 25 bp, Homo sapien
tcgttccatatgagcaacaaaacat

SEQ ID NO: 3844985 - DNA, 25 bp, Homo sapien
aacaggaagatcatggtttcacacc

SEQ ID NO: 3844986 - DNA, 25 bp, Homo sapien
tattttgtggaattatcaaaacagg

SEQ ID NO: 3844987 - DNA, 25 bp, Homo sapien
tgttgaggccttcacaaagtaattc

SEQ ID NO: 3844988 - DNA, 25 bp, Homo sapien
tgaaacgtttgactatacttgaggg

SEQ ID NO: 3844989 - DNA, 25 bp, Homo sapien
gttaaactgatgctgtcaaccatgt

SEQ ID NO: 3844990 - DNA, 25 bp, Homo sapien
tctacttatcagaaagcatcttgta

SEQ ID NO: 3844991 - DNA, 25 bp, Homo sapien
taacgcattgaagggggctctcaac

SEQ ID NO: 3844992 - DNA, 25 bp, Homo sapien
tctgaaataacgcattgaagggggc

SEQ ID NO: 3844993 - DNA, 25 bp, Homo sapien
tgaagggggctctcaacttatattc

SEQ ID NO: 3844994 - DNA, 25 bp, Homo sapien
gggctctcaacttatattcatatac

SEQ ID NO: 3844995 - DNA, 25 bp, Homo sapien
gaaatgccttacaaaagtcaacgac

SEQ ID NO: 3844996 - DNA, 25 bp, Homo sapien
tctagcttaagtgatgctgttcgaa

SEQ ID NO: 3844997 - DNA, 25 bp, Homo sapien
cgaatttaacaattggagcgctaag

SEQ ID NO: 3844998 - DNA, 25 bp, Homo sapien
gcaagtcagagtaaaagatgttctt

SEQ ID NO: 3844999 - DNA, 25 bp, Homo sapien
cataggcttcaagaaaaaacagaac

SEQ ID NO: 3845000 - DNA, 25 bp, Homo sapien
aagttgggtatctaattttcatgcc

SEQ ID NO: 3845001 - DNA, 25 bp, Homo sapien
gcatccacatgatagacatgccttt

SEQ ID NO: 3845002 - DNA, 25 bp, Homo sapien
tatgatcaacaagaggtttgcccga

SEQ ID NO: 3845003 - DNA, 25 bp, Homo sapien
gagattgtttttcagttccctcgac

SEQ ID NO: 3845004 - DNA, 25 bp, Homo sapien
tcagttccctcgacaatattgttca

SEQ ID NO: 3845005 - DNA, 25 bp, Homo sapien
acttctgaagggcacatagtttgaa

SEQ ID NO: 3845006 - DNA, 25 bp, Homo sapien
tgaagtagattgactgtgagattgt

SEQ ID NO: 3845007 - DNA, 25 bp, Homo sapien
tgctaagtttttaacgtgtctgagg

SEQ ID NO: 3845008 - DNA, 25 bp, Homo sapien
ctgctaagtttttaacgtgtctgag

SEQ ID NO: 3845009 - DNA, 25 bp, Homo sapien
tctgctaagtttttaacgtgtctga

SEQ ID NO: 3845010 - DNA, 25 bp, Homo sapien
aagtttttaacgtgtctgaggatgc

SEQ ID NO: 3845011 - DNA, 25 bp, Homo sapien
gttctctctgagggtctgttttaca

SEQ ID NO: 3845012 - DNA, 25 bp, Homo sapien
ttttacacactgtcgttgttgatag

SEQ ID NO: 3845013 - DNA, 25 bp, Homo sapien
gggtctgttttacacactgtcgttg

SEQ ID NO: 3845014 - DNA, 25 bp, Homo sapien
tgagggtctgttttacacactgtcg

SEQ ID NO: 3845015 - DNA, 25 bp, Homo sapien
catcaagttggtcgtgcatttaaca

SEQ ID NO: 3845016 - DNA, 25 bp, Homo sapien
tctcggcaggcatcaagttggtcgt

SEQ ID NO: 3845017 - DNA, 25 bp, Homo sapien
aattttctcggcaggcatcaagttg

SEQ ID NO: 3845018 - DNA, 25 bp, Homo sapien
caggcatcaagttggtcgtgcattt

SEQ ID NO: 3845019 - DNA, 25 bp, Homo sapien
tctttcggtttcaataggtaacata

SEQ ID NO: 3845020 - DNA, 25 bp, Homo sapien
tgttctgttccttctatcatcagtg

SEQ ID NO: 3845021 - DNA, 25 bp, Homo sapien
ttaggttctgatttgagttccacag

SEQ ID NO: 3845022 - DNA, 25 bp, Homo sapien
tctctctcctagagagtgaagaatg

SEQ ID NO: 3845023 - DNA, 25 bp, Homo sapien
tgtaaaacacaaggccttgaaggag

SEQ ID NO: 3845024 - DNA, 25 bp, Homo sapien
ctctggtctatttggaactttcctc

SEQ ID NO: 3845025 - DNA, 25 bp, Homo sapien
caaatttgcctcttcagttgtaagc

SEQ ID NO: 3845026 - DNA, 25 bp, Homo sapien
ttgtaagcaatggattgctgctacc

SEQ ID NO: 3845027 - DNA, 25 bp, Homo sapien
gccactgctgcagatctatgatctc

SEQ ID NO: 3845028 - DNA, 25 bp, Homo sapien
cagtttgttgctcttaagtgatccg

SEQ ID NO: 3845029 - DNA, 25 bp, Homo sapien
gggcacttaagtcatcctcatcaga

SEQ ID NO: 3845030 - DNA, 25 bp, Homo sapien
ggtgaaaatgggtctacaaaatctg

SEQ ID NO: 3845031 - DNA, 25 bp, Homo sapien
gcctcctgggtaagctgactgactg

SEQ ID NO: 3845032 - DNA, 25 bp, Homo sapien
ttctgagactgagttatttcccctg

SEQ ID NO: 3845033 - DNA, 25 bp, Homo sapien
cacaacttgttgatgtttcctgtct

SEQ ID NO: 3845034 - DNA, 25 bp, Homo sapien
gatgtttcctgtcttctgagactga

SEQ ID NO: 3845035 - DNA, 25 bp, Homo sapien
ttcctgtcttctgagactgagttat

SEQ ID NO: 3845036 - DNA, 25 bp, Homo sapien
ttgttgaaaatggtagagaaggaaa

SEQ ID NO: 3845037 - DNA, 25 bp, Homo sapien
ttgaaaatggtagagaaggaaaaga

SEQ ID NO: 3845038 - DNA, 25 bp, Homo sapien
tgttgaaaatggtagagaaggaaaa

SEQ ID NO: 3845039 - DNA, 25 bp, Homo sapien
ctttgttgaaaatggtagagaagga

SEQ ID NO: 3845040 - DNA, 25 bp, Homo sapien
cagtctttgtacactcagcttgacg

SEQ ID NO: 3845041 - DNA, 25 bp, Homo sapien
cactgctggtttagccgcgggtaat

SEQ ID NO: 3845042 - DNA, 25 bp, Homo sapien
taatgcggcctgaattcgtgcagtc

SEQ ID NO: 3845043 - DNA, 25 bp, Homo sapien
tcttcatagagatgcgcacctggcg

SEQ ID NO: 3845044 - DNA, 25 bp, Homo sapien
tgtctgtagctgaccaaaaccacca

SEQ ID NO: 3845045 - DNA, 25 bp, Homo sapien
ctgcctctggagtccggatctccag

SEQ ID NO: 3845046 - DNA, 25 bp, Homo sapien
ccagagccaacaaggccccttctgt

SEQ ID NO: 3845047 - DNA, 25 bp, Homo sapien
agaatgcgtcctccttccccataat

SEQ ID NO: 3845048 - DNA, 25 bp, Homo sapien
tattgatatcaagtagtttgccatc

SEQ ID NO: 3845049 - DNA, 25 bp, Homo sapien
tttattgatatcaagtagtttgcca

SEQ ID NO: 3845050 - DNA, 25 bp, Homo sapien
tctttattgatatcaagtagtttgc

SEQ ID NO: 3845051 - DNA, 25 bp, Homo sapien
aagtctttattgatatcaagtagtt

SEQ ID NO: 3845052 - DNA, 25 bp, Homo sapien
ggtcaattgcatagacagtcaagtc

SEQ ID NO: 3845053 - DNA, 25 bp, Homo sapien
aatggactccactacgaccttggca

SEQ ID NO: 3845054 - DNA, 25 bp, Homo sapien
taaaaagctcatttctatcgatggc

SEQ ID NO: 3845055 - DNA, 25 bp, Homo sapien
ttcctgaacatagcgatccaagatc

SEQ ID NO: 3845056 - DNA, 25 bp, Homo sapien
ctataaatcaaacaaagtacaaaca

SEQ ID NO: 3845057 - DNA, 25 bp, Homo sapien
tataaatcaaacaaagtacaaacat

SEQ ID NO: 3845058 - DNA, 25 bp, Homo sapien
gaaacaatgacttgcatatccagct

SEQ ID NO: 3845059 - DNA, 25 bp, Homo sapien
aacaatgacttgcatatccagctga

SEQ ID NO: 3845060 - DNA, 25 bp, Homo sapien
aaacaatgacttgcatatccagctg

SEQ ID NO: 3845061 - DNA, 25 bp, Homo sapien
acaatgacttgcatatccagctgat

SEQ ID NO: 3845062 - DNA, 25 bp, Homo sapien
tcctcatattatggaagagcatagc

SEQ ID NO: 3845063 - DNA, 25 bp, Homo sapien
tcagtcccttcccatagtcgtcagt

SEQ ID NO: 3845064 - DNA, 25 bp, Homo sapien
gagcatagcagttttgataagccct

SEQ ID NO: 3845065 - DNA, 25 bp, Homo sapien
gagtctgtaggccatgacactataa

SEQ ID NO: 3845066 - DNA, 25 bp, Homo sapien
catggcttccccctcatttttgaag

SEQ ID NO: 3845067 - DNA, 25 bp, Homo sapien
cttcctcagttgaaatccatgaact

SEQ ID NO: 3845068 - DNA, 25 bp, Homo sapien
tcttcctcagttgaaatccatgaac

SEQ ID NO: 3845069 - DNA, 25 bp, Homo sapien
ccaggcatggcttccccctcatttt

SEQ ID NO: 3845070 - DNA, 25 bp, Homo sapien
tcatagaagtcagagttgatcacat

SEQ ID NO: 3845071 - DNA, 25 bp, Homo sapien
tctcctcttggaccaaactaaccat

SEQ ID NO: 3845072 - DNA, 25 bp, Homo sapien
ttcagggtttatgtccctttctgct

SEQ ID NO: 3845073 - DNA, 25 bp, Homo sapien
gagttgatcacattgttctcatttc

SEQ ID NO: 3845074 - DNA, 25 bp, Homo sapien
tagaaacgcagccatccatgaacca

SEQ ID NO: 3845075 - DNA, 25 bp, Homo sapien
aggacggcctcgctaggcacttaat

SEQ ID NO: 3845076 - DNA, 25 bp, Homo sapien
accatagtactgatgggagctttca

SEQ ID NO: 3845077 - DNA, 25 bp, Homo sapien
tgtatataagcttccaagtctatgg

SEQ ID NO: 3845078 - DNA, 25 bp, Homo sapien
tcagttcacaacaaagtcattaata

SEQ ID NO: 3845079 - DNA, 25 bp, Homo sapien
tgactctggaagatttgattcactg

SEQ ID NO: 3845080 - DNA, 25 bp, Homo sapien
taatatctgggagaggtgactctgg

SEQ ID NO: 3845081 - DNA, 25 bp, Homo sapien
tcattaatatctgggagaggtgact

SEQ ID NO: 3845082 - DNA, 25 bp, Homo sapien
atcgtctttggatctcataagtctc

SEQ ID NO: 3845083 - DNA, 25 bp, Homo sapien
gaatcgtctttggatctcataagtc

SEQ ID NO: 3845084 - DNA, 25 bp, Homo sapien
ctgaatcgtctttggatctcataag

SEQ ID NO: 3845085 - DNA, 25 bp, Homo sapien
cgtctttggatctcataagtctcat

SEQ ID NO: 3845086 - DNA, 25 bp, Homo sapien
accaaattgttcttcagccaaatct

SEQ ID NO: 3845087 - DNA, 25 bp, Homo sapien
ctaaaccaaattgttcttcagccaa

SEQ ID NO: 3845088 - DNA, 25 bp, Homo sapien
aattgttcttcagccaaatctgcag

SEQ ID NO: 3845089 - DNA, 25 bp, Homo sapien
caaattgttcttcagccaaatctgc

SEQ ID NO: 3845090 - DNA, 25 bp, Homo sapien
tactggggcgattaaatgcaggttg

SEQ ID NO: 3845091 - DNA, 25 bp, Homo sapien
ctactggggcgattaaatgcaggtt

SEQ ID NO: 3845092 - DNA, 25 bp, Homo sapien
actggggcgattaaatgcaggttga

SEQ ID NO: 3845093 - DNA, 25 bp, Homo sapien
tggggcgattaaatgcaggttgagt

SEQ ID NO: 3845094 - DNA, 25 bp, Homo sapien
cctctgaccatgactgtggcttttt

SEQ ID NO: 3845095 - DNA, 25 bp, Homo sapien
tacggcatcactctgctgaaacctc

SEQ ID NO: 3845096 - DNA, 25 bp, Homo sapien
cttttttctatctacggcatcactc

SEQ ID NO: 3845097 - DNA, 25 bp, Homo sapien
tctatctacggcatcactctgctga

SEQ ID NO: 3845098 - DNA, 25 bp, Homo sapien
tgtatattaacataattccgcatac

SEQ ID NO: 3845099 - DNA, 25 bp, Homo sapien
ctgtatattaacataattccgcata

SEQ ID NO: 3845100 - DNA, 25 bp, Homo sapien
tctgtatattaacataattccgcat

SEQ ID NO: 3845101 - DNA, 25 bp, Homo sapien
ttctgtatattaacataattccgca

SEQ ID NO: 3845102 - DNA, 25 bp, Homo sapien
tacagaagtaaacattcttgcatct

SEQ ID NO: 3845103 - DNA, 25 bp, Homo sapien
tcagatacacctccgatgtagaatt

SEQ ID NO: 3845104 - DNA, 25 bp, Homo sapien
tattttcatcctgaatctcaatgta

SEQ ID NO: 3845105 - DNA, 25 bp, Homo sapien
tcatcctgaatctcaatgtatactt

SEQ ID NO: 3845106 - DNA, 25 bp, Homo sapien
ctcccctgtcgtgtctttctaatgt

SEQ ID NO: 3845107 - DNA, 25 bp, Homo sapien
gctcccctgtcgtgtctttctaatg

SEQ ID NO: 3845108 - DNA, 25 bp, Homo sapien
tgctcccctgtcgtgtctttctaat

SEQ ID NO: 3845109 - DNA, 25 bp, Homo sapien
tcccctgtcgtgtctttctaatgtg

SEQ ID NO: 3845110 - DNA, 25 bp, Homo sapien
gaagtcaccagattatccacttgag

SEQ ID NO: 3845111 - DNA, 25 bp, Homo sapien
cctagtttgggtcatgtgcttgctc

SEQ ID NO: 3845112 - DNA, 25 bp, Homo sapien
gcttccccactaaggattgtaccat

SEQ ID NO: 3845113 - DNA, 25 bp, Homo sapien
tccacttgagaagtcactgggacaa

SEQ ID NO: 3845114 - DNA, 25 bp, Homo sapien
tctcaactgggatcaatttggctgc

SEQ ID NO: 3845115 - DNA, 25 bp, Homo sapien
acagaacaggctcttaccccaaacg

SEQ ID NO: 3845116 - DNA, 25 bp, Homo sapien
taatctagtgcctacactgcactgg

SEQ ID NO: 3845117 - DNA, 25 bp, Homo sapien
taaatgagtagaggtcaggaatgct

SEQ ID NO: 3845118 - DNA, 25 bp, Homo sapien
taatccagaggtccattcacataga

SEQ ID NO: 3845119 - DNA, 25 bp, Homo sapien
aactcggagattggcaaggaccact

SEQ ID NO: 3845120 - DNA, 25 bp, Homo sapien
cagggaatcagcttggactcgaagt

SEQ ID NO: 3845121 - DNA, 25 bp, Homo sapien
gactcgaagtacatagcttgtcctg

SEQ ID NO: 3845122 - DNA, 25 bp, Homo sapien
tacacaatactttgattaatggcag

SEQ ID NO: 3845123 - DNA, 25 bp, Homo sapien
ggcaagttcacttactggaggaggt

SEQ ID NO: 3845124 - DNA, 25 bp, Homo sapien
cctcctgtgtgaagcgtgggatctc

SEQ ID NO: 3845125 - DNA, 25 bp, Homo sapien
tgtgtgaagcgtgggatctcaccag

SEQ ID NO: 3845126 - DNA, 25 bp, Homo sapien
gatgtaagacaagaatcttcactgt

SEQ ID NO: 3845127 - DNA, 25 bp, Homo sapien
gggatctcaccaggatgtaagacaa

SEQ ID NO: 3845128 - DNA, 25 bp, Homo sapien
gactcgtgttattactcttccagaa

SEQ ID NO: 3845129 - DNA, 25 bp, Homo sapien
taggttcttcattaagattgactcg

SEQ ID NO: 3845130 - DNA, 25 bp, Homo sapien
aaattgttgtaggttcttcattaag

SEQ ID NO: 3845131 - DNA, 25 bp, Homo sapien
cattaagattgactcgtgttattac

SEQ ID NO: 3845132 - DNA, 25 bp, Homo sapien
atcatctactctatacctcacacga

SEQ ID NO: 3845133 - DNA, 25 bp, Homo sapien
gtacatcatctactctatacctcac

SEQ ID NO: 3845134 - DNA, 25 bp, Homo sapien
catcatctactctatacctcacacg

SEQ ID NO: 3845135 - DNA, 25 bp, Homo sapien
tacatcatctactctatacctcaca

SEQ ID NO: 3845136 - DNA, 25 bp, Homo sapien
tgtgtgaaggcaaccttagcctcac

SEQ ID NO: 3845137 - DNA, 25 bp, Homo sapien
tttgataactgggcaacagataagg

SEQ ID NO: 3845138 - DNA, 25 bp, Homo sapien
cagcattaggtttcatgtactcctt

SEQ ID NO: 3845139 - DNA, 25 bp, Homo sapien
ggtttgataactgggcaacagataa

SEQ ID NO: 3845140 - DNA, 25 bp, Homo sapien
cattaggtttcatgtactccttggt

SEQ ID NO: 3845141 - DNA, 25 bp, Homo sapien
gccaaactaagtcttggagatatta

SEQ ID NO: 3845142 - DNA, 25 bp, Homo sapien
ccaaactaagtcttggagatattaa

SEQ ID NO: 3845143 - DNA, 25 bp, Homo sapien
caaactaagtcttggagatattaag

SEQ ID NO: 3845144 - DNA, 25 bp, Homo sapien
aaactaagtcttggagatattaaga

SEQ ID NO: 3845145 - DNA, 25 bp, Homo sapien
gtccaaatcgaagctgaaaaatgtt

SEQ ID NO: 3845146 - DNA, 25 bp, Homo sapien
cagtgtgagcccactcagagaaaaa

SEQ ID NO: 3845147 - DNA, 25 bp, Homo sapien
gaaatatgctctgtacctgtggatg

SEQ ID NO: 3845148 - DNA, 25 bp, Homo sapien
taagtgaagcttacaaatggagaca

SEQ ID NO: 3845149 - DNA, 25 bp, Homo sapien
tgcatcttcagcataaactgttgtg

SEQ ID NO: 3845150 - DNA, 25 bp, Homo sapien
taggtgtacccttgactgcatccgg

SEQ ID NO: 3845151 - DNA, 25 bp, Homo sapien
ctaaagacaggaggataatcattca

SEQ ID NO: 3845152 - DNA, 25 bp, Homo sapien
tccggagccaccatccctttgtata

SEQ ID NO: 3845153 - DNA, 25 bp, Homo sapien
ctgcttacatattatggcatcttca

SEQ ID NO: 3845154 - DNA, 25 bp, Homo sapien
catctgcttacatattatggcatct

SEQ ID NO: 3845155 - DNA, 25 bp, Homo sapien
tctgcttacatattatggcatcttc

SEQ ID NO: 3845156 - DNA, 25 bp, Homo sapien
gcttacatattatggcatcttcata

SEQ ID NO: 3845157 - DNA, 25 bp, Homo sapien
tgtgacagtagcaataccaggtggc

SEQ ID NO: 3845158 - DNA, 25 bp, Homo sapien
aaatggatgtagtgcaaaaaagtgc

SEQ ID NO: 3845159 - DNA, 25 bp, Homo sapien
tccttaaaagcgatagttctcctgt

SEQ ID NO: 3845160 - DNA, 25 bp, Homo sapien
cacttctgggcttcttatccggtaa

SEQ ID NO: 3845161 - DNA, 25 bp, Homo sapien
tcccattggatgtgatacgaaaaag

SEQ ID NO: 3845162 - DNA, 25 bp, Homo sapien
taaagttacccaaactgtagtgcac

SEQ ID NO: 3845163 - DNA, 25 bp, Homo sapien
aatgtccaaaaccttgatggccaag

SEQ ID NO: 3845164 - DNA, 25 bp, Homo sapien
tgaatgacgagggtgtactgctcca

SEQ ID NO: 3845165 - DNA, 25 bp, Homo sapien
tgctcaaggaaataaaagaggatag

SEQ ID NO: 3845166 - DNA, 25 bp, Homo sapien
attaggtattgatgggacttatctc

SEQ ID NO: 3845167 - DNA, 25 bp, Homo sapien
attcaacgacacttcatgctaaaaa

SEQ ID NO: 3845168 - DNA, 25 bp, Homo sapien
tcaaggaaataaaagaggatagaaa

SEQ ID NO: 3845169 - DNA, 25 bp, Homo sapien
tatttctccaacttcttcattctca

SEQ ID NO: 3845170 - DNA, 25 bp, Homo sapien
aacttcttcattctcatctttttct

SEQ ID NO: 3845171 - DNA, 25 bp, Homo sapien
caacttcttcattctcatctttttc

SEQ ID NO: 3845172 - DNA, 25 bp, Homo sapien
ttctatttctccaacttcttcattc

SEQ ID NO: 3845173 - DNA, 25 bp, Homo sapien
tcactcattccttgagctagtttag

SEQ ID NO: 3845174 - DNA, 25 bp, Homo sapien
ggatagagccagatataggttccag

SEQ ID NO: 3845175 - DNA, 25 bp, Homo sapien
ttgataacatcacagggatagagcc

SEQ ID NO: 3845176 - DNA, 25 bp, Homo sapien
gctgtttcattaccttaatttggga

SEQ ID NO: 3845177 - DNA, 25 bp, Homo sapien
cttagcagactcctcaatgagatac

SEQ ID NO: 3845178 - DNA, 25 bp, Homo sapien
tagcagactcctcaatgagatactc

SEQ ID NO: 3845179 - DNA, 25 bp, Homo sapien
ttagcagactcctcaatgagatact

SEQ ID NO: 3845180 - DNA, 25 bp, Homo sapien
tgatcagaatatgactgcatttggg

SEQ ID NO: 3845181 - DNA, 25 bp, Homo sapien
tcccccaaagacttgggatcatctg

SEQ ID NO: 3845182 - DNA, 25 bp, Homo sapien
catttgggggcttctactggcatct

SEQ ID NO: 3845183 - DNA, 25 bp, Homo sapien
gaagttatatcatgctctgctgttg

SEQ ID NO: 3845184 - DNA, 25 bp, Homo sapien
taagaggcctctcatatctgagacc

SEQ ID NO: 3845185 - DNA, 25 bp, Homo sapien
cctctagtaagaggcctctcatatc

SEQ ID NO: 3845186 - DNA, 25 bp, Homo sapien
tgagtatgaggcctctagtaagagg

SEQ ID NO: 3845187 - DNA, 25 bp, Homo sapien
ctgcagttgagtatgaggcctctag

SEQ ID NO: 3845188 - DNA, 25 bp, Homo sapien
gcatgtccctcagagcatttggtat

SEQ ID NO: 3845189 - DNA, 25 bp, Homo sapien
cttgtcagtgtcctatgcatgtccc

SEQ ID NO: 3845190 - DNA, 25 bp, Homo sapien
ttttcttggtgtagccaaacttgtc

SEQ ID NO: 3845191 - DNA, 25 bp, Homo sapien
ttgcacatgcccctgttatagactt

SEQ ID NO: 3845192 - DNA, 25 bp, Homo sapien
tcttggcagataaggatcaaacact

SEQ ID NO: 3845193 - DNA, 25 bp, Homo sapien
aatttcttggcagataaggatcaaa

SEQ ID NO: 3845194 - DNA, 25 bp, Homo sapien
tggcagataaggatcaaacactgga

SEQ ID NO: 3845195 - DNA, 25 bp, Homo sapien
tttcttggcagataaggatcaaaca

SEQ ID NO: 3845196 - DNA, 25 bp, Homo sapien
gaatgtagcgatcagtgctttccct

SEQ ID NO: 3845197 - DNA, 25 bp, Homo sapien
cagaatgtagcgatcagtgctttcc

SEQ ID NO: 3845198 - DNA, 25 bp, Homo sapien
agaatgtagcgatcagtgctttccc

SEQ ID NO: 3845199 - DNA, 25 bp, Homo sapien
tcagaatgtagcgatcagtgctttc

SEQ ID NO: 3845200 - DNA, 25 bp, Homo sapien
aatctcagaagtttcaaagaaggtg

SEQ ID NO: 3845201 - DNA, 25 bp, Homo sapien
gtgcaaagttttgaacatgaatctc

SEQ ID NO: 3845202 - DNA, 25 bp, Homo sapien
tgaaatgtcagttattgttctccat

SEQ ID NO: 3845203 - DNA, 25 bp, Homo sapien
aaagaaggtggcagttgaaatgtca

SEQ ID NO: 3845204 - DNA, 25 bp, Homo sapien
tatgttattgagtctccctctcgat

SEQ ID NO: 3845205 - DNA, 25 bp, Homo sapien
catatgttattgagtctccctctcg

SEQ ID NO: 3845206 - DNA, 25 bp, Homo sapien
tgttattgagtctccctctcgatca

SEQ ID NO: 3845207 - DNA, 25 bp, Homo sapien
tggcatatgttattgagtctccctc

SEQ ID NO: 3845208 - DNA, 25 bp, Homo sapien
gataaccgtttgctcctattgcggg

SEQ ID NO: 3845209 - DNA, 25 bp, Homo sapien
aacatgcagtagtatttgtggcagc

SEQ ID NO: 3845210 - DNA, 25 bp, Homo sapien
taaaccattacaacgcttagtatga

SEQ ID NO: 3845211 - DNA, 25 bp, Homo sapien
tctggtagagagaatcagaacccca

SEQ ID NO: 3845212 - DNA, 25 bp, Homo sapien
ttttgctgtaaatacaaaagtccaa

SEQ ID NO: 3845213 - DNA, 25 bp, Homo sapien
tacaaaagtccaagcctgcattata

SEQ ID NO: 3845214 - DNA, 25 bp, Homo sapien
ttatactcagtttgaataaggaata

SEQ ID NO: 3845215 - DNA, 25 bp, Homo sapien
tatattatactcagtttgaataagg

SEQ ID NO: 3845216 - DNA, 25 bp, Homo sapien
ataacaggtttgagaaagcagagcc

SEQ ID NO: 3845217 - DNA, 25 bp, Homo sapien
caatacagccgtcaggcaaaactgc

SEQ ID NO: 3845218 - DNA, 25 bp, Homo sapien
catgcactgaggaaaatcactgctt

SEQ ID NO: 3845219 - DNA, 25 bp, Homo sapien
attttcctcaagtgaatgccatcaa

SEQ ID NO: 3845220 - DNA, 25 bp, Homo sapien
aagccaatttgctgctatcttcaaa

SEQ ID NO: 3845221 - DNA, 25 bp, Homo sapien
tgaagccaatttgctgctatcttca

SEQ ID NO: 3845222 - DNA, 25 bp, Homo sapien
ttccaaattgagcagtgcgtcagct

SEQ ID NO: 3845223 - DNA, 25 bp, Homo sapien
ttgagcagtgcgtcagctgtaggta

SEQ ID NO: 3845224 - DNA, 25 bp, Homo sapien
aagcgaggagggctttgattatttg

SEQ ID NO: 3845225 - DNA, 25 bp, Homo sapien
tcaaggctatacatcagctgtggga

SEQ ID NO: 3845226 - DNA, 25 bp, Homo sapien
accctcatggcttcactaatttcaa

SEQ ID NO: 3845227 - DNA, 25 bp, Homo sapien
ggtggaagcacttcaatatacacag

SEQ ID NO: 3845228 - DNA, 25 bp, Homo sapien
gactatcatttccacccctggagcg

SEQ ID NO: 3845229 - DNA, 25 bp, Homo sapien
ccctggagcgatggtgataagccct

SEQ ID NO: 3845230 - DNA, 25 bp, Homo sapien
tatccgctgcttggaccgtgagtgc

SEQ ID NO: 3845231 - DNA, 25 bp, Homo sapien
tgagtgcgtaagtccgcccgactat

SEQ ID NO: 3845232 - DNA, 25 bp, Homo sapien
tccccaggtctcatgtctgtataaa

SEQ ID NO: 3845233 - DNA, 25 bp, Homo sapien
gaaggttggcgtgttatcatttgca

SEQ ID NO: 3845234 - DNA, 25 bp, Homo sapien
cacttgaatattgacgatgactggc

SEQ ID NO: 3845235 - DNA, 25 bp, Homo sapien
gatgactggctcactttcttgtaca

SEQ ID NO: 3845236 - DNA, 25 bp, Homo sapien
taccagtctgtgtgacggtgaagac

SEQ ID NO: 3845237 - DNA, 25 bp, Homo sapien
tccctgtccactggttgaagtaagg

SEQ ID NO: 3845238 - DNA, 25 bp, Homo sapien
tcagaaaaaggtgaagctctgggtc

SEQ ID NO: 3845239 - DNA, 25 bp, Homo sapien
ggtgaggtagcgagtaataccagtc

SEQ ID NO: 3845240 - DNA, 25 bp, Homo sapien
tatatcgtggaatacaaaatactga

SEQ ID NO: 3845241 - DNA, 25 bp, Homo sapien
tacctataaatatcatgcttactct

SEQ ID NO: 3845242 - DNA, 25 bp, Homo sapien
tttccaaaatagcattggactggag

SEQ ID NO: 3845243 - DNA, 25 bp, Homo sapien
caaaagatggtgacctatatcgtgg

SEQ ID NO: 3845244 - DNA, 25 bp, Homo sapien
ccagagctactattcttaaaggtga

SEQ ID NO: 3845245 - DNA, 25 bp, Homo sapien
agactgtccgaaatggttgctccca

SEQ ID NO: 3845246 - DNA, 25 bp, Homo sapien
tcaatgtgtagaccggcaaaggcag

SEQ ID NO: 3845247 - DNA, 25 bp, Homo sapien
ctgggcattgtaaaatatggacttt

SEQ ID NO: 3845248 - DNA, 25 bp, Homo sapien
tgttttagcgatactctgttggcag

SEQ ID NO: 3845249 - DNA, 25 bp, Homo sapien
aattggcttgaaggcaacatgcagc

SEQ ID NO: 3845250 - DNA, 25 bp, Homo sapien
gatcatgggccaagagaatgcgaaa

SEQ ID NO: 3845251 - DNA, 25 bp, Homo sapien
gatctttgacttgctactctgcctg

SEQ ID NO: 3845252 - DNA, 25 bp, Homo sapien
taagttctgctgtcctaggatgcat

SEQ ID NO: 3845253 - DNA, 25 bp, Homo sapien
tccaggagactaagttctgctgtcc

SEQ ID NO: 3845254 - DNA, 25 bp, Homo sapien
gagactaagttctgctgtcctagga

SEQ ID NO: 3845255 - DNA, 25 bp, Homo sapien
tggctccaggagactaagttctgct

SEQ ID NO: 3845256 - DNA, 25 bp, Homo sapien
aaatcgtgggtaatcctcaggagtc

SEQ ID NO: 3845257 - DNA, 25 bp, Homo sapien
aatcgtgggtaatcctcaggagtcc

SEQ ID NO: 3845258 - DNA, 25 bp, Homo sapien
atggaaaaatcgtgggtaatcctca

SEQ ID NO: 3845259 - DNA, 25 bp, Homo sapien
gaaaaatcgtgggtaatcctcagga

SEQ ID NO: 3845260 - DNA, 25 bp, Homo sapien
gtgtaaaatgttatcagatacaaac

SEQ ID NO: 3845261 - DNA, 25 bp, Homo sapien
tgtaagattctagaataactgatag

SEQ ID NO: 3845262 - DNA, 25 bp, Homo sapien
gatagtgtaaaatgttatcagatac

SEQ ID NO: 3845263 - DNA, 25 bp, Homo sapien
gattctagaataactgatagtgtaa

SEQ ID NO: 3845264 - DNA, 25 bp, Homo sapien
gatggaatagaggattcctggccta

SEQ ID NO: 3845265 - DNA, 25 bp, Homo sapien
caatggcttggattggtggcgtaac

SEQ ID NO: 3845266 - DNA, 25 bp, Homo sapien
tattccggtcctgatcaatggcttg

SEQ ID NO: 3845267 - DNA, 25 bp, Homo sapien
tcctggcctatctgatggcggttga

SEQ ID NO: 3845268 - DNA, 25 bp, Homo sapien
ttagaggccaaacaaccatttctgt

SEQ ID NO: 3845269 - DNA, 25 bp, Homo sapien
tgaaaaagtatcagacatatcgaaa

SEQ ID NO: 3845270 - DNA, 25 bp, Homo sapien
ttttttcaagggtcagaaatatcag

SEQ ID NO: 3845271 - DNA, 25 bp, Homo sapien
tatcagacatatcgaaatgtttttc

SEQ ID NO: 3845272 - DNA, 25 bp, Homo sapien
tgtataatgtgactgaatttgtttc

SEQ ID NO: 3845273 - DNA, 25 bp, Homo sapien
tataatgtgactgaatttgtttcca

SEQ ID NO: 3845274 - DNA, 25 bp, Homo sapien
ctgaatttgtttccaaaatgtgcat

SEQ ID NO: 3845275 - DNA, 25 bp, Homo sapien
cttgtataatgtgactgaatttgtt

SEQ ID NO: 3845276 - DNA, 25 bp, Homo sapien
tcaaaaatcctccaaacgattttga

SEQ ID NO: 3845277 - DNA, 25 bp, Homo sapien
atcaaaaatcctccaaacgattttg

SEQ ID NO: 3845278 - DNA, 25 bp, Homo sapien
atcctccaaacgattttgacaagca

SEQ ID NO: 3845279 - DNA, 25 bp, Homo sapien
aaatcctccaaacgattttgacaag

SEQ ID NO: 3845280 - DNA, 25 bp, Homo sapien
ttaaccaggctgatgcagacaaagt

SEQ ID NO: 3845281 - DNA, 25 bp, Homo sapien
tatctggctctctgatcttcgttgc

SEQ ID NO: 3845282 - DNA, 25 bp, Homo sapien
ctagtcagttcgtctgtagtctgga

SEQ ID NO: 3845283 - DNA, 25 bp, Homo sapien
tattgtttagagtcgcagctttgct

SEQ ID NO: 3845284 - DNA, 25 bp, Homo sapien
tagggccatgagtaaaactaatgca

SEQ ID NO: 3845285 - DNA, 25 bp, Homo sapien
tcttggcaaaaatcgtacttagacc

SEQ ID NO: 3845286 - DNA, 25 bp, Homo sapien
tattaagcgatgatcactaccttgc

SEQ ID NO: 3845287 - DNA, 25 bp, Homo sapien
tagtagctgcctgacatttcaattc

SEQ ID NO: 3845288 - DNA, 25 bp, Homo sapien
acatatgaggcctttgttcgtttca

SEQ ID NO: 3845289 - DNA, 25 bp, Homo sapien
tgaggcctttgttcgtttcattctt

SEQ ID NO: 3845290 - DNA, 25 bp, Homo sapien
gcctttgttcgtttcattctttcca

SEQ ID NO: 3845291 - DNA, 25 bp, Homo sapien
cttcacatatgaggcctttgttcgt

SEQ ID NO: 3845292 - DNA, 25 bp, Homo sapien
tgtacattcgtattctctaaagtct

SEQ ID NO: 3845293 - DNA, 25 bp, Homo sapien
acattcgtattctctaaagtcttca

SEQ ID NO: 3845294 - DNA, 25 bp, Homo sapien
ttctgtacattcgtattctctaaag

SEQ ID NO: 3845295 - DNA, 25 bp, Homo sapien
caattttctgtacattcgtattctc

SEQ ID NO: 3845296 - DNA, 25 bp, Homo sapien
ccttatctccctcaagtggacactg

SEQ ID NO: 3845297 - DNA, 25 bp, Homo sapien
tctccctcaagtggacactgtcggc

SEQ ID NO: 3845298 - DNA, 25 bp, Homo sapien
cactgtcggcttttcgtagatgttc

SEQ ID NO: 3845299 - DNA, 25 bp, Homo sapien
ggacactgtcggcttttcgtagatg

SEQ ID NO: 3845300 - DNA, 25 bp, Homo sapien
gagtgtaaactcctctgggttggct

SEQ ID NO: 3845301 - DNA, 25 bp, Homo sapien
tgtgaattttcagatagagtgtaaa

SEQ ID NO: 3845302 - DNA, 25 bp, Homo sapien
tatagaacgtaacataaaggttgaa

SEQ ID NO: 3845303 - DNA, 25 bp, Homo sapien
cagatagagtgtaaactcctctggg

SEQ ID NO: 3845304 - DNA, 25 bp, Homo sapien
acagttcttgactgagaggaacttc

SEQ ID NO: 3845305 - DNA, 25 bp, Homo sapien
gggactggctttaagaattggtaca

SEQ ID NO: 3845306 - DNA, 25 bp, Homo sapien
tatgagccttcagaagggactggct

SEQ ID NO: 3845307 - DNA, 25 bp, Homo sapien
ctagtatgagccttcagaagggact

SEQ ID NO: 3845308 - DNA, 25 bp, Homo sapien
cagcttgataagtgagtggacggca

SEQ ID NO: 3845309 - DNA, 25 bp, Homo sapien
tctcattcagattttgggcacggtc

SEQ ID NO: 3845310 - DNA, 25 bp, Homo sapien
caatcacgagtgtttggcacaagga

SEQ ID NO: 3845311 - DNA, 25 bp, Homo sapien
gagttctcaactcaggtatggcagc

SEQ ID NO: 3845312 - DNA, 25 bp, Homo sapien
ggattatgacaaagtagcgagtctt

SEQ ID NO: 3845313 - DNA, 25 bp, Homo sapien
agcgagtcttatcttcatagttgag

SEQ ID NO: 3845314 - DNA, 25 bp, Homo sapien
tccttaacactatatttccagtcaa

SEQ ID NO: 3845315 - DNA, 25 bp, Homo sapien
catagttgagcctcttccttaacac

SEQ ID NO: 3845316 - DNA, 25 bp, Homo sapien
tatctgtagctccattgtctcctga

SEQ ID NO: 3845317 - DNA, 25 bp, Homo sapien
aaatcctgtgaatattgtggtacca

SEQ ID NO: 3845318 - DNA, 25 bp, Homo sapien
tttggtccatcatctatatctgtag

SEQ ID NO: 3845319 - DNA, 25 bp, Homo sapien
catactctatctgtccatttggtcc

SEQ ID NO: 3845320 - DNA, 25 bp, Homo sapien
tttctacagactgtccatgaataaa

SEQ ID NO: 3845321 - DNA, 25 bp, Homo sapien
attttctacagactgtccatgaata

SEQ ID NO: 3845322 - DNA, 25 bp, Homo sapien
ttttctacagactgtccatgaataa

SEQ ID NO: 3845323 - DNA, 25 bp, Homo sapien
ggcatagtagctttcatgcttgaaa

SEQ ID NO: 3845324 - DNA, 25 bp, Homo sapien
tctcaccactattcgcacttcatgg

SEQ ID NO: 3845325 - DNA, 25 bp, Homo sapien
catggtagataatagtgcccacttt

SEQ ID NO: 3845326 - DNA, 25 bp, Homo sapien
aagtgggtgagttgtcattcctgtc

SEQ ID NO: 3845327 - DNA, 25 bp, Homo sapien
ctgcaccacaatggagtgtatgttc

SEQ ID NO: 3845328 - DNA, 25 bp, Homo sapien
gcaccacaatggagtgtatgttcat

SEQ ID NO: 3845329 - DNA, 25 bp, Homo sapien
tgcaccacaatggagtgtatgttca

SEQ ID NO: 3845330 - DNA, 25 bp, Homo sapien
gaaaagcatttgcttaacaggatcc

SEQ ID NO: 3845331 - DNA, 25 bp, Homo sapien
tctatccagaactcttccggtgctg

SEQ ID NO: 3845332 - DNA, 25 bp, Homo sapien
catcaacacccagtaatccacatta

SEQ ID NO: 3845333 - DNA, 25 bp, Homo sapien
aagttctatggtggggtctggtcct

SEQ ID NO: 3845334 - DNA, 25 bp, Homo sapien
ctgcaaaccaaagaaaggtacttga

SEQ ID NO: 3845335 - DNA, 25 bp, Homo sapien
tgcaaaccaaagaaaggtacttgaa

SEQ ID NO: 3845336 - DNA, 25 bp, Homo sapien
ttcctaaagaacaagtcaggctgca

SEQ ID NO: 3845337 - DNA, 25 bp, Homo sapien
tcctaaagaacaagtcaggctgcag

SEQ ID NO: 3845338 - DNA, 25 bp, Homo sapien
aaagaacaagtcaggctgcagaaag

SEQ ID NO: 3845339 - DNA, 25 bp, Homo sapien
ctaaagaacaagtcaggctgcagaa

SEQ ID NO: 3845340 - DNA, 25 bp, Homo sapien
ggagatattgcaataatttccctgg

SEQ ID NO: 3845341 - DNA, 25 bp, Homo sapien
gagatattgcaataatttccctggt

SEQ ID NO: 3845342 - DNA, 25 bp, Homo sapien
gatattgcaataatttccctggtta

SEQ ID NO: 3845343 - DNA, 25 bp, Homo sapien
aggagatattgcaataatttccctg

SEQ ID NO: 3845344 - DNA, 25 bp, Homo sapien
atgagcatgatgtattttgcctgga

SEQ ID NO: 3845345 - DNA, 25 bp, Homo sapien
ccatgagcatgatgtattttgcctg

SEQ ID NO: 3845346 - DNA, 25 bp, Homo sapien
aaccatgagcatgatgtattttgcc

SEQ ID NO: 3845347 - DNA, 25 bp, Homo sapien
taaccatgagcatgatgtattttgc

SEQ ID NO: 3845348 - DNA, 25 bp, Homo sapien
ctgcaaatgcagctgccgaacaaat

SEQ ID NO: 3845349 - DNA, 25 bp, Homo sapien
ttgcagacaaagggcggactgcaaa

SEQ ID NO: 3845350 - DNA, 25 bp, Homo sapien
gcaaatgcagctgccgaacaaatat

SEQ ID NO: 3845351 - DNA, 25 bp, Homo sapien
caaagggcggactgcaaatgcagct

SEQ ID NO: 3845352 - DNA, 25 bp, Homo sapien
cctgctcacttcttgctaacacttg

SEQ ID NO: 3845353 - DNA, 25 bp, Homo sapien
tctgtgctacctatttgttaacctg

SEQ ID NO: 3845354 - DNA, 25 bp, Homo sapien
tgaagcctcttacatcttctgtggc

SEQ ID NO: 3845355 - DNA, 25 bp, Homo sapien
gccagcggatacctgaagcctctta

SEQ ID NO: 3845356 - DNA, 25 bp, Homo sapien
cagaagcaggtaacaacttgccatg

SEQ ID NO: 3845357 - DNA, 25 bp, Homo sapien
aaattgcccccagtctttttgagct

SEQ ID NO: 3845358 - DNA, 25 bp, Homo sapien
tgaaattgcccccagtctttttgag

SEQ ID NO: 3845359 - DNA, 25 bp, Homo sapien
ttgaaattgcccccagtctttttga

SEQ ID NO: 3845360 - DNA, 25 bp, Homo sapien
gaaattgcccccagtctttttgagc

SEQ ID NO: 3845361 - DNA, 25 bp, Homo sapien
atttggaaggagaactaaagcaagt

SEQ ID NO: 3845362 - DNA, 25 bp, Homo sapien
cacttaggcagctaattcactgtct

SEQ ID NO: 3845363 - DNA, 25 bp, Homo sapien
gcaagtttagttctcctcacaaaag

SEQ ID NO: 3845364 - DNA, 25 bp, Homo sapien
taattcttagaatgcctagtcctct

SEQ ID NO: 3845365 - DNA, 25 bp, Homo sapien
ttgaacatttatgggcaataggaca

SEQ ID NO: 3845366 - DNA, 25 bp, Homo sapien
gatgctggcaattgactatctactg

SEQ ID NO: 3845367 - DNA, 25 bp, Homo sapien
tgatttaagagaatggatgctggca

SEQ ID NO: 3845368 - DNA, 25 bp, Homo sapien
tttccaccttgcaacataaaacctg

SEQ ID NO: 3845369 - DNA, 25 bp, Homo sapien
cttcatatgtttctcctctgattct

SEQ ID NO: 3845370 - DNA, 25 bp, Homo sapien
catatgtttctcctctgattcttct

SEQ ID NO: 3845371 - DNA, 25 bp, Homo sapien
gccttcatatgtttctcctctgatt

SEQ ID NO: 3845372 - DNA, 25 bp, Homo sapien
cttaaaagtaaaaagccttcatatg

SEQ ID NO: 3845373 - DNA, 25 bp, Homo sapien
cagtagcagttaagggatcaattca

SEQ ID NO: 3845374 - DNA, 25 bp, Homo sapien
cactaacgtataagggaaaggcagc

SEQ ID NO: 3845375 - DNA, 25 bp, Homo sapien
accctggccagggatatttccttag

SEQ ID NO: 3845376 - DNA, 25 bp, Homo sapien
tagtgacagcagtatggtctgcagc

SEQ ID NO: 3845377 - DNA, 25 bp, Homo sapien
catcaatagcaactatggtagctgg

SEQ ID NO: 3845378 - DNA, 25 bp, Homo sapien
ctttcttcatcaatagcaactatgg

SEQ ID NO: 3845379 - DNA, 25 bp, Homo sapien
caactatggtagctggtggtcctcc

SEQ ID NO: 3845380 - DNA, 25 bp, Homo sapien
tagcaactatggtagctggtggtcc

SEQ ID NO: 3845381 - DNA, 25 bp, Homo sapien
ctgataacaccttccttagagccat

SEQ ID NO: 3845382 - DNA, 25 bp, Homo sapien
aatgttcagtctaaaatgacggcac

SEQ ID NO: 3845383 - DNA, 25 bp, Homo sapien
gataaaggctatctcaaataaaatg

SEQ ID NO: 3845384 - DNA, 25 bp, Homo sapien
tgttcagtctaaaatgacggcacat

SEQ ID NO: 3845385 - DNA, 25 bp, Homo sapien
ctttagtgtagtagataaaggctat

SEQ ID NO: 3845386 - DNA, 25 bp, Homo sapien
tccctgaagctaaacatgtccagag

SEQ ID NO: 3845387 - DNA, 25 bp, Homo sapien
catcatcatactggcccaagcagat

SEQ ID NO: 3845388 - DNA, 25 bp, Homo sapien
caagcagatttcaaagagagagccc

SEQ ID NO: 3845389 - DNA, 25 bp, Homo sapien
tccagagataaaactgtcgaaacat

SEQ ID NO: 3845390 - DNA, 25 bp, Homo sapien
ctgtcaaagttcactcaaagctgat

SEQ ID NO: 3845391 - DNA, 25 bp, Homo sapien
cttctgtcaaagttcactcaaagct

SEQ ID NO: 3845392 - DNA, 25 bp, Homo sapien
tccactgatgacgtagagtgacaca

SEQ ID NO: 3845393 - DNA, 25 bp, Homo sapien
tgttaagtgatgtagagaaaggtcc

SEQ ID NO: 3845394 - DNA, 25 bp, Homo sapien
gacacatcctgagtaaggctataag

SEQ ID NO: 3845395 - DNA, 25 bp, Homo sapien
tctcctgaagagacaatagatttcc

SEQ ID NO: 3845396 - DNA, 25 bp, Homo sapien
gactaagatcacagagttaacataa

SEQ ID NO: 3845397 - DNA, 25 bp, Homo sapien
aaggtgagtgggctcagtaaatgcc

SEQ ID NO: 3845398 - DNA, 25 bp, Homo sapien
gaactatattctgtatccattattt

SEQ ID NO: 3845399 - DNA, 25 bp, Homo sapien
gaaaaagtaccttgactaagatcac

SEQ ID NO: 3845400 - DNA, 25 bp, Homo sapien
gagccacaggaagagtaacgcatag

SEQ ID NO: 3845401 - DNA, 25 bp, Homo sapien
tatcagccgtcaggaaggatttgca

SEQ ID NO: 3845402 - DNA, 25 bp, Homo sapien
tttcctgctggtttatcagccgtca

SEQ ID NO: 3845403 - DNA, 25 bp, Homo sapien
tatcaatggcatacatggagccaca

SEQ ID NO: 3845404 - DNA, 25 bp, Homo sapien
ccagtgctcataatctagttccaag

SEQ ID NO: 3845405 - DNA, 25 bp, Homo sapien
tccacgttctgagatgtatgccacc

SEQ ID NO: 3845406 - DNA, 25 bp, Homo sapien
aactaacactaagctgctagcagga

SEQ ID NO: 3845407 - DNA, 25 bp, Homo sapien
tgccacctgccttagttaccacaag

SEQ ID NO: 3845408 - DNA, 25 bp, Homo sapien
gagatacttcttccagtcgctatgt

SEQ ID NO: 3845409 - DNA, 25 bp, Homo sapien
aatccaatggagatgtgtaactacc

SEQ ID NO: 3845410 - DNA, 25 bp, Homo sapien
gctttttgggctccatcgagatact

SEQ ID NO: 3845411 - DNA, 25 bp, Homo sapien
gatggaatgagatgtgtaacaatcc

SEQ ID NO: 3845412 - DNA, 25 bp, Homo sapien
tgcaggagagatcataagtcctgag

SEQ ID NO: 3845413 - DNA, 25 bp, Homo sapien
gagagatcataagtcctgagataac

SEQ ID NO: 3845414 - DNA, 25 bp, Homo sapien
ttggcttggacccatactacccatt

SEQ ID NO: 3845415 - DNA, 25 bp, Homo sapien
tacccattcatagagtgcaggagag

SEQ ID NO: 3845416 - DNA, 25 bp, Homo sapien
tgcgaagctttaatttaggccattt

SEQ ID NO: 3845417 - DNA, 25 bp, Homo sapien
tgtaagaaatgatggcttaattatc

SEQ ID NO: 3845418 - DNA, 25 bp, Homo sapien
gaaatgatggcttaattatcttatc

SEQ ID NO: 3845419 - DNA, 25 bp, Homo sapien
gtgaataaatgcgaagctttaattt

SEQ ID NO: 3845420 - DNA, 25 bp, Homo sapien
tgaatgtgcgtctgatgatcctgtg

SEQ ID NO: 3845421 - DNA, 25 bp, Homo sapien
atgtgcgtctgatgatcctgtgcat

SEQ ID NO: 3845422 - DNA, 25 bp, Homo sapien
ttgaatgtgcgtctgatgatcctgt

SEQ ID NO: 3845423 - DNA, 25 bp, Homo sapien
aatgtgcgtctgatgatcctgtgca

SEQ ID NO: 3845424 - DNA, 25 bp, Homo sapien
cattcaaatgattggtcttagtctc

SEQ ID NO: 3845425 - DNA, 25 bp, Homo sapien
tccaaactcattcaaatgattggtc

SEQ ID NO: 3845426 - DNA, 25 bp, Homo sapien
tttctccactgcactacttcccatg

SEQ ID NO: 3845427 - DNA, 25 bp, Homo sapien
ttagtctctggccatgtgcatttct

SEQ ID NO: 3845428 - DNA, 25 bp, Homo sapien
tgtgttgttgggtggcttcagagtt

SEQ ID NO: 3845429 - DNA, 25 bp, Homo sapien
taacctcaaagtgtgttgttgggtg

SEQ ID NO: 3845430 - DNA, 25 bp, Homo sapien
caaagtgtgttgttgggtggcttca

SEQ ID NO: 3845431 - DNA, 25 bp, Homo sapien
caagataacctcaaagtgtgttgtt

SEQ ID NO: 3845432 - DNA, 25 bp, Homo sapien
tcagagttaaagtcgctaacttgct

SEQ ID NO: 3845433 - DNA, 25 bp, Homo sapien
cttgcatactacacccatcattatc

SEQ ID NO: 3845434 - DNA, 25 bp, Homo sapien
tccctgaactacgatttccttggct

SEQ ID NO: 3845435 - DNA, 25 bp, Homo sapien
tggcttccttaagtctcagagttaa

SEQ ID NO: 3845436 - DNA, 25 bp, Homo sapien
atatggctttgatacttttggtttt

SEQ ID NO: 3845437 - DNA, 25 bp, Homo sapien
gaagtaaggtctctatgatctgtga

SEQ ID NO: 3845438 - DNA, 25 bp, Homo sapien
ggtctctatgatctgtgatggtttc

SEQ ID NO: 3845439 - DNA, 25 bp, Homo sapien
aaaatgaggaagtaaggtctctatg

SEQ ID NO: 3845440 - DNA, 25 bp, Homo sapien
tgtactgtcgccatagccataaaca

SEQ ID NO: 3845441 - DNA, 25 bp, Homo sapien
ctgtccacagagtgcatatagtaca

SEQ ID NO: 3845442 - DNA, 25 bp, Homo sapien
catagcaaccaagctgcagtgatgc

SEQ ID NO: 3845443 - DNA, 25 bp, Homo sapien
aggttgagagcattgctgtccacag

SEQ ID NO: 3845444 - DNA, 25 bp, Homo sapien
ggtatttcgaaacatgacaatgcaa

SEQ ID NO: 3845445 - DNA, 25 bp, Homo sapien
tggaatggtatttcgaaacatgaca

SEQ ID NO: 3845446 - DNA, 25 bp, Homo sapien
tggtatttcgaaacatgacaatgca

SEQ ID NO: 3845447 - DNA, 25 bp, Homo sapien
aatggtatttcgaaacatgacaatg

SEQ ID NO: 3845448 - DNA, 25 bp, Homo sapien
ctgggctctccggttagcattattt

SEQ ID NO: 3845449 - DNA, 25 bp, Homo sapien
tgggctctccggttagcattatttt

SEQ ID NO: 3845450 - DNA, 25 bp, Homo sapien
aaatcatgtgctcttgtggttgtgc

SEQ ID NO: 3845451 - DNA, 25 bp, Homo sapien
gctcttaaaagccaataagtaggcg

SEQ ID NO: 3845452 - DNA, 25 bp, Homo sapien
ttcacatgtaactgaaggacatttt

SEQ ID NO: 3845453 - DNA, 25 bp, Homo sapien
ggcgataatttgtcaatggcagcaa

SEQ ID NO: 3845454 - DNA, 25 bp, Homo sapien
cttgcttacatagccagttgctctg

SEQ ID NO: 3845455 - DNA, 25 bp, Homo sapien
actatctggatacttgcttacatag

SEQ ID NO: 3845456 - DNA, 25 bp, Homo sapien
aagaagagggatatgagagggtatt

SEQ ID NO: 3845457 - DNA, 25 bp, Homo sapien
tgagtgcaggtaaagactatctgga

SEQ ID NO: 3845458 - DNA, 25 bp, Homo sapien
ctcaaagccaatgtaaaaggttcgg

SEQ ID NO: 3845459 - DNA, 25 bp, Homo sapien
attctctagactcaaagccaatgta

SEQ ID NO: 3845460 - DNA, 25 bp, Homo sapien
tctacattctctagactcaaagcca

SEQ ID NO: 3845461 - DNA, 25 bp, Homo sapien
ctctagactcaaagccaatgtaaaa

SEQ ID NO: 3845462 - DNA, 25 bp, Homo sapien
ccgtatctaagcctgcaaaccatac

SEQ ID NO: 3845463 - DNA, 25 bp, Homo sapien
gacccgtatctaagcctgcaaacca

SEQ ID NO: 3845464 - DNA, 25 bp, Homo sapien
gtatctaagcctgcaaaccatactc

SEQ ID NO: 3845465 - DNA, 25 bp, Homo sapien
ctgacccgtatctaagcctgcaaac

SEQ ID NO: 3845466 - DNA, 25 bp, Homo sapien
tctgtaaacacatctcaagtgatac

SEQ ID NO: 3845467 - DNA, 25 bp, Homo sapien
tgtaaacacatctcaagtgatacat

SEQ ID NO: 3845468 - DNA, 25 bp, Homo sapien
ctgtaaacacatctcaagtgataca

SEQ ID NO: 3845469 - DNA, 25 bp, Homo sapien
agaaaaattcagagatactggagat

SEQ ID NO: 3845470 - DNA, 25 bp, Homo sapien
ccagtaatgtcaattggtgatggag

SEQ ID NO: 3845471 - DNA, 25 bp, Homo sapien
tccgctatcatcctgaagcaccatg

SEQ ID NO: 3845472 - DNA, 25 bp, Homo sapien
gactctcaccacaaaattaatgtcc

SEQ ID NO: 3845473 - DNA, 25 bp, Homo sapien
tgaacctccaggcttgtacctagat

SEQ ID NO: 3845474 - DNA, 25 bp, Homo sapien
tccaggcttgtacctagataagaca

SEQ ID NO: 3845475 - DNA, 25 bp, Homo sapien
tagataagacatccccaaacatgga

SEQ ID NO: 3845476 - DNA, 25 bp, Homo sapien
gcttgtacctagataagacatcccc

SEQ ID NO: 3845477 - DNA, 25 bp, Homo sapien
ttcattatactttccacactgagaa

SEQ ID NO: 3845478 - DNA, 25 bp, Homo sapien
atatgtggctgttgtttcattatac

SEQ ID NO: 3845479 - DNA, 25 bp, Homo sapien
tttcattatactttccacactgaga

SEQ ID NO: 3845480 - DNA, 25 bp, Homo sapien
gctgttgtttcattatactttccac

SEQ ID NO: 3845481 - DNA, 25 bp, Homo sapien
cagattccattgtgcctttcgtaga

SEQ ID NO: 3845482 - DNA, 25 bp, Homo sapien
gcctttcgtagatcccacggcatat

SEQ ID NO: 3845483 - DNA, 25 bp, Homo sapien
attgtgcctttcgtagatcccacgg

SEQ ID NO: 3845484 - DNA, 25 bp, Homo sapien
caacaatgatacagattccattgtg

SEQ ID NO: 3845485 - DNA, 25 bp, Homo sapien
cataacatatatctgcttaaagaca

SEQ ID NO: 3845486 - DNA, 25 bp, Homo sapien
cagttcttgaacttactgtgaaata

SEQ ID NO: 3845487 - DNA, 25 bp, Homo sapien
tggaaatttaattccatacacagtt

SEQ ID NO: 3845488 - DNA, 25 bp, Homo sapien
taaaggaggataccactttactcac

SEQ ID NO: 3845489 - DNA, 25 bp, Homo sapien
tctgtcaacttcaactgtttctagg

SEQ ID NO: 3845490 - DNA, 25 bp, Homo sapien
tgtcaacctctaggtctgtcaactt

SEQ ID NO: 3845491 - DNA, 25 bp, Homo sapien
cctagtgtcgtgtccttttgtcaac

SEQ ID NO: 3845492 - DNA, 25 bp, Homo sapien
aacttcaactgtttctagggaatga

SEQ ID NO: 3845493 - DNA, 25 bp, Homo sapien
gatccacaattatgccaggtagtac

SEQ ID NO: 3845494 - DNA, 25 bp, Homo sapien
ttgatccacaattatgccaggtagt

SEQ ID NO: 3845495 - DNA, 25 bp, Homo sapien
cttgatccacaattatgccaggtag

SEQ ID NO: 3845496 - DNA, 25 bp, Homo sapien
tgatccacaattatgccaggtagta

SEQ ID NO: 3845497 - DNA, 25 bp, Homo sapien
tacgcagagccagtataaatgacct

SEQ ID NO: 3845498 - DNA, 25 bp, Homo sapien
ccaagatggcgagtcaaaaagcagc

SEQ ID NO: 3845499 - DNA, 25 bp, Homo sapien
aattttgaacggatgaaagctacca

SEQ ID NO: 3845500 - DNA, 25 bp, Homo sapien
tattggaaacttcatctacgcagag

SEQ ID NO: 3845501 - DNA, 25 bp, Homo sapien
taaacagagcgcatgaactgagtgg

SEQ ID NO: 3845502 - DNA, 25 bp, Homo sapien
gcgcatgaactgagtgggaatgaca

SEQ ID NO: 3845503 - DNA, 25 bp, Homo sapien
ttaaatttgatgctagattccggga

SEQ ID NO: 3845504 - DNA, 25 bp, Homo sapien
tagattccgggaagctctgggtcat

SEQ ID NO: 3845505 - DNA, 25 bp, Homo sapien
gcttggctttagatgttgtaccctg

SEQ ID NO: 3845506 - DNA, 25 bp, Homo sapien
tcatagactaactactgagagaggt

SEQ ID NO: 3845507 - DNA, 25 bp, Homo sapien
tgtaccctgtttaaccagtctgtag

SEQ ID NO: 3845508 - DNA, 25 bp, Homo sapien
aaaggtacataccactatgcttggc

SEQ ID NO: 3845509 - DNA, 25 bp, Homo sapien
cacggatatcgtactgagcccattg

SEQ ID NO: 3845510 - DNA, 25 bp, Homo sapien
gatatcgtactgagcccattgtgca

SEQ ID NO: 3845511 - DNA, 25 bp, Homo sapien
gcttgagccacggatatcgtactga

SEQ ID NO: 3845512 - DNA, 25 bp, Homo sapien
tcgtactgagcccattgtgcagttc

SEQ ID NO: 3845513 - DNA, 25 bp, Homo sapien
ttctggattggagactggcaaagga

SEQ ID NO: 3845514 - DNA, 25 bp, Homo sapien
cactcgtataccttctggattggag

SEQ ID NO: 3845515 - DNA, 25 bp, Homo sapien
ccagaaacactttccactcgtatac

SEQ ID NO: 3845516 - DNA, 25 bp, Homo sapien
acactttccactcgtataccttctg

SEQ ID NO: 3845517 - DNA, 25 bp, Homo sapien
ggctagaagggtcatgactgctctt

SEQ ID NO: 3845518 - DNA, 25 bp, Homo sapien
tgaatcccaatccatcaccttggct

SEQ ID NO: 3845519 - DNA, 25 bp, Homo sapien
gatgaatcccaatccatcaccttgg

SEQ ID NO: 3845520 - DNA, 25 bp, Homo sapien
tgagatgaatcccaatccatcacct

SEQ ID NO: 3845521 - DNA, 25 bp, Homo sapien
tttcctcccatccttgaaatgcatt

SEQ ID NO: 3845522 - DNA, 25 bp, Homo sapien
ctttcctcccatccttgaaatgcat

SEQ ID NO: 3845523 - DNA, 25 bp, Homo sapien
ttcctcccatccttgaaatgcattt

SEQ ID NO: 3845524 - DNA, 25 bp, Homo sapien
tcctcccatccttgaaatgcatttt

SEQ ID NO: 3845525 - DNA, 25 bp, Homo sapien
tcaagagggaaatgatgctaacaac

SEQ ID NO: 3845526 - DNA, 25 bp, Homo sapien
taagaaattctcttctcaagaggga

SEQ ID NO: 3845527 - DNA, 25 bp, Homo sapien
gaaatgatgctaacaacaatggtaa

SEQ ID NO: 3845528 - DNA, 25 bp, Homo sapien
tggtaacaaggcttttctccttcat

SEQ ID NO: 3845529 - DNA, 25 bp, Homo sapien
tataccgaaagccagtatacccatt

SEQ ID NO: 3845530 - DNA, 25 bp, Homo sapien
aatataccgaaagccagtataccca

SEQ ID NO: 3845531 - DNA, 25 bp, Homo sapien
cgaaagccagtatacccattcatgg

SEQ ID NO: 3845532 - DNA, 25 bp, Homo sapien
taccgaaagccagtatacccattca

SEQ ID NO: 3845533 - DNA, 25 bp, Homo sapien
aaaagattaaagtgagttgggcgcg

SEQ ID NO: 3845534 - DNA, 25 bp, Homo sapien
cggttcctgtgagatgaaagttcaa

SEQ ID NO: 3845535 - DNA, 25 bp, Homo sapien
gatgtaggtccaccttggctgctca

SEQ ID NO: 3845536 - DNA, 25 bp, Homo sapien
tagagatatagtcagtacaggttac

SEQ ID NO: 3845537 - DNA, 25 bp, Homo sapien
cagagacgattctttatatttgatc

SEQ ID NO: 3845538 - DNA, 25 bp, Homo sapien
tgtattcagcagttgatagctcaga

SEQ ID NO: 3845539 - DNA, 25 bp, Homo sapien
gatagctcagagacgattctttata

SEQ ID NO: 3845540 - DNA, 25 bp, Homo sapien
cttcttggacactgcttgtattcag

SEQ ID NO: 3845541 - DNA, 25 bp, Homo sapien
cttagagtactgaaatacggactgc

SEQ ID NO: 3845542 - DNA, 25 bp, Homo sapien
ccaacatgcctactgtctcttactt

SEQ ID NO: 3845543 - DNA, 25 bp, Homo sapien
ttttagttgaaattagtgacaatag

SEQ ID NO: 3845544 - DNA, 25 bp, Homo sapien
gaaatacggactgcatgcattttct

SEQ ID NO: 3845545 - DNA, 25 bp, Homo sapien
ctaggatcgctgatagttacctggt

SEQ ID NO: 3845546 - DNA, 25 bp, Homo sapien
gatcgctgatagttacctggtccca

SEQ ID NO: 3845547 - DNA, 25 bp, Homo sapien
tcgctgatagttacctggtcccagt

SEQ ID NO: 3845548 - DNA, 25 bp, Homo sapien
taggatcgctgatagttacctggtc

SEQ ID NO: 3845549 - DNA, 25 bp, Homo sapien
ggcatattatatgcttggctcactt

SEQ ID NO: 3845550 - DNA, 25 bp, Homo sapien
tatagacccagtcataacaggacct

SEQ ID NO: 3845551 - DNA, 25 bp, Homo sapien
tatttccctttcattgcactactca

SEQ ID NO: 3845552 - DNA, 25 bp, Homo sapien
gcactactcaccatctggcatatta

SEQ ID NO: 3845553 - DNA, 25 bp, Homo sapien
tagcagacgccaacattattaacca

SEQ ID NO: 3845554 - DNA, 25 bp, Homo sapien
taagcctatagcagacgccaacatt

SEQ ID NO: 3845555 - DNA, 25 bp, Homo sapien
gcctatagcagacgccaacattatt

SEQ ID NO: 3845556 - DNA, 25 bp, Homo sapien
cagtaagcctatagcagacgccaac

SEQ ID NO: 3845557 - DNA, 25 bp, Homo sapien
acataggtattttggagtcactgac

SEQ ID NO: 3845558 - DNA, 25 bp, Homo sapien
gtatcactgagggtgctaccagggc

SEQ ID NO: 3845559 - DNA, 25 bp, Homo sapien
gaggcactttttaggtatccacata

SEQ ID NO: 3845560 - DNA, 25 bp, Homo sapien
tcaggagtaggcagctggatgttca

SEQ ID NO: 3845561 - DNA, 25 bp, Homo sapien
cattacagtgttcgttttcacttcc

SEQ ID NO: 3845562 - DNA, 25 bp, Homo sapien
gaggacttcataacatcaccaggta

SEQ ID NO: 3845563 - DNA, 25 bp, Homo sapien
caccaggtaagccaatcattttgag

SEQ ID NO: 3845564 - DNA, 25 bp, Homo sapien
cagtaagtgttcagttgtgccagaa

SEQ ID NO: 3845565 - DNA, 25 bp, Homo sapien
tctctaccatgaataagccctgtcg

SEQ ID NO: 3845566 - DNA, 25 bp, Homo sapien
gagttatgcctgacaatttgctgcc

SEQ ID NO: 3845567 - DNA, 25 bp, Homo sapien
caaatcggctgggaagagttatgcc

SEQ ID NO: 3845568 - DNA, 25 bp, Homo sapien
tgttaggctcaagtcaggatcagaa

SEQ ID NO: 3845569 - DNA, 25 bp, Homo sapien
tcataagcacaactgaggtttgtca

SEQ ID NO: 3845570 - DNA, 25 bp, Homo sapien
ccacttctggggcacaatctcataa

SEQ ID NO: 3845571 - DNA, 25 bp, Homo sapien
gagcattgaaacttagctgacagct

SEQ ID NO: 3845572 - DNA, 25 bp, Homo sapien
tcagctttgatatcttccactttca

SEQ ID NO: 3845573 - DNA, 25 bp, Homo sapien
tatgtgtctatataggtacatacag

SEQ ID NO: 3845574 - DNA, 25 bp, Homo sapien
ttgtgtctatataggtacatacaga

SEQ ID NO: 3845575 - DNA, 25 bp, Homo sapien
ctatataggtacatacagacatatg

SEQ ID NO: 3845576 - DNA, 25 bp, Homo sapien
tgtgtctatataggtacatacagac

SEQ ID NO: 3845577 - DNA, 25 bp, Homo sapien
tccacactcagaagttggaacagaa

SEQ ID NO: 3845578 - DNA, 25 bp, Homo sapien
ttttttgagtcatctgcacagatcc

SEQ ID NO: 3845579 - DNA, 25 bp, Homo sapien
attttttgagtcatctgcacagatc

SEQ ID NO: 3845580 - DNA, 25 bp, Homo sapien
aattttttgagtcatctgcacagat

SEQ ID NO: 3845581 - DNA, 25 bp, Homo sapien
tgagcaaagatacccaggtcttaaa

SEQ ID NO: 3845582 - DNA, 25 bp, Homo sapien
tcatcattgagcaaagatacccagg

SEQ ID NO: 3845583 - DNA, 25 bp, Homo sapien
gttattcatcattgagcaaagatac

SEQ ID NO: 3845584 - DNA, 25 bp, Homo sapien
aaagatacccaggtcttaaagccat

SEQ ID NO: 3845585 - DNA, 25 bp, Homo sapien
gtcactgcatgcaggattctgggag

SEQ ID NO: 3845586 - DNA, 25 bp, Homo sapien
gtcctcgctgcatctgtcactgcat

SEQ ID NO: 3845587 - DNA, 25 bp, Homo sapien
gctgcatctgtcactgcatgcagga

SEQ ID NO: 3845588 - DNA, 25 bp, Homo sapien
gtaactttgagcaaggcagctgtgt

SEQ ID NO: 3845589 - DNA, 25 bp, Homo sapien
gccaactggcagtatagctgtactt

SEQ ID NO: 3845590 - DNA, 25 bp, Homo sapien
tagatgtgaggaatgttcaactgcc

SEQ ID NO: 3845591 - DNA, 25 bp, Homo sapien
tagtcccttatattccagcagccac

SEQ ID NO: 3845592 - DNA, 25 bp, Homo sapien
tgatggaccatctaacagttctagt

SEQ ID NO: 3845593 - DNA, 25 bp, Homo sapien
atgtgcatgtccgcagtgcattcct

SEQ ID NO: 3845594 - DNA, 25 bp, Homo sapien
tcaaatgtgcatgtccgcagtgcat

SEQ ID NO: 3845595 - DNA, 25 bp, Homo sapien
caaatgtgcatgtccgcagtgcatt

SEQ ID NO: 3845596 - DNA, 25 bp, Homo sapien
aaatgtgcatgtccgcagtgcattc

SEQ ID NO: 3845597 - DNA, 25 bp, Homo sapien
tgaactcgtattgtttaagggtcaa

SEQ ID NO: 3845598 - DNA, 25 bp, Homo sapien
tgtgataaggataatgtgtgttgca

SEQ ID NO: 3845599 - DNA, 25 bp, Homo sapien
catggaaatgaatactcccaaatgg

SEQ ID NO: 3845600 - DNA, 25 bp, Homo sapien
gggtcaactgtattacactttgtga

SEQ ID NO: 3845601 - DNA, 25 bp, Homo sapien
aactgcactgtgtgtccttttccat

SEQ ID NO: 3845602 - DNA, 25 bp, Homo sapien
ctaggagcaggatgtttagctttca

SEQ ID NO: 3845603 - DNA, 25 bp, Homo sapien
cacacagctgtcaaactgcactgtg

SEQ ID NO: 3845604 - DNA, 25 bp, Homo sapien
taggcaggaaaacctggctaggagc

SEQ ID NO: 3845605 - DNA, 25 bp, Homo sapien
cgattgtggctggacttatcttgaa

SEQ ID NO: 3845606 - DNA, 25 bp, Homo sapien
gcgggagcctgatccctgcggaatc

SEQ ID NO: 3845607 - DNA, 25 bp, Homo sapien
tgatccctgcggaatcgattgtggc

SEQ ID NO: 3845608 - DNA, 25 bp, Homo sapien
cggaatcgattgtggctggacttat

SEQ ID NO: 3845609 - DNA, 25 bp, Homo sapien
accttgtgagggtgccacggatttg

SEQ ID NO: 3845610 - DNA, 25 bp, Homo sapien
ttccaccttgtgagggtgccacgga

SEQ ID NO: 3845611 - DNA, 25 bp, Homo sapien
tccaccttgtgagggtgccacggat

SEQ ID NO: 3845612 - DNA, 25 bp, Homo sapien
tacttccaccttgtgagggtgccac

SEQ ID NO: 3845613 - DNA, 25 bp, Homo sapien
acgtagggatcccgagcagccacgg

SEQ ID NO: 3845614 - DNA, 25 bp, Homo sapien
cgtagggatcccgagcagccacgga

SEQ ID NO: 3845615 - DNA, 25 bp, Homo sapien
gacgtagggatcccgagcagccacg

SEQ ID NO: 3845616 - DNA, 25 bp, Homo sapien
gtagggatcccgagcagccacggag

SEQ ID NO: 3845617 - DNA, 25 bp, Homo sapien
ggtcagagacacacaaggatggtga

SEQ ID NO: 3845618 - DNA, 25 bp, Homo sapien
caaggatggtgatcaaaatccagtg

SEQ ID NO: 3845619 - DNA, 25 bp, Homo sapien
cacacaaggatggtgatcaaaatcc

SEQ ID NO: 3845620 - DNA, 25 bp, Homo sapien
gagacacacaaggatggtgatcaaa

SEQ ID NO: 3845621 - DNA, 25 bp, Homo sapien
aacaagttgcagcttcaggagcggg

SEQ ID NO: 3845622 - DNA, 25 bp, Homo sapien
ctaccaaaatcagggggaggaagct

SEQ ID NO: 3845623 - DNA, 25 bp, Homo sapien
gaggagggtggattaaaaggataga

SEQ ID NO: 3845624 - DNA, 25 bp, Homo sapien
tgctccttgagcgatcacccagagc

SEQ ID NO: 3845625 - DNA, 25 bp, Homo sapien
ggagtccgagctgccgcctgcaaaa

SEQ ID NO: 3845626 - DNA, 25 bp, Homo sapien
cagggtacgaataccaaaagcgcct

SEQ ID NO: 3845627 - DNA, 25 bp, Homo sapien
ctgcggggaactcgaggcaaagaca

SEQ ID NO: 3845628 - DNA, 25 bp, Homo sapien
gcgcctcccgctggagaggctgcgg

SEQ ID NO: 3845629 - DNA, 25 bp, Homo sapien
cgaagaggactgtcaaaaggcgtta

SEQ ID NO: 3845630 - DNA, 25 bp, Homo sapien
gagcatcctctgatgttggtcctga

SEQ ID NO: 3845631 - DNA, 25 bp, Homo sapien
tagaaacttcggaaactggcaacag

SEQ ID NO: 3845632 - DNA, 25 bp, Homo sapien
tcctgaactgggagagtctgaccaa

SEQ ID NO: 3845633 - DNA, 25 bp, Homo sapien
gctttcctggattccgcgaccacaa

SEQ ID NO: 3845634 - DNA, 25 bp, Homo sapien
taagtctcaggtcttccaagcctag

SEQ ID NO: 3845635 - DNA, 25 bp, Homo sapien
ggtcttccaagcctagcactctgtc

SEQ ID NO: 3845636 - DNA, 25 bp, Homo sapien
tccttgctctcactaagtctcaggt

SEQ ID NO: 3845637 - DNA, 25 bp, Homo sapien
cgaagtagttgcaggagtttgtgct

SEQ ID NO: 3845638 - DNA, 25 bp, Homo sapien
ttttgcgaagtagttgcaggagttt

SEQ ID NO: 3845639 - DNA, 25 bp, Homo sapien
tcctctctattcttcgcaaagctgg

SEQ ID NO: 3845640 - DNA, 25 bp, Homo sapien
ctctctattcttcgcaaagctggcc

SEQ ID NO: 3845641 - DNA, 25 bp, Homo sapien
ggcaatgtcattgccctcattgaca

SEQ ID NO: 3845642 - DNA, 25 bp, Homo sapien
aagtggaccatgaggtctatcaccc

SEQ ID NO: 3845643 - DNA, 25 bp, Homo sapien
gactgacagtttggcggtagagaca

SEQ ID NO: 3845644 - DNA, 25 bp, Homo sapien
tactctttggaggtcaagtggacca

SEQ ID NO: 3845645 - DNA, 25 bp, Homo sapien
ttgcccctgttcttgacagtgccag

SEQ ID NO: 3845646 - DNA, 25 bp, Homo sapien
gggtgaccttgcccctgttcttgac

SEQ ID NO: 3845647 - DNA, 25 bp, Homo sapien
ccctgttcttgacagtgccagtaga

SEQ ID NO: 3845648 - DNA, 25 bp, Homo sapien
gaccttgcccctgttcttgacagtg

SEQ ID NO: 3845649 - DNA, 25 bp, Homo sapien
cacaaacacggggtcatcactagag

SEQ ID NO: 3845650 - DNA, 25 bp, Homo sapien
cacggggtcatcactagaggcggca

SEQ ID NO: 3845651 - DNA, 25 bp, Homo sapien
gggtcatcactagaggcggcagaga

SEQ ID NO: 3845652 - DNA, 25 bp, Homo sapien
aaacacggggtcatcactagaggcg

SEQ ID NO: 3845653 - DNA, 25 bp, Homo sapien
ggcggactccacaacacatttagtg

SEQ ID NO: 3845654 - DNA, 25 bp, Homo sapien
ctggcggactccacaacacatttag

SEQ ID NO: 3845655 - DNA, 25 bp, Homo sapien
cactggcggactccacaacacattt

SEQ ID NO: 3845656 - DNA, 25 bp, Homo sapien
aagacactggcggactccacaacac

SEQ ID NO: 3845657 - DNA, 25 bp, Homo sapien
gggatttccattgaagacgagcttt

SEQ ID NO: 3845658 - DNA, 25 bp, Homo sapien
tccattgaagacgagctttccattc

SEQ ID NO: 3845659 - DNA, 25 bp, Homo sapien
gaagacgagctttccattctcagcc

SEQ ID NO: 3845660 - DNA, 25 bp, Homo sapien
gatttccattgaagacgagctttcc

SEQ ID NO: 3845661 - DNA, 25 bp, Homo sapien
ctgtaccatggaatttgccatgggt

SEQ ID NO: 3845662 - DNA, 25 bp, Homo sapien
ccatggaatttgccatgggtggaat

SEQ ID NO: 3845663 - DNA, 25 bp, Homo sapien
catggaatttgccatgggtggaatc

SEQ ID NO: 3845664 - DNA, 25 bp, Homo sapien
ggaatttgccatgggtggaatcata

SEQ ID NO: 3845665 - DNA, 25 bp, Homo sapien
ggggtcattgatggtgacaatatcc

SEQ ID NO: 3845666 - DNA, 25 bp, Homo sapien
ttgatggtgacaatatccactttac

SEQ ID NO: 3845667 - DNA, 25 bp, Homo sapien
ttgttgaggtcaatgaaggggtcat

SEQ ID NO: 3845668 - DNA, 25 bp, Homo sapien
agatcatgtagactatgttgttgag

SEQ ID NO: 3845669 - DNA, 25 bp, Homo sapien
atagtccaatccgttggctctggcc

SEQ ID NO: 3845670 - DNA, 25 bp, Homo sapien
gggtgcccaatatagtccaatccgt

SEQ ID NO: 3845671 - DNA, 25 bp, Homo sapien
aatatagtccaatccgttggctctg

SEQ ID NO: 3845672 - DNA, 25 bp, Homo sapien
cctagtgaccgggtgcccaatatag

SEQ ID NO: 3845673 - DNA, 25 bp, Homo sapien
caatgctttaaatccaggtgtggag

SEQ ID NO: 3845674 - DNA, 25 bp, Homo sapien
ggtgaacttcctgagaaacgatgtt

SEQ ID NO: 3845675 - DNA, 25 bp, Homo sapien
tggagacaaccttttgatagcttct

SEQ ID NO: 3845676 - DNA, 25 bp, Homo sapien
gctttaaatccaggtgtggagacaa

SEQ ID NO: 3845677 - DNA, 25 bp, Homo sapien
aagtgtctgttaatgtcattatgag

SEQ ID NO: 3845678 - DNA, 25 bp, Homo sapien
aaaagtgtctgttaatgtcattatg

SEQ ID NO: 3845679 - DNA, 25 bp, Homo sapien
agtgtctgttaatgtcattatgagc

SEQ ID NO: 3845680 - DNA, 25 bp, Homo sapien
tgaaaagtgtctgttaatgtcatta

SEQ ID NO: 3845681 - DNA, 25 bp, Homo sapien
gactggaacaccagtaaagcctctc

SEQ ID NO: 3845682 - DNA, 25 bp, Homo sapien
gcctctcctctctggaaaaagttta

SEQ ID NO: 3845683 - DNA, 25 bp, Homo sapien
tcatcttaggactggaacaccagta

SEQ ID NO: 3845684 - DNA, 25 bp, Homo sapien
gtgcatcataactgacagcagcagg

SEQ ID NO: 3845685 - DNA, 25 bp, Homo sapien
cttagtattgctgctttctgtatgc

SEQ ID NO: 3845686 - DNA, 25 bp, Homo sapien
ctgctttctgtatgcacatccgaaa

SEQ ID NO: 3845687 - DNA, 25 bp, Homo sapien
tttctgtatgcacatccgaaaggac

SEQ ID NO: 3845688 - DNA, 25 bp, Homo sapien
tattgctgctttctgtatgcacatc

SEQ ID NO: 3845689 - DNA, 25 bp, Homo sapien
caattttgtggtggtgatactatca

SEQ ID NO: 3845690 - DNA, 25 bp, Homo sapien
ccagctctgtgtatgaatggattaa

SEQ ID NO: 3845691 - DNA, 25 bp, Homo sapien
cacagtgggctaaagaaggacatca

SEQ ID NO: 3845692 - DNA, 25 bp, Homo sapien
tttgttgtgccaataagcagtggca

SEQ ID NO: 3845693 - DNA, 25 bp, Homo sapien
tgctgggatagtgaaatcgtctgaa

SEQ ID NO: 3845694 - DNA, 25 bp, Homo sapien
tctgaagcaggctcaatatattcat

SEQ ID NO: 3845695 - DNA, 25 bp, Homo sapien
tagtgaaatcgtctgaagcaggctc

SEQ ID NO: 3845696 - DNA, 25 bp, Homo sapien
gaagcaggctcaatatattcattgt

SEQ ID NO: 3845697 - DNA, 25 bp, Homo sapien
ctctttcttgtattttcttgacaac

SEQ ID NO: 3845698 - DNA, 25 bp, Homo sapien
cttgtattttcttgacaacttgctc

SEQ ID NO: 3845699 - DNA, 25 bp, Homo sapien
tttcttgtattttcttgacaacttg

SEQ ID NO: 3845700 - DNA, 25 bp, Homo sapien
tctctttcttgtattttcttgacaa

SEQ ID NO: 3845701 - DNA, 25 bp, Homo sapien
tgagtacatccttgtgcttgcattt

SEQ ID NO: 3845702 - DNA, 25 bp, Homo sapien
atttgttttcaacatcgccaaggtg

SEQ ID NO: 3845703 - DNA, 25 bp, Homo sapien
tcatgcataagatggtaaaatgagt

SEQ ID NO: 3845704 - DNA, 25 bp, Homo sapien
gcttgcatttgttttcaacatcgcc

SEQ ID NO: 3845705 - DNA, 25 bp, Homo sapien
ttgaggtttccaaagcactgatcat

SEQ ID NO: 3845706 - DNA, 25 bp, Homo sapien
cagttgaggtttccaaagcactgat

SEQ ID NO: 3845707 - DNA, 25 bp, Homo sapien
aaaccatttggagcctcagttgagg

SEQ ID NO: 3845708 - DNA, 25 bp, Homo sapien
gcctcagttgaggtttccaaagcac

SEQ ID NO: 3845709 - DNA, 25 bp, Homo sapien
tctcaggcagaatacttctgacacc

SEQ ID NO: 3845710 - DNA, 25 bp, Homo sapien
ggttggttgtgttgtttattgcagt

SEQ ID NO: 3845711 - DNA, 25 bp, Homo sapien
agtttttacagttgttctcaggcag

SEQ ID NO: 3845712 - DNA, 25 bp, Homo sapien
cagttgttctcaggcagaatacttc

SEQ ID NO: 3845713 - DNA, 25 bp, Homo sapien
aaggaacagtgcctgatttggcatt

SEQ ID NO: 3845714 - DNA, 25 bp, Homo sapien
acagtgcctgatttggcattttcct

SEQ ID NO: 3845715 - DNA, 25 bp, Homo sapien
tcaaggaacagtgcctgatttggca

SEQ ID NO: 3845716 - DNA, 25 bp, Homo sapien
ggaacagtgcctgatttggcatttt

SEQ ID NO: 3845717 - DNA, 25 bp, Homo sapien
tggctttagaagtgtcaggaatctc

SEQ ID NO: 3845718 - DNA, 25 bp, Homo sapien
tagaagtgtcaggaatctcttaagc

SEQ ID NO: 3845719 - DNA, 25 bp, Homo sapien
gtttgagaatatttgccagcaagta

SEQ ID NO: 3845720 - DNA, 25 bp, Homo sapien
caggaatctcttaagctggcaattt

SEQ ID NO: 3845721 - DNA, 25 bp, Homo sapien
tataaagaaaggtcgctcaagcagc

SEQ ID NO: 3845722 - DNA, 25 bp, Homo sapien
gagccaggacatgctttgcttcagt

SEQ ID NO: 3845723 - DNA, 25 bp, Homo sapien
catcttcatgagaccggactgtagc

SEQ ID NO: 3845724 - DNA, 25 bp, Homo sapien
aaatgagggccttttgagccaggac

SEQ ID NO: 3845725 - DNA, 25 bp, Homo sapien
catgacccttagtctacagaaggtg

SEQ ID NO: 3845726 - DNA, 25 bp, Homo sapien
gcacctggccttgtcaacacattca

SEQ ID NO: 3845727 - DNA, 25 bp, Homo sapien
gacagtcaacttgagctgagatgct

SEQ ID NO: 3845728 - DNA, 25 bp, Homo sapien
cacattcaacatgatgacagtcaac

SEQ ID NO: 3845729 - DNA, 25 bp, Homo sapien
tcataaaggtatgaagagcttcact

SEQ ID NO: 3845730 - DNA, 25 bp, Homo sapien
caagaatcacaaatgtagttatctc

SEQ ID NO: 3845731 - DNA, 25 bp, Homo sapien
cttgcatggtacaggatgacttcat

SEQ ID NO: 3845732 - DNA, 25 bp, Homo sapien
tgacttcataaaggtatgaagagct

SEQ ID NO: 3845733 - DNA, 25 bp, Homo sapien
gcttctacaacttcgctgattcttt

SEQ ID NO: 3845734 - DNA, 25 bp, Homo sapien
cttctacaacttcgctgattctttt

SEQ ID NO: 3845735 - DNA, 25 bp, Homo sapien
tgcttctacaacttcgctgattctt

SEQ ID NO: 3845736 - DNA, 25 bp, Homo sapien
tctgcttctacaacttcgctgattc

SEQ ID NO: 3845737 - DNA, 25 bp, Homo sapien
aacaatttcgttctcctccacagta

SEQ ID NO: 3845738 - DNA, 25 bp, Homo sapien
tctttgaaatcgtcaagtttgtcag

SEQ ID NO: 3845739 - DNA, 25 bp, Homo sapien
tttacttgttcagagatgagagtca

SEQ ID NO: 3845740 - DNA, 25 bp, Homo sapien
tcagttttttctgctacaaacaatt

SEQ ID NO: 3845741 - DNA, 25 bp, Homo sapien
agaacgttgtaagtgtctccattca

SEQ ID NO: 3845742 - DNA, 25 bp, Homo sapien
cattatccggtttactagaacgttg

SEQ ID NO: 3845743 - DNA, 25 bp, Homo sapien
cattctctatgacttccattatccg

SEQ ID NO: 3845744 - DNA, 25 bp, Homo sapien
tactagaacgttgtaagtgtctcca

SEQ ID NO: 3845745 - DNA, 25 bp, Homo sapien
atccaatacattttgtagctttcat

SEQ ID NO: 3845746 - DNA, 25 bp, Homo sapien
tttcccatcgccaaatccaatacat

SEQ ID NO: 3845747 - DNA, 25 bp, Homo sapien
ttttttcccatcgccaaatccaata

SEQ ID NO: 3845748 - DNA, 25 bp, Homo sapien
tctttatttgtattacactacctaa

SEQ ID NO: 3845749 - DNA, 25 bp, Homo sapien
cattactgcttgcaatgatgatacc

SEQ ID NO: 3845750 - DNA, 25 bp, Homo sapien
tgtaagaagtttgcattactgcttg

SEQ ID NO: 3845751 - DNA, 25 bp, Homo sapien
gaattgtaagaagtttgcattactg

SEQ ID NO: 3845752 - DNA, 25 bp, Homo sapien
gaagtttgcattactgcttgcaatg

SEQ ID NO: 3845753 - DNA, 25 bp, Homo sapien
tattgcttaattctaaatcagtgcc

SEQ ID NO: 3845754 - DNA, 25 bp, Homo sapien
taccctgatattggctttgtctcca

SEQ ID NO: 3845755 - DNA, 25 bp, Homo sapien
aaataccctgatattggctttgtct

SEQ ID NO: 3845756 - DNA, 25 bp, Homo sapien
gaagtcctggagtaatattgcttaa

SEQ ID NO: 3845757 - DNA, 25 bp, Homo sapien
caacgtgcccaatcgctgacttgca

SEQ ID NO: 3845758 - DNA, 25 bp, Homo sapien
gatgtagatgggtagatctgctcga

SEQ ID NO: 3845759 - DNA, 25 bp, Homo sapien
taaattacacaacacgctgtctcgg

SEQ ID NO: 3845760 - DNA, 25 bp, Homo sapien
tcggatgtaatcaggcaacgtgccc

SEQ ID NO: 3845761 - DNA, 25 bp, Homo sapien
ataagagtatggcatctcatatctg

SEQ ID NO: 3845762 - DNA, 25 bp, Homo sapien
aaataagagtatggcatctcatatc

SEQ ID NO: 3845763 - DNA, 25 bp, Homo sapien
gaaaataagagtatggcatctcata

SEQ ID NO: 3845764 - DNA, 25 bp, Homo sapien
aagagtatggcatctcatatctggg

SEQ ID NO: 3845765 - DNA, 25 bp, Homo sapien
atgttgagaatccaatgttatagcc

SEQ ID NO: 3845766 - DNA, 25 bp, Homo sapien
tgttgagaatccaatgttatagcca

SEQ ID NO: 3845767 - DNA, 25 bp, Homo sapien
ttatgttgagaatccaatgttatag

SEQ ID NO: 3845768 - DNA, 25 bp, Homo sapien
gttgagaatccaatgttatagccac

SEQ ID NO: 3845769 - DNA, 25 bp, Homo sapien
cgtttcaccgacacagacatagaga

SEQ ID NO: 3845770 - DNA, 25 bp, Homo sapien
tgaagaagcgatccacatcaccatt

SEQ ID NO: 3845771 - DNA, 25 bp, Homo sapien
gagacaagtagatttccacacgaca

SEQ ID NO: 3845772 - DNA, 25 bp, Homo sapien
caacttgtaacacacgcccaatggg

SEQ ID NO: 3845773 - DNA, 25 bp, Homo sapien
aataactggattatgccatttgttt

SEQ ID NO: 3845774 - DNA, 25 bp, Homo sapien
taataactggattatgccatttgtt

SEQ ID NO: 3845775 - DNA, 25 bp, Homo sapien
ctaataactggattatgccatttgt

SEQ ID NO: 3845776 - DNA, 25 bp, Homo sapien
ataactggattatgccatttgtttc

SEQ ID NO: 3845777 - DNA, 25 bp, Homo sapien
ctgtcgctgcatagttcctggtcat

SEQ ID NO: 3845778 - DNA, 25 bp, Homo sapien
catgttgcttgccagaacatccaca

SEQ ID NO: 3845779 - DNA, 25 bp, Homo sapien
cacttctctagccagtgtttcgtag

SEQ ID NO: 3845780 - DNA, 25 bp, Homo sapien
tagccagtgtttcgtagcatgttgc

SEQ ID NO: 3845781 - DNA, 25 bp, Homo sapien
gtttcgtagcatgttgcttgccaga

SEQ ID NO: 3845782 - DNA, 25 bp, Homo sapien
taagagtggtctctatcttgacata

SEQ ID NO: 3845783 - DNA, 25 bp, Homo sapien
gagtggtctctatcttgacataaga

SEQ ID NO: 3845784 - DNA, 25 bp, Homo sapien
catcctgtgattatctgaagccatt

SEQ ID NO: 3845785 - DNA, 25 bp, Homo sapien
aatgacatataccatcctgtgatta

SEQ ID NO: 3845786 - DNA, 25 bp, Homo sapien
ttgccctaactggacagcactattt

SEQ ID NO: 3845787 - DNA, 25 bp, Homo sapien
cactagcattatgagctattacttt

SEQ ID NO: 3845788 - DNA, 25 bp, Homo sapien
cctttctgtaaatctatcactagca

SEQ ID NO: 3845789 - DNA, 25 bp, Homo sapien
gagctattactttatctttctgaaa

SEQ ID NO: 3845790 - DNA, 25 bp, Homo sapien
ttcctttcttgtttcactctagagg

SEQ ID NO: 3845791 - DNA, 25 bp, Homo sapien
ggcttctgccaaatgatcaataacc

SEQ ID NO: 3845792 - DNA, 25 bp, Homo sapien
tcctttcttgtttcactctagaggc

SEQ ID NO: 3845793 - DNA, 25 bp, Homo sapien
tactccttatattccataaagtaat

SEQ ID NO: 3845794 - DNA, 25 bp, Homo sapien
agtcactcatgccattcctttcaac

SEQ ID NO: 3845795 - DNA, 25 bp, Homo sapien
gttgaagtcactcatgccattcctt

SEQ ID NO: 3845796 - DNA, 25 bp, Homo sapien
tccttatattccataaagtaatcac

SEQ ID NO: 3845797 - DNA, 25 bp, Homo sapien
tctctttcaactcctttgacatcat

SEQ ID NO: 3845798 - DNA, 25 bp, Homo sapien
ttgttctctttcaactcctttgaca

SEQ ID NO: 3845799 - DNA, 25 bp, Homo sapien
ttattgttctctttcaactcctttg

SEQ ID NO: 3845800 - DNA, 25 bp, Homo sapien
gttctctttcaactcctttgacatc

SEQ ID NO: 3845801 - DNA, 25 bp, Homo sapien
gctgatgataacaagccagattctc

SEQ ID NO: 3845802 - DNA, 25 bp, Homo sapien
tttggcggggagacctcacattcct

SEQ ID NO: 3845803 - DNA, 25 bp, Homo sapien
tcatgcagcgcaacctggtctatca

SEQ ID NO: 3845804 - DNA, 25 bp, Homo sapien
agcaggaccattccttgctgagcag

SEQ ID NO: 3845805 - DNA, 25 bp, Homo sapien
tcctgtcagctcttttatcctatca

SEQ ID NO: 3845806 - DNA, 25 bp, Homo sapien
acctcctccagtcgcaagggactta

SEQ ID NO: 3845807 - DNA, 25 bp, Homo sapien
cagctcttttatcctatcatatttg

SEQ ID NO: 3845808 - DNA, 25 bp, Homo sapien
ctccagtcgcaagggacttaattta

SEQ ID NO: 3845809 - DNA, 25 bp, Homo sapien
gatacacttctatccccaaagagaa

SEQ ID NO: 3845810 - DNA, 25 bp, Homo sapien
caaatggagactgtggatacacttc

SEQ ID NO: 3845811 - DNA, 25 bp, Homo sapien
gaaatccatgtatcttccctcacag

SEQ ID NO: 3845812 - DNA, 25 bp, Homo sapien
tgaaaccaccagagataatgctata

SEQ ID NO: 3845813 - DNA, 25 bp, Homo sapien
tcacattctattcatatctcagaac

SEQ ID NO: 3845814 - DNA, 25 bp, Homo sapien
ttcacattctattcatatctcagaa

SEQ ID NO: 3845815 - DNA, 25 bp, Homo sapien
catatctcagaacttatacataaaa

SEQ ID NO: 3845816 - DNA, 25 bp, Homo sapien
tcagaacttatacataaaagagaga

SEQ ID NO: 3845817 - DNA, 25 bp, Homo sapien
ttgtgtgtaaatagttacggcattt

SEQ ID NO: 3845818 - DNA, 25 bp, Homo sapien
gtgtgtaaatagttacggcattttc

SEQ ID NO: 3845819 - DNA, 25 bp, Homo sapien
gtgtaaatagttacggcattttcag

SEQ ID NO: 3845820 - DNA, 25 bp, Homo sapien
tgtgtaaatagttacggcattttca

SEQ ID NO: 3845821 - DNA, 25 bp, Homo sapien
tagaaactgatcctagcaactggtt

SEQ ID NO: 3845822 - DNA, 25 bp, Homo sapien
tacagacagaatgtgcagtattagc

SEQ ID NO: 3845823 - DNA, 25 bp, Homo sapien
agttaaagagcagcggaaaatgccc

SEQ ID NO: 3845824 - DNA, 25 bp, Homo sapien
tagctttgccaacactatctgggat

SEQ ID NO: 3845825 - DNA, 25 bp, Homo sapien
tgttaagtcaaactgcctaccaagc

SEQ ID NO: 3845826 - DNA, 25 bp, Homo sapien
gaaagctcaactatttgcaagcaga

SEQ ID NO: 3845827 - DNA, 25 bp, Homo sapien
tatgagaacacaaacaggctagaag

SEQ ID NO: 3845828 - DNA, 25 bp, Homo sapien
gatgatctatcaatggttacagctg

SEQ ID NO: 3845829 - DNA, 25 bp, Homo sapien
tgcacaaatccactatcatagttgg

SEQ ID NO: 3845830 - DNA, 25 bp, Homo sapien
gagatttgaacacacctctcaggtg

SEQ ID NO: 3845831 - DNA, 25 bp, Homo sapien
tcaagagaaaggatgtcaagcaaag

SEQ ID NO: 3845832 - DNA, 25 bp, Homo sapien
gcctatagatgaagcaggctaccac

SEQ ID NO: 3845833 - DNA, 25 bp, Homo sapien
tgctatgaattgaatgattgtgaaa

SEQ ID NO: 3845834 - DNA, 25 bp, Homo sapien
ttctctgaccaaattaaacttagat

SEQ ID NO: 3845835 - DNA, 25 bp, Homo sapien
tatcttctcacaatcaatagaagac

SEQ ID NO: 3845836 - DNA, 25 bp, Homo sapien
tctccaatccgaaaacagaaagtgg

SEQ ID NO: 3845837 - DNA, 25 bp, Homo sapien
tataattctggttcaccgcaagaac

SEQ ID NO: 3845838 - DNA, 25 bp, Homo sapien
caagaatgttaacactaggctgtac

SEQ ID NO: 3845839 - DNA, 25 bp, Homo sapien
gatcaaggtatcactagaggtcaat

SEQ ID NO: 3845840 - DNA, 25 bp, Homo sapien
agcttgctgggatgtagtcagaaat

SEQ ID NO: 3845841 - DNA, 25 bp, Homo sapien
gagcttgctgggatgtagtcagaaa

SEQ ID NO: 3845842 - DNA, 25 bp, Homo sapien
atggttgggaggtgagggaagtcag

SEQ ID NO: 3845843 - DNA, 25 bp, Homo sapien
ctgtaatgatggttgggaggtgagg

SEQ ID NO: 3845844 - DNA, 25 bp, Homo sapien
ggttgggaggtgagggaagtcagag

SEQ ID NO: 3845845 - DNA, 25 bp, Homo sapien
ttgggaggtgagggaagtcagaggc

SEQ ID NO: 3845846 - DNA, 25 bp, Homo sapien
agcatgggaatgaggtgtaacataa

SEQ ID NO: 3845847 - DNA, 25 bp, Homo sapien
cagagagaggtaaaccaggctttcc

SEQ ID NO: 3845848 - DNA, 25 bp, Homo sapien
gggacaccaaggcctgagttgggtc

SEQ ID NO: 3845849 - DNA, 25 bp, Homo sapien
gctaagcatgggaatgaggtgtaac

SEQ ID NO: 3845850 - DNA, 25 bp, Homo sapien
tctccatgctgctgtcctccaggaa

SEQ ID NO: 3845851 - DNA, 25 bp, Homo sapien
ttctaggatctttctccatgctgct

SEQ ID NO: 3845852 - DNA, 25 bp, Homo sapien
cttttctaggatctttctccatgct

SEQ ID NO: 3845853 - DNA, 25 bp, Homo sapien
ctccatgctgctgtcctccaggaag

SEQ ID NO: 3845854 - DNA, 25 bp, Homo sapien
ctccagcaggttgtagaccaacagc

SEQ ID NO: 3845855 - DNA, 25 bp, Homo sapien
tctccagcaggttgtagaccaacag

SEQ ID NO: 3845856 - DNA, 25 bp, Homo sapien
atctccagcaggttgtagaccaaca

SEQ ID NO: 3845857 - DNA, 25 bp, Homo sapien
catctccagcaggttgtagaccaac

SEQ ID NO: 3845858 - DNA, 25 bp, Homo sapien
catggtgtctcctgtactctgctcc

SEQ ID NO: 3845859 - DNA, 25 bp, Homo sapien
tatcatctggaagattctctgcctc

SEQ ID NO: 3845860 - DNA, 25 bp, Homo sapien
ctcagcctcagggaacaacagctta

SEQ ID NO: 3845861 - DNA, 25 bp, Homo sapien
tgaaggacacaccagggtctctccc

SEQ ID NO: 3845862 - DNA, 25 bp, Homo sapien
tcaagctcctgctgagtccctgtct

SEQ ID NO: 3845863 - DNA, 25 bp, Homo sapien
tgaaacaccctgtcaagctcctgct

SEQ ID NO: 3845864 - DNA, 25 bp, Homo sapien
tgagtccctgtcttacgctccctca

SEQ ID NO: 3845865 - DNA, 25 bp, Homo sapien
agtttctgaaacaccctgtcaagct

SEQ ID NO: 3845866 - DNA, 25 bp, Homo sapien
tctgcagaaacctccgccagatgct

SEQ ID NO: 3845867 - DNA, 25 bp, Homo sapien
ctctgcagaaacctccgccagatgc

SEQ ID NO: 3845868 - DNA, 25 bp, Homo sapien
gccactggttctggactgctctgcg

SEQ ID NO: 3845869 - DNA, 25 bp, Homo sapien
tgcgtttctccatggccatttgttt

SEQ ID NO: 3845870 - DNA, 25 bp, Homo sapien
tggttctggactgctctgcgtttct

SEQ ID NO: 3845871 - DNA, 25 bp, Homo sapien
ggactgctctgcgtttctccatggc

SEQ ID NO: 3845872 - DNA, 25 bp, Homo sapien
tggtgaggccaattttgatggcctc

SEQ ID NO: 3845873 - DNA, 25 bp, Homo sapien
ggagttgtgtccgtttcctctgggc

SEQ ID NO: 3845874 - DNA, 25 bp, Homo sapien
ggcctctacgtgctccctgtaggtg

SEQ ID NO: 3845875 - DNA, 25 bp, Homo sapien
tggagctgctcaaaggcttcccgga

SEQ ID NO: 3845876 - DNA, 25 bp, Homo sapien
accaggaatgagtacatgagtgagg

SEQ ID NO: 3845877 - DNA, 25 bp, Homo sapien
agctgctactacaatcccctgccta

SEQ ID NO: 3845878 - DNA, 25 bp, Homo sapien
aatgggagacctaactgaaatcctc

SEQ ID NO: 3845879 - DNA, 25 bp, Homo sapien
tccttcccatcagccaaatgggaga

SEQ ID NO: 3845880 - DNA, 25 bp, Homo sapien
agacccttagcagtgtcctcctgag

SEQ ID NO: 3845881 - DNA, 25 bp, Homo sapien
gcaggaaatccgctacctgaagctg

SEQ ID NO: 3845882 - DNA, 25 bp, Homo sapien
ttctgcaggaaatccgctacctgaa

SEQ ID NO: 3845883 - DNA, 25 bp, Homo sapien
aggaaatccgctacctgaagctggc

SEQ ID NO: 3845884 - DNA, 25 bp, Homo sapien
agggcagagacagggaacatcctta

SEQ ID NO: 3845885 - DNA, 25 bp, Homo sapien
gagggcagagacagggaacatcctt

SEQ ID NO: 3845886 - DNA, 25 bp, Homo sapien
gggagggcagagacagggaacatcc

SEQ ID NO: 3845887 - DNA, 25 bp, Homo sapien
gagggagggcagagacagggaacat

SEQ ID NO: 3845888 - DNA, 25 bp, Homo sapien
tggcttctgaaaggctcgctctcat

SEQ ID NO: 3845889 - DNA, 25 bp, Homo sapien
ctcctgcaggcctacaggttccaag

SEQ ID NO: 3845890 - DNA, 25 bp, Homo sapien
caggcctacaggttccaagatgcct

SEQ ID NO: 3845891 - DNA, 25 bp, Homo sapien
cctacaggttccaagatgcctgcca

SEQ ID NO: 3845892 - DNA, 25 bp, Homo sapien
cctgcaggcctacaggttccaagat

SEQ ID NO: 3845893 - DNA, 25 bp, Homo sapien
ctgcagcttccgcctctgtctccgc

SEQ ID NO: 3845894 - DNA, 25 bp, Homo sapien
gcagcttccgcctctgtctccgctg

SEQ ID NO: 3845895 - DNA, 25 bp, Homo sapien
tctagggctgcagcttccgcctctg

SEQ ID NO: 3845896 - DNA, 25 bp, Homo sapien
tagggctgcagcttccgcctctgtc

SEQ ID NO: 3845897 - DNA, 25 bp, Homo sapien
tttccaggcgccgagttcagctgcc

SEQ ID NO: 3845898 - DNA, 25 bp, Homo sapien
ttagtgggcgggcatcaaggaccat

SEQ ID NO: 3845899 - DNA, 25 bp, Homo sapien
aagtcacagtcgacttcgcgccggg

SEQ ID NO: 3845900 - DNA, 25 bp, Homo sapien
tgccttcccacaatccctaagatta

SEQ ID NO: 3845901 - DNA, 25 bp, Homo sapien
ttggattctcccttcacataatcaa

SEQ ID NO: 3845902 - DNA, 25 bp, Homo sapien
accataccaaaccatttgccagtca

SEQ ID NO: 3845903 - DNA, 25 bp, Homo sapien
gtcttggattctcccttcacataat

SEQ ID NO: 3845904 - DNA, 25 bp, Homo sapien
cataccaaaccatttgccagtcatg

SEQ ID NO: 3845905 - DNA, 25 bp, Homo sapien
caactgagcggttccttcatcttca

SEQ ID NO: 3845906 - DNA, 25 bp, Homo sapien
cagaaatattatgcaactgagcggt

SEQ ID NO: 3845907 - DNA, 25 bp, Homo sapien
aggtggagtgtaggcagaaatatta

SEQ ID NO: 3845908 - DNA, 25 bp, Homo sapien
tcctttggttcaatccacacagtgc

SEQ ID NO: 3845909 - DNA, 25 bp, Homo sapien
gaaccatagcccaacacagtgtctg

SEQ ID NO: 3845910 - DNA, 25 bp, Homo sapien
tatttcccagcacagtacataaggt

SEQ ID NO: 3845911 - DNA, 25 bp, Homo sapien
aacatctagcatggcagtgactaac

SEQ ID NO: 3845912 - DNA, 25 bp, Homo sapien
tctgtgatgcatcgactaactctaa

SEQ ID NO: 3845913 - DNA, 25 bp, Homo sapien
tcacagaagtcagtgttacacagaa

SEQ ID NO: 3845914 - DNA, 25 bp, Homo sapien
tatggacattgaagacagcattgtc

SEQ ID NO: 3845915 - DNA, 25 bp, Homo sapien
ggtttaattaaccagaaagccatca

SEQ ID NO: 3845916 - DNA, 25 bp, Homo sapien
tcactgggtgattggtgccaaaaag

SEQ ID NO: 3845917 - DNA, 25 bp, Homo sapien
tcatatgccataagggctcatagat

SEQ ID NO: 3845918 - DNA, 25 bp, Homo sapien
catatgccataagggctcatagatc

SEQ ID NO: 3845919 - DNA, 25 bp, Homo sapien
tcttctaatttctggcagttggtag

SEQ ID NO: 3845920 - DNA, 25 bp, Homo sapien
aagaagtgcaaagtcttctaatttc

SEQ ID NO: 3845921 - DNA, 25 bp, Homo sapien
ctggctggataaaaagaagtgcaaa

SEQ ID NO: 3845922 - DNA, 25 bp, Homo sapien
taatttctggcagttggtagccctc

SEQ ID NO: 3845923 - DNA, 25 bp, Homo sapien
tgtcaagcaatctggccttttatca

SEQ ID NO: 3845924 - DNA, 25 bp, Homo sapien
aagcaatctggccttttatcaaaag

SEQ ID NO: 3845925 - DNA, 25 bp, Homo sapien
cagggagcaacctcgtcatattgat

SEQ ID NO: 3845926 - DNA, 25 bp, Homo sapien
gatctgttcaatgcatgtcaagcaa

SEQ ID NO: 3845927 - DNA, 25 bp, Homo sapien
caagcaagcaaacattctggatgga

SEQ ID NO: 3845928 - DNA, 25 bp, Homo sapien
gtaattattgattggtctgttggaa

SEQ ID NO: 3845929 - DNA, 25 bp, Homo sapien
caactatgtaataatcccattcatc

SEQ ID NO: 3845930 - DNA, 25 bp, Homo sapien
tctggatggatctacaactatgtaa

SEQ ID NO: 3845931 - DNA, 25 bp, Homo sapien
catagtgaagtgctcccaaatgggc

SEQ ID NO: 3845932 - DNA, 25 bp, Homo sapien
gcatctttcaccttagtaggccaca

SEQ ID NO: 3845933 - DNA, 25 bp, Homo sapien
aatcagaatgtttcggagctcagcc

SEQ ID NO: 3845934 - DNA, 25 bp, Homo sapien
catttatccctactggcatagtgaa

SEQ ID NO: 3845935 - DNA, 25 bp, Homo sapien
cataaggggctgtgatgaccactca

SEQ ID NO: 3845936 - DNA, 25 bp, Homo sapien
cctttggccataaggggctgtgatg

SEQ ID NO: 3845937 - DNA, 25 bp, Homo sapien
ggccataaggggctgtgatgaccac

SEQ ID NO: 3845938 - DNA, 25 bp, Homo sapien
gccctttggccataaggggctgtga

SEQ ID NO: 3845939 - DNA, 25 bp, Homo sapien
attcccttacttgtttccgcctatg

SEQ ID NO: 3845940 - DNA, 25 bp, Homo sapien
tcttgggaattggacgatgactgct

SEQ ID NO: 3845941 - DNA, 25 bp, Homo sapien
gtttccgcctatgtcctgctgattg

SEQ ID NO: 3845942 - DNA, 25 bp, Homo sapien
acagaatgctcattgatacatttac

SEQ ID NO: 3845943 - DNA, 25 bp, Homo sapien
ttgagattttgcttgttgagaaacc

SEQ ID NO: 3845944 - DNA, 25 bp, Homo sapien
tgagattttgcttgttgagaaacct

SEQ ID NO: 3845945 - DNA, 25 bp, Homo sapien
cacagtacctacgaatatttctata

SEQ ID NO: 3845946 - DNA, 25 bp, Homo sapien
cagtacctacgaatatttctatagt

SEQ ID NO: 3845947 - DNA, 25 bp, Homo sapien
aaacacagtacctacgaatatttct

SEQ ID NO: 3845948 - DNA, 25 bp, Homo sapien
cctacgaatatttctatagtactta

SEQ ID NO: 3845949 - DNA, 25 bp, Homo sapien
tccaattacattctgcaataaccac

SEQ ID NO: 3845950 - DNA, 25 bp, Homo sapien
tgcatttttctgaaagtctcagtgc

SEQ ID NO: 3845951 - DNA, 25 bp, Homo sapien
taaattgctcttgctctgaccagca

SEQ ID NO: 3845952 - DNA, 25 bp, Homo sapien
tgtggtcattatagtccaaattctg

SEQ ID NO: 3845953 - DNA, 25 bp, Homo sapien
gctggataacttagcactgtcattt

SEQ ID NO: 3845954 - DNA, 25 bp, Homo sapien
tattattaattgactgaattggtgg

SEQ ID NO: 3845955 - DNA, 25 bp, Homo sapien
tgaagaccgctcttgatgggtccag

SEQ ID NO: 3845956 - DNA, 25 bp, Homo sapien
aatgctgcaaatacaagcacagaaa

SEQ ID NO: 3845957 - DNA, 25 bp, Homo sapien
tgcaaatacaagcacagaaattaca

SEQ ID NO: 3845958 - DNA, 25 bp, Homo sapien
gaagcatttggcatacttgagggaa

SEQ ID NO: 3845959 - DNA, 25 bp, Homo sapien
tatcagagcctagataaagagctgc

SEQ ID NO: 3845960 - DNA, 25 bp, Homo sapien
actaaagcaatacctgggaatgggc

SEQ ID NO: 3845961 - DNA, 25 bp, Homo sapien
cagactcacattcaggtaacctagc

SEQ ID NO: 3845962 - DNA, 25 bp, Homo sapien
cttcttaaagtcagtgcctctgcag

SEQ ID NO: 3845963 - DNA, 25 bp, Homo sapien
agctctcttcttaaagtcagtgcct

SEQ ID NO: 3845964 - DNA, 25 bp, Homo sapien
tctcttcttaaagtcagtgcctctg

SEQ ID NO: 3845965 - DNA, 25 bp, Homo sapien
cttaaagtcagtgcctctgcagcag

SEQ ID NO: 3845966 - DNA, 25 bp, Homo sapien
ttgtacctaatgagagaggtgccca

SEQ ID NO: 3845967 - DNA, 25 bp, Homo sapien
tctcattgtacctaatgagagaggt

SEQ ID NO: 3845968 - DNA, 25 bp, Homo sapien
tgtacctaatgagagaggtgcccat

SEQ ID NO: 3845969 - DNA, 25 bp, Homo sapien
cattctcattgtacctaatgagaga

SEQ ID NO: 3845970 - DNA, 25 bp, Homo sapien
tgtaccatagccaatacttctgcta

SEQ ID NO: 3845971 - DNA, 25 bp, Homo sapien
gaaacttcagttgtgaatgcagaag

SEQ ID NO: 3845972 - DNA, 25 bp, Homo sapien
gttctttagacttctgtaccatagc

SEQ ID NO: 3845973 - DNA, 25 bp, Homo sapien
tccccattacgtagagttgtagttc

SEQ ID NO: 3845974 - DNA, 25 bp, Homo sapien
caaggtaagcctcctgttaactcgg

SEQ ID NO: 3845975 - DNA, 25 bp, Homo sapien
ccttgttggtcagcattagaccaaa

SEQ ID NO: 3845976 - DNA, 25 bp, Homo sapien
ctcggtttctacaattcagtttgga

SEQ ID NO: 3845977 - DNA, 25 bp, Homo sapien
ttctaatattctccggtgaacctcc

SEQ ID NO: 3845978 - DNA, 25 bp, Homo sapien
tcactaaatatgtaacgtctatacg

SEQ ID NO: 3845979 - DNA, 25 bp, Homo sapien
tgtagtggatccagtgtagcaagtg

SEQ ID NO: 3845980 - DNA, 25 bp, Homo sapien
taacgtctatacgactttgtagtgg

SEQ ID NO: 3845981 - DNA, 25 bp, Homo sapien
gcaagtgggaaggttaccaccattg

SEQ ID NO: 3845982 - DNA, 25 bp, Homo sapien
tttgagaaaagtgactatattttcc

SEQ ID NO: 3845983 - DNA, 25 bp, Homo sapien
attttgagaaaagtgactatatttt

SEQ ID NO: 3845984 - DNA, 25 bp, Homo sapien
tgagaaaagtgactatattttcctc

SEQ ID NO: 3845985 - DNA, 25 bp, Homo sapien
gagaaaagtgactatattttcctct

SEQ ID NO: 3845986 - DNA, 25 bp, Homo sapien
cctttgaagagacgggatgccctgg

SEQ ID NO: 3845987 - DNA, 25 bp, Homo sapien
tcagaagaagaaataccacacgggc

SEQ ID NO: 3845988 - DNA, 25 bp, Homo sapien
tcaactgaagaagcactatccctgg

SEQ ID NO: 3845989 - DNA, 25 bp, Homo sapien
ccatgttttcggagtcctttgaaga

SEQ ID NO: 3845990 - DNA, 25 bp, Homo sapien
tactttcaatccctgtaagttcata

SEQ ID NO: 3845991 - DNA, 25 bp, Homo sapien
ttcaatccctgtaagttcatatcac

SEQ ID NO: 3845992 - DNA, 25 bp, Homo sapien
tgtaagttcatatcacacgtggttt

SEQ ID NO: 3845993 - DNA, 25 bp, Homo sapien
catatcacacgtggttttagttgtc

SEQ ID NO: 3845994 - DNA, 25 bp, Homo sapien
tttttcatccagagaacatactgcc

SEQ ID NO: 3845995 - DNA, 25 bp, Homo sapien
cagagaacatactgcctccactttg

SEQ ID NO: 3845996 - DNA, 25 bp, Homo sapien
gatgatgttgctgtccagcgaacaa

SEQ ID NO: 3845997 - DNA, 25 bp, Homo sapien
tgtccagcgaacaaagaagtaacca

SEQ ID NO: 3845998 - DNA, 25 bp, Homo sapien
ttctcaggtacgcaacgaaggtccg

SEQ ID NO: 3845999 - DNA, 25 bp, Homo sapien
tccgaactgtgatgttcagataagc

SEQ ID NO: 3846000 - DNA, 25 bp, Homo sapien
taaggctacatgtcctccccacact

SEQ ID NO: 3846001 - DNA, 25 bp, Homo sapien
gccagtaaccagcaattcttcattc

SEQ ID NO: 3846002 - DNA, 25 bp, Homo sapien
gcccagcctctatcactttatttct

SEQ ID NO: 3846003 - DNA, 25 bp, Homo sapien
tatttcttatcttggctaacatagg

SEQ ID NO: 3846004 - DNA, 25 bp, Homo sapien
ggagcacctcagtcatttaaaagac

SEQ ID NO: 3846005 - DNA, 25 bp, Homo sapien
atggaattcagccttacttaagcac

SEQ ID NO: 3846006 - DNA, 25 bp, Homo sapien
tgtaccagggctaaccacaacgtag

SEQ ID NO: 3846007 - DNA, 25 bp, Homo sapien
tataatcctgcagttcatagctaga

SEQ ID NO: 3846008 - DNA, 25 bp, Homo sapien
gatggactccaagattcatgcaggg

SEQ ID NO: 3846009 - DNA, 25 bp, Homo sapien
taatgatgggcacattgctgcatgg

SEQ ID NO: 3846010 - DNA, 25 bp, Homo sapien
aagaggctgattccttgccacccag

SEQ ID NO: 3846011 - DNA, 25 bp, Homo sapien
aggtgtaaccacaggcctccaagag

SEQ ID NO: 3846012 - DNA, 25 bp, Homo sapien
tccaaaatgtgaaagcctttagtga

SEQ ID NO: 3846013 - DNA, 25 bp, Homo sapien
tgaggcactcctcaggtgtaaccac

SEQ ID NO: 3846014 - DNA, 25 bp, Homo sapien
tataatttgttcagtgacatctcca

SEQ ID NO: 3846015 - DNA, 25 bp, Homo sapien
ataatttgttcagtgacatctccat

SEQ ID NO: 3846016 - DNA, 25 bp, Homo sapien
catataatttgttcagtgacatctc

SEQ ID NO: 3846017 - DNA, 25 bp, Homo sapien
ctgcatataatttgttcagtgacat

SEQ ID NO: 3846018 - DNA, 25 bp, Homo sapien
catgatctcctaaaactcccatcgc

SEQ ID NO: 3846019 - DNA, 25 bp, Homo sapien
tctcctaaaactcccatcgcgtact

SEQ ID NO: 3846020 - DNA, 25 bp, Homo sapien
tgatctcctaaaactcccatcgcgt

SEQ ID NO: 3846021 - DNA, 25 bp, Homo sapien
gatctcctaaaactcccatcgcgta

SEQ ID NO: 3846022 - DNA, 25 bp, Homo sapien
catctttccagggtgaagttccatg

SEQ ID NO: 3846023 - DNA, 25 bp, Homo sapien
attgagcatctttccagggtgaagt

SEQ ID NO: 3846024 - DNA, 25 bp, Homo sapien
ttccagggtgaagttccatgagaac

SEQ ID NO: 3846025 - DNA, 25 bp, Homo sapien
ctcattaactcatgctcattgagca

SEQ ID NO: 3846026 - DNA, 25 bp, Homo sapien
ggaagtaattttgttgtgatggtca

SEQ ID NO: 3846027 - DNA, 25 bp, Homo sapien
tgatggtcatacaccggacctcctt

SEQ ID NO: 3846028 - DNA, 25 bp, Homo sapien
cggacctcctttaagacaataccag

SEQ ID NO: 3846029 - DNA, 25 bp, Homo sapien
ctcctttaagacaataccaggtatc

SEQ ID NO: 3846030 - DNA, 25 bp, Homo sapien
tactttcatccctaagcgtaactgc

SEQ ID NO: 3846031 - DNA, 25 bp, Homo sapien
tccctaagcgtaactgctgttttcc

SEQ ID NO: 3846032 - DNA, 25 bp, Homo sapien
tttcatccctaagcgtaactgctgt

SEQ ID NO: 3846033 - DNA, 25 bp, Homo sapien
ttgttactttcatccctaagcgtaa

SEQ ID NO: 3846034 - DNA, 25 bp, Homo sapien
gagaacatctgacccagtcctccat

SEQ ID NO: 3846035 - DNA, 25 bp, Homo sapien
cagcagcagttctgtcaaatcccaa

SEQ ID NO: 3846036 - DNA, 25 bp, Homo sapien
aatcccaaaatctccacacaaagag

SEQ ID NO: 3846037 - DNA, 25 bp, Homo sapien
agagaacatctgacccagtcctcca

SEQ ID NO: 3846038 - DNA, 25 bp, Homo sapien
caatatggtcgtgggctgtgtagca

SEQ ID NO: 3846039 - DNA, 25 bp, Homo sapien
gcaattcctctcctcgcaatatggt

SEQ ID NO: 3846040 - DNA, 25 bp, Homo sapien
gaattccgcaaacgtatgttaagca

SEQ ID NO: 3846041 - DNA, 25 bp, Homo sapien
taaggtcaacccatacatccccaaa

SEQ ID NO: 3846042 - DNA, 25 bp, Homo sapien
cccttgcttgggtaaacagacacaa

SEQ ID NO: 3846043 - DNA, 25 bp, Homo sapien
ttgcttgggtaaacagacacaagtc

SEQ ID NO: 3846044 - DNA, 25 bp, Homo sapien
tgggtaaacagacacaagtctgctc

SEQ ID NO: 3846045 - DNA, 25 bp, Homo sapien
gcttgggtaaacagacacaagtctg

SEQ ID NO: 3846046 - DNA, 25 bp, Homo sapien
aatacagcagtgacgttgttctcaa

SEQ ID NO: 3846047 - DNA, 25 bp, Homo sapien
gaatacagcagtgacgttgttctca

SEQ ID NO: 3846048 - DNA, 25 bp, Homo sapien
atacagcagtgacgttgttctcaaa

SEQ ID NO: 3846049 - DNA, 25 bp, Homo sapien
agaatacagcagtgacgttgttctc

SEQ ID NO: 3846050 - DNA, 25 bp, Homo sapien
gtatttgaacataccagattgtttc

SEQ ID NO: 3846051 - DNA, 25 bp, Homo sapien
atgtatttgaacataccagattgtt

SEQ ID NO: 3846052 - DNA, 25 bp, Homo sapien
tttgaacataccagattgtttcata

SEQ ID NO: 3846053 - DNA, 25 bp, Homo sapien
tatttgaacataccagattgtttca

SEQ ID NO: 3846054 - DNA, 25 bp, Homo sapien
tcagtggcccattaatatatcgtgg

SEQ ID NO: 3846055 - DNA, 25 bp, Homo sapien
tggcccattaatatatcgtggaagg

SEQ ID NO: 3846056 - DNA, 25 bp, Homo sapien
cagtggcccattaatatatcgtgga

SEQ ID NO: 3846057 - DNA, 25 bp, Homo sapien
ccattaatatatcgtggaaggcttt

SEQ ID NO: 3846058 - DNA, 25 bp, Homo sapien
gaaacactatctaccacagttctgt

SEQ ID NO: 3846059 - DNA, 25 bp, Homo sapien
gagtaaatgatttggctgagaaagg

SEQ ID NO: 3846060 - DNA, 25 bp, Homo sapien
gaattgttttgtctaattggccaga

SEQ ID NO: 3846061 - DNA, 25 bp, Homo sapien
gtcacatgatgtctccttagcgctg

SEQ ID NO: 3846062 - DNA, 25 bp, Homo sapien
ttttctgatgtattcccacacttgc

SEQ ID NO: 3846063 - DNA, 25 bp, Homo sapien
ttctgatgtattcccacacttgcag

SEQ ID NO: 3846064 - DNA, 25 bp, Homo sapien
ctgatgtattcccacacttgcagca

SEQ ID NO: 3846065 - DNA, 25 bp, Homo sapien
tgatgtattcccacacttgcagcat

SEQ ID NO: 3846066 - DNA, 25 bp, Homo sapien
ttcacatttccgcactctggagagc

SEQ ID NO: 3846067 - DNA, 25 bp, Homo sapien
gagccagcttttacaatgaaggaga

SEQ ID NO: 3846068 - DNA, 25 bp, Homo sapien
gcactctggagagccgatatgagcc

SEQ ID NO: 3846069 - DNA, 25 bp, Homo sapien
gagccgatatgagccagcttttaca

SEQ ID NO: 3846070 - DNA, 25 bp, Homo sapien
ttccctgacaccttctgtagcacag

SEQ ID NO: 3846071 - DNA, 25 bp, Homo sapien
gaaaaacatactgagagctgtatgc

SEQ ID NO: 3846072 - DNA, 25 bp, Homo sapien
aaaacatactgagagctgtatgcag

SEQ ID NO: 3846073 - DNA, 25 bp, Homo sapien
cagaaaaacatactgagagctgtat

SEQ ID NO: 3846074 - DNA, 25 bp, Homo sapien
aatgtgtgagctacatgcaagtcac

SEQ ID NO: 3846075 - DNA, 25 bp, Homo sapien
aacttttacagggtcatcttagcta

SEQ ID NO: 3846076 - DNA, 25 bp, Homo sapien
ggccccagtgatggttgaaaaaatc

SEQ ID NO: 3846077 - DNA, 25 bp, Homo sapien
cacaaaagagcttattggacaacac

SEQ ID NO: 3846078 - DNA, 25 bp, Homo sapien
ggatttcagagtaggaaaggttcat

SEQ ID NO: 3846079 - DNA, 25 bp, Homo sapien
caaaggatttcagagtaggaaaggt

SEQ ID NO: 3846080 - DNA, 25 bp, Homo sapien
gttgtaaggcaaaggatttcagagt

SEQ ID NO: 3846081 - DNA, 25 bp, Homo sapien
taaggcaaaggatttcagagtagga

SEQ ID NO: 3846082 - DNA, 25 bp, Homo sapien
tatcgtgacatattccatattaagg

SEQ ID NO: 3846083 - DNA, 25 bp, Homo sapien
catattccatattaaggtgaccatc

SEQ ID NO: 3846084 - DNA, 25 bp, Homo sapien
ttccatattaaggtgaccatctggg

SEQ ID NO: 3846085 - DNA, 25 bp, Homo sapien
gaccatctggggatgaattcttcat

SEQ ID NO: 3846086 - DNA, 25 bp, Homo sapien
tgagtgatgtacttttgtgtccaga

SEQ ID NO: 3846087 - DNA, 25 bp, Homo sapien
ccttcgatgttcaaacgtgtccgga

SEQ ID NO: 3846088 - DNA, 25 bp, Homo sapien
tgagatgtcagcttctacaatgcta

SEQ ID NO: 3846089 - DNA, 25 bp, Homo sapien
tgaaaccagagaccctcgtggtgtt

SEQ ID NO: 3846090 - DNA, 25 bp, Homo sapien
tatgccatagtgttcctggtatttt

SEQ ID NO: 3846091 - DNA, 25 bp, Homo sapien
tatttttgagaaagcgtcctatgtt

SEQ ID NO: 3846092 - DNA, 25 bp, Homo sapien
aagcgtcctatgttcaaatactgca

SEQ ID NO: 3846093 - DNA, 25 bp, Homo sapien
gagcatccactatgccatagtgttc

SEQ ID NO: 3846094 - DNA, 25 bp, Homo sapien
gaacgatatcctctgactgactcaa

SEQ ID NO: 3846095 - DNA, 25 bp, Homo sapien
atacaggtgtgagaacgatatcctc

SEQ ID NO: 3846096 - DNA, 25 bp, Homo sapien
ttggatacaggtgtgagaacgatat

SEQ ID NO: 3846097 - DNA, 25 bp, Homo sapien
ggtgtgagaacgatatcctctgact

SEQ ID NO: 3846098 - DNA, 25 bp, Homo sapien
gagctctgctttctcataatcctct

SEQ ID NO: 3846099 - DNA, 25 bp, Homo sapien
ttctcataatcctctatatgaggat

SEQ ID NO: 3846100 - DNA, 25 bp, Homo sapien
gaacacacctggaagagctctgctt

SEQ ID NO: 3846101 - DNA, 25 bp, Homo sapien
cacaggaacacacctggaagagctc

SEQ ID NO: 3846102 - DNA, 25 bp, Homo sapien
tgtagtctttttgaacctccacgaa

SEQ ID NO: 3846103 - DNA, 25 bp, Homo sapien
cacgaagcatctgtaacagtcgtgg

SEQ ID NO: 3846104 - DNA, 25 bp, Homo sapien
gaagcatctgtaacagtcgtggata

SEQ ID NO: 3846105 - DNA, 25 bp, Homo sapien
ctccacgaagcatctgtaacagtcg

SEQ ID NO: 3846106 - DNA, 25 bp, Homo sapien
gtccagaacagcttatgctgtagtc

SEQ ID NO: 3846107 - DNA, 25 bp, Homo sapien
agtccagaacagcttatgctgtagt

SEQ ID NO: 3846108 - DNA, 25 bp, Homo sapien
ttttaagtccagaacagcttatgct

SEQ ID NO: 3846109 - DNA, 25 bp, Homo sapien
atattttaagtccagaacagcttat

SEQ ID NO: 3846110 - DNA, 25 bp, Homo sapien
tgggaaaggatctagtcgtggaatc

SEQ ID NO: 3846111 - DNA, 25 bp, Homo sapien
tcatgggaaaggatctagtcgtgga

SEQ ID NO: 3846112 - DNA, 25 bp, Homo sapien
tcgtggaatctttgtagcatgcttt

SEQ ID NO: 3846113 - DNA, 25 bp, Homo sapien
gggccattaactggggtgacttcat

SEQ ID NO: 3846114 - DNA, 25 bp, Homo sapien
tgctcccctgaacgtatgtgactga

SEQ ID NO: 3846115 - DNA, 25 bp, Homo sapien
gcagtatttgttcttcctgctcccc

SEQ ID NO: 3846116 - DNA, 25 bp, Homo sapien
tattgaaccatttgcatctccagtg

SEQ ID NO: 3846117 - DNA, 25 bp, Homo sapien
taagccataggtgtaagggtacatg

SEQ ID NO: 3846118 - DNA, 25 bp, Homo sapien
caataacatagagaccaccactgga

SEQ ID NO: 3846119 - DNA, 25 bp, Homo sapien
tctgggaaatactgtacagccaagt

SEQ ID NO: 3846120 - DNA, 25 bp, Homo sapien
tggacttcctagattccccagttat

SEQ ID NO: 3846121 - DNA, 25 bp, Homo sapien
tgtactcattgtactgcccaaggga

SEQ ID NO: 3846122 - DNA, 25 bp, Homo sapien
aagggcatctaccaacggaaagaag

SEQ ID NO: 3846123 - DNA, 25 bp, Homo sapien
tgaaaaactctcagcagaccaagaa

SEQ ID NO: 3846124 - DNA, 25 bp, Homo sapien
gagaagtaaaagtcctgcagattga

SEQ ID NO: 3846125 - DNA, 25 bp, Homo sapien
gaattgcctcctcagatcaggaaaa

SEQ ID NO: 3846126 - DNA, 25 bp, Homo sapien
catcgtagcgctattcactatagca

SEQ ID NO: 3846127 - DNA, 25 bp, Homo sapien
ttgtacaaagtaccaagatgtggat

SEQ ID NO: 3846128 - DNA, 25 bp, Homo sapien
ttactcatatatgggagctaaacac

SEQ ID NO: 3846129 - DNA, 25 bp, Homo sapien
aattgttctatcaaaaggactcacg

SEQ ID NO: 3846130 - DNA, 25 bp, Homo sapien
taagtgattcagttcaatttgacaa

SEQ ID NO: 3846131 - DNA, 25 bp, Homo sapien
ctacactttattattctccccacac

SEQ ID NO: 3846132 - DNA, 25 bp, Homo sapien
ctgtttgcaatgtactccctagtca

SEQ ID NO: 3846133 - DNA, 25 bp, Homo sapien
cccacactcgcattcacaaattaag

SEQ ID NO: 3846134 - DNA, 25 bp, Homo sapien
ggctgcaacctttcttgaaggcaga

SEQ ID NO: 3846135 - DNA, 25 bp, Homo sapien
cagagggcaccacctagaggtaaca

SEQ ID NO: 3846136 - DNA, 25 bp, Homo sapien
ctgtgggcggctgcaacctttcttg

SEQ ID NO: 3846137 - DNA, 25 bp, Homo sapien
gcagagggcaccacctagaggtaac

SEQ ID NO: 3846138 - DNA, 25 bp, Homo sapien
caaatcagtctcattaggtttacat

SEQ ID NO: 3846139 - DNA, 25 bp, Homo sapien
tacatgtaataaatggcatagcgat

SEQ ID NO: 3846140 - DNA, 25 bp, Homo sapien
ggcatagcgatttatctatcattgc

SEQ ID NO: 3846141 - DNA, 25 bp, Homo sapien
cattgcatattacagaggaaggaag

SEQ ID NO: 3846142 - DNA, 25 bp, Homo sapien
cactgatatggctgacattgacatt

SEQ ID NO: 3846143 - DNA, 25 bp, Homo sapien
catggccatattgggctactctggc

SEQ ID NO: 3846144 - DNA, 25 bp, Homo sapien
aatatttcacatggccatattgggc

SEQ ID NO: 3846145 - DNA, 25 bp, Homo sapien
ttcttcccacaggataccactgata

SEQ ID NO: 3846146 - DNA, 25 bp, Homo sapien
gttgatgatctggtcccctgctctt

SEQ ID NO: 3846147 - DNA, 25 bp, Homo sapien
ctgttgatgatctggtcccctgctc

SEQ ID NO: 3846148 - DNA, 25 bp, Homo sapien
ccctgctctttaccctgggctctcc

SEQ ID NO: 3846149 - DNA, 25 bp, Homo sapien
tgatgatctggtcccctgctcttta

SEQ ID NO: 3846150 - DNA, 25 bp, Homo sapien
atttaggatttccagggctgcaaga

SEQ ID NO: 3846151 - DNA, 25 bp, Homo sapien
tgagttcctatcttttagtcttata

SEQ ID NO: 3846152 - DNA, 25 bp, Homo sapien
ttaggatttccagggctgcaagaat

SEQ ID NO: 3846153 - DNA, 25 bp, Homo sapien
tagtcttataaatgtagtattgcca

SEQ ID NO: 3846154 - DNA, 25 bp, Homo sapien
cattcccagggtaattttctctcca

SEQ ID NO: 3846155 - DNA, 25 bp, Homo sapien
tatgtaactgaatagcactctcctc

SEQ ID NO: 3846156 - DNA, 25 bp, Homo sapien
gcataaagacccagctggctaatct

SEQ ID NO: 3846157 - DNA, 25 bp, Homo sapien
tcttgctgggaatagaattaatggc

SEQ ID NO: 3846158 - DNA, 25 bp, Homo sapien
aagaggcatttgtctaacacaacca

SEQ ID NO: 3846159 - DNA, 25 bp, Homo sapien
gcagctaaccttgagtccttaggac

SEQ ID NO: 3846160 - DNA, 25 bp, Homo sapien
cagctaaccttgagtccttaggacc

SEQ ID NO: 3846161 - DNA, 25 bp, Homo sapien
aagcagctaaccttgagtccttagg

SEQ ID NO: 3846162 - DNA, 25 bp, Homo sapien
gctaaccttgagtccttaggaccca

SEQ ID NO: 3846163 - DNA, 25 bp, Homo sapien
tgtccccagcattcgtgctttctga

SEQ ID NO: 3846164 - DNA, 25 bp, Homo sapien
ccagataatttctgactgtccccag

SEQ ID NO: 3846165 - DNA, 25 bp, Homo sapien
tgcttgaatagctggagtgctgcca

SEQ ID NO: 3846166 - DNA, 25 bp, Homo sapien
cacagtctgaaatacccagataatt

SEQ ID NO: 3846167 - DNA, 25 bp, Homo sapien
ctttagctatgaccggcagttttcg

SEQ ID NO: 3846168 - DNA, 25 bp, Homo sapien
tatgaccggcagttttcgattttgc

SEQ ID NO: 3846169 - DNA, 25 bp, Homo sapien
tgtacattcactttagctatgaccg

SEQ ID NO: 3846170 - DNA, 25 bp, Homo sapien
ccggcagttttcgattttgcttgta

SEQ ID NO: 3846171 - DNA, 25 bp, Homo sapien
tcggatggcccggagaaccactgag

SEQ ID NO: 3846172 - DNA, 25 bp, Homo sapien
tggctcggatggcccggagaaccac

SEQ ID NO: 3846173 - DNA, 25 bp, Homo sapien
gctcggatggcccggagaaccactg

SEQ ID NO: 3846174 - DNA, 25 bp, Homo sapien
tgaggggccctaggcaggtgaaaca

SEQ ID NO: 3846175 - DNA, 25 bp, Homo sapien
cactgcaagggtaatgtattcactg

SEQ ID NO: 3846176 - DNA, 25 bp, Homo sapien
aatgtattcactgtggagtctagga

SEQ ID NO: 3846177 - DNA, 25 bp, Homo sapien
cagagcactgcaagggtaatgtatt

SEQ ID NO: 3846178 - DNA, 25 bp, Homo sapien
gcaagggtaatgtattcactgtgga

SEQ ID NO: 3846179 - DNA, 25 bp, Homo sapien
tgtggtttaatgaggataatgaggc

SEQ ID NO: 3846180 - DNA, 25 bp, Homo sapien
tgtctgcaggtagtccttgatctgt

SEQ ID NO: 3846181 - DNA, 25 bp, Homo sapien
tctgtgggtactgattgtggtttaa

SEQ ID NO: 3846182 - DNA, 25 bp, Homo sapien
tgagctccaaaactcagacagaagc

SEQ ID NO: 3846183 - DNA, 25 bp, Homo sapien
caaagacagagatatgagtattaac

SEQ ID NO: 3846184 - DNA, 25 bp, Homo sapien
gacagagatatgagtattaacccat

SEQ ID NO: 3846185 - DNA, 25 bp, Homo sapien
gagatatgagtattaacccatggta

SEQ ID NO: 3846186 - DNA, 25 bp, Homo sapien
gagtattaacccatggtatttctgg

SEQ ID NO: 3846187 - DNA, 25 bp, Homo sapien
gtgttcattcccttggtgcatatat

SEQ ID NO: 3846188 - DNA, 25 bp, Homo sapien
tgtgttcattcccttggtgcatata

SEQ ID NO: 3846189 - DNA, 25 bp, Homo sapien
tatattcctttggtttatatatcca

SEQ ID NO: 3846190 - DNA, 25 bp, Homo sapien
atgggcatttgggtttgttgtcttt

SEQ ID NO: 3846191 - DNA, 25 bp, Homo sapien
tgttgtctttgctcttgtaaatagt

SEQ ID NO: 3846192 - DNA, 25 bp, Homo sapien
aattgccttactgtcttccacagtg

SEQ ID NO: 3846193 - DNA, 25 bp, Homo sapien
tcataaggctattctatccccaatt

SEQ ID NO: 3846194 - DNA, 25 bp, Homo sapien
tatgtacggatctattattggcctc

SEQ ID NO: 3846195 - DNA, 25 bp, Homo sapien
gtctatccacatgcccatacaagat

SEQ ID NO: 3846196 - DNA, 25 bp, Homo sapien
ccccaattaattgccttgtcacttt

SEQ ID NO: 3846197 - DNA, 25 bp, Homo sapien
cgagtcttttgtcgggctccttaca

SEQ ID NO: 3846198 - DNA, 25 bp, Homo sapien
tcaaaactcgagtcttttgtcgggc

SEQ ID NO: 3846199 - DNA, 25 bp, Homo sapien
tttgtcgggctccttacaatgatgt

SEQ ID NO: 3846200 - DNA, 25 bp, Homo sapien
aactcgagtcttttgtcgggctcct

SEQ ID NO: 3846201 - DNA, 25 bp, Homo sapien
gacactaatactttgtgcagcagaa

SEQ ID NO: 3846202 - DNA, 25 bp, Homo sapien
tggccatgaagatcataactccagt

SEQ ID NO: 3846203 - DNA, 25 bp, Homo sapien
gtcagacactgagtcaagcacttga

SEQ ID NO: 3846204 - DNA, 25 bp, Homo sapien
cagttaaccgttgaacaacacagga

SEQ ID NO: 3846205 - DNA, 25 bp, Homo sapien
ttgtcttcctcgaaaatgccttcct

SEQ ID NO: 3846206 - DNA, 25 bp, Homo sapien
gtcttcctcgaaaatgccttcctgc

SEQ ID NO: 3846207 - DNA, 25 bp, Homo sapien
tgtcttcctcgaaaatgccttcctg

SEQ ID NO: 3846208 - DNA, 25 bp, Homo sapien
gccagttgtttctgatactctctgc

SEQ ID NO: 3846209 - DNA, 25 bp, Homo sapien
ggcatcacaggccttccgcaagtga

SEQ ID NO: 3846210 - DNA, 25 bp, Homo sapien
gcatcacaggccttccgcaagtgaa

SEQ ID NO: 3846211 - DNA, 25 bp, Homo sapien
tggcatcacaggccttccgcaagtg

SEQ ID NO: 3846212 - DNA, 25 bp, Homo sapien
aagtgttttcgtgttatcaagattc

SEQ ID NO: 3846213 - DNA, 25 bp, Homo sapien
gaaggagccagagataaaactgaag

SEQ ID NO: 3846214 - DNA, 25 bp, Homo sapien
actgaagtgttttcgtgttatcaag

SEQ ID NO: 3846215 - DNA, 25 bp, Homo sapien
gtgttttcgtgttatcaagattcca

SEQ ID NO: 3846216 - DNA, 25 bp, Homo sapien
gataaaaggctctcaaatatgacct

SEQ ID NO: 3846217 - DNA, 25 bp, Homo sapien
tatgataaggcagtgccaaaatttc

SEQ ID NO: 3846218 - DNA, 25 bp, Homo sapien
agaatgataaaaggctctcaaatat

SEQ ID NO: 3846219 - DNA, 25 bp, Homo sapien
gaagtatcttccgtactgtacctgc

SEQ ID NO: 3846220 - DNA, 25 bp, Homo sapien
gcatgatgtgaaagtccatatgcac

SEQ ID NO: 3846221 - DNA, 25 bp, Homo sapien
atgatgtgaaagtccatatgcactt

SEQ ID NO: 3846222 - DNA, 25 bp, Homo sapien
catgatgtgaaagtccatatgcact

SEQ ID NO: 3846223 - DNA, 25 bp, Homo sapien
gccaagtagcagatttgagcaaata

SEQ ID NO: 3846224 - DNA, 25 bp, Homo sapien
gttcagcttcccaaaagctaagcca

SEQ ID NO: 3846225 - DNA, 25 bp, Homo sapien
tgagcaaatactgacacaagactaa

SEQ ID NO: 3846226 - DNA, 25 bp, Homo sapien
agctaagccataaggtaatgccaag

SEQ ID NO: 3846227 - DNA, 25 bp, Homo sapien
caaatctttctggaaccagttaact

SEQ ID NO: 3846228 - DNA, 25 bp, Homo sapien
gagcctctgtaaatgattcatccca

SEQ ID NO: 3846229 - DNA, 25 bp, Homo sapien
tgagtcatgtagaggaagtcagtca

SEQ ID NO: 3846230 - DNA, 25 bp, Homo sapien
tctccagtgacaatgaggccccttt

SEQ ID NO: 3846231 - DNA, 25 bp, Homo sapien
tgagggaatggacaaacattccttg

SEQ ID NO: 3846232 - DNA, 25 bp, Homo sapien
agggaatggacaaacattccttgcc

SEQ ID NO: 3846233 - DNA, 25 bp, Homo sapien
ctgagggaatggacaaacattcctt

SEQ ID NO: 3846234 - DNA, 25 bp, Homo sapien
gagggaatggacaaacattccttgc

SEQ ID NO: 3846235 - DNA, 25 bp, Homo sapien
ggcagaaacaaagttctcaattatc

SEQ ID NO: 3846236 - DNA, 25 bp, Homo sapien
tgggcagaaacaaagttctcaatta

SEQ ID NO: 3846237 - DNA, 25 bp, Homo sapien
cagaaacaaagttctcaattatcat

SEQ ID NO: 3846238 - DNA, 25 bp, Homo sapien
ctgggcagaaacaaagttctcaatt

SEQ ID NO: 3846239 - DNA, 25 bp, Homo sapien
aagtctggtagtaagacttttcatg

SEQ ID NO: 3846240 - DNA, 25 bp, Homo sapien
tctggtagtaagacttttcatggaa

SEQ ID NO: 3846241 - DNA, 25 bp, Homo sapien
tggaagtctggtagtaagacttttc

SEQ ID NO: 3846242 - DNA, 25 bp, Homo sapien
gtctggtagtaagacttttcatgga

SEQ ID NO: 3846243 - DNA, 25 bp, Homo sapien
atttagaggcgcaggaaatttggat

SEQ ID NO: 3846244 - DNA, 25 bp, Homo sapien
ttcagatttagaggcgcaggaaatt

SEQ ID NO: 3846245 - DNA, 25 bp, Homo sapien
gatttagaggcgcaggaaatttgga

SEQ ID NO: 3846246 - DNA, 25 bp, Homo sapien
atattcagatttagaggcgcaggaa

SEQ ID NO: 3846247 - DNA, 25 bp, Homo sapien
agaactatctaatttcacaatctta

SEQ ID NO: 3846248 - DNA, 25 bp, Homo sapien
tatttaaccaacatcataagcagac

SEQ ID NO: 3846249 - DNA, 25 bp, Homo sapien
cttatatttaaccaacatcataagc

SEQ ID NO: 3846250 - DNA, 25 bp, Homo sapien
tatatttaaccaacatcataagcag

SEQ ID NO: 3846251 - DNA, 25 bp, Homo sapien
tttttgaactgctgcattttgaaga

SEQ ID NO: 3846252 - DNA, 25 bp, Homo sapien
tttgggttccaatgaatgagctagg

SEQ ID NO: 3846253 - DNA, 25 bp, Homo sapien
caatgaatgagctaggattctggct

SEQ ID NO: 3846254 - DNA, 25 bp, Homo sapien
tcattgtgagagataccagagggcc

SEQ ID NO: 3846255 - DNA, 25 bp, Homo sapien
cggtgcctacggctctgtggttttg

SEQ ID NO: 3846256 - DNA, 25 bp, Homo sapien
caagttcagatcttggtggaagaac

SEQ ID NO: 3846257 - DNA, 25 bp, Homo sapien
aagttcagatcttggtggaagaaca

SEQ ID NO: 3846258 - DNA, 25 bp, Homo sapien
gccaggatgcccctcggttgggtta

SEQ ID NO: 3846259 - DNA, 25 bp, Homo sapien
gctggccaggatgcccctcggttgg

SEQ ID NO: 3846260 - DNA, 25 bp, Homo sapien
gggctggccaggatgcccctcggtt

SEQ ID NO: 3846261 - DNA, 25 bp, Homo sapien
ctgggaccccgcaggcagggctggc

SEQ ID NO: 3846262 - DNA, 25 bp, Homo sapien
ctcagggagctgactatgtgcgcaa

SEQ ID NO: 3846263 - DNA, 25 bp, Homo sapien
tgccaaaccactggaactcctggta

SEQ ID NO: 3846264 - DNA, 25 bp, Homo sapien
gactatgtgcgcaatattcttgcca

SEQ ID NO: 3846265 - DNA, 25 bp, Homo sapien
ccaaaccactggaactcctggtaga

SEQ ID NO: 3846266 - DNA, 25 bp, Homo sapien
caagttgcgcaagtgcgagacgcgc

SEQ ID NO: 3846267 - DNA, 25 bp, Homo sapien
cgaccatgaatgtgatccgcgatgt

SEQ ID NO: 3846268 - DNA, 25 bp, Homo sapien
cctgcctcgcgaccatgaatgtgat

SEQ ID NO: 3846269 - DNA, 25 bp, Homo sapien
tgatccgcgatgtggcccagcaagt

SEQ ID NO: 3846270 - DNA, 25 bp, Homo sapien
cctttgtacagtctgttccagcata

SEQ ID NO: 3846271 - DNA, 25 bp, Homo sapien
catactgagaccatgtctggtgctg

SEQ ID NO: 3846272 - DNA, 25 bp, Homo sapien
tgttccagcatactgagaccatgtc

SEQ ID NO: 3846273 - DNA, 25 bp, Homo sapien
catgtctggtgctgcatgatgaagc

SEQ ID NO: 3846274 - DNA, 25 bp, Homo sapien
gcaccagcatggctcaccaacagat

SEQ ID NO: 3846275 - DNA, 25 bp, Homo sapien
agcatggctcaccaacagatgccca

SEQ ID NO: 3846276 - DNA, 25 bp, Homo sapien
ctactctgcaccagcatggctcacc

SEQ ID NO: 3846277 - DNA, 25 bp, Homo sapien
caccttgctcggcaccatcgaatga

SEQ ID NO: 3846278 - DNA, 25 bp, Homo sapien
tgctctcctatactccgcttcatct

SEQ ID NO: 3846279 - DNA, 25 bp, Homo sapien
tggccagtcgctgctctcctatact

SEQ ID NO: 3846280 - DNA, 25 bp, Homo sapien
gtcgctgctctcctatactccgctt

SEQ ID NO: 3846281 - DNA, 25 bp, Homo sapien
ttggccagtcgctgctctcctatac

SEQ ID NO: 3846282 - DNA, 25 bp, Homo sapien
tcttccctggtcgactctctgatta

SEQ ID NO: 3846283 - DNA, 25 bp, Homo sapien
ttcttccctggtcgactctctgatt

SEQ ID NO: 3846284 - DNA, 25 bp, Homo sapien
ccctggtcgactctctgattagcat

SEQ ID NO: 3846285 - DNA, 25 bp, Homo sapien
ttccctggtcgactctctgattagc

SEQ ID NO: 3846286 - DNA, 25 bp, Homo sapien
cagctgagctcccttcattgtgaga

SEQ ID NO: 3846287 - DNA, 25 bp, Homo sapien
tgagtctcattagcactatgctcag

SEQ ID NO: 3846288 - DNA, 25 bp, Homo sapien
tcattagcactatgctcagccagct

SEQ ID NO: 3846289 - DNA, 25 bp, Homo sapien
tcccttcattgtgagatgcagccag

SEQ ID NO: 3846290 - DNA, 25 bp, Homo sapien
tcctccagggtacaagagctactgt

SEQ ID NO: 3846291 - DNA, 25 bp, Homo sapien
gatgccacccttggataaaagacaa

SEQ ID NO: 3846292 - DNA, 25 bp, Homo sapien
taacctttcaatgggagattcctcc

SEQ ID NO: 3846293 - DNA, 25 bp, Homo sapien
aagacaggagttttagatgccaccc

SEQ ID NO: 3846294 - DNA, 25 bp, Homo sapien
ttgtctctgtattgatccctgctat

SEQ ID NO: 3846295 - DNA, 25 bp, Homo sapien
tattgatccctgctattgaatgtgc

SEQ ID NO: 3846296 - DNA, 25 bp, Homo sapien
tttcaagggattcaaacatcatatg

SEQ ID NO: 3846297 - DNA, 25 bp, Homo sapien
tgcatttttcaagggattcaaacat

SEQ ID NO: 3846298 - DNA, 25 bp, Homo sapien
aaagcacctgttgacctgatcacta

SEQ ID NO: 3846299 - DNA, 25 bp, Homo sapien
ttttgcaaagcacctgttgacctga

SEQ ID NO: 3846300 - DNA, 25 bp, Homo sapien
gttgacctgatcactataattcatg

SEQ ID NO: 3846301 - DNA, 25 bp, Homo sapien
tttccgttttgcaaagcacctgttg

SEQ ID NO: 3846302 - DNA, 25 bp, Homo sapien
tcttgtggaagcaatgatgcggatg

SEQ ID NO: 3846303 - DNA, 25 bp, Homo sapien
gtaaaaggtcttgtggaagcaatga

SEQ ID NO: 3846304 - DNA, 25 bp, Homo sapien
gatgcggatgtatctttgcaatata

SEQ ID NO: 3846305 - DNA, 25 bp, Homo sapien
tttcctccagccaaagtaagaacca

SEQ ID NO: 3846306 - DNA, 25 bp, Homo sapien
tcaggaaatggtgcacaaggagctc

SEQ ID NO: 3846307 - DNA, 25 bp, Homo sapien
tggcatcgagccaaaacacatctgc

SEQ ID NO: 3846308 - DNA, 25 bp, Homo sapien
gtgtcctttggactgcctctgacaa

SEQ ID NO: 3846309 - DNA, 25 bp, Homo sapien
gcaagaactttgtgaacggtgtcct

SEQ ID NO: 3846310 - DNA, 25 bp, Homo sapien
tcccagaaccctatcaacactgaca

SEQ ID NO: 3846311 - DNA, 25 bp, Homo sapien
ccagaaccctatcaacactgacact

SEQ ID NO: 3846312 - DNA, 25 bp, Homo sapien
gaaccctatcaacactgacactggc

SEQ ID NO: 3846313 - DNA, 25 bp, Homo sapien
cttcccagaaccctatcaacactga

SEQ ID NO: 3846314 - DNA, 25 bp, Homo sapien
tttagatgaagcctgaagcagccaa

SEQ ID NO: 3846315 - DNA, 25 bp, Homo sapien
agcagccaaagcctcaagccagttg

SEQ ID NO: 3846316 - DNA, 25 bp, Homo sapien
aaagtgatcatcaatcttaccacct

SEQ ID NO: 3846317 - DNA, 25 bp, Homo sapien
gtaacttaacaaacagagagctttc

SEQ ID NO: 3846318 - DNA, 25 bp, Homo sapien
ctggtgcacatgcttcttgactctc

SEQ ID NO: 3846319 - DNA, 25 bp, Homo sapien
tttgcctggtgcacatgcttcttga

SEQ ID NO: 3846320 - DNA, 25 bp, Homo sapien
gacggtttgcctggtgcacatgctt

SEQ ID NO: 3846321 - DNA, 25 bp, Homo sapien
tgcaggacggtttgcctggtgcaca

SEQ ID NO: 3846322 - DNA, 25 bp, Homo sapien
ctgcaaggaattacatggcgaggct

SEQ ID NO: 3846323 - DNA, 25 bp, Homo sapien
catatgaaccttacacaatatgact

SEQ ID NO: 3846324 - DNA, 25 bp, Homo sapien
atatgacttcattactcatgggaca

SEQ ID NO: 3846325 - DNA, 25 bp, Homo sapien
tactcatgggacattgagcttccat

SEQ ID NO: 3846326 - DNA, 25 bp, Homo sapien
gagtgatggagagttactgtcacca

SEQ ID NO: 3846327 - DNA, 25 bp, Homo sapien
tttcctttgtcctcagcctgtgagt

SEQ ID NO: 3846328 - DNA, 25 bp, Homo sapien
ctgcttctgctgcaacactcgccat

SEQ ID NO: 3846329 - DNA, 25 bp, Homo sapien
attggatcagtttgtgttctggagg

SEQ ID NO: 3846330 - DNA, 25 bp, Homo sapien
gattggatcagtttgtgttctggag

SEQ ID NO: 3846331 - DNA, 25 bp, Homo sapien
tgattggatcagtttgtgttctgga

SEQ ID NO: 3846332 - DNA, 25 bp, Homo sapien
tgtatgaggtgagactggttactcc

SEQ ID NO: 3846333 - DNA, 25 bp, Homo sapien
tctttaaagtgtatgaggtgagact

SEQ ID NO: 3846334 - DNA, 25 bp, Homo sapien
gactggttactcctccgtgcactat

SEQ ID NO: 3846335 - DNA, 25 bp, Homo sapien
gcactatctccacaagatgcttcca

SEQ ID NO: 3846336 - DNA, 25 bp, Homo sapien
ttagagccccataagagcaaactgt

SEQ ID NO: 3846337 - DNA, 25 bp, Homo sapien
tgaatatagatacgcaccaaaccct

SEQ ID NO: 3846338 - DNA, 25 bp, Homo sapien
taccagtgatgttaagattgaggcc

SEQ ID NO: 3846339 - DNA, 25 bp, Homo sapien
caaatcaagactaaaggcactggag

SEQ ID NO: 3846340 - DNA, 25 bp, Homo sapien
aatgaacaaatagttagttttcctg

SEQ ID NO: 3846341 - DNA, 25 bp, Homo sapien
caaatagttagttttcctgagtaag

SEQ ID NO: 3846342 - DNA, 25 bp, Homo sapien
accccttaaaaagactgcaacagag

SEQ ID NO: 3846343 - DNA, 25 bp, Homo sapien
ccaccccttaaaaagactgcaacag

SEQ ID NO: 3846344 - DNA, 25 bp, Homo sapien
caaagagtaatgaacttgcgtaaaa

SEQ ID NO: 3846345 - DNA, 25 bp, Homo sapien
ataaacaaagagtaatgaacttgcg

SEQ ID NO: 3846346 - DNA, 25 bp, Homo sapien
gagtaatgaacttgcgtaaaaatta

SEQ ID NO: 3846347 - DNA, 25 bp, Homo sapien
aacaaagagtaatgaacttgcgtaa

SEQ ID NO: 3846348 - DNA, 25 bp, Homo sapien
taagcttcttccgtaatgctggttt

SEQ ID NO: 3846349 - DNA, 25 bp, Homo sapien
tgttaagcttcttccgtaatgctgg

SEQ ID NO: 3846350 - DNA, 25 bp, Homo sapien
tttgttaagcttcttccgtaatgct

SEQ ID NO: 3846351 - DNA, 25 bp, Homo sapien
agcttcttccgtaatgctggttttc

SEQ ID NO: 3846352 - DNA, 25 bp, Homo sapien
ttttgggatgtcacgaagcacacgc

SEQ ID NO: 3846353 - DNA, 25 bp, Homo sapien
tgagagtcaccatgaggaagctgcg

SEQ ID NO: 3846354 - DNA, 25 bp, Homo sapien
caaaggctggttcatagaccctagc

SEQ ID NO: 3846355 - DNA, 25 bp, Homo sapien
gcctaatccagggtaagactctctt

SEQ ID NO: 3846356 - DNA, 25 bp, Homo sapien
tgcaaacccaaagaagagtttacta

SEQ ID NO: 3846357 - DNA, 25 bp, Homo sapien
cctcaaaacctagctcccacttgtg

SEQ ID NO: 3846358 - DNA, 25 bp, Homo sapien
atgcaaacccaaagaagagtttact

SEQ ID NO: 3846359 - DNA, 25 bp, Homo sapien
ctcccacttgtgagagcctatagta

SEQ ID NO: 3846360 - DNA, 25 bp, Homo sapien
cccggtctctaatgtgtaaaactgg

SEQ ID NO: 3846361 - DNA, 25 bp, Homo sapien
caccatatgcaactaattttaatat

SEQ ID NO: 3846362 - DNA, 25 bp, Homo sapien
tactgagacagggaataacagggat

SEQ ID NO: 3846363 - DNA, 25 bp, Homo sapien
taaaactggttacatggtgattcca

SEQ ID NO: 3846364 - DNA, 25 bp, Homo sapien
atccactccatgcatccatagtcaa

SEQ ID NO: 3846365 - DNA, 25 bp, Homo sapien
cactccatgcatccatagtcaaaat

SEQ ID NO: 3846366 - DNA, 25 bp, Homo sapien
catgcatccatagtcaaaataaatg

SEQ ID NO: 3846367 - DNA, 25 bp, Homo sapien
aaaaacaatgcatccactccatgca

SEQ ID NO: 3846368 - DNA, 25 bp, Homo sapien
tgatagtctgtgacagtatcaacag

SEQ ID NO: 3846369 - DNA, 25 bp, Homo sapien
acagtgataactgtggttttggtac

SEQ ID NO: 3846370 - DNA, 25 bp, Homo sapien
gtatcaacagtgataactgtggttt

SEQ ID NO: 3846371 - DNA, 25 bp, Homo sapien
gaagctggtttcttgcaagtgatag

SEQ ID NO: 3846372 - DNA, 25 bp, Homo sapien
ccctccaccaccaggcacagcccat

SEQ ID NO: 3846373 - DNA, 25 bp, Homo sapien
ccaccaggcacagcccatctgcaat

SEQ ID NO: 3846374 - DNA, 25 bp, Homo sapien
tccaccaccaggcacagcccatctg

SEQ ID NO: 3846375 - DNA, 25 bp, Homo sapien
caccaccaggcacagcccatctgca

SEQ ID NO: 3846376 - DNA, 25 bp, Homo sapien
atgggtacttgctgacctgttgctg

SEQ ID NO: 3846377 - DNA, 25 bp, Homo sapien
tgggtacttgctgacctgttgctga

SEQ ID NO: 3846378 - DNA, 25 bp, Homo sapien
agattttctcctcccatctccaacc

SEQ ID NO: 3846379 - DNA, 25 bp, Homo sapien
tcagattttctcctcccatctccaa

SEQ ID NO: 3846380 - DNA, 25 bp, Homo sapien
cttcagattttctcctcccatctcc

SEQ ID NO: 3846381 - DNA, 25 bp, Homo sapien
attttctcctcccatctccaaccac

SEQ ID NO: 3846382 - DNA, 25 bp, Homo sapien
tcattggaatctagatactgtacct

SEQ ID NO: 3846383 - DNA, 25 bp, Homo sapien
ttatagcattcctgaaaacttccac

SEQ ID NO: 3846384 - DNA, 25 bp, Homo sapien
cattaaatgggtttgcgagagatta

SEQ ID NO: 3846385 - DNA, 25 bp, Homo sapien
tatagggaatgatgaccaaagggca

SEQ ID NO: 3846386 - DNA, 25 bp, Homo sapien
ttttcagaagactgtaatttaaagc

SEQ ID NO: 3846387 - DNA, 25 bp, Homo sapien
gcttttcagaagactgtaatttaaa

SEQ ID NO: 3846388 - DNA, 25 bp, Homo sapien
gtgcttttcagaagactgtaattta

SEQ ID NO: 3846389 - DNA, 25 bp, Homo sapien
cagtgcttttcagaagactgtaatt

SEQ ID NO: 3846390 - DNA, 25 bp, Homo sapien
gaccagatgccataatattttggca

SEQ ID NO: 3846391 - DNA, 25 bp, Homo sapien
tattttcgtagctctagaagaacac

SEQ ID NO: 3846392 - DNA, 25 bp, Homo sapien
agaacaccatcaaaacagtcagcag

SEQ ID NO: 3846393 - DNA, 25 bp, Homo sapien
ggtgcagtgggaggtgaccagatgc

SEQ ID NO: 3846394 - DNA, 25 bp, Homo sapien
tatagaattccagctctcttgggcc

SEQ ID NO: 3846395 - DNA, 25 bp, Homo sapien
atagaattccagctctcttgggccc

SEQ ID NO: 3846396 - DNA, 25 bp, Homo sapien
tagaattccagctctcttgggcccc

SEQ ID NO: 3846397 - DNA, 25 bp, Homo sapien
taggtaatgtgctaacactgtaaca

SEQ ID NO: 3846398 - DNA, 25 bp, Homo sapien
ataggtaatgtgctaacactgtaac

SEQ ID NO: 3846399 - DNA, 25 bp, Homo sapien
agactggagtgaggcatatctcaca

SEQ ID NO: 3846400 - DNA, 25 bp, Homo sapien
gataggtaatgtgctaacactgtaa

SEQ ID NO: 3846401 - DNA, 25 bp, Homo sapien
tggcattgatgtattccctcaactt

SEQ ID NO: 3846402 - DNA, 25 bp, Homo sapien
acaggtctggcattgatgtattccc

SEQ ID NO: 3846403 - DNA, 25 bp, Homo sapien
ggtctggcattgatgtattccctca

SEQ ID NO: 3846404 - DNA, 25 bp, Homo sapien
tctggcattgatgtattccctcaac

SEQ ID NO: 3846405 - DNA, 25 bp, Homo sapien
cagtgttccgggaagtcagagaccc

SEQ ID NO: 3846406 - DNA, 25 bp, Homo sapien
tctatgataaacatatattggccag

SEQ ID NO: 3846407 - DNA, 25 bp, Homo sapien
tatgataaacatatattggccaggt

SEQ ID NO: 3846408 - DNA, 25 bp, Homo sapien
agctgagacagtgttccgggaagtc

SEQ ID NO: 3846409 - DNA, 25 bp, Homo sapien
ccactttgtccttcccgtacatgtg

SEQ ID NO: 3846410 - DNA, 25 bp, Homo sapien
ttgtccttcccgtacatgtgcccgg

SEQ ID NO: 3846411 - DNA, 25 bp, Homo sapien
tttgtccttcccgtacatgtgcccg

SEQ ID NO: 3846412 - DNA, 25 bp, Homo sapien
actttgtccttcccgtacatgtgcc

SEQ ID NO: 3846413 - DNA, 25 bp, Homo sapien
cacgcagccgttgaggaagcggagt

SEQ ID NO: 3846414 - DNA, 25 bp, Homo sapien
gggcacgcagccgttgaggaagcgg

SEQ ID NO: 3846415 - DNA, 25 bp, Homo sapien
ggggtgccctcaggggtggactcga

SEQ ID NO: 3846416 - DNA, 25 bp, Homo sapien
tgcgagaggggcacgcagccgttga

SEQ ID NO: 3846417 - DNA, 25 bp, Homo sapien
taacggcagcgagagtaggaaaaaa

SEQ ID NO: 3846418 - DNA, 25 bp, Homo sapien
ggcgctgcccggtagacagaaccga

SEQ ID NO: 3846419 - DNA, 25 bp, Homo sapien
cgcgggcgctcctctgcccaactct

SEQ ID NO: 3846420 - DNA, 25 bp, Homo sapien
gtagacagaaccgagccgaagaaca

SEQ ID NO: 3846421 - DNA, 25 bp, Homo sapien
tggtgttaccccttttccatgtcag

SEQ ID NO: 3846422 - DNA, 25 bp, Homo sapien
cattggcatagggtcataagtggcc

SEQ ID NO: 3846423 - DNA, 25 bp, Homo sapien
tattttcctcgaacacatggtactg

SEQ ID NO: 3846424 - DNA, 25 bp, Homo sapien
ccatcacaaaatccaagggaggtaa

SEQ ID NO: 3846425 - DNA, 25 bp, Homo sapien
gaagatcatgaatctagccagaagt

SEQ ID NO: 3846426 - DNA, 25 bp, Homo sapien
aatcgacagcattaaggaagttgcg

SEQ ID NO: 3846427 - DNA, 25 bp, Homo sapien
cattagctattcagagtggctttcc

SEQ ID NO: 3846428 - DNA, 25 bp, Homo sapien
taagaagtggattgctacagctcct

SEQ ID NO: 3846429 - DNA, 25 bp, Homo sapien
tgccagacacagtcgcttaggcctg

SEQ ID NO: 3846430 - DNA, 25 bp, Homo sapien
taagtatcaatactacacgaactga

SEQ ID NO: 3846431 - DNA, 25 bp, Homo sapien
caacactttgagaatgtaacagcca

SEQ ID NO: 3846432 - DNA, 25 bp, Homo sapien
tgttaataaacaaacgctgacatct

SEQ ID NO: 3846433 - DNA, 25 bp, Homo sapien
gcatcaaggcttgtttctaatatga

SEQ ID NO: 3846434 - DNA, 25 bp, Homo sapien
tgaaatgctgtactttgctgtggga

SEQ ID NO: 3846435 - DNA, 25 bp, Homo sapien
catatattacatttacactgccctc

SEQ ID NO: 3846436 - DNA, 25 bp, Homo sapien
gtaccacatcttattgacctcaaaa

SEQ ID NO: 3846437 - DNA, 25 bp, Homo sapien
tgtctgattcaccttcgctggattc

SEQ ID NO: 3846438 - DNA, 25 bp, Homo sapien
caaatcagcttgtcgtgaagttacc

SEQ ID NO: 3846439 - DNA, 25 bp, Homo sapien
tcttgttgaaacatcgtggtgcaca

SEQ ID NO: 3846440 - DNA, 25 bp, Homo sapien
atgtgggccctctgatcatcaagaa

SEQ ID NO: 3846441 - DNA, 25 bp, Homo sapien
gagtctcccagctgtgaaaagtaga

SEQ ID NO: 3846442 - DNA, 25 bp, Homo sapien
gtcatccatatctgcacagtaatct

SEQ ID NO: 3846443 - DNA, 25 bp, Homo sapien
catcaattaaacttagcaaagtctg

SEQ ID NO: 3846444 - DNA, 25 bp, Homo sapien
agtagagttccacttatgtcatcca

SEQ ID NO: 3846445 - DNA, 25 bp, Homo sapien
tagccccgggacttctggtagatgt

SEQ ID NO: 3846446 - DNA, 25 bp, Homo sapien
ggccctgttgtatatgaagacctca

SEQ ID NO: 3846447 - DNA, 25 bp, Homo sapien
caaaattggcaattggccggcagtc

SEQ ID NO: 3846448 - DNA, 25 bp, Homo sapien
gaatgcttgtcctacatgtgtgcca

SEQ ID NO: 3846449 - DNA, 25 bp, Homo sapien
taaattgcccgattgccgactgttg

SEQ ID NO: 3846450 - DNA, 25 bp, Homo sapien
gtattccgtgcgctgacaactcctg

SEQ ID NO: 3846451 - DNA, 25 bp, Homo sapien
gaggcccaggcttcgcattgctgtg

SEQ ID NO: 3846452 - DNA, 25 bp, Homo sapien
tctgacggctgcaagatccctgtgg

SEQ ID NO: 3846453 - DNA, 25 bp, Homo sapien
ggtgacgagtcagccctggcgaacc

SEQ ID NO: 3846454 - DNA, 25 bp, Homo sapien
ggcaggtgacgagtcagccctggcg

SEQ ID NO: 3846455 - DNA, 25 bp, Homo sapien
caggtgacgagtcagccctggcgaa

SEQ ID NO: 3846456 - DNA, 25 bp, Homo sapien
acgagtcagccctggcgaaccgagg

SEQ ID NO: 3846457 - DNA, 25 bp, Homo sapien
acatctttagcccttatcctctgca

SEQ ID NO: 3846458 - DNA, 25 bp, Homo sapien
tgaacatctttagcccttatcctct

SEQ ID NO: 3846459 - DNA, 25 bp, Homo sapien
cttatcctctgcaccatttgttttg

SEQ ID NO: 3846460 - DNA, 25 bp, Homo sapien
cttttgaacatctttagcccttatc

SEQ ID NO: 3846461 - DNA, 25 bp, Homo sapien
tagagagtgtgatcaagagtccgcc

SEQ ID NO: 3846462 - DNA, 25 bp, Homo sapien
gaggcactgagtaaataatgtctgt

SEQ ID NO: 3846463 - DNA, 25 bp, Homo sapien
gaatcattatgcctggtgcagagaa

SEQ ID NO: 3846464 - DNA, 25 bp, Homo sapien
tccgccatctaaacaggaagccatg

SEQ ID NO: 3846465 - DNA, 25 bp, Homo sapien
tgatgtcggcatagttgttggaaaa

SEQ ID NO: 3846466 - DNA, 25 bp, Homo sapien
taacaatttgtactcataaccagat

SEQ ID NO: 3846467 - DNA, 25 bp, Homo sapien
cacagcagtcgtgtgtatactgatc

SEQ ID NO: 3846468 - DNA, 25 bp, Homo sapien
cataaccagatttgtttggacaagt

SEQ ID NO: 3846469 - DNA, 25 bp, Homo sapien
aaggatagacatggtttgtgtgcat

SEQ ID NO: 3846470 - DNA, 25 bp, Homo sapien
cttaaaggatagacatggtttgtgt

SEQ ID NO: 3846471 - DNA, 25 bp, Homo sapien
aaaggatagacatggtttgtgtgca

SEQ ID NO: 3846472 - DNA, 25 bp, Homo sapien
taaaggatagacatggtttgtgtgc

SEQ ID NO: 3846473 - DNA, 25 bp, Homo sapien
gatcctaatccagatgaccccttag

SEQ ID NO: 3846474 - DNA, 25 bp, Homo sapien
tcatataggttgcagagaaatccat

SEQ ID NO: 3846475 - DNA, 25 bp, Homo sapien
gaccccttagtaccagatattgcac

SEQ ID NO: 3846476 - DNA, 25 bp, Homo sapien
gaggagttctctcgtacccatccaa

SEQ ID NO: 3846477 - DNA, 25 bp, Homo sapien
cccttgtcttaggatattctgtaga

SEQ ID NO: 3846478 - DNA, 25 bp, Homo sapien
cagtattgaaaaaccccaacggctg

SEQ ID NO: 3846479 - DNA, 25 bp, Homo sapien
ttgacaccttttacagatcttactg

SEQ ID NO: 3846480 - DNA, 25 bp, Homo sapien
taattgcactgctaagtaggaagat

SEQ ID NO: 3846481 - DNA, 25 bp, Homo sapien
gggatcaagctcgaatcctgagcct

SEQ ID NO: 3846482 - DNA, 25 bp, Homo sapien
tcataagggatcaagctcgaatcct

SEQ ID NO: 3846483 - DNA, 25 bp, Homo sapien
tcaagctcgaatcctgagcctttag

SEQ ID NO: 3846484 - DNA, 25 bp, Homo sapien
gctcgaatcctgagcctttagccac

SEQ ID NO: 3846485 - DNA, 25 bp, Homo sapien
cctgggagtctataaaagggaagtg

SEQ ID NO: 3846486 - DNA, 25 bp, Homo sapien
cttaaatgtaacttctgtctgagcc

SEQ ID NO: 3846487 - DNA, 25 bp, Homo sapien
tagtcctacttccagagagccaatg

SEQ ID NO: 3846488 - DNA, 25 bp, Homo sapien
ccatgccagaatgggaggtttgaac

SEQ ID NO: 3846489 - DNA, 25 bp, Homo sapien
gcaggactgtctgttacgtacagcc

SEQ ID NO: 3846490 - DNA, 25 bp, Homo sapien
tggcttgaactgagacgctccgctg

SEQ ID NO: 3846491 - DNA, 25 bp, Homo sapien
ttgtgaccgtcacgggcggacaccg

SEQ ID NO: 3846492 - DNA, 25 bp, Homo sapien
ccagccctggcttgaactgagacgc

SEQ ID NO: 3846493 - DNA, 25 bp, Homo sapien
ttgtgtattgccaggaggctctccg

SEQ ID NO: 3846494 - DNA, 25 bp, Homo sapien
gagttgtgtattgccaggaggctct

SEQ ID NO: 3846495 - DNA, 25 bp, Homo sapien
ctctccgagattggggtcgggtcac

SEQ ID NO: 3846496 - DNA, 25 bp, Homo sapien
tgtgattgctggagttgtgtattgc

SEQ ID NO: 3846497 - DNA, 25 bp, Homo sapien
gatggcgtttctccgaagcatgtgg

SEQ ID NO: 3846498 - DNA, 25 bp, Homo sapien
ttcaggtaggcccgcttgcctgtgc

SEQ ID NO: 3846499 - DNA, 25 bp, Homo sapien
cggctgtggaagtcgactgcgctcc

SEQ ID NO: 3846500 - DNA, 25 bp, Homo sapien
agcagagctgtgcaccggctgtgga

SEQ ID NO: 3846501 - DNA, 25 bp, Homo sapien
ttcttgctaccctccactcgcttct

SEQ ID NO: 3846502 - DNA, 25 bp, Homo sapien
gaattcgcgccgagtctccggccat

SEQ ID NO: 3846503 - DNA, 25 bp, Homo sapien
gatcctttccgcctcctctgcgaat

SEQ ID NO: 3846504 - DNA, 25 bp, Homo sapien
tcctctgcgaattcgcgccgagtct

SEQ ID NO: 3846505 - DNA, 25 bp, Homo sapien
tcaacccatggtctatagtatagtg

SEQ ID NO: 3846506 - DNA, 25 bp, Homo sapien
ttctctcgtgagtatattgatccag

SEQ ID NO: 3846507 - DNA, 25 bp, Homo sapien
tgtttaagagacagccaactatggc

SEQ ID NO: 3846508 - DNA, 25 bp, Homo sapien
tagctgccacagaaactatagccca

SEQ ID NO: 3846509 - DNA, 25 bp, Homo sapien
ccatacaaagctagtgtcagtctct

SEQ ID NO: 3846510 - DNA, 25 bp, Homo sapien
tacgctattgcgtttggctaactcc

SEQ ID NO: 3846511 - DNA, 25 bp, Homo sapien
caagcagggtgtatactgtcatgaa

SEQ ID NO: 3846512 - DNA, 25 bp, Homo sapien
tcaccaccaggttgtgctaaaacag

SEQ ID NO: 3846513 - DNA, 25 bp, Homo sapien
tctggagggtggaactggccattta

SEQ ID NO: 3846514 - DNA, 25 bp, Homo sapien
gagtagaatcaaccgtcagtgcatg

SEQ ID NO: 3846515 - DNA, 25 bp, Homo sapien
gctgtgattcttgactatggctgag

SEQ ID NO: 3846516 - DNA, 25 bp, Homo sapien
tcagtgcatgcagatagctgggcca

SEQ ID NO: 3846517 - DNA, 25 bp, Homo sapien
tattgatggtatcagttgcagcaca

SEQ ID NO: 3846518 - DNA, 25 bp, Homo sapien
gtgtcatatccaagagaccattgca

SEQ ID NO: 3846519 - DNA, 25 bp, Homo sapien
caagagaccattgcaaaattgaaga

SEQ ID NO: 3846520 - DNA, 25 bp, Homo sapien
agattatgaagatttacccccagta

SEQ ID NO: 3846521 - DNA, 25 bp, Homo sapien
gaagactgatccatgacaacagctg

SEQ ID NO: 3846522 - DNA, 25 bp, Homo sapien
tcttttccatgaagactgatccatg

SEQ ID NO: 3846523 - DNA, 25 bp, Homo sapien
tatccacaccactaccgaaagaaat

SEQ ID NO: 3846524 - DNA, 25 bp, Homo sapien
ctggggggctgctacaattagcaat

SEQ ID NO: 3846525 - DNA, 25 bp, Homo sapien
aattggtacagtgccttgcaaataa

SEQ ID NO: 3846526 - DNA, 25 bp, Homo sapien
cagtgccttgcaaataacgtttcat

SEQ ID NO: 3846527 - DNA, 25 bp, Homo sapien
aataattggtacagtgccttgcaaa

SEQ ID NO: 3846528 - DNA, 25 bp, Homo sapien
ggtacagtgccttgcaaataacgtt

SEQ ID NO: 3846529 - DNA, 25 bp, Homo sapien
caagccacagttccaattggccaca

SEQ ID NO: 3846530 - DNA, 25 bp, Homo sapien
agatcccaagccacagttccaattg

SEQ ID NO: 3846531 - DNA, 25 bp, Homo sapien
gttccaattggccacaaaatgacca

SEQ ID NO: 3846532 - DNA, 25 bp, Homo sapien
ttcctccatccaaagatcccaagcc

SEQ ID NO: 3846533 - DNA, 25 bp, Homo sapien
tgttttcaagccaggaaatgccttc

SEQ ID NO: 3846534 - DNA, 25 bp, Homo sapien
gaaaagcttgtccacatcggacctg

SEQ ID NO: 3846535 - DNA, 25 bp, Homo sapien
gacacggtgaactggctgaggtaca

SEQ ID NO: 3846536 - DNA, 25 bp, Homo sapien
tcggacctgcttgcatgctccactg

SEQ ID NO: 3846537 - DNA, 25 bp, Homo sapien
aagaaccacacagcctgcatctgca

SEQ ID NO: 3846538 - DNA, 25 bp, Homo sapien
acacagcctgcatctgcattctctg

SEQ ID NO: 3846539 - DNA, 25 bp, Homo sapien
ctttcaaagaaccacacagcctgca

SEQ ID NO: 3846540 - DNA, 25 bp, Homo sapien
acagcctgcatctgcattctctgca

SEQ ID NO: 3846541 - DNA, 25 bp, Homo sapien
ctgccctgaaaagaagggtcaacag

SEQ ID NO: 3846542 - DNA, 25 bp, Homo sapien
gcctgtgtccagttgaatgactgtt

SEQ ID NO: 3846543 - DNA, 25 bp, Homo sapien
tgtgtccagttgaatgactgttcat

SEQ ID NO: 3846544 - DNA, 25 bp, Homo sapien
tgccctgaaaagaagggtcaacagc

SEQ ID NO: 3846545 - DNA, 25 bp, Homo sapien
ccatgcagagtatctgatgtttttg

SEQ ID NO: 3846546 - DNA, 25 bp, Homo sapien
cgaaacaaccatgcagagtatctga

SEQ ID NO: 3846547 - DNA, 25 bp, Homo sapien
tctaattactacttcgaaacaacca

SEQ ID NO: 3846548 - DNA, 25 bp, Homo sapien
tactacttcgaaacaaccatgcaga

SEQ ID NO: 3846549 - DNA, 25 bp, Homo sapien
ctcggttgagtagcagagttagcca

SEQ ID NO: 3846550 - DNA, 25 bp, Homo sapien
tgctcggttgagtagcagagttagc

SEQ ID NO: 3846551 - DNA, 25 bp, Homo sapien
gctcggttgagtagcagagttagcc

SEQ ID NO: 3846552 - DNA, 25 bp, Homo sapien
actgctcggttgagtagcagagtta

SEQ ID NO: 3846553 - DNA, 25 bp, Homo sapien
gcagtaaaacctcacgctcacgggc

SEQ ID NO: 3846554 - DNA, 25 bp, Homo sapien
cttctcgtagagttccgtgaggatg

SEQ ID NO: 3846555 - DNA, 25 bp, Homo sapien
agtaaaacctcacgctcacgggcat

SEQ ID NO: 3846556 - DNA, 25 bp, Homo sapien
gtagagttccgtgaggatgcactga

SEQ ID NO: 3846557 - DNA, 25 bp, Homo sapien
cagcggttggtggcagtaccaaaat

SEQ ID NO: 3846558 - DNA, 25 bp, Homo sapien
tcagcggttggtggcagtaccaaaa

SEQ ID NO: 3846559 - DNA, 25 bp, Homo sapien
gcaaacagacaccagagggtgcaag

SEQ ID NO: 3846560 - DNA, 25 bp, Homo sapien
caaacagacaccagagggtgcaaga

SEQ ID NO: 3846561 - DNA, 25 bp, Homo sapien
aaacagacaccagagggtgcaagag

SEQ ID NO: 3846562 - DNA, 25 bp, Homo sapien
ctgataggacaaatttgccttaggt

SEQ ID NO: 3846563 - DNA, 25 bp, Homo sapien
gataggacaaatttgccttaggtaa

SEQ ID NO: 3846564 - DNA, 25 bp, Homo sapien
tgataggacaaatttgccttaggta

SEQ ID NO: 3846565 - DNA, 25 bp, Homo sapien
tgagaagactttgctatcttctttg

SEQ ID NO: 3846566 - DNA, 25 bp, Homo sapien
agactttgctatcttctttgactga

SEQ ID NO: 3846567 - DNA, 25 bp, Homo sapien
tgtaaaactgattagtgttctcaaa

SEQ ID NO: 3846568 - DNA, 25 bp, Homo sapien
ctgattagtgttctcaaagtccctg

SEQ ID NO: 3846569 - DNA, 25 bp, Homo sapien
tattcacgatttcagcaagcttgct

SEQ ID NO: 3846570 - DNA, 25 bp, Homo sapien
tcagcaagcttgcttacctggtgtt

SEQ ID NO: 3846571 - DNA, 25 bp, Homo sapien
tgtgcattcttctgttattcacgat

SEQ ID NO: 3846572 - DNA, 25 bp, Homo sapien
gcttacctggtgtttaagtccacag

SEQ ID NO: 3846573 - DNA, 25 bp, Homo sapien
tactctggtaataggaggtagagag

SEQ ID NO: 3846574 - DNA, 25 bp, Homo sapien
tggaggcctgcagaatcataattca

SEQ ID NO: 3846575 - DNA, 25 bp, Homo sapien
cacagttgaaacctgatgggagaat

SEQ ID NO: 3846576 - DNA, 25 bp, Homo sapien
gcagctgtgcaactctttggaggcc

SEQ ID NO: 3846577 - DNA, 25 bp, Homo sapien
tctggcttccttgcgacattcctta

SEQ ID NO: 3846578 - DNA, 25 bp, Homo sapien
aactgaagctcagtgggtgtccaca

SEQ ID NO: 3846579 - DNA, 25 bp, Homo sapien
tccacaagggcaatagtccgctcct

SEQ ID NO: 3846580 - DNA, 25 bp, Homo sapien
ttccttagaactggcttgaaactga

SEQ ID NO: 3846581 - DNA, 25 bp, Homo sapien
ttgtgtgcgtgcaggcattattcat

SEQ ID NO: 3846582 - DNA, 25 bp, Homo sapien
caccaaaggaatggcttgtgtgcgt

SEQ ID NO: 3846583 - DNA, 25 bp, Homo sapien
gcttgtgtgcgtgcaggcattattc

SEQ ID NO: 3846584 - DNA, 25 bp, Homo sapien
caaaggaatggcttgtgtgcgtgca

SEQ ID NO: 3846585 - DNA, 25 bp, Homo sapien
caggtgcctcatgcatatttagtgc

SEQ ID NO: 3846586 - DNA, 25 bp, Homo sapien
tgtgggtggcctaattaaagcctca

SEQ ID NO: 3846587 - DNA, 25 bp, Homo sapien
agggattagttagcctgctgacagc

SEQ ID NO: 3846588 - DNA, 25 bp, Homo sapien
acagctatgggttttgtgtgtcctg

SEQ ID NO: 3846589 - DNA, 25 bp, Homo sapien
tcacctgcttcgagttgcattgtaa

SEQ ID NO: 3846590 - DNA, 25 bp, Homo sapien
agagtcacctgcttcgagttgcatt

SEQ ID NO: 3846591 - DNA, 25 bp, Homo sapien
aaccacatttcctgtattattcctt

SEQ ID NO: 3846592 - DNA, 25 bp, Homo sapien
gcttcgagttgcattgtaatggtat

SEQ ID NO: 3846593 - DNA, 25 bp, Homo sapien
tctctttgtcattggcattaatatt

SEQ ID NO: 3846594 - DNA, 25 bp, Homo sapien
ttctctttgtcattggcattaatat

SEQ ID NO: 3846595 - DNA, 25 bp, Homo sapien
atgttactgagcttttatcctgcat

SEQ ID NO: 3846596 - DNA, 25 bp, Homo sapien
ttatgttactgagcttttatcctgc

SEQ ID NO: 3846597 - DNA, 25 bp, Homo sapien
tttttatatccatgctcagaatttc

SEQ ID NO: 3846598 - DNA, 25 bp, Homo sapien
tgctcagaatttctctgacaactca

SEQ ID NO: 3846599 - DNA, 25 bp, Homo sapien
atatccatgctcagaatttctctga

SEQ ID NO: 3846600 - DNA, 25 bp, Homo sapien
catgctcagaatttctctgacaact

SEQ ID NO: 3846601 - DNA, 25 bp, Homo sapien
ctgaccatttaggagaaccacaagg

SEQ ID NO: 3846602 - DNA, 25 bp, Homo sapien
agaaaaggaagcctgaccatttagg

SEQ ID NO: 3846603 - DNA, 25 bp, Homo sapien
gaccatttaggagaaccacaaggtc

SEQ ID NO: 3846604 - DNA, 25 bp, Homo sapien
catttaggagaaccacaaggtccat

SEQ ID NO: 3846605 - DNA, 25 bp, Homo sapien
aagactgtctcctccggtagagcat

SEQ ID NO: 3846606 - DNA, 25 bp, Homo sapien
tctgctttaggagggtgtagtgttt

SEQ ID NO: 3846607 - DNA, 25 bp, Homo sapien
taggcataagtaagggcagtgtctg

SEQ ID NO: 3846608 - DNA, 25 bp, Homo sapien
tagagcatggctgaagccgtctgct

SEQ ID NO: 3846609 - DNA, 25 bp, Homo sapien
agggctcgcatatcgagcttgaatt

SEQ ID NO: 3846610 - DNA, 25 bp, Homo sapien
ttaaagggctcgcatatcgagcttg

SEQ ID NO: 3846611 - DNA, 25 bp, Homo sapien
gaatactggtattcagttagttcca

SEQ ID NO: 3846612 - DNA, 25 bp, Homo sapien
ctttgctcaattcagaatactggta

SEQ ID NO: 3846613 - DNA, 25 bp, Homo sapien
tagcttctcttggaaaatctgaatg

SEQ ID NO: 3846614 - DNA, 25 bp, Homo sapien
tcaggtaaacactcaagctaatagc

SEQ ID NO: 3846615 - DNA, 25 bp, Homo sapien
tacaagttatgttcactgtaggcca

SEQ ID NO: 3846616 - DNA, 25 bp, Homo sapien
tttgcacgtgatagctggagctggt

SEQ ID NO: 3846617 - DNA, 25 bp, Homo sapien
caccgcgcctagccagccaattttt

SEQ ID NO: 3846618 - DNA, 25 bp, Homo sapien
tgcctggccaatatttaattgatag

SEQ ID NO: 3846619 - DNA, 25 bp, Homo sapien
ccgcgcctagccagccaattttttt

SEQ ID NO: 3846620 - DNA, 25 bp, Homo sapien
catgcctggccaatatttaattgat

SEQ ID NO: 3846621 - DNA, 25 bp, Homo sapien
tatagacaggcttgaagaaatggtg

SEQ ID NO: 3846622 - DNA, 25 bp, Homo sapien
tgtttacatagcacgtgaagaagct

SEQ ID NO: 3846623 - DNA, 25 bp, Homo sapien
gatatacatagggcccgaagattgg

SEQ ID NO: 3846624 - DNA, 25 bp, Homo sapien
caaggaaatcaaggacacggacaca

SEQ ID NO: 3846625 - DNA, 25 bp, Homo sapien
ttgccccggtcctgttgaaacaggc

SEQ ID NO: 3846626 - DNA, 25 bp, Homo sapien
tggcagtcaccagaacacatctgtc

SEQ ID NO: 3846627 - DNA, 25 bp, Homo sapien
acctccgattactcatcatggtgga

SEQ ID NO: 3846628 - DNA, 25 bp, Homo sapien
tgaaacaggcgctgcaccttcaggt

SEQ ID NO: 3846629 - DNA, 25 bp, Homo sapien
tttgggagtgactggaattgatctg

SEQ ID NO: 3846630 - DNA, 25 bp, Homo sapien
ctggttgtgttttatttgggagtga

SEQ ID NO: 3846631 - DNA, 25 bp, Homo sapien
gtgactggaattgatctgtgcccat

SEQ ID NO: 3846632 - DNA, 25 bp, Homo sapien
aaagaaatcagctggttgtgtttta

SEQ ID NO: 3846633 - DNA, 25 bp, Homo sapien
tctcctgttatgaccctgttctgct

SEQ ID NO: 3846634 - DNA, 25 bp, Homo sapien
ctctggaccagggttcaaggaaaag

SEQ ID NO: 3846635 - DNA, 25 bp, Homo sapien
gatactgggtaatagagaacatctg

SEQ ID NO: 3846636 - DNA, 25 bp, Homo sapien
tgatcagagatagccttataggaac

SEQ ID NO: 3846637 - DNA, 25 bp, Homo sapien
tggctgagtttctatcccagactgg

SEQ ID NO: 3846638 - DNA, 25 bp, Homo sapien
taaggctgctcattgctatggctga

SEQ ID NO: 3846639 - DNA, 25 bp, Homo sapien
tgtgaatcagtttgcaggagtaggc

SEQ ID NO: 3846640 - DNA, 25 bp, Homo sapien
taagccattgtttcctagctgggtg

SEQ ID NO: 3846641 - DNA, 25 bp, Homo sapien
tataaaaccaataatagttgttagc

SEQ ID NO: 3846642 - DNA, 25 bp, Homo sapien
aaccctgtgtatagccttttgtctg

SEQ ID NO: 3846643 - DNA, 25 bp, Homo sapien
tcaaactaacatgtctatcacttca

SEQ ID NO: 3846644 - DNA, 25 bp, Homo sapien
tatggagtatataccttagataaca

SEQ ID NO: 3846645 - DNA, 25 bp, Homo sapien
tgattcttcggaatgccatcagaac

SEQ ID NO: 3846646 - DNA, 25 bp, Homo sapien
tgaacaatcctactgtctgtctggg

SEQ ID NO: 3846647 - DNA, 25 bp, Homo sapien
cacaattgcaagatttgggccttcc

SEQ ID NO: 3846648 - DNA, 25 bp, Homo sapien
tctgtctggggctgattcttcggaa

SEQ ID NO: 3846649 - DNA, 25 bp, Homo sapien
cagcggttgagtctggatttgattc

SEQ ID NO: 3846650 - DNA, 25 bp, Homo sapien
cacagagttacagccgaggcttctc

SEQ ID NO: 3846651 - DNA, 25 bp, Homo sapien
cacctgctttcttgagcaacctgag

SEQ ID NO: 3846652 - DNA, 25 bp, Homo sapien
ggaaactatttccagcagcggttga

SEQ ID NO: 3846653 - DNA, 25 bp, Homo sapien
gctccttgctagagaaaccacaagc

SEQ ID NO: 3846654 - DNA, 25 bp, Homo sapien
tgaaatgaaactcgctgttttgtga

SEQ ID NO: 3846655 - DNA, 25 bp, Homo sapien
gttttttgcatttccacgtagactg

SEQ ID NO: 3846656 - DNA, 25 bp, Homo sapien
tagactgcgttgctccttgctagag

SEQ ID NO: 3846657 - DNA, 25 bp, Homo sapien
gcgtagcagtttaatatcgaacaaa

SEQ ID NO: 3846658 - DNA, 25 bp, Homo sapien
gcagtttaatatcgaacaaaggcat

SEQ ID NO: 3846659 - DNA, 25 bp, Homo sapien
tgaggaagcgtagcagtttaatatc

SEQ ID NO: 3846660 - DNA, 25 bp, Homo sapien
ctttgtgaggaagcgtagcagttta

SEQ ID NO: 3846661 - DNA, 25 bp, Homo sapien
caaaaggtttgaagttcttggcagt

SEQ ID NO: 3846662 - DNA, 25 bp, Homo sapien
gcaaaaggtttgaagttcttggcag

SEQ ID NO: 3846663 - DNA, 25 bp, Homo sapien
ttttcaaagcagtcactcctttcat

SEQ ID NO: 3846664 - DNA, 25 bp, Homo sapien
attttcaaagcagtcactcctttca

SEQ ID NO: 3846665 - DNA, 25 bp, Homo sapien
cattttcaaagcagtcactcctttc

SEQ ID NO: 3846666 - DNA, 25 bp, Homo sapien
tttcccatatattgtttgatttaaa

SEQ ID NO: 3846667 - DNA, 25 bp, Homo sapien
gggaatgattttgtcccattattaa

SEQ ID NO: 3846668 - DNA, 25 bp, Homo sapien
ttattaatataagtaccatttccca

SEQ ID NO: 3846669 - DNA, 25 bp, Homo sapien
cagggaatgattttgtcccattatt

SEQ ID NO: 3846670 - DNA, 25 bp, Homo sapien
cactatgaacattttattttcaaac

SEQ ID NO: 3846671 - DNA, 25 bp, Homo sapien
tatgaacattttattttcaaacatt

SEQ ID NO: 3846672 - DNA, 25 bp, Homo sapien
atcactatgaacattttattttcaa

SEQ ID NO: 3846673 - DNA, 25 bp, Homo sapien
tgaacattttattttcaaacatttg

SEQ ID NO: 3846674 - DNA, 25 bp, Homo sapien
aaattattggagatagcttacattc

SEQ ID NO: 3846675 - DNA, 25 bp, Homo sapien
gttgtacaaaggctttaaaatctgc

SEQ ID NO: 3846676 - DNA, 25 bp, Homo sapien
cagtgtattgtgtactgacagagca

SEQ ID NO: 3846677 - DNA, 25 bp, Homo sapien
cattctttcttaggttgtacaaagg

SEQ ID NO: 3846678 - DNA, 25 bp, Homo sapien
cagttgctgcagcataattctcagt

SEQ ID NO: 3846679 - DNA, 25 bp, Homo sapien
catccctatttataccagttgctgc

SEQ ID NO: 3846680 - DNA, 25 bp, Homo sapien
aagtaaatctatcatttggaccata

SEQ ID NO: 3846681 - DNA, 25 bp, Homo sapien
aattatatgggcagcctttcagcca

SEQ ID NO: 3846682 - DNA, 25 bp, Homo sapien
gctttgtgtcacctttgacccggta

SEQ ID NO: 3846683 - DNA, 25 bp, Homo sapien
gtacctcaatagtcactcctcctca

SEQ ID NO: 3846684 - DNA, 25 bp, Homo sapien
acctttaaatggtggagtgtcccag

SEQ ID NO: 3846685 - DNA, 25 bp, Homo sapien
ttttgggtcctttctctacacattc

SEQ ID NO: 3846686 - DNA, 25 bp, Homo sapien
agcacaccatccttagcactctggg

SEQ ID NO: 3846687 - DNA, 25 bp, Homo sapien
ggtgtctggtatcaggaccaaagca

SEQ ID NO: 3846688 - DNA, 25 bp, Homo sapien
gacacaggagatgtatgaacagcct

SEQ ID NO: 3846689 - DNA, 25 bp, Homo sapien
tctgggtgtctggtatcaggaccaa

SEQ ID NO: 3846690 - DNA, 25 bp, Homo sapien
tagctatgttccgtatggccacagg

SEQ ID NO: 3846691 - DNA, 25 bp, Homo sapien
taatctgcgccttaataatgactgg

SEQ ID NO: 3846692 - DNA, 25 bp, Homo sapien
tccagggtggcagttcataaagaca

SEQ ID NO: 3846693 - DNA, 25 bp, Homo sapien
ttataactggcaccgagggactgcc

SEQ ID NO: 3846694 - DNA, 25 bp, Homo sapien
agtctctggggctgaaccatagggt

SEQ ID NO: 3846695 - DNA, 25 bp, Homo sapien
gctgaaccatagggttggtcatgtg

SEQ ID NO: 3846696 - DNA, 25 bp, Homo sapien
tccaccagagacagcagcgcagtct

SEQ ID NO: 3846697 - DNA, 25 bp, Homo sapien
tatgtggctccagtaggcacttcca

SEQ ID NO: 3846698 - DNA, 25 bp, Homo sapien
gtgggagggcacacaacttccaaga

SEQ ID NO: 3846699 - DNA, 25 bp, Homo sapien
ttcttctagatgtgacagtctcagg

SEQ ID NO: 3846700 - DNA, 25 bp, Homo sapien
gtgacagtctcagggcacccattgg

SEQ ID NO: 3846701 - DNA, 25 bp, Homo sapien
tgggagggcacacaacttccaagag

SEQ ID NO: 3846702 - DNA, 25 bp, Homo sapien
taaatgaaggcttttgcctgtctgg

SEQ ID NO: 3846703 - DNA, 25 bp, Homo sapien
ctggagccagctcagcaccatgaag

SEQ ID NO: 3846704 - DNA, 25 bp, Homo sapien
aaggcttttgcctgtctggagccag

SEQ ID NO: 3846705 - DNA, 25 bp, Homo sapien
cagctgtaaatgaaggcttttgcct

SEQ ID NO: 3846706 - DNA, 25 bp, Homo sapien
agagccaacaggtcatggaattctt

SEQ ID NO: 3846707 - DNA, 25 bp, Homo sapien
tcagatgctgctcatcactgcttgc

SEQ ID NO: 3846708 - DNA, 25 bp, Homo sapien
tggagaagagccaacaggtcatgga

SEQ ID NO: 3846709 - DNA, 25 bp, Homo sapien
acaggtcatggaattctttcttcag

SEQ ID NO: 3846710 - DNA, 25 bp, Homo sapien
tggtcccaaaagatttgtcctgtgt

SEQ ID NO: 3846711 - DNA, 25 bp, Homo sapien
cttttgtcccttctatcccctgctt

SEQ ID NO: 3846712 - DNA, 25 bp, Homo sapien
cttctatcccctgcttggatagcat

SEQ ID NO: 3846713 - DNA, 25 bp, Homo sapien
ctggtcccaaaagatttgtcctgtg

SEQ ID NO: 3846714 - DNA, 25 bp, Homo sapien
catacttctggttatccgatatttg

SEQ ID NO: 3846715 - DNA, 25 bp, Homo sapien
tccgatatttgatatgaacataaag

SEQ ID NO: 3846716 - DNA, 25 bp, Homo sapien
ctttaactgttcatacttctggtta

SEQ ID NO: 3846717 - DNA, 25 bp, Homo sapien
ggttatccgatatttgatatgaaca

SEQ ID NO: 3846718 - DNA, 25 bp, Homo sapien
gaatgaacaatgtggttgctttgtg

SEQ ID NO: 3846719 - DNA, 25 bp, Homo sapien
ctgaatgaacaatgtggttgctttg

SEQ ID NO: 3846720 - DNA, 25 bp, Homo sapien
aatgaacaatgtggttgctttgtga

SEQ ID NO: 3846721 - DNA, 25 bp, Homo sapien
gaacaatgtggttgctttgtgaata

SEQ ID NO: 3846722 - DNA, 25 bp, Homo sapien
gctcttataagaagcagtcgactcc

SEQ ID NO: 3846723 - DNA, 25 bp, Homo sapien
gaaccctgccttgcaatttggtaga

SEQ ID NO: 3846724 - DNA, 25 bp, Homo sapien
tccactcagccccatgaattaaatg

SEQ ID NO: 3846725 - DNA, 25 bp, Homo sapien
gaaggcactaagtgcttcaacctct

SEQ ID NO: 3846726 - DNA, 25 bp, Homo sapien
gggaccatgtcatgttggcacaact

SEQ ID NO: 3846727 - DNA, 25 bp, Homo sapien
tgttggcacaactctatatacatca

SEQ ID NO: 3846728 - DNA, 25 bp, Homo sapien
tctatatacatcaccgtactcaaaa

SEQ ID NO: 3846729 - DNA, 25 bp, Homo sapien
ctagaccttccaaaccaagactggg

SEQ ID NO: 3846730 - DNA, 25 bp, Homo sapien
aaggcataggaagcagtggctttac

SEQ ID NO: 3846731 - DNA, 25 bp, Homo sapien
gacatcactctttccctattcaaag

SEQ ID NO: 3846732 - DNA, 25 bp, Homo sapien
ggctttacagtccatataaccagca

SEQ ID NO: 3846733 - DNA, 25 bp, Homo sapien
tctccctcagcttctaaggcatagg

SEQ ID NO: 3846734 - DNA, 25 bp, Homo sapien
gggctctgatttggctggtgtttat

SEQ ID NO: 3846735 - DNA, 25 bp, Homo sapien
tgtgctattgtgtaccgagcattta

SEQ ID NO: 3846736 - DNA, 25 bp, Homo sapien
gcatttacgctacaccctgctgact

SEQ ID NO: 3846737 - DNA, 25 bp, Homo sapien
ttttgcttggattgtgtctgggctc

SEQ ID NO: 3846738 - DNA, 25 bp, Homo sapien
tgctcttgtttctttcctaaataaa

SEQ ID NO: 3846739 - DNA, 25 bp, Homo sapien
ctcccccctctctcttaattttgct

SEQ ID NO: 3846740 - DNA, 25 bp, Homo sapien
cctctctcttaattttgctcttgtt

SEQ ID NO: 3846741 - DNA, 25 bp, Homo sapien
cccctctctcttaattttgctcttg

SEQ ID NO: 3846742 - DNA, 25 bp, Homo sapien
tgagccaagccattttacccaagaa

SEQ ID NO: 3846743 - DNA, 25 bp, Homo sapien
tctgatgcactctactggaaggctg

SEQ ID NO: 3846744 - DNA, 25 bp, Homo sapien
tagtcaaaggatggtggctgtttcc

SEQ ID NO: 3846745 - DNA, 25 bp, Homo sapien
gaagattctgacgtgtaacctgagg

SEQ ID NO: 3846746 - DNA, 25 bp, Homo sapien
taggatggtgctctgcatcagcgat

SEQ ID NO: 3846747 - DNA, 25 bp, Homo sapien
tatccatccattgaccatccctagg

SEQ ID NO: 3846748 - DNA, 25 bp, Homo sapien
gataagactcattgctggtactgcc

SEQ ID NO: 3846749 - DNA, 25 bp, Homo sapien
tcacttaggcgagagactgtatcca

SEQ ID NO: 3846750 - DNA, 25 bp, Homo sapien
catgggaacagatgggtctgatttt

SEQ ID NO: 3846751 - DNA, 25 bp, Homo sapien
catcttgaattgctcatatacaggg

SEQ ID NO: 3846752 - DNA, 25 bp, Homo sapien
gtggactgaaggctatgtctgtgat

SEQ ID NO: 3846753 - DNA, 25 bp, Homo sapien
ttatatcatgggaacagatgggtct

SEQ ID NO: 3846754 - DNA, 25 bp, Homo sapien
tggcaaactctggtaaatgttctat

SEQ ID NO: 3846755 - DNA, 25 bp, Homo sapien
tatggcaaactctggtaaatgttct

SEQ ID NO: 3846756 - DNA, 25 bp, Homo sapien
atggcaaactctggtaaatgttcta

SEQ ID NO: 3846757 - DNA, 25 bp, Homo sapien
gcaaaatcaggcaaatctctaaaga

SEQ ID NO: 3846758 - DNA, 25 bp, Homo sapien
tctctaaagaaaatcgcagattgta

SEQ ID NO: 3846759 - DNA, 25 bp, Homo sapien
tgagcagggatttttggcagtcatc

SEQ ID NO: 3846760 - DNA, 25 bp, Homo sapien
aaaatcgcagattgtagcaactggg

SEQ ID NO: 3846761 - DNA, 25 bp, Homo sapien
gagggagaccttaaccacagtgagt

SEQ ID NO: 3846762 - DNA, 25 bp, Homo sapien
ccttaaccacagtgagtagctcagg

SEQ ID NO: 3846763 - DNA, 25 bp, Homo sapien
taaccacagtgagtagctcaggaga

SEQ ID NO: 3846764 - DNA, 25 bp, Homo sapien
aagagagagggagaccttaaccaca

SEQ ID NO: 3846765 - DNA, 25 bp, Homo sapien
cagctgctgcctatgaaaaagaggt

SEQ ID NO: 3846766 - DNA, 25 bp, Homo sapien
gtctcagagttatcgtgggcagagc

SEQ ID NO: 3846767 - DNA, 25 bp, Homo sapien
tcagagttatcgtgggcagagcttc

SEQ ID NO: 3846768 - DNA, 25 bp, Homo sapien
gtgttgccacttttcccccagcagt

SEQ ID NO: 3846769 - DNA, 25 bp, Homo sapien
tcctccttctcgatctattttttcg

SEQ ID NO: 3846770 - DNA, 25 bp, Homo sapien
cttggccacgtttttgcttgggtct

SEQ ID NO: 3846771 - DNA, 25 bp, Homo sapien
gagtctttcccccagatgcttaatg

SEQ ID NO: 3846772 - DNA, 25 bp, Homo sapien
tagcagtggatgttgatttagatgc

SEQ ID NO: 3846773 - DNA, 25 bp, Homo sapien
cagtcctctgtaattttgacgtcca

SEQ ID NO: 3846774 - DNA, 25 bp, Homo sapien
aattttgacgtccagatggtgccat

SEQ ID NO: 3846775 - DNA, 25 bp, Homo sapien
atgcagtcctctgtaattttgacgt

SEQ ID NO: 3846776 - DNA, 25 bp, Homo sapien
tctgtaattttgacgtccagatggt

SEQ ID NO: 3846777 - DNA, 25 bp, Homo sapien
gaagttatccaagaacaggccaggc

SEQ ID NO: 3846778 - DNA, 25 bp, Homo sapien
gatgggacctggttaagtcaaagca

SEQ ID NO: 3846779 - DNA, 25 bp, Homo sapien
tctacacagtgagttaaagctgctc

SEQ ID NO: 3846780 - DNA, 25 bp, Homo sapien
tatggcaggcactctatcaatgaag

SEQ ID NO: 3846781 - DNA, 25 bp, Homo sapien
gggacctaggaggattctggttcga

SEQ ID NO: 3846782 - DNA, 25 bp, Homo sapien
attctggttcgaggaaagcagagga

SEQ ID NO: 3846783 - DNA, 25 bp, Homo sapien
agaatttgacaatactgtcatcaag

SEQ ID NO: 3846784 - DNA, 25 bp, Homo sapien
tgaagaatttgacaatactgtcatc

SEQ ID NO: 3846785 - DNA, 25 bp, Homo sapien
gctcaaagaatttcagctcttctgc

SEQ ID NO: 3846786 - DNA, 25 bp, Homo sapien
ggcagattgacaacatatgggtttt

SEQ ID NO: 3846787 - DNA, 25 bp, Homo sapien
tcagttccagtattcaggggctcaa

SEQ ID NO: 3846788 - DNA, 25 bp, Homo sapien
gatgcaggcttgatattttaccaac

SEQ ID NO: 3846789 - DNA, 25 bp, Homo sapien
gctgatcatccaaggtagatttaat

SEQ ID NO: 3846790 - DNA, 25 bp, Homo sapien
catttgaagtcaagaccgagtggat

SEQ ID NO: 3846791 - DNA, 25 bp, Homo sapien
tcaagtaactccactggtagcagct

SEQ ID NO: 3846792 - DNA, 25 bp, Homo sapien
taatattggagagtcaagttcattt

SEQ ID NO: 3846793 - DNA, 25 bp, Homo sapien
actactgtcaccaccctggaagcat

SEQ ID NO: 3846794 - DNA, 25 bp, Homo sapien
cctcactactgtcaccaccctggaa

SEQ ID NO: 3846795 - DNA, 25 bp, Homo sapien
tactgtcaccaccctggaagcatcc

SEQ ID NO: 3846796 - DNA, 25 bp, Homo sapien
tcactactgtcaccaccctggaagc

SEQ ID NO: 3846797 - DNA, 25 bp, Homo sapien
tcgttttgcttaaagctgtttttgc

SEQ ID NO: 3846798 - DNA, 25 bp, Homo sapien
ttttgcttaaagctgtttttgccca

SEQ ID NO: 3846799 - DNA, 25 bp, Homo sapien
taagaagtcttcagggccattgcct

SEQ ID NO: 3846800 - DNA, 25 bp, Homo sapien
gaagctgcaacttggaatagacttg

SEQ ID NO: 3846801 - DNA, 25 bp, Homo sapien
ggccctctgatattggcttgggagc

SEQ ID NO: 3846802 - DNA, 25 bp, Homo sapien
gcagctgcctgagaagaagctgcaa

SEQ ID NO: 3846803 - DNA, 25 bp, Homo sapien
tttgtagcttacatggcagctctcc

SEQ ID NO: 3846804 - DNA, 25 bp, Homo sapien
tgcaagtttaccagtgtgtactttg

SEQ ID NO: 3846805 - DNA, 25 bp, Homo sapien
caagctgattaccagcaatatcttc

SEQ ID NO: 3846806 - DNA, 25 bp, Homo sapien
gagatccttgattaagagatgcaag

SEQ ID NO: 3846807 - DNA, 25 bp, Homo sapien
catagggaagacaacatcctgagac

SEQ ID NO: 3846808 - DNA, 25 bp, Homo sapien
gttgcttgctccacagactccatag

SEQ ID NO: 3846809 - DNA, 25 bp, Homo sapien
catcctgagaccttaggatcttcag

SEQ ID NO: 3846810 - DNA, 25 bp, Homo sapien
tccacagactccatagggaagacaa

SEQ ID NO: 3846811 - DNA, 25 bp, Homo sapien
tgagtgtccacctctttcttctacc

SEQ ID NO: 3846812 - DNA, 25 bp, Homo sapien
cacctctttcttctaccccaaacat

SEQ ID NO: 3846813 - DNA, 25 bp, Homo sapien
tgtccacctctttcttctaccccaa

SEQ ID NO: 3846814 - DNA, 25 bp, Homo sapien
ctgattgagtgtccacctctttctt

SEQ ID NO: 3846815 - DNA, 25 bp, Homo sapien
tgttaatgctgtagatacctgcaaa

SEQ ID NO: 3846816 - DNA, 25 bp, Homo sapien
tgtttgccgatttggcttctcaagc

SEQ ID NO: 3846817 - DNA, 25 bp, Homo sapien
cattctgaatcgtgaggctatcttt

SEQ ID NO: 3846818 - DNA, 25 bp, Homo sapien
tggaaagtagatgtcctagggagaa

SEQ ID NO: 3846819 - DNA, 25 bp, Homo sapien
gagttcttacataacctcctagtct

SEQ ID NO: 3846820 - DNA, 25 bp, Homo sapien
tagtctctcgggatgagcagaacat

SEQ ID NO: 3846821 - DNA, 25 bp, Homo sapien
acctcctagtctctcgggatgagca

SEQ ID NO: 3846822 - DNA, 25 bp, Homo sapien
tcttcacccctgtctgagttcttac

SEQ ID NO: 3846823 - DNA, 25 bp, Homo sapien
gagccttgccactaatttccatcat

SEQ ID NO: 3846824 - DNA, 25 bp, Homo sapien
tgagccttgccactaatttccatca

SEQ ID NO: 3846825 - DNA, 25 bp, Homo sapien
ttgagccttgccactaatttccatc

SEQ ID NO: 3846826 - DNA, 25 bp, Homo sapien
cttgagccttgccactaatttccat

SEQ ID NO: 3846827 - DNA, 25 bp, Homo sapien
gactgctcgtccttcatcttatttt

SEQ ID NO: 3846828 - DNA, 25 bp, Homo sapien
tgccacttgggatagactgctcgtc

SEQ ID NO: 3846829 - DNA, 25 bp, Homo sapien
gctttctggctttcattaatcaaac

SEQ ID NO: 3846830 - DNA, 25 bp, Homo sapien
tctctctggcaatttgcagtggaag

SEQ ID NO: 3846831 - DNA, 25 bp, Homo sapien
gaatctgattgagtctgtctgttaa

SEQ ID NO: 3846832 - DNA, 25 bp, Homo sapien
tctgattgagtctgtctgttaacag

SEQ ID NO: 3846833 - DNA, 25 bp, Homo sapien
ctgaatctgattgagtctgtctgtt

SEQ ID NO: 3846834 - DNA, 25 bp, Homo sapien
gattgagtctgtctgttaacagaaa

SEQ ID NO: 3846835 - DNA, 25 bp, Homo sapien
ttgacctttgcctgacttctctgag

SEQ ID NO: 3846836 - DNA, 25 bp, Homo sapien
tacaactgctgtggggattgctttc

SEQ ID NO: 3846837 - DNA, 25 bp, Homo sapien
catttgcatgattgtgctaaatcca

SEQ ID NO: 3846838 - DNA, 25 bp, Homo sapien
ctgatgtgtgtagcagtacaactgc

SEQ ID NO: 3846839 - DNA, 25 bp, Homo sapien
atgttgatgttggaggccagagctc

SEQ ID NO: 3846840 - DNA, 25 bp, Homo sapien
tagagtatgtagagccaaatgtcca

SEQ ID NO: 3846841 - DNA, 25 bp, Homo sapien
caaatgtccaggaaatatgaggttc

SEQ ID NO: 3846842 - DNA, 25 bp, Homo sapien
tatgaggttcatatgccagagaagg

SEQ ID NO: 3846843 - DNA, 25 bp, Homo sapien
ttcagcagagatagaatatccctgc

SEQ ID NO: 3846844 - DNA, 25 bp, Homo sapien
agcagagatagaatatccctgctgc

SEQ ID NO: 3846845 - DNA, 25 bp, Homo sapien
ctgcccgcttcagcagagatagaat

SEQ ID NO: 3846846 - DNA, 25 bp, Homo sapien
cgcttcagcagagatagaatatccc

SEQ ID NO: 3846847 - DNA, 25 bp, Homo sapien
ccacatttaatcttccacacctcat

SEQ ID NO: 3846848 - DNA, 25 bp, Homo sapien
tccacatttaatcttccacacctca

SEQ ID NO: 3846849 - DNA, 25 bp, Homo sapien
ttccacatttaatcttccacacctc

SEQ ID NO: 3846850 - DNA, 25 bp, Homo sapien
caaagcccatgtcctagtcaggctc

SEQ ID NO: 3846851 - DNA, 25 bp, Homo sapien
catgtcctagtcaggctcctcagat

SEQ ID NO: 3846852 - DNA, 25 bp, Homo sapien
acctcctgcttgtgcggtgcaggct

SEQ ID NO: 3846853 - DNA, 25 bp, Homo sapien
caggacctcctgcttgtgcggtgca

SEQ ID NO: 3846854 - DNA, 25 bp, Homo sapien
ggttattgaatttatcctccgtgat

SEQ ID NO: 3846855 - DNA, 25 bp, Homo sapien
tgcaaagaagctaggccaaaagggc

SEQ ID NO: 3846856 - DNA, 25 bp, Homo sapien
aggaggctgccgatattgacactgg

SEQ ID NO: 3846857 - DNA, 25 bp, Homo sapien
ccaaaagggctcgacagttacagca

SEQ ID NO: 3846858 - DNA, 25 bp, Homo sapien
tgggtgaaagtgggaccggagctgc

SEQ ID NO: 3846859 - DNA, 25 bp, Homo sapien
cttgggtgaaagtgggaccggagct

SEQ ID NO: 3846860 - DNA, 25 bp, Homo sapien
ttgggtgaaagtgggaccggagctg

SEQ ID NO: 3846861 - DNA, 25 bp, Homo sapien
tcacatgtagtataaggaccttatg

SEQ ID NO: 3846862 - DNA, 25 bp, Homo sapien
tgcaacatctcttgtagtacagaac

SEQ ID NO: 3846863 - DNA, 25 bp, Homo sapien
tgtgggaaggactgctgcaacatct

SEQ ID NO: 3846864 - DNA, 25 bp, Homo sapien
cttgggctttgggttattactatca

SEQ ID NO: 3846865 - DNA, 25 bp, Homo sapien
gatgcataaaagttacatagccaaa

SEQ ID NO: 3846866 - DNA, 25 bp, Homo sapien
cttagggcttccagatgcataaaag

SEQ ID NO: 3846867 - DNA, 25 bp, Homo sapien
agatgcataaaagttacatagccaa

SEQ ID NO: 3846868 - DNA, 25 bp, Homo sapien
ttgtcttagggcttccagatgcata

SEQ ID NO: 3846869 - DNA, 25 bp, Homo sapien
tggtttttgccttacaggtgcttga

SEQ ID NO: 3846870 - DNA, 25 bp, Homo sapien
cttcgtggtttttgccttacaggtg

SEQ ID NO: 3846871 - DNA, 25 bp, Homo sapien
tttttgccttacaggtgcttgagac

SEQ ID NO: 3846872 - DNA, 25 bp, Homo sapien
cgtggtttttgccttacaggtgctt

SEQ ID NO: 3846873 - DNA, 25 bp, Homo sapien
tgtgtttacccgtgtagaatccagg

SEQ ID NO: 3846874 - DNA, 25 bp, Homo sapien
tacctgtgtttacccgtgtagaatc

SEQ ID NO: 3846875 - DNA, 25 bp, Homo sapien
cctgtgtttacccgtgtagaatcca

SEQ ID NO: 3846876 - DNA, 25 bp, Homo sapien
ttgtacctgtgtttacccgtgtaga

SEQ ID NO: 3846877 - DNA, 25 bp, Homo sapien
aacatttcaaattcattcccaatct

SEQ ID NO: 3846878 - DNA, 25 bp, Homo sapien
cttaacatttcaaattcattcccaa

SEQ ID NO: 3846879 - DNA, 25 bp, Homo sapien
taacatttcaaattcattcccaatc

SEQ ID NO: 3846880 - DNA, 25 bp, Homo sapien
acatttcaaattcattcccaatctt

SEQ ID NO: 3846881 - DNA, 25 bp, Homo sapien
caagggttcgaatggttcgtttgag

SEQ ID NO: 3846882 - DNA, 25 bp, Homo sapien
gttcgaatggttcgtttgagctcac

SEQ ID NO: 3846883 - DNA, 25 bp, Homo sapien
ttgtcctcaagggttcgaatggttc

SEQ ID NO: 3846884 - DNA, 25 bp, Homo sapien
ctcaagggttcgaatggttcgtttg

SEQ ID NO: 3846885 - DNA, 25 bp, Homo sapien
tttgatgacattgtcttacaaggcg

SEQ ID NO: 3846886 - DNA, 25 bp, Homo sapien
ctacgaaaagtacggaatgtgcatg

SEQ ID NO: 3846887 - DNA, 25 bp, Homo sapien
tggctacgaaaagtacggaatgtgc

SEQ ID NO: 3846888 - DNA, 25 bp, Homo sapien
cttttcatggctacgaaaagtacgg

SEQ ID NO: 3846889 - DNA, 25 bp, Homo sapien
ttcatggctacgaaaagtacggaat

SEQ ID NO: 3846890 - DNA, 25 bp, Homo sapien
cttcactatcagagaaataatctca

SEQ ID NO: 3846891 - DNA, 25 bp, Homo sapien
tggacaacccttcataatgtaaata

SEQ ID NO: 3846892 - DNA, 25 bp, Homo sapien
ttggacacttcactatcagagaaat

SEQ ID NO: 3846893 - DNA, 25 bp, Homo sapien
ggacaacccttcataatgtaaatat

SEQ ID NO: 3846894 - DNA, 25 bp, Homo sapien
ttttttgttgctgcgctacaggagc

SEQ ID NO: 3846895 - DNA, 25 bp, Homo sapien
gttctgcccacactatcattttttg

SEQ ID NO: 3846896 - DNA, 25 bp, Homo sapien
cattttttgttgctgcgctacagga

SEQ ID NO: 3846897 - DNA, 25 bp, Homo sapien
gcagttctgcccacactatcatttt

SEQ ID NO: 3846898 - DNA, 25 bp, Homo sapien
tcaatctttgccaagagttctcatt

SEQ ID NO: 3846899 - DNA, 25 bp, Homo sapien
ccttcctgaaacagtgatgacgatg

SEQ ID NO: 3846900 - DNA, 25 bp, Homo sapien
tgttcgttacctcccacttgatcct

SEQ ID NO: 3846901 - DNA, 25 bp, Homo sapien
acgatgatgatgagataacaccacc

SEQ ID NO: 3846902 - DNA, 25 bp, Homo sapien
ggatacagaattgcgtagtatttca

SEQ ID NO: 3846903 - DNA, 25 bp, Homo sapien
gaattgcgtagtatttcatcaggat

SEQ ID NO: 3846904 - DNA, 25 bp, Homo sapien
tacagaattgcgtagtatttcatca

SEQ ID NO: 3846905 - DNA, 25 bp, Homo sapien
ctgaggatacagaattgcgtagtat

SEQ ID NO: 3846906 - DNA, 25 bp, Homo sapien
tggaaatgaaagtacacatagtcat

SEQ ID NO: 3846907 - DNA, 25 bp, Homo sapien
ctggaaatgaaagtacacatagtca

SEQ ID NO: 3846908 - DNA, 25 bp, Homo sapien
catattgccccttctttacaggtga

SEQ ID NO: 3846909 - DNA, 25 bp, Homo sapien
gacacagctagttagtacagataac

SEQ ID NO: 3846910 - DNA, 25 bp, Homo sapien
actgcttctccatgattgtccatca

SEQ ID NO: 3846911 - DNA, 25 bp, Homo sapien
ggctgctcttaattacaaccaaact

SEQ ID NO: 3846912 - DNA, 25 bp, Homo sapien
tagctttagctgtcttctttgtagc

SEQ ID NO: 3846913 - DNA, 25 bp, Homo sapien
ttagctttagctgtcttctttgtag

SEQ ID NO: 3846914 - DNA, 25 bp, Homo sapien
tgtgggccacaactatccaagtaaa

SEQ ID NO: 3846915 - DNA, 25 bp, Homo sapien
ggccacaactatccaagtaaagaaa

SEQ ID NO: 3846916 - DNA, 25 bp, Homo sapien
ttccaagacaggttactctgagagc

SEQ ID NO: 3846917 - DNA, 25 bp, Homo sapien
aaattttgactactgtcagcagagg

SEQ ID NO: 3846918 - DNA, 25 bp, Homo sapien
ccagccccttcaacactaactcctt

SEQ ID NO: 3846919 - DNA, 25 bp, Homo sapien
attttgactactgtcagcagaggat

SEQ ID NO: 3846920 - DNA, 25 bp, Homo sapien
atgaaccaccaaaagctttcaattt

SEQ ID NO: 3846921 - DNA, 25 bp, Homo sapien
catgaaccaccaaaagctttcaatt

SEQ ID NO: 3846922 - DNA, 25 bp, Homo sapien
gcatgaaccaccaaaagctttcaat

SEQ ID NO: 3846923 - DNA, 25 bp, Homo sapien
tagcagacatctcaagctaatgatt

SEQ ID NO: 3846924 - DNA, 25 bp, Homo sapien
acagaactataaagccccacagaaa

SEQ ID NO: 3846925 - DNA, 25 bp, Homo sapien
cactgcaatttaggtacaaaaaggt

SEQ ID NO: 3846926 - DNA, 25 bp, Homo sapien
caaaagaatgtagcatacgagttgg

SEQ ID NO: 3846927 - DNA, 25 bp, Homo sapien
tacctgaggcattgggacaaagggt

SEQ ID NO: 3846928 - DNA, 25 bp, Homo sapien
tgacggacgggtctcaactctttgg

SEQ ID NO: 3846929 - DNA, 25 bp, Homo sapien
tagctagagaaactcatggtctgtg

SEQ ID NO: 3846930 - DNA, 25 bp, Homo sapien
gcttcagggccttgcggccatctct

SEQ ID NO: 3846931 - DNA, 25 bp, Homo sapien
tagctctcaactcaaccacgttctg

SEQ ID NO: 3846932 - DNA, 25 bp, Homo sapien
caagagaacacttccgcttagccct

SEQ ID NO: 3846933 - DNA, 25 bp, Homo sapien
cacgttctgagtactgttggagcca

SEQ ID NO: 3846934 - DNA, 25 bp, Homo sapien
aacttcagggaagattggatagctc

SEQ ID NO: 3846935 - DNA, 25 bp, Homo sapien
tccttttggctatgtggcagggccc

SEQ ID NO: 3846936 - DNA, 25 bp, Homo sapien
aagacacagggaaaattgaccattt

SEQ ID NO: 3846937 - DNA, 25 bp, Homo sapien
tcttgacctgtctgagcatgcactt

SEQ ID NO: 3846938 - DNA, 25 bp, Homo sapien
caacaaggtatgaacagtcatgaag

SEQ ID NO: 3846939 - DNA, 25 bp, Homo sapien
aatcctcagcagaaaggtgccttgg

SEQ ID NO: 3846940 - DNA, 25 bp, Homo sapien
caaacgggaacagaggtcaataggc

SEQ ID NO: 3846941 - DNA, 25 bp, Homo sapien
tgtttccgaggaatgtccggccgag

SEQ ID NO: 3846942 - DNA, 25 bp, Homo sapien
tacagagagtccgaagagtccgggc

SEQ ID NO: 3846943 - DNA, 25 bp, Homo sapien
tgatcaaaaacctcagcctggaggc

SEQ ID NO: 3846944 - DNA, 25 bp, Homo sapien
ggaaaaatggaggtgccgcgcctgg

SEQ ID NO: 3846945 - DNA, 25 bp, Homo sapien
cctggatacgaagcaggcgggcttc

SEQ ID NO: 3846946 - DNA, 25 bp, Homo sapien
gcctggaggccattcagctgtgcga

SEQ ID NO: 3846947 - DNA, 25 bp, Homo sapien
tgtcttcggtcactgggaataattc

SEQ ID NO: 3846948 - DNA, 25 bp, Homo sapien
taatactacttgtaagtttagcctg

SEQ ID NO: 3846949 - DNA, 25 bp, Homo sapien
tttagcctgtcttcggtcactggga

SEQ ID NO: 3846950 - DNA, 25 bp, Homo sapien
tctggctttcgtaatataaattcct

SEQ ID NO: 3846951 - DNA, 25 bp, Homo sapien
tcctaaccaaatcattctgctgcat

SEQ ID NO: 3846952 - DNA, 25 bp, Homo sapien
tattgacctcaacaagaaagagaac

SEQ ID NO: 3846953 - DNA, 25 bp, Homo sapien
ggaagaacttcctgtaccacataac

SEQ ID NO: 3846954 - DNA, 25 bp, Homo sapien
aaatcaaaggatcgcattacacact

SEQ ID NO: 3846955 - DNA, 25 bp, Homo sapien
tgactcattcaagatttcatgggaa

SEQ ID NO: 3846956 - DNA, 25 bp, Homo sapien
tatgctttcagtgatggatattctc

SEQ ID NO: 3846957 - DNA, 25 bp, Homo sapien
taagtgaggatcatacatactacag

SEQ ID NO: 3846958 - DNA, 25 bp, Homo sapien
agggagcaagattgagcagtcatta

SEQ ID NO: 3846959 - DNA, 25 bp, Homo sapien
tactacagataagtgtgaaagaggg

SEQ ID NO: 3846960 - DNA, 25 bp, Homo sapien
ccgcatgaaagggtgtaattgcagc

SEQ ID NO: 3846961 - DNA, 25 bp, Homo sapien
taattgcagcatgagttaaatcttg

SEQ ID NO: 3846962 - DNA, 25 bp, Homo sapien
tattgggataactccaaaccgcatg

SEQ ID NO: 3846963 - DNA, 25 bp, Homo sapien
tcttgaagcctagaattgtcagcac

SEQ ID NO: 3846964 - DNA, 25 bp, Homo sapien
tgtattgttgtataaaatatttaca

SEQ ID NO: 3846965 - DNA, 25 bp, Homo sapien
gtattgttgtataaaatatttacaa

SEQ ID NO: 3846966 - DNA, 25 bp, Homo sapien
tagtcaatagtcttcccatccaaac

SEQ ID NO: 3846967 - DNA, 25 bp, Homo sapien
tgtacatgtcacgaaaccatttccc

SEQ ID NO: 3846968 - DNA, 25 bp, Homo sapien
tttgtacagaaggatgaataactac

SEQ ID NO: 3846969 - DNA, 25 bp, Homo sapien
ctcaaatagttgtgtatctgtcctg

SEQ ID NO: 3846970 - DNA, 25 bp, Homo sapien
tagcagacttaaaggacaaggtagt

SEQ ID NO: 3846971 - DNA, 25 bp, Homo sapien
tagggtactgagagcctagcagact

SEQ ID NO: 3846972 - DNA, 25 bp, Homo sapien
ttccctaacaagtgtcctagctatg

SEQ ID NO: 3846973 - DNA, 25 bp, Homo sapien
tgtattccttcctacttgaaaagcg

SEQ ID NO: 3846974 - DNA, 25 bp, Homo sapien
cctctaatagtctcagtttggcttt

SEQ ID NO: 3846975 - DNA, 25 bp, Homo sapien
aatagttttggccacatcttgcttg

SEQ ID NO: 3846976 - DNA, 25 bp, Homo sapien
tcataatactcatctgccattggta

SEQ ID NO: 3846977 - DNA, 25 bp, Homo sapien
ttgcttgctgatgaggacctctaat

SEQ ID NO: 3846978 - DNA, 25 bp, Homo sapien
tgtaaaaagtcaccgttcctgcaaa

SEQ ID NO: 3846979 - DNA, 25 bp, Homo sapien
aatcctgagtctaagccagtgtgga

SEQ ID NO: 3846980 - DNA, 25 bp, Homo sapien
gaatgttgcattggacaaatcctga

SEQ ID NO: 3846981 - DNA, 25 bp, Homo sapien
tacctgacagctaccatgtcccatg

SEQ ID NO: 3846982 - DNA, 25 bp, Homo sapien
tcggagatggtcaagaagtacaggc

SEQ ID NO: 3846983 - DNA, 25 bp, Homo sapien
aggctttccgcagtctcttcttgtc

SEQ ID NO: 3846984 - DNA, 25 bp, Homo sapien
tcagccctagtttctcggagatggt

SEQ ID NO: 3846985 - DNA, 25 bp, Homo sapien
tcaaattctcttaaggctttccgca

SEQ ID NO: 3846986 - DNA, 25 bp, Homo sapien
ccctaacaggctcagtctcattaga

SEQ ID NO: 3846987 - DNA, 25 bp, Homo sapien
gctggatctgccaaagaaggttgtt

SEQ ID NO: 3846988 - DNA, 25 bp, Homo sapien
catctggtaaaagggccctaacagg

SEQ ID NO: 3846989 - DNA, 25 bp, Homo sapien
agatgctggatctgccaaagaaggt

SEQ ID NO: 3846990 - DNA, 25 bp, Homo sapien
aagtaacagcatgcaagtatcctga

SEQ ID NO: 3846991 - DNA, 25 bp, Homo sapien
gaaatgacaactagccttgtttgca

SEQ ID NO: 3846992 - DNA, 25 bp, Homo sapien
aaattggctctagacatacaagtgc

SEQ ID NO: 3846993 - DNA, 25 bp, Homo sapien
gcagtatatactgccatgaagggtc

SEQ ID NO: 3846994 - DNA, 25 bp, Homo sapien
gttggaataagggaaggtgttgaca

SEQ ID NO: 3846995 - DNA, 25 bp, Homo sapien
cggctttatgaggttcttgtcttgc

SEQ ID NO: 3846996 - DNA, 25 bp, Homo sapien
aattctgtatcggtcataaagcggc

SEQ ID NO: 3846997 - DNA, 25 bp, Homo sapien
ctgtatcggtcataaagcggcttta

SEQ ID NO: 3846998 - DNA, 25 bp, Homo sapien
gccaagtgcccatggttagaaagtg

SEQ ID NO: 3846999 - DNA, 25 bp, Homo sapien
gagaatcagttcacttgccaagtgc

SEQ ID NO: 3847000 - DNA, 25 bp, Homo sapien
gaactattatccaccagtcagtagg

SEQ ID NO: 3847001 - DNA, 25 bp, Homo sapien
tgaactacatgagggcattgaccac

SEQ ID NO: 3847002 - DNA, 25 bp, Homo sapien
gaaagtcaatcacgccagtcttagg

SEQ ID NO: 3847003 - DNA, 25 bp, Homo sapien
gaagttacccactgactgtcacaga

SEQ ID NO: 3847004 - DNA, 25 bp, Homo sapien
catgacaaggagagattaaccaggt

SEQ ID NO: 3847005 - DNA, 25 bp, Homo sapien
gcatctgttattcgagcactgaaag

SEQ ID NO: 3847006 - DNA, 25 bp, Homo sapien
tcatgtggcactactgctcgtggcc

SEQ ID NO: 3847007 - DNA, 25 bp, Homo sapien
tataccctggtgtctttgccattta

SEQ ID NO: 3847008 - DNA, 25 bp, Homo sapien
gctcgtggccagtaacctgtcagga

SEQ ID NO: 3847009 - DNA, 25 bp, Homo sapien
tattgatgtaatggcaaagtgctct

SEQ ID NO: 3847010 - DNA, 25 bp, Homo sapien
cctctatataacaagacatggtgat

SEQ ID NO: 3847011 - DNA, 25 bp, Homo sapien
ctctatataacaagacatggtgatg

SEQ ID NO: 3847012 - DNA, 25 bp, Homo sapien
tctatataacaagacatggtgatgt

SEQ ID NO: 3847013 - DNA, 25 bp, Homo sapien
tatataacaagacatggtgatgtac

SEQ ID NO: 3847014 - DNA, 25 bp, Homo sapien
taggtggacctttgggagcactccc

SEQ ID NO: 3847015 - DNA, 25 bp, Homo sapien
caaggcagcatctggagtctcttct

SEQ ID NO: 3847016 - DNA, 25 bp, Homo sapien
gggactgtgggttgctcacacaaca

SEQ ID NO: 3847017 - DNA, 25 bp, Homo sapien
tccttcaggcatgtcaaggcagcat

SEQ ID NO: 3847018 - DNA, 25 bp, Homo sapien
ggagttacagtctaagcagaaaaca

SEQ ID NO: 3847019 - DNA, 25 bp, Homo sapien
ttatcactagtttaactgcttcctt

SEQ ID NO: 3847020 - DNA, 25 bp, Homo sapien
aaaagggagttacagtctaagcaga

SEQ ID NO: 3847021 - DNA, 25 bp, Homo sapien
gctctggagcacattatcactagtt

SEQ ID NO: 3847022 - DNA, 25 bp, Homo sapien
tccatttcaggacttcaggattaga

SEQ ID NO: 3847023 - DNA, 25 bp, Homo sapien
gagctgtttacgacctttagccaaa

SEQ ID NO: 3847024 - DNA, 25 bp, Homo sapien
tgtttacgacctttagccaaatcat

SEQ ID NO: 3847025 - DNA, 25 bp, Homo sapien
atccatttcaggacttcaggattag

SEQ ID NO: 3847026 - DNA, 25 bp, Homo sapien
ggtctgtggctccttgccatctcca

SEQ ID NO: 3847027 - DNA, 25 bp, Homo sapien
tccgcttgaggctctggatgtgctt

SEQ ID NO: 3847028 - DNA, 25 bp, Homo sapien
cagctgcagcgtgaagaactccgcg

SEQ ID NO: 3847029 - DNA, 25 bp, Homo sapien
caaatttccgaattttccgcttgag

SEQ ID NO: 3847030 - DNA, 25 bp, Homo sapien
aggcacatttgtgctacttcagtca

SEQ ID NO: 3847031 - DNA, 25 bp, Homo sapien
ggcacatttgtgctacttcagtcac

SEQ ID NO: 3847032 - DNA, 25 bp, Homo sapien
caggcacatttgtgctacttcagtc

SEQ ID NO: 3847033 - DNA, 25 bp, Homo sapien
aagatggagcatcgtggcgacagca

SEQ ID NO: 3847034 - DNA, 25 bp, Homo sapien
cagtgggttatcaccatcagtgatg

SEQ ID NO: 3847035 - DNA, 25 bp, Homo sapien
tctggtgcactgtcggcctcattct

SEQ ID NO: 3847036 - DNA, 25 bp, Homo sapien
tgatgtgatagagcagcctgctggt

SEQ ID NO: 3847037 - DNA, 25 bp, Homo sapien
catctgctatggaagtaagggcagg

SEQ ID NO: 3847038 - DNA, 25 bp, Homo sapien
agaaggtaagtacccatctgctatg

SEQ ID NO: 3847039 - DNA, 25 bp, Homo sapien
ccagaaggtaagtacccatctgcta

SEQ ID NO: 3847040 - DNA, 25 bp, Homo sapien
ctgctatggaagtaagggcaggcga

SEQ ID NO: 3847041 - DNA, 25 bp, Homo sapien
caataactcatagcatataatatca

SEQ ID NO: 3847042 - DNA, 25 bp, Homo sapien
aataactcatagcatataatatcac

SEQ ID NO: 3847043 - DNA, 25 bp, Homo sapien
cactaggctctaagaagaaatgtgt

SEQ ID NO: 3847044 - DNA, 25 bp, Homo sapien
tttcttaaaccactaggctctaaga

SEQ ID NO: 3847045 - DNA, 25 bp, Homo sapien
cagtaggtgtatgggttcctcatca

SEQ ID NO: 3847046 - DNA, 25 bp, Homo sapien
caaaatacaccagtaggtgtatggg

SEQ ID NO: 3847047 - DNA, 25 bp, Homo sapien
aaattccaaccttcgatgtgggcgg

SEQ ID NO: 3847048 - DNA, 25 bp, Homo sapien
gaattagccaattcactcagggaag

SEQ ID NO: 3847049 - DNA, 25 bp, Homo sapien
caagcttctgggcatgccatctggt

SEQ ID NO: 3847050 - DNA, 25 bp, Homo sapien
gacaggacaggttgtctaccaagcc

SEQ ID NO: 3847051 - DNA, 25 bp, Homo sapien
tccattttccgttcaatcacatcag

SEQ ID NO: 3847052 - DNA, 25 bp, Homo sapien
tttccgttcaatcacatcagaatag

SEQ ID NO: 3847053 - DNA, 25 bp, Homo sapien
tcacatcagaataggtgcttactaa

SEQ ID NO: 3847054 - DNA, 25 bp, Homo sapien
gaataggtgcttactaattccatgc

SEQ ID NO: 3847055 - DNA, 25 bp, Homo sapien
aatttgcctgctgttggctagccaa

SEQ ID NO: 3847056 - DNA, 25 bp, Homo sapien
taaggacctttcatgaagaatgctc

SEQ ID NO: 3847057 - DNA, 25 bp, Homo sapien
tcttggccgcatctagacaggtcta

SEQ ID NO: 3847058 - DNA, 25 bp, Homo sapien
tgagtgtgaaccagcaagagactga

SEQ ID NO: 3847059 - DNA, 25 bp, Homo sapien
ggcaagcacgctctgggttgatgct

SEQ ID NO: 3847060 - DNA, 25 bp, Homo sapien
gactccatgcacctgagcagcttct

SEQ ID NO: 3847061 - DNA, 25 bp, Homo sapien
ggcgccgggtccttgactccatgca

SEQ ID NO: 3847062 - DNA, 25 bp, Homo sapien
tgcagaatctgtcccatcggcaagc

SEQ ID NO: 3847063 - DNA, 25 bp, Homo sapien
gattcgagggcttgcagcttcagca

SEQ ID NO: 3847064 - DNA, 25 bp, Homo sapien
cacagatcagattcgagggcttgca

SEQ ID NO: 3847065 - DNA, 25 bp, Homo sapien
aaatgcagagcacagatcagattcg

SEQ ID NO: 3847066 - DNA, 25 bp, Homo sapien
gagggcttgcagcttcagcaaggaa

SEQ ID NO: 3847067 - DNA, 25 bp, Homo sapien
cagctaagtagatgcctaacacaca

SEQ ID NO: 3847068 - DNA, 25 bp, Homo sapien
gaggccagctaagtagatgcctaac

SEQ ID NO: 3847069 - DNA, 25 bp, Homo sapien
gtgtccgcagctcccgcaagcacct

SEQ ID NO: 3847070 - DNA, 25 bp, Homo sapien
aacatgaggccagctaagtagatgc

SEQ ID NO: 3847071 - DNA, 25 bp, Homo sapien
cacaccaagtttctgggaggattta

SEQ ID NO: 3847072 - DNA, 25 bp, Homo sapien
gctgaaggaacaggcacaccaagtt

SEQ ID NO: 3847073 - DNA, 25 bp, Homo sapien
aactgaggttgttgacaggagctgc

SEQ ID NO: 3847074 - DNA, 25 bp, Homo sapien
gcagctgagtgtggaagcaagaact

SEQ ID NO: 3847075 - DNA, 25 bp, Homo sapien
tctgccttttggcaccatgggccac

SEQ ID NO: 3847076 - DNA, 25 bp, Homo sapien
gacacactgtgtgggatggggtcca

SEQ ID NO: 3847077 - DNA, 25 bp, Homo sapien
ccatgggccacttgtaagtcctcct

SEQ ID NO: 3847078 - DNA, 25 bp, Homo sapien
taagtcctcctgaacagagagtggg

SEQ ID NO: 3847079 - DNA, 25 bp, Homo sapien
gcacgcaacatagattcctcgcatg

SEQ ID NO: 3847080 - DNA, 25 bp, Homo sapien
tcctcaaaaggagcacgcaacatag

SEQ ID NO: 3847081 - DNA, 25 bp, Homo sapien
actgctcatcttctcgggccgtgca

SEQ ID NO: 3847082 - DNA, 25 bp, Homo sapien
ggtcctaacaggctacaggccggta

SEQ ID NO: 3847083 - DNA, 25 bp, Homo sapien
gagttttataaccttcagaaggcca

SEQ ID NO: 3847084 - DNA, 25 bp, Homo sapien
gatgtcccgacttgatatgtgtccc

SEQ ID NO: 3847085 - DNA, 25 bp, Homo sapien
caaggctaggaaggccagatgtccc

SEQ ID NO: 3847086 - DNA, 25 bp, Homo sapien
ccaggatcacccatgttgctgtaaa

SEQ ID NO: 3847087 - DNA, 25 bp, Homo sapien
gatacagattacttggctgagcctg

SEQ ID NO: 3847088 - DNA, 25 bp, Homo sapien
tccctggacctagccatgcatagag

SEQ ID NO: 3847089 - DNA, 25 bp, Homo sapien
aaagcacaagaaggatttgccacgc

SEQ ID NO: 3847090 - DNA, 25 bp, Homo sapien
gataagaaactaccccagccagtgc

SEQ ID NO: 3847091 - DNA, 25 bp, Homo sapien
ggagtcttcagaatagagttacagt

SEQ ID NO: 3847092 - DNA, 25 bp, Homo sapien
gccctgtagggtcaattaacagcaa

SEQ ID NO: 3847093 - DNA, 25 bp, Homo sapien
ccttgggcataaatggacaaagcac

SEQ ID NO: 3847094 - DNA, 25 bp, Homo sapien
taaagggagcacaatgcagtatcag

SEQ ID NO: 3847095 - DNA, 25 bp, Homo sapien
caatcatgctattgtctggcttcat

SEQ ID NO: 3847096 - DNA, 25 bp, Homo sapien
gaatattataggactcagcgacttc

SEQ ID NO: 3847097 - DNA, 25 bp, Homo sapien
ctgaatattataggactcagcgact

SEQ ID NO: 3847098 - DNA, 25 bp, Homo sapien
tattataggactcagcgacttccat

SEQ ID NO: 3847099 - DNA, 25 bp, Homo sapien
tgggggagacagacacctgtctcta

SEQ ID NO: 3847100 - DNA, 25 bp, Homo sapien
ctgggggagacagacacctgtctct

SEQ ID NO: 3847101 - DNA, 25 bp, Homo sapien
gggagacagacacctgtctctatgg

SEQ ID NO: 3847102 - DNA, 25 bp, Homo sapien
agacagacacctgtctctatggttt

SEQ ID NO: 3847103 - DNA, 25 bp, Homo sapien
tttgtgttccatagagactctgtcg

SEQ ID NO: 3847104 - DNA, 25 bp, Homo sapien
gaaggaattacaaagaggcatctgg

SEQ ID NO: 3847105 - DNA, 25 bp, Homo sapien
ggaggcatactcctgtaaaaagtca

SEQ ID NO: 3847106 - DNA, 25 bp, Homo sapien
tcttcataggagagtagcgactgga

SEQ ID NO: 3847107 - DNA, 25 bp, Homo sapien
ctgtattcaaccagtctggatcagc

SEQ ID NO: 3847108 - DNA, 25 bp, Homo sapien
catactgtattcaaccagtctggat

SEQ ID NO: 3847109 - DNA, 25 bp, Homo sapien
agcacatactgtattcaaccagtct

SEQ ID NO: 3847110 - DNA, 25 bp, Homo sapien
tactgtattcaaccagtctggatca

SEQ ID NO: 3847111 - DNA, 25 bp, Homo sapien
tgggaatgttcaagtgatctcagca

SEQ ID NO: 3847112 - DNA, 25 bp, Homo sapien
catccagtgctcttatgctcaggca

SEQ ID NO: 3847113 - DNA, 25 bp, Homo sapien
gacagctgcgttcactgattcaggc

SEQ ID NO: 3847114 - DNA, 25 bp, Homo sapien
cattcccatggatttgcagctcaaa

SEQ ID NO: 3847115 - DNA, 25 bp, Homo sapien
gccagagagagtattccaaaccaat

SEQ ID NO: 3847116 - DNA, 25 bp, Homo sapien
ggaaaatacggcttcacgtcttgaa

SEQ ID NO: 3847117 - DNA, 25 bp, Homo sapien
tcgccacggttatacaatcctgaag

SEQ ID NO: 3847118 - DNA, 25 bp, Homo sapien
gggttagggccaagacatcgcaagc

SEQ ID NO: 3847119 - DNA, 25 bp, Homo sapien
ttggcgaaatggcagtcctctggtc

SEQ ID NO: 3847120 - DNA, 25 bp, Homo sapien
tcatttaagtcctgccgagtttcaa

SEQ ID NO: 3847121 - DNA, 25 bp, Homo sapien
tgccgagtttcaaaagcatcctttg

SEQ ID NO: 3847122 - DNA, 25 bp, Homo sapien
aaaagcatcctttggcgaaatggca

SEQ ID NO: 3847123 - DNA, 25 bp, Homo sapien
aaaactcggtcacactgaacactcc

SEQ ID NO: 3847124 - DNA, 25 bp, Homo sapien
ccttaacgatactgcttgaaccatt

SEQ ID NO: 3847125 - DNA, 25 bp, Homo sapien
gaaccatttacaatctttcctggaa

SEQ ID NO: 3847126 - DNA, 25 bp, Homo sapien
gctggcctacacacaaaaactcggt

SEQ ID NO: 3847127 - DNA, 25 bp, Homo sapien
tcttagtcctcttgctccatcagct

SEQ ID NO: 3847128 - DNA, 25 bp, Homo sapien
caagcctttctgacccttaaaattg

SEQ ID NO: 3847129 - DNA, 25 bp, Homo sapien
tcagctccaggttcttcccatgccc

SEQ ID NO: 3847130 - DNA, 25 bp, Homo sapien
aaaattggttcttagtcctcttgct

SEQ ID NO: 3847131 - DNA, 25 bp, Homo sapien
gctccttgtgctcaaaagagcccaa

SEQ ID NO: 3847132 - DNA, 25 bp, Homo sapien
tcatgacctcaatccgctccaaaat

SEQ ID NO: 3847133 - DNA, 25 bp, Homo sapien
gagcccaatatacaacatgaggact

SEQ ID NO: 3847134 - DNA, 25 bp, Homo sapien
cccagggagacatatgtaggacttc

SEQ ID NO: 3847135 - DNA, 25 bp, Homo sapien
tcaccagatcctgcgattgctgaca

SEQ ID NO: 3847136 - DNA, 25 bp, Homo sapien
cagaacagtctggaatgttgctagg

SEQ ID NO: 3847137 - DNA, 25 bp, Homo sapien
tgttgctaggtcagaaagctcaatt

SEQ ID NO: 3847138 - DNA, 25 bp, Homo sapien
gctgacagcggtgcacagaacagtc

SEQ ID NO: 3847139 - DNA, 25 bp, Homo sapien
ggctaaggtcactggaagacactcg

SEQ ID NO: 3847140 - DNA, 25 bp, Homo sapien
tctagcaggctagagaggccatcct

SEQ ID NO: 3847141 - DNA, 25 bp, Homo sapien
gacactcgggtcagcacagaatctg

SEQ ID NO: 3847142 - DNA, 25 bp, Homo sapien
gactatgagtacacagctttacgag

SEQ ID NO: 3847143 - DNA, 25 bp, Homo sapien
tcacctgacactctgactggctgga

SEQ ID NO: 3847144 - DNA, 25 bp, Homo sapien
gactctcatgagctggtgttcctgc

SEQ ID NO: 3847145 - DNA, 25 bp, Homo sapien
ggttgaagtcgcactgtttcttggc

SEQ ID NO: 3847146 - DNA, 25 bp, Homo sapien
ctctgactggctggataccacatgc

SEQ ID NO: 3847147 - DNA, 25 bp, Homo sapien
tattggatgaatagatacatctgaa

SEQ ID NO: 3847148 - DNA, 25 bp, Homo sapien
tatgaatgttcacacatactcacac

SEQ ID NO: 3847149 - DNA, 25 bp, Homo sapien
aatcttaactgtgactaattctgag

SEQ ID NO: 3847150 - DNA, 25 bp, Homo sapien
cacacacatgagattggaataagtt

SEQ ID NO: 3847151 - DNA, 25 bp, Homo sapien
ctggagcgcaatgatacgatctcga

SEQ ID NO: 3847152 - DNA, 25 bp, Homo sapien
gactcactgcaaattctgcgtccca

SEQ ID NO: 3847153 - DNA, 25 bp, Homo sapien
gagcgcaatgatacgatctcgactc

SEQ ID NO: 3847154 - DNA, 25 bp, Homo sapien
cgactcactgcaaattctgcgtccc

SEQ ID NO: 3847155 - DNA, 25 bp, Homo sapien
ggtcttcagaggaccacgctctctg

SEQ ID NO: 3847156 - DNA, 25 bp, Homo sapien
tttcagagagagcaatatctgggtc

SEQ ID NO: 3847157 - DNA, 25 bp, Homo sapien
gagagagcaatatctgggtcttcag

SEQ ID NO: 3847158 - DNA, 25 bp, Homo sapien
gctctctgggttcctaaatcaaatg

SEQ ID NO: 3847159 - DNA, 25 bp, Homo sapien
agacagtaagcaacagggaggaaaa

SEQ ID NO: 3847160 - DNA, 25 bp, Homo sapien
tgagaagacagtaagcaacagggag

SEQ ID NO: 3847161 - DNA, 25 bp, Homo sapien
ctgagaagacagtaagcaacaggga

SEQ ID NO: 3847162 - DNA, 25 bp, Homo sapien
gaagacagtaagcaacagggaggaa

SEQ ID NO: 3847163 - DNA, 25 bp, Homo sapien
ggtcggcagagcacgcaatgacaag

SEQ ID NO: 3847164 - DNA, 25 bp, Homo sapien
aaaacagtgcgctcaaatcgtctgc

SEQ ID NO: 3847165 - DNA, 25 bp, Homo sapien
agcttccacgtgtctcaggtcggca

SEQ ID NO: 3847166 - DNA, 25 bp, Homo sapien
ccggctcagagcacccaacttttaa

SEQ ID NO: 3847167 - DNA, 25 bp, Homo sapien
gtcttggcaaaagcctgagaagaga

SEQ ID NO: 3847168 - DNA, 25 bp, Homo sapien
ccgtcttggcaaaagcctgagaaga

SEQ ID NO: 3847169 - DNA, 25 bp, Homo sapien
cttggcaaaagcctgagaagagaga

SEQ ID NO: 3847170 - DNA, 25 bp, Homo sapien
cgtcttggcaaaagcctgagaagag

SEQ ID NO: 3847171 - DNA, 25 bp, Homo sapien
tgggtcgcaatacgctgtccaccag

SEQ ID NO: 3847172 - DNA, 25 bp, Homo sapien
tgaagatggacttgggcttcctgga

SEQ ID NO: 3847173 - DNA, 25 bp, Homo sapien
ggcggcgcgtgctcttctaccagag

SEQ ID NO: 3847174 - DNA, 25 bp, Homo sapien
tcgcctctacattctgctgctgcgg

SEQ ID NO: 3847175 - DNA, 25 bp, Homo sapien
ctgtcactagaacatgaaatgcatg

SEQ ID NO: 3847176 - DNA, 25 bp, Homo sapien
tgaaatgcatgagaagtggccgctt

SEQ ID NO: 3847177 - DNA, 25 bp, Homo sapien
gtcactagaacatgaaatgcatgag

SEQ ID NO: 3847178 - DNA, 25 bp, Homo sapien
tgtcactagaacatgaaatgcatga

SEQ ID NO: 3847179 - DNA, 25 bp, Homo sapien
tggaaagcaattcctagctgctcaa

SEQ ID NO: 3847180 - DNA, 25 bp, Homo sapien
ggaaagcaattcctagctgctcaag

SEQ ID NO: 3847181 - DNA, 25 bp, Homo sapien
cctggaaagcaattcctagctgctc

SEQ ID NO: 3847182 - DNA, 25 bp, Homo sapien
ctggaaagcaattcctagctgctca

SEQ ID NO: 3847183 - DNA, 25 bp, Homo sapien
actggagcaatcagtctggtcttca

SEQ ID NO: 3847184 - DNA, 25 bp, Homo sapien
gagcaatcagtctggtcttcatgta

SEQ ID NO: 3847185 - DNA, 25 bp, Homo sapien
caatcagtctggtcttcatgtagag

SEQ ID NO: 3847186 - DNA, 25 bp, Homo sapien
ctgagactggagcaatcagtctggt

SEQ ID NO: 3847187 - DNA, 25 bp, Homo sapien
ccagccaaggtcgcccatgtgccat

SEQ ID NO: 3847188 - DNA, 25 bp, Homo sapien
tcccagccaaggtcgcccatgtgcc

SEQ ID NO: 3847189 - DNA, 25 bp, Homo sapien
ttcccagccaaggtcgcccatgtgc

SEQ ID NO: 3847190 - DNA, 25 bp, Homo sapien
cccagccaaggtcgcccatgtgcca

SEQ ID NO: 3847191 - DNA, 25 bp, Homo sapien
tatgaagctggagctgattagttga

SEQ ID NO: 3847192 - DNA, 25 bp, Homo sapien
gctgattagttgatccaatattcat

SEQ ID NO: 3847193 - DNA, 25 bp, Homo sapien
aaagttggagaagattctgaagtat

SEQ ID NO: 3847194 - DNA, 25 bp, Homo sapien
ttctgaagtatgaagctggagctga

SEQ ID NO: 3847195 - DNA, 25 bp, Homo sapien
aatcggtgaagcctggattgtttct

SEQ ID NO: 3847196 - DNA, 25 bp, Homo sapien
tgtaagtcaagatcccaaggcctca

SEQ ID NO: 3847197 - DNA, 25 bp, Homo sapien
ttatctttgcacctgggctaagttg

SEQ ID NO: 3847198 - DNA, 25 bp, Homo sapien
ccacattaagcccaaaaagcaagaa

SEQ ID NO: 3847199 - DNA, 25 bp, Homo sapien
ctttaaccataggactaggtgactc

SEQ ID NO: 3847200 - DNA, 25 bp, Homo sapien
taatcaacagctttaaccataggac

SEQ ID NO: 3847201 - DNA, 25 bp, Homo sapien
actcattcgtcccatagtcacatct

SEQ ID NO: 3847202 - DNA, 25 bp, Homo sapien
gactaggtgactcattcgtcccata

SEQ ID NO: 3847203 - DNA, 25 bp, Homo sapien
ggtgctgctgaaggaattatcctga

SEQ ID NO: 3847204 - DNA, 25 bp, Homo sapien
gctgctgaaggaattatcctgaagg

SEQ ID NO: 3847205 - DNA, 25 bp, Homo sapien
gtggtgctgctgaaggaattatcct

SEQ ID NO: 3847206 - DNA, 25 bp, Homo sapien
tctgttacagtggtgctgctgaagg

SEQ ID NO: 3847207 - DNA, 25 bp, Homo sapien
tgattgctctccgggagtgagcaca

SEQ ID NO: 3847208 - DNA, 25 bp, Homo sapien
attgctctccgggagtgagcacata

SEQ ID NO: 3847209 - DNA, 25 bp, Homo sapien
cggggagccgtctccctgattgctc

SEQ ID NO: 3847210 - DNA, 25 bp, Homo sapien
tgctctccgggagtgagcacataca

SEQ ID NO: 3847211 - DNA, 25 bp, Homo sapien
cgggctcgcccggcacgctcgctct

SEQ ID NO: 3847212 - DNA, 25 bp, Homo sapien
tccgggctcgcccggcacgctcgct

SEQ ID NO: 3847213 - DNA, 25 bp, Homo sapien
gggctcgcccggcacgctcgctcta

SEQ ID NO: 3847214 - DNA, 25 bp, Homo sapien
ggctcgcccggcacgctcgctctac

SEQ ID NO: 3847215 - DNA, 25 bp, Homo sapien
agcggcacgggcgaaccacaaagcc

SEQ ID NO: 3847216 - DNA, 25 bp, Homo sapien
acgggcgaaccacaaagcccggcag

SEQ ID NO: 3847217 - DNA, 25 bp, Homo sapien
atgctcgtaacgacacccccagcag

SEQ ID NO: 3847218 - DNA, 25 bp, Homo sapien
tgcacatgctcgtaacgacaccccc

SEQ ID NO: 3847219 - DNA, 25 bp, Homo sapien
aggcgccgcgtttaatcttgggctc

SEQ ID NO: 3847220 - DNA, 25 bp, Homo sapien
ctggagagttaccacacgaccccga

SEQ ID NO: 3847221 - DNA, 25 bp, Homo sapien
cagcccaggcgccgcgtttaatctt

SEQ ID NO: 3847222 - DNA, 25 bp, Homo sapien
tggagagttaccacacgaccccgac

SEQ ID NO: 3847223 - DNA, 25 bp, Homo sapien
gggatggaggctcgcagagattcat

SEQ ID NO: 3847224 - DNA, 25 bp, Homo sapien
tggaggctcgcagagattcatccat

SEQ ID NO: 3847225 - DNA, 25 bp, Homo sapien
cagggatggaggctcgcagagattc

SEQ ID NO: 3847226 - DNA, 25 bp, Homo sapien
gatggaggctcgcagagattcatcc

SEQ ID NO: 3847227 - DNA, 25 bp, Homo sapien
cagcatgtgctcgtaagaatggtgg

SEQ ID NO: 3847228 - DNA, 25 bp, Homo sapien
ggagactttgttgtgctgtattttg

SEQ ID NO: 3847229 - DNA, 25 bp, Homo sapien
ggggtctgccttgcaccattcatga

SEQ ID NO: 3847230 - DNA, 25 bp, Homo sapien
actgacagcatgtgctcgtaagaat

SEQ ID NO: 3847231 - DNA, 25 bp, Homo sapien
ctgcacaaaggagtcagagcccaga

SEQ ID NO: 3847232 - DNA, 25 bp, Homo sapien
aaaggagtcagagcccagagcttgg

SEQ ID NO: 3847233 - DNA, 25 bp, Homo sapien
gcacaaaggagtcagagcccagagc

SEQ ID NO: 3847234 - DNA, 25 bp, Homo sapien
aggagtcagagcccagagcttgggg

SEQ ID NO: 3847235 - DNA, 25 bp, Homo sapien
tattaaggtgcagatttctccaaac

SEQ ID NO: 3847236 - DNA, 25 bp, Homo sapien
tcacaaataactgctcttattaagg

SEQ ID NO: 3847237 - DNA, 25 bp, Homo sapien
aataactgctcttattaaggtgcag

SEQ ID NO: 3847238 - DNA, 25 bp, Homo sapien
gctcttattaaggtgcagatttctc

SEQ ID NO: 3847239 - DNA, 25 bp, Homo sapien
aatgtctctgagtcttgagttacat

SEQ ID NO: 3847240 - DNA, 25 bp, Homo sapien
tctgagtcttgagttacattaagct

SEQ ID NO: 3847241 - DNA, 25 bp, Homo sapien
gagttacattaagctcaggagtcat

SEQ ID NO: 3847242 - DNA, 25 bp, Homo sapien
tcttgagttacattaagctcaggag

SEQ ID NO: 3847243 - DNA, 25 bp, Homo sapien
tgaatttcctcctgtagctcagagt

SEQ ID NO: 3847244 - DNA, 25 bp, Homo sapien
tagttatacattcgtcaaaatcatt

SEQ ID NO: 3847245 - DNA, 25 bp, Homo sapien
atcattttcaaagttttcaacttct

SEQ ID NO: 3847246 - DNA, 25 bp, Homo sapien
caacttctttgcctttggtttgaat

SEQ ID NO: 3847247 - DNA, 25 bp, Homo sapien
taaggagctcacctctatgaaagga

SEQ ID NO: 3847248 - DNA, 25 bp, Homo sapien
cacagaaggtcttttagagatgtat

SEQ ID NO: 3847249 - DNA, 25 bp, Homo sapien
cagcagggtatttggtcattcagga

SEQ ID NO: 3847250 - DNA, 25 bp, Homo sapien
gagatgtatttcagctaaggagctc

SEQ ID NO: 3847251 - DNA, 25 bp, Homo sapien
ctttccttcaccttgtgtgatcaaa

SEQ ID NO: 3847252 - DNA, 25 bp, Homo sapien
caaagtctgtgcagatacacaaaga

SEQ ID NO: 3847253 - DNA, 25 bp, Homo sapien
cagaactttgtcaggaacacgggac

SEQ ID NO: 3847254 - DNA, 25 bp, Homo sapien
caatgattagttttatcacaggcag

SEQ ID NO: 3847255 - DNA, 25 bp, Homo sapien
agtgtccaggttgtaggtgagccta

SEQ ID NO: 3847256 - DNA, 25 bp, Homo sapien
tcttctactgactcctgagtctcaa

SEQ ID NO: 3847257 - DNA, 25 bp, Homo sapien
tcaatcctgaattctctcagacaca

SEQ ID NO: 3847258 - DNA, 25 bp, Homo sapien
ccttggcgtaagcatctgatgacat

SEQ ID NO: 3847259 - DNA, 25 bp, Homo sapien
gagcagaaacacaattggagcaaag

SEQ ID NO: 3847260 - DNA, 25 bp, Homo sapien
gctcatttccacctttgtacatttc

SEQ ID NO: 3847261 - DNA, 25 bp, Homo sapien
ttcctcatactctctcaccaattta

SEQ ID NO: 3847262 - DNA, 25 bp, Homo sapien
gggtttccaggacacatattgctca

SEQ ID NO: 3847263 - DNA, 25 bp, Homo sapien
tttagaagacatgaattgaccaggg

SEQ ID NO: 3847264 - DNA, 25 bp, Homo sapien
tttgcacatgtgttatgcagaaatg

SEQ ID NO: 3847265 - DNA, 25 bp, Homo sapien
ctagttaggaagtgctttgcacatg

SEQ ID NO: 3847266 - DNA, 25 bp, Homo sapien
aatgaagcaactccaaccagatgac

SEQ ID NO: 3847267 - DNA, 25 bp, Homo sapien
tctagttaggaagtgctttgcacat

SEQ ID NO: 3847268 - DNA, 25 bp, Homo sapien
cttttccaagccaatggaagagtaa

SEQ ID NO: 3847269 - DNA, 25 bp, Homo sapien
ggccgtctcttagtgaggtctccaa

SEQ ID NO: 3847270 - DNA, 25 bp, Homo sapien
taatggtggatacagtgaatataca

SEQ ID NO: 3847271 - DNA, 25 bp, Homo sapien
ctgaaccttaaatgcgtgaatgaat

SEQ ID NO: 3847272 - DNA, 25 bp, Homo sapien
tgagtgtatctcctgacagttcaaa

SEQ ID NO: 3847273 - DNA, 25 bp, Homo sapien
ccattttcacatccctttgtttgat

SEQ ID NO: 3847274 - DNA, 25 bp, Homo sapien
gctgctatttcccattttcacatcc

SEQ ID NO: 3847275 - DNA, 25 bp, Homo sapien
ctgcatgtgcacacttgtggtaatt

SEQ ID NO: 3847276 - DNA, 25 bp, Homo sapien
cggaaatcctattcgactatcagga

SEQ ID NO: 3847277 - DNA, 25 bp, Homo sapien
gatggcactgcttgaccacacttct

SEQ ID NO: 3847278 - DNA, 25 bp, Homo sapien
ttcttcccacacatctacacggaaa

SEQ ID NO: 3847279 - DNA, 25 bp, Homo sapien
tgcaagtccagagagttgatggcac

SEQ ID NO: 3847280 - DNA, 25 bp, Homo sapien
tttctttgtcaatggctttagaggg

SEQ ID NO: 3847281 - DNA, 25 bp, Homo sapien
cagctcttcaacattaacttattat

SEQ ID NO: 3847282 - DNA, 25 bp, Homo sapien
ttgcccttgctgattctttcctcca

SEQ ID NO: 3847283 - DNA, 25 bp, Homo sapien
ctgaaggtatcatatcattgccctt

SEQ ID NO: 3847284 - DNA, 25 bp, Homo sapien
gaagaagtcgcaggaattttagcat

SEQ ID NO: 3847285 - DNA, 25 bp, Homo sapien
ggagttatgaaaaggccatatttgt

SEQ ID NO: 3847286 - DNA, 25 bp, Homo sapien
catcgtgaatgctctgcttgacccc

SEQ ID NO: 3847287 - DNA, 25 bp, Homo sapien
cctgttcaatcctttaggagttatg

SEQ ID NO: 3847288 - DNA, 25 bp, Homo sapien
caagtcataagctaaatgtgccaaa

SEQ ID NO: 3847289 - DNA, 25 bp, Homo sapien
caaaagattgaactgtagacaacca

SEQ ID NO: 3847290 - DNA, 25 bp, Homo sapien
tctaatcctgcacaactggtggagt

SEQ ID NO: 3847291 - DNA, 25 bp, Homo sapien
tagacaaccatcttccagggaaatg

SEQ ID NO: 3847292 - DNA, 25 bp, Homo sapien
aacatgcacctgtacgtgccccatg

SEQ ID NO: 3847293 - DNA, 25 bp, Homo sapien
ctgtacgtgccccatgcagtcttta

SEQ ID NO: 3847294 - DNA, 25 bp, Homo sapien
cccatgcagtctttataaggacaga

SEQ ID NO: 3847295 - DNA, 25 bp, Homo sapien
cgtgccccatgcagtctttataagg

SEQ ID NO: 3847296 - DNA, 25 bp, Homo sapien
agcaaagcgcagaactggagaccca

SEQ ID NO: 3847297 - DNA, 25 bp, Homo sapien
tgccaccagggttccgagaggcctc

SEQ ID NO: 3847298 - DNA, 25 bp, Homo sapien
gccaccagggttccgagaggcctcc

SEQ ID NO: 3847299 - DNA, 25 bp, Homo sapien
aaagcgcagaactggagacccagaa

SEQ ID NO: 3847300 - DNA, 25 bp, Homo sapien
ccacattggatgttatttagcagac

SEQ ID NO: 3847301 - DNA, 25 bp, Homo sapien
caggttattgggtttcctgaacata

SEQ ID NO: 3847302 - DNA, 25 bp, Homo sapien
gacaacagataacgcccacattgga

SEQ ID NO: 3847303 - DNA, 25 bp, Homo sapien
gcctttggacaattatcagcattga

SEQ ID NO: 3847304 - DNA, 25 bp, Homo sapien
tcactgggaggatatgcaagaactt

SEQ ID NO: 3847305 - DNA, 25 bp, Homo sapien
tataaagtgcttcaggcgccttcga

SEQ ID NO: 3847306 - DNA, 25 bp, Homo sapien
cagtgggtaccaaacaacatgcgag

SEQ ID NO: 3847307 - DNA, 25 bp, Homo sapien
tagatgtttgggcaacagcctacac

SEQ ID NO: 3847308 - DNA, 25 bp, Homo sapien
cattagaggcaactttgtacaagaa

SEQ ID NO: 3847309 - DNA, 25 bp, Homo sapien
gacgcagaagccactaaaataaaat

SEQ ID NO: 3847310 - DNA, 25 bp, Homo sapien
ttgcatgtatcccaagagggcaagg

SEQ ID NO: 3847311 - DNA, 25 bp, Homo sapien
tgcaatatcataggtctgggtccag

SEQ ID NO: 3847312 - DNA, 25 bp, Homo sapien
tatattactccactacttccagcgt

SEQ ID NO: 3847313 - DNA, 25 bp, Homo sapien
ttcatggaaatagtatgaacatcca

SEQ ID NO: 3847314 - DNA, 25 bp, Homo sapien
ccagcgtggtttactgggagttaga

SEQ ID NO: 3847315 - DNA, 25 bp, Homo sapien
ccataccctaattatatcagtttta

SEQ ID NO: 3847316 - DNA, 25 bp, Homo sapien
tgaagtcagccagtatccctaaaag

SEQ ID NO: 3847317 - DNA, 25 bp, Homo sapien
caccattggctaacgtgatcctgca

SEQ ID NO: 3847318 - DNA, 25 bp, Homo sapien
ggtggaaaccctccgatgtcaaaga

SEQ ID NO: 3847319 - DNA, 25 bp, Homo sapien
tggaattgcacacaaggctaggccc

SEQ ID NO: 3847320 - DNA, 25 bp, Homo sapien
cctctgcagagcagcatatatgaaa

SEQ ID NO: 3847321 - DNA, 25 bp, Homo sapien
ctctgcagagcagcatatatgaaaa

SEQ ID NO: 3847322 - DNA, 25 bp, Homo sapien
tgtggaagatcctcacaggttctgc

SEQ ID NO: 3847323 - DNA, 25 bp, Homo sapien
tggaagatcctcacaggttctgcaa

SEQ ID NO: 3847324 - DNA, 25 bp, Homo sapien
ttcccacacttgtggaagatcctca

SEQ ID NO: 3847325 - DNA, 25 bp, Homo sapien
agtccttcccacacttgtggaagat

SEQ ID NO: 3847326 - DNA, 25 bp, Homo sapien
ctgttgaaatcaggccaagcgctag

SEQ ID NO: 3847327 - DNA, 25 bp, Homo sapien
cacgtaatggtcactgttgcagtgt

SEQ ID NO: 3847328 - DNA, 25 bp, Homo sapien
aaatcaggccaagcgctaggcctcg

SEQ ID NO: 3847329 - DNA, 25 bp, Homo sapien
cctcggcgatcgtcaaaatactggc

SEQ ID NO: 3847330 - DNA, 25 bp, Homo sapien
cctcacctcctctcatcaaaccaga

SEQ ID NO: 3847331 - DNA, 25 bp, Homo sapien
actggagacacaacttcagaggcct

SEQ ID NO: 3847332 - DNA, 25 bp, Homo sapien
ggagacacaacttcagaggcctctt

SEQ ID NO: 3847333 - DNA, 25 bp, Homo sapien
ttcacacactggagacacaacttca

SEQ ID NO: 3847334 - DNA, 25 bp, Homo sapien
aactgctcaacatcaggcctccagc

SEQ ID NO: 3847335 - DNA, 25 bp, Homo sapien
tccagccaccatgaagccactgaag

SEQ ID NO: 3847336 - DNA, 25 bp, Homo sapien
ttgctccaaaagatgagacacagag

SEQ ID NO: 3847337 - DNA, 25 bp, Homo sapien
aacagaaagtagatattgggagcaa

SEQ ID NO: 3847338 - DNA, 25 bp, Homo sapien
ttatcatatgatccatccatcataa

SEQ ID NO: 3847339 - DNA, 25 bp, Homo sapien
tgactcgtattatgagtttgaacac

SEQ ID NO: 3847340 - DNA, 25 bp, Homo sapien
tactgactcgtattatgagtttgaa

SEQ ID NO: 3847341 - DNA, 25 bp, Homo sapien
ttactgactcgtattatgagtttga

SEQ ID NO: 3847342 - DNA, 25 bp, Homo sapien
actgactcgtattatgagtttgaac

SEQ ID NO: 3847343 - DNA, 25 bp, Homo sapien
gacatgtgatttgaccacagtgtat

SEQ ID NO: 3847344 - DNA, 25 bp, Homo sapien
cacaggacatgtgatttgaccacag

SEQ ID NO: 3847345 - DNA, 25 bp, Homo sapien
gaccacaggacatgtgatttgacca

SEQ ID NO: 3847346 - DNA, 25 bp, Homo sapien
atgaccacaggacatgtgatttgac

SEQ ID NO: 3847347 - DNA, 25 bp, Homo sapien
ttgcaagcaagccaactccacttgc

SEQ ID NO: 3847348 - DNA, 25 bp, Homo sapien
ccaaaggcatccagccattctatgt

SEQ ID NO: 3847349 - DNA, 25 bp, Homo sapien
cattctatgtacaggactccaacag

SEQ ID NO: 3847350 - DNA, 25 bp, Homo sapien
gccattctatgtacaggactccaac

SEQ ID NO: 3847351 - DNA, 25 bp, Homo sapien
cagccccatccaccgtcaggcgact

SEQ ID NO: 3847352 - DNA, 25 bp, Homo sapien
cccatccaccgtcaggcgacttttt

SEQ ID NO: 3847353 - DNA, 25 bp, Homo sapien
catccaccgtcaggcgactttttaa

SEQ ID NO: 3847354 - DNA, 25 bp, Homo sapien
gccccatccaccgtcaggcgacttt

SEQ ID NO: 3847355 - DNA, 25 bp, Homo sapien
acaaaatcaggaggcgtttctctgc

SEQ ID NO: 3847356 - DNA, 25 bp, Homo sapien
aaatcaggaggcgtttctctgcagg

SEQ ID NO: 3847357 - DNA, 25 bp, Homo sapien
gacaaaatcaggaggcgtttctctg

SEQ ID NO: 3847358 - DNA, 25 bp, Homo sapien
aagacaaaatcaggaggcgtttctc

SEQ ID NO: 3847359 - DNA, 25 bp, Homo sapien
tcagagagtcatagctacacccatc

SEQ ID NO: 3847360 - DNA, 25 bp, Homo sapien
tgcccacggattctgccaaaccatg

SEQ ID NO: 3847361 - DNA, 25 bp, Homo sapien
ttccatgtctcttcactatgccagg

SEQ ID NO: 3847362 - DNA, 25 bp, Homo sapien
tatgccaggtttactgtcaggtgca

SEQ ID NO: 3847363 - DNA, 25 bp, Homo sapien
gatattctgtactgcgtaaggtgat

SEQ ID NO: 3847364 - DNA, 25 bp, Homo sapien
gattttatgaataggctagccttca

SEQ ID NO: 3847365 - DNA, 25 bp, Homo sapien
cctttttgaggatgtagatcagtcc

SEQ ID NO: 3847366 - DNA, 25 bp, Homo sapien
taattaagtttccttgaccttgagc

SEQ ID NO: 3847367 - DNA, 25 bp, Homo sapien
gtgagtatgcagtaatttcaagttg

SEQ ID NO: 3847368 - DNA, 25 bp, Homo sapien
gtatgcagtaatttcaagttgatta

SEQ ID NO: 3847369 - DNA, 25 bp, Homo sapien
gagtatgcagtaatttcaagttgat

SEQ ID NO: 3847370 - DNA, 25 bp, Homo sapien
tgagtatgcagtaatttcaagttga

SEQ ID NO: 3847371 - DNA, 25 bp, Homo sapien
tctgccccgccagccgccctgtccg

SEQ ID NO: 3847372 - DNA, 25 bp, Homo sapien
gttcagccccccgcccagccagcca

SEQ ID NO: 3847373 - DNA, 25 bp, Homo sapien
gatggctgccgtgtctgtgtagaaa

SEQ ID NO: 3847374 - DNA, 25 bp, Homo sapien
cagccagccaccccgtccgggaggt

SEQ ID NO: 3847375 - DNA, 25 bp, Homo sapien
tcagtgaggaaagaccagaatgaca

SEQ ID NO: 3847376 - DNA, 25 bp, Homo sapien
gataacccgagtgtacatcgcagct

SEQ ID NO: 3847377 - DNA, 25 bp, Homo sapien
tactttccctataaagacctctggc

SEQ ID NO: 3847378 - DNA, 25 bp, Homo sapien
taaggaataagcacactggctggtg

SEQ ID NO: 3847379 - DNA, 25 bp, Homo sapien
taggatgtccaacaaatctgtgccc

SEQ ID NO: 3847380 - DNA, 25 bp, Homo sapien
tgttatttgttaagggactagccca

SEQ ID NO: 3847381 - DNA, 25 bp, Homo sapien
gtttacccattagcagagcacaagg

SEQ ID NO: 3847382 - DNA, 25 bp, Homo sapien
gattggcacatagggaaagctcaac

SEQ ID NO: 3847383 - DNA, 25 bp, Homo sapien
ctaggacaagggcaaatcgtggctc

SEQ ID NO: 3847384 - DNA, 25 bp, Homo sapien
catactcgctgatgtgaaagggtgg

SEQ ID NO: 3847385 - DNA, 25 bp, Homo sapien
gctcagtcacagtaaggtatgtggt

SEQ ID NO: 3847386 - DNA, 25 bp, Homo sapien
caaaactgtcattcagagcctcttg

SEQ ID NO: 3847387 - DNA, 25 bp, Homo sapien
tccctgacgcaggactaacgttgcc

SEQ ID NO: 3847388 - DNA, 25 bp, Homo sapien
tacactgcatattgccccaggaaag

SEQ ID NO: 3847389 - DNA, 25 bp, Homo sapien
aatagttcaaagcacagactctggg

SEQ ID NO: 3847390 - DNA, 25 bp, Homo sapien
tagcttgagttgcatggccagatcc

SEQ ID NO: 3847391 - DNA, 25 bp, Homo sapien
tttgtgttggatagactaggcaccc

SEQ ID NO: 3847392 - DNA, 25 bp, Homo sapien
tggaaagcctctgggcgctgctgaa

SEQ ID NO: 3847393 - DNA, 25 bp, Homo sapien
agcgtaaatcctgactaaacttcgg

SEQ ID NO: 3847394 - DNA, 25 bp, Homo sapien
tgttcgtggttatcagctctctgga

SEQ ID NO: 3847395 - DNA, 25 bp, Homo sapien
gcgcgctgcgctccacgtaggtcag

SEQ ID NO: 3847396 - DNA, 25 bp, Homo sapien
gggcattaagcaccaagtcctccca

SEQ ID NO: 3847397 - DNA, 25 bp, Homo sapien
tggcgccaacgtgcagaatccgccg

SEQ ID NO: 3847398 - DNA, 25 bp, Homo sapien
gtggtgctgaacctggcgccaacgt

SEQ ID NO: 3847399 - DNA, 25 bp, Homo sapien
caaggcagttggaggcctttcggtc

SEQ ID NO: 3847400 - DNA, 25 bp, Homo sapien
gaccaaggcagttggaggcctttcg

SEQ ID NO: 3847401 - DNA, 25 bp, Homo sapien
tggttgctcgcgctccggaccaagg

SEQ ID NO: 3847402 - DNA, 25 bp, Homo sapien
cgcgctccggaccaaggcagttgga

SEQ ID NO: 3847403 - DNA, 25 bp, Homo sapien
ttcaactccgtacaaaatgccgcct

SEQ ID NO: 3847404 - DNA, 25 bp, Homo sapien
tccgtacaaaatgccgccttcggat

SEQ ID NO: 3847405 - DNA, 25 bp, Homo sapien
ctctctttcaactccgtacaaaatg

SEQ ID NO: 3847406 - DNA, 25 bp, Homo sapien
caaaatgccgccttcggattcccgg

SEQ ID NO: 3847407 - DNA, 25 bp, Homo sapien
tactgctccgagtcggagttacttc

SEQ ID NO: 3847408 - DNA, 25 bp, Homo sapien
tacttcttgcctctaggacgctggg

SEQ ID NO: 3847409 - DNA, 25 bp, Homo sapien
aaaagcccggttccatgctgctcca

SEQ ID NO: 3847410 - DNA, 25 bp, Homo sapien
gggcgcaccgtggacactcgaagcc

SEQ ID NO: 3847411 - DNA, 25 bp, Homo sapien
tccggtgctcagcacccggctcagt

SEQ ID NO: 3847412 - DNA, 25 bp, Homo sapien
attaggcaatcggtcccgctacgcg

SEQ ID NO: 3847413 - DNA, 25 bp, Homo sapien
cggcccctgccggagtattaggcaa

SEQ ID NO: 3847414 - DNA, 25 bp, Homo sapien
ccagccgggcggctatttatccgag

SEQ ID NO: 3847415 - DNA, 25 bp, Homo sapien
tgcccccacagacccgcagcggcgg

SEQ ID NO: 3847416 - DNA, 25 bp, Homo sapien
tccaccttctctttcgccttctcct

SEQ ID NO: 3847417 - DNA, 25 bp, Homo sapien
agcggcggcggccacatggagctgg

SEQ ID NO: 3847418 - DNA, 25 bp, Homo sapien
tggggagccggcccccttctctgag

SEQ ID NO: 3847419 - DNA, 25 bp, Homo sapien
cagtctgaaccggttgtgactgcgc

SEQ ID NO: 3847420 - DNA, 25 bp, Homo sapien
ctgaaccggttgtgactgcgcgggt

SEQ ID NO: 3847421 - DNA, 25 bp, Homo sapien
tttgcggggcaccccggccagtctg

SEQ ID NO: 3847422 - DNA, 25 bp, Homo sapien
gaaccggttgtgactgcgcgggtgg

SEQ ID NO: 3847423 - DNA, 25 bp, Homo sapien
gaatgcgagtgttccttggtctccc

SEQ ID NO: 3847424 - DNA, 25 bp, Homo sapien
tcctggccggagctgtatgctcagc

SEQ ID NO: 3847425 - DNA, 25 bp, Homo sapien
ccgccaagggccgtgcgcgtttggg

SEQ ID NO: 3847426 - DNA, 25 bp, Homo sapien
gaaacgggcaccagaactttgtgga

SEQ ID NO: 3847427 - DNA, 25 bp, Homo sapien
cccatccacataccgctcacagtct

SEQ ID NO: 3847428 - DNA, 25 bp, Homo sapien
catccacataccgctcacagtctac

SEQ ID NO: 3847429 - DNA, 25 bp, Homo sapien
tgctcccatccacataccgctcaca

SEQ ID NO: 3847430 - DNA, 25 bp, Homo sapien
tcccatccacataccgctcacagtc

SEQ ID NO: 3847431 - DNA, 25 bp, Homo sapien
tgaagcctccggatccggttccaga

SEQ ID NO: 3847432 - DNA, 25 bp, Homo sapien
atatagattgtgaagcctccggatc

SEQ ID NO: 3847433 - DNA, 25 bp, Homo sapien
gattgtgaagcctccggatccggtt

SEQ ID NO: 3847434 - DNA, 25 bp, Homo sapien
ttccagacacttcctagtgttggcc

SEQ ID NO: 3847435 - DNA, 25 bp, Homo sapien
ctgtaattcagtttgaaatgtacat

SEQ ID NO: 3847436 - DNA, 25 bp, Homo sapien
actgtaattcagtttgaaatgtaca

SEQ ID NO: 3847437 - DNA, 25 bp, Homo sapien
ggagtagtagtagaaattaatatcc

SEQ ID NO: 3847438 - DNA, 25 bp, Homo sapien
tagaaattaagtcaacaaagataac

SEQ ID NO: 3847439 - DNA, 25 bp, Homo sapien
tgggagtagtagtagaaattaatat

SEQ ID NO: 3847440 - DNA, 25 bp, Homo sapien
cttctagacttttgggagtagtagt

SEQ ID NO: 3847441 - DNA, 25 bp, Homo sapien
agtggtaggtaacacggcttctcag

SEQ ID NO: 3847442 - DNA, 25 bp, Homo sapien
tagtggtaggtaacacggcttctca

SEQ ID NO: 3847443 - DNA, 25 bp, Homo sapien
gtagtggtaggtaacacggcttctc

SEQ ID NO: 3847444 - DNA, 25 bp, Homo sapien
ctgaattaatcccaggtagtggtag

SEQ ID NO: 3847445 - DNA, 25 bp, Homo sapien
gccaaggtaggagtattgtttgaac

SEQ ID NO: 3847446 - DNA, 25 bp, Homo sapien
aggttgcggtaagccgagatggtgc

SEQ ID NO: 3847447 - DNA, 25 bp, Homo sapien
ccaggaggcggaggttgcggtaagc

SEQ ID NO: 3847448 - DNA, 25 bp, Homo sapien
cctgggcgacagagggagattccgt

SEQ ID NO: 3847449 - DNA, 25 bp, Homo sapien
caaagtcaagggaatgatctctctc

SEQ ID NO: 3847450 - DNA, 25 bp, Homo sapien
tccaggggttcaataagcgaagtcc

SEQ ID NO: 3847451 - DNA, 25 bp, Homo sapien
ttcaataagcgaagtccaaagtcaa

SEQ ID NO: 3847452 - DNA, 25 bp, Homo sapien
tgaaaaacaccatatggtcttggtg

SEQ ID NO: 3847453 - DNA, 25 bp, Homo sapien
ctttgctaccacctctcaacagatg

SEQ ID NO: 3847454 - DNA, 25 bp, Homo sapien
cacctctcaacagatgcttcagctg

SEQ ID NO: 3847455 - DNA, 25 bp, Homo sapien
taccacctctcaacagatgcttcag

SEQ ID NO: 3847456 - DNA, 25 bp, Homo sapien
tttgctaccacctctcaacagatgc

SEQ ID NO: 3847457 - DNA, 25 bp, Homo sapien
gatagagtataaggcacaagtggcc

SEQ ID NO: 3847458 - DNA, 25 bp, Homo sapien
tccaatagttggaggtgcacccaga

SEQ ID NO: 3847459 - DNA, 25 bp, Homo sapien
cagcaggagcaaaactatggcaagg

SEQ ID NO: 3847460 - DNA, 25 bp, Homo sapien
caagtggccagagacaagactgtca

SEQ ID NO: 3847461 - DNA, 25 bp, Homo sapien
tgagtccaatacctctacgaagtta

SEQ ID NO: 3847462 - DNA, 25 bp, Homo sapien
caatacctctacgaagttatgttca

SEQ ID NO: 3847463 - DNA, 25 bp, Homo sapien
actgagtccaatacctctacgaagt

SEQ ID NO: 3847464 - DNA, 25 bp, Homo sapien
gtccaatacctctacgaagttatgt

SEQ ID NO: 3847465 - DNA, 25 bp, Homo sapien
ggcttcatgcccaacactaatgtga

SEQ ID NO: 3847466 - DNA, 25 bp, Homo sapien
tgatgaatttgggtagtaagtcccc

SEQ ID NO: 3847467 - DNA, 25 bp, Homo sapien
tagtggtctaccagaacacaggcaa

SEQ ID NO: 3847468 - DNA, 25 bp, Homo sapien
gattaataatttcccaatagtggtc

SEQ ID NO: 3847469 - DNA, 25 bp, Homo sapien
gcacccatgctatcaagacacagga

SEQ ID NO: 3847470 - DNA, 25 bp, Homo sapien
gactttatgctaacagctgtgtgta

SEQ ID NO: 3847471 - DNA, 25 bp, Homo sapien
tcttacaatggctcttgagcatgga

SEQ ID NO: 3847472 - DNA, 25 bp, Homo sapien
gcaacctgggcttggcagttaatca

SEQ ID NO: 3847473 - DNA, 25 bp, Homo sapien
agcatcaatggctggctctttaaca

SEQ ID NO: 3847474 - DNA, 25 bp, Homo sapien
tggctggctctttaacaatttggaa

SEQ ID NO: 3847475 - DNA, 25 bp, Homo sapien
atttctttggtagtcatcactacaa

SEQ ID NO: 3847476 - DNA, 25 bp, Homo sapien
tagtcatcactacaaagttttcagt

SEQ ID NO: 3847477 - DNA, 25 bp, Homo sapien
ggaaatgttcgctcactccaagtgc

SEQ ID NO: 3847478 - DNA, 25 bp, Homo sapien
ttcagagcccaaagaggtgtcaggt

SEQ ID NO: 3847479 - DNA, 25 bp, Homo sapien
tgaaaattccgggtttgacatggcc

SEQ ID NO: 3847480 - DNA, 25 bp, Homo sapien
gaaaatgaagctactgaagcccctg

SEQ ID NO: 3847481 - DNA, 25 bp, Homo sapien
catcccatttatgtggagaaggtac

SEQ ID NO: 3847482 - DNA, 25 bp, Homo sapien
gaaaccaccggtgagtaggacaaca

SEQ ID NO: 3847483 - DNA, 25 bp, Homo sapien
tactttgggccatctgttttacgag

SEQ ID NO: 3847484 - DNA, 25 bp, Homo sapien
ggtgaaatgaacagccatcaatgct

SEQ ID NO: 3847485 - DNA, 25 bp, Homo sapien
tagtgaagcctagataacctcagtg

SEQ ID NO: 3847486 - DNA, 25 bp, Homo sapien
cctttggcgttgagtagacggctcc

SEQ ID NO: 3847487 - DNA, 25 bp, Homo sapien
tccagccagggaatggacgtacatg

SEQ ID NO: 3847488 - DNA, 25 bp, Homo sapien
taccaaacagcgaaggttccagcca

SEQ ID NO: 3847489 - DNA, 25 bp, Homo sapien
gaccgtgggctgcatgggtggcgga

SEQ ID NO: 3847490 - DNA, 25 bp, Homo sapien
aggactgttgcttctccgtggtgaa

SEQ ID NO: 3847491 - DNA, 25 bp, Homo sapien
cggcgtgggccgtttgaatttgtca

SEQ ID NO: 3847492 - DNA, 25 bp, Homo sapien
cgaaggagtaggctgcgaggtggct

SEQ ID NO: 3847493 - DNA, 25 bp, Homo sapien
tgttgaacaaactgctggacttggg

SEQ ID NO: 3847494 - DNA, 25 bp, Homo sapien
gtttctatgtttgaggccgggtgca

SEQ ID NO: 3847495 - DNA, 25 bp, Homo sapien
tgaaagatacagctcaacagaaatg

SEQ ID NO: 3847496 - DNA, 25 bp, Homo sapien
tggacttgggtccttcaacgagagc

SEQ ID NO: 3847497 - DNA, 25 bp, Homo sapien
actttcaggagtaaagtgctgcttc

SEQ ID NO: 3847498 - DNA, 25 bp, Homo sapien
taagggcaccgatcctgttctccag

SEQ ID NO: 3847499 - DNA, 25 bp, Homo sapien
acagtttcaaggtgaacggatggag

SEQ ID NO: 3847500 - DNA, 25 bp, Homo sapien
tccagaacaccagtcggtaccactt

SEQ ID NO: 3847501 - DNA, 25 bp, Homo sapien
tcagtgaagttggtggcgtgaaacc

SEQ ID NO: 3847502 - DNA, 25 bp, Homo sapien
aaccaaccgtgtgacttgcatatga

SEQ ID NO: 3847503 - DNA, 25 bp, Homo sapien
taagacattccagctctagtcagtg

SEQ ID NO: 3847504 - DNA, 25 bp, Homo sapien
ccatgtgctgcacgtgaagacccgg

SEQ ID NO: 3847505 - DNA, 25 bp, Homo sapien
tcatgactgagaaaacacactaagc

SEQ ID NO: 3847506 - DNA, 25 bp, Homo sapien
cagaacctaagttgaaattgccaaa

SEQ ID NO: 3847507 - DNA, 25 bp, Homo sapien
gattaattaaaagcgactcatgact

SEQ ID NO: 3847508 - DNA, 25 bp, Homo sapien
tctgacccaggaatacaataaagga

SEQ ID NO: 3847509 - DNA, 25 bp, Homo sapien
ttcaatgtgccaggaatcagtcact

SEQ ID NO: 3847510 - DNA, 25 bp, Homo sapien
cttgaactcggagaaggtgtgtaag

SEQ ID NO: 3847511 - DNA, 25 bp, Homo sapien
caggtgatataggcctgcttgaact

SEQ ID NO: 3847512 - DNA, 25 bp, Homo sapien
ggctggacacagtgcgaggtcttaa

SEQ ID NO: 3847513 - DNA, 25 bp, Homo sapien
cgaggtcttaatccttgtgcagaca

SEQ ID NO: 3847514 - DNA, 25 bp, Homo sapien
taataagccttgagtactgaacacc

SEQ ID NO: 3847515 - DNA, 25 bp, Homo sapien
ctgataaaccatcctgcacgagcga

SEQ ID NO: 3847516 - DNA, 25 bp, Homo sapien
tgcgctgacgaggagaaattgctgc

SEQ ID NO: 3847517 - DNA, 25 bp, Homo sapien
tcaccagttgggagacctaggatgt

SEQ ID NO: 3847518 - DNA, 25 bp, Homo sapien
catgagtaggcctggtttcagacac

SEQ ID NO: 3847519 - DNA, 25 bp, Homo sapien
ttttggacagcacgtattggcatca

SEQ ID NO: 3847520 - DNA, 25 bp, Homo sapien
gcagtactactcgtcacagccatga

SEQ ID NO: 3847521 - DNA, 25 bp, Homo sapien
agataccgcccatgtaacgccaggg

SEQ ID NO: 3847522 - DNA, 25 bp, Homo sapien
ttcgtcgtccatttctaagctggac

SEQ ID NO: 3847523 - DNA, 25 bp, Homo sapien
ctttcgtcgtccatttctaagctgg

SEQ ID NO: 3847524 - DNA, 25 bp, Homo sapien
tttcgtcgtccatttctaagctgga

SEQ ID NO: 3847525 - DNA, 25 bp, Homo sapien
cttctctcatgtgacgttcctcctc

SEQ ID NO: 3847526 - DNA, 25 bp, Homo sapien
cactctcggagagctgtcgacagag

SEQ ID NO: 3847527 - DNA, 25 bp, Homo sapien
tcactctcggagagctgtcgacaga

SEQ ID NO: 3847528 - DNA, 25 bp, Homo sapien
tcatgtgacgttcctcctccagata

SEQ ID NO: 3847529 - DNA, 25 bp, Homo sapien
atgtttcatgcaatcatatccaaat

SEQ ID NO: 3847530 - DNA, 25 bp, Homo sapien
ggagactaccatgaaatcctttgca

SEQ ID NO: 3847531 - DNA, 25 bp, Homo sapien
taagaatgtcccctgcagtgatcgg

SEQ ID NO: 3847532 - DNA, 25 bp, Homo sapien
gaattaacattagtgaggctccaag

SEQ ID NO: 3847533 - DNA, 25 bp, Homo sapien
tacaggaagggtgctggagactacc

SEQ ID NO: 3847534 - DNA, 25 bp, Homo sapien
ttgcacacagaactccctagtactt

SEQ ID NO: 3847535 - DNA, 25 bp, Homo sapien
cttatatttccccaggtctacagcc

SEQ ID NO: 3847536 - DNA, 25 bp, Homo sapien
acacagaactccctagtacttaggg

SEQ ID NO: 3847537 - DNA, 25 bp, Homo sapien
ccctagtacttaggggccacagctt

SEQ ID NO: 3847538 - DNA, 25 bp, Homo sapien
tcttcagccgttccacttcattctt

SEQ ID NO: 3847539 - DNA, 25 bp, Homo sapien
gcttcttcagccgttccacttcatt

SEQ ID NO: 3847540 - DNA, 25 bp, Homo sapien
gacgcatcatattttctggagaatc

SEQ ID NO: 3847541 - DNA, 25 bp, Homo sapien
ctttaaaaacctgatgtgacgcatc

SEQ ID NO: 3847542 - DNA, 25 bp, Homo sapien
tggtggagcagagacgggctggtct

SEQ ID NO: 3847543 - DNA, 25 bp, Homo sapien
ggagatatctctaggcgatggtgga

SEQ ID NO: 3847544 - DNA, 25 bp, Homo sapien
cagagacgggctggtctaatttttc

SEQ ID NO: 3847545 - DNA, 25 bp, Homo sapien
agatatctctaggcgatggtggagc

SEQ ID NO: 3847546 - DNA, 25 bp, Homo sapien
ttcagcttcaagcttatccatcctt

SEQ ID NO: 3847547 - DNA, 25 bp, Homo sapien
ttttccagaggcgattaactagtgc

SEQ ID NO: 3847548 - DNA, 25 bp, Homo sapien
tccagaggcgattaactagtgcttc

SEQ ID NO: 3847549 - DNA, 25 bp, Homo sapien
ggcgattaactagtgcttcttgttc

SEQ ID NO: 3847550 - DNA, 25 bp, Homo sapien
tgtttaaaagcatcataggaggtag

SEQ ID NO: 3847551 - DNA, 25 bp, Homo sapien
ggtagaggtagttgataagcaagaa

SEQ ID NO: 3847552 - DNA, 25 bp, Homo sapien
tgatgtctagtggagaaatgcatac

SEQ ID NO: 3847553 - DNA, 25 bp, Homo sapien
tatgaggcatttacctttaaggatc

SEQ ID NO: 3847554 - DNA, 25 bp, Homo sapien
ccatggcagccaaaattgctgggtc

SEQ ID NO: 3847555 - DNA, 25 bp, Homo sapien
tcaggcagtcatgccaccaagatag

SEQ ID NO: 3847556 - DNA, 25 bp, Homo sapien
tcatgccaccaagataggaacggat

SEQ ID NO: 3847557 - DNA, 25 bp, Homo sapien
aacggatatcggtcaccatggcagc

SEQ ID NO: 3847558 - DNA, 25 bp, Homo sapien
ctgtccaaccagcaagtacagagga

SEQ ID NO: 3847559 - DNA, 25 bp, Homo sapien
tgtccaaccagcaagtacagaggaa

SEQ ID NO: 3847560 - DNA, 25 bp, Homo sapien
tagctaagagcaatccacaatggtc

SEQ ID NO: 3847561 - DNA, 25 bp, Homo sapien
tactacaagagcagagacaatctca

SEQ ID NO: 3847562 - DNA, 25 bp, Homo sapien
tgtctaatgctatgtctaaaggcca

SEQ ID NO: 3847563 - DNA, 25 bp, Homo sapien
gaggcaagtcctaagaaaacacgag

SEQ ID NO: 3847564 - DNA, 25 bp, Homo sapien
aaatgacatctgtaactgttgcaaa

SEQ ID NO: 3847565 - DNA, 25 bp, Homo sapien
cagtggctaccatcagactattacc

SEQ ID NO: 3847566 - DNA, 25 bp, Homo sapien
tgcaaatatactatcagatcagtgg

SEQ ID NO: 3847567 - DNA, 25 bp, Homo sapien
gagttcagtggagaagtcctcagga

SEQ ID NO: 3847568 - DNA, 25 bp, Homo sapien
cagaaaggagccaactcagaaacca

SEQ ID NO: 3847569 - DNA, 25 bp, Homo sapien
catcgtgaccaactcaaatctctgg

SEQ ID NO: 3847570 - DNA, 25 bp, Homo sapien
gaaactcagcccagttaagttctgc

SEQ ID NO: 3847571 - DNA, 25 bp, Homo sapien
catgatctagctgtgaacattccct

SEQ ID NO: 3847572 - DNA, 25 bp, Homo sapien
gtaaaatattcaaacgagagcggtc

SEQ ID NO: 3847573 - DNA, 25 bp, Homo sapien
ggaatgagttaacatggagtaaggt

SEQ ID NO: 3847574 - DNA, 25 bp, Homo sapien
aacgagagcggtcctgagagtgact

SEQ ID NO: 3847575 - DNA, 25 bp, Homo sapien
tattcaaacgagagcggtcctgaga

SEQ ID NO: 3847576 - DNA, 25 bp, Homo sapien
tgttgacctgaaattcctgctcttg

SEQ ID NO: 3847577 - DNA, 25 bp, Homo sapien
tcaagatgctgttctagttcggctt

SEQ ID NO: 3847578 - DNA, 25 bp, Homo sapien
ttagaaatggtgtcattctccagtt

SEQ ID NO: 3847579 - DNA, 25 bp, Homo sapien
ctgttctaatgtaagttgcttagaa

SEQ ID NO: 3847580 - DNA, 25 bp, Homo sapien
tgaaaaacaccgagatgtggaaatc

SEQ ID NO: 3847581 - DNA, 25 bp, Homo sapien
gaaaaacaccgagatgtggaaatca

SEQ ID NO: 3847582 - DNA, 25 bp, Homo sapien
atgaaaaacaccgagatgtggaaat

SEQ ID NO: 3847583 - DNA, 25 bp, Homo sapien
aaatgaaaaacaccgagatgtggaa

SEQ ID NO: 3847584 - DNA, 25 bp, Homo sapien
ccgcccccggctaattgcttgtatt

SEQ ID NO: 3847585 - DNA, 25 bp, Homo sapien
accgcccccggctaattgcttgtat

SEQ ID NO: 3847586 - DNA, 25 bp, Homo sapien
tgtgaacctcttgctcctgaaaaga

SEQ ID NO: 3847587 - DNA, 25 bp, Homo sapien
gcaatggtgtcatagtcttggcgcc

SEQ ID NO: 3847588 - DNA, 25 bp, Homo sapien
tctctgatcagtattaagggccctg

SEQ ID NO: 3847589 - DNA, 25 bp, Homo sapien
caggagggccacagatctagtcatc

SEQ ID NO: 3847590 - DNA, 25 bp, Homo sapien
gctttggccctgcataaaagcaggt

SEQ ID NO: 3847591 - DNA, 25 bp, Homo sapien
tgagtgtgctcccaaagagcagaaa

SEQ ID NO: 3847592 - DNA, 25 bp, Homo sapien
gctactagcatagcaggactctgag

SEQ ID NO: 3847593 - DNA, 25 bp, Homo sapien
tcaaaaggtaaggacaaaccaggca

SEQ ID NO: 3847594 - DNA, 25 bp, Homo sapien
taatagggagtggagttgattcccc

SEQ ID NO: 3847595 - DNA, 25 bp, Homo sapien
gcccgtgtgccctgcgatagaatag

SEQ ID NO: 3847596 - DNA, 25 bp, Homo sapien
tgtgttctccccacgtctatgcggg

SEQ ID NO: 3847597 - DNA, 25 bp, Homo sapien
gatagaatagatcctgcccagggca

SEQ ID NO: 3847598 - DNA, 25 bp, Homo sapien
gttactaatgaattcttcttcctgc

SEQ ID NO: 3847599 - DNA, 25 bp, Homo sapien
cattagtgaggaattcttcttcttt

SEQ ID NO: 3847600 - DNA, 25 bp, Homo sapien
attagtgaggaattcttcttctttc

SEQ ID NO: 3847601 - DNA, 25 bp, Homo sapien
tatccaagctacttgtttttctggt

SEQ ID NO: 3847602 - DNA, 25 bp, Homo sapien
ctggttttgaccgacaaagtcctat

SEQ ID NO: 3847603 - DNA, 25 bp, Homo sapien
tttgaccgacaaagtcctatatgat

SEQ ID NO: 3847604 - DNA, 25 bp, Homo sapien
tctaagcctgccatctatccaagct

SEQ ID NO: 3847605 - DNA, 25 bp, Homo sapien
caaggtatttccccaaaatcagcca

SEQ ID NO: 3847606 - DNA, 25 bp, Homo sapien
cgagcagtaatcactgtctgttaat

SEQ ID NO: 3847607 - DNA, 25 bp, Homo sapien
tgttaatgtgaggactagaccacaa

SEQ ID NO: 3847608 - DNA, 25 bp, Homo sapien
cacaaagcgtctcttcatcattctt

SEQ ID NO: 3847609 - DNA, 25 bp, Homo sapien
tgtgaggactagaccacaaagcgtc

SEQ ID NO: 3847610 - DNA, 25 bp, Homo sapien
tggaacagtaaaccctccaatccca

SEQ ID NO: 3847611 - DNA, 25 bp, Homo sapien
gaacagtaaaccctccaatcccaga

SEQ ID NO: 3847612 - DNA, 25 bp, Homo sapien
tctgggtggaacagtaaaccctcca

SEQ ID NO: 3847613 - DNA, 25 bp, Homo sapien
acagtaaaccctccaatcccagagt

SEQ ID NO: 3847614 - DNA, 25 bp, Homo sapien
caatgactaacacctgaagaccggg

SEQ ID NO: 3847615 - DNA, 25 bp, Homo sapien
cattccaacagctatacatgcttgg

SEQ ID NO: 3847616 - DNA, 25 bp, Homo sapien
gaagaccgggatataacattccaac

SEQ ID NO: 3847617 - DNA, 25 bp, Homo sapien
gcttggaaaacctgcggtgtttctc

SEQ ID NO: 3847618 - DNA, 25 bp, Homo sapien
ctttctggaagccatagatgccagt

SEQ ID NO: 3847619 - DNA, 25 bp, Homo sapien
agactttctggaagccatagatgcc

SEQ ID NO: 3847620 - DNA, 25 bp, Homo sapien
ttctggaagccatagatgccagtcc

SEQ ID NO: 3847621 - DNA, 25 bp, Homo sapien
ctggaagccatagatgccagtccat

SEQ ID NO: 3847622 - DNA, 25 bp, Homo sapien
ctgggaagccagtctgcatacctac

SEQ ID NO: 3847623 - DNA, 25 bp, Homo sapien
ttctgctgcttcgtcatgggggctg

SEQ ID NO: 3847624 - DNA, 25 bp, Homo sapien
ggctgggaagccagtctgcatacct

SEQ ID NO: 3847625 - DNA, 25 bp, Homo sapien
aactttctgctgcttcgtcatgggg

SEQ ID NO: 3847626 - DNA, 25 bp, Homo sapien
aaccagcaaaactgggatgctcgga

SEQ ID NO: 3847627 - DNA, 25 bp, Homo sapien
accagcaaaactgggatgctcggaa

SEQ ID NO: 3847628 - DNA, 25 bp, Homo sapien
gggcagaaccagcaaaactgggatg

SEQ ID NO: 3847629 - DNA, 25 bp, Homo sapien
tgagggcagaaccagcaaaactggg

SEQ ID NO: 3847630 - DNA, 25 bp, Homo sapien
aggtaaaaggtctccaagcctgctg

SEQ ID NO: 3847631 - DNA, 25 bp, Homo sapien
cagggcagcaggtaaaaggtctcca

SEQ ID NO: 3847632 - DNA, 25 bp, Homo sapien
caacagctttagggaggaaggttag

SEQ ID NO: 3847633 - DNA, 25 bp, Homo sapien
aggaaggttagagctggggccagca

SEQ ID NO: 3847634 - DNA, 25 bp, Homo sapien
ctgagacatccagtcaacgatggct

SEQ ID NO: 3847635 - DNA, 25 bp, Homo sapien
ccagtcaacgatggctttcagagag

SEQ ID NO: 3847636 - DNA, 25 bp, Homo sapien
gacatccagtcaacgatggctttca

SEQ ID NO: 3847637 - DNA, 25 bp, Homo sapien
gaggagaccaggaagctggtgtgga

SEQ ID NO: 3847638 - DNA, 25 bp, Homo sapien
ctgtgaaagcaaactgagagccgct

SEQ ID NO: 3847639 - DNA, 25 bp, Homo sapien
agactccaaagagccccgcaaaagg

SEQ ID NO: 3847640 - DNA, 25 bp, Homo sapien
aagactccaaagagccccgcaaaag

SEQ ID NO: 3847641 - DNA, 25 bp, Homo sapien
agcaaactgagagccgctgaggaag

SEQ ID NO: 3847642 - DNA, 25 bp, Homo sapien
tgtccttgcgatagggcagacagat

SEQ ID NO: 3847643 - DNA, 25 bp, Homo sapien
cctctaggttttaggactatcaaat

SEQ ID NO: 3847644 - DNA, 25 bp, Homo sapien
cacaggtcctctaggttttaggact

SEQ ID NO: 3847645 - DNA, 25 bp, Homo sapien
ttttaggactatcaaataaaacaca

SEQ ID NO: 3847646 - DNA, 25 bp, Homo sapien
acacagactggtataatcctggctc

SEQ ID NO: 3847647 - DNA, 25 bp, Homo sapien
tgttacttttacacagccacacaga

SEQ ID NO: 3847648 - DNA, 25 bp, Homo sapien
cctgcagtcctgttacttttacaca

SEQ ID NO: 3847649 - DNA, 25 bp, Homo sapien
cacagccacacagactggtataatc

SEQ ID NO: 3847650 - DNA, 25 bp, Homo sapien
cttggaaacccactcagttcccagg

SEQ ID NO: 3847651 - DNA, 25 bp, Homo sapien
ggaaacccactcagttcccaggcat

SEQ ID NO: 3847652 - DNA, 25 bp, Homo sapien
agagaaacatgggtcgttagaagcc

SEQ ID NO: 3847653 - DNA, 25 bp, Homo sapien
aagccaggttgcgaggctccccaac

SEQ ID NO: 3847654 - DNA, 25 bp, Homo sapien
ccctacaggagtcggcctaagcttc

SEQ ID NO: 3847655 - DNA, 25 bp, Homo sapien
cagggccaggctgaatgaaagtcaa

SEQ ID NO: 3847656 - DNA, 25 bp, Homo sapien
tcaagtgcaatcctcgctatgctac

SEQ ID NO: 3847657 - DNA, 25 bp, Homo sapien
tatgctaccgggagagccctaacat

SEQ ID NO: 3847658 - DNA, 25 bp, Homo sapien
gaatagccgcttacataccagaaga

SEQ ID NO: 3847659 - DNA, 25 bp, Homo sapien
tgtggacacgactgaaagactgctt

SEQ ID NO: 3847660 - DNA, 25 bp, Homo sapien
ttatacagatactgagaacacaggc

SEQ ID NO: 3847661 - DNA, 25 bp, Homo sapien
tataactcacaggtgcactgggcgc

SEQ ID NO: 3847662 - DNA, 25 bp, Homo sapien
taaacaccgggaatgaacacatttg

SEQ ID NO: 3847663 - DNA, 25 bp, Homo sapien
tggatcctaggtcagttaacaaaac

SEQ ID NO: 3847664 - DNA, 25 bp, Homo sapien
tgagaggtcaaacgtaccaccacag

SEQ ID NO: 3847665 - DNA, 25 bp, Homo sapien
gaaggcctctgatcttaaacaccgg

SEQ ID NO: 3847666 - DNA, 25 bp, Homo sapien
agtggctgcctctgcaaattccccg

SEQ ID NO: 3847667 - DNA, 25 bp, Homo sapien
ggctactgatcacacttaacttgca

SEQ ID NO: 3847668 - DNA, 25 bp, Homo sapien
gcgaagaaagctgcataggaggctt

SEQ ID NO: 3847669 - DNA, 25 bp, Homo sapien
gcaaagacatctctgtcagcgaaga

SEQ ID NO: 3847670 - DNA, 25 bp, Homo sapien
aggacagacccgcgtggccccgaag

SEQ ID NO: 3847671 - DNA, 25 bp, Homo sapien
ccgaggaggacagacccgcgtggcc

SEQ ID NO: 3847672 - DNA, 25 bp, Homo sapien
ggaggacagacccgcgtggccccga

SEQ ID NO: 3847673 - DNA, 25 bp, Homo sapien
gaggaggacagacccgcgtggcccc

SEQ ID NO: 3847674 - DNA, 25 bp, Homo sapien
agtgtgctctcagagggtccccggg

SEQ ID NO: 3847675 - DNA, 25 bp, Homo sapien
tgtgctctcagagggtccccgggaa

SEQ ID NO: 3847676 - DNA, 25 bp, Homo sapien
cctctcctcccggaagccagcaggt

SEQ ID NO: 3847677 - DNA, 25 bp, Homo sapien
gtccccgcagggagtgtgctctcag

SEQ ID NO: 3847678 - DNA, 25 bp, Homo sapien
cttgcacttcagtttgtaggtctcc

SEQ ID NO: 3847679 - DNA, 25 bp, Homo sapien
tgttctcttgctgcagcgaggccag

SEQ ID NO: 3847680 - DNA, 25 bp, Homo sapien
tcacgctggctttgcgcaggtcgcg

SEQ ID NO: 3847681 - DNA, 25 bp, Homo sapien
cacttcagtttgtaggtctccagct

SEQ ID NO: 3847682 - DNA, 25 bp, Homo sapien
gacgagcaggacgactgcatggcgg

SEQ ID NO: 3847683 - DNA, 25 bp, Homo sapien
acgactgcatggcggccgagctgct

SEQ ID NO: 3847684 - DNA, 25 bp, Homo sapien
ctccaggcggaacggcgagatgaca

SEQ ID NO: 3847685 - DNA, 25 bp, Homo sapien
gcggaacggcgagatgacaatgccc

SEQ ID NO: 3847686 - DNA, 25 bp, Homo sapien
gccgggctgcgaatgagtgggcgcc

SEQ ID NO: 3847687 - DNA, 25 bp, Homo sapien
ggcggcgacgaaggccgggctgcga

SEQ ID NO: 3847688 - DNA, 25 bp, Homo sapien
aggggagcgccgagctgagcgcctg

SEQ ID NO: 3847689 - DNA, 25 bp, Homo sapien
ctgcgaatgagtgggcgccgggcga

SEQ ID NO: 3847690 - DNA, 25 bp, Homo sapien
gattgagtagacacgggaatgttcc

SEQ ID NO: 3847691 - DNA, 25 bp, Homo sapien
ggttgtactattgcaggtgtctgga

SEQ ID NO: 3847692 - DNA, 25 bp, Homo sapien
tgcttgatatccagtgattccatgg

SEQ ID NO: 3847693 - DNA, 25 bp, Homo sapien
tgaagcccttgctagcctctgctct

SEQ ID NO: 3847694 - DNA, 25 bp, Homo sapien
tgtctctgagcagagtatatttcct

SEQ ID NO: 3847695 - DNA, 25 bp, Homo sapien
agggctgatagtctgatggcatctt

SEQ ID NO: 3847696 - DNA, 25 bp, Homo sapien
gcgatcgtccctagtcaaaaggcca

SEQ ID NO: 3847697 - DNA, 25 bp, Homo sapien
caaacaatgccgagtggtatccttc

SEQ ID NO: 3847698 - DNA, 25 bp, Homo sapien
tggctaaccctgtagtgctgaagaa

SEQ ID NO: 3847699 - DNA, 25 bp, Homo sapien
tgtaggtgctgttcctccgagatag

SEQ ID NO: 3847700 - DNA, 25 bp, Homo sapien
cacctctgtgtgagcttaccttaaa

SEQ ID NO: 3847701 - DNA, 25 bp, Homo sapien
taaaggtactaaggcatgaaagaac

SEQ ID NO: 3847702 - DNA, 25 bp, Homo sapien
gaagtcagggattttgctattaacc

SEQ ID NO: 3847703 - DNA, 25 bp, Homo sapien
ttttgaccatatgacacactctcgg

SEQ ID NO: 3847704 - DNA, 25 bp, Homo sapien
gtgtcctcatgaaagttccgtctgg

SEQ ID NO: 3847705 - DNA, 25 bp, Homo sapien
cactataggtctgttaggtcaaggg

SEQ ID NO: 3847706 - DNA, 25 bp, Homo sapien
tcaaagagcttcgtggtgagtctgt

SEQ ID NO: 3847707 - DNA, 25 bp, Homo sapien
cctcgcaaaggctggtgattgagca

SEQ ID NO: 3847708 - DNA, 25 bp, Homo sapien
tctccattctcccatctgccttcct

SEQ ID NO: 3847709 - DNA, 25 bp, Homo sapien
ccatctgccttcctctccccagtct

SEQ ID NO: 3847710 - DNA, 25 bp, Homo sapien
ctgttgaccaatctttctccattct

SEQ ID NO: 3847711 - DNA, 25 bp, Homo sapien
atctgccttcctctccccagtcttt

SEQ ID NO: 3847712 - DNA, 25 bp, Homo sapien
tggggtggagcagtagtgtgtgtct

SEQ ID NO: 3847713 - DNA, 25 bp, Homo sapien
ttgtcaatttagccactttgagcac

SEQ ID NO: 3847714 - DNA, 25 bp, Homo sapien
gtcaatttagccactttgagcacca

SEQ ID NO: 3847715 - DNA, 25 bp, Homo sapien
tcaatttagccactttgagcaccat

SEQ ID NO: 3847716 - DNA, 25 bp, Homo sapien
ctttcattatagtcttttgtcaatt

SEQ ID NO: 3847717 - DNA, 25 bp, Homo sapien
catgggctacactttatcactggtc

SEQ ID NO: 3847718 - DNA, 25 bp, Homo sapien
ttctcagactaagcccagtccatgg

SEQ ID NO: 3847719 - DNA, 25 bp, Homo sapien
taaatacaacgtaagactatatggg

SEQ ID NO: 3847720 - DNA, 25 bp, Homo sapien
ggctcaggtttcttgtctcattgca

SEQ ID NO: 3847721 - DNA, 25 bp, Homo sapien
caaagcaagttccatggcaagggtg

SEQ ID NO: 3847722 - DNA, 25 bp, Homo sapien
ggaagtgtaatccaccctcagggag

SEQ ID NO: 3847723 - DNA, 25 bp, Homo sapien
gagaatctagtgttatcatggccag

SEQ ID NO: 3847724 - DNA, 25 bp, Homo sapien
tagatgacctgcctagtctccacag

SEQ ID NO: 3847725 - DNA, 25 bp, Homo sapien
tctttggctaagaaggaggttgtgc

SEQ ID NO: 3847726 - DNA, 25 bp, Homo sapien
acttcagcagcatgactgtgtgctc

SEQ ID NO: 3847727 - DNA, 25 bp, Homo sapien
tgattaggatgagcaccatagcccg

SEQ ID NO: 3847728 - DNA, 25 bp, Homo sapien
tgctcatgaggtattggaacatcca

SEQ ID NO: 3847729 - DNA, 25 bp, Homo sapien
accagtggaggttggtgacacaagt

SEQ ID NO: 3847730 - DNA, 25 bp, Homo sapien
ctggaatggaccagtggaggttggt

SEQ ID NO: 3847731 - DNA, 25 bp, Homo sapien
tggtgacacaagttagtccttggtg

SEQ ID NO: 3847732 - DNA, 25 bp, Homo sapien
agttagtccttggtgaatgaagtca

SEQ ID NO: 3847733 - DNA, 25 bp, Homo sapien
tacatatttataagctggcaggcca

SEQ ID NO: 3847734 - DNA, 25 bp, Homo sapien
taccaaatgaacagcgaggaacatc

SEQ ID NO: 3847735 - DNA, 25 bp, Homo sapien
gacctcctgcttgatcggaaccaaa

SEQ ID NO: 3847736 - DNA, 25 bp, Homo sapien
tgtcatacagccaaacgtgagctga

SEQ ID NO: 3847737 - DNA, 25 bp, Homo sapien
gaatagcatgtagtgagcactccag

SEQ ID NO: 3847738 - DNA, 25 bp, Homo sapien
gctctgtgggctaaaagcaactgca

SEQ ID NO: 3847739 - DNA, 25 bp, Homo sapien
tttgggataccatgcagatgcaacc

SEQ ID NO: 3847740 - DNA, 25 bp, Homo sapien
ggcagtgatacctgtagaccccaca

SEQ ID NO: 3847741 - DNA, 25 bp, Homo sapien
ggtgtctacatcttatagccagtac

SEQ ID NO: 3847742 - DNA, 25 bp, Homo sapien
ttacagcgtgctgccattctactag

SEQ ID NO: 3847743 - DNA, 25 bp, Homo sapien
gattggcttactgaaaggtgtctac

SEQ ID NO: 3847744 - DNA, 25 bp, Homo sapien
tccacctctaaagcggcaagcattt

SEQ ID NO: 3847745 - DNA, 25 bp, Homo sapien
cgcgccaatccggaaatgaaagtga

SEQ ID NO: 3847746 - DNA, 25 bp, Homo sapien
cattaatgtgtggaagcagcgaaca

SEQ ID NO: 3847747 - DNA, 25 bp, Homo sapien
tatacaagaatcagtgaagagtcac

SEQ ID NO: 3847748 - DNA, 25 bp, Homo sapien
gcattgctaattgcacacgcgccaa

SEQ ID NO: 3847749 - DNA, 25 bp, Homo sapien
tctcaatactggcagtaaaaactta

SEQ ID NO: 3847750 - DNA, 25 bp, Homo sapien
tcttccacgaatttctcaatactgg

SEQ ID NO: 3847751 - DNA, 25 bp, Homo sapien
tgctgacatttcttccacgaatttc

SEQ ID NO: 3847752 - DNA, 25 bp, Homo sapien
atactggcagtaaaaacttatgatc

SEQ ID NO: 3847753 - DNA, 25 bp, Homo sapien
tacctgctagatgccttagaggaca

SEQ ID NO: 3847754 - DNA, 25 bp, Homo sapien
tttgtaattgcaccagaccacctgg

SEQ ID NO: 3847755 - DNA, 25 bp, Homo sapien
agtgagcttttctaggtgacctcca

SEQ ID NO: 3847756 - DNA, 25 bp, Homo sapien
gacaaggccctaaggtgtactggaa

SEQ ID NO: 3847757 - DNA, 25 bp, Homo sapien
taaactgtgatgacagcgccatctg

SEQ ID NO: 3847758 - DNA, 25 bp, Homo sapien
taatttcgtaatgagtagcaaggcc

SEQ ID NO: 3847759 - DNA, 25 bp, Homo sapien
tcttggttatgcaatcagagcctgt

SEQ ID NO: 3847760 - DNA, 25 bp, Homo sapien
tacaggaaggtcattcattggacaa

SEQ ID NO: 3847761 - DNA, 25 bp, Homo sapien
gtaactaaaatacactacagtgcag

SEQ ID NO: 3847762 - DNA, 25 bp, Homo sapien
cagaaatcatggactaagacttttt

SEQ ID NO: 3847763 - DNA, 25 bp, Homo sapien
gtaattcccaattcaggtagctttg

SEQ ID NO: 3847764 - DNA, 25 bp, Homo sapien
caataagtagggcttttttgattgt

SEQ ID NO: 3847765 - DNA, 25 bp, Homo sapien
ctcagagcttcggacttgcatatgt

SEQ ID NO: 3847766 - DNA, 25 bp, Homo sapien
tgaggactcaacttttgagcccctt

SEQ ID NO: 3847767 - DNA, 25 bp, Homo sapien
tctccctaggtaatcacatctgttc

SEQ ID NO: 3847768 - DNA, 25 bp, Homo sapien
gagccccttcttggcttacttcagt

SEQ ID NO: 3847769 - DNA, 25 bp, Homo sapien
ggcagccagcatgactataaaaact

SEQ ID NO: 3847770 - DNA, 25 bp, Homo sapien
taaaggaccctggaagcatagcact

SEQ ID NO: 3847771 - DNA, 25 bp, Homo sapien
tggctcagctggtgtaggtaaccct

SEQ ID NO: 3847772 - DNA, 25 bp, Homo sapien
catgcataggagtgggttcattcta

SEQ ID NO: 3847773 - DNA, 25 bp, Homo sapien
cccatatggcctaattgtagctaag

SEQ ID NO: 3847774 - DNA, 25 bp, Homo sapien
aagtccaggcaaatgtaaacaaagc

SEQ ID NO: 3847775 - DNA, 25 bp, Homo sapien
aagactggtggtgaactaaaggaag

SEQ ID NO: 3847776 - DNA, 25 bp, Homo sapien
ttctggcaagcagggaacagcagat

SEQ ID NO: 3847777 - DNA, 25 bp, Homo sapien
caatttctagggagtgcacaaagct

SEQ ID NO: 3847778 - DNA, 25 bp, Homo sapien
actggagggattctttaactggcac

SEQ ID NO: 3847779 - DNA, 25 bp, Homo sapien
taactggcacattggaaatgggctg

SEQ ID NO: 3847780 - DNA, 25 bp, Homo sapien
tcaagcaagctagagagcactgtca

SEQ ID NO: 3847781 - DNA, 25 bp, Homo sapien
ttcgtcttaatactttccgagtgat

SEQ ID NO: 3847782 - DNA, 25 bp, Homo sapien
cacatcatcacgttttctctcttgt

SEQ ID NO: 3847783 - DNA, 25 bp, Homo sapien
acaattcgtcttaatactttccgag

SEQ ID NO: 3847784 - DNA, 25 bp, Homo sapien
tctcttgtgggataacaattcgtct

SEQ ID NO: 3847785 - DNA, 25 bp, Homo sapien
aggagatgacactacagcacaaaag

SEQ ID NO: 3847786 - DNA, 25 bp, Homo sapien
ttaggagatgacactacagcacaaa

SEQ ID NO: 3847787 - DNA, 25 bp, Homo sapien
ttttaggagatgacactacagcaca

SEQ ID NO: 3847788 - DNA, 25 bp, Homo sapien
ctgttttaggagatgacactacagc

SEQ ID NO: 3847789 - DNA, 25 bp, Homo sapien
cagtaaattgttcttctgtgacaga

SEQ ID NO: 3847790 - DNA, 25 bp, Homo sapien
gttcttctgtgacagattcaccagg

SEQ ID NO: 3847791 - DNA, 25 bp, Homo sapien
cttcttcatcagtaaattgttcttc

SEQ ID NO: 3847792 - DNA, 25 bp, Homo sapien
cagattcaccaggaatgttttttgc

SEQ ID NO: 3847793 - DNA, 25 bp, Homo sapien
tacacactgtaaaccgaaaggcttc

SEQ ID NO: 3847794 - DNA, 25 bp, Homo sapien
gattagatcgtctcactttaagcac

SEQ ID NO: 3847795 - DNA, 25 bp, Homo sapien
tactccagtgcaagggaaaaaggct

SEQ ID NO: 3847796 - DNA, 25 bp, Homo sapien
taaacctcaagtatgtataagcgtg

SEQ ID NO: 3847797 - DNA, 25 bp, Homo sapien
cagggtcctattgatctgtcagtca

SEQ ID NO: 3847798 - DNA, 25 bp, Homo sapien
tgtgccacttatagttcgggagaac

SEQ ID NO: 3847799 - DNA, 25 bp, Homo sapien
gttttagggaaaatggccaatcaca

SEQ ID NO: 3847800 - DNA, 25 bp, Homo sapien
actcagcagaagtaggaccatatct

SEQ ID NO: 3847801 - DNA, 25 bp, Homo sapien
gccacataatgatccagctacagga

SEQ ID NO: 3847802 - DNA, 25 bp, Homo sapien
gatatgaactactgtgtcaccaaga

SEQ ID NO: 3847803 - DNA, 25 bp, Homo sapien
tacaagctttcaagggtgcaaaaaa

SEQ ID NO: 3847804 - DNA, 25 bp, Homo sapien
gaaggagtttctacaaccacaagga

SEQ ID NO: 3847805 - DNA, 25 bp, Homo sapien
cgggtagtgactctccgctcttcct

SEQ ID NO: 3847806 - DNA, 25 bp, Homo sapien
cgaataactcgggtagtgactctcc

SEQ ID NO: 3847807 - DNA, 25 bp, Homo sapien
acgccggcgaataactcgggtagtg

SEQ ID NO: 3847808 - DNA, 25 bp, Homo sapien
ctttataatcaaacgccggcgaata

SEQ ID NO: 3847809 - DNA, 25 bp, Homo sapien
ataattttaccatcacacttaaaat

SEQ ID NO: 3847810 - DNA, 25 bp, Homo sapien
tataattttaccatcacacttaaaa

SEQ ID NO: 3847811 - DNA, 25 bp, Homo sapien
gtataattttaccatcacacttaaa

SEQ ID NO: 3847812 - DNA, 25 bp, Homo sapien
catttgatctacagaaagaggcata

SEQ ID NO: 3847813 - DNA, 25 bp, Homo sapien
tgtgtacaggtaaagatcaaggtag

SEQ ID NO: 3847814 - DNA, 25 bp, Homo sapien
catctaccatgaaggtgtataccct

SEQ ID NO: 3847815 - DNA, 25 bp, Homo sapien
taacacataactggtactgagaaag

SEQ ID NO: 3847816 - DNA, 25 bp, Homo sapien
taaaactgctataggaggtacaggt

SEQ ID NO: 3847817 - DNA, 25 bp, Homo sapien
taacatccgctggaaaaatgaattc

SEQ ID NO: 3847818 - DNA, 25 bp, Homo sapien
gtcccagagacagaatttagttaac

SEQ ID NO: 3847819 - DNA, 25 bp, Homo sapien
ggtacaggtgttagataaaatgctt

SEQ ID NO: 3847820 - DNA, 25 bp, Homo sapien
gtaggagccgcacccggacttttga

SEQ ID NO: 3847821 - DNA, 25 bp, Homo sapien
gcagtcatccgtgtaggagccgcac

SEQ ID NO: 3847822 - DNA, 25 bp, Homo sapien
aacagcaggcagtcatccgtgtagg

SEQ ID NO: 3847823 - DNA, 25 bp, Homo sapien
cttataacagcaggcagtcatccgt

SEQ ID NO: 3847824 - DNA, 25 bp, Homo sapien
gatgacctagttggttgctattata

SEQ ID NO: 3847825 - DNA, 25 bp, Homo sapien
catacatcagatgacctagttggtt

SEQ ID NO: 3847826 - DNA, 25 bp, Homo sapien
catcagatgacctagttggttgcta

SEQ ID NO: 3847827 - DNA, 25 bp, Homo sapien
tctgagatcatacatcagatgacct

SEQ ID NO: 3847828 - DNA, 25 bp, Homo sapien
cagcgaaaactgcaagtgctactat

SEQ ID NO: 3847829 - DNA, 25 bp, Homo sapien
taagcaactgattaccaccaccaaa

SEQ ID NO: 3847830 - DNA, 25 bp, Homo sapien
gaactggatatgtctcagcgaaaac

SEQ ID NO: 3847831 - DNA, 25 bp, Homo sapien
tcttatatccacgtatgagtcatca

SEQ ID NO: 3847832 - DNA, 25 bp, Homo sapien
gctagtggtgatgctggttcttcaa

SEQ ID NO: 3847833 - DNA, 25 bp, Homo sapien
ccatctgctggagaagtcctactca

SEQ ID NO: 3847834 - DNA, 25 bp, Homo sapien
tttttcatactgacaggcacacagg

SEQ ID NO: 3847835 - DNA, 25 bp, Homo sapien
ggttcttcaacatgaccagatccat

SEQ ID NO: 3847836 - DNA, 25 bp, Homo sapien
agtccacattgcttgccggcgttct

SEQ ID NO: 3847837 - DNA, 25 bp, Homo sapien
agcaaagtgactggcattttcctcc

SEQ ID NO: 3847838 - DNA, 25 bp, Homo sapien
ctttgtttattaccgctagaaggca

SEQ ID NO: 3847839 - DNA, 25 bp, Homo sapien
caagcatactgtgaagatcctgtaa

SEQ ID NO: 3847840 - DNA, 25 bp, Homo sapien
tccaccctcatgtgttcaagcagtt

SEQ ID NO: 3847841 - DNA, 25 bp, Homo sapien
ctccaccctcatgtgttcaagcagt

SEQ ID NO: 3847842 - DNA, 25 bp, Homo sapien
ccaccctcatgtgttcaagcagttc

SEQ ID NO: 3847843 - DNA, 25 bp, Homo sapien
agtaacccaccagttactcttcgag

SEQ ID NO: 3847844 - DNA, 25 bp, Homo sapien
caggactctaggtttccacttgatg

SEQ ID NO: 3847845 - DNA, 25 bp, Homo sapien
tcttcgagcttgagcgcaggactct

SEQ ID NO: 3847846 - DNA, 25 bp, Homo sapien
tgtcatccagtcgatctagtaaccc

SEQ ID NO: 3847847 - DNA, 25 bp, Homo sapien
ccagccaaatttccaaggtattgag

SEQ ID NO: 3847848 - DNA, 25 bp, Homo sapien
tgctgaacacgcttaagaatagcct

SEQ ID NO: 3847849 - DNA, 25 bp, Homo sapien
caagttgaatgtcctcaaatagaga

SEQ ID NO: 3847850 - DNA, 25 bp, Homo sapien
ctgtaattgaagacatttccagttc

SEQ ID NO: 3847851 - DNA, 25 bp, Homo sapien
tcagacatacattctccaactggct

SEQ ID NO: 3847852 - DNA, 25 bp, Homo sapien
gcttcaggcatttctgttaaaggca

SEQ ID NO: 3847853 - DNA, 25 bp, Homo sapien
ggtccatctgcggaatgctctatgt

SEQ ID NO: 3847854 - DNA, 25 bp, Homo sapien
tgcagttacgactggaggtccatct

SEQ ID NO: 3847855 - DNA, 25 bp, Homo sapien
ttcccctgggaaggcactagcccat

SEQ ID NO: 3847856 - DNA, 25 bp, Homo sapien
ctatggaagacagtacatttggact

SEQ ID NO: 3847857 - DNA, 25 bp, Homo sapien
atggaagacagtacatttggactga

SEQ ID NO: 3847858 - DNA, 25 bp, Homo sapien
tatggaagacagtacatttggactg

SEQ ID NO: 3847859 - DNA, 25 bp, Homo sapien
cagggagcactctgaatattcacga

SEQ ID NO: 3847860 - DNA, 25 bp, Homo sapien
tagggtccactcagaaccacgaatc

SEQ ID NO: 3847861 - DNA, 25 bp, Homo sapien
cagagatagtaggaaaaccattcgc

SEQ ID NO: 3847862 - DNA, 25 bp, Homo sapien
catactgtggtggactgaatacagc

SEQ ID NO: 3847863 - DNA, 25 bp, Homo sapien
aaattcattatagaggctgggtggg

SEQ ID NO: 3847864 - DNA, 25 bp, Homo sapien
tctactcaaaattcattatagaggc

SEQ ID NO: 3847865 - DNA, 25 bp, Homo sapien
tagaagttaattagaagtttgtgac

SEQ ID NO: 3847866 - DNA, 25 bp, Homo sapien
gactcttgttaatctaactttgcca

SEQ ID NO: 3847867 - DNA, 25 bp, Homo sapien
tcagtgcacatttaaatacctggtg

SEQ ID NO: 3847868 - DNA, 25 bp, Homo sapien
tggcagcatattcatgaagttaaaa

SEQ ID NO: 3847869 - DNA, 25 bp, Homo sapien
tagtaacatgtatgccgactgaatt

SEQ ID NO: 3847870 - DNA, 25 bp, Homo sapien
caacgaacgctaaataactaaagca

SEQ ID NO: 3847871 - DNA, 25 bp, Homo sapien
taaaaatggctcatcgtttgtttta

SEQ ID NO: 3847872 - DNA, 25 bp, Homo sapien
tattagaaataccaactctttcaga

SEQ ID NO: 3847873 - DNA, 25 bp, Homo sapien
ctatatacgaataaaagaggtaact

SEQ ID NO: 3847874 - DNA, 25 bp, Homo sapien
ttgtatataaacagaggtatttacc

SEQ ID NO: 3847875 - DNA, 25 bp, Homo sapien
taccttaggcgttcatacgtcatga

SEQ ID NO: 3847876 - DNA, 25 bp, Homo sapien
tttgtcaagaccgaagttaaggcat

SEQ ID NO: 3847877 - DNA, 25 bp, Homo sapien
gcagtgtcactatatctattcgatt

SEQ ID NO: 3847878 - DNA, 25 bp, Homo sapien
atctgcaaaacttctggtgcctgaa

SEQ ID NO: 3847879 - DNA, 25 bp, Homo sapien
cttctagcagtgtcactatatctat

SEQ ID NO: 3847880 - DNA, 25 bp, Homo sapien
ttggattttccacacgtatttgatt

SEQ ID NO: 3847881 - DNA, 25 bp, Homo sapien
ttgtggcattttttccgtctctggt

SEQ ID NO: 3847882 - DNA, 25 bp, Homo sapien
gtggcattttttccgtctctggtaa

SEQ ID NO: 3847883 - DNA, 25 bp, Homo sapien
tccacacgtatttgattgatttcat

SEQ ID NO: 3847884 - DNA, 25 bp, Homo sapien
tgtgaaccacagttagaaaaccacc

SEQ ID NO: 3847885 - DNA, 25 bp, Homo sapien
gatctccccggaacagaatttagcc

SEQ ID NO: 3847886 - DNA, 25 bp, Homo sapien
gagacaatactcctactgcccaata

SEQ ID NO: 3847887 - DNA, 25 bp, Homo sapien
aacaactgttgtgatcatggcctac

SEQ ID NO: 3847888 - DNA, 25 bp, Homo sapien
tgtccgttcacatggactctgtgga

SEQ ID NO: 3847889 - DNA, 25 bp, Homo sapien
gtcccaggtgatcggctactattgc

SEQ ID NO: 3847890 - DNA, 25 bp, Homo sapien
tgccatcctgatatctgtccgttca

SEQ ID NO: 3847891 - DNA, 25 bp, Homo sapien
tgtccaactaagtcccaggtgatcg

SEQ ID NO: 3847892 - DNA, 25 bp, Homo sapien
ttcgttgtaaccgaaggctggccac

SEQ ID NO: 3847893 - DNA, 25 bp, Homo sapien
cagagaggcggtccacaagctttaa

SEQ ID NO: 3847894 - DNA, 25 bp, Homo sapien
cgggaagtctcggacaacgacgtgt

SEQ ID NO: 3847895 - DNA, 25 bp, Homo sapien
tcatcggacaactcggactgcatct

SEQ ID NO: 3847896 - DNA, 25 bp, Homo sapien
aatattcaatggaatgtttacatac

SEQ ID NO: 3847897 - DNA, 25 bp, Homo sapien
taaaatattcaatggaatgtttaca

SEQ ID NO: 3847898 - DNA, 25 bp, Homo sapien
tattcaatggaatgtttacatactt

SEQ ID NO: 3847899 - DNA, 25 bp, Homo sapien
ttaaaatattcaatggaatgtttac

SEQ ID NO: 3847900 - DNA, 25 bp, Homo sapien
tcctaactttaactgtgcagctggt

SEQ ID NO: 3847901 - DNA, 25 bp, Homo sapien
cctaactttaactgtgcagctggtg

SEQ ID NO: 3847902 - DNA, 25 bp, Homo sapien
gtggtggtagtgacacaggtggatc

SEQ ID NO: 3847903 - DNA, 25 bp, Homo sapien
ttcctaactttaactgtgcagctgg

SEQ ID NO: 3847904 - DNA, 25 bp, Homo sapien
ttttcactggaattctggactttac

SEQ ID NO: 3847905 - DNA, 25 bp, Homo sapien
ggaagctgtttggccttgcctttct

SEQ ID NO: 3847906 - DNA, 25 bp, Homo sapien
tgtgtggcacatgcttttctaactg

SEQ ID NO: 3847907 - DNA, 25 bp, Homo sapien
gcaattatgttatccctgtgtgtgt

SEQ ID NO: 3847908 - DNA, 25 bp, Homo sapien
tacacatgaagaagtagtaagggct

SEQ ID NO: 3847909 - DNA, 25 bp, Homo sapien
ctttctctgtggtacaagtgggtgc

SEQ ID NO: 3847910 - DNA, 25 bp, Homo sapien
catatggttcggtgggaaggtatct

SEQ ID NO: 3847911 - DNA, 25 bp, Homo sapien
gggcctaacgcccatctggctattg

SEQ ID NO: 3847912 - DNA, 25 bp, Homo sapien
gctatcttcttcttgggacacagga

SEQ ID NO: 3847913 - DNA, 25 bp, Homo sapien
taataatgacttcagtgggctcagc

SEQ ID NO: 3847914 - DNA, 25 bp, Homo sapien
caccgcctggtggagaatgataaac

SEQ ID NO: 3847915 - DNA, 25 bp, Homo sapien
tctaatgacaggttcagccagctgg

SEQ ID NO: 3847916 - DNA, 25 bp, Homo sapien
gatggtgtagacaacttaagggcag

SEQ ID NO: 3847917 - DNA, 25 bp, Homo sapien
gacccaagggatgtatagagtgcac

SEQ ID NO: 3847918 - DNA, 25 bp, Homo sapien
ttgactacagagtatactggcactg

SEQ ID NO: 3847919 - DNA, 25 bp, Homo sapien
gttgcagatattgacgacccaaggg

SEQ ID NO: 3847920 - DNA, 25 bp, Homo sapien
tttttcctgtaacgtggcagtggct

SEQ ID NO: 3847921 - DNA, 25 bp, Homo sapien
tggagacaccactgactttaaaggt

SEQ ID NO: 3847922 - DNA, 25 bp, Homo sapien
tcaactgctgatttaactggagaca

SEQ ID NO: 3847923 - DNA, 25 bp, Homo sapien
tgcagtcgtggtagaaaacactttc

SEQ ID NO: 3847924 - DNA, 25 bp, Homo sapien
gaaaacgtagaattggatgccagcc

SEQ ID NO: 3847925 - DNA, 25 bp, Homo sapien
ttaagggcgtagcttccgtgactgc

SEQ ID NO: 3847926 - DNA, 25 bp, Homo sapien
gacaccacagtttttatcggcgaag

SEQ ID NO: 3847927 - DNA, 25 bp, Homo sapien
tctagccagggtaccagaggaaact

SEQ ID NO: 3847928 - DNA, 25 bp, Homo sapien
taatcggagctgttgtccaggactg

SEQ ID NO: 3847929 - DNA, 25 bp, Homo sapien
ctgatggcgtattagaggaagaact

SEQ ID NO: 3847930 - DNA, 25 bp, Homo sapien
tcttgttgctcctgtactccgttca

SEQ ID NO: 3847931 - DNA, 25 bp, Homo sapien
cttgataaggaagtgaagcctgact

SEQ ID NO: 3847932 - DNA, 25 bp, Homo sapien
ggcaccgaactaatccagaatcttt

SEQ ID NO: 3847933 - DNA, 25 bp, Homo sapien
tggatgtcaggcaccgaactaatcc

SEQ ID NO: 3847934 - DNA, 25 bp, Homo sapien
tcaggcaccgaactaatccagaatc

SEQ ID NO: 3847935 - DNA, 25 bp, Homo sapien
atgtcaggcaccgaactaatccaga

SEQ ID NO: 3847936 - DNA, 25 bp, Homo sapien
aaatccacgtagattagtaaatgtg

SEQ ID NO: 3847937 - DNA, 25 bp, Homo sapien
tccacgtagattagtaaatgtgtta

SEQ ID NO: 3847938 - DNA, 25 bp, Homo sapien
tgaaaatccacgtagattagtaaat

SEQ ID NO: 3847939 - DNA, 25 bp, Homo sapien
ccacgtagattagtaaatgtgttag

SEQ ID NO: 3847940 - DNA, 25 bp, Homo sapien
ggctcagtcaagtagctgtagcgct

SEQ ID NO: 3847941 - DNA, 25 bp, Homo sapien
tcagtcaagtagctgtagcgcttac

SEQ ID NO: 3847942 - DNA, 25 bp, Homo sapien
tcattccaggctcagtcaagtagct

SEQ ID NO: 3847943 - DNA, 25 bp, Homo sapien
ccaggctcagtcaagtagctgtagc

SEQ ID NO: 3847944 - DNA, 25 bp, Homo sapien
gctaaggatgcgaagctctgtcgtc

SEQ ID NO: 3847945 - DNA, 25 bp, Homo sapien
gatgcgaagctctgtcgtctatctg

SEQ ID NO: 3847946 - DNA, 25 bp, Homo sapien
gaagctctgtcgtctatctgttttc

SEQ ID NO: 3847947 - DNA, 25 bp, Homo sapien
gtaaagctaaggatgcgaagctctg

SEQ ID NO: 3847948 - DNA, 25 bp, Homo sapien
catcatcttgatctgactctgtctc

SEQ ID NO: 3847949 - DNA, 25 bp, Homo sapien
ctcatcatcttgatctgactctgtc

SEQ ID NO: 3847950 - DNA, 25 bp, Homo sapien
tcatcatcttgatctgactctgtct

SEQ ID NO: 3847951 - DNA, 25 bp, Homo sapien
gaaaagaatatcaggatatgaaaag

SEQ ID NO: 3847952 - DNA, 25 bp, Homo sapien
ttccaagatgcattgcagagacaag

SEQ ID NO: 3847953 - DNA, 25 bp, Homo sapien
ccaagatgcattgcagagacaagga

SEQ ID NO: 3847954 - DNA, 25 bp, Homo sapien
gacagcagggaaaagaatatcagga

SEQ ID NO: 3847955 - DNA, 25 bp, Homo sapien
caaaccgctgtttgaggcagtcctt

SEQ ID NO: 3847956 - DNA, 25 bp, Homo sapien
ctttttatgtgctggcagagtgata

SEQ ID NO: 3847957 - DNA, 25 bp, Homo sapien
gtgatatttaagttgcaaaccgctg

SEQ ID NO: 3847958 - DNA, 25 bp, Homo sapien
agaaaagacagacgaccacagggct

SEQ ID NO: 3847959 - DNA, 25 bp, Homo sapien
taagtggggccaaatttccataaca

SEQ ID NO: 3847960 - DNA, 25 bp, Homo sapien
cttgatggaaaatggcagtctattt

SEQ ID NO: 3847961 - DNA, 25 bp, Homo sapien
tcaacataaataggttttccttcca

SEQ ID NO: 3847962 - DNA, 25 bp, Homo sapien
ttgctgtcctcctttggtaagtggg

SEQ ID NO: 3847963 - DNA, 25 bp, Homo sapien
tctctgtacagttgcgtggctaacc

SEQ ID NO: 3847964 - DNA, 25 bp, Homo sapien
ctgtcatgcagaaacatcgcaagga

SEQ ID NO: 3847965 - DNA, 25 bp, Homo sapien
caaacttggccatatatggaacaca

SEQ ID NO: 3847966 - DNA, 25 bp, Homo sapien
gattctacgggatcattcattttgg

SEQ ID NO: 3847967 - DNA, 25 bp, Homo sapien
caatcttttataaacgtcaaaggag

SEQ ID NO: 3847968 - DNA, 25 bp, Homo sapien
ataaacgtcaaaggagttgttcctg

SEQ ID NO: 3847969 - DNA, 25 bp, Homo sapien
aaacattggttgtaaaggagacaca

SEQ ID NO: 3847970 - DNA, 25 bp, Homo sapien
ttcccactgagcaggcgaagtgccc

SEQ ID NO: 3847971 - DNA, 25 bp, Homo sapien
tgttgactttatcatgggagatgct

SEQ ID NO: 3847972 - DNA, 25 bp, Homo sapien
gagagaacaacagcagatatgttga

SEQ ID NO: 3847973 - DNA, 25 bp, Homo sapien
ctttatcatgggagatgctccttgt

SEQ ID NO: 3847974 - DNA, 25 bp, Homo sapien
gcagatatgttgactttatcatggg

SEQ ID NO: 3847975 - DNA, 25 bp, Homo sapien
tgcatagccacaaactggcaaaact

SEQ ID NO: 3847976 - DNA, 25 bp, Homo sapien
gcatagccacaaactggcaaaactt

SEQ ID NO: 3847977 - DNA, 25 bp, Homo sapien
ctgcatagccacaaactggcaaaac

SEQ ID NO: 3847978 - DNA, 25 bp, Homo sapien
catagccacaaactggcaaaacttc

SEQ ID NO: 3847979 - DNA, 25 bp, Homo sapien
tatctttgtacacaatctttgtgaa

SEQ ID NO: 3847980 - DNA, 25 bp, Homo sapien
aagtacagcagtgacttaaccaaac

SEQ ID NO: 3847981 - DNA, 25 bp, Homo sapien
taggaagtacagcagtgacttaacc

SEQ ID NO: 3847982 - DNA, 25 bp, Homo sapien
ctttgtgaatcaataggaagtacag

SEQ ID NO: 3847983 - DNA, 25 bp, Homo sapien
gctttgtttccaaggatctttttca

SEQ ID NO: 3847984 - DNA, 25 bp, Homo sapien
gctacagagaagacgcagattgggt

SEQ ID NO: 3847985 - DNA, 25 bp, Homo sapien
tatggaatttccgtcttcttggttc

SEQ ID NO: 3847986 - DNA, 25 bp, Homo sapien
ccattggatacaccttctcctgagg

SEQ ID NO: 3847987 - DNA, 25 bp, Homo sapien
tggaggcccactcgaattcttttag

SEQ ID NO: 3847988 - DNA, 25 bp, Homo sapien
attcttttagttagggcaccctctg

SEQ ID NO: 3847989 - DNA, 25 bp, Homo sapien
tcgtgataatcctgcagatacgctt

SEQ ID NO: 3847990 - DNA, 25 bp, Homo sapien
tgcttaatccgggaaaccactgcaa

SEQ ID NO: 3847991 - DNA, 25 bp, Homo sapien
tcccaaatggaacaatgactataga

SEQ ID NO: 3847992 - DNA, 25 bp, Homo sapien
tacggatcaaccactaaactctgag

SEQ ID NO: 3847993 - DNA, 25 bp, Homo sapien
tctgtaaacctaaacactgaaatcc

SEQ ID NO: 3847994 - DNA, 25 bp, Homo sapien
gggaggatcaaattatcaactagga

SEQ ID NO: 3847995 - DNA, 25 bp, Homo sapien
gggccgcattgctcggcatcatgag

SEQ ID NO: 3847996 - DNA, 25 bp, Homo sapien
tcccctaaggcttttgagtctaata

SEQ ID NO: 3847997 - DNA, 25 bp, Homo sapien
gaaaatagagaacgaaatccccaga

SEQ ID NO: 3847998 - DNA, 25 bp, Homo sapien
tcacaccctgactgtgggccgcatt

SEQ ID NO: 3847999 - DNA, 25 bp, Homo sapien
gggcatatgcctgacacaagtcatt

SEQ ID NO: 3848000 - DNA, 25 bp, Homo sapien
tgtgtagaatgaccataacctgccc

SEQ ID NO: 3848001 - DNA, 25 bp, Homo sapien
ctctccatttggtgtagcctccctt

SEQ ID NO: 3848002 - DNA, 25 bp, Homo sapien
tgtactctgtgtgtagaatgaccat

SEQ ID NO: 3848003 - DNA, 25 bp, Homo sapien
caaagccttccgtgtaatacttagg

SEQ ID NO: 3848004 - DNA, 25 bp, Homo sapien
ttttgttccaagacagcgattggga

SEQ ID NO: 3848005 - DNA, 25 bp, Homo sapien
gaggagggtactcatcctcgcgtat

SEQ ID NO: 3848006 - DNA, 25 bp, Homo sapien
catacacactgtccagagaggcact

SEQ ID NO: 3848007 - DNA, 25 bp, Homo sapien
gtgacatgctcagatatataccagt

SEQ ID NO: 3848008 - DNA, 25 bp, Homo sapien
tatctgggagaaacttgaaaaagct

SEQ ID NO: 3848009 - DNA, 25 bp, Homo sapien
taaagactaattatggcccaagaga

SEQ ID NO: 3848010 - DNA, 25 bp, Homo sapien
gacattgaaacaacacagaccccaa

SEQ ID NO: 3848011 - DNA, 25 bp, Homo sapien
cagaaccaaggagccatcattatta

SEQ ID NO: 3848012 - DNA, 25 bp, Homo sapien
tacagaaccaaggagccatcattat

SEQ ID NO: 3848013 - DNA, 25 bp, Homo sapien
ttacagaaccaaggagccatcatta

SEQ ID NO: 3848014 - DNA, 25 bp, Homo sapien
agaaccaaggagccatcattattac

SEQ ID NO: 3848015 - DNA, 25 bp, Homo sapien
ccatgccattaagtaactcggttaa

SEQ ID NO: 3848016 - DNA, 25 bp, Homo sapien
ttcctctcatggacccaaagtgagg

SEQ ID NO: 3848017 - DNA, 25 bp, Homo sapien
tcacttcgaagaacaatgagttctc

SEQ ID NO: 3848018 - DNA, 25 bp, Homo sapien
gtgagggatttccactatgacaggg

SEQ ID NO: 3848019 - DNA, 25 bp, Homo sapien
taaaagaatggctgcaaattgaaca

SEQ ID NO: 3848020 - DNA, 25 bp, Homo sapien
gctgcaaattgaacatagccaatca

SEQ ID NO: 3848021 - DNA, 25 bp, Homo sapien
atcaagccacgggaaataattttgt

SEQ ID NO: 3848022 - DNA, 25 bp, Homo sapien
tacttgttggtttgaaattgtcaca

SEQ ID NO: 3848023 - DNA, 25 bp, Homo sapien
caagctgcaggattcggctaaccaa

SEQ ID NO: 3848024 - DNA, 25 bp, Homo sapien
ggattcggctaaccaagctctcacc

SEQ ID NO: 3848025 - DNA, 25 bp, Homo sapien
tcaccctcatttacagggggaggat

SEQ ID NO: 3848026 - DNA, 25 bp, Homo sapien
tgcaggattcggctaaccaagctct

SEQ ID NO: 3848027 - DNA, 25 bp, Homo sapien
taccaaacggcaggtgattcgagtg

SEQ ID NO: 3848028 - DNA, 25 bp, Homo sapien
tgatgacggcttcctctcatggagc

SEQ ID NO: 3848029 - DNA, 25 bp, Homo sapien
ggacccatttctaccagcctactgg

SEQ ID NO: 3848030 - DNA, 25 bp, Homo sapien
cctaaaaattgtgcccctgcaggac

SEQ ID NO: 3848031 - DNA, 25 bp, Homo sapien
tctgaatcaaattcccttgtgaatg

SEQ ID NO: 3848032 - DNA, 25 bp, Homo sapien
gcagcccagctgtaatgtctaagag

SEQ ID NO: 3848033 - DNA, 25 bp, Homo sapien
taatgtctaagagaatctgaatcaa

SEQ ID NO: 3848034 - DNA, 25 bp, Homo sapien
tgacattgtctaaggtgtctgcagc

SEQ ID NO: 3848035 - DNA, 25 bp, Homo sapien
aatctgtatggtgctaacttcaagg

SEQ ID NO: 3848036 - DNA, 25 bp, Homo sapien
caaggtcggttgaatccagctcaaa

SEQ ID NO: 3848037 - DNA, 25 bp, Homo sapien
tatagcttaggaaccccagtagagt

SEQ ID NO: 3848038 - DNA, 25 bp, Homo sapien
tcccagcagctttggacgtatgtca

SEQ ID NO: 3848039 - DNA, 25 bp, Homo sapien
tgctgtcccgtgcataggagcttct

SEQ ID NO: 3848040 - DNA, 25 bp, Homo sapien
tgttcaaggtgtaagacctatccga

SEQ ID NO: 3848041 - DNA, 25 bp, Homo sapien
ctgctctttggatggcacaaggagt

SEQ ID NO: 3848042 - DNA, 25 bp, Homo sapien
ctttggatggcacaaggagttcttc

SEQ ID NO: 3848043 - DNA, 25 bp, Homo sapien
gaagtctagaattggctcctcggca

SEQ ID NO: 3848044 - DNA, 25 bp, Homo sapien
gacaaggatcatgagaagctagcac

SEQ ID NO: 3848045 - DNA, 25 bp, Homo sapien
aactcaatagagtcagggcccttgg

SEQ ID NO: 3848046 - DNA, 25 bp, Homo sapien
gaggagcttccacgagatcatctgc

SEQ ID NO: 3848047 - DNA, 25 bp, Homo sapien
tataagcataattcctgcacagagg

SEQ ID NO: 3848048 - DNA, 25 bp, Homo sapien
cattcttctaggattggagccttca

SEQ ID NO: 3848049 - DNA, 25 bp, Homo sapien
tatcagaatctcagatggacctctc

SEQ ID NO: 3848050 - DNA, 25 bp, Homo sapien
ggtacagagcctcctgacattagag

SEQ ID NO: 3848051 - DNA, 25 bp, Homo sapien
ccatggcatgatatgttaacattgg

SEQ ID NO: 3848052 - DNA, 25 bp, Homo sapien
ggccactctctgcattagacattca

SEQ ID NO: 3848053 - DNA, 25 bp, Homo sapien
ttcttcaaattatggtccccatggc

SEQ ID NO: 3848054 - DNA, 25 bp, Homo sapien
tggtgtgatttgagagtcgccggcc

SEQ ID NO: 3848055 - DNA, 25 bp, Homo sapien
aatatgtgactcagattggttctcc

SEQ ID NO: 3848056 - DNA, 25 bp, Homo sapien
ctcccagttttgtcagtgagctctt

SEQ ID NO: 3848057 - DNA, 25 bp, Homo sapien
tctcacttattagcaaataatactt

SEQ ID NO: 3848058 - DNA, 25 bp, Homo sapien
cagtaacagagaatagtgaacaatc

SEQ ID NO: 3848059 - DNA, 25 bp, Homo sapien
gagaacatttcgctaaattcacatc

SEQ ID NO: 3848060 - DNA, 25 bp, Homo sapien
tgaaattaacaaccgcaaaccacaa

SEQ ID NO: 3848061 - DNA, 25 bp, Homo sapien
tagcagagcatgtgtatttgcgtcg

SEQ ID NO: 3848062 - DNA, 25 bp, Homo sapien
gaacacacaattaacatgttcaatc

SEQ ID NO: 3848063 - DNA, 25 bp, Homo sapien
tgtctgtgtccccggtcattgcatc

SEQ ID NO: 3848064 - DNA, 25 bp, Homo sapien
gcgctccgagactaaagcccatgta

SEQ ID NO: 3848065 - DNA, 25 bp, Homo sapien
caattccttaaggtcctgtggccca

SEQ ID NO: 3848066 - DNA, 25 bp, Homo sapien
tgcaggcagggaatcatcacccaat

SEQ ID NO: 3848067 - DNA, 25 bp, Homo sapien
agagagtaagcccacatcaaaagct

SEQ ID NO: 3848068 - DNA, 25 bp, Homo sapien
tgtagagagtaagcccacatcaaaa

SEQ ID NO: 3848069 - DNA, 25 bp, Homo sapien
gatgtagagagtaagcccacatcaa

SEQ ID NO: 3848070 - DNA, 25 bp, Homo sapien
tagagagtaagcccacatcaaaagc

SEQ ID NO: 3848071 - DNA, 25 bp, Homo sapien
gttatcagcaaatcccccaatatct

SEQ ID NO: 3848072 - DNA, 25 bp, Homo sapien
tatcagcaaatcccccaatatctca

SEQ ID NO: 3848073 - DNA, 25 bp, Homo sapien
ttggttatcagcaaatcccccaata

SEQ ID NO: 3848074 - DNA, 25 bp, Homo sapien
ggttatcagcaaatcccccaatatc

SEQ ID NO: 3848075 - DNA, 25 bp, Homo sapien
ctgtaagcctcagctgactagaaag

SEQ ID NO: 3848076 - DNA, 25 bp, Homo sapien
ggcagcttgtttgaatggacatgga

SEQ ID NO: 3848077 - DNA, 25 bp, Homo sapien
gagggcagcttgtttgaatggacat

SEQ ID NO: 3848078 - DNA, 25 bp, Homo sapien
atgagggcagcttgtttgaatggac

SEQ ID NO: 3848079 - DNA, 25 bp, Homo sapien
gcttgtttgaatggacatggattac

SEQ ID NO: 3848080 - DNA, 25 bp, Homo sapien
ctgctgctacccagtaccaagagat

SEQ ID NO: 3848081 - DNA, 25 bp, Homo sapien
acaccaagtacaactcaaagatctt

SEQ ID NO: 3848082 - DNA, 25 bp, Homo sapien
tttacggctgggctatttgcacatt

SEQ ID NO: 3848083 - DNA, 25 bp, Homo sapien
taaacagatcaactttctactgctg

SEQ ID NO: 3848084 - DNA, 25 bp, Homo sapien
gcgttgcctagtcgggtaaccaaga

SEQ ID NO: 3848085 - DNA, 25 bp, Homo sapien
caagacagccttcatgtagggagag

SEQ ID NO: 3848086 - DNA, 25 bp, Homo sapien
taatttgataccaatgcgcgttgcc

SEQ ID NO: 3848087 - DNA, 25 bp, Homo sapien
tatgtaaatatgaggactgctccgg

SEQ ID NO: 3848088 - DNA, 25 bp, Homo sapien
taggatgctatgacacctggtgctt

SEQ ID NO: 3848089 - DNA, 25 bp, Homo sapien
tgctttactctgatcagcctggctg

SEQ ID NO: 3848090 - DNA, 25 bp, Homo sapien
ccgagaatacctggagaattgggct

SEQ ID NO: 3848091 - DNA, 25 bp, Homo sapien
tataagagcacatctatccccttgg

SEQ ID NO: 3848092 - DNA, 25 bp, Homo sapien
agagcccttcttttaactaccacag

SEQ ID NO: 3848093 - DNA, 25 bp, Homo sapien
tctagtcagcattacagaacagtag

SEQ ID NO: 3848094 - DNA, 25 bp, Homo sapien
aatcagttgctgtcactctagagcc

SEQ ID NO: 3848095 - DNA, 25 bp, Homo sapien
tttagagtggtggaataaatactcc

SEQ ID NO: 3848096 - DNA, 25 bp, Homo sapien
taccttgggaattttgtaccatgtg

SEQ ID NO: 3848097 - DNA, 25 bp, Homo sapien
aattttgtaccatgtgcatctatta

SEQ ID NO: 3848098 - DNA, 25 bp, Homo sapien
tgtaccttgggaattttgtaccatg

SEQ ID NO: 3848099 - DNA, 25 bp, Homo sapien
gggaattttgtaccatgtgcatcta

SEQ ID NO: 3848100 - DNA, 25 bp, Homo sapien
ttgtaacatgggaaaactgcatgtc

SEQ ID NO: 3848101 - DNA, 25 bp, Homo sapien
ggaagaaggagatgcacgctattaa

SEQ ID NO: 3848102 - DNA, 25 bp, Homo sapien
taatgtggtacttctagtagtttca

SEQ ID NO: 3848103 - DNA, 25 bp, Homo sapien
tgatattctaccttacatgcctctt

SEQ ID NO: 3848104 - DNA, 25 bp, Homo sapien
caggactggagcctcagagaaaaac

SEQ ID NO: 3848105 - DNA, 25 bp, Homo sapien
taaaagtctaattctggcccagagt

SEQ ID NO: 3848106 - DNA, 25 bp, Homo sapien
tggtgatgctgcaagcccagctcat

SEQ ID NO: 3848107 - DNA, 25 bp, Homo sapien
acagtcccgtgctcaaggtatacaa

SEQ ID NO: 3848108 - DNA, 25 bp, Homo sapien
gagttttccagaaccgcttctcttc

SEQ ID NO: 3848109 - DNA, 25 bp, Homo sapien
tcttcctcttatgtgtgcccagagt

SEQ ID NO: 3848110 - DNA, 25 bp, Homo sapien
ctgggacctcatccggtgcctggcg

SEQ ID NO: 3848111 - DNA, 25 bp, Homo sapien
tgtctctgacactttgaccaacaag

SEQ ID NO: 3848112 - DNA, 25 bp, Homo sapien
caatgcactttaagataacaaagag

SEQ ID NO: 3848113 - DNA, 25 bp, Homo sapien
cactgcaagtacttgggatcacagg

SEQ ID NO: 3848114 - DNA, 25 bp, Homo sapien
agctcaatgcactttaagataacaa

SEQ ID NO: 3848115 - DNA, 25 bp, Homo sapien
caggtgtttataccacttaaacact

SEQ ID NO: 3848116 - DNA, 25 bp, Homo sapien
ggaacaggaatagctatacttagat

SEQ ID NO: 3848117 - DNA, 25 bp, Homo sapien
tacacaccaaatgctggagcacccg

SEQ ID NO: 3848118 - DNA, 25 bp, Homo sapien
agttcttacctagcaatgataatgc

SEQ ID NO: 3848119 - DNA, 25 bp, Homo sapien
caaaatggcatagtaagttcttacc

SEQ ID NO: 3848120 - DNA, 25 bp, Homo sapien
agtagaatgatggtttcaggaggct

SEQ ID NO: 3848121 - DNA, 25 bp, Homo sapien
tatcttaagtgaggtaagctaggca

SEQ ID NO: 3848122 - DNA, 25 bp, Homo sapien
gataaatttagcacgttctcactca

SEQ ID NO: 3848123 - DNA, 25 bp, Homo sapien
taatatctggtagcacaatagggca

SEQ ID NO: 3848124 - DNA, 25 bp, Homo sapien
tagagtcatatttcatagagctgcc

SEQ ID NO: 3848125 - DNA, 25 bp, Homo sapien
tagcaggagtttgcctcaccagctg

SEQ ID NO: 3848126 - DNA, 25 bp, Homo sapien
ctcctaaacctgttcagtagagtca

SEQ ID NO: 3848127 - DNA, 25 bp, Homo sapien
tgtaactacactccaatccactaga

SEQ ID NO: 3848128 - DNA, 25 bp, Homo sapien
cataggagcttactcaaatggccaa

SEQ ID NO: 3848129 - DNA, 25 bp, Homo sapien
gatgatctctcactagttcttgtag

SEQ ID NO: 3848130 - DNA, 25 bp, Homo sapien
tcaaagctctggcaagactatcagg

SEQ ID NO: 3848131 - DNA, 25 bp, Homo sapien
gactatcaggcaaatgagtcagaag

SEQ ID NO: 3848132 - DNA, 25 bp, Homo sapien
catttcaggggcattggctttacga

SEQ ID NO: 3848133 - DNA, 25 bp, Homo sapien
caacatctgagatatattcgccatc

SEQ ID NO: 3848134 - DNA, 25 bp, Homo sapien
ctgagatatattcgccatcactgag

SEQ ID NO: 3848135 - DNA, 25 bp, Homo sapien
tatattcgccatcactgagcatttc

SEQ ID NO: 3848136 - DNA, 25 bp, Homo sapien
tcatcagacatatcaagaacttcat

SEQ ID NO: 3848137 - DNA, 25 bp, Homo sapien
ttctggaacattcattttgtgcttc

SEQ ID NO: 3848138 - DNA, 25 bp, Homo sapien
tcagacatatcaagaacttcattca

SEQ ID NO: 3848139 - DNA, 25 bp, Homo sapien
catcagacatatcaagaacttcatt

SEQ ID NO: 3848140 - DNA, 25 bp, Homo sapien
caatggctgctggagtcccagtaac

SEQ ID NO: 3848141 - DNA, 25 bp, Homo sapien
gctatacaaatatcatgcctgtggt

SEQ ID NO: 3848142 - DNA, 25 bp, Homo sapien
ggtgttctgctccttacatatgaag

SEQ ID NO: 3848143 - DNA, 25 bp, Homo sapien
gcaaccaatatctgtgtgctagagg

SEQ ID NO: 3848144 - DNA, 25 bp, Homo sapien
tggtctcttcggtcactatcttcag

SEQ ID NO: 3848145 - DNA, 25 bp, Homo sapien
cagggtgtccactactgagatgtag

SEQ ID NO: 3848146 - DNA, 25 bp, Homo sapien
gtggtcatggtctcttcggtcacta

SEQ ID NO: 3848147 - DNA, 25 bp, Homo sapien
ggtcactatcttcagggtgtccact

SEQ ID NO: 3848148 - DNA, 25 bp, Homo sapien
gcaatgccaagggcagtattcccat

SEQ ID NO: 3848149 - DNA, 25 bp, Homo sapien
caatgccaagggcagtattcccatt

SEQ ID NO: 3848150 - DNA, 25 bp, Homo sapien
tgcttgatgtaatggcgtataccca

SEQ ID NO: 3848151 - DNA, 25 bp, Homo sapien
ctgctgtgctgcttgatgtaatggc

SEQ ID NO: 3848152 - DNA, 25 bp, Homo sapien
ttatatgcgtatgcccctgctgtgc

SEQ ID NO: 3848153 - DNA, 25 bp, Homo sapien
ggaggcgttgttctgaagtaagaca

SEQ ID NO: 3848154 - DNA, 25 bp, Homo sapien
ctttgttttggcattaacttttgca

SEQ ID NO: 3848155 - DNA, 25 bp, Homo sapien
ttgttttggcattaacttttgcaga

SEQ ID NO: 3848156 - DNA, 25 bp, Homo sapien
tgttttggcattaacttttgcagaa

SEQ ID NO: 3848157 - DNA, 25 bp, Homo sapien
ttttggcattaacttttgcagaatg

SEQ ID NO: 3848158 - DNA, 25 bp, Homo sapien
tgatatttccatagtggcagcccac

SEQ ID NO: 3848159 - DNA, 25 bp, Homo sapien
atttccatagtggcagcccacatgc

SEQ ID NO: 3848160 - DNA, 25 bp, Homo sapien
ttgatatttccatagtggcagccca

SEQ ID NO: 3848161 - DNA, 25 bp, Homo sapien
gggtataaagggtcagcaaactgga

SEQ ID NO: 3848162 - DNA, 25 bp, Homo sapien
tgaatggtatacatcccacctgtgg

SEQ ID NO: 3848163 - DNA, 25 bp, Homo sapien
tctgctgtgctctagttatgggaca

SEQ ID NO: 3848164 - DNA, 25 bp, Homo sapien
tgctttctgaagtgagacgctctgc

SEQ ID NO: 3848165 - DNA, 25 bp, Homo sapien
tacggcaaccggagactttagtgtc

SEQ ID NO: 3848166 - DNA, 25 bp, Homo sapien
gctagaatcaagtacccaggccgtt

SEQ ID NO: 3848167 - DNA, 25 bp, Homo sapien
taaatcatgctgaacgaacgtagag

SEQ ID NO: 3848168 - DNA, 25 bp, Homo sapien
gcatgaccgcacagaccattaggaa

SEQ ID NO: 3848169 - DNA, 25 bp, Homo sapien
tgcagtcaccaaatggacacattct

SEQ ID NO: 3848170 - DNA, 25 bp, Homo sapien
attcttttccgtgtggcaagggagg

SEQ ID NO: 3848171 - DNA, 25 bp, Homo sapien
acattcttttccgtgtggcaaggga

SEQ ID NO: 3848172 - DNA, 25 bp, Homo sapien
gacacattcttttccgtgtggcaag

SEQ ID NO: 3848173 - DNA, 25 bp, Homo sapien
ttcttgagcagccaaatggagtggg

SEQ ID NO: 3848174 - DNA, 25 bp, Homo sapien
tgggcgtccacatgagccccttggt

SEQ ID NO: 3848175 - DNA, 25 bp, Homo sapien
ctgccacattcactcgatcttcttg

SEQ ID NO: 3848176 - DNA, 25 bp, Homo sapien
cttggtttacgaggacttctgccac

SEQ ID NO: 3848177 - DNA, 25 bp, Homo sapien
tctccatattaattcccaaggtcta

SEQ ID NO: 3848178 - DNA, 25 bp, Homo sapien
gagttttaacatattgccaatgcca

SEQ ID NO: 3848179 - DNA, 25 bp, Homo sapien
caaagtgaacactgacatatgctga

SEQ ID NO: 3848180 - DNA, 25 bp, Homo sapien
tcactctgggtaggaaagatcgcct

SEQ ID NO: 3848181 - DNA, 25 bp, Homo sapien
caactggcgcattgaccatttttct

SEQ ID NO: 3848182 - DNA, 25 bp, Homo sapien
tcgagcagtctacccgccttgtctt

SEQ ID NO: 3848183 - DNA, 25 bp, Homo sapien
gctctgttaagtaacactttggtaa

SEQ ID NO: 3848184 - DNA, 25 bp, Homo sapien
gccagagcaactggcgcattgacca

SEQ ID NO: 3848185 - DNA, 25 bp, Homo sapien
tccagcagagttgtcgctatgtcca

SEQ ID NO: 3848186 - DNA, 25 bp, Homo sapien
ccgggtaactgcgttggcatcagca

SEQ ID NO: 3848187 - DNA, 25 bp, Homo sapien
ttcgcatttctaccgaggagcagcg

SEQ ID NO: 3848188 - DNA, 25 bp, Homo sapien
tggacggaagcaattccttgccggg

SEQ ID NO: 3848189 - DNA, 25 bp, Homo sapien
gcaaatactggtaaaccaagtggta

SEQ ID NO: 3848190 - DNA, 25 bp, Homo sapien
acaaatcacttggtcacatgcccag

SEQ ID NO: 3848191 - DNA, 25 bp, Homo sapien
accaagtggtacatgaatatagtgc

SEQ ID NO: 3848192 - DNA, 25 bp, Homo sapien
tgtatcctgcattcctaagtaggga

SEQ ID NO: 3848193 - DNA, 25 bp, Homo sapien
tagaaaaagttcctgaccagtacca

SEQ ID NO: 3848194 - DNA, 25 bp, Homo sapien
ggagaaatcaactaggaatgtacca

SEQ ID NO: 3848195 - DNA, 25 bp, Homo sapien
caatgtcccattagaaaagcctgtg

SEQ ID NO: 3848196 - DNA, 25 bp, Homo sapien
cattacccaggctcttatggaggca

SEQ ID NO: 3848197 - DNA, 25 bp, Homo sapien
cagtctccttaggctgtggaattat

SEQ ID NO: 3848198 - DNA, 25 bp, Homo sapien
tcagtctccttaggctgtggaatta

SEQ ID NO: 3848199 - DNA, 25 bp, Homo sapien
atcagtctccttaggctgtggaatt

SEQ ID NO: 3848200 - DNA, 25 bp, Homo sapien
tttgcggctgcgtgaggtgaggctc

SEQ ID NO: 3848201 - DNA, 25 bp, Homo sapien
ggtgaggctccttggtccaaaagca

SEQ ID NO: 3848202 - DNA, 25 bp, Homo sapien
ctacatgcagtggtgttagcccgct

SEQ ID NO: 3848203 - DNA, 25 bp, Homo sapien
ctgattatcgtaatgtgcagctaca

SEQ ID NO: 3848204 - DNA, 25 bp, Homo sapien
cgtgcagaaacaacaaccagtgtca

SEQ ID NO: 3848205 - DNA, 25 bp, Homo sapien
gaaacaacaaccagtgtcaaaggtg

SEQ ID NO: 3848206 - DNA, 25 bp, Homo sapien
gaaaacacgtgcagaaacaacaacc

SEQ ID NO: 3848207 - DNA, 25 bp, Homo sapien
aacacgtgcagaaacaacaaccagt

SEQ ID NO: 3848208 - DNA, 25 bp, Homo sapien
ccagcagcatctggagatgcacttt

SEQ ID NO: 3848209 - DNA, 25 bp, Homo sapien
cttcccagcagcatctggagatgca

SEQ ID NO: 3848210 - DNA, 25 bp, Homo sapien
cagcagcatctggagatgcactttt

SEQ ID NO: 3848211 - DNA, 25 bp, Homo sapien
tcccagcagcatctggagatgcact

SEQ ID NO: 3848212 - DNA, 25 bp, Homo sapien
gattggcgacttcaagctttccata

SEQ ID NO: 3848213 - DNA, 25 bp, Homo sapien
ctgtagcaggagattggcgacttca

SEQ ID NO: 3848214 - DNA, 25 bp, Homo sapien
caggagattggcgacttcaagcttt

SEQ ID NO: 3848215 - DNA, 25 bp, Homo sapien
tgccacatgaagaggagtaaatcct

SEQ ID NO: 3848216 - DNA, 25 bp, Homo sapien
tatgtctgctttccccagtcgggct

SEQ ID NO: 3848217 - DNA, 25 bp, Homo sapien
tcatgcccctctcgggcggaaaggt

SEQ ID NO: 3848218 - DNA, 25 bp, Homo sapien
tatagataaagacgctccatgatcc

SEQ ID NO: 3848219 - DNA, 25 bp, Homo sapien
tccatgatccaaaaggaacgcggcc

SEQ ID NO: 3848220 - DNA, 25 bp, Homo sapien
cagcttggccggagcgagctgccat

SEQ ID NO: 3848221 - DNA, 25 bp, Homo sapien
gcttctacctgagctccgtcttgta

SEQ ID NO: 3848222 - DNA, 25 bp, Homo sapien
gagctccgtcttgtaccagataccg

SEQ ID NO: 3848223 - DNA, 25 bp, Homo sapien
cagataccgcacaacttcagcttgg

SEQ ID NO: 3848224 - DNA, 25 bp, Homo sapien
aggctccatgatgcattagttgtga

SEQ ID NO: 3848225 - DNA, 25 bp, Homo sapien
acattggtggtgtttggtgaggctc

SEQ ID NO: 3848226 - DNA, 25 bp, Homo sapien
ccatgatgcattagttgtgatacaa

SEQ ID NO: 3848227 - DNA, 25 bp, Homo sapien
gctccatgatgcattagttgtgata

SEQ ID NO: 3848228 - DNA, 25 bp, Homo sapien
gcaacatggattggggtaaggcccg

SEQ ID NO: 3848229 - DNA, 25 bp, Homo sapien
caacatggattggggtaaggcccga

SEQ ID NO: 3848230 - DNA, 25 bp, Homo sapien
agcaacatggattggggtaaggccc

SEQ ID NO: 3848231 - DNA, 25 bp, Homo sapien
cagaaggagttccattactttaatt

SEQ ID NO: 3848232 - DNA, 25 bp, Homo sapien
gcaatatgaagaggggtaaagccat

SEQ ID NO: 3848233 - DNA, 25 bp, Homo sapien
ctcggttacagcttggatggatgca

SEQ ID NO: 3848234 - DNA, 25 bp, Homo sapien
ggatgcaccgtgtttcagaaggagt

SEQ ID NO: 3848235 - DNA, 25 bp, Homo sapien
ccacgtgtagggcagtcaggtagtc

SEQ ID NO: 3848236 - DNA, 25 bp, Homo sapien
tcttatccaagagaaccttggcaac

SEQ ID NO: 3848237 - DNA, 25 bp, Homo sapien
ggtgacatcatccacgggtacatta

SEQ ID NO: 3848238 - DNA, 25 bp, Homo sapien
gagaaccttggcaactttgtaatgg

SEQ ID NO: 3848239 - DNA, 25 bp, Homo sapien
gaggagaagctggacgcagtttaaa

SEQ ID NO: 3848240 - DNA, 25 bp, Homo sapien
gacgcagtttaaatgatccccttgt

SEQ ID NO: 3848241 - DNA, 25 bp, Homo sapien
gaagctggacgcagtttaaatgatc

SEQ ID NO: 3848242 - DNA, 25 bp, Homo sapien
cagtttaaatgatccccttgtgtgg

SEQ ID NO: 3848243 - DNA, 25 bp, Homo sapien
gaatgggggcagctcgatcaagcaa

SEQ ID NO: 3848244 - DNA, 25 bp, Homo sapien
acctgctcgtggccactccttgctc

SEQ ID NO: 3848245 - DNA, 25 bp, Homo sapien
gggcagctcgatcaagcaacatttc

SEQ ID NO: 3848246 - DNA, 25 bp, Homo sapien
gccactccttgctccacagtgcagt

SEQ ID NO: 3848247 - DNA, 25 bp, Homo sapien
taatcttgtgagggtatacgtgtcc

SEQ ID NO: 3848248 - DNA, 25 bp, Homo sapien
aatcttgtgagggtatacgtgtcca

SEQ ID NO: 3848249 - DNA, 25 bp, Homo sapien
atcttgtgagggtatacgtgtccag

SEQ ID NO: 3848250 - DNA, 25 bp, Homo sapien
tcaggattgcctcccttggaaggac

SEQ ID NO: 3848251 - DNA, 25 bp, Homo sapien
ggtcacatggcaagtacatagagta

SEQ ID NO: 3848252 - DNA, 25 bp, Homo sapien
gggttccttctactatgccaagcaa

SEQ ID NO: 3848253 - DNA, 25 bp, Homo sapien
ctatgagaaaagcatcagtagctac

SEQ ID NO: 3848254 - DNA, 25 bp, Homo sapien
tagctcctcgatcgagcaatagttt

SEQ ID NO: 3848255 - DNA, 25 bp, Homo sapien
ttggcatcgattttagctcctcgat

SEQ ID NO: 3848256 - DNA, 25 bp, Homo sapien
tgcaacatgtaaaggagtgatgtca

SEQ ID NO: 3848257 - DNA, 25 bp, Homo sapien
cgatcgagcaatagttttaccatat

SEQ ID NO: 3848258 - DNA, 25 bp, Homo sapien
tgagtttaagttctgctgttcacaa

SEQ ID NO: 3848259 - DNA, 25 bp, Homo sapien
tcataaatgaactaggctcacaggg

SEQ ID NO: 3848260 - DNA, 25 bp, Homo sapien
tgctgttcacaaagaatcaattaca

SEQ ID NO: 3848261 - DNA, 25 bp, Homo sapien
gcttcttattcttgtgtagcagcaa

SEQ ID NO: 3848262 - DNA, 25 bp, Homo sapien
tgagccccaagtgggacgtgacacg

SEQ ID NO: 3848263 - DNA, 25 bp, Homo sapien
gtgtgagtaagggctggcatgccat

SEQ ID NO: 3848264 - DNA, 25 bp, Homo sapien
tgggacgtgacacgaagacctcatc

SEQ ID NO: 3848265 - DNA, 25 bp, Homo sapien
gacgtgacacgaagacctcatcact

SEQ ID NO: 3848266 - DNA, 25 bp, Homo sapien
accatgcctggtgagatattaatcc

SEQ ID NO: 3848267 - DNA, 25 bp, Homo sapien
tctgaatgccccagagaggtttaac

SEQ ID NO: 3848268 - DNA, 25 bp, Homo sapien
catcccttgctttctatactctgaa

SEQ ID NO: 3848269 - DNA, 25 bp, Homo sapien
tagccattaacttccctaatatgta

SEQ ID NO: 3848270 - DNA, 25 bp, Homo sapien
ttggtgccatcgacctgacctgcgt

SEQ ID NO: 3848271 - DNA, 25 bp, Homo sapien
tgtatattcttcaaaccaccagagg

SEQ ID NO: 3848272 - DNA, 25 bp, Homo sapien
caggcggcagggcacatattcaagg

SEQ ID NO: 3848273 - DNA, 25 bp, Homo sapien
tcagagcaacaattctagagcagca

SEQ ID NO: 3848274 - DNA, 25 bp, Homo sapien
cattgggtttggtgcactggtctaa

SEQ ID NO: 3848275 - DNA, 25 bp, Homo sapien
tctacagagctgaatgcaaagtctc

SEQ ID NO: 3848276 - DNA, 25 bp, Homo sapien
cctagaccaggagagattcaagttg

SEQ ID NO: 3848277 - DNA, 25 bp, Homo sapien
gacttttagcctaggcttagcccag

SEQ ID NO: 3848278 - DNA, 25 bp, Homo sapien
gcctttctgctttcaactcctttca

SEQ ID NO: 3848279 - DNA, 25 bp, Homo sapien
tcaccagacgaactccaaggaaggg

SEQ ID NO: 3848280 - DNA, 25 bp, Homo sapien
gggaaatgagatagactctgcaaca

SEQ ID NO: 3848281 - DNA, 25 bp, Homo sapien
gacactgttacagaggacctatcct

SEQ ID NO: 3848282 - DNA, 25 bp, Homo sapien
ccacagcagccgctcggtttaacag

SEQ ID NO: 3848283 - DNA, 25 bp, Homo sapien
ccatagtgagcagctatgtggagcg

SEQ ID NO: 3848284 - DNA, 25 bp, Homo sapien
gcaacgtggctacattgatatttcc

SEQ ID NO: 3848285 - DNA, 25 bp, Homo sapien
tttccatagtgagcagctatgtgga

SEQ ID NO: 3848286 - DNA, 25 bp, Homo sapien
caaccagaggtttgtttgtgtacac

SEQ ID NO: 3848287 - DNA, 25 bp, Homo sapien
gcctggcctgtcatcttgggtatca

SEQ ID NO: 3848288 - DNA, 25 bp, Homo sapien
tcaggtaccacatgtcaagacgatg

SEQ ID NO: 3848289 - DNA, 25 bp, Homo sapien
gctgatctacgctcagtgcctggcc

SEQ ID NO: 3848290 - DNA, 25 bp, Homo sapien
taaaggttgtgtgtctaacaccgga

SEQ ID NO: 3848291 - DNA, 25 bp, Homo sapien
cataagcttgcgaagagggagaccg

SEQ ID NO: 3848292 - DNA, 25 bp, Homo sapien
tggctagctcagacacacattgttc

SEQ ID NO: 3848293 - DNA, 25 bp, Homo sapien
acaccggagagttgcatgacaggcc

SEQ ID NO: 3848294 - DNA, 25 bp, Homo sapien
tggtcgtgaccttgttgcaaagcca

SEQ ID NO: 3848295 - DNA, 25 bp, Homo sapien
tttcgggccgcgatatgaagagctg

SEQ ID NO: 3848296 - DNA, 25 bp, Homo sapien
ctgggagacgcacttttcctttggt

SEQ ID NO: 3848297 - DNA, 25 bp, Homo sapien
tagcaggagcgaaacgacttggtcg

SEQ ID NO: 3848298 - DNA, 25 bp, Homo sapien
aataaatggatgggtcaagatgggc

SEQ ID NO: 3848299 - DNA, 25 bp, Homo sapien
ataaatggatgggtcaagatgggct

SEQ ID NO: 3848300 - DNA, 25 bp, Homo sapien
aatatgtttcctgcataagccaatt

SEQ ID NO: 3848301 - DNA, 25 bp, Homo sapien
gaatatgtttcctgcataagccaat

SEQ ID NO: 3848302 - DNA, 25 bp, Homo sapien
tatgtttcctgcataagccaattaa

SEQ ID NO: 3848303 - DNA, 25 bp, Homo sapien
atatgtttcctgcataagccaatta

SEQ ID NO: 3848304 - DNA, 25 bp, Homo sapien
tcccctggttgctcaaggatatcca

SEQ ID NO: 3848305 - DNA, 25 bp, Homo sapien
ggatatccagtaccttatgaagtgt

SEQ ID NO: 3848306 - DNA, 25 bp, Homo sapien
aaggtccatcccctggttgctcaag

SEQ ID NO: 3848307 - DNA, 25 bp, Homo sapien
gtttgctttgtgcagttattcttca

SEQ ID NO: 3848308 - DNA, 25 bp, Homo sapien
tgtggctaggctctggcttgcacca

SEQ ID NO: 3848309 - DNA, 25 bp, Homo sapien
gctaggctctggcttgcaccattgt

SEQ ID NO: 3848310 - DNA, 25 bp, Homo sapien
tgcaccattgtcaagaagaaacttg

SEQ ID NO: 3848311 - DNA, 25 bp, Homo sapien
gctctggcttgcaccattgtcaaga

SEQ ID NO: 3848312 - DNA, 25 bp, Homo sapien
gccatatacaatggcgtgaaaccat

SEQ ID NO: 3848313 - DNA, 25 bp, Homo sapien
ggctgccatatacaatggcgtgaaa

SEQ ID NO: 3848314 - DNA, 25 bp, Homo sapien
tgggctgccatatacaatggcgtga

SEQ ID NO: 3848315 - DNA, 25 bp, Homo sapien
tcctgggctgccatatacaatggcg

SEQ ID NO: 3848316 - DNA, 25 bp, Homo sapien
caaagatgcgatgtgcaatgctgtg

SEQ ID NO: 3848317 - DNA, 25 bp, Homo sapien
ttgcccagccaaagatgcgatgtgc

SEQ ID NO: 3848318 - DNA, 25 bp, Homo sapien
gctccatttgtaaccaagactttta

SEQ ID NO: 3848319 - DNA, 25 bp, Homo sapien
cattgacattggctccatttgtaac

SEQ ID NO: 3848320 - DNA, 25 bp, Homo sapien
gcagctcagaaacaacctctacatg

SEQ ID NO: 3848321 - DNA, 25 bp, Homo sapien
caacctctacatggccttctttgga

SEQ ID NO: 3848322 - DNA, 25 bp, Homo sapien
tgcatccacattggcttctctctgc

SEQ ID NO: 3848323 - DNA, 25 bp, Homo sapien
gaagcaaggtggagagcgttcaacc

SEQ ID NO: 3848324 - DNA, 25 bp, Homo sapien
attgcaaatgttgatgtcaactcca

SEQ ID NO: 3848325 - DNA, 25 bp, Homo sapien
aatgttgatgtcaactccatttttt

SEQ ID NO: 3848326 - DNA, 25 bp, Homo sapien
gatgtcaactccattttttatgtag

SEQ ID NO: 3848327 - DNA, 25 bp, Homo sapien
tgatgtcaactccattttttatgta

SEQ ID NO: 3848328 - DNA, 25 bp, Homo sapien
ttttcaaggtgtccagctcgagctg

SEQ ID NO: 3848329 - DNA, 25 bp, Homo sapien
ggtgtccagctcgagctgctcttaa

SEQ ID NO: 3848330 - DNA, 25 bp, Homo sapien
tccagctcgagctgctcttaagtaa

SEQ ID NO: 3848331 - DNA, 25 bp, Homo sapien
tcaaggtgtccagctcgagctgctc

SEQ ID NO: 3848332 - DNA, 25 bp, Homo sapien
tggcagggcaaatattggattctta

SEQ ID NO: 3848333 - DNA, 25 bp, Homo sapien
taaaataaccttgcataagtggcag

SEQ ID NO: 3848334 - DNA, 25 bp, Homo sapien
tctcctctaaaataaccttgcataa

SEQ ID NO: 3848335 - DNA, 25 bp, Homo sapien
ccttgcataagtggcagggcaaata

SEQ ID NO: 3848336 - DNA, 25 bp, Homo sapien
aagactggtgtaggttcacactgac

SEQ ID NO: 3848337 - DNA, 25 bp, Homo sapien
taggataaaattagataactcaggt

SEQ ID NO: 3848338 - DNA, 25 bp, Homo sapien
tgcacttctggcaaaacagtttctc

SEQ ID NO: 3848339 - DNA, 25 bp, Homo sapien
gcacagctaggcactcaattaaata

SEQ ID NO: 3848340 - DNA, 25 bp, Homo sapien
gaacaaggatttcaggccttcatgc

SEQ ID NO: 3848341 - DNA, 25 bp, Homo sapien
tacaatacagtggacttcagcttcc

SEQ ID NO: 3848342 - DNA, 25 bp, Homo sapien
cttcctggtcagataattagaggcc

SEQ ID NO: 3848343 - DNA, 25 bp, Homo sapien
gatattgctatattccgctcaggaa

SEQ ID NO: 3848344 - DNA, 25 bp, Homo sapien
taggactaactggtaactagaaggc

SEQ ID NO: 3848345 - DNA, 25 bp, Homo sapien
ccatgattatgagaggctgtaccct

SEQ ID NO: 3848346 - DNA, 25 bp, Homo sapien
aagtctacagtagggctaggtgcag

SEQ ID NO: 3848347 - DNA, 25 bp, Homo sapien
tgagatgagagcctaagagtctgag

SEQ ID NO: 3848348 - DNA, 25 bp, Homo sapien
tggacagagcatcacatctaaaaat

SEQ ID NO: 3848349 - DNA, 25 bp, Homo sapien
tatctgccttcggaaatgtaaaggt

SEQ ID NO: 3848350 - DNA, 25 bp, Homo sapien
gtaagaaacctgataactcaattag

SEQ ID NO: 3848351 - DNA, 25 bp, Homo sapien
aattagttaacactttggacagagc

SEQ ID NO: 3848352 - DNA, 25 bp, Homo sapien
tcctcagatgggtactgccgaacta

SEQ ID NO: 3848353 - DNA, 25 bp, Homo sapien
gggctgttcaaacctcctaggctgt

SEQ ID NO: 3848354 - DNA, 25 bp, Homo sapien
tgccgaactagccatcaagaaaggg

SEQ ID NO: 3848355 - DNA, 25 bp, Homo sapien
taaaccatattagagggctgttggc

SEQ ID NO: 3848356 - DNA, 25 bp, Homo sapien
catgagctgcaactttgttagggtc

SEQ ID NO: 3848357 - DNA, 25 bp, Homo sapien
ttgagcacgtctagtctggaaatgg

SEQ ID NO: 3848358 - DNA, 25 bp, Homo sapien
ggaccctgcggataacatgagctgc

SEQ ID NO: 3848359 - DNA, 25 bp, Homo sapien
tggaaatggcgcttactcccaggac

SEQ ID NO: 3848360 - DNA, 25 bp, Homo sapien
agtcccaggatacaaaaccaatatg

SEQ ID NO: 3848361 - DNA, 25 bp, Homo sapien
aataaaggtattcaagtaggaagag

SEQ ID NO: 3848362 - DNA, 25 bp, Homo sapien
tatgcagaaatcacaagcatttcta

SEQ ID NO: 3848363 - DNA, 25 bp, Homo sapien
tcccaggatacaaaaccaatatgca

SEQ ID NO: 3848364 - DNA, 25 bp, Homo sapien
tccagcagatgaggatggcacctga

SEQ ID NO: 3848365 - DNA, 25 bp, Homo sapien
caaagagaaggactcgtccctcgga

SEQ ID NO: 3848366 - DNA, 25 bp, Homo sapien
tgaatgatgaactgacccctgaacc

SEQ ID NO: 3848367 - DNA, 25 bp, Homo sapien
cagaaaggaattgctgctcagtggc

SEQ ID NO: 3848368 - DNA, 25 bp, Homo sapien
tgagaaagatgtacctgtgttcctg

SEQ ID NO: 3848369 - DNA, 25 bp, Homo sapien
agaaagatgtacctgtgttcctgtt

SEQ ID NO: 3848370 - DNA, 25 bp, Homo sapien
gagaaagatgtacctgtgttcctgt

SEQ ID NO: 3848371 - DNA, 25 bp, Homo sapien
cccatgaattcaaccagagaaatca

SEQ ID NO: 3848372 - DNA, 25 bp, Homo sapien
tctacgtagacagcttgaattctgg

SEQ ID NO: 3848373 - DNA, 25 bp, Homo sapien
tcattcaacttgtgatcccatgaat

SEQ ID NO: 3848374 - DNA, 25 bp, Homo sapien
gatctttttctgcaagatgtctacg

SEQ ID NO: 3848375 - DNA, 25 bp, Homo sapien
tccctgtgccctttgatacttccca

SEQ ID NO: 3848376 - DNA, 25 bp, Homo sapien
caccatagagttccctgtgcccttt

SEQ ID NO: 3848377 - DNA, 25 bp, Homo sapien
accaggaacattcagtaaccactaa

SEQ ID NO: 3848378 - DNA, 25 bp, Homo sapien
gaacattcagtaaccactaaaggaa

SEQ ID NO: 3848379 - DNA, 25 bp, Homo sapien
gatcacacgggcagtttttagaatg

SEQ ID NO: 3848380 - DNA, 25 bp, Homo sapien
acaaagatcacacgggcagttttta

SEQ ID NO: 3848381 - DNA, 25 bp, Homo sapien
tgcttaatctaaggacagcttacaa

SEQ ID NO: 3848382 - DNA, 25 bp, Homo sapien
tctgctaaataaataccctgagtct

SEQ ID NO: 3848383 - DNA, 25 bp, Homo sapien
cattgttaacaatgtttaatcccgg

SEQ ID NO: 3848384 - DNA, 25 bp, Homo sapien
taatcccgggtattgaggctattca

SEQ ID NO: 3848385 - DNA, 25 bp, Homo sapien
aatgaaaaacaatggtattctccaa

SEQ ID NO: 3848386 - DNA, 25 bp, Homo sapien
ttcaagatttacaaaccaacaaatg

SEQ ID NO: 3848387 - DNA, 25 bp, Homo sapien
cataattttcaagatttacaaacca

SEQ ID NO: 3848388 - DNA, 25 bp, Homo sapien
ttctttcaataatctacatttctca

SEQ ID NO: 3848389 - DNA, 25 bp, Homo sapien
caacacctttacttccttctcaaag

SEQ ID NO: 3848390 - DNA, 25 bp, Homo sapien
gtcaacacctttacttccttctcaa

SEQ ID NO: 3848391 - DNA, 25 bp, Homo sapien
tcaacacctttacttccttctcaaa

SEQ ID NO: 3848392 - DNA, 25 bp, Homo sapien
agtcaacacctttacttccttctca

SEQ ID NO: 3848393 - DNA, 25 bp, Homo sapien
tgaatagcctgttccctcgggatcc

SEQ ID NO: 3848394 - DNA, 25 bp, Homo sapien
agctggctgaacaaccaaaggctcc

SEQ ID NO: 3848395 - DNA, 25 bp, Homo sapien
ctcgggatcctttagtggcaccact

SEQ ID NO: 3848396 - DNA, 25 bp, Homo sapien
tgcccatgaccttgttggacagagc

SEQ ID NO: 3848397 - DNA, 25 bp, Homo sapien
aatctgcatggctgagttttaaatc

SEQ ID NO: 3848398 - DNA, 25 bp, Homo sapien
ttaaatccccattcacgtacttctg

SEQ ID NO: 3848399 - DNA, 25 bp, Homo sapien
tagaagcaatagaatggaaatctgc

SEQ ID NO: 3848400 - DNA, 25 bp, Homo sapien
taataacaattagacacagaatgct

SEQ ID NO: 3848401 - DNA, 25 bp, Homo sapien
tgctccttgtatgccttgtgctcca

SEQ ID NO: 3848402 - DNA, 25 bp, Homo sapien
cactgtgatttgtagtcctgcccaa

SEQ ID NO: 3848403 - DNA, 25 bp, Homo sapien
tgtgatttgtagtcctgcccaagtg

SEQ ID NO: 3848404 - DNA, 25 bp, Homo sapien
agtgctccttgtatgccttgtgctc

SEQ ID NO: 3848405 - DNA, 25 bp, Homo sapien
cagaaaaactatacttccatgtaga

SEQ ID NO: 3848406 - DNA, 25 bp, Homo sapien
gactctcaggaccagtgtcagggtc

SEQ ID NO: 3848407 - DNA, 25 bp, Homo sapien
ccaaatcaatacctgtgacttttca

SEQ ID NO: 3848408 - DNA, 25 bp, Homo sapien
agggtcctcgagataaaacagacaa

SEQ ID NO: 3848409 - DNA, 25 bp, Homo sapien
tccagcagatatgaatggtagtctc

SEQ ID NO: 3848410 - DNA, 25 bp, Homo sapien
gtgtctctgactttcagtacctaca

SEQ ID NO: 3848411 - DNA, 25 bp, Homo sapien
cctgtggtgatggtattagtagact

SEQ ID NO: 3848412 - DNA, 25 bp, Homo sapien
caaaaggtaagctatatccagcaga

SEQ ID NO: 3848413 - DNA, 25 bp, Homo sapien
agcattgatttctaaatccctgttt

SEQ ID NO: 3848414 - DNA, 25 bp, Homo sapien
cagcattgatttctaaatccctgtt

SEQ ID NO: 3848415 - DNA, 25 bp, Homo sapien
tcagcattgatttctaaatccctgt

SEQ ID NO: 3848416 - DNA, 25 bp, Homo sapien
aaaagatcctctcaagcacacacgg

SEQ ID NO: 3848417 - DNA, 25 bp, Homo sapien
gaagctgtattatggctgtatcccc

SEQ ID NO: 3848418 - DNA, 25 bp, Homo sapien
taccgtagtgaagaagacagctggg

SEQ ID NO: 3848419 - DNA, 25 bp, Homo sapien
cccaaatgatggtgtccggacttca

SEQ ID NO: 3848420 - DNA, 25 bp, Homo sapien
ttagggtttgcttcaatcaccttac

SEQ ID NO: 3848421 - DNA, 25 bp, Homo sapien
caggaatctgtgctgtaatcagtgt

SEQ ID NO: 3848422 - DNA, 25 bp, Homo sapien
gaatctgtgctgtaatcagtgtttc

SEQ ID NO: 3848423 - DNA, 25 bp, Homo sapien
ttcatgttagggtttgcttcaatca

SEQ ID NO: 3848424 - DNA, 25 bp, Homo sapien
ggggtgtcttctgctaggatgcaca

SEQ ID NO: 3848425 - DNA, 25 bp, Homo sapien
tggggtgtcttctgctaggatgcac

SEQ ID NO: 3848426 - DNA, 25 bp, Homo sapien
tgcatttgactttgtagggctgaaa

SEQ ID NO: 3848427 - DNA, 25 bp, Homo sapien
tgtgcttccgatacaaaagtccata

SEQ ID NO: 3848428 - DNA, 25 bp, Homo sapien
aactttggcggtcggtgcatttgac

SEQ ID NO: 3848429 - DNA, 25 bp, Homo sapien
tctgcttcacaaagagtgccaagtg

SEQ ID NO: 3848430 - DNA, 25 bp, Homo sapien
cctcttgtaggacgctttatagtct

SEQ ID NO: 3848431 - DNA, 25 bp, Homo sapien
ttcctcttgtaggacgctttatagt

SEQ ID NO: 3848432 - DNA, 25 bp, Homo sapien
tcctcttgtaggacgctttatagtc

SEQ ID NO: 3848433 - DNA, 25 bp, Homo sapien
gcgaagcagtgataaaaatgggaag

SEQ ID NO: 3848434 - DNA, 25 bp, Homo sapien
aagcagtgataaaaatgggaaggga

SEQ ID NO: 3848435 - DNA, 25 bp, Homo sapien
ctgcgaagcagtgataaaaatggga

SEQ ID NO: 3848436 - DNA, 25 bp, Homo sapien
tgggaagggaaagaatcagggacca

SEQ ID NO: 3848437 - DNA, 25 bp, Homo sapien
ttggcatcctagatgatatcaagag

SEQ ID NO: 3848438 - DNA, 25 bp, Homo sapien
ttcttcacaaagaaatccggatcca

SEQ ID NO: 3848439 - DNA, 25 bp, Homo sapien
gcagcctcgccataagagatagtca

SEQ ID NO: 3848440 - DNA, 25 bp, Homo sapien
tccggatccacgatcatttcattaa

SEQ ID NO: 3848441 - DNA, 25 bp, Homo sapien
atgaggaggcttccccaaggtctct

SEQ ID NO: 3848442 - DNA, 25 bp, Homo sapien
aggaacaggcacatgaggaggcttc

SEQ ID NO: 3848443 - DNA, 25 bp, Homo sapien
gaacaggcacatgaggaggcttccc

SEQ ID NO: 3848444 - DNA, 25 bp, Homo sapien
aggcacatgaggaggcttccccaag

SEQ ID NO: 3848445 - DNA, 25 bp, Homo sapien
gcatgaagatatgtcctcaggcact

SEQ ID NO: 3848446 - DNA, 25 bp, Homo sapien
cacacagacaggtgctacagaagca

SEQ ID NO: 3848447 - DNA, 25 bp, Homo sapien
ccatgggcgagaaagacaaggacac

SEQ ID NO: 3848448 - DNA, 25 bp, Homo sapien
cagcaccagggacatatagagaaat

SEQ ID NO: 3848449 - DNA, 25 bp, Homo sapien
aggagccgctacagttacccaggtg

SEQ ID NO: 3848450 - DNA, 25 bp, Homo sapien
tctagcgcagattggcagggataca

SEQ ID NO: 3848451 - DNA, 25 bp, Homo sapien
cttccgccggcacaagaaagcttgc

SEQ ID NO: 3848452 - DNA, 25 bp, Homo sapien
gtaacaagctgcctgaacaacggag

SEQ ID NO: 3848453 - DNA, 25 bp, Homo sapien
tgttgtatcacatgaaagtcccagt

SEQ ID NO: 3848454 - DNA, 25 bp, Homo sapien
gatagaaattcattgagaagcctgc

SEQ ID NO: 3848455 - DNA, 25 bp, Homo sapien
caccaaatctttcacccgggcaaat

SEQ ID NO: 3848456 - DNA, 25 bp, Homo sapien
cctatcacttgggtttattacgaca

SEQ ID NO: 3848457 - DNA, 25 bp, Homo sapien
tcctggcttttgacccagctaccaa

SEQ ID NO: 3848458 - DNA, 25 bp, Homo sapien
tttgacccagctaccaaggatccac

SEQ ID NO: 3848459 - DNA, 25 bp, Homo sapien
caaggaactggtggataatggagcc

SEQ ID NO: 3848460 - DNA, 25 bp, Homo sapien
gccccaagctggaaggcgcttggtt

SEQ ID NO: 3848461 - DNA, 25 bp, Homo sapien
agatgacatcagtggtcgtccccgc

SEQ ID NO: 3848462 - DNA, 25 bp, Homo sapien
cctcttaaatgaccagcgggaacta

SEQ ID NO: 3848463 - DNA, 25 bp, Homo sapien
aacccgagtgtccagagttagccac

SEQ ID NO: 3848464 - DNA, 25 bp, Homo sapien
tgaccagcgggaactactgccagat

SEQ ID NO: 3848465 - DNA, 25 bp, Homo sapien
taatcttggctaaagcccttcctta

SEQ ID NO: 3848466 - DNA, 25 bp, Homo sapien
gatgatacagccataatctgtgaat

SEQ ID NO: 3848467 - DNA, 25 bp, Homo sapien
atcttggctaaagcccttccttaag

SEQ ID NO: 3848468 - DNA, 25 bp, Homo sapien
aacaaccaaccctgatgatacagcc

SEQ ID NO: 3848469 - DNA, 25 bp, Homo sapien
tcctcttcagttgatttgtattttc

SEQ ID NO: 3848470 - DNA, 25 bp, Homo sapien
ttgtattttcagctttccagcccac

SEQ ID NO: 3848471 - DNA, 25 bp, Homo sapien
cttcctcttcagttgatttgtattt

SEQ ID NO: 3848472 - DNA, 25 bp, Homo sapien
gatttgtattttcagctttccagcc

SEQ ID NO: 3848473 - DNA, 25 bp, Homo sapien
cataagctgattgctcctctctcct

SEQ ID NO: 3848474 - DNA, 25 bp, Homo sapien
aaacttctgttgtatggttgatgcc

SEQ ID NO: 3848475 - DNA, 25 bp, Homo sapien
cacattgtctaatccctcttgatct

SEQ ID NO: 3848476 - DNA, 25 bp, Homo sapien
agcataaatctatattccatctcac

SEQ ID NO: 3848477 - DNA, 25 bp, Homo sapien
aactggcaatgctgatttaggagta

SEQ ID NO: 3848478 - DNA, 25 bp, Homo sapien
ggcaatgctgatttaggagtattgc

SEQ ID NO: 3848479 - DNA, 25 bp, Homo sapien
actggcaatgctgatttaggagtat

SEQ ID NO: 3848480 - DNA, 25 bp, Homo sapien
ctggcaatgctgatttaggagtatt

SEQ ID NO: 3848481 - DNA, 25 bp, Homo sapien
acacactctcctagacatttgccaa

SEQ ID NO: 3848482 - DNA, 25 bp, Homo sapien
gacatttgccaatctcctttgccaa

SEQ ID NO: 3848483 - DNA, 25 bp, Homo sapien
tgtctccaatcggtctttgtaaaac

SEQ ID NO: 3848484 - DNA, 25 bp, Homo sapien
catctgtctccaatcggtctttgta

SEQ ID NO: 3848485 - DNA, 25 bp, Homo sapien
gaagagttagggtatttcattggga

SEQ ID NO: 3848486 - DNA, 25 bp, Homo sapien
taagtagagctggaactaccctaga

SEQ ID NO: 3848487 - DNA, 25 bp, Homo sapien
taagctctttttctggctatagtag

SEQ ID NO: 3848488 - DNA, 25 bp, Homo sapien
tgggagcagattctagccaagagct

SEQ ID NO: 3848489 - DNA, 25 bp, Homo sapien
gggattatcctcagggaaggcttta

SEQ ID NO: 3848490 - DNA, 25 bp, Homo sapien
aaacaggcagggaatctcggagata

SEQ ID NO: 3848491 - DNA, 25 bp, Homo sapien
tctcatcggatgtgaatgaagccat

SEQ ID NO: 3848492 - DNA, 25 bp, Homo sapien
gatatgttacagtcatgtggaaggg

SEQ ID NO: 3848493 - DNA, 25 bp, Homo sapien
ttcccattgtctttgtgatcaagtc

SEQ ID NO: 3848494 - DNA, 25 bp, Homo sapien
ctttgtgatcaagtctctgtacatc

SEQ ID NO: 3848495 - DNA, 25 bp, Homo sapien
tgtacatctgccatactgatttaaa

SEQ ID NO: 3848496 - DNA, 25 bp, Homo sapien
gtacatctgccatactgatttaaaa

SEQ ID NO: 3848497 - DNA, 25 bp, Homo sapien
tctaatttatatagctagggtcaac

SEQ ID NO: 3848498 - DNA, 25 bp, Homo sapien
gatgtggatactaccaaggttcaac

SEQ ID NO: 3848499 - DNA, 25 bp, Homo sapien
agtgtctggtatatgatggagctca

SEQ ID NO: 3848500 - DNA, 25 bp, Homo sapien
caacatggaactctacttgctgtat

SEQ ID NO: 3848501 - DNA, 25 bp, Homo sapien
tagatgcaccatacaaagcaccgca

SEQ ID NO: 3848502 - DNA, 25 bp, Homo sapien
gataacacagagatatagatgcacc

SEQ ID NO: 3848503 - DNA, 25 bp, Homo sapien
gaacagaactttcagcatctcttag

SEQ ID NO: 3848504 - DNA, 25 bp, Homo sapien
ttggaacatccattatcaccgtcgg

SEQ ID NO: 3848505 - DNA, 25 bp, Homo sapien
ccagaggcaataatcccaagatatc

SEQ ID NO: 3848506 - DNA, 25 bp, Homo sapien
tgttgatcaccaagctacagtgcct

SEQ ID NO: 3848507 - DNA, 25 bp, Homo sapien
tgagcaagaggccacccaatgtgaa

SEQ ID NO: 3848508 - DNA, 25 bp, Homo sapien
tttggtctttacaagctgtttccca

SEQ ID NO: 3848509 - DNA, 25 bp, Homo sapien
gttcagtctgactggccattgacag

SEQ ID NO: 3848510 - DNA, 25 bp, Homo sapien
gatgggagtaaaaccttgatggaca

SEQ ID NO: 3848511 - DNA, 25 bp, Homo sapien
tcagtaagagttcactagagcatgg

SEQ ID NO: 3848512 - DNA, 25 bp, Homo sapien
tatgacaggcatggtaggtgcagct

SEQ ID NO: 3848513 - DNA, 25 bp, Homo sapien
tgtcaacgttattctgtgactgtcc

SEQ ID NO: 3848514 - DNA, 25 bp, Homo sapien
gtgactgtcctttcaggggcctttc

SEQ ID NO: 3848515 - DNA, 25 bp, Homo sapien
ctttcttcttcgagattggcaataa

SEQ ID NO: 3848516 - DNA, 25 bp, Homo sapien
tcactgcatgtcaacgttattctgt

SEQ ID NO: 3848517 - DNA, 25 bp, Homo sapien
gttttgccaaatattttctcaccat

SEQ ID NO: 3848518 - DNA, 25 bp, Homo sapien
taatgaggctgctgttttgccaaat

SEQ ID NO: 3848519 - DNA, 25 bp, Homo sapien
gacaaaataatgaggctgctgtttt

SEQ ID NO: 3848520 - DNA, 25 bp, Homo sapien
tcctgtagacaaaataatgaggctg

SEQ ID NO: 3848521 - DNA, 25 bp, Homo sapien
taaaaagaacccagccatggcgttg

SEQ ID NO: 3848522 - DNA, 25 bp, Homo sapien
tgataaaaagaacccagccatggcg

SEQ ID NO: 3848523 - DNA, 25 bp, Homo sapien
aaagaacccagccatggcgttgctg

SEQ ID NO: 3848524 - DNA, 25 bp, Homo sapien
actgataaaaagaacccagccatgg

SEQ ID NO: 3848525 - DNA, 25 bp, Homo sapien
ctaaatatcggcaaagcaactgttt

SEQ ID NO: 3848526 - DNA, 25 bp, Homo sapien
aaatatcggcaaagcaactgtttga

SEQ ID NO: 3848527 - DNA, 25 bp, Homo sapien
taaatatcggcaaagcaactgtttg

SEQ ID NO: 3848528 - DNA, 25 bp, Homo sapien
ctaaaggttaagattcccattcatt

SEQ ID NO: 3848529 - DNA, 25 bp, Homo sapien
aattcaagctgttgagagcccactc

SEQ ID NO: 3848530 - DNA, 25 bp, Homo sapien
cactcggcgcaggttgaggtttgaa

SEQ ID NO: 3848531 - DNA, 25 bp, Homo sapien
tcggcgcaggttgaggtttgaacca

SEQ ID NO: 3848532 - DNA, 25 bp, Homo sapien
tctgcttaatacatcaaccatatca

SEQ ID NO: 3848533 - DNA, 25 bp, Homo sapien
gagaagtcattgctataatgaagtg

SEQ ID NO: 3848534 - DNA, 25 bp, Homo sapien
tctggcagctaatatatctttggag

SEQ ID NO: 3848535 - DNA, 25 bp, Homo sapien
agcatgaacacagcgcattctggca

SEQ ID NO: 3848536 - DNA, 25 bp, Homo sapien
tggcagctcaaggaacgagcctata

SEQ ID NO: 3848537 - DNA, 25 bp, Homo sapien
tgttgcaccataaacgcaggtaagc

SEQ ID NO: 3848538 - DNA, 25 bp, Homo sapien
gctgctgaccaacttcaaaacgatg

SEQ ID NO: 3848539 - DNA, 25 bp, Homo sapien
tgtgtcaaggtgcattccaaagaga

SEQ ID NO: 3848540 - DNA, 25 bp, Homo sapien
ggtactgcccaaaatcgtgggccaa

SEQ ID NO: 3848541 - DNA, 25 bp, Homo sapien
ctggtactgcccaaaatcgtgggcc

SEQ ID NO: 3848542 - DNA, 25 bp, Homo sapien
tgcccaaaatcgtgggccaaagcct

SEQ ID NO: 3848543 - DNA, 25 bp, Homo sapien
tactgcccaaaatcgtgggccaaag

SEQ ID NO: 3848544 - DNA, 25 bp, Homo sapien
aaaaactcatgcaggtatcccctct

SEQ ID NO: 3848545 - DNA, 25 bp, Homo sapien
ctatttgcagcagaacagtgtcact

SEQ ID NO: 3848546 - DNA, 25 bp, Homo sapien
caggaatgtgaccagagtgatttca

SEQ ID NO: 3848547 - DNA, 25 bp, Homo sapien
gttctatcttatgccctctgttctg

SEQ ID NO: 3848548 - DNA, 25 bp, Homo sapien
tatgaccattgattccactcctagg

SEQ ID NO: 3848549 - DNA, 25 bp, Homo sapien
gggaccactgtaccatatgaccatt

SEQ ID NO: 3848550 - DNA, 25 bp, Homo sapien
caaaaacttatacaggatgtttgtt

SEQ ID NO: 3848551 - DNA, 25 bp, Homo sapien
cttatacaggatgtttgttgaaact

SEQ ID NO: 3848552 - DNA, 25 bp, Homo sapien
acacataaggcaaagctatggtggt

SEQ ID NO: 3848553 - DNA, 25 bp, Homo sapien
cacacataaggcaaagctatggtgg

SEQ ID NO: 3848554 - DNA, 25 bp, Homo sapien
tcacacataaggcaaagctatggtg

SEQ ID NO: 3848555 - DNA, 25 bp, Homo sapien
tataaggtgctgtgttcatccagaa

SEQ ID NO: 3848556 - DNA, 25 bp, Homo sapien
cagacagtataaggtgctgtgttca

SEQ ID NO: 3848557 - DNA, 25 bp, Homo sapien
tgtccagacagtataaggtgctgtg

SEQ ID NO: 3848558 - DNA, 25 bp, Homo sapien
ttaagtgtccagacagtataaggtg

SEQ ID NO: 3848559 - DNA, 25 bp, Homo sapien
cacggcaaagagtcaaagcattgag

SEQ ID NO: 3848560 - DNA, 25 bp, Homo sapien
taatcgttaccctgagataaggtcc

SEQ ID NO: 3848561 - DNA, 25 bp, Homo sapien
ttataaaagacagatcaccgccggt

SEQ ID NO: 3848562 - DNA, 25 bp, Homo sapien
atttacgggtgctccccaggcaaag

SEQ ID NO: 3848563 - DNA, 25 bp, Homo sapien
tggtacatcttcttacagcaactgg

SEQ ID NO: 3848564 - DNA, 25 bp, Homo sapien
gcataaggtgaagcagaatgagatt

SEQ ID NO: 3848565 - DNA, 25 bp, Homo sapien
ttaactgtaagcaatactctttgtg

SEQ ID NO: 3848566 - DNA, 25 bp, Homo sapien
gaattgagttgcaatttccaaccca

SEQ ID NO: 3848567 - DNA, 25 bp, Homo sapien
aagtaacactccacaacgaatccag

SEQ ID NO: 3848568 - DNA, 25 bp, Homo sapien
gactagagttcgagagtattcccct

SEQ ID NO: 3848569 - DNA, 25 bp, Homo sapien
cacacactccttctgacggttctgg

SEQ ID NO: 3848570 - DNA, 25 bp, Homo sapien
tttccaaaggcccatatcctggtgg

SEQ ID NO: 3848571 - DNA, 25 bp, Homo sapien
gaactggcatcagcacaactgatag

SEQ ID NO: 3848572 - DNA, 25 bp, Homo sapien
tgatagccacagaccagctttcagt

SEQ ID NO: 3848573 - DNA, 25 bp, Homo sapien
tgagcctggtaaacgtgatcagtaa

SEQ ID NO: 3848574 - DNA, 25 bp, Homo sapien
gcaattcgtttccatagagcctcat

SEQ ID NO: 3848575 - DNA, 25 bp, Homo sapien
ttggaccattaagtgacaggagctg

SEQ ID NO: 3848576 - DNA, 25 bp, Homo sapien
cagcaagttatctctgtcgagttca

SEQ ID NO: 3848577 - DNA, 25 bp, Homo sapien
ggatattcaataacagagattctga

SEQ ID NO: 3848578 - DNA, 25 bp, Homo sapien
tattttagctgagtgaggatattca

SEQ ID NO: 3848579 - DNA, 25 bp, Homo sapien
ggtggcgttggagcctctaaagaaa

SEQ ID NO: 3848580 - DNA, 25 bp, Homo sapien
gtggcgttggagcctctaaagaaat

SEQ ID NO: 3848581 - DNA, 25 bp, Homo sapien
ggcgttggagcctctaaagaaatca

SEQ ID NO: 3848582 - DNA, 25 bp, Homo sapien
tggcgttggagcctctaaagaaatc

SEQ ID NO: 3848583 - DNA, 25 bp, Homo sapien
ttcagcctggtattcccagtagtct

SEQ ID NO: 3848584 - DNA, 25 bp, Homo sapien
tcagcctggtattcccagtagtctt

SEQ ID NO: 3848585 - DNA, 25 bp, Homo sapien
gtattcccagtagtctttgtatctt

SEQ ID NO: 3848586 - DNA, 25 bp, Homo sapien
ctttctagagcttcgtgaataatct

SEQ ID NO: 3848587 - DNA, 25 bp, Homo sapien
gagcttcgtgaataatctgatccaa

SEQ ID NO: 3848588 - DNA, 25 bp, Homo sapien
tagagcttcgtgaataatctgatcc

SEQ ID NO: 3848589 - DNA, 25 bp, Homo sapien
cttcgtgaataatctgatccaaagc

SEQ ID NO: 3848590 - DNA, 25 bp, Homo sapien
tctgtaccgccaaaacatatagatc

SEQ ID NO: 3848591 - DNA, 25 bp, Homo sapien
catgcaggtattggcttatcaggca

SEQ ID NO: 3848592 - DNA, 25 bp, Homo sapien
atgcaggtattggcttatcaggcat

SEQ ID NO: 3848593 - DNA, 25 bp, Homo sapien
cttgcttttcttatatagtctgaca

SEQ ID NO: 3848594 - DNA, 25 bp, Homo sapien
tcttgcttttcttatatagtctgac

SEQ ID NO: 3848595 - DNA, 25 bp, Homo sapien
tttcttatatagtctgacaatctgc

SEQ ID NO: 3848596 - DNA, 25 bp, Homo sapien
ttatatagtctgacaatctgccttt

SEQ ID NO: 3848597 - DNA, 25 bp, Homo sapien
ttccttcagggtgcctaaaactgca

SEQ ID NO: 3848598 - DNA, 25 bp, Homo sapien
taagtcagcgtaacatccatttgca

SEQ ID NO: 3848599 - DNA, 25 bp, Homo sapien
cagagctacagtcattaagtcagcg

SEQ ID NO: 3848600 - DNA, 25 bp, Homo sapien
tctggagatgagtgtttgcacaaca

SEQ ID NO: 3848601 - DNA, 25 bp, Homo sapien
tgcaatcctgctccttgaccgattc

SEQ ID NO: 3848602 - DNA, 25 bp, Homo sapien
gtgcaatcctgctccttgaccgatt

SEQ ID NO: 3848603 - DNA, 25 bp, Homo sapien
tgtgcaatcctgctccttgaccgat

SEQ ID NO: 3848604 - DNA, 25 bp, Homo sapien
caatcctgctccttgaccgattcca

SEQ ID NO: 3848605 - DNA, 25 bp, Homo sapien
caattgtgaggactttcaagcaccc

SEQ ID NO: 3848606 - DNA, 25 bp, Homo sapien
gtggggagaatccagcagccatgtt

SEQ ID NO: 3848607 - DNA, 25 bp, Homo sapien
caagcaccctataaagaagtccatg

SEQ ID NO: 3848608 - DNA, 25 bp, Homo sapien
aattccaattgtgaggactttcaag

SEQ ID NO: 3848609 - DNA, 25 bp, Homo sapien
cacgtgaactcagagcaataactca

SEQ ID NO: 3848610 - DNA, 25 bp, Homo sapien
ctcacgtgaactcagagcaataact

SEQ ID NO: 3848611 - DNA, 25 bp, Homo sapien
cgtgaactcagagcaataactcatt

SEQ ID NO: 3848612 - DNA, 25 bp, Homo sapien
gaactcagagcaataactcattcat

SEQ ID NO: 3848613 - DNA, 25 bp, Homo sapien
ggcaagttgacctcaaaagaactca

SEQ ID NO: 3848614 - DNA, 25 bp, Homo sapien
gaacacatatattctgagtcatctg

SEQ ID NO: 3848615 - DNA, 25 bp, Homo sapien
tggccagaaccacatttgcattgca

SEQ ID NO: 3848616 - DNA, 25 bp, Homo sapien
gaccgtctcataactgatcattgtg

SEQ ID NO: 3848617 - DNA, 25 bp, Homo sapien
tgtcccaacgtgttggcatgagcca

SEQ ID NO: 3848618 - DNA, 25 bp, Homo sapien
gctactaaaggttcttattttctga

SEQ ID NO: 3848619 - DNA, 25 bp, Homo sapien
gaagcatggccatcttgcacaagca

SEQ ID NO: 3848620 - DNA, 25 bp, Homo sapien
actgcacccaggctactaaaggttc

SEQ ID NO: 3848621 - DNA, 25 bp, Homo sapien
agaatcctgctagtgcgcttcccgc

SEQ ID NO: 3848622 - DNA, 25 bp, Homo sapien
tccttgtcacagaaccacgaaaaaa

SEQ ID NO: 3848623 - DNA, 25 bp, Homo sapien
cgcctcacaaattgaatcccaggta

SEQ ID NO: 3848624 - DNA, 25 bp, Homo sapien
ggacactctgcaaagtcagaatcct

SEQ ID NO: 3848625 - DNA, 25 bp, Homo sapien
taaccttagatcctacaatttcagt

SEQ ID NO: 3848626 - DNA, 25 bp, Homo sapien
tcactgaattgagcgctttagatgg

SEQ ID NO: 3848627 - DNA, 25 bp, Homo sapien
gattttcctctaccctaccattctg

SEQ ID NO: 3848628 - DNA, 25 bp, Homo sapien
attccctagagatgtgaggtaagac

SEQ ID NO: 3848629 - DNA, 25 bp, Homo sapien
cttgacatccttagaaacagggtct

SEQ ID NO: 3848630 - DNA, 25 bp, Homo sapien
tctcagtggaaaaagagagacctaa

SEQ ID NO: 3848631 - DNA, 25 bp, Homo sapien
gggacattttaccagcctaccactg

SEQ ID NO: 3848632 - DNA, 25 bp, Homo sapien
taagccagttacagacctcagttct

SEQ ID NO: 3848633 - DNA, 25 bp, Homo sapien
gagcggagtcctcggtgcccgcggg

SEQ ID NO: 3848634 - DNA, 25 bp, Homo sapien
ggagtcctcggtgcccgcgggagag

SEQ ID NO: 3848635 - DNA, 25 bp, Homo sapien
ggcaggagcggagtcctcggtgccc

SEQ ID NO: 3848636 - DNA, 25 bp, Homo sapien
tgggcaggagcggagtcctcggtgc

SEQ ID NO: 3848637 - DNA, 25 bp, Homo sapien
gttcggccgcggctcaggaacacca

SEQ ID NO: 3848638 - DNA, 25 bp, Homo sapien
gcggctcaggaacaccaagcgcggc

SEQ ID NO: 3848639 - DNA, 25 bp, Homo sapien
gctcctcgggcctccaaacgtggga

SEQ ID NO: 3848640 - DNA, 25 bp, Homo sapien
tgggaaaaagttcggccgcggctca

SEQ ID NO: 3848641 - DNA, 25 bp, Homo sapien
cgatgtcagtgcatgcagagagatg

SEQ ID NO: 3848642 - DNA, 25 bp, Homo sapien
aaggtgaaggcatagaggtttctgg

SEQ ID NO: 3848643 - DNA, 25 bp, Homo sapien
tttaaagggcgagagggagaagatc

SEQ ID NO: 3848644 - DNA, 25 bp, Homo sapien
cagagagatgtgcataggggccttt

SEQ ID NO: 3848645 - DNA, 25 bp, Homo sapien
catccacaatatgccaagccttggg

SEQ ID NO: 3848646 - DNA, 25 bp, Homo sapien
tgttctcctggtgccttgtgcacag

SEQ ID NO: 3848647 - DNA, 25 bp, Homo sapien
tgccttgtgcacagctgacagtaag

SEQ ID NO: 3848648 - DNA, 25 bp, Homo sapien
taagcccacaataacttctacgaag

SEQ ID NO: 3848649 - DNA, 25 bp, Homo sapien
ctagtcgactatctccaccccactg

SEQ ID NO: 3848650 - DNA, 25 bp, Homo sapien
tcacttctgctagcattagcagttt

SEQ ID NO: 3848651 - DNA, 25 bp, Homo sapien
tgtcacttctgctagcattagcagt

SEQ ID NO: 3848652 - DNA, 25 bp, Homo sapien
atgtcacttctgctagcattagcag

SEQ ID NO: 3848653 - DNA, 25 bp, Homo sapien
gtcacttctgctagcattagcagtt

SEQ ID NO: 3848654 - DNA, 25 bp, Homo sapien
tcttggaaattgagcggagagcgac

SEQ ID NO: 3848655 - DNA, 25 bp, Homo sapien
aaactgctcgcacttggcttcaaag

SEQ ID NO: 3848656 - DNA, 25 bp, Homo sapien
tacgggctacccgattggtgaatcc

SEQ ID NO: 3848657 - DNA, 25 bp, Homo sapien
tagaaacagtaggacgacactctcc

SEQ ID NO: 3848658 - DNA, 25 bp, Homo sapien
gattgaagcaaaatccgctccccca

SEQ ID NO: 3848659 - DNA, 25 bp, Homo sapien
tgttctcaggaactgcctgaagagg

SEQ ID NO: 3848660 - DNA, 25 bp, Homo sapien
cacgctgagcgcctgcggagtagca

SEQ ID NO: 3848661 - DNA, 25 bp, Homo sapien
tcatgagtcgaggtcggctgttctc

SEQ ID NO: 3848662 - DNA, 25 bp, Homo sapien
cacaaggtggacttatttgcatatg

SEQ ID NO: 3848663 - DNA, 25 bp, Homo sapien
ctgagataacatagaactggtaggt

SEQ ID NO: 3848664 - DNA, 25 bp, Homo sapien
cactctgcagaggtagcgctgttag

SEQ ID NO: 3848665 - DNA, 25 bp, Homo sapien
taatgaaagcctagggcagagtggt

SEQ ID NO: 3848666 - DNA, 25 bp, Homo sapien
cacaattgacatatcttggagtgga

SEQ ID NO: 3848667 - DNA, 25 bp, Homo sapien
cagagtgtaaagactccttatgcca

SEQ ID NO: 3848668 - DNA, 25 bp, Homo sapien
caaagtctatcccagttgcgaacca

SEQ ID NO: 3848669 - DNA, 25 bp, Homo sapien
tatactcttcacagttaggacaacc

SEQ ID NO: 3848670 - DNA, 25 bp, Homo sapien
taaaaagctaacatgagagcatgcc

SEQ ID NO: 3848671 - DNA, 25 bp, Homo sapien
gcttatcttggctttcgagtctgag

SEQ ID NO: 3848672 - DNA, 25 bp, Homo sapien
tacaaagatcaagggctgtccgcaa

SEQ ID NO: 3848673 - DNA, 25 bp, Homo sapien
aagtgaattcttatgccttggtcag

SEQ ID NO: 3848674 - DNA, 25 bp, Homo sapien
caagggtgacccaggtggaatccgt

SEQ ID NO: 3848675 - DNA, 25 bp, Homo sapien
taaatgccggctttccactccttgt

SEQ ID NO: 3848676 - DNA, 25 bp, Homo sapien
gtgcaaggcgtaggcaaatgacctc

SEQ ID NO: 3848677 - DNA, 25 bp, Homo sapien
cagcagtagtaaattggtgcaaggc

SEQ ID NO: 3848678 - DNA, 25 bp, Homo sapien
catatatgatacctgcccagaccct

SEQ ID NO: 3848679 - DNA, 25 bp, Homo sapien
cttctccctgttgcctttcttgatc

SEQ ID NO: 3848680 - DNA, 25 bp, Homo sapien
aagcatatatgatacctgcccagac

SEQ ID NO: 3848681 - DNA, 25 bp, Homo sapien
tgcactgcttctccctgttgccttt

SEQ ID NO: 3848682 - DNA, 25 bp, Homo sapien
ctgataagatatggggaggaatttg

SEQ ID NO: 3848683 - DNA, 25 bp, Homo sapien
ggcaaggcagaagctgtgcattcta

SEQ ID NO: 3848684 - DNA, 25 bp, Homo sapien
tatggggaggaatttggctgagttc

SEQ ID NO: 3848685 - DNA, 25 bp, Homo sapien
ggtcccaggagttctaaattgcagg

SEQ ID NO: 3848686 - DNA, 25 bp, Homo sapien
gatatgccctttccgtcaggatcca

SEQ ID NO: 3848687 - DNA, 25 bp, Homo sapien
ccctttccgtcaggatccagagttt

SEQ ID NO: 3848688 - DNA, 25 bp, Homo sapien
ctggatatgccctttccgtcaggat

SEQ ID NO: 3848689 - DNA, 25 bp, Homo sapien
tatgccctttccgtcaggatccaga

SEQ ID NO: 3848690 - DNA, 25 bp, Homo sapien
ctcttctccacagttacttcccagc

SEQ ID NO: 3848691 - DNA, 25 bp, Homo sapien
tgcttcctgtagccctgttcctctt

SEQ ID NO: 3848692 - DNA, 25 bp, Homo sapien
cttctccacagttacttcccagcca

SEQ ID NO: 3848693 - DNA, 25 bp, Homo sapien
cttttcttattacttggagaatcca

SEQ ID NO: 3848694 - DNA, 25 bp, Homo sapien
tcttatactgccagacatttacatt

SEQ ID NO: 3848695 - DNA, 25 bp, Homo sapien
tggagttggaggagcatcagtcggg

SEQ ID NO: 3848696 - DNA, 25 bp, Homo sapien
tgagttcccctctcttatactgcca

SEQ ID NO: 3848697 - DNA, 25 bp, Homo sapien
taaaatgtccaatagagtcccccat

SEQ ID NO: 3848698 - DNA, 25 bp, Homo sapien
tgttttgcagtgtcttcggtggttg

SEQ ID NO: 3848699 - DNA, 25 bp, Homo sapien
cactagatgtcactatggcatcttt

SEQ ID NO: 3848700 - DNA, 25 bp, Homo sapien
tctctcatcccactgtgacatgttt

SEQ ID NO: 3848701 - DNA, 25 bp, Homo sapien
cttcggtggttgaccactagatgtc

SEQ ID NO: 3848702 - DNA, 25 bp, Homo sapien
taacacagcttcattgagggcctgc

SEQ ID NO: 3848703 - DNA, 25 bp, Homo sapien
gccaagacctggagattttctgtcc

SEQ ID NO: 3848704 - DNA, 25 bp, Homo sapien
gagacagttgtctccatgaaacagg

SEQ ID NO: 3848705 - DNA, 25 bp, Homo sapien
ttccagaagcgtagagagacagttg

SEQ ID NO: 3848706 - DNA, 25 bp, Homo sapien
gcagccaggttatatattggtgagc

SEQ ID NO: 3848707 - DNA, 25 bp, Homo sapien
cctgcatggtatcgttcatggattc

SEQ ID NO: 3848708 - DNA, 25 bp, Homo sapien
ggtatcgttcatggattctgaccat

SEQ ID NO: 3848709 - DNA, 25 bp, Homo sapien
cactcctgcatggtatcgttcatgg

SEQ ID NO: 3848710 - DNA, 25 bp, Homo sapien
gcatggtatcgttcatggattctga

SEQ ID NO: 3848711 - DNA, 25 bp, Homo sapien
gttctttggaatcaccctgcttgtt

SEQ ID NO: 3848712 - DNA, 25 bp, Homo sapien
tgccaaacaccctatatgccaaatg

SEQ ID NO: 3848713 - DNA, 25 bp, Homo sapien
ctccgtgattatgtggctgattgcc

SEQ ID NO: 3848714 - DNA, 25 bp, Homo sapien
aagacacttcaagcccatcactgct

SEQ ID NO: 3848715 - DNA, 25 bp, Homo sapien
ccaagttacttgaggaagacacttc

SEQ ID NO: 3848716 - DNA, 25 bp, Homo sapien
gatgagaaacaaccaccttaaaggc

SEQ ID NO: 3848717 - DNA, 25 bp, Homo sapien
agattatcgaccctaaccaacccag

SEQ ID NO: 3848718 - DNA, 25 bp, Homo sapien
taagatggtcacctctccaggtgga

SEQ ID NO: 3848719 - DNA, 25 bp, Homo sapien
tccaggtggagcaccctcttgattt

SEQ ID NO: 3848720 - DNA, 25 bp, Homo sapien
ccatgtcgctgtggaaactgaacga

SEQ ID NO: 3848721 - DNA, 25 bp, Homo sapien
gaggcaagtcgcttcacgtctgcta

SEQ ID NO: 3848722 - DNA, 25 bp, Homo sapien
ttcacgtctgtggatatgcaactgc

SEQ ID NO: 3848723 - DNA, 25 bp, Homo sapien
aactgaacgacaggagaggcaagtc

SEQ ID NO: 3848724 - DNA, 25 bp, Homo sapien
cagtagctgataacaacactagtgg

SEQ ID NO: 3848725 - DNA, 25 bp, Homo sapien
ccattttatggtgggatacatgtca

SEQ ID NO: 3848726 - DNA, 25 bp, Homo sapien
taaaggccataatcagcatcaacca

SEQ ID NO: 3848727 - DNA, 25 bp, Homo sapien
gcatcaaccaaatgaaccagccact

SEQ ID NO: 3848728 - DNA, 25 bp, Homo sapien
tgactgactgcctcacgaaagctcc

SEQ ID NO: 3848729 - DNA, 25 bp, Homo sapien
tgagaaagagtcagaacgaactcac

SEQ ID NO: 3848730 - DNA, 25 bp, Homo sapien
tttgacctcccaacagaatgagccc

SEQ ID NO: 3848731 - DNA, 25 bp, Homo sapien
gtcacacttcctagtttaacactga

SEQ ID NO: 3848732 - DNA, 25 bp, Homo sapien
tttccgtgtaggagaacgcaggcgc

SEQ ID NO: 3848733 - DNA, 25 bp, Homo sapien
aataatgctcggtggtcatgtgggc

SEQ ID NO: 3848734 - DNA, 25 bp, Homo sapien
tatgtattcaggtccaccagtgagt

SEQ ID NO: 3848735 - DNA, 25 bp, Homo sapien
taatacagcaatccgaacaccagcg

SEQ ID NO: 3848736 - DNA, 25 bp, Homo sapien
aaaatattttccaatctggaatcag

SEQ ID NO: 3848737 - DNA, 25 bp, Homo sapien
aataaagtaatacacagtattttca

SEQ ID NO: 3848738 - DNA, 25 bp, Homo sapien
tctggaatcagaaacatgaaagctg

SEQ ID NO: 3848739 - DNA, 25 bp, Homo sapien
tcatttcaacaaaatacaacagacc

SEQ ID NO: 3848740 - DNA, 25 bp, Homo sapien
acatatcagtttaaggaatgcagtg

SEQ ID NO: 3848741 - DNA, 25 bp, Homo sapien
aaggaatgcagtgagagtcagcttc

SEQ ID NO: 3848742 - DNA, 25 bp, Homo sapien
aggaatgcagtgagagtcagcttcc

SEQ ID NO: 3848743 - DNA, 25 bp, Homo sapien
tatacatatcagtttaaggaatgca

SEQ ID NO: 3848744 - DNA, 25 bp, Homo sapien
gtgcccgaaacctgaactatgtcgt

SEQ ID NO: 3848745 - DNA, 25 bp, Homo sapien
aacaagacgaattttatagtagtgc

SEQ ID NO: 3848746 - DNA, 25 bp, Homo sapien
tttgaaaagtggtggatcagattac

SEQ ID NO: 3848747 - DNA, 25 bp, Homo sapien
actatgtcgtatctctaacaagacg

SEQ ID NO: 3848748 - DNA, 25 bp, Homo sapien
gaagcaccactttcgtcttgagcga

SEQ ID NO: 3848749 - DNA, 25 bp, Homo sapien
actgctggagatgaattccagaagc

SEQ ID NO: 3848750 - DNA, 25 bp, Homo sapien
cacacgctggtagtgatcttcttcc

SEQ ID NO: 3848751 - DNA, 25 bp, Homo sapien
tcttgagcgatgcttatttagtgca

SEQ ID NO: 3848752 - DNA, 25 bp, Homo sapien
ggtgaaggaaagatgcagaccataa

SEQ ID NO: 3848753 - DNA, 25 bp, Homo sapien
gaaggaaagatgcagaccataagac

SEQ ID NO: 3848754 - DNA, 25 bp, Homo sapien
tgaaggaaagatgcagaccataaga

SEQ ID NO: 3848755 - DNA, 25 bp, Homo sapien
ctggtgaaggaaagatgcagaccat

SEQ ID NO: 3848756 - DNA, 25 bp, Homo sapien
tagggccatttgcaaaaggtgacac

SEQ ID NO: 3848757 - DNA, 25 bp, Homo sapien
ggtgacactaacgttctgagaggaa

SEQ ID NO: 3848758 - DNA, 25 bp, Homo sapien
tatcctctcaaaaacgtgatgcggc

SEQ ID NO: 3848759 - DNA, 25 bp, Homo sapien
tacctgtagtcatgcagctgggcac

SEQ ID NO: 3848760 - DNA, 25 bp, Homo sapien
tagaagataaaagcttccatgagag

SEQ ID NO: 3848761 - DNA, 25 bp, Homo sapien
tctcgaggaatcatccatgagctgc

SEQ ID NO: 3848762 - DNA, 25 bp, Homo sapien
ctgaccatgttcctttccagggaca

SEQ ID NO: 3848763 - DNA, 25 bp, Homo sapien
gaccaccagccagtctcgaggaatc

SEQ ID NO: 3848764 - DNA, 25 bp, Homo sapien
gagcatacactgttgtagttggtgc

SEQ ID NO: 3848765 - DNA, 25 bp, Homo sapien
gtgcagatgtggtgcaaacaccagg

SEQ ID NO: 3848766 - DNA, 25 bp, Homo sapien
ttgatttccttacggaacttggagc

SEQ ID NO: 3848767 - DNA, 25 bp, Homo sapien
cggccaactggtgggcattgtgaaa

SEQ ID NO: 3848768 - DNA, 25 bp, Homo sapien
tttagaaaactccagaacagctgca

SEQ ID NO: 3848769 - DNA, 25 bp, Homo sapien
tgtgccagggactagataattctgc

SEQ ID NO: 3848770 - DNA, 25 bp, Homo sapien
cattgttaatcagcctgtgccaggg

SEQ ID NO: 3848771 - DNA, 25 bp, Homo sapien
tactccatggtgaagctaaagctga

SEQ ID NO: 3848772 - DNA, 25 bp, Homo sapien
cactcgtggcggctttggtcaactc

SEQ ID NO: 3848773 - DNA, 25 bp, Homo sapien
ttccaagtaagagagcacttctccg

SEQ ID NO: 3848774 - DNA, 25 bp, Homo sapien
ggtcaactcctgaacggcatgctgt

SEQ ID NO: 3848775 - DNA, 25 bp, Homo sapien
ccgtcaatgcccacgccactcgtgg

SEQ ID NO: 3848776 - DNA, 25 bp, Homo sapien
gagacctgcagttagaagtaacaaa

SEQ ID NO: 3848777 - DNA, 25 bp, Homo sapien
gagccatttttgcttgggagcttga

SEQ ID NO: 3848778 - DNA, 25 bp, Homo sapien
tacgttctggtctgaagctaggcca

SEQ ID NO: 3848779 - DNA, 25 bp, Homo sapien
gactgacgtgtgagggtacagcctt

SEQ ID NO: 3848780 - DNA, 25 bp, Homo sapien
tatcctatgcagacctgcttcagct

SEQ ID NO: 3848781 - DNA, 25 bp, Homo sapien
tatatcctatgcagacctgcttcag

SEQ ID NO: 3848782 - DNA, 25 bp, Homo sapien
tcatatatcctatgcagacctgctt

SEQ ID NO: 3848783 - DNA, 25 bp, Homo sapien
catatatcctatgcagacctgcttc

SEQ ID NO: 3848784 - DNA, 25 bp, Homo sapien
caaggcaattaattccagcgggtcc

SEQ ID NO: 3848785 - DNA, 25 bp, Homo sapien
tttgccaaggcaattaattccagcg

SEQ ID NO: 3848786 - DNA, 25 bp, Homo sapien
caggcaaaatctgtttgccaaggca

SEQ ID NO: 3848787 - DNA, 25 bp, Homo sapien
caattaattccagcgggtccagatc

SEQ ID NO: 3848788 - DNA, 25 bp, Homo sapien
tcttgtttatgttcgggagatacac

SEQ ID NO: 3848789 - DNA, 25 bp, Homo sapien
aactgcttggtatagagataatcca

SEQ ID NO: 3848790 - DNA, 25 bp, Homo sapien
tggtatagagataatccaatactgc

SEQ ID NO: 3848791 - DNA, 25 bp, Homo sapien
caatactgcttgcattgatatcttg

SEQ ID NO: 3848792 - DNA, 25 bp, Homo sapien
ctgaaatgttatacaaaaagctaaa

SEQ ID NO: 3848793 - DNA, 25 bp, Homo sapien
tgaaatgttatacaaaaagctaaat

SEQ ID NO: 3848794 - DNA, 25 bp, Homo sapien
tggccggttatgaacttcttaattc

SEQ ID NO: 3848795 - DNA, 25 bp, Homo sapien
ctgcagtggcttgatgatagcttag

SEQ ID NO: 3848796 - DNA, 25 bp, Homo sapien
tttttgtagaaatggcgggcttgct

SEQ ID NO: 3848797 - DNA, 25 bp, Homo sapien
gcttgatgatagcttaggcctgggc

SEQ ID NO: 3848798 - DNA, 25 bp, Homo sapien
tgttattctcctatgcagccaccag

SEQ ID NO: 3848799 - DNA, 25 bp, Homo sapien
gcttatggcttatgcactctggcag

SEQ ID NO: 3848800 - DNA, 25 bp, Homo sapien
tcctttcagataggtagacccatcc

SEQ ID NO: 3848801 - DNA, 25 bp, Homo sapien
cagacatggttggtgaaaacgacaa

SEQ ID NO: 3848802 - DNA, 25 bp, Homo sapien
gaaacaggtttagagtgagccactt

SEQ ID NO: 3848803 - DNA, 25 bp, Homo sapien
ggagattagcattcgtgaggtcagc

SEQ ID NO: 3848804 - DNA, 25 bp, Homo sapien
cagttctaagtggtgagggacctca

SEQ ID NO: 3848805 - DNA, 25 bp, Homo sapien
aattgtggcacaggtcttcagtggc

SEQ ID NO: 3848806 - DNA, 25 bp, Homo sapien
agttgagatttgagtcccacagtcc

SEQ ID NO: 3848807 - DNA, 25 bp, Homo sapien
tcaggatactagagccaagaaaggt

SEQ ID NO: 3848808 - DNA, 25 bp, Homo sapien
gctgttagacaccataagaggccat

SEQ ID NO: 3848809 - DNA, 25 bp, Homo sapien
tcattagtcacaggtgagagtctcc

SEQ ID NO: 3848810 - DNA, 25 bp, Homo sapien
tacacaatgggatactatatagccc

SEQ ID NO: 3848811 - DNA, 25 bp, Homo sapien
tcgaatttcttgtgctagtgcctca

SEQ ID NO: 3848812 - DNA, 25 bp, Homo sapien
tagtgcctcatgtgaaaagttagct

SEQ ID NO: 3848813 - DNA, 25 bp, Homo sapien
ggctgtactcccatgttaactgtag

SEQ ID NO: 3848814 - DNA, 25 bp, Homo sapien
taacctgaaggacaatctagtgcat

SEQ ID NO: 3848815 - DNA, 25 bp, Homo sapien
ttctgaactactgggagacatgctc

SEQ ID NO: 3848816 - DNA, 25 bp, Homo sapien
cagagccttagacagtattgtagca

SEQ ID NO: 3848817 - DNA, 25 bp, Homo sapien
ggaatgcggcttctcaaggtcccct

SEQ ID NO: 3848818 - DNA, 25 bp, Homo sapien
cactgatggctccatcgtccaattt

SEQ ID NO: 3848819 - DNA, 25 bp, Homo sapien
tccatcgtccaatttaaatgtcacg

SEQ ID NO: 3848820 - DNA, 25 bp, Homo sapien
tgccatccactcacagctacagatc

SEQ ID NO: 3848821 - DNA, 25 bp, Homo sapien
acaaatgaccccccgaacatggctg

SEQ ID NO: 3848822 - DNA, 25 bp, Homo sapien
attgaggaaacacaaccatgagcca

SEQ ID NO: 3848823 - DNA, 25 bp, Homo sapien
acaaccatgagccaactttgctgag

SEQ ID NO: 3848824 - DNA, 25 bp, Homo sapien
gaggaaacacaaccatgagccaact

SEQ ID NO: 3848825 - DNA, 25 bp, Homo sapien
gaaacacaaccatgagccaactttg

SEQ ID NO: 3848826 - DNA, 25 bp, Homo sapien
ttaatggctctgccccgcggcccac

SEQ ID NO: 3848827 - DNA, 25 bp, Homo sapien
taatggctctgccccgcggcccact

SEQ ID NO: 3848828 - DNA, 25 bp, Homo sapien
tggctctgccccgcggcccactcac

SEQ ID NO: 3848829 - DNA, 25 bp, Homo sapien
atggctctgccccgcggcccactca

SEQ ID NO: 3848830 - DNA, 25 bp, Homo sapien
tgaacagaacatcggcacatagagg

SEQ ID NO: 3848831 - DNA, 25 bp, Homo sapien
tgaagacttccactggtcggcctga

SEQ ID NO: 3848832 - DNA, 25 bp, Homo sapien
cgagaacgttcccttgctgagacac

SEQ ID NO: 3848833 - DNA, 25 bp, Homo sapien
gaggattgtccagtaaacaggcagc

SEQ ID NO: 3848834 - DNA, 25 bp, Homo sapien
gaacattttaaaaattataatcagc

SEQ ID NO: 3848835 - DNA, 25 bp, Homo sapien
agaacattttaaaaattataatcag

SEQ ID NO: 3848836 - DNA, 25 bp, Homo sapien
tggactggtgcattagccccttaac

SEQ ID NO: 3848837 - DNA, 25 bp, Homo sapien
caagccttcttttgcttggactggt

SEQ ID NO: 3848838 - DNA, 25 bp, Homo sapien
taaatgatccacttcctacagctct

SEQ ID NO: 3848839 - DNA, 25 bp, Homo sapien
ctgttggatttgtgaattctctttc

SEQ ID NO: 3848840 - DNA, 25 bp, Homo sapien
agctggcacccaacaaggataacgg

SEQ ID NO: 3848841 - DNA, 25 bp, Homo sapien
gattaacagcttccaggtcggcata

SEQ ID NO: 3848842 - DNA, 25 bp, Homo sapien
taacgggcgcctggctcgattaaca

SEQ ID NO: 3848843 - DNA, 25 bp, Homo sapien
gcatagcggagatcaagctggcacc

SEQ ID NO: 3848844 - DNA, 25 bp, Homo sapien
tgggattagcaatcgaaaaacagag

SEQ ID NO: 3848845 - DNA, 25 bp, Homo sapien
catgatttagggaattgggattagc

SEQ ID NO: 3848846 - DNA, 25 bp, Homo sapien
ttttcacatgatttagggaattggg

SEQ ID NO: 3848847 - DNA, 25 bp, Homo sapien
caatcgaaaaacagaggaccacaac

SEQ ID NO: 3848848 - DNA, 25 bp, Homo sapien
gctgatgcattgacgtttccgatga

SEQ ID NO: 3848849 - DNA, 25 bp, Homo sapien
cttggagtcatgcaaacagcctgat

SEQ ID NO: 3848850 - DNA, 25 bp, Homo sapien
gcctaacagttcatttccatattgc

SEQ ID NO: 3848851 - DNA, 25 bp, Homo sapien
tattgcactgcagaatgctgatgca

SEQ ID NO: 3848852 - DNA, 25 bp, Homo sapien
ttttacgggcaatgagaaggacagt

SEQ ID NO: 3848853 - DNA, 25 bp, Homo sapien
tggttgggtctcttgatacagtaac

SEQ ID NO: 3848854 - DNA, 25 bp, Homo sapien
gaaggacagtggactccaccaagtt

SEQ ID NO: 3848855 - DNA, 25 bp, Homo sapien
tctccagaaagctatgagtgggaca

SEQ ID NO: 3848856 - DNA, 25 bp, Homo sapien
ccctgctggtaactgaggtaggttc

SEQ ID NO: 3848857 - DNA, 25 bp, Homo sapien
gtcgacaacatatctttcatgcata

SEQ ID NO: 3848858 - DNA, 25 bp, Homo sapien
gacaacatatctttcatgcatatag

SEQ ID NO: 3848859 - DNA, 25 bp, Homo sapien
tcgacaacatatctttcatgcatat

SEQ ID NO: 3848860 - DNA, 25 bp, Homo sapien
cgacaacatatctttcatgcatata

SEQ ID NO: 3848861 - DNA, 25 bp, Homo sapien
ccattagggccagtacttgagtgaa

SEQ ID NO: 3848862 - DNA, 25 bp, Homo sapien
tcttcccttagttactttgctatct

SEQ ID NO: 3848863 - DNA, 25 bp, Homo sapien
aaacttcagtgatccagataatact

SEQ ID NO: 3848864 - DNA, 25 bp, Homo sapien
tgtctttaagacacaaccagtaata

SEQ ID NO: 3848865 - DNA, 25 bp, Homo sapien
taactctctgagtccccttgaaaga

SEQ ID NO: 3848866 - DNA, 25 bp, Homo sapien
gaaagtggtctaagtcacagattct

SEQ ID NO: 3848867 - DNA, 25 bp, Homo sapien
cagcagttacaagcaggttcattta

SEQ ID NO: 3848868 - DNA, 25 bp, Homo sapien
taggtgttacaaacctgactgccca

SEQ ID NO: 3848869 - DNA, 25 bp, Homo sapien
gcaatcaaagcagcccgcagttgga

SEQ ID NO: 3848870 - DNA, 25 bp, Homo sapien
caagtgaagtgttactcagagaacc

SEQ ID NO: 3848871 - DNA, 25 bp, Homo sapien
tctgaagtagggtgaccaagtgcca

SEQ ID NO: 3848872 - DNA, 25 bp, Homo sapien
tgttgatttgtaaacccgctgctgg

SEQ ID NO: 3848873 - DNA, 25 bp, Homo sapien
tcatcaacaacatcccgagaacgct

SEQ ID NO: 3848874 - DNA, 25 bp, Homo sapien
gcaaagcgtctgtctttgtgatgat

SEQ ID NO: 3848875 - DNA, 25 bp, Homo sapien
gatgatcaccaaaagtatcccaaag

SEQ ID NO: 3848876 - DNA, 25 bp, Homo sapien
caccaaaagtatcccaaagcctgag

SEQ ID NO: 3848877 - DNA, 25 bp, Homo sapien
tggtcaatcgcccacactgttggca

SEQ ID NO: 3848878 - DNA, 25 bp, Homo sapien
tctttcgtagtccatgtcagcgtcc

SEQ ID NO: 3848879 - DNA, 25 bp, Homo sapien
ggccagcagctgatactgcgtgagt

SEQ ID NO: 3848880 - DNA, 25 bp, Homo sapien
ctggcacacgcggtactggtcaatc

SEQ ID NO: 3848881 - DNA, 25 bp, Homo sapien
gagggagtctattgttaaactaata

SEQ ID NO: 3848882 - DNA, 25 bp, Homo sapien
tctattgttaaactaataagaacag

SEQ ID NO: 3848883 - DNA, 25 bp, Homo sapien
tttgagggagtctattgttaaacta

SEQ ID NO: 3848884 - DNA, 25 bp, Homo sapien
ttgttaaactaataagaacagatgc

SEQ ID NO: 3848885 - DNA, 25 bp, Homo sapien
tttctatcaaggcatggtgagcagt

SEQ ID NO: 3848886 - DNA, 25 bp, Homo sapien
catggtgagcagtctgcttaaagac

SEQ ID NO: 3848887 - DNA, 25 bp, Homo sapien
tggtgagcagtctgcttaaagacaa

SEQ ID NO: 3848888 - DNA, 25 bp, Homo sapien
tatttgctatttctatcaaggcatg

SEQ ID NO: 3848889 - DNA, 25 bp, Homo sapien
tggagtgcaatcacatgatagctca

SEQ ID NO: 3848890 - DNA, 25 bp, Homo sapien
atcacatgatagctcactgcgacct

SEQ ID NO: 3848891 - DNA, 25 bp, Homo sapien
gagtgcaatcacatgatagctcact

SEQ ID NO: 3848892 - DNA, 25 bp, Homo sapien
gcaatcacatgatagctcactgcga

SEQ ID NO: 3848893 - DNA, 25 bp, Homo sapien
cactgtctttaagagggtttatcaa

SEQ ID NO: 3848894 - DNA, 25 bp, Homo sapien
cagagatgcggccaagtacagattc

SEQ ID NO: 3848895 - DNA, 25 bp, Homo sapien
cagattcaagttacattctggaaga

SEQ ID NO: 3848896 - DNA, 25 bp, Homo sapien
tacactgtctttaagagggtttatc

SEQ ID NO: 3848897 - DNA, 25 bp, Homo sapien
ggggctggcagagaacttgcatgca

SEQ ID NO: 3848898 - DNA, 25 bp, Homo sapien
gggctggcagagaacttgcatgcag

SEQ ID NO: 3848899 - DNA, 25 bp, Homo sapien
ctggggctggcagagaacttgcatg

SEQ ID NO: 3848900 - DNA, 25 bp, Homo sapien
tggggctggcagagaacttgcatgc

SEQ ID NO: 3848901 - DNA, 25 bp, Homo sapien
taacaggaagtgcatcagtaaccat

SEQ ID NO: 3848902 - DNA, 25 bp, Homo sapien
caagagcagtgtttgacagatggca

SEQ ID NO: 3848903 - DNA, 25 bp, Homo sapien
tgactgatcattaagccctgtggcc

SEQ ID NO: 3848904 - DNA, 25 bp, Homo sapien
taagcctgcagttggtgagagaaac

SEQ ID NO: 3848905 - DNA, 25 bp, Homo sapien
agtaattgcaggcaggaggggcata

SEQ ID NO: 3848906 - DNA, 25 bp, Homo sapien
gaggagagccccagtaattgcaggc

SEQ ID NO: 3848907 - DNA, 25 bp, Homo sapien
ggaggagagccccagtaattgcagg

SEQ ID NO: 3848908 - DNA, 25 bp, Homo sapien
ttcaccaaatgggaaggtggtggtg

SEQ ID NO: 3848909 - DNA, 25 bp, Homo sapien
cagaaactggaaggatttccgccaa

SEQ ID NO: 3848910 - DNA, 25 bp, Homo sapien
tgataacaccactgatgaccagcag

SEQ ID NO: 3848911 - DNA, 25 bp, Homo sapien
gaccagcagactgccatgtccacgg

SEQ ID NO: 3848912 - DNA, 25 bp, Homo sapien
ttccatggagccaaatgataacacc

SEQ ID NO: 3848913 - DNA, 25 bp, Homo sapien
tcttcatcccttcttacagggctag

SEQ ID NO: 3848914 - DNA, 25 bp, Homo sapien
tcatcccttcttacagggctagcca

SEQ ID NO: 3848915 - DNA, 25 bp, Homo sapien
catcccttcttacagggctagccat

SEQ ID NO: 3848916 - DNA, 25 bp, Homo sapien
ttcatcccttcttacagggctagcc

SEQ ID NO: 3848917 - DNA, 25 bp, Homo sapien
tcttggcagcactatccaaaacagc

SEQ ID NO: 3848918 - DNA, 25 bp, Homo sapien
gatctatatgatctgtgcagaagcc

SEQ ID NO: 3848919 - DNA, 25 bp, Homo sapien
taggaattttgcaggcccattagtg

SEQ ID NO: 3848920 - DNA, 25 bp, Homo sapien
tgtggatctactaaaactgtgggct

SEQ ID NO: 3848921 - DNA, 25 bp, Homo sapien
taatcaactgcaacataggttggcc

SEQ ID NO: 3848922 - DNA, 25 bp, Homo sapien
ctgccagcatttatatgggagctgc

SEQ ID NO: 3848923 - DNA, 25 bp, Homo sapien
ggagctgcaccccttaatcaactgc

SEQ ID NO: 3848924 - DNA, 25 bp, Homo sapien
taggttggcctatggatagaagagt

SEQ ID NO: 3848925 - DNA, 25 bp, Homo sapien
aaagtatctgaagacaggagtgtcc

SEQ ID NO: 3848926 - DNA, 25 bp, Homo sapien
tcttctagacctattggcatcgctt

SEQ ID NO: 3848927 - DNA, 25 bp, Homo sapien
cagagtggagacatgtaattgcttt

SEQ ID NO: 3848928 - DNA, 25 bp, Homo sapien
tgatgacagagctcaagaaagtatc

SEQ ID NO: 3848929 - DNA, 25 bp, Homo sapien
aagaacagaacactctgctcacagc

SEQ ID NO: 3848930 - DNA, 25 bp, Homo sapien
agccgagcgagacgcgagctctctc

SEQ ID NO: 3848931 - DNA, 25 bp, Homo sapien
gctctctccgccttcaagggccggg

SEQ ID NO: 3848932 - DNA, 25 bp, Homo sapien
ctgaagccgagcgagacgcgagctc

SEQ ID NO: 3848933 - DNA, 25 bp, Homo sapien
tgaagccgagcgagacgcgagctct

SEQ ID NO: 3848934 - DNA, 25 bp, Homo sapien
gctgcgcgcggtcgcgggtgtgcgg

SEQ ID NO: 3848935 - DNA, 25 bp, Homo sapien
cagcagccacggctgcgcgcggtcg

SEQ ID NO: 3848936 - DNA, 25 bp, Homo sapien
tgcgcgcggtcgcgggtgtgcgggg

SEQ ID NO: 3848937 - DNA, 25 bp, Homo sapien
agcagcagccacggctgcgcgcggt

SEQ ID NO: 3848938 - DNA, 25 bp, Homo sapien
actgcctcgccctgccgcctcgccc

SEQ ID NO: 3848939 - DNA, 25 bp, Homo sapien
ccgtggccgctcttcccagtcccgg

SEQ ID NO: 3848940 - DNA, 25 bp, Homo sapien
tcccagtcccgggcgagaggggctc

SEQ ID NO: 3848941 - DNA, 25 bp, Homo sapien
cagtcccgggcgagaggggctcgcc

SEQ ID NO: 3848942 - DNA, 25 bp, Homo sapien
gccgcggactccgagggaggacatt

SEQ ID NO: 3848943 - DNA, 25 bp, Homo sapien
agtaagttgggccactaaccggctg

SEQ ID NO: 3848944 - DNA, 25 bp, Homo sapien
gccactaaccggctgggcagcatgg

SEQ ID NO: 3848945 - DNA, 25 bp, Homo sapien
cctaggagctgaccggccgcggact

SEQ ID NO: 3848946 - DNA, 25 bp, Homo sapien
tgctgactaagggctgcattagccc

SEQ ID NO: 3848947 - DNA, 25 bp, Homo sapien
ctgactaagggctgcattagcccag

SEQ ID NO: 3848948 - DNA, 25 bp, Homo sapien
tgactaagggctgcattagcccagc

SEQ ID NO: 3848949 - DNA, 25 bp, Homo sapien
gctgactaagggctgcattagccca

SEQ ID NO: 3848950 - DNA, 25 bp, Homo sapien
cttcctccgcgacttggcgggaggg

SEQ ID NO: 3848951 - DNA, 25 bp, Homo sapien
cgacccgggtacagaggtgatttat

SEQ ID NO: 3848952 - DNA, 25 bp, Homo sapien
agcccatgcctcctcacagaaactt

SEQ ID NO: 3848953 - DNA, 25 bp, Homo sapien
aggtgaaattgactgtggcctccat

SEQ ID NO: 3848954 - DNA, 25 bp, Homo sapien
cagaggtgatttataacctcctgca

SEQ ID NO: 3848955 - DNA, 25 bp, Homo sapien
tttcaggtttattttataagactgc

SEQ ID NO: 3848956 - DNA, 25 bp, Homo sapien
caggtttattttataagactgcatt

SEQ ID NO: 3848957 - DNA, 25 bp, Homo sapien
actcctatagaaagggtcttttcag

SEQ ID NO: 3848958 - DNA, 25 bp, Homo sapien
ctcctatagaaagggtcttttcagg

SEQ ID NO: 3848959 - DNA, 25 bp, Homo sapien
tttctgtcccaaataccacgggctg

SEQ ID NO: 3848960 - DNA, 25 bp, Homo sapien
taccacgggctgtctttgaaagaat

SEQ ID NO: 3848961 - DNA, 25 bp, Homo sapien
aaagaatctgtgtgttcgtagtttt

SEQ ID NO: 3848962 - DNA, 25 bp, Homo sapien
aatctgtgtgttcgtagtttttgca

SEQ ID NO: 3848963 - DNA, 25 bp, Homo sapien
ccactggtctagctcaacatgcata

SEQ ID NO: 3848964 - DNA, 25 bp, Homo sapien
gctaacctaatggatctattcttgg

SEQ ID NO: 3848965 - DNA, 25 bp, Homo sapien
catgcataagaggaggtagcaaaca

SEQ ID NO: 3848966 - DNA, 25 bp, Homo sapien
ctgggcaccaatgaaatgtaggcta

SEQ ID NO: 3848967 - DNA, 25 bp, Homo sapien
atcctgtcacggtatccatcttaga

SEQ ID NO: 3848968 - DNA, 25 bp, Homo sapien
tatccttgctgaaggcccggcttct

SEQ ID NO: 3848969 - DNA, 25 bp, Homo sapien
cagtgattgtaccttgtgccagcaa

SEQ ID NO: 3848970 - DNA, 25 bp, Homo sapien
gacaacatgggtaaggttagcctcc

SEQ ID NO: 3848971 - DNA, 25 bp, Homo sapien
tcaggtgtcgatgagcgatatgccc

SEQ ID NO: 3848972 - DNA, 25 bp, Homo sapien
ggaatgaataccaaatgagacactc

SEQ ID NO: 3848973 - DNA, 25 bp, Homo sapien
tggaatgaataccaaatgagacact

SEQ ID NO: 3848974 - DNA, 25 bp, Homo sapien
ggaacccatatgtgcatcaaacttg

SEQ ID NO: 3848975 - DNA, 25 bp, Homo sapien
ggtctacaatgtgtcagttacagat

SEQ ID NO: 3848976 - DNA, 25 bp, Homo sapien
gttacagatactcagaagggtccag

SEQ ID NO: 3848977 - DNA, 25 bp, Homo sapien
tatcaaacagtaattagggtagcag

SEQ ID NO: 3848978 - DNA, 25 bp, Homo sapien
cagatggctgtaatgtcactaggca

SEQ ID NO: 3848979 - DNA, 25 bp, Homo sapien
cattatatggtgcaggactgtagtc

SEQ ID NO: 3848980 - DNA, 25 bp, Homo sapien
gaccgctgtcgtatgtgctgttcac

SEQ ID NO: 3848981 - DNA, 25 bp, Homo sapien
gcagcagcatcatagaatgtgagta

SEQ ID NO: 3848982 - DNA, 25 bp, Homo sapien
caaaatatgcccaatgactgataaa

SEQ ID NO: 3848983 - DNA, 25 bp, Homo sapien
ggatcgttgtaagtggaaattttca

SEQ ID NO: 3848984 - DNA, 25 bp, Homo sapien
gtctgtgaccaccaatataactctt

SEQ ID NO: 3848985 - DNA, 25 bp, Homo sapien
atacaagtgcgcagacatgacaggg

SEQ ID NO: 3848986 - DNA, 25 bp, Homo sapien
ccagtgtgtccagtctttgtttgct

SEQ ID NO: 3848987 - DNA, 25 bp, Homo sapien
tgtttgcttttcaggttcaaggaac

SEQ ID NO: 3848988 - DNA, 25 bp, Homo sapien
caaggaacacattgttccctcaaaa

SEQ ID NO: 3848989 - DNA, 25 bp, Homo sapien
ttcaggttcaaggaacacattgttc

SEQ ID NO: 3848990 - DNA, 25 bp, Homo sapien
ttggaagggaaacgatagactacta

SEQ ID NO: 3848991 - DNA, 25 bp, Homo sapien
ggtaagaggacactttgcattctaa

SEQ ID NO: 3848992 - DNA, 25 bp, Homo sapien
tgattgcaaccccagggcaaagaga

SEQ ID NO: 3848993 - DNA, 25 bp, Homo sapien
tagactactattgcagagagggaag

SEQ ID NO: 3848994 - DNA, 25 bp, Homo sapien
cacaagtttagttgaaaggacgtct

SEQ ID NO: 3848995 - DNA, 25 bp, Homo sapien
ccaagttagtctgggttcagaatca

SEQ ID NO: 3848996 - DNA, 25 bp, Homo sapien
tcctagtcagggcatgttgctagca

SEQ ID NO: 3848997 - DNA, 25 bp, Homo sapien
tctacctctgtatgtgtggctgaga

SEQ ID NO: 3848998 - DNA, 25 bp, Homo sapien
aaaatctttcgataatttgttcatg

SEQ ID NO: 3848999 - DNA, 25 bp, Homo sapien
atatctcattaatttgggacttcaa

SEQ ID NO: 3849000 - DNA, 25 bp, Homo sapien
tgtacacattttagacacagaataa

SEQ ID NO: 3849001 - DNA, 25 bp, Homo sapien
tacaagttcctacatacatccaatc

SEQ ID NO: 3849002 - DNA, 25 bp, Homo sapien
ttcataacttagtcaagaatgcttg

SEQ ID NO: 3849003 - DNA, 25 bp, Homo sapien
ccattttcataacttagtcaagaat

SEQ ID NO: 3849004 - DNA, 25 bp, Homo sapien
taacttagtcaagaatgcttgatga

SEQ ID NO: 3849005 - DNA, 25 bp, Homo sapien
tagtcaagaatgcttgatgaagagg

SEQ ID NO: 3849006 - DNA, 25 bp, Homo sapien
gaaattgttgattgccggtggctcc

SEQ ID NO: 3849007 - DNA, 25 bp, Homo sapien
tcaacagtaaggaggagtttctgaa

SEQ ID NO: 3849008 - DNA, 25 bp, Homo sapien
caaaaatgaagtgtggacccagatg

SEQ ID NO: 3849009 - DNA, 25 bp, Homo sapien
gctccaggccagttgctgctcatta

SEQ ID NO: 3849010 - DNA, 25 bp, Homo sapien
gctgtccaccattgtagatgacctg

SEQ ID NO: 3849011 - DNA, 25 bp, Homo sapien
tgaggaatttgcctcgctgtccacc

SEQ ID NO: 3849012 - DNA, 25 bp, Homo sapien
gatgacctgatgtccccgagagctt

SEQ ID NO: 3849013 - DNA, 25 bp, Homo sapien
cagcccagagaaaatagcctgagga

SEQ ID NO: 3849014 - DNA, 25 bp, Homo sapien
tgagtgctccaaaataccccatctc

SEQ ID NO: 3849015 - DNA, 25 bp, Homo sapien
ggctttcacggctaacaaaccaaga

SEQ ID NO: 3849016 - DNA, 25 bp, Homo sapien
ccaagaaaaatcaatcccgcatcac

SEQ ID NO: 3849017 - DNA, 25 bp, Homo sapien
cacaaggtgtggcatagcagggcaa

SEQ ID NO: 3849018 - DNA, 25 bp, Homo sapien
cagatgctgcgcctactttcagaag

SEQ ID NO: 3849019 - DNA, 25 bp, Homo sapien
tgtggcacgtccagcccagattctt

SEQ ID NO: 3849020 - DNA, 25 bp, Homo sapien
gactttatctctctaatccctctgg

SEQ ID NO: 3849021 - DNA, 25 bp, Homo sapien
cttatcttttctgactgacagtgac

SEQ ID NO: 3849022 - DNA, 25 bp, Homo sapien
ggacgctggaagctcccgcggcggc

SEQ ID NO: 3849023 - DNA, 25 bp, Homo sapien
ctggggacgctggaagctcccgcgg

SEQ ID NO: 3849024 - DNA, 25 bp, Homo sapien
acgctggaagctcccgcggcggctc

SEQ ID NO: 3849025 - DNA, 25 bp, Homo sapien
gggacgctggaagctcccgcggcgg

SEQ ID NO: 3849026 - DNA, 25 bp, Homo sapien
tggctgactttgtgagtgtgaccca

SEQ ID NO: 3849027 - DNA, 25 bp, Homo sapien
tgtggctgactttgtgagtgtgacc

SEQ ID NO: 3849028 - DNA, 25 bp, Homo sapien
gctgactttgtgagtgtgacccagc

SEQ ID NO: 3849029 - DNA, 25 bp, Homo sapien
ggctgactttgtgagtgtgacccag

SEQ ID NO: 3849030 - DNA, 25 bp, Homo sapien
tgggaagctgattacacattctatc

SEQ ID NO: 3849031 - DNA, 25 bp, Homo sapien
tgatgctgccccaggtactcttgca

SEQ ID NO: 3849032 - DNA, 25 bp, Homo sapien
tagctaacagtgctccacgagtcac

SEQ ID NO: 3849033 - DNA, 25 bp, Homo sapien
ccacagccacaaatagcccaagtga

SEQ ID NO: 3849034 - DNA, 25 bp, Homo sapien
gggtcattctcaggcaacttgtttc

SEQ ID NO: 3849035 - DNA, 25 bp, Homo sapien
caagctgtgtgagcactctcaccct

SEQ ID NO: 3849036 - DNA, 25 bp, Homo sapien
gctgtgtgagcactctcaccctggg

SEQ ID NO: 3849037 - DNA, 25 bp, Homo sapien
gtgtgagcactctcaccctgggtca

SEQ ID NO: 3849038 - DNA, 25 bp, Homo sapien
aggcaggagctcagttatttcagag

SEQ ID NO: 3849039 - DNA, 25 bp, Homo sapien
gcttggcttcttccgggtctagtgg

SEQ ID NO: 3849040 - DNA, 25 bp, Homo sapien
gcagcttggcttcttccgggtctag

SEQ ID NO: 3849041 - DNA, 25 bp, Homo sapien
ccacaatgggctggccgctggcatt

SEQ ID NO: 3849042 - DNA, 25 bp, Homo sapien
gccacaatgggctggccgctggcat

SEQ ID NO: 3849043 - DNA, 25 bp, Homo sapien
gaagattccacatggaccttctgat

SEQ ID NO: 3849044 - DNA, 25 bp, Homo sapien
gcgccggcgatttcggttccaagaa

SEQ ID NO: 3849045 - DNA, 25 bp, Homo sapien
gcgatttcggttccaagaagattcc

SEQ ID NO: 3849046 - DNA, 25 bp, Homo sapien
tgcccttcttgcgccggcgatttcg

SEQ ID NO: 3849047 - DNA, 25 bp, Homo sapien
ccttgtcactaagacttgttgatgg

SEQ ID NO: 3849048 - DNA, 25 bp, Homo sapien
gaaacgtctgaacaggttgcccttg

SEQ ID NO: 3849049 - DNA, 25 bp, Homo sapien
cagcagggttggagatcatcccgga

SEQ ID NO: 3849050 - DNA, 25 bp, Homo sapien
tattgaagtatgaagggaaccccag

SEQ ID NO: 3849051 - DNA, 25 bp, Homo sapien
ttggcaatgcgatccccaggtaaac

SEQ ID NO: 3849052 - DNA, 25 bp, Homo sapien
caggcttggcaatgcgatccccagg

SEQ ID NO: 3849053 - DNA, 25 bp, Homo sapien
gcttggcaatgcgatccccaggtaa

SEQ ID NO: 3849054 - DNA, 25 bp, Homo sapien
aggcttggcaatgcgatccccaggt

SEQ ID NO: 3849055 - DNA, 25 bp, Homo sapien
tctgagtctctttggccaaagcaga

SEQ ID NO: 3849056 - DNA, 25 bp, Homo sapien
cataatgccggtgtggttctgagtc

SEQ ID NO: 3849057 - DNA, 25 bp, Homo sapien
ttctgagtctctttggccaaagcag

SEQ ID NO: 3849058 - DNA, 25 bp, Homo sapien
agtctatcaccataatgccggtgtg

SEQ ID NO: 3849059 - DNA, 25 bp, Homo sapien
taagctcagctgtgttatagcaagc

SEQ ID NO: 3849060 - DNA, 25 bp, Homo sapien
ttttaccagcgcatacacttcagag

SEQ ID NO: 3849061 - DNA, 25 bp, Homo sapien
tctcattaaaatcgctaagctcagc

SEQ ID NO: 3849062 - DNA, 25 bp, Homo sapien
ggaacagtaatccagcaggactaga

SEQ ID NO: 3849063 - DNA, 25 bp, Homo sapien
ctgctgttcagtgtgcatttcctcc

SEQ ID NO: 3849064 - DNA, 25 bp, Homo sapien
gctgttcagtgtgcatttcctcctc

SEQ ID NO: 3849065 - DNA, 25 bp, Homo sapien
tgttcagtgtgcatttcctcctctt

SEQ ID NO: 3849066 - DNA, 25 bp, Homo sapien
cagtgtgcatttcctcctcttgaca

SEQ ID NO: 3849067 - DNA, 25 bp, Homo sapien
gcatttcatctggaaggcactctct

SEQ ID NO: 3849068 - DNA, 25 bp, Homo sapien
tcagaggataatgatgacaatttcc

SEQ ID NO: 3849069 - DNA, 25 bp, Homo sapien
ctagaaccaatgtgcatcttcccca

SEQ ID NO: 3849070 - DNA, 25 bp, Homo sapien
tctctcacacactacatcactgtct

SEQ ID NO: 3849071 - DNA, 25 bp, Homo sapien
gccgcattctctgcaatgaatatac

SEQ ID NO: 3849072 - DNA, 25 bp, Homo sapien
ttgcagtgtcgaatttcttgccaca

SEQ ID NO: 3849073 - DNA, 25 bp, Homo sapien
cttccagtccccgttttttgcagtg

SEQ ID NO: 3849074 - DNA, 25 bp, Homo sapien
ccacaaaattgatgcaattgccgca

SEQ ID NO: 3849075 - DNA, 25 bp, Homo sapien
ctgagaatggattcctcgaagtact

SEQ ID NO: 3849076 - DNA, 25 bp, Homo sapien
ttcagctccccgtaccagtgagcaa

SEQ ID NO: 3849077 - DNA, 25 bp, Homo sapien
gggcctgagaatggattcctcgaag

SEQ ID NO: 3849078 - DNA, 25 bp, Homo sapien
tccccgtaccagtgagcaacttggc

SEQ ID NO: 3849079 - DNA, 25 bp, Homo sapien
tggatttcgcccagttcagtctggc

SEQ ID NO: 3849080 - DNA, 25 bp, Homo sapien
ttgaatgaggcaaaagcgtgtaaaa

SEQ ID NO: 3849081 - DNA, 25 bp, Homo sapien
taaaagtgatgttctcctaccatgg

SEQ ID NO: 3849082 - DNA, 25 bp, Homo sapien
tctcctaccatggatttcgcccagt

SEQ ID NO: 3849083 - DNA, 25 bp, Homo sapien
gatgcatgccgccacttagcagatt

SEQ ID NO: 3849084 - DNA, 25 bp, Homo sapien
tgtctcccaaagataaacgaggtgc

SEQ ID NO: 3849085 - DNA, 25 bp, Homo sapien
aaatcggctcagttacagtttctgc

SEQ ID NO: 3849086 - DNA, 25 bp, Homo sapien
aattagcctgaaaatctgcctggag

SEQ ID NO: 3849087 - DNA, 25 bp, Homo sapien
cgccagcaggtaatctcatagatca

SEQ ID NO: 3849088 - DNA, 25 bp, Homo sapien
caactgctttaacaggaccataaat

SEQ ID NO: 3849089 - DNA, 25 bp, Homo sapien
atattgacaatctgacccatgaacc

SEQ ID NO: 3849090 - DNA, 25 bp, Homo sapien
taactggttttgattgaccaactgc

SEQ ID NO: 3849091 - DNA, 25 bp, Homo sapien
tatatcagaatagcatgacgttttc

SEQ ID NO: 3849092 - DNA, 25 bp, Homo sapien
aaattaggttctaggagcacaaaag

SEQ ID NO: 3849093 - DNA, 25 bp, Homo sapien
ggtacagacattgggaaaacacacc

SEQ ID NO: 3849094 - DNA, 25 bp, Homo sapien
gaaagtcattcaggcatacacacac

SEQ ID NO: 3849095 - DNA, 25 bp, Homo sapien
tatctagaagtctcacccaatagca

SEQ ID NO: 3849096 - DNA, 25 bp, Homo sapien
cagaacctgaagcatggtaacaggt

SEQ ID NO: 3849097 - DNA, 25 bp, Homo sapien
taccactgaatttagagctctcctg

SEQ ID NO: 3849098 - DNA, 25 bp, Homo sapien
ggaacttcactatctagaagtctca

SEQ ID NO: 3849099 - DNA, 25 bp, Homo sapien
gaaactgcccagttcgtgacggtca

SEQ ID NO: 3849100 - DNA, 25 bp, Homo sapien
ctcctagggatttggaacagggact

SEQ ID NO: 3849101 - DNA, 25 bp, Homo sapien
ggtcacattactctgaaaactgccg

SEQ ID NO: 3849102 - DNA, 25 bp, Homo sapien
ggactgatcatatttctcctaggga

SEQ ID NO: 3849103 - DNA, 25 bp, Homo sapien
ggttctatggccaaggttttctcca

SEQ ID NO: 3849104 - DNA, 25 bp, Homo sapien
gttctatggccaaggttttctccaa

SEQ ID NO: 3849105 - DNA, 25 bp, Homo sapien
ttctatggccaaggttttctccaaa

SEQ ID NO: 3849106 - DNA, 25 bp, Homo sapien
tttggctagctcatagatgtagtgt

SEQ ID NO: 3849107 - DNA, 25 bp, Homo sapien
ctcttattctcgaatggctcttcct

SEQ ID NO: 3849108 - DNA, 25 bp, Homo sapien
cttattctcgaatggctcttcctca

SEQ ID NO: 3849109 - DNA, 25 bp, Homo sapien
tcttattctcgaatggctcttcctc

SEQ ID NO: 3849110 - DNA, 25 bp, Homo sapien
tcacttgtgagatcggttggcttcc

SEQ ID NO: 3849111 - DNA, 25 bp, Homo sapien
ttggcttccgattaagagtaggcat

SEQ ID NO: 3849112 - DNA, 25 bp, Homo sapien
gagatcggttggcttccgattaaga

SEQ ID NO: 3849113 - DNA, 25 bp, Homo sapien
tgaaactcacttgtgagatcggttg

SEQ ID NO: 3849114 - DNA, 25 bp, Homo sapien
ctgtagaactgaagacatgggtcaa

SEQ ID NO: 3849115 - DNA, 25 bp, Homo sapien
gtagaactgaagacatgggtcaaaa

SEQ ID NO: 3849116 - DNA, 25 bp, Homo sapien
tgtagaactgaagacatgggtcaaa

SEQ ID NO: 3849117 - DNA, 25 bp, Homo sapien
ccttggctgccttgacgtgtctgta

SEQ ID NO: 3849118 - DNA, 25 bp, Homo sapien
aatgaagaggcgaattacttttcta

SEQ ID NO: 3849119 - DNA, 25 bp, Homo sapien
ttagagaaccactgagaagccaaaa

SEQ ID NO: 3849120 - DNA, 25 bp, Homo sapien
tacagtaatgtgattagagaaccac

SEQ ID NO: 3849121 - DNA, 25 bp, Homo sapien
tgggaggggagtgagaaaaagctgc

SEQ ID NO: 3849122 - DNA, 25 bp, Homo sapien
tgtgggaggggagtgagaaaaagct

SEQ ID NO: 3849123 - DNA, 25 bp, Homo sapien
ctgtgggaggggagtgagaaaaagc

SEQ ID NO: 3849124 - DNA, 25 bp, Homo sapien
ggaggggagtgagaaaaagctgcac

SEQ ID NO: 3849125 - DNA, 25 bp, Homo sapien
aaagagcacagttgttctaagcaca

SEQ ID NO: 3849126 - DNA, 25 bp, Homo sapien
ccttgactgctcactgaatccgatg

SEQ ID NO: 3849127 - DNA, 25 bp, Homo sapien
cttcgctttccttgactgctcactg

SEQ ID NO: 3849128 - DNA, 25 bp, Homo sapien
cactgaatccgatgaggaaagagca

SEQ ID NO: 3849129 - DNA, 25 bp, Homo sapien
tcttattcctggaaagaccgctgtc

SEQ ID NO: 3849130 - DNA, 25 bp, Homo sapien
agaccgctgtccaccttctggcagg

SEQ ID NO: 3849131 - DNA, 25 bp, Homo sapien
cattccatctatgatgtttggaagc

SEQ ID NO: 3849132 - DNA, 25 bp, Homo sapien
ctggaaagaccgctgtccaccttct

SEQ ID NO: 3849133 - DNA, 25 bp, Homo sapien
tatattaagattttccaggaaacta

SEQ ID NO: 3849134 - DNA, 25 bp, Homo sapien
gctccttcactaagagaactgttgg

SEQ ID NO: 3849135 - DNA, 25 bp, Homo sapien
gtgttccatcttcacaataggaacc

SEQ ID NO: 3849136 - DNA, 25 bp, Homo sapien
atcaccccgacaatcaccagaagaa

SEQ ID NO: 3849137 - DNA, 25 bp, Homo sapien
tgcaggctccttcactaagagaact

SEQ ID NO: 3849138 - DNA, 25 bp, Homo sapien
gtcggttcactgtgccactcaggca

SEQ ID NO: 3849139 - DNA, 25 bp, Homo sapien
tcggttcactgtgccactcaggcat

SEQ ID NO: 3849140 - DNA, 25 bp, Homo sapien
ggtcggttcactgtgccactcaggc

SEQ ID NO: 3849141 - DNA, 25 bp, Homo sapien
ctggtcggttcactgtgccactcag

SEQ ID NO: 3849142 - DNA, 25 bp, Homo sapien
tgttaattaggtcccaatctctgct

SEQ ID NO: 3849143 - DNA, 25 bp, Homo sapien
catgaattgagggaagaagttgcgc

SEQ ID NO: 3849144 - DNA, 25 bp, Homo sapien
cgccttgagcaagacatagcccatg

SEQ ID NO: 3849145 - DNA, 25 bp, Homo sapien
taatggacacttgatagttggcacg

SEQ ID NO: 3849146 - DNA, 25 bp, Homo sapien
cccagcaaaggatgaccatacaatt

SEQ ID NO: 3849147 - DNA, 25 bp, Homo sapien
tgaccatacaattgttccactccac

SEQ ID NO: 3849148 - DNA, 25 bp, Homo sapien
caaaggatgaccatacaattgttcc

SEQ ID NO: 3849149 - DNA, 25 bp, Homo sapien
ggatgaccatacaattgttccactc

SEQ ID NO: 3849150 - DNA, 25 bp, Homo sapien
gtattctgcacacaaggcatgatga

SEQ ID NO: 3849151 - DNA, 25 bp, Homo sapien
gagatcctgcttaaacagtggtaag

SEQ ID NO: 3849152 - DNA, 25 bp, Homo sapien
tatcgtgccgcaactgactgattca

SEQ ID NO: 3849153 - DNA, 25 bp, Homo sapien
gactgattataaagttggcaacact

SEQ ID NO: 3849154 - DNA, 25 bp, Homo sapien
ttgtttctcaaatagagcgtgggtt

SEQ ID NO: 3849155 - DNA, 25 bp, Homo sapien
cagaggaattaccttttgcagggtt

SEQ ID NO: 3849156 - DNA, 25 bp, Homo sapien
agcgtgggtttttgcagtgctgccc

SEQ ID NO: 3849157 - DNA, 25 bp, Homo sapien
cctgttccagaggaattaccttttg

SEQ ID NO: 3849158 - DNA, 25 bp, Homo sapien
gatgctacgacttgggtattctgat

SEQ ID NO: 3849159 - DNA, 25 bp, Homo sapien
taagcctagctgttgtgatatacag

SEQ ID NO: 3849160 - DNA, 25 bp, Homo sapien
gatatacagatgctacgacttgggt

SEQ ID NO: 3849161 - DNA, 25 bp, Homo sapien
tgatgctagaatgccggcagcactg

SEQ ID NO: 3849162 - DNA, 25 bp, Homo sapien
tttcatactttgtgtcctctccact

SEQ ID NO: 3849163 - DNA, 25 bp, Homo sapien
ccaatgtccatagggatcaaactac

SEQ ID NO: 3849164 - DNA, 25 bp, Homo sapien
ggagtttgccatccagagacaggaa

SEQ ID NO: 3849165 - DNA, 25 bp, Homo sapien
ggcggtacacatgctatgacctcag

SEQ ID NO: 3849166 - DNA, 25 bp, Homo sapien
ttcaaggtctgaagctacaagccca

SEQ ID NO: 3849167 - DNA, 25 bp, Homo sapien
gctaaagtggacagatgcctggcat

SEQ ID NO: 3849168 - DNA, 25 bp, Homo sapien
tgcgtctctgtagtatacgtcacca

SEQ ID NO: 3849169 - DNA, 25 bp, Homo sapien
taaagttactccctgcatatggaaa

SEQ ID NO: 3849170 - DNA, 25 bp, Homo sapien
caaaggccactcatagcaaaatagt

SEQ ID NO: 3849171 - DNA, 25 bp, Homo sapien
actctgaaagatggatagaaatctt

SEQ ID NO: 3849172 - DNA, 25 bp, Homo sapien
ttacattcaactctgaaagatggat

SEQ ID NO: 3849173 - DNA, 25 bp, Homo sapien
tctgaaagatggatagaaatcttaa

SEQ ID NO: 3849174 - DNA, 25 bp, Homo sapien
ttcaactctgaaagatggatagaaa

SEQ ID NO: 3849175 - DNA, 25 bp, Homo sapien
caacaacctcaaataagccactttc

SEQ ID NO: 3849176 - DNA, 25 bp, Homo sapien
aataataccaacagcaccaacaacc

SEQ ID NO: 3849177 - DNA, 25 bp, Homo sapien
caagcaattaaataacaactatggc

SEQ ID NO: 3849178 - DNA, 25 bp, Homo sapien
taggaaggatatttgactgagttta

SEQ ID NO: 3849179 - DNA, 25 bp, Homo sapien
agcccacgaggagtctaattacaaa

SEQ ID NO: 3849180 - DNA, 25 bp, Homo sapien
ttcacgaagccaagccaagtctcag

SEQ ID NO: 3849181 - DNA, 25 bp, Homo sapien
tattaattgccaagatggtcctggg

SEQ ID NO: 3849182 - DNA, 25 bp, Homo sapien
taggttaacaaatgctgccccaagc

SEQ ID NO: 3849183 - DNA, 25 bp, Homo sapien
tccatcaccatgttccctgagagca

SEQ ID NO: 3849184 - DNA, 25 bp, Homo sapien
tcccgtcactcaacaagggctgttg

SEQ ID NO: 3849185 - DNA, 25 bp, Homo sapien
tagtcgcggttcaaagaagctgcag

SEQ ID NO: 3849186 - DNA, 25 bp, Homo sapien
gggtagcacattccgactcccgtca

SEQ ID NO: 3849187 - DNA, 25 bp, Homo sapien
ctctctatgatacggaagctgggca

SEQ ID NO: 3849188 - DNA, 25 bp, Homo sapien
tgtaagaacatatgcgccatggcag

SEQ ID NO: 3849189 - DNA, 25 bp, Homo sapien
taacagccgcgacagttggtctgca

SEQ ID NO: 3849190 - DNA, 25 bp, Homo sapien
caaatctttcgagggcatgtcactg

SEQ ID NO: 3849191 - DNA, 25 bp, Homo sapien
tgtggtgggagtcgtcggaggtgac

SEQ ID NO: 3849192 - DNA, 25 bp, Homo sapien
ggtgtggtgggagtcgtcggaggtg

SEQ ID NO: 3849193 - DNA, 25 bp, Homo sapien
aggggtgtggtgggagtcgtcggag

SEQ ID NO: 3849194 - DNA, 25 bp, Homo sapien
ctaaggggtgtggtgggagtcgtcg

SEQ ID NO: 3849195 - DNA, 25 bp, Homo sapien
tgacttctcaacgaagcacggactg

SEQ ID NO: 3849196 - DNA, 25 bp, Homo sapien
gacgctgattccgatgttccacaga

SEQ ID NO: 3849197 - DNA, 25 bp, Homo sapien
catcagtatgagacgcacgacaagg

SEQ ID NO: 3849198 - DNA, 25 bp, Homo sapien
gttgcaacaccaccacgaggaagtt

SEQ ID NO: 3849199 - DNA, 25 bp, Homo sapien
agacacagggcacacaacgttctgt

SEQ ID NO: 3849200 - DNA, 25 bp, Homo sapien
gtcacagacacagggcacacaacgt

SEQ ID NO: 3849201 - DNA, 25 bp, Homo sapien
ctgtcacagacacagggcacacaac

SEQ ID NO: 3849202 - DNA, 25 bp, Homo sapien
acagacacagggcacacaacgttct

SEQ ID NO: 3849203 - DNA, 25 bp, Homo sapien
tattaaagtaagaccagtaggattc

SEQ ID NO: 3849204 - DNA, 25 bp, Homo sapien
ggattccaaggacctccaatgagga

SEQ ID NO: 3849205 - DNA, 25 bp, Homo sapien
tcttctgaagttctaatacatgggt

SEQ ID NO: 3849206 - DNA, 25 bp, Homo sapien
ccagtaggattccaaggacctccaa

SEQ ID NO: 3849207 - DNA, 25 bp, Homo sapien
tgccaggtcaagtggaaactgcagc

SEQ ID NO: 3849208 - DNA, 25 bp, Homo sapien
gccaggtcaagtggaaactgcagca

SEQ ID NO: 3849209 - DNA, 25 bp, Homo sapien
ccaggtcaagtggaaactgcagcat

SEQ ID NO: 3849210 - DNA, 25 bp, Homo sapien
ctgccaggtcaagtggaaactgcag

SEQ ID NO: 3849211 - DNA, 25 bp, Homo sapien
ccatataacaaggatggcatagact

SEQ ID NO: 3849212 - DNA, 25 bp, Homo sapien
caagtccatataacaaggatggcat

SEQ ID NO: 3849213 - DNA, 25 bp, Homo sapien
agtccatataacaaggatggcatag

SEQ ID NO: 3849214 - DNA, 25 bp, Homo sapien
tccatataacaaggatggcatagac

SEQ ID NO: 3849215 - DNA, 25 bp, Homo sapien
ccaaagaagggtccatactcagaca

SEQ ID NO: 3849216 - DNA, 25 bp, Homo sapien
gattcctgtgtaaatggctccccac

SEQ ID NO: 3849217 - DNA, 25 bp, Homo sapien
gacttaaagcccaacatatgcatga

SEQ ID NO: 3849218 - DNA, 25 bp, Homo sapien
tattacgaagcatcagcacaggtcc

SEQ ID NO: 3849219 - DNA, 25 bp, Homo sapien
tgagatggccaattcaggctcaaag

SEQ ID NO: 3849220 - DNA, 25 bp, Homo sapien
tcttttgacttgagatggccaattc

SEQ ID NO: 3849221 - DNA, 25 bp, Homo sapien
cacctgtgagaattcaaatttcatc

SEQ ID NO: 3849222 - DNA, 25 bp, Homo sapien
tttcagttgcacctgtgagaattca

SEQ ID NO: 3849223 - DNA, 25 bp, Homo sapien
tcttctattagtggaatttttccaa

SEQ ID NO: 3849224 - DNA, 25 bp, Homo sapien
ccacttggggttagtatgtcttcta

SEQ ID NO: 3849225 - DNA, 25 bp, Homo sapien
aaaatagaacaagttgccacttggg

SEQ ID NO: 3849226 - DNA, 25 bp, Homo sapien
tgtcttctattagtggaatttttcc

SEQ ID NO: 3849227 - DNA, 25 bp, Homo sapien
aagagattagcctcaactctgcaaa

SEQ ID NO: 3849228 - DNA, 25 bp, Homo sapien
gtattaacctatcctggaagaaata

SEQ ID NO: 3849229 - DNA, 25 bp, Homo sapien
cctatcctggaagaaatatttcacc

SEQ ID NO: 3849230 - DNA, 25 bp, Homo sapien
gagattagcctcaactctgcaaaat

SEQ ID NO: 3849231 - DNA, 25 bp, Homo sapien
tgatcccgcctccaatgggtagaag

SEQ ID NO: 3849232 - DNA, 25 bp, Homo sapien
caggaatgtctgatggagtcccaat

SEQ ID NO: 3849233 - DNA, 25 bp, Homo sapien
attccagtatgtcagccgctgtccc

SEQ ID NO: 3849234 - DNA, 25 bp, Homo sapien
ttctagggtctcacttgtgaattcc

SEQ ID NO: 3849235 - DNA, 25 bp, Homo sapien
taaagaaagtaaaatgcctttcagc

SEQ ID NO: 3849236 - DNA, 25 bp, Homo sapien
gaaagtaaaatgcctttcagctgaa

SEQ ID NO: 3849237 - DNA, 25 bp, Homo sapien
gtaaaatgcctttcagctgaacact

SEQ ID NO: 3849238 - DNA, 25 bp, Homo sapien
aagtaaaatgcctttcagctgaaca

SEQ ID NO: 3849239 - DNA, 25 bp, Homo sapien
ctactggtttgttcattggatgtca

SEQ ID NO: 3849240 - DNA, 25 bp, Homo sapien
ggtttgttcattggatgtcaatgtt

SEQ ID NO: 3849241 - DNA, 25 bp, Homo sapien
actggtttgttcattggatgtcaat

SEQ ID NO: 3849242 - DNA, 25 bp, Homo sapien
ctctactggtttgttcattggatgt

SEQ ID NO: 3849243 - DNA, 25 bp, Homo sapien
taatgatggaacgatgctaatcaga

SEQ ID NO: 3849244 - DNA, 25 bp, Homo sapien
tggaacgatgctaatcagatataaa

SEQ ID NO: 3849245 - DNA, 25 bp, Homo sapien
tgatggaacgatgctaatcagatat

SEQ ID NO: 3849246 - DNA, 25 bp, Homo sapien
gccataatgatggaacgatgctaat

SEQ ID NO: 3849247 - DNA, 25 bp, Homo sapien
gggaggactcaacacaggattacca

SEQ ID NO: 3849248 - DNA, 25 bp, Homo sapien
gcaagcagaggcataaaggcactac

SEQ ID NO: 3849249 - DNA, 25 bp, Homo sapien
gaatgagctgatgtgtgcaatgcca

SEQ ID NO: 3849250 - DNA, 25 bp, Homo sapien
ttagcgtactcaccctaaaatggta

SEQ ID NO: 3849251 - DNA, 25 bp, Homo sapien
aaatgtgtatgggacaggaagctca

SEQ ID NO: 3849252 - DNA, 25 bp, Homo sapien
ttaaaatgtgtatgggacaggaagc

SEQ ID NO: 3849253 - DNA, 25 bp, Homo sapien
atgtgtatgggacaggaagctcaac

SEQ ID NO: 3849254 - DNA, 25 bp, Homo sapien
taaaatgtgtatgggacaggaagct

SEQ ID NO: 3849255 - DNA, 25 bp, Homo sapien
cagtatgcatctgtcaagtctaggt

SEQ ID NO: 3849256 - DNA, 25 bp, Homo sapien
cagaaatatttcaaggctcatgacg

SEQ ID NO: 3849257 - DNA, 25 bp, Homo sapien
gctcatgacgattgccccttttgtt

SEQ ID NO: 3849258 - DNA, 25 bp, Homo sapien
taacatggagtctagggatactgga

SEQ ID NO: 3849259 - DNA, 25 bp, Homo sapien
taatgcctgctttcgagtgaacagc

SEQ ID NO: 3849260 - DNA, 25 bp, Homo sapien
catagtatcatatcatgcttgctca

SEQ ID NO: 3849261 - DNA, 25 bp, Homo sapien
cttttgccagtaagttcaacctagc

SEQ ID NO: 3849262 - DNA, 25 bp, Homo sapien
tgagagataacaaagcaaggtgacc

SEQ ID NO: 3849263 - DNA, 25 bp, Homo sapien
tagtgttgatgtaatgttgcttgtc

SEQ ID NO: 3849264 - DNA, 25 bp, Homo sapien
ccaactggcgagttactagtgttga

SEQ ID NO: 3849265 - DNA, 25 bp, Homo sapien
caacaaatcaaacctctccaactgg

SEQ ID NO: 3849266 - DNA, 25 bp, Homo sapien
gcttgtccctggacagctgagctca

SEQ ID NO: 3849267 - DNA, 25 bp, Homo sapien
gtttcagaaggcacactacatggca

SEQ ID NO: 3849268 - DNA, 25 bp, Homo sapien
tccttgcaagataggcaggccgtta

SEQ ID NO: 3849269 - DNA, 25 bp, Homo sapien
tcttctcgtcttaggagggtggcca

SEQ ID NO: 3849270 - DNA, 25 bp, Homo sapien
gatgaaaccacagacgtgcagcgag

SEQ ID NO: 3849271 - DNA, 25 bp, Homo sapien
aacttgagggtgagcgcagtctcca

SEQ ID NO: 3849272 - DNA, 25 bp, Homo sapien
agaccccgaccagcgagtgcagcag

SEQ ID NO: 3849273 - DNA, 25 bp, Homo sapien
cgttaaggaagaccagtccctccat

SEQ ID NO: 3849274 - DNA, 25 bp, Homo sapien
acagcaaccgagtggccagggcgtt

SEQ ID NO: 3849275 - DNA, 25 bp, Homo sapien
agcccaccggtgagcaggaatatga

SEQ ID NO: 3849276 - DNA, 25 bp, Homo sapien
tgcctacgtccccttgcctgcgccc

SEQ ID NO: 3849277 - DNA, 25 bp, Homo sapien
cggagcccaccggtgagcaggaata

SEQ ID NO: 3849278 - DNA, 25 bp, Homo sapien
aggaccctgccgggcgtgcccggag

SEQ ID NO: 3849279 - DNA, 25 bp, Homo sapien
cccttctcaccctcagcgcccgatg

SEQ ID NO: 3849280 - DNA, 25 bp, Homo sapien
tcaacttttgtgagatcagctgtaa

SEQ ID NO: 3849281 - DNA, 25 bp, Homo sapien
caacttttgtgagatcagctgtaaa

SEQ ID NO: 3849282 - DNA, 25 bp, Homo sapien
cagagtatgaagatctaaaggaacc

SEQ ID NO: 3849283 - DNA, 25 bp, Homo sapien
gggcaaggtcaacagagtatgaaga

SEQ ID NO: 3849284 - DNA, 25 bp, Homo sapien
ctaataaatgagagccaatggtttt

SEQ ID NO: 3849285 - DNA, 25 bp, Homo sapien
gctctagatagtcttgcaagtctgt

SEQ ID NO: 3849286 - DNA, 25 bp, Homo sapien
ggctaaaggctctagatagtcttgc

SEQ ID NO: 3849287 - DNA, 25 bp, Homo sapien
taaatgagagccaatggttttcttc

SEQ ID NO: 3849288 - DNA, 25 bp, Homo sapien
acatccgactcctgcacattccaaa

SEQ ID NO: 3849289 - DNA, 25 bp, Homo sapien
tgcacattccaaactaatagacaca

SEQ ID NO: 3849290 - DNA, 25 bp, Homo sapien
ctgcacattccaaactaatagacac

SEQ ID NO: 3849291 - DNA, 25 bp, Homo sapien
tcttccctaaacatccgactcctgc

SEQ ID NO: 3849292 - DNA, 25 bp, Homo sapien
gaaaactgatgaatgattctggctc

SEQ ID NO: 3849293 - DNA, 25 bp, Homo sapien
gggctgtttgtaaccctccagagtc

SEQ ID NO: 3849294 - DNA, 25 bp, Homo sapien
attctggctctcaggcgagggaaga

SEQ ID NO: 3849295 - DNA, 25 bp, Homo sapien
tgtttgtaaccctccagagtcacct

SEQ ID NO: 3849296 - DNA, 25 bp, Homo sapien
cagtcagaacacttccggaggtggt

SEQ ID NO: 3849297 - DNA, 25 bp, Homo sapien
cattttctgaggtgatcaccccgga

SEQ ID NO: 3849298 - DNA, 25 bp, Homo sapien
ttaccccagaatccacggtcagggc

SEQ ID NO: 3849299 - DNA, 25 bp, Homo sapien
gcacttccagagatgattaccccag

SEQ ID NO: 3849300 - DNA, 25 bp, Homo sapien
tcccatagtaaccaatcagagccag

SEQ ID NO: 3849301 - DNA, 25 bp, Homo sapien
catagatcccatagtaaccaatcag

SEQ ID NO: 3849302 - DNA, 25 bp, Homo sapien
ctgaacaacatagatcccatagtaa

SEQ ID NO: 3849303 - DNA, 25 bp, Homo sapien
catagtaaccaatcagagccagtct

SEQ ID NO: 3849304 - DNA, 25 bp, Homo sapien
aatgtttggaagggctgcagacaac

SEQ ID NO: 3849305 - DNA, 25 bp, Homo sapien
tgtaatgtttggaagggctgcagac

SEQ ID NO: 3849306 - DNA, 25 bp, Homo sapien
ttgtaatgtttggaagggctgcaga

SEQ ID NO: 3849307 - DNA, 25 bp, Homo sapien
taatgtttggaagggctgcagacaa

SEQ ID NO: 3849308 - DNA, 25 bp, Homo sapien
ttgatgcttctaattggcagccgtg

SEQ ID NO: 3849309 - DNA, 25 bp, Homo sapien
tgttgatgcttctaattggcagccg

SEQ ID NO: 3849310 - DNA, 25 bp, Homo sapien
ctaatttacacagtgttgatgcttc

SEQ ID NO: 3849311 - DNA, 25 bp, Homo sapien
gatgcttctaattggcagccgtgca

SEQ ID NO: 3849312 - DNA, 25 bp, Homo sapien
gctgtcttaataatcatattgtcgg

SEQ ID NO: 3849313 - DNA, 25 bp, Homo sapien
ccagtgagtgagtcattatatgaaa

SEQ ID NO: 3849314 - DNA, 25 bp, Homo sapien
cacttgttgtgtaatgtgggatcca

SEQ ID NO: 3849315 - DNA, 25 bp, Homo sapien
tcggcggtagtatgggtattgttct

SEQ ID NO: 3849316 - DNA, 25 bp, Homo sapien
gctttatacatataccaaccctctg

SEQ ID NO: 3849317 - DNA, 25 bp, Homo sapien
tttatacatataccaaccctctgca

SEQ ID NO: 3849318 - DNA, 25 bp, Homo sapien
ttgctttatacatataccaaccctc

SEQ ID NO: 3849319 - DNA, 25 bp, Homo sapien
ttatacatataccaaccctctgcat

SEQ ID NO: 3849320 - DNA, 25 bp, Homo sapien
caatataattgtcctgcgtatgtgg

SEQ ID NO: 3849321 - DNA, 25 bp, Homo sapien
taaaatacagcgcatgatatatcaa

SEQ ID NO: 3849322 - DNA, 25 bp, Homo sapien
gagataactccgctttgatggtgtt

SEQ ID NO: 3849323 - DNA, 25 bp, Homo sapien
atggtgttatttcctgagcacgcaa

SEQ ID NO: 3849324 - DNA, 25 bp, Homo sapien
agaaattcagcgttagagattatga

SEQ ID NO: 3849325 - DNA, 25 bp, Homo sapien
aacacacactcaaatagccaaacaa

SEQ ID NO: 3849326 - DNA, 25 bp, Homo sapien
aaacacacactcaaatagccaaaca

SEQ ID NO: 3849327 - DNA, 25 bp, Homo sapien
aattcagcgttagagattatgaaaa

SEQ ID NO: 3849328 - DNA, 25 bp, Homo sapien
aaatgacaaatagtacactgtgtct

SEQ ID NO: 3849329 - DNA, 25 bp, Homo sapien
gttaaatgacaaatagtacactgtg

SEQ ID NO: 3849330 - DNA, 25 bp, Homo sapien
taaatgacaaatagtacactgtgtc

SEQ ID NO: 3849331 - DNA, 25 bp, Homo sapien
agttaaatgacaaatagtacactgt

SEQ ID NO: 3849332 - DNA, 25 bp, Homo sapien
ctggaaccttcactttcattaattt

SEQ ID NO: 3849333 - DNA, 25 bp, Homo sapien
tggaaccttcactttcattaatttc

SEQ ID NO: 3849334 - DNA, 25 bp, Homo sapien
catttctggtactgctttcaccttc

SEQ ID NO: 3849335 - DNA, 25 bp, Homo sapien
ctcatttctggtactgctttcacct

SEQ ID NO: 3849336 - DNA, 25 bp, Homo sapien
tttctggtactgctttcaccttcat

SEQ ID NO: 3849337 - DNA, 25 bp, Homo sapien
atttctggtactgctttcaccttca

SEQ ID NO: 3849338 - DNA, 25 bp, Homo sapien
tctcccctatgtcgccaagtagttg

SEQ ID NO: 3849339 - DNA, 25 bp, Homo sapien
taattgaggagttgtgtagagccca

SEQ ID NO: 3849340 - DNA, 25 bp, Homo sapien
gtctatataaatgctaaaccttcca

SEQ ID NO: 3849341 - DNA, 25 bp, Homo sapien
caagtagttgctggccactgagaca

SEQ ID NO: 3849342 - DNA, 25 bp, Homo sapien
tgtgcattttcatcgggctctcacc

SEQ ID NO: 3849343 - DNA, 25 bp, Homo sapien
tgctgtctagtaactgaacctccca

SEQ ID NO: 3849344 - DNA, 25 bp, Homo sapien
caaatgccacagaagacggtttcgg

SEQ ID NO: 3849345 - DNA, 25 bp, Homo sapien
taaagcccagtgttgattgactcca

SEQ ID NO: 3849346 - DNA, 25 bp, Homo sapien
gattaggcttgcaaccctgcttttt

SEQ ID NO: 3849347 - DNA, 25 bp, Homo sapien
cagagattaggcttgcaaccctgct

SEQ ID NO: 3849348 - DNA, 25 bp, Homo sapien
atcagagattaggcttgcaaccctg

SEQ ID NO: 3849349 - DNA, 25 bp, Homo sapien
gagattaggcttgcaaccctgcttt

SEQ ID NO: 3849350 - DNA, 25 bp, Homo sapien
catataacaattatggagcacccac

SEQ ID NO: 3849351 - DNA, 25 bp, Homo sapien
gcaagatactctgcgagcacaaggg

SEQ ID NO: 3849352 - DNA, 25 bp, Homo sapien
gcacaagggcgatgacgagaaactt

SEQ ID NO: 3849353 - DNA, 25 bp, Homo sapien
agtggtctagtacagctggagctcg

SEQ ID NO: 3849354 - DNA, 25 bp, Homo sapien
tcgtgactgaaaaatactgaatctg

SEQ ID NO: 3849355 - DNA, 25 bp, Homo sapien
tatggctgacttaatgttagggaca

SEQ ID NO: 3849356 - DNA, 25 bp, Homo sapien
aaggctttgagtccagtaactgaga

SEQ ID NO: 3849357 - DNA, 25 bp, Homo sapien
gggatctacacaggcaagcaacttt

SEQ ID NO: 3849358 - DNA, 25 bp, Homo sapien
cttgcagattatctcagtgcctgca

SEQ ID NO: 3849359 - DNA, 25 bp, Homo sapien
tataatgcagtttgaagcactttaa

SEQ ID NO: 3849360 - DNA, 25 bp, Homo sapien
taatgcagtttgaagcactttaatt

SEQ ID NO: 3849361 - DNA, 25 bp, Homo sapien
aattatataatgcagtttgaagcac

SEQ ID NO: 3849362 - DNA, 25 bp, Homo sapien
tgcagtttgaagcactttaatttat

SEQ ID NO: 3849363 - DNA, 25 bp, Homo sapien
gcatgttcttagattgcatttcatt

SEQ ID NO: 3849364 - DNA, 25 bp, Homo sapien
cctctggaagacgtccctcttctgg

SEQ ID NO: 3849365 - DNA, 25 bp, Homo sapien
tggtagataataagtttgcatgttc

SEQ ID NO: 3849366 - DNA, 25 bp, Homo sapien
catttcattatgcttccgttcccct

SEQ ID NO: 3849367 - DNA, 25 bp, Homo sapien
aaatgtcttcgatggtcattttggt

SEQ ID NO: 3849368 - DNA, 25 bp, Homo sapien
gaagacaattaaggtccttgacttg

SEQ ID NO: 3849369 - DNA, 25 bp, Homo sapien
tttattctgggcgttctaagtacca

SEQ ID NO: 3849370 - DNA, 25 bp, Homo sapien
ctaagtaccagaatgaaagaagaca

SEQ ID NO: 3849371 - DNA, 25 bp, Homo sapien
tggtccaaatcttctttgcagaatt

SEQ ID NO: 3849372 - DNA, 25 bp, Homo sapien
atcatctgcggaatgaggagaacca

SEQ ID NO: 3849373 - DNA, 25 bp, Homo sapien
tcatctgcggaatgaggagaaccat

SEQ ID NO: 3849374 - DNA, 25 bp, Homo sapien
catcatctgcggaatgaggagaacc

SEQ ID NO: 3849375 - DNA, 25 bp, Homo sapien
tgaggagaaccatcctccatctagc

SEQ ID NO: 3849376 - DNA, 25 bp, Homo sapien
ctccatgcatgtggcctaataagag

SEQ ID NO: 3849377 - DNA, 25 bp, Homo sapien
tcccaatgctgtgggtgaaatgaac

SEQ ID NO: 3849378 - DNA, 25 bp, Homo sapien
cctccagtgggctccatgcatgtgg

SEQ ID NO: 3849379 - DNA, 25 bp, Homo sapien
tgaacaagttgtcctaggggagact

SEQ ID NO: 3849380 - DNA, 25 bp, Homo sapien
gcctttactgacaactggtcccagc

SEQ ID NO: 3849381 - DNA, 25 bp, Homo sapien
ccagtttcatgggtagttccactta

SEQ ID NO: 3849382 - DNA, 25 bp, Homo sapien
tcattgaatcatactgcctttactg

SEQ ID NO: 3849383 - DNA, 25 bp, Homo sapien
tggtcccagcaccttatacttcagc

SEQ ID NO: 3849384 - DNA, 25 bp, Homo sapien
gaacaagggttctagcatctctctg

SEQ ID NO: 3849385 - DNA, 25 bp, Homo sapien
gatgattgacaatgtccacgtgcac

SEQ ID NO: 3849386 - DNA, 25 bp, Homo sapien
tcactgcaaacttcatgtatggagg

SEQ ID NO: 3849387 - DNA, 25 bp, Homo sapien
taaaaacaccatgatcacgactcag

SEQ ID NO: 3849388 - DNA, 25 bp, Homo sapien
gatctttgaaacagccatagggcag

SEQ ID NO: 3849389 - DNA, 25 bp, Homo sapien
caaactgctcctgatttctataaaa

SEQ ID NO: 3849390 - DNA, 25 bp, Homo sapien
gctttgcgatagaggaaagaggcta

SEQ ID NO: 3849391 - DNA, 25 bp, Homo sapien
gcagtcccaagctatcaatgatagt

SEQ ID NO: 3849392 - DNA, 25 bp, Homo sapien
cctgggtttcagatcggccctgcag

SEQ ID NO: 3849393 - DNA, 25 bp, Homo sapien
tgcctgggtttcagatcggccctgc

SEQ ID NO: 3849394 - DNA, 25 bp, Homo sapien
tgggtttcagatcggccctgcagaa

SEQ ID NO: 3849395 - DNA, 25 bp, Homo sapien
tttcagatcggccctgcagaactga

SEQ ID NO: 3849396 - DNA, 25 bp, Homo sapien
tatttcagtgcaaaatacagttctc

SEQ ID NO: 3849397 - DNA, 25 bp, Homo sapien
gttctcaaaatgtcagtttcatcta

SEQ ID NO: 3849398 - DNA, 25 bp, Homo sapien
tttcatctagtttggcctttccaag

SEQ ID NO: 3849399 - DNA, 25 bp, Homo sapien
tgtcagtttcatctagtttggcctt

SEQ ID NO: 3849400 - DNA, 25 bp, Homo sapien
gctccaccatcaaggatggctatgg

SEQ ID NO: 3849401 - DNA, 25 bp, Homo sapien
tcactaattccttcggattcatgcc

SEQ ID NO: 3849402 - DNA, 25 bp, Homo sapien
gctatggaaggacttcactaattcc

SEQ ID NO: 3849403 - DNA, 25 bp, Homo sapien
aattccttcggattcatgccctgct

SEQ ID NO: 3849404 - DNA, 25 bp, Homo sapien
gcccggaagaaagcactgagtgacc

SEQ ID NO: 3849405 - DNA, 25 bp, Homo sapien
agtcatctcgaaaataattgcccgg

SEQ ID NO: 3849406 - DNA, 25 bp, Homo sapien
tgacctgtctgctcggaaaggagcc

SEQ ID NO: 3849407 - DNA, 25 bp, Homo sapien
gacatacacgcatattcctcatgga

SEQ ID NO: 3849408 - DNA, 25 bp, Homo sapien
tatcggtcatgaaacaataggactc

SEQ ID NO: 3849409 - DNA, 25 bp, Homo sapien
tcacgaaacacgatggtaaccactg

SEQ ID NO: 3849410 - DNA, 25 bp, Homo sapien
ccactggaccatggcaaactgtgca

SEQ ID NO: 3849411 - DNA, 25 bp, Homo sapien
tctcagacccgaagcacctggcaaa

SEQ ID NO: 3849412 - DNA, 25 bp, Homo sapien
gagggcatggcctcaaatactgcat

SEQ ID NO: 3849413 - DNA, 25 bp, Homo sapien
tgagggcatggcctcaaatactgca

SEQ ID NO: 3849414 - DNA, 25 bp, Homo sapien
catggcctcaaatactgcattgtaa

SEQ ID NO: 3849415 - DNA, 25 bp, Homo sapien
gggcatggcctcaaatactgcattg

SEQ ID NO: 3849416 - DNA, 25 bp, Homo sapien
tcttgaggacagacacttcacctgc

SEQ ID NO: 3849417 - DNA, 25 bp, Homo sapien
tgaggacagacacttcacctgcttc

SEQ ID NO: 3849418 - DNA, 25 bp, Homo sapien
actcttgaggacagacacttcacct

SEQ ID NO: 3849419 - DNA, 25 bp, Homo sapien
ctaactcttgaggacagacacttca

SEQ ID NO: 3849420 - DNA, 25 bp, Homo sapien
gttctcagcagtcaaaatctttgtg

SEQ ID NO: 3849421 - DNA, 25 bp, Homo sapien
cagcagtcaaaatctttgtgttaat

SEQ ID NO: 3849422 - DNA, 25 bp, Homo sapien
atctctgcagttctcagcagtcaaa

SEQ ID NO: 3849423 - DNA, 25 bp, Homo sapien
tgcagttctcagcagtcaaaatctt

SEQ ID NO: 3849424 - DNA, 25 bp, Homo sapien
cgggttcccactgttaatgctgtca

SEQ ID NO: 3849425 - DNA, 25 bp, Homo sapien
attactttccctgactctactgaca

SEQ ID NO: 3849426 - DNA, 25 bp, Homo sapien
tctgaactttactgtcaatccgggt

SEQ ID NO: 3849427 - DNA, 25 bp, Homo sapien
cagttgtcatcaaatcctaccgtct

SEQ ID NO: 3849428 - DNA, 25 bp, Homo sapien
ctgaaagtaaggtttagtaggcaca

SEQ ID NO: 3849429 - DNA, 25 bp, Homo sapien
agggtgggtagggagataagatctc

SEQ ID NO: 3849430 - DNA, 25 bp, Homo sapien
gggtgggtagggagataagatctct

SEQ ID NO: 3849431 - DNA, 25 bp, Homo sapien
gaaagtaaggtttagtaggcacaga

SEQ ID NO: 3849432 - DNA, 25 bp, Homo sapien
ccataacgacattcacggcaggaat

SEQ ID NO: 3849433 - DNA, 25 bp, Homo sapien
taagctgaacgtgtatttgagccga

SEQ ID NO: 3849434 - DNA, 25 bp, Homo sapien
ttgttaaaatctgtactgcagctag

SEQ ID NO: 3849435 - DNA, 25 bp, Homo sapien
tgagccgaagagtgtttgaaaacat

SEQ ID NO: 3849436 - DNA, 25 bp, Homo sapien
gtagtggagttctctgccgtgacat

SEQ ID NO: 3849437 - DNA, 25 bp, Homo sapien
ttcacagagtagtggagttctctgc

SEQ ID NO: 3849438 - DNA, 25 bp, Homo sapien
cacagagtagtggagttctctgccg

SEQ ID NO: 3849439 - DNA, 25 bp, Homo sapien
gagtagtggagttctctgccgtgac

SEQ ID NO: 3849440 - DNA, 25 bp, Homo sapien
ttcctaggaattcttcagaacagag

SEQ ID NO: 3849441 - DNA, 25 bp, Homo sapien
tatgcaagtttacaaccctgacgct

SEQ ID NO: 3849442 - DNA, 25 bp, Homo sapien
gcaagtgttacatggttatcaggaa

SEQ ID NO: 3849443 - DNA, 25 bp, Homo sapien
aatgtacttgagaaagcttagttcc

SEQ ID NO: 3849444 - DNA, 25 bp, Homo sapien
cttttcctggcgcagtacagctgcc

SEQ ID NO: 3849445 - DNA, 25 bp, Homo sapien
aagagttgaccaccaaccagaaaga

SEQ ID NO: 3849446 - DNA, 25 bp, Homo sapien
gaaagaagccctgattccaccaagc

SEQ ID NO: 3849447 - DNA, 25 bp, Homo sapien
tagaatggcaagagttgaccaccaa

SEQ ID NO: 3849448 - DNA, 25 bp, Homo sapien
tctcttctagctatgacttttatca

SEQ ID NO: 3849449 - DNA, 25 bp, Homo sapien
ttctcttctagctatgacttttatc

SEQ ID NO: 3849450 - DNA, 25 bp, Homo sapien
acttttcagtcccatcagctccttc

SEQ ID NO: 3849451 - DNA, 25 bp, Homo sapien
agcccctttttcgcttgggctgagg

SEQ ID NO: 3849452 - DNA, 25 bp, Homo sapien
caagcccctttttcgcttgggctga

SEQ ID NO: 3849453 - DNA, 25 bp, Homo sapien
agcctctatgatcacagtaagattt

SEQ ID NO: 3849454 - DNA, 25 bp, Homo sapien
cacaagcccctttttcgcttgggct

SEQ ID NO: 3849455 - DNA, 25 bp, Homo sapien
tcatttgatgtctttccgtccccag

SEQ ID NO: 3849456 - DNA, 25 bp, Homo sapien
tggcaacgggcactgtttgtcaaca

SEQ ID NO: 3849457 - DNA, 25 bp, Homo sapien
agagcagatccccagaagacctaag

SEQ ID NO: 3849458 - DNA, 25 bp, Homo sapien
tgctgggtctggataggtctgccca

SEQ ID NO: 3849459 - DNA, 25 bp, Homo sapien
tgtacaggatgtatattcaaatgtg

SEQ ID NO: 3849460 - DNA, 25 bp, Homo sapien
ataaagctgatatcgtctggttggg

SEQ ID NO: 3849461 - DNA, 25 bp, Homo sapien
caatttgggaaagctatcaaagcag

SEQ ID NO: 3849462 - DNA, 25 bp, Homo sapien
tggaaataaagctgatatcgtctgg

SEQ ID NO: 3849463 - DNA, 25 bp, Homo sapien
gatttggaggccatgtaaaaaccag

SEQ ID NO: 3849464 - DNA, 25 bp, Homo sapien
aggaagctccaccagcatttgcggg

SEQ ID NO: 3849465 - DNA, 25 bp, Homo sapien
gggagatctcaaccttccaactctc

SEQ ID NO: 3849466 - DNA, 25 bp, Homo sapien
caactctcactagatttggaggcca

SEQ ID NO: 3849467 - DNA, 25 bp, Homo sapien
gacttccaaccagcgatggactggg

SEQ ID NO: 3849468 - DNA, 25 bp, Homo sapien
ggcaagggacccacgttcagaatca

SEQ ID NO: 3849469 - DNA, 25 bp, Homo sapien
cagaatcacctagcatcaggtccgc

SEQ ID NO: 3849470 - DNA, 25 bp, Homo sapien
ctccggatcgcaaaagtgacccgag

SEQ ID NO: 3849471 - DNA, 25 bp, Homo sapien
tattccccatatagtacatgtttac

SEQ ID NO: 3849472 - DNA, 25 bp, Homo sapien
caatataataaaagctggagggggg

SEQ ID NO: 3849473 - DNA, 25 bp, Homo sapien
attccccatatagtacatgtttact

SEQ ID NO: 3849474 - DNA, 25 bp, Homo sapien
cttattccccatatagtacatgttt

SEQ ID NO: 3849475 - DNA, 25 bp, Homo sapien
atgcaaacctcgcaatgctccaggg

SEQ ID NO: 3849476 - DNA, 25 bp, Homo sapien
tgcataatagccgtgcatgcaaacc

SEQ ID NO: 3849477 - DNA, 25 bp, Homo sapien
tgcaatctagcctggcggaggaccg

SEQ ID NO: 3849478 - DNA, 25 bp, Homo sapien
tcaacactgcgaaaatgcaatctag

SEQ ID NO: 3849479 - DNA, 25 bp, Homo sapien
tctcatcagacgatatcccagacag

SEQ ID NO: 3849480 - DNA, 25 bp, Homo sapien
aaatctcatcagacgatatcccaga

SEQ ID NO: 3849481 - DNA, 25 bp, Homo sapien
aaaaatctcatcagacgatatccca

SEQ ID NO: 3849482 - DNA, 25 bp, Homo sapien
atcagacgatatcccagacaggagc

SEQ ID NO: 3849483 - DNA, 25 bp, Homo sapien
tcgtatggcgcctttctctcgatta

SEQ ID NO: 3849484 - DNA, 25 bp, Homo sapien
tatttttacaaatcttcttgtgtgt

SEQ ID NO: 3849485 - DNA, 25 bp, Homo sapien
ggcgcctttctctcgattatgaatt

SEQ ID NO: 3849486 - DNA, 25 bp, Homo sapien
cccgccgagatcgtatggcgccttt

SEQ ID NO: 3849487 - DNA, 25 bp, Homo sapien
ccggctgaaggcagagaatgcgttt

SEQ ID NO: 3849488 - DNA, 25 bp, Homo sapien
ttcagaacgtcgagatggagcccaa

SEQ ID NO: 3849489 - DNA, 25 bp, Homo sapien
ctgccaggacctgatgcaatccatt

SEQ ID NO: 3849490 - DNA, 25 bp, Homo sapien
caagccaacaagtttggagagaatg

SEQ ID NO: 3849491 - DNA, 25 bp, Homo sapien
tctacaaggcttttcaattccacct

SEQ ID NO: 3849492 - DNA, 25 bp, Homo sapien
ttctttgtaagatgtacgccaaagg

SEQ ID NO: 3849493 - DNA, 25 bp, Homo sapien
tccgatttgcatagcggagctccag

SEQ ID NO: 3849494 - DNA, 25 bp, Homo sapien
caagaattttgtcccttggcgactt

SEQ ID NO: 3849495 - DNA, 25 bp, Homo sapien
ttcgtgtctggctcggtcgtgtctg

SEQ ID NO: 3849496 - DNA, 25 bp, Homo sapien
ctcggtcgtgtctgggtggatttct

SEQ ID NO: 3849497 - DNA, 25 bp, Homo sapien
cttcgtgtctggctcggtcgtgtct

SEQ ID NO: 3849498 - DNA, 25 bp, Homo sapien
tcgtgtctgggtggatttctttcgg

SEQ ID NO: 3849499 - DNA, 25 bp, Homo sapien
ccaaagcgagagcagggtaatcaaa

SEQ ID NO: 3849500 - DNA, 25 bp, Homo sapien
tactggagttcgtcgaaacgttcgc

SEQ ID NO: 3849501 - DNA, 25 bp, Homo sapien
ggtctatgccggttaattactggag

SEQ ID NO: 3849502 - DNA, 25 bp, Homo sapien
gaattactcgtcagtggtctatgcc

SEQ ID NO: 3849503 - DNA, 25 bp, Homo sapien
gcagtgttctggttggaaatttgca

SEQ ID NO: 3849504 - DNA, 25 bp, Homo sapien
cagtgaaggtcagatgcagaaaagg

SEQ ID NO: 3849505 - DNA, 25 bp, Homo sapien
ggtcattgataatgttctcagagac

SEQ ID NO: 3849506 - DNA, 25 bp, Homo sapien
ggtgtatccattggtaaagctggtc

SEQ ID NO: 3849507 - DNA, 25 bp, Homo sapien
cagaaaaggtcattgataatgttct

SEQ ID NO: 3849508 - DNA, 25 bp, Homo sapien
atgtcaacaagccatatcgggtctt

SEQ ID NO: 3849509 - DNA, 25 bp, Homo sapien
tatcgggtcttttttacatctaatg

SEQ ID NO: 3849510 - DNA, 25 bp, Homo sapien
tgcatttggagagttttgctggaaa

SEQ ID NO: 3849511 - DNA, 25 bp, Homo sapien
tacatctaatgtcttgatcattgca

SEQ ID NO: 3849512 - DNA, 25 bp, Homo sapien
gagtggatcatttccctcaaaccta

SEQ ID NO: 3849513 - DNA, 25 bp, Homo sapien
ctggtcaagtgggtacattctgatt

SEQ ID NO: 3849514 - DNA, 25 bp, Homo sapien
gagatgtggcttccacgctggacca

SEQ ID NO: 3849515 - DNA, 25 bp, Homo sapien
gaagtcattgctgtttccgaaaagg

SEQ ID NO: 3849516 - DNA, 25 bp, Homo sapien
gggtagagcacattgactggcataa

SEQ ID NO: 3849517 - DNA, 25 bp, Homo sapien
gcattgcccaagacgaaaattgttg

SEQ ID NO: 3849518 - DNA, 25 bp, Homo sapien
tacgccttaatgtgacaacttcctg

SEQ ID NO: 3849519 - DNA, 25 bp, Homo sapien
catgtgaccctggtttgtgatgagc

SEQ ID NO: 3849520 - DNA, 25 bp, Homo sapien
ttcttcttctgatgacggactgaag

SEQ ID NO: 3849521 - DNA, 25 bp, Homo sapien
gtttcctgcagccacgaaagcttct

SEQ ID NO: 3849522 - DNA, 25 bp, Homo sapien
cacgaaagcttcttagaattccagg

SEQ ID NO: 3849523 - DNA, 25 bp, Homo sapien
tctgatgacggactgaagatggacc

SEQ ID NO: 3849524 - DNA, 25 bp, Homo sapien
tcacctcccatcaaatcagtagtgg

SEQ ID NO: 3849525 - DNA, 25 bp, Homo sapien
gaaaccatcccacacagtccatgga

SEQ ID NO: 3849526 - DNA, 25 bp, Homo sapien
ttttcatttcagtttccaggcctcc

SEQ ID NO: 3849527 - DNA, 25 bp, Homo sapien
gcctgcctgaacattactgcctgag

SEQ ID NO: 3849528 - DNA, 25 bp, Homo sapien
agcagggcaaacagctacaactatg

SEQ ID NO: 3849529 - DNA, 25 bp, Homo sapien
caggtagcagggcaaacagctacaa

SEQ ID NO: 3849530 - DNA, 25 bp, Homo sapien
ggaactcacaggtagcagggcaaac

SEQ ID NO: 3849531 - DNA, 25 bp, Homo sapien
ctcacaggtagcagggcaaacagct

SEQ ID NO: 3849532 - DNA, 25 bp, Homo sapien
gcttggatgaaggttgcatgagtac

SEQ ID NO: 3849533 - DNA, 25 bp, Homo sapien
ttataaggtagagtctagccagtgc

SEQ ID NO: 3849534 - DNA, 25 bp, Homo sapien
tgaaggttgcatgagtacgtcttgc

SEQ ID NO: 3849535 - DNA, 25 bp, Homo sapien
tgaaggcgtaagcagtgttccagga

SEQ ID NO: 3849536 - DNA, 25 bp, Homo sapien
tgagacggattcttgtggattggtg

SEQ ID NO: 3849537 - DNA, 25 bp, Homo sapien
taaaagagtaggcattgtgacctct

SEQ ID NO: 3849538 - DNA, 25 bp, Homo sapien
cggattcttgtggattggtgtgatc

SEQ ID NO: 3849539 - DNA, 25 bp, Homo sapien
gcaatttttatcctcagcctcgcaa

SEQ ID NO: 3849540 - DNA, 25 bp, Homo sapien
tgtctccgataagtgcatagtggtt

SEQ ID NO: 3849541 - DNA, 25 bp, Homo sapien
tttttgttgtctccgataagtgcat

SEQ ID NO: 3849542 - DNA, 25 bp, Homo sapien
tctccgataagtgcatagtggttca

SEQ ID NO: 3849543 - DNA, 25 bp, Homo sapien
tgttgtctccgataagtgcatagtg

SEQ ID NO: 3849544 - DNA, 25 bp, Homo sapien
cagaaattgcctcgccaaaggtgat

SEQ ID NO: 3849545 - DNA, 25 bp, Homo sapien
ccttcggattgtctgcattggaaca

SEQ ID NO: 3849546 - DNA, 25 bp, Homo sapien
tgccaaggttgaatccttcggattg

SEQ ID NO: 3849547 - DNA, 25 bp, Homo sapien
tcagaaattgcctcgccaaaggtga

SEQ ID NO: 3849548 - DNA, 25 bp, Homo sapien
catgttttaggatgcttgttaatga

SEQ ID NO: 3849549 - DNA, 25 bp, Homo sapien
atgtacagcatgttttaggatgctt

SEQ ID NO: 3849550 - DNA, 25 bp, Homo sapien
cagcatgttttaggatgcttgttaa

SEQ ID NO: 3849551 - DNA, 25 bp, Homo sapien
tacagcatgttttaggatgcttgtt

SEQ ID NO: 3849552 - DNA, 25 bp, Homo sapien
gggcacgttggtagtcagaacatta

SEQ ID NO: 3849553 - DNA, 25 bp, Homo sapien
ggcacgttggtagtcagaacattac

SEQ ID NO: 3849554 - DNA, 25 bp, Homo sapien
aaggccatcttcaatttgactgtgc

SEQ ID NO: 3849555 - DNA, 25 bp, Homo sapien
gccagacaatctaattctgacagtg

SEQ ID NO: 3849556 - DNA, 25 bp, Homo sapien
gagaaataggcctggatcatttgcc

SEQ ID NO: 3849557 - DNA, 25 bp, Homo sapien
tctgacagtgtagtgaaggccatct

SEQ ID NO: 3849558 - DNA, 25 bp, Homo sapien
tatagggtgtccaggaactcccaag

SEQ ID NO: 3849559 - DNA, 25 bp, Homo sapien
tcagtgtctggactatagggtgtcc

SEQ ID NO: 3849560 - DNA, 25 bp, Homo sapien
tgtgtcaggagttaacccttcagtg

SEQ ID NO: 3849561 - DNA, 25 bp, Homo sapien
ctcagggccacgatagcagccaggg

SEQ ID NO: 3849562 - DNA, 25 bp, Homo sapien
tggcgatggtttgttcacacagtgt

SEQ ID NO: 3849563 - DNA, 25 bp, Homo sapien
gctggcgatggtttgttcacacagt

SEQ ID NO: 3849564 - DNA, 25 bp, Homo sapien
ctggctggcgatggtttgttcacac

SEQ ID NO: 3849565 - DNA, 25 bp, Homo sapien
cgatggtttgttcacacagtgtcat

SEQ ID NO: 3849566 - DNA, 25 bp, Homo sapien
ccttgaagagacttcatctggacat

SEQ ID NO: 3849567 - DNA, 25 bp, Homo sapien
gaatggagagtaggcccatcactac

SEQ ID NO: 3849568 - DNA, 25 bp, Homo sapien
gacattgaacgtggtcttccttgaa

SEQ ID NO: 3849569 - DNA, 25 bp, Homo sapien
tgaaggctaaggtttaggtacaaca

SEQ ID NO: 3849570 - DNA, 25 bp, Homo sapien
tgccttcaggatttaatagaaaacc

SEQ ID NO: 3849571 - DNA, 25 bp, Homo sapien
cctcgctgccttcaggatttaatag

SEQ ID NO: 3849572 - DNA, 25 bp, Homo sapien
agcgcagcctcgctgccttcaggat

SEQ ID NO: 3849573 - DNA, 25 bp, Homo sapien
gagcgcagcctcgctgccttcagga

SEQ ID NO: 3849574 - DNA, 25 bp, Homo sapien
cgggtagcctgaagcgtattctgtg

SEQ ID NO: 3849575 - DNA, 25 bp, Homo sapien
aaggtccactgtgcgggtagcctga

SEQ ID NO: 3849576 - DNA, 25 bp, Homo sapien
ctctgcaagaaggtccactgtgcgg

SEQ ID NO: 3849577 - DNA, 25 bp, Homo sapien
tgcgggtagcctgaagcgtattctg

SEQ ID NO: 3849578 - DNA, 25 bp, Homo sapien
gatgagagtctttttagtcccaaac

SEQ ID NO: 3849579 - DNA, 25 bp, Homo sapien
agagggtaatggaagtgttttctcg

SEQ ID NO: 3849580 - DNA, 25 bp, Homo sapien
tgaaagttctttgtcagagggaaga

SEQ ID NO: 3849581 - DNA, 25 bp, Homo sapien
tattgaaattataccatggccatga

SEQ ID NO: 3849582 - DNA, 25 bp, Homo sapien
cggtaccgctcgatgctgaaacgca

SEQ ID NO: 3849583 - DNA, 25 bp, Homo sapien
agtactgccggtaccgctcgatgct

SEQ ID NO: 3849584 - DNA, 25 bp, Homo sapien
taagccatcttccattctaacggac

SEQ ID NO: 3849585 - DNA, 25 bp, Homo sapien
gaaacgcatccaggataagccatct

SEQ ID NO: 3849586 - DNA, 25 bp, Homo sapien
ccatcccccaaattattgcggcata

SEQ ID NO: 3849587 - DNA, 25 bp, Homo sapien
ggctcactttcacaagccccatgtg

SEQ ID NO: 3849588 - DNA, 25 bp, Homo sapien
aaattattgcggcataaggcgtcat

SEQ ID NO: 3849589 - DNA, 25 bp, Homo sapien
gtgcgtgtgtgcctagttgttttca

SEQ ID NO: 3849590 - DNA, 25 bp, Homo sapien
tgcccttaaggattctccagtctgg

SEQ ID NO: 3849591 - DNA, 25 bp, Homo sapien
cacagctaaagtacaaggagtacag

SEQ ID NO: 3849592 - DNA, 25 bp, Homo sapien
tgctgggcagataaaagacacatcc

SEQ ID NO: 3849593 - DNA, 25 bp, Homo sapien
catgttatgcaatgcagccttttgg

SEQ ID NO: 3849594 - DNA, 25 bp, Homo sapien
taagctaaatcaaacatgcccaggg

SEQ ID NO: 3849595 - DNA, 25 bp, Homo sapien
gaaatatgcttgacactaggctctc

SEQ ID NO: 3849596 - DNA, 25 bp, Homo sapien
gcttcagggttccaggcgctcttac

SEQ ID NO: 3849597 - DNA, 25 bp, Homo sapien
gcaaaatatagcctacaggatgcca

SEQ ID NO: 3849598 - DNA, 25 bp, Homo sapien
aaagctcctctttcacttcaggtct

SEQ ID NO: 3849599 - DNA, 25 bp, Homo sapien
caaagctcctctttcacttcaggtc

SEQ ID NO: 3849600 - DNA, 25 bp, Homo sapien
gaaattaaagtctccttagcaccca

SEQ ID NO: 3849601 - DNA, 25 bp, Homo sapien
aggaaccgaaatgagaatggtgccc

SEQ ID NO: 3849602 - DNA, 25 bp, Homo sapien
ttagcacccatctagagagccaggt

SEQ ID NO: 3849603 - DNA, 25 bp, Homo sapien
ggtgccctactttgtgaacttgcaa

SEQ ID NO: 3849604 - DNA, 25 bp, Homo sapien
aagagggtccctcgtggtgtcacca

SEQ ID NO: 3849605 - DNA, 25 bp, Homo sapien
tacagtgttccttgagttcccatgg

SEQ ID NO: 3849606 - DNA, 25 bp, Homo sapien
cattggaatacccagactacagtgt

SEQ ID NO: 3849607 - DNA, 25 bp, Homo sapien
gggtggtaccagcaaattgctatca

SEQ ID NO: 3849608 - DNA, 25 bp, Homo sapien
ttttacaacccgaagcatgggactc

SEQ ID NO: 3849609 - DNA, 25 bp, Homo sapien
cattgccctgcgtcaaactatagcc

SEQ ID NO: 3849610 - DNA, 25 bp, Homo sapien
caagttgcatggtgggaagctaaca

SEQ ID NO: 3849611 - DNA, 25 bp, Homo sapien
catgggactctgatataactgcagt

SEQ ID NO: 3849612 - DNA, 25 bp, Homo sapien
tatacactgcttacccagccaaatg

SEQ ID NO: 3849613 - DNA, 25 bp, Homo sapien
tgtgaaactgtcctacataccagag

SEQ ID NO: 3849614 - DNA, 25 bp, Homo sapien
tgaagcaactgattctagtggaaca

SEQ ID NO: 3849615 - DNA, 25 bp, Homo sapien
tgtttttgaggctgactgactgtcc

SEQ ID NO: 3849616 - DNA, 25 bp, Homo sapien
gataacaatgaaactgcggctctta

SEQ ID NO: 3849617 - DNA, 25 bp, Homo sapien
gaagaccgcttggatgaactcccca

SEQ ID NO: 3849618 - DNA, 25 bp, Homo sapien
acttctaaataggtaactcgactgc

SEQ ID NO: 3849619 - DNA, 25 bp, Homo sapien
tagagatccagtgttaagagttcca

SEQ ID NO: 3849620 - DNA, 25 bp, Homo sapien
aatctatttactgagtgtggcttcc

SEQ ID NO: 3849621 - DNA, 25 bp, Homo sapien
tcattggctgagaacgacgttttaa

SEQ ID NO: 3849622 - DNA, 25 bp, Homo sapien
caattcaaaatgcactaagtctgtg

SEQ ID NO: 3849623 - DNA, 25 bp, Homo sapien
gaatcgaattggcagtggagtcata

SEQ ID NO: 3849624 - DNA, 25 bp, Homo sapien
ttccaagcagggcttctaatccatg

SEQ ID NO: 3849625 - DNA, 25 bp, Homo sapien
gcttctaatccatgtgtgggcagga

SEQ ID NO: 3849626 - DNA, 25 bp, Homo sapien
cagggcttctaatccatgtgtgggc

SEQ ID NO: 3849627 - DNA, 25 bp, Homo sapien
tcaagaacatcatgggaatgatttc

SEQ ID NO: 3849628 - DNA, 25 bp, Homo sapien
gaggggaggtctgcacacagtcccc

SEQ ID NO: 3849629 - DNA, 25 bp, Homo sapien
cacgctcctggtgtgagttgagggg

SEQ ID NO: 3849630 - DNA, 25 bp, Homo sapien
tgtcatccaagcttgggaagttcat

SEQ ID NO: 3849631 - DNA, 25 bp, Homo sapien
gggaggtctgcacacagtccccttg

SEQ ID NO: 3849632 - DNA, 25 bp, Homo sapien
ttatctgaaggcaagggccacagga

SEQ ID NO: 3849633 - DNA, 25 bp, Homo sapien
tctgaaggcaagggccacaggagaa

SEQ ID NO: 3849634 - DNA, 25 bp, Homo sapien
gaaggcaagggccacaggagaatgc

SEQ ID NO: 3849635 - DNA, 25 bp, Homo sapien
aaggcaagggccacaggagaatgct

SEQ ID NO: 3849636 - DNA, 25 bp, Homo sapien
tcctgccactaccaccggctttctc

SEQ ID NO: 3849637 - DNA, 25 bp, Homo sapien
ctgccactaccaccggctttctctc

SEQ ID NO: 3849638 - DNA, 25 bp, Homo sapien
ctgctccttctgcactcccccatgc

SEQ ID NO: 3849639 - DNA, 25 bp, Homo sapien
gctccttctgcactcccccatgccc

SEQ ID NO: 3849640 - DNA, 25 bp, Homo sapien
atgtatggcacatcataaaccttac

SEQ ID NO: 3849641 - DNA, 25 bp, Homo sapien
ctttgaagatagtaattaatccatg

SEQ ID NO: 3849642 - DNA, 25 bp, Homo sapien
ataaaatggtaatgtccctggagca

SEQ ID NO: 3849643 - DNA, 25 bp, Homo sapien
tgtatttctagctgataagacccta

SEQ ID NO: 3849644 - DNA, 25 bp, Homo sapien
gatagacattaacacgcttttgacc

SEQ ID NO: 3849645 - DNA, 25 bp, Homo sapien
tatagaactcaagcccatcttcagg

SEQ ID NO: 3849646 - DNA, 25 bp, Homo sapien
tatttagtaacgtgacactgggctc

SEQ ID NO: 3849647 - DNA, 25 bp, Homo sapien
tctctccactacgtgggaagttgga

SEQ ID NO: 3849648 - DNA, 25 bp, Homo sapien
taagtattaggaagctgtcacattc

SEQ ID NO: 3849649 - DNA, 25 bp, Homo sapien
actctgttacagtagtatccattgg

SEQ ID NO: 3849650 - DNA, 25 bp, Homo sapien
gatacattttattatgcgacgtaaa

SEQ ID NO: 3849651 - DNA, 25 bp, Homo sapien
tatcttgcacttttattcaggcatg

SEQ ID NO: 3849652 - DNA, 25 bp, Homo sapien
gaaaacagtaccaagagctctcggt

SEQ ID NO: 3849653 - DNA, 25 bp, Homo sapien
tcaaggttcactccatcagtgggtg

SEQ ID NO: 3849654 - DNA, 25 bp, Homo sapien
gacacctggtaaacactgaatggaa

SEQ ID NO: 3849655 - DNA, 25 bp, Homo sapien
tttgagttaccacaaacacaggtgc

SEQ ID NO: 3849656 - DNA, 25 bp, Homo sapien
tggttctaatgaagtatttgagaag

SEQ ID NO: 3849657 - DNA, 25 bp, Homo sapien
tcacactggttctaatgaagtattt

SEQ ID NO: 3849658 - DNA, 25 bp, Homo sapien
actggttctaatgaagtatttgaga

SEQ ID NO: 3849659 - DNA, 25 bp, Homo sapien
acactggttctaatgaagtatttga

SEQ ID NO: 3849660 - DNA, 25 bp, Homo sapien
aagaggaatttggaagttgctggca

SEQ ID NO: 3849661 - DNA, 25 bp, Homo sapien
ttctggagattatgtagttgattac

SEQ ID NO: 3849662 - DNA, 25 bp, Homo sapien
tatgtgaagaggaatttggaagttg

SEQ ID NO: 3849663 - DNA, 25 bp, Homo sapien
tctggagattatgtagttgattact

SEQ ID NO: 3849664 - DNA, 25 bp, Homo sapien
gaccacatctgccttattaacctta

SEQ ID NO: 3849665 - DNA, 25 bp, Homo sapien
taggagcggcttagccatgcgtttc

SEQ ID NO: 3849666 - DNA, 25 bp, Homo sapien
tatcaattacaatggaaacaacccc

SEQ ID NO: 3849667 - DNA, 25 bp, Homo sapien
tacaggtcaagaatttaggagcggc

SEQ ID NO: 3849668 - DNA, 25 bp, Homo sapien
ggtgtctcactagtaagttggggct

SEQ ID NO: 3849669 - DNA, 25 bp, Homo sapien
gactgtctgagtatagctactgtct

SEQ ID NO: 3849670 - DNA, 25 bp, Homo sapien
cacatggatctctcccgggactgtc

SEQ ID NO: 3849671 - DNA, 25 bp, Homo sapien
tgtcttccccctaagtgagtgatcc

SEQ ID NO: 3849672 - DNA, 25 bp, Homo sapien
atgctgcaaaatgaaactcctccag

SEQ ID NO: 3849673 - DNA, 25 bp, Homo sapien
gctgcaaaatgaaactcctccagga

SEQ ID NO: 3849674 - DNA, 25 bp, Homo sapien
caggaacccattggatgaattatct

SEQ ID NO: 3849675 - DNA, 25 bp, Homo sapien
gaacccattggatgaattatcttct

SEQ ID NO: 3849676 - DNA, 25 bp, Homo sapien
gttctacaaaaatgcatccattcat

SEQ ID NO: 3849677 - DNA, 25 bp, Homo sapien
aaaaatgcatccattcataattttg

SEQ ID NO: 3849678 - DNA, 25 bp, Homo sapien
ctacaaaaatgcatccattcataat

SEQ ID NO: 3849679 - DNA, 25 bp, Homo sapien
gcatccattcataattttgagtaga

SEQ ID NO: 3849680 - DNA, 25 bp, Homo sapien
tgtaacatacagtaagctgggcccc

SEQ ID NO: 3849681 - DNA, 25 bp, Homo sapien
aacagtatttcagggctcatcaagg

SEQ ID NO: 3849682 - DNA, 25 bp, Homo sapien
caattacatgacttgggctcgctta

SEQ ID NO: 3849683 - DNA, 25 bp, Homo sapien
gagactccttgtggctagtagcgac

SEQ ID NO: 3849684 - DNA, 25 bp, Homo sapien
tgtgtgctcaccatcacttaatcta

SEQ ID NO: 3849685 - DNA, 25 bp, Homo sapien
gcagccatgatctagggtccagaat

SEQ ID NO: 3849686 - DNA, 25 bp, Homo sapien
caggcagaagttttcgaggagcagc

SEQ ID NO: 3849687 - DNA, 25 bp, Homo sapien
cttaatctatttctcctggcaggca

SEQ ID NO: 3849688 - DNA, 25 bp, Homo sapien
cattagagttgatagtttggtatcc

SEQ ID NO: 3849689 - DNA, 25 bp, Homo sapien
gttgtccttaaccaattgatctgtg

SEQ ID NO: 3849690 - DNA, 25 bp, Homo sapien
tcatcatgtaatggctcacttgcag

SEQ ID NO: 3849691 - DNA, 25 bp, Homo sapien
tttggtatccaaagacgatgtctga

SEQ ID NO: 3849692 - DNA, 25 bp, Homo sapien
taaggaactgcccatttgtctcttc

SEQ ID NO: 3849693 - DNA, 25 bp, Homo sapien
taccatcaaagagtgtggcccaagg

SEQ ID NO: 3849694 - DNA, 25 bp, Homo sapien
gatgaccatttgatggttaccatca

SEQ ID NO: 3849695 - DNA, 25 bp, Homo sapien
ggattcttcatgctgaccaataagg

SEQ ID NO: 3849696 - DNA, 25 bp, Homo sapien
tatcatggtagactgaggttgcctc

SEQ ID NO: 3849697 - DNA, 25 bp, Homo sapien
ggtttccgtggtgacataatctcaa

SEQ ID NO: 3849698 - DNA, 25 bp, Homo sapien
acaaaggtggtttccgtggtgacat

SEQ ID NO: 3849699 - DNA, 25 bp, Homo sapien
cctcttttgtcaagaacaaaggtgg

SEQ ID NO: 3849700 - DNA, 25 bp, Homo sapien
gaacatgggtcactcctcttttaca

SEQ ID NO: 3849701 - DNA, 25 bp, Homo sapien
tatgctaagctcctaatgtaactca

SEQ ID NO: 3849702 - DNA, 25 bp, Homo sapien
tcctattgaccatccagaacatggg

SEQ ID NO: 3849703 - DNA, 25 bp, Homo sapien
tcttccctgggctaaacagatctac

SEQ ID NO: 3849704 - DNA, 25 bp, Homo sapien
aaatctgagttatagcttgtccagg

SEQ ID NO: 3849705 - DNA, 25 bp, Homo sapien
tccttatccattgcccggattctgg

SEQ ID NO: 3849706 - DNA, 25 bp, Homo sapien
tgaagatcttctctattgtcaactg

SEQ ID NO: 3849707 - DNA, 25 bp, Homo sapien
cttgtccaggaacaggattgatgac

SEQ ID NO: 3849708 - DNA, 25 bp, Homo sapien
cacaaggacaatggtttcattcacg

SEQ ID NO: 3849709 - DNA, 25 bp, Homo sapien
cgagttgaattccttcgagactgtc

SEQ ID NO: 3849710 - DNA, 25 bp, Homo sapien
cttaaaggactgagatatggcgagt

SEQ ID NO: 3849711 - DNA, 25 bp, Homo sapien
ctgagatatggcgagttgaattcct

SEQ ID NO: 3849712 - DNA, 25 bp, Homo sapien
tatggcgagttgaattccttcgaga

SEQ ID NO: 3849713 - DNA, 25 bp, Homo sapien
aaacaatagagtttacctcctcgca

SEQ ID NO: 3849714 - DNA, 25 bp, Homo sapien
taatgggtactaccaaagctggttc

SEQ ID NO: 3849715 - DNA, 25 bp, Homo sapien
gctggttccactttagcttcaattt

SEQ ID NO: 3849716 - DNA, 25 bp, Homo sapien
ttacctcctcgcaaaacacaataca

SEQ ID NO: 3849717 - DNA, 25 bp, Homo sapien
gccatacaagctggctgggcaacta

SEQ ID NO: 3849718 - DNA, 25 bp, Homo sapien
aagctggctgggcaactagtcggca

SEQ ID NO: 3849719 - DNA, 25 bp, Homo sapien
gctgggcaactagtcggcagcacat

SEQ ID NO: 3849720 - DNA, 25 bp, Homo sapien
gcatcctcagccatacaagctggct

SEQ ID NO: 3849721 - DNA, 25 bp, Homo sapien
acaggggaagccaaaatgaagactc

SEQ ID NO: 3849722 - DNA, 25 bp, Homo sapien
tgccatacaggggaagccaaaatga

SEQ ID NO: 3849723 - DNA, 25 bp, Homo sapien
gttgccatacaggggaagccaaaat

SEQ ID NO: 3849724 - DNA, 25 bp, Homo sapien
aggggaagccaaaatgaagactcct

SEQ ID NO: 3849725 - DNA, 25 bp, Homo sapien
actcatgtctccattatttaagccg

SEQ ID NO: 3849726 - DNA, 25 bp, Homo sapien
gcaaatctcagtgtagagaaaggaa

SEQ ID NO: 3849727 - DNA, 25 bp, Homo sapien
tatttaagccgatatccacttgagg

SEQ ID NO: 3849728 - DNA, 25 bp, Homo sapien
ttcttttcccactaagccttgcaag

SEQ ID NO: 3849729 - DNA, 25 bp, Homo sapien
tcagcactttccaaggttagggtag

SEQ ID NO: 3849730 - DNA, 25 bp, Homo sapien
gggtagtgtgagctagcaaattata

SEQ ID NO: 3849731 - DNA, 25 bp, Homo sapien
tccattaatagacagattatgggtc

SEQ ID NO: 3849732 - DNA, 25 bp, Homo sapien
tgggtcttgaaactatcctcagcac

SEQ ID NO: 3849733 - DNA, 25 bp, Homo sapien
tgtaactgacttgcctgtagcttgc

SEQ ID NO: 3849734 - DNA, 25 bp, Homo sapien
gagagccccagtgtatcgtattggc

SEQ ID NO: 3849735 - DNA, 25 bp, Homo sapien
taattcagctattagatgcactggg

SEQ ID NO: 3849736 - DNA, 25 bp, Homo sapien
gagtgcagggacctattaacctttg

SEQ ID NO: 3849737 - DNA, 25 bp, Homo sapien
aatctctcttgggtcacagaagtaa

SEQ ID NO: 3849738 - DNA, 25 bp, Homo sapien
gaacatctttgcctttcatatgaga

SEQ ID NO: 3849739 - DNA, 25 bp, Homo sapien
tgtaaaggtgcatgaaactccaaaa

SEQ ID NO: 3849740 - DNA, 25 bp, Homo sapien
taaagtaccttccagcaaatccttg

SEQ ID NO: 3849741 - DNA, 25 bp, Homo sapien
aacagcagagctgaggagcaagcac

SEQ ID NO: 3849742 - DNA, 25 bp, Homo sapien
acagcagagctgaggagcaagcaca

SEQ ID NO: 3849743 - DNA, 25 bp, Homo sapien
cagcagagctgaggagcaagcacat

SEQ ID NO: 3849744 - DNA, 25 bp, Homo sapien
aaaacagcagagctgaggagcaagc

SEQ ID NO: 3849745 - DNA, 25 bp, Homo sapien
ttcttgaagcactgaacttattttc

SEQ ID NO: 3849746 - DNA, 25 bp, Homo sapien
ctttatctgaaagtctggccctgct

SEQ ID NO: 3849747 - DNA, 25 bp, Homo sapien
tcttctgtacagcaactatacactt

SEQ ID NO: 3849748 - DNA, 25 bp, Homo sapien
tcctgtagctttacttatagatgtc

SEQ ID NO: 3849749 - DNA, 25 bp, Homo sapien
aaccctagtacactgctggcggagt

SEQ ID NO: 3849750 - DNA, 25 bp, Homo sapien
aaagggaaactactacatgatccag

SEQ ID NO: 3849751 - DNA, 25 bp, Homo sapien
cacaatcgccaaggtatgtccatca

SEQ ID NO: 3849752 - DNA, 25 bp, Homo sapien
gaaaataagctacgtgtgtatacac

SEQ ID NO: 3849753 - DNA, 25 bp, Homo sapien
tatgtgagtggcaaaactaggcctc

SEQ ID NO: 3849754 - DNA, 25 bp, Homo sapien
cacactgatttaggcacatagaacc

SEQ ID NO: 3849755 - DNA, 25 bp, Homo sapien
tttctatggctacccaaggagttcc

SEQ ID NO: 3849756 - DNA, 25 bp, Homo sapien
tattactatgagacactggaccaga

SEQ ID NO: 3849757 - DNA, 25 bp, Homo sapien
atccaaagaaccaataataagaact

SEQ ID NO: 3849758 - DNA, 25 bp, Homo sapien
agagaaatggacttcttctgaacaa

SEQ ID NO: 3849759 - DNA, 25 bp, Homo sapien
ttattctctgaagattaaaaaatac

SEQ ID NO: 3849760 - DNA, 25 bp, Homo sapien
tttattctctgaagattaaaaaata

SEQ ID NO: 3849761 - DNA, 25 bp, Homo sapien
tatttttattctctgaagattaaaa

SEQ ID NO: 3849762 - DNA, 25 bp, Homo sapien
aattatttttattctctgaagatta

SEQ ID NO: 3849763 - DNA, 25 bp, Homo sapien
acaaaaaatggcatagcgtcgtgat

SEQ ID NO: 3849764 - DNA, 25 bp, Homo sapien
cacattagctcccattttgaataaa

SEQ ID NO: 3849765 - DNA, 25 bp, Homo sapien
caaaaaatggcatagcgtcgtgatc

SEQ ID NO: 3849766 - DNA, 25 bp, Homo sapien
tagctcccattttgaataaacaaaa

SEQ ID NO: 3849767 - DNA, 25 bp, Homo sapien
tctttccacattagtggtattcgaa

SEQ ID NO: 3849768 - DNA, 25 bp, Homo sapien
gagtctttccacattagtggtattc

SEQ ID NO: 3849769 - DNA, 25 bp, Homo sapien
tgaagtgatcagagtctttccacat

SEQ ID NO: 3849770 - DNA, 25 bp, Homo sapien
gttctttattgctgaagtgatcaga

SEQ ID NO: 3849771 - DNA, 25 bp, Homo sapien
tacatgctgttcgttctttactttc

SEQ ID NO: 3849772 - DNA, 25 bp, Homo sapien
ctgatatggcaatctttcctttaca

SEQ ID NO: 3849773 - DNA, 25 bp, Homo sapien
caatctttcctttacatgctgttcg

SEQ ID NO: 3849774 - DNA, 25 bp, Homo sapien
cgttctttactttcaaatttcacat

SEQ ID NO: 3849775 - DNA, 25 bp, Homo sapien
ttctgtagctccgatgtataggcca

SEQ ID NO: 3849776 - DNA, 25 bp, Homo sapien
gcacaccatgagattcttaactgca

SEQ ID NO: 3849777 - DNA, 25 bp, Homo sapien
cttaactgcatgtaaaacttgatct

SEQ ID NO: 3849778 - DNA, 25 bp, Homo sapien
taggccattagtcgagcattgcaca

SEQ ID NO: 3849779 - DNA, 25 bp, Homo sapien
cgattacgtggcagcttcattcatg

SEQ ID NO: 3849780 - DNA, 25 bp, Homo sapien
tctgactctcaatattcctgttagg

SEQ ID NO: 3849781 - DNA, 25 bp, Homo sapien
tttcagcagaggtgtttgaccagtg

SEQ ID NO: 3849782 - DNA, 25 bp, Homo sapien
tactctatgctgtgaggagtcgcag

SEQ ID NO: 3849783 - DNA, 25 bp, Homo sapien
ggcatcacctacacctgcaaaaaga

SEQ ID NO: 3849784 - DNA, 25 bp, Homo sapien
cagctgtccactggcctcgctgggt

SEQ ID NO: 3849785 - DNA, 25 bp, Homo sapien
cattaaatccgtaataagccagctg

SEQ ID NO: 3849786 - DNA, 25 bp, Homo sapien
cctcgctgggtttcttgggaatcga

SEQ ID NO: 3849787 - DNA, 25 bp, Homo sapien
gcggagcgcaggacccctcaggctc

SEQ ID NO: 3849788 - DNA, 25 bp, Homo sapien
ccgccaggcggagcgcaggacccct

SEQ ID NO: 3849789 - DNA, 25 bp, Homo sapien
gacccctcaggctcggcccctccat

SEQ ID NO: 3849790 - DNA, 25 bp, Homo sapien
gtgggaagccccgccaggcggagcg

SEQ ID NO: 3849791 - DNA, 25 bp, Homo sapien
ctccaacgcgaactgtccgggccgt

SEQ ID NO: 3849792 - DNA, 25 bp, Homo sapien
agcgcacgcgcagtgggcgcgcctt

SEQ ID NO: 3849793 - DNA, 25 bp, Homo sapien
gccgtaccaagtcccagtcgcaggg

SEQ ID NO: 3849794 - DNA, 25 bp, Homo sapien
gccgtcgccactccttcaaagggaa

SEQ ID NO: 3849795 - DNA, 25 bp, Homo sapien
aggtttctggctggtggttttcgtg

SEQ ID NO: 3849796 - DNA, 25 bp, Homo sapien
gttttcgtggcacgccctttgcact

SEQ ID NO: 3849797 - DNA, 25 bp, Homo sapien
ttctggctggtggttttcgtggcac

SEQ ID NO: 3849798 - DNA, 25 bp, Homo sapien
gctggtggttttcgtggcacgccct

SEQ ID NO: 3849799 - DNA, 25 bp, Homo sapien
ccagggtcacccagatatcatggtt

SEQ ID NO: 3849800 - DNA, 25 bp, Homo sapien
tttcccagcgttgtcaccagggtca

SEQ ID NO: 3849801 - DNA, 25 bp, Homo sapien
gagcccacggtctcgttcctaaaga

SEQ ID NO: 3849802 - DNA, 25 bp, Homo sapien
cctaaagattagcacaaagacccat

SEQ ID NO: 3849803 - DNA, 25 bp, Homo sapien
tgttaagtcacaggtgaatgttaaa

SEQ ID NO: 3849804 - DNA, 25 bp, Homo sapien
aattgttaagtcacaggtgaatgtt

SEQ ID NO: 3849805 - DNA, 25 bp, Homo sapien
gttaagtcacaggtgaatgttaaaa

SEQ ID NO: 3849806 - DNA, 25 bp, Homo sapien
ttgttaagtcacaggtgaatgttaa

SEQ ID NO: 3849807 - DNA, 25 bp, Homo sapien
gctccattggtttaagtgatcagaa

SEQ ID NO: 3849808 - DNA, 25 bp, Homo sapien
tgacaagtaatgagaggaacggaat

SEQ ID NO: 3849809 - DNA, 25 bp, Homo sapien
attgataagaaaacaacaatgtcat

SEQ ID NO: 3849810 - DNA, 25 bp, Homo sapien
tgagaggaacggaatgctccattgg

SEQ ID NO: 3849811 - DNA, 25 bp, Homo sapien
ttatgtgctttctctgggaatccga

SEQ ID NO: 3849812 - DNA, 25 bp, Homo sapien
tatgtgctttctctgggaatccgac

SEQ ID NO: 3849813 - DNA, 25 bp, Homo sapien
atgtgctttctctgggaatccgaca

SEQ ID NO: 3849814 - DNA, 25 bp, Homo sapien
tatatattgggataaaagagctcac

SEQ ID NO: 3849815 - DNA, 25 bp, Homo sapien
gacagagcgttcttaggttggactg

SEQ ID NO: 3849816 - DNA, 25 bp, Homo sapien
cacacacagttagttaaagcaggtc

SEQ ID NO: 3849817 - DNA, 25 bp, Homo sapien
tagtgatgtggaacacccaggacag

SEQ ID NO: 3849818 - DNA, 25 bp, Homo sapien
tgagagtatcaattccagacagtgt

SEQ ID NO: 3849819 - DNA, 25 bp, Homo sapien
cctccttggaatcccacactattaa

SEQ ID NO: 3849820 - DNA, 25 bp, Homo sapien
tcactctgaacaaaaggggtcttcc

SEQ ID NO: 3849821 - DNA, 25 bp, Homo sapien
tggaatcccacactattaagggaat

SEQ ID NO: 3849822 - DNA, 25 bp, Homo sapien
gggctccctttgctaaccccttgca

SEQ ID NO: 3849823 - DNA, 25 bp, Homo sapien
ggtggccagttctcatcatacaggg

SEQ ID NO: 3849824 - DNA, 25 bp, Homo sapien
ctttagggtggccagttctcatcat

SEQ ID NO: 3849825 - DNA, 25 bp, Homo sapien
tagggtggccagttctcatcataca

SEQ ID NO: 3849826 - DNA, 25 bp, Homo sapien
tctccacattgtgggtacatccact

SEQ ID NO: 3849827 - DNA, 25 bp, Homo sapien
gggtacatccactcttcgaattatg

SEQ ID NO: 3849828 - DNA, 25 bp, Homo sapien
tatgcaacacagaatcaggaaccat

SEQ ID NO: 3849829 - DNA, 25 bp, Homo sapien
tccactcttcgaattatgcaacaca

SEQ ID NO: 3849830 - DNA, 25 bp, Homo sapien
gaatgtagcagtgcagacgaccaga

SEQ ID NO: 3849831 - DNA, 25 bp, Homo sapien
tacagttgttaagctggaaacccaa

SEQ ID NO: 3849832 - DNA, 25 bp, Homo sapien
ttttagaacatgtagggcaacctcc

SEQ ID NO: 3849833 - DNA, 25 bp, Homo sapien
cttttttctgaagctgagcccagcc

SEQ ID NO: 3849834 - DNA, 25 bp, Homo sapien
tcctcaagtgtagcctcttagagta

SEQ ID NO: 3849835 - DNA, 25 bp, Homo sapien
gctccttggttgttgttcctcaagt

SEQ ID NO: 3849836 - DNA, 25 bp, Homo sapien
tgaaatccagatgcagttgaagctc

SEQ ID NO: 3849837 - DNA, 25 bp, Homo sapien
gagtagtttcccttgatctgaacac

SEQ ID NO: 3849838 - DNA, 25 bp, Homo sapien
tataaaggctctcttacaaagccgg

SEQ ID NO: 3849839 - DNA, 25 bp, Homo sapien
cagatgtaggctagagctgcagtca

SEQ ID NO: 3849840 - DNA, 25 bp, Homo sapien
agtgtcctctctatctggtggctca

SEQ ID NO: 3849841 - DNA, 25 bp, Homo sapien
acaaagccggtaagttgatgctggc

SEQ ID NO: 3849842 - DNA, 25 bp, Homo sapien
gaaactgaatactgtaaagccatca

SEQ ID NO: 3849843 - DNA, 25 bp, Homo sapien
ggctaagagtattcaaggtaactga

SEQ ID NO: 3849844 - DNA, 25 bp, Homo sapien
gcaaaagatttgcaataccccaaca

SEQ ID NO: 3849845 - DNA, 25 bp, Homo sapien
tatggaaattcaaagggctaagagt

SEQ ID NO: 3849846 - DNA, 25 bp, Homo sapien
gggccaattactacacaggctgtga

SEQ ID NO: 3849847 - DNA, 25 bp, Homo sapien
taaggtcaacttgtggccactttgg

SEQ ID NO: 3849848 - DNA, 25 bp, Homo sapien
ggctaccaatgtaggtcagggttct

SEQ ID NO: 3849849 - DNA, 25 bp, Homo sapien
gcatcctggaatgagggctaccaat

SEQ ID NO: 3849850 - DNA, 25 bp, Homo sapien
tgcaaaaaagcttgccagggcctgc

SEQ ID NO: 3849851 - DNA, 25 bp, Homo sapien
catctctcgcagtgatgtcagtgta

SEQ ID NO: 3849852 - DNA, 25 bp, Homo sapien
tgcgaggctgacacgcgtctttcct

SEQ ID NO: 3849853 - DNA, 25 bp, Homo sapien
aatcctgagtcggatcgggctcccg

SEQ ID NO: 3849854 - DNA, 25 bp, Homo sapien
tgagccagggtttgcatctcgttcc

SEQ ID NO: 3849855 - DNA, 25 bp, Homo sapien
gaggttgaggacacttttcacccaa

SEQ ID NO: 3849856 - DNA, 25 bp, Homo sapien
gggctccctcatttcgggtccaatg

SEQ ID NO: 3849857 - DNA, 25 bp, Homo sapien
tcccggtgtacccatcacaggaaga

SEQ ID NO: 3849858 - DNA, 25 bp, Homo sapien
tggcttttagtacaaggctatttat

SEQ ID NO: 3849859 - DNA, 25 bp, Homo sapien
ttggataagagttagtcaaacctgt

SEQ ID NO: 3849860 - DNA, 25 bp, Homo sapien
tccaatctgggaccttgatcaaagg

SEQ ID NO: 3849861 - DNA, 25 bp, Homo sapien
tagtcaaacctgtacttaggttggc

SEQ ID NO: 3849862 - DNA, 25 bp, Homo sapien
tatataagcagctatcaagtgggca

SEQ ID NO: 3849863 - DNA, 25 bp, Homo sapien
gcatcaaattagcagcgcattaaaa

SEQ ID NO: 3849864 - DNA, 25 bp, Homo sapien
gcaatatcatcaggtctcttgcaga

SEQ ID NO: 3849865 - DNA, 25 bp, Homo sapien
caagtgggcaaaaacattgctgtga

SEQ ID NO: 3849866 - DNA, 25 bp, Homo sapien
gtccagcctttgtccggattagcat

SEQ ID NO: 3849867 - DNA, 25 bp, Homo sapien
ctttgtccggattagcattgctggg

SEQ ID NO: 3849868 - DNA, 25 bp, Homo sapien
ttaaacctgcaagccgtggccctgt

SEQ ID NO: 3849869 - DNA, 25 bp, Homo sapien
cctgcaagccgtggccctgtgaaca

SEQ ID NO: 3849870 - DNA, 25 bp, Homo sapien
tacttgatgacgatccagatttgga

SEQ ID NO: 3849871 - DNA, 25 bp, Homo sapien
agaagcagaaggtcaactccacaga

SEQ ID NO: 3849872 - DNA, 25 bp, Homo sapien
cacagagctccaagtcaggttgaga

SEQ ID NO: 3849873 - DNA, 25 bp, Homo sapien
cagataaaccaagtgatacttgatg

SEQ ID NO: 3849874 - DNA, 25 bp, Homo sapien
gctgaacacgctctacatccaacat

SEQ ID NO: 3849875 - DNA, 25 bp, Homo sapien
aatctttcttttattggtcgcctgg

SEQ ID NO: 3849876 - DNA, 25 bp, Homo sapien
ttctgtcgtgatgcatagcatgggc

SEQ ID NO: 3849877 - DNA, 25 bp, Homo sapien
catccaacatcattcttctgtcgtg

SEQ ID NO: 3849878 - DNA, 25 bp, Homo sapien
tttagatgctctggttttattacag

SEQ ID NO: 3849879 - DNA, 25 bp, Homo sapien
ccttgtgtttagatgctctggtttt

SEQ ID NO: 3849880 - DNA, 25 bp, Homo sapien
tattacagttccctggttcggagca

SEQ ID NO: 3849881 - DNA, 25 bp, Homo sapien
tcggagcagttacatggcttatcat

SEQ ID NO: 3849882 - DNA, 25 bp, Homo sapien
ccattgtgacctggcctggacttaa

SEQ ID NO: 3849883 - DNA, 25 bp, Homo sapien
tccaagttggacttatattccattg

SEQ ID NO: 3849884 - DNA, 25 bp, Homo sapien
cacatatgggttgagggatgatgac

SEQ ID NO: 3849885 - DNA, 25 bp, Homo sapien
cctggacttaatggaatcagaaact

SEQ ID NO: 3849886 - DNA, 25 bp, Homo sapien
aaagtgggagtcacatttcctccca

SEQ ID NO: 3849887 - DNA, 25 bp, Homo sapien
ccgtggcatagagccccatctagga

SEQ ID NO: 3849888 - DNA, 25 bp, Homo sapien
ccatctaggaaatgccccacgttct

SEQ ID NO: 3849889 - DNA, 25 bp, Homo sapien
aagctgcgaccagatccgtggcata

SEQ ID NO: 3849890 - DNA, 25 bp, Homo sapien
tgttaggaacttcaatataggtttc

SEQ ID NO: 3849891 - DNA, 25 bp, Homo sapien
ctaagatcttgtgttaggaacttca

SEQ ID NO: 3849892 - DNA, 25 bp, Homo sapien
taggaacttcaatataggtttctct

SEQ ID NO: 3849893 - DNA, 25 bp, Homo sapien
agatcttgtgttaggaacttcaata

SEQ ID NO: 3849894 - DNA, 25 bp, Homo sapien
cttgcatctatcagactttccaagg

SEQ ID NO: 3849895 - DNA, 25 bp, Homo sapien
tgcatctatcagactttccaaggag

SEQ ID NO: 3849896 - DNA, 25 bp, Homo sapien
ttgcatctatcagactttccaagga

SEQ ID NO: 3849897 - DNA, 25 bp, Homo sapien
gcttgaatttctaccctccctctgg

SEQ ID NO: 3849898 - DNA, 25 bp, Homo sapien
taaggcccaccttctattgtatttc

SEQ ID NO: 3849899 - DNA, 25 bp, Homo sapien
tcattcaaggcatatggtcgttaac

SEQ ID NO: 3849900 - DNA, 25 bp, Homo sapien
tgtgagtctctaacttccacttaag

SEQ ID NO: 3849901 - DNA, 25 bp, Homo sapien
ggaaagaaccggattcacagcctga

SEQ ID NO: 3849902 - DNA, 25 bp, Homo sapien
gaagcagttgataaagtactgaagg

SEQ ID NO: 3849903 - DNA, 25 bp, Homo sapien
agtatcagggttaggagcctctgga

SEQ ID NO: 3849904 - DNA, 25 bp, Homo sapien
ttatctgggcaagtatcagggttag

SEQ ID NO: 3849905 - DNA, 25 bp, Homo sapien
ttgtcacaaacatcagtatctttca

SEQ ID NO: 3849906 - DNA, 25 bp, Homo sapien
tgttgtcacaaacatcagtatcttt

SEQ ID NO: 3849907 - DNA, 25 bp, Homo sapien
gttgtcacaaacatcagtatctttc

SEQ ID NO: 3849908 - DNA, 25 bp, Homo sapien
ctgttgtcacaaacatcagtatctt

SEQ ID NO: 3849909 - DNA, 25 bp, Homo sapien
tggctgtgtaatgaatgctctctgg

SEQ ID NO: 3849910 - DNA, 25 bp, Homo sapien
tgtaatgaatgctctctgggtacat

SEQ ID NO: 3849911 - DNA, 25 bp, Homo sapien
ttttggctgtgtaatgaatgctctc

SEQ ID NO: 3849912 - DNA, 25 bp, Homo sapien
gctgtgtaatgaatgctctctgggt

SEQ ID NO: 3849913 - DNA, 25 bp, Homo sapien
gactggttttctcgctgcatgtgaa

SEQ ID NO: 3849914 - DNA, 25 bp, Homo sapien
tgatttgctttgactgagacctgta

SEQ ID NO: 3849915 - DNA, 25 bp, Homo sapien
gacctgtatacatgtgctccgccta

SEQ ID NO: 3849916 - DNA, 25 bp, Homo sapien
tgtcccggatgtgaccaagactgga

SEQ ID NO: 3849917 - DNA, 25 bp, Homo sapien
ttgaggtggtgtctccaatgtacca

SEQ ID NO: 3849918 - DNA, 25 bp, Homo sapien
gttgaggtggtgtctccaatgtacc

SEQ ID NO: 3849919 - DNA, 25 bp, Homo sapien
tgaggtggtgtctccaatgtaccat

SEQ ID NO: 3849920 - DNA, 25 bp, Homo sapien
tgaggtctgataggaggttgaggtg

SEQ ID NO: 3849921 - DNA, 25 bp, Homo sapien
gcaacattattagcaaggcatccca

SEQ ID NO: 3849922 - DNA, 25 bp, Homo sapien
caacattattagcaaggcatcccat

SEQ ID NO: 3849923 - DNA, 25 bp, Homo sapien
aagagggccagactctttcaggtgg

SEQ ID NO: 3849924 - DNA, 25 bp, Homo sapien
gagggccagactctttcaggtggca

SEQ ID NO: 3849925 - DNA, 25 bp, Homo sapien
tgaaaggcagcaggtctatttgcac

SEQ ID NO: 3849926 - DNA, 25 bp, Homo sapien
tgcgggcctgagctagccccttctt

SEQ ID NO: 3849927 - DNA, 25 bp, Homo sapien
gcttttttctctgtgcgggcctgag

SEQ ID NO: 3849928 - DNA, 25 bp, Homo sapien
gaatttctgagtctcatcttcagct

SEQ ID NO: 3849929 - DNA, 25 bp, Homo sapien
ctgccccaacactgagtcacaactg

SEQ ID NO: 3849930 - DNA, 25 bp, Homo sapien
ccaacactgagtcacaactgcggca

SEQ ID NO: 3849931 - DNA, 25 bp, Homo sapien
cacaactgcggcattcaggacacat

SEQ ID NO: 3849932 - DNA, 25 bp, Homo sapien
tgagtcacaactgcggcattcagga

SEQ ID NO: 3849933 - DNA, 25 bp, Homo sapien
tagacatacaaccatccctccaatt

SEQ ID NO: 3849934 - DNA, 25 bp, Homo sapien
tatgaacttgtgactcagtggccga

SEQ ID NO: 3849935 - DNA, 25 bp, Homo sapien
tcagtggccgacatttgaagacaac

SEQ ID NO: 3849936 - DNA, 25 bp, Homo sapien
aataatgtccttcctgtgcctagcg

SEQ ID NO: 3849937 - DNA, 25 bp, Homo sapien
tggcagatgaagttagcacctcatc

SEQ ID NO: 3849938 - DNA, 25 bp, Homo sapien
tattgacaacacaagaatagccatg

SEQ ID NO: 3849939 - DNA, 25 bp, Homo sapien
catctaaactgagcttcttaaacat

SEQ ID NO: 3849940 - DNA, 25 bp, Homo sapien
aaactgagcttcttaaacatgtcca

SEQ ID NO: 3849941 - DNA, 25 bp, Homo sapien
cactcttttggtacacgactatttg

SEQ ID NO: 3849942 - DNA, 25 bp, Homo sapien
ctcagaatctgtgtggactgcttga

SEQ ID NO: 3849943 - DNA, 25 bp, Homo sapien
tgctctttcatcctctgattcaata

SEQ ID NO: 3849944 - DNA, 25 bp, Homo sapien
ttgatcttgcactgtaaactccttg

SEQ ID NO: 3849945 - DNA, 25 bp, Homo sapien
ctagtcccagtaacaaggacggcct

SEQ ID NO: 3849946 - DNA, 25 bp, Homo sapien
aacaatacccgaagatccaccagtg

SEQ ID NO: 3849947 - DNA, 25 bp, Homo sapien
acaaggacggccttcggaacctgct

SEQ ID NO: 3849948 - DNA, 25 bp, Homo sapien
ggccttcggaacctgcttcaaacaa

SEQ ID NO: 3849949 - DNA, 25 bp, Homo sapien
ttgtgtacgtttcccagactgtgag

SEQ ID NO: 3849950 - DNA, 25 bp, Homo sapien
gggcatcattgtctgagatgctgtt

SEQ ID NO: 3849951 - DNA, 25 bp, Homo sapien
tttcattcgttcctgtgagcctggg

SEQ ID NO: 3849952 - DNA, 25 bp, Homo sapien
agactgtgagtctccggatctagac

SEQ ID NO: 3849953 - DNA, 25 bp, Homo sapien
cacatgggccacattgaactgaagg

SEQ ID NO: 3849954 - DNA, 25 bp, Homo sapien
ttttcggtggcccattcacacatgg

SEQ ID NO: 3849955 - DNA, 25 bp, Homo sapien
gagactataaatagagccctgggct

SEQ ID NO: 3849956 - DNA, 25 bp, Homo sapien
gaaggtatagagcagtggcttcacc

SEQ ID NO: 3849957 - DNA, 25 bp, Homo sapien
caactgttgttggtaattatagacg

SEQ ID NO: 3849958 - DNA, 25 bp, Homo sapien
ttatgtttttgggttgcgctgcaac

SEQ ID NO: 3849959 - DNA, 25 bp, Homo sapien
ttgggttgcgctgcaactgttgttg

SEQ ID NO: 3849960 - DNA, 25 bp, Homo sapien
ttggtaattatagacgcgtgggtgt

SEQ ID NO: 3849961 - DNA, 25 bp, Homo sapien
ctctttgcacaagaccaacactggg

SEQ ID NO: 3849962 - DNA, 25 bp, Homo sapien
tcccatcataaggtcccgtgtgtcc

SEQ ID NO: 3849963 - DNA, 25 bp, Homo sapien
gggtgctgatgaacagttcctcctc

SEQ ID NO: 3849964 - DNA, 25 bp, Homo sapien
gggtgtctgaactcacaatcccatc

SEQ ID NO: 3849965 - DNA, 25 bp, Homo sapien
ttctaacccatctattgaacttggg

SEQ ID NO: 3849966 - DNA, 25 bp, Homo sapien
tctctggtgatccaagtgaaggtgg

SEQ ID NO: 3849967 - DNA, 25 bp, Homo sapien
gaacagtcaagtatgtccaattcta

SEQ ID NO: 3849968 - DNA, 25 bp, Homo sapien
tgagctgaccatcggctaccagaac

SEQ ID NO: 3849969 - DNA, 25 bp, Homo sapien
ctttgggtgatggtggcagaaagtc

SEQ ID NO: 3849970 - DNA, 25 bp, Homo sapien
tgcctttgggtgatggtggcagaaa

SEQ ID NO: 3849971 - DNA, 25 bp, Homo sapien
cctatgcctttgggtgatggtggca

SEQ ID NO: 3849972 - DNA, 25 bp, Homo sapien
tatgcctttgggtgatggtggcaga

SEQ ID NO: 3849973 - DNA, 25 bp, Homo sapien
accctgacaactgttccaaccatta

SEQ ID NO: 3849974 - DNA, 25 bp, Homo sapien
gggtctctgtgcttgtttcccctga

SEQ ID NO: 3849975 - DNA, 25 bp, Homo sapien
tctctgtgcttgtttcccctgacat

SEQ ID NO: 3849976 - DNA, 25 bp, Homo sapien
accctgggtctctgtgcttgtttcc

SEQ ID NO: 3849977 - DNA, 25 bp, Homo sapien
caccctgggtctctgtgcttgtttc

SEQ ID NO: 3849978 - DNA, 25 bp, Homo sapien
tcacacggctaataatcagccacgt

SEQ ID NO: 3849979 - DNA, 25 bp, Homo sapien
ttctcaagaaatgcgaatgtcctgc

SEQ ID NO: 3849980 - DNA, 25 bp, Homo sapien
tcctgcacaggaagtaacacttcat

SEQ ID NO: 3849981 - DNA, 25 bp, Homo sapien
cagccacgtgcttgtcagggttagg

SEQ ID NO: 3849982 - DNA, 25 bp, Homo sapien
gacaacttgaaaaagagcctgaagt

SEQ ID NO: 3849983 - DNA, 25 bp, Homo sapien
gtgcctggaaagtcccatccccatt

SEQ ID NO: 3849984 - DNA, 25 bp, Homo sapien
tcactgacttgggactggtgatgga

SEQ ID NO: 3849985 - DNA, 25 bp, Homo sapien
caggaagttggagaagctgtctgcc

SEQ ID NO: 3849986 - DNA, 25 bp, Homo sapien
cttctagcctcatagctagaagtga

SEQ ID NO: 3849987 - DNA, 25 bp, Homo sapien
ctagaagtgagtaagtcagctgagc

SEQ ID NO: 3849988 - DNA, 25 bp, Homo sapien
catagctagaagtgagtaagtcagc

SEQ ID NO: 3849989 - DNA, 25 bp, Homo sapien
tagcctcatagctagaagtgagtaa

SEQ ID NO: 3849990 - DNA, 25 bp, Homo sapien
taatgtctgcgctgggtcagataac

SEQ ID NO: 3849991 - DNA, 25 bp, Homo sapien
gtctccaggtaaattcccttctgtc

SEQ ID NO: 3849992 - DNA, 25 bp, Homo sapien
ccttctgtctctaaatgaatgggta

SEQ ID NO: 3849993 - DNA, 25 bp, Homo sapien
gagtcgcaaaggatcctctcagtgg

SEQ ID NO: 3849994 - DNA, 25 bp, Homo sapien
cacacacaataaagcggagcttgcc

SEQ ID NO: 3849995 - DNA, 25 bp, Homo sapien
tggcaaaacccagctcaatctttgc

SEQ ID NO: 3849996 - DNA, 25 bp, Homo sapien
taaagcggagcttgcctatattaaa

SEQ ID NO: 3849997 - DNA, 25 bp, Homo sapien
gcctatattaaagctggcaaaaccc

SEQ ID NO: 3849998 - DNA, 25 bp, Homo sapien
caggaagccatactcagtacccagt

SEQ ID NO: 3849999 - DNA, 25 bp, Homo sapien
tacagcctcttctgagggtacccat

SEQ ID NO: 3850000 - DNA, 25 bp, Homo sapien
tccatagatgattggccctggcagg

SEQ ID NO: 3850001 - DNA, 25 bp, Homo sapien
tgagccaatggcagacaacccatat

SEQ ID NO: 3850002 - DNA, 25 bp, Homo sapien
cccaagtttggcgttggcagtcagg

SEQ ID NO: 3850003 - DNA, 25 bp, Homo sapien
gacgttgtgctgaatacacttgcag

SEQ ID NO: 3850004 - DNA, 25 bp, Homo sapien
ggcagtcaggtaattcatcagatct

SEQ ID NO: 3850005 - DNA, 25 bp, Homo sapien
gccaactggaagcaaccgtgacgtt

SEQ ID NO: 3850006 - DNA, 25 bp, Homo sapien
ttcataggcaaattgacaatcatcg

SEQ ID NO: 3850007 - DNA, 25 bp, Homo sapien
caatcatcgatttgttgactgaaca

SEQ ID NO: 3850008 - DNA, 25 bp, Homo sapien
ttagaagtgtgctgctttagccaga

SEQ ID NO: 3850009 - DNA, 25 bp, Homo sapien
taaacaaggaactccagttattgaa

SEQ ID NO: 3850010 - DNA, 25 bp, Homo sapien
aattcataacctctggcctcaacgg

SEQ ID NO: 3850011 - DNA, 25 bp, Homo sapien
cagtctcatggtttgccctaggaaa

SEQ ID NO: 3850012 - DNA, 25 bp, Homo sapien
catttaatacaacaagcaaggaggt

SEQ ID NO: 3850013 - DNA, 25 bp, Homo sapien
catgtgagggaactgatggacagct

SEQ ID NO: 3850014 - DNA, 25 bp, Homo sapien
taaccacaattgtagagtgtggcca

SEQ ID NO: 3850015 - DNA, 25 bp, Homo sapien
ctgtccatatgggttcaatgtgagt

SEQ ID NO: 3850016 - DNA, 25 bp, Homo sapien
tcaatgtgagtaaccacaattgtag

SEQ ID NO: 3850017 - DNA, 25 bp, Homo sapien
acaattgtagagtgtggccatcttc

SEQ ID NO: 3850018 - DNA, 25 bp, Homo sapien
caagtgcagtgagttcaaagaggct

SEQ ID NO: 3850019 - DNA, 25 bp, Homo sapien
ccagtgtacatctgtggaggaccta

SEQ ID NO: 3850020 - DNA, 25 bp, Homo sapien
ttacaagcatgaggaagtcagtccc

SEQ ID NO: 3850021 - DNA, 25 bp, Homo sapien
ggagcagctattccatgggcccatg

SEQ ID NO: 3850022 - DNA, 25 bp, Homo sapien
tgttgtaactaagcaaaacccacaa

SEQ ID NO: 3850023 - DNA, 25 bp, Homo sapien
aacccacaaatccaaaagtcctgtg

SEQ ID NO: 3850024 - DNA, 25 bp, Homo sapien
taactaagcaaaacccacaaatcca

SEQ ID NO: 3850025 - DNA, 25 bp, Homo sapien
cacaaatccaaaagtcctgtggcca

SEQ ID NO: 3850026 - DNA, 25 bp, Homo sapien
gagggcagaatttgcttggcagctc

SEQ ID NO: 3850027 - DNA, 25 bp, Homo sapien
gcagaatttgcttggcagctcttcc

SEQ ID NO: 3850028 - DNA, 25 bp, Homo sapien
ttgtaaagagggcagaatttgcttg

SEQ ID NO: 3850029 - DNA, 25 bp, Homo sapien
tcttatcaagttgtaaagagggcag

SEQ ID NO: 3850030 - DNA, 25 bp, Homo sapien
ggcaacaaaacctgtaggagtcagc

SEQ ID NO: 3850031 - DNA, 25 bp, Homo sapien
caagccgtggcccagtagaagtgtg

SEQ ID NO: 3850032 - DNA, 25 bp, Homo sapien
actagcacttgatggctgagtggca

SEQ ID NO: 3850033 - DNA, 25 bp, Homo sapien
gtcagctccttgtgataacagagcc

SEQ ID NO: 3850034 - DNA, 25 bp, Homo sapien
ttccatcccggttgatcaagttcat

SEQ ID NO: 3850035 - DNA, 25 bp, Homo sapien
ctgagagcagaccagctagaaacca

SEQ ID NO: 3850036 - DNA, 25 bp, Homo sapien
attccatcccggttgatcaagttca

SEQ ID NO: 3850037 - DNA, 25 bp, Homo sapien
gctgattcatagatgacacctctga

SEQ ID NO: 3850038 - DNA, 25 bp, Homo sapien
tcaccttcgggattaccatttcaac

SEQ ID NO: 3850039 - DNA, 25 bp, Homo sapien
gcaccaatagatttgatgtccaatg

SEQ ID NO: 3850040 - DNA, 25 bp, Homo sapien
caatgagggttcacttgctgattca

SEQ ID NO: 3850041 - DNA, 25 bp, Homo sapien
ctcctgagcgctgcatgtaacagct

SEQ ID NO: 3850042 - DNA, 25 bp, Homo sapien
gtgaagcagcatcgtactgtttttt

SEQ ID NO: 3850043 - DNA, 25 bp, Homo sapien
tgccctgagggccaacaaggtaaat

SEQ ID NO: 3850044 - DNA, 25 bp, Homo sapien
ccatgtgaagcagcatcgtactgtt

SEQ ID NO: 3850045 - DNA, 25 bp, Homo sapien
tgcgtgctaaatctgaaaagcgttt

SEQ ID NO: 3850046 - DNA, 25 bp, Homo sapien
ggctgcgtgctaaatctgaaaagcg

SEQ ID NO: 3850047 - DNA, 25 bp, Homo sapien
atctgaaaagcgtttgcagctcagc

SEQ ID NO: 3850048 - DNA, 25 bp, Homo sapien
tgaaaagcgtttgcagctcagcccc

SEQ ID NO: 3850049 - DNA, 25 bp, Homo sapien
ccccgacataagaagtgagtggacc

SEQ ID NO: 3850050 - DNA, 25 bp, Homo sapien
tgcagtggggattcccagccagcac

SEQ ID NO: 3850051 - DNA, 25 bp, Homo sapien
tgggggattgtcagcaccataactt

SEQ ID NO: 3850052 - DNA, 25 bp, Homo sapien
tttgctgtcgagtggatttccccga

SEQ ID NO: 3850053 - DNA, 25 bp, Homo sapien
tctgagtgattctggatgtctcaca

SEQ ID NO: 3850054 - DNA, 25 bp, Homo sapien
tctggatgtctcacacttttgctta

SEQ ID NO: 3850055 - DNA, 25 bp, Homo sapien
gtttgacacgtctgccatttctgag

SEQ ID NO: 3850056 - DNA, 25 bp, Homo sapien
tgctgtgtttgacacgtctgccatt

SEQ ID NO: 3850057 - DNA, 25 bp, Homo sapien
aatcagtactccaattttgccattc

SEQ ID NO: 3850058 - DNA, 25 bp, Homo sapien
tcccaatcagtactccaattttgcc

SEQ ID NO: 3850059 - DNA, 25 bp, Homo sapien
tgcttcccaatcagtactccaattt

SEQ ID NO: 3850060 - DNA, 25 bp, Homo sapien
ctgcttcccaatcagtactccaatt

SEQ ID NO: 3850061 - DNA, 25 bp, Homo sapien
aaccatatatgtacttaattctgcc

SEQ ID NO: 3850062 - DNA, 25 bp, Homo sapien
taatgggaatttctggaattgtgac

SEQ ID NO: 3850063 - DNA, 25 bp, Homo sapien
tctgccaaggatttctgtaatactc

SEQ ID NO: 3850064 - DNA, 25 bp, Homo sapien
taaggtctcgtgctaataatgggaa

SEQ ID NO: 3850065 - DNA, 25 bp, Homo sapien
ttagtgccagctgatggcaaccctg

SEQ ID NO: 3850066 - DNA, 25 bp, Homo sapien
ccacaatggcttccaaaggagcatg

SEQ ID NO: 3850067 - DNA, 25 bp, Homo sapien
ccagggcatccaaggctgaacaatc

SEQ ID NO: 3850068 - DNA, 25 bp, Homo sapien
aatctacttcctgctctgttctcag

SEQ ID NO: 3850069 - DNA, 25 bp, Homo sapien
tgctgcccctactatcaggtttctg

SEQ ID NO: 3850070 - DNA, 25 bp, Homo sapien
ctttgctgcccctactatcaggttt

SEQ ID NO: 3850071 - DNA, 25 bp, Homo sapien
tctctcttctggtggaacttctcat

SEQ ID NO: 3850072 - DNA, 25 bp, Homo sapien
gcccctactatcaggtttctgctgc

SEQ ID NO: 3850073 - DNA, 25 bp, Homo sapien
ggatttcaagtccaacagggaggcc

SEQ ID NO: 3850074 - DNA, 25 bp, Homo sapien
tttcaagtccaacagggaggcctgg

SEQ ID NO: 3850075 - DNA, 25 bp, Homo sapien
gtggatttcaagtccaacagggagg

SEQ ID NO: 3850076 - DNA, 25 bp, Homo sapien
gatttcaagtccaacagggaggcct

SEQ ID NO: 3850077 - DNA, 25 bp, Homo sapien
gagagatatggactgtcctagccat

SEQ ID NO: 3850078 - DNA, 25 bp, Homo sapien
ttcctcaagagagatatggactgtc

SEQ ID NO: 3850079 - DNA, 25 bp, Homo sapien
cctcaagagagatatggactgtcct

SEQ ID NO: 3850080 - DNA, 25 bp, Homo sapien
caagagagatatggactgtcctagc

SEQ ID NO: 3850081 - DNA, 25 bp, Homo sapien
cttatacaccaataatagacagaga

SEQ ID NO: 3850082 - DNA, 25 bp, Homo sapien
aaaccctatcatctcagccaaaaat

SEQ ID NO: 3850083 - DNA, 25 bp, Homo sapien
gaaaaccctatcatctcagccaaaa

SEQ ID NO: 3850084 - DNA, 25 bp, Homo sapien
accctatcatctcagccaaaaatct

SEQ ID NO: 3850085 - DNA, 25 bp, Homo sapien
caccgaggcaatccaggaaggagca

SEQ ID NO: 3850086 - DNA, 25 bp, Homo sapien
caaagactcgcgatccggagagaat

SEQ ID NO: 3850087 - DNA, 25 bp, Homo sapien
aaggaggacctctgaactgaatgca

SEQ ID NO: 3850088 - DNA, 25 bp, Homo sapien
tgaatgcagcatttcagggtcgcgc

SEQ ID NO: 3850089 - DNA, 25 bp, Homo sapien
tcccttctaggaatgtactccagaa

SEQ ID NO: 3850090 - DNA, 25 bp, Homo sapien
atcatcccttctaggaatgtactcc

SEQ ID NO: 3850091 - DNA, 25 bp, Homo sapien
tccacgtcagattccctttcctcct

SEQ ID NO: 3850092 - DNA, 25 bp, Homo sapien
ctaggaatgtactccagaatatgcc

SEQ ID NO: 3850093 - DNA, 25 bp, Homo sapien
ggacaaaaggcataagccccacagt

SEQ ID NO: 3850094 - DNA, 25 bp, Homo sapien
aagaggacaaaaggcataagcccca

SEQ ID NO: 3850095 - DNA, 25 bp, Homo sapien
tagcatgtgctaacatactcatggg

SEQ ID NO: 3850096 - DNA, 25 bp, Homo sapien
cacagtcactagcatgtgctaacat

SEQ ID NO: 3850097 - DNA, 25 bp, Homo sapien
gagtcttcggaacacaatctatatt

SEQ ID NO: 3850098 - DNA, 25 bp, Homo sapien
cagagtcttcggaacacaatctata

SEQ ID NO: 3850099 - DNA, 25 bp, Homo sapien
tcaatactcagagtcttcggaacac

SEQ ID NO: 3850100 - DNA, 25 bp, Homo sapien
tactcagagtcttcggaacacaatc

SEQ ID NO: 3850101 - DNA, 25 bp, Homo sapien
ttcccttaatcctagtatacagcat

SEQ ID NO: 3850102 - DNA, 25 bp, Homo sapien
catttcccttaatcctagtatacag

SEQ ID NO: 3850103 - DNA, 25 bp, Homo sapien
tcatttcccttaatcctagtataca

SEQ ID NO: 3850104 - DNA, 25 bp, Homo sapien
tttcccttaatcctagtatacagca

SEQ ID NO: 3850105 - DNA, 25 bp, Homo sapien
cttgtaagtacacacagtaggctgg

SEQ ID NO: 3850106 - DNA, 25 bp, Homo sapien
taggctggaacaacaatatcctgac

SEQ ID NO: 3850107 - DNA, 25 bp, Homo sapien
taggatttgcctaacgacacacagc

SEQ ID NO: 3850108 - DNA, 25 bp, Homo sapien
tttaactggagaggattcactgaac

SEQ ID NO: 3850109 - DNA, 25 bp, Homo sapien
ggccggtcccggcacgcagaggagc

SEQ ID NO: 3850110 - DNA, 25 bp, Homo sapien
acaacatggcctccttgatccaacg

SEQ ID NO: 3850111 - DNA, 25 bp, Homo sapien
aggagcagccgaccatgccccgaga

SEQ ID NO: 3850112 - DNA, 25 bp, Homo sapien
ttgatccaacggatcgcccgccagg

SEQ ID NO: 3850113 - DNA, 25 bp, Homo sapien
tacatgcacatctacgagacggacg

SEQ ID NO: 3850114 - DNA, 25 bp, Homo sapien
gactgccactattaccgggtgctgg

SEQ ID NO: 3850115 - DNA, 25 bp, Homo sapien
aaaatttgcccagctgtcgtctaag

SEQ ID NO: 3850116 - DNA, 25 bp, Homo sapien
tattattagtggaatgttgaccccg

SEQ ID NO: 3850117 - DNA, 25 bp, Homo sapien
aaatcagtcccaagccataaagtgc

SEQ ID NO: 3850118 - DNA, 25 bp, Homo sapien
tatacagccatactaaactcaggga

SEQ ID NO: 3850119 - DNA, 25 bp, Homo sapien
gtctacatcacacaaggcaccaagg

SEQ ID NO: 3850120 - DNA, 25 bp, Homo sapien
tcacctaagagagactagaatgggc

SEQ ID NO: 3850121 - DNA, 25 bp, Homo sapien
agaggagcaaggggcgagcggccct

SEQ ID NO: 3850122 - DNA, 25 bp, Homo sapien
gagcaaggggcgagcggccctccgc

SEQ ID NO: 3850123 - DNA, 25 bp, Homo sapien
gcgagcggccctccgccaagactgc

SEQ ID NO: 3850124 - DNA, 25 bp, Homo sapien
gggcgagcggccctccgccaagact

SEQ ID NO: 3850125 - DNA, 25 bp, Homo sapien
tctgggccagctgtaccatgtaggt

SEQ ID NO: 3850126 - DNA, 25 bp, Homo sapien
tacttgcgaggcctcagaatgggcc

SEQ ID NO: 3850127 - DNA, 25 bp, Homo sapien
tcggatgtgccgtgtcagctcgtca

SEQ ID NO: 3850128 - DNA, 25 bp, Homo sapien
tgctgacaggaacgcagaagggtcc

SEQ ID NO: 3850129 - DNA, 25 bp, Homo sapien
cggtggcggagagtacaggtggtcc

SEQ ID NO: 3850130 - DNA, 25 bp, Homo sapien
ggtggcggagagtacaggtggtcca

SEQ ID NO: 3850131 - DNA, 25 bp, Homo sapien
gtggcggagagtacaggtggtccag

SEQ ID NO: 3850132 - DNA, 25 bp, Homo sapien
gcggtggcggagagtacaggtggtc

SEQ ID NO: 3850133 - DNA, 25 bp, Homo sapien
tatgggagatccaacgacctcttct

SEQ ID NO: 3850134 - DNA, 25 bp, Homo sapien
gatgcctgcactcacaatattgatt

SEQ ID NO: 3850135 - DNA, 25 bp, Homo sapien
tattgattatgccttctgggtagca

SEQ ID NO: 3850136 - DNA, 25 bp, Homo sapien
tactgagggtcaatggagaacttgc

SEQ ID NO: 3850137 - DNA, 25 bp, Homo sapien
agctgtggcaaagtccaaaaggtgg

SEQ ID NO: 3850138 - DNA, 25 bp, Homo sapien
actgtagagctgtggcaaagtccaa

SEQ ID NO: 3850139 - DNA, 25 bp, Homo sapien
caaggccgagagtctcagcactgta

SEQ ID NO: 3850140 - DNA, 25 bp, Homo sapien
ccgctcacataggtccatttccaag

SEQ ID NO: 3850141 - DNA, 25 bp, Homo sapien
tcaagaactacctccaaaaaagcag

SEQ ID NO: 3850142 - DNA, 25 bp, Homo sapien
aagaatcgacctatcccagtcagtg

SEQ ID NO: 3850143 - DNA, 25 bp, Homo sapien
aaaaagcctcatccgcccggagctt

SEQ ID NO: 3850144 - DNA, 25 bp, Homo sapien
tgtggctctagtccccaataaaaaa

SEQ ID NO: 3850145 - DNA, 25 bp, Homo sapien
acgctttcccctggcgcttctccgc

SEQ ID NO: 3850146 - DNA, 25 bp, Homo sapien
tttcccctggcgcttctccgccgct

SEQ ID NO: 3850147 - DNA, 25 bp, Homo sapien
tcccctggcgcttctccgccgctcg

SEQ ID NO: 3850148 - DNA, 25 bp, Homo sapien
cctggcgcttctccgccgctcggct

SEQ ID NO: 3850149 - DNA, 25 bp, Homo sapien
ggtttgctggcgacctggcgcatct

SEQ ID NO: 3850150 - DNA, 25 bp, Homo sapien
gggcctgcgaagacacgcggcttac

SEQ ID NO: 3850151 - DNA, 25 bp, Homo sapien
tctcagctgtcgcaggttcctcctg

SEQ ID NO: 3850152 - DNA, 25 bp, Homo sapien
gtgcagtcagcaccgtccacctgga

SEQ ID NO: 3850153 - DNA, 25 bp, Homo sapien
gcgaggtcctccaccgggtagatgt

SEQ ID NO: 3850154 - DNA, 25 bp, Homo sapien
gggcctcccagttcggcattgggaa

SEQ ID NO: 3850155 - DNA, 25 bp, Homo sapien
tgggaaagatggtcaccgacgtggc

SEQ ID NO: 3850156 - DNA, 25 bp, Homo sapien
tccaccgggtagatgttgtcagaca

SEQ ID NO: 3850157 - DNA, 25 bp, Homo sapien
actgggattttgtctacggccttgg

SEQ ID NO: 3850158 - DNA, 25 bp, Homo sapien
ctgggattttgtctacggccttggc

SEQ ID NO: 3850159 - DNA, 25 bp, Homo sapien
tactgggattttgtctacggccttg

SEQ ID NO: 3850160 - DNA, 25 bp, Homo sapien
tgggattttgtctacggccttggcg

SEQ ID NO: 3850161 - DNA, 25 bp, Homo sapien
tattaatcaattgctcctcgctcag

SEQ ID NO: 3850162 - DNA, 25 bp, Homo sapien
tcctgtctgtgttccggctgctggg

SEQ ID NO: 3850163 - DNA, 25 bp, Homo sapien
gaaaaatgtctatttgccactgact

SEQ ID NO: 3850164 - DNA, 25 bp, Homo sapien
ctggagtgtcagaaaagccgttttg

SEQ ID NO: 3850165 - DNA, 25 bp, Homo sapien
gggctcgcgacttccagctcgcagg

SEQ ID NO: 3850166 - DNA, 25 bp, Homo sapien
caggcggcttttgccgtcacatggc

SEQ ID NO: 3850167 - DNA, 25 bp, Homo sapien
cgtgacgtcgctgcccatatatgga

SEQ ID NO: 3850168 - DNA, 25 bp, Homo sapien
gatttgcatacacgggctcggccgc

SEQ ID NO: 3850169 - DNA, 25 bp, Homo sapien
gcgcgccgtcgttgccagcagtgtc

SEQ ID NO: 3850170 - DNA, 25 bp, Homo sapien
cctgttgactgcgtccgcgcgccgt

SEQ ID NO: 3850171 - DNA, 25 bp, Homo sapien
tccgcgcgccgtcgttgccagcagt

SEQ ID NO: 3850172 - DNA, 25 bp, Homo sapien
tgttgactgcgtccgcgcgccgtcg

SEQ ID NO: 3850173 - DNA, 25 bp, Homo sapien
tgaggctgccgggagcggtctctcc

SEQ ID NO: 3850174 - DNA, 25 bp, Homo sapien
tgctcttccactgaagcgctgcttc

SEQ ID NO: 3850175 - DNA, 25 bp, Homo sapien
cgctgcagccgtgcgccagctctcg

SEQ ID NO: 3850176 - DNA, 25 bp, Homo sapien
cagcgcaccgcggtcagggccctga

SEQ ID NO: 3850177 - DNA, 25 bp, Homo sapien
agccggtatccagcggccggccatc

SEQ ID NO: 3850178 - DNA, 25 bp, Homo sapien
caaaacagccggtatccagcggccg

SEQ ID NO: 3850179 - DNA, 25 bp, Homo sapien
aaacagccggtatccagcggccggc

SEQ ID NO: 3850180 - DNA, 25 bp, Homo sapien
ctccaaaacagccggtatccagcgg

SEQ ID NO: 3850181 - DNA, 25 bp, Homo sapien
caagacgacgcctcggaagggagtc

SEQ ID NO: 3850182 - DNA, 25 bp, Homo sapien
agcccactccgcctgcgctctggcg

SEQ ID NO: 3850183 - DNA, 25 bp, Homo sapien
gaccatgggcaagacgacgcctcgg

SEQ ID NO: 3850184 - DNA, 25 bp, Homo sapien
tccgcctgcgctctggcgggtcccg

SEQ ID NO: 3850185 - DNA, 25 bp, Homo sapien
gctcctctctgcgcacgtgggcgga

SEQ ID NO: 3850186 - DNA, 25 bp, Homo sapien
gcgaggcgactgctcgcgcttcgct

SEQ ID NO: 3850187 - DNA, 25 bp, Homo sapien
tgcccggccagcagggcgcggaggg

SEQ ID NO: 3850188 - DNA, 25 bp, Homo sapien
gcaggcgggcgagttgcccgggccg

SEQ ID NO: 3850189 - DNA, 25 bp, Homo sapien
gataggctgtcagtctgatcataaa

SEQ ID NO: 3850190 - DNA, 25 bp, Homo sapien
aagcataatcttcatccaaaatcat

SEQ ID NO: 3850191 - DNA, 25 bp, Homo sapien
cataaaggctcaaagcataatcttc

SEQ ID NO: 3850192 - DNA, 25 bp, Homo sapien
gatgtccactttaataagtgatagg

SEQ ID NO: 3850193 - DNA, 25 bp, Homo sapien
ctcctggatgaaataggaactgcga

SEQ ID NO: 3850194 - DNA, 25 bp, Homo sapien
gctgcagccgctgaatttggggcat

SEQ ID NO: 3850195 - DNA, 25 bp, Homo sapien
taggaactgcgaacacacttgagct

SEQ ID NO: 3850196 - DNA, 25 bp, Homo sapien
tctccacaggactcctggatgaaat

SEQ ID NO: 3850197 - DNA, 25 bp, Homo sapien
cgagatgccgacgttatctgatgaa

SEQ ID NO: 3850198 - DNA, 25 bp, Homo sapien
tatctgatgaagcaggtcagtgtgt

SEQ ID NO: 3850199 - DNA, 25 bp, Homo sapien
ccgacgttatctgatgaagcaggtc

SEQ ID NO: 3850200 - DNA, 25 bp, Homo sapien
gatgaagcaggtcagtgtgttctgc

SEQ ID NO: 3850201 - DNA, 25 bp, Homo sapien
ctttaaatgaagctctttagacagt

SEQ ID NO: 3850202 - DNA, 25 bp, Homo sapien
gaagctctttagacagtggctgggt

SEQ ID NO: 3850203 - DNA, 25 bp, Homo sapien
aatgaagctctttagacagtggctg

SEQ ID NO: 3850204 - DNA, 25 bp, Homo sapien
taaatgaagctctttagacagtggc

SEQ ID NO: 3850205 - DNA, 25 bp, Homo sapien
gtcagacacaagcaataccttggcc

SEQ ID NO: 3850206 - DNA, 25 bp, Homo sapien
gaagggggtcagacacaagcaatac

SEQ ID NO: 3850207 - DNA, 25 bp, Homo sapien
gggggtcagacacaagcaatacctt

SEQ ID NO: 3850208 - DNA, 25 bp, Homo sapien
cagaagaagggggtcagacacaagc

SEQ ID NO: 3850209 - DNA, 25 bp, Homo sapien
ggttgggcacaccatagcactgcct

SEQ ID NO: 3850210 - DNA, 25 bp, Homo sapien
gagggttgggcacaccatagcactg

SEQ ID NO: 3850211 - DNA, 25 bp, Homo sapien
ccaagtcctaaatagcagatgcttt

SEQ ID NO: 3850212 - DNA, 25 bp, Homo sapien
tggtgctctgtaaccaagtcctaaa

SEQ ID NO: 3850213 - DNA, 25 bp, Homo sapien
actggtggccttcgcagcaggatga

SEQ ID NO: 3850214 - DNA, 25 bp, Homo sapien
tgccggtgaccaaggccagtccggt

SEQ ID NO: 3850215 - DNA, 25 bp, Homo sapien
aggccagtccggttcactccagtct

SEQ ID NO: 3850216 - DNA, 25 bp, Homo sapien
tcctgaggccttctccattggcatg

SEQ ID NO: 3850217 - DNA, 25 bp, Homo sapien
gttctttgttaactggaatgcccca

SEQ ID NO: 3850218 - DNA, 25 bp, Homo sapien
gggctttcgatcactaacaagccag

SEQ ID NO: 3850219 - DNA, 25 bp, Homo sapien
gaatgccccagagcgaggagttgga

SEQ ID NO: 3850220 - DNA, 25 bp, Homo sapien
aagccagcctatcagaaggccccat

SEQ ID NO: 3850221 - DNA, 25 bp, Homo sapien
cttggaattcccctggccctctgta

SEQ ID NO: 3850222 - DNA, 25 bp, Homo sapien
ggccctctgtagacaccaaccctgg

SEQ ID NO: 3850223 - DNA, 25 bp, Homo sapien
gagtccaagaagctctccttgagtc

SEQ ID NO: 3850224 - DNA, 25 bp, Homo sapien
ctctccttgagtccctcgcttggaa

SEQ ID NO: 3850225 - DNA, 25 bp, Homo sapien
cctctaagaggtgttcagtgtgcat

SEQ ID NO: 3850226 - DNA, 25 bp, Homo sapien
aaccacctctaagaggtgttcagtg

SEQ ID NO: 3850227 - DNA, 25 bp, Homo sapien
ccacctctaagaggtgttcagtgtg

SEQ ID NO: 3850228 - DNA, 25 bp, Homo sapien
cacctctggatatttggtctgttct

SEQ ID NO: 3850229 - DNA, 25 bp, Homo sapien
cgggcttcacttcaatactgcccct

SEQ ID NO: 3850230 - DNA, 25 bp, Homo sapien
cctccccgggcttcacttcaatact

SEQ ID NO: 3850231 - DNA, 25 bp, Homo sapien
tccccgggcttcacttcaatactgc

SEQ ID NO: 3850232 - DNA, 25 bp, Homo sapien
ggcttcacttcaatactgcccctca

SEQ ID NO: 3850233 - DNA, 25 bp, Homo sapien
cagccaggcactggtggaactggat

SEQ ID NO: 3850234 - DNA, 25 bp, Homo sapien
tggaactggatgaccgcaggtccat

SEQ ID NO: 3850235 - DNA, 25 bp, Homo sapien
tggtggaactggatgaccgcaggtc

SEQ ID NO: 3850236 - DNA, 25 bp, Homo sapien
ccagccaggcactggtggaactgga

SEQ ID NO: 3850237 - DNA, 25 bp, Homo sapien
caagcttggcctgagaacagacggc

SEQ ID NO: 3850238 - DNA, 25 bp, Homo sapien
taggaagcaagcttggcctgagaac

SEQ ID NO: 3850239 - DNA, 25 bp, Homo sapien
gagatggctcaccttatggcagagt

SEQ ID NO: 3850240 - DNA, 25 bp, Homo sapien
tggctcaccttatggcagagtagga

SEQ ID NO: 3850241 - DNA, 25 bp, Homo sapien
gctgactataacactcgtctctcaa

SEQ ID NO: 3850242 - DNA, 25 bp, Homo sapien
ttatagttgctgactataacactcg

SEQ ID NO: 3850243 - DNA, 25 bp, Homo sapien
tagttgctgactataacactcgtct

SEQ ID NO: 3850244 - DNA, 25 bp, Homo sapien
ctataacactcgtctctcaataatg

SEQ ID NO: 3850245 - DNA, 25 bp, Homo sapien
agcaaaatgccgaattgatacgcca

SEQ ID NO: 3850246 - DNA, 25 bp, Homo sapien
gcaaaatgccgaattgatacgccat

SEQ ID NO: 3850247 - DNA, 25 bp, Homo sapien
agaaaaaggcggcacagagaccagg

SEQ ID NO: 3850248 - DNA, 25 bp, Homo sapien
gacgacattccagcaagagatgggc

SEQ ID NO: 3850249 - DNA, 25 bp, Homo sapien
gcacagagataggatcaagggcgtt

SEQ ID NO: 3850250 - DNA, 25 bp, Homo sapien
aggattccaccaagatggcagcgac

SEQ ID NO: 3850251 - DNA, 25 bp, Homo sapien
taatttcataaggaatcttggtctt

SEQ ID NO: 3850252 - DNA, 25 bp, Homo sapien
ttgcaatagcattctgaacaggtca

SEQ ID NO: 3850253 - DNA, 25 bp, Homo sapien
atttgcaatagcattctgaacaggt

SEQ ID NO: 3850254 - DNA, 25 bp, Homo sapien
tttgcaatagcattctgaacaggtc

SEQ ID NO: 3850255 - DNA, 25 bp, Homo sapien
gcaatagcattctgaacaggtcatc

SEQ ID NO: 3850256 - DNA, 25 bp, Homo sapien
cttggaagtctgctaggctgcccat

SEQ ID NO: 3850257 - DNA, 25 bp, Homo sapien
accttggaagtctgctaggctgccc

SEQ ID NO: 3850258 - DNA, 25 bp, Homo sapien
caccttggaagtctgctaggctgcc

SEQ ID NO: 3850259 - DNA, 25 bp, Homo sapien
ccttggaagtctgctaggctgccca

SEQ ID NO: 3850260 - DNA, 25 bp, Homo sapien
tacaagcttggatacccctgtgagg

SEQ ID NO: 3850261 - DNA, 25 bp, Homo sapien
ggtccactagttccagcagctgtct

SEQ ID NO: 3850262 - DNA, 25 bp, Homo sapien
tggacagttacctgtagcccagaag

SEQ ID NO: 3850263 - DNA, 25 bp, Homo sapien
ccctgtgaggacacgtgtgcttaca

SEQ ID NO: 3850264 - DNA, 25 bp, Homo sapien
tatgttgccttgtctaattagctgc

SEQ ID NO: 3850265 - DNA, 25 bp, Homo sapien
gattgtgctacaagatgtcctgtgg

SEQ ID NO: 3850266 - DNA, 25 bp, Homo sapien
ttagcgggaaaactgtcacaaggca

SEQ ID NO: 3850267 - DNA, 25 bp, Homo sapien
tcctgtggatgcagtccagactgtt

SEQ ID NO: 3850268 - DNA, 25 bp, Homo sapien
caggttcaatagagtctatcctttt

SEQ ID NO: 3850269 - DNA, 25 bp, Homo sapien
catttatcaggttcaatagagtcta

SEQ ID NO: 3850270 - DNA, 25 bp, Homo sapien
tatcaggttcaatagagtctatcct

SEQ ID NO: 3850271 - DNA, 25 bp, Homo sapien
ggttcaatagagtctatccttttca

SEQ ID NO: 3850272 - DNA, 25 bp, Homo sapien
ctactgcagcgccgccaggtgctcc

SEQ ID NO: 3850273 - DNA, 25 bp, Homo sapien
gcagagcacggggatatttttcaga

SEQ ID NO: 3850274 - DNA, 25 bp, Homo sapien
tgacttttgaactacgtcccctctc

SEQ ID NO: 3850275 - DNA, 25 bp, Homo sapien
ttcagacaatagcagtgacttttga

SEQ ID NO: 3850276 - DNA, 25 bp, Homo sapien
gatatttttcagacaatagcagtga

SEQ ID NO: 3850277 - DNA, 25 bp, Homo sapien
ccagtgctcatccatacccctttct

SEQ ID NO: 3850278 - DNA, 25 bp, Homo sapien
acttccagtgctcatccatacccct

SEQ ID NO: 3850279 - DNA, 25 bp, Homo sapien
tccagtgctcatccatacccctttc

SEQ ID NO: 3850280 - DNA, 25 bp, Homo sapien
cttccagtgctcatccatacccctt

SEQ ID NO: 3850281 - DNA, 25 bp, Homo sapien
tgccaggcaggaacatgtaacccac

SEQ ID NO: 3850282 - DNA, 25 bp, Homo sapien
agcaaaaagccccgtgagactctcc

SEQ ID NO: 3850283 - DNA, 25 bp, Homo sapien
caaaaagccccgtgagactctccag

SEQ ID NO: 3850284 - DNA, 25 bp, Homo sapien
gggcagcaaaaagccccgtgagact

SEQ ID NO: 3850285 - DNA, 25 bp, Homo sapien
gcagcaaaaagccccgtgagactct

SEQ ID NO: 3850286 - DNA, 25 bp, Homo sapien
cacctcgcctggttggtgagagctg

SEQ ID NO: 3850287 - DNA, 25 bp, Homo sapien
gacacgggctggtcgtcctgttgtt

SEQ ID NO: 3850288 - DNA, 25 bp, Homo sapien
tcacagagcacctcgcctggttggt

SEQ ID NO: 3850289 - DNA, 25 bp, Homo sapien
agagcacctcgcctggttggtgaga

SEQ ID NO: 3850290 - DNA, 25 bp, Homo sapien
gcgtgggcagacatgccaggaatgc

SEQ ID NO: 3850291 - DNA, 25 bp, Homo sapien
agagcttccgacaggagaggcagcc

SEQ ID NO: 3850292 - DNA, 25 bp, Homo sapien
gcagccagccgagcgtgggcagaca

SEQ ID NO: 3850293 - DNA, 25 bp, Homo sapien
cgcggcttccctttgcatcatacct

SEQ ID NO: 3850294 - DNA, 25 bp, Homo sapien
gaaagaattgtcaggcacaccagca

SEQ ID NO: 3850295 - DNA, 25 bp, Homo sapien
gaatcagcatccaagactccctttg

SEQ ID NO: 3850296 - DNA, 25 bp, Homo sapien
gaaagttctctatgaagtggtggaa

SEQ ID NO: 3850297 - DNA, 25 bp, Homo sapien
tatggcctgataggtacaaatggac

SEQ ID NO: 3850298 - DNA, 25 bp, Homo sapien
gagtctagaactgggtcgaatcaca

SEQ ID NO: 3850299 - DNA, 25 bp, Homo sapien
tagaactgggtcgaatcacaatagc

SEQ ID NO: 3850300 - DNA, 25 bp, Homo sapien
cttgtactgagtctagaactgggtc

SEQ ID NO: 3850301 - DNA, 25 bp, Homo sapien
tgggtcgaatcacaatagcagcgac

SEQ ID NO: 3850302 - DNA, 25 bp, Homo sapien
ccaccacaggttccttgcttccttc

SEQ ID NO: 3850303 - DNA, 25 bp, Homo sapien
ccttcctgtcttggtctcatcttgt

SEQ ID NO: 3850304 - DNA, 25 bp, Homo sapien
ttcctgtcttggtctcatcttgtct

SEQ ID NO: 3850305 - DNA, 25 bp, Homo sapien
ctgtcttggtctcatcttgtcttct

SEQ ID NO: 3850306 - DNA, 25 bp, Homo sapien
tcgaaaatatccacgaatgctggtc

SEQ ID NO: 3850307 - DNA, 25 bp, Homo sapien
ggccagctggcagaagtactcgaaa

SEQ ID NO: 3850308 - DNA, 25 bp, Homo sapien
tctatagaagtgattgcagaacttg

SEQ ID NO: 3850309 - DNA, 25 bp, Homo sapien
tcttacaaactgaacccacactcgg

SEQ ID NO: 3850310 - DNA, 25 bp, Homo sapien
agtaaatactgtccgattgattgac

SEQ ID NO: 3850311 - DNA, 25 bp, Homo sapien
cacaaagtcgatgcacagtaaatac

SEQ ID NO: 3850312 - DNA, 25 bp, Homo sapien
gcactatgctggcacaaagtcgatg

SEQ ID NO: 3850313 - DNA, 25 bp, Homo sapien
gctggcacaaagtcgatgcacagta

SEQ ID NO: 3850314 - DNA, 25 bp, Homo sapien
cctgaaactttgtaaccagcatctc

SEQ ID NO: 3850315 - DNA, 25 bp, Homo sapien
cattcctgaaactttgtaaccagca

SEQ ID NO: 3850316 - DNA, 25 bp, Homo sapien
aacattcctgaaactttgtaaccag

SEQ ID NO: 3850317 - DNA, 25 bp, Homo sapien
ctgaacattcctgaaactttgtaac

SEQ ID NO: 3850318 - DNA, 25 bp, Homo sapien
ctgtgtctccgcctttggcagggct

SEQ ID NO: 3850319 - DNA, 25 bp, Homo sapien
ggcagggctggtgtcagcagtgctg

SEQ ID NO: 3850320 - DNA, 25 bp, Homo sapien
tgtgtctccgcctttggcagggctg

SEQ ID NO: 3850321 - DNA, 25 bp, Homo sapien
gtgtcagcagtgctggcagtcacac

SEQ ID NO: 3850322 - DNA, 25 bp, Homo sapien
ggttggcagggacactgcacatcat

SEQ ID NO: 3850323 - DNA, 25 bp, Homo sapien
cttggatgcagccaagcgcccagca

SEQ ID NO: 3850324 - DNA, 25 bp, Homo sapien
gggcagtctgcaaacatcatatgtg

SEQ ID NO: 3850325 - DNA, 25 bp, Homo sapien
caggccttgtaggttttgtgactac

SEQ ID NO: 3850326 - DNA, 25 bp, Homo sapien
tctgttctggacatgtggacttgga

SEQ ID NO: 3850327 - DNA, 25 bp, Homo sapien
agcttttagatgctctctcaaagca

SEQ ID NO: 3850328 - DNA, 25 bp, Homo sapien
gcaccaaaggctttgcaggaccagc

SEQ ID NO: 3850329 - DNA, 25 bp, Homo sapien
taataataggcatttccattgtgtc

SEQ ID NO: 3850330 - DNA, 25 bp, Homo sapien
tgagttgcagaagccttactgcttg

SEQ ID NO: 3850331 - DNA, 25 bp, Homo sapien
ggatggcacaggtgggtgctatgcc

SEQ ID NO: 3850332 - DNA, 25 bp, Homo sapien
ttgtcacacgtcagtgtgtttggca

SEQ ID NO: 3850333 - DNA, 25 bp, Homo sapien
catttggacatggttgtaaaattcc

SEQ ID NO: 3850334 - DNA, 25 bp, Homo sapien
tgacatcaaatggcagaggatggca

SEQ ID NO: 3850335 - DNA, 25 bp, Homo sapien
tttccttcctgttgagtagttgctg

SEQ ID NO: 3850336 - DNA, 25 bp, Homo sapien
gatgccctcagaggtattaagccca

SEQ ID NO: 3850337 - DNA, 25 bp, Homo sapien
tagttgctgaagatgccctcagagg

SEQ ID NO: 3850338 - DNA, 25 bp, Homo sapien
gtattaagcccactgtgcagcagcc

SEQ ID NO: 3850339 - DNA, 25 bp, Homo sapien
tgtggattgagtagtgcaatgacat

SEQ ID NO: 3850340 - DNA, 25 bp, Homo sapien
gtggattgagtagtgcaatgacatg

SEQ ID NO: 3850341 - DNA, 25 bp, Homo sapien
ctgtggattgagtagtgcaatgaca

SEQ ID NO: 3850342 - DNA, 25 bp, Homo sapien
ctggagcctctgctgtggcagccat

SEQ ID NO: 3850343 - DNA, 25 bp, Homo sapien
ttccctgtctcctctggagcctctg

SEQ ID NO: 3850344 - DNA, 25 bp, Homo sapien
tcctctggagcctctgctgtggcag

SEQ ID NO: 3850345 - DNA, 25 bp, Homo sapien
ctctggagcctctgctgtggcagcc

SEQ ID NO: 3850346 - DNA, 25 bp, Homo sapien
tttatgaaagcggaaactgagcttc

SEQ ID NO: 3850347 - DNA, 25 bp, Homo sapien
tatttaatagctacaggaggagtca

SEQ ID NO: 3850348 - DNA, 25 bp, Homo sapien
gtgtgcatcctttgtagactggcca

SEQ ID NO: 3850349 - DNA, 25 bp, Homo sapien
tgaagcagaggacactaaggtactc

SEQ ID NO: 3850350 - DNA, 25 bp, Homo sapien
gcctgttaactgtctctgagaggta

SEQ ID NO: 3850351 - DNA, 25 bp, Homo sapien
tcaggtctaggacaacatttggttc

SEQ ID NO: 3850352 - DNA, 25 bp, Homo sapien
catttggttcatgctactgctcaga

SEQ ID NO: 3850353 - DNA, 25 bp, Homo sapien
ggatatggccaaacttcaggtctag

SEQ ID NO: 3850354 - DNA, 25 bp, Homo sapien
tcaaatgggcactcagcattaccca

SEQ ID NO: 3850355 - DNA, 25 bp, Homo sapien
tttctctcttaggttgactttccca

SEQ ID NO: 3850356 - DNA, 25 bp, Homo sapien
cttaggttgactttcccactctgag

SEQ ID NO: 3850357 - DNA, 25 bp, Homo sapien
ggcactcagcattacccacaaaata

SEQ ID NO: 3850358 - DNA, 25 bp, Homo sapien
gcctcctcaacctggcagaagttcg

SEQ ID NO: 3850359 - DNA, 25 bp, Homo sapien
gcagaagttcgcagcaaatactggg

SEQ ID NO: 3850360 - DNA, 25 bp, Homo sapien
gctgattttgtagaaacgtcagagt

SEQ ID NO: 3850361 - DNA, 25 bp, Homo sapien
gagttatggagcttgccaccacatg

SEQ ID NO: 3850362 - DNA, 25 bp, Homo sapien
agagtggacgtaatgctagttggca

SEQ ID NO: 3850363 - DNA, 25 bp, Homo sapien
cagtttacataattaatcagggtgc

SEQ ID NO: 3850364 - DNA, 25 bp, Homo sapien
cctaaataatatggtggccggaggg

SEQ ID NO: 3850365 - DNA, 25 bp, Homo sapien
gatacacacccttctagatgaaact

SEQ ID NO: 3850366 - DNA, 25 bp, Homo sapien
ggccctgccaatgactgacatggaa

SEQ ID NO: 3850367 - DNA, 25 bp, Homo sapien
gagttaaccaagtctggacgcagtg

SEQ ID NO: 3850368 - DNA, 25 bp, Homo sapien
tactgatctggagaatttggcagcc

SEQ ID NO: 3850369 - DNA, 25 bp, Homo sapien
gaaggttgaccctcaatgggcctgg

SEQ ID NO: 3850370 - DNA, 25 bp, Homo sapien
gaataggccctcagagttagggccg

SEQ ID NO: 3850371 - DNA, 25 bp, Homo sapien
gttagggccgaaagaatccaagtga

SEQ ID NO: 3850372 - DNA, 25 bp, Homo sapien
agtgaaggcgagtttagtttttgcg

SEQ ID NO: 3850373 - DNA, 25 bp, Homo sapien
tcaggttccagacttgaggaatgga

SEQ ID NO: 3850374 - DNA, 25 bp, Homo sapien
tcttataaaggccattccaagaagc

SEQ ID NO: 3850375 - DNA, 25 bp, Homo sapien
tataaaggccattccaagaagcagc

SEQ ID NO: 3850376 - DNA, 25 bp, Homo sapien
taaaggccattccaagaagcagctc

SEQ ID NO: 3850377 - DNA, 25 bp, Homo sapien
aaaggccattccaagaagcagctcc

SEQ ID NO: 3850378 - DNA, 25 bp, Homo sapien
tctaggtttacatagtaattgcata

SEQ ID NO: 3850379 - DNA, 25 bp, Homo sapien
cggtttcaaagcatatctatctagg

SEQ ID NO: 3850380 - DNA, 25 bp, Homo sapien
acttttgcagttggaaaggtctgag

SEQ ID NO: 3850381 - DNA, 25 bp, Homo sapien
ccaggccatgtcataacttttgcag

SEQ ID NO: 3850382 - DNA, 25 bp, Homo sapien
gcaatttcccagatgcaggcaatag

SEQ ID NO: 3850383 - DNA, 25 bp, Homo sapien
tgtgtcctattctcacagtaactgt

SEQ ID NO: 3850384 - DNA, 25 bp, Homo sapien
gacatgactgctgtgcgattcagca

SEQ ID NO: 3850385 - DNA, 25 bp, Homo sapien
aagagaatttcttggcactgatggt

SEQ ID NO: 3850386 - DNA, 25 bp, Homo sapien
tcatcctcgtgtatcttcaaggctc

SEQ ID NO: 3850387 - DNA, 25 bp, Homo sapien
cctaaaaatatcaaactggatcaca

SEQ ID NO: 3850388 - DNA, 25 bp, Homo sapien
tatcctctacttcatcctcgtgtat

SEQ ID NO: 3850389 - DNA, 25 bp, Homo sapien
tcattcaaggttaagtaatcccagt

SEQ ID NO: 3850390 - DNA, 25 bp, Homo sapien
ctgcatgatacaaaatatttttaac

SEQ ID NO: 3850391 - DNA, 25 bp, Homo sapien
gaaagagatgttgatatttctaatc

SEQ ID NO: 3850392 - DNA, 25 bp, Homo sapien
tgaaagagatgttgatatttctaat

SEQ ID NO: 3850393 - DNA, 25 bp, Homo sapien
ctgaaagagatgttgatatttctaa

SEQ ID NO: 3850394 - DNA, 25 bp, Homo sapien
aaagagatgttgatatttctaatca

SEQ ID NO: 3850395 - DNA, 25 bp, Homo sapien
tgttaagccaaaagggacactataa

SEQ ID NO: 3850396 - DNA, 25 bp, Homo sapien
tgtgaccaactaggcaatgactgcc

SEQ ID NO: 3850397 - DNA, 25 bp, Homo sapien
tgaagaacaggacctagaacaccca

SEQ ID NO: 3850398 - DNA, 25 bp, Homo sapien
gactgcctaagctgttatacatgta

SEQ ID NO: 3850399 - DNA, 25 bp, Homo sapien
atgactctacaagatgttctggaga

SEQ ID NO: 3850400 - DNA, 25 bp, Homo sapien
gactctacaagatgttctggagaca

SEQ ID NO: 3850401 - DNA, 25 bp, Homo sapien
aaatcttcagttacctgaatacagc

SEQ ID NO: 3850402 - DNA, 25 bp, Homo sapien
tcagttacctgaatacagctgtgaa

SEQ ID NO: 3850403 - DNA, 25 bp, Homo sapien
aatcctttggagaggctgataacca

SEQ ID NO: 3850404 - DNA, 25 bp, Homo sapien
gaaggcccaagctgatccaatctgg

SEQ ID NO: 3850405 - DNA, 25 bp, Homo sapien
caatcaccggtgacatcagtacaac

SEQ ID NO: 3850406 - DNA, 25 bp, Homo sapien
gacagatctactgacctcgactgag

SEQ ID NO: 3850407 - DNA, 25 bp, Homo sapien
aactcctgcggtgtcttgtctaaca

SEQ ID NO: 3850408 - DNA, 25 bp, Homo sapien
gtctgattattctgagggccaccta

SEQ ID NO: 3850409 - DNA, 25 bp, Homo sapien
tacaggagtttcacagactgagtcc

SEQ ID NO: 3850410 - DNA, 25 bp, Homo sapien
aactatggatgagatgttcagcgcc

SEQ ID NO: 3850411 - DNA, 25 bp, Homo sapien
ggaacagccaaatgcccatatgcaa

SEQ ID NO: 3850412 - DNA, 25 bp, Homo sapien
tagagaggaactaggagagccatac

SEQ ID NO: 3850413 - DNA, 25 bp, Homo sapien
tgagcctactaaaagaccactgttc

SEQ ID NO: 3850414 - DNA, 25 bp, Homo sapien
gaagcaagtcttacagatacctgac

SEQ ID NO: 3850415 - DNA, 25 bp, Homo sapien
tcagtcagtaaaaaatatgttagaa

SEQ ID NO: 3850416 - DNA, 25 bp, Homo sapien
aatatgttagaaataagtttgtata

SEQ ID NO: 3850417 - DNA, 25 bp, Homo sapien
atgttagaaataagtttgtatatac

SEQ ID NO: 3850418 - DNA, 25 bp, Homo sapien
tttcagtcagtaaaaaatatgttag

SEQ ID NO: 3850419 - DNA, 25 bp, Homo sapien
ggtcacgtattggatcatgttctgg

SEQ ID NO: 3850420 - DNA, 25 bp, Homo sapien
cctttgacggagctttttgttcaca

SEQ ID NO: 3850421 - DNA, 25 bp, Homo sapien
ctgatgaagtgctcccgctggcaaa

SEQ ID NO: 3850422 - DNA, 25 bp, Homo sapien
ggcaaaacaatagcatcaccaagga

SEQ ID NO: 3850423 - DNA, 25 bp, Homo sapien
gaatcattccctaggtcagcagcca

SEQ ID NO: 3850424 - DNA, 25 bp, Homo sapien
ttgtttttacatcccgcgactccag

SEQ ID NO: 3850425 - DNA, 25 bp, Homo sapien
gactccagatagctacttttcgcca

SEQ ID NO: 3850426 - DNA, 25 bp, Homo sapien
ccaagtgaaggtacggcaacaatga

SEQ ID NO: 3850427 - DNA, 25 bp, Homo sapien
caggtatttcacttgagtccttcaa

SEQ ID NO: 3850428 - DNA, 25 bp, Homo sapien
gaagaaattcccttatcttgtcaac

SEQ ID NO: 3850429 - DNA, 25 bp, Homo sapien
tgtcatccaaatcttcttcctcaaa

SEQ ID NO: 3850430 - DNA, 25 bp, Homo sapien
tttcccagcataaatatgccacaga

SEQ ID NO: 3850431 - DNA, 25 bp, Homo sapien
catgactaatgaacggcaggacaaa

SEQ ID NO: 3850432 - DNA, 25 bp, Homo sapien
gggtggtcctaacaatgacttgtac

SEQ ID NO: 3850433 - DNA, 25 bp, Homo sapien
gttttatgcaaaccaagaagcagga

SEQ ID NO: 3850434 - DNA, 25 bp, Homo sapien
gaaaggttttactcattaccatgac

SEQ ID NO: 3850435 - DNA, 25 bp, Homo sapien
gttcctatatcatgatctttagcag

SEQ ID NO: 3850436 - DNA, 25 bp, Homo sapien
gctatgccaacataaactagtatat

SEQ ID NO: 3850437 - DNA, 25 bp, Homo sapien
ctagtatatttacaacatcagaaac

SEQ ID NO: 3850438 - DNA, 25 bp, Homo sapien
tcaatatggagatttgttgttccta

SEQ ID NO: 3850439 - DNA, 25 bp, Homo sapien
cactatgcccggcctgagcaaaaat

SEQ ID NO: 3850440 - DNA, 25 bp, Homo sapien
tgcccggcctgagcaaaaattttaa

SEQ ID NO: 3850441 - DNA, 25 bp, Homo sapien
tatgcccggcctgagcaaaaatttt

SEQ ID NO: 3850442 - DNA, 25 bp, Homo sapien
ctatgcccggcctgagcaaaaattt

SEQ ID NO: 3850443 - DNA, 25 bp, Homo sapien
tgggagaaatgtgaatatataccta

SEQ ID NO: 3850444 - DNA, 25 bp, Homo sapien
gggagaaatgtgaatatatacctac

SEQ ID NO: 3850445 - DNA, 25 bp, Homo sapien
atgggagaaatgtgaatatatacct

SEQ ID NO: 3850446 - DNA, 25 bp, Homo sapien
gattacaatattctggcaatggcag

SEQ ID NO: 3850447 - DNA, 25 bp, Homo sapien
aaatcctggcaaatgagaggccaaa

SEQ ID NO: 3850448 - DNA, 25 bp, Homo sapien
cactgcacaacctgggtcctagatc

SEQ ID NO: 3850449 - DNA, 25 bp, Homo sapien
gatcaggacgtacaaaaaatcctgg

SEQ ID NO: 3850450 - DNA, 25 bp, Homo sapien
ttgctggcatcatagtcttgaagtc

SEQ ID NO: 3850451 - DNA, 25 bp, Homo sapien
tgctggcatcatagtcttgaagtct

SEQ ID NO: 3850452 - DNA, 25 bp, Homo sapien
cttgctggcatcatagtcttgaagt

SEQ ID NO: 3850453 - DNA, 25 bp, Homo sapien
caagactaattgattccgccttcca

SEQ ID NO: 3850454 - DNA, 25 bp, Homo sapien
gatgctatctttgcagttcaggaga

SEQ ID NO: 3850455 - DNA, 25 bp, Homo sapien
gaattccttaacattggcatttgaa

SEQ ID NO: 3850456 - DNA, 25 bp, Homo sapien
tcttcaaaaccatcccagaattcct

SEQ ID NO: 3850457 - DNA, 25 bp, Homo sapien
attttcttatgcacaccagaaacca

SEQ ID NO: 3850458 - DNA, 25 bp, Homo sapien
cattttcttatgcacaccagaaacc

SEQ ID NO: 3850459 - DNA, 25 bp, Homo sapien
taaaactatcacctagagtataatg

SEQ ID NO: 3850460 - DNA, 25 bp, Homo sapien
caatttgattatacagattccacaa

SEQ ID NO: 3850461 - DNA, 25 bp, Homo sapien
aaagctttctgattagactccttgc

SEQ ID NO: 3850462 - DNA, 25 bp, Homo sapien
ggctgaagcgatcaatcgtcccacc

SEQ ID NO: 3850463 - DNA, 25 bp, Homo sapien
taaatcttgtgtatatgcaatgcac

SEQ ID NO: 3850464 - DNA, 25 bp, Homo sapien
tgtgtgacgcttttctacctcaaaa

SEQ ID NO: 3850465 - DNA, 25 bp, Homo sapien
gactgcgtctcttattagatgctca

SEQ ID NO: 3850466 - DNA, 25 bp, Homo sapien
cctaaaaagatcaagcagcattgca

SEQ ID NO: 3850467 - DNA, 25 bp, Homo sapien
gaatgttaggcatagtccgtccact

SEQ ID NO: 3850468 - DNA, 25 bp, Homo sapien
gttttcaacaactgaagcaattatg

SEQ ID NO: 3850469 - DNA, 25 bp, Homo sapien
cataaaatatgcttctcacagatcc

SEQ ID NO: 3850470 - DNA, 25 bp, Homo sapien
catccactgcagatattatgctttc

SEQ ID NO: 3850471 - DNA, 25 bp, Homo sapien
tgttgtagtcagcaaatcccgtaag

SEQ ID NO: 3850472 - DNA, 25 bp, Homo sapien
gcaatgccagcatctgtagacccca

SEQ ID NO: 3850473 - DNA, 25 bp, Homo sapien
gtagaccccacacgtagctttccag

SEQ ID NO: 3850474 - DNA, 25 bp, Homo sapien
caaatcccgtaaggttgagccttgt

SEQ ID NO: 3850475 - DNA, 25 bp, Homo sapien
tgactgggattctggaggagttaac

SEQ ID NO: 3850476 - DNA, 25 bp, Homo sapien
tgcctacatcactctctgggctgct

SEQ ID NO: 3850477 - DNA, 25 bp, Homo sapien
tctgctaaccagtgcagtggtgact

SEQ ID NO: 3850478 - DNA, 25 bp, Homo sapien
gacttcggaggagtattttgctgct

SEQ ID NO: 3850479 - DNA, 25 bp, Homo sapien
gcacagagaaattttattactgtga

SEQ ID NO: 3850480 - DNA, 25 bp, Homo sapien
ctcaggcatgcacagagaaatttta

SEQ ID NO: 3850481 - DNA, 25 bp, Homo sapien
attactgtgattaagaacattctgt

SEQ ID NO: 3850482 - DNA, 25 bp, Homo sapien
tttattactgtgattaagaacattc

SEQ ID NO: 3850483 - DNA, 25 bp, Homo sapien
gcaaacctaattcatacataagtcc

SEQ ID NO: 3850484 - DNA, 25 bp, Homo sapien
tgactaatttaaccacagattttat

SEQ ID NO: 3850485 - DNA, 25 bp, Homo sapien
taattcaattagtagtatagataca

SEQ ID NO: 3850486 - DNA, 25 bp, Homo sapien
tatcaaagttgactaatttaaccac

SEQ ID NO: 3850487 - DNA, 25 bp, Homo sapien
atttccaacttgtaaattctgtttg

SEQ ID NO: 3850488 - DNA, 25 bp, Homo sapien
caatgacaatgggatttaataccat

SEQ ID NO: 3850489 - DNA, 25 bp, Homo sapien
aaattctgtttgttagtacaatgac

SEQ ID NO: 3850490 - DNA, 25 bp, Homo sapien
gtttgttagtacaatgacaatggga

SEQ ID NO: 3850491 - DNA, 25 bp, Homo sapien
tcttgtgccctttaaatttcttcca

SEQ ID NO: 3850492 - DNA, 25 bp, Homo sapien
cacacttcatccaagcatatagttc

SEQ ID NO: 3850493 - DNA, 25 bp, Homo sapien
tgatcatgaggctgtcccttcacac

SEQ ID NO: 3850494 - DNA, 25 bp, Homo sapien
tcacacacttcatccaagcatatag

SEQ ID NO: 3850495 - DNA, 25 bp, Homo sapien
tgtttgtgatcatgaggctgtccct

SEQ ID NO: 3850496 - DNA, 25 bp, Homo sapien
ggatataatgatagcctttctaaaa

SEQ ID NO: 3850497 - DNA, 25 bp, Homo sapien
aaatgtcaatgatatgctttagatg

SEQ ID NO: 3850498 - DNA, 25 bp, Homo sapien
gctagagtcacagccaaagagaaaa

SEQ ID NO: 3850499 - DNA, 25 bp, Homo sapien
tagatgtttggttctgaaacaagtc

SEQ ID NO: 3850500 - DNA, 25 bp, Homo sapien
cccagtgaatgttaaacaatgttgc

SEQ ID NO: 3850501 - DNA, 25 bp, Homo sapien
gactcctctcactgctcttttccag

SEQ ID NO: 3850502 - DNA, 25 bp, Homo sapien
cacatttttggcagacccagtgaat

SEQ ID NO: 3850503 - DNA, 25 bp, Homo sapien
ccttgtaacaatctaagcagaccac

SEQ ID NO: 3850504 - DNA, 25 bp, Homo sapien
ttccagacctgcctgatatccagag

SEQ ID NO: 3850505 - DNA, 25 bp, Homo sapien
gagggattactctgtgcattgcaga

SEQ ID NO: 3850506 - DNA, 25 bp, Homo sapien
aaaaatgccgtacatctaagcaggg

SEQ ID NO: 3850507 - DNA, 25 bp, Homo sapien
cattgcagactgttcagaggcatct

SEQ ID NO: 3850508 - DNA, 25 bp, Homo sapien
tcatgtgtccacaaactcatagctt

SEQ ID NO: 3850509 - DNA, 25 bp, Homo sapien
aaaccatctattctaactactccgt

SEQ ID NO: 3850510 - DNA, 25 bp, Homo sapien
cagatgttactaattgacagaactt

SEQ ID NO: 3850511 - DNA, 25 bp, Homo sapien
tcatattggtcaggagaagagaaac

SEQ ID NO: 3850512 - DNA, 25 bp, Homo sapien
caaaatactggtgagtgagctggtt

SEQ ID NO: 3850513 - DNA, 25 bp, Homo sapien
taggccctatctcacagcaggagtc

SEQ ID NO: 3850514 - DNA, 25 bp, Homo sapien
tcatcctgtaaaaaggattccccag

SEQ ID NO: 3850515 - DNA, 25 bp, Homo sapien
gcttcagcttcttgactttacgcca

SEQ ID NO: 3850516 - DNA, 25 bp, Homo sapien
gattacagtgctatccagaggaagg

SEQ ID NO: 3850517 - DNA, 25 bp, Homo sapien
tactactggctaatgtaactggtgc

SEQ ID NO: 3850518 - DNA, 25 bp, Homo sapien
gaaacactggtagtatcggcagcag

SEQ ID NO: 3850519 - DNA, 25 bp, Homo sapien
catgactgaactgggaacactgccc

SEQ ID NO: 3850520 - DNA, 25 bp, Homo sapien
ctgtaaagaaaatacacaaatattt

SEQ ID NO: 3850521 - DNA, 25 bp, Homo sapien
taatccaataccatctgctgaggtc

SEQ ID NO: 3850522 - DNA, 25 bp, Homo sapien
ctgcactggaaggtctgacaggaat

SEQ ID NO: 3850523 - DNA, 25 bp, Homo sapien
tccttatgatgatctactaaagttt

SEQ ID NO: 3850524 - DNA, 25 bp, Homo sapien
tgtaattttaagaggccgatgaggc

SEQ ID NO: 3850525 - DNA, 25 bp, Homo sapien
caccaagtaaggaggcagtaggcac

SEQ ID NO: 3850526 - DNA, 25 bp, Homo sapien
taacaacttcaggtgatgggctgga

SEQ ID NO: 3850527 - DNA, 25 bp, Homo sapien
cagtaggcactccaggtaacacagt

SEQ ID NO: 3850528 - DNA, 25 bp, Homo sapien
catgagcactctctagtcgtgggtg

SEQ ID NO: 3850529 - DNA, 25 bp, Homo sapien
ctgccttctcattattatggggttt

SEQ ID NO: 3850530 - DNA, 25 bp, Homo sapien
tctgaggaattatctattattctct

SEQ ID NO: 3850531 - DNA, 25 bp, Homo sapien
tctgttctgaggaattatctattat

SEQ ID NO: 3850532 - DNA, 25 bp, Homo sapien
acattgtcagttcgaagtcttttca

SEQ ID NO: 3850533 - DNA, 25 bp, Homo sapien
ctggtctgggactatttgcttgggc

SEQ ID NO: 3850534 - DNA, 25 bp, Homo sapien
ttttggtacagcagcttgggagttc

SEQ ID NO: 3850535 - DNA, 25 bp, Homo sapien
catctggtatactgctatctgagcc

SEQ ID NO: 3850536 - DNA, 25 bp, Homo sapien
ttgcttgggcacgtgtataatggct

SEQ ID NO: 3850537 - DNA, 25 bp, Homo sapien
caaagagtgaacaacatcatctaga

SEQ ID NO: 3850538 - DNA, 25 bp, Homo sapien
gacctgcgtcgtgatgtaatgccaa

SEQ ID NO: 3850539 - DNA, 25 bp, Homo sapien
ttttgattggcacgagacctgcgtc

SEQ ID NO: 3850540 - DNA, 25 bp, Homo sapien
tgaaccatagaaggatcgacattct

SEQ ID NO: 3850541 - DNA, 25 bp, Homo sapien
cactgggtggcagagtcttgtctat

SEQ ID NO: 3850542 - DNA, 25 bp, Homo sapien
gtcttgtctatatactctcactctg

SEQ ID NO: 3850543 - DNA, 25 bp, Homo sapien
aattatgccagtaaaccactgggtg

SEQ ID NO: 3850544 - DNA, 25 bp, Homo sapien
ctgtatccatttaaggaataaggac

SEQ ID NO: 3850545 - DNA, 25 bp, Homo sapien
ctgggtttaggctgtctatgtcgtc

SEQ ID NO: 3850546 - DNA, 25 bp, Homo sapien
atgaagctgcgggttgtccctgaga

SEQ ID NO: 3850547 - DNA, 25 bp, Homo sapien
gaactgggtttaggctgtctatgtc

SEQ ID NO: 3850548 - DNA, 25 bp, Homo sapien
agctgcgggttgtccctgagaactg

SEQ ID NO: 3850549 - DNA, 25 bp, Homo sapien
gtgctaaatgttagacagaagtcaa

SEQ ID NO: 3850550 - DNA, 25 bp, Homo sapien
caaggctgacttacagataagagaa

SEQ ID NO: 3850551 - DNA, 25 bp, Homo sapien
tattaaaggttaaatgagcaaatct

SEQ ID NO: 3850552 - DNA, 25 bp, Homo sapien
gccttgagctcgtgtgagattaaaa

SEQ ID NO: 3850553 - DNA, 25 bp, Homo sapien
cagaacaaccagtatgaagcaagat

SEQ ID NO: 3850554 - DNA, 25 bp, Homo sapien
aaatatatacaatcaggagcacagg

SEQ ID NO: 3850555 - DNA, 25 bp, Homo sapien
gtgaggtatgatcactgtagtcact

SEQ ID NO: 3850556 - DNA, 25 bp, Homo sapien
taatgcaatttgatctaactgactg

SEQ ID NO: 3850557 - DNA, 25 bp, Homo sapien
tgtaaaactgatactggttaataat

SEQ ID NO: 3850558 - DNA, 25 bp, Homo sapien
cctgcagcttgatccaagaatatta

SEQ ID NO: 3850559 - DNA, 25 bp, Homo sapien
tactataatgtgaagtcatcccctt

SEQ ID NO: 3850560 - DNA, 25 bp, Homo sapien
cccctttctggaacacgttcatctt

SEQ ID NO: 3850561 - DNA, 25 bp, Homo sapien
tctgtctaatgtcaaagcacttccc

SEQ ID NO: 3850562 - DNA, 25 bp, Homo sapien
catccatgcgcttgcataatcaaaa

SEQ ID NO: 3850563 - DNA, 25 bp, Homo sapien
gcaaatcagcaaaggtctgtctaat

SEQ ID NO: 3850564 - DNA, 25 bp, Homo sapien
aatcaaaattttgcatgctctctgc

SEQ ID NO: 3850565 - DNA, 25 bp, Homo sapien
caccttttcaatgatatctactctg

SEQ ID NO: 3850566 - DNA, 25 bp, Homo sapien
ccaatccttattgatcttacactgc

SEQ ID NO: 3850567 - DNA, 25 bp, Homo sapien
aattttgtatgaatactgcctggca

SEQ ID NO: 3850568 - DNA, 25 bp, Homo sapien
cagagaggtctggagttttggattc

SEQ ID NO: 3850569 - DNA, 25 bp, Homo sapien
aagaacagacacactccagtgattc

SEQ ID NO: 3850570 - DNA, 25 bp, Homo sapien
caagaacagacacactccagtgatt

SEQ ID NO: 3850571 - DNA, 25 bp, Homo sapien
caccagcccggccgggaactcctct

SEQ ID NO: 3850572 - DNA, 25 bp, Homo sapien
agaaatcagtagcaagggaaacctc

SEQ ID NO: 3850573 - DNA, 25 bp, Homo sapien
agcgaaaatcatacggcaaactgtc

SEQ ID NO: 3850574 - DNA, 25 bp, Homo sapien
caatgccatgaaacaagcctcaaca

SEQ ID NO: 3850575 - DNA, 25 bp, Homo sapien
tgctcctgaacaacgaataggtcaa

SEQ ID NO: 3850576 - DNA, 25 bp, Homo sapien
cacaacctaccaaaattgaaccagg

SEQ ID NO: 3850577 - DNA, 25 bp, Homo sapien
acacaacctaccaaaattgaaccag

SEQ ID NO: 3850578 - DNA, 25 bp, Homo sapien
tgaaaggacaaagaaggtggatcac

SEQ ID NO: 3850579 - DNA, 25 bp, Homo sapien
gaaaggacaaagaaggtggatcact

SEQ ID NO: 3850580 - DNA, 25 bp, Homo sapien
acaacaaaaagcagatgcttaaaga

SEQ ID NO: 3850581 - DNA, 25 bp, Homo sapien
acaaaaagcagatgcttaaagatag

SEQ ID NO: 3850582 - DNA, 25 bp, Homo sapien
tgcagtcaggtgaggttgcaccatt

SEQ ID NO: 3850583 - DNA, 25 bp, Homo sapien
ttgcagtcaggtgaggttgcaccat

SEQ ID NO: 3850584 - DNA, 25 bp, Homo sapien
ttcccaacactaacatgccaagcag

SEQ ID NO: 3850585 - DNA, 25 bp, Homo sapien
gttcaacgctcatttatagtgctgg

SEQ ID NO: 3850586 - DNA, 25 bp, Homo sapien
gcacactcttacttagccagggtag

SEQ ID NO: 3850587 - DNA, 25 bp, Homo sapien
caagcagatgctaccaactgatgta

SEQ ID NO: 3850588 - DNA, 25 bp, Homo sapien
tacagaaccctagtcttctgagaag

SEQ ID NO: 3850589 - DNA, 25 bp, Homo sapien
tgttagtccccacaattccaagagc

SEQ ID NO: 3850590 - DNA, 25 bp, Homo sapien
gaactactagcctgctggtctacca

SEQ ID NO: 3850591 - DNA, 25 bp, Homo sapien
actggtactgtatgaggagaaccct

SEQ ID NO: 3850592 - DNA, 25 bp, Homo sapien
caccaggcgcggtggtatttaacca

SEQ ID NO: 3850593 - DNA, 25 bp, Homo sapien
cgtgatgtcctagtggcttagctaa

SEQ ID NO: 3850594 - DNA, 25 bp, Homo sapien
ctattcatcctgatgtaactcaggg

SEQ ID NO: 3850595 - DNA, 25 bp, Homo sapien
tatggtgtaatactgcaccaggcgc

SEQ ID NO: 3850596 - DNA, 25 bp, Homo sapien
tatggattacctgccgagggaacaa

SEQ ID NO: 3850597 - DNA, 25 bp, Homo sapien
gaatacccatatgcacaaccaaaaa

SEQ ID NO: 3850598 - DNA, 25 bp, Homo sapien
acatcttaatatggattacctgccg

SEQ ID NO: 3850599 - DNA, 25 bp, Homo sapien
aaatctaggtattcagaatacccat

SEQ ID NO: 3850600 - DNA, 25 bp, Homo sapien
ggatgtaccatgacattgcctgcta

SEQ ID NO: 3850601 - DNA, 25 bp, Homo sapien
gaattgatactgacacacgtaagtc

SEQ ID NO: 3850602 - DNA, 25 bp, Homo sapien
gttcccaattccagtctgagtaaag

SEQ ID NO: 3850603 - DNA, 25 bp, Homo sapien
tagacttctcaaacagttgtgtgga

SEQ ID NO: 3850604 - DNA, 25 bp, Homo sapien
taagcaaaatcaactgactgcattc

SEQ ID NO: 3850605 - DNA, 25 bp, Homo sapien
tttttcacacaactagaagttagat

SEQ ID NO: 3850606 - DNA, 25 bp, Homo sapien
tgtctgaatatcaataaagtttaat

SEQ ID NO: 3850607 - DNA, 25 bp, Homo sapien
aataaatcgtttatcctataagcaa

SEQ ID NO: 3850608 - DNA, 25 bp, Homo sapien
ctggtagggctgaaaggcactatct

SEQ ID NO: 3850609 - DNA, 25 bp, Homo sapien
caaggaattctactgcagtgactga

SEQ ID NO: 3850610 - DNA, 25 bp, Homo sapien
tgcttatctacaaggaattctactg

SEQ ID NO: 3850611 - DNA, 25 bp, Homo sapien
tctacaaggaattctactgcagtga

SEQ ID NO: 3850612 - DNA, 25 bp, Homo sapien
ctgggtatatttctttcaaccagag

SEQ ID NO: 3850613 - DNA, 25 bp, Homo sapien
tgggtatatttctttcaaccagagg

SEQ ID NO: 3850614 - DNA, 25 bp, Homo sapien
tatatttctttcaaccagaggtttg

SEQ ID NO: 3850615 - DNA, 25 bp, Homo sapien
tatttctttcaaccagaggtttgaa

SEQ ID NO: 3850616 - DNA, 25 bp, Homo sapien
cactacagagtcttagggtacctaa

SEQ ID NO: 3850617 - DNA, 25 bp, Homo sapien
tgataattttctgggtagtatcctg

SEQ ID NO: 3850618 - DNA, 25 bp, Homo sapien
gtatcctgaaattatgaaggaacac

SEQ ID NO: 3850619 - DNA, 25 bp, Homo sapien
cacacaccaatacaatgtatcaatg

SEQ ID NO: 3850620 - DNA, 25 bp, Homo sapien
gagtgacttgaaagaacaaagtcca

SEQ ID NO: 3850621 - DNA, 25 bp, Homo sapien
tactaatataaatctcaccaaaggt

SEQ ID NO: 3850622 - DNA, 25 bp, Homo sapien
caagcaggtctattgaaaaacacga

SEQ ID NO: 3850623 - DNA, 25 bp, Homo sapien
aaggcagtgaccttaatttctcagg

SEQ ID NO: 3850624 - DNA, 25 bp, Homo sapien
tccacaacaaggctttaaaggtcag

SEQ ID NO: 3850625 - DNA, 25 bp, Homo sapien
tctggaagagtatctagtgtaaata

SEQ ID NO: 3850626 - DNA, 25 bp, Homo sapien
gaagagtatctagtgtaaatacttc

SEQ ID NO: 3850627 - DNA, 25 bp, Homo sapien
gctttaaaggtcagtaagtatttgc

SEQ ID NO: 3850628 - DNA, 25 bp, Homo sapien
gaagcaggagctgtaacctaacaag

SEQ ID NO: 3850629 - DNA, 25 bp, Homo sapien
gcatttctgagctcacttgcagcgg

SEQ ID NO: 3850630 - DNA, 25 bp, Homo sapien
cagtgatgaggattacaactcgctc

SEQ ID NO: 3850631 - DNA, 25 bp, Homo sapien
cagcggcgtcattgtataggaagaa

SEQ ID NO: 3850632 - DNA, 25 bp, Homo sapien
ctgtggtgttaacgactaagaaatc

SEQ ID NO: 3850633 - DNA, 25 bp, Homo sapien
gtgttaacgactaagaaatcctgca

SEQ ID NO: 3850634 - DNA, 25 bp, Homo sapien
tgtggtgttaacgactaagaaatcc

SEQ ID NO: 3850635 - DNA, 25 bp, Homo sapien
tggtgttaacgactaagaaatcctg

SEQ ID NO: 3850636 - DNA, 25 bp, Homo sapien
tgcatcctccgatctgggtcaggat

SEQ ID NO: 3850637 - DNA, 25 bp, Homo sapien
caggataatttctctcgaggtcgct

SEQ ID NO: 3850638 - DNA, 25 bp, Homo sapien
cagtaagatactccaaataaagaga

SEQ ID NO: 3850639 - DNA, 25 bp, Homo sapien
tttctctcgaggtcgcttacataac

SEQ ID NO: 3850640 - DNA, 25 bp, Homo sapien
cacccaaatgagaacgagtacttgg

SEQ ID NO: 3850641 - DNA, 25 bp, Homo sapien
ctgcgtggaaacacagtgcagtagc

SEQ ID NO: 3850642 - DNA, 25 bp, Homo sapien
agaacgagtacttggcttagggcac

SEQ ID NO: 3850643 - DNA, 25 bp, Homo sapien
acagtgcagtagcttccaacagtgc

SEQ ID NO: 3850644 - DNA, 25 bp, Homo sapien
ctctgcctcttggttcaaaagattc

SEQ ID NO: 3850645 - DNA, 25 bp, Homo sapien
ggtctccaactacctcaggttatct

SEQ ID NO: 3850646 - DNA, 25 bp, Homo sapien
gtacccagcctgcattttaataaaa

SEQ ID NO: 3850647 - DNA, 25 bp, Homo sapien
ctgtacccagcctgcattttaataa

SEQ ID NO: 3850648 - DNA, 25 bp, Homo sapien
gacctcgtgattcaccgcctccgcc

SEQ ID NO: 3850649 - DNA, 25 bp, Homo sapien
tgcagtggtgcgatgggatttcacc

SEQ ID NO: 3850650 - DNA, 25 bp, Homo sapien
gtgcagtggtgcgatgggatttcac

SEQ ID NO: 3850651 - DNA, 25 bp, Homo sapien
tcgtgattcaccgcctccgccttcc

SEQ ID NO: 3850652 - DNA, 25 bp, Homo sapien
cagagtagcatggacaataggtgca

SEQ ID NO: 3850653 - DNA, 25 bp, Homo sapien
ccagagtagcatggacaataggtgc

SEQ ID NO: 3850654 - DNA, 25 bp, Homo sapien
agtagcatggacaataggtgcatgc

SEQ ID NO: 3850655 - DNA, 25 bp, Homo sapien
gagtagcatggacaataggtgcatg

SEQ ID NO: 3850656 - DNA, 25 bp, Homo sapien
ctcttgaggataaaaattaaatata

SEQ ID NO: 3850657 - DNA, 25 bp, Homo sapien
cttgaggataaaaattaaatataat

SEQ ID NO: 3850658 - DNA, 25 bp, Homo sapien
tcttgaggataaaaattaaatataa

SEQ ID NO: 3850659 - DNA, 25 bp, Homo sapien
cattaaatcaactcaaccataaaag

SEQ ID NO: 3850660 - DNA, 25 bp, Homo sapien
caactcaaccataaaagcaatgctt

SEQ ID NO: 3850661 - DNA, 25 bp, Homo sapien
aaatgttaatactcataaaaatcac

SEQ ID NO: 3850662 - DNA, 25 bp, Homo sapien
aatgttaatactcataaaaatcaca

SEQ ID NO: 3850663 - DNA, 25 bp, Homo sapien
caaaagctagtaatatgcctcttcc

SEQ ID NO: 3850664 - DNA, 25 bp, Homo sapien
ggtcaaaagctagtaatatgcctct

SEQ ID NO: 3850665 - DNA, 25 bp, Homo sapien
agctagtaatatgcctcttccagtt

SEQ ID NO: 3850666 - DNA, 25 bp, Homo sapien
tttggtcaaaagctagtaatatgcc

SEQ ID NO: 3850667 - DNA, 25 bp, Homo sapien
cagtaaactgtcacatctaggtcct

SEQ ID NO: 3850668 - DNA, 25 bp, Homo sapien
cgtaattatgcgtatctcacatcct

SEQ ID NO: 3850669 - DNA, 25 bp, Homo sapien
ggtcaatctttccaaggcctagttc

SEQ ID NO: 3850670 - DNA, 25 bp, Homo sapien
tgaactccaactgatcaacttatgg

SEQ ID NO: 3850671 - DNA, 25 bp, Homo sapien
taatattgagatcacgaacagcagc

SEQ ID NO: 3850672 - DNA, 25 bp, Homo sapien
ttccacaaaaggcatatcatcacag

SEQ ID NO: 3850673 - DNA, 25 bp, Homo sapien
gcactattaactcatgcctaaatga

SEQ ID NO: 3850674 - DNA, 25 bp, Homo sapien
atgcctggctatcttgttgattcat

SEQ ID NO: 3850675 - DNA, 25 bp, Homo sapien
tgacacgctgtaacaccctttttgg

SEQ ID NO: 3850676 - DNA, 25 bp, Homo sapien
gccacactgcaggtgacgagaaaga

SEQ ID NO: 3850677 - DNA, 25 bp, Homo sapien
tgtaacacaaatgggctgaaactgc

SEQ ID NO: 3850678 - DNA, 25 bp, Homo sapien
ggtggtaacatgctcccagattgtg

SEQ ID NO: 3850679 - DNA, 25 bp, Homo sapien
gctcacctacggcacaaacaatagc

SEQ ID NO: 3850680 - DNA, 25 bp, Homo sapien
attatagtttctcagcaagaccatt

SEQ ID NO: 3850681 - DNA, 25 bp, Homo sapien
tttcaaatgccctacaaataatgtc

SEQ ID NO: 3850682 - DNA, 25 bp, Homo sapien
ataatgtcaactttgatactgctgc

SEQ ID NO: 3850683 - DNA, 25 bp, Homo sapien
gatcaggtctttgaattatgtcact

SEQ ID NO: 3850684 - DNA, 25 bp, Homo sapien
ccacactacttgaatgctgactcca

SEQ ID NO: 3850685 - DNA, 25 bp, Homo sapien
gtatacagcattaaacaaccacact

SEQ ID NO: 3850686 - DNA, 25 bp, Homo sapien
ccttacaagtggaatgtctgagttg

SEQ ID NO: 3850687 - DNA, 25 bp, Homo sapien
ctactgtgcccggtagagaccccat

SEQ ID NO: 3850688 - DNA, 25 bp, Homo sapien
aagacttagtcattagtttatcacg

SEQ ID NO: 3850689 - DNA, 25 bp, Homo sapien
gacttagtcattagtttatcacgtt

SEQ ID NO: 3850690 - DNA, 25 bp, Homo sapien
aaaagacttagtcattagtttatca

SEQ ID NO: 3850691 - DNA, 25 bp, Homo sapien
taagtctggtcaatcatatccctcc

SEQ ID NO: 3850692 - DNA, 25 bp, Homo sapien
ttaagagttcccactactgagcctg

SEQ ID NO: 3850693 - DNA, 25 bp, Homo sapien
ctttctgaaagggatattgctatgc

SEQ ID NO: 3850694 - DNA, 25 bp, Homo sapien
aggtttataggtagctttactgcca

SEQ ID NO: 3850695 - DNA, 25 bp, Homo sapien
taaccagtctaggagatgatatctc

SEQ ID NO: 3850696 - DNA, 25 bp, Homo sapien
gaaatggtaccaccaggtaagactg

SEQ ID NO: 3850697 - DNA, 25 bp, Homo sapien
gaattcttgcagacagatccttacc

SEQ ID NO: 3850698 - DNA, 25 bp, Homo sapien
tgaattccagcctgacagagaagct

SEQ ID NO: 3850699 - DNA, 25 bp, Homo sapien
caatggtccatcttcagaatagtaa

SEQ ID NO: 3850700 - DNA, 25 bp, Homo sapien
gaaagggcctaacacaacagataaa

SEQ ID NO: 3850701 - DNA, 25 bp, Homo sapien
tggcaggcttggatacttttacaat

SEQ ID NO: 3850702 - DNA, 25 bp, Homo sapien
caagaaactactcagaatgtactcc

SEQ ID NO: 3850703 - DNA, 25 bp, Homo sapien
gaaaaccacactggagagatgtatg

SEQ ID NO: 3850704 - DNA, 25 bp, Homo sapien
aactcagtaattccggccgggtgca

SEQ ID NO: 3850705 - DNA, 25 bp, Homo sapien
ctttattggtcatcaaagaaggaca

SEQ ID NO: 3850706 - DNA, 25 bp, Homo sapien
aataaacccgacattaagatacgat

SEQ ID NO: 3850707 - DNA, 25 bp, Homo sapien
ctttatctctggcagtcttatattt

SEQ ID NO: 3850708 - DNA, 25 bp, Homo sapien
tactgctgaaaaagtgtgatgccaa

SEQ ID NO: 3850709 - DNA, 25 bp, Homo sapien
ccctcatctctgcaagtctttagca

SEQ ID NO: 3850710 - DNA, 25 bp, Homo sapien
gcttacattcaagagttactgctga

SEQ ID NO: 3850711 - DNA, 25 bp, Homo sapien
ggagggtgaggcagaagaatcactt

SEQ ID NO: 3850712 - DNA, 25 bp, Homo sapien
acgcacctggaatcccagcaactcg

SEQ ID NO: 3850713 - DNA, 25 bp, Homo sapien
gaacccaggaggctgaggttgcagt

SEQ ID NO: 3850714 - DNA, 25 bp, Homo sapien
acaaaaactaggcttggtggcacgc

SEQ ID NO: 3850715 - DNA, 25 bp, Homo sapien
gagatggctagtacaatggcctgcg

SEQ ID NO: 3850716 - DNA, 25 bp, Homo sapien
tgtgcattctctcaatcttcaaatg

SEQ ID NO: 3850717 - DNA, 25 bp, Homo sapien
gcgggggccatcttgtgcattctct

SEQ ID NO: 3850718 - DNA, 25 bp, Homo sapien
caaggcatacttagatgtgatataa

SEQ ID NO: 3850719 - DNA, 25 bp, Homo sapien
gaaagttcctgcagacggagatcag

SEQ ID NO: 3850720 - DNA, 25 bp, Homo sapien
ccaaaggatggacaatatctgccca

SEQ ID NO: 3850721 - DNA, 25 bp, Homo sapien
caaagttaggcccttgctccaagaa

SEQ ID NO: 3850722 - DNA, 25 bp, Homo sapien
tctgcccaaatggataagggtggtc

SEQ ID NO: 3850723 - DNA, 25 bp, Homo sapien
gacagagcgcaattccatctcaaaa

SEQ ID NO: 3850724 - DNA, 25 bp, Homo sapien
ccagctgggagacagagcgcaattc

SEQ ID NO: 3850725 - DNA, 25 bp, Homo sapien
agacagagcgcaattccatctcaaa

SEQ ID NO: 3850726 - DNA, 25 bp, Homo sapien
gctgggagacagagcgcaattccat

SEQ ID NO: 3850727 - DNA, 25 bp, Homo sapien
tataaagcctaacatgaaacactga

SEQ ID NO: 3850728 - DNA, 25 bp, Homo sapien
ctataaagcctaacatgaaacactg

SEQ ID NO: 3850729 - DNA, 25 bp, Homo sapien
gtaacaatttattacaatggcaaga

SEQ ID NO: 3850730 - DNA, 25 bp, Homo sapien
ggtaacaatttattacaatggcaag

SEQ ID NO: 3850731 - DNA, 25 bp, Homo sapien
cctataatctcagctaatcgggatg

SEQ ID NO: 3850732 - DNA, 25 bp, Homo sapien
aaaatcagcctagcgtggtggtggg

SEQ ID NO: 3850733 - DNA, 25 bp, Homo sapien
aatcagcctagcgtggtggtgggtg

SEQ ID NO: 3850734 - DNA, 25 bp, Homo sapien
tgaggcaggagaattgcttgaaccc

SEQ ID NO: 3850735 - DNA, 25 bp, Homo sapien
atacgtttctatgtaaacatgcttc

SEQ ID NO: 3850736 - DNA, 25 bp, Homo sapien
ggttttatctgctgaaattcaattt

SEQ ID NO: 3850737 - DNA, 25 bp, Homo sapien
aaaatacgtttctatgtaaacatgc

SEQ ID NO: 3850738 - DNA, 25 bp, Homo sapien
ataatatctggggcttaaaaatacg

SEQ ID NO: 3850739 - DNA, 25 bp, Homo sapien
taaatatgggaacaactttcatctg

SEQ ID NO: 3850740 - DNA, 25 bp, Homo sapien
tactggtgagcactttatcatggct

SEQ ID NO: 3850741 - DNA, 25 bp, Homo sapien
gctcccactgcaaattcattacgaa

SEQ ID NO: 3850742 - DNA, 25 bp, Homo sapien
aaaacactgtattcacgcactggaa

SEQ ID NO: 3850743 - DNA, 25 bp, Homo sapien
ctccatttgtttctagggtgatcca

SEQ ID NO: 3850744 - DNA, 25 bp, Homo sapien
tccactgatagtctacacaaaactg

SEQ ID NO: 3850745 - DNA, 25 bp, Homo sapien
cagaatgtcagagaagttcaacact

SEQ ID NO: 3850746 - DNA, 25 bp, Homo sapien
gggtgatccagacgttttaacagaa

SEQ ID NO: 3850747 - DNA, 25 bp, Homo sapien
agtttattcagcaaccctgagggaa

SEQ ID NO: 3850748 - DNA, 25 bp, Homo sapien
ttttactccttgacaactgttctaa

SEQ ID NO: 3850749 - DNA, 25 bp, Homo sapien
tacacatatataggttgggcatccc

SEQ ID NO: 3850750 - DNA, 25 bp, Homo sapien
ttgacaactgttctaattatccttc

SEQ ID NO: 3850751 - DNA, 25 bp, Homo sapien
gacaagcatcctacgatgtcataaa

SEQ ID NO: 3850752 - DNA, 25 bp, Homo sapien
acttctatatgacaagcatcctacg

SEQ ID NO: 3850753 - DNA, 25 bp, Homo sapien
tatatgacaagcatcctacgatgtc

SEQ ID NO: 3850754 - DNA, 25 bp, Homo sapien
gcacttattacttctatatgacaag

SEQ ID NO: 3850755 - DNA, 25 bp, Homo sapien
ttgctgattaaataccaactactgt

SEQ ID NO: 3850756 - DNA, 25 bp, Homo sapien
ctgattgatctattgtcatgataat

SEQ ID NO: 3850757 - DNA, 25 bp, Homo sapien
tattgtcatgataatcatactgcca

SEQ ID NO: 3850758 - DNA, 25 bp, Homo sapien
ttttattgctgattaaataccaact

SEQ ID NO: 3850759 - DNA, 25 bp, Homo sapien
ctggtgctgtatttatgactagata

SEQ ID NO: 3850760 - DNA, 25 bp, Homo sapien
tgtatttatgactagatatgtaagc

SEQ ID NO: 3850761 - DNA, 25 bp, Homo sapien
caactctggtgctgtatttatgact

SEQ ID NO: 3850762 - DNA, 25 bp, Homo sapien
tatgactagatatgtaagcaatcat

SEQ ID NO: 3850763 - DNA, 25 bp, Homo sapien
ataaaacaagtttgaggtctattat

SEQ ID NO: 3850764 - DNA, 25 bp, Homo sapien
tactataaccaatcataatctaacg

SEQ ID NO: 3850765 - DNA, 25 bp, Homo sapien
gcacccagcctataaccattaatac

SEQ ID NO: 3850766 - DNA, 25 bp, Homo sapien
cataatctaacgtgaataattccaa

SEQ ID NO: 3850767 - DNA, 25 bp, Homo sapien
tagtaatccacaacttcaacaaatt

SEQ ID NO: 3850768 - DNA, 25 bp, Homo sapien
gagttggtatttgtatagtaatcca

SEQ ID NO: 3850769 - DNA, 25 bp, Homo sapien
atagtaatccagcatttaactgcaa

SEQ ID NO: 3850770 - DNA, 25 bp, Homo sapien
ccagcatttaactgcaaaggttaag

SEQ ID NO: 3850771 - DNA, 25 bp, Homo sapien
tcatcatcaaagaaaggacctcctt

SEQ ID NO: 3850772 - DNA, 25 bp, Homo sapien
tcaaggctagctgatttaaagccca

SEQ ID NO: 3850773 - DNA, 25 bp, Homo sapien
tctggcattactcactaaaaagtgg

SEQ ID NO: 3850774 - DNA, 25 bp, Homo sapien
cacaatcgagctgaaatagcaggct

SEQ ID NO: 3850775 - DNA, 25 bp, Homo sapien
tttcaaatggtaaattcagatgtgt

SEQ ID NO: 3850776 - DNA, 25 bp, Homo sapien
gacctcatggtcacacaaatatatt

SEQ ID NO: 3850777 - DNA, 25 bp, Homo sapien
ttcaaatggtaaattcagatgtgtt

SEQ ID NO: 3850778 - DNA, 25 bp, Homo sapien
cttgacctcatggtcacacaaatat

SEQ ID NO: 3850779 - DNA, 25 bp, Homo sapien
tcatatttaaatggcttgctgttct

SEQ ID NO: 3850780 - DNA, 25 bp, Homo sapien
caaactatcatctattttaggatac

SEQ ID NO: 3850781 - DNA, 25 bp, Homo sapien
agatagatacggtggtgtgtacctg

SEQ ID NO: 3850782 - DNA, 25 bp, Homo sapien
gaacacatgtagacgtggcaactgt

SEQ ID NO: 3850783 - DNA, 25 bp, Homo sapien
gaaaggaacacctgttatactagaa

SEQ ID NO: 3850784 - DNA, 25 bp, Homo sapien
gggccatattcatggctaccaccat

SEQ ID NO: 3850785 - DNA, 25 bp, Homo sapien
ttgagcagccatactaatgaaagga

SEQ ID NO: 3850786 - DNA, 25 bp, Homo sapien
cattggtataactggcctgggccat

SEQ ID NO: 3850787 - DNA, 25 bp, Homo sapien
ttacagtaatgcgccaccattcttg

SEQ ID NO: 3850788 - DNA, 25 bp, Homo sapien
acagtaatgcgccaccattcttggc

SEQ ID NO: 3850789 - DNA, 25 bp, Homo sapien
tacagtaatgcgccaccattcttgg

SEQ ID NO: 3850790 - DNA, 25 bp, Homo sapien
gagattcaagagactagtcccagct

SEQ ID NO: 3850791 - DNA, 25 bp, Homo sapien
tcccagctgggtgtaaatctttaaa

SEQ ID NO: 3850792 - DNA, 25 bp, Homo sapien
cacactgcagcactctcagaggttg

SEQ ID NO: 3850793 - DNA, 25 bp, Homo sapien
cagaggttgagtggaccaatgagcc

SEQ ID NO: 3850794 - DNA, 25 bp, Homo sapien
tcctctgcaattcttactgatttgt

SEQ ID NO: 3850795 - DNA, 25 bp, Homo sapien
tcaattctgctgaggcggcatagca

SEQ ID NO: 3850796 - DNA, 25 bp, Homo sapien
ggcggcatagcaaattcctctgcaa

SEQ ID NO: 3850797 - DNA, 25 bp, Homo sapien
gcaaattcctctgcaattcttactg

SEQ ID NO: 3850798 - DNA, 25 bp, Homo sapien
cagctggtattatggaagtgcacca

SEQ ID NO: 3850799 - DNA, 25 bp, Homo sapien
cactatggcataacaagtgacactg

SEQ ID NO: 3850800 - DNA, 25 bp, Homo sapien
ccctggccggagtgtagtctcatga

SEQ ID NO: 3850801 - DNA, 25 bp, Homo sapien
cgttgtgacataacacactatggca

SEQ ID NO: 3850802 - DNA, 25 bp, Homo sapien
actcatttgaagaagactacctcca

SEQ ID NO: 3850803 - DNA, 25 bp, Homo sapien
gcctcaaacttgaaactagtgccag

SEQ ID NO: 3850804 - DNA, 25 bp, Homo sapien
tgaacacagtgagacatacagagta

SEQ ID NO: 3850805 - DNA, 25 bp, Homo sapien
gaaatatgccacaaagtctatgtcc

SEQ ID NO: 3850806 - DNA, 25 bp, Homo sapien
cacagtgtctaattcgtatgaggta

SEQ ID NO: 3850807 - DNA, 25 bp, Homo sapien
tggttgaaccagaattgcctatcta

SEQ ID NO: 3850808 - DNA, 25 bp, Homo sapien
tcaagcatcgtttcctaagactaga

SEQ ID NO: 3850809 - DNA, 25 bp, Homo sapien
tatgaggtacgtgacaaacattagc

SEQ ID NO: 3850810 - DNA, 25 bp, Homo sapien
tctgagatgggtaaagcactgtgct

SEQ ID NO: 3850811 - DNA, 25 bp, Homo sapien
cactagctgggttgcagcacattca

SEQ ID NO: 3850812 - DNA, 25 bp, Homo sapien
tgggccagcggaaaagtagtagaaa

SEQ ID NO: 3850813 - DNA, 25 bp, Homo sapien
aaacttgtgataactcccagtaggg

SEQ ID NO: 3850814 - DNA, 25 bp, Homo sapien
gtggtgctcccataaatgttttgct

SEQ ID NO: 3850815 - DNA, 25 bp, Homo sapien
atgtggtgctcccataaatgttttg

SEQ ID NO: 3850816 - DNA, 25 bp, Homo sapien
tgtggtgctcccataaatgttttgc

SEQ ID NO: 3850817 - DNA, 25 bp, Homo sapien
tggtgctcccataaatgttttgcta

SEQ ID NO: 3850818 - DNA, 25 bp, Homo sapien
taaaacttttgtgcagcacgggcca

SEQ ID NO: 3850819 - DNA, 25 bp, Homo sapien
tggaaaaagtggacatctacacgta

SEQ ID NO: 3850820 - DNA, 25 bp, Homo sapien
cgggccactgctaacacagtaaaaa

SEQ ID NO: 3850821 - DNA, 25 bp, Homo sapien
ggcataagcaacaagcggaaacaga

SEQ ID NO: 3850822 - DNA, 25 bp, Homo sapien
tgtgacagtaactcacattgacttg

SEQ ID NO: 3850823 - DNA, 25 bp, Homo sapien
taactcacattgacttggattcttg

SEQ ID NO: 3850824 - DNA, 25 bp, Homo sapien
ttaatgaaacaggaatagatcttac

SEQ ID NO: 3850825 - DNA, 25 bp, Homo sapien
tgcttaatgaaacaggaatagatct

SEQ ID NO: 3850826 - DNA, 25 bp, Homo sapien
ctagggtcattccttttggcccaga

SEQ ID NO: 3850827 - DNA, 25 bp, Homo sapien
atccctgagtctggctagggtcatt

SEQ ID NO: 3850828 - DNA, 25 bp, Homo sapien
cgtttatcccattcaagatcatcaa

SEQ ID NO: 3850829 - DNA, 25 bp, Homo sapien
ggcccagattaagtggtattccacc

SEQ ID NO: 3850830 - DNA, 25 bp, Homo sapien
acctgaagagtttccatttccactt

SEQ ID NO: 3850831 - DNA, 25 bp, Homo sapien
ttccatttccacttatttgaatcat

SEQ ID NO: 3850832 - DNA, 25 bp, Homo sapien
gtttccatttccacttatttgaatc

SEQ ID NO: 3850833 - DNA, 25 bp, Homo sapien
gagtttccatttccacttatttgaa

SEQ ID NO: 3850834 - DNA, 25 bp, Homo sapien
catcaaagatttccctagggcatgc

SEQ ID NO: 3850835 - DNA, 25 bp, Homo sapien
tagggcatgcaatattgttggccac

SEQ ID NO: 3850836 - DNA, 25 bp, Homo sapien
caaaaaacggtaacaatcatctgag

SEQ ID NO: 3850837 - DNA, 25 bp, Homo sapien
tttttgccgataaagtgccttgcct

SEQ ID NO: 3850838 - DNA, 25 bp, Homo sapien
ctgcgcctggccgaaaaaagaaaat

SEQ ID NO: 3850839 - DNA, 25 bp, Homo sapien
tagaattgtatcaaaccctcagacc

SEQ ID NO: 3850840 - DNA, 25 bp, Homo sapien
gaactttgggaagtgtacgaataca

SEQ ID NO: 3850841 - DNA, 25 bp, Homo sapien
aatggaagattctcccagatagacc

SEQ ID NO: 3850842 - DNA, 25 bp, Homo sapien
catttcatcccacagctaaagaaca

SEQ ID NO: 3850843 - DNA, 25 bp, Homo sapien
acatatcaagaaggtggccaggcgt

SEQ ID NO: 3850844 - DNA, 25 bp, Homo sapien
cctcatagaactgatcaattcagta

SEQ ID NO: 3850845 - DNA, 25 bp, Homo sapien
tgcaatagctgagaaacatatcaag

SEQ ID NO: 3850846 - DNA, 25 bp, Homo sapien
tataccaataatgcaatagctgaga

SEQ ID NO: 3850847 - DNA, 25 bp, Homo sapien
caattttgcaaacaccgtctcacag

SEQ ID NO: 3850848 - DNA, 25 bp, Homo sapien
agagcctaaggagccaaagcaatcc

SEQ ID NO: 3850849 - DNA, 25 bp, Homo sapien
cctacagtggccaaaataggatggt

SEQ ID NO: 3850850 - DNA, 25 bp, Homo sapien
gaatcacactacactacccgacttt

SEQ ID NO: 3850851 - DNA, 25 bp, Homo sapien
tctaagctggagttaagtgtcacaa

SEQ ID NO: 3850852 - DNA, 25 bp, Homo sapien
taagtgtcacaatcatgactgaaga

SEQ ID NO: 3850853 - DNA, 25 bp, Homo sapien
tctcactctcgttgtctaagctgga

SEQ ID NO: 3850854 - DNA, 25 bp, Homo sapien
tactggatccactatagtgcttaca

SEQ ID NO: 3850855 - DNA, 25 bp, Homo sapien
tgtttcatcaccataagagagtgaa

SEQ ID NO: 3850856 - DNA, 25 bp, Homo sapien
cttaatgtgtaactttggaatatca

SEQ ID NO: 3850857 - DNA, 25 bp, Homo sapien
taaccaatgtttcatcaccataaga

SEQ ID NO: 3850858 - DNA, 25 bp, Homo sapien
gtctggcttgatcttttaaccaatg

SEQ ID NO: 3850859 - DNA, 25 bp, Homo sapien
catttctctctaattccagttgaag

SEQ ID NO: 3850860 - DNA, 25 bp, Homo sapien
ctcgtttcctctcttgcggtagaac

SEQ ID NO: 3850861 - DNA, 25 bp, Homo sapien
tcgtttcctctcttgcggtagaact

SEQ ID NO: 3850862 - DNA, 25 bp, Homo sapien
tctctctaattccagttgaagatgc

SEQ ID NO: 3850863 - DNA, 25 bp, Homo sapien
aaaaaaaagtgaatgatgtacttca

SEQ ID NO: 3850864 - DNA, 25 bp, Homo sapien
gagaatcgctgtagctcaggaggca

SEQ ID NO: 3850865 - DNA, 25 bp, Homo sapien
gaggttgcagtgagctgaaattgca

SEQ ID NO: 3850866 - DNA, 25 bp, Homo sapien
tgaaattgcaccactgcactccagc

SEQ ID NO: 3850867 - DNA, 25 bp, Homo sapien
gagacacaagaaaagatcccacaag

SEQ ID NO: 3850868 - DNA, 25 bp, Homo sapien
tatatccagtcaggtctgagtcaag

SEQ ID NO: 3850869 - DNA, 25 bp, Homo sapien
gatatactccatcgatacaagagaa

SEQ ID NO: 3850870 - DNA, 25 bp, Homo sapien
gaacgggccatcaagtatatcctaa

SEQ ID NO: 3850871 - DNA, 25 bp, Homo sapien
cctaaatgccaggaagcactgtcga

SEQ ID NO: 3850872 - DNA, 25 bp, Homo sapien
gtgtgttgcatgactcagactccag

SEQ ID NO: 3850873 - DNA, 25 bp, Homo sapien
taacgacaagcagaccctaggtatt

SEQ ID NO: 3850874 - DNA, 25 bp, Homo sapien
gaatcaagtctaggctgctcagcca

SEQ ID NO: 3850875 - DNA, 25 bp, Homo sapien
caaaacaataccacaaagtagttgc

SEQ ID NO: 3850876 - DNA, 25 bp, Homo sapien
aaacaataccacaaagtagttgcta

SEQ ID NO: 3850877 - DNA, 25 bp, Homo sapien
acaataccacaaagtagttgctaaa

SEQ ID NO: 3850878 - DNA, 25 bp, Homo sapien
atcaaaacaataccacaaagtagtt

SEQ ID NO: 3850879 - DNA, 25 bp, Homo sapien
tctgctgttgagtatcaaaagaggt

SEQ ID NO: 3850880 - DNA, 25 bp, Homo sapien
gacagaactgtttggactttacctg

SEQ ID NO: 3850881 - DNA, 25 bp, Homo sapien
ggtcaaagacaagcaaccttcatta

SEQ ID NO: 3850882 - DNA, 25 bp, Homo sapien
gaatggtctcatctacaaaagcgta

SEQ ID NO: 3850883 - DNA, 25 bp, Homo sapien
gggactgcaggtgtccgccaacacg

SEQ ID NO: 3850884 - DNA, 25 bp, Homo sapien
tgggactgcaggtgtccgccaacac

SEQ ID NO: 3850885 - DNA, 25 bp, Homo sapien
gactgcaggtgtccgccaacacgcc

SEQ ID NO: 3850886 - DNA, 25 bp, Homo sapien
ctgcaggtgtccgccaacacgccca

SEQ ID NO: 3850887 - DNA, 25 bp, Homo sapien
gattcatgcagtatcctgcccttag

SEQ ID NO: 3850888 - DNA, 25 bp, Homo sapien
cctgtacgctcaatccatgaagttg

SEQ ID NO: 3850889 - DNA, 25 bp, Homo sapien
aagccaaccaaagacgatacttgcg

SEQ ID NO: 3850890 - DNA, 25 bp, Homo sapien
tgcccttagcgagaagttccagata

SEQ ID NO: 3850891 - DNA, 25 bp, Homo sapien
taacctcatggactgaagtgactga

SEQ ID NO: 3850892 - DNA, 25 bp, Homo sapien
gatcttactgtcagcattatcgtgg

SEQ ID NO: 3850893 - DNA, 25 bp, Homo sapien
catttgcgtaaagatactgacgatc

SEQ ID NO: 3850894 - DNA, 25 bp, Homo sapien
tgactgaaggtgtaaacctcctgca

SEQ ID NO: 3850895 - DNA, 25 bp, Homo sapien
caggacacaggcactaactacttaa

SEQ ID NO: 3850896 - DNA, 25 bp, Homo sapien
ttcaaatctgcaatgggacatcaag

SEQ ID NO: 3850897 - DNA, 25 bp, Homo sapien
aatgagtaagttagaaatcctcccg

SEQ ID NO: 3850898 - DNA, 25 bp, Homo sapien
gcttttaactgtggccgctcaccaa

SEQ ID NO: 3850899 - DNA, 25 bp, Homo sapien
tagaatattctaccggctcacagtg

SEQ ID NO: 3850900 - DNA, 25 bp, Homo sapien
aacagttgtacttttaacaggctga

SEQ ID NO: 3850901 - DNA, 25 bp, Homo sapien
gaaagattatagtaaacacagattg

SEQ ID NO: 3850902 - DNA, 25 bp, Homo sapien
gattgtaacagcaaatagtccaaga

SEQ ID NO: 3850903 - DNA, 25 bp, Homo sapien
cacaggccttgagagattatatgag

SEQ ID NO: 3850904 - DNA, 25 bp, Homo sapien
tgccacagtgaagtaaacaatgact

SEQ ID NO: 3850905 - DNA, 25 bp, Homo sapien
gtagtagccgaattcaacacaagtt

SEQ ID NO: 3850906 - DNA, 25 bp, Homo sapien
taacagtttcaaaggtgccacagtg

SEQ ID NO: 3850907 - DNA, 25 bp, Homo sapien
gcccatctctgaatgcatcttagtt

SEQ ID NO: 3850908 - DNA, 25 bp, Homo sapien
tgaacatagctggagatgagtgact

SEQ ID NO: 3850909 - DNA, 25 bp, Homo sapien
tcatgaccaatgtcaagtcagtcct

SEQ ID NO: 3850910 - DNA, 25 bp, Homo sapien
cattagagtaattcatttgcccatc

SEQ ID NO: 3850911 - DNA, 25 bp, Homo sapien
tattgaaccacctcagtttacacgg

SEQ ID NO: 3850912 - DNA, 25 bp, Homo sapien
tcagtaactattgcccactttggga

SEQ ID NO: 3850913 - DNA, 25 bp, Homo sapien
gaaagcaaccttaatctacagacag

SEQ ID NO: 3850914 - DNA, 25 bp, Homo sapien
gaacagtgcgtatgcagcaagggaa

SEQ ID NO: 3850915 - DNA, 25 bp, Homo sapien
tagtatcaggaactcagctgcggac

SEQ ID NO: 3850916 - DNA, 25 bp, Homo sapien
tagagtctctcagcccattataagg

SEQ ID NO: 3850917 - DNA, 25 bp, Homo sapien
caggttcaagtcataataggagtca

SEQ ID NO: 3850918 - DNA, 25 bp, Homo sapien
taatctgactgtttgctataggcac

SEQ ID NO: 3850919 - DNA, 25 bp, Homo sapien
caaacacaggacgtatatgaagaaa

SEQ ID NO: 3850920 - DNA, 25 bp, Homo sapien
catgaatagctggagggatactaca

SEQ ID NO: 3850921 - DNA, 25 bp, Homo sapien
gtctataaaactgtacacaattcca

SEQ ID NO: 3850922 - DNA, 25 bp, Homo sapien
tatagtgtctaagaataagcctaac

SEQ ID NO: 3850923 - DNA, 25 bp, Homo sapien
cctgtgaacagccataggactactg

SEQ ID NO: 3850924 - DNA, 25 bp, Homo sapien
cactctaccaactaggaaaagaagg

SEQ ID NO: 3850925 - DNA, 25 bp, Homo sapien
ggaatgcgaggatggttcaacacac

SEQ ID NO: 3850926 - DNA, 25 bp, Homo sapien
ttcctgctaattggaaggctgtggc

SEQ ID NO: 3850927 - DNA, 25 bp, Homo sapien
ggagacaaatgactggtacatatca

SEQ ID NO: 3850928 - DNA, 25 bp, Homo sapien
taatacgtaagaaaccaaggagaca

SEQ ID NO: 3850929 - DNA, 25 bp, Homo sapien
ctataaatcaacaatggacaatctg

SEQ ID NO: 3850930 - DNA, 25 bp, Homo sapien
tgtttgtggatcagaaaatccgata

SEQ ID NO: 3850931 - DNA, 25 bp, Homo sapien
taatcaaaaacgctgcaggactggg

SEQ ID NO: 3850932 - DNA, 25 bp, Homo sapien
tctgaaatccacatggaatcgcagg

SEQ ID NO: 3850933 - DNA, 25 bp, Homo sapien
cagctatactgtcggtcctctgtac

SEQ ID NO: 3850934 - DNA, 25 bp, Homo sapien
ggactgggataaagacagctatact

SEQ ID NO: 3850935 - DNA, 25 bp, Homo sapien
tacgtgcatccgttcacatctttat

SEQ ID NO: 3850936 - DNA, 25 bp, Homo sapien
ctacgtgcatccgttcacatcttta

SEQ ID NO: 3850937 - DNA, 25 bp, Homo sapien
cgtgcatccgttcacatctttattt

SEQ ID NO: 3850938 - DNA, 25 bp, Homo sapien
acgtgcatccgttcacatctttatt

SEQ ID NO: 3850939 - DNA, 25 bp, Homo sapien
tagaaagccaagcatctattaagga

SEQ ID NO: 3850940 - DNA, 25 bp, Homo sapien
ttagaaagccaagcatctattaagg

SEQ ID NO: 3850941 - DNA, 25 bp, Homo sapien
agccgcggtcgacccctccgggatg

SEQ ID NO: 3850942 - DNA, 25 bp, Homo sapien
tccgtggccgcccaggcgccacagc

SEQ ID NO: 3850943 - DNA, 25 bp, Homo sapien
cggactcgcggctccgcctttcggg

SEQ ID NO: 3850944 - DNA, 25 bp, Homo sapien
ggctatcccgggagtcctgctccga

SEQ ID NO: 3850945 - DNA, 25 bp, Homo sapien
acccaggcaagggatgcgggcaaac

SEQ ID NO: 3850946 - DNA, 25 bp, Homo sapien
aagccgctcggagagacgcagggac

SEQ ID NO: 3850947 - DNA, 25 bp, Homo sapien
gggcaaacgcgccaagggttcagca

SEQ ID NO: 3850948 - DNA, 25 bp, Homo sapien
agaggggcgtgaccgccagttggcc

SEQ ID NO: 3850949 - DNA, 25 bp, Homo sapien
cccgcgtctctaccgccatagctgt

SEQ ID NO: 3850950 - DNA, 25 bp, Homo sapien
tgtgtgacacggctcggatgacccc

SEQ ID NO: 3850951 - DNA, 25 bp, Homo sapien
cgccaggtccggattgcggctgtcc

SEQ ID NO: 3850952 - DNA, 25 bp, Homo sapien
gattgcggctgtccctgtgtgacac

SEQ ID NO: 3850953 - DNA, 25 bp, Homo sapien
gggaaccgatgaaacctcactccta

SEQ ID NO: 3850954 - DNA, 25 bp, Homo sapien
tgcgagggaaccgatgaaacctcac

SEQ ID NO: 3850955 - DNA, 25 bp, Homo sapien
cagtgcgagggaaccgatgaaacct

SEQ ID NO: 3850956 - DNA, 25 bp, Homo sapien
tccagtgcgagggaaccgatgaaac

SEQ ID NO: 3850957 - DNA, 25 bp, Homo sapien
cgggacacagcagcggacccgaaag

SEQ ID NO: 3850958 - DNA, 25 bp, Homo sapien
gcaaacactcctttggactcccaga

SEQ ID NO: 3850959 - DNA, 25 bp, Homo sapien
gactcgggacgaaccggccgctctg

SEQ ID NO: 3850960 - DNA, 25 bp, Homo sapien
tttggactcccagattcgcagcctt

SEQ ID NO: 3850961 - DNA, 25 bp, Homo sapien
tcatgacttcaagggaaaacgaggg

SEQ ID NO: 3850962 - DNA, 25 bp, Homo sapien
caccgcagacggaaagtagtgcccg

SEQ ID NO: 3850963 - DNA, 25 bp, Homo sapien
tgaattagcagtcccgcagtaacag

SEQ ID NO: 3850964 - DNA, 25 bp, Homo sapien
cacccgcggtttgatgttcagagca

SEQ ID NO: 3850965 - DNA, 25 bp, Homo sapien
aaatcagtgtagattaaggaaccag

SEQ ID NO: 3850966 - DNA, 25 bp, Homo sapien
aaggaaccagtaaagtgacttggtg

SEQ ID NO: 3850967 - DNA, 25 bp, Homo sapien
tagggagatcaacatccagatacca

SEQ ID NO: 3850968 - DNA, 25 bp, Homo sapien
caaaaatgcatatcggcaagttgag

SEQ ID NO: 3850969 - DNA, 25 bp, Homo sapien
gacctttatccttgagaagctcaca

SEQ ID NO: 3850970 - DNA, 25 bp, Homo sapien
taggacctttatccttgagaagctc

SEQ ID NO: 3850971 - DNA, 25 bp, Homo sapien
gagataggacctttatccttgagaa

SEQ ID NO: 3850972 - DNA, 25 bp, Homo sapien
cctttatccttgagaagctcacagt

SEQ ID NO: 3850973 - DNA, 25 bp, Homo sapien
aggaacttagaatctcggacataaa

SEQ ID NO: 3850974 - DNA, 25 bp, Homo sapien
ttctaaatctaactcaactaagagg

SEQ ID NO: 3850975 - DNA, 25 bp, Homo sapien
tagaatctcggacataaatgagagt

SEQ ID NO: 3850976 - DNA, 25 bp, Homo sapien
cctgttcttcctacagggttattca

SEQ ID NO: 3850977 - DNA, 25 bp, Homo sapien
caaagtatgctttcctgtcacgtgg

SEQ ID NO: 3850978 - DNA, 25 bp, Homo sapien
caagaacacacgtaattcagcaagg

SEQ ID NO: 3850979 - DNA, 25 bp, Homo sapien
agtaagagtcttgccagcgtgtccc

SEQ ID NO: 3850980 - DNA, 25 bp, Homo sapien
tgttacaagttaatagcagcagggt

SEQ ID NO: 3850981 - DNA, 25 bp, Homo sapien
gcttgtctcaaattctggcgttacg

SEQ ID NO: 3850982 - DNA, 25 bp, Homo sapien
taatgaatgctgatagaagttggaa

SEQ ID NO: 3850983 - DNA, 25 bp, Homo sapien
ccagtcagcctactctcaaattatt

SEQ ID NO: 3850984 - DNA, 25 bp, Homo sapien
tccaaattatgtagtccagtcagcc

SEQ ID NO: 3850985 - DNA, 25 bp, Homo sapien
agagcctgcctaagactaatactgg

SEQ ID NO: 3850986 - DNA, 25 bp, Homo sapien
taagagcattcgactactagagaag

SEQ ID NO: 3850987 - DNA, 25 bp, Homo sapien
tgaagttcaggtgcgcagataaggc

SEQ ID NO: 3850988 - DNA, 25 bp, Homo sapien
acaatagaggtctcctactactggg

SEQ ID NO: 3850989 - DNA, 25 bp, Homo sapien
gactggcaccctagaatggcagcaa

SEQ ID NO: 3850990 - DNA, 25 bp, Homo sapien
cctaaatacattcgatgggagcact

SEQ ID NO: 3850991 - DNA, 25 bp, Homo sapien
ttataaagccaacacaactccaggg

SEQ ID NO: 3850992 - DNA, 25 bp, Homo sapien
aaagcccatcttttgcaaccctgtg

SEQ ID NO: 3850993 - DNA, 25 bp, Homo sapien
taacacacataatatgatctctgcc

SEQ ID NO: 3850994 - DNA, 25 bp, Homo sapien
acacataatatgatctctgccttgt

SEQ ID NO: 3850995 - DNA, 25 bp, Homo sapien
gtcatcccccacaataacacacata

SEQ ID NO: 3850996 - DNA, 25 bp, Homo sapien
atcccccacaataacacacataata

SEQ ID NO: 3850997 - DNA, 25 bp, Homo sapien
gatattagcgtttgcctcagccaga

SEQ ID NO: 3850998 - DNA, 25 bp, Homo sapien
ggattccaaacataaccttcagatg

SEQ ID NO: 3850999 - DNA, 25 bp, Homo sapien
aaagtggaggcgcaagtagcaaact

SEQ ID NO: 3851000 - DNA, 25 bp, Homo sapien
tctttgcaaactgggagtaacgacc

SEQ ID NO: 3851001 - DNA, 25 bp, Homo sapien
ttgtgctcactgaaactagaaaagc

SEQ ID NO: 3851002 - DNA, 25 bp, Homo sapien
gtgctcactgaaactagaaaagctg

SEQ ID NO: 3851003 - DNA, 25 bp, Homo sapien
gctgcacatcagtaacccacttacc

SEQ ID NO: 3851004 - DNA, 25 bp, Homo sapien
acatcagtaacccacttaccactga

SEQ ID NO: 3851005 - DNA, 25 bp, Homo sapien
ccctccctctgaataccacactcac

SEQ ID NO: 3851006 - DNA, 25 bp, Homo sapien
tccctccctctgaataccacactca

SEQ ID NO: 3851007 - DNA, 25 bp, Homo sapien
tacgggcaagcctaataaactgaga

SEQ ID NO: 3851008 - DNA, 25 bp, Homo sapien
taaactgagattggctctcaccagc

SEQ ID NO: 3851009 - DNA, 25 bp, Homo sapien
tcaccagcacgagctgaaaaagcta

SEQ ID NO: 3851010 - DNA, 25 bp, Homo sapien
gctgctttttattcctacgggcaag

SEQ ID NO: 3851011 - DNA, 25 bp, Homo sapien
aagggtaacacaacatggcaggata

SEQ ID NO: 3851012 - DNA, 25 bp, Homo sapien
tttttggcacttaccatctttggtg

SEQ ID NO: 3851013 - DNA, 25 bp, Homo sapien
caaatcggatttgcaacaaattccc

SEQ ID NO: 3851014 - DNA, 25 bp, Homo sapien
tgaatatggtgtggctaagtgtaga

SEQ ID NO: 3851015 - DNA, 25 bp, Homo sapien
tgggatagctgccaagccatttgca

SEQ ID NO: 3851016 - DNA, 25 bp, Homo sapien
cctaggaaacaccactctgggcact

SEQ ID NO: 3851017 - DNA, 25 bp, Homo sapien
gaaactggatgcctacctttaccat

SEQ ID NO: 3851018 - DNA, 25 bp, Homo sapien
gcaccttgggaaagactctatgact

SEQ ID NO: 3851019 - DNA, 25 bp, Homo sapien
acaaacatgaaaaaagaggctcaac

SEQ ID NO: 3851020 - DNA, 25 bp, Homo sapien
aagactctagctcaaaagataaaat

SEQ ID NO: 3851021 - DNA, 25 bp, Homo sapien
gggcaagactctagctcaaaagata

SEQ ID NO: 3851022 - DNA, 25 bp, Homo sapien
tgggtggcagggcaagactctagct

SEQ ID NO: 3851023 - DNA, 25 bp, Homo sapien
cacaactggaagtctagagggaggt

SEQ ID NO: 3851024 - DNA, 25 bp, Homo sapien
ggagaagcattctataggcctagga

SEQ ID NO: 3851025 - DNA, 25 bp, Homo sapien
taggattaggtctcagtcctctggt

SEQ ID NO: 3851026 - DNA, 25 bp, Homo sapien
tggtgagcccgtgcctctagactgt

SEQ ID NO: 3851027 - DNA, 25 bp, Homo sapien
gtgacttcacttatctgaggaatct

SEQ ID NO: 3851028 - DNA, 25 bp, Homo sapien
catgctacactggaaattggaagtc

SEQ ID NO: 3851029 - DNA, 25 bp, Homo sapien
caagtggcaattactgagctcctta

SEQ ID NO: 3851030 - DNA, 25 bp, Homo sapien
tgaagatatatacccaaaaatcaga

SEQ ID NO: 3851031 - DNA, 25 bp, Homo sapien
atcctcccgaggatgcgacggcagt

SEQ ID NO: 3851032 - DNA, 25 bp, Homo sapien
tgtggcgctgctcggctgcgtgcgg

SEQ ID NO: 3851033 - DNA, 25 bp, Homo sapien
cttggtccacgtcgctgcggagctc

SEQ ID NO: 3851034 - DNA, 25 bp, Homo sapien
ggccgagggcctagctgcggcgact

SEQ ID NO: 3851035 - DNA, 25 bp, Homo sapien
taataacgctgactaggtttcccag

SEQ ID NO: 3851036 - DNA, 25 bp, Homo sapien
tttaaggagaagctgcaagaaagcc

SEQ ID NO: 3851037 - DNA, 25 bp, Homo sapien
ggcatctgttcgcaaggtcactgta

SEQ ID NO: 3851038 - DNA, 25 bp, Homo sapien
cataggtggtttcgtgcagatgagc

SEQ ID NO: 3851039 - DNA, 25 bp, Homo sapien
gagtaaagggtatcatggacatgca

SEQ ID NO: 3851040 - DNA, 25 bp, Homo sapien
tttgggaattatagccagccttgga

SEQ ID NO: 3851041 - DNA, 25 bp, Homo sapien
gagaaggcacagaactacgaagatg

SEQ ID NO: 3851042 - DNA, 25 bp, Homo sapien
gatgaacactggtcacttcctcgta

SEQ ID NO: 3851043 - DNA, 25 bp, Homo sapien
actgttacactgtccttgtctttcc

SEQ ID NO: 3851044 - DNA, 25 bp, Homo sapien
tttcctactcaaagacagtatcatc

SEQ ID NO: 3851045 - DNA, 25 bp, Homo sapien
gagtcaagaactttatctgtgggag

SEQ ID NO: 3851046 - DNA, 25 bp, Homo sapien
tatgacctggtactagacttcttaa

SEQ ID NO: 3851047 - DNA, 25 bp, Homo sapien
gagtaactgggtctacaggcccgtg

SEQ ID NO: 3851048 - DNA, 25 bp, Homo sapien
aactgggtctacaggcccgtgctac

SEQ ID NO: 3851049 - DNA, 25 bp, Homo sapien
agggtttaaccatgttgcccaggat

SEQ ID NO: 3851050 - DNA, 25 bp, Homo sapien
cagggtttaaccatgttgcccagga

SEQ ID NO: 3851051 - DNA, 25 bp, Homo sapien
tctcaaagaggtagtacaagtcctg

SEQ ID NO: 3851052 - DNA, 25 bp, Homo sapien
cagcacatggagcacgggattagat

SEQ ID NO: 3851053 - DNA, 25 bp, Homo sapien
taaatgtatccatagaccacagtgc

SEQ ID NO: 3851054 - DNA, 25 bp, Homo sapien
ttatctctctaaagtctggtcccag

SEQ ID NO: 3851055 - DNA, 25 bp, Homo sapien
taaagttagacgtctgtctgcctca

SEQ ID NO: 3851056 - DNA, 25 bp, Homo sapien
cacttaggattacagatcacagagc

SEQ ID NO: 3851057 - DNA, 25 bp, Homo sapien
cacataatgcgtgttaaggtctttc

SEQ ID NO: 3851058 - DNA, 25 bp, Homo sapien
caatttggatgggttagctgtctca

SEQ ID NO: 3851059 - DNA, 25 bp, Homo sapien
tcccagaatgacgtcgccattttat

SEQ ID NO: 3851060 - DNA, 25 bp, Homo sapien
ctctcccagaatgacgtcgccattt

SEQ ID NO: 3851061 - DNA, 25 bp, Homo sapien
cccagaatgacgtcgccattttatc

SEQ ID NO: 3851062 - DNA, 25 bp, Homo sapien
tctcccagaatgacgtcgccatttt

SEQ ID NO: 3851063 - DNA, 25 bp, Homo sapien
ccaaaatattcaagagccatcggat

SEQ ID NO: 3851064 - DNA, 25 bp, Homo sapien
aaatattcaagagccatcggattcc

SEQ ID NO: 3851065 - DNA, 25 bp, Homo sapien
aaaatattcaagagccatcggattc

SEQ ID NO: 3851066 - DNA, 25 bp, Homo sapien
caaaatattcaagagccatcggatt

SEQ ID NO: 3851067 - DNA, 25 bp, Homo sapien
tggggacgctgtactgaacccgaga

SEQ ID NO: 3851068 - DNA, 25 bp, Homo sapien
gggacgctgtactgaacccgagaga

SEQ ID NO: 3851069 - DNA, 25 bp, Homo sapien
aactggggacgctgtactgaacccg

SEQ ID NO: 3851070 - DNA, 25 bp, Homo sapien
atggaaactggggacgctgtactga

SEQ ID NO: 3851071 - DNA, 25 bp, Homo sapien
gatgaagtaccgatctcttctcctt

SEQ ID NO: 3851072 - DNA, 25 bp, Homo sapien
ttcctgggtcacatgtagatgaagt

SEQ ID NO: 3851073 - DNA, 25 bp, Homo sapien
tgttctgctcggacctgttcctgag

SEQ ID NO: 3851074 - DNA, 25 bp, Homo sapien
gacagtcattccctccatagggatg

SEQ ID NO: 3851075 - DNA, 25 bp, Homo sapien
tcccagcctttcatgaatccaagaa

SEQ ID NO: 3851076 - DNA, 25 bp, Homo sapien
ttctgagaagttgtctgggaaagcc

SEQ ID NO: 3851077 - DNA, 25 bp, Homo sapien
ccatgtggagagaggatcagaacaa

SEQ ID NO: 3851078 - DNA, 25 bp, Homo sapien
gggaaggactctacctccttattgc

SEQ ID NO: 3851079 - DNA, 25 bp, Homo sapien
ccaaggagttggttgtccgagagtc

SEQ ID NO: 3851080 - DNA, 25 bp, Homo sapien
actgccttcagggtaaagtccaagg

SEQ ID NO: 3851081 - DNA, 25 bp, Homo sapien
tcagtgtctggaagacttttgcacc

SEQ ID NO: 3851082 - DNA, 25 bp, Homo sapien
tgtaaactccaactgtcctggatga

SEQ ID NO: 3851083 - DNA, 25 bp, Homo sapien
tcatcccaggacatctaaaggcagg

SEQ ID NO: 3851084 - DNA, 25 bp, Homo sapien
tcctgtgagtactaatgaaaggccc

SEQ ID NO: 3851085 - DNA, 25 bp, Homo sapien
aggcagatgccaaagtacacacggg

SEQ ID NO: 3851086 - DNA, 25 bp, Homo sapien
gaacaaaggtgtgatgtccagaaag

SEQ ID NO: 3851087 - DNA, 25 bp, Homo sapien
agtagctttattgattggaacaggc

SEQ ID NO: 3851088 - DNA, 25 bp, Homo sapien
tccaaataaaacatcactagtgaca

SEQ ID NO: 3851089 - DNA, 25 bp, Homo sapien
cctcaagtgtggataaagcatcttc

SEQ ID NO: 3851090 - DNA, 25 bp, Homo sapien
caaaatacagtatcaggaaacccac

SEQ ID NO: 3851091 - DNA, 25 bp, Homo sapien
gaaactctggtctatgctcatcttg

SEQ ID NO: 3851092 - DNA, 25 bp, Homo sapien
agctttgcttgtgccgcgttctgca

SEQ ID NO: 3851093 - DNA, 25 bp, Homo sapien
catgttggcgatattcgaatgcttc

SEQ ID NO: 3851094 - DNA, 25 bp, Homo sapien
atgcttcttcgccagctgcactgtg

SEQ ID NO: 3851095 - DNA, 25 bp, Homo sapien
cagggtctgttccagatgatgcatg

SEQ ID NO: 3851096 - DNA, 25 bp, Homo sapien
tcaggcagtagttcttttggtcagg

SEQ ID NO: 3851097 - DNA, 25 bp, Homo sapien
cccttggtcaatgggaaaacactgt

SEQ ID NO: 3851098 - DNA, 25 bp, Homo sapien
tcccaccctgtaattgcatgctgct

SEQ ID NO: 3851099 - DNA, 25 bp, Homo sapien
gtttgggaactggtgtggacttctc

SEQ ID NO: 3851100 - DNA, 25 bp, Homo sapien
tagtttgggaactggtgtggacttc

SEQ ID NO: 3851101 - DNA, 25 bp, Homo sapien
taaggcatttgcctgctcatatagc

SEQ ID NO: 3851102 - DNA, 25 bp, Homo sapien
tatagctcaactgcctttaacactg

SEQ ID NO: 3851103 - DNA, 25 bp, Homo sapien
gggcggggcaccttgactgagggtc

SEQ ID NO: 3851104 - DNA, 25 bp, Homo sapien
gtgaggaaggagtcctaacgggctc

SEQ ID NO: 3851105 - DNA, 25 bp, Homo sapien
ctatgagtcactctactcaaaatgt

SEQ ID NO: 3851106 - DNA, 25 bp, Homo sapien
aaggagtcctaacgggctctttgag

SEQ ID NO: 3851107 - DNA, 25 bp, Homo sapien
gccaatgccgtgtttttgaagattc

SEQ ID NO: 3851108 - DNA, 25 bp, Homo sapien
caatgccgtgtttttgaagattctc

SEQ ID NO: 3851109 - DNA, 25 bp, Homo sapien
aatgccgtgtttttgaagattctca

SEQ ID NO: 3851110 - DNA, 25 bp, Homo sapien
ccaatgccgtgtttttgaagattct

SEQ ID NO: 3851111 - DNA, 25 bp, Homo sapien
aaccgtggcctcttctctggacaga

SEQ ID NO: 3851112 - DNA, 25 bp, Homo sapien
gacagactccctttgaggtatgggc

SEQ ID NO: 3851113 - DNA, 25 bp, Homo sapien
cctgtcttccctatcttctttacgt

SEQ ID NO: 3851114 - DNA, 25 bp, Homo sapien
gaggcatattcacaagcaggagttc

SEQ ID NO: 3851115 - DNA, 25 bp, Homo sapien
tagggtctctactcctggccccatt

SEQ ID NO: 3851116 - DNA, 25 bp, Homo sapien
ttgcgttataatcttgaattcagac

SEQ ID NO: 3851117 - DNA, 25 bp, Homo sapien
tcagacacctttagggtctctactc

SEQ ID NO: 3851118 - DNA, 25 bp, Homo sapien
tgcgttataatcttgaattcagaca

SEQ ID NO: 3851119 - DNA, 25 bp, Homo sapien
tcgggtttccggcaactttatgcag

SEQ ID NO: 3851120 - DNA, 25 bp, Homo sapien
caacttttgacccatggtgctggaa

SEQ ID NO: 3851121 - DNA, 25 bp, Homo sapien
tagcactggctactttcgggtttcc

SEQ ID NO: 3851122 - DNA, 25 bp, Homo sapien
tggtggtggccaacttgatgcgaca

SEQ ID NO: 3851123 - DNA, 25 bp, Homo sapien
ttctgccatcttcggttccatatca

SEQ ID NO: 3851124 - DNA, 25 bp, Homo sapien
ttggcattctgccatcttcggttcc

SEQ ID NO: 3851125 - DNA, 25 bp, Homo sapien
tgtcagcagttgatctacaggcctg

SEQ ID NO: 3851126 - DNA, 25 bp, Homo sapien
cagttgatctacaggcctgcgcttg

SEQ ID NO: 3851127 - DNA, 25 bp, Homo sapien
ttctaggtccttgctggaatacaca

SEQ ID NO: 3851128 - DNA, 25 bp, Homo sapien
caaatttccaccagaattctaggtc

SEQ ID NO: 3851129 - DNA, 25 bp, Homo sapien
ccttgctggaatacacaagtggcat

SEQ ID NO: 3851130 - DNA, 25 bp, Homo sapien
tccaccagaattctaggtccttgct

SEQ ID NO: 3851131 - DNA, 25 bp, Homo sapien
ggatcaatcaactctgccaaggggt

SEQ ID NO: 3851132 - DNA, 25 bp, Homo sapien
ttctcagaaagggactgactttcca

SEQ ID NO: 3851133 - DNA, 25 bp, Homo sapien
tggggtgcctactctggatcaatca

SEQ ID NO: 3851134 - DNA, 25 bp, Homo sapien
cactttcagttagagaagtcagggc

SEQ ID NO: 3851135 - DNA, 25 bp, Homo sapien
ttaatatctgcttggtgacgacgtt

SEQ ID NO: 3851136 - DNA, 25 bp, Homo sapien
gagtgacacatctatagtatctgaa

SEQ ID NO: 3851137 - DNA, 25 bp, Homo sapien
acgacgttgtgcctgatgggcagtt

SEQ ID NO: 3851138 - DNA, 25 bp, Homo sapien
ggtctggtcgtcatctgagagtgac

SEQ ID NO: 3851139 - DNA, 25 bp, Homo sapien
ggtggtgtattgtacttggcagcct

SEQ ID NO: 3851140 - DNA, 25 bp, Homo sapien
ggcagcctcatcagaaccatgtgga

SEQ ID NO: 3851141 - DNA, 25 bp, Homo sapien
caaaggcagatggggttgctatctg

SEQ ID NO: 3851142 - DNA, 25 bp, Homo sapien
gaagagagttttccaaaggcagatg

SEQ ID NO: 3851143 - DNA, 25 bp, Homo sapien
ttggctgcacactgggattctgcat

SEQ ID NO: 3851144 - DNA, 25 bp, Homo sapien
aacagaacacggtctgctcgagtgc

SEQ ID NO: 3851145 - DNA, 25 bp, Homo sapien
tagaagtacttggtagcgacttggc

SEQ ID NO: 3851146 - DNA, 25 bp, Homo sapien
cattgtcaggaatgggtaacagcca

SEQ ID NO: 3851147 - DNA, 25 bp, Homo sapien
tgccaagaccattgtcgaggaactt

SEQ ID NO: 3851148 - DNA, 25 bp, Homo sapien
tcattgccaagaccattgtcgagga

SEQ ID NO: 3851149 - DNA, 25 bp, Homo sapien
gaccattgtcgaggaactttctctc

SEQ ID NO: 3851150 - DNA, 25 bp, Homo sapien
gtcgaggaactttctctcaacattt

SEQ ID NO: 3851151 - DNA, 25 bp, Homo sapien
tcttttggctggagaatgtagttca

SEQ ID NO: 3851152 - DNA, 25 bp, Homo sapien
tattaggtccacctggcctatagtg

SEQ ID NO: 3851153 - DNA, 25 bp, Homo sapien
taatcttgctctcccttggttatca

SEQ ID NO: 3851154 - DNA, 25 bp, Homo sapien
gcctatagtgctattcaagtcttct

SEQ ID NO: 3851155 - DNA, 25 bp, Homo sapien
ccacattttcgggagagagacattg

SEQ ID NO: 3851156 - DNA, 25 bp, Homo sapien
ccttccgcttcaatccagtgtgtca

SEQ ID NO: 3851157 - DNA, 25 bp, Homo sapien
taagctcccacatccaaattcaact

SEQ ID NO: 3851158 - DNA, 25 bp, Homo sapien
gattatcccaggtgctccttccgct

SEQ ID NO: 3851159 - DNA, 25 bp, Homo sapien
tgcgtttctcagaccattgaggtga

SEQ ID NO: 3851160 - DNA, 25 bp, Homo sapien
gcgtttctcagaccattgaggtgaa

SEQ ID NO: 3851161 - DNA, 25 bp, Homo sapien
cgtttctcagaccattgaggtgaag

SEQ ID NO: 3851162 - DNA, 25 bp, Homo sapien
ctgcgtttctcagaccattgaggtg

SEQ ID NO: 3851163 - DNA, 25 bp, Homo sapien
ggaaacacccattggggtgctccat

SEQ ID NO: 3851164 - DNA, 25 bp, Homo sapien
gggaaacacccattggggtgctcca

SEQ ID NO: 3851165 - DNA, 25 bp, Homo sapien
gagggaaacacccattggggtgctc

SEQ ID NO: 3851166 - DNA, 25 bp, Homo sapien
tatttttatgtacagaaaactcaac

SEQ ID NO: 3851167 - DNA, 25 bp, Homo sapien
tttttatgtacagaaaactcaacag

SEQ ID NO: 3851168 - DNA, 25 bp, Homo sapien
tttatgtacagaaaactcaacagtg

SEQ ID NO: 3851169 - DNA, 25 bp, Homo sapien
tatgtacagaaaactcaacagtgta

SEQ ID NO: 3851170 - DNA, 25 bp, Homo sapien
catcgtatctgtatctgtcgttgta

SEQ ID NO: 3851171 - DNA, 25 bp, Homo sapien
tcatcgtatctgtatctgtcgttgt

SEQ ID NO: 3851172 - DNA, 25 bp, Homo sapien
tctcatcgtatctgtatctgtcgtt

SEQ ID NO: 3851173 - DNA, 25 bp, Homo sapien
ctcatcgtatctgtatctgtcgttg

SEQ ID NO: 3851174 - DNA, 25 bp, Homo sapien
aaggtggcgatggtgttaactcctg

SEQ ID NO: 3851175 - DNA, 25 bp, Homo sapien
ggacaggtggtctcttggtgggggc

SEQ ID NO: 3851176 - DNA, 25 bp, Homo sapien
tggtgggggcgtcccctttgccagc

SEQ ID NO: 3851177 - DNA, 25 bp, Homo sapien
aggtggcgatggtgttaactcctgc

SEQ ID NO: 3851178 - DNA, 25 bp, Homo sapien
ttctcttgctttgtctctggtctgt

SEQ ID NO: 3851179 - DNA, 25 bp, Homo sapien
tcttctcttgctttgtctctggtct

SEQ ID NO: 3851180 - DNA, 25 bp, Homo sapien
ctcggcctgggccaacagccttctt

SEQ ID NO: 3851181 - DNA, 25 bp, Homo sapien
ctcttgctttgtctctggtctgtac

SEQ ID NO: 3851182 - DNA, 25 bp, Homo sapien
tgggccagcttaagcagctgagtag

SEQ ID NO: 3851183 - DNA, 25 bp, Homo sapien
tgtgggccagcttaagcagctgagt

SEQ ID NO: 3851184 - DNA, 25 bp, Homo sapien
ttgtgggccagcttaagcagctgag

SEQ ID NO: 3851185 - DNA, 25 bp, Homo sapien
gtgggccagcttaagcagctgagta

SEQ ID NO: 3851186 - DNA, 25 bp, Homo sapien
gtttggcggtccagggcctgggtga

SEQ ID NO: 3851187 - DNA, 25 bp, Homo sapien
ctgtttggcggtccagggcctgggt

SEQ ID NO: 3851188 - DNA, 25 bp, Homo sapien
tgtttggcggtccagggcctgggtg

SEQ ID NO: 3851189 - DNA, 25 bp, Homo sapien
tttggcggtccagggcctgggtgaa

SEQ ID NO: 3851190 - DNA, 25 bp, Homo sapien
atagaggatggctctctgccgctgc

SEQ ID NO: 3851191 - DNA, 25 bp, Homo sapien
tttcagccccttatagaggatggct

SEQ ID NO: 3851192 - DNA, 25 bp, Homo sapien
ttcagccccttatagaggatggctc

SEQ ID NO: 3851193 - DNA, 25 bp, Homo sapien
gaggatggctctctgccgctgcaac

SEQ ID NO: 3851194 - DNA, 25 bp, Homo sapien
tcacaaagcgggtgaagtgtctttt

SEQ ID NO: 3851195 - DNA, 25 bp, Homo sapien
acaaagcgggtgaagtgtcttttgg

SEQ ID NO: 3851196 - DNA, 25 bp, Homo sapien
ttcacaaagcgggtgaagtgtcttt

SEQ ID NO: 3851197 - DNA, 25 bp, Homo sapien
catttcacaaagcgggtgaagtgtc

SEQ ID NO: 3851198 - DNA, 25 bp, Homo sapien
aggagagtgggcttgccatttttga

SEQ ID NO: 3851199 - DNA, 25 bp, Homo sapien
ggcttgtgaatgtggtggcaggtat

SEQ ID NO: 3851200 - DNA, 25 bp, Homo sapien
tttgaaagctggtgatagcgggctt

SEQ ID NO: 3851201 - DNA, 25 bp, Homo sapien
ggagagtgggcttgccatttttgaa

SEQ ID NO: 3851202 - DNA, 25 bp, Homo sapien
gctcccatgcaggaattgtgcctaa

SEQ ID NO: 3851203 - DNA, 25 bp, Homo sapien
aaatcatcagactattgtcaaagcc

SEQ ID NO: 3851204 - DNA, 25 bp, Homo sapien
ccctttgtgttctgcgatggccatc

SEQ ID NO: 3851205 - DNA, 25 bp, Homo sapien
ggaattgtgcctaatccataaatca

SEQ ID NO: 3851206 - DNA, 25 bp, Homo sapien
cttgggatgatgcatccatcccagg

SEQ ID NO: 3851207 - DNA, 25 bp, Homo sapien
ctgaataggatgatttaaacagtcc

SEQ ID NO: 3851208 - DNA, 25 bp, Homo sapien
tccatcccaggaacaatagaatcct

SEQ ID NO: 3851209 - DNA, 25 bp, Homo sapien
tttggatctctctgaggcaaaagta

SEQ ID NO: 3851210 - DNA, 25 bp, Homo sapien
gacagcacaaatcgatatcctcttg

SEQ ID NO: 3851211 - DNA, 25 bp, Homo sapien
tattgattaaaagggccagactccc

SEQ ID NO: 3851212 - DNA, 25 bp, Homo sapien
agctccccgctctggattcttgctg

SEQ ID NO: 3851213 - DNA, 25 bp, Homo sapien
aataagaactgccatccagcaggga

SEQ ID NO: 3851214 - DNA, 25 bp, Homo sapien
tccggggagcttcacaaatgacctc

SEQ ID NO: 3851215 - DNA, 25 bp, Homo sapien
gctccggggagcttcacaaatgacc

SEQ ID NO: 3851216 - DNA, 25 bp, Homo sapien
gggctccggggagcttcacaaatga

SEQ ID NO: 3851217 - DNA, 25 bp, Homo sapien
tgagcaggagggcgtcggattccat

SEQ ID NO: 3851218 - DNA, 25 bp, Homo sapien
ttggcaatggtgcttcgaaggaacg

SEQ ID NO: 3851219 - DNA, 25 bp, Homo sapien
gcttcgaaggaacgcacaaaacacc

SEQ ID NO: 3851220 - DNA, 25 bp, Homo sapien
tggtgcttcgaaggaacgcacaaaa

SEQ ID NO: 3851221 - DNA, 25 bp, Homo sapien
caatggtgcttcgaaggaacgcaca

SEQ ID NO: 3851222 - DNA, 25 bp, Homo sapien
gctgtgtgcaatgatcattcccaga

SEQ ID NO: 3851223 - DNA, 25 bp, Homo sapien
ctgtgtgcaatgatcattcccagat

SEQ ID NO: 3851224 - DNA, 25 bp, Homo sapien
tgctgtgtgcaatgatcattcccag

SEQ ID NO: 3851225 - DNA, 25 bp, Homo sapien
tgtgtgcaatgatcattcccagatc

SEQ ID NO: 3851226 - DNA, 25 bp, Homo sapien
gacacacgggaactgatttcccaag

SEQ ID NO: 3851227 - DNA, 25 bp, Homo sapien
gggaactgatttcccaagctgccgc

SEQ ID NO: 3851228 - DNA, 25 bp, Homo sapien
agtgactccgggaaaaggaccagag

SEQ ID NO: 3851229 - DNA, 25 bp, Homo sapien
aggaccagaggacacacgggaactg

SEQ ID NO: 3851230 - DNA, 25 bp, Homo sapien
ttgccacgtgctccagtgactgtcg

SEQ ID NO: 3851231 - DNA, 25 bp, Homo sapien
ctcaacagtccccaacagcgtggga

SEQ ID NO: 3851232 - DNA, 25 bp, Homo sapien
gctaagattgccctctggcgccctt

SEQ ID NO: 3851233 - DNA, 25 bp, Homo sapien
tggtgcgccctttctttgccacgtg

SEQ ID NO: 3851234 - DNA, 25 bp, Homo sapien
gccgctagtcgtcccttgaggctgg

SEQ ID NO: 3851235 - DNA, 25 bp, Homo sapien
ggctggtgccatcaatcactgggta

SEQ ID NO: 3851236 - DNA, 25 bp, Homo sapien
tagatccttgtccaaaggagactga

SEQ ID NO: 3851237 - DNA, 25 bp, Homo sapien
cttagccgctagtcgtcccttgagg

SEQ ID NO: 3851238 - DNA, 25 bp, Homo sapien
gacagcccagacgtcttcaaagagc

SEQ ID NO: 3851239 - DNA, 25 bp, Homo sapien
ccagaagacggcttgagtaaagaca

SEQ ID NO: 3851240 - DNA, 25 bp, Homo sapien
tgatgaaggccgtcggagagctctc

SEQ ID NO: 3851241 - DNA, 25 bp, Homo sapien
tcactgatgttggaggagactagca

SEQ ID NO: 3851242 - DNA, 25 bp, Homo sapien
tgccctaggcccaagatccatgtct

SEQ ID NO: 3851243 - DNA, 25 bp, Homo sapien
gggctagtagttcactgcttgccaa

SEQ ID NO: 3851244 - DNA, 25 bp, Homo sapien
tttgtgtttatggaatctgcagccc

SEQ ID NO: 3851245 - DNA, 25 bp, Homo sapien
ttgccaagactactgcaggcccatt

SEQ ID NO: 3851246 - DNA, 25 bp, Homo sapien
tttcttcagagcacctggggcccac

SEQ ID NO: 3851247 - DNA, 25 bp, Homo sapien
ctgtgcttgagggtccttttctgtc

SEQ ID NO: 3851248 - DNA, 25 bp, Homo sapien
tatttgttgtagtcactggggccag

SEQ ID NO: 3851249 - DNA, 25 bp, Homo sapien
cactatttccgtgcttggagatacc

SEQ ID NO: 3851250 - DNA, 25 bp, Homo sapien
caggttcttgctggcctagagcaat

SEQ ID NO: 3851251 - DNA, 25 bp, Homo sapien
tgggagatactttctttcatgtcta

SEQ ID NO: 3851252 - DNA, 25 bp, Homo sapien
tctgggagatactttctttcatgtc

SEQ ID NO: 3851253 - DNA, 25 bp, Homo sapien
ccaggttcttgctggcctagagcaa

SEQ ID NO: 3851254 - DNA, 25 bp, Homo sapien
ttcccaacttccgtcagagctccta

SEQ ID NO: 3851255 - DNA, 25 bp, Homo sapien
cctctcatgcttggagatactttcc

SEQ ID NO: 3851256 - DNA, 25 bp, Homo sapien
ccaacttccgtcagagctcctaggg

SEQ ID NO: 3851257 - DNA, 25 bp, Homo sapien
acttccgtcagagctcctagggtcc

SEQ ID NO: 3851258 - DNA, 25 bp, Homo sapien
gaagatgtggcctcagttctacaac

SEQ ID NO: 3851259 - DNA, 25 bp, Homo sapien
gaaggacgctccctgaggtgagcca

SEQ ID NO: 3851260 - DNA, 25 bp, Homo sapien
ggaacactctgagctccacatgaga

SEQ ID NO: 3851261 - DNA, 25 bp, Homo sapien
gactctttggaaaccgaaccacaga

SEQ ID NO: 3851262 - DNA, 25 bp, Homo sapien
tgggcttgccactttgaatcagaga

SEQ ID NO: 3851263 - DNA, 25 bp, Homo sapien
ggccgtagaggactcacagctcttc

SEQ ID NO: 3851264 - DNA, 25 bp, Homo sapien
cctaaatttagacacggccgtagag

SEQ ID NO: 3851265 - DNA, 25 bp, Homo sapien
gctttgtgagatgccctgctccatt

SEQ ID NO: 3851266 - DNA, 25 bp, Homo sapien
ctgagtggtttaggacagggctttt

SEQ ID NO: 3851267 - DNA, 25 bp, Homo sapien
tctcttgacaatctccctttgcccc

SEQ ID NO: 3851268 - DNA, 25 bp, Homo sapien
gcctctgaaaggggttttcagagct

SEQ ID NO: 3851269 - DNA, 25 bp, Homo sapien
atcttctcttgacaatctccctttg

SEQ ID NO: 3851270 - DNA, 25 bp, Homo sapien
aagcaagaaatacgcacagaaagag

SEQ ID NO: 3851271 - DNA, 25 bp, Homo sapien
aagagcaagctctcctatggagaac

SEQ ID NO: 3851272 - DNA, 25 bp, Homo sapien
gctctcctatggagaactcgggagc

SEQ ID NO: 3851273 - DNA, 25 bp, Homo sapien
aaagcaagaaatacgcacagaaaga

SEQ ID NO: 3851274 - DNA, 25 bp, Homo sapien
gagaatgccactggcgcccctctga

SEQ ID NO: 3851275 - DNA, 25 bp, Homo sapien
ttgagaatgccactggcgcccctct

SEQ ID NO: 3851276 - DNA, 25 bp, Homo sapien
gtgagcaggtgagagtgtggccctt

SEQ ID NO: 3851277 - DNA, 25 bp, Homo sapien
agagtgtggcccttgagaatgccac

SEQ ID NO: 3851278 - DNA, 25 bp, Homo sapien
ggaagtgctgttgagaaattgaggg

SEQ ID NO: 3851279 - DNA, 25 bp, Homo sapien
ggctcttcagtctttcactgggaca

SEQ ID NO: 3851280 - DNA, 25 bp, Homo sapien
ggagcgaggctacatggatcctgca

SEQ ID NO: 3851281 - DNA, 25 bp, Homo sapien
acactgagcaacaccatcagagagc

SEQ ID NO: 3851282 - DNA, 25 bp, Homo sapien
tactgagagtgtattgttcagcagc

SEQ ID NO: 3851283 - DNA, 25 bp, Homo sapien
gagcaatgcggcttgaccgcctgga

SEQ ID NO: 3851284 - DNA, 25 bp, Homo sapien
aaagcaattcggcaccgggtcctgt

SEQ ID NO: 3851285 - DNA, 25 bp, Homo sapien
tcacctgttttcgtcccaagtcttg

SEQ ID NO: 3851286 - DNA, 25 bp, Homo sapien
ctgccaggaatgagatcgtggaggt

SEQ ID NO: 3851287 - DNA, 25 bp, Homo sapien
gaatgagatcgtggaggtgccctct

SEQ ID NO: 3851288 - DNA, 25 bp, Homo sapien
gatcgtggaggtgccctctattgtg

SEQ ID NO: 3851289 - DNA, 25 bp, Homo sapien
caggaatgagatcgtggaggtgccc

SEQ ID NO: 3851290 - DNA, 25 bp, Homo sapien
tctgactcttggaagtattgaagct

SEQ ID NO: 3851291 - DNA, 25 bp, Homo sapien
ttggaagtattgaagctccttgaga

SEQ ID NO: 3851292 - DNA, 25 bp, Homo sapien
gagaatgtcattggtttagtcgctt

SEQ ID NO: 3851293 - DNA, 25 bp, Homo sapien
ggtttagtcgcttcctgtccagcat

SEQ ID NO: 3851294 - DNA, 25 bp, Homo sapien
tctagaattcctcctcgacttgtgg

SEQ ID NO: 3851295 - DNA, 25 bp, Homo sapien
tatggtttccacgtgcctttcaata

SEQ ID NO: 3851296 - DNA, 25 bp, Homo sapien
cctttcaataatgccggctgttttc

SEQ ID NO: 3851297 - DNA, 25 bp, Homo sapien
tccatgtgtactgattctagaattc

SEQ ID NO: 3851298 - DNA, 25 bp, Homo sapien
gagggaaccatgcagatatcctgtg

SEQ ID NO: 3851299 - DNA, 25 bp, Homo sapien
catgcagatatcctgtgagtctttc

SEQ ID NO: 3851300 - DNA, 25 bp, Homo sapien
gggaaccatgcagatatcctgtgag

SEQ ID NO: 3851301 - DNA, 25 bp, Homo sapien
gaaccatgcagatatcctgtgagtc

SEQ ID NO: 3851302 - DNA, 25 bp, Homo sapien
cccaggtttcttgggcctctgcttc

SEQ ID NO: 3851303 - DNA, 25 bp, Homo sapien
ccaggtttcttgggcctctgcttca

SEQ ID NO: 3851304 - DNA, 25 bp, Homo sapien
ccccaggtttcttgggcctctgctt

SEQ ID NO: 3851305 - DNA, 25 bp, Homo sapien
caggtttcttgggcctctgcttcat

SEQ ID NO: 3851306 - DNA, 25 bp, Homo sapien
gccttcagaccaagacaatcgaaca

SEQ ID NO: 3851307 - DNA, 25 bp, Homo sapien
cagagccttcagaccaagacaatcg

SEQ ID NO: 3851308 - DNA, 25 bp, Homo sapien
gagccttcagaccaagacaatcgaa

SEQ ID NO: 3851309 - DNA, 25 bp, Homo sapien
ccttcagaccaagacaatcgaacat

SEQ ID NO: 3851310 - DNA, 25 bp, Homo sapien
gaagggtggccatatttgccaagtg

SEQ ID NO: 3851311 - DNA, 25 bp, Homo sapien
gctcctttatcatgtgaagttgaag

SEQ ID NO: 3851312 - DNA, 25 bp, Homo sapien
ctttatcatgtgaagttgaaggtgg

SEQ ID NO: 3851313 - DNA, 25 bp, Homo sapien
aaggtggaagggtggccatatttgc

SEQ ID NO: 3851314 - DNA, 25 bp, Homo sapien
gaagaattctgtttatattggttag

SEQ ID NO: 3851315 - DNA, 25 bp, Homo sapien
tgttgatgaccctgcttctggcgat

SEQ ID NO: 3851316 - DNA, 25 bp, Homo sapien
tataatggcctatattaagtccaac

SEQ ID NO: 3851317 - DNA, 25 bp, Homo sapien
ggcgatattgtgtggggtaaatcct

SEQ ID NO: 3851318 - DNA, 25 bp, Homo sapien
tatgtcttggtagatgggttcacca

SEQ ID NO: 3851319 - DNA, 25 bp, Homo sapien
ctatgtcttggtagatgggttcacc

SEQ ID NO: 3851320 - DNA, 25 bp, Homo sapien
tcactatgtcttggtagatgggttc

SEQ ID NO: 3851321 - DNA, 25 bp, Homo sapien
tggtagatgggttcaccatttttca

SEQ ID NO: 3851322 - DNA, 25 bp, Homo sapien
tgatggtttcgtttggttccacagt

SEQ ID NO: 3851323 - DNA, 25 bp, Homo sapien
aggtggtcctttggggcagaggata

SEQ ID NO: 3851324 - DNA, 25 bp, Homo sapien
gatgatggtttcgtttggttccaca

SEQ ID NO: 3851325 - DNA, 25 bp, Homo sapien
tctgcaaaggtggtcctttggggca

SEQ ID NO: 3851326 - DNA, 25 bp, Homo sapien
gacacatgtctgtaggctcttggta

SEQ ID NO: 3851327 - DNA, 25 bp, Homo sapien
ggaaacaacgtcttgctgacacatg

SEQ ID NO: 3851328 - DNA, 25 bp, Homo sapien
caacgtcttgctgacacatgtctgt

SEQ ID NO: 3851329 - DNA, 25 bp, Homo sapien
ggctcttggtaatgcctaagtccat

SEQ ID NO: 3851330 - DNA, 25 bp, Homo sapien
gctttctcccatttggctcacagag

SEQ ID NO: 3851331 - DNA, 25 bp, Homo sapien
agggcatccatagcctatttgtaga

SEQ ID NO: 3851332 - DNA, 25 bp, Homo sapien
ttgtagacgcctgggcacagattgc

SEQ ID NO: 3851333 - DNA, 25 bp, Homo sapien
tagagttcgtcagcaatgagagatg

SEQ ID NO: 3851334 - DNA, 25 bp, Homo sapien
gaatgttatagtactgacccaattt

SEQ ID NO: 3851335 - DNA, 25 bp, Homo sapien
ggtgccagggaccacaaattcctga

SEQ ID NO: 3851336 - DNA, 25 bp, Homo sapien
aaacctggacaggaatgttatagta

SEQ ID NO: 3851337 - DNA, 25 bp, Homo sapien
gacaggaatgttatagtactgaccc

SEQ ID NO: 3851338 - DNA, 25 bp, Homo sapien
gggccagactccatggaaactgtga

SEQ ID NO: 3851339 - DNA, 25 bp, Homo sapien
tattaacacggactatgtgtaaggc

SEQ ID NO: 3851340 - DNA, 25 bp, Homo sapien
gaaggatgacgtggcagatttgcaa

SEQ ID NO: 3851341 - DNA, 25 bp, Homo sapien
taacatcaacgtcatcaaacctaat

SEQ ID NO: 3851342 - DNA, 25 bp, Homo sapien
tgctcttgcccacaacaagttaagt

SEQ ID NO: 3851343 - DNA, 25 bp, Homo sapien
tgctaaacccatggcaagatgtgac

SEQ ID NO: 3851344 - DNA, 25 bp, Homo sapien
ctggaggtgagctagctgctcttgc

SEQ ID NO: 3851345 - DNA, 25 bp, Homo sapien
caagttaagtcctgacatctcagca

SEQ ID NO: 3851346 - DNA, 25 bp, Homo sapien
tcagattccaaactactgagcacat

SEQ ID NO: 3851347 - DNA, 25 bp, Homo sapien
ggatgatgtgtatgaaagtcagatt

SEQ ID NO: 3851348 - DNA, 25 bp, Homo sapien
taatggtccaatacgaaggatgatg

SEQ ID NO: 3851349 - DNA, 25 bp, Homo sapien
ctgcttcctagaatagttgtaatgg

SEQ ID NO: 3851350 - DNA, 25 bp, Homo sapien
ttttaaacgcagtattctattatag

SEQ ID NO: 3851351 - DNA, 25 bp, Homo sapien
ctattatagaagaccttgatttttc

SEQ ID NO: 3851352 - DNA, 25 bp, Homo sapien
ttaaacgcagtattctattatagaa

SEQ ID NO: 3851353 - DNA, 25 bp, Homo sapien
cagtattctattatagaagaccttg

SEQ ID NO: 3851354 - DNA, 25 bp, Homo sapien
ctgtacaggtccttgagtgacatcc

SEQ ID NO: 3851355 - DNA, 25 bp, Homo sapien
gaatccaactacaaattcatgctcc

SEQ ID NO: 3851356 - DNA, 25 bp, Homo sapien
tattttcctcttgaactagcacaat

SEQ ID NO: 3851357 - DNA, 25 bp, Homo sapien
tcccctctggtgaatccaactacaa

SEQ ID NO: 3851358 - DNA, 25 bp, Homo sapien
cagccttcagacacttctgtaccag

SEQ ID NO: 3851359 - DNA, 25 bp, Homo sapien
cacttcgattctcagtccactctgg

SEQ ID NO: 3851360 - DNA, 25 bp, Homo sapien
cactctggtatctgtgtccatttgg

SEQ ID NO: 3851361 - DNA, 25 bp, Homo sapien
gacacttctgtaccagatttccaca

SEQ ID NO: 3851362 - DNA, 25 bp, Homo sapien
aaggttttgccaagctactgttcat

SEQ ID NO: 3851363 - DNA, 25 bp, Homo sapien
tcttggctccctctgtggacacaga

SEQ ID NO: 3851364 - DNA, 25 bp, Homo sapien
tttggttccactcacactcttggct

SEQ ID NO: 3851365 - DNA, 25 bp, Homo sapien
cctctgtggacacagaaaggttttg

SEQ ID NO: 3851366 - DNA, 25 bp, Homo sapien
ctacagctttgaggagactgaacag

SEQ ID NO: 3851367 - DNA, 25 bp, Homo sapien
aaggccattgcttaacaggactgtg

SEQ ID NO: 3851368 - DNA, 25 bp, Homo sapien
gactgtgggtcctcctatttctaca

SEQ ID NO: 3851369 - DNA, 25 bp, Homo sapien
ctttgaggagactgaacagccatct

SEQ ID NO: 3851370 - DNA, 25 bp, Homo sapien
catctttgtgattggttgtgcccat

SEQ ID NO: 3851371 - DNA, 25 bp, Homo sapien
ctccatctttgtgattggttgtgcc

SEQ ID NO: 3851372 - DNA, 25 bp, Homo sapien
gccaccagcacactcttaatgttgc

SEQ ID NO: 3851373 - DNA, 25 bp, Homo sapien
cacactcttaatgttgctgccactg

SEQ ID NO: 3851374 - DNA, 25 bp, Homo sapien
tctcttcactagtctgaaacaagtc

SEQ ID NO: 3851375 - DNA, 25 bp, Homo sapien
tggagcctttgcctgaacagttagg

SEQ ID NO: 3851376 - DNA, 25 bp, Homo sapien
tgttatcagaccagaatcatgagta

SEQ ID NO: 3851377 - DNA, 25 bp, Homo sapien
cacattcattgggttcctcaggagg

SEQ ID NO: 3851378 - DNA, 25 bp, Homo sapien
tcttgttaagccctctcaagtcatt

SEQ ID NO: 3851379 - DNA, 25 bp, Homo sapien
tatagttatctatccttagttcttg

SEQ ID NO: 3851380 - DNA, 25 bp, Homo sapien
ttcttgttaagccctctcaagtcat

SEQ ID NO: 3851381 - DNA, 25 bp, Homo sapien
ttgttaagccctctcaagtcatttg

SEQ ID NO: 3851382 - DNA, 25 bp, Homo sapien
gaaattctgctctatcaccgttata

SEQ ID NO: 3851383 - DNA, 25 bp, Homo sapien
tctgctctatcaccgttatatcatc

SEQ ID NO: 3851384 - DNA, 25 bp, Homo sapien
aattctgctctatcaccgttatatc

SEQ ID NO: 3851385 - DNA, 25 bp, Homo sapien
gctctatcaccgttatatcatcttc

SEQ ID NO: 3851386 - DNA, 25 bp, Homo sapien
catacttatcgccatctgtttggat

SEQ ID NO: 3851387 - DNA, 25 bp, Homo sapien
tgcttttgcatactagatggcttgt

SEQ ID NO: 3851388 - DNA, 25 bp, Homo sapien
tctctttcaactggagttgaattga

SEQ ID NO: 3851389 - DNA, 25 bp, Homo sapien
tataaaaggcatattggtcagctga

SEQ ID NO: 3851390 - DNA, 25 bp, Homo sapien
gttttttgtgcaccactaccaactc

SEQ ID NO: 3851391 - DNA, 25 bp, Homo sapien
tgttttttgtgcaccactaccaact

SEQ ID NO: 3851392 - DNA, 25 bp, Homo sapien
ttgttttttgtgcaccactaccaac

SEQ ID NO: 3851393 - DNA, 25 bp, Homo sapien
caaggtttgtgcaaatttagcttcc

SEQ ID NO: 3851394 - DNA, 25 bp, Homo sapien
gacttggtacaggagaaattcgacc

SEQ ID NO: 3851395 - DNA, 25 bp, Homo sapien
gataactgatatctttgctgagaaa

SEQ ID NO: 3851396 - DNA, 25 bp, Homo sapien
agaatttttactccccatgacaagg

SEQ ID NO: 3851397 - DNA, 25 bp, Homo sapien
cacctacatgctgggtccggagaaa

SEQ ID NO: 3851398 - DNA, 25 bp, Homo sapien
gctacggcctctacgcagtagaggt

SEQ ID NO: 3851399 - DNA, 25 bp, Homo sapien
cggcctctacgcagtagaggtaccg

SEQ ID NO: 3851400 - DNA, 25 bp, Homo sapien
ctctacgcagtagaggtaccgcgtc

SEQ ID NO: 3851401 - DNA, 25 bp, Homo sapien
ctacgcagtagaggtaccgcgtctg

SEQ ID NO: 3851402 - DNA, 25 bp, Homo sapien
catcttgcttgcgtccaaatatctg

SEQ ID NO: 3851403 - DNA, 25 bp, Homo sapien
ccaaatatctggtcacattgtctga

SEQ ID NO: 3851404 - DNA, 25 bp, Homo sapien
caattacgtgatgtttgattatccc

SEQ ID NO: 3851405 - DNA, 25 bp, Homo sapien
cattgtctgacgatgagagagagca

SEQ ID NO: 3851406 - DNA, 25 bp, Homo sapien
gtttctggctgtctatcattttctc

SEQ ID NO: 3851407 - DNA, 25 bp, Homo sapien
ttgtaaaaacatgtagatgtcagac

SEQ ID NO: 3851408 - DNA, 25 bp, Homo sapien
tgaattggtctgaaggggactcctg

SEQ ID NO: 3851409 - DNA, 25 bp, Homo sapien
tagtagtcaaagacaggaagtttat

SEQ ID NO: 3851410 - DNA, 25 bp, Homo sapien
taaattcaccagctgcaacagcagg

SEQ ID NO: 3851411 - DNA, 25 bp, Homo sapien
ggtatttgggccacaataacaataa

SEQ ID NO: 3851412 - DNA, 25 bp, Homo sapien
aactactaagcgcagtaatctggga

SEQ ID NO: 3851413 - DNA, 25 bp, Homo sapien
aatagcctgggatattggtaaattc

SEQ ID NO: 3851414 - DNA, 25 bp, Homo sapien
catcagtggccttgagtccagagaa

SEQ ID NO: 3851415 - DNA, 25 bp, Homo sapien
tacatccgattgggttctttggtgt

SEQ ID NO: 3851416 - DNA, 25 bp, Homo sapien
gattggtccttgatcagtggtcttt

SEQ ID NO: 3851417 - DNA, 25 bp, Homo sapien
tgattggtccttgatcagtggtctt

SEQ ID NO: 3851418 - DNA, 25 bp, Homo sapien
ttggtccttgatcagtggtcttttc

SEQ ID NO: 3851419 - DNA, 25 bp, Homo sapien
attggtccttgatcagtggtctttt

SEQ ID NO: 3851420 - DNA, 25 bp, Homo sapien
gatcccatgttgtatttagaacaaa

SEQ ID NO: 3851421 - DNA, 25 bp, Homo sapien
gaggatcccatgttgtatttagaac

SEQ ID NO: 3851422 - DNA, 25 bp, Homo sapien
gagctctttgcatgaatgcaatttt

SEQ ID NO: 3851423 - DNA, 25 bp, Homo sapien
cccatgttgtatttagaacaaagat

SEQ ID NO: 3851424 - DNA, 25 bp, Homo sapien
caacactgacaggtttatataccgc

SEQ ID NO: 3851425 - DNA, 25 bp, Homo sapien
tcaatcctgaggaacaacactgaca

SEQ ID NO: 3851426 - DNA, 25 bp, Homo sapien
gaggaacaacactgacaggtttata

SEQ ID NO: 3851427 - DNA, 25 bp, Homo sapien
cactgacaggtttatataccgctac

SEQ ID NO: 3851428 - DNA, 25 bp, Homo sapien
atttttgttgagctgaggacgatgc

SEQ ID NO: 3851429 - DNA, 25 bp, Homo sapien
gatgctcagtgtatggactgagtca

SEQ ID NO: 3851430 - DNA, 25 bp, Homo sapien
gaggacgatgctcagtgtatggact

SEQ ID NO: 3851431 - DNA, 25 bp, Homo sapien
cttccaaagcacagtcaccaaccca

SEQ ID NO: 3851432 - DNA, 25 bp, Homo sapien
tgtccaccctcatgtcgactatttc

SEQ ID NO: 3851433 - DNA, 25 bp, Homo sapien
accctcatgtcgactatttcctcta

SEQ ID NO: 3851434 - DNA, 25 bp, Homo sapien
cctcatgtcgactatttcctctagt

SEQ ID NO: 3851435 - DNA, 25 bp, Homo sapien
gctccttgtccaccctcatgtcgac

SEQ ID NO: 3851436 - DNA, 25 bp, Homo sapien
tccttttatattgctccttatacac

SEQ ID NO: 3851437 - DNA, 25 bp, Homo sapien
ccattgaaccatcattgaattgtgt

SEQ ID NO: 3851438 - DNA, 25 bp, Homo sapien
tatctctcatttaggcccattgaac

SEQ ID NO: 3851439 - DNA, 25 bp, Homo sapien
tgttgggcaagggtctgacatacct

SEQ ID NO: 3851440 - DNA, 25 bp, Homo sapien
tcaaatggccacagtaagcctaagg

SEQ ID NO: 3851441 - DNA, 25 bp, Homo sapien
aaatttttcaggttcagctgcctga

SEQ ID NO: 3851442 - DNA, 25 bp, Homo sapien
tcaggttcagctgcctgatgggaga

SEQ ID NO: 3851443 - DNA, 25 bp, Homo sapien
cacagtaagcctaaggtccatttca

SEQ ID NO: 3851444 - DNA, 25 bp, Homo sapien
ttgagaacttatctcctgtggtttt

SEQ ID NO: 3851445 - DNA, 25 bp, Homo sapien
tgacttgcgttagtgttttcctgca

SEQ ID NO: 3851446 - DNA, 25 bp, Homo sapien
ttttgagctctgacttgcgttagtg

SEQ ID NO: 3851447 - DNA, 25 bp, Homo sapien
gagaacttatctcctgtggttttta

SEQ ID NO: 3851448 - DNA, 25 bp, Homo sapien
tggaagcatccagggaaacagaaca

SEQ ID NO: 3851449 - DNA, 25 bp, Homo sapien
cattaggagcgatctggtgccgact

SEQ ID NO: 3851450 - DNA, 25 bp, Homo sapien
tgagcattaggagcgatctggtgcc

SEQ ID NO: 3851451 - DNA, 25 bp, Homo sapien
tcattgagcattaggagcgatctgg

SEQ ID NO: 3851452 - DNA, 25 bp, Homo sapien
gggcctccaagatgttatgaggtgt

SEQ ID NO: 3851453 - DNA, 25 bp, Homo sapien
tcagggaatcagtgggtcatccatc

SEQ ID NO: 3851454 - DNA, 25 bp, Homo sapien
tatgaggtgttgttacaggtaaaag

SEQ ID NO: 3851455 - DNA, 25 bp, Homo sapien
gattcagtgctgctagacaagcagg

SEQ ID NO: 3851456 - DNA, 25 bp, Homo sapien
cctaacagaccttaggtcgtccact

SEQ ID NO: 3851457 - DNA, 25 bp, Homo sapien
gaccttaggtcgtccactattgtat

SEQ ID NO: 3851458 - DNA, 25 bp, Homo sapien
cttaggtcgtccactattgtatttc

SEQ ID NO: 3851459 - DNA, 25 bp, Homo sapien
cagaccttaggtcgtccactattgt

SEQ ID NO: 3851460 - DNA, 25 bp, Homo sapien
agccaataagttctcttctctgagt

SEQ ID NO: 3851461 - DNA, 25 bp, Homo sapien
gccaataagttctcttctctgagtt

SEQ ID NO: 3851462 - DNA, 25 bp, Homo sapien
tctctgagttcctttaacatctctc

SEQ ID NO: 3851463 - DNA, 25 bp, Homo sapien
ttctctgagttcctttaacatctct

SEQ ID NO: 3851464 - DNA, 25 bp, Homo sapien
ctgaaaggtcataaagaactctctg

SEQ ID NO: 3851465 - DNA, 25 bp, Homo sapien
tccatgggttatttctgaaaggtca

SEQ ID NO: 3851466 - DNA, 25 bp, Homo sapien
cccagtgaaggtccatgggttattt

SEQ ID NO: 3851467 - DNA, 25 bp, Homo sapien
tgaaaggtcataaagaactctctgg

SEQ ID NO: 3851468 - DNA, 25 bp, Homo sapien
aagcattgagggctcatacagcacc

SEQ ID NO: 3851469 - DNA, 25 bp, Homo sapien
gcattgagggctcatacagcaccat

SEQ ID NO: 3851470 - DNA, 25 bp, Homo sapien
ctgaaagcattgagggctcatacag

SEQ ID NO: 3851471 - DNA, 25 bp, Homo sapien
gaaagcattgagggctcatacagca

SEQ ID NO: 3851472 - DNA, 25 bp, Homo sapien
aggttctttagctgacaatggccaa

SEQ ID NO: 3851473 - DNA, 25 bp, Homo sapien
cagggtagccctgaccattaagtaa

SEQ ID NO: 3851474 - DNA, 25 bp, Homo sapien
gcaacaagacgataggggtgatgtt

SEQ ID NO: 3851475 - DNA, 25 bp, Homo sapien
tttatgccaagaatgttattcccag

SEQ ID NO: 3851476 - DNA, 25 bp, Homo sapien
gggataggacattacccctctggct

SEQ ID NO: 3851477 - DNA, 25 bp, Homo sapien
aggacattacccctctggctttctt

SEQ ID NO: 3851478 - DNA, 25 bp, Homo sapien
tggggataggacattacccctctgg

SEQ ID NO: 3851479 - DNA, 25 bp, Homo sapien
gataggacattacccctctggcttt

SEQ ID NO: 3851480 - DNA, 25 bp, Homo sapien
gcaagcggtcatggaaactttgaaa

SEQ ID NO: 3851481 - DNA, 25 bp, Homo sapien
taactgagtgtaccacctctccttg

SEQ ID NO: 3851482 - DNA, 25 bp, Homo sapien
ttgagcagtgaataagcaagcggtc

SEQ ID NO: 3851483 - DNA, 25 bp, Homo sapien
gcagagtattagagtgtcccaggtt

SEQ ID NO: 3851484 - DNA, 25 bp, Homo sapien
ctttccatgatactgtttcttgatc

SEQ ID NO: 3851485 - DNA, 25 bp, Homo sapien
tctttccatgatactgtttcttgat

SEQ ID NO: 3851486 - DNA, 25 bp, Homo sapien
gatggatgccttcacaatttcagtt

SEQ ID NO: 3851487 - DNA, 25 bp, Homo sapien
tgtgatggatgccttcacaatttca

SEQ ID NO: 3851488 - DNA, 25 bp, Homo sapien
actgtctgtgtctcacgtatgcctg

SEQ ID NO: 3851489 - DNA, 25 bp, Homo sapien
catggttcctttggaaggttgcaca

SEQ ID NO: 3851490 - DNA, 25 bp, Homo sapien
ttcccatagagaaacagaccggcca

SEQ ID NO: 3851491 - DNA, 25 bp, Homo sapien
ggttgcacagcattattggttccag

SEQ ID NO: 3851492 - DNA, 25 bp, Homo sapien
catcagggggttcttgggagctgtc

SEQ ID NO: 3851493 - DNA, 25 bp, Homo sapien
ggtcctcttagcatggatatgccat

SEQ ID NO: 3851494 - DNA, 25 bp, Homo sapien
gggagctgtctcaggtcctcttagc

SEQ ID NO: 3851495 - DNA, 25 bp, Homo sapien
tgtctcaggtcctcttagcatggat

SEQ ID NO: 3851496 - DNA, 25 bp, Homo sapien
tgcttttagcagagggataattttc

SEQ ID NO: 3851497 - DNA, 25 bp, Homo sapien
ttcagatcctggtggtacagtacag

SEQ ID NO: 3851498 - DNA, 25 bp, Homo sapien
gtgaaatataggagttgcttttagc

SEQ ID NO: 3851499 - DNA, 25 bp, Homo sapien
gtacaggaagaaagcgtgtatggat

SEQ ID NO: 3851500 - DNA, 25 bp, Homo sapien
ccagcagagcggtgagagcaaggcc

SEQ ID NO: 3851501 - DNA, 25 bp, Homo sapien
agtacttgtctgctactgtgtcaga

SEQ ID NO: 3851502 - DNA, 25 bp, Homo sapien
tgtttcttgctgctccagtacttgt

SEQ ID NO: 3851503 - DNA, 25 bp, Homo sapien
tgtagtagctcactcagccaatcta

SEQ ID NO: 3851504 - DNA, 25 bp, Homo sapien
gccacatctgcaccatgaatctgtt

SEQ ID NO: 3851505 - DNA, 25 bp, Homo sapien
aaatgcttcctctaagtttttcctg

SEQ ID NO: 3851506 - DNA, 25 bp, Homo sapien
atctggttgatattgagaaaatgcc

SEQ ID NO: 3851507 - DNA, 25 bp, Homo sapien
tgccttctgtcaatatctggttgat

SEQ ID NO: 3851508 - DNA, 25 bp, Homo sapien
gagaaaatgccaccttgttttcttc

SEQ ID NO: 3851509 - DNA, 25 bp, Homo sapien
ccagaatccagtctgcttgcccaga

SEQ ID NO: 3851510 - DNA, 25 bp, Homo sapien
gattttcaaccactaatgctgcatt

SEQ ID NO: 3851511 - DNA, 25 bp, Homo sapien
ctttaggccactgattttcaaccac

SEQ ID NO: 3851512 - DNA, 25 bp, Homo sapien
tcttcattatcaccagaatccagtc

SEQ ID NO: 3851513 - DNA, 25 bp, Homo sapien
tgactcagctgagatcgtggatata

SEQ ID NO: 3851514 - DNA, 25 bp, Homo sapien
cccctccaaggagacagagggcatt

SEQ ID NO: 3851515 - DNA, 25 bp, Homo sapien
gatcgtggatataatgctgttctca

SEQ ID NO: 3851516 - DNA, 25 bp, Homo sapien
gaacccctccaaggagacagagggc

SEQ ID NO: 3851517 - DNA, 25 bp, Homo sapien
gaagagagagatctatccaatcaat

SEQ ID NO: 3851518 - DNA, 25 bp, Homo sapien
tgcatcagcgaacacattgcctttt

SEQ ID NO: 3851519 - DNA, 25 bp, Homo sapien
tgagataggctttcatcaaatatgt

SEQ ID NO: 3851520 - DNA, 25 bp, Homo sapien
tcctcaggtgagtttgagataggct

SEQ ID NO: 3851521 - DNA, 25 bp, Homo sapien
taaaaactgcattgatagattagta

SEQ ID NO: 3851522 - DNA, 25 bp, Homo sapien
gatagattagtaagatctgcttcac

SEQ ID NO: 3851523 - DNA, 25 bp, Homo sapien
ctgaatcactgttagttgaagatat

SEQ ID NO: 3851524 - DNA, 25 bp, Homo sapien
taagatctgcttcactgaatcactg

SEQ ID NO: 3851525 - DNA, 25 bp, Homo sapien
tctgtgctgccaagttcatccaagt

SEQ ID NO: 3851526 - DNA, 25 bp, Homo sapien
ctgccaagttcatccaagtcagtca

SEQ ID NO: 3851527 - DNA, 25 bp, Homo sapien
tgtgctgccaagttcatccaagtca

SEQ ID NO: 3851528 - DNA, 25 bp, Homo sapien
tgctgccaagttcatccaagtcagt

SEQ ID NO: 3851529 - DNA, 25 bp, Homo sapien
tggaagaatgtccatcattactcct

SEQ ID NO: 3851530 - DNA, 25 bp, Homo sapien
agaatgtccatcattactcctgaat

SEQ ID NO: 3851531 - DNA, 25 bp, Homo sapien
agtcattgtatttgaagaagtggtc

SEQ ID NO: 3851532 - DNA, 25 bp, Homo sapien
gaagaagtggtcaacagagtaatca

SEQ ID NO: 3851533 - DNA, 25 bp, Homo sapien
gtctccaatggagtcatgaagtcca

SEQ ID NO: 3851534 - DNA, 25 bp, Homo sapien
caaccaaaagggcagatgtctccaa

SEQ ID NO: 3851535 - DNA, 25 bp, Homo sapien
tatcatattcacaaggtaactgccc

SEQ ID NO: 3851536 - DNA, 25 bp, Homo sapien
ccatgaagtatcaaacatatagctc

SEQ ID NO: 3851537 - DNA, 25 bp, Homo sapien
gcccgatcacctctcccttatgttt

SEQ ID NO: 3851538 - DNA, 25 bp, Homo sapien
cggaatggaatttatacagcccgat

SEQ ID NO: 3851539 - DNA, 25 bp, Homo sapien
tctgctgtctaatgactggcttctt

SEQ ID NO: 3851540 - DNA, 25 bp, Homo sapien
ggaatttatacagcccgatcacctc

SEQ ID NO: 3851541 - DNA, 25 bp, Homo sapien
ttccagccttagctaagcttcctga

SEQ ID NO: 3851542 - DNA, 25 bp, Homo sapien
ggtaagcccaacaactccactgctg

SEQ ID NO: 3851543 - DNA, 25 bp, Homo sapien
tatgcgtactcttgatggtctggac

SEQ ID NO: 3851544 - DNA, 25 bp, Homo sapien
catttcttctgtaaagggacgtctt

SEQ ID NO: 3851545 - DNA, 25 bp, Homo sapien
tttttaagccatcgaccttgtgtcc

SEQ ID NO: 3851546 - DNA, 25 bp, Homo sapien
cattccagtgttaagtttataacat

SEQ ID NO: 3851547 - DNA, 25 bp, Homo sapien
taacatatgcagatatgaaacattt

SEQ ID NO: 3851548 - DNA, 25 bp, Homo sapien
taaaaggcaaactactatttgaata

SEQ ID NO: 3851549 - DNA, 25 bp, Homo sapien
ttaaaaacatacaggcatctgagag

SEQ ID NO: 3851550 - DNA, 25 bp, Homo sapien
tagaggagtcatcagcagtataggt

SEQ ID NO: 3851551 - DNA, 25 bp, Homo sapien
tttgacaaagccaacttgagacaca

SEQ ID NO: 3851552 - DNA, 25 bp, Homo sapien
tggcccaagggttgtgatgattagc

SEQ ID NO: 3851553 - DNA, 25 bp, Homo sapien
ttcaggctcaatgctttagaggagt

SEQ ID NO: 3851554 - DNA, 25 bp, Homo sapien
gcttggtcagaagcccactgaggag

SEQ ID NO: 3851555 - DNA, 25 bp, Homo sapien
acagcttggtcagaagcccactgag

SEQ ID NO: 3851556 - DNA, 25 bp, Homo sapien
agcttggtcagaagcccactgagga

SEQ ID NO: 3851557 - DNA, 25 bp, Homo sapien
cagcttggtcagaagcccactgagg

SEQ ID NO: 3851558 - DNA, 25 bp, Homo sapien
tgtgacttcgtctaaattgagcagg

SEQ ID NO: 3851559 - DNA, 25 bp, Homo sapien
tagtggccctgtagcttgtaaaagc

SEQ ID NO: 3851560 - DNA, 25 bp, Homo sapien
tatgttccatgcctcagacttctct

SEQ ID NO: 3851561 - DNA, 25 bp, Homo sapien
gacttctctttagcactgttgtgac

SEQ ID NO: 3851562 - DNA, 25 bp, Homo sapien
ggcctcccaaaattgagtgctcaga

SEQ ID NO: 3851563 - DNA, 25 bp, Homo sapien
tcccaaaattgagtgctcagaatgc

SEQ ID NO: 3851564 - DNA, 25 bp, Homo sapien
aaattgagtgctcagaatgccttta

SEQ ID NO: 3851565 - DNA, 25 bp, Homo sapien
tgaatattcttgaactctcctctcc

SEQ ID NO: 3851566 - DNA, 25 bp, Homo sapien
actttgtactttgtgtatttctaga

SEQ ID NO: 3851567 - DNA, 25 bp, Homo sapien
aaaatacgttcatagtttattgctg

SEQ ID NO: 3851568 - DNA, 25 bp, Homo sapien
tctagaaggcgtcattcattttcca

SEQ ID NO: 3851569 - DNA, 25 bp, Homo sapien
tctgctccaacatgatttctaaagg

SEQ ID NO: 3851570 - DNA, 25 bp, Homo sapien
ggctcgagaaacatgatcttcttga

SEQ ID NO: 3851571 - DNA, 25 bp, Homo sapien
tcaaatgtctggctcgagaaacatg

SEQ ID NO: 3851572 - DNA, 25 bp, Homo sapien
tgaccccttgaatccaacaaaccag

SEQ ID NO: 3851573 - DNA, 25 bp, Homo sapien
tcattttctacttgtgaccccttga

SEQ ID NO: 3851574 - DNA, 25 bp, Homo sapien
tctggagcgcctttgggcttcaaag

SEQ ID NO: 3851575 - DNA, 25 bp, Homo sapien
tactcattcgttcactgtcttctgg

SEQ ID NO: 3851576 - DNA, 25 bp, Homo sapien
gcgacttgaattctcatcctctttc

SEQ ID NO: 3851577 - DNA, 25 bp, Homo sapien
aaaaacagcaacatccctcaaacag

SEQ ID NO: 3851578 - DNA, 25 bp, Homo sapien
ttcagtgtggctacatttctcttta

SEQ ID NO: 3851579 - DNA, 25 bp, Homo sapien
gtgtggctacatttctctttagcat

SEQ ID NO: 3851580 - DNA, 25 bp, Homo sapien
tcagtgtggctacatttctctttag

SEQ ID NO: 3851581 - DNA, 25 bp, Homo sapien
cagtgtggctacatttctctttagc

SEQ ID NO: 3851582 - DNA, 25 bp, Homo sapien
tctgggtgttaatggtccttctgtt

SEQ ID NO: 3851583 - DNA, 25 bp, Homo sapien
tgagttctgggtgttaatggtcctt

SEQ ID NO: 3851584 - DNA, 25 bp, Homo sapien
gtgttaatggtccttctgtttttca

SEQ ID NO: 3851585 - DNA, 25 bp, Homo sapien
gttctgggtgttaatggtccttctg

SEQ ID NO: 3851586 - DNA, 25 bp, Homo sapien
acttgtccatgaaccaggcccgatt

SEQ ID NO: 3851587 - DNA, 25 bp, Homo sapien
gcaagtcatgtgtctgctcttgaac

SEQ ID NO: 3851588 - DNA, 25 bp, Homo sapien
ggtaccatctacttttgacaaatat

SEQ ID NO: 3851589 - DNA, 25 bp, Homo sapien
gtgtgttctaaaactttgcaagtca

SEQ ID NO: 3851590 - DNA, 25 bp, Homo sapien
tgaggagaaacgtattgaaccttca

SEQ ID NO: 3851591 - DNA, 25 bp, Homo sapien
gaaacgtattgaaccttcatttaca

SEQ ID NO: 3851592 - DNA, 25 bp, Homo sapien
tgtctgaggagaaacgtattgaacc

SEQ ID NO: 3851593 - DNA, 25 bp, Homo sapien
gtattgaaccttcatttacacccat

SEQ ID NO: 3851594 - DNA, 25 bp, Homo sapien
catgtatgagaagtataagaagtag

SEQ ID NO: 3851595 - DNA, 25 bp, Homo sapien
taattgccctccaatcatgtatgag

SEQ ID NO: 3851596 - DNA, 25 bp, Homo sapien
tagaacagcttaagtttgaaatcac

SEQ ID NO: 3851597 - DNA, 25 bp, Homo sapien
agaagtagagttattgttgtagaac

SEQ ID NO: 3851598 - DNA, 25 bp, Homo sapien
tcagaaaactcttgtctccgatcaa

SEQ ID NO: 3851599 - DNA, 25 bp, Homo sapien
atcactgggaaactccttctatcag

SEQ ID NO: 3851600 - DNA, 25 bp, Homo sapien
aacttttctgatccttgggtgattt

SEQ ID NO: 3851601 - DNA, 25 bp, Homo sapien
tcttgtctccgatcaatcagggctt

SEQ ID NO: 3851602 - DNA, 25 bp, Homo sapien
ctatacatgtcttgaagtcataaac

SEQ ID NO: 3851603 - DNA, 25 bp, Homo sapien
gaatctttgatcttataaactggga

SEQ ID NO: 3851604 - DNA, 25 bp, Homo sapien
tatagtaattctggtcctaattcag

SEQ ID NO: 3851605 - DNA, 25 bp, Homo sapien
gatagatgatgaatatagtaattct

SEQ ID NO: 3851606 - DNA, 25 bp, Homo sapien
ccatattgaggacggcttgctgagt

SEQ ID NO: 3851607 - DNA, 25 bp, Homo sapien
gggatccatattgaggacggcttgc

SEQ ID NO: 3851608 - DNA, 25 bp, Homo sapien
tgaaggtttgccctagcccctgtag

SEQ ID NO: 3851609 - DNA, 25 bp, Homo sapien
gctgagtggtaggaatgtgtccctt

SEQ ID NO: 3851610 - DNA, 25 bp, Homo sapien
ttctcagcgtatactctgcattgat

SEQ ID NO: 3851611 - DNA, 25 bp, Homo sapien
ttttgcacacttccaaatacaaatt

SEQ ID NO: 3851612 - DNA, 25 bp, Homo sapien
gaggaaaccttttgcacacttccaa

SEQ ID NO: 3851613 - DNA, 25 bp, Homo sapien
tgcattgattgaggaaaccttttgc

SEQ ID NO: 3851614 - DNA, 25 bp, Homo sapien
tgcatcttgtgaataggcttgctcc

SEQ ID NO: 3851615 - DNA, 25 bp, Homo sapien
tagtgtagacaatcccagggctctc

SEQ ID NO: 3851616 - DNA, 25 bp, Homo sapien
gctaatgaggatcagtttcttctcc

SEQ ID NO: 3851617 - DNA, 25 bp, Homo sapien
ggctctccttgagaggaagcctctc

SEQ ID NO: 3851618 - DNA, 25 bp, Homo sapien
cacaacccgaaatatctgtgggtct

SEQ ID NO: 3851619 - DNA, 25 bp, Homo sapien
tctgtgggtctttctctacagccat

SEQ ID NO: 3851620 - DNA, 25 bp, Homo sapien
tctgtctgttaactccacaacccga

SEQ ID NO: 3851621 - DNA, 25 bp, Homo sapien
ttaactccacaacccgaaatatctg

SEQ ID NO: 3851622 - DNA, 25 bp, Homo sapien
tatactcaacaggtgaaacatgtgc

SEQ ID NO: 3851623 - DNA, 25 bp, Homo sapien
ttcctagacgttgaagtgatcacca

SEQ ID NO: 3851624 - DNA, 25 bp, Homo sapien
aaaactatgtattggcccggtgtgg

SEQ ID NO: 3851625 - DNA, 25 bp, Homo sapien
tcaatcagcagttcggatctggact

SEQ ID NO: 3851626 - DNA, 25 bp, Homo sapien
cagtgctttcgagcctgagcgacgc

SEQ ID NO: 3851627 - DNA, 25 bp, Homo sapien
aaatacagtgctttcgagcctgagc

SEQ ID NO: 3851628 - DNA, 25 bp, Homo sapien
tccatttcaagcatagctttcaaca

SEQ ID NO: 3851629 - DNA, 25 bp, Homo sapien
gcatagctttcaacatttcgccata

SEQ ID NO: 3851630 - DNA, 25 bp, Homo sapien
agcagccgagaagctcgaactgggt

SEQ ID NO: 3851631 - DNA, 25 bp, Homo sapien
aacaaagcagccgagaagctcgaac

SEQ ID NO: 3851632 - DNA, 25 bp, Homo sapien
gtaaacaaagcagccgagaagctcg

SEQ ID NO: 3851633 - DNA, 25 bp, Homo sapien
aagcagccgagaagctcgaactggg

SEQ ID NO: 3851634 - DNA, 25 bp, Homo sapien
ctgcccaaaacagaaatttggcaaa

SEQ ID NO: 3851635 - DNA, 25 bp, Homo sapien
gcccaaaacagaaatttggcaaaga

SEQ ID NO: 3851636 - DNA, 25 bp, Homo sapien
tgcccaaaacagaaatttggcaaag

SEQ ID NO: 3851637 - DNA, 25 bp, Homo sapien
ccaaaacagaaatttggcaaagatt

SEQ ID NO: 3851638 - DNA, 25 bp, Homo sapien
ctctgattttgtacacgaaaatgtt

SEQ ID NO: 3851639 - DNA, 25 bp, Homo sapien
tctgattttgtacacgaaaatgttt

SEQ ID NO: 3851640 - DNA, 25 bp, Homo sapien
aaatgataccaaaatctaggagaaa

SEQ ID NO: 3851641 - DNA, 25 bp, Homo sapien
tcccaccggtggctcccgccactgg

SEQ ID NO: 3851642 - DNA, 25 bp, Homo sapien
gatggcaggcggtgtccaaaagcct

SEQ ID NO: 3851643 - DNA, 25 bp, Homo sapien
cagcctcctgccggttttcccaccg

SEQ ID NO: 3851644 - DNA, 25 bp, Homo sapien
tgccttagggattggcgctgcccag

SEQ ID NO: 3851645 - DNA, 25 bp, Homo sapien
tttccgaggccacaaaggcgagaac

SEQ ID NO: 3851646 - DNA, 25 bp, Homo sapien
gcaccagatcgccttcctttccgag

SEQ ID NO: 3851647 - DNA, 25 bp, Homo sapien
cttcctttccgaggccacaaaggcg

SEQ ID NO: 3851648 - DNA, 25 bp, Homo sapien
gatcgccttcctttccgaggccaca

SEQ ID NO: 3851649 - DNA, 25 bp, Homo sapien
tgggcttctctcctaaacttgccat

SEQ ID NO: 3851650 - DNA, 25 bp, Homo sapien
tctcctttaaacttgggcttctctc

SEQ ID NO: 3851651 - DNA, 25 bp, Homo sapien
acttgggcttctctcctaaacttgc

SEQ ID NO: 3851652 - DNA, 25 bp, Homo sapien
aacttgggcttctctcctaaacttg

SEQ ID NO: 3851653 - DNA, 25 bp, Homo sapien
caaggccctcaaactgcttttgctc

SEQ ID NO: 3851654 - DNA, 25 bp, Homo sapien
caacacggactggtagtagaaatta

SEQ ID NO: 3851655 - DNA, 25 bp, Homo sapien
ttcccctaaaggctgtaaactgcca

SEQ ID NO: 3851656 - DNA, 25 bp, Homo sapien
taaaacaacacggactggtagtaga

SEQ ID NO: 3851657 - DNA, 25 bp, Homo sapien
tacctttgcccataaattttatcat

SEQ ID NO: 3851658 - DNA, 25 bp, Homo sapien
tctattatacctttgcccataaatt

SEQ ID NO: 3851659 - DNA, 25 bp, Homo sapien
cttgtctattatacctttgcccata

SEQ ID NO: 3851660 - DNA, 25 bp, Homo sapien
atacctttgcccataaattttatca

SEQ ID NO: 3851661 - DNA, 25 bp, Homo sapien
gcattatttagtccctctaggctgc

SEQ ID NO: 3851662 - DNA, 25 bp, Homo sapien
tctgcattatttagtccctctaggc

SEQ ID NO: 3851663 - DNA, 25 bp, Homo sapien
tttctgcattatttagtccctctag

SEQ ID NO: 3851664 - DNA, 25 bp, Homo sapien
tgcattatttagtccctctaggctg

SEQ ID NO: 3851665 - DNA, 25 bp, Homo sapien
ttatgcatcatgacccaatgatttc

SEQ ID NO: 3851666 - DNA, 25 bp, Homo sapien
atgcatcatgacccaatgatttcac

SEQ ID NO: 3851667 - DNA, 25 bp, Homo sapien
tatgcatcatgacccaatgatttca

SEQ ID NO: 3851668 - DNA, 25 bp, Homo sapien
tacttctgcctttaaagacgtacat

SEQ ID NO: 3851669 - DNA, 25 bp, Homo sapien
tgaagcagcatttgtcggatgcttt

SEQ ID NO: 3851670 - DNA, 25 bp, Homo sapien
tatattacttctgcctttaaagacg

SEQ ID NO: 3851671 - DNA, 25 bp, Homo sapien
tgtcggatgctttggatatattact

SEQ ID NO: 3851672 - DNA, 25 bp, Homo sapien
tatgccagatttcagcacccatgac

SEQ ID NO: 3851673 - DNA, 25 bp, Homo sapien
ccagtgtgacaagaatatgccagat

SEQ ID NO: 3851674 - DNA, 25 bp, Homo sapien
acaagaatatgccagatttcagcac

SEQ ID NO: 3851675 - DNA, 25 bp, Homo sapien
gtgtgacaagaatatgccagatttc

SEQ ID NO: 3851676 - DNA, 25 bp, Homo sapien
ataatcctcatagatgccctggtcc

SEQ ID NO: 3851677 - DNA, 25 bp, Homo sapien
aagtcctttgacataatcctcatag

SEQ ID NO: 3851678 - DNA, 25 bp, Homo sapien
tgggcagaaagtgctcaaagttcag

SEQ ID NO: 3851679 - DNA, 25 bp, Homo sapien
tggtccttgtttttggccaccacca

SEQ ID NO: 3851680 - DNA, 25 bp, Homo sapien
tcattcaaaaatcgtttttcctgga

SEQ ID NO: 3851681 - DNA, 25 bp, Homo sapien
aaatcgtttttcctggactggagat

SEQ ID NO: 3851682 - DNA, 25 bp, Homo sapien
cgtttttcctggactggagatataa

SEQ ID NO: 3851683 - DNA, 25 bp, Homo sapien
aatcgtttttcctggactggagata

SEQ ID NO: 3851684 - DNA, 25 bp, Homo sapien
cctttgaagtattgcctgccctgta

SEQ ID NO: 3851685 - DNA, 25 bp, Homo sapien
tccctttgaagtattgcctgccctg

SEQ ID NO: 3851686 - DNA, 25 bp, Homo sapien
tttgaagtattgcctgccctgtaag

SEQ ID NO: 3851687 - DNA, 25 bp, Homo sapien
ccctttgaagtattgcctgccctgt

SEQ ID NO: 3851688 - DNA, 25 bp, Homo sapien
tattttggagtaataaaccagctcc

SEQ ID NO: 3851689 - DNA, 25 bp, Homo sapien
aaaccagctccattccttatcgatg

SEQ ID NO: 3851690 - DNA, 25 bp, Homo sapien
tccattccttatcgatgggttctgc

SEQ ID NO: 3851691 - DNA, 25 bp, Homo sapien
ttatcgatgggttctgcgtccatga

SEQ ID NO: 3851692 - DNA, 25 bp, Homo sapien
ttcacaagaaacaccatacttttgg

SEQ ID NO: 3851693 - DNA, 25 bp, Homo sapien
tcacaagaaacaccatacttttggc

SEQ ID NO: 3851694 - DNA, 25 bp, Homo sapien
tttcacaagaaacaccatacttttg

SEQ ID NO: 3851695 - DNA, 25 bp, Homo sapien
gaattagcactggtggaaagctccc

SEQ ID NO: 3851696 - DNA, 25 bp, Homo sapien
tagcactggtggaaagctcccttcc

SEQ ID NO: 3851697 - DNA, 25 bp, Homo sapien
gctcccttccctgtcatcaaatgta

SEQ ID NO: 3851698 - DNA, 25 bp, Homo sapien
gaagagaattagcactggtggaaag

SEQ ID NO: 3851699 - DNA, 25 bp, Homo sapien
atgaaatagcatcatggcactaaaa

SEQ ID NO: 3851700 - DNA, 25 bp, Homo sapien
tagagaccaccatcaataaactttt

SEQ ID NO: 3851701 - DNA, 25 bp, Homo sapien
tcttttgctaggccacgataatgaa

SEQ ID NO: 3851702 - DNA, 25 bp, Homo sapien
tagcatcatggcactaaaatgacca

SEQ ID NO: 3851703 - DNA, 25 bp, Homo sapien
gactggcacagatactagaagtgag

SEQ ID NO: 3851704 - DNA, 25 bp, Homo sapien
cccagcctggaggtaaaggtccaca

SEQ ID NO: 3851705 - DNA, 25 bp, Homo sapien
gacttcctattgcaaggatcttgaa

SEQ ID NO: 3851706 - DNA, 25 bp, Homo sapien
ggttctgcgttctggaagccttgag

SEQ ID NO: 3851707 - DNA, 25 bp, Homo sapien
cacgcaactgcctgtctctgctgct

SEQ ID NO: 3851708 - DNA, 25 bp, Homo sapien
gtctctgctgctccccgctaaactt

SEQ ID NO: 3851709 - DNA, 25 bp, Homo sapien
tgtctctgctgctccccgctaaact

SEQ ID NO: 3851710 - DNA, 25 bp, Homo sapien
tctgctgctccccgctaaacttgac

SEQ ID NO: 3851711 - DNA, 25 bp, Homo sapien
ttctgagagccatccccaacccggg

SEQ ID NO: 3851712 - DNA, 25 bp, Homo sapien
ctttggcctccgcagcagttgctgc

SEQ ID NO: 3851713 - DNA, 25 bp, Homo sapien
gactctgagacaggtctgcagccca

SEQ ID NO: 3851714 - DNA, 25 bp, Homo sapien
tcccacttgagcatgctggctgcag

SEQ ID NO: 3851715 - DNA, 25 bp, Homo sapien
gacgtggaactaacaaaatcatggt

SEQ ID NO: 3851716 - DNA, 25 bp, Homo sapien
catggtcaatgttgtaagggctaga

SEQ ID NO: 3851717 - DNA, 25 bp, Homo sapien
gccttacatcgcacatcacatggtg

SEQ ID NO: 3851718 - DNA, 25 bp, Homo sapien
tgtagttccatataccaaagcatag

SEQ ID NO: 3851719 - DNA, 25 bp, Homo sapien
ttatctcgaggtaagacaaccactg

SEQ ID NO: 3851720 - DNA, 25 bp, Homo sapien
gggtggcctctagccaatgactgag

SEQ ID NO: 3851721 - DNA, 25 bp, Homo sapien
gctttgggtgacctgaccagattcc

SEQ ID NO: 3851722 - DNA, 25 bp, Homo sapien
ggccgttgcacccattctacagctg

SEQ ID NO: 3851723 - DNA, 25 bp, Homo sapien
gtttaaaagaaacacgctactcatc

SEQ ID NO: 3851724 - DNA, 25 bp, Homo sapien
tataccctaccagtcagtgaagatg

SEQ ID NO: 3851725 - DNA, 25 bp, Homo sapien
gcatctttgagccagtactttaagt

SEQ ID NO: 3851726 - DNA, 25 bp, Homo sapien
aagatgcattgaaagagtaaagcca

SEQ ID NO: 3851727 - DNA, 25 bp, Homo sapien
ttttccagcattgacttttagagaa

SEQ ID NO: 3851728 - DNA, 25 bp, Homo sapien
tccagcattgacttttagagaaaaa

SEQ ID NO: 3851729 - DNA, 25 bp, Homo sapien
gtttcaattttgcgaattgcatcca

SEQ ID NO: 3851730 - DNA, 25 bp, Homo sapien
tttcaattttgcgaattgcatccat

SEQ ID NO: 3851731 - DNA, 25 bp, Homo sapien
gatgatggcgatacaaaaatgaatt

SEQ ID NO: 3851732 - DNA, 25 bp, Homo sapien
agatgatggcgatacaaaaatgaat

SEQ ID NO: 3851733 - DNA, 25 bp, Homo sapien
gagatggagtttcgaaaagctgcag

SEQ ID NO: 3851734 - DNA, 25 bp, Homo sapien
tgagccaccaatgttactttgaccc

SEQ ID NO: 3851735 - DNA, 25 bp, Homo sapien
gctgttagatctgccgaggcaccgt

SEQ ID NO: 3851736 - DNA, 25 bp, Homo sapien
aagctgcagctctcttaagcctgag

SEQ ID NO: 3851737 - DNA, 25 bp, Homo sapien
taaccactagtagcctaccgtttgc

SEQ ID NO: 3851738 - DNA, 25 bp, Homo sapien
aaaaattcacatatgacttctgatg

SEQ ID NO: 3851739 - DNA, 25 bp, Homo sapien
caaaagctttatggataacataaac

SEQ ID NO: 3851740 - DNA, 25 bp, Homo sapien
tgtattatgtatggcattcttacaa

SEQ ID NO: 3851741 - DNA, 25 bp, Homo sapien
gatattcaaccaataatcctcttct

SEQ ID NO: 3851742 - DNA, 25 bp, Homo sapien
tattcaaccaataatcctcttcttc

SEQ ID NO: 3851743 - DNA, 25 bp, Homo sapien
ggatattcaaccaataatcctcttc

SEQ ID NO: 3851744 - DNA, 25 bp, Homo sapien
atattcaaccaataatcctcttctt

SEQ ID NO: 3851745 - DNA, 25 bp, Homo sapien
ttcctctctaagaggccacagtttt

SEQ ID NO: 3851746 - DNA, 25 bp, Homo sapien
gcagaagattgcagaaatgtgagga

SEQ ID NO: 3851747 - DNA, 25 bp, Homo sapien
cacagttttgattgactgttttcca

SEQ ID NO: 3851748 - DNA, 25 bp, Homo sapien
tgtgaggagaggcttcacaccttcc

SEQ ID NO: 3851749 - DNA, 25 bp, Homo sapien
ctattcacacttgccgtttttttct

SEQ ID NO: 3851750 - DNA, 25 bp, Homo sapien
aaggtattgaatgcaaaatggtcct

SEQ ID NO: 3851751 - DNA, 25 bp, Homo sapien
tgagacctagatgaagggtagcgtt

SEQ ID NO: 3851752 - DNA, 25 bp, Homo sapien
aatgcaaaatggtcctgtggaaaac

SEQ ID NO: 3851753 - DNA, 25 bp, Homo sapien
tgaagggtagcgtttgtccaagagt

SEQ ID NO: 3851754 - DNA, 25 bp, Homo sapien
acttttatcatcagctagggtggcc

SEQ ID NO: 3851755 - DNA, 25 bp, Homo sapien
cttttatcatcagctagggtggcca

SEQ ID NO: 3851756 - DNA, 25 bp, Homo sapien
ctgctgacacttgcctcacacagag

SEQ ID NO: 3851757 - DNA, 25 bp, Homo sapien
gacacttgcctcacacagagtcttg

SEQ ID NO: 3851758 - DNA, 25 bp, Homo sapien
acatccttgttgagactcatgccat

SEQ ID NO: 3851759 - DNA, 25 bp, Homo sapien
ccacatccttgttgagactcatgcc

SEQ ID NO: 3851760 - DNA, 25 bp, Homo sapien
cacatccttgttgagactcatgcca

SEQ ID NO: 3851761 - DNA, 25 bp, Homo sapien
catccttgttgagactcatgccatt

SEQ ID NO: 3851762 - DNA, 25 bp, Homo sapien
tgtgcaaacccacaaatattgatgc

SEQ ID NO: 3851763 - DNA, 25 bp, Homo sapien
cacaaatattgatgctgtccctgag

SEQ ID NO: 3851764 - DNA, 25 bp, Homo sapien
tattgatgctgtccctgaggtctgc

SEQ ID NO: 3851765 - DNA, 25 bp, Homo sapien
ctgaggtctgcatccagtcctttct

SEQ ID NO: 3851766 - DNA, 25 bp, Homo sapien
ccagtgcagcctctaagctcagttt

SEQ ID NO: 3851767 - DNA, 25 bp, Homo sapien
tattccttgaatgcaccagtgcagc

SEQ ID NO: 3851768 - DNA, 25 bp, Homo sapien
caccagtgcagcctctaagctcagt

SEQ ID NO: 3851769 - DNA, 25 bp, Homo sapien
gcaccagtgcagcctctaagctcag

SEQ ID NO: 3851770 - DNA, 25 bp, Homo sapien
tctgaagaaaatggtagagctttgc

SEQ ID NO: 3851771 - DNA, 25 bp, Homo sapien
ggcctcttctgtgattcacctttgg

SEQ ID NO: 3851772 - DNA, 25 bp, Homo sapien
gttcatgaaaggcagtttaggtcac

SEQ ID NO: 3851773 - DNA, 25 bp, Homo sapien
aaaggcagtttaggtcacatggtga

SEQ ID NO: 3851774 - DNA, 25 bp, Homo sapien
acaatggagagatataagagagctg

SEQ ID NO: 3851775 - DNA, 25 bp, Homo sapien
caatggagagatataagagagctgc

SEQ ID NO: 3851776 - DNA, 25 bp, Homo sapien
aatggagagatataagagagctgct

SEQ ID NO: 3851777 - DNA, 25 bp, Homo sapien
cttgccatctgcagtatcctggtca

SEQ ID NO: 3851778 - DNA, 25 bp, Homo sapien
tcctggtcagactctatatatccag

SEQ ID NO: 3851779 - DNA, 25 bp, Homo sapien
tggtcagactctatatatccagtta

SEQ ID NO: 3851780 - DNA, 25 bp, Homo sapien
tgcagtatcctggtcagactctata

SEQ ID NO: 3851781 - DNA, 25 bp, Homo sapien
tcctagactgtaaagcataaagctt

SEQ ID NO: 3851782 - DNA, 25 bp, Homo sapien
aaattctttacttgtgttctgagtg

SEQ ID NO: 3851783 - DNA, 25 bp, Homo sapien
tgtgttctgagtgtcttcccctttc

SEQ ID NO: 3851784 - DNA, 25 bp, Homo sapien
aaagcttgagttcattcattgttga

SEQ ID NO: 3851785 - DNA, 25 bp, Homo sapien
ttgctgctacctcgtgagaattgcc

SEQ ID NO: 3851786 - DNA, 25 bp, Homo sapien
cctcgtgagaattgccatggaatgc

SEQ ID NO: 3851787 - DNA, 25 bp, Homo sapien
gatctgtgcggcataaacggtctca

SEQ ID NO: 3851788 - DNA, 25 bp, Homo sapien
tgatgctgatctgtgcggcataaac

SEQ ID NO: 3851789 - DNA, 25 bp, Homo sapien
tgggaagtctacatgggtctcatcc

SEQ ID NO: 3851790 - DNA, 25 bp, Homo sapien
caaaatctgtccagcaagataacag

SEQ ID NO: 3851791 - DNA, 25 bp, Homo sapien
caatttccctatcagttgaggaggc

SEQ ID NO: 3851792 - DNA, 25 bp, Homo sapien
gaagctgtgactgataaatgacgat

SEQ ID NO: 3851793 - DNA, 25 bp, Homo sapien
tttgtgtttatgtggcaccttcccc

SEQ ID NO: 3851794 - DNA, 25 bp, Homo sapien
gactgtcaagtctcatagcactgca

SEQ ID NO: 3851795 - DNA, 25 bp, Homo sapien
tgctgaggagactgtcaagtctcat

SEQ ID NO: 3851796 - DNA, 25 bp, Homo sapien
gcagaggttatgagccctggaaatg

SEQ ID NO: 3851797 - DNA, 25 bp, Homo sapien
taaacaaagctctataatggacaca

SEQ ID NO: 3851798 - DNA, 25 bp, Homo sapien
ggaaacagcttgaagacgtatgaaa

SEQ ID NO: 3851799 - DNA, 25 bp, Homo sapien
cagaaagaggtgaccatctcctcaa

SEQ ID NO: 3851800 - DNA, 25 bp, Homo sapien
gtagacataatcagaggaaacagct

SEQ ID NO: 3851801 - DNA, 25 bp, Homo sapien
tcttgaatttgctatggccgtggac

SEQ ID NO: 3851802 - DNA, 25 bp, Homo sapien
gaagaacctgcatcattgctgcaag

SEQ ID NO: 3851803 - DNA, 25 bp, Homo sapien
cagttgctcctggacagctacaagg

SEQ ID NO: 3851804 - DNA, 25 bp, Homo sapien
ggatgagcttcgcagagatcttgaa

SEQ ID NO: 3851805 - DNA, 25 bp, Homo sapien
tacttctgttgtgttgacagtggtt

SEQ ID NO: 3851806 - DNA, 25 bp, Homo sapien
tgttgtgttgacagtggtttcagat

SEQ ID NO: 3851807 - DNA, 25 bp, Homo sapien
tctgttgtgttgacagtggtttcag

SEQ ID NO: 3851808 - DNA, 25 bp, Homo sapien
gccatatacttctgttgtgttgaca

SEQ ID NO: 3851809 - DNA, 25 bp, Homo sapien
agtggagataagtctctctcattcc

SEQ ID NO: 3851810 - DNA, 25 bp, Homo sapien
cattcctggtatattttacactttt

SEQ ID NO: 3851811 - DNA, 25 bp, Homo sapien
ttagtggagataagtctctctcatt

SEQ ID NO: 3851812 - DNA, 25 bp, Homo sapien
tctcattcctggtatattttacact

SEQ ID NO: 3851813 - DNA, 25 bp, Homo sapien
tcagtcctcgtatatgctgccagga

SEQ ID NO: 3851814 - DNA, 25 bp, Homo sapien
tgccaggagatccacaacaaaagtc

SEQ ID NO: 3851815 - DNA, 25 bp, Homo sapien
cttcagtcctcgtatatgctgccag

SEQ ID NO: 3851816 - DNA, 25 bp, Homo sapien
ccaggagatccacaacaaaagtcat

SEQ ID NO: 3851817 - DNA, 25 bp, Homo sapien
tcacaagggcacctctggtatgtct

SEQ ID NO: 3851818 - DNA, 25 bp, Homo sapien
gagaactcttatgcagggatgaaca

SEQ ID NO: 3851819 - DNA, 25 bp, Homo sapien
tatgtctggaaacgtagagaactct

SEQ ID NO: 3851820 - DNA, 25 bp, Homo sapien
tgtagagcgtcattttcacaagggc

SEQ ID NO: 3851821 - DNA, 25 bp, Homo sapien
tcagtcgactctaaaaaaggccatg

SEQ ID NO: 3851822 - DNA, 25 bp, Homo sapien
catgcagggtctcaaacaaggagta

SEQ ID NO: 3851823 - DNA, 25 bp, Homo sapien
tgcacacgtgtgacctccataaaga

SEQ ID NO: 3851824 - DNA, 25 bp, Homo sapien
ggctccaccgtaagaaatatcagaa

SEQ ID NO: 3851825 - DNA, 25 bp, Homo sapien
gcagccataaagcatctcgtctcag

SEQ ID NO: 3851826 - DNA, 25 bp, Homo sapien
ataaaacttatggtcggccccacag

SEQ ID NO: 3851827 - DNA, 25 bp, Homo sapien
tcttgcctgcggatgggattctggt

SEQ ID NO: 3851828 - DNA, 25 bp, Homo sapien
ggactgctagatgccataatgcagc

SEQ ID NO: 3851829 - DNA, 25 bp, Homo sapien
catgggaaccacaatctctaggaca

SEQ ID NO: 3851830 - DNA, 25 bp, Homo sapien
caattaacagaggatacctagccca

SEQ ID NO: 3851831 - DNA, 25 bp, Homo sapien
taaaaacagtaacatctcaggtggc

SEQ ID NO: 3851832 - DNA, 25 bp, Homo sapien
tatacaataggcaggctgtcttggc

SEQ ID NO: 3851833 - DNA, 25 bp, Homo sapien
tcaaaaggtacataggtggatcacc

SEQ ID NO: 3851834 - DNA, 25 bp, Homo sapien
taacatctggcagggatactggtgg

SEQ ID NO: 3851835 - DNA, 25 bp, Homo sapien
gaaatttctggcaatcctctgcaga

SEQ ID NO: 3851836 - DNA, 25 bp, Homo sapien
gagttcttattagcaggatcaagca

SEQ ID NO: 3851837 - DNA, 25 bp, Homo sapien
tattatgaagtccattatgaactca

SEQ ID NO: 3851838 - DNA, 25 bp, Homo sapien
tatgaactcaactaggaatgaacac

SEQ ID NO: 3851839 - DNA, 25 bp, Homo sapien
aactaggaatgaacacagtgactgg

SEQ ID NO: 3851840 - DNA, 25 bp, Homo sapien
tagttcaatggtacagttcatgcag

SEQ ID NO: 3851841 - DNA, 25 bp, Homo sapien
gtattacagataaacaggactctct

SEQ ID NO: 3851842 - DNA, 25 bp, Homo sapien
gataatctctatgatgggaaacgct

SEQ ID NO: 3851843 - DNA, 25 bp, Homo sapien
taggtgctgaccatacagaaatgac

SEQ ID NO: 3851844 - DNA, 25 bp, Homo sapien
gcttttgttgatttagcgcccaata

SEQ ID NO: 3851845 - DNA, 25 bp, Homo sapien
ctccacatcacaactgggtgccggg

SEQ ID NO: 3851846 - DNA, 25 bp, Homo sapien
cactcatgacttgcaatggatggat

SEQ ID NO: 3851847 - DNA, 25 bp, Homo sapien
gcccagcaggactctggattcggat

SEQ ID NO: 3851848 - DNA, 25 bp, Homo sapien
gattcggatgatcttggttgaggca

SEQ ID NO: 3851849 - DNA, 25 bp, Homo sapien
cgtttctttctcacagtatgaaatg

SEQ ID NO: 3851850 - DNA, 25 bp, Homo sapien
ctttctcacagtatgaaatgaaagt

SEQ ID NO: 3851851 - DNA, 25 bp, Homo sapien
ttctcacagtatgaaatgaaagtca

SEQ ID NO: 3851852 - DNA, 25 bp, Homo sapien
tttctttctcacagtatgaaatgaa

SEQ ID NO: 3851853 - DNA, 25 bp, Homo sapien
ccacgtgttgctgctaaaacaggaa

SEQ ID NO: 3851854 - DNA, 25 bp, Homo sapien
taatcttggtacagaagcagagaac

SEQ ID NO: 3851855 - DNA, 25 bp, Homo sapien
tcctcaaagcctatgccacgtgttg

SEQ ID NO: 3851856 - DNA, 25 bp, Homo sapien
tgagcttactaaaggcacggcattt

SEQ ID NO: 3851857 - DNA, 25 bp, Homo sapien
gcacattcctatagttgtcaaatac

SEQ ID NO: 3851858 - DNA, 25 bp, Homo sapien
cagctcaactcgtgaacatcaggat

SEQ ID NO: 3851859 - DNA, 25 bp, Homo sapien
gctgcactttgcctaatggggaatt

SEQ ID NO: 3851860 - DNA, 25 bp, Homo sapien
catcaggatgtctgcatccagctct

SEQ ID NO: 3851861 - DNA, 25 bp, Homo sapien
gctttaacttgactgcagattttca

SEQ ID NO: 3851862 - DNA, 25 bp, Homo sapien
ttggtgggagtagaacttaatctgt

SEQ ID NO: 3851863 - DNA, 25 bp, Homo sapien
tcagctttaacttgactgcagattt

SEQ ID NO: 3851864 - DNA, 25 bp, Homo sapien
gtagaacttaatctgttccaggtag

SEQ ID NO: 3851865 - DNA, 25 bp, Homo sapien
gctgctgtttagcaaattcaggttt

SEQ ID NO: 3851866 - DNA, 25 bp, Homo sapien
tgacagctgctgtttagcaaattca

SEQ ID NO: 3851867 - DNA, 25 bp, Homo sapien
agctgctgtttagcaaattcaggtt

SEQ ID NO: 3851868 - DNA, 25 bp, Homo sapien
ctatgacagctgctgtttagcaaat

SEQ ID NO: 3851869 - DNA, 25 bp, Homo sapien
tctgccgagcaaggacatccatcct

SEQ ID NO: 3851870 - DNA, 25 bp, Homo sapien
ggacatccatccttgatcctgattc

SEQ ID NO: 3851871 - DNA, 25 bp, Homo sapien
tagcaatctgccgagcaaggacatc

SEQ ID NO: 3851872 - DNA, 25 bp, Homo sapien
ctgattagcaatctgccgagcaagg

SEQ ID NO: 3851873 - DNA, 25 bp, Homo sapien
tgtatgctttagtggtcctttgccc

SEQ ID NO: 3851874 - DNA, 25 bp, Homo sapien
agatcacatcagttgtatgctttag

SEQ ID NO: 3851875 - DNA, 25 bp, Homo sapien
catcagttgtatgctttagtggtcc

SEQ ID NO: 3851876 - DNA, 25 bp, Homo sapien
tgcatagatcacatcagttgtatgc

SEQ ID NO: 3851877 - DNA, 25 bp, Homo sapien
tttatatatgttagctgtggtgttc

SEQ ID NO: 3851878 - DNA, 25 bp, Homo sapien
aatttatatatgttagctgtggtgt

SEQ ID NO: 3851879 - DNA, 25 bp, Homo sapien
ttatatatgttagctgtggtgttca

SEQ ID NO: 3851880 - DNA, 25 bp, Homo sapien
atttatatatgttagctgtggtgtt

SEQ ID NO: 3851881 - DNA, 25 bp, Homo sapien
tgacactgcctcatccttgactctc

SEQ ID NO: 3851882 - DNA, 25 bp, Homo sapien
gacactgcctcatccttgactctct

SEQ ID NO: 3851883 - DNA, 25 bp, Homo sapien
taagactgtgcctgttccatgggat

SEQ ID NO: 3851884 - DNA, 25 bp, Homo sapien
tgtttacgccaggagctggcatccg

SEQ ID NO: 3851885 - DNA, 25 bp, Homo sapien
ggcgtccctcttcacattgagcttt

SEQ ID NO: 3851886 - DNA, 25 bp, Homo sapien
agctggcatccgaaaggcgtccctc

SEQ ID NO: 3851887 - DNA, 25 bp, Homo sapien
tttaagtggcaaacagagagaggga

SEQ ID NO: 3851888 - DNA, 25 bp, Homo sapien
cagaggaatcagtcacaactttgca

SEQ ID NO: 3851889 - DNA, 25 bp, Homo sapien
tcacttggagtagaacactgatatc

SEQ ID NO: 3851890 - DNA, 25 bp, Homo sapien
ttgctagaattcgaacacctcacgg

SEQ ID NO: 3851891 - DNA, 25 bp, Homo sapien
ttttgagagcgtatcattaaagatc

SEQ ID NO: 3851892 - DNA, 25 bp, Homo sapien
tttgaatttttgagagcgtatcatt

SEQ ID NO: 3851893 - DNA, 25 bp, Homo sapien
tttttgagagcgtatcattaaagat

SEQ ID NO: 3851894 - DNA, 25 bp, Homo sapien
gaatttttgagagcgtatcattaaa

SEQ ID NO: 3851895 - DNA, 25 bp, Homo sapien
tcttccggtttagtctcgattgttc

SEQ ID NO: 3851896 - DNA, 25 bp, Homo sapien
ctttcttccggtttagtctcgattg

SEQ ID NO: 3851897 - DNA, 25 bp, Homo sapien
catcactcctaaagtttttatccct

SEQ ID NO: 3851898 - DNA, 25 bp, Homo sapien
tgttttcattgaactgagttccatc

SEQ ID NO: 3851899 - DNA, 25 bp, Homo sapien
ggaagacagtagcttcgtggctgca

SEQ ID NO: 3851900 - DNA, 25 bp, Homo sapien
tgatggtgatggcaactttctctgt

SEQ ID NO: 3851901 - DNA, 25 bp, Homo sapien
tctctgtaggagtaactgaacaaca

SEQ ID NO: 3851902 - DNA, 25 bp, Homo sapien
catgcattccagtggcaaggagtct

SEQ ID NO: 3851903 - DNA, 25 bp, Homo sapien
tatttgatccacatattcctccatg

SEQ ID NO: 3851904 - DNA, 25 bp, Homo sapien
taattcttgagtgcaacaggccatg

SEQ ID NO: 3851905 - DNA, 25 bp, Homo sapien
tggttaattcttgagtgcaacaggc

SEQ ID NO: 3851906 - DNA, 25 bp, Homo sapien
gttaattcttgagtgcaacaggcca

SEQ ID NO: 3851907 - DNA, 25 bp, Homo sapien
caagattccgcgtggacagaattta

SEQ ID NO: 3851908 - DNA, 25 bp, Homo sapien
aagattccgcgtggacagaatttac

SEQ ID NO: 3851909 - DNA, 25 bp, Homo sapien
tcaagattccgcgtggacagaattt

SEQ ID NO: 3851910 - DNA, 25 bp, Homo sapien
aactttctcacatacatcatcacct

SEQ ID NO: 3851911 - DNA, 25 bp, Homo sapien
gcctccattctcatgaactttctca

SEQ ID NO: 3851912 - DNA, 25 bp, Homo sapien
tggcctccattctcatgaactttct

SEQ ID NO: 3851913 - DNA, 25 bp, Homo sapien
tgaactttctcacatacatcatcac

SEQ ID NO: 3851914 - DNA, 25 bp, Homo sapien
tcctcatggctttacccttcattgt

SEQ ID NO: 3851915 - DNA, 25 bp, Homo sapien
catggctttacccttcattgttgtc

SEQ ID NO: 3851916 - DNA, 25 bp, Homo sapien
tctgttcctcatggctttacccttc

SEQ ID NO: 3851917 - DNA, 25 bp, Homo sapien
tctgcccacttcttcaaagcttctg

SEQ ID NO: 3851918 - DNA, 25 bp, Homo sapien
tgaaatcagcaacttgctcagcaat

SEQ ID NO: 3851919 - DNA, 25 bp, Homo sapien
catacacatgttcttggccagaaca

SEQ ID NO: 3851920 - DNA, 25 bp, Homo sapien
tatcatcccatatctcaatctcagc

SEQ ID NO: 3851921 - DNA, 25 bp, Homo sapien
ggccagaacaatgatgtcgttgctt

SEQ ID NO: 3851922 - DNA, 25 bp, Homo sapien
ttctccatcttgactaccggtcatt

SEQ ID NO: 3851923 - DNA, 25 bp, Homo sapien
ccatcttgactaccggtcattatca

SEQ ID NO: 3851924 - DNA, 25 bp, Homo sapien
ttgactaccggtcattatcattctc

SEQ ID NO: 3851925 - DNA, 25 bp, Homo sapien
gactaccggtcattatcattctctc

SEQ ID NO: 3851926 - DNA, 25 bp, Homo sapien
atccaactgccccttctcagagtcc

SEQ ID NO: 3851927 - DNA, 25 bp, Homo sapien
cagtcagataatgaggcccttcaag

SEQ ID NO: 3851928 - DNA, 25 bp, Homo sapien
ctgaattccatgacccagtttacag

SEQ ID NO: 3851929 - DNA, 25 bp, Homo sapien
taaattggaagtagacagaaggtgt

SEQ ID NO: 3851930 - DNA, 25 bp, Homo sapien
tcaaaaaagagacagactactcagt

SEQ ID NO: 3851931 - DNA, 25 bp, Homo sapien
gagccagtctaaagacacagtatca

SEQ ID NO: 3851932 - DNA, 25 bp, Homo sapien
agtatcaacatggttactacttgat

SEQ ID NO: 3851933 - DNA, 25 bp, Homo sapien
atggttactacttgatcctactggg

SEQ ID NO: 3851934 - DNA, 25 bp, Homo sapien
ctggggaccctttcaggttctgtgg

SEQ ID NO: 3851935 - DNA, 25 bp, Homo sapien
atcatcaagtttgtaacctataatg

SEQ ID NO: 3851936 - DNA, 25 bp, Homo sapien
gagatcatcaagtttgtaacctata

SEQ ID NO: 3851937 - DNA, 25 bp, Homo sapien
gtaacctataatgggcagccagtca

SEQ ID NO: 3851938 - DNA, 25 bp, Homo sapien
tgtaacctataatgggcagccagtc

SEQ ID NO: 3851939 - DNA, 25 bp, Homo sapien
aatgctggtgtgactgcggacctcg

SEQ ID NO: 3851940 - DNA, 25 bp, Homo sapien
tgtgactgcggacctcgtgttcctc

SEQ ID NO: 3851941 - DNA, 25 bp, Homo sapien
tctgaatgctggtgtgactgcggac

SEQ ID NO: 3851942 - DNA, 25 bp, Homo sapien
gcggacctcgtgttcctcttcaagg

SEQ ID NO: 3851943 - DNA, 25 bp, Homo sapien
ttttgtaaagggactaggaggatca

SEQ ID NO: 3851944 - DNA, 25 bp, Homo sapien
gagtatcttgtaactgcacgctcca

SEQ ID NO: 3851945 - DNA, 25 bp, Homo sapien
agagactttgccttcgtccggttct

SEQ ID NO: 3851946 - DNA, 25 bp, Homo sapien
tgggttgaactccaataaagagact

SEQ ID NO: 3851947 - DNA, 25 bp, Homo sapien
tttcacgaagaagctcacatctgac

SEQ ID NO: 3851948 - DNA, 25 bp, Homo sapien
tatgaaggactggttacttctagct

SEQ ID NO: 3851949 - DNA, 25 bp, Homo sapien
cacatctgacatagctttcagagac

SEQ ID NO: 3851950 - DNA, 25 bp, Homo sapien
tctagcttgaaggaagtgtgatagg

SEQ ID NO: 3851951 - DNA, 25 bp, Homo sapien
gctgtgaatctgtctagtcctgtat

SEQ ID NO: 3851952 - DNA, 25 bp, Homo sapien
gaattagtgtcaaagggattggtac

SEQ ID NO: 3851953 - DNA, 25 bp, Homo sapien
gtcctgatttaacctaggagagctg

SEQ ID NO: 3851954 - DNA, 25 bp, Homo sapien
tctgtcttgtgaattagtgtcaaag

SEQ ID NO: 3851955 - DNA, 25 bp, Homo sapien
ttttcaacttttccagttatgcatg

SEQ ID NO: 3851956 - DNA, 25 bp, Homo sapien
ttttttcaacttttccagttatgca

SEQ ID NO: 3851957 - DNA, 25 bp, Homo sapien
cttttccagttatgcatgaagacat

SEQ ID NO: 3851958 - DNA, 25 bp, Homo sapien
tcaacttttccagttatgcatgaag

SEQ ID NO: 3851959 - DNA, 25 bp, Homo sapien
catatattgtcttgaagagaatcag

SEQ ID NO: 3851960 - DNA, 25 bp, Homo sapien
tgacaaagaagcacatgtatgtaca

SEQ ID NO: 3851961 - DNA, 25 bp, Homo sapien
tgtttccaagaaatcgcctgaaagt

SEQ ID NO: 3851962 - DNA, 25 bp, Homo sapien
gaagtagcgttcagataaatggcat

SEQ ID NO: 3851963 - DNA, 25 bp, Homo sapien
ctgaccgccagttcttgcaagggtt

SEQ ID NO: 3851964 - DNA, 25 bp, Homo sapien
gaccgccagttcttgcaagggttct

SEQ ID NO: 3851965 - DNA, 25 bp, Homo sapien
cagttcttgcaagggttctggacat

SEQ ID NO: 3851966 - DNA, 25 bp, Homo sapien
tgaccgccagttcttgcaagggttc

SEQ ID NO: 3851967 - DNA, 25 bp, Homo sapien
aaagctattgcacctactgcaaaag

SEQ ID NO: 3851968 - DNA, 25 bp, Homo sapien
aatggaattgtaaacagacggtagc

SEQ ID NO: 3851969 - DNA, 25 bp, Homo sapien
tatttcacagttccatacaatctcc

SEQ ID NO: 3851970 - DNA, 25 bp, Homo sapien
cggtagcctcctcttgtgtcaatca

SEQ ID NO: 3851971 - DNA, 25 bp, Homo sapien
ctggatgccaccaggaggcggtgta

SEQ ID NO: 3851972 - DNA, 25 bp, Homo sapien
gcggtgtaggaagcaacacgtgcat

SEQ ID NO: 3851973 - DNA, 25 bp, Homo sapien
caaaagatgtggctcaactgtggac

SEQ ID NO: 3851974 - DNA, 25 bp, Homo sapien
tgtggctcaactgtggacactggat

SEQ ID NO: 3851975 - DNA, 25 bp, Homo sapien
tataaccaggagtcattactactct

SEQ ID NO: 3851976 - DNA, 25 bp, Homo sapien
tactactctgtatttgataagtgta

SEQ ID NO: 3851977 - DNA, 25 bp, Homo sapien
ccctacacagcgtataaccaggagt

SEQ ID NO: 3851978 - DNA, 25 bp, Homo sapien
ccaggagtcattactactctgtatt

SEQ ID NO: 3851979 - DNA, 25 bp, Homo sapien
tcctcaccaacatttctgatttttt

SEQ ID NO: 3851980 - DNA, 25 bp, Homo sapien
atttttggaggaaacattatactat

SEQ ID NO: 3851981 - DNA, 25 bp, Homo sapien
ttcaaaatagatgtcctaatttaca

SEQ ID NO: 3851982 - DNA, 25 bp, Homo sapien
aaaatagatgtcctaatttacattc

SEQ ID NO: 3851983 - DNA, 25 bp, Homo sapien
tagccgttaggactatggagagaaa

SEQ ID NO: 3851984 - DNA, 25 bp, Homo sapien
ttagtgccaagcaccgggaactgtc

SEQ ID NO: 3851985 - DNA, 25 bp, Homo sapien
gggagaagcgcacatttgatagccg

SEQ ID NO: 3851986 - DNA, 25 bp, Homo sapien
gacagggaactatgatcattagtgc

SEQ ID NO: 3851987 - DNA, 25 bp, Homo sapien
gaagtcgtgtagaggttcccctaga

SEQ ID NO: 3851988 - DNA, 25 bp, Homo sapien
cctgtagaagtcgtgtagaggttcc

SEQ ID NO: 3851989 - DNA, 25 bp, Homo sapien
aggaatccctgtagaagtcgtgtag

SEQ ID NO: 3851990 - DNA, 25 bp, Homo sapien
gtcgtgtagaggttcccctagaggc

SEQ ID NO: 3851991 - DNA, 25 bp, Homo sapien
tcttctttgagatgtccacaaattg

SEQ ID NO: 3851992 - DNA, 25 bp, Homo sapien
gaattgtatcatagatcttctttga

SEQ ID NO: 3851993 - DNA, 25 bp, Homo sapien
cgaatcatcatgactgaacatctga

SEQ ID NO: 3851994 - DNA, 25 bp, Homo sapien
tatcatccaacacattcaatgagct

SEQ ID NO: 3851995 - DNA, 25 bp, Homo sapien
catctcttgcaattctgcctgccat

SEQ ID NO: 3851996 - DNA, 25 bp, Homo sapien
ttctttttaaagctgaatttccaca

SEQ ID NO: 3851997 - DNA, 25 bp, Homo sapien
tctttttaaagctgaatttccacat

SEQ ID NO: 3851998 - DNA, 25 bp, Homo sapien
tctgtcaggcagaagtcccagtcat

SEQ ID NO: 3851999 - DNA, 25 bp, Homo sapien
caagataattgtcccacgttctgtc

SEQ ID NO: 3852000 - DNA, 25 bp, Homo sapien
tagttaccgctcaggaaataacctg

SEQ ID NO: 3852001 - DNA, 25 bp, Homo sapien
gctcaggaaataacctgtcagcaca

SEQ ID NO: 3852002 - DNA, 25 bp, Homo sapien
gtccagcttgcgaggatggagccat

SEQ ID NO: 3852003 - DNA, 25 bp, Homo sapien
gaacttgcttgtcaaatgtgccaag

SEQ ID NO: 3852004 - DNA, 25 bp, Homo sapien
gtgggcagtagttcctgaggcatac

SEQ ID NO: 3852005 - DNA, 25 bp, Homo sapien
aataaggtttactaactgagactga

SEQ ID NO: 3852006 - DNA, 25 bp, Homo sapien
ccagagtgggcagtagttcctgagg

SEQ ID NO: 3852007 - DNA, 25 bp, Homo sapien
ggtttgtccactttgccaatatcat

SEQ ID NO: 3852008 - DNA, 25 bp, Homo sapien
tattcaagtaggctgcaattgcatt

SEQ ID NO: 3852009 - DNA, 25 bp, Homo sapien
tcaagtaggctgcaattgcattaac

SEQ ID NO: 3852010 - DNA, 25 bp, Homo sapien
attcaagtaggctgcaattgcatta

SEQ ID NO: 3852011 - DNA, 25 bp, Homo sapien
tttattcaagtaggctgcaattgca

SEQ ID NO: 3852012 - DNA, 25 bp, Homo sapien
cagccaatgtaaactgaatgtgaat

SEQ ID NO: 3852013 - DNA, 25 bp, Homo sapien
gcttcgtcaattcctggtcacttga

SEQ ID NO: 3852014 - DNA, 25 bp, Homo sapien
tgaatcttacaaattcttgccttag

SEQ ID NO: 3852015 - DNA, 25 bp, Homo sapien
gagttatctccacaacccttggcca

SEQ ID NO: 3852016 - DNA, 25 bp, Homo sapien
gagtgccgtctaatgtcccaattcc

SEQ ID NO: 3852017 - DNA, 25 bp, Homo sapien
acagggttacagatagttcctgcta

SEQ ID NO: 3852018 - DNA, 25 bp, Homo sapien
agttcctgctacttgagtgccgtct

SEQ ID NO: 3852019 - DNA, 25 bp, Homo sapien
tacttgagtgccgtctaatgtccca

SEQ ID NO: 3852020 - DNA, 25 bp, Homo sapien
ttctgggctctcagtaagtaaagag

SEQ ID NO: 3852021 - DNA, 25 bp, Homo sapien
aagagactcattgaaggtgttaggt

SEQ ID NO: 3852022 - DNA, 25 bp, Homo sapien
gggaaagagttgtaaccaagtgtga

SEQ ID NO: 3852023 - DNA, 25 bp, Homo sapien
cagtaagtaaagagactcattgaag

SEQ ID NO: 3852024 - DNA, 25 bp, Homo sapien
tttgcttcctcgttgataatcatcc

SEQ ID NO: 3852025 - DNA, 25 bp, Homo sapien
gcaagtagttccattgtcccagtga

SEQ ID NO: 3852026 - DNA, 25 bp, Homo sapien
gtcccagtgatgtccaattaagttg

SEQ ID NO: 3852027 - DNA, 25 bp, Homo sapien
gaattggctttgcaacaagctgctg

SEQ ID NO: 3852028 - DNA, 25 bp, Homo sapien
ctttgcactggtgaataaccacaca

SEQ ID NO: 3852029 - DNA, 25 bp, Homo sapien
acaggtgttctagagttacagaaga

SEQ ID NO: 3852030 - DNA, 25 bp, Homo sapien
ccatgccaattcatctccactgttg

SEQ ID NO: 3852031 - DNA, 25 bp, Homo sapien
actggtgaataaccacacagcatgt

SEQ ID NO: 3852032 - DNA, 25 bp, Homo sapien
taagagctacagtgcacgagaacag

SEQ ID NO: 3852033 - DNA, 25 bp, Homo sapien
gagcatatacttgtctgggatgatg

SEQ ID NO: 3852034 - DNA, 25 bp, Homo sapien
cagtatatctgaggagttcatcaag

SEQ ID NO: 3852035 - DNA, 25 bp, Homo sapien
gatgtaattgagttggcacgtccct

SEQ ID NO: 3852036 - DNA, 25 bp, Homo sapien
tcagaattccttttagtaaggcatg

SEQ ID NO: 3852037 - DNA, 25 bp, Homo sapien
gctcagaattccttttagtaaggca

SEQ ID NO: 3852038 - DNA, 25 bp, Homo sapien
cagaattccttttagtaaggcatgc

SEQ ID NO: 3852039 - DNA, 25 bp, Homo sapien
gaattccttttagtaaggcatgctt

SEQ ID NO: 3852040 - DNA, 25 bp, Homo sapien
tgcagctgttattggcaactgactt

SEQ ID NO: 3852041 - DNA, 25 bp, Homo sapien
cagctgttattggcaactgacttac

SEQ ID NO: 3852042 - DNA, 25 bp, Homo sapien
gcagctgttattggcaactgactta

SEQ ID NO: 3852043 - DNA, 25 bp, Homo sapien
taactgtccatttcacccgtgacga

SEQ ID NO: 3852044 - DNA, 25 bp, Homo sapien
cccgtgacgatgtgagcaactcttg

SEQ ID NO: 3852045 - DNA, 25 bp, Homo sapien
gcatcctggtctcttaaggctatga

SEQ ID NO: 3852046 - DNA, 25 bp, Homo sapien
cgcagcacggtctaaattatcagca

SEQ ID NO: 3852047 - DNA, 25 bp, Homo sapien
tctgaagagtgtctcctgacctcat

SEQ ID NO: 3852048 - DNA, 25 bp, Homo sapien
taacattctggatctgtaataagga

SEQ ID NO: 3852049 - DNA, 25 bp, Homo sapien
gtaatgttaacattctggatctgta

SEQ ID NO: 3852050 - DNA, 25 bp, Homo sapien
ttctggatctgtaataaggagccat

SEQ ID NO: 3852051 - DNA, 25 bp, Homo sapien
taatgttaacattctggatctgtaa

SEQ ID NO: 3852052 - DNA, 25 bp, Homo sapien
ccactgttattctgattaagtaatc

SEQ ID NO: 3852053 - DNA, 25 bp, Homo sapien
gcctggcttgctccactgttattct

SEQ ID NO: 3852054 - DNA, 25 bp, Homo sapien
gttttctactccttcagtggcctgg

SEQ ID NO: 3852055 - DNA, 25 bp, Homo sapien
attctctctccctaccagttgcgtt

SEQ ID NO: 3852056 - DNA, 25 bp, Homo sapien
gatcatcttcccatcttttgcctac

SEQ ID NO: 3852057 - DNA, 25 bp, Homo sapien
tcacagatcatcttcccatcttttg

SEQ ID NO: 3852058 - DNA, 25 bp, Homo sapien
acagatcatcttcccatcttttgcc

SEQ ID NO: 3852059 - DNA, 25 bp, Homo sapien
agatcatcttcccatcttttgccta

SEQ ID NO: 3852060 - DNA, 25 bp, Homo sapien
gcgtgctgtgtttctaaggctcttt

SEQ ID NO: 3852061 - DNA, 25 bp, Homo sapien
cagagatgtactgttcgtgtttgga

SEQ ID NO: 3852062 - DNA, 25 bp, Homo sapien
tactgttcgtgtttggaatgcgtgc

SEQ ID NO: 3852063 - DNA, 25 bp, Homo sapien
cgtgtttggaatgcgtgctgtgttt

SEQ ID NO: 3852064 - DNA, 25 bp, Homo sapien
gactgacctgctacaagaccctggt

SEQ ID NO: 3852065 - DNA, 25 bp, Homo sapien
ggactgacctgctacaagaccctgg

SEQ ID NO: 3852066 - DNA, 25 bp, Homo sapien
taaacagtgatagaatcagtaaaga

SEQ ID NO: 3852067 - DNA, 25 bp, Homo sapien
tagcgtaatagtaagtaacagaccc

SEQ ID NO: 3852068 - DNA, 25 bp, Homo sapien
gagcatgtttaggtcacttagttaa

SEQ ID NO: 3852069 - DNA, 25 bp, Homo sapien
ttatttgttgttggctgtccgaagg

SEQ ID NO: 3852070 - DNA, 25 bp, Homo sapien
ttttggtggaaacctgaggcattca

SEQ ID NO: 3852071 - DNA, 25 bp, Homo sapien
ggctctagacatggaaaagtggata

SEQ ID NO: 3852072 - DNA, 25 bp, Homo sapien
gaacgcacgaacaggaagtttgaag

SEQ ID NO: 3852073 - DNA, 25 bp, Homo sapien
aacatgggctttggataggaggaac

SEQ ID NO: 3852074 - DNA, 25 bp, Homo sapien
gatttgggcagtgtgttctacagca

SEQ ID NO: 3852075 - DNA, 25 bp, Homo sapien
cacaggaagagccatttcgtccagg

SEQ ID NO: 3852076 - DNA, 25 bp, Homo sapien
ttcgtccaggtttgttgagatttgg

SEQ ID NO: 3852077 - DNA, 25 bp, Homo sapien
tgttctacagcaaagacatctcccc

SEQ ID NO: 3852078 - DNA, 25 bp, Homo sapien
tacacagggtgcattgacgaaccaa

SEQ ID NO: 3852079 - DNA, 25 bp, Homo sapien
tcaaagactactacatacacagggt

SEQ ID NO: 3852080 - DNA, 25 bp, Homo sapien
gaactgactgatatctactcgagag

SEQ ID NO: 3852081 - DNA, 25 bp, Homo sapien
taatttgatctttggagccgagaag

SEQ ID NO: 3852082 - DNA, 25 bp, Homo sapien
tttggtaaatagacatccttaaatg

SEQ ID NO: 3852083 - DNA, 25 bp, Homo sapien
ctcttttggtaaatagacatcctta

SEQ ID NO: 3852084 - DNA, 25 bp, Homo sapien
tggtaaatagacatccttaaatgga

SEQ ID NO: 3852085 - DNA, 25 bp, Homo sapien
ctgctcttttggtaaatagacatcc

SEQ ID NO: 3852086 - DNA, 25 bp, Homo sapien
ggatatcctttttcttcatccccat

SEQ ID NO: 3852087 - DNA, 25 bp, Homo sapien
cattagtggccatgatatcagtctc

SEQ ID NO: 3852088 - DNA, 25 bp, Homo sapien
atcagtctctttgttttggatatcc

SEQ ID NO: 3852089 - DNA, 25 bp, Homo sapien
cagtctctttgttttggatatcctt

SEQ ID NO: 3852090 - DNA, 25 bp, Homo sapien
tggcgtgatctccggtcactacaag

SEQ ID NO: 3852091 - DNA, 25 bp, Homo sapien
tgatctccggtcactacaagctctg

SEQ ID NO: 3852092 - DNA, 25 bp, Homo sapien
tcgctcaggctggatggagttcagt

SEQ ID NO: 3852093 - DNA, 25 bp, Homo sapien
gtcgctcaggctggatggagttcag

SEQ ID NO: 3852094 - DNA, 25 bp, Homo sapien
cttcagtctccacaatgatccctga

SEQ ID NO: 3852095 - DNA, 25 bp, Homo sapien
agtctccacaatgatccctgaacaa

SEQ ID NO: 3852096 - DNA, 25 bp, Homo sapien
tcagtctccacaatgatccctgaac

SEQ ID NO: 3852097 - DNA, 25 bp, Homo sapien
tctccacaatgatccctgaacaata

SEQ ID NO: 3852098 - DNA, 25 bp, Homo sapien
caccatgcctgtcccagtattattc

SEQ ID NO: 3852099 - DNA, 25 bp, Homo sapien
catgcctgtcccagtattattctat

SEQ ID NO: 3852100 - DNA, 25 bp, Homo sapien
ccatgcctgtcccagtattattcta

SEQ ID NO: 3852101 - DNA, 25 bp, Homo sapien
atgcctgtcccagtattattctatt

SEQ ID NO: 3852102 - DNA, 25 bp, Homo sapien
cagtgaggacatgtatatgattctc

SEQ ID NO: 3852103 - DNA, 25 bp, Homo sapien
tatgattctcccatgtacgcttgta

SEQ ID NO: 3852104 - DNA, 25 bp, Homo sapien
tccatggtgtttttgaccgcttgac

SEQ ID NO: 3852105 - DNA, 25 bp, Homo sapien
gcttgtaatgtcatctacggcttca

SEQ ID NO: 3852106 - DNA, 25 bp, Homo sapien
cataagggctgtgtttgatcctcat

SEQ ID NO: 3852107 - DNA, 25 bp, Homo sapien
tgcccacgctcgctcataagggctg

SEQ ID NO: 3852108 - DNA, 25 bp, Homo sapien
gctcgctcataagggctgtgtttga

SEQ ID NO: 3852109 - DNA, 25 bp, Homo sapien
ccacgctcgctcataagggctgtgt

SEQ ID NO: 3852110 - DNA, 25 bp, Homo sapien
cctcctcatctctgagctggcatcc

SEQ ID NO: 3852111 - DNA, 25 bp, Homo sapien
tcatctctgagctggcatccatcca

SEQ ID NO: 3852112 - DNA, 25 bp, Homo sapien
tcctcatctctgagctggcatccat

SEQ ID NO: 3852113 - DNA, 25 bp, Homo sapien
ctcatctctgagctggcatccatcc

SEQ ID NO: 3852114 - DNA, 25 bp, Homo sapien
ggtaatttgaatatcgattatctca

SEQ ID NO: 3852115 - DNA, 25 bp, Homo sapien
tgtgctatcttgatatgagcataca

SEQ ID NO: 3852116 - DNA, 25 bp, Homo sapien
taacatcgctgtcatctattaaatg

SEQ ID NO: 3852117 - DNA, 25 bp, Homo sapien
gacaagtgatgtttgaatgagatgg

SEQ ID NO: 3852118 - DNA, 25 bp, Homo sapien
ggaatgctgacagacagttttgcag

SEQ ID NO: 3852119 - DNA, 25 bp, Homo sapien
tctggaatgctgacagacagttttg

SEQ ID NO: 3852120 - DNA, 25 bp, Homo sapien
taaacttaagtattcgcttaagaga

SEQ ID NO: 3852121 - DNA, 25 bp, Homo sapien
aatgctgacagacagttttgcagtc

SEQ ID NO: 3852122 - DNA, 25 bp, Homo sapien
ctcctatactttggattacccatga

SEQ ID NO: 3852123 - DNA, 25 bp, Homo sapien
tatactttggattacccatgaaata

SEQ ID NO: 3852124 - DNA, 25 bp, Homo sapien
cctatactttggattacccatgaaa

SEQ ID NO: 3852125 - DNA, 25 bp, Homo sapien
tcctatactttggattacccatgaa

SEQ ID NO: 3852126 - DNA, 25 bp, Homo sapien
taggtggtccgtaagtatttgttga

SEQ ID NO: 3852127 - DNA, 25 bp, Homo sapien
gctcccagtaggtggtccgtaagta

SEQ ID NO: 3852128 - DNA, 25 bp, Homo sapien
ctcccagtaggtggtccgtaagtat

SEQ ID NO: 3852129 - DNA, 25 bp, Homo sapien
ccagtaggtggtccgtaagtatttg

SEQ ID NO: 3852130 - DNA, 25 bp, Homo sapien
gtttgaaggaggcacgtatcacacg

SEQ ID NO: 3852131 - DNA, 25 bp, Homo sapien
gaaaatccaatgatcaaacttacac

SEQ ID NO: 3852132 - DNA, 25 bp, Homo sapien
tccaatgatcaaacttacactacaa

SEQ ID NO: 3852133 - DNA, 25 bp, Homo sapien
gaaggaggcacgtatcacacgtgag

SEQ ID NO: 3852134 - DNA, 25 bp, Homo sapien
tgattggctgcaattttgacaattt

SEQ ID NO: 3852135 - DNA, 25 bp, Homo sapien
ccaaatgattggctgcaattttgac

SEQ ID NO: 3852136 - DNA, 25 bp, Homo sapien
caaatgattggctgcaattttgaca

SEQ ID NO: 3852137 - DNA, 25 bp, Homo sapien
aatgattggctgcaattttgacaat

SEQ ID NO: 3852138 - DNA, 25 bp, Homo sapien
gatctctccagaacacgaagcaaac

SEQ ID NO: 3852139 - DNA, 25 bp, Homo sapien
tctccagaacacgaagcaaaccttg

SEQ ID NO: 3852140 - DNA, 25 bp, Homo sapien
tccagaacacgaagcaaaccttgat

SEQ ID NO: 3852141 - DNA, 25 bp, Homo sapien
gaacacgaagcaaaccttgatgttt

SEQ ID NO: 3852142 - DNA, 25 bp, Homo sapien
aaaccgttgtcaggctcagcctctg

SEQ ID NO: 3852143 - DNA, 25 bp, Homo sapien
gcacctggagcctttcaaaccgttg

SEQ ID NO: 3852144 - DNA, 25 bp, Homo sapien
ttgttccagaagtcaggagacaggt

SEQ ID NO: 3852145 - DNA, 25 bp, Homo sapien
tggctttgctcagtgtatgccgttt

SEQ ID NO: 3852146 - DNA, 25 bp, Homo sapien
cctggctgccagtctttggaaagca

SEQ ID NO: 3852147 - DNA, 25 bp, Homo sapien
tctgactactatggatccctcctgc

SEQ ID NO: 3852148 - DNA, 25 bp, Homo sapien
cttcagcctctgactactatggatc

SEQ ID NO: 3852149 - DNA, 25 bp, Homo sapien
tgccagtctttggaaagcacaccca

SEQ ID NO: 3852150 - DNA, 25 bp, Homo sapien
taattaacactaatgggcagctgcc

SEQ ID NO: 3852151 - DNA, 25 bp, Homo sapien
tgttggttaattaacactaatgggc

SEQ ID NO: 3852152 - DNA, 25 bp, Homo sapien
aacactaatgggcagctgccatccc

SEQ ID NO: 3852153 - DNA, 25 bp, Homo sapien
tggttaattaacactaatgggcagc

SEQ ID NO: 3852154 - DNA, 25 bp, Homo sapien
tattccttccaggttgtgaaatgga

SEQ ID NO: 3852155 - DNA, 25 bp, Homo sapien
ttattccttccaggttgtgaaatgg

SEQ ID NO: 3852156 - DNA, 25 bp, Homo sapien
tgtaaaatctaagagggtctgcctc

SEQ ID NO: 3852157 - DNA, 25 bp, Homo sapien
tgcaagagcccaatccctaactgtg

SEQ ID NO: 3852158 - DNA, 25 bp, Homo sapien
tcccacttgtgatataagacttcgt

SEQ ID NO: 3852159 - DNA, 25 bp, Homo sapien
gagtgtcagtagcacctgcaagagc

SEQ ID NO: 3852160 - DNA, 25 bp, Homo sapien
cggactctgtcaagactagtatttc

SEQ ID NO: 3852161 - DNA, 25 bp, Homo sapien
tgacctcggactctgtcaagactag

SEQ ID NO: 3852162 - DNA, 25 bp, Homo sapien
ggagagctttggaatgacctcggac

SEQ ID NO: 3852163 - DNA, 25 bp, Homo sapien
tgagctttccccaaaccaattaatc

SEQ ID NO: 3852164 - DNA, 25 bp, Homo sapien
tgtattggagtctagaagaataaat

SEQ ID NO: 3852165 - DNA, 25 bp, Homo sapien
agatttggggaaattgtattggagt

SEQ ID NO: 3852166 - DNA, 25 bp, Homo sapien
cttccttagacaaatggagatttgg

SEQ ID NO: 3852167 - DNA, 25 bp, Homo sapien
ttccttagacaaatggagatttggg

SEQ ID NO: 3852168 - DNA, 25 bp, Homo sapien
tcatttgcaacaagttgatagggcc

SEQ ID NO: 3852169 - DNA, 25 bp, Homo sapien
tagaggaagacccttctctctctaa

SEQ ID NO: 3852170 - DNA, 25 bp, Homo sapien
cttctccagaatgggatttagagga

SEQ ID NO: 3852171 - DNA, 25 bp, Homo sapien
tggtcctggacaaaaccgccttctc

SEQ ID NO: 3852172 - DNA, 25 bp, Homo sapien
tatggattttctttttaccctgctc

SEQ ID NO: 3852173 - DNA, 25 bp, Homo sapien
gattttctttttaccctgctcctgc

SEQ ID NO: 3852174 - DNA, 25 bp, Homo sapien
tcttcactcctaccaggcaaaagtg

SEQ ID NO: 3852175 - DNA, 25 bp, Homo sapien
tgccagcaataggttttgctctata

SEQ ID NO: 3852176 - DNA, 25 bp, Homo sapien
tcaagggtcttcactcctaccaggc

SEQ ID NO: 3852177 - DNA, 25 bp, Homo sapien
tgctctatatagtctggattcccag

SEQ ID NO: 3852178 - DNA, 25 bp, Homo sapien
gatgaataactactctggtgtgggc

SEQ ID NO: 3852179 - DNA, 25 bp, Homo sapien
gaataactactctggtgtgggctgt

SEQ ID NO: 3852180 - DNA, 25 bp, Homo sapien
taactactctggtgtgggctgttct

SEQ ID NO: 3852181 - DNA, 25 bp, Homo sapien
ctactctggtgtgggctgttctgct

SEQ ID NO: 3852182 - DNA, 25 bp, Homo sapien
ggctattctgtgtcttttacctgtt

SEQ ID NO: 3852183 - DNA, 25 bp, Homo sapien
gagttttcctgtccacaaatatgga

SEQ ID NO: 3852184 - DNA, 25 bp, Homo sapien
cagctttacaataaggcctgaaggc

SEQ ID NO: 3852185 - DNA, 25 bp, Homo sapien
taccatactggttcaatcattacag

SEQ ID NO: 3852186 - DNA, 25 bp, Homo sapien
ccttatttgataacagatgaccaat

SEQ ID NO: 3852187 - DNA, 25 bp, Homo sapien
gcaatgtgtgaaacttgaacagcat

SEQ ID NO: 3852188 - DNA, 25 bp, Homo sapien
aaacatatccttatttgataacaga

SEQ ID NO: 3852189 - DNA, 25 bp, Homo sapien
cagatgaccaattaaagcaatgtgt

SEQ ID NO: 3852190 - DNA, 25 bp, Homo sapien
aatcaccaacaaggtgagatcaaag

SEQ ID NO: 3852191 - DNA, 25 bp, Homo sapien
ctaaatcaccaacaaggtgagatca

SEQ ID NO: 3852192 - DNA, 25 bp, Homo sapien
tcaccaacaaggtgagatcaaagta

SEQ ID NO: 3852193 - DNA, 25 bp, Homo sapien
taaatcaccaacaaggtgagatcaa

SEQ ID NO: 3852194 - DNA, 25 bp, Homo sapien
tgagaattgttcgaccaaggcaccc

SEQ ID NO: 3852195 - DNA, 25 bp, Homo sapien
gaccaaggcacccttcttcatcaaa

SEQ ID NO: 3852196 - DNA, 25 bp, Homo sapien
gaattgttcgaccaaggcacccttc

SEQ ID NO: 3852197 - DNA, 25 bp, Homo sapien
tttctgagaattgttcgaccaaggc

SEQ ID NO: 3852198 - DNA, 25 bp, Homo sapien
gagaatgggagcctcattctcctgg

SEQ ID NO: 3852199 - DNA, 25 bp, Homo sapien
ctggactttagtgagttacagttct

SEQ ID NO: 3852200 - DNA, 25 bp, Homo sapien
gcctcattctcctggactttagtga

SEQ ID NO: 3852201 - DNA, 25 bp, Homo sapien
tttatttaggtacaattcaaccata

SEQ ID NO: 3852202 - DNA, 25 bp, Homo sapien
tacaagcctgctggtgtgttcatga

SEQ ID NO: 3852203 - DNA, 25 bp, Homo sapien
ttttcccggccattcttagcagctt

SEQ ID NO: 3852204 - DNA, 25 bp, Homo sapien
tcaatgagaaccaaaagagggactg

SEQ ID NO: 3852205 - DNA, 25 bp, Homo sapien
gagggactgtcgtatccaggaaaga

SEQ ID NO: 3852206 - DNA, 25 bp, Homo sapien
gttgtctaaagcaatattcagggta

SEQ ID NO: 3852207 - DNA, 25 bp, Homo sapien
tctgcgaaggtctcttgtcttctta

SEQ ID NO: 3852208 - DNA, 25 bp, Homo sapien
caatattcagggtattactcctttc

SEQ ID NO: 3852209 - DNA, 25 bp, Homo sapien
cacatgttgtctaaagcaatattca

SEQ ID NO: 3852210 - DNA, 25 bp, Homo sapien
gaggaaggagtagcaagccccttta

SEQ ID NO: 3852211 - DNA, 25 bp, Homo sapien
tattcacagctttatctctattggg

SEQ ID NO: 3852212 - DNA, 25 bp, Homo sapien
gaagttggagacgacttattcacag

SEQ ID NO: 3852213 - DNA, 25 bp, Homo sapien
cctctccgggaagtgctaaataagt

SEQ ID NO: 3852214 - DNA, 25 bp, Homo sapien
cactcttctcgctgaggctggagtg

SEQ ID NO: 3852215 - DNA, 25 bp, Homo sapien
gggttcaagtgcttctcctgacagc

SEQ ID NO: 3852216 - DNA, 25 bp, Homo sapien
gaccacagataatccacccgcctca

SEQ ID NO: 3852217 - DNA, 25 bp, Homo sapien
ttcaagtgcttctcctgacagcctc

SEQ ID NO: 3852218 - DNA, 25 bp, Homo sapien
cagtgcctcattagtgaactccagc

SEQ ID NO: 3852219 - DNA, 25 bp, Homo sapien
gtgaactccagcatcatccctacat

SEQ ID NO: 3852220 - DNA, 25 bp, Homo sapien
ctgccccagtgcctcattagtgaac

SEQ ID NO: 3852221 - DNA, 25 bp, Homo sapien
tacatccgcgcatctgtatccttgc

SEQ ID NO: 3852222 - DNA, 25 bp, Homo sapien
cctcagcaggagataatgttttgaa

SEQ ID NO: 3852223 - DNA, 25 bp, Homo sapien
catcatcctcagcaggagataatgt

SEQ ID NO: 3852224 - DNA, 25 bp, Homo sapien
tcatcctcagcaggagataatgttt

SEQ ID NO: 3852225 - DNA, 25 bp, Homo sapien
tcctcagcaggagataatgttttga

SEQ ID NO: 3852226 - DNA, 25 bp, Homo sapien
tctcagtgtcgttatcattttcttg

SEQ ID NO: 3852227 - DNA, 25 bp, Homo sapien
ttttcttgttggaacttgcataacc

SEQ ID NO: 3852228 - DNA, 25 bp, Homo sapien
ctatgtattatatgaagactctcag

SEQ ID NO: 3852229 - DNA, 25 bp, Homo sapien
ccttctttcttaaagcttgctgaca

SEQ ID NO: 3852230 - DNA, 25 bp, Homo sapien
ccaacatgggaaaattctctcctta

SEQ ID NO: 3852231 - DNA, 25 bp, Homo sapien
catgtaccaacatgggaaaattctc

SEQ ID NO: 3852232 - DNA, 25 bp, Homo sapien
taccaacatgggaaaattctctcct

SEQ ID NO: 3852233 - DNA, 25 bp, Homo sapien
gtaccaacatgggaaaattctctcc

SEQ ID NO: 3852234 - DNA, 25 bp, Homo sapien
atgttctttcaatgacacactcagc

SEQ ID NO: 3852235 - DNA, 25 bp, Homo sapien
catgttctttcaatgacacactcag

SEQ ID NO: 3852236 - DNA, 25 bp, Homo sapien
aacaatagggtgtattgttcccatg

SEQ ID NO: 3852237 - DNA, 25 bp, Homo sapien
cttatcaaagaccaacaatagggtg

SEQ ID NO: 3852238 - DNA, 25 bp, Homo sapien
tgatactgctgatctaaggaccaca

SEQ ID NO: 3852239 - DNA, 25 bp, Homo sapien
gacaacacctgtactagagaaaaaa

SEQ ID NO: 3852240 - DNA, 25 bp, Homo sapien
tttaggtactggaccactggtgtgc

SEQ ID NO: 3852241 - DNA, 25 bp, Homo sapien
cacagtccatgtttgctagccagct

SEQ ID NO: 3852242 - DNA, 25 bp, Homo sapien
tatgtggcatgtagcgaataaccca

SEQ ID NO: 3852243 - DNA, 25 bp, Homo sapien
gagtcactgactctttagcaggaga

SEQ ID NO: 3852244 - DNA, 25 bp, Homo sapien
aatggtttcggcagcagactgtcca

SEQ ID NO: 3852245 - DNA, 25 bp, Homo sapien
aagctgtattaccaggcgagtcctg

SEQ ID NO: 3852246 - DNA, 25 bp, Homo sapien
cagtcttgtcagaaattctggtcag

SEQ ID NO: 3852247 - DNA, 25 bp, Homo sapien
catacactggataactagcctttga

SEQ ID NO: 3852248 - DNA, 25 bp, Homo sapien
tgtgttgcctcggtgaaatcatgac

SEQ ID NO: 3852249 - DNA, 25 bp, Homo sapien
gtcagaatccttactcatacactgg

SEQ ID NO: 3852250 - DNA, 25 bp, Homo sapien
gagctatgggtttatactggtgatt

SEQ ID NO: 3852251 - DNA, 25 bp, Homo sapien
ctacttgatgatgtttgagctatgg

SEQ ID NO: 3852252 - DNA, 25 bp, Homo sapien
tgatgtttgagctatgggtttatac

SEQ ID NO: 3852253 - DNA, 25 bp, Homo sapien
tatgggtttatactggtgattggaa

SEQ ID NO: 3852254 - DNA, 25 bp, Homo sapien
tgaccatcaccccatgcttgatcaa

SEQ ID NO: 3852255 - DNA, 25 bp, Homo sapien
gacaacaatgggatgaagtatggct

SEQ ID NO: 3852256 - DNA, 25 bp, Homo sapien
tgggcagttgaaatctgaatcaaag

SEQ ID NO: 3852257 - DNA, 25 bp, Homo sapien
ccatgcttgatcaactgggcagttg

SEQ ID NO: 3852258 - DNA, 25 bp, Homo sapien
tactgggacccttatgttgaactgc

SEQ ID NO: 3852259 - DNA, 25 bp, Homo sapien
cctcagaaacagggtactccctcat

SEQ ID NO: 3852260 - DNA, 25 bp, Homo sapien
gaactgcatgctttagaccctcaga

SEQ ID NO: 3852261 - DNA, 25 bp, Homo sapien
tgtattcaggtatcttcactctgtc

SEQ ID NO: 3852262 - DNA, 25 bp, Homo sapien
agtccttttgatttgtcgtggatac

SEQ ID NO: 3852263 - DNA, 25 bp, Homo sapien
ccttttgatttgtcgtggatactac

SEQ ID NO: 3852264 - DNA, 25 bp, Homo sapien
actaagtccttttgatttgtcgtgg

SEQ ID NO: 3852265 - DNA, 25 bp, Homo sapien
ctaagtccttttgatttgtcgtgga

SEQ ID NO: 3852266 - DNA, 25 bp, Homo sapien
gaactcatgacagggaacaataccg

SEQ ID NO: 3852267 - DNA, 25 bp, Homo sapien
agatggtgtcacatgttctcaaaac

SEQ ID NO: 3852268 - DNA, 25 bp, Homo sapien
gctgagttgcagagatggttaataa

SEQ ID NO: 3852269 - DNA, 25 bp, Homo sapien
cttgagcagagttttacaggtaaag

SEQ ID NO: 3852270 - DNA, 25 bp, Homo sapien
tttctttcttttatattccaggaga

SEQ ID NO: 3852271 - DNA, 25 bp, Homo sapien
ttcttttatattccaggagagagac

SEQ ID NO: 3852272 - DNA, 25 bp, Homo sapien
tcttttatattccaggagagagaca

SEQ ID NO: 3852273 - DNA, 25 bp, Homo sapien
ctttcttttatattccaggagagag

SEQ ID NO: 3852274 - DNA, 25 bp, Homo sapien
tgagattacccatcctgaatcctga

SEQ ID NO: 3852275 - DNA, 25 bp, Homo sapien
gaatcctgataggtctcatgcttaa

SEQ ID NO: 3852276 - DNA, 25 bp, Homo sapien
gaggagcaatccttgctttaagtga

SEQ ID NO: 3852277 - DNA, 25 bp, Homo sapien
tttaagtgaattctctgctactgca

SEQ ID NO: 3852278 - DNA, 25 bp, Homo sapien
tgtgctgacaactgtattgaaaggg

SEQ ID NO: 3852279 - DNA, 25 bp, Homo sapien
tctggtactaataacttttcacttg

SEQ ID NO: 3852280 - DNA, 25 bp, Homo sapien
ttcaggtagacaatccataatctac

SEQ ID NO: 3852281 - DNA, 25 bp, Homo sapien
cacttgagcctcttagatatttcag

SEQ ID NO: 3852282 - DNA, 25 bp, Homo sapien
gacaaaagggtagatttaagccaga

SEQ ID NO: 3852283 - DNA, 25 bp, Homo sapien
tagccaactcataagccagatagca

SEQ ID NO: 3852284 - DNA, 25 bp, Homo sapien
gctggaaacttagggtgatcacctt

SEQ ID NO: 3852285 - DNA, 25 bp, Homo sapien
gtccttcatggcctcgcttaaagca

SEQ ID NO: 3852286 - DNA, 25 bp, Homo sapien
ccacattctcagtgggttcctctgt

SEQ ID NO: 3852287 - DNA, 25 bp, Homo sapien
gatgtctcaatgactacgtgggaga

SEQ ID NO: 3852288 - DNA, 25 bp, Homo sapien
gggaagtaaagtatgatgagcaaga

SEQ ID NO: 3852289 - DNA, 25 bp, Homo sapien
caaagttaatgggtcctccagcctc

SEQ ID NO: 3852290 - DNA, 25 bp, Homo sapien
gatacaagttgtcaagcccatttgg

SEQ ID NO: 3852291 - DNA, 25 bp, Homo sapien
tgtgctgtgcaaaggagaatagtca

SEQ ID NO: 3852292 - DNA, 25 bp, Homo sapien
tgcatgtctgcaatgtgccaagtgc

SEQ ID NO: 3852293 - DNA, 25 bp, Homo sapien
gaaattttcaggactcaatcccatg

SEQ ID NO: 3852294 - DNA, 25 bp, Homo sapien
tgaactgggtgctcatcacgggaac

SEQ ID NO: 3852295 - DNA, 25 bp, Homo sapien
gaaaccaaagcaacagtccgagcag

SEQ ID NO: 3852296 - DNA, 25 bp, Homo sapien
gtccgagcagctttcagaatgacag

SEQ ID NO: 3852297 - DNA, 25 bp, Homo sapien
aacgcagctctgtggctgaactggg

SEQ ID NO: 3852298 - DNA, 25 bp, Homo sapien
tgcgtggctggcaaagaataatgtt

SEQ ID NO: 3852299 - DNA, 25 bp, Homo sapien
tcttggagtgttctgcgtggctggc

SEQ ID NO: 3852300 - DNA, 25 bp, Homo sapien
gaataatgttccaaaatcggtccat

SEQ ID NO: 3852301 - DNA, 25 bp, Homo sapien
ctgcgaatgcggtgttgggatttat

SEQ ID NO: 3852302 - DNA, 25 bp, Homo sapien
tcagccagctgaacactggttctat

SEQ ID NO: 3852303 - DNA, 25 bp, Homo sapien
tgaacactggttctattaggctctc

SEQ ID NO: 3852304 - DNA, 25 bp, Homo sapien
cagctgaacactggttctattaggc

SEQ ID NO: 3852305 - DNA, 25 bp, Homo sapien
ctggttctattaggctctctgacaa

SEQ ID NO: 3852306 - DNA, 25 bp, Homo sapien
aagatggaaaacgttgttctgaaat

SEQ ID NO: 3852307 - DNA, 25 bp, Homo sapien
ccagagcgcatagtttgaaaagatg

SEQ ID NO: 3852308 - DNA, 25 bp, Homo sapien
ggtccaacttaggtagagaatcttg

SEQ ID NO: 3852309 - DNA, 25 bp, Homo sapien
tgctttcagtactggaatctgcttg

SEQ ID NO: 3852310 - DNA, 25 bp, Homo sapien
gcagcctgcagtaactatatcgtag

SEQ ID NO: 3852311 - DNA, 25 bp, Homo sapien
tgcatagagtgtctcatgatgactg

SEQ ID NO: 3852312 - DNA, 25 bp, Homo sapien
gctccaataacagtatgcagcctgc

SEQ ID NO: 3852313 - DNA, 25 bp, Homo sapien
tcagttttaagatccagcagtgtgt

SEQ ID NO: 3852314 - DNA, 25 bp, Homo sapien
gtttctaaatgacacaagatctgtg

SEQ ID NO: 3852315 - DNA, 25 bp, Homo sapien
cactgagttaattgactggctttgg

SEQ ID NO: 3852316 - DNA, 25 bp, Homo sapien
ttaagaaactctcacggcgaggtgt

SEQ ID NO: 3852317 - DNA, 25 bp, Homo sapien
gactttgaaaagagcagagacgaga

SEQ ID NO: 3852318 - DNA, 25 bp, Homo sapien
taagtcaaccacaagcagttttaca

SEQ ID NO: 3852319 - DNA, 25 bp, Homo sapien
catttttgatatgacgctaacatca

SEQ ID NO: 3852320 - DNA, 25 bp, Homo sapien
tattcattgtactaggactttccac

SEQ ID NO: 3852321 - DNA, 25 bp, Homo sapien
taatagtaatacacttgaggagggt

SEQ ID NO: 3852322 - DNA, 25 bp, Homo sapien
cacactgatctatttactttcttcg

SEQ ID NO: 3852323 - DNA, 25 bp, Homo sapien
tactttcttcgtcaatacaatttta

SEQ ID NO: 3852324 - DNA, 25 bp, Homo sapien
cagtattagaacacacctatggaag

SEQ ID NO: 3852325 - DNA, 25 bp, Homo sapien
tcctaaagtgagataagcatacatg

SEQ ID NO: 3852326 - DNA, 25 bp, Homo sapien
tggccatgcgacctggaagaatttg

SEQ ID NO: 3852327 - DNA, 25 bp, Homo sapien
aaaatttcggcccagggtgcagact

SEQ ID NO: 3852328 - DNA, 25 bp, Homo sapien
gcagatggccctacagttaatgaga

SEQ ID NO: 3852329 - DNA, 25 bp, Homo sapien
taatgagattcttgcaagcccgcaa

SEQ ID NO: 3852330 - DNA, 25 bp, Homo sapien
tagcaacgtggcagatggccctaca

SEQ ID NO: 3852331 - DNA, 25 bp, Homo sapien
aatgagccaaatgagtagcaacgtg

SEQ ID NO: 3852332 - DNA, 25 bp, Homo sapien
atttacagcatatctccattgcact

SEQ ID NO: 3852333 - DNA, 25 bp, Homo sapien
tggcacttcaacctcagtatctttc

SEQ ID NO: 3852334 - DNA, 25 bp, Homo sapien
ttacagcatatctccattgcacttc

SEQ ID NO: 3852335 - DNA, 25 bp, Homo sapien
gcacttcaacctcagtatctttctc

SEQ ID NO: 3852336 - DNA, 25 bp, Homo sapien
gaatcaggagctggcataagaccct

SEQ ID NO: 3852337 - DNA, 25 bp, Homo sapien
ggttcttaataggtagccactgcca

SEQ ID NO: 3852338 - DNA, 25 bp, Homo sapien
gaagtccttcagctgacctggtagg

SEQ ID NO: 3852339 - DNA, 25 bp, Homo sapien
ctagtgagttttgtacgggtgccca

SEQ ID NO: 3852340 - DNA, 25 bp, Homo sapien
tcttgtctagcagcaagaaatgaag

SEQ ID NO: 3852341 - DNA, 25 bp, Homo sapien
ttctccaattgactgtagcagaggg

SEQ ID NO: 3852342 - DNA, 25 bp, Homo sapien
caattgactgtagcagagggccctc

SEQ ID NO: 3852343 - DNA, 25 bp, Homo sapien
gaaatgaagaatccgacttggagta

SEQ ID NO: 3852344 - DNA, 25 bp, Homo sapien
tgttggccattaaccttcatacctc

SEQ ID NO: 3852345 - DNA, 25 bp, Homo sapien
atctattcaccactcctgttggcca

SEQ ID NO: 3852346 - DNA, 25 bp, Homo sapien
gaggcatgcaccagaaaacaaaata

SEQ ID NO: 3852347 - DNA, 25 bp, Homo sapien
gccagaactctgtgctgtttaaact

SEQ ID NO: 3852348 - DNA, 25 bp, Homo sapien
gtttctactgactgtatctcttcct

SEQ ID NO: 3852349 - DNA, 25 bp, Homo sapien
tttctgtttagccttgtcatcatta

SEQ ID NO: 3852350 - DNA, 25 bp, Homo sapien
catcattaccaaggagcttgctcat

SEQ ID NO: 3852351 - DNA, 25 bp, Homo sapien
agtttctactgactgtatctcttcc

SEQ ID NO: 3852352 - DNA, 25 bp, Homo sapien
ctaaaacacatttgctacaaccagg

SEQ ID NO: 3852353 - DNA, 25 bp, Homo sapien
aaacacatttgctacaaccaggcat

SEQ ID NO: 3852354 - DNA, 25 bp, Homo sapien
tcctaaaacacatttgctacaacca

SEQ ID NO: 3852355 - DNA, 25 bp, Homo sapien
taaaacacatttgctacaaccaggc

SEQ ID NO: 3852356 - DNA, 25 bp, Homo sapien
ctctttcagtcagggcttcaccatg

SEQ ID NO: 3852357 - DNA, 25 bp, Homo sapien
tctttcagtcagggcttcaccatgg

SEQ ID NO: 3852358 - DNA, 25 bp, Homo sapien
tctctttcagtcagggcttcaccat

SEQ ID NO: 3852359 - DNA, 25 bp, Homo sapien
ttctctttcagtcagggcttcacca

SEQ ID NO: 3852360 - DNA, 25 bp, Homo sapien
tttcttgcagggaagctgagttgca

SEQ ID NO: 3852361 - DNA, 25 bp, Homo sapien
ctgagttgcataaagtgaagccaca

SEQ ID NO: 3852362 - DNA, 25 bp, Homo sapien
tatcttgcaaggtaagaactcctgt

SEQ ID NO: 3852363 - DNA, 25 bp, Homo sapien
caaaagtcgaagctagaatctatcc

SEQ ID NO: 3852364 - DNA, 25 bp, Homo sapien
aaatcacaagctccgtagatacaag

SEQ ID NO: 3852365 - DNA, 25 bp, Homo sapien
tacaagtcaaacacaactctctctg

SEQ ID NO: 3852366 - DNA, 25 bp, Homo sapien
caagctccgtagatacaagtcaaac

SEQ ID NO: 3852367 - DNA, 25 bp, Homo sapien
aagtcaaacacaactctctctggct

SEQ ID NO: 3852368 - DNA, 25 bp, Homo sapien
taatctacagtgaataggccacaga

SEQ ID NO: 3852369 - DNA, 25 bp, Homo sapien
gaaactgctgaaaaggttctatgta

SEQ ID NO: 3852370 - DNA, 25 bp, Homo sapien
cttttccccagttgagctatgtatc

SEQ ID NO: 3852371 - DNA, 25 bp, Homo sapien
tcaatgccaatcaaaatccaggtag

SEQ ID NO: 3852372 - DNA, 25 bp, Homo sapien
tgtgctaaagcaccagttggatggt

SEQ ID NO: 3852373 - DNA, 25 bp, Homo sapien
gcatttttacacttagcagcttcac

SEQ ID NO: 3852374 - DNA, 25 bp, Homo sapien
gaagtgccccaaaggagtgatttta

SEQ ID NO: 3852375 - DNA, 25 bp, Homo sapien
gaagtcgagttctaaagcaatctgc

SEQ ID NO: 3852376 - DNA, 25 bp, Homo sapien
acatggatacagaattagagcaatt

SEQ ID NO: 3852377 - DNA, 25 bp, Homo sapien
gaaactgtccagtacattattctat

SEQ ID NO: 3852378 - DNA, 25 bp, Homo sapien
acctctttaggcatgaccttatttc

SEQ ID NO: 3852379 - DNA, 25 bp, Homo sapien
gaatttgcatcttctaacctcttta

SEQ ID NO: 3852380 - DNA, 25 bp, Homo sapien
gaaatgatacttggttgacaaccca

SEQ ID NO: 3852381 - DNA, 25 bp, Homo sapien
aaggataaatatcgaggctgtgccc

SEQ ID NO: 3852382 - DNA, 25 bp, Homo sapien
tgcaggcgatctagtcattaagtac

SEQ ID NO: 3852383 - DNA, 25 bp, Homo sapien
cattaagtacagagaccttgggtgt

SEQ ID NO: 3852384 - DNA, 25 bp, Homo sapien
ctggaccctagtcctggcgcgggat

SEQ ID NO: 3852385 - DNA, 25 bp, Homo sapien
tagatcgcggcgagggaactgttct

SEQ ID NO: 3852386 - DNA, 25 bp, Homo sapien
gaactgttctgctacgtaggaaacc

SEQ ID NO: 3852387 - DNA, 25 bp, Homo sapien
acgaacttccattgcgtgacgggca

SEQ ID NO: 3852388 - DNA, 25 bp, Homo sapien
tctaggctctttggtacgctgaggc

SEQ ID NO: 3852389 - DNA, 25 bp, Homo sapien
tcagcttagattgcagaacagacag

SEQ ID NO: 3852390 - DNA, 25 bp, Homo sapien
ccctctgtagctcgagtgggagaca

SEQ ID NO: 3852391 - DNA, 25 bp, Homo sapien
gacagggagcttaaacagcaggctc

SEQ ID NO: 3852392 - DNA, 25 bp, Homo sapien
tacgtagcacaaatgattctttatt

SEQ ID NO: 3852393 - DNA, 25 bp, Homo sapien
atacgtagcacaaatgattctttat

SEQ ID NO: 3852394 - DNA, 25 bp, Homo sapien
tgttgagggagataaaattagcact

SEQ ID NO: 3852395 - DNA, 25 bp, Homo sapien
tattttaggtgccatagggacacca

SEQ ID NO: 3852396 - DNA, 25 bp, Homo sapien
taagattctacaaatatgttgaggg

SEQ ID NO: 3852397 - DNA, 25 bp, Homo sapien
ggcttttttaggtgaggcacgatga

SEQ ID NO: 3852398 - DNA, 25 bp, Homo sapien
ttaaggcaggcaaacttagaacaca

SEQ ID NO: 3852399 - DNA, 25 bp, Homo sapien
gggaaacatctggatgacctcaata

SEQ ID NO: 3852400 - DNA, 25 bp, Homo sapien
tggaagctacactcccagaatttct

SEQ ID NO: 3852401 - DNA, 25 bp, Homo sapien
aattagtggtgctaaatgtcagcga

SEQ ID NO: 3852402 - DNA, 25 bp, Homo sapien
tgtttgtgtcccgattaagaaatcc

SEQ ID NO: 3852403 - DNA, 25 bp, Homo sapien
gaatgagtcatttgtcagatgtgtg

SEQ ID NO: 3852404 - DNA, 25 bp, Homo sapien
gtgtattaagaatatcttctcccac

SEQ ID NO: 3852405 - DNA, 25 bp, Homo sapien
tttatgtttgtgtcccgattaagaa

SEQ ID NO: 3852406 - DNA, 25 bp, Homo sapien
catgcattcttgagttggttctata

SEQ ID NO: 3852407 - DNA, 25 bp, Homo sapien
tcctacctagttgccctgtttacta

SEQ ID NO: 3852408 - DNA, 25 bp, Homo sapien
ttgcctactccagggttacaaagat

SEQ ID NO: 3852409 - DNA, 25 bp, Homo sapien
tagtgtttacctgaggaattgcaac

SEQ ID NO: 3852410 - DNA, 25 bp, Homo sapien
caaaaaatgcatctccccgtgtatt

SEQ ID NO: 3852411 - DNA, 25 bp, Homo sapien
tgtgtgtggcggtctttccaaaatt

SEQ ID NO: 3852412 - DNA, 25 bp, Homo sapien
ttcttgaacttgtgtgtggcggtct

SEQ ID NO: 3852413 - DNA, 25 bp, Homo sapien
cagttttactgaaatgtccctatga

SEQ ID NO: 3852414 - DNA, 25 bp, Homo sapien
tctttcaacgaaggtgtggagcatg

SEQ ID NO: 3852415 - DNA, 25 bp, Homo sapien
gagtaatcatgatccagtagggctg

SEQ ID NO: 3852416 - DNA, 25 bp, Homo sapien
gaaaggagcaaagtccacctgcatc

SEQ ID NO: 3852417 - DNA, 25 bp, Homo sapien
taggaagaccaatacatagctgtgt

SEQ ID NO: 3852418 - DNA, 25 bp, Homo sapien
ccccaaatggagtagtcaagaaaat

SEQ ID NO: 3852419 - DNA, 25 bp, Homo sapien
aaagactcaatatttcagggcaccc

SEQ ID NO: 3852420 - DNA, 25 bp, Homo sapien
aaacatctcacctactgtatatatc

SEQ ID NO: 3852421 - DNA, 25 bp, Homo sapien
gaaatttctgatccccaaatggagt

SEQ ID NO: 3852422 - DNA, 25 bp, Homo sapien
cagtacttgctggtttaccctacac

SEQ ID NO: 3852423 - DNA, 25 bp, Homo sapien
gctagctttttggtataagaggcct

SEQ ID NO: 3852424 - DNA, 25 bp, Homo sapien
ctttggagctttgataggcattgac

SEQ ID NO: 3852425 - DNA, 25 bp, Homo sapien
taagaggcctagtttttggcctgcg

SEQ ID NO: 3852426 - DNA, 25 bp, Homo sapien
gcaaatacgtaatgagaaccaacaa

SEQ ID NO: 3852427 - DNA, 25 bp, Homo sapien
cccctatagtcatgtatcacctgaa

SEQ ID NO: 3852428 - DNA, 25 bp, Homo sapien
tagcagcattatctctcactcagtt

SEQ ID NO: 3852429 - DNA, 25 bp, Homo sapien
tgcatggagctcagatctgacttgt

SEQ ID NO: 3852430 - DNA, 25 bp, Homo sapien
ctacaacaatatgatttcaacccag

SEQ ID NO: 3852431 - DNA, 25 bp, Homo sapien
ggctgcctacctacaattctatttt

SEQ ID NO: 3852432 - DNA, 25 bp, Homo sapien
catgatggctgcctacctacaattc

SEQ ID NO: 3852433 - DNA, 25 bp, Homo sapien
atatccatgcttggtgttatcttag

SEQ ID NO: 3852434 - DNA, 25 bp, Homo sapien
gttctagaatagggctggatgtgga

SEQ ID NO: 3852435 - DNA, 25 bp, Homo sapien
ttctagaatagggctggatgtggat

SEQ ID NO: 3852436 - DNA, 25 bp, Homo sapien
ccaccaaagagactagggaagacta

SEQ ID NO: 3852437 - DNA, 25 bp, Homo sapien
gagatgtccacattcaaattcccag

SEQ ID NO: 3852438 - DNA, 25 bp, Homo sapien
gggtggctcccactaatcacatgag

SEQ ID NO: 3852439 - DNA, 25 bp, Homo sapien
gaaacatgacgttgctggcttagaa

SEQ ID NO: 3852440 - DNA, 25 bp, Homo sapien
agaaaataatgcattcctccaacaa

SEQ ID NO: 3852441 - DNA, 25 bp, Homo sapien
gaaaataatgcattcctccaacaat

SEQ ID NO: 3852442 - DNA, 25 bp, Homo sapien
tgatttttactccagtgaggcccag

SEQ ID NO: 3852443 - DNA, 25 bp, Homo sapien
gatttttactccagtgaggcccagg

SEQ ID NO: 3852444 - DNA, 25 bp, Homo sapien
tgtggactgagcctgagacaaacat

SEQ ID NO: 3852445 - DNA, 25 bp, Homo sapien
gaacttattgaacgttgagattcca

SEQ ID NO: 3852446 - DNA, 25 bp, Homo sapien
tctgttttgtccgttatagacccat

SEQ ID NO: 3852447 - DNA, 25 bp, Homo sapien
caggacagtatatattagggcaaac

SEQ ID NO: 3852448 - DNA, 25 bp, Homo sapien
aaagctactgactgatctgaaaaac

SEQ ID NO: 3852449 - DNA, 25 bp, Homo sapien
tacaaaagctactgactgatctgaa

SEQ ID NO: 3852450 - DNA, 25 bp, Homo sapien
actgactgatctgaaaaacaactgg

SEQ ID NO: 3852451 - DNA, 25 bp, Homo sapien
caattacaaaagctactgactgatc

SEQ ID NO: 3852452 - DNA, 25 bp, Homo sapien
tcccttcttcaactaatagtgagat

SEQ ID NO: 3852453 - DNA, 25 bp, Homo sapien
ctaacttgatcctgagcaatctgcc

SEQ ID NO: 3852454 - DNA, 25 bp, Homo sapien
tcttaaattgatgtgcaactctagt

SEQ ID NO: 3852455 - DNA, 25 bp, Homo sapien
tattggatactaacttctaatggcc

SEQ ID NO: 3852456 - DNA, 25 bp, Homo sapien
tgtatacggaaagtatctcagccta

SEQ ID NO: 3852457 - DNA, 25 bp, Homo sapien
ctattttgtatacggaaagtatctc

SEQ ID NO: 3852458 - DNA, 25 bp, Homo sapien
cagcctatattcaaagtacaaggga

SEQ ID NO: 3852459 - DNA, 25 bp, Homo sapien
cggaaagtatctcagcctatattca

SEQ ID NO: 3852460 - DNA, 25 bp, Homo sapien
gtacatgaagaatccgccagcagag

SEQ ID NO: 3852461 - DNA, 25 bp, Homo sapien
caaggcgtttctctagtgatggtcg

SEQ ID NO: 3852462 - DNA, 25 bp, Homo sapien
tgcgataatccgctctcggtgtaag

SEQ ID NO: 3852463 - DNA, 25 bp, Homo sapien
tcctgaagagcctggcgaatggcgt

SEQ ID NO: 3852464 - DNA, 25 bp, Homo sapien
agtcagccacagcagctatttgtaa

SEQ ID NO: 3852465 - DNA, 25 bp, Homo sapien
tcagtcagccacagcagctatttgt

SEQ ID NO: 3852466 - DNA, 25 bp, Homo sapien
cagtcagccacagcagctatttgta

SEQ ID NO: 3852467 - DNA, 25 bp, Homo sapien
ctccaaccactgccattttgtgcct

SEQ ID NO: 3852468 - DNA, 25 bp, Homo sapien
ataacacgcacactttctcctcctc

SEQ ID NO: 3852469 - DNA, 25 bp, Homo sapien
gcagcatgtcacacctttgcttaaa

SEQ ID NO: 3852470 - DNA, 25 bp, Homo sapien
agtgtattcccatttaacttggagt

SEQ ID NO: 3852471 - DNA, 25 bp, Homo sapien
taaaggcatacacactcctaaatgg

SEQ ID NO: 3852472 - DNA, 25 bp, Homo sapien
tttaagacacgagtcgcagcatgtc

SEQ ID NO: 3852473 - DNA, 25 bp, Homo sapien
gaaattacattgagagcattctgaa

SEQ ID NO: 3852474 - DNA, 25 bp, Homo sapien
tgaagctcgggctcctgcaatttca

SEQ ID NO: 3852475 - DNA, 25 bp, Homo sapien
gcaacatcagaatgctccaaacaag

SEQ ID NO: 3852476 - DNA, 25 bp, Homo sapien
tgctttgagggaagcaacatcagaa

SEQ ID NO: 3852477 - DNA, 25 bp, Homo sapien
gagttttaaccctggcaagagaaca

SEQ ID NO: 3852478 - DNA, 25 bp, Homo sapien
gagcctctcctatgctgagcctcga

SEQ ID NO: 3852479 - DNA, 25 bp, Homo sapien
tcgactttgcatcaaggcagtgtgc

SEQ ID NO: 3852480 - DNA, 25 bp, Homo sapien
ttcaccatgctgtgagttaggtccc

SEQ ID NO: 3852481 - DNA, 25 bp, Homo sapien
tctatacgataacattggcttaggc

SEQ ID NO: 3852482 - DNA, 25 bp, Homo sapien
ccgccattgcccaggcctgcttagg

SEQ ID NO: 3852483 - DNA, 25 bp, Homo sapien
gcccgccattgcccaggcctgctta

SEQ ID NO: 3852484 - DNA, 25 bp, Homo sapien
ggcgcccgccattgcccaggcctgc

SEQ ID NO: 3852485 - DNA, 25 bp, Homo sapien
cgccattgcccaggcctgcttaggt

SEQ ID NO: 3852486 - DNA, 25 bp, Homo sapien
cttggaagacctcggaaagatagga

SEQ ID NO: 3852487 - DNA, 25 bp, Homo sapien
aaatgcatgtctccgggcctgatga

SEQ ID NO: 3852488 - DNA, 25 bp, Homo sapien
gacctcggaaagataggaaatgcat

SEQ ID NO: 3852489 - DNA, 25 bp, Homo sapien
gataggaaatgcatgtctccgggcc

SEQ ID NO: 3852490 - DNA, 25 bp, Homo sapien
atttattttcaactatatgctctaa

SEQ ID NO: 3852491 - DNA, 25 bp, Homo sapien
tgatttcacaaaaggctgtccgtgg

SEQ ID NO: 3852492 - DNA, 25 bp, Homo sapien
ccctctgtgatttcacaaaaggctg

SEQ ID NO: 3852493 - DNA, 25 bp, Homo sapien
aaaggctgtccgtggatctttggcg

SEQ ID NO: 3852494 - DNA, 25 bp, Homo sapien
tcacaaaaggctgtccgtggatctt

SEQ ID NO: 3852495 - DNA, 25 bp, Homo sapien
cattatagataccataacttcctag

SEQ ID NO: 3852496 - DNA, 25 bp, Homo sapien
tagataccataacttcctagattca

SEQ ID NO: 3852497 - DNA, 25 bp, Homo sapien
tcttctcattatagataccataact

SEQ ID NO: 3852498 - DNA, 25 bp, Homo sapien
ctcttcttctcattatagataccat

SEQ ID NO: 3852499 - DNA, 25 bp, Homo sapien
ccatccctgtggcttgttgtaattt

SEQ ID NO: 3852500 - DNA, 25 bp, Homo sapien
catccctgtggcttgttgtaatttc

SEQ ID NO: 3852501 - DNA, 25 bp, Homo sapien
cctcgtttgtaatgattaagggcca

SEQ ID NO: 3852502 - DNA, 25 bp, Homo sapien
tttcaaacacctcgtttgtaatgat

SEQ ID NO: 3852503 - DNA, 25 bp, Homo sapien
actgacccacaagtacagagcagag

SEQ ID NO: 3852504 - DNA, 25 bp, Homo sapien
gctggcaaagaagatgttcccacta

SEQ ID NO: 3852505 - DNA, 25 bp, Homo sapien
aagctgattgctgagggctcgccct

SEQ ID NO: 3852506 - DNA, 25 bp, Homo sapien
tggctgcatcagcaaaaagctatcc

SEQ ID NO: 3852507 - DNA, 25 bp, Homo sapien
tacaaatgccaataaagcccaggag

SEQ ID NO: 3852508 - DNA, 25 bp, Homo sapien
gaagtggctgagttgcaaaaatcct

SEQ ID NO: 3852509 - DNA, 25 bp, Homo sapien
tggagaggctctagaccaggtactg

SEQ ID NO: 3852510 - DNA, 25 bp, Homo sapien
ggttgtcacctttacatggccatgg

SEQ ID NO: 3852511 - DNA, 25 bp, Homo sapien
tattcaattaggatacttcagcaaa

SEQ ID NO: 3852512 - DNA, 25 bp, Homo sapien
gtattcaattaggatacttcagcaa

SEQ ID NO: 3852513 - DNA, 25 bp, Homo sapien
ggtattcaattaggatacttcagca

SEQ ID NO: 3852514 - DNA, 25 bp, Homo sapien
tacgccccacggagtctcgctgatt

SEQ ID NO: 3852515 - DNA, 25 bp, Homo sapien
gagatcaaactgcaaggcagcagcg

SEQ ID NO: 3852516 - DNA, 25 bp, Homo sapien
gatcaaactgcaaggcagcagcgag

SEQ ID NO: 3852517 - DNA, 25 bp, Homo sapien
ggtcctacgccccacggagtctcgc

SEQ ID NO: 3852518 - DNA, 25 bp, Homo sapien
tcagacatctccacttcactaaagt

SEQ ID NO: 3852519 - DNA, 25 bp, Homo sapien
cattttagaacatcatcagacatct

SEQ ID NO: 3852520 - DNA, 25 bp, Homo sapien
tcattttagaacatcatcagacatc

SEQ ID NO: 3852521 - DNA, 25 bp, Homo sapien
tcatcagacatctccacttcactaa

SEQ ID NO: 3852522 - DNA, 25 bp, Homo sapien
gatcatggaggggtagaatcaatac

SEQ ID NO: 3852523 - DNA, 25 bp, Homo sapien
actgccaaagacaatctacaaattc

SEQ ID NO: 3852524 - DNA, 25 bp, Homo sapien
gaacaaatctggacacatcacacta

SEQ ID NO: 3852525 - DNA, 25 bp, Homo sapien
aaaaacatcccatgatcatggaggg

SEQ ID NO: 3852526 - DNA, 25 bp, Homo sapien
gcataagcagtacttggcagtttgg

SEQ ID NO: 3852527 - DNA, 25 bp, Homo sapien
cataagcagtacttggcagtttggg

SEQ ID NO: 3852528 - DNA, 25 bp, Homo sapien
taagcagtacttggcagtttgggca

SEQ ID NO: 3852529 - DNA, 25 bp, Homo sapien
tggcataagcagtacttggcagttt

SEQ ID NO: 3852530 - DNA, 25 bp, Homo sapien
gatgggaatgttcccaccacccctc

SEQ ID NO: 3852531 - DNA, 25 bp, Homo sapien
agaccagaacaaagagtaacttgcc

SEQ ID NO: 3852532 - DNA, 25 bp, Homo sapien
tgtgagaattatatgccataatgta

SEQ ID NO: 3852533 - DNA, 25 bp, Homo sapien
gcttccatactgtcaagaatcatag

SEQ ID NO: 3852534 - DNA, 25 bp, Homo sapien
tggatgacccaattaaccagttaca

SEQ ID NO: 3852535 - DNA, 25 bp, Homo sapien
tcagagcatgattatttatggcagc

SEQ ID NO: 3852536 - DNA, 25 bp, Homo sapien
ggcaaaagactttaacagatacttc

SEQ ID NO: 3852537 - DNA, 25 bp, Homo sapien
tggatgaatcctaaacgcattatgc

SEQ ID NO: 3852538 - DNA, 25 bp, Homo sapien
tcttactacaaaatgcctgtgagga

SEQ ID NO: 3852539 - DNA, 25 bp, Homo sapien
tgagtttcgaaattggaggttcttg

SEQ ID NO: 3852540 - DNA, 25 bp, Homo sapien
acctcgttgagtttcgaaattggag

SEQ ID NO: 3852541 - DNA, 25 bp, Homo sapien
tttcgaaattggaggttcttgggca

SEQ ID NO: 3852542 - DNA, 25 bp, Homo sapien
caacaagggacagcatggggtaaca

SEQ ID NO: 3852543 - DNA, 25 bp, Homo sapien
gatcaaactttaacaggttaatatg

SEQ ID NO: 3852544 - DNA, 25 bp, Homo sapien
catcgtcatgtcgtttggatcaaac

SEQ ID NO: 3852545 - DNA, 25 bp, Homo sapien
tgttgttgccagcatcgtcatgtcg

SEQ ID NO: 3852546 - DNA, 25 bp, Homo sapien
agaagaaagacaggactgtcgctgg

SEQ ID NO: 3852547 - DNA, 25 bp, Homo sapien
tagagaattttagcctgtattaatg

SEQ ID NO: 3852548 - DNA, 25 bp, Homo sapien
aatactgaactgtagtgctaccagg

SEQ ID NO: 3852549 - DNA, 25 bp, Homo sapien
gctatactaatatgagcagaattta

SEQ ID NO: 3852550 - DNA, 25 bp, Homo sapien
gaattttagcctgtattaatgctgt

SEQ ID NO: 3852551 - DNA, 25 bp, Homo sapien
gaatgtgtctgatcctggacttttt

SEQ ID NO: 3852552 - DNA, 25 bp, Homo sapien
gtgaatgtgtctgatcctggacttt

SEQ ID NO: 3852553 - DNA, 25 bp, Homo sapien
ggctgtgaatgtgtctgatcctgga

SEQ ID NO: 3852554 - DNA, 25 bp, Homo sapien
atgtgtctgatcctggacttttttt

SEQ ID NO: 3852555 - DNA, 25 bp, Homo sapien
tcaatctgaaagagcagaactccca

SEQ ID NO: 3852556 - DNA, 25 bp, Homo sapien
caatctgaaagagcagaactcccac

SEQ ID NO: 3852557 - DNA, 25 bp, Homo sapien
cgttttagagaagactgcacccaca

SEQ ID NO: 3852558 - DNA, 25 bp, Homo sapien
tcaagacacaggaggtagcagaagt

SEQ ID NO: 3852559 - DNA, 25 bp, Homo sapien
tagagggctcaccaaagaaccaaag

SEQ ID NO: 3852560 - DNA, 25 bp, Homo sapien
gataccaaggatcaatagagggctc

SEQ ID NO: 3852561 - DNA, 25 bp, Homo sapien
tttctttaagagaggtataaggaca

SEQ ID NO: 3852562 - DNA, 25 bp, Homo sapien
ataaggacacatgtggaaaccccta

SEQ ID NO: 3852563 - DNA, 25 bp, Homo sapien
tttaagagaggtataaggacacatg

SEQ ID NO: 3852564 - DNA, 25 bp, Homo sapien
aggacacatgtggaaacccctaaag

SEQ ID NO: 3852565 - DNA, 25 bp, Homo sapien
tggcaggaagcctaaagtgttcatc

SEQ ID NO: 3852566 - DNA, 25 bp, Homo sapien
catctcctccaccaaggagagctct

SEQ ID NO: 3852567 - DNA, 25 bp, Homo sapien
ggatggcaggaagcctaaagtgttc

SEQ ID NO: 3852568 - DNA, 25 bp, Homo sapien
tcatctcctccaccaaggagagctc

SEQ ID NO: 3852569 - DNA, 25 bp, Homo sapien
ctgctgacgtttgaaggctaaataa

SEQ ID NO: 3852570 - DNA, 25 bp, Homo sapien
tttgttggcaacatttttgagagac

SEQ ID NO: 3852571 - DNA, 25 bp, Homo sapien
gatttgttggcaacatttttgagag

SEQ ID NO: 3852572 - DNA, 25 bp, Homo sapien
gacgtttgaaggctaaataatccaa

SEQ ID NO: 3852573 - DNA, 25 bp, Homo sapien
ttgcaagaggcacatgacatcaatc

SEQ ID NO: 3852574 - DNA, 25 bp, Homo sapien
aggataaggagtctcgtcaccgcag

SEQ ID NO: 3852575 - DNA, 25 bp, Homo sapien
tgacatcaatcatgtccgcaaggat

SEQ ID NO: 3852576 - DNA, 25 bp, Homo sapien
agctgacacatgttgcaagaggcac

SEQ ID NO: 3852577 - DNA, 25 bp, Homo sapien
tttgggagaaaacaggggtcatctg

SEQ ID NO: 3852578 - DNA, 25 bp, Homo sapien
gagaaaacaggggtcatctgtaaat

SEQ ID NO: 3852579 - DNA, 25 bp, Homo sapien
aaaacaggggtcatctgtaaatctc

SEQ ID NO: 3852580 - DNA, 25 bp, Homo sapien
caggggtcatctgtaaatctctcag

SEQ ID NO: 3852581 - DNA, 25 bp, Homo sapien
tagagggtgtcgatcttgttcacca

SEQ ID NO: 3852582 - DNA, 25 bp, Homo sapien
agagggtgtcgatcttgttcaccat

SEQ ID NO: 3852583 - DNA, 25 bp, Homo sapien
ctcatccttacaagtctcacaggta

SEQ ID NO: 3852584 - DNA, 25 bp, Homo sapien
catccttacaagtctcacaggtatg

SEQ ID NO: 3852585 - DNA, 25 bp, Homo sapien
tccttacaagtctcacaggtatgca

SEQ ID NO: 3852586 - DNA, 25 bp, Homo sapien
ccttacaagtctcacaggtatgcat

SEQ ID NO: 3852587 - DNA, 25 bp, Homo sapien
cacatattagcttgcccctgcttta

SEQ ID NO: 3852588 - DNA, 25 bp, Homo sapien
cacacatattagcttgcccctgctt

SEQ ID NO: 3852589 - DNA, 25 bp, Homo sapien
acacatattagcttgcccctgcttt

SEQ ID NO: 3852590 - DNA, 25 bp, Homo sapien
tcaggtccatttggcctaaagttca

SEQ ID NO: 3852591 - DNA, 25 bp, Homo sapien
catcttcttggttggtctagctagc

SEQ ID NO: 3852592 - DNA, 25 bp, Homo sapien
tatatttggtacaatgcagctgtga

SEQ ID NO: 3852593 - DNA, 25 bp, Homo sapien
gttttatgaatacgggtgctccagg

SEQ ID NO: 3852594 - DNA, 25 bp, Homo sapien
gatgctactgcttaggcttcccaaa

SEQ ID NO: 3852595 - DNA, 25 bp, Homo sapien
agtgatgctactgcttaggcttccc

SEQ ID NO: 3852596 - DNA, 25 bp, Homo sapien
gtgatgctactgcttaggcttccca

SEQ ID NO: 3852597 - DNA, 25 bp, Homo sapien
tgatgctactgcttaggcttcccaa

SEQ ID NO: 3852598 - DNA, 25 bp, Homo sapien
tgacttttgcgagcccagcatatat

SEQ ID NO: 3852599 - DNA, 25 bp, Homo sapien
tctatctagttgacttttgcgagcc

SEQ ID NO: 3852600 - DNA, 25 bp, Homo sapien
tgtctcccactaaaatgttagtcag

SEQ ID NO: 3852601 - DNA, 25 bp, Homo sapien
tcagtgagggcaagccttatctatc

SEQ ID NO: 3852602 - DNA, 25 bp, Homo sapien
ggagagaagaagctgctggacacca

SEQ ID NO: 3852603 - DNA, 25 bp, Homo sapien
agaagctgctggacaccactctctt

SEQ ID NO: 3852604 - DNA, 25 bp, Homo sapien
aaacaaagggagagaagaagctgct

SEQ ID NO: 3852605 - DNA, 25 bp, Homo sapien
tgctggacaccactctcttccactc

SEQ ID NO: 3852606 - DNA, 25 bp, Homo sapien
aagcttttgggaacagtgctttcac

SEQ ID NO: 3852607 - DNA, 25 bp, Homo sapien
cccacactgaagttgctggcggtag

SEQ ID NO: 3852608 - DNA, 25 bp, Homo sapien
cataggataatcattggctgttccc

SEQ ID NO: 3852609 - DNA, 25 bp, Homo sapien
tgtcactatccctactatccatagg

SEQ ID NO: 3852610 - DNA, 25 bp, Homo sapien
taccagacagtttatggaaactatg

SEQ ID NO: 3852611 - DNA, 25 bp, Homo sapien
gagaatgactgatgacgtacatact

SEQ ID NO: 3852612 - DNA, 25 bp, Homo sapien
gacgtacatacttattaccagacag

SEQ ID NO: 3852613 - DNA, 25 bp, Homo sapien
gacagtttatggaaactatgttgtc

SEQ ID NO: 3852614 - DNA, 25 bp, Homo sapien
ctaaagatatgcagtttgctcctga

SEQ ID NO: 3852615 - DNA, 25 bp, Homo sapien
taaagatatgcagtttgctcctgac

SEQ ID NO: 3852616 - DNA, 25 bp, Homo sapien
tttctttgcgaacttcctcaagtga

SEQ ID NO: 3852617 - DNA, 25 bp, Homo sapien
gtctaataaattccaagttgcttcc

SEQ ID NO: 3852618 - DNA, 25 bp, Homo sapien
gtgaagccgtaagctcatcctttaa

SEQ ID NO: 3852619 - DNA, 25 bp, Homo sapien
gacactggctcttttcgaacgtcct

SEQ ID NO: 3852620 - DNA, 25 bp, Homo sapien
ctggggacagtttacaagtgtggta

SEQ ID NO: 3852621 - DNA, 25 bp, Homo sapien
tggggacagtttacaagtgtggtaa

SEQ ID NO: 3852622 - DNA, 25 bp, Homo sapien
caagtccttgtcatccaagacacag

SEQ ID NO: 3852623 - DNA, 25 bp, Homo sapien
catctgggctagtctctctctcatc

SEQ ID NO: 3852624 - DNA, 25 bp, Homo sapien
ctgaagcagaaacccagaggtcatc

SEQ ID NO: 3852625 - DNA, 25 bp, Homo sapien
ttgtcatccaagacacagaaacggg

SEQ ID NO: 3852626 - DNA, 25 bp, Homo sapien
tattcaatgtgattggtgtttcagc

SEQ ID NO: 3852627 - DNA, 25 bp, Homo sapien
cggtgaatgtttggacctgcagatc

SEQ ID NO: 3852628 - DNA, 25 bp, Homo sapien
ttatgagaggctccagtagcttctc

SEQ ID NO: 3852629 - DNA, 25 bp, Homo sapien
gcagatcctgaggatcgatattcaa

SEQ ID NO: 3852630 - DNA, 25 bp, Homo sapien
ttctctctcctttgcgttgatttca

SEQ ID NO: 3852631 - DNA, 25 bp, Homo sapien
tctctctcctttgcgttgatttcat

SEQ ID NO: 3852632 - DNA, 25 bp, Homo sapien
atggtctcttttctcagcgattcag

SEQ ID NO: 3852633 - DNA, 25 bp, Homo sapien
tctaaaagtagaaacatggtctctt

SEQ ID NO: 3852634 - DNA, 25 bp, Homo sapien
ctccttctaaaagtagaaacatggt

SEQ ID NO: 3852635 - DNA, 25 bp, Homo sapien
aacatggtctcttttctcagcgatt

SEQ ID NO: 3852636 - DNA, 25 bp, Homo sapien
tgacagcagcgagtttctaagctag

SEQ ID NO: 3852637 - DNA, 25 bp, Homo sapien
tttagtgagtacaaggcccagagtc

SEQ ID NO: 3852638 - DNA, 25 bp, Homo sapien
gctagttcacttagacaagcccagt

SEQ ID NO: 3852639 - DNA, 25 bp, Homo sapien
tccagaatcttcaacatagtaggtg

SEQ ID NO: 3852640 - DNA, 25 bp, Homo sapien
cagagtattgcccatatacagatac

SEQ ID NO: 3852641 - DNA, 25 bp, Homo sapien
tttagaaattcagtgccactatcat

SEQ ID NO: 3852642 - DNA, 25 bp, Homo sapien
cagatactaaaccaattgtctaagc

SEQ ID NO: 3852643 - DNA, 25 bp, Homo sapien
ctcacaatttggcttatgatgcatc

SEQ ID NO: 3852644 - DNA, 25 bp, Homo sapien
ttacagagtaccaaattgagaggca

SEQ ID NO: 3852645 - DNA, 25 bp, Homo sapien
tcagctcccgtagggaattttccaa

SEQ ID NO: 3852646 - DNA, 25 bp, Homo sapien
tggtggtcacagagttacagagtac

SEQ ID NO: 3852647 - DNA, 25 bp, Homo sapien
tcttcctataaagtaaatgggctta

SEQ ID NO: 3852648 - DNA, 25 bp, Homo sapien
cttgacatcccactcgaacttctgt

SEQ ID NO: 3852649 - DNA, 25 bp, Homo sapien
catcccactcgaacttctgtggcat

SEQ ID NO: 3852650 - DNA, 25 bp, Homo sapien
aattccttgacatcccactcgaact

SEQ ID NO: 3852651 - DNA, 25 bp, Homo sapien
tcaattccttgacatcccactcgaa

SEQ ID NO: 3852652 - DNA, 25 bp, Homo sapien
gttggatttgttgatcacaggcccc

SEQ ID NO: 3852653 - DNA, 25 bp, Homo sapien
ttggatttgttgatcacaggcccca

SEQ ID NO: 3852654 - DNA, 25 bp, Homo sapien
tggatttgttgatcacaggccccat

SEQ ID NO: 3852655 - DNA, 25 bp, Homo sapien
cgacaaatactcactccactacaag

SEQ ID NO: 3852656 - DNA, 25 bp, Homo sapien
ctttccgacaaatactcactccact

SEQ ID NO: 3852657 - DNA, 25 bp, Homo sapien
actccactacaagtgtcactccttc

SEQ ID NO: 3852658 - DNA, 25 bp, Homo sapien
acaaatactcactccactacaagtg

SEQ ID NO: 3852659 - DNA, 25 bp, Homo sapien
tcagagaaagctaggactgtgctcc

SEQ ID NO: 3852660 - DNA, 25 bp, Homo sapien
cagagaaagctaggactgtgctccc

SEQ ID NO: 3852661 - DNA, 25 bp, Homo sapien
gagaaagctaggactgtgctcccta

SEQ ID NO: 3852662 - DNA, 25 bp, Homo sapien
agaaagctaggactgtgctccctac

SEQ ID NO: 3852663 - DNA, 25 bp, Homo sapien
tccagacactgagaaactgttcaag

SEQ ID NO: 3852664 - DNA, 25 bp, Homo sapien
caagttgaagtctggcgagaaggaa

SEQ ID NO: 3852665 - DNA, 25 bp, Homo sapien
caggcccgacagtcaggatctgtgg

SEQ ID NO: 3852666 - DNA, 25 bp, Homo sapien
gccgcatggttaaagggtgagttcc

SEQ ID NO: 3852667 - DNA, 25 bp, Homo sapien
gatgctgtctagaatagcatcaaac

SEQ ID NO: 3852668 - DNA, 25 bp, Homo sapien
gggatgctgtctagaatagcatcaa

SEQ ID NO: 3852669 - DNA, 25 bp, Homo sapien
tgggatgctgtctagaatagcatca

SEQ ID NO: 3852670 - DNA, 25 bp, Homo sapien
ggatgctgtctagaatagcatcaaa

SEQ ID NO: 3852671 - DNA, 25 bp, Homo sapien
cggggttcagacaagtaatttcaca

SEQ ID NO: 3852672 - DNA, 25 bp, Homo sapien
tctccccacggggttcagacaagta

SEQ ID NO: 3852673 - DNA, 25 bp, Homo sapien
cacggggttcagacaagtaatttca

SEQ ID NO: 3852674 - DNA, 25 bp, Homo sapien
agaaaacattttttgtacatccatc

SEQ ID NO: 3852675 - DNA, 25 bp, Homo sapien
aaaacattttttgtacatccatcac

SEQ ID NO: 3852676 - DNA, 25 bp, Homo sapien
aacattttttgtacatccatcacta

SEQ ID NO: 3852677 - DNA, 25 bp, Homo sapien
acattttttgtacatccatcactaa

SEQ ID NO: 3852678 - DNA, 25 bp, Homo sapien
tacactgtacagagattgcttttta

SEQ ID NO: 3852679 - DNA, 25 bp, Homo sapien
tatttaaatacactgtacagagatt

SEQ ID NO: 3852680 - DNA, 25 bp, Homo sapien
taataggaaaaagcatataatacaa

SEQ ID NO: 3852681 - DNA, 25 bp, Homo sapien
gatttctataagtagtattaatagg

SEQ ID NO: 3852682 - DNA, 25 bp, Homo sapien
cattatgagaactgattcaaggatg

SEQ ID NO: 3852683 - DNA, 25 bp, Homo sapien
gtactcagcaattcacagacatgac

SEQ ID NO: 3852684 - DNA, 25 bp, Homo sapien
caaagactgcatgttggcagcatag

SEQ ID NO: 3852685 - DNA, 25 bp, Homo sapien
tatctaagagctttaatttattcaa

SEQ ID NO: 3852686 - DNA, 25 bp, Homo sapien
aaacgaaggtgccaaccattcacat

SEQ ID NO: 3852687 - DNA, 25 bp, Homo sapien
cttggaccagcggaaacgaaggtgc

SEQ ID NO: 3852688 - DNA, 25 bp, Homo sapien
agcggaaacgaaggtgccaaccatt

SEQ ID NO: 3852689 - DNA, 25 bp, Homo sapien
gaccagcggaaacgaaggtgccaac

SEQ ID NO: 3852690 - DNA, 25 bp, Homo sapien
ttttctctgcggttgaagccagctc

SEQ ID NO: 3852691 - DNA, 25 bp, Homo sapien
tacctctgacaacccagtgcattga

SEQ ID NO: 3852692 - DNA, 25 bp, Homo sapien
tcttccagcatcaggtcttttttac

SEQ ID NO: 3852693 - DNA, 25 bp, Homo sapien
ccatcttggtggtatgagtcttgtc

SEQ ID NO: 3852694 - DNA, 25 bp, Homo sapien
taggtaataaatcatgcctaaatct

SEQ ID NO: 3852695 - DNA, 25 bp, Homo sapien
aagtgttccaatggagagaatctag

SEQ ID NO: 3852696 - DNA, 25 bp, Homo sapien
gagaatctaggtaataaatcatgcc

SEQ ID NO: 3852697 - DNA, 25 bp, Homo sapien
tgttccaatggagagaatctaggta

SEQ ID NO: 3852698 - DNA, 25 bp, Homo sapien
gactaatcagatcctgcctttttaa

SEQ ID NO: 3852699 - DNA, 25 bp, Homo sapien
gacataaactaaaaagatggagaat

SEQ ID NO: 3852700 - DNA, 25 bp, Homo sapien
tcatggctttctctgactaatcaga

SEQ ID NO: 3852701 - DNA, 25 bp, Homo sapien
gctttctctgactaatcagatcctg

SEQ ID NO: 3852702 - DNA, 25 bp, Homo sapien
taaaatagtaagcaataacagggag

SEQ ID NO: 3852703 - DNA, 25 bp, Homo sapien
agggagtgtgtatactgaaacaaac

SEQ ID NO: 3852704 - DNA, 25 bp, Homo sapien
gagaagtacatttattagagctcat

SEQ ID NO: 3852705 - DNA, 25 bp, Homo sapien
aacaaacagccaaagagattgaaag

SEQ ID NO: 3852706 - DNA, 25 bp, Homo sapien
gttttctccctcctatcgcctaatg

SEQ ID NO: 3852707 - DNA, 25 bp, Homo sapien
tacggacactgaattatatccagac

SEQ ID NO: 3852708 - DNA, 25 bp, Homo sapien
tgagtctaatccatgggcatcctga

SEQ ID NO: 3852709 - DNA, 25 bp, Homo sapien
tctcttcatgggatttacggacact

SEQ ID NO: 3852710 - DNA, 25 bp, Homo sapien
tcacgtcgcacccagcgagaaaccc

SEQ ID NO: 3852711 - DNA, 25 bp, Homo sapien
acgtcgcacccagcgagaaacccac

SEQ ID NO: 3852712 - DNA, 25 bp, Homo sapien
cacgtcgcacccagcgagaaaccca

SEQ ID NO: 3852713 - DNA, 25 bp, Homo sapien
tctcttcattggtcagaatctcctt

SEQ ID NO: 3852714 - DNA, 25 bp, Homo sapien
cccactgctggaatggcatcgacat

SEQ ID NO: 3852715 - DNA, 25 bp, Homo sapien
catctggctccttcgccagtggtca

SEQ ID NO: 3852716 - DNA, 25 bp, Homo sapien
tagcgggctcgactctcttcattgg

SEQ ID NO: 3852717 - DNA, 25 bp, Homo sapien
aagtcttgcgagacattctgattta

SEQ ID NO: 3852718 - DNA, 25 bp, Homo sapien
ggaagtcttgcgagacattctgatt

SEQ ID NO: 3852719 - DNA, 25 bp, Homo sapien
agcttataggagcaaatgatgctgg

SEQ ID NO: 3852720 - DNA, 25 bp, Homo sapien
tcattttgtaagcttataggagcaa

SEQ ID NO: 3852721 - DNA, 25 bp, Homo sapien
aggatgcttgtctgggtgacattcc

SEQ ID NO: 3852722 - DNA, 25 bp, Homo sapien
ggatgcttgtctgggtgacattcca

SEQ ID NO: 3852723 - DNA, 25 bp, Homo sapien
atgcttgtctgggtgacattccaga

SEQ ID NO: 3852724 - DNA, 25 bp, Homo sapien
gatgcttgtctgggtgacattccag

SEQ ID NO: 3852725 - DNA, 25 bp, Homo sapien
tgtggacaccccgttggcacagcac

SEQ ID NO: 3852726 - DNA, 25 bp, Homo sapien
cccactcccggccatattgatgctg

SEQ ID NO: 3852727 - DNA, 25 bp, Homo sapien
acaccccgttggcacagcactacag

SEQ ID NO: 3852728 - DNA, 25 bp, Homo sapien
tggtctcccactcccggccatattg

SEQ ID NO: 3852729 - DNA, 25 bp, Homo sapien
ctgaggctggagaatgcttgaaccc

SEQ ID NO: 3852730 - DNA, 25 bp, Homo sapien
ccaggaggcagaggttgcagtgagc

SEQ ID NO: 3852731 - DNA, 25 bp, Homo sapien
gtgtggtcatgggcgcctgtaatct

SEQ ID NO: 3852732 - DNA, 25 bp, Homo sapien
cagctactcaggaggctgaggctgg

SEQ ID NO: 3852733 - DNA, 25 bp, Homo sapien
gaccaacatggtgaaacctcatctc

SEQ ID NO: 3852734 - DNA, 25 bp, Homo sapien
ctgaccaacatggtgaaacctcatc

SEQ ID NO: 3852735 - DNA, 25 bp, Homo sapien
ccaacatggtgaaacctcatctcta

SEQ ID NO: 3852736 - DNA, 25 bp, Homo sapien
tcaggaattggagaccaggctgacc

SEQ ID NO: 3852737 - DNA, 25 bp, Homo sapien
tacaatggtagcagttggactgacc

SEQ ID NO: 3852738 - DNA, 25 bp, Homo sapien
tgcttgcgatcggtggctgcgtcac

SEQ ID NO: 3852739 - DNA, 25 bp, Homo sapien
gctgcgtcactctggtaaaggtgtg

SEQ ID NO: 3852740 - DNA, 25 bp, Homo sapien
tatagccatggccagtacaatggta

SEQ ID NO: 3852741 - DNA, 25 bp, Homo sapien
gtaatgtgtagtaatcttcagtatc

SEQ ID NO: 3852742 - DNA, 25 bp, Homo sapien
agtaatgtgtagtaatcttcagtat

SEQ ID NO: 3852743 - DNA, 25 bp, Homo sapien
taatgtgtagtaatcttcagtatct

SEQ ID NO: 3852744 - DNA, 25 bp, Homo sapien
catcacatcccagtaatgtgtagta

SEQ ID NO: 3852745 - DNA, 25 bp, Homo sapien
tggccacagtcaatacaccagatgt

SEQ ID NO: 3852746 - DNA, 25 bp, Homo sapien
gaattagagcagcatgttccacata

SEQ ID NO: 3852747 - DNA, 25 bp, Homo sapien
cacagtgagcttcgaattaacagga

SEQ ID NO: 3852748 - DNA, 25 bp, Homo sapien
tccctcggaaacaagaggcacagtg

SEQ ID NO: 3852749 - DNA, 25 bp, Homo sapien
tacaactcccataaggcatcgcgag

SEQ ID NO: 3852750 - DNA, 25 bp, Homo sapien
caactcccataaggcatcgcgagca

SEQ ID NO: 3852751 - DNA, 25 bp, Homo sapien
gactacaactcccataaggcatcgc

SEQ ID NO: 3852752 - DNA, 25 bp, Homo sapien
ccgagactacaactcccataaggca

SEQ ID NO: 3852753 - DNA, 25 bp, Homo sapien
ctttagtagtcccatgaaggtgagc

SEQ ID NO: 3852754 - DNA, 25 bp, Homo sapien
taggcgttaactatcaggttaggcc

SEQ ID NO: 3852755 - DNA, 25 bp, Homo sapien
catttgggtgctttttcacagtgac

SEQ ID NO: 3852756 - DNA, 25 bp, Homo sapien
gagttaggcttattgggattccagc

SEQ ID NO: 3852757 - DNA, 25 bp, Homo sapien
aatgtcagaagtgaaagttccccac

SEQ ID NO: 3852758 - DNA, 25 bp, Homo sapien
catgtatgtgatagctgttaacgga

SEQ ID NO: 3852759 - DNA, 25 bp, Homo sapien
tctttatacgaggtttttagcagca

SEQ ID NO: 3852760 - DNA, 25 bp, Homo sapien
tagtagaacctagaagttgcagtgg

SEQ ID NO: 3852761 - DNA, 25 bp, Homo sapien
tataaagctgactgccatcgagaag

SEQ ID NO: 3852762 - DNA, 25 bp, Homo sapien
cagtgtcatggttagtaaacttcag

SEQ ID NO: 3852763 - DNA, 25 bp, Homo sapien
tcaaaagatgctgcagttgcatgca

SEQ ID NO: 3852764 - DNA, 25 bp, Homo sapien
tattggccttgacagttaattatag

SEQ ID NO: 3852765 - DNA, 25 bp, Homo sapien
ggagcagaacttgagcgttttataa

SEQ ID NO: 3852766 - DNA, 25 bp, Homo sapien
tcaccacagtcttgtggagaagtac

SEQ ID NO: 3852767 - DNA, 25 bp, Homo sapien
tttgggaatttggagctcaagccct

SEQ ID NO: 3852768 - DNA, 25 bp, Homo sapien
tggttaagtatttagtgcatgggtc

SEQ ID NO: 3852769 - DNA, 25 bp, Homo sapien
caatcagctgttggtcaagactaac

SEQ ID NO: 3852770 - DNA, 25 bp, Homo sapien
tcttcaatcagctgttggtcaagac

SEQ ID NO: 3852771 - DNA, 25 bp, Homo sapien
gctgttggtcaagactaactttctt

SEQ ID NO: 3852772 - DNA, 25 bp, Homo sapien
tcagctgttggtcaagactaacttt

SEQ ID NO: 3852773 - DNA, 25 bp, Homo sapien
tgctagccctagtattatggagatg

SEQ ID NO: 3852774 - DNA, 25 bp, Homo sapien
gatgttaattgtaattcagccagaa

SEQ ID NO: 3852775 - DNA, 25 bp, Homo sapien
tgttaaataccaaactgctagccct

SEQ ID NO: 3852776 - DNA, 25 bp, Homo sapien
ggcccctgattatacagttccaaag

SEQ ID NO: 3852777 - DNA, 25 bp, Homo sapien
taatggcatgagacaactaagcatc

SEQ ID NO: 3852778 - DNA, 25 bp, Homo sapien
ttttattactggcaactgtggagac

SEQ ID NO: 3852779 - DNA, 25 bp, Homo sapien
gaaatagctctaaagcactgcagca

SEQ ID NO: 3852780 - DNA, 25 bp, Homo sapien
gctataacccagtgattggtgctca

SEQ ID NO: 3852781 - DNA, 25 bp, Homo sapien
taaaggtttttcactcaatgattga

SEQ ID NO: 3852782 - DNA, 25 bp, Homo sapien
taatcaaatgactattgcaggccaa

SEQ ID NO: 3852783 - DNA, 25 bp, Homo sapien
tgcactcacaccagatcatttctga

SEQ ID NO: 3852784 - DNA, 25 bp, Homo sapien
taagcaatatttccatgcactcaca

SEQ ID NO: 3852785 - DNA, 25 bp, Homo sapien
tcataatacttgctatgtttattag

SEQ ID NO: 3852786 - DNA, 25 bp, Homo sapien
gctatgtttattagaagatggtcaa

SEQ ID NO: 3852787 - DNA, 25 bp, Homo sapien
agaagatggtcaaaaaaaatccatg

SEQ ID NO: 3852788 - DNA, 25 bp, Homo sapien
tacttgctatgtttattagaagatg

SEQ ID NO: 3852789 - DNA, 25 bp, Homo sapien
cactcgtagattgaacattctgcaa

SEQ ID NO: 3852790 - DNA, 25 bp, Homo sapien
ttttggcttccatgaacactcgtag

SEQ ID NO: 3852791 - DNA, 25 bp, Homo sapien
acattctgcaagtaagaattataat

SEQ ID NO: 3852792 - DNA, 25 bp, Homo sapien
gaattcatcaccacaagaaaaacac

SEQ ID NO: 3852793 - DNA, 25 bp, Homo sapien
tgaagccttcattgtgatcaatagc

SEQ ID NO: 3852794 - DNA, 25 bp, Homo sapien
aaactgggagatactcctcaccacc

SEQ ID NO: 3852795 - DNA, 25 bp, Homo sapien
caatagcttggatcagtttagagcg

SEQ ID NO: 3852796 - DNA, 25 bp, Homo sapien
gtatattttggaagatccagaagat

SEQ ID NO: 3852797 - DNA, 25 bp, Homo sapien
cttcataccaagaataggaatgcga

SEQ ID NO: 3852798 - DNA, 25 bp, Homo sapien
ccaagaataggaatgcgatcactac

SEQ ID NO: 3852799 - DNA, 25 bp, Homo sapien
cataccaagaataggaatgcgatca

SEQ ID NO: 3852800 - DNA, 25 bp, Homo sapien
taccaagaataggaatgcgatcact

SEQ ID NO: 3852801 - DNA, 25 bp, Homo sapien
cagagcttcactttaacatctgctc

SEQ ID NO: 3852802 - DNA, 25 bp, Homo sapien
taatatttggtacagtcgctacagc

SEQ ID NO: 3852803 - DNA, 25 bp, Homo sapien
gatacagtagcaagtaatatttggt

SEQ ID NO: 3852804 - DNA, 25 bp, Homo sapien
tggtacagtcgctacagcagagctt

SEQ ID NO: 3852805 - DNA, 25 bp, Homo sapien
tcggaggttgccaaatcattcctgg

SEQ ID NO: 3852806 - DNA, 25 bp, Homo sapien
tgagggaactaaggcctgaaaaagc

SEQ ID NO: 3852807 - DNA, 25 bp, Homo sapien
tacaggaccactatcgtatatatgg

SEQ ID NO: 3852808 - DNA, 25 bp, Homo sapien
gaatttgaccaagattctcggaggt

SEQ ID NO: 3852809 - DNA, 25 bp, Homo sapien
ccaatattcccctttgtattctgta

SEQ ID NO: 3852810 - DNA, 25 bp, Homo sapien
tggtaattcgtgaaatacttcccaa

SEQ ID NO: 3852811 - DNA, 25 bp, Homo sapien
aaatttttatcgtaggatgttctgc

SEQ ID NO: 3852812 - DNA, 25 bp, Homo sapien
cgtaggatgttctgcccaatattcc

SEQ ID NO: 3852813 - DNA, 25 bp, Homo sapien
ctgcaacttcatgagggaaccctga

SEQ ID NO: 3852814 - DNA, 25 bp, Homo sapien
atggtgctatactgaggcctcctgc

SEQ ID NO: 3852815 - DNA, 25 bp, Homo sapien
ttcatgcccgtgtgtataaggatac

SEQ ID NO: 3852816 - DNA, 25 bp, Homo sapien
ttctgaggtagtttccaagatggcc

SEQ ID NO: 3852817 - DNA, 25 bp, Homo sapien
cattatccggcacacagtagaggct

SEQ ID NO: 3852818 - DNA, 25 bp, Homo sapien
agtaagaggcgttcccagattcatc

SEQ ID NO: 3852819 - DNA, 25 bp, Homo sapien
ttgggccctgggaaaacctcagtga

SEQ ID NO: 3852820 - DNA, 25 bp, Homo sapien
tggagctcaccgtctagtaagaggc

SEQ ID NO: 3852821 - DNA, 25 bp, Homo sapien
gggagacaggatacgtgtgcaggag

SEQ ID NO: 3852822 - DNA, 25 bp, Homo sapien
ggagacaggatacgtgtgcaggaga

SEQ ID NO: 3852823 - DNA, 25 bp, Homo sapien
gcataaagcctcagattcatccagt

SEQ ID NO: 3852824 - DNA, 25 bp, Homo sapien
tcttgctttgctgcctatgacagag

SEQ ID NO: 3852825 - DNA, 25 bp, Homo sapien
cacaattaggatactgagcagtccc

SEQ ID NO: 3852826 - DNA, 25 bp, Homo sapien
tctgtaagttctaagcacatgtgca

SEQ ID NO: 3852827 - DNA, 25 bp, Homo sapien
tataccgttcaaatccattcattgt

SEQ ID NO: 3852828 - DNA, 25 bp, Homo sapien
taatagtgtctaattcatataccgt

SEQ ID NO: 3852829 - DNA, 25 bp, Homo sapien
caatatcagagattagttttcccct

SEQ ID NO: 3852830 - DNA, 25 bp, Homo sapien
gtttgaagggtagagtgctttcctg

SEQ ID NO: 3852831 - DNA, 25 bp, Homo sapien
tatgaaagcccgcatgaaaagcatc

SEQ ID NO: 3852832 - DNA, 25 bp, Homo sapien
gcagaaggacttttcctccacagac

SEQ ID NO: 3852833 - DNA, 25 bp, Homo sapien
gaccattgcttgtagttcattaggc

SEQ ID NO: 3852834 - DNA, 25 bp, Homo sapien
cattaggctgaaagagcagaaggac

SEQ ID NO: 3852835 - DNA, 25 bp, Homo sapien
tgtgtctgcaccatttagaaccagc

SEQ ID NO: 3852836 - DNA, 25 bp, Homo sapien
gctgtgtctgcaccatttagaacca

SEQ ID NO: 3852837 - DNA, 25 bp, Homo sapien
ctgtgtctgcaccatttagaaccag

SEQ ID NO: 3852838 - DNA, 25 bp, Homo sapien
gtgtctgcaccatttagaaccagct

SEQ ID NO: 3852839 - DNA, 25 bp, Homo sapien
tcctctatgtcatcttctggataat

SEQ ID NO: 3852840 - DNA, 25 bp, Homo sapien
cctctatgtcatcttctggataatc

SEQ ID NO: 3852841 - DNA, 25 bp, Homo sapien
gaagggcatttgtttacttcagaaa

SEQ ID NO: 3852842 - DNA, 25 bp, Homo sapien
catagaaggaaagctttctgtacct

SEQ ID NO: 3852843 - DNA, 25 bp, Homo sapien
tagaaggaaagctttctgtaccttc

SEQ ID NO: 3852844 - DNA, 25 bp, Homo sapien
tattagaagggcatttgtttacttc

SEQ ID NO: 3852845 - DNA, 25 bp, Homo sapien
aaatggaggtccacaatggtacaat

SEQ ID NO: 3852846 - DNA, 25 bp, Homo sapien
cccaacatcaggcattagttctttc

SEQ ID NO: 3852847 - DNA, 25 bp, Homo sapien
gccacagataacaccaatcaaatgg

SEQ ID NO: 3852848 - DNA, 25 bp, Homo sapien
caaatggaacaaatcactgtcttca

SEQ ID NO: 3852849 - DNA, 25 bp, Homo sapien
tacactactgacacactgaaaatgt

SEQ ID NO: 3852850 - DNA, 25 bp, Homo sapien
taactgaaacatacttacactactg

SEQ ID NO: 3852851 - DNA, 25 bp, Homo sapien
ccttggatgcttagataactgaaac

SEQ ID NO: 3852852 - DNA, 25 bp, Homo sapien
atttagctgttttactctccttgga

SEQ ID NO: 3852853 - DNA, 25 bp, Homo sapien
tgctgacctgctctaaatgacaagg

SEQ ID NO: 3852854 - DNA, 25 bp, Homo sapien
gagattaatgggctatagtctgctg

SEQ ID NO: 3852855 - DNA, 25 bp, Homo sapien
tcagcagaaggaatagtcaacatta

SEQ ID NO: 3852856 - DNA, 25 bp, Homo sapien
tgttagggatccagtagtaattcct

SEQ ID NO: 3852857 - DNA, 25 bp, Homo sapien
agcctggaatcttcataatacctaa

SEQ ID NO: 3852858 - DNA, 25 bp, Homo sapien
gatccaataattccctcatgatgag

SEQ ID NO: 3852859 - DNA, 25 bp, Homo sapien
taaacatgccgtatttaggatccaa

SEQ ID NO: 3852860 - DNA, 25 bp, Homo sapien
aaaaattctttgcgcacccctcctg

SEQ ID NO: 3852861 - DNA, 25 bp, Homo sapien
caatgcaaacaccaaatagactgta

SEQ ID NO: 3852862 - DNA, 25 bp, Homo sapien
gaaagtacattctggagaccctaga

SEQ ID NO: 3852863 - DNA, 25 bp, Homo sapien
gagaccctagaacatgttatttatt

SEQ ID NO: 3852864 - DNA, 25 bp, Homo sapien
taaaagtcccaattataccacagaa

SEQ ID NO: 3852865 - DNA, 25 bp, Homo sapien
ttcctaaggacttccattgcatctc

SEQ ID NO: 3852866 - DNA, 25 bp, Homo sapien
tacgcaccactagaattaagcaggg

SEQ ID NO: 3852867 - DNA, 25 bp, Homo sapien
acaatattttctctacgcaccacta

SEQ ID NO: 3852868 - DNA, 25 bp, Homo sapien
ttctctacgcaccactagaattaag

SEQ ID NO: 3852869 - DNA, 25 bp, Homo sapien
tcagatattctataccagaggaagc

SEQ ID NO: 3852870 - DNA, 25 bp, Homo sapien
gataatggtgaccaaccccaggaac

SEQ ID NO: 3852871 - DNA, 25 bp, Homo sapien
taaggaatgatctggctaaggaagc

SEQ ID NO: 3852872 - DNA, 25 bp, Homo sapien
ttagagtaagccagtacagaacggt

SEQ ID NO: 3852873 - DNA, 25 bp, Homo sapien
gactgcatcggtctgtaacagagta

SEQ ID NO: 3852874 - DNA, 25 bp, Homo sapien
taacagagtagtttttgcttgggca

SEQ ID NO: 3852875 - DNA, 25 bp, Homo sapien
cagattgtaacagggatatctgcca

SEQ ID NO: 3852876 - DNA, 25 bp, Homo sapien
tgcatctgtaagactgcatcggtct

SEQ ID NO: 3852877 - DNA, 25 bp, Homo sapien
taaagagttatgaattgccagtcac

SEQ ID NO: 3852878 - DNA, 25 bp, Homo sapien
gagcccctgctatgagacttctaat

SEQ ID NO: 3852879 - DNA, 25 bp, Homo sapien
taaaacaatatctttgtgcctgccc

SEQ ID NO: 3852880 - DNA, 25 bp, Homo sapien
acattcttgtagttggaggacgacc

SEQ ID NO: 3852881 - DNA, 25 bp, Homo sapien
aactagaggtcactacgggagcagg

SEQ ID NO: 3852882 - DNA, 25 bp, Homo sapien
gtattgttacacatctatgccagga

SEQ ID NO: 3852883 - DNA, 25 bp, Homo sapien
cagtaaaaactctgggcaccagggt

SEQ ID NO: 3852884 - DNA, 25 bp, Homo sapien
tgccctgggttactaggaggtgacc

SEQ ID NO: 3852885 - DNA, 25 bp, Homo sapien
tcacttgtctgaacctcttggatca

SEQ ID NO: 3852886 - DNA, 25 bp, Homo sapien
aagtcacttgtctgaacctcttgga

SEQ ID NO: 3852887 - DNA, 25 bp, Homo sapien
atgattttcatcactttcttgcgga

SEQ ID NO: 3852888 - DNA, 25 bp, Homo sapien
catcactttcttgcggatttggcgg

SEQ ID NO: 3852889 - DNA, 25 bp, Homo sapien
tcttctgtacctgaccattgcgttt

SEQ ID NO: 3852890 - DNA, 25 bp, Homo sapien
gaggtcttctgtacctgaccattgc

SEQ ID NO: 3852891 - DNA, 25 bp, Homo sapien
ggtcttctgtacctgaccattgcgt

SEQ ID NO: 3852892 - DNA, 25 bp, Homo sapien
aagaggtcttctgtacctgaccatt

SEQ ID NO: 3852893 - DNA, 25 bp, Homo sapien
accattagtggtcttgacattaaca

SEQ ID NO: 3852894 - DNA, 25 bp, Homo sapien
taaccattagtggtcttgacattaa

SEQ ID NO: 3852895 - DNA, 25 bp, Homo sapien
tagtggtcttgacattaacatgagc

SEQ ID NO: 3852896 - DNA, 25 bp, Homo sapien
attagtggtcttgacattaacatga

SEQ ID NO: 3852897 - DNA, 25 bp, Homo sapien
cacgtgtcaccagcgatattattgg

SEQ ID NO: 3852898 - DNA, 25 bp, Homo sapien
tgtagttgactgagttcccacgtgt

SEQ ID NO: 3852899 - DNA, 25 bp, Homo sapien
gagtcaaaaagacccttggctgatt

SEQ ID NO: 3852900 - DNA, 25 bp, Homo sapien
gggaggcctcgtagcaaattatcaa

SEQ ID NO: 3852901 - DNA, 25 bp, Homo sapien
agcctccgcacctggactgtaatgt

SEQ ID NO: 3852902 - DNA, 25 bp, Homo sapien
aatatgtaagtgaacactgggcttc

SEQ ID NO: 3852903 - DNA, 25 bp, Homo sapien
gagtttagaactagtttaatgtgtg

SEQ ID NO: 3852904 - DNA, 25 bp, Homo sapien
tagaactagtttaatgtgtgtatat

SEQ ID NO: 3852905 - DNA, 25 bp, Homo sapien
gcagaacttcgtcaaagtattgcca

SEQ ID NO: 3852906 - DNA, 25 bp, Homo sapien
taaccatcatcctagtcaaacccat

SEQ ID NO: 3852907 - DNA, 25 bp, Homo sapien
tcactgtcaattctaaggtttcatc

SEQ ID NO: 3852908 - DNA, 25 bp, Homo sapien
cccaagaatggtattatcaaggtta

SEQ ID NO: 3852909 - DNA, 25 bp, Homo sapien
cctgggtacagaaaagtgggcctca

SEQ ID NO: 3852910 - DNA, 25 bp, Homo sapien
tacagctggtgcctagcaagcaatg

SEQ ID NO: 3852911 - DNA, 25 bp, Homo sapien
gatgtctagaagcaacctgattccg

SEQ ID NO: 3852912 - DNA, 25 bp, Homo sapien
tgggagtatcctaaaaacagcgtgc

SEQ ID NO: 3852913 - DNA, 25 bp, Homo sapien
tatcatactgtataatctgtcccat

SEQ ID NO: 3852914 - DNA, 25 bp, Homo sapien
caattcttgtacttcatgtatataa

SEQ ID NO: 3852915 - DNA, 25 bp, Homo sapien
ataggcctgctgttggacccagttg

SEQ ID NO: 3852916 - DNA, 25 bp, Homo sapien
ctgttggacccagttgatataatca

SEQ ID NO: 3852917 - DNA, 25 bp, Homo sapien
acaagcacccgccatcatgaccggc

SEQ ID NO: 3852918 - DNA, 25 bp, Homo sapien
gactacaagcacccgccatcatgac

SEQ ID NO: 3852919 - DNA, 25 bp, Homo sapien
ctacaagcacccgccatcatgaccg

SEQ ID NO: 3852920 - DNA, 25 bp, Homo sapien
aagcacccgccatcatgaccggcta

SEQ ID NO: 3852921 - DNA, 25 bp, Homo sapien
taaaccaacttgcactcactgtcat

SEQ ID NO: 3852922 - DNA, 25 bp, Homo sapien
caaatcctggaccatacaataagtc

SEQ ID NO: 3852923 - DNA, 25 bp, Homo sapien
ttcactaagatagaccaaatcctgg

SEQ ID NO: 3852924 - DNA, 25 bp, Homo sapien
gccagagaggctactcttacagtaa

SEQ ID NO: 3852925 - DNA, 25 bp, Homo sapien
gagtcagattcagagaagacccaaa

SEQ ID NO: 3852926 - DNA, 25 bp, Homo sapien
gtcagattcagagaagacccaaatg

SEQ ID NO: 3852927 - DNA, 25 bp, Homo sapien
agagtcagattcagagaagacccaa

SEQ ID NO: 3852928 - DNA, 25 bp, Homo sapien
agattcagagaagacccaaatgttg

SEQ ID NO: 3852929 - DNA, 25 bp, Homo sapien
aaacatagtgcaggccacaaggacc

SEQ ID NO: 3852930 - DNA, 25 bp, Homo sapien
tcaaaatgtgagttcctgcaagcct

SEQ ID NO: 3852931 - DNA, 25 bp, Homo sapien
tactaggtgagtccaagtgcagaac

SEQ ID NO: 3852932 - DNA, 25 bp, Homo sapien
cacagctggatagggcaccagtcaa

SEQ ID NO: 3852933 - DNA, 25 bp, Homo sapien
taggcaagagggtctgaaaatgcaa

SEQ ID NO: 3852934 - DNA, 25 bp, Homo sapien
aggcaagagggtctgaaaatgcaaa

SEQ ID NO: 3852935 - DNA, 25 bp, Homo sapien
caactgtcagggatgaaaatccatc

SEQ ID NO: 3852936 - DNA, 25 bp, Homo sapien
aatccatctttaatgaaacagctca

SEQ ID NO: 3852937 - DNA, 25 bp, Homo sapien
gagtctacttcttcatataactttg

SEQ ID NO: 3852938 - DNA, 25 bp, Homo sapien
tgaactgctacaagtgtaaagggta

SEQ ID NO: 3852939 - DNA, 25 bp, Homo sapien
tagagtttcaaaagatgtaccacaa

SEQ ID NO: 3852940 - DNA, 25 bp, Homo sapien
ggaataccgatcttgtagagtttca

SEQ ID NO: 3852941 - DNA, 25 bp, Homo sapien
ggaggttcaagtactgaccaccagt

SEQ ID NO: 3852942 - DNA, 25 bp, Homo sapien
aaagttctactatcttgaggaatag

SEQ ID NO: 3852943 - DNA, 25 bp, Homo sapien
ttctaggttcacaagagctgtacca

SEQ ID NO: 3852944 - DNA, 25 bp, Homo sapien
gagctgtaccaaagggaattgctat

SEQ ID NO: 3852945 - DNA, 25 bp, Homo sapien
aaattgttggaatcactcatcaggg

SEQ ID NO: 3852946 - DNA, 25 bp, Homo sapien
ggaattgctattgttgtgaaattgt

SEQ ID NO: 3852947 - DNA, 25 bp, Homo sapien
gataaaacctcaatgcttcaacatc

SEQ ID NO: 3852948 - DNA, 25 bp, Homo sapien
tcaggtaaggagctagtcagtttag

SEQ ID NO: 3852949 - DNA, 25 bp, Homo sapien
ggtaaggagctagtcagtttaggaa

SEQ ID NO: 3852950 - DNA, 25 bp, Homo sapien
tcaatgcttcaacatcaggtaagga

SEQ ID NO: 3852951 - DNA, 25 bp, Homo sapien
gcagcattcatatcaacccctgaaa

SEQ ID NO: 3852952 - DNA, 25 bp, Homo sapien
tgatcaggttgtataagtttgtgga

SEQ ID NO: 3852953 - DNA, 25 bp, Homo sapien
tgctgagatatctgcggatgatcag

SEQ ID NO: 3852954 - DNA, 25 bp, Homo sapien
caacccctgaaaatctggtacctgt

SEQ ID NO: 3852955 - DNA, 25 bp, Homo sapien
agaggaagaaaacgttccatctatc

SEQ ID NO: 3852956 - DNA, 25 bp, Homo sapien
cagctaaaaaacttccatttaggca

SEQ ID NO: 3852957 - DNA, 25 bp, Homo sapien
gcaaccagaggaagaaaacgttcca

SEQ ID NO: 3852958 - DNA, 25 bp, Homo sapien
aaacttccatttaggcaaccagagg

SEQ ID NO: 3852959 - DNA, 25 bp, Homo sapien
gctttgtcggattgggacatctgaa

SEQ ID NO: 3852960 - DNA, 25 bp, Homo sapien
gatctgctttgtcggattgggacat

SEQ ID NO: 3852961 - DNA, 25 bp, Homo sapien
ttgtcggattgggacatctgaagtc

SEQ ID NO: 3852962 - DNA, 25 bp, Homo sapien
tgaagtcatctggtggcccacagtt

SEQ ID NO: 3852963 - DNA, 25 bp, Homo sapien
tagagtaatgtgaaaagctttgatc

SEQ ID NO: 3852964 - DNA, 25 bp, Homo sapien
gactagagtaatgtgaaaagctttg

SEQ ID NO: 3852965 - DNA, 25 bp, Homo sapien
gtaatgtgaaaagctttgatctccc

SEQ ID NO: 3852966 - DNA, 25 bp, Homo sapien
gggactagagtaatgtgaaaagctt

SEQ ID NO: 3852967 - DNA, 25 bp, Homo sapien
gtatttattcttggcgaggcacagt

SEQ ID NO: 3852968 - DNA, 25 bp, Homo sapien
gaccatggctgctatagaattatcc

SEQ ID NO: 3852969 - DNA, 25 bp, Homo sapien
taaaactactacatggaggcaggag

SEQ ID NO: 3852970 - DNA, 25 bp, Homo sapien
taaacgatcccacaagcataagcag

SEQ ID NO: 3852971 - DNA, 25 bp, Homo sapien
tggacaacatggcaagacctcgcct

SEQ ID NO: 3852972 - DNA, 25 bp, Homo sapien
aagcctaaccatatgaggggtctag

SEQ ID NO: 3852973 - DNA, 25 bp, Homo sapien
tttccaatgtatgtccttggcgccc

SEQ ID NO: 3852974 - DNA, 25 bp, Homo sapien
gcccttgtccaaaatgaatttactg

SEQ ID NO: 3852975 - DNA, 25 bp, Homo sapien
ccttggcgcccttgtccaaaatgaa

SEQ ID NO: 3852976 - DNA, 25 bp, Homo sapien
ggctttgtctcttcatgtttggtca

SEQ ID NO: 3852977 - DNA, 25 bp, Homo sapien
tttctgaaaagtcacatggctttgt

SEQ ID NO: 3852978 - DNA, 25 bp, Homo sapien
ctgtttatcttcagtttagttgaga

SEQ ID NO: 3852979 - DNA, 25 bp, Homo sapien
ggtcactagtgccttatttcattgg

SEQ ID NO: 3852980 - DNA, 25 bp, Homo sapien
agcagagcacattacagcccagagc

SEQ ID NO: 3852981 - DNA, 25 bp, Homo sapien
gacacccaatcagcagagcacatta

SEQ ID NO: 3852982 - DNA, 25 bp, Homo sapien
agcccagagctcctgagcccaagcg

SEQ ID NO: 3852983 - DNA, 25 bp, Homo sapien
gcccagagctcctgagcccaagcga

SEQ ID NO: 3852984 - DNA, 25 bp, Homo sapien
caagtgataaatcctgtcaggcctg

SEQ ID NO: 3852985 - DNA, 25 bp, Homo sapien
tagatcacacctgacagtactgggt

SEQ ID NO: 3852986 - DNA, 25 bp, Homo sapien
tgggtctcacccaaagcatgtagag

SEQ ID NO: 3852987 - DNA, 25 bp, Homo sapien
catatggatgtggaaaacgtcctta

SEQ ID NO: 3852988 - DNA, 25 bp, Homo sapien
aaatgggagcctggggcaccaaaat

SEQ ID NO: 3852989 - DNA, 25 bp, Homo sapien
ccctctccctgtatcccattcctag

SEQ ID NO: 3852990 - DNA, 25 bp, Homo sapien
ctccctgtatcccattcctagaagg

SEQ ID NO: 3852991 - DNA, 25 bp, Homo sapien
cgccctctccctgtatcccattcct

SEQ ID NO: 3852992 - DNA, 25 bp, Homo sapien
tcaggcgctgcaggaacacattctc

SEQ ID NO: 3852993 - DNA, 25 bp, Homo sapien
caggcgctgcaggaacacattctcc

SEQ ID NO: 3852994 - DNA, 25 bp, Homo sapien
caggttctcaatactggttcgcttt

SEQ ID NO: 3852995 - DNA, 25 bp, Homo sapien
ttctgcagcaagggccgcgccgctt

SEQ ID NO: 3852996 - DNA, 25 bp, Homo sapien
tctgcagcaagggccgcgccgctta

SEQ ID NO: 3852997 - DNA, 25 bp, Homo sapien
ctgcagcaagggccgcgccgcttac

SEQ ID NO: 3852998 - DNA, 25 bp, Homo sapien
ctaagctgttgagcctcaaagaggc

SEQ ID NO: 3852999 - DNA, 25 bp, Homo sapien
aagctaagctgttgagcctcaaaga

SEQ ID NO: 3853000 - DNA, 25 bp, Homo sapien
gctaagctgttgagcctcaaagagg

SEQ ID NO: 3853001 - DNA, 25 bp, Homo sapien
taagctgttgagcctcaaagaggca

SEQ ID NO: 3853002 - DNA, 25 bp, Homo sapien
tggcaaattgctcaagttctttctg

SEQ ID NO: 3853003 - DNA, 25 bp, Homo sapien
tgtgcatatcccagggtgatcctct

SEQ ID NO: 3853004 - DNA, 25 bp, Homo sapien
ctcttctgcttcaggagcttggcaa

SEQ ID NO: 3853005 - DNA, 25 bp, Homo sapien
cagcctgtgcatatcccagggtgat

SEQ ID NO: 3853006 - DNA, 25 bp, Homo sapien
tctggtagacactgcccattatagg

SEQ ID NO: 3853007 - DNA, 25 bp, Homo sapien
ctgttgcttgttgaaccggttccca

SEQ ID NO: 3853008 - DNA, 25 bp, Homo sapien
ttcctgttgcttgttgaaccggttc

SEQ ID NO: 3853009 - DNA, 25 bp, Homo sapien
ctgcccattataggggtaccaattt

SEQ ID NO: 3853010 - DNA, 25 bp, Homo sapien
tgatgaaggaacaaaagcagaagtg

SEQ ID NO: 3853011 - DNA, 25 bp, Homo sapien
aggaacaaaagcagaagtgtgctgc

SEQ ID NO: 3853012 - DNA, 25 bp, Homo sapien
tgaaggaacaaaagcagaagtgtgc

SEQ ID NO: 3853013 - DNA, 25 bp, Homo sapien
ctgatgaaggaacaaaagcagaagt

SEQ ID NO: 3853014 - DNA, 25 bp, Homo sapien
gagagaacttcacaacctatgctaa

SEQ ID NO: 3853015 - DNA, 25 bp, Homo sapien
tatgaaagtaataaaggtcatcatc

SEQ ID NO: 3853016 - DNA, 25 bp, Homo sapien
aagtaataaaggtcatcatcagcca

SEQ ID NO: 3853017 - DNA, 25 bp, Homo sapien
cacaacctatgctaaaatttatatg

SEQ ID NO: 3853018 - DNA, 25 bp, Homo sapien
ccacaagcaatctcagtgacaatgc

SEQ ID NO: 3853019 - DNA, 25 bp, Homo sapien
aattatggcccaactgaccataccc

SEQ ID NO: 3853020 - DNA, 25 bp, Homo sapien
cgtccacaagcaatctcagtgacaa

SEQ ID NO: 3853021 - DNA, 25 bp, Homo sapien
ctggtagaattatggcccaactgac

SEQ ID NO: 3853022 - DNA, 25 bp, Homo sapien
cttggttagagcagcagtatgatct

SEQ ID NO: 3853023 - DNA, 25 bp, Homo sapien
tgactttagtaaattaggaacatac

SEQ ID NO: 3853024 - DNA, 25 bp, Homo sapien
gcagtatgatcttctccacaacaaa

SEQ ID NO: 3853025 - DNA, 25 bp, Homo sapien
tagagcagcagtatgatcttctcca

SEQ ID NO: 3853026 - DNA, 25 bp, Homo sapien
gaaagggattccaagcaaagactta

SEQ ID NO: 3853027 - DNA, 25 bp, Homo sapien
gagtacaaaactatgggctcctcct

SEQ ID NO: 3853028 - DNA, 25 bp, Homo sapien
gacctagctgaccaaacttgttgcg

SEQ ID NO: 3853029 - DNA, 25 bp, Homo sapien
gtcagtacctaaacccaattggcca

SEQ ID NO: 3853030 - DNA, 25 bp, Homo sapien
tacaatctggatatctgacaaactt

SEQ ID NO: 3853031 - DNA, 25 bp, Homo sapien
gatagtaaccacaagcaacctgtac

SEQ ID NO: 3853032 - DNA, 25 bp, Homo sapien
aagtgcaagtgaatgatagtaacca

SEQ ID NO: 3853033 - DNA, 25 bp, Homo sapien
cctgtacaatctggatatctgacaa

SEQ ID NO: 3853034 - DNA, 25 bp, Homo sapien
caagctcaattttagcgtaccaaaa

SEQ ID NO: 3853035 - DNA, 25 bp, Homo sapien
tgatggcctactatatgcacatagg

SEQ ID NO: 3853036 - DNA, 25 bp, Homo sapien
gaagaagacagatcaagaccagtta

SEQ ID NO: 3853037 - DNA, 25 bp, Homo sapien
catttaacaaattgatcttgaatgc

SEQ ID NO: 3853038 - DNA, 25 bp, Homo sapien
ttctgccataagagagtccggagca

SEQ ID NO: 3853039 - DNA, 25 bp, Homo sapien
gagagtccggagcaaattctgacca

SEQ ID NO: 3853040 - DNA, 25 bp, Homo sapien
caaattctgaccagagagtcgacac

SEQ ID NO: 3853041 - DNA, 25 bp, Homo sapien
ccagagagtcgacacacatgatttt

SEQ ID NO: 3853042 - DNA, 25 bp, Homo sapien
caaattagcaggatccaatgcacct

SEQ ID NO: 3853043 - DNA, 25 bp, Homo sapien
gagagctgtactgctacaatttagc

SEQ ID NO: 3853044 - DNA, 25 bp, Homo sapien
catactaggcagatgatacattgac

SEQ ID NO: 3853045 - DNA, 25 bp, Homo sapien
tacccaactgtgctcaaattactaa

SEQ ID NO: 3853046 - DNA, 25 bp, Homo sapien
tctgatgcattcctctgatcctacc

SEQ ID NO: 3853047 - DNA, 25 bp, Homo sapien
tgtccatcagaatcgagaccccaag

SEQ ID NO: 3853048 - DNA, 25 bp, Homo sapien
tctgatcctaccaggccaagctgtc

SEQ ID NO: 3853049 - DNA, 25 bp, Homo sapien
catttagcgctaacgtatgagcttc

SEQ ID NO: 3853050 - DNA, 25 bp, Homo sapien
gaaatcaagaagagaaatattgcat

SEQ ID NO: 3853051 - DNA, 25 bp, Homo sapien
tacagaaatcaagaagagaaatatt

SEQ ID NO: 3853052 - DNA, 25 bp, Homo sapien
ctacagaaatcaagaagagaaatat

SEQ ID NO: 3853053 - DNA, 25 bp, Homo sapien
cagaaatcaagaagagaaatattgc

SEQ ID NO: 3853054 - DNA, 25 bp, Homo sapien
aagtcaaagatagcaatgtaaagtc

SEQ ID NO: 3853055 - DNA, 25 bp, Homo sapien
gagtttacagcctatggaaaaggag

SEQ ID NO: 3853056 - DNA, 25 bp, Homo sapien
aataagcgtcctagccctcaatgag

SEQ ID NO: 3853057 - DNA, 25 bp, Homo sapien
aaagatagtccaggcgaggtagctc

SEQ ID NO: 3853058 - DNA, 25 bp, Homo sapien
gccaagcttctcaatgtgtatttaa

SEQ ID NO: 3853059 - DNA, 25 bp, Homo sapien
caagcgtagttacttagaagggata

SEQ ID NO: 3853060 - DNA, 25 bp, Homo sapien
gcagagggaacaatagcgtggtcaa

SEQ ID NO: 3853061 - DNA, 25 bp, Homo sapien
tggtcaaatgtaagagccaagcttc

SEQ ID NO: 3853062 - DNA, 25 bp, Homo sapien
taactttacagttctcaagatacca

SEQ ID NO: 3853063 - DNA, 25 bp, Homo sapien
caatgcagagtatacctaaaatcca

SEQ ID NO: 3853064 - DNA, 25 bp, Homo sapien
gatactgtagagctccattcttaca

SEQ ID NO: 3853065 - DNA, 25 bp, Homo sapien
tcaaaactctaaactagggcaatgc

SEQ ID NO: 3853066 - DNA, 25 bp, Homo sapien
gaatggtacaatccatagccaagaa

SEQ ID NO: 3853067 - DNA, 25 bp, Homo sapien
cccaggctgatggtaactgatactt

SEQ ID NO: 3853068 - DNA, 25 bp, Homo sapien
taaaaggatctctaacatgatggac

SEQ ID NO: 3853069 - DNA, 25 bp, Homo sapien
gattacacaagtgtgccgccatacc

SEQ ID NO: 3853070 - DNA, 25 bp, Homo sapien
gcaggaagacaactgtctgttgaat

SEQ ID NO: 3853071 - DNA, 25 bp, Homo sapien
taaggttaattgaagactaaaggca

SEQ ID NO: 3853072 - DNA, 25 bp, Homo sapien
tagcacaatatcaagggcacagcag

SEQ ID NO: 3853073 - DNA, 25 bp, Homo sapien
ggcatagtctttgaataagagctct

SEQ ID NO: 3853074 - DNA, 25 bp, Homo sapien
tcctattagagagcctagttatgaa

SEQ ID NO: 3853075 - DNA, 25 bp, Homo sapien
tacaggtaacatcaaccactcaggc

SEQ ID NO: 3853076 - DNA, 25 bp, Homo sapien
ccttattctcagttgcagaggctca

SEQ ID NO: 3853077 - DNA, 25 bp, Homo sapien
caatgcagtaccaacttataatgtg

SEQ ID NO: 3853078 - DNA, 25 bp, Homo sapien
tgtgggaagcaatttaagatctact

SEQ ID NO: 3853079 - DNA, 25 bp, Homo sapien
ccaacagcattatcgcaaaaggtgt

SEQ ID NO: 3853080 - DNA, 25 bp, Homo sapien
tacttcagctactagtggaaccaaa

SEQ ID NO: 3853081 - DNA, 25 bp, Homo sapien
tctttaggaccgcttttagcctcac

SEQ ID NO: 3853082 - DNA, 25 bp, Homo sapien
ctccgtaaatttatcccctaagatg

SEQ ID NO: 3853083 - DNA, 25 bp, Homo sapien
ccctaagatgaggataattcttgca

SEQ ID NO: 3853084 - DNA, 25 bp, Homo sapien
aattcttgcaaattgtgtcacaagc

SEQ ID NO: 3853085 - DNA, 25 bp, Homo sapien
tgctgccatttctccgtaaatttat

SEQ ID NO: 3853086 - DNA, 25 bp, Homo sapien
gaaaggcaagccaagtaatcactac

SEQ ID NO: 3853087 - DNA, 25 bp, Homo sapien
aagaaaggcaagccaagtaatcact

SEQ ID NO: 3853088 - DNA, 25 bp, Homo sapien
agaaaggcaagccaagtaatcacta

SEQ ID NO: 3853089 - DNA, 25 bp, Homo sapien
tacatcttgaaaatagaactctcga

SEQ ID NO: 3853090 - DNA, 25 bp, Homo sapien
tattggaatgactcaacagtagaaa

SEQ ID NO: 3853091 - DNA, 25 bp, Homo sapien
tagaaattaccattcgaggatatgg

SEQ ID NO: 3853092 - DNA, 25 bp, Homo sapien
tctgccaatcgagttagtcttccat

SEQ ID NO: 3853093 - DNA, 25 bp, Homo sapien
acataaaaaaattggccaggcctgg

SEQ ID NO: 3853094 - DNA, 25 bp, Homo sapien
acctgaggtcaggagttcgagaccc

SEQ ID NO: 3853095 - DNA, 25 bp, Homo sapien
tttgggagaccgaggtgggcagatc

SEQ ID NO: 3853096 - DNA, 25 bp, Homo sapien
tggctcatgcctgtaatcccagcac

SEQ ID NO: 3853097 - DNA, 25 bp, Homo sapien
taggccacaggttaaatctattcac

SEQ ID NO: 3853098 - DNA, 25 bp, Homo sapien
tcactacattgtcaggccaagtcct

SEQ ID NO: 3853099 - DNA, 25 bp, Homo sapien
tgtggtccctaaaaagtccagaaca

SEQ ID NO: 3853100 - DNA, 25 bp, Homo sapien
taaatggattggtctagcgcactga

SEQ ID NO: 3853101 - DNA, 25 bp, Homo sapien
tatcttttaatccagtcctcaaatt

SEQ ID NO: 3853102 - DNA, 25 bp, Homo sapien
taaaaaacatcttaggccaggagca

SEQ ID NO: 3853103 - DNA, 25 bp, Homo sapien
gacacaaatcattaacgaattattc

SEQ ID NO: 3853104 - DNA, 25 bp, Homo sapien
taatccagtcctcaaattcacaaat

SEQ ID NO: 3853105 - DNA, 25 bp, Homo sapien
cattacatccacatgtgtacactgt

SEQ ID NO: 3853106 - DNA, 25 bp, Homo sapien
acatcctacatctcggaccctttta

SEQ ID NO: 3853107 - DNA, 25 bp, Homo sapien
catgtgtacactgttccatcatcca

SEQ ID NO: 3853108 - DNA, 25 bp, Homo sapien
tttttcatgacctagctgtcctaga

SEQ ID NO: 3853109 - DNA, 25 bp, Homo sapien
ctgcccaaaggatgcatttccccag

SEQ ID NO: 3853110 - DNA, 25 bp, Homo sapien
gcccaaaggatgcatttccccagca

SEQ ID NO: 3853111 - DNA, 25 bp, Homo sapien
aggatgcatttccccagcacaacat

SEQ ID NO: 3853112 - DNA, 25 bp, Homo sapien
ccaaaggatgcatttccccagcaca

SEQ ID NO: 3853113 - DNA, 25 bp, Homo sapien
tcaataaaaaattctcttctgaaac

SEQ ID NO: 3853114 - DNA, 25 bp, Homo sapien
tattttggtcttccagtttcaataa

SEQ ID NO: 3853115 - DNA, 25 bp, Homo sapien
gcttgtaattattttggtcttccag

SEQ ID NO: 3853116 - DNA, 25 bp, Homo sapien
taattattttggtcttccagtttca

SEQ ID NO: 3853117 - DNA, 25 bp, Homo sapien
aactaataggaataagtaccttgat

SEQ ID NO: 3853118 - DNA, 25 bp, Homo sapien
acttctggttatcttgtgatagact

SEQ ID NO: 3853119 - DNA, 25 bp, Homo sapien
gacactttctatgatcctttgcaaa

SEQ ID NO: 3853120 - DNA, 25 bp, Homo sapien
tcttgtgatagactaaactaatagg

SEQ ID NO: 3853121 - DNA, 25 bp, Homo sapien
catcaacagaaaatggagttcttat

SEQ ID NO: 3853122 - DNA, 25 bp, Homo sapien
ctccacatcaacagaaaatggagtt

SEQ ID NO: 3853123 - DNA, 25 bp, Homo sapien
cacatcaacagaaaatggagttctt

SEQ ID NO: 3853124 - DNA, 25 bp, Homo sapien
tccacatcaacagaaaatggagttc

SEQ ID NO: 3853125 - DNA, 25 bp, Homo sapien
gatggcgaaatctgtagaactttcc

SEQ ID NO: 3853126 - DNA, 25 bp, Homo sapien
taggaatggatagtctgatggcgaa

SEQ ID NO: 3853127 - DNA, 25 bp, Homo sapien
aaaaatcacccgtgggcaatctata

SEQ ID NO: 3853128 - DNA, 25 bp, Homo sapien
tacgtagacttttaaacacatcgcg

SEQ ID NO: 3853129 - DNA, 25 bp, Homo sapien
agtgcgcggcctcaacctgagagaa

SEQ ID NO: 3853130 - DNA, 25 bp, Homo sapien
aaatgagaagcagtttagtcccgtc

SEQ ID NO: 3853131 - DNA, 25 bp, Homo sapien
gtctttccctgaacgtgcacccaga

SEQ ID NO: 3853132 - DNA, 25 bp, Homo sapien
tcctctcgccagcaacaggtaggga

SEQ ID NO: 3853133 - DNA, 25 bp, Homo sapien
agagacagccgtcagcgacccggat

SEQ ID NO: 3853134 - DNA, 25 bp, Homo sapien
aaagcggacgccactgctgtccagt

SEQ ID NO: 3853135 - DNA, 25 bp, Homo sapien
gttccttagagaaaagcggacgcca

SEQ ID NO: 3853136 - DNA, 25 bp, Homo sapien
acagccgtcagcgacccggatggag

SEQ ID NO: 3853137 - DNA, 25 bp, Homo sapien
tgctctgatacccatggcagtggca

SEQ ID NO: 3853138 - DNA, 25 bp, Homo sapien
tgtcccagtaaaaaggtgcctccag

SEQ ID NO: 3853139 - DNA, 25 bp, Homo sapien
tcccggctggaactacccaatgtag

SEQ ID NO: 3853140 - DNA, 25 bp, Homo sapien
tgaggctcacaggagaaaatagctc

SEQ ID NO: 3853141 - DNA, 25 bp, Homo sapien
tctttggctagtacttgtaatccca

SEQ ID NO: 3853142 - DNA, 25 bp, Homo sapien
aaatgtatgttgttggccgggtgca

SEQ ID NO: 3853143 - DNA, 25 bp, Homo sapien
aagaaatgtatgttgttggccgggt

SEQ ID NO: 3853144 - DNA, 25 bp, Homo sapien
gaaaagagtatttgactccagaatt

SEQ ID NO: 3853145 - DNA, 25 bp, Homo sapien
ctggatctgcaacggaaccctgtaa

SEQ ID NO: 3853146 - DNA, 25 bp, Homo sapien
tttgtgtctgacacaagttaggcag

SEQ ID NO: 3853147 - DNA, 25 bp, Homo sapien
gagatttggactttagatgatcctg

SEQ ID NO: 3853148 - DNA, 25 bp, Homo sapien
gatgatcctggttgattgatatagg

SEQ ID NO: 3853149 - DNA, 25 bp, Homo sapien
cccaatgtgagtaaattgtttctgt

SEQ ID NO: 3853150 - DNA, 25 bp, Homo sapien
gtttctgtggctgactgactgaatt

SEQ ID NO: 3853151 - DNA, 25 bp, Homo sapien
ggcattcctgtggatcatcccaatg

SEQ ID NO: 3853152 - DNA, 25 bp, Homo sapien
ggatcatcccaatgtgagtaaattg

SEQ ID NO: 3853153 - DNA, 25 bp, Homo sapien
aagcacaggatcgtgttcaaaccac

SEQ ID NO: 3853154 - DNA, 25 bp, Homo sapien
gcacaggatcgtgttcaaaccacaa

SEQ ID NO: 3853155 - DNA, 25 bp, Homo sapien
agcacaggatcgtgttcaaaccaca

SEQ ID NO: 3853156 - DNA, 25 bp, Homo sapien
agctcaggcgatccgcctgcctcaa

SEQ ID NO: 3853157 - DNA, 25 bp, Homo sapien
aggcatgcacctctacgccctgcta

SEQ ID NO: 3853158 - DNA, 25 bp, Homo sapien
ctacaggcatgcacctctacgccct

SEQ ID NO: 3853159 - DNA, 25 bp, Homo sapien
gcatgcacctctacgccctgctaat

SEQ ID NO: 3853160 - DNA, 25 bp, Homo sapien
ttgggacctgtgagctgacaaatgc

SEQ ID NO: 3853161 - DNA, 25 bp, Homo sapien
tctctatttccaagggcgtgaagaa

SEQ ID NO: 3853162 - DNA, 25 bp, Homo sapien
catgggcctctagctataagggaaa

SEQ ID NO: 3853163 - DNA, 25 bp, Homo sapien
tcacaggcacatggtttatacagct

SEQ ID NO: 3853164 - DNA, 25 bp, Homo sapien
gaattcatagtggtagtttttgcaa

SEQ ID NO: 3853165 - DNA, 25 bp, Homo sapien
tgcttttgaacatatgagacaacag

SEQ ID NO: 3853166 - DNA, 25 bp, Homo sapien
aaaggcactttcagtagaacagaca

SEQ ID NO: 3853167 - DNA, 25 bp, Homo sapien
cacaatttatggacacaagaagttg

SEQ ID NO: 3853168 - DNA, 25 bp, Homo sapien
tacaactcacgtatgcgggcaaaca

SEQ ID NO: 3853169 - DNA, 25 bp, Homo sapien
gactttgcatatccctagacactag

SEQ ID NO: 3853170 - DNA, 25 bp, Homo sapien
catatcctgggtgtactgagccaca

SEQ ID NO: 3853171 - DNA, 25 bp, Homo sapien
tttttgtcacttgccccagcagagc

SEQ ID NO: 3853172 - DNA, 25 bp, Homo sapien
catgattatcgtagaacttacccgt

SEQ ID NO: 3853173 - DNA, 25 bp, Homo sapien
cacaaagctgtagtgctggaatcca

SEQ ID NO: 3853174 - DNA, 25 bp, Homo sapien
ccctggttacgcgtgcagtatgtgc

SEQ ID NO: 3853175 - DNA, 25 bp, Homo sapien
catgaggaaggtactgcccctggtt

SEQ ID NO: 3853176 - DNA, 25 bp, Homo sapien
tctccatgcataagttcttcccact

SEQ ID NO: 3853177 - DNA, 25 bp, Homo sapien
gcataagttcttcccacttgaaaac

SEQ ID NO: 3853178 - DNA, 25 bp, Homo sapien
tccctctccatgcataagttcttcc

SEQ ID NO: 3853179 - DNA, 25 bp, Homo sapien
catgcataagttcttcccacttgaa

SEQ ID NO: 3853180 - DNA, 25 bp, Homo sapien
atccttagaatcctgggccgccgga

SEQ ID NO: 3853181 - DNA, 25 bp, Homo sapien
taaatgattgcgtccataggtctga

SEQ ID NO: 3853182 - DNA, 25 bp, Homo sapien
taatggatactgtaacttcacccga

SEQ ID NO: 3853183 - DNA, 25 bp, Homo sapien
aaaatacagagcaccgatacccatg

SEQ ID NO: 3853184 - DNA, 25 bp, Homo sapien
gccgaagtgctcacagtggagaccc

SEQ ID NO: 3853185 - DNA, 25 bp, Homo sapien
ccaggatccgggtcagagccatgat

SEQ ID NO: 3853186 - DNA, 25 bp, Homo sapien
tggacagctttttatcctggcccca

SEQ ID NO: 3853187 - DNA, 25 bp, Homo sapien
aaccaccctgcgtaagcggtcgaag

SEQ ID NO: 3853188 - DNA, 25 bp, Homo sapien
tcgcgcgcgttggccgccaggcgcc

SEQ ID NO: 3853189 - DNA, 25 bp, Homo sapien
gctcgcgcgcgttggccgccaggcg

SEQ ID NO: 3853190 - DNA, 25 bp, Homo sapien
cgctcgcgcgcgttggccgccaggc

SEQ ID NO: 3853191 - DNA, 25 bp, Homo sapien
cacgtgcccgcgcactcggtgccgc

SEQ ID NO: 3853192 - DNA, 25 bp, Homo sapien
cggccccggcgcacgtgcccgcgca

SEQ ID NO: 3853193 - DNA, 25 bp, Homo sapien
cgcgcacgggggtgcaacgcgcgct

SEQ ID NO: 3853194 - DNA, 25 bp, Homo sapien
cgcgcactcggtgccgcccgcgcac

SEQ ID NO: 3853195 - DNA, 25 bp, Homo sapien
gcctcttctgagcaaataagtcata

SEQ ID NO: 3853196 - DNA, 25 bp, Homo sapien
gatgaccaggctgatatctcttcac

SEQ ID NO: 3853197 - DNA, 25 bp, Homo sapien
ggaaggcctttcaagtcctctggga

SEQ ID NO: 3853198 - DNA, 25 bp, Homo sapien
gagactcctttgcaggaagatgaac

SEQ ID NO: 3853199 - DNA, 25 bp, Homo sapien
gataatgacgatctaattgatgcag

SEQ ID NO: 3853200 - DNA, 25 bp, Homo sapien
tacctccaaataggttcaatccaga

SEQ ID NO: 3853201 - DNA, 25 bp, Homo sapien
ggaatcaaggagcaagaaaactacc

SEQ ID NO: 3853202 - DNA, 25 bp, Homo sapien
cagttgtgtcaactgcccgcaggaa

SEQ ID NO: 3853203 - DNA, 25 bp, Homo sapien
tccagcatgacagatgttgaacaca

SEQ ID NO: 3853204 - DNA, 25 bp, Homo sapien
tagtagtcttttaaccgtgacttgc

SEQ ID NO: 3853205 - DNA, 25 bp, Homo sapien
agactataaccccattgtgaccgcc

SEQ ID NO: 3853206 - DNA, 25 bp, Homo sapien
tgaacacagacttctgcatggagcc

SEQ ID NO: 3853207 - DNA, 25 bp, Homo sapien
gattttgcaggccatgtacccagga

SEQ ID NO: 3853208 - DNA, 25 bp, Homo sapien
taatgccgttgttcttcatattcat

SEQ ID NO: 3853209 - DNA, 25 bp, Homo sapien
tacatttgttctggatgttattgtc

SEQ ID NO: 3853210 - DNA, 25 bp, Homo sapien
tgtttctctgcaaaatggactgtac

SEQ ID NO: 3853211 - DNA, 25 bp, Homo sapien
cagttttccagggtgtagaatagtc

SEQ ID NO: 3853212 - DNA, 25 bp, Homo sapien
gaatagtcacccactcctgcttatt

SEQ ID NO: 3853213 - DNA, 25 bp, Homo sapien
tccagggtgtagaatagtcacccac

SEQ ID NO: 3853214 - DNA, 25 bp, Homo sapien
ggtgtagaatagtcacccactcctg

SEQ ID NO: 3853215 - DNA, 25 bp, Homo sapien
ccccgagtcagttcctccaaccctg

SEQ ID NO: 3853216 - DNA, 25 bp, Homo sapien
cccgagtcagttcctccaaccctgg

SEQ ID NO: 3853217 - DNA, 25 bp, Homo sapien
gccaatttcacccccgagtcagttc

SEQ ID NO: 3853218 - DNA, 25 bp, Homo sapien
ttcacccccgagtcagttcctccaa

SEQ ID NO: 3853219 - DNA, 25 bp, Homo sapien
tagatcagctttgttggtcctccaa

SEQ ID NO: 3853220 - DNA, 25 bp, Homo sapien
agatcagctttgttggtcctccaaa

SEQ ID NO: 3853221 - DNA, 25 bp, Homo sapien
ctagatcagctttgttggtcctcca

SEQ ID NO: 3853222 - DNA, 25 bp, Homo sapien
aaacatgattaactaacttggtcca

SEQ ID NO: 3853223 - DNA, 25 bp, Homo sapien
catgtacctaataatacaggttcaa

SEQ ID NO: 3853224 - DNA, 25 bp, Homo sapien
tctctgagtaactgatagcaaaagc

SEQ ID NO: 3853225 - DNA, 25 bp, Homo sapien
taagagggctaacaatcgtatacat

SEQ ID NO: 3853226 - DNA, 25 bp, Homo sapien
taaatctatgctggaaaaaatccac

SEQ ID NO: 3853227 - DNA, 25 bp, Homo sapien
gataaactcctagcaactaatccat

SEQ ID NO: 3853228 - DNA, 25 bp, Homo sapien
tatcactacatatcctacagacatt

SEQ ID NO: 3853229 - DNA, 25 bp, Homo sapien
agtccttggaaagcacaatttacca

SEQ ID NO: 3853230 - DNA, 25 bp, Homo sapien
tcacccagcctgaaattttaaacta

SEQ ID NO: 3853231 - DNA, 25 bp, Homo sapien
agactgggtctcatgttggagtgca

SEQ ID NO: 3853232 - DNA, 25 bp, Homo sapien
cacagtgctggattaccggtatgag

SEQ ID NO: 3853233 - DNA, 25 bp, Homo sapien
ataggtcactgcagctttgcagcct

SEQ ID NO: 3853234 - DNA, 25 bp, Homo sapien
ttgttcaataacagaactcgctggg

SEQ ID NO: 3853235 - DNA, 25 bp, Homo sapien
aatgaagatgccacaaactaggaga

SEQ ID NO: 3853236 - DNA, 25 bp, Homo sapien
tgttactggtgaaaagcgtacgttc

SEQ ID NO: 3853237 - DNA, 25 bp, Homo sapien
ggaacaacccaaatgatcacgaaca

SEQ ID NO: 3853238 - DNA, 25 bp, Homo sapien
gggcttaagtaaacctatgcatgtc

SEQ ID NO: 3853239 - DNA, 25 bp, Homo sapien
gtcaaatgctgtttcatcccacctt

SEQ ID NO: 3853240 - DNA, 25 bp, Homo sapien
tctcaagactcaaaggcaccaagca

SEQ ID NO: 3853241 - DNA, 25 bp, Homo sapien
gagggataccttactgaacatcagg

SEQ ID NO: 3853242 - DNA, 25 bp, Homo sapien
acacagacttgattccgttacctac

SEQ ID NO: 3853243 - DNA, 25 bp, Homo sapien
tggccagaattgtatcacatattca

SEQ ID NO: 3853244 - DNA, 25 bp, Homo sapien
tttatcatacgttcatacaacacag

SEQ ID NO: 3853245 - DNA, 25 bp, Homo sapien
taaacaaatattgttcgtgcagcca

SEQ ID NO: 3853246 - DNA, 25 bp, Homo sapien
gattcccctcctgaagagaacttgg

SEQ ID NO: 3853247 - DNA, 25 bp, Homo sapien
tgtgaaatcagatcccagctgggta

SEQ ID NO: 3853248 - DNA, 25 bp, Homo sapien
tcataaaaggatgagcctggtctcc

SEQ ID NO: 3853249 - DNA, 25 bp, Homo sapien
taactcgcaggatacagggatggac

SEQ ID NO: 3853250 - DNA, 25 bp, Homo sapien
ggccgcgcgtatatttgccttccct

SEQ ID NO: 3853251 - DNA, 25 bp, Homo sapien
gtccccatcccaaagtcaactatag

SEQ ID NO: 3853252 - DNA, 25 bp, Homo sapien
tttttgagacggctgagaactacca

SEQ ID NO: 3853253 - DNA, 25 bp, Homo sapien
tatcattctcaagccatatatcaag

SEQ ID NO: 3853254 - DNA, 25 bp, Homo sapien
gaatgtctgactgattagcttgcag

SEQ ID NO: 3853255 - DNA, 25 bp, Homo sapien
tcactatgacaggaagtagcctaat

SEQ ID NO: 3853256 - DNA, 25 bp, Homo sapien
tttaatttcactatgacaggaagta

SEQ ID NO: 3853257 - DNA, 25 bp, Homo sapien
actatgacaggaagtagcctaatac

SEQ ID NO: 3853258 - DNA, 25 bp, Homo sapien
ttaatttcactatgacaggaagtag

SEQ ID NO: 3853259 - DNA, 25 bp, Homo sapien
caaatacactcatgagtggagccaa

SEQ ID NO: 3853260 - DNA, 25 bp, Homo sapien
taacactgctaacactttatggcct

SEQ ID NO: 3853261 - DNA, 25 bp, Homo sapien
ttaatggctgcaaaatcaggtactc

SEQ ID NO: 3853262 - DNA, 25 bp, Homo sapien
tacttggtggttagagacagcagcg

SEQ ID NO: 3853263 - DNA, 25 bp, Homo sapien
gtcagtgtgccctctaaaacaacag

SEQ ID NO: 3853264 - DNA, 25 bp, Homo sapien
taatgtcaacccttccgtctggacg

SEQ ID NO: 3853265 - DNA, 25 bp, Homo sapien
tcctcctcggtgggaacactgaaaa

SEQ ID NO: 3853266 - DNA, 25 bp, Homo sapien
ctaggctgtcagtgtgccctctaaa

SEQ ID NO: 3853267 - DNA, 25 bp, Homo sapien
cactagcttcgaattaggcaaataa

SEQ ID NO: 3853268 - DNA, 25 bp, Homo sapien
gtctgtacagtctctgtatgttggg

SEQ ID NO: 3853269 - DNA, 25 bp, Homo sapien
ggatagtacatatgagaaggaacac

SEQ ID NO: 3853270 - DNA, 25 bp, Homo sapien
tgggcagttactgtatctgtgtctg

SEQ ID NO: 3853271 - DNA, 25 bp, Homo sapien
gctgctgagaacagcgtgtgcagac

SEQ ID NO: 3853272 - DNA, 25 bp, Homo sapien
agctgctgagaacagcgtgtgcaga

SEQ ID NO: 3853273 - DNA, 25 bp, Homo sapien
ccagatgctgggaccagtagctgct

SEQ ID NO: 3853274 - DNA, 25 bp, Homo sapien
atgctgggaccagtagctgctgaga

SEQ ID NO: 3853275 - DNA, 25 bp, Homo sapien
cagtcttgacatcccgttctcaagc

SEQ ID NO: 3853276 - DNA, 25 bp, Homo sapien
cactgcagtcttgacatcccgttct

SEQ ID NO: 3853277 - DNA, 25 bp, Homo sapien
tcttgacatcccgttctcaagccat

SEQ ID NO: 3853278 - DNA, 25 bp, Homo sapien
tgcagtcttgacatcccgttctcaa

SEQ ID NO: 3853279 - DNA, 25 bp, Homo sapien
tcttccaccaagctaacattcctga

SEQ ID NO: 3853280 - DNA, 25 bp, Homo sapien
caaaatatacagcaataactgacag

SEQ ID NO: 3853281 - DNA, 25 bp, Homo sapien
tttcacgtttgtactctagatttag

SEQ ID NO: 3853282 - DNA, 25 bp, Homo sapien
tacagcaataactgacagaaaaata

SEQ ID NO: 3853283 - DNA, 25 bp, Homo sapien
tctagaagtgttggctcaaggagct

SEQ ID NO: 3853284 - DNA, 25 bp, Homo sapien
catctgaccagaacaggagccctga

SEQ ID NO: 3853285 - DNA, 25 bp, Homo sapien
gctgtgcttgtgcaatctgcttgga

SEQ ID NO: 3853286 - DNA, 25 bp, Homo sapien
tatgggatgttcaagtaaggcaacc

SEQ ID NO: 3853287 - DNA, 25 bp, Homo sapien
agcagattctccgtgttcactttca

SEQ ID NO: 3853288 - DNA, 25 bp, Homo sapien
cttgcagcagattctccgtgttcac

SEQ ID NO: 3853289 - DNA, 25 bp, Homo sapien
agtcaaatgcttgggtctgcccacc

SEQ ID NO: 3853290 - DNA, 25 bp, Homo sapien
ccaacccacggtgcaaaatatcttg

SEQ ID NO: 3853291 - DNA, 25 bp, Homo sapien
ggtgcagcttgctcaaagagcttaa

SEQ ID NO: 3853292 - DNA, 25 bp, Homo sapien
tataaatctgggtactcagccctcc

SEQ ID NO: 3853293 - DNA, 25 bp, Homo sapien
taaatcatggtttgactggacacag

SEQ ID NO: 3853294 - DNA, 25 bp, Homo sapien
aacactctggctgcgtaaatcatgg

SEQ ID NO: 3853295 - DNA, 25 bp, Homo sapien
aggagcttttgggtatctggagaat

SEQ ID NO: 3853296 - DNA, 25 bp, Homo sapien
tcactgaggcggacgaggagctttt

SEQ ID NO: 3853297 - DNA, 25 bp, Homo sapien
tatctggagaataacagatgtcctg

SEQ ID NO: 3853298 - DNA, 25 bp, Homo sapien
gtcactgaggcggacgaggagcttt

SEQ ID NO: 3853299 - DNA, 25 bp, Homo sapien
ttgcacagccatgctcggggcccat

SEQ ID NO: 3853300 - DNA, 25 bp, Homo sapien
tgcacagccatgctcggggcccatt

SEQ ID NO: 3853301 - DNA, 25 bp, Homo sapien
cagccatgctcggggcccattcctc

SEQ ID NO: 3853302 - DNA, 25 bp, Homo sapien
ccatgctcggggcccattcctctcc

SEQ ID NO: 3853303 - DNA, 25 bp, Homo sapien
tcaagtcctctacttcatggaagtc

SEQ ID NO: 3853304 - DNA, 25 bp, Homo sapien
tatcaagtcctctacttcatggaag

SEQ ID NO: 3853305 - DNA, 25 bp, Homo sapien
tttatcaagtcctctacttcatgga

SEQ ID NO: 3853306 - DNA, 25 bp, Homo sapien
ctttatcaagtcctctacttcatgg

SEQ ID NO: 3853307 - DNA, 25 bp, Homo sapien
ctgggggtgggctggataaagaggc

SEQ ID NO: 3853308 - DNA, 25 bp, Homo sapien
gctggataaagaggcaagtccagga

SEQ ID NO: 3853309 - DNA, 25 bp, Homo sapien
tgggctggataaagaggcaagtcca

SEQ ID NO: 3853310 - DNA, 25 bp, Homo sapien
gggggtgggctggataaagaggcaa

SEQ ID NO: 3853311 - DNA, 25 bp, Homo sapien
tcagagtgacaaacgtgagcgtgct

SEQ ID NO: 3853312 - DNA, 25 bp, Homo sapien
gcccttagttctccactcagagtga

SEQ ID NO: 3853313 - DNA, 25 bp, Homo sapien
caaacgtgagcgtgctattcatgtt

SEQ ID NO: 3853314 - DNA, 25 bp, Homo sapien
atcctctgctcgtctggcccttagt

SEQ ID NO: 3853315 - DNA, 25 bp, Homo sapien
atccccacaaggccctgatctttgt

SEQ ID NO: 3853316 - DNA, 25 bp, Homo sapien
gctgtctatgcttgtttgtggctgc

SEQ ID NO: 3853317 - DNA, 25 bp, Homo sapien
ttccatttccgtttgctgtctatgc

SEQ ID NO: 3853318 - DNA, 25 bp, Homo sapien
tccgtttgctgtctatgcttgtttg

SEQ ID NO: 3853319 - DNA, 25 bp, Homo sapien
aataaaatagcattctgatcgcagc

SEQ ID NO: 3853320 - DNA, 25 bp, Homo sapien
tttggaccatcagaaaaagtgtgtg

SEQ ID NO: 3853321 - DNA, 25 bp, Homo sapien
gggcacatactcagaaaggccaaag

SEQ ID NO: 3853322 - DNA, 25 bp, Homo sapien
gcagctttccaatgatgctgggcac

SEQ ID NO: 3853323 - DNA, 25 bp, Homo sapien
ctaagtgttagattcattaaagaaa

SEQ ID NO: 3853324 - DNA, 25 bp, Homo sapien
gttagattcattaaagaaaatcaca

SEQ ID NO: 3853325 - DNA, 25 bp, Homo sapien
gattcattaaagaaaatcacattac

SEQ ID NO: 3853326 - DNA, 25 bp, Homo sapien
tagattcattaaagaaaatcacatt

SEQ ID NO: 3853327 - DNA, 25 bp, Homo sapien
gacctcactcgctggtgtaaaccat

SEQ ID NO: 3853328 - DNA, 25 bp, Homo sapien
cactcgctggtgtaaaccatctcag

SEQ ID NO: 3853329 - DNA, 25 bp, Homo sapien
taaaccatctcagtccaaagcagga

SEQ ID NO: 3853330 - DNA, 25 bp, Homo sapien
cacagagtgggacctcactcgctgg

SEQ ID NO: 3853331 - DNA, 25 bp, Homo sapien
tgtctgtcgggtgcagttttcggat

SEQ ID NO: 3853332 - DNA, 25 bp, Homo sapien
ttgtgcaaagttgtctgtcgggtgc

SEQ ID NO: 3853333 - DNA, 25 bp, Homo sapien
gcagttttcggataaaagcagtttc

SEQ ID NO: 3853334 - DNA, 25 bp, Homo sapien
cagttttcggataaaagcagtttca

SEQ ID NO: 3853335 - DNA, 25 bp, Homo sapien
taattagaaacagacgatcattgag

SEQ ID NO: 3853336 - DNA, 25 bp, Homo sapien
tggacaacaactaccattaacttaa

SEQ ID NO: 3853337 - DNA, 25 bp, Homo sapien
gacttcctttggacaacaactacca

SEQ ID NO: 3853338 - DNA, 25 bp, Homo sapien
tagaaacagacgatcattgaggttt

SEQ ID NO: 3853339 - DNA, 25 bp, Homo sapien
agcccacaacatgtaccactggcag

SEQ ID NO: 3853340 - DNA, 25 bp, Homo sapien
cagtagcagcccacaacatgtacca

SEQ ID NO: 3853341 - DNA, 25 bp, Homo sapien
tagcagcccacaacatgtaccactg

SEQ ID NO: 3853342 - DNA, 25 bp, Homo sapien
acaacatgtaccactggcagctgga

SEQ ID NO: 3853343 - DNA, 25 bp, Homo sapien
aataccagctcaagtctgcgtaatg

SEQ ID NO: 3853344 - DNA, 25 bp, Homo sapien
caagtctgcgtaatgaatgtagagt

SEQ ID NO: 3853345 - DNA, 25 bp, Homo sapien
ccagctcaagtctgcgtaatgaatg

SEQ ID NO: 3853346 - DNA, 25 bp, Homo sapien
gcgtaatgaatgtagagttaaggta

SEQ ID NO: 3853347 - DNA, 25 bp, Homo sapien
gattcccacgaaatgctcttgctgt

SEQ ID NO: 3853348 - DNA, 25 bp, Homo sapien
gcaggattcccacgaaatgctcttg

SEQ ID NO: 3853349 - DNA, 25 bp, Homo sapien
agcagcaggattcccacgaaatgct

SEQ ID NO: 3853350 - DNA, 25 bp, Homo sapien
cccacgaaatgctcttgctgtgaat

SEQ ID NO: 3853351 - DNA, 25 bp, Homo sapien
aagctgtttttgcaagttctcaaaa

SEQ ID NO: 3853352 - DNA, 25 bp, Homo sapien
caagcaattattcaaagatactaca

SEQ ID NO: 3853353 - DNA, 25 bp, Homo sapien
taaagatatataatcccctaacttc

SEQ ID NO: 3853354 - DNA, 25 bp, Homo sapien
gacgcaaagaacagttcccagatac

SEQ ID NO: 3853355 - DNA, 25 bp, Homo sapien
tttacttggtgtccagacgcaaaga

SEQ ID NO: 3853356 - DNA, 25 bp, Homo sapien
agaacttctccagagcgctacggca

SEQ ID NO: 3853357 - DNA, 25 bp, Homo sapien
cacaggctaatcagtctccgaggca

SEQ ID NO: 3853358 - DNA, 25 bp, Homo sapien
gatttgcagagagaacggtaacgtg

SEQ ID NO: 3853359 - DNA, 25 bp, Homo sapien
acatggtggaccagaaaatccgccc

SEQ ID NO: 3853360 - DNA, 25 bp, Homo sapien
aaagccaatggcgacgaaggtgctc

SEQ ID NO: 3853361 - DNA, 25 bp, Homo sapien
tgacttctgacgcagattcccaaga

SEQ ID NO: 3853362 - DNA, 25 bp, Homo sapien
cgaaggtgctcaactcccaaatcca

SEQ ID NO: 3853363 - DNA, 25 bp, Homo sapien
gctgacgggactgcgagtgacttct

SEQ ID NO: 3853364 - DNA, 25 bp, Homo sapien
gtttcaagtaggtcgtctgggccca

SEQ ID NO: 3853365 - DNA, 25 bp, Homo sapien
caattgttttgcgtagtttggcgta

SEQ ID NO: 3853366 - DNA, 25 bp, Homo sapien
tctgggcccagtgaactataattgt

SEQ ID NO: 3853367 - DNA, 25 bp, Homo sapien
ttttccgatggcattaaggctctag

SEQ ID NO: 3853368 - DNA, 25 bp, Homo sapien
ttttgtaaagagcaagcccattggg

SEQ ID NO: 3853369 - DNA, 25 bp, Homo sapien
tgaaacagtaggtttgagtgaccct

SEQ ID NO: 3853370 - DNA, 25 bp, Homo sapien
ccctttgaagagatagtccagactg

SEQ ID NO: 3853371 - DNA, 25 bp, Homo sapien
tcagtgatgctttctcaagattgcc

SEQ ID NO: 3853372 - DNA, 25 bp, Homo sapien
caacagattaaggtcgaatttgcag

SEQ ID NO: 3853373 - DNA, 25 bp, Homo sapien
ttcatgaagcagtgagggtagatct

SEQ ID NO: 3853374 - DNA, 25 bp, Homo sapien
gcaaatcgtaccactaagatcctct

SEQ ID NO: 3853375 - DNA, 25 bp, Homo sapien
ctgtgtaaatcaccgtttatgggaa

SEQ ID NO: 3853376 - DNA, 25 bp, Homo sapien
tacatttatgctgaaacctgtacct

SEQ ID NO: 3853377 - DNA, 25 bp, Homo sapien
tgttaacttacggtgtatttaggca

SEQ ID NO: 3853378 - DNA, 25 bp, Homo sapien
gcattttgcccagtatctaatttac

SEQ ID NO: 3853379 - DNA, 25 bp, Homo sapien
tactttatgaattgttttccgtgac

SEQ ID NO: 3853380 - DNA, 25 bp, Homo sapien
atggtggtatgtgtatctaatgaac

SEQ ID NO: 3853381 - DNA, 25 bp, Homo sapien
cagcgaccgggaccatatgatagac

SEQ ID NO: 3853382 - DNA, 25 bp, Homo sapien
tatgatagaccaataggaggaagag

SEQ ID NO: 3853383 - DNA, 25 bp, Homo sapien
tatgtatgacagaatgcgacgagga

SEQ ID NO: 3853384 - DNA, 25 bp, Homo sapien
caagttcaggttttcatggtggtca

SEQ ID NO: 3853385 - DNA, 25 bp, Homo sapien
ttttccaggtatgggaggacatggc

SEQ ID NO: 3853386 - DNA, 25 bp, Homo sapien
tatgagagggttgccttttcgtgca

SEQ ID NO: 3853387 - DNA, 25 bp, Homo sapien
caagctcttagtggtaatataggaa

SEQ ID NO: 3853388 - DNA, 25 bp, Homo sapien
aacctggctaacttgtgattagaac

SEQ ID NO: 3853389 - DNA, 25 bp, Homo sapien
tggttacattagagacccaatggcc

SEQ ID NO: 3853390 - DNA, 25 bp, Homo sapien
tcttactgggaatcagctggcctga

SEQ ID NO: 3853391 - DNA, 25 bp, Homo sapien
tcagtccatgggctaaatccggtca

SEQ ID NO: 3853392 - DNA, 25 bp, Homo sapien
ccactaaatccaatacgagttcata

SEQ ID NO: 3853393 - DNA, 25 bp, Homo sapien
tcaccactaaatccaatacgagttc

SEQ ID NO: 3853394 - DNA, 25 bp, Homo sapien
aagcagatgtagagtttgtgacaca

SEQ ID NO: 3853395 - DNA, 25 bp, Homo sapien
cacaggagaagcagatgtagagttt

SEQ ID NO: 3853396 - DNA, 25 bp, Homo sapien
cgtaagtggtgtctttggcacacaa

SEQ ID NO: 3853397 - DNA, 25 bp, Homo sapien
ggctctaagatctgtaggtaacgct

SEQ ID NO: 3853398 - DNA, 25 bp, Homo sapien
ctgtgggctttatatatcgctgtac

SEQ ID NO: 3853399 - DNA, 25 bp, Homo sapien
ggcacacaatcttatttcctaaacg

SEQ ID NO: 3853400 - DNA, 25 bp, Homo sapien
ctatggatcagttggaagaatggga

SEQ ID NO: 3853401 - DNA, 25 bp, Homo sapien
ggatatggtactcctgatggtttgg

SEQ ID NO: 3853402 - DNA, 25 bp, Homo sapien
gaagaatgggaatggggaacaatta

SEQ ID NO: 3853403 - DNA, 25 bp, Homo sapien
taaagataatcagggaggctatgga

SEQ ID NO: 3853404 - DNA, 25 bp, Homo sapien
gacaacagcatctggtctactagac

SEQ ID NO: 3853405 - DNA, 25 bp, Homo sapien
ctttataatgactgaaggaatgtgt

SEQ ID NO: 3853406 - DNA, 25 bp, Homo sapien
aacaccaacatacaagtcttgacaa

SEQ ID NO: 3853407 - DNA, 25 bp, Homo sapien
ggtggatggcgtgggatgtactgaa

SEQ ID NO: 3853408 - DNA, 25 bp, Homo sapien
tcttagagtagggttaaggttctca

SEQ ID NO: 3853409 - DNA, 25 bp, Homo sapien
tttgtatctgatccctgcttggagt

SEQ ID NO: 3853410 - DNA, 25 bp, Homo sapien
gttctcagtgacacaagaattcagt

SEQ ID NO: 3853411 - DNA, 25 bp, Homo sapien
cagttttctgcccaatagagtttaa

SEQ ID NO: 3853412 - DNA, 25 bp, Homo sapien
tctcttaacatcttaaagcagtaaa

SEQ ID NO: 3853413 - DNA, 25 bp, Homo sapien
ctctcttaacatcttaaagcagtaa

SEQ ID NO: 3853414 - DNA, 25 bp, Homo sapien
actctcttaacatcttaaagcagta

SEQ ID NO: 3853415 - DNA, 25 bp, Homo sapien
cttaaagcagtaaaagtatacagta

SEQ ID NO: 3853416 - DNA, 25 bp, Homo sapien
ccaaaactacatggagcaagttgct

SEQ ID NO: 3853417 - DNA, 25 bp, Homo sapien
caagtcagtcagtgttgatacatga

SEQ ID NO: 3853418 - DNA, 25 bp, Homo sapien
caagttgctgtcataaaagctgcct

SEQ ID NO: 3853419 - DNA, 25 bp, Homo sapien
tacaattgtaattccctggcaccat

SEQ ID NO: 3853420 - DNA, 25 bp, Homo sapien
tattggccctgtctaatgcaagagg

SEQ ID NO: 3853421 - DNA, 25 bp, Homo sapien
aatactgaccgaaagccgcttaagg

SEQ ID NO: 3853422 - DNA, 25 bp, Homo sapien
atctgacacctcaaaagctgactgg

SEQ ID NO: 3853423 - DNA, 25 bp, Homo sapien
gcagggaggtacctaggattaacca

SEQ ID NO: 3853424 - DNA, 25 bp, Homo sapien
ttcattgtaggtaatttcatacata

SEQ ID NO: 3853425 - DNA, 25 bp, Homo sapien
cattgtaggtaatttcatacataag

SEQ ID NO: 3853426 - DNA, 25 bp, Homo sapien
tgtaggtaatttcatacataaggat

SEQ ID NO: 3853427 - DNA, 25 bp, Homo sapien
atacataaggatttagttctggagt

SEQ ID NO: 3853428 - DNA, 25 bp, Homo sapien
catgacaggaatcacaaacccgtac

SEQ ID NO: 3853429 - DNA, 25 bp, Homo sapien
tcagggcaagttagatgagcatctc

SEQ ID NO: 3853430 - DNA, 25 bp, Homo sapien
gagcagtgcatgacaggaatcacaa

SEQ ID NO: 3853431 - DNA, 25 bp, Homo sapien
cagtgcatgacaggaatcacaaacc

SEQ ID NO: 3853432 - DNA, 25 bp, Homo sapien
gttcgttgtcagagcaggcattaca

SEQ ID NO: 3853433 - DNA, 25 bp, Homo sapien
agaaggcaaaggtagttcgttgtca

SEQ ID NO: 3853434 - DNA, 25 bp, Homo sapien
ggcaaaggtagttcgttgtcagagc

SEQ ID NO: 3853435 - DNA, 25 bp, Homo sapien
aggtagttcgttgtcagagcaggca

SEQ ID NO: 3853436 - DNA, 25 bp, Homo sapien
gagagtgagaattccttttcacaaa

SEQ ID NO: 3853437 - DNA, 25 bp, Homo sapien
agagtgagaattccttttcacaaag

SEQ ID NO: 3853438 - DNA, 25 bp, Homo sapien
cttcaggaaaagaaccttaaagatg

SEQ ID NO: 3853439 - DNA, 25 bp, Homo sapien
aagagataatctgttgctgatggga

SEQ ID NO: 3853440 - DNA, 25 bp, Homo sapien
gggtatcctagtccaacaatattta

SEQ ID NO: 3853441 - DNA, 25 bp, Homo sapien
aaacaagattgcagccaggcgacaa

SEQ ID NO: 3853442 - DNA, 25 bp, Homo sapien
gccaaggtgagaggctctctttaga

SEQ ID NO: 3853443 - DNA, 25 bp, Homo sapien
ccagcacttttgagactttgagagg

SEQ ID NO: 3853444 - DNA, 25 bp, Homo sapien
gagtcagatagcttgaatcatagaa

SEQ ID NO: 3853445 - DNA, 25 bp, Homo sapien
tagttcatatcagacaaacaccagc

SEQ ID NO: 3853446 - DNA, 25 bp, Homo sapien
cttggcctaatcaaggctttagatt

SEQ ID NO: 3853447 - DNA, 25 bp, Homo sapien
catgcttggcctaatcaaggcttta

SEQ ID NO: 3853448 - DNA, 25 bp, Homo sapien
tggcctaatcaaggctttagattta

SEQ ID NO: 3853449 - DNA, 25 bp, Homo sapien
tgcttggcctaatcaaggctttaga

SEQ ID NO: 3853450 - DNA, 25 bp, Homo sapien
tagtagaaatgggtttctccatgtt

SEQ ID NO: 3853451 - DNA, 25 bp, Homo sapien
cagggcattaccttccattggagac

SEQ ID NO: 3853452 - DNA, 25 bp, Homo sapien
taatacattagattcacacagggca

SEQ ID NO: 3853453 - DNA, 25 bp, Homo sapien
tgcttcggcctctatatatcctggg

SEQ ID NO: 3853454 - DNA, 25 bp, Homo sapien
cagcatccaagctcctcattcagtg

SEQ ID NO: 3853455 - DNA, 25 bp, Homo sapien
ttatgtcttcaattttaagttttga

SEQ ID NO: 3853456 - DNA, 25 bp, Homo sapien
caatgctttgttggcttcttttatg

SEQ ID NO: 3853457 - DNA, 25 bp, Homo sapien
ctgcaatgctttgttggcttctttt

SEQ ID NO: 3853458 - DNA, 25 bp, Homo sapien
atgctttgttggcttcttttatgtc

SEQ ID NO: 3853459 - DNA, 25 bp, Homo sapien
tatggccttctctggctagtggaat

SEQ ID NO: 3853460 - DNA, 25 bp, Homo sapien
aatattggcattttcggctgggtgc

SEQ ID NO: 3853461 - DNA, 25 bp, Homo sapien
tctctggctagtggaatatttcata

SEQ ID NO: 3853462 - DNA, 25 bp, Homo sapien
atattggcattttcggctgggtgcg

SEQ ID NO: 3853463 - DNA, 25 bp, Homo sapien
tatgttcaatcaggcgcaaagctgc

SEQ ID NO: 3853464 - DNA, 25 bp, Homo sapien
tcaatcaggcgcaaagctgctaccc

SEQ ID NO: 3853465 - DNA, 25 bp, Homo sapien
tggcaatatgttcaatcaggcgcaa

SEQ ID NO: 3853466 - DNA, 25 bp, Homo sapien
ccaaatatctggcaatatgttcaat

SEQ ID NO: 3853467 - DNA, 25 bp, Homo sapien
tttcatcctggaggttaaggaactc

SEQ ID NO: 3853468 - DNA, 25 bp, Homo sapien
ttgccgagttcttgaagagcttgct

SEQ ID NO: 3853469 - DNA, 25 bp, Homo sapien
agagcttgctcttgttcatgatata

SEQ ID NO: 3853470 - DNA, 25 bp, Homo sapien
tcgctaagcttgttgccgagttctt

SEQ ID NO: 3853471 - DNA, 25 bp, Homo sapien
tttttaagactaatgatttgttgag

SEQ ID NO: 3853472 - DNA, 25 bp, Homo sapien
tgatttgttgagtctcatttctaag

SEQ ID NO: 3853473 - DNA, 25 bp, Homo sapien
caatcttcaagtcagtttccagttg

SEQ ID NO: 3853474 - DNA, 25 bp, Homo sapien
tcaatcttcaagtcagtttccagtt

SEQ ID NO: 3853475 - DNA, 25 bp, Homo sapien
cataagcaggtataacaagtgaggc

SEQ ID NO: 3853476 - DNA, 25 bp, Homo sapien
tcagcatctgagactataggcctgc

SEQ ID NO: 3853477 - DNA, 25 bp, Homo sapien
caggtgctagctggcaaagcaaaca

SEQ ID NO: 3853478 - DNA, 25 bp, Homo sapien
tccatgattattgctcataagcagg

SEQ ID NO: 3853479 - DNA, 25 bp, Homo sapien
aagtggcgtgacctcagcgcactgc

SEQ ID NO: 3853480 - DNA, 25 bp, Homo sapien
agtgaagtggcgtgacctcagcgca

SEQ ID NO: 3853481 - DNA, 25 bp, Homo sapien
gagtgaagtggcgtgacctcagcgc

SEQ ID NO: 3853482 - DNA, 25 bp, Homo sapien
tgaagtggcgtgacctcagcgcact

SEQ ID NO: 3853483 - DNA, 25 bp, Homo sapien
tcttgtagatatttctcatcctcat

SEQ ID NO: 3853484 - DNA, 25 bp, Homo sapien
tgcagactatcagatttactgagac

SEQ ID NO: 3853485 - DNA, 25 bp, Homo sapien
ttcttgtagatatttctcatcctca

SEQ ID NO: 3853486 - DNA, 25 bp, Homo sapien
gagatttgtttctgcagactatcag

SEQ ID NO: 3853487 - DNA, 25 bp, Homo sapien
caaatcaactttgggtaaaactgag

SEQ ID NO: 3853488 - DNA, 25 bp, Homo sapien
ctggtgtaattcaaatcaactttgg

SEQ ID NO: 3853489 - DNA, 25 bp, Homo sapien
caactttgggtaaaactgaggctag

SEQ ID NO: 3853490 - DNA, 25 bp, Homo sapien
tggtgtaattcaaatcaactttggg

SEQ ID NO: 3853491 - DNA, 25 bp, Homo sapien
tgtaaaagggtgaagaagacaaata

SEQ ID NO: 3853492 - DNA, 25 bp, Homo sapien
cacacaatgtctagaagttgttttg

SEQ ID NO: 3853493 - DNA, 25 bp, Homo sapien
ggaaaactcacaaactcaaacgtga

SEQ ID NO: 3853494 - DNA, 25 bp, Homo sapien
aaactcaaacgtgaaagagccacac

SEQ ID NO: 3853495 - DNA, 25 bp, Homo sapien
aaagagccacacaatgtctagaagt

SEQ ID NO: 3853496 - DNA, 25 bp, Homo sapien
gaatcaagtgtgctacaaggccaag

SEQ ID NO: 3853497 - DNA, 25 bp, Homo sapien
gagaaccggaaaactgagaagctga

SEQ ID NO: 3853498 - DNA, 25 bp, Homo sapien
aaatctgtaagggagccattgggca

SEQ ID NO: 3853499 - DNA, 25 bp, Homo sapien
agtgtattaccacagcagctgacca

SEQ ID NO: 3853500 - DNA, 25 bp, Homo sapien
gatatatctttaaccagcttgtact

SEQ ID NO: 3853501 - DNA, 25 bp, Homo sapien
ggtcctgcgtgtcactgctggcaca

SEQ ID NO: 3853502 - DNA, 25 bp, Homo sapien
gcaattgtcctagtttgagttaaca

SEQ ID NO: 3853503 - DNA, 25 bp, Homo sapien
gctggcacatttcaccaatgacatt

SEQ ID NO: 3853504 - DNA, 25 bp, Homo sapien
taaagcaacttgattccatgcaaca

SEQ ID NO: 3853505 - DNA, 25 bp, Homo sapien
tgtaactgaacgacatgaaactgct

SEQ ID NO: 3853506 - DNA, 25 bp, Homo sapien
tgaatcagcgtaatataaagcaact

SEQ ID NO: 3853507 - DNA, 25 bp, Homo sapien
gaaactgctgatattaggcctctaa

SEQ ID NO: 3853508 - DNA, 25 bp, Homo sapien
tcttctagtcgggcaattatttcat

SEQ ID NO: 3853509 - DNA, 25 bp, Homo sapien
cttctagtcgggcaattatttcatt

SEQ ID NO: 3853510 - DNA, 25 bp, Homo sapien
tttcttctagtcgggcaattatttc

SEQ ID NO: 3853511 - DNA, 25 bp, Homo sapien
tctagtcgggcaattatttcatttt

SEQ ID NO: 3853512 - DNA, 25 bp, Homo sapien
aagctatggtggttttgatttgtgt

SEQ ID NO: 3853513 - DNA, 25 bp, Homo sapien
gctatggtggttttgatttgtgtgt

SEQ ID NO: 3853514 - DNA, 25 bp, Homo sapien
aaagctatggtggttttgatttgtg

SEQ ID NO: 3853515 - DNA, 25 bp, Homo sapien
ctatggtggttttgatttgtgtgtg

SEQ ID NO: 3853516 - DNA, 25 bp, Homo sapien
tataaagcagtgctattagtcattt

SEQ ID NO: 3853517 - DNA, 25 bp, Homo sapien
gatataaagcagtgctattagtcat

SEQ ID NO: 3853518 - DNA, 25 bp, Homo sapien
gtgtgatataaagcagtgctattag

SEQ ID NO: 3853519 - DNA, 25 bp, Homo sapien
gtgatataaagcagtgctattagtc

SEQ ID NO: 3853520 - DNA, 25 bp, Homo sapien
ggcaagttcaatctcatgcttcata

SEQ ID NO: 3853521 - DNA, 25 bp, Homo sapien
tgcaacttttgatacatctctatgt

SEQ ID NO: 3853522 - DNA, 25 bp, Homo sapien
taacttcctctagttgttgtcgaag

SEQ ID NO: 3853523 - DNA, 25 bp, Homo sapien
gcctatcagagtatcttgtttctca

SEQ ID NO: 3853524 - DNA, 25 bp, Homo sapien
tgtacatttcatctagcccctgacg

SEQ ID NO: 3853525 - DNA, 25 bp, Homo sapien
cgagaatgcttatatgtttgaagct

SEQ ID NO: 3853526 - DNA, 25 bp, Homo sapien
gattcatctcgaagctgccttctgg

SEQ ID NO: 3853527 - DNA, 25 bp, Homo sapien
ctgtcgtaactgagattcatctcga

SEQ ID NO: 3853528 - DNA, 25 bp, Homo sapien
tttcacttcgtaattgatgattttc

SEQ ID NO: 3853529 - DNA, 25 bp, Homo sapien
tattttcacttcgtaattgatgatt

SEQ ID NO: 3853530 - DNA, 25 bp, Homo sapien
atttattttcacttcgtaattgatg

SEQ ID NO: 3853531 - DNA, 25 bp, Homo sapien
cacttcgtaattgatgattttcttc

SEQ ID NO: 3853532 - DNA, 25 bp, Homo sapien
tgaagtctagacatgtaacaggaac

SEQ ID NO: 3853533 - DNA, 25 bp, Homo sapien
caggtctcaccatgagttaaacatg

SEQ ID NO: 3853534 - DNA, 25 bp, Homo sapien
tgtggtaactgagttggacacccca

SEQ ID NO: 3853535 - DNA, 25 bp, Homo sapien
acatgaatgattaagtggtttgact

SEQ ID NO: 3853536 - DNA, 25 bp, Homo sapien
gaagaggcacaaactagtgagtagc

SEQ ID NO: 3853537 - DNA, 25 bp, Homo sapien
aacttgaacttcacagtcctactaa

SEQ ID NO: 3853538 - DNA, 25 bp, Homo sapien
tataatggtcccgatcaggagccca

SEQ ID NO: 3853539 - DNA, 25 bp, Homo sapien
tcctactaaagtcaagaagaggcac

SEQ ID NO: 3853540 - DNA, 25 bp, Homo sapien
atgaatcaactcttgaatggaggct

SEQ ID NO: 3853541 - DNA, 25 bp, Homo sapien
caactcttgaatggaggctgctgac

SEQ ID NO: 3853542 - DNA, 25 bp, Homo sapien
tttgacttttctaatgaatcaactc

SEQ ID NO: 3853543 - DNA, 25 bp, Homo sapien
gaatcaactcttgaatggaggctgc

SEQ ID NO: 3853544 - DNA, 25 bp, Homo sapien
tgctgtccagtatggccgccatgag

SEQ ID NO: 3853545 - DNA, 25 bp, Homo sapien
aatattactcgctatacctgtgctg

SEQ ID NO: 3853546 - DNA, 25 bp, Homo sapien
gaggaaaagcaagagtcacagctta

SEQ ID NO: 3853547 - DNA, 25 bp, Homo sapien
tacatattcactgagtagtactcag

SEQ ID NO: 3853548 - DNA, 25 bp, Homo sapien
ggtctaatatggcagcaatttgaac

SEQ ID NO: 3853549 - DNA, 25 bp, Homo sapien
tttggtctaatatggcagcaatttg

SEQ ID NO: 3853550 - DNA, 25 bp, Homo sapien
ttcttttggtctaatatggcagcaa

SEQ ID NO: 3853551 - DNA, 25 bp, Homo sapien
cttttggtctaatatggcagcaatt

SEQ ID NO: 3853552 - DNA, 25 bp, Homo sapien
tgtaaagagctatataaaaaaccca

SEQ ID NO: 3853553 - DNA, 25 bp, Homo sapien
tataaaaaacccaatatgtgaaata

SEQ ID NO: 3853554 - DNA, 25 bp, Homo sapien
tgatttgtaaagagctatataaaaa

SEQ ID NO: 3853555 - DNA, 25 bp, Homo sapien
acccaatatgtgaaataacttatga

SEQ ID NO: 3853556 - DNA, 25 bp, Homo sapien
ctttctttatttccaatatcttctt

SEQ ID NO: 3853557 - DNA, 25 bp, Homo sapien
acatagaaaaatcaatcactccaac

SEQ ID NO: 3853558 - DNA, 25 bp, Homo sapien
tacatagaaaaatcaatcactccaa

SEQ ID NO: 3853559 - DNA, 25 bp, Homo sapien
tttatttccaatatcttcttcattc

SEQ ID NO: 3853560 - DNA, 25 bp, Homo sapien
tcccttcacacacagattagcatcg

SEQ ID NO: 3853561 - DNA, 25 bp, Homo sapien
cattagtgcgtgatactcataaaac

SEQ ID NO: 3853562 - DNA, 25 bp, Homo sapien
ccaacaattactgctccttcttctt

SEQ ID NO: 3853563 - DNA, 25 bp, Homo sapien
catcgatcacattcaggccaaccag

SEQ ID NO: 3853564 - DNA, 25 bp, Homo sapien
agagatccctctgaataattaagca

SEQ ID NO: 3853565 - DNA, 25 bp, Homo sapien
ttttttgcatgagggctaatcgaag

SEQ ID NO: 3853566 - DNA, 25 bp, Homo sapien
taatcgaagccacgctcttgctcga

SEQ ID NO: 3853567 - DNA, 25 bp, Homo sapien
caagagatccctctgaataattaag

SEQ ID NO: 3853568 - DNA, 25 bp, Homo sapien
ctatttcctctgcttcggggtacag

SEQ ID NO: 3853569 - DNA, 25 bp, Homo sapien
tttcctctgcttcggggtacagctt

SEQ ID NO: 3853570 - DNA, 25 bp, Homo sapien
acactagctcctatttcctctgctt

SEQ ID NO: 3853571 - DNA, 25 bp, Homo sapien
tctgcttcggggtacagcttctcca

SEQ ID NO: 3853572 - DNA, 25 bp, Homo sapien
agtcagaatccaaagtgcggccaaa

SEQ ID NO: 3853573 - DNA, 25 bp, Homo sapien
caggcaatgttccataacaacaaag

SEQ ID NO: 3853574 - DNA, 25 bp, Homo sapien
agagcagattcaatgagtcctttga

SEQ ID NO: 3853575 - DNA, 25 bp, Homo sapien
ctttaagaccgtgtttcaggcaatg

SEQ ID NO: 3853576 - DNA, 25 bp, Homo sapien
ttaacaagtttgctctctctacagc

SEQ ID NO: 3853577 - DNA, 25 bp, Homo sapien
tctctctacagctgtggggtctttt

SEQ ID NO: 3853578 - DNA, 25 bp, Homo sapien
tctctacagctgtggggtcttttgt

SEQ ID NO: 3853579 - DNA, 25 bp, Homo sapien
gtttaacaagtttgctctctctaca

SEQ ID NO: 3853580 - DNA, 25 bp, Homo sapien
ttttcgggagtgaaaccacttcatg

SEQ ID NO: 3853581 - DNA, 25 bp, Homo sapien
caatgatctagtattccagctccga

SEQ ID NO: 3853582 - DNA, 25 bp, Homo sapien
caaatctgcatcgtggtctgactcc

SEQ ID NO: 3853583 - DNA, 25 bp, Homo sapien
actgctatggccaaactgcctggtg

SEQ ID NO: 3853584 - DNA, 25 bp, Homo sapien
tcggcgtcaggcacccaggccaaaa

SEQ ID NO: 3853585 - DNA, 25 bp, Homo sapien
ccccgtctcccgccctcggcgtcag

SEQ ID NO: 3853586 - DNA, 25 bp, Homo sapien
aacctgagatgcgtcttccctccgc

SEQ ID NO: 3853587 - DNA, 25 bp, Homo sapien
cctgctccccgacccgggagtgaca

SEQ ID NO: 3853588 - DNA, 25 bp, Homo sapien
tcgggccccagttccgactggcggc

SEQ ID NO: 3853589 - DNA, 25 bp, Homo sapien
cgcgttgccatgacgaccccgggag

SEQ ID NO: 3853590 - DNA, 25 bp, Homo sapien
ctagcgttcggtttcggcccgctcg

SEQ ID NO: 3853591 - DNA, 25 bp, Homo sapien
actatgcctcagaacccgggcggga

SEQ ID NO: 3853592 - DNA, 25 bp, Homo sapien
ctgcgcggtctcgggcggaggctcc

SEQ ID NO: 3853593 - DNA, 25 bp, Homo sapien
gcgcggtctcgggcggaggctccct

SEQ ID NO: 3853594 - DNA, 25 bp, Homo sapien
gcggtctcgggcggaggctccctcg

SEQ ID NO: 3853595 - DNA, 25 bp, Homo sapien
gctgcgcggtctcgggcggaggctc

SEQ ID NO: 3853596 - DNA, 25 bp, Homo sapien
cgggagagaagcccgccgtctctaa

SEQ ID NO: 3853597 - DNA, 25 bp, Homo sapien
ccgtctctaagcctcctcgcatccg

SEQ ID NO: 3853598 - DNA, 25 bp, Homo sapien
agagaagcccgccgtctctaagcct

SEQ ID NO: 3853599 - DNA, 25 bp, Homo sapien
ccgccgtctctaagcctcctcgcat

SEQ ID NO: 3853600 - DNA, 25 bp, Homo sapien
aatgggctttggattagggacctca

SEQ ID NO: 3853601 - DNA, 25 bp, Homo sapien
gatactgccctagtatgaaaaggca

SEQ ID NO: 3853602 - DNA, 25 bp, Homo sapien
tctaggttaggcaaaaatgcatgca

SEQ ID NO: 3853603 - DNA, 25 bp, Homo sapien
tgggcactagctagaggagatactg

SEQ ID NO: 3853604 - DNA, 25 bp, Homo sapien
agtgagagctttaatttaaacaagc

SEQ ID NO: 3853605 - DNA, 25 bp, Homo sapien
atagtgagagctttaatttaaacaa

SEQ ID NO: 3853606 - DNA, 25 bp, Homo sapien
tagtgagagctttaatttaaacaag

SEQ ID NO: 3853607 - DNA, 25 bp, Homo sapien
agtgcaatcaaatgtgaccatatac

SEQ ID NO: 3853608 - DNA, 25 bp, Homo sapien
aacagtgcaatcaaatgtgaccata

SEQ ID NO: 3853609 - DNA, 25 bp, Homo sapien
cagtgcaatcaaatgtgaccatata

SEQ ID NO: 3853610 - DNA, 25 bp, Homo sapien
acagtgcaatcaaatgtgaccatat

SEQ ID NO: 3853611 - DNA, 25 bp, Homo sapien
caaaggaggatagcaatttagtgag

SEQ ID NO: 3853612 - DNA, 25 bp, Homo sapien
ggatagcaatttagtgagggcacac

SEQ ID NO: 3853613 - DNA, 25 bp, Homo sapien
gaggatagcaatttagtgagggcac

SEQ ID NO: 3853614 - DNA, 25 bp, Homo sapien
tctccaaaggaggatagcaatttag

SEQ ID NO: 3853615 - DNA, 25 bp, Homo sapien
gacgtcgccaatctttcaagagttc

SEQ ID NO: 3853616 - DNA, 25 bp, Homo sapien
tggctctggttatagcaacattaag

SEQ ID NO: 3853617 - DNA, 25 bp, Homo sapien
tagcaacattaagacgtcgccaatc

SEQ ID NO: 3853618 - DNA, 25 bp, Homo sapien
aatcagtttatgtttggctctggtt

SEQ ID NO: 3853619 - DNA, 25 bp, Homo sapien
tactgtattaacttcgaccatccca

SEQ ID NO: 3853620 - DNA, 25 bp, Homo sapien
gaccatcccaatagaacgtgccaat

SEQ ID NO: 3853621 - DNA, 25 bp, Homo sapien
gctgcctgtacggtgcaataatacc

SEQ ID NO: 3853622 - DNA, 25 bp, Homo sapien
caataataccaatatcagagggact

SEQ ID NO: 3853623 - DNA, 25 bp, Homo sapien
ggattatatgctactaaaacagtgc

SEQ ID NO: 3853624 - DNA, 25 bp, Homo sapien
taaacgagacttaatgccagattgt

SEQ ID NO: 3853625 - DNA, 25 bp, Homo sapien
tatgtgcccaactgatgtttataac

SEQ ID NO: 3853626 - DNA, 25 bp, Homo sapien
tagtttcatgagaacgtaaaggatt

SEQ ID NO: 3853627 - DNA, 25 bp, Homo sapien
aaatggaggttaggaaaactatgag

SEQ ID NO: 3853628 - DNA, 25 bp, Homo sapien
tttcaacttgttctggcgctggaac

SEQ ID NO: 3853629 - DNA, 25 bp, Homo sapien
ggcttctgttacattgctcacacca

SEQ ID NO: 3853630 - DNA, 25 bp, Homo sapien
taggaaaactatgagtttggcttct

SEQ ID NO: 3853631 - DNA, 25 bp, Homo sapien
cgtaggtttatcactgcattggcca

SEQ ID NO: 3853632 - DNA, 25 bp, Homo sapien
ccatcaaccaaggattatcagaata

SEQ ID NO: 3853633 - DNA, 25 bp, Homo sapien
tccagcttgccctcataggtcagct

SEQ ID NO: 3853634 - DNA, 25 bp, Homo sapien
tgttgggttcaaatactcccatcaa

SEQ ID NO: 3853635 - DNA, 25 bp, Homo sapien
aagataactttagttttggtagatg

SEQ ID NO: 3853636 - DNA, 25 bp, Homo sapien
tagttttggtagatggaaacaaaca

SEQ ID NO: 3853637 - DNA, 25 bp, Homo sapien
tttggtagatggaaacaaacatgaa

SEQ ID NO: 3853638 - DNA, 25 bp, Homo sapien
caaacatgaaaaccactcctagcta

SEQ ID NO: 3853639 - DNA, 25 bp, Homo sapien
tgctccagcctcttgaataagcttt

SEQ ID NO: 3853640 - DNA, 25 bp, Homo sapien
ctcttgaataagctttcactcatgc

SEQ ID NO: 3853641 - DNA, 25 bp, Homo sapien
tgtacaacagcactcttattctgct

SEQ ID NO: 3853642 - DNA, 25 bp, Homo sapien
ctgtactgcacggttaactgtacaa

SEQ ID NO: 3853643 - DNA, 25 bp, Homo sapien
gtttatcagtgtactaaatctgttc

SEQ ID NO: 3853644 - DNA, 25 bp, Homo sapien
tttatcagtgtactaaatctgttcc

SEQ ID NO: 3853645 - DNA, 25 bp, Homo sapien
ttatcagtgtactaaatctgttcct

SEQ ID NO: 3853646 - DNA, 25 bp, Homo sapien
cactaacacaaatctccgtgaaaaa

SEQ ID NO: 3853647 - DNA, 25 bp, Homo sapien
gatggtcccccactaacacaaatct

SEQ ID NO: 3853648 - DNA, 25 bp, Homo sapien
gggcccagacaaattggttggctaa

SEQ ID NO: 3853649 - DNA, 25 bp, Homo sapien
ggttggctaatttgagaggcttcat

SEQ ID NO: 3853650 - DNA, 25 bp, Homo sapien
tgaatctgacccaaacgcaaaaatc

SEQ ID NO: 3853651 - DNA, 25 bp, Homo sapien
tttgatctgcaaatttcttgctctg

SEQ ID NO: 3853652 - DNA, 25 bp, Homo sapien
tatagctggtcaacaaaacgctaaa

SEQ ID NO: 3853653 - DNA, 25 bp, Homo sapien
gttcttctagaagagctaaggattt

SEQ ID NO: 3853654 - DNA, 25 bp, Homo sapien
tacccacgatgagtgtgtagtcttt

SEQ ID NO: 3853655 - DNA, 25 bp, Homo sapien
tttttcatcgcttgcctctgaggct

SEQ ID NO: 3853656 - DNA, 25 bp, Homo sapien
gtcccaggcatacccacgatgagtg

SEQ ID NO: 3853657 - DNA, 25 bp, Homo sapien
gagtacatatcgtagttgtttttcc

SEQ ID NO: 3853658 - DNA, 25 bp, Homo sapien
gcaggcaactgtatcctttgcatca

SEQ ID NO: 3853659 - DNA, 25 bp, Homo sapien
ctgtatcctttgcatcatgtggaag

SEQ ID NO: 3853660 - DNA, 25 bp, Homo sapien
aagtcaataattaaatctcgaagtt

SEQ ID NO: 3853661 - DNA, 25 bp, Homo sapien
tataaactgaggttcacgaaagtca

SEQ ID NO: 3853662 - DNA, 25 bp, Homo sapien
ttcttcttggtctaatctgaacaaa

SEQ ID NO: 3853663 - DNA, 25 bp, Homo sapien
aatctgaacaaagttgattctggaa

SEQ ID NO: 3853664 - DNA, 25 bp, Homo sapien
agatttcctaatggggtatctatat

SEQ ID NO: 3853665 - DNA, 25 bp, Homo sapien
gaaagatttcctaatggggtatcta

SEQ ID NO: 3853666 - DNA, 25 bp, Homo sapien
cacttgccaatcaaggacagcatga

SEQ ID NO: 3853667 - DNA, 25 bp, Homo sapien
ttgccaatcaaggacagcatgaggc

SEQ ID NO: 3853668 - DNA, 25 bp, Homo sapien
gtcacacttgccaatcaaggacagc

SEQ ID NO: 3853669 - DNA, 25 bp, Homo sapien
tcagtcacacttgccaatcaaggac

SEQ ID NO: 3853670 - DNA, 25 bp, Homo sapien
gggcatgcccgtattaactgtaaga

SEQ ID NO: 3853671 - DNA, 25 bp, Homo sapien
tactgatcagtagggaacaagcctg

SEQ ID NO: 3853672 - DNA, 25 bp, Homo sapien
cattaagaaatggtcgggcatgccc

SEQ ID NO: 3853673 - DNA, 25 bp, Homo sapien
gaatattgtggatcaccatcccatg

SEQ ID NO: 3853674 - DNA, 25 bp, Homo sapien
gaaaatactcaaagttgattgtggt

SEQ ID NO: 3853675 - DNA, 25 bp, Homo sapien
tgaaaagtgactactaaagggtata

SEQ ID NO: 3853676 - DNA, 25 bp, Homo sapien
tgactactaaagggtatagggcttc

SEQ ID NO: 3853677 - DNA, 25 bp, Homo sapien
taatcaggtttccaatgcaactgcc

SEQ ID NO: 3853678 - DNA, 25 bp, Homo sapien
taactctgtcacctgccattagatt

SEQ ID NO: 3853679 - DNA, 25 bp, Homo sapien
ccattagatttgtgacaggtatggc

SEQ ID NO: 3853680 - DNA, 25 bp, Homo sapien
tctagacaaagcaaacagtgacctt

SEQ ID NO: 3853681 - DNA, 25 bp, Homo sapien
caggcattagccagatattttggtg

SEQ ID NO: 3853682 - DNA, 25 bp, Homo sapien
tattatccttcgattgtgactccag

SEQ ID NO: 3853683 - DNA, 25 bp, Homo sapien
gttaacattagacaccaaaggctga

SEQ ID NO: 3853684 - DNA, 25 bp, Homo sapien
tctaagtgtgtttgcttcagatgct

SEQ ID NO: 3853685 - DNA, 25 bp, Homo sapien
cacaattgggactgaactacaatcc

SEQ ID NO: 3853686 - DNA, 25 bp, Homo sapien
caattgggactgaactacaatccat

SEQ ID NO: 3853687 - DNA, 25 bp, Homo sapien
acaattgggactgaactacaatcca

SEQ ID NO: 3853688 - DNA, 25 bp, Homo sapien
tagcagatttgctaatacggtgaaa

SEQ ID NO: 3853689 - DNA, 25 bp, Homo sapien
tacggtgaaacaatgagaatgccat

SEQ ID NO: 3853690 - DNA, 25 bp, Homo sapien
taaagagcacaattgccaatttgtg

SEQ ID NO: 3853691 - DNA, 25 bp, Homo sapien
tcttctgtctagtagcagatttgct

SEQ ID NO: 3853692 - DNA, 25 bp, Homo sapien
ttggcaggcacagggtacatctgac

SEQ ID NO: 3853693 - DNA, 25 bp, Homo sapien
ctcttttatctagatggttggcagg

SEQ ID NO: 3853694 - DNA, 25 bp, Homo sapien
tttatctagatggttggcaggcaca

SEQ ID NO: 3853695 - DNA, 25 bp, Homo sapien
gttggcaggcacagggtacatctga

SEQ ID NO: 3853696 - DNA, 25 bp, Homo sapien
gtcttgaggtagagaagcaagccag

SEQ ID NO: 3853697 - DNA, 25 bp, Homo sapien
agtcttgaggtagagaagcaagcca

SEQ ID NO: 3853698 - DNA, 25 bp, Homo sapien
aaacagacaattttcttattaacat

SEQ ID NO: 3853699 - DNA, 25 bp, Homo sapien
ggtttcacgacttcaatgttacatg

SEQ ID NO: 3853700 - DNA, 25 bp, Homo sapien
tataccctcgatgtattttcacacc

SEQ ID NO: 3853701 - DNA, 25 bp, Homo sapien
gaatttgattctttgccagttttaa

SEQ ID NO: 3853702 - DNA, 25 bp, Homo sapien
ccagttttaagttccagcggcatta

SEQ ID NO: 3853703 - DNA, 25 bp, Homo sapien
tgcccatttacaaaacgaaggaaga

SEQ ID NO: 3853704 - DNA, 25 bp, Homo sapien
acgaaggaagatagtcctctacttc

SEQ ID NO: 3853705 - DNA, 25 bp, Homo sapien
gcatctgagggaagtcagtcgaagt

SEQ ID NO: 3853706 - DNA, 25 bp, Homo sapien
ttttatgcatgaaatctcctgccca

SEQ ID NO: 3853707 - DNA, 25 bp, Homo sapien
tatgtttaagctccgcaatcttaat

SEQ ID NO: 3853708 - DNA, 25 bp, Homo sapien
gtttaagctccgcaatcttaataac

SEQ ID NO: 3853709 - DNA, 25 bp, Homo sapien
cttctttatgtttaagctccgcaat

SEQ ID NO: 3853710 - DNA, 25 bp, Homo sapien
aagctccgcaatcttaataactact

SEQ ID NO: 3853711 - DNA, 25 bp, Homo sapien
gagagccagtccaacagagaagaca

SEQ ID NO: 3853712 - DNA, 25 bp, Homo sapien
tgaaattcctcaagccagaaagcaa

SEQ ID NO: 3853713 - DNA, 25 bp, Homo sapien
aatgctagctctgccaaaattgact

SEQ ID NO: 3853714 - DNA, 25 bp, Homo sapien
aaccacaggttgaaagagaagctga

SEQ ID NO: 3853715 - DNA, 25 bp, Homo sapien
tcttgtagcttttctggggcaaagc

SEQ ID NO: 3853716 - DNA, 25 bp, Homo sapien
tgaattgtttgaaaagcaagttctt

SEQ ID NO: 3853717 - DNA, 25 bp, Homo sapien
tttcttgaattgtttgaaaagcaag

SEQ ID NO: 3853718 - DNA, 25 bp, Homo sapien
ccgtaccaattagcatttggcgtgt

SEQ ID NO: 3853719 - DNA, 25 bp, Homo sapien
ccaaaatctttatctattatccaag

SEQ ID NO: 3853720 - DNA, 25 bp, Homo sapien
tcaggacagctcttctcatacatcg

SEQ ID NO: 3853721 - DNA, 25 bp, Homo sapien
tatccaagtgtcagatgtgcagtct

SEQ ID NO: 3853722 - DNA, 25 bp, Homo sapien
gaatactactggctatgctggtgcc

SEQ ID NO: 3853723 - DNA, 25 bp, Homo sapien
tcttggaaaggaagctaccactttc

SEQ ID NO: 3853724 - DNA, 25 bp, Homo sapien
tgtgaagcagtgatgaccaggcgct

SEQ ID NO: 3853725 - DNA, 25 bp, Homo sapien
tattgactgccaacaccaggtaccg

SEQ ID NO: 3853726 - DNA, 25 bp, Homo sapien
aggtaccggttatccattcctgtgc

SEQ ID NO: 3853727 - DNA, 25 bp, Homo sapien
actccggaggctcgtcgggtgccca

SEQ ID NO: 3853728 - DNA, 25 bp, Homo sapien
gggagctgcaccgggtccctgggcc

SEQ ID NO: 3853729 - DNA, 25 bp, Homo sapien
cccggtcagtctgaggcggtgcgga

SEQ ID NO: 3853730 - DNA, 25 bp, Homo sapien
tctttcaaatctcccgctttgttcc

SEQ ID NO: 3853731 - DNA, 25 bp, Homo sapien
cagcagctccagttcgttcagctgc

SEQ ID NO: 3853732 - DNA, 25 bp, Homo sapien
agcagctccagttcgttcagctgct

SEQ ID NO: 3853733 - DNA, 25 bp, Homo sapien
ctgtagacagaaaagacagcggaac

SEQ ID NO: 3853734 - DNA, 25 bp, Homo sapien
agacagaaaagacagcggaaccggg

SEQ ID NO: 3853735 - DNA, 25 bp, Homo sapien
gtagacagaaaagacagcggaaccg

SEQ ID NO: 3853736 - DNA, 25 bp, Homo sapien
tgtagacagaaaagacagcggaacc

SEQ ID NO: 3853737 - DNA, 25 bp, Homo sapien
gcgagcctgcgcacctcgcgcgcat

SEQ ID NO: 3853738 - DNA, 25 bp, Homo sapien
gaaaaaggcgcgagcctgcgcacct

SEQ ID NO: 3853739 - DNA, 25 bp, Homo sapien
cgcgagcctgcgcacctcgcgcgca

SEQ ID NO: 3853740 - DNA, 25 bp, Homo sapien
aaagggaaaaaggcgcgagcctgcg

SEQ ID NO: 3853741 - DNA, 25 bp, Homo sapien
cttaggactgggaatacagggagtc

SEQ ID NO: 3853742 - DNA, 25 bp, Homo sapien
cttgcttaggactgggaatacaggg

SEQ ID NO: 3853743 - DNA, 25 bp, Homo sapien
gactgggaatacagggagtcttcat

SEQ ID NO: 3853744 - DNA, 25 bp, Homo sapien
tttgctcccttgcttaggactggga

SEQ ID NO: 3853745 - DNA, 25 bp, Homo sapien
gttctggctctattatctaggctgg

SEQ ID NO: 3853746 - DNA, 25 bp, Homo sapien
ttctgtttcatctatgtcagtcttg

SEQ ID NO: 3853747 - DNA, 25 bp, Homo sapien
gtttcatctatgtcagtcttggttg

SEQ ID NO: 3853748 - DNA, 25 bp, Homo sapien
ttaattggctacacagattttctgt

SEQ ID NO: 3853749 - DNA, 25 bp, Homo sapien
gaataggctctagattcagaccggc

SEQ ID NO: 3853750 - DNA, 25 bp, Homo sapien
tagatctgccacttacatgaacctg

SEQ ID NO: 3853751 - DNA, 25 bp, Homo sapien
cagaccggctgaatttgaatcctag

SEQ ID NO: 3853752 - DNA, 25 bp, Homo sapien
taggcctcgattattcccatctgtc

SEQ ID NO: 3853753 - DNA, 25 bp, Homo sapien
tctgcaaggcaacccattaattgta

SEQ ID NO: 3853754 - DNA, 25 bp, Homo sapien
tatgcttgctatacaagtgtgtcag

SEQ ID NO: 3853755 - DNA, 25 bp, Homo sapien
ctagtgcccaatactagaatgtgtc

SEQ ID NO: 3853756 - DNA, 25 bp, Homo sapien
tagatgcgaggaactatgtaaagtg

SEQ ID NO: 3853757 - DNA, 25 bp, Homo sapien
taaacatcactgagtaccactctga

SEQ ID NO: 3853758 - DNA, 25 bp, Homo sapien
aacatcactgagtaccactctgacg

SEQ ID NO: 3853759 - DNA, 25 bp, Homo sapien
tcactgagtaccactctgacgccat

SEQ ID NO: 3853760 - DNA, 25 bp, Homo sapien
agtaaacatcactgagtaccactct

SEQ ID NO: 3853761 - DNA, 25 bp, Homo sapien
tttgggaagtcgggggggcagatca

SEQ ID NO: 3853762 - DNA, 25 bp, Homo sapien
aacagggcaaaacccagctctacta

SEQ ID NO: 3853763 - DNA, 25 bp, Homo sapien
caaaacccagctctactaaatacac

SEQ ID NO: 3853764 - DNA, 25 bp, Homo sapien
ttgggaagtcgggggggcagatcac

SEQ ID NO: 3853765 - DNA, 25 bp, Homo sapien
cagagagctatacccactgagaggt

SEQ ID NO: 3853766 - DNA, 25 bp, Homo sapien
ggaaagatgactcgggaaaatcgct

SEQ ID NO: 3853767 - DNA, 25 bp, Homo sapien
tggaagataacctggcaagatgcac

SEQ ID NO: 3853768 - DNA, 25 bp, Homo sapien
ggtatacctcacttatcaatctgga

SEQ ID NO: 3853769 - DNA, 25 bp, Homo sapien
tagagcaaatcatctaacaaaaaca

SEQ ID NO: 3853770 - DNA, 25 bp, Homo sapien
taaaggataacaattcaaatcatat

SEQ ID NO: 3853771 - DNA, 25 bp, Homo sapien
catttctacgtcttcatattgcact

SEQ ID NO: 3853772 - DNA, 25 bp, Homo sapien
tggaagaactagttgatgcatcata

SEQ ID NO: 3853773 - DNA, 25 bp, Homo sapien
cctcataataacatttgagcaagac

SEQ ID NO: 3853774 - DNA, 25 bp, Homo sapien
tttcctattatccagtggagcataa

SEQ ID NO: 3853775 - DNA, 25 bp, Homo sapien
gttgcataggctggcatggaattcc

SEQ ID NO: 3853776 - DNA, 25 bp, Homo sapien
cagtggagcataattgtgagaagag

SEQ ID NO: 3853777 - DNA, 25 bp, Homo sapien
aaatgtcaatgctggctgtttcata

SEQ ID NO: 3853778 - DNA, 25 bp, Homo sapien
tcttgtgacagggtaaatatcccca

SEQ ID NO: 3853779 - DNA, 25 bp, Homo sapien
catcaaaaagtatggtaagcagttc

SEQ ID NO: 3853780 - DNA, 25 bp, Homo sapien
ttaaagcggtttagccagcatcagc

SEQ ID NO: 3853781 - DNA, 25 bp, Homo sapien
gctaatggcaacctcttgaaccccg

SEQ ID NO: 3853782 - DNA, 25 bp, Homo sapien
ttctccctctgagaatgtattaaga

SEQ ID NO: 3853783 - DNA, 25 bp, Homo sapien
catacttcatagtatcccgcatggt

SEQ ID NO: 3853784 - DNA, 25 bp, Homo sapien
taagagataaaccacgatagagtcc

SEQ ID NO: 3853785 - DNA, 25 bp, Homo sapien
ctgcttgagagggaatacagcgaat

SEQ ID NO: 3853786 - DNA, 25 bp, Homo sapien
tccatggtgtccatagacatacttc

SEQ ID NO: 3853787 - DNA, 25 bp, Homo sapien
tcttcccctgagagacaacatatca

SEQ ID NO: 3853788 - DNA, 25 bp, Homo sapien
caagcacagggtaatgctcccagcc

SEQ ID NO: 3853789 - DNA, 25 bp, Homo sapien
tcttttgggtgaacacggcaatcca

SEQ ID NO: 3853790 - DNA, 25 bp, Homo sapien
ctcaagtagctggatacaacaagca

SEQ ID NO: 3853791 - DNA, 25 bp, Homo sapien
tcttgtgcctcagcttccagagtat

SEQ ID NO: 3853792 - DNA, 25 bp, Homo sapien
tgtgcctcagcttccagagtatctg

SEQ ID NO: 3853793 - DNA, 25 bp, Homo sapien
accttgtgatcctcccgcgtcagcc

SEQ ID NO: 3853794 - DNA, 25 bp, Homo sapien
ggactacaggcgcacaccgccacac

SEQ ID NO: 3853795 - DNA, 25 bp, Homo sapien
gcgccatctcagctctttgcctcct

SEQ ID NO: 3853796 - DNA, 25 bp, Homo sapien
cgccatctcagctctttgcctcctg

SEQ ID NO: 3853797 - DNA, 25 bp, Homo sapien
gccatctcagctctttgcctcctgg

SEQ ID NO: 3853798 - DNA, 25 bp, Homo sapien
cactgcgacaggccttttttgtttt

SEQ ID NO: 3853799 - DNA, 25 bp, Homo sapien
tccttactgagtttaatgttacatt

SEQ ID NO: 3853800 - DNA, 25 bp, Homo sapien
cctatctccttactgagtttaatgt

SEQ ID NO: 3853801 - DNA, 25 bp, Homo sapien
tcctatctccttactgagtttaatg

SEQ ID NO: 3853802 - DNA, 25 bp, Homo sapien
atctccttactgagtttaatgttac

SEQ ID NO: 3853803 - DNA, 25 bp, Homo sapien
ggcacttttcaaattccggcagaac

SEQ ID NO: 3853804 - DNA, 25 bp, Homo sapien
ccgacgagtcacatcaaatgggtag

SEQ ID NO: 3853805 - DNA, 25 bp, Homo sapien
tgcattcgccgacgagtcacatcaa

SEQ ID NO: 3853806 - DNA, 25 bp, Homo sapien
cagttcctaattgcattcgccgacg

SEQ ID NO: 3853807 - DNA, 25 bp, Homo sapien
tgagttttcaaaactaagacattag

SEQ ID NO: 3853808 - DNA, 25 bp, Homo sapien
atattgtctgcgctattgctccagc

SEQ ID NO: 3853809 - DNA, 25 bp, Homo sapien
aagacattaggattgtctgatgaag

SEQ ID NO: 3853810 - DNA, 25 bp, Homo sapien
caccaccacaaagtaagtttacatg

SEQ ID NO: 3853811 - DNA, 25 bp, Homo sapien
tcctaaaatagtaggcatcagacct

SEQ ID NO: 3853812 - DNA, 25 bp, Homo sapien
agtaggcatcagacctctgtaaaat

SEQ ID NO: 3853813 - DNA, 25 bp, Homo sapien
gcatcagacctctgtaaaatccaaa

SEQ ID NO: 3853814 - DNA, 25 bp, Homo sapien
cctaaaatagtaggcatcagacctc

SEQ ID NO: 3853815 - DNA, 25 bp, Homo sapien
taagtacagataactgctgtcatac

SEQ ID NO: 3853816 - DNA, 25 bp, Homo sapien
catgtcaagagggtaagtacagata

SEQ ID NO: 3853817 - DNA, 25 bp, Homo sapien
taattcctgtatagctgtgttcccc

SEQ ID NO: 3853818 - DNA, 25 bp, Homo sapien
taggcggaccctaaccatgtcaaga

SEQ ID NO: 3853819 - DNA, 25 bp, Homo sapien
gaatcaattcatttatctcctcttc

SEQ ID NO: 3853820 - DNA, 25 bp, Homo sapien
ttgagaatcaattcatttatctcct

SEQ ID NO: 3853821 - DNA, 25 bp, Homo sapien
tcttcttgcatccccttgcccccca

SEQ ID NO: 3853822 - DNA, 25 bp, Homo sapien
ttcctttgagaatcaattcatttat

SEQ ID NO: 3853823 - DNA, 25 bp, Homo sapien
tagtggtggtaacagctttcttctt

SEQ ID NO: 3853824 - DNA, 25 bp, Homo sapien
ttcttccctcagtttacaactacaa

SEQ ID NO: 3853825 - DNA, 25 bp, Homo sapien
cttgaatagtggtggtaacagcttt

SEQ ID NO: 3853826 - DNA, 25 bp, Homo sapien
aatccaatacaaatagtagaatatg

SEQ ID NO: 3853827 - DNA, 25 bp, Homo sapien
tccaaacacgtaggaagcttgttgc

SEQ ID NO: 3853828 - DNA, 25 bp, Homo sapien
tttgggaaaggtgcctacaagcctc

SEQ ID NO: 3853829 - DNA, 25 bp, Homo sapien
tcaaagtacagtgagcacgtggttc

SEQ ID NO: 3853830 - DNA, 25 bp, Homo sapien
aaaattcaagagttggactaccagc

SEQ ID NO: 3853831 - DNA, 25 bp, Homo sapien
cacgtttagttccatggaaactggc

SEQ ID NO: 3853832 - DNA, 25 bp, Homo sapien
cttgtcacgtttagttccatggaaa

SEQ ID NO: 3853833 - DNA, 25 bp, Homo sapien
gccagatggatttcagacaactaaa

SEQ ID NO: 3853834 - DNA, 25 bp, Homo sapien
tgtcacgtttagttccatggaaact

SEQ ID NO: 3853835 - DNA, 25 bp, Homo sapien
tgtgacttccaaccgaggcaagaaa

SEQ ID NO: 3853836 - DNA, 25 bp, Homo sapien
aggcgtttcaatgcaatatccaaca

SEQ ID NO: 3853837 - DNA, 25 bp, Homo sapien
caatatccaacattagcaggaagat

SEQ ID NO: 3853838 - DNA, 25 bp, Homo sapien
ggcaagaaacgcaaaaggcgtttca

SEQ ID NO: 3853839 - DNA, 25 bp, Homo sapien
gatccatgcccatccgaaaggtttt

SEQ ID NO: 3853840 - DNA, 25 bp, Homo sapien
ggttttgatgaaggtcaggttgtat

SEQ ID NO: 3853841 - DNA, 25 bp, Homo sapien
tccgaaaggttttgatgaaggtcag

SEQ ID NO: 3853842 - DNA, 25 bp, Homo sapien
tgcccatccgaaaggttttgatgaa

SEQ ID NO: 3853843 - DNA, 25 bp, Homo sapien
tacaactatccatgtagacattcac

SEQ ID NO: 3853844 - DNA, 25 bp, Homo sapien
ctaatggtacaactatccatgtaga

SEQ ID NO: 3853845 - DNA, 25 bp, Homo sapien
ctatccatgtagacattcaccacag

SEQ ID NO: 3853846 - DNA, 25 bp, Homo sapien
tggtacaactatccatgtagacatt

SEQ ID NO: 3853847 - DNA, 25 bp, Homo sapien
gataaaactgaacaaagacggcaaa

SEQ ID NO: 3853848 - DNA, 25 bp, Homo sapien
aagacggcaaaaagattcctgaaca

SEQ ID NO: 3853849 - DNA, 25 bp, Homo sapien
taggataaaactgaacaaagacggc

SEQ ID NO: 3853850 - DNA, 25 bp, Homo sapien
actgaacaaagacggcaaaaagatt

SEQ ID NO: 3853851 - DNA, 25 bp, Homo sapien
tccaaagttacatttagaagcctta

SEQ ID NO: 3853852 - DNA, 25 bp, Homo sapien
tttcaagtgtttcaatcacaggaga

SEQ ID NO: 3853853 - DNA, 25 bp, Homo sapien
gaagccttatcaaaagtagaggagc

SEQ ID NO: 3853854 - DNA, 25 bp, Homo sapien
gattatagttgtaggacgagggaca

SEQ ID NO: 3853855 - DNA, 25 bp, Homo sapien
tgatatacaggatgcgtgcggtgac

SEQ ID NO: 3853856 - DNA, 25 bp, Homo sapien
tatacaggatgcgtgcggtgactca

SEQ ID NO: 3853857 - DNA, 25 bp, Homo sapien
aagtgatatacaggatgcgtgcggt

SEQ ID NO: 3853858 - DNA, 25 bp, Homo sapien
tacaggatgcgtgcggtgactcaca

SEQ ID NO: 3853859 - DNA, 25 bp, Homo sapien
gccattaatctgtgcacatgacctg

SEQ ID NO: 3853860 - DNA, 25 bp, Homo sapien
cctgaaattcccagcttcgtagtaa

SEQ ID NO: 3853861 - DNA, 25 bp, Homo sapien
ctgccatggatccagccattaatct

SEQ ID NO: 3853862 - DNA, 25 bp, Homo sapien
gaaattcccagcttcgtagtaatta

SEQ ID NO: 3853863 - DNA, 25 bp, Homo sapien
cgttttataatgctcaaatgccata

SEQ ID NO: 3853864 - DNA, 25 bp, Homo sapien
ggattgcaccatagggaaagattcg

SEQ ID NO: 3853865 - DNA, 25 bp, Homo sapien
gaaagattcgaatcatcattgcacc

SEQ ID NO: 3853866 - DNA, 25 bp, Homo sapien
tctttttgaggaacagcacgcaatg

SEQ ID NO: 3853867 - DNA, 25 bp, Homo sapien
caaatgattctcctgccccagcctc

SEQ ID NO: 3853868 - DNA, 25 bp, Homo sapien
acagttttactcatgttgccccagc

SEQ ID NO: 3853869 - DNA, 25 bp, Homo sapien
cagttttactcatgttgccccagct

SEQ ID NO: 3853870 - DNA, 25 bp, Homo sapien
tcaaatgattctcctgccccagcct

SEQ ID NO: 3853871 - DNA, 25 bp, Homo sapien
gctctgttgcaggtccacatatgtt

SEQ ID NO: 3853872 - DNA, 25 bp, Homo sapien
gagacaggaaggctaatgataaggt

SEQ ID NO: 3853873 - DNA, 25 bp, Homo sapien
tggaagcggacacaaaggttaagcc

SEQ ID NO: 3853874 - DNA, 25 bp, Homo sapien
taatgattacctagcagagacagga

SEQ ID NO: 3853875 - DNA, 25 bp, Homo sapien
taatggtgattgtgagcttgtaata

SEQ ID NO: 3853876 - DNA, 25 bp, Homo sapien
aatgcttgtaatggtgattgtgagc

SEQ ID NO: 3853877 - DNA, 25 bp, Homo sapien
cgatccaatggagcaactgttgttt

SEQ ID NO: 3853878 - DNA, 25 bp, Homo sapien
ataaaacctttactcgatccaatgg

SEQ ID NO: 3853879 - DNA, 25 bp, Homo sapien
tattaatccaactgccaggttctgt

SEQ ID NO: 3853880 - DNA, 25 bp, Homo sapien
aaatgtggttatggagacagacact

SEQ ID NO: 3853881 - DNA, 25 bp, Homo sapien
caggttctgtttgaagtaacctcct

SEQ ID NO: 3853882 - DNA, 25 bp, Homo sapien
cagacacttcaaggtattaatccaa

SEQ ID NO: 3853883 - DNA, 25 bp, Homo sapien
catttttacggagacagacacttga

SEQ ID NO: 3853884 - DNA, 25 bp, Homo sapien
cggagacagacacttgaaggtattt

SEQ ID NO: 3853885 - DNA, 25 bp, Homo sapien
gaaggtatttatccgattgccaggt

SEQ ID NO: 3853886 - DNA, 25 bp, Homo sapien
ctggaacatttttacggagacagac

SEQ ID NO: 3853887 - DNA, 25 bp, Homo sapien
ctgtttgaagtaaactcctcttctt

SEQ ID NO: 3853888 - DNA, 25 bp, Homo sapien
tgtatttcgaccctaccatgtgcca

SEQ ID NO: 3853889 - DNA, 25 bp, Homo sapien
aggatgacgtgagccaacagttgga

SEQ ID NO: 3853890 - DNA, 25 bp, Homo sapien
tcacggagagctataattgtgcggc

SEQ ID NO: 3853891 - DNA, 25 bp, Homo sapien
ctttagcataggtcagagtccaggc

SEQ ID NO: 3853892 - DNA, 25 bp, Homo sapien
aaaataatagttggccaggtatggt

SEQ ID NO: 3853893 - DNA, 25 bp, Homo sapien
tccatatcaaagctctcttatccga

SEQ ID NO: 3853894 - DNA, 25 bp, Homo sapien
aaactagccaagcaacacacctgta

SEQ ID NO: 3853895 - DNA, 25 bp, Homo sapien
aactagccaagcaacacacctgtaa

SEQ ID NO: 3853896 - DNA, 25 bp, Homo sapien
actagccaagcaacacacctgtaat

SEQ ID NO: 3853897 - DNA, 25 bp, Homo sapien
aaaactagccaagcaacacacctgt

SEQ ID NO: 3853898 - DNA, 25 bp, Homo sapien
gtagacagtttgcacaattttccag

SEQ ID NO: 3853899 - DNA, 25 bp, Homo sapien
cacatcaataatagggcttgtcaag

SEQ ID NO: 3853900 - DNA, 25 bp, Homo sapien
tacacaacccagagaagtaattaag

SEQ ID NO: 3853901 - DNA, 25 bp, Homo sapien
taattaagtaatgacaacctgtggg

SEQ ID NO: 3853902 - DNA, 25 bp, Homo sapien
ccagggtctctgtaagggatcctcc

SEQ ID NO: 3853903 - DNA, 25 bp, Homo sapien
cataacctagctgtcattagtcaag

SEQ ID NO: 3853904 - DNA, 25 bp, Homo sapien
aagaatgggtgcctgattcagacct

SEQ ID NO: 3853905 - DNA, 25 bp, Homo sapien
agcctctgccggagtgccaaaggtc

SEQ ID NO: 3853906 - DNA, 25 bp, Homo sapien
gctggctcttcgtggcatggaccca

SEQ ID NO: 3853907 - DNA, 25 bp, Homo sapien
tcagggcagacatctaacagaacat

SEQ ID NO: 3853908 - DNA, 25 bp, Homo sapien
tccaggaatgtcatagaggccgctt

SEQ ID NO: 3853909 - DNA, 25 bp, Homo sapien
aacattgaagcagccagagtccagg

SEQ ID NO: 3853910 - DNA, 25 bp, Homo sapien
gaaaggagcgcagccagtagaagtc

SEQ ID NO: 3853911 - DNA, 25 bp, Homo sapien
ccagtagaagtctctgcgggttgtg

SEQ ID NO: 3853912 - DNA, 25 bp, Homo sapien
ctccggccagaaaggagcgcagcca

SEQ ID NO: 3853913 - DNA, 25 bp, Homo sapien
ggagcgcagccagtagaagtctctg

SEQ ID NO: 3853914 - DNA, 25 bp, Homo sapien
cgggagggggatcggccgccgccag

SEQ ID NO: 3853915 - DNA, 25 bp, Homo sapien
accatagccggaacaggcggtgaca

SEQ ID NO: 3853916 - DNA, 25 bp, Homo sapien
tcaggccccttctgttcggacggaa

SEQ ID NO: 3853917 - DNA, 25 bp, Homo sapien
tgccaacttacagaacaccggacgg

SEQ ID NO: 3853918 - DNA, 25 bp, Homo sapien
aaacggtaggcagtgagatggtccc

SEQ ID NO: 3853919 - DNA, 25 bp, Homo sapien
gggacgataattatcctccacctcc

SEQ ID NO: 3853920 - DNA, 25 bp, Homo sapien
tcttggatcgtcgaagattcctgca

SEQ ID NO: 3853921 - DNA, 25 bp, Homo sapien
ttatctggctcactagttggttccc

SEQ ID NO: 3853922 - DNA, 25 bp, Homo sapien
tatggccaggatgtacgtatagggc

SEQ ID NO: 3853923 - DNA, 25 bp, Homo sapien
agggtctcaataagcccgtgttaca

SEQ ID NO: 3853924 - DNA, 25 bp, Homo sapien
aataagcccgtgttacatgctcgcc

SEQ ID NO: 3853925 - DNA, 25 bp, Homo sapien
tctatgagggtctcaataagcccgt

SEQ ID NO: 3853926 - DNA, 25 bp, Homo sapien
taagcccgtgttacatgctcgccac

SEQ ID NO: 3853927 - DNA, 25 bp, Homo sapien
gtagcggctaggaaatcccaaacat

SEQ ID NO: 3853928 - DNA, 25 bp, Homo sapien
tagcggctaggaaatcccaaacatt

SEQ ID NO: 3853929 - DNA, 25 bp, Homo sapien
gcggctaggaaatcccaaacattcc

SEQ ID NO: 3853930 - DNA, 25 bp, Homo sapien
agcggctaggaaatcccaaacattc

SEQ ID NO: 3853931 - DNA, 25 bp, Homo sapien
tcagtccagaaaggagactacccca

SEQ ID NO: 3853932 - DNA, 25 bp, Homo sapien
tcttctcagtccagaaaggagacta

SEQ ID NO: 3853933 - DNA, 25 bp, Homo sapien
tctcagtccagaaaggagactaccc

SEQ ID NO: 3853934 - DNA, 25 bp, Homo sapien
ttctcagtccagaaaggagactacc

SEQ ID NO: 3853935 - DNA, 25 bp, Homo sapien
cataaagtgaatacgaccaccactg

SEQ ID NO: 3853936 - DNA, 25 bp, Homo sapien
cgttgctggcgacctagacattgct

SEQ ID NO: 3853937 - DNA, 25 bp, Homo sapien
tccagcccagagtcagggaacacag

SEQ ID NO: 3853938 - DNA, 25 bp, Homo sapien
tgaactttgcagacatccagcccag

SEQ ID NO: 3853939 - DNA, 25 bp, Homo sapien
gcgccgctttgtgcgcgcagccgct

SEQ ID NO: 3853940 - DNA, 25 bp, Homo sapien
gcagtctgctccggcgccgctttgt

SEQ ID NO: 3853941 - DNA, 25 bp, Homo sapien
ggagtggccgcgcagtctgctccgg

SEQ ID NO: 3853942 - DNA, 25 bp, Homo sapien
ctccggcgccgctttgtgcgcgcag

SEQ ID NO: 3853943 - DNA, 25 bp, Homo sapien
caatccccgaaatgtgctgctgaaa

SEQ ID NO: 3853944 - DNA, 25 bp, Homo sapien
gctgtgatgggactgtgaccgccct

SEQ ID NO: 3853945 - DNA, 25 bp, Homo sapien
gtgatgaaatgcaggccttccggcc

SEQ ID NO: 3853946 - DNA, 25 bp, Homo sapien
tgctgccgctgttgcaatgccaggt

SEQ ID NO: 3853947 - DNA, 25 bp, Homo sapien
ggtgtgtgtcgggagatggtggttt

SEQ ID NO: 3853948 - DNA, 25 bp, Homo sapien
gcagtccaggtgtgtgtcgggagat

SEQ ID NO: 3853949 - DNA, 25 bp, Homo sapien
gtcgggagatggtggtttgttctac

SEQ ID NO: 3853950 - DNA, 25 bp, Homo sapien
tgtgtcgggagatggtggtttgttc

SEQ ID NO: 3853951 - DNA, 25 bp, Homo sapien
tggttccgtctgaccgcgagtctgg

SEQ ID NO: 3853952 - DNA, 25 bp, Homo sapien
gagtctggtgcgcagaccggcccca

SEQ ID NO: 3853953 - DNA, 25 bp, Homo sapien
ctgcggatatagatgctcagtgaca

SEQ ID NO: 3853954 - DNA, 25 bp, Homo sapien
gacttgcttggcaggtctgcggata

SEQ ID NO: 3853955 - DNA, 25 bp, Homo sapien
ctaccatcgatccaatggtggtgac

SEQ ID NO: 3853956 - DNA, 25 bp, Homo sapien
gccaagaggttactaatcaggaagg

SEQ ID NO: 3853957 - DNA, 25 bp, Homo sapien
ctgccctcggaaccgccaagaggtt

SEQ ID NO: 3853958 - DNA, 25 bp, Homo sapien
tcaggaaggctctaccatcgatcca

SEQ ID NO: 3853959 - DNA, 25 bp, Homo sapien
gggatttgtgtgcattgtttttgtt

SEQ ID NO: 3853960 - DNA, 25 bp, Homo sapien
gcctcctgtgatttcggcgcgacca

SEQ ID NO: 3853961 - DNA, 25 bp, Homo sapien
ttcggcgcgaccagatcctctgcag

SEQ ID NO: 3853962 - DNA, 25 bp, Homo sapien
tgtttttgttgaagcctcctgtgat

SEQ ID NO: 3853963 - DNA, 25 bp, Homo sapien
gtcgcagcttgtggctgcctgtgtc

SEQ ID NO: 3853964 - DNA, 25 bp, Homo sapien
ccttctatactttctgtgttggcta

SEQ ID NO: 3853965 - DNA, 25 bp, Homo sapien
ttatcattaaaagctccttctatac

SEQ ID NO: 3853966 - DNA, 25 bp, Homo sapien
acagagatagaagtttatcattaaa

SEQ ID NO: 3853967 - DNA, 25 bp, Homo sapien
tgttgatccatcgacccccatttat

SEQ ID NO: 3853968 - DNA, 25 bp, Homo sapien
taagactatgtcaatatactgttaa

SEQ ID NO: 3853969 - DNA, 25 bp, Homo sapien
caatatactgttaattctctttggt

SEQ ID NO: 3853970 - DNA, 25 bp, Homo sapien
tacagggacaccctaccaagcacag

SEQ ID NO: 3853971 - DNA, 25 bp, Homo sapien
gcacagcctgagaagatacattaag

SEQ ID NO: 3853972 - DNA, 25 bp, Homo sapien
gtgttggtctttgcaaccttcctta

SEQ ID NO: 3853973 - DNA, 25 bp, Homo sapien
ataaaaagccttacactcagctgtg

SEQ ID NO: 3853974 - DNA, 25 bp, Homo sapien
gccttacactcagctgtgttggtct

SEQ ID NO: 3853975 - DNA, 25 bp, Homo sapien
cactcagctgtgttggtctttgcaa

SEQ ID NO: 3853976 - DNA, 25 bp, Homo sapien
acctagtctagtggtctcctattcc

SEQ ID NO: 3853977 - DNA, 25 bp, Homo sapien
agtctagtggtctcctattcccagg

SEQ ID NO: 3853978 - DNA, 25 bp, Homo sapien
gttttgaatttctatgtttgtgacc

SEQ ID NO: 3853979 - DNA, 25 bp, Homo sapien
tctatgtttgtgacctaggccagtt

SEQ ID NO: 3853980 - DNA, 25 bp, Homo sapien
tacacatacaaacacgttactgttg

SEQ ID NO: 3853981 - DNA, 25 bp, Homo sapien
tttcccctgtccatgattgaatgca

SEQ ID NO: 3853982 - DNA, 25 bp, Homo sapien
gatcatttgagagctagatgtagac

SEQ ID NO: 3853983 - DNA, 25 bp, Homo sapien
gattgttctcttgtatatccccata

SEQ ID NO: 3853984 - DNA, 25 bp, Homo sapien
ctattgcaaattgtatcattcctga

SEQ ID NO: 3853985 - DNA, 25 bp, Homo sapien
actgaataaggctaaatgaatactg

SEQ ID NO: 3853986 - DNA, 25 bp, Homo sapien
cctgattacacagaactttgtgggt

SEQ ID NO: 3853987 - DNA, 25 bp, Homo sapien
ccttgtgtgtcatttatttagagca

SEQ ID NO: 3853988 - DNA, 25 bp, Homo sapien
ctggattgcaatggctgatctcgtc

SEQ ID NO: 3853989 - DNA, 25 bp, Homo sapien
acccaagctggattgcaatggctga

SEQ ID NO: 3853990 - DNA, 25 bp, Homo sapien
caagctggattgcaatggctgatct

SEQ ID NO: 3853991 - DNA, 25 bp, Homo sapien
gctggattgcaatggctgatctcgt

SEQ ID NO: 3853992 - DNA, 25 bp, Homo sapien
gttgtatccaccgtcttcacagtgg

SEQ ID NO: 3853993 - DNA, 25 bp, Homo sapien
tcatgttgtatccaccgtcttcaca

SEQ ID NO: 3853994 - DNA, 25 bp, Homo sapien
catgttgtatccaccgtcttcacag

SEQ ID NO: 3853995 - DNA, 25 bp, Homo sapien
gtatccaccgtcttcacagtggcat

SEQ ID NO: 3853996 - DNA, 25 bp, Homo sapien
ctttcgtagcgaaagggccaggcgt

SEQ ID NO: 3853997 - DNA, 25 bp, Homo sapien
agtaagcgccgttcctccgggagat

SEQ ID NO: 3853998 - DNA, 25 bp, Homo sapien
ggagcgcgcacgcagaacgtcagcc

SEQ ID NO: 3853999 - DNA, 25 bp, Homo sapien
ttcgtagcgaaagggccaggcgtat

SEQ ID NO: 3854000 - DNA, 25 bp, Homo sapien
gcgtggtaaacgagcccagggctct

SEQ ID NO: 3854001 - DNA, 25 bp, Homo sapien
atcgtggcggctcccggcggcgtgg

SEQ ID NO: 3854002 - DNA, 25 bp, Homo sapien
ctctcgggagccatcgagtgtcgtg

SEQ ID NO: 3854003 - DNA, 25 bp, Homo sapien
gaggctttctccgtgcgtggtaaac

SEQ ID NO: 3854004 - DNA, 25 bp, Homo sapien
ctgaagtgctttgatacgtcttcag

SEQ ID NO: 3854005 - DNA, 25 bp, Homo sapien
tgctttgatacgtcttcagtgacag

SEQ ID NO: 3854006 - DNA, 25 bp, Homo sapien
agtgctttgatacgtcttcagtgac

SEQ ID NO: 3854007 - DNA, 25 bp, Homo sapien
tttgatacgtcttcagtgacagcca

SEQ ID NO: 3854008 - DNA, 25 bp, Homo sapien
gtcagtaactgaataaccgctttag

SEQ ID NO: 3854009 - DNA, 25 bp, Homo sapien
caagcattgtaatcagaaggggaag

SEQ ID NO: 3854010 - DNA, 25 bp, Homo sapien
ggagttcagtcagtaactgaataac

SEQ ID NO: 3854011 - DNA, 25 bp, Homo sapien
taaccgctttagataactcattacc

SEQ ID NO: 3854012 - DNA, 25 bp, Homo sapien
tggtgccagtgtatgataaaatcca

SEQ ID NO: 3854013 - DNA, 25 bp, Homo sapien
tgatataagaatgtttgaaggtgat

SEQ ID NO: 3854014 - DNA, 25 bp, Homo sapien
atgtagtgatgaggaatggtgttaa

SEQ ID NO: 3854015 - DNA, 25 bp, Homo sapien
gtttgaaggtgatgcatgtttgatt

SEQ ID NO: 3854016 - DNA, 25 bp, Homo sapien
ccaagccagtagatgtcagtatgat

SEQ ID NO: 3854017 - DNA, 25 bp, Homo sapien
tctactttcccagaatagcatctat

SEQ ID NO: 3854018 - DNA, 25 bp, Homo sapien
tcagtatgatgccttaaattaagtc

SEQ ID NO: 3854019 - DNA, 25 bp, Homo sapien
tattagttgtcctgatgtcaatgtt

SEQ ID NO: 3854020 - DNA, 25 bp, Homo sapien
gaaatgctcctgtgtatggtaaacc

SEQ ID NO: 3854021 - DNA, 25 bp, Homo sapien
tgaggagacctgttccttgaggctc

SEQ ID NO: 3854022 - DNA, 25 bp, Homo sapien
cattgactattggataaccgagtga

SEQ ID NO: 3854023 - DNA, 25 bp, Homo sapien
gagtgattcaccctctaaaccagaa

SEQ ID NO: 3854024 - DNA, 25 bp, Homo sapien
aaggccctacaatggtccttactgc

SEQ ID NO: 3854025 - DNA, 25 bp, Homo sapien
gatgtggagggctactcctccacct

SEQ ID NO: 3854026 - DNA, 25 bp, Homo sapien
gggtacggatgtggagggctactcc

SEQ ID NO: 3854027 - DNA, 25 bp, Homo sapien
ctcaaaaaggccctacaatggtcct

SEQ ID NO: 3854028 - DNA, 25 bp, Homo sapien
ttcgatatccttccgcttatgcgca

SEQ ID NO: 3854029 - DNA, 25 bp, Homo sapien
cattgggccttttcgatatccttcc

SEQ ID NO: 3854030 - DNA, 25 bp, Homo sapien
tcatcgtattatgcattgggccttt

SEQ ID NO: 3854031 - DNA, 25 bp, Homo sapien
tatccttccgcttatgcgcattcct

SEQ ID NO: 3854032 - DNA, 25 bp, Homo sapien
tttcatgagtgcagaggctttggga

SEQ ID NO: 3854033 - DNA, 25 bp, Homo sapien
gtttcatgagtgcagaggctttggg

SEQ ID NO: 3854034 - DNA, 25 bp, Homo sapien
cagtctcattctaccagcaaagcct

SEQ ID NO: 3854035 - DNA, 25 bp, Homo sapien
tgtgggtagatgttggaggcgttcc

SEQ ID NO: 3854036 - DNA, 25 bp, Homo sapien
tctcattctaccagcaaagcctgtt

SEQ ID NO: 3854037 - DNA, 25 bp, Homo sapien
caagaggcaggggaataatctgaat

SEQ ID NO: 3854038 - DNA, 25 bp, Homo sapien
tcttcagcaaatggcagggattgcc

SEQ ID NO: 3854039 - DNA, 25 bp, Homo sapien
tccagattgggacacgagcggttca

SEQ ID NO: 3854040 - DNA, 25 bp, Homo sapien
atgcaaagtggagccctatcccagc

SEQ ID NO: 3854041 - DNA, 25 bp, Homo sapien
gggactcacagcaactttcttcagc

SEQ ID NO: 3854042 - DNA, 25 bp, Homo sapien
aatgtacctacgatctgtaagcccc

SEQ ID NO: 3854043 - DNA, 25 bp, Homo sapien
gagggagtcatacccctgagccagt

SEQ ID NO: 3854044 - DNA, 25 bp, Homo sapien
gagccagttactgaccccagacttt

SEQ ID NO: 3854045 - DNA, 25 bp, Homo sapien
gattcactggcacataaacctcaga

SEQ ID NO: 3854046 - DNA, 25 bp, Homo sapien
gaagcagacagcaattctaccttgt

SEQ ID NO: 3854047 - DNA, 25 bp, Homo sapien
caataagaatacagtactggccact

SEQ ID NO: 3854048 - DNA, 25 bp, Homo sapien
ctagaggagatcattcccaggctgc

SEQ ID NO: 3854049 - DNA, 25 bp, Homo sapien
ccttccaaggccagatagagaagct

SEQ ID NO: 3854050 - DNA, 25 bp, Homo sapien
ttttcataacataaattggatcttt

SEQ ID NO: 3854051 - DNA, 25 bp, Homo sapien
tcacttcccagaggtaataactgct

SEQ ID NO: 3854052 - DNA, 25 bp, Homo sapien
ataaatcacactctgtggaaaggag

SEQ ID NO: 3854053 - DNA, 25 bp, Homo sapien
tcataacataaattggatctttttt

SEQ ID NO: 3854054 - DNA, 25 bp, Homo sapien
tcctgagttaaagcgatctgcctgt

SEQ ID NO: 3854055 - DNA, 25 bp, Homo sapien
aaatattatttatgcttctttggct

SEQ ID NO: 3854056 - DNA, 25 bp, Homo sapien
aaatgatccttccacacctggctaa

SEQ ID NO: 3854057 - DNA, 25 bp, Homo sapien
cctggcctattcctattatttaagt

SEQ ID NO: 3854058 - DNA, 25 bp, Homo sapien
cacatcatcataccctgttgtaggg

SEQ ID NO: 3854059 - DNA, 25 bp, Homo sapien
ggatttctccgtcatcaatagctga

SEQ ID NO: 3854060 - DNA, 25 bp, Homo sapien
aggatgtggaaaaccgcagatctag

SEQ ID NO: 3854061 - DNA, 25 bp, Homo sapien
tatcccaattttacgtgcggcattc

SEQ ID NO: 3854062 - DNA, 25 bp, Homo sapien
tgtctccattgggtagagtagctgg

SEQ ID NO: 3854063 - DNA, 25 bp, Homo sapien
taaggctggtgtgctagacgttatc

SEQ ID NO: 3854064 - DNA, 25 bp, Homo sapien
tagctgggtcgcaaggatcatgaag

SEQ ID NO: 3854065 - DNA, 25 bp, Homo sapien
tgtgaaaagccaactagcctcggtg

SEQ ID NO: 3854066 - DNA, 25 bp, Homo sapien
gactgtgccactaacagactgtggg

SEQ ID NO: 3854067 - DNA, 25 bp, Homo sapien
caaatggacagcgtgagaaggatca

SEQ ID NO: 3854068 - DNA, 25 bp, Homo sapien
tcacaatgaaccagggatcagcttc

SEQ ID NO: 3854069 - DNA, 25 bp, Homo sapien
ggacatctgtccgttcctggctaca

SEQ ID NO: 3854070 - DNA, 25 bp, Homo sapien
tagtatggaatacgtcatgaatttt

SEQ ID NO: 3854071 - DNA, 25 bp, Homo sapien
ccagcagttattggagatgtccttc

SEQ ID NO: 3854072 - DNA, 25 bp, Homo sapien
caaaactgagttgtaaggctgggca

SEQ ID NO: 3854073 - DNA, 25 bp, Homo sapien
gcatttggccatccagtgtcattgg

SEQ ID NO: 3854074 - DNA, 25 bp, Homo sapien
cacctgtaatcctgtgacctgataa

SEQ ID NO: 3854075 - DNA, 25 bp, Homo sapien
tcataggtggtgtacttccggcagg

SEQ ID NO: 3854076 - DNA, 25 bp, Homo sapien
aaatctagagtattgcttccccatg

SEQ ID NO: 3854077 - DNA, 25 bp, Homo sapien
ttccggcaggaggtatatatgtcta

SEQ ID NO: 3854078 - DNA, 25 bp, Homo sapien
ttagggcagaactacttcataggtg

SEQ ID NO: 3854079 - DNA, 25 bp, Homo sapien
gactagcgtgggcatttcatttata

SEQ ID NO: 3854080 - DNA, 25 bp, Homo sapien
ccattgcaatgtaggttgggcgaca

SEQ ID NO: 3854081 - DNA, 25 bp, Homo sapien
ttaaagggagtcttatgcatgaatt

SEQ ID NO: 3854082 - DNA, 25 bp, Homo sapien
ggatacttttgagctggccgccatg

SEQ ID NO: 3854083 - DNA, 25 bp, Homo sapien
aaaccataggtctctggcttccgtt

SEQ ID NO: 3854084 - DNA, 25 bp, Homo sapien
ctttgaaccacgatctttgatcacc

SEQ ID NO: 3854085 - DNA, 25 bp, Homo sapien
taaaccataggtctctggcttccgt

SEQ ID NO: 3854086 - DNA, 25 bp, Homo sapien
gctttgaaccacgatctttgatcac

SEQ ID NO: 3854087 - DNA, 25 bp, Homo sapien
agtgagctgagatcgtgccactgca

SEQ ID NO: 3854088 - DNA, 25 bp, Homo sapien
cttgtggggctgaggtgagaagact

SEQ ID NO: 3854089 - DNA, 25 bp, Homo sapien
cttgagcccagaaggttgagggtgc

SEQ ID NO: 3854090 - DNA, 25 bp, Homo sapien
ctgtagttccagatgcttgtggggc

SEQ ID NO: 3854091 - DNA, 25 bp, Homo sapien
ggaattactgagcttaaaagtgtaa

SEQ ID NO: 3854092 - DNA, 25 bp, Homo sapien
gaattggttctttaggatagatttc

SEQ ID NO: 3854093 - DNA, 25 bp, Homo sapien
tggaattactgagcttaaaagtgta

SEQ ID NO: 3854094 - DNA, 25 bp, Homo sapien
ggaggaccactttgagcctttggaa

SEQ ID NO: 3854095 - DNA, 25 bp, Homo sapien
tcacatgtataaggtggctccatag

SEQ ID NO: 3854096 - DNA, 25 bp, Homo sapien
tacctaagggagtgtaacagtctct

SEQ ID NO: 3854097 - DNA, 25 bp, Homo sapien
tggaagttaaggtttcctcagccac

SEQ ID NO: 3854098 - DNA, 25 bp, Homo sapien
ggcctagttcctaaagccacagtat

SEQ ID NO: 3854099 - DNA, 25 bp, Homo sapien
tagcccctggccagataactgcctg

SEQ ID NO: 3854100 - DNA, 25 bp, Homo sapien
gttaacttcaagtgggcaagctggg

SEQ ID NO: 3854101 - DNA, 25 bp, Homo sapien
gaactgaagaacctgatgtagcccc

SEQ ID NO: 3854102 - DNA, 25 bp, Homo sapien
aagaacagctaaaaccttgttgtgg

SEQ ID NO: 3854103 - DNA, 25 bp, Homo sapien
caagccatgggtattaggtgacagt

SEQ ID NO: 3854104 - DNA, 25 bp, Homo sapien
catgggtaccttatcaagcagatta

SEQ ID NO: 3854105 - DNA, 25 bp, Homo sapien
cattatttggataggcatgggtacc

SEQ ID NO: 3854106 - DNA, 25 bp, Homo sapien
ttgttctaatgctcgtgttttcttt

SEQ ID NO: 3854107 - DNA, 25 bp, Homo sapien
tttgttctaatgctcgtgttttctt

SEQ ID NO: 3854108 - DNA, 25 bp, Homo sapien
tgttctaatgctcgtgttttctttt

SEQ ID NO: 3854109 - DNA, 25 bp, Homo sapien
tgtcagctaagttttatgccccgca

SEQ ID NO: 3854110 - DNA, 25 bp, Homo sapien
tagaggccgctatggcgaacgttcc

SEQ ID NO: 3854111 - DNA, 25 bp, Homo sapien
tctgcgagaaattccaggcggcgct

SEQ ID NO: 3854112 - DNA, 25 bp, Homo sapien
ggagtcccgactgcaaacattgagg

SEQ ID NO: 3854113 - DNA, 25 bp, Homo sapien
tgaaccacatcgacacggaggagct

SEQ ID NO: 3854114 - DNA, 25 bp, Homo sapien
gattggctgctttagatttcttgat

SEQ ID NO: 3854115 - DNA, 25 bp, Homo sapien
aaagattgggaactattctatttgg

SEQ ID NO: 3854116 - DNA, 25 bp, Homo sapien
agtaaactgattaagttttaggcat

SEQ ID NO: 3854117 - DNA, 25 bp, Homo sapien
tagtatatgtgccagttattgccat

SEQ ID NO: 3854118 - DNA, 25 bp, Homo sapien
gagaaaccccagaattagtcaggct

SEQ ID NO: 3854119 - DNA, 25 bp, Homo sapien
aaagcagttccataaggttcatctg

SEQ ID NO: 3854120 - DNA, 25 bp, Homo sapien
ggttcatctgtagaagtctgttgac

SEQ ID NO: 3854121 - DNA, 25 bp, Homo sapien
gggcaaggtggcttacatctataac

SEQ ID NO: 3854122 - DNA, 25 bp, Homo sapien
aatttattgtgcatgggattttggc

SEQ ID NO: 3854123 - DNA, 25 bp, Homo sapien
atatctattgattgtataaggagag

SEQ ID NO: 3854124 - DNA, 25 bp, Homo sapien
ttgagacagtttaagtctaggatga

SEQ ID NO: 3854125 - DNA, 25 bp, Homo sapien
tgacagccattcctgtatatctatt

SEQ ID NO: 3854126 - DNA, 25 bp, Homo sapien
ccaatagctatgctttatggaggcc

SEQ ID NO: 3854127 - DNA, 25 bp, Homo sapien
caagtatcagttgcaaataaagctg

SEQ ID NO: 3854128 - DNA, 25 bp, Homo sapien
gaggccaggcactgtttatcagctg

SEQ ID NO: 3854129 - DNA, 25 bp, Homo sapien
gaacagaagagctatcatatgccct

SEQ ID NO: 3854130 - DNA, 25 bp, Homo sapien
gctatgtatgacactctgacccaga

SEQ ID NO: 3854131 - DNA, 25 bp, Homo sapien
tgctatgtatgacactctgacccag

SEQ ID NO: 3854132 - DNA, 25 bp, Homo sapien
ctctgctatgtatgacactctgacc

SEQ ID NO: 3854133 - DNA, 25 bp, Homo sapien
gattacagcaagaaagctgctctgc

SEQ ID NO: 3854134 - DNA, 25 bp, Homo sapien
gactaggagccctcaggaaacttag

SEQ ID NO: 3854135 - DNA, 25 bp, Homo sapien
cagttcctcaggcttaacaggaagc

SEQ ID NO: 3854136 - DNA, 25 bp, Homo sapien
ggcggaaggcgaaagagaagcaagc

SEQ ID NO: 3854137 - DNA, 25 bp, Homo sapien
caggaagcatgactaggagccctca

SEQ ID NO: 3854138 - DNA, 25 bp, Homo sapien
aaagctgtgcagtttggaaccggtg

SEQ ID NO: 3854139 - DNA, 25 bp, Homo sapien
gaacttttcttattgggtcagcact

SEQ ID NO: 3854140 - DNA, 25 bp, Homo sapien
gaaccggtgaactgtgtgatgccat

SEQ ID NO: 3854141 - DNA, 25 bp, Homo sapien
ggtcagcactatgtctttgaggcaa

SEQ ID NO: 3854142 - DNA, 25 bp, Homo sapien
tacctttatagccaggtgagtgcag

SEQ ID NO: 3854143 - DNA, 25 bp, Homo sapien
tgaacttgagatacagtcaactgag

SEQ ID NO: 3854144 - DNA, 25 bp, Homo sapien
gtcagacaggcccaattccattgtg

SEQ ID NO: 3854145 - DNA, 25 bp, Homo sapien
aatgctgggtaatgtacctggtaac

SEQ ID NO: 3854146 - DNA, 25 bp, Homo sapien
gctgatccccaccaggtctgacggg

SEQ ID NO: 3854147 - DNA, 25 bp, Homo sapien
cacgatagtgatcagaggacgtctc

SEQ ID NO: 3854148 - DNA, 25 bp, Homo sapien
aaattctgttccattcgacccaacg

SEQ ID NO: 3854149 - DNA, 25 bp, Homo sapien
tacttcctgtacttcgctgcctctg

SEQ ID NO: 3854150 - DNA, 25 bp, Homo sapien
ttgctctaggctgcccgggtttcca

SEQ ID NO: 3854151 - DNA, 25 bp, Homo sapien
ggagaacccacagacatgcataagc

SEQ ID NO: 3854152 - DNA, 25 bp, Homo sapien
acatgcataagcttgctctaggctg

SEQ ID NO: 3854153 - DNA, 25 bp, Homo sapien
tggggccttggagtatagaggaaga

SEQ ID NO: 3854154 - DNA, 25 bp, Homo sapien
tattccctcaccaaccacttctgtg

SEQ ID NO: 3854155 - DNA, 25 bp, Homo sapien
tccctgctcaggtacagatctggaa

SEQ ID NO: 3854156 - DNA, 25 bp, Homo sapien
aagtgggatgtttttggcatggttt

SEQ ID NO: 3854157 - DNA, 25 bp, Homo sapien
gctccaaatattccctcaccaacca

SEQ ID NO: 3854158 - DNA, 25 bp, Homo sapien
ctggagatccgacagccctggccta

SEQ ID NO: 3854159 - DNA, 25 bp, Homo sapien
tcgtagatggcccagggtagcaaaa

SEQ ID NO: 3854160 - DNA, 25 bp, Homo sapien
tggcatcctcgcaccagaactggtc

SEQ ID NO: 3854161 - DNA, 25 bp, Homo sapien
tactggaggttacatgctggcatcc

SEQ ID NO: 3854162 - DNA, 25 bp, Homo sapien
cccaggcagtgagtggccttgattc

SEQ ID NO: 3854163 - DNA, 25 bp, Homo sapien
tgagtggccttgattcctgtctccc

SEQ ID NO: 3854164 - DNA, 25 bp, Homo sapien
gtggccttgattcctgtctcccctg

SEQ ID NO: 3854165 - DNA, 25 bp, Homo sapien
gcagtgagtggccttgattcctgtc

SEQ ID NO: 3854166 - DNA, 25 bp, Homo sapien
ttcctgttcgtagccctgacaaaag

SEQ ID NO: 3854167 - DNA, 25 bp, Homo sapien
gccctgacaaaagtgtccagagttt

SEQ ID NO: 3854168 - DNA, 25 bp, Homo sapien
acagggtccaaagcaagccatgtgg

SEQ ID NO: 3854169 - DNA, 25 bp, Homo sapien
cgctgagggtgcacacagggtccaa

SEQ ID NO: 3854170 - DNA, 25 bp, Homo sapien
gcttgtgcccacatctgagcatgca

SEQ ID NO: 3854171 - DNA, 25 bp, Homo sapien
cacgcaatgccagatatgattcgac

SEQ ID NO: 3854172 - DNA, 25 bp, Homo sapien
aaaaggctctcagtatcgggctcaa

SEQ ID NO: 3854173 - DNA, 25 bp, Homo sapien
catgtgagtgactgcggcacaaggc

SEQ ID NO: 3854174 - DNA, 25 bp, Homo sapien
tgctggcagggtcgatcgcattctg

SEQ ID NO: 3854175 - DNA, 25 bp, Homo sapien
tatagatggcgccttctcccttgtc

SEQ ID NO: 3854176 - DNA, 25 bp, Homo sapien
tccatgcatccgtgtcttaatacca

SEQ ID NO: 3854177 - DNA, 25 bp, Homo sapien
tagagggtcaccaggcattggatca

SEQ ID NO: 3854178 - DNA, 25 bp, Homo sapien
tgtgcctggccgaaggaaatatttt

SEQ ID NO: 3854179 - DNA, 25 bp, Homo sapien
gtgcctggccgaaggaaatattttc

SEQ ID NO: 3854180 - DNA, 25 bp, Homo sapien
tacttcagaaagacgagaatccagg

SEQ ID NO: 3854181 - DNA, 25 bp, Homo sapien
tactctggatcaggcttcggctccg

SEQ ID NO: 3854182 - DNA, 25 bp, Homo sapien
gaacaggattaccaactagtagacg

SEQ ID NO: 3854183 - DNA, 25 bp, Homo sapien
gctccggctctggatcaggatctgg

SEQ ID NO: 3854184 - DNA, 25 bp, Homo sapien
ttcgctgaacttaacgctctgggtt

SEQ ID NO: 3854185 - DNA, 25 bp, Homo sapien
ccgcaagctatttcgctgaacttaa

SEQ ID NO: 3854186 - DNA, 25 bp, Homo sapien
gaacttaacgctctgggttgttgaa

SEQ ID NO: 3854187 - DNA, 25 bp, Homo sapien
catttccgtccgcaagctatttcgc

SEQ ID NO: 3854188 - DNA, 25 bp, Homo sapien
ttagctgggtgtcggcagtctctag

SEQ ID NO: 3854189 - DNA, 25 bp, Homo sapien
ccattttctggtagtagtcgtcagt

SEQ ID NO: 3854190 - DNA, 25 bp, Homo sapien
cagtctctaggttagatctcatttt

SEQ ID NO: 3854191 - DNA, 25 bp, Homo sapien
gaagcactagcctgggcattgtggt

SEQ ID NO: 3854192 - DNA, 25 bp, Homo sapien
tgttgtagtatgtacccatacttca

SEQ ID NO: 3854193 - DNA, 25 bp, Homo sapien
ctatatttgcagagttgagccacca

SEQ ID NO: 3854194 - DNA, 25 bp, Homo sapien
taaatggcatatactgtgtggcctt

SEQ ID NO: 3854195 - DNA, 25 bp, Homo sapien
gcagtcactacatgagaaccactaa

SEQ ID NO: 3854196 - DNA, 25 bp, Homo sapien
tcttgtcatcaaccggggttcagca

SEQ ID NO: 3854197 - DNA, 25 bp, Homo sapien
ttcttgtcatcaaccggggttcagc

SEQ ID NO: 3854198 - DNA, 25 bp, Homo sapien
cttgtcatcaaccggggttcagcac

SEQ ID NO: 3854199 - DNA, 25 bp, Homo sapien
catgggctcatcacaattagatgca

SEQ ID NO: 3854200 - DNA, 25 bp, Homo sapien
taaagcagtagtaacgtcccttata

SEQ ID NO: 3854201 - DNA, 25 bp, Homo sapien
gatgagcttggtgcctgtctaaggc

SEQ ID NO: 3854202 - DNA, 25 bp, Homo sapien
gagcttggtgcctgtctaaggcttt

SEQ ID NO: 3854203 - DNA, 25 bp, Homo sapien
caggaggacctgtgaagcatgtagt

SEQ ID NO: 3854204 - DNA, 25 bp, Homo sapien
tatggagtgtttcaccgcaggcact

SEQ ID NO: 3854205 - DNA, 25 bp, Homo sapien
ggcaaaagggtccatgtaccaccat

SEQ ID NO: 3854206 - DNA, 25 bp, Homo sapien
gcacttctgagtaccattccatggc

SEQ ID NO: 3854207 - DNA, 25 bp, Homo sapien
tcactcctgtcgttcaggtgggagt

SEQ ID NO: 3854208 - DNA, 25 bp, Homo sapien
atgtccagcctcaataagtaatttt

SEQ ID NO: 3854209 - DNA, 25 bp, Homo sapien
catgtccagcctcaataagtaattt

SEQ ID NO: 3854210 - DNA, 25 bp, Homo sapien
ctcctgtcgttcaggtgggagtgca

SEQ ID NO: 3854211 - DNA, 25 bp, Homo sapien
cattgtgactgtaaccactggcagc

SEQ ID NO: 3854212 - DNA, 25 bp, Homo sapien
tatagacttggacctttacctgcag

SEQ ID NO: 3854213 - DNA, 25 bp, Homo sapien
cactggcagcgtttggaagtctcta

SEQ ID NO: 3854214 - DNA, 25 bp, Homo sapien
tcaggagatgcttctagtgtgccca

SEQ ID NO: 3854215 - DNA, 25 bp, Homo sapien
tgtgcttcctgcctctagaattgtc

SEQ ID NO: 3854216 - DNA, 25 bp, Homo sapien
tgagaccctggaacaatttctaaaa

SEQ ID NO: 3854217 - DNA, 25 bp, Homo sapien
tctgcggtcaggcagtgagtcccct

SEQ ID NO: 3854218 - DNA, 25 bp, Homo sapien
ccagcggtgcctgcaagggttacta

SEQ ID NO: 3854219 - DNA, 25 bp, Homo sapien
gattgttcatccacaggagaactgg

SEQ ID NO: 3854220 - DNA, 25 bp, Homo sapien
ctgcagattgttcatccacaggaga

SEQ ID NO: 3854221 - DNA, 25 bp, Homo sapien
acaggagaactgggaggttttcagt

SEQ ID NO: 3854222 - DNA, 25 bp, Homo sapien
cacaggagaactgggaggttttcag

SEQ ID NO: 3854223 - DNA, 25 bp, Homo sapien
tacgtggctgcctcaaagggatgct

SEQ ID NO: 3854224 - DNA, 25 bp, Homo sapien
cctttcaccgggaatgtgcctggga

SEQ ID NO: 3854225 - DNA, 25 bp, Homo sapien
tagcacgtgttcttcaccctggata

SEQ ID NO: 3854226 - DNA, 25 bp, Homo sapien
ggtgacgtacgtggacgcactctgt

SEQ ID NO: 3854227 - DNA, 25 bp, Homo sapien
cctctcataccaccgcaagggctgt

SEQ ID NO: 3854228 - DNA, 25 bp, Homo sapien
acctctcataccaccgcaagggctg

SEQ ID NO: 3854229 - DNA, 25 bp, Homo sapien
ctccaccgtcgaggccacctctcat

SEQ ID NO: 3854230 - DNA, 25 bp, Homo sapien
caggatgggctccaccgtcgaggcc

SEQ ID NO: 3854231 - DNA, 25 bp, Homo sapien
tgaaggaggtgtgcggagccgtgtc

SEQ ID NO: 3854232 - DNA, 25 bp, Homo sapien
tgagtctcggcttctaaggcattct

SEQ ID NO: 3854233 - DNA, 25 bp, Homo sapien
tcctgtaagggcatctaagaatggg

SEQ ID NO: 3854234 - DNA, 25 bp, Homo sapien
tgaggacagcatcgtggtgaaggag

SEQ ID NO: 3854235 - DNA, 25 bp, Homo sapien
gaactagcccctcgatgtgatgtga

SEQ ID NO: 3854236 - DNA, 25 bp, Homo sapien
caggaaactgtgaaggaactagccc

SEQ ID NO: 3854237 - DNA, 25 bp, Homo sapien
gcacagaaggagaactaggaacccc

SEQ ID NO: 3854238 - DNA, 25 bp, Homo sapien
ctggcagatcagttggtcagagacc

SEQ ID NO: 3854239 - DNA, 25 bp, Homo sapien
cacattgttcaggtgaggcttgagc

SEQ ID NO: 3854240 - DNA, 25 bp, Homo sapien
taaagcgagttatgtcagcaccctg

SEQ ID NO: 3854241 - DNA, 25 bp, Homo sapien
gaggaactcacgttatgaactaggg

SEQ ID NO: 3854242 - DNA, 25 bp, Homo sapien
aatatatagaatctgcccatgtggc

SEQ ID NO: 3854243 - DNA, 25 bp, Homo sapien
gtgggaggcatgattgaagaaatag

SEQ ID NO: 3854244 - DNA, 25 bp, Homo sapien
tgggaggcatgattgaagaaataga

SEQ ID NO: 3854245 - DNA, 25 bp, Homo sapien
ttgtgggaggcatgattgaagaaat

SEQ ID NO: 3854246 - DNA, 25 bp, Homo sapien
tgtgggaggcatgattgaagaaata

SEQ ID NO: 3854247 - DNA, 25 bp, Homo sapien
gattattctgcatttctctagatct

SEQ ID NO: 3854248 - DNA, 25 bp, Homo sapien
atgaaatcaaactggccagatggaa

SEQ ID NO: 3854249 - DNA, 25 bp, Homo sapien
agcagattattctgcatttctctag

SEQ ID NO: 3854250 - DNA, 25 bp, Homo sapien
ttctgcatttctctagatctttgag

SEQ ID NO: 3854251 - DNA, 25 bp, Homo sapien
gcctagctctgtgatcatccatgat

SEQ ID NO: 3854252 - DNA, 25 bp, Homo sapien
atttgcctagctctgtgatcatcca

SEQ ID NO: 3854253 - DNA, 25 bp, Homo sapien
aatttgcctagctctgtgatcatcc

SEQ ID NO: 3854254 - DNA, 25 bp, Homo sapien
ttgcctagctctgtgatcatccatg

SEQ ID NO: 3854255 - DNA, 25 bp, Homo sapien
tcagccaggacattaatgtgcacca

SEQ ID NO: 3854256 - DNA, 25 bp, Homo sapien
agagcatcagccaggacattaatgt

SEQ ID NO: 3854257 - DNA, 25 bp, Homo sapien
catcagccaggacattaatgtgcac

SEQ ID NO: 3854258 - DNA, 25 bp, Homo sapien
gcatcagccaggacattaatgtgca

SEQ ID NO: 3854259 - DNA, 25 bp, Homo sapien
gtccttgcttcagagtcccacggac

SEQ ID NO: 3854260 - DNA, 25 bp, Homo sapien
gagtcccacggactgaagttgacag

SEQ ID NO: 3854261 - DNA, 25 bp, Homo sapien
ttgcttcagagtcccacggactgaa

SEQ ID NO: 3854262 - DNA, 25 bp, Homo sapien
ttcagagtcccacggactgaagttg

SEQ ID NO: 3854263 - DNA, 25 bp, Homo sapien
ctgcagaaccagaacggtggtccag

SEQ ID NO: 3854264 - DNA, 25 bp, Homo sapien
cagaaccagaacggtggtccagggc

SEQ ID NO: 3854265 - DNA, 25 bp, Homo sapien
tgcagaaccagaacggtggtccagg

SEQ ID NO: 3854266 - DNA, 25 bp, Homo sapien
gaaccagaacggtggtccagggctc

SEQ ID NO: 3854267 - DNA, 25 bp, Homo sapien
tgctgagagacacatatgaacctgg

SEQ ID NO: 3854268 - DNA, 25 bp, Homo sapien
gagccctgcggtggaattgattatc

SEQ ID NO: 3854269 - DNA, 25 bp, Homo sapien
tctggtagcttgcaggtgactcagc

SEQ ID NO: 3854270 - DNA, 25 bp, Homo sapien
tgatgatctcacacagacctgtcac

SEQ ID NO: 3854271 - DNA, 25 bp, Homo sapien
gctttgtgagccgtgtcgtatgacc

SEQ ID NO: 3854272 - DNA, 25 bp, Homo sapien
acaaaatcgtgtgtccgtggaacca

SEQ ID NO: 3854273 - DNA, 25 bp, Homo sapien
ggcaagcagctaagagtccgggatc

SEQ ID NO: 3854274 - DNA, 25 bp, Homo sapien
gtggaaccagtcctagccgcgtgtg

SEQ ID NO: 3854275 - DNA, 25 bp, Homo sapien
tccagtgtgcattgacaatgttaca

SEQ ID NO: 3854276 - DNA, 25 bp, Homo sapien
ttccagtgtgcattgacaatgttac

SEQ ID NO: 3854277 - DNA, 25 bp, Homo sapien
ccttccagtgtgcattgacaatgtt

SEQ ID NO: 3854278 - DNA, 25 bp, Homo sapien
accttccagtgtgcattgacaatgt

SEQ ID NO: 3854279 - DNA, 25 bp, Homo sapien
ttaatcaccatctacgtgggctgta

SEQ ID NO: 3854280 - DNA, 25 bp, Homo sapien
atctacgtgggctgtatctgacttc

SEQ ID NO: 3854281 - DNA, 25 bp, Homo sapien
caccatctacgtgggctgtatctga

SEQ ID NO: 3854282 - DNA, 25 bp, Homo sapien
taatcaccatctacgtgggctgtat

SEQ ID NO: 3854283 - DNA, 25 bp, Homo sapien
ccaggaaggcatttgagcttgcatc

SEQ ID NO: 3854284 - DNA, 25 bp, Homo sapien
tacatattcttgtatgccccaggaa

SEQ ID NO: 3854285 - DNA, 25 bp, Homo sapien
cagtgggctcccattatcatgtggc

SEQ ID NO: 3854286 - DNA, 25 bp, Homo sapien
gacccttactggatcctctgaagtg

SEQ ID NO: 3854287 - DNA, 25 bp, Homo sapien
gcagccaggcacaaggcttcagggt

SEQ ID NO: 3854288 - DNA, 25 bp, Homo sapien
cagggttcaataggcacctatctca

SEQ ID NO: 3854289 - DNA, 25 bp, Homo sapien
caaggcttcagggttcaataggcac

SEQ ID NO: 3854290 - DNA, 25 bp, Homo sapien
tcaataggcacctatctcagtccat

SEQ ID NO: 3854291 - DNA, 25 bp, Homo sapien
gacaccacactctttctaacaactt

SEQ ID NO: 3854292 - DNA, 25 bp, Homo sapien
cccacaagagtgatgattcacttca

SEQ ID NO: 3854293 - DNA, 25 bp, Homo sapien
ggaagtgttgtgtgcaaagagatca

SEQ ID NO: 3854294 - DNA, 25 bp, Homo sapien
tgttattttgggaactagtccattc

SEQ ID NO: 3854295 - DNA, 25 bp, Homo sapien
tttggtgggggcaagcaaaccatac

SEQ ID NO: 3854296 - DNA, 25 bp, Homo sapien
tgggggcaagcaaaccatacccaaa

SEQ ID NO: 3854297 - DNA, 25 bp, Homo sapien
aaccatacccaaaccatagccctga

SEQ ID NO: 3854298 - DNA, 25 bp, Homo sapien
catacccaaaccatagccctgatcc

SEQ ID NO: 3854299 - DNA, 25 bp, Homo sapien
catgaacaaagtctccttagtgtga

SEQ ID NO: 3854300 - DNA, 25 bp, Homo sapien
cagccatgaacaaagtctccttagt

SEQ ID NO: 3854301 - DNA, 25 bp, Homo sapien
ccagccatgaacaaagtctccttag

SEQ ID NO: 3854302 - DNA, 25 bp, Homo sapien
gccatgaacaaagtctccttagtgt

SEQ ID NO: 3854303 - DNA, 25 bp, Homo sapien
cttccttggtgggtgtgacccatgg

SEQ ID NO: 3854304 - DNA, 25 bp, Homo sapien
ggcaagccggaatccagagcgaaac

SEQ ID NO: 3854305 - DNA, 25 bp, Homo sapien
ctgttgactctcgtggagagggagg

SEQ ID NO: 3854306 - DNA, 25 bp, Homo sapien
tgggagtcagctcgagcttatcttc

SEQ ID NO: 3854307 - DNA, 25 bp, Homo sapien
tggtagagctcatggccaaccagaa

SEQ ID NO: 3854308 - DNA, 25 bp, Homo sapien
ggcagtagatgtcctcctggaagct

SEQ ID NO: 3854309 - DNA, 25 bp, Homo sapien
cagcagatggcaaacgtcagcacca

SEQ ID NO: 3854310 - DNA, 25 bp, Homo sapien
ccagaagagtgccaggtagacttgc

SEQ ID NO: 3854311 - DNA, 25 bp, Homo sapien
tggctacatgatgtggttaacccat

SEQ ID NO: 3854312 - DNA, 25 bp, Homo sapien
ctggctacatgatgtggttaaccca

SEQ ID NO: 3854313 - DNA, 25 bp, Homo sapien
cttcttcatggcctgcaggtggcgc

SEQ ID NO: 3854314 - DNA, 25 bp, Homo sapien
gcctgcaggtggcgcaggttggcac

SEQ ID NO: 3854315 - DNA, 25 bp, Homo sapien
tggcctgcaggtggcgcaggttggc

SEQ ID NO: 3854316 - DNA, 25 bp, Homo sapien
catggcctgcaggtggcgcaggttg

SEQ ID NO: 3854317 - DNA, 25 bp, Homo sapien
gagcgtgaggccgatgacgctgtag

SEQ ID NO: 3854318 - DNA, 25 bp, Homo sapien
gccgatgacgctgtaggctacaaac

SEQ ID NO: 3854319 - DNA, 25 bp, Homo sapien
tgacgctgtaggctacaaacatcac

SEQ ID NO: 3854320 - DNA, 25 bp, Homo sapien
tgaggccgatgacgctgtaggctac

SEQ ID NO: 3854321 - DNA, 25 bp, Homo sapien
gagggcgatcaccacgaggtggtac

SEQ ID NO: 3854322 - DNA, 25 bp, Homo sapien
tagatgagggcgatcaccacgaggt

SEQ ID NO: 3854323 - DNA, 25 bp, Homo sapien
cgcgagcggcaggaagtagatgagg

SEQ ID NO: 3854324 - DNA, 25 bp, Homo sapien
ggaagtagatgagggcgatcaccac

SEQ ID NO: 3854325 - DNA, 25 bp, Homo sapien
gtctgccagcgcctggtcctgggac

SEQ ID NO: 3854326 - DNA, 25 bp, Homo sapien
gggcactgtggagccgcccctgcgg

SEQ ID NO: 3854327 - DNA, 25 bp, Homo sapien
gggcgactccgaagtctgccagcgc

SEQ ID NO: 3854328 - DNA, 25 bp, Homo sapien
cattgggtagcctgtgtgccaggag

SEQ ID NO: 3854329 - DNA, 25 bp, Homo sapien
caaatcgtaggctgtgactcacgta

SEQ ID NO: 3854330 - DNA, 25 bp, Homo sapien
tgtcaaccttgatgttactccacaa

SEQ ID NO: 3854331 - DNA, 25 bp, Homo sapien
gactcacgtagcgttcttgcctgtt

SEQ ID NO: 3854332 - DNA, 25 bp, Homo sapien
gctggagcacgaataccctttccct

SEQ ID NO: 3854333 - DNA, 25 bp, Homo sapien
cacttggtggcaccctggtccatgg

SEQ ID NO: 3854334 - DNA, 25 bp, Homo sapien
aggaggagcgtcttgcccccgctgt

SEQ ID NO: 3854335 - DNA, 25 bp, Homo sapien
tccatggtgacggtggagtagaagc

SEQ ID NO: 3854336 - DNA, 25 bp, Homo sapien
ctgtcttcgggccaggccaccacgc

SEQ ID NO: 3854337 - DNA, 25 bp, Homo sapien
ctgaaagccgaggctggaaggggtg

SEQ ID NO: 3854338 - DNA, 25 bp, Homo sapien
cggcagcaatggcggtcatggagta

SEQ ID NO: 3854339 - DNA, 25 bp, Homo sapien
tgtcggcagcaatggcggtcatgga

SEQ ID NO: 3854340 - DNA, 25 bp, Homo sapien
gtcggcagcaatggcggtcatggag

SEQ ID NO: 3854341 - DNA, 25 bp, Homo sapien
ctgtcggcagcaatggcggtcatgg

SEQ ID NO: 3854342 - DNA, 25 bp, Homo sapien
tggaagtagcagaaggcacggccaa

SEQ ID NO: 3854343 - DNA, 25 bp, Homo sapien
ttctggaagtagcagaaggcacggc

SEQ ID NO: 3854344 - DNA, 25 bp, Homo sapien
gtagcagaaggcacggccaaagtac

SEQ ID NO: 3854345 - DNA, 25 bp, Homo sapien
gaagtagcagaaggcacggccaaag

SEQ ID NO: 3854346 - DNA, 25 bp, Homo sapien
cagatgttgtggctggcatagacaa

SEQ ID NO: 3854347 - DNA, 25 bp, Homo sapien
cagccagcgccagattgacgatgaa

SEQ ID NO: 3854348 - DNA, 25 bp, Homo sapien
tcagccagcgccagattgacgatga

SEQ ID NO: 3854349 - DNA, 25 bp, Homo sapien
gacaaagttgaaggcggcattgaag

SEQ ID NO: 3854350 - DNA, 25 bp, Homo sapien
gccaggtaggctgtggcccacagtg

SEQ ID NO: 3854351 - DNA, 25 bp, Homo sapien
tgtgatgcccgtggtgttgctctca

SEQ ID NO: 3854352 - DNA, 25 bp, Homo sapien
tctcagggccagatgagatattggc

SEQ ID NO: 3854353 - DNA, 25 bp, Homo sapien
gacgatggcattacccgtcacggcc

SEQ ID NO: 3854354 - DNA, 25 bp, Homo sapien
tcagaggaatgcacagcgggagtct

SEQ ID NO: 3854355 - DNA, 25 bp, Homo sapien
tctggagtccacaggtcaatggcgc

SEQ ID NO: 3854356 - DNA, 25 bp, Homo sapien
ggtgacaagttaggactcgaaccca

SEQ ID NO: 3854357 - DNA, 25 bp, Homo sapien
tggaacaaaggacctggctcctcgg

SEQ ID NO: 3854358 - DNA, 25 bp, Homo sapien
agcatcgcgggacactagcgctgag

SEQ ID NO: 3854359 - DNA, 25 bp, Homo sapien
gacagcatcgcgggacactagcgct

SEQ ID NO: 3854360 - DNA, 25 bp, Homo sapien
tcacagacagcatcgcgggacacta

SEQ ID NO: 3854361 - DNA, 25 bp, Homo sapien
cacagacagcatcgcgggacactag

SEQ ID NO: 3854362 - DNA, 25 bp, Homo sapien
ggttggcaaagggtcagcccctctg

SEQ ID NO: 3854363 - DNA, 25 bp, Homo sapien
gggtgccaggaggtggccgaagtga

SEQ ID NO: 3854364 - DNA, 25 bp, Homo sapien
ccgaagtgagaggaggacgtggggt

SEQ ID NO: 3854365 - DNA, 25 bp, Homo sapien
gggtcagcccctctgctgaaaggct

SEQ ID NO: 3854366 - DNA, 25 bp, Homo sapien
tccccttgtcttgcctttactgttc

SEQ ID NO: 3854367 - DNA, 25 bp, Homo sapien
ctcaggtcttggatcgcgtcttgtt

SEQ ID NO: 3854368 - DNA, 25 bp, Homo sapien
atcgaaaccacttccttgatcacct

SEQ ID NO: 3854369 - DNA, 25 bp, Homo sapien
tttactgttctgtcggcctccacgt

SEQ ID NO: 3854370 - DNA, 25 bp, Homo sapien
ctaggagtggccagaacgttgtcag

SEQ ID NO: 3854371 - DNA, 25 bp, Homo sapien
taggagtggccagaacgttgtcagt

SEQ ID NO: 3854372 - DNA, 25 bp, Homo sapien
ggagtggccagaacgttgtcagtgt

SEQ ID NO: 3854373 - DNA, 25 bp, Homo sapien
gagtggccagaacgttgtcagtgtc

SEQ ID NO: 3854374 - DNA, 25 bp, Homo sapien
catcgggctccagcagaatctgtcc

SEQ ID NO: 3854375 - DNA, 25 bp, Homo sapien
ctcaacatcgggctccagcagaatc

SEQ ID NO: 3854376 - DNA, 25 bp, Homo sapien
tcatttctcaacatcgggctccagc

SEQ ID NO: 3854377 - DNA, 25 bp, Homo sapien
aacatcgggctccagcagaatctgt

SEQ ID NO: 3854378 - DNA, 25 bp, Homo sapien
gaaatccaacttattactcctgggc

SEQ ID NO: 3854379 - DNA, 25 bp, Homo sapien
gtcctcatctcgtccagctggcagg

SEQ ID NO: 3854380 - DNA, 25 bp, Homo sapien
ctgagtcctcatctcgtccagctgg

SEQ ID NO: 3854381 - DNA, 25 bp, Homo sapien
gcaacttgatcttgactctgagtcc

SEQ ID NO: 3854382 - DNA, 25 bp, Homo sapien
gccgtccatagtgccagggcatctg

SEQ ID NO: 3854383 - DNA, 25 bp, Homo sapien
tactggtcattaatctacacaggtc

SEQ ID NO: 3854384 - DNA, 25 bp, Homo sapien
ttggcgcttagttgggcattgggtc

SEQ ID NO: 3854385 - DNA, 25 bp, Homo sapien
ctgggccctgggagtttggcgctta

SEQ ID NO: 3854386 - DNA, 25 bp, Homo sapien
tgctgcttgagaggtgggttcctgg

SEQ ID NO: 3854387 - DNA, 25 bp, Homo sapien
ctgcttgagaggtgggttcctggca

SEQ ID NO: 3854388 - DNA, 25 bp, Homo sapien
ggcctcagacaaggcaaagcccaga

SEQ ID NO: 3854389 - DNA, 25 bp, Homo sapien
agctgctgcttgagaggtgggttcc

SEQ ID NO: 3854390 - DNA, 25 bp, Homo sapien
aaacacagttccaatgtcagcccct

SEQ ID NO: 3854391 - DNA, 25 bp, Homo sapien
cacagttccaatgtcagcccctgaa

SEQ ID NO: 3854392 - DNA, 25 bp, Homo sapien
caatgtccccagagacaacactggt

SEQ ID NO: 3854393 - DNA, 25 bp, Homo sapien
tgctgtgtcaatgtccccagagaca

SEQ ID NO: 3854394 - DNA, 25 bp, Homo sapien
tagggagttgctgtaggaagctgtt

SEQ ID NO: 3854395 - DNA, 25 bp, Homo sapien
agggagttgctgtaggaagctgttt

SEQ ID NO: 3854396 - DNA, 25 bp, Homo sapien
gtagggagttgctgtaggaagctgt

SEQ ID NO: 3854397 - DNA, 25 bp, Homo sapien
cacaggcccgattagacccctggta

SEQ ID NO: 3854398 - DNA, 25 bp, Homo sapien
caggcccgattagacccctggtaca

SEQ ID NO: 3854399 - DNA, 25 bp, Homo sapien
agacacaggcccgattagacccctg

SEQ ID NO: 3854400 - DNA, 25 bp, Homo sapien
aggcagacacaggcccgattagacc

SEQ ID NO: 3854401 - DNA, 25 bp, Homo sapien
acaggtgcgatttttctttacttgc

SEQ ID NO: 3854402 - DNA, 25 bp, Homo sapien
tcctccgtgttaccgagtcttctta

SEQ ID NO: 3854403 - DNA, 25 bp, Homo sapien
tcttcttaaacaggtgcgatttttc

SEQ ID NO: 3854404 - DNA, 25 bp, Homo sapien
ttggttcccatagggacaaggctgt

SEQ ID NO: 3854405 - DNA, 25 bp, Homo sapien
gagcacagctaacttccctgaggct

SEQ ID NO: 3854406 - DNA, 25 bp, Homo sapien
tttcagtgtcccctagtactctatc

SEQ ID NO: 3854407 - DNA, 25 bp, Homo sapien
ttggtaccctcagactgccctggga

SEQ ID NO: 3854408 - DNA, 25 bp, Homo sapien
gggagcacagctaacttccctgagg

SEQ ID NO: 3854409 - DNA, 25 bp, Homo sapien
gacatgatgatcagtaaggagaccc

SEQ ID NO: 3854410 - DNA, 25 bp, Homo sapien
gaagtcagtttaaggctcaggcagc

SEQ ID NO: 3854411 - DNA, 25 bp, Homo sapien
ggcacttagccttgaaacatagcag

SEQ ID NO: 3854412 - DNA, 25 bp, Homo sapien
aactcagagggtctattggaaagcc

SEQ ID NO: 3854413 - DNA, 25 bp, Homo sapien
gatattagctctttgtaagatggat

SEQ ID NO: 3854414 - DNA, 25 bp, Homo sapien
tagctctttgtaagatggatagatt

SEQ ID NO: 3854415 - DNA, 25 bp, Homo sapien
gctctttgtaagatggatagattgc

SEQ ID NO: 3854416 - DNA, 25 bp, Homo sapien
tggatattagctctttgtaagatgg

SEQ ID NO: 3854417 - DNA, 25 bp, Homo sapien
gatacaacagccaacctaatgggtg

SEQ ID NO: 3854418 - DNA, 25 bp, Homo sapien
tgaattacatcaccagctttctggt

SEQ ID NO: 3854419 - DNA, 25 bp, Homo sapien
ggacatcggtgctcctatctcttgg

SEQ ID NO: 3854420 - DNA, 25 bp, Homo sapien
ttagagcaggacttacaacattagc

SEQ ID NO: 3854421 - DNA, 25 bp, Homo sapien
tgggtgtcatgtacccgataggaag

SEQ ID NO: 3854422 - DNA, 25 bp, Homo sapien
gccttgtcaaagagctccttcccag

SEQ ID NO: 3854423 - DNA, 25 bp, Homo sapien
ctgggaattgggtgtcatgtacccg

SEQ ID NO: 3854424 - DNA, 25 bp, Homo sapien
catgtacccgataggaagccaagcc

SEQ ID NO: 3854425 - DNA, 25 bp, Homo sapien
taagaacaccggtcctggtcgggca

SEQ ID NO: 3854426 - DNA, 25 bp, Homo sapien
aacaccggtcctggtcgggcatggt

SEQ ID NO: 3854427 - DNA, 25 bp, Homo sapien
cttataagaacaccggtcctggtcg

SEQ ID NO: 3854428 - DNA, 25 bp, Homo sapien
tcttataagaacaccggtcctggtc

SEQ ID NO: 3854429 - DNA, 25 bp, Homo sapien
aattatggaggcccgaagtctgaga

SEQ ID NO: 3854430 - DNA, 25 bp, Homo sapien
agttcttgtgatggcccttagggca

SEQ ID NO: 3854431 - DNA, 25 bp, Homo sapien
gacctgcacggttgagttcttgtga

SEQ ID NO: 3854432 - DNA, 25 bp, Homo sapien
tagggcagttgcagacagccatctt

SEQ ID NO: 3854433 - DNA, 25 bp, Homo sapien
agtctgagatcaagacctgcacggt

SEQ ID NO: 3854434 - DNA, 25 bp, Homo sapien
ggcaaagttaggaacgattgagtac

SEQ ID NO: 3854435 - DNA, 25 bp, Homo sapien
tactggatagacctactttctgtga

SEQ ID NO: 3854436 - DNA, 25 bp, Homo sapien
ggtcactggagtcccagaaagtgtg

SEQ ID NO: 3854437 - DNA, 25 bp, Homo sapien
tcactggagtcccagaaagtgtgag

SEQ ID NO: 3854438 - DNA, 25 bp, Homo sapien
ctgccatatgtgattgaccatggga

SEQ ID NO: 3854439 - DNA, 25 bp, Homo sapien
gccatatgtgattgaccatgggagc

SEQ ID NO: 3854440 - DNA, 25 bp, Homo sapien
gtgattgaccatgggagcttgagca

SEQ ID NO: 3854441 - DNA, 25 bp, Homo sapien
ttgaccatgggagcttgagcatggg

SEQ ID NO: 3854442 - DNA, 25 bp, Homo sapien
ctgtgggagacccagtaagggtagg

SEQ ID NO: 3854443 - DNA, 25 bp, Homo sapien
ggggggtcgagtttgtcagggctga

SEQ ID NO: 3854444 - DNA, 25 bp, Homo sapien
aggggggtcgagtttgtcagggctg

SEQ ID NO: 3854445 - DNA, 25 bp, Homo sapien
tgaggggggtcgagtttgtcagggc

SEQ ID NO: 3854446 - DNA, 25 bp, Homo sapien
ccttgaggggggtcgagtttgtcag

SEQ ID NO: 3854447 - DNA, 25 bp, Homo sapien
ctgtgtcaaggggacagaggcgtag

SEQ ID NO: 3854448 - DNA, 25 bp, Homo sapien
tgagggatagagtctgtgtcaaggg

SEQ ID NO: 3854449 - DNA, 25 bp, Homo sapien
caaggggacagaggcgtagccatcc

SEQ ID NO: 3854450 - DNA, 25 bp, Homo sapien
ctgagggatagagtctgtgtcaagg

SEQ ID NO: 3854451 - DNA, 25 bp, Homo sapien
gacaaacgagctggattttcatgct

SEQ ID NO: 3854452 - DNA, 25 bp, Homo sapien
tcatgcttggtggacgtgaatgaag

SEQ ID NO: 3854453 - DNA, 25 bp, Homo sapien
gaatggagacaaacgagctggattt

SEQ ID NO: 3854454 - DNA, 25 bp, Homo sapien
ctaggcctttagcgggaagaatgga

SEQ ID NO: 3854455 - DNA, 25 bp, Homo sapien
aagctttcggtagattatttgtcat

SEQ ID NO: 3854456 - DNA, 25 bp, Homo sapien
cctgaaagctttcggtagattattt

SEQ ID NO: 3854457 - DNA, 25 bp, Homo sapien
gcccctgaaagctttcggtagatta

SEQ ID NO: 3854458 - DNA, 25 bp, Homo sapien
tgggcccctgaaagctttcggtaga

SEQ ID NO: 3854459 - DNA, 25 bp, Homo sapien
taaataccacttatggaggcttaga

SEQ ID NO: 3854460 - DNA, 25 bp, Homo sapien
gaaggctggataagcatgtttaatc

SEQ ID NO: 3854461 - DNA, 25 bp, Homo sapien
gaatttgaggcaaataaagagctaa

SEQ ID NO: 3854462 - DNA, 25 bp, Homo sapien
aagtctcatgtctcggccacctgag

SEQ ID NO: 3854463 - DNA, 25 bp, Homo sapien
caatggctccgaaaagtgcacgagg

SEQ ID NO: 3854464 - DNA, 25 bp, Homo sapien
gctcacgtttcaggcgcagttcgca

SEQ ID NO: 3854465 - DNA, 25 bp, Homo sapien
gaacaagtgcttttgagggccgccg

SEQ ID NO: 3854466 - DNA, 25 bp, Homo sapien
gctttaaggcagagtgaggcgccct

SEQ ID NO: 3854467 - DNA, 25 bp, Homo sapien
gcgtttgagtcagcgcccagatgta

SEQ ID NO: 3854468 - DNA, 25 bp, Homo sapien
tgctcagtgccaactcgctcttagg

SEQ ID NO: 3854469 - DNA, 25 bp, Homo sapien
tacaagctgtggtccgctatgcgca

SEQ ID NO: 3854470 - DNA, 25 bp, Homo sapien
ctcaagcaggcggaaaaggtggccc

SEQ ID NO: 3854471 - DNA, 25 bp, Homo sapien
ggtaagtttgagtccgtcactgggc

SEQ ID NO: 3854472 - DNA, 25 bp, Homo sapien
ttgagtccgtcactgggcgcagtcc

SEQ ID NO: 3854473 - DNA, 25 bp, Homo sapien
tcagagggaagggtaagtttgagtc

SEQ ID NO: 3854474 - DNA, 25 bp, Homo sapien
actgggcgcagtccgcgattccgag

SEQ ID NO: 3854475 - DNA, 25 bp, Homo sapien
gtccctcggaggcctccaaatatta

SEQ ID NO: 3854476 - DNA, 25 bp, Homo sapien
cccgctgggtcagaggatccctctt

SEQ ID NO: 3854477 - DNA, 25 bp, Homo sapien
cgctgggtcagaggatccctctttc

SEQ ID NO: 3854478 - DNA, 25 bp, Homo sapien
ctgcccgtccctcggaggcctccaa

SEQ ID NO: 3854479 - DNA, 25 bp, Homo sapien
gagctcagcgggcttctggtcgcca

SEQ ID NO: 3854480 - DNA, 25 bp, Homo sapien
tttctaccggcgcaaaagaatagag

SEQ ID NO: 3854481 - DNA, 25 bp, Homo sapien
gcttctggtcgccaagttcagctga

SEQ ID NO: 3854482 - DNA, 25 bp, Homo sapien
agagcgatgagcagcgagggccgtg

SEQ ID NO: 3854483 - DNA, 25 bp, Homo sapien
tctgtttgctctctcgagggcgggc

SEQ ID NO: 3854484 - DNA, 25 bp, Homo sapien
gcacgctttatctgcttcgcccggg

SEQ ID NO: 3854485 - DNA, 25 bp, Homo sapien
tgagaccgcagggatttcctgagca

SEQ ID NO: 3854486 - DNA, 25 bp, Homo sapien
tgagcagcaagtcgtgtgccccttg

SEQ ID NO: 3854487 - DNA, 25 bp, Homo sapien
ttattgaaagcatatggtctccagg

SEQ ID NO: 3854488 - DNA, 25 bp, Homo sapien
tattgaaagcatatggtctccaggg

SEQ ID NO: 3854489 - DNA, 25 bp, Homo sapien
attgaaagcatatggtctccagggg

SEQ ID NO: 3854490 - DNA, 25 bp, Homo sapien
ttgaaagcatatggtctccaggggc

SEQ ID NO: 3854491 - DNA, 25 bp, Homo sapien
cttccgcaggctggtgctgcccagc

SEQ ID NO: 3854492 - DNA, 25 bp, Homo sapien
gcgcttccgcaggctggtgctgccc

SEQ ID NO: 3854493 - DNA, 25 bp, Homo sapien
cgcttccgcaggctggtgctgccca

SEQ ID NO: 3854494 - DNA, 25 bp, Homo sapien
gcttccgcaggctggtgctgcccag

SEQ ID NO: 3854495 - DNA, 25 bp, Homo sapien
cttgccctttggcgcgttgcgccac

SEQ ID NO: 3854496 - DNA, 25 bp, Homo sapien
gctcttgccctttggcgcgttgcgc

SEQ ID NO: 3854497 - DNA, 25 bp, Homo sapien
tccagtttggagctcttgccctttg

SEQ ID NO: 3854498 - DNA, 25 bp, Homo sapien
tcttgccctttggcgcgttgcgcca

SEQ ID NO: 3854499 - DNA, 25 bp, Homo sapien
ctggacggagcggagagggttggaa

SEQ ID NO: 3854500 - DNA, 25 bp, Homo sapien
ggtgctcgctgggcatcgcctgacc

SEQ ID NO: 3854501 - DNA, 25 bp, Homo sapien
gggctcttgaactctcggatggtga

SEQ ID NO: 3854502 - DNA, 25 bp, Homo sapien
aagagcgcggcttgccaaaaggcgg

SEQ ID NO: 3854503 - DNA, 25 bp, Homo sapien
ggcgggtacaccgggaggattctgc

SEQ ID NO: 3854504 - DNA, 25 bp, Homo sapien
tgcttgtctccttagcaggttgcat

SEQ ID NO: 3854505 - DNA, 25 bp, Homo sapien
tgaggcgcactaggggcgggcgggt

SEQ ID NO: 3854506 - DNA, 25 bp, Homo sapien
cgggtacaccgggaggattctgctt

SEQ ID NO: 3854507 - DNA, 25 bp, Homo sapien
caggcttgagatggcagatgagctc

SEQ ID NO: 3854508 - DNA, 25 bp, Homo sapien
accctggtgcctcctccgacgccca

SEQ ID NO: 3854509 - DNA, 25 bp, Homo sapien
aggcttgagatggcagatgagctct

SEQ ID NO: 3854510 - DNA, 25 bp, Homo sapien
tgcctggccggtcctcttttcccca

SEQ ID NO: 3854511 - DNA, 25 bp, Homo sapien
gagactatatcaaattcatccttga

SEQ ID NO: 3854512 - DNA, 25 bp, Homo sapien
taaagtgcaaggcagggagactata

SEQ ID NO: 3854513 - DNA, 25 bp, Homo sapien
ttagtttgtccttaatggtccattc

SEQ ID NO: 3854514 - DNA, 25 bp, Homo sapien
tccttaatggtccattctttatgcc

SEQ ID NO: 3854515 - DNA, 25 bp, Homo sapien
aaggttaatgctaattagctttaca

SEQ ID NO: 3854516 - DNA, 25 bp, Homo sapien
ggttaatgctaattagctttacagt

SEQ ID NO: 3854517 - DNA, 25 bp, Homo sapien
ctttaaaggttaatgctaattagct

SEQ ID NO: 3854518 - DNA, 25 bp, Homo sapien
gttaatgctaattagctttacagtg

SEQ ID NO: 3854519 - DNA, 25 bp, Homo sapien
gggaaataatatagagaactaggga

SEQ ID NO: 3854520 - DNA, 25 bp, Homo sapien
ctagggagctgatcaggaaaatgat

SEQ ID NO: 3854521 - DNA, 25 bp, Homo sapien
tagtatgcattagttttgttgttaa

SEQ ID NO: 3854522 - DNA, 25 bp, Homo sapien
tatagagaactagggagctgatcag

SEQ ID NO: 3854523 - DNA, 25 bp, Homo sapien
taagtttgacaaagttatgtaattg

SEQ ID NO: 3854524 - DNA, 25 bp, Homo sapien
tgacaaagttatgtaattgttttac

SEQ ID NO: 3854525 - DNA, 25 bp, Homo sapien
gatatataggattctaacctataaa

SEQ ID NO: 3854526 - DNA, 25 bp, Homo sapien
gaagatatataggattctaacctat

SEQ ID NO: 3854527 - DNA, 25 bp, Homo sapien
gctaagtggagtgaaaaaatgctca

SEQ ID NO: 3854528 - DNA, 25 bp, Homo sapien
aaaatgctcaagtcaacagaggctc

SEQ ID NO: 3854529 - DNA, 25 bp, Homo sapien
atgctcaagtcaacagaggctcctg

SEQ ID NO: 3854530 - DNA, 25 bp, Homo sapien
tagaatagaggatacacctgctaag

SEQ ID NO: 3854531 - DNA, 25 bp, Homo sapien
agtagagtctacctactaagggctt

SEQ ID NO: 3854532 - DNA, 25 bp, Homo sapien
agagtctacctactaagggctttga

SEQ ID NO: 3854533 - DNA, 25 bp, Homo sapien
taagtagagtctacctactaagggc

SEQ ID NO: 3854534 - DNA, 25 bp, Homo sapien
acagaaattaagtagagtctaccta

SEQ ID NO: 3854535 - DNA, 25 bp, Homo sapien
tacagaaagggtataaatcagcatt

SEQ ID NO: 3854536 - DNA, 25 bp, Homo sapien
acagaaagggtataaatcagcattt

SEQ ID NO: 3854537 - DNA, 25 bp, Homo sapien
attctatcaatgtaactcttttatc

SEQ ID NO: 3854538 - DNA, 25 bp, Homo sapien
tatcaatgtaactcttttatcggac

SEQ ID NO: 3854539 - DNA, 25 bp, Homo sapien
tattatttattctatcaatgtaact

SEQ ID NO: 3854540 - DNA, 25 bp, Homo sapien
attatttattctatcaatgtaactc

SEQ ID NO: 3854541 - DNA, 25 bp, Homo sapien
attccccctctgttacgtcaaatgg

SEQ ID NO: 3854542 - DNA, 25 bp, Homo sapien
cgaaactaactctgattccccctct

SEQ ID NO: 3854543 - DNA, 25 bp, Homo sapien
cctctgttacgtcaaatggggctct

SEQ ID NO: 3854544 - DNA, 25 bp, Homo sapien
cccctctgttacgtcaaatggggct

SEQ ID NO: 3854545 - DNA, 25 bp, Homo sapien
cagcggtgacctctgagggctgata

SEQ ID NO: 3854546 - DNA, 25 bp, Homo sapien
cagtggcatcttggcaaccatgctg

SEQ ID NO: 3854547 - DNA, 25 bp, Homo sapien
gaacatgggctttccgcagtggcat

SEQ ID NO: 3854548 - DNA, 25 bp, Homo sapien
catgatgcttggtgttcgtggcctc

SEQ ID NO: 3854549 - DNA, 25 bp, Homo sapien
ttcccctttgtgttaagcgtgaggc

SEQ ID NO: 3854550 - DNA, 25 bp, Homo sapien
tgtgttaagcgtgaggcagagggag

SEQ ID NO: 3854551 - DNA, 25 bp, Homo sapien
cctttgtgttaagcgtgaggcagag

SEQ ID NO: 3854552 - DNA, 25 bp, Homo sapien
cccctttgtgttaagcgtgaggcag

SEQ ID NO: 3854553 - DNA, 25 bp, Homo sapien
tgagatgccaggcatgatggtcagc

SEQ ID NO: 3854554 - DNA, 25 bp, Homo sapien
tcctctggccagaatggctggtgag

SEQ ID NO: 3854555 - DNA, 25 bp, Homo sapien
gagggttcctctggccagaatggct

SEQ ID NO: 3854556 - DNA, 25 bp, Homo sapien
ccaggcatgatggtcagctttgtgg

SEQ ID NO: 3854557 - DNA, 25 bp, Homo sapien
ccgtacctgcatcagcatcgcctag

SEQ ID NO: 3854558 - DNA, 25 bp, Homo sapien
gtacctgcatcagcatcgcctagaa

SEQ ID NO: 3854559 - DNA, 25 bp, Homo sapien
acctgcatcagcatcgcctagaaac

SEQ ID NO: 3854560 - DNA, 25 bp, Homo sapien
ggccgtacctgcatcagcatcgcct

SEQ ID NO: 3854561 - DNA, 25 bp, Homo sapien
tgtaaaatgcaatttgctttcgaaa

SEQ ID NO: 3854562 - DNA, 25 bp, Homo sapien
aaatgtaaaatgcaatttgctttcg

SEQ ID NO: 3854563 - DNA, 25 bp, Homo sapien
taaaatgcaatttgctttcgaaatt

SEQ ID NO: 3854564 - DNA, 25 bp, Homo sapien
aatgtaaaatgcaatttgctttcga

SEQ ID NO: 3854565 - DNA, 25 bp, Homo sapien
acaacaccatctttagacaatataa

SEQ ID NO: 3854566 - DNA, 25 bp, Homo sapien
taactccacttcagcagttcagtga

SEQ ID NO: 3854567 - DNA, 25 bp, Homo sapien
gcagttcagtgaaaacaacaccatc

SEQ ID NO: 3854568 - DNA, 25 bp, Homo sapien
ccatctttagacaatataaaagtca

SEQ ID NO: 3854569 - DNA, 25 bp, Homo sapien
gtagccgtgtgctcagtcacaggtg

SEQ ID NO: 3854570 - DNA, 25 bp, Homo sapien
gaagcatcgtacacttggccccttg

SEQ ID NO: 3854571 - DNA, 25 bp, Homo sapien
gctgaggaagcatcgtacacttggc

SEQ ID NO: 3854572 - DNA, 25 bp, Homo sapien
ggcagctcagtagccgtgtgctcag

SEQ ID NO: 3854573 - DNA, 25 bp, Homo sapien
agccttctccaaagggcttcacacc

SEQ ID NO: 3854574 - DNA, 25 bp, Homo sapien
aagccttctccaaagggcttcacac

SEQ ID NO: 3854575 - DNA, 25 bp, Homo sapien
gaagccttctccaaagggcttcaca

SEQ ID NO: 3854576 - DNA, 25 bp, Homo sapien
gccttctccaaagggcttcacaccc

SEQ ID NO: 3854577 - DNA, 25 bp, Homo sapien
agtgggatttgtacacagccccagg

SEQ ID NO: 3854578 - DNA, 25 bp, Homo sapien
tcattggctgttgcccagtgccgtg

SEQ ID NO: 3854579 - DNA, 25 bp, Homo sapien
ggctgttgcccagtgccgtgctttc

SEQ ID NO: 3854580 - DNA, 25 bp, Homo sapien
tttgaaaagtgggatttgtacacag

SEQ ID NO: 3854581 - DNA, 25 bp, Homo sapien
ctgctaggcacaggagagtggtcat

SEQ ID NO: 3854582 - DNA, 25 bp, Homo sapien
ggaagcctggcctcgtgaacccgat

SEQ ID NO: 3854583 - DNA, 25 bp, Homo sapien
ctgctccgggagtggttgccaggaa

SEQ ID NO: 3854584 - DNA, 25 bp, Homo sapien
tggtggagcagaatccactcccctg

SEQ ID NO: 3854585 - DNA, 25 bp, Homo sapien
tgaacccgatggtctgacccctcaa

SEQ ID NO: 3854586 - DNA, 25 bp, Homo sapien
tggccctcggctgaccctggcttct

SEQ ID NO: 3854587 - DNA, 25 bp, Homo sapien
tggccaggatgacctaatgttccac

SEQ ID NO: 3854588 - DNA, 25 bp, Homo sapien
tactgagcttgctctcaaagcccca

SEQ ID NO: 3854589 - DNA, 25 bp, Homo sapien
cacttggtgctgacaagccgtctgg

SEQ ID NO: 3854590 - DNA, 25 bp, Homo sapien
ggatttataatgcttctggctccag

SEQ ID NO: 3854591 - DNA, 25 bp, Homo sapien
gacatcatctaattgagaggagagg

SEQ ID NO: 3854592 - DNA, 25 bp, Homo sapien
ccccgacctggatctaacagtaatg

SEQ ID NO: 3854593 - DNA, 25 bp, Homo sapien
cagtgctcaactccttgaagcttcc

SEQ ID NO: 3854594 - DNA, 25 bp, Homo sapien
gccctgcgtcgggaactcagaagca

SEQ ID NO: 3854595 - DNA, 25 bp, Homo sapien
tgcaggagcccttgacttgatacag

SEQ ID NO: 3854596 - DNA, 25 bp, Homo sapien
tcagaagcatgaggagttcacaggc

SEQ ID NO: 3854597 - DNA, 25 bp, Homo sapien
ttgatacagttgatcaaggcccagc

SEQ ID NO: 3854598 - DNA, 25 bp, Homo sapien
ggcctggcgctgaagccatttgatc

SEQ ID NO: 3854599 - DNA, 25 bp, Homo sapien
gctgttgcttctgagccaccagcat

SEQ ID NO: 3854600 - DNA, 25 bp, Homo sapien
ctttcctggcttgggctaaaagctg

SEQ ID NO: 3854601 - DNA, 25 bp, Homo sapien
agcggctgcaaagggtgtttccatc

SEQ ID NO: 3854602 - DNA, 25 bp, Homo sapien
gaagtgtcaccgtgtctgaaacaac

SEQ ID NO: 3854603 - DNA, 25 bp, Homo sapien
gggcccataaagtccaggttatgaa

SEQ ID NO: 3854604 - DNA, 25 bp, Homo sapien
acaactgcttctttattgcgtacgc

SEQ ID NO: 3854605 - DNA, 25 bp, Homo sapien
ttagccctccgaatcagagcgacag

SEQ ID NO: 3854606 - DNA, 25 bp, Homo sapien
ggaatccgttcatttctgggcagcg

SEQ ID NO: 3854607 - DNA, 25 bp, Homo sapien
gaatccgttcatttctgggcagcgg

SEQ ID NO: 3854608 - DNA, 25 bp, Homo sapien
aggaatccgttcatttctgggcagc

SEQ ID NO: 3854609 - DNA, 25 bp, Homo sapien
caggaatccgttcatttctgggcag

SEQ ID NO: 3854610 - DNA, 25 bp, Homo sapien
tagctgcaggttggaacagtggaca

SEQ ID NO: 3854611 - DNA, 25 bp, Homo sapien
tagagaggagttaaactgtgatcca

SEQ ID NO: 3854612 - DNA, 25 bp, Homo sapien
gaatattcagcggtcaggacaccgg

SEQ ID NO: 3854613 - DNA, 25 bp, Homo sapien
ttaggtctccgttcagaatattcag

SEQ ID NO: 3854614 - DNA, 25 bp, Homo sapien
tgggggaggcactgatagaggtttc

SEQ ID NO: 3854615 - DNA, 25 bp, Homo sapien
tggctgtgggggaggcactgataga

SEQ ID NO: 3854616 - DNA, 25 bp, Homo sapien
gaggcactgatagaggtttctccca

SEQ ID NO: 3854617 - DNA, 25 bp, Homo sapien
ggggaggcactgatagaggtttctc

SEQ ID NO: 3854618 - DNA, 25 bp, Homo sapien
gaagtccgagcggtgtagtcaaata

SEQ ID NO: 3854619 - DNA, 25 bp, Homo sapien
agattcatcatgacgtcaccccgac

SEQ ID NO: 3854620 - DNA, 25 bp, Homo sapien
tcagtcccaagtttagtgcggcaag

SEQ ID NO: 3854621 - DNA, 25 bp, Homo sapien
caatctaaactctggatcagtccca

SEQ ID NO: 3854622 - DNA, 25 bp, Homo sapien
tccggtaacactcaggccctggaca

SEQ ID NO: 3854623 - DNA, 25 bp, Homo sapien
cctccggtaacactcaggccctgga

SEQ ID NO: 3854624 - DNA, 25 bp, Homo sapien
ctccggtaacactcaggccctggac

SEQ ID NO: 3854625 - DNA, 25 bp, Homo sapien
cagtctcagacattcagtcaagcaa

SEQ ID NO: 3854626 - DNA, 25 bp, Homo sapien
caacatcccttacagacatctggaa

SEQ ID NO: 3854627 - DNA, 25 bp, Homo sapien
gatgataagggacgctgtgcaccta

SEQ ID NO: 3854628 - DNA, 25 bp, Homo sapien
tagcctagctttgcactgccttgtc

SEQ ID NO: 3854629 - DNA, 25 bp, Homo sapien
tgggaacttctaaagtcagagtggc

SEQ ID NO: 3854630 - DNA, 25 bp, Homo sapien
gtcactgcccaaccagtaggtggga

SEQ ID NO: 3854631 - DNA, 25 bp, Homo sapien
ggaacttctaaagtcagagtggcca

SEQ ID NO: 3854632 - DNA, 25 bp, Homo sapien
tcctgagtcactgcccaaccagtag

SEQ ID NO: 3854633 - DNA, 25 bp, Homo sapien
agttcaccgggtctcttaggctcca

SEQ ID NO: 3854634 - DNA, 25 bp, Homo sapien
agctccaggctgtcccctcttgtcc

SEQ ID NO: 3854635 - DNA, 25 bp, Homo sapien
cagaagagtgatggagccggatgat

SEQ ID NO: 3854636 - DNA, 25 bp, Homo sapien
cggatgatcagggaagagcttccaa

SEQ ID NO: 3854637 - DNA, 25 bp, Homo sapien
cctggaggtggctcattatgaccca

SEQ ID NO: 3854638 - DNA, 25 bp, Homo sapien
ccctggaggtggctcattatgaccc

SEQ ID NO: 3854639 - DNA, 25 bp, Homo sapien
ctggaggtggctcattatgacccag

SEQ ID NO: 3854640 - DNA, 25 bp, Homo sapien
atcagccaagtgccagcccgcccac

SEQ ID NO: 3854641 - DNA, 25 bp, Homo sapien
ggttgcatttcagggcacgctgaga

SEQ ID NO: 3854642 - DNA, 25 bp, Homo sapien
gacatcgctgcgtttcttggctgtg

SEQ ID NO: 3854643 - DNA, 25 bp, Homo sapien
catttcagggcacgctgagagctgc

SEQ ID NO: 3854644 - DNA, 25 bp, Homo sapien
gagctgctgcctccatagatgtcat

SEQ ID NO: 3854645 - DNA, 25 bp, Homo sapien
agagccaacctagcccgggagccaa

SEQ ID NO: 3854646 - DNA, 25 bp, Homo sapien
tctgtgcatagagccaacctagccc

SEQ ID NO: 3854647 - DNA, 25 bp, Homo sapien
tgcatagagccaacctagcccggga

SEQ ID NO: 3854648 - DNA, 25 bp, Homo sapien
aatctgtgcatagagccaacctagc

SEQ ID NO: 3854649 - DNA, 25 bp, Homo sapien
gtgggatggtgaaacccgggcctgc

SEQ ID NO: 3854650 - DNA, 25 bp, Homo sapien
ctgtgggatggtgaaacccgggcct

SEQ ID NO: 3854651 - DNA, 25 bp, Homo sapien
tctgtgggatggtgaaacccgggcc

SEQ ID NO: 3854652 - DNA, 25 bp, Homo sapien
tgtgggatggtgaaacccgggcctg

SEQ ID NO: 3854653 - DNA, 25 bp, Homo sapien
gccggcttcagatccagggcctctt

SEQ ID NO: 3854654 - DNA, 25 bp, Homo sapien
ctgctgcccgcctttctctcaatca

SEQ ID NO: 3854655 - DNA, 25 bp, Homo sapien
tgctcgtggtgaaaggccggcttca

SEQ ID NO: 3854656 - DNA, 25 bp, Homo sapien
tcaatcactggaatagctggcaaac

SEQ ID NO: 3854657 - DNA, 25 bp, Homo sapien
gaagcccaggtcttgcccctgaggt

SEQ ID NO: 3854658 - DNA, 25 bp, Homo sapien
atgctgacgcttcctggccttgtca

SEQ ID NO: 3854659 - DNA, 25 bp, Homo sapien
ttgtcagcttgtcccccaagacact

SEQ ID NO: 3854660 - DNA, 25 bp, Homo sapien
caagacactcccctgggatgaagga

SEQ ID NO: 3854661 - DNA, 25 bp, Homo sapien
ctgccatccttggctcgtccggaag

SEQ ID NO: 3854662 - DNA, 25 bp, Homo sapien
catccttggctcgtccggaagccaa

SEQ ID NO: 3854663 - DNA, 25 bp, Homo sapien
tccttggctcgtccggaagccaaag

SEQ ID NO: 3854664 - DNA, 25 bp, Homo sapien
tgccatccttggctcgtccggaagc

SEQ ID NO: 3854665 - DNA, 25 bp, Homo sapien
gctgtgccgatttgcagcaacagcc

SEQ ID NO: 3854666 - DNA, 25 bp, Homo sapien
caggacgccctgctgtgccgatttg

SEQ ID NO: 3854667 - DNA, 25 bp, Homo sapien
attcctgccagggtgagtcactgcc

SEQ ID NO: 3854668 - DNA, 25 bp, Homo sapien
gccttggtgtcccaggactcttggg

SEQ ID NO: 3854669 - DNA, 25 bp, Homo sapien
aggactgtcataatcactcagccca

SEQ ID NO: 3854670 - DNA, 25 bp, Homo sapien
ttgcacatcgatgcccaaaggactg

SEQ ID NO: 3854671 - DNA, 25 bp, Homo sapien
aagagctctcctttgcacatcgatg

SEQ ID NO: 3854672 - DNA, 25 bp, Homo sapien
gatgcccaaaggactgtcataatca

SEQ ID NO: 3854673 - DNA, 25 bp, Homo sapien
agtcttgtctctggccaaacctttt

SEQ ID NO: 3854674 - DNA, 25 bp, Homo sapien
tgtctctggccaaacctttttcctg

SEQ ID NO: 3854675 - DNA, 25 bp, Homo sapien
tctctggccaaacctttttcctgct

SEQ ID NO: 3854676 - DNA, 25 bp, Homo sapien
ggagtcttgtctctggccaaacctt

SEQ ID NO: 3854677 - DNA, 25 bp, Homo sapien
gaaactcacacatatggccaaggag

SEQ ID NO: 3854678 - DNA, 25 bp, Homo sapien
aactcacacatatggccaaggagga

SEQ ID NO: 3854679 - DNA, 25 bp, Homo sapien
tcacacatatggccaaggaggaagc

SEQ ID NO: 3854680 - DNA, 25 bp, Homo sapien
actcacacatatggccaaggaggaa

SEQ ID NO: 3854681 - DNA, 25 bp, Homo sapien
ttaatatatccatagacctgcctgt

SEQ ID NO: 3854682 - DNA, 25 bp, Homo sapien
gagcctaataaagtctcggaaaggc

SEQ ID NO: 3854683 - DNA, 25 bp, Homo sapien
catctgtttctagacgttgtcctag

SEQ ID NO: 3854684 - DNA, 25 bp, Homo sapien
tatatccatagacctgcctgtcagc

SEQ ID NO: 3854685 - DNA, 25 bp, Homo sapien
gccttggaggattgacaaaggtcct

SEQ ID NO: 3854686 - DNA, 25 bp, Homo sapien
gtggagccttggaggattgacaaag

SEQ ID NO: 3854687 - DNA, 25 bp, Homo sapien
gagccttggaggattgacaaaggtc

SEQ ID NO: 3854688 - DNA, 25 bp, Homo sapien
gggtgccccacacttcaaaccagga

SEQ ID NO: 3854689 - DNA, 25 bp, Homo sapien
tcctgcctgtcagggagagctcaag

SEQ ID NO: 3854690 - DNA, 25 bp, Homo sapien
gggctcttcattatccatcggtcat

SEQ ID NO: 3854691 - DNA, 25 bp, Homo sapien
gatctggatcagtaaactaattggg

SEQ ID NO: 3854692 - DNA, 25 bp, Homo sapien
catcggtcatcaaccagaaacatct

SEQ ID NO: 3854693 - DNA, 25 bp, Homo sapien
tgtctgggccactggcaggccccag

SEQ ID NO: 3854694 - DNA, 25 bp, Homo sapien
agcagcccctgctgacactcccgct

SEQ ID NO: 3854695 - DNA, 25 bp, Homo sapien
gggcctccttgcagagatgctgtct

SEQ ID NO: 3854696 - DNA, 25 bp, Homo sapien
tcaccagctgcgctgggtgttgtct

SEQ ID NO: 3854697 - DNA, 25 bp, Homo sapien
tgggttccacaaactcgccatcttc

SEQ ID NO: 3854698 - DNA, 25 bp, Homo sapien
ccacaacgtgctcttgccgctgtta

SEQ ID NO: 3854699 - DNA, 25 bp, Homo sapien
ctcttgccgctgttatgtcctaggg

SEQ ID NO: 3854700 - DNA, 25 bp, Homo sapien
ctgctgggttccacaaactcgccat

SEQ ID NO: 3854701 - DNA, 25 bp, Homo sapien
caggatgtaactgcccaccaggtaa

SEQ ID NO: 3854702 - DNA, 25 bp, Homo sapien
ccttgtacagaaatggaagctccac

SEQ ID NO: 3854703 - DNA, 25 bp, Homo sapien
ttattacccagatgcccggtggcca

SEQ ID NO: 3854704 - DNA, 25 bp, Homo sapien
cttggtgtctacgagctcctggtga

SEQ ID NO: 3854705 - DNA, 25 bp, Homo sapien
tcagatccagcctcttctgcgctta

SEQ ID NO: 3854706 - DNA, 25 bp, Homo sapien
tctgcgcttaccctggtacattttc

SEQ ID NO: 3854707 - DNA, 25 bp, Homo sapien
cctcttctgcgcttaccctggtaca

SEQ ID NO: 3854708 - DNA, 25 bp, Homo sapien
cttctgcgcttaccctggtacattt

SEQ ID NO: 3854709 - DNA, 25 bp, Homo sapien
ggaagctccaagatctcccagccct

SEQ ID NO: 3854710 - DNA, 25 bp, Homo sapien
cactaagcccctgctgtatacagag

SEQ ID NO: 3854711 - DNA, 25 bp, Homo sapien
tgtacaaagggttcagatccacctt

SEQ ID NO: 3854712 - DNA, 25 bp, Homo sapien
ccaggcatgcaggtatatacaggcc

SEQ ID NO: 3854713 - DNA, 25 bp, Homo sapien
ctgctgtatacagagcgccaggcat

SEQ ID NO: 3854714 - DNA, 25 bp, Homo sapien
cccaggtgctgggggtcaggggcag

SEQ ID NO: 3854715 - DNA, 25 bp, Homo sapien
tagcccaggtgctgggggtcagggg

SEQ ID NO: 3854716 - DNA, 25 bp, Homo sapien
gtgctgggggtcaggggcaggtttc

SEQ ID NO: 3854717 - DNA, 25 bp, Homo sapien
caggtgctgggggtcaggggcaggt

SEQ ID NO: 3854718 - DNA, 25 bp, Homo sapien
gctcaagtggtcagaagattcagcc

SEQ ID NO: 3854719 - DNA, 25 bp, Homo sapien
aagtggtcagaagattcagcctcca

SEQ ID NO: 3854720 - DNA, 25 bp, Homo sapien
cgtgttgctcaagtggtcagaagat

SEQ ID NO: 3854721 - DNA, 25 bp, Homo sapien
catgtcgtgttgctcaagtggtcag

SEQ ID NO: 3854722 - DNA, 25 bp, Homo sapien
tagctggtgtgatgatgttaaactc

SEQ ID NO: 3854723 - DNA, 25 bp, Homo sapien
gctggtgtgatgatgttaaactctt

SEQ ID NO: 3854724 - DNA, 25 bp, Homo sapien
tggtgtgatgatgttaaactcttcc

SEQ ID NO: 3854725 - DNA, 25 bp, Homo sapien
gatagctggtgtgatgatgttaaac

SEQ ID NO: 3854726 - DNA, 25 bp, Homo sapien
tccccacgccacacttctgctgtgt

SEQ ID NO: 3854727 - DNA, 25 bp, Homo sapien
ccccacgccacacttctgctgtgtc

SEQ ID NO: 3854728 - DNA, 25 bp, Homo sapien
tggtggtgccgttcagccagatggc

SEQ ID NO: 3854729 - DNA, 25 bp, Homo sapien
tgccgttcagccagatggcatggaa

SEQ ID NO: 3854730 - DNA, 25 bp, Homo sapien
tggtgccgttcagccagatggcatg

SEQ ID NO: 3854731 - DNA, 25 bp, Homo sapien
cgttcagccagatggcatggaagca

SEQ ID NO: 3854732 - DNA, 25 bp, Homo sapien
cggggacttatgtggggcttgtctt

SEQ ID NO: 3854733 - DNA, 25 bp, Homo sapien
ccggggacttatgtggggcttgtct

SEQ ID NO: 3854734 - DNA, 25 bp, Homo sapien
gccggggacttatgtggggcttgtc

SEQ ID NO: 3854735 - DNA, 25 bp, Homo sapien
caaacactgttatgacattgctcct

SEQ ID NO: 3854736 - DNA, 25 bp, Homo sapien
gctccttcacagatctgtagtcaga

SEQ ID NO: 3854737 - DNA, 25 bp, Homo sapien
ggtcaaactaactctcacgtacaag

SEQ ID NO: 3854738 - DNA, 25 bp, Homo sapien
tgtagtcagatgatagccagtgggc

SEQ ID NO: 3854739 - DNA, 25 bp, Homo sapien
ggagcaaggcttgcacaacagatga

SEQ ID NO: 3854740 - DNA, 25 bp, Homo sapien
gtgatgtgcgtactgcaacctctgc

SEQ ID NO: 3854741 - DNA, 25 bp, Homo sapien
tgctggagaactgtcgatgcctttt

SEQ ID NO: 3854742 - DNA, 25 bp, Homo sapien
aaaacatggacatggaacatggaac

SEQ ID NO: 3854743 - DNA, 25 bp, Homo sapien
catgatgtgacgtttgagcttcccc

SEQ ID NO: 3854744 - DNA, 25 bp, Homo sapien
cactggcgagatccggtgtcaggaa

SEQ ID NO: 3854745 - DNA, 25 bp, Homo sapien
tcccaggtcataggtgtgatgccca

SEQ ID NO: 3854746 - DNA, 25 bp, Homo sapien
cccctcaatggaagaaagcagccct

SEQ ID NO: 3854747 - DNA, 25 bp, Homo sapien
tgcagtctcactctggggttcccgg

SEQ ID NO: 3854748 - DNA, 25 bp, Homo sapien
cagtagacgcagtgaccagcagatg

SEQ ID NO: 3854749 - DNA, 25 bp, Homo sapien
agacgcagtgaccagcagatgagcc

SEQ ID NO: 3854750 - DNA, 25 bp, Homo sapien
ggtctgtacctggtgggcagcgtgg

SEQ ID NO: 3854751 - DNA, 25 bp, Homo sapien
tgttgagcaggtgttgaaagcgggc

SEQ ID NO: 3854752 - DNA, 25 bp, Homo sapien
gctagaaaagaagccctcaaggtca

SEQ ID NO: 3854753 - DNA, 25 bp, Homo sapien
cagggacagcgggtgacctttacag

SEQ ID NO: 3854754 - DNA, 25 bp, Homo sapien
gggcggtctcctgagctagaaaaga

SEQ ID NO: 3854755 - DNA, 25 bp, Homo sapien
ctatttgtccgaatgaggtcttggg

SEQ ID NO: 3854756 - DNA, 25 bp, Homo sapien
caaaccacaggtcggtgaggcctgg

SEQ ID NO: 3854757 - DNA, 25 bp, Homo sapien
aaactgtagaagaatgggatcccaa

SEQ ID NO: 3854758 - DNA, 25 bp, Homo sapien
taagggcgtgcgtcctagggactga

SEQ ID NO: 3854759 - DNA, 25 bp, Homo sapien
cgggcagtacctcagcaggatcagc

SEQ ID NO: 3854760 - DNA, 25 bp, Homo sapien
caatcttcatagttctccctgctgc

SEQ ID NO: 3854761 - DNA, 25 bp, Homo sapien
ctcaaaatgtggtagtacgggcagt

SEQ ID NO: 3854762 - DNA, 25 bp, Homo sapien
tcatagttctccctgctgcaagaaa

SEQ ID NO: 3854763 - DNA, 25 bp, Homo sapien
cagggctgtcccaatgcaggcctgt

SEQ ID NO: 3854764 - DNA, 25 bp, Homo sapien
ccaggcattgaacacagcatcaggg

SEQ ID NO: 3854765 - DNA, 25 bp, Homo sapien
caggcctgtttgatgaaaattggca

SEQ ID NO: 3854766 - DNA, 25 bp, Homo sapien
agagctgccaggcattgaacacagc

SEQ ID NO: 3854767 - DNA, 25 bp, Homo sapien
gagggagagtgacaagactcacgtt

SEQ ID NO: 3854768 - DNA, 25 bp, Homo sapien
tgcatcatcacagccttgtgcttct

SEQ ID NO: 3854769 - DNA, 25 bp, Homo sapien
ttctaatctcatcacatcccctttg

SEQ ID NO: 3854770 - DNA, 25 bp, Homo sapien
tgaacatggtagaaaggagcctttg

SEQ ID NO: 3854771 - DNA, 25 bp, Homo sapien
gatatccaagccatccttagataag

SEQ ID NO: 3854772 - DNA, 25 bp, Homo sapien
ccaggagttccatgtgctgcgggct

SEQ ID NO: 3854773 - DNA, 25 bp, Homo sapien
tgtcccatgcgtttgtttacaagcc

SEQ ID NO: 3854774 - DNA, 25 bp, Homo sapien
aaagggcttagaggatcgccgtcca

SEQ ID NO: 3854775 - DNA, 25 bp, Homo sapien
ggaccaaaggtgagtgtccttctgg

SEQ ID NO: 3854776 - DNA, 25 bp, Homo sapien
tctgggtgatgtgttgaacaggtgg

SEQ ID NO: 3854777 - DNA, 25 bp, Homo sapien
gtgatgtgttgaacaggtgggagaa

SEQ ID NO: 3854778 - DNA, 25 bp, Homo sapien
tgggcctcctggaccaaaggtgagt

SEQ ID NO: 3854779 - DNA, 25 bp, Homo sapien
cccatggtggacagtggaagggcag

SEQ ID NO: 3854780 - DNA, 25 bp, Homo sapien
aggctgggcttgctgttataacaaa

SEQ ID NO: 3854781 - DNA, 25 bp, Homo sapien
taacaaacccactgtcgcaatcaca

SEQ ID NO: 3854782 - DNA, 25 bp, Homo sapien
aggagagggcgagagaacacgagca

SEQ ID NO: 3854783 - DNA, 25 bp, Homo sapien
catcataccatgacaggtgtctgca

SEQ ID NO: 3854784 - DNA, 25 bp, Homo sapien
ctggcatcataccatgacaggtgtc

SEQ ID NO: 3854785 - DNA, 25 bp, Homo sapien
aggcatcacggcgatgcccttggct

SEQ ID NO: 3854786 - DNA, 25 bp, Homo sapien
agggtctccaggcatcacggcgatg

SEQ ID NO: 3854787 - DNA, 25 bp, Homo sapien
agtgattcatccagaaggggcatgg

SEQ ID NO: 3854788 - DNA, 25 bp, Homo sapien
ctggaagagtgattcatccagaagg

SEQ ID NO: 3854789 - DNA, 25 bp, Homo sapien
agagtgattcatccagaaggggcat

SEQ ID NO: 3854790 - DNA, 25 bp, Homo sapien
attcatccagaaggggcatggggtc

SEQ ID NO: 3854791 - DNA, 25 bp, Homo sapien
gtaaccacagctgcaagtaattctg

SEQ ID NO: 3854792 - DNA, 25 bp, Homo sapien
aattctgcccgctgttggatttgct

SEQ ID NO: 3854793 - DNA, 25 bp, Homo sapien
tacacggatgctaccaaaatctctc

SEQ ID NO: 3854794 - DNA, 25 bp, Homo sapien
catttgactggtgaaattctgcccg

SEQ ID NO: 3854795 - DNA, 25 bp, Homo sapien
tgccttcttcgtttcatggccacct

SEQ ID NO: 3854796 - DNA, 25 bp, Homo sapien
cagtgtagcatttgtgagccacgga

SEQ ID NO: 3854797 - DNA, 25 bp, Homo sapien
ctttgaagatacagagcaatcgatg

SEQ ID NO: 3854798 - DNA, 25 bp, Homo sapien
atcgatgtgtggaagtgaggaaacc

SEQ ID NO: 3854799 - DNA, 25 bp, Homo sapien
ggacaccagagttagcgtctcctca

SEQ ID NO: 3854800 - DNA, 25 bp, Homo sapien
aggacaccagagttagcgtctcctc

SEQ ID NO: 3854801 - DNA, 25 bp, Homo sapien
caggacaccagagttagcgtctcct

SEQ ID NO: 3854802 - DNA, 25 bp, Homo sapien
gcaggacaccagagttagcgtctcc

SEQ ID NO: 3854803 - DNA, 25 bp, Homo sapien
tagaagtgagctggaggaggggcca

SEQ ID NO: 3854804 - DNA, 25 bp, Homo sapien
agaagtgagctggaggaggggccac

SEQ ID NO: 3854805 - DNA, 25 bp, Homo sapien
ctagaagtgagctggaggaggggcc

SEQ ID NO: 3854806 - DNA, 25 bp, Homo sapien
tggatcgtgggtcgctgcccaggtg

SEQ ID NO: 3854807 - DNA, 25 bp, Homo sapien
tcgtgggtcgctgcccaggtgacac

SEQ ID NO: 3854808 - DNA, 25 bp, Homo sapien
tcttccaggttggatcgtgggtcgc

SEQ ID NO: 3854809 - DNA, 25 bp, Homo sapien
cttccaggttggatcgtgggtcgct

SEQ ID NO: 3854810 - DNA, 25 bp, Homo sapien
aaagacattaccagacccttcctcg

SEQ ID NO: 3854811 - DNA, 25 bp, Homo sapien
gatggtccaggattaggttttcgga

SEQ ID NO: 3854812 - DNA, 25 bp, Homo sapien
ccttcctcgtccctttctttcatga

SEQ ID NO: 3854813 - DNA, 25 bp, Homo sapien
gtccttcttgcttaaatctccaaag

SEQ ID NO: 3854814 - DNA, 25 bp, Homo sapien
ccaatggtaaaatagccggatttgt

SEQ ID NO: 3854815 - DNA, 25 bp, Homo sapien
caatggtaaaatagccggatttgtt

SEQ ID NO: 3854816 - DNA, 25 bp, Homo sapien
accaatggtaaaatagccggatttg

SEQ ID NO: 3854817 - DNA, 25 bp, Homo sapien
tgctggaacaaggtaaggcttccca

SEQ ID NO: 3854818 - DNA, 25 bp, Homo sapien
ctgctggaacaaggtaaggcttccc

SEQ ID NO: 3854819 - DNA, 25 bp, Homo sapien
cagcagtgccataaagcttccacaa

SEQ ID NO: 3854820 - DNA, 25 bp, Homo sapien
gccataaagcttccacaatttccat

SEQ ID NO: 3854821 - DNA, 25 bp, Homo sapien
tttgccattgttagagcagtctgac

SEQ ID NO: 3854822 - DNA, 25 bp, Homo sapien
ggactgtgcccttgcatgtgatcgc

SEQ ID NO: 3854823 - DNA, 25 bp, Homo sapien
ttcacactggccttggcatttgcca

SEQ ID NO: 3854824 - DNA, 25 bp, Homo sapien
tagagcagtctgacatcataggact

SEQ ID NO: 3854825 - DNA, 25 bp, Homo sapien
ccagccagaactgaggtgctggcta

SEQ ID NO: 3854826 - DNA, 25 bp, Homo sapien
gctaagctaggtgtgtctaagagta

SEQ ID NO: 3854827 - DNA, 25 bp, Homo sapien
cacataaatgtagaggtccatgata

SEQ ID NO: 3854828 - DNA, 25 bp, Homo sapien
taataaattattgtgtcctggtgcc

SEQ ID NO: 3854829 - DNA, 25 bp, Homo sapien
caggacacatgcctagcgttgtcca

SEQ ID NO: 3854830 - DNA, 25 bp, Homo sapien
acatgcctagcgttgtccacctgga

SEQ ID NO: 3854831 - DNA, 25 bp, Homo sapien
tgcctagcgttgtccacctggatac

SEQ ID NO: 3854832 - DNA, 25 bp, Homo sapien
acagcaggacacatgcctagcgttg

SEQ ID NO: 3854833 - DNA, 25 bp, Homo sapien
tcttatctgcctcctttcaaggccc

SEQ ID NO: 3854834 - DNA, 25 bp, Homo sapien
catcaaccctgttacttcctgggct

SEQ ID NO: 3854835 - DNA, 25 bp, Homo sapien
gtcataagcagacgaatgtaccaag

SEQ ID NO: 3854836 - DNA, 25 bp, Homo sapien
ctttccagtgtcataagcagacgaa

SEQ ID NO: 3854837 - DNA, 25 bp, Homo sapien
caatttcctttggtgctgccaccat

SEQ ID NO: 3854838 - DNA, 25 bp, Homo sapien
caggcattgcactgtacagtttggg

SEQ ID NO: 3854839 - DNA, 25 bp, Homo sapien
gtggatgaggacaattgtgtcataa

SEQ ID NO: 3854840 - DNA, 25 bp, Homo sapien
aatacaggcattgcactgtacagtt

SEQ ID NO: 3854841 - DNA, 25 bp, Homo sapien
tgaggacaattgtgtcataaaagta

SEQ ID NO: 3854842 - DNA, 25 bp, Homo sapien
ggaccctgcggccttggccttccgc

SEQ ID NO: 3854843 - DNA, 25 bp, Homo sapien
gaccctgcggccttggccttccgca

SEQ ID NO: 3854844 - DNA, 25 bp, Homo sapien
ccctgcggccttggccttccgcagt

SEQ ID NO: 3854845 - DNA, 25 bp, Homo sapien
ctgcggccttggccttccgcagtgt

SEQ ID NO: 3854846 - DNA, 25 bp, Homo sapien
cccaatatattattacagagggtat

SEQ ID NO: 3854847 - DNA, 25 bp, Homo sapien
tctacacgtgaatctgaaattctct

SEQ ID NO: 3854848 - DNA, 25 bp, Homo sapien
tataagttcaagagagtttggcaac

SEQ ID NO: 3854849 - DNA, 25 bp, Homo sapien
tggcaacatcgctcaaacttaacac

SEQ ID NO: 3854850 - DNA, 25 bp, Homo sapien
ttaaaaccatgtggtgatgataaag

SEQ ID NO: 3854851 - DNA, 25 bp, Homo sapien
gatgataaagatgacgatgacagac

SEQ ID NO: 3854852 - DNA, 25 bp, Homo sapien
atgataaagatgacgatgacagact

SEQ ID NO: 3854853 - DNA, 25 bp, Homo sapien
taaaaccatgtggtgatgataaaga

SEQ ID NO: 3854854 - DNA, 25 bp, Homo sapien
gctgagagaaggctacaacagctcc

SEQ ID NO: 3854855 - DNA, 25 bp, Homo sapien
tgagagaaggctacaacagctccca

SEQ ID NO: 3854856 - DNA, 25 bp, Homo sapien
agctgagagaaggctacaacagctc

SEQ ID NO: 3854857 - DNA, 25 bp, Homo sapien
ctgagagaaggctacaacagctccc

SEQ ID NO: 3854858 - DNA, 25 bp, Homo sapien
gctgagtctgctgcaaagccgtgtg

SEQ ID NO: 3854859 - DNA, 25 bp, Homo sapien
ttcgacaactgttcggctgagtctg

SEQ ID NO: 3854860 - DNA, 25 bp, Homo sapien
aagccgtgtggtccgtaaggccgct

SEQ ID NO: 3854861 - DNA, 25 bp, Homo sapien
catactggtgacaggtgtttcgaca

SEQ ID NO: 3854862 - DNA, 25 bp, Homo sapien
caaaaggtttgtgtgagtccgtgta

SEQ ID NO: 3854863 - DNA, 25 bp, Homo sapien
gaagaaaatcatcccagattctgtc

SEQ ID NO: 3854864 - DNA, 25 bp, Homo sapien
aatgacagcgtcttaagtctacaga

SEQ ID NO: 3854865 - DNA, 25 bp, Homo sapien
ggctgactgtagttccaaagcaagc

SEQ ID NO: 3854866 - DNA, 25 bp, Homo sapien
ggatgtgcccatgcagagtcccctt

SEQ ID NO: 3854867 - DNA, 25 bp, Homo sapien
caggattcctagaggctgcatttcg

SEQ ID NO: 3854868 - DNA, 25 bp, Homo sapien
gcaggattcctagaggctgcatttc

SEQ ID NO: 3854869 - DNA, 25 bp, Homo sapien
aggattcctagaggctgcatttcgg

SEQ ID NO: 3854870 - DNA, 25 bp, Homo sapien
ttgggagcactcaatttcatgatca

SEQ ID NO: 3854871 - DNA, 25 bp, Homo sapien
catataattgggagcactcaatttc

SEQ ID NO: 3854872 - DNA, 25 bp, Homo sapien
gtggagaatactcttatcaaataag

SEQ ID NO: 3854873 - DNA, 25 bp, Homo sapien
ctgtcatataattgggagcactcaa

SEQ ID NO: 3854874 - DNA, 25 bp, Homo sapien
tgcagcaaatatggagaaggccaca

SEQ ID NO: 3854875 - DNA, 25 bp, Homo sapien
gcagcaaatatggagaaggccacag

SEQ ID NO: 3854876 - DNA, 25 bp, Homo sapien
ctgcagcaaatatggagaaggccac

SEQ ID NO: 3854877 - DNA, 25 bp, Homo sapien
ggctgcctcccatccccattatttc

SEQ ID NO: 3854878 - DNA, 25 bp, Homo sapien
tgcctcccatccccattatttctga

SEQ ID NO: 3854879 - DNA, 25 bp, Homo sapien
cctcccatccccattatttctgaaa

SEQ ID NO: 3854880 - DNA, 25 bp, Homo sapien
tcccatccccattatttctgaaacc

SEQ ID NO: 3854881 - DNA, 25 bp, Homo sapien
tggtcctgaagacaatagcctcgcg

SEQ ID NO: 3854882 - DNA, 25 bp, Homo sapien
gcgctcatctaaatacccgttggga

SEQ ID NO: 3854883 - DNA, 25 bp, Homo sapien
tcagaggaaacctggatggtccaca

SEQ ID NO: 3854884 - DNA, 25 bp, Homo sapien
tcacaatacaaagccgagactggct

SEQ ID NO: 3854885 - DNA, 25 bp, Homo sapien
gaaaggcaaagagtcctgcccggca

SEQ ID NO: 3854886 - DNA, 25 bp, Homo sapien
gaggccgcgcggtttcaccattaat

SEQ ID NO: 3854887 - DNA, 25 bp, Homo sapien
gaccatagcgcgtttgtgcccagtt

SEQ ID NO: 3854888 - DNA, 25 bp, Homo sapien
taacaggagactggatcgcgaccat

SEQ ID NO: 3854889 - DNA, 25 bp, Homo sapien
cttgggcgataaagggggggctgct

SEQ ID NO: 3854890 - DNA, 25 bp, Homo sapien
gcccaacttgcttccttgggcgata

SEQ ID NO: 3854891 - DNA, 25 bp, Homo sapien
acttgcttccttgggcgataaaggg

SEQ ID NO: 3854892 - DNA, 25 bp, Homo sapien
ttaaatccagctgcccaacttgctt

SEQ ID NO: 3854893 - DNA, 25 bp, Homo sapien
aaattcctgcggccagcgaggggcc

SEQ ID NO: 3854894 - DNA, 25 bp, Homo sapien
tcaaattcctgcggccagcgagggg

SEQ ID NO: 3854895 - DNA, 25 bp, Homo sapien
gccagcgaggggccgggggcgtcga

SEQ ID NO: 3854896 - DNA, 25 bp, Homo sapien
cagcgaggggccgggggcgtcgagg

SEQ ID NO: 3854897 - DNA, 25 bp, Homo sapien
ccaggcgaggctggacccggaggaa

SEQ ID NO: 3854898 - DNA, 25 bp, Homo sapien
atgcgaggttcagcagcgggcccca

SEQ ID NO: 3854899 - DNA, 25 bp, Homo sapien
aggaagcggaggtctcctgggaatg

SEQ ID NO: 3854900 - DNA, 25 bp, Homo sapien
cctgggaatgcggagtttcgggcgc

SEQ ID NO: 3854901 - DNA, 25 bp, Homo sapien
gggcctctgaaggtgcccgggcagg

SEQ ID NO: 3854902 - DNA, 25 bp, Homo sapien
ttttaaagcgcctctggtctgccat

SEQ ID NO: 3854903 - DNA, 25 bp, Homo sapien
tttttaaagcgcctctggtctgcca

SEQ ID NO: 3854904 - DNA, 25 bp, Homo sapien
tcaaagcctcgttgtagaagcttga

SEQ ID NO: 3854905 - DNA, 25 bp, Homo sapien
gctgtctctttttcaaagcctcgtt

SEQ ID NO: 3854906 - DNA, 25 bp, Homo sapien
tctctttttcaaagcctcgttgtag

SEQ ID NO: 3854907 - DNA, 25 bp, Homo sapien
ttttcaaagcctcgttgtagaagct

SEQ ID NO: 3854908 - DNA, 25 bp, Homo sapien
tacgagtaattataagactgtatac

SEQ ID NO: 3854909 - DNA, 25 bp, Homo sapien
gatccactctacgagtaattataag

SEQ ID NO: 3854910 - DNA, 25 bp, Homo sapien
gaaatgctctgatccactctacgag

SEQ ID NO: 3854911 - DNA, 25 bp, Homo sapien
aacattcttgaaatgctctgatcca

SEQ ID NO: 3854912 - DNA, 25 bp, Homo sapien
cagattcagggtttgtctggtttcc

SEQ ID NO: 3854913 - DNA, 25 bp, Homo sapien
aggacaggtacattgcagattcagg

SEQ ID NO: 3854914 - DNA, 25 bp, Homo sapien
ggtttcctctatagcccacgtgcat

SEQ ID NO: 3854915 - DNA, 25 bp, Homo sapien
ttctgctatgaaaggacaggtacat

SEQ ID NO: 3854916 - DNA, 25 bp, Homo sapien
taacagtttgatggttcctaataaa

SEQ ID NO: 3854917 - DNA, 25 bp, Homo sapien
atttttaaaaaagcgtgcagccact

SEQ ID NO: 3854918 - DNA, 25 bp, Homo sapien
ctcctagccatatacctaagagaac

SEQ ID NO: 3854919 - DNA, 25 bp, Homo sapien
tagaattaccaatacaaccaagcaa

SEQ ID NO: 3854920 - DNA, 25 bp, Homo sapien
cagtatgcccctagagacaagcagc

SEQ ID NO: 3854921 - DNA, 25 bp, Homo sapien
agttgttgggcctcaccagaccacc

SEQ ID NO: 3854922 - DNA, 25 bp, Homo sapien
ggactgatgcagacactgcagtatg

SEQ ID NO: 3854923 - DNA, 25 bp, Homo sapien
cagcctctctaagtgaccctcatta

SEQ ID NO: 3854924 - DNA, 25 bp, Homo sapien
accacacccggctaggagcatcttt

SEQ ID NO: 3854925 - DNA, 25 bp, Homo sapien
gggaaaccatctagacactcaatac

SEQ ID NO: 3854926 - DNA, 25 bp, Homo sapien
caggttaaaactgcgagcccaggtt

SEQ ID NO: 3854927 - DNA, 25 bp, Homo sapien
tacctattgggtcaccagtggcctt

SEQ ID NO: 3854928 - DNA, 25 bp, Homo sapien
catccaaaagagataagaactattt

SEQ ID NO: 3854929 - DNA, 25 bp, Homo sapien
gaagtccatgtctcaaggatgtcca

SEQ ID NO: 3854930 - DNA, 25 bp, Homo sapien
aactatttgatgtagattttctgtg

SEQ ID NO: 3854931 - DNA, 25 bp, Homo sapien
gtccagactaaacatccaaaagaga

SEQ ID NO: 3854932 - DNA, 25 bp, Homo sapien
tggcagttgccaatgacgaggagct

SEQ ID NO: 3854933 - DNA, 25 bp, Homo sapien
gccgtagaatgggtttgccaaacat

SEQ ID NO: 3854934 - DNA, 25 bp, Homo sapien
tgccgcgagggacaacaagaaggcc

SEQ ID NO: 3854935 - DNA, 25 bp, Homo sapien
gatttctttccaggccgagacatag

SEQ ID NO: 3854936 - DNA, 25 bp, Homo sapien
gccatggtcgcagaccatgcttggg

SEQ ID NO: 3854937 - DNA, 25 bp, Homo sapien
tttatggccaatccatcatggactg

SEQ ID NO: 3854938 - DNA, 25 bp, Homo sapien
tgttgtcactgacgggtaactacca

SEQ ID NO: 3854939 - DNA, 25 bp, Homo sapien
gatgcttgctatacttctgttgtca

SEQ ID NO: 3854940 - DNA, 25 bp, Homo sapien
taagcaatgggctatcaacggcccc

SEQ ID NO: 3854941 - DNA, 25 bp, Homo sapien
ttcatattcaacttggtggcagccg

SEQ ID NO: 3854942 - DNA, 25 bp, Homo sapien
tgtcgtcgtgagctgcaggcattga

SEQ ID NO: 3854943 - DNA, 25 bp, Homo sapien
gactgcaggtatgtgtgagcccttt

SEQ ID NO: 3854944 - DNA, 25 bp, Homo sapien
tggtgcacaccgacagggttcctgt

SEQ ID NO: 3854945 - DNA, 25 bp, Homo sapien
cttgacctgaatgcagagggcgcca

SEQ ID NO: 3854946 - DNA, 25 bp, Homo sapien
cctatagggtttcatgcagtccgga

SEQ ID NO: 3854947 - DNA, 25 bp, Homo sapien
aaagctgccgtcatcccagtctgga

SEQ ID NO: 3854948 - DNA, 25 bp, Homo sapien
aaagcctcactaaagaatttggcca

SEQ ID NO: 3854949 - DNA, 25 bp, Homo sapien
atgaacccaccacgcagaaaggagg

SEQ ID NO: 3854950 - DNA, 25 bp, Homo sapien
tgaccttggcatccagtggacagag

SEQ ID NO: 3854951 - DNA, 25 bp, Homo sapien
agtgtctaataggaggccccacata

SEQ ID NO: 3854952 - DNA, 25 bp, Homo sapien
tgggctctgttggtgtgcgtgttcc

SEQ ID NO: 3854953 - DNA, 25 bp, Homo sapien
tgcgtgttccgtggcggagagaaga

SEQ ID NO: 3854954 - DNA, 25 bp, Homo sapien
acagacctcgttttagatttatagc

SEQ ID NO: 3854955 - DNA, 25 bp, Homo sapien
atcggaggacgacccgagtcccaag

SEQ ID NO: 3854956 - DNA, 25 bp, Homo sapien
tctgagagctctaaatggcacgcgt

SEQ ID NO: 3854957 - DNA, 25 bp, Homo sapien
taaaagtggaaatgtgctggccgca

SEQ ID NO: 3854958 - DNA, 25 bp, Homo sapien
ttaaacacctccaatggctggcagg

SEQ ID NO: 3854959 - DNA, 25 bp, Homo sapien
tgttgcagaatgtatgggctccccg

SEQ ID NO: 3854960 - DNA, 25 bp, Homo sapien
tagttctagcacttgccaggcgggt

SEQ ID NO: 3854961 - DNA, 25 bp, Homo sapien
agaagaatagcattagttctagcac

SEQ ID NO: 3854962 - DNA, 25 bp, Homo sapien
catcattggcatcttattccagaag

SEQ ID NO: 3854963 - DNA, 25 bp, Homo sapien
tgccatgcgccaagcagtccgtacg

SEQ ID NO: 3854964 - DNA, 25 bp, Homo sapien
ctgctgcggtagttctcccgcctgg

SEQ ID NO: 3854965 - DNA, 25 bp, Homo sapien
tgcggtagttctcccgcctggcctc

SEQ ID NO: 3854966 - DNA, 25 bp, Homo sapien
gtagttctcccgcctggcctctcca

SEQ ID NO: 3854967 - DNA, 25 bp, Homo sapien
tgctgcggtagttctcccgcctggc

SEQ ID NO: 3854968 - DNA, 25 bp, Homo sapien
ttggtcagccgaaccatgagccggc

SEQ ID NO: 3854969 - DNA, 25 bp, Homo sapien
gccggcccacatagaagccactgat

SEQ ID NO: 3854970 - DNA, 25 bp, Homo sapien
ccagctcgtagagacgaacaggtcc

SEQ ID NO: 3854971 - DNA, 25 bp, Homo sapien
ggtcccggctcttggtcagccgaac

SEQ ID NO: 3854972 - DNA, 25 bp, Homo sapien
caggtatgggatagcccaaaaaggc

SEQ ID NO: 3854973 - DNA, 25 bp, Homo sapien
agtggccaggtatgggatagcccaa

SEQ ID NO: 3854974 - DNA, 25 bp, Homo sapien
tgttctagtggccaggtatgggata

SEQ ID NO: 3854975 - DNA, 25 bp, Homo sapien
gatagcccaaaaaggcttccccatg

SEQ ID NO: 3854976 - DNA, 25 bp, Homo sapien
agataggccatcttgggcgtcctca

SEQ ID NO: 3854977 - DNA, 25 bp, Homo sapien
aatggcgtagacgttgctgtggccc

SEQ ID NO: 3854978 - DNA, 25 bp, Homo sapien
agttgacgatgttggccacggcgat

SEQ ID NO: 3854979 - DNA, 25 bp, Homo sapien
cgtcggcacagtcaccaatggcgta

SEQ ID NO: 3854980 - DNA, 25 bp, Homo sapien
aatttcagaagattctggtcacctt

SEQ ID NO: 3854981 - DNA, 25 bp, Homo sapien
cactagggggcggccctaatttcag

SEQ ID NO: 3854982 - DNA, 25 bp, Homo sapien
tttcagaagattctggtcaccttgg

SEQ ID NO: 3854983 - DNA, 25 bp, Homo sapien
atttcagaagattctggtcaccttg

SEQ ID NO: 3854984 - DNA, 25 bp, Homo sapien
tctcgatactcattgagaggcagct

SEQ ID NO: 3854985 - DNA, 25 bp, Homo sapien
cgtctgcactttgatgtactctcga

SEQ ID NO: 3854986 - DNA, 25 bp, Homo sapien
ctgttgatcttgatgccggtgcaga

SEQ ID NO: 3854987 - DNA, 25 bp, Homo sapien
gcagagaatcaccaggttggtggcc

SEQ ID NO: 3854988 - DNA, 25 bp, Homo sapien
tttaatggaagatctcagacgcgcc

SEQ ID NO: 3854989 - DNA, 25 bp, Homo sapien
cagacgcgcctcttatgagtgccag

SEQ ID NO: 3854990 - DNA, 25 bp, Homo sapien
catggaaatcccgtaagtaccaggc

SEQ ID NO: 3854991 - DNA, 25 bp, Homo sapien
tcctaactaggcaggacgagcgctc

SEQ ID NO: 3854992 - DNA, 25 bp, Homo sapien
gcagggagggaggtgagggtgcacg

SEQ ID NO: 3854993 - DNA, 25 bp, Homo sapien
agggagggaggtgagggtgcacgta

SEQ ID NO: 3854994 - DNA, 25 bp, Homo sapien
gggagggaggtgagggtgcacgtac

SEQ ID NO: 3854995 - DNA, 25 bp, Homo sapien
cagggagggaggtgagggtgcacgt

SEQ ID NO: 3854996 - DNA, 25 bp, Homo sapien
ctgcacgcccttccggaggaggatc

SEQ ID NO: 3854997 - DNA, 25 bp, Homo sapien
ccttccggaggaggatctccttcac

SEQ ID NO: 3854998 - DNA, 25 bp, Homo sapien
gcagctgcacgcccttccggaggag

SEQ ID NO: 3854999 - DNA, 25 bp, Homo sapien
acgcccttccggaggaggatctcct

SEQ ID NO: 3855000 - DNA, 25 bp, Homo sapien
taagcccacatgttctagactagga

SEQ ID NO: 3855001 - DNA, 25 bp, Homo sapien
gccggttcttgatacagagctcctg

SEQ ID NO: 3855002 - DNA, 25 bp, Homo sapien
cttaataaagggtggctgctactac

SEQ ID NO: 3855003 - DNA, 25 bp, Homo sapien
gagaagtaatctgtccaatgccagg

SEQ ID NO: 3855004 - DNA, 25 bp, Homo sapien
ccacgatgaaccgtgagcgctggac

SEQ ID NO: 3855005 - DNA, 25 bp, Homo sapien
tcccaccaccacgatgaaccgtgag

SEQ ID NO: 3855006 - DNA, 25 bp, Homo sapien
accaccacgatgaaccgtgagcgct

SEQ ID NO: 3855007 - DNA, 25 bp, Homo sapien
caccacgatgaaccgtgagcgctgg

SEQ ID NO: 3855008 - DNA, 25 bp, Homo sapien
tgcccgtggccaggataagatgaga

SEQ ID NO: 3855009 - DNA, 25 bp, Homo sapien
tcctcataggcctggatagcggcct

SEQ ID NO: 3855010 - DNA, 25 bp, Homo sapien
ggctggaaacctcattaaacttgcc

SEQ ID NO: 3855011 - DNA, 25 bp, Homo sapien
cataggcctggatagcggcctgctg

SEQ ID NO: 3855012 - DNA, 25 bp, Homo sapien
gaaagtcaccgagtaagaaatgaat

SEQ ID NO: 3855013 - DNA, 25 bp, Homo sapien
ccttgaaagtcaccgagtaagaaat

SEQ ID NO: 3855014 - DNA, 25 bp, Homo sapien
cactactagcccctgccggaagttg

SEQ ID NO: 3855015 - DNA, 25 bp, Homo sapien
gcccctgccggaagttgtccttgaa

SEQ ID NO: 3855016 - DNA, 25 bp, Homo sapien
aaagcgtcgggccattaggtatgcc

SEQ ID NO: 3855017 - DNA, 25 bp, Homo sapien
taaaatgccaatctgggcctcagac

SEQ ID NO: 3855018 - DNA, 25 bp, Homo sapien
cagaccgtcagaaaagctcaagctt

SEQ ID NO: 3855019 - DNA, 25 bp, Homo sapien
tttcacgagctgcaaaccaacaggg

SEQ ID NO: 3855020 - DNA, 25 bp, Homo sapien
gctcggagagcagccacattgtggt

SEQ ID NO: 3855021 - DNA, 25 bp, Homo sapien
tccaccagcatgaaggggacgttca

SEQ ID NO: 3855022 - DNA, 25 bp, Homo sapien
tggctgctgcgatcccgccaaagcc

SEQ ID NO: 3855023 - DNA, 25 bp, Homo sapien
aatcaccacgtgcagagctcccgat

SEQ ID NO: 3855024 - DNA, 25 bp, Homo sapien
gacccacagtgagagaggcctcgat

SEQ ID NO: 3855025 - DNA, 25 bp, Homo sapien
ttctccagaggcatccactgttacg

SEQ ID NO: 3855026 - DNA, 25 bp, Homo sapien
tacgtaacaagtttggatgactcct

SEQ ID NO: 3855027 - DNA, 25 bp, Homo sapien
agagcatatcagagtcagggaggct

SEQ ID NO: 3855028 - DNA, 25 bp, Homo sapien
tgagctgtcctcgtacacactggtt

SEQ ID NO: 3855029 - DNA, 25 bp, Homo sapien
cagcttttggttagaactccgggca

SEQ ID NO: 3855030 - DNA, 25 bp, Homo sapien
tgacaatcaggtggacatacaagcc

SEQ ID NO: 3855031 - DNA, 25 bp, Homo sapien
tccaagacatggtggtggttcccca

SEQ ID NO: 3855032 - DNA, 25 bp, Homo sapien
cctggcacagagtagcaatgaatac

SEQ ID NO: 3855033 - DNA, 25 bp, Homo sapien
gccactgtgatttcgagctgtagaa

SEQ ID NO: 3855034 - DNA, 25 bp, Homo sapien
taataataggacagaccgcttacca

SEQ ID NO: 3855035 - DNA, 25 bp, Homo sapien
gcagattagtttgcccagtcccaaa

SEQ ID NO: 3855036 - DNA, 25 bp, Homo sapien
agttactgacccgaggcgctcccgg

SEQ ID NO: 3855037 - DNA, 25 bp, Homo sapien
gcttggtcgtcttcccgagttactg

SEQ ID NO: 3855038 - DNA, 25 bp, Homo sapien
ccccggaaacggtcctggcacgctg

SEQ ID NO: 3855039 - DNA, 25 bp, Homo sapien
ggcgtgactcagcactcgtgctggt

SEQ ID NO: 3855040 - DNA, 25 bp, Homo sapien
ctttgaaacaaatgctcccatggcc

SEQ ID NO: 3855041 - DNA, 25 bp, Homo sapien
ttgaccctgagcgaacggccttgaa

SEQ ID NO: 3855042 - DNA, 25 bp, Homo sapien
tcccatggccagatgtcgcctctcc

SEQ ID NO: 3855043 - DNA, 25 bp, Homo sapien
gcgaacggccttgaactttgaaaca

SEQ ID NO: 3855044 - DNA, 25 bp, Homo sapien
taacatgacggaatctaagaggagg

SEQ ID NO: 3855045 - DNA, 25 bp, Homo sapien
aactgaaaatcagggctcgctgcct

SEQ ID NO: 3855046 - DNA, 25 bp, Homo sapien
ctgtaatgagctcagccaggcctgt

SEQ ID NO: 3855047 - DNA, 25 bp, Homo sapien
tcagcagtgcccatagctttggaac

SEQ ID NO: 3855048 - DNA, 25 bp, Homo sapien
cagtagaaatcactcgagggcccac

SEQ ID NO: 3855049 - DNA, 25 bp, Homo sapien
catgaccagctatgagggccagtct

SEQ ID NO: 3855050 - DNA, 25 bp, Homo sapien
agtctggcaggaccgtatcccgtga

SEQ ID NO: 3855051 - DNA, 25 bp, Homo sapien
cattagtgaaaggatacccagaggt

SEQ ID NO: 3855052 - DNA, 25 bp, Homo sapien
gctggaatctacctgtcaggcccag

SEQ ID NO: 3855053 - DNA, 25 bp, Homo sapien
aacgggctgccaggttaaggatcca

SEQ ID NO: 3855054 - DNA, 25 bp, Homo sapien
gcacagtgtcaagagcgcccctgtt

SEQ ID NO: 3855055 - DNA, 25 bp, Homo sapien
tcctacagcagaaaaaggtcactct

SEQ ID NO: 3855056 - DNA, 25 bp, Homo sapien
tcacggaggccacctaggtcttggg

SEQ ID NO: 3855057 - DNA, 25 bp, Homo sapien
tggagcaccgtgatgggaatgctga

SEQ ID NO: 3855058 - DNA, 25 bp, Homo sapien
agcagcgcggtccagctcacggagg

SEQ ID NO: 3855059 - DNA, 25 bp, Homo sapien
cagggccggctggagcaccgtgatg

SEQ ID NO: 3855060 - DNA, 25 bp, Homo sapien
tattgtcccgggtgttgctggtgat

SEQ ID NO: 3855061 - DNA, 25 bp, Homo sapien
ttgtcccgggtgttgctggtgatta

SEQ ID NO: 3855062 - DNA, 25 bp, Homo sapien
tcccgggtgttgctggtgattatgc

SEQ ID NO: 3855063 - DNA, 25 bp, Homo sapien
ttattgtcccgggtgttgctggtga

SEQ ID NO: 3855064 - DNA, 25 bp, Homo sapien
aaatctcctccaatctgggtcagtt

SEQ ID NO: 3855065 - DNA, 25 bp, Homo sapien
tttgtttggcctgctcggtgcatgg

SEQ ID NO: 3855066 - DNA, 25 bp, Homo sapien
tccatttagttgtcgcatctcccaa

SEQ ID NO: 3855067 - DNA, 25 bp, Homo sapien
gacatgagttgcactagtttttcca

SEQ ID NO: 3855068 - DNA, 25 bp, Homo sapien
gggcctcactatggttgtccagctt

SEQ ID NO: 3855069 - DNA, 25 bp, Homo sapien
ggggcctcactatggttgtccagct

SEQ ID NO: 3855070 - DNA, 25 bp, Homo sapien
gagaatgaccctcaattgaggccta

SEQ ID NO: 3855071 - DNA, 25 bp, Homo sapien
cacaggctaaagtgtaatggtgacc

SEQ ID NO: 3855072 - DNA, 25 bp, Homo sapien
tcccagtgtctcagctatctgatgt

SEQ ID NO: 3855073 - DNA, 25 bp, Homo sapien
tggagtacttctgacgttcaccttg

SEQ ID NO: 3855074 - DNA, 25 bp, Homo sapien
tattagaataccagccaacgttagg

SEQ ID NO: 3855075 - DNA, 25 bp, Homo sapien
actggactggagttggaggtttcta

SEQ ID NO: 3855076 - DNA, 25 bp, Homo sapien
tgatcgatttaacggccacatgtat

SEQ ID NO: 3855077 - DNA, 25 bp, Homo sapien
gacaacaagagcaaggtttttcact

SEQ ID NO: 3855078 - DNA, 25 bp, Homo sapien
ttttcccagacagagggtgcactgg

SEQ ID NO: 3855079 - DNA, 25 bp, Homo sapien
caggagaacagcctgcaaaccttcg

SEQ ID NO: 3855080 - DNA, 25 bp, Homo sapien
tagctcactcataatgcccaccatt

SEQ ID NO: 3855081 - DNA, 25 bp, Homo sapien
cagagaagggaccagagcccagatc

SEQ ID NO: 3855082 - DNA, 25 bp, Homo sapien
caaggaggtttcctgagtggttgga

SEQ ID NO: 3855083 - DNA, 25 bp, Homo sapien
aaggaggtttcctgagtggttggag

SEQ ID NO: 3855084 - DNA, 25 bp, Homo sapien
ggaggtttcctgagtggttggagaa

SEQ ID NO: 3855085 - DNA, 25 bp, Homo sapien
tgagtggttggagaagaggggtccc

SEQ ID NO: 3855086 - DNA, 25 bp, Homo sapien
cacgtggtctgcagcattacgggcg

SEQ ID NO: 3855087 - DNA, 25 bp, Homo sapien
gcacacgtggtctgcagcattacgg

SEQ ID NO: 3855088 - DNA, 25 bp, Homo sapien
tggtctgcagcattacgggcgtgcc

SEQ ID NO: 3855089 - DNA, 25 bp, Homo sapien
tctgcagcattacgggcgtgccatt

SEQ ID NO: 3855090 - DNA, 25 bp, Homo sapien
ctgaggtcaccgagggcccgcaaga

SEQ ID NO: 3855091 - DNA, 25 bp, Homo sapien
gactggccaaagacgccaaagccca

SEQ ID NO: 3855092 - DNA, 25 bp, Homo sapien
tgcaccacagccgaaaggatgcctg

SEQ ID NO: 3855093 - DNA, 25 bp, Homo sapien
accacagccgaaaggatgcctgagg

SEQ ID NO: 3855094 - DNA, 25 bp, Homo sapien
tggagccttgaaagtgccacatgcc

SEQ ID NO: 3855095 - DNA, 25 bp, Homo sapien
gcctccatggagtgcaacatcagta

SEQ ID NO: 3855096 - DNA, 25 bp, Homo sapien
caaggacatgggactaataggtggc

SEQ ID NO: 3855097 - DNA, 25 bp, Homo sapien
tccttttccaagtgcagggtatggg

SEQ ID NO: 3855098 - DNA, 25 bp, Homo sapien
catggaagtgctcagcgggcacagg

SEQ ID NO: 3855099 - DNA, 25 bp, Homo sapien
tggaagtgctcagcgggcacaggga

SEQ ID NO: 3855100 - DNA, 25 bp, Homo sapien
tcatggaagtgctcagcgggcacag

SEQ ID NO: 3855101 - DNA, 25 bp, Homo sapien
cttcatggaagtgctcagcgggcac

SEQ ID NO: 3855102 - DNA, 25 bp, Homo sapien
tagggacatgtctcctgagtggcaa

SEQ ID NO: 3855103 - DNA, 25 bp, Homo sapien
atagggacatgtctcctgagtggca

SEQ ID NO: 3855104 - DNA, 25 bp, Homo sapien
tggcaaataccacacggccccagat

SEQ ID NO: 3855105 - DNA, 25 bp, Homo sapien
aataccacacggccccagatggcca

SEQ ID NO: 3855106 - DNA, 25 bp, Homo sapien
gaggcccagagacgctcagtaacat

SEQ ID NO: 3855107 - DNA, 25 bp, Homo sapien
gggtagcttccaacagacctggcag

SEQ ID NO: 3855108 - DNA, 25 bp, Homo sapien
tatcagccctgaatcgaccagcagg

SEQ ID NO: 3855109 - DNA, 25 bp, Homo sapien
tagcacacgacgtgacaggctccgt

SEQ ID NO: 3855110 - DNA, 25 bp, Homo sapien
ctacaaggcggggtgccacagccac

SEQ ID NO: 3855111 - DNA, 25 bp, Homo sapien
acggtgccgcactccaccaacactg

SEQ ID NO: 3855112 - DNA, 25 bp, Homo sapien
agccactccggagccccatacggtg

SEQ ID NO: 3855113 - DNA, 25 bp, Homo sapien
ggacacgtgccgacaggtcactaca

SEQ ID NO: 3855114 - DNA, 25 bp, Homo sapien
ggcgcagagcagcgtgaagcccacc

SEQ ID NO: 3855115 - DNA, 25 bp, Homo sapien
gcaggcggtgaagcgcgtcgcgggc

SEQ ID NO: 3855116 - DNA, 25 bp, Homo sapien
gaagcccacccattcgccggccttc

SEQ ID NO: 3855117 - DNA, 25 bp, Homo sapien
gccggccttccaacagagcggcgcc

SEQ ID NO: 3855118 - DNA, 25 bp, Homo sapien
tgcgtcggtaagcagcagtgggccg

SEQ ID NO: 3855119 - DNA, 25 bp, Homo sapien
tgggccggccacgttgctgagcacc

SEQ ID NO: 3855120 - DNA, 25 bp, Homo sapien
gcagctcagcgtgttgagaaagatg

SEQ ID NO: 3855121 - DNA, 25 bp, Homo sapien
accccgcagctcagcgtgttgagaa

SEQ ID NO: 3855122 - DNA, 25 bp, Homo sapien
agcccagcgctctcagttgatccgc

SEQ ID NO: 3855123 - DNA, 25 bp, Homo sapien
aggcgcgcgaagtgggcccagaagg

SEQ ID NO: 3855124 - DNA, 25 bp, Homo sapien
ccgagaggcgacaccgccatggctg

SEQ ID NO: 3855125 - DNA, 25 bp, Homo sapien
tcgagaagcgccactgttccgctgc

SEQ ID NO: 3855126 - DNA, 25 bp, Homo sapien
ccgggctcgaggctcgcgcactggg

SEQ ID NO: 3855127 - DNA, 25 bp, Homo sapien
ggctcgcgcactggggcgtgcacag

SEQ ID NO: 3855128 - DNA, 25 bp, Homo sapien
caggtgggccgggctcgaggctcgc

SEQ ID NO: 3855129 - DNA, 25 bp, Homo sapien
ggggcgtgcacagccctgggcggcc

SEQ ID NO: 3855130 - DNA, 25 bp, Homo sapien
ggctcaggattaccccgctgcagct

SEQ ID NO: 3855131 - DNA, 25 bp, Homo sapien
aggtcgtccctgcaactgtcgccag

SEQ ID NO: 3855132 - DNA, 25 bp, Homo sapien
gacttcgctgccagctcgcaggaag

SEQ ID NO: 3855133 - DNA, 25 bp, Homo sapien
aggcccgggctacggctcaggatta

SEQ ID NO: 3855134 - DNA, 25 bp, Homo sapien
gcctgctcggccgccctcatggcag

SEQ ID NO: 3855135 - DNA, 25 bp, Homo sapien
agcccgcctgctcggccgccctcat

SEQ ID NO: 3855136 - DNA, 25 bp, Homo sapien
ccgcctgctcggccgccctcatggc

SEQ ID NO: 3855137 - DNA, 25 bp, Homo sapien
ctgctcggccgccctcatggcagac

SEQ ID NO: 3855138 - DNA, 25 bp, Homo sapien
cactcgggagcttctccgagaaaca

SEQ ID NO: 3855139 - DNA, 25 bp, Homo sapien
gcaagctagcgagcgaggaccccta

SEQ ID NO: 3855140 - DNA, 25 bp, Homo sapien
gcctctaggccggacactcgggagc

SEQ ID NO: 3855141 - DNA, 25 bp, Homo sapien
aaacagcaagctagcgagcgaggac

SEQ ID NO: 3855142 - DNA, 25 bp, Homo sapien
ggcgcaagctctgactcacgtcttc

SEQ ID NO: 3855143 - DNA, 25 bp, Homo sapien
ctggaagcgagaggcgcaagctctg

SEQ ID NO: 3855144 - DNA, 25 bp, Homo sapien
gtccggctgaagctgcctagcgcca

SEQ ID NO: 3855145 - DNA, 25 bp, Homo sapien
ccggtccggctgaagctgcctagcg

SEQ ID NO: 3855146 - DNA, 25 bp, Homo sapien
tctaggccagggtccaaatactttc

SEQ ID NO: 3855147 - DNA, 25 bp, Homo sapien
taaccaccagccaggatttatctag

SEQ ID NO: 3855148 - DNA, 25 bp, Homo sapien
tacgctttaggacagaggaggatga

SEQ ID NO: 3855149 - DNA, 25 bp, Homo sapien
ccgatttgacccacaaggcatagtt

SEQ ID NO: 3855150 - DNA, 25 bp, Homo sapien
gctgggagctactccatgtaccaca

SEQ ID NO: 3855151 - DNA, 25 bp, Homo sapien
ggagctactccatgtaccacaatgc

SEQ ID NO: 3855152 - DNA, 25 bp, Homo sapien
agtagctgggagctactccatgtac

SEQ ID NO: 3855153 - DNA, 25 bp, Homo sapien
gggagctactccatgtaccacaatg

SEQ ID NO: 3855154 - DNA, 25 bp, Homo sapien
taaacggcattgttcaaactcagag

SEQ ID NO: 3855155 - DNA, 25 bp, Homo sapien
cctggtggcaaaattcaagtatctc

SEQ ID NO: 3855156 - DNA, 25 bp, Homo sapien
gcatgttccaaatctctcaagtagt

SEQ ID NO: 3855157 - DNA, 25 bp, Homo sapien
tggttgcctccccaaataaacggca

SEQ ID NO: 3855158 - DNA, 25 bp, Homo sapien
cacccaagtagggatgccggtgctt

SEQ ID NO: 3855159 - DNA, 25 bp, Homo sapien
gctttccccacaagtcagtactgga

SEQ ID NO: 3855160 - DNA, 25 bp, Homo sapien
tactgccaataagtgatgctgcctc

SEQ ID NO: 3855161 - DNA, 25 bp, Homo sapien
gagctgccctatgtataacccacag

SEQ ID NO: 3855162 - DNA, 25 bp, Homo sapien
gagaccaaattctgcaaatggaaat

SEQ ID NO: 3855163 - DNA, 25 bp, Homo sapien
tgagagaccaaattctgcaaatgga

SEQ ID NO: 3855164 - DNA, 25 bp, Homo sapien
ctgagagaccaaattctgcaaatgg

SEQ ID NO: 3855165 - DNA, 25 bp, Homo sapien
gagagaccaaattctgcaaatggaa

SEQ ID NO: 3855166 - DNA, 25 bp, Homo sapien
gaatgaacctagcttaccacagtgg

SEQ ID NO: 3855167 - DNA, 25 bp, Homo sapien
gatggcatacagctttacccggcaa

SEQ ID NO: 3855168 - DNA, 25 bp, Homo sapien
tggaaacctgccacaactgcaaggc

SEQ ID NO: 3855169 - DNA, 25 bp, Homo sapien
caacgccagacatggttggagagct

SEQ ID NO: 3855170 - DNA, 25 bp, Homo sapien
tgaacacttccatggggcgagcatt

SEQ ID NO: 3855171 - DNA, 25 bp, Homo sapien
ttccatggggcgagcattcagctcc

SEQ ID NO: 3855172 - DNA, 25 bp, Homo sapien
gcacatgaacacttccatggggcga

SEQ ID NO: 3855173 - DNA, 25 bp, Homo sapien
ggggcgagcattcagctccttcagg

SEQ ID NO: 3855174 - DNA, 25 bp, Homo sapien
gattggcacattggatattgtttca

SEQ ID NO: 3855175 - DNA, 25 bp, Homo sapien
ttgttacccaagataaggattggca

SEQ ID NO: 3855176 - DNA, 25 bp, Homo sapien
tcactgattgcatctgttctgtcaa

SEQ ID NO: 3855177 - DNA, 25 bp, Homo sapien
cataaagcccaaatatctcacggag

SEQ ID NO: 3855178 - DNA, 25 bp, Homo sapien
aaatacacattaaaggacaaaacat

SEQ ID NO: 3855179 - DNA, 25 bp, Homo sapien
tatacattaaaatacacattaaagg

SEQ ID NO: 3855180 - DNA, 25 bp, Homo sapien
tacattaaaatacacattaaaggac

SEQ ID NO: 3855181 - DNA, 25 bp, Homo sapien
atacacattaaaggacaaaacatac

SEQ ID NO: 3855182 - DNA, 25 bp, Homo sapien
ctcaactttggattccacgaggcga

SEQ ID NO: 3855183 - DNA, 25 bp, Homo sapien
tccacgaggcgagaatgatctgcac

SEQ ID NO: 3855184 - DNA, 25 bp, Homo sapien
ctttggattccacgaggcgagaatg

SEQ ID NO: 3855185 - DNA, 25 bp, Homo sapien
ccacgaggcgagaatgatctgcaca

SEQ ID NO: 3855186 - DNA, 25 bp, Homo sapien
aacaatctacaattcccagttcagg

SEQ ID NO: 3855187 - DNA, 25 bp, Homo sapien
tggtggctaggttattatgtaaaag

SEQ ID NO: 3855188 - DNA, 25 bp, Homo sapien
ccatctggcgtctggtccttctaca

SEQ ID NO: 3855189 - DNA, 25 bp, Homo sapien
cctaaatttatcacaccaaacaatc

SEQ ID NO: 3855190 - DNA, 25 bp, Homo sapien
gaaaccaaagacatagcctgagtag

SEQ ID NO: 3855191 - DNA, 25 bp, Homo sapien
tcaaatgtgaactgagtgcccatca

SEQ ID NO: 3855192 - DNA, 25 bp, Homo sapien
actctgtatgtctctaaacacctga

SEQ ID NO: 3855193 - DNA, 25 bp, Homo sapien
tctaaacacctgataggaatctgga

SEQ ID NO: 3855194 - DNA, 25 bp, Homo sapien
cgtgcccaccaagatcaaaagttgt

SEQ ID NO: 3855195 - DNA, 25 bp, Homo sapien
gctcgtgcccaccaagatcaaaagt

SEQ ID NO: 3855196 - DNA, 25 bp, Homo sapien
cttgctcgtgcccaccaagatcaaa

SEQ ID NO: 3855197 - DNA, 25 bp, Homo sapien
tcgtgcccaccaagatcaaaagttg

SEQ ID NO: 3855198 - DNA, 25 bp, Homo sapien
tatgagttggcttttgggacttcag

SEQ ID NO: 3855199 - DNA, 25 bp, Homo sapien
gtgtcttacagggaactttctcgta

SEQ ID NO: 3855200 - DNA, 25 bp, Homo sapien
gatctgaaagtacataacctgagtg

SEQ ID NO: 3855201 - DNA, 25 bp, Homo sapien
gaggtgtccctttacaggaccagtg

SEQ ID NO: 3855202 - DNA, 25 bp, Homo sapien
agatcaaaaggtcacctgatatttt

SEQ ID NO: 3855203 - DNA, 25 bp, Homo sapien
aagatcaaaaggtcacctgatattt

SEQ ID NO: 3855204 - DNA, 25 bp, Homo sapien
cattatccaaacctaagaatacaag

SEQ ID NO: 3855205 - DNA, 25 bp, Homo sapien
cctgcattatccaaacctaagaata

SEQ ID NO: 3855206 - DNA, 25 bp, Homo sapien
ttgcctgcattatccaaacctaaga

SEQ ID NO: 3855207 - DNA, 25 bp, Homo sapien
tgcattatccaaacctaagaataca

SEQ ID NO: 3855208 - DNA, 25 bp, Homo sapien
tgaagccattgtagatccactcaaa

SEQ ID NO: 3855209 - DNA, 25 bp, Homo sapien
ggaactggagcacactgctgaagcc

SEQ ID NO: 3855210 - DNA, 25 bp, Homo sapien
cattgtagatccactcaaagatgaa

SEQ ID NO: 3855211 - DNA, 25 bp, Homo sapien
tgctgaagccattgtagatccactc

SEQ ID NO: 3855212 - DNA, 25 bp, Homo sapien
gaggaagcaaagtaaagagaaacta

SEQ ID NO: 3855213 - DNA, 25 bp, Homo sapien
ctttcttgacacagattttgcaatc

SEQ ID NO: 3855214 - DNA, 25 bp, Homo sapien
tattctttcttgacacagattttgc

SEQ ID NO: 3855215 - DNA, 25 bp, Homo sapien
cttgacacagattttgcaatctgga

SEQ ID NO: 3855216 - DNA, 25 bp, Homo sapien
tgatgatactttgtggatcctgagg

SEQ ID NO: 3855217 - DNA, 25 bp, Homo sapien
ctcatttgatgatactttgtggatc

SEQ ID NO: 3855218 - DNA, 25 bp, Homo sapien
tacaaattgaaggttggaagcagcc

SEQ ID NO: 3855219 - DNA, 25 bp, Homo sapien
ctttgtggatcctgaggttttctgg

SEQ ID NO: 3855220 - DNA, 25 bp, Homo sapien
tgacgaagacacatcaaaacctgag

SEQ ID NO: 3855221 - DNA, 25 bp, Homo sapien
cctgagataagccagaagctaggcc

SEQ ID NO: 3855222 - DNA, 25 bp, Homo sapien
tctccaagtgaaagtaacaggtctc

SEQ ID NO: 3855223 - DNA, 25 bp, Homo sapien
caaggtgactttacgttgaggccaa

SEQ ID NO: 3855224 - DNA, 25 bp, Homo sapien
ttagtggtgtagaacttcaccatgt

SEQ ID NO: 3855225 - DNA, 25 bp, Homo sapien
agttgattaaatgatcagggaagca

SEQ ID NO: 3855226 - DNA, 25 bp, Homo sapien
attaaatgatcagggaagcagatcc

SEQ ID NO: 3855227 - DNA, 25 bp, Homo sapien
atggctatattagtggtgtagaact

SEQ ID NO: 3855228 - DNA, 25 bp, Homo sapien
gtgggggattcctccctgacctcag

SEQ ID NO: 3855229 - DNA, 25 bp, Homo sapien
gggtaacatagagagacctgcatct

SEQ ID NO: 3855230 - DNA, 25 bp, Homo sapien
cctgggtaacatagagagacctgca

SEQ ID NO: 3855231 - DNA, 25 bp, Homo sapien
ctgaggtgggggattcctccctgac

SEQ ID NO: 3855232 - DNA, 25 bp, Homo sapien
gcgcggcagcgcttgcttgtaatcc

SEQ ID NO: 3855233 - DNA, 25 bp, Homo sapien
aataaaatgaacagctgggcgcggc

SEQ ID NO: 3855234 - DNA, 25 bp, Homo sapien
aaaatgaacagctgggcgcggcagc

SEQ ID NO: 3855235 - DNA, 25 bp, Homo sapien
tcaaagaatgccagatgaagaataa

SEQ ID NO: 3855236 - DNA, 25 bp, Homo sapien
tccaagtagctaaatcccggctgct

SEQ ID NO: 3855237 - DNA, 25 bp, Homo sapien
gctgctgatttgtatgctccaaggg

SEQ ID NO: 3855238 - DNA, 25 bp, Homo sapien
aaagaacaatgtgcccttcctctgc

SEQ ID NO: 3855239 - DNA, 25 bp, Homo sapien
gagtccgcactttaaggagtccaac

SEQ ID NO: 3855240 - DNA, 25 bp, Homo sapien
gggctcctccggcaaaacagcggct

SEQ ID NO: 3855241 - DNA, 25 bp, Homo sapien
caaaacagcggctggctcggaccct

SEQ ID NO: 3855242 - DNA, 25 bp, Homo sapien
tccctcagagcacactaaccagcag

SEQ ID NO: 3855243 - DNA, 25 bp, Homo sapien
tccggcaaaacagcggctggctcgg

SEQ ID NO: 3855244 - DNA, 25 bp, Homo sapien
tgataactttgcagatcttctccgt

SEQ ID NO: 3855245 - DNA, 25 bp, Homo sapien
tcttgggcttgatgcagtggaggtg

SEQ ID NO: 3855246 - DNA, 25 bp, Homo sapien
gcagttttagtgataactttgcaga

SEQ ID NO: 3855247 - DNA, 25 bp, Homo sapien
tgtggaggagcagttttagtgataa

SEQ ID NO: 3855248 - DNA, 25 bp, Homo sapien
tcttaagatggttcgggccatggct

SEQ ID NO: 3855249 - DNA, 25 bp, Homo sapien
aatcttaagatggttcgggccatgg

SEQ ID NO: 3855250 - DNA, 25 bp, Homo sapien
atggaatcttaagatggttcgggcc

SEQ ID NO: 3855251 - DNA, 25 bp, Homo sapien
ggttcgggccatggctggtcacggt

SEQ ID NO: 3855252 - DNA, 25 bp, Homo sapien
tggccccagatctgttcactgggtc

SEQ ID NO: 3855253 - DNA, 25 bp, Homo sapien
ccttggccccagatctgttcactgg

SEQ ID NO: 3855254 - DNA, 25 bp, Homo sapien
gccccagatctgttcactgggtctt

SEQ ID NO: 3855255 - DNA, 25 bp, Homo sapien
ttggccccagatctgttcactgggt

SEQ ID NO: 3855256 - DNA, 25 bp, Homo sapien
gtgcagtggcgacctctgcagcttt

SEQ ID NO: 3855257 - DNA, 25 bp, Homo sapien
tataggatcctaaaatgtactcacc

SEQ ID NO: 3855258 - DNA, 25 bp, Homo sapien
caaaggcctctatggttataatcag

SEQ ID NO: 3855259 - DNA, 25 bp, Homo sapien
aaattactagtgacaaacagggaca

SEQ ID NO: 3855260 - DNA, 25 bp, Homo sapien
gatagagctaaaagttcaaaggcct

SEQ ID NO: 3855261 - DNA, 25 bp, Homo sapien
gaaataggcccacacagatatgctc

SEQ ID NO: 3855262 - DNA, 25 bp, Homo sapien
ggagcaaccggacatccataggaaa

SEQ ID NO: 3855263 - DNA, 25 bp, Homo sapien
caatggatatttgacaagcgtgcaa

SEQ ID NO: 3855264 - DNA, 25 bp, Homo sapien
tcaagagagtgtggtatcggcagac

SEQ ID NO: 3855265 - DNA, 25 bp, Homo sapien
aaatgctttagatggataacattct

SEQ ID NO: 3855266 - DNA, 25 bp, Homo sapien
gctttagatggataacattctgagt

SEQ ID NO: 3855267 - DNA, 25 bp, Homo sapien
tgctttagatggataacattctgag

SEQ ID NO: 3855268 - DNA, 25 bp, Homo sapien
ttctggtgatggaaccacttatcca

SEQ ID NO: 3855269 - DNA, 25 bp, Homo sapien
ttttctggtgatggaaccacttatc

SEQ ID NO: 3855270 - DNA, 25 bp, Homo sapien
tagtttttctggtgatggaaccact

SEQ ID NO: 3855271 - DNA, 25 bp, Homo sapien
gtttttctggtgatggaaccactta

SEQ ID NO: 3855272 - DNA, 25 bp, Homo sapien
ttaatgaatcctactatgaattacc

SEQ ID NO: 3855273 - DNA, 25 bp, Homo sapien
aatacacctaacatataacaaagac

SEQ ID NO: 3855274 - DNA, 25 bp, Homo sapien
ttgagaatcaaaaatacacctaaca

SEQ ID NO: 3855275 - DNA, 25 bp, Homo sapien
aatgaatcctactatgaattacctg

SEQ ID NO: 3855276 - DNA, 25 bp, Homo sapien
aatgtggagatcagcccactcaggg

SEQ ID NO: 3855277 - DNA, 25 bp, Homo sapien
cactaaaggtggtatgtagcagctc

SEQ ID NO: 3855278 - DNA, 25 bp, Homo sapien
taaaaatatgtacgtggctgcgtgc

SEQ ID NO: 3855279 - DNA, 25 bp, Homo sapien
gaaacccggcctgattagtgttcaa

SEQ ID NO: 3855280 - DNA, 25 bp, Homo sapien
tgcaggcagattcacagggtggtgg

SEQ ID NO: 3855281 - DNA, 25 bp, Homo sapien
gtgcaggcagattcacagggtggtg

SEQ ID NO: 3855282 - DNA, 25 bp, Homo sapien
cgtctgttggtactgtgcaggcaga

SEQ ID NO: 3855283 - DNA, 25 bp, Homo sapien
ctgttggtactgtgcaggcagattc

SEQ ID NO: 3855284 - DNA, 25 bp, Homo sapien
caaaattattgctttgacgggtgct

SEQ ID NO: 3855285 - DNA, 25 bp, Homo sapien
cagtccttgctagaaccaagtcaag

SEQ ID NO: 3855286 - DNA, 25 bp, Homo sapien
ggtcataggcacacaggttacttgg

SEQ ID NO: 3855287 - DNA, 25 bp, Homo sapien
tgttctaccccatttacaaggcagt

SEQ ID NO: 3855288 - DNA, 25 bp, Homo sapien
tgtcgaaacaagtacttcctctccc

SEQ ID NO: 3855289 - DNA, 25 bp, Homo sapien
tcaagtatttgtcgaaacaagtact

SEQ ID NO: 3855290 - DNA, 25 bp, Homo sapien
tcctctccccatttagcatcatagt

SEQ ID NO: 3855291 - DNA, 25 bp, Homo sapien
catagtttttagcaaccaggcttgt

SEQ ID NO: 3855292 - DNA, 25 bp, Homo sapien
acttgaaggggctctcagacaaagt

SEQ ID NO: 3855293 - DNA, 25 bp, Homo sapien
cttgaaggggctctcagacaaagtt

SEQ ID NO: 3855294 - DNA, 25 bp, Homo sapien
ttgaaggggctctcagacaaagttg

SEQ ID NO: 3855295 - DNA, 25 bp, Homo sapien
agtcactaatgctttccaatggtca

SEQ ID NO: 3855296 - DNA, 25 bp, Homo sapien
tcttagtcactaatgctttccaatg

SEQ ID NO: 3855297 - DNA, 25 bp, Homo sapien
ttttcttagtcactaatgctttcca

SEQ ID NO: 3855298 - DNA, 25 bp, Homo sapien
tagtcactaatgctttccaatggtc

SEQ ID NO: 3855299 - DNA, 25 bp, Homo sapien
tgaagaggtttgcattacaatgata

SEQ ID NO: 3855300 - DNA, 25 bp, Homo sapien
ttgaagaggtttgcattacaatgat

SEQ ID NO: 3855301 - DNA, 25 bp, Homo sapien
aagaggtttgcattacaatgataaa

SEQ ID NO: 3855302 - DNA, 25 bp, Homo sapien
gaagaggtttgcattacaatgataa

SEQ ID NO: 3855303 - DNA, 25 bp, Homo sapien
taaattctgcattaaacgcaaactc

SEQ ID NO: 3855304 - DNA, 25 bp, Homo sapien
taaaccagtccacagtagcttctaa

SEQ ID NO: 3855305 - DNA, 25 bp, Homo sapien
taagtagccaggtttcagccgtttg

SEQ ID NO: 3855306 - DNA, 25 bp, Homo sapien
catcaggaaccttataccttctaaa

SEQ ID NO: 3855307 - DNA, 25 bp, Homo sapien
gataacattggagcgaagccccttg

SEQ ID NO: 3855308 - DNA, 25 bp, Homo sapien
tctctgttaggtaagggcaaacagc

SEQ ID NO: 3855309 - DNA, 25 bp, Homo sapien
gaggtactatccctggtccagaggc

SEQ ID NO: 3855310 - DNA, 25 bp, Homo sapien
ggcagaggctatgtcagaggatcac

SEQ ID NO: 3855311 - DNA, 25 bp, Homo sapien
gtcggtttccccttcgtcaatcata

SEQ ID NO: 3855312 - DNA, 25 bp, Homo sapien
tcggtttccccttcgtcaatcatag

SEQ ID NO: 3855313 - DNA, 25 bp, Homo sapien
agtcggtttccccttcgtcaatcat

SEQ ID NO: 3855314 - DNA, 25 bp, Homo sapien
cagtcggtttccccttcgtcaatca

SEQ ID NO: 3855315 - DNA, 25 bp, Homo sapien
cacaacagccagtatgtttatcatt

SEQ ID NO: 3855316 - DNA, 25 bp, Homo sapien
aattgggtcattgtcaccacaacag

SEQ ID NO: 3855317 - DNA, 25 bp, Homo sapien
tttcacacacatcaattgggtcatt

SEQ ID NO: 3855318 - DNA, 25 bp, Homo sapien
cattgtcaccacaacagccagtatg

SEQ ID NO: 3855319 - DNA, 25 bp, Homo sapien
tcctttatacgggaacaaattcgca

SEQ ID NO: 3855320 - DNA, 25 bp, Homo sapien
tttatacgggaacaaattcgcaaca

SEQ ID NO: 3855321 - DNA, 25 bp, Homo sapien
ttatacgggaacaaattcgcaacat

SEQ ID NO: 3855322 - DNA, 25 bp, Homo sapien
tatacgggaacaaattcgcaacata

SEQ ID NO: 3855323 - DNA, 25 bp, Homo sapien
taaattctaatgtttgagtaataaa

SEQ ID NO: 3855324 - DNA, 25 bp, Homo sapien
gtgattactgttaagagtttgtgat

SEQ ID NO: 3855325 - DNA, 25 bp, Homo sapien
gtgaggtataaaggaactatcaaga

SEQ ID NO: 3855326 - DNA, 25 bp, Homo sapien
tataaaggaactatcaagaagggaa

SEQ ID NO: 3855327 - DNA, 25 bp, Homo sapien
ctagtaggcaatgggagatacaact

SEQ ID NO: 3855328 - DNA, 25 bp, Homo sapien
tgagtttagctggagcccaaaggga

SEQ ID NO: 3855329 - DNA, 25 bp, Homo sapien
tctaggctttgggaacattggaagc

SEQ ID NO: 3855330 - DNA, 25 bp, Homo sapien
actagaaaatagactgggaccagac

SEQ ID NO: 3855331 - DNA, 25 bp, Homo sapien
gaccagcgtggtacttcaactacca

SEQ ID NO: 3855332 - DNA, 25 bp, Homo sapien
ttagaccagcgtggtacttcaacta

SEQ ID NO: 3855333 - DNA, 25 bp, Homo sapien
cttcaactaccatgtgaaacacatc

SEQ ID NO: 3855334 - DNA, 25 bp, Homo sapien
gcgtggtacttcaactaccatgtga

SEQ ID NO: 3855335 - DNA, 25 bp, Homo sapien
ggtatgagcttgactcactgaagcc

SEQ ID NO: 3855336 - DNA, 25 bp, Homo sapien
gaaaccatgggagactaaagcatcc

SEQ ID NO: 3855337 - DNA, 25 bp, Homo sapien
gggctttcggtttccagcagcagta

SEQ ID NO: 3855338 - DNA, 25 bp, Homo sapien
aagatcaactgaagagctcgccaag

SEQ ID NO: 3855339 - DNA, 25 bp, Homo sapien
tcctgggtagaaaacctcagaacca

SEQ ID NO: 3855340 - DNA, 25 bp, Homo sapien
aaaagccagagtcaattcattgatt

SEQ ID NO: 3855341 - DNA, 25 bp, Homo sapien
tgcaaaagccagagtcaattcattg

SEQ ID NO: 3855342 - DNA, 25 bp, Homo sapien
caaaagccagagtcaattcattgat

SEQ ID NO: 3855343 - DNA, 25 bp, Homo sapien
gcaaaagccagagtcaattcattga

SEQ ID NO: 3855344 - DNA, 25 bp, Homo sapien
gatgctttcgaaaaggtataccaga

SEQ ID NO: 3855345 - DNA, 25 bp, Homo sapien
tgctcaccaaatgacaatggctctt

SEQ ID NO: 3855346 - DNA, 25 bp, Homo sapien
gaaatacgatgaccgaagttcacac

SEQ ID NO: 3855347 - DNA, 25 bp, Homo sapien
tccctatcagaagagctcacgtagt

SEQ ID NO: 3855348 - DNA, 25 bp, Homo sapien
actaacttcttatttagtcaatgga

SEQ ID NO: 3855349 - DNA, 25 bp, Homo sapien
gactaacttcttatttagtcaatgg

SEQ ID NO: 3855350 - DNA, 25 bp, Homo sapien
cttatctgcataaattggaatatca

SEQ ID NO: 3855351 - DNA, 25 bp, Homo sapien
catgaaatggagatatatattgtcc

SEQ ID NO: 3855352 - DNA, 25 bp, Homo sapien
gagatatatattgtcctttctcatt

SEQ ID NO: 3855353 - DNA, 25 bp, Homo sapien
tggaatatcatgaaatggagatata

SEQ ID NO: 3855354 - DNA, 25 bp, Homo sapien
gctcctcggtgctgaagccgctcat

SEQ ID NO: 3855355 - DNA, 25 bp, Homo sapien
gcggcgcgctcctcggtgctgaagc

SEQ ID NO: 3855356 - DNA, 25 bp, Homo sapien
ctccagggagaagggcgcggcgcgc

SEQ ID NO: 3855357 - DNA, 25 bp, Homo sapien
tgaggaagactcggtactccaggga

SEQ ID NO: 3855358 - DNA, 25 bp, Homo sapien
ccgcacgcggcgccgactgacaagg

SEQ ID NO: 3855359 - DNA, 25 bp, Homo sapien
gcacgcggcgccgactgacaaggag

SEQ ID NO: 3855360 - DNA, 25 bp, Homo sapien
acgcggcgccgactgacaaggagag

SEQ ID NO: 3855361 - DNA, 25 bp, Homo sapien
agagccaccagcccgcacgcggcgc

SEQ ID NO: 3855362 - DNA, 25 bp, Homo sapien
caaagttgagccatattactgacac

SEQ ID NO: 3855363 - DNA, 25 bp, Homo sapien
tctgatccgtcgtaacaaagttgag

SEQ ID NO: 3855364 - DNA, 25 bp, Homo sapien
tctgcttgcggtcttaaaggtgagc

SEQ ID NO: 3855365 - DNA, 25 bp, Homo sapien
tctcaaaaggcgttgataagtcacc

SEQ ID NO: 3855366 - DNA, 25 bp, Homo sapien
cattttgcaaagacacggactagag

SEQ ID NO: 3855367 - DNA, 25 bp, Homo sapien
cactgaaacggattgacttggctgt

SEQ ID NO: 3855368 - DNA, 25 bp, Homo sapien
cacagaaatgtagatcgctcagtca

SEQ ID NO: 3855369 - DNA, 25 bp, Homo sapien
gaggaccacgagacagcactatgga

SEQ ID NO: 3855370 - DNA, 25 bp, Homo sapien
tcagtttcccagatgtaggaaggag

SEQ ID NO: 3855371 - DNA, 25 bp, Homo sapien
tatgggagacctccatcaaggctct

SEQ ID NO: 3855372 - DNA, 25 bp, Homo sapien
cctggactttgtggtcagatagact

SEQ ID NO: 3855373 - DNA, 25 bp, Homo sapien
gatgcaaatgtgtctcatggccaaa

SEQ ID NO: 3855374 - DNA, 25 bp, Homo sapien
cccttccctgggcaagccgtggtga

SEQ ID NO: 3855375 - DNA, 25 bp, Homo sapien
ccttccctgggcaagccgtggtgag

SEQ ID NO: 3855376 - DNA, 25 bp, Homo sapien
gcccttccctgggcaagccgtggtg

SEQ ID NO: 3855377 - DNA, 25 bp, Homo sapien
cgcccattccgcagcgggaggcggc

SEQ ID NO: 3855378 - DNA, 25 bp, Homo sapien
ccgcccattccgcagcgggaggcgg

SEQ ID NO: 3855379 - DNA, 25 bp, Homo sapien
cccgactcagagggcagcccggagt

SEQ ID NO: 3855380 - DNA, 25 bp, Homo sapien
gactcagagggcagcccggagtcgc

SEQ ID NO: 3855381 - DNA, 25 bp, Homo sapien
tagggcccgactcagagggcagccc

SEQ ID NO: 3855382 - DNA, 25 bp, Homo sapien
ctagggcccgactcagagggcagcc

SEQ ID NO: 3855383 - DNA, 25 bp, Homo sapien
aagccgcggcggaagttctcgttga

SEQ ID NO: 3855384 - DNA, 25 bp, Homo sapien
caggacagcgtgaagaacagcgcca

SEQ ID NO: 3855385 - DNA, 25 bp, Homo sapien
tctcgttgaagtagccgtagatgat

SEQ ID NO: 3855386 - DNA, 25 bp, Homo sapien
tgagctgcccgtagtcgatgagcag

SEQ ID NO: 3855387 - DNA, 25 bp, Homo sapien
ggcctggcagagcttgcgcgcgatg

SEQ ID NO: 3855388 - DNA, 25 bp, Homo sapien
tgcgccgcgatgctcgcgggtccgc

SEQ ID NO: 3855389 - DNA, 25 bp, Homo sapien
gcgatgctcgcgggtccgcagcctc

SEQ ID NO: 3855390 - DNA, 25 bp, Homo sapien
gagcttgcgcgcgatgcgggcgtac

SEQ ID NO: 3855391 - DNA, 25 bp, Homo sapien
cctcccagcaggagtagagcgggta

SEQ ID NO: 3855392 - DNA, 25 bp, Homo sapien
gcacagtggtgtagaccctgcgcat

SEQ ID NO: 3855393 - DNA, 25 bp, Homo sapien
ccaggtagatgtgcgagaagagcac

SEQ ID NO: 3855394 - DNA, 25 bp, Homo sapien
gcttctcgcggaaagggtgcacgat

SEQ ID NO: 3855395 - DNA, 25 bp, Homo sapien
ctgaccttcatcatcgcatctaggg

SEQ ID NO: 3855396 - DNA, 25 bp, Homo sapien
tcatcgcatctagggcggcgtcgaa

SEQ ID NO: 3855397 - DNA, 25 bp, Homo sapien
gcggcgtcgaagaacagctcagacc

SEQ ID NO: 3855398 - DNA, 25 bp, Homo sapien
atctagggcggcgtcgaagaacagc

SEQ ID NO: 3855399 - DNA, 25 bp, Homo sapien
agtgtgaaaacggaagccgacacag

SEQ ID NO: 3855400 - DNA, 25 bp, Homo sapien
tgcaccaagccgctcatcttgcatg

SEQ ID NO: 3855401 - DNA, 25 bp, Homo sapien
catcttgcatgtggcattgtcgaag

SEQ ID NO: 3855402 - DNA, 25 bp, Homo sapien
gaagccgacacagacatgccctgca

SEQ ID NO: 3855403 - DNA, 25 bp, Homo sapien
tggagtctcaggttggtggaaactt

SEQ ID NO: 3855404 - DNA, 25 bp, Homo sapien
gtctcaggttggtggaaacttgatt

SEQ ID NO: 3855405 - DNA, 25 bp, Homo sapien
ctggagtctcaggttggtggaaact

SEQ ID NO: 3855406 - DNA, 25 bp, Homo sapien
gagtctcaggttggtggaaacttga

SEQ ID NO: 3855407 - DNA, 25 bp, Homo sapien
caagaaaggccagtcgcatgagaga

SEQ ID NO: 3855408 - DNA, 25 bp, Homo sapien
acaagaaaggccagtcgcatgagag

SEQ ID NO: 3855409 - DNA, 25 bp, Homo sapien
agaaaggccagtcgcatgagagagt

SEQ ID NO: 3855410 - DNA, 25 bp, Homo sapien
aaggccagtcgcatgagagagtaga

SEQ ID NO: 3855411 - DNA, 25 bp, Homo sapien
gccggttcttgagcacgatgaaaca

SEQ ID NO: 3855412 - DNA, 25 bp, Homo sapien
gggtgttgcccaccatgcagagcag

SEQ ID NO: 3855413 - DNA, 25 bp, Homo sapien
cgatgaaacagaccagggtgttgcc

SEQ ID NO: 3855414 - DNA, 25 bp, Homo sapien
gaagatgagcgcataggccacaatg

SEQ ID NO: 3855415 - DNA, 25 bp, Homo sapien
gtgttagtcccattctgacttaggg

SEQ ID NO: 3855416 - DNA, 25 bp, Homo sapien
gggtggcctcagtgttagtcccatt

SEQ ID NO: 3855417 - DNA, 25 bp, Homo sapien
tgacttaggggccaactgctgttgg

SEQ ID NO: 3855418 - DNA, 25 bp, Homo sapien
gaggagaaggtgaggtttgtagccg

SEQ ID NO: 3855419 - DNA, 25 bp, Homo sapien
ggaccaaaggaatatattggtcagg

SEQ ID NO: 3855420 - DNA, 25 bp, Homo sapien
accaaaggaatatattggtcaggac

SEQ ID NO: 3855421 - DNA, 25 bp, Homo sapien
ctaggaccaaaggaatatattggtc

SEQ ID NO: 3855422 - DNA, 25 bp, Homo sapien
taggaccaaaggaatatattggtca

SEQ ID NO: 3855423 - DNA, 25 bp, Homo sapien
ctctaagttctgcattgccctggtt

SEQ ID NO: 3855424 - DNA, 25 bp, Homo sapien
taagttctgcattgccctggttccc

SEQ ID NO: 3855425 - DNA, 25 bp, Homo sapien
tctagctgggttcagccaatgccag

SEQ ID NO: 3855426 - DNA, 25 bp, Homo sapien
tgcattgccctggttcccttgtctt

SEQ ID NO: 3855427 - DNA, 25 bp, Homo sapien
ctttgatgtcgttccccttcatctc

SEQ ID NO: 3855428 - DNA, 25 bp, Homo sapien
tttgatgtcgttccccttcatctcc

SEQ ID NO: 3855429 - DNA, 25 bp, Homo sapien
ggtacagcactgtggcttggcaatc

SEQ ID NO: 3855430 - DNA, 25 bp, Homo sapien
ttgggactctcgtgcagctgctgta

SEQ ID NO: 3855431 - DNA, 25 bp, Homo sapien
gctgctgtagttatctgctggctca

SEQ ID NO: 3855432 - DNA, 25 bp, Homo sapien
acagttatcaactcgaggcctggag

SEQ ID NO: 3855433 - DNA, 25 bp, Homo sapien
acagatcggcaatgactgaattatt

SEQ ID NO: 3855434 - DNA, 25 bp, Homo sapien
ttcgtcaaacagatcggcaatgact

SEQ ID NO: 3855435 - DNA, 25 bp, Homo sapien
caaacagatcggcaatgactgaatt

SEQ ID NO: 3855436 - DNA, 25 bp, Homo sapien
cttttcgtcaaacagatcggcaatg

SEQ ID NO: 3855437 - DNA, 25 bp, Homo sapien
tgggaatcagaaagcgtggccttga

SEQ ID NO: 3855438 - DNA, 25 bp, Homo sapien
gcgtggccttgagagctggccccat

SEQ ID NO: 3855439 - DNA, 25 bp, Homo sapien
aaagcgtggccttgagagctggccc

SEQ ID NO: 3855440 - DNA, 25 bp, Homo sapien
atcagaaagcgtggccttgagagct

SEQ ID NO: 3855441 - DNA, 25 bp, Homo sapien
cccagttgcgggctccggcggtctc

SEQ ID NO: 3855442 - DNA, 25 bp, Homo sapien
caggtccggtcggtccgggcagagg

SEQ ID NO: 3855443 - DNA, 25 bp, Homo sapien
agagggacggtctccgggcacttgg

SEQ ID NO: 3855444 - DNA, 25 bp, Homo sapien
gcggtctccgatggcgggaggcagc

SEQ ID NO: 3855445 - DNA, 25 bp, Homo sapien
tgtgcccgccgagcgagggcgcccc

SEQ ID NO: 3855446 - DNA, 25 bp, Homo sapien
ctgtgcccgccgagcgagggcgccc

SEQ ID NO: 3855447 - DNA, 25 bp, Homo sapien
gtgcccgccgagcgagggcgccccg

SEQ ID NO: 3855448 - DNA, 25 bp, Homo sapien
tgcccgccgagcgagggcgccccgg

SEQ ID NO: 3855449 - DNA, 25 bp, Homo sapien
aaacacaagaatttcactgggcttt

SEQ ID NO: 3855450 - DNA, 25 bp, Homo sapien
ctgttctactggagaaacacaagaa

SEQ ID NO: 3855451 - DNA, 25 bp, Homo sapien
gctccttcaacgctgctgttctact

SEQ ID NO: 3855452 - DNA, 25 bp, Homo sapien
tagggcagcccttcagaggtcaagt

SEQ ID NO: 3855453 - DNA, 25 bp, Homo sapien
atccatgtggacacctgcttggaga

SEQ ID NO: 3855454 - DNA, 25 bp, Homo sapien
tccatgtggacacctgcttggagaa

SEQ ID NO: 3855455 - DNA, 25 bp, Homo sapien
aatccatgtggacacctgcttggag

SEQ ID NO: 3855456 - DNA, 25 bp, Homo sapien
gaatccatgtggacacctgcttgga

SEQ ID NO: 3855457 - DNA, 25 bp, Homo sapien
cgcaagggtcctggtctcatagagc

SEQ ID NO: 3855458 - DNA, 25 bp, Homo sapien
tgccgcaagggtcctggtctcatag

SEQ ID NO: 3855459 - DNA, 25 bp, Homo sapien
ctgccgcaagggtcctggtctcata

SEQ ID NO: 3855460 - DNA, 25 bp, Homo sapien
gccgcaagggtcctggtctcataga

SEQ ID NO: 3855461 - DNA, 25 bp, Homo sapien
gccacccaagatgcccacggcccag

SEQ ID NO: 3855462 - DNA, 25 bp, Homo sapien
atgcccacggcccagtccttgtcca

SEQ ID NO: 3855463 - DNA, 25 bp, Homo sapien
ccaagatgcccacggcccagtcctt

SEQ ID NO: 3855464 - DNA, 25 bp, Homo sapien
ggccacccaagatgcccacggccca

SEQ ID NO: 3855465 - DNA, 25 bp, Homo sapien
tccgtgtggtgaaaatatggcccct

SEQ ID NO: 3855466 - DNA, 25 bp, Homo sapien
gagaccctttctcttgcacagcagc

SEQ ID NO: 3855467 - DNA, 25 bp, Homo sapien
gctggaaatgcacacgggcctttgg

SEQ ID NO: 3855468 - DNA, 25 bp, Homo sapien
tgccctccaagagcagagacccttt

SEQ ID NO: 3855469 - DNA, 25 bp, Homo sapien
tcttgaacgctgtggaacattccct

SEQ ID NO: 3855470 - DNA, 25 bp, Homo sapien
cttattaatcagctctccctaggga

SEQ ID NO: 3855471 - DNA, 25 bp, Homo sapien
ggttcccatctacgaagcagaagag

SEQ ID NO: 3855472 - DNA, 25 bp, Homo sapien
tgggcattcgtctgggttccaccaa

SEQ ID NO: 3855473 - DNA, 25 bp, Homo sapien
tttgcccagagtttgaccaaccagg

SEQ ID NO: 3855474 - DNA, 25 bp, Homo sapien
cctaagatgccaggttgagggcctc

SEQ ID NO: 3855475 - DNA, 25 bp, Homo sapien
gtcaaggttcttcaagccacaggcg

SEQ ID NO: 3855476 - DNA, 25 bp, Homo sapien
caaccaggccttgggatacgagcag

SEQ ID NO: 3855477 - DNA, 25 bp, Homo sapien
acccaccacgtgctgctcggcccac

SEQ ID NO: 3855478 - DNA, 25 bp, Homo sapien
cccaccacgtgctgctcggcccacc

SEQ ID NO: 3855479 - DNA, 25 bp, Homo sapien
tgaagcggaggttgatgctgcgcaa

SEQ ID NO: 3855480 - DNA, 25 bp, Homo sapien
cgttgagtgggttgaagcggaggtt

SEQ ID NO: 3855481 - DNA, 25 bp, Homo sapien
gcgccttccggagacatgagcatgt

SEQ ID NO: 3855482 - DNA, 25 bp, Homo sapien
tcacgcgcacctcggcgttgagtgg

SEQ ID NO: 3855483 - DNA, 25 bp, Homo sapien
ctccttcgctttctctggagctcat

SEQ ID NO: 3855484 - DNA, 25 bp, Homo sapien
tagaatccttttatgaagccagagg

SEQ ID NO: 3855485 - DNA, 25 bp, Homo sapien
tcttaggtgaggactaaagtcaagg

SEQ ID NO: 3855486 - DNA, 25 bp, Homo sapien
tcaaggactcagtggcctatggcaa

SEQ ID NO: 3855487 - DNA, 25 bp, Homo sapien
tgttgcaaggcctcatgtcttaggt

SEQ ID NO: 3855488 - DNA, 25 bp, Homo sapien
ctctggagacagccaaataagcagc

SEQ ID NO: 3855489 - DNA, 25 bp, Homo sapien
tggagacagccaaataagcagctga

SEQ ID NO: 3855490 - DNA, 25 bp, Homo sapien
tctggagacagccaaataagcagct

SEQ ID NO: 3855491 - DNA, 25 bp, Homo sapien
aaataagcagctgaaacggctgggc

SEQ ID NO: 3855492 - DNA, 25 bp, Homo sapien
cagcaaatggtcactagtgcacggg

SEQ ID NO: 3855493 - DNA, 25 bp, Homo sapien
ggtatcctctcatgtcttcgttcag

SEQ ID NO: 3855494 - DNA, 25 bp, Homo sapien
gtgtctcagcgtactgacttgccga

SEQ ID NO: 3855495 - DNA, 25 bp, Homo sapien
gaatcccggctcagatggagtgacc

SEQ ID NO: 3855496 - DNA, 25 bp, Homo sapien
gcaacagcccctggcatttccatat

SEQ ID NO: 3855497 - DNA, 25 bp, Homo sapien
gagcccctcctggacagcaacagcc

SEQ ID NO: 3855498 - DNA, 25 bp, Homo sapien
gctgacagggagcagcgtgtttgtt

SEQ ID NO: 3855499 - DNA, 25 bp, Homo sapien
gcagggcggtaagctgctcagggaa

SEQ ID NO: 3855500 - DNA, 25 bp, Homo sapien
ggttgatggtctccagcgccggcag

SEQ ID NO: 3855501 - DNA, 25 bp, Homo sapien
agtcctggaactggttccgggacag

SEQ ID NO: 3855502 - DNA, 25 bp, Homo sapien
tccgggacaggtcaatggccttgag

SEQ ID NO: 3855503 - DNA, 25 bp, Homo sapien
caatgggaaaggagaccagcttgca

SEQ ID NO: 3855504 - DNA, 25 bp, Homo sapien
ttaagctcgttgttagccagggtga

SEQ ID NO: 3855505 - DNA, 25 bp, Homo sapien
gatctggccagagacattccgcagg

SEQ ID NO: 3855506 - DNA, 25 bp, Homo sapien
tccgcaggaccttgtagatgccaat

SEQ ID NO: 3855507 - DNA, 25 bp, Homo sapien
ctcctcttgccactcgatctaaagc

SEQ ID NO: 3855508 - DNA, 25 bp, Homo sapien
cctcttgccactcgatctaaagcct

SEQ ID NO: 3855509 - DNA, 25 bp, Homo sapien
tcttgccactcgatctaaagcctct

SEQ ID NO: 3855510 - DNA, 25 bp, Homo sapien
cttgccactcgatctaaagcctctc

SEQ ID NO: 3855511 - DNA, 25 bp, Homo sapien
gatttgcactgaaccctccattgga

SEQ ID NO: 3855512 - DNA, 25 bp, Homo sapien
atctgtcgatttgcactgaaccctc

SEQ ID NO: 3855513 - DNA, 25 bp, Homo sapien
cacagacatctgtcgatttgcactg

SEQ ID NO: 3855514 - DNA, 25 bp, Homo sapien
tgtcgatttgcactgaaccctccat

SEQ ID NO: 3855515 - DNA, 25 bp, Homo sapien
ccagagtgtcagagccgctctccac

SEQ ID NO: 3855516 - DNA, 25 bp, Homo sapien
agagtgtcagagccgctctccaccg

SEQ ID NO: 3855517 - DNA, 25 bp, Homo sapien
tccaccgtctcgttgaccttccttg

SEQ ID NO: 3855518 - DNA, 25 bp, Homo sapien
gagtgtcagagccgctctccaccgt

SEQ ID NO: 3855519 - DNA, 25 bp, Homo sapien
gtcctgccgccagcccccaggctgg

SEQ ID NO: 3855520 - DNA, 25 bp, Homo sapien
ggtgtcctgccgccagcccccaggc

SEQ ID NO: 3855521 - DNA, 25 bp, Homo sapien
gcagacacaggtgtcctgccgccag

SEQ ID NO: 3855522 - DNA, 25 bp, Homo sapien
tcctgccgccagcccccaggctggt

SEQ ID NO: 3855523 - DNA, 25 bp, Homo sapien
ctgcttctcacaaaagggcctgagc

SEQ ID NO: 3855524 - DNA, 25 bp, Homo sapien
ggcagctgggttctactggttttct

SEQ ID NO: 3855525 - DNA, 25 bp, Homo sapien
ggccgagagctcaggccacatccag

SEQ ID NO: 3855526 - DNA, 25 bp, Homo sapien
gattcactctataggcagggcattg

SEQ ID NO: 3855527 - DNA, 25 bp, Homo sapien
catgtgtgacctcaccagacatggg

SEQ ID NO: 3855528 - DNA, 25 bp, Homo sapien
tcagatcagaacgaagttgacccac

SEQ ID NO: 3855529 - DNA, 25 bp, Homo sapien
cagttgggaacgttagagcctggca

SEQ ID NO: 3855530 - DNA, 25 bp, Homo sapien
cagtccggagacctctgcaaaggag

SEQ ID NO: 3855531 - DNA, 25 bp, Homo sapien
tgaggagcgacccaaatagtcccaa

SEQ ID NO: 3855532 - DNA, 25 bp, Homo sapien
gggcaagaagcgtgtggtcccgctc

SEQ ID NO: 3855533 - DNA, 25 bp, Homo sapien
caagaagcgtgtggtcccgctccgg

SEQ ID NO: 3855534 - DNA, 25 bp, Homo sapien
ttgcggggcaagaagcgtgtggtcc

SEQ ID NO: 3855535 - DNA, 25 bp, Homo sapien
tttgcggggcaagaagcgtgtggtc

SEQ ID NO: 3855536 - DNA, 25 bp, Homo sapien
gcgcagcgcagtcacgctccctccg

SEQ ID NO: 3855537 - DNA, 25 bp, Homo sapien
gcgccctgcgcagcgcagtcacgct

SEQ ID NO: 3855538 - DNA, 25 bp, Homo sapien
cctagcgccctgcgcagcgcagtca

SEQ ID NO: 3855539 - DNA, 25 bp, Homo sapien
ctgcgcagcgcagtcacgctccctc

SEQ ID NO: 3855540 - DNA, 25 bp, Homo sapien
ctagtgatcagcagcggctcagttt

SEQ ID NO: 3855541 - DNA, 25 bp, Homo sapien
cactagtgatcagcagcggctcagt

SEQ ID NO: 3855542 - DNA, 25 bp, Homo sapien
tagtgatcagcagcggctcagtttt

SEQ ID NO: 3855543 - DNA, 25 bp, Homo sapien
actagtgatcagcagcggctcagtt

SEQ ID NO: 3855544 - DNA, 25 bp, Homo sapien
ggcagcgacgcctttggaaatggat

SEQ ID NO: 3855545 - DNA, 25 bp, Homo sapien
tcctgtcgcgaaaaagagctcttgt

SEQ ID NO: 3855546 - DNA, 25 bp, Homo sapien
ctttgtcaaggacaccccagttggg

SEQ ID NO: 3855547 - DNA, 25 bp, Homo sapien
tcaagtctgctcaagtaaagtggtg

SEQ ID NO: 3855548 - DNA, 25 bp, Homo sapien
tgaaatggccagagtaggtaaaact

SEQ ID NO: 3855549 - DNA, 25 bp, Homo sapien
tggccagagtaggtaaaactatata

SEQ ID NO: 3855550 - DNA, 25 bp, Homo sapien
tatgaaatggccagagtaggtaaaa

SEQ ID NO: 3855551 - DNA, 25 bp, Homo sapien
aatggccagagtaggtaaaactata

SEQ ID NO: 3855552 - DNA, 25 bp, Homo sapien
gaacaacttgaacaatcacgacagg

SEQ ID NO: 3855553 - DNA, 25 bp, Homo sapien
tagccctggcaccttaattgaagac

SEQ ID NO: 3855554 - DNA, 25 bp, Homo sapien
tggatcgtcgcaattctcccatggc

SEQ ID NO: 3855555 - DNA, 25 bp, Homo sapien
tgcccaatatcccaggagtcactag

SEQ ID NO: 3855556 - DNA, 25 bp, Homo sapien
aaagcagcaacactgatacttgtgt

SEQ ID NO: 3855557 - DNA, 25 bp, Homo sapien
ttcgagatggacatctgactctcct

SEQ ID NO: 3855558 - DNA, 25 bp, Homo sapien
gatttggccaataggatcaacagtg

SEQ ID NO: 3855559 - DNA, 25 bp, Homo sapien
tggacatctgactctcctgcaagga

SEQ ID NO: 3855560 - DNA, 25 bp, Homo sapien
tcctctgggtgccaaatgatgggaa

SEQ ID NO: 3855561 - DNA, 25 bp, Homo sapien
ggaagatgagcttcatctgaccatt

SEQ ID NO: 3855562 - DNA, 25 bp, Homo sapien
gggaagatgagcttcatctgaccat

SEQ ID NO: 3855563 - DNA, 25 bp, Homo sapien
tgttgagcagcataataatcccggg

SEQ ID NO: 3855564 - DNA, 25 bp, Homo sapien
aatgaccgctgaagaacgttgaccc

SEQ ID NO: 3855565 - DNA, 25 bp, Homo sapien
cccagggtgagagtaacaggccatt

SEQ ID NO: 3855566 - DNA, 25 bp, Homo sapien
tccacttggtgggtaaggcctgatc

SEQ ID NO: 3855567 - DNA, 25 bp, Homo sapien
ccattgagtggtttacctctgcatg

SEQ ID NO: 3855568 - DNA, 25 bp, Homo sapien
ggaacctcacagatgaaacccttaa

SEQ ID NO: 3855569 - DNA, 25 bp, Homo sapien
ttcacaaggcatgagataaactttc

SEQ ID NO: 3855570 - DNA, 25 bp, Homo sapien
tctgcatgtttggagggaacctcac

SEQ ID NO: 3855571 - DNA, 25 bp, Homo sapien
attttcaagggcacagatacagaga

SEQ ID NO: 3855572 - DNA, 25 bp, Homo sapien
ggctttctaggtattgggcttccaa

SEQ ID NO: 3855573 - DNA, 25 bp, Homo sapien
tagtttaacatgatggttctggccc

SEQ ID NO: 3855574 - DNA, 25 bp, Homo sapien
cccatgtgggtctctgcgtagggca

SEQ ID NO: 3855575 - DNA, 25 bp, Homo sapien
ctcagttaccacttttattttcctg

SEQ ID NO: 3855576 - DNA, 25 bp, Homo sapien
tattttcctgtagctaggagttagc

SEQ ID NO: 3855577 - DNA, 25 bp, Homo sapien
cctgtagctaggagttagcaaaagg

SEQ ID NO: 3855578 - DNA, 25 bp, Homo sapien
ctaggagttagcaaaaggaactggg

SEQ ID NO: 3855579 - DNA, 25 bp, Homo sapien
caaagggagcaaacatgaattagat

SEQ ID NO: 3855580 - DNA, 25 bp, Homo sapien
tagatgttaagctattgagctgaag

SEQ ID NO: 3855581 - DNA, 25 bp, Homo sapien
aggttcccaccagagtcggtgcttg

SEQ ID NO: 3855582 - DNA, 25 bp, Homo sapien
gatgatgttatcaggaagccaggtt

SEQ ID NO: 3855583 - DNA, 25 bp, Homo sapien
cccaggaagcaaccactcaataaaa

SEQ ID NO: 3855584 - DNA, 25 bp, Homo sapien
acccaggaagcaaccactcaataaa

SEQ ID NO: 3855585 - DNA, 25 bp, Homo sapien
taaataactggtcttgtgttcatgc

SEQ ID NO: 3855586 - DNA, 25 bp, Homo sapien
ctagtgaatggctgctatgtgtttc

SEQ ID NO: 3855587 - DNA, 25 bp, Homo sapien
cataggttaaccctgcatgcccatt

SEQ ID NO: 3855588 - DNA, 25 bp, Homo sapien
cttcctgggcttcttgatggcaatg

SEQ ID NO: 3855589 - DNA, 25 bp, Homo sapien
tgcttcgaatcaaggcaactggtga

SEQ ID NO: 3855590 - DNA, 25 bp, Homo sapien
cagcctgctgagtatgtgggtttca

SEQ ID NO: 3855591 - DNA, 25 bp, Homo sapien
catctaggataacagctgcttgaag

SEQ ID NO: 3855592 - DNA, 25 bp, Homo sapien
gggccgcttcctgttcctagtcatg

SEQ ID NO: 3855593 - DNA, 25 bp, Homo sapien
cagaggacactcacgtgctaaggtg

SEQ ID NO: 3855594 - DNA, 25 bp, Homo sapien
tggaaaagcggagactgccagcact

SEQ ID NO: 3855595 - DNA, 25 bp, Homo sapien
tatctacattgctgagtgctgtgcg

SEQ ID NO: 3855596 - DNA, 25 bp, Homo sapien
gatggatagcagagggtaccacgca

SEQ ID NO: 3855597 - DNA, 25 bp, Homo sapien
tgaggtcgcacagcttccagtggct

SEQ ID NO: 3855598 - DNA, 25 bp, Homo sapien
caaactcaggctgtgtctgccgaag

SEQ ID NO: 3855599 - DNA, 25 bp, Homo sapien
tcaccactgctggataggaagctca

SEQ ID NO: 3855600 - DNA, 25 bp, Homo sapien
caacatggccggtcctcttggatga

SEQ ID NO: 3855601 - DNA, 25 bp, Homo sapien
agctcattagcagagaaccactcca

SEQ ID NO: 3855602 - DNA, 25 bp, Homo sapien
ttgttgtacagctcattagcagaga

SEQ ID NO: 3855603 - DNA, 25 bp, Homo sapien
ggccagtagattgccactggccagc

SEQ ID NO: 3855604 - DNA, 25 bp, Homo sapien
acaaggccagtagattgccactggc

SEQ ID NO: 3855605 - DNA, 25 bp, Homo sapien
tcagtaaagagaacatccagccagc

SEQ ID NO: 3855606 - DNA, 25 bp, Homo sapien
cagtaaagaactcatgcacttgtgc

SEQ ID NO: 3855607 - DNA, 25 bp, Homo sapien
ccttcatttacagagtgggcagccc

SEQ ID NO: 3855608 - DNA, 25 bp, Homo sapien
ttccagagtgcaggcaaatccagtc

SEQ ID NO: 3855609 - DNA, 25 bp, Homo sapien
gcacaacaagtggaagggactcggt

SEQ ID NO: 3855610 - DNA, 25 bp, Homo sapien
tatggtgatctaggagcactctgcc

SEQ ID NO: 3855611 - DNA, 25 bp, Homo sapien
tcttccacgatcatgtctttatggt

SEQ ID NO: 3855612 - DNA, 25 bp, Homo sapien
cacatacagcatgctcagcggcttg

SEQ ID NO: 3855613 - DNA, 25 bp, Homo sapien
ctcacagcgataggcgttgtactgc

SEQ ID NO: 3855614 - DNA, 25 bp, Homo sapien
catggttggtcggatgaaactcctc

SEQ ID NO: 3855615 - DNA, 25 bp, Homo sapien
aacaggattaggacactcgccctca

SEQ ID NO: 3855616 - DNA, 25 bp, Homo sapien
aagtgatgtcgacggtgcctcttgc

SEQ ID NO: 3855617 - DNA, 25 bp, Homo sapien
ggagcacattggtggcaggcggtgt

SEQ ID NO: 3855618 - DNA, 25 bp, Homo sapien
ctgcgagaggttggagtagagcata

SEQ ID NO: 3855619 - DNA, 25 bp, Homo sapien
tccaaaaccatgctgcccaaggaaa

SEQ ID NO: 3855620 - DNA, 25 bp, Homo sapien
gttggagtagagcataaggagcaca

SEQ ID NO: 3855621 - DNA, 25 bp, Homo sapien
tcaatggcaagtgagccctcagtgg

SEQ ID NO: 3855622 - DNA, 25 bp, Homo sapien
gaaaccgctctaagcagctgtctga

SEQ ID NO: 3855623 - DNA, 25 bp, Homo sapien
gccagatcctcttgttggctcagga

SEQ ID NO: 3855624 - DNA, 25 bp, Homo sapien
gaagtcaaaagcaaacgtccagttc

SEQ ID NO: 3855625 - DNA, 25 bp, Homo sapien
ccccgcgtacgcaggagcgcagtgg

SEQ ID NO: 3855626 - DNA, 25 bp, Homo sapien
tcgcagcacccgcctggagtagggc

SEQ ID NO: 3855627 - DNA, 25 bp, Homo sapien
gcgcagtggccaccgtcgcagcacc

SEQ ID NO: 3855628 - DNA, 25 bp, Homo sapien
tcgcggtagaggctcagcatgtacg

SEQ ID NO: 3855629 - DNA, 25 bp, Homo sapien
taccaaacgccttgatgctgagaca

SEQ ID NO: 3855630 - DNA, 25 bp, Homo sapien
ccaggtcagaactgcgacttcctta

SEQ ID NO: 3855631 - DNA, 25 bp, Homo sapien
ttccagggacgggatctagggctcc

SEQ ID NO: 3855632 - DNA, 25 bp, Homo sapien
aaagctggcggaggacctagttcca

SEQ ID NO: 3855633 - DNA, 25 bp, Homo sapien
tcagttattcttaggggtcatgggg

SEQ ID NO: 3855634 - DNA, 25 bp, Homo sapien
cagttattcttaggggtcatgggga

SEQ ID NO: 3855635 - DNA, 25 bp, Homo sapien
gcaaccccagctcgccgaaatccag

SEQ ID NO: 3855636 - DNA, 25 bp, Homo sapien
agctcgccgaaatccagctccagtc

SEQ ID NO: 3855637 - DNA, 25 bp, Homo sapien
cccagctcgccgaaatccagctcca

SEQ ID NO: 3855638 - DNA, 25 bp, Homo sapien
ggcaaccccagctcgccgaaatcca

SEQ ID NO: 3855639 - DNA, 25 bp, Homo sapien
gcacagcgaagagtgaacgcacgca

SEQ ID NO: 3855640 - DNA, 25 bp, Homo sapien
gcacgcacgtgggtgcgttcaccca

SEQ ID NO: 3855641 - DNA, 25 bp, Homo sapien
atctctccgcgaggaagcacagcga

SEQ ID NO: 3855642 - DNA, 25 bp, Homo sapien
cgcctagtgctagtccgcgcgtgtg

SEQ ID NO: 3855643 - DNA, 25 bp, Homo sapien
ccggccgcactgcacagcgaggccg

SEQ ID NO: 3855644 - DNA, 25 bp, Homo sapien
gctccggccgcactgcacagcgagg

SEQ ID NO: 3855645 - DNA, 25 bp, Homo sapien
atccagctccggccgcactgcacag

SEQ ID NO: 3855646 - DNA, 25 bp, Homo sapien
cagctccggccgcactgcacagcga

SEQ ID NO: 3855647 - DNA, 25 bp, Homo sapien
ccgcgggctggcaggtaccgaagtg

SEQ ID NO: 3855648 - DNA, 25 bp, Homo sapien
ccggccgcaggagcacggatgcccc

SEQ ID NO: 3855649 - DNA, 25 bp, Homo sapien
accccacacccgctcaggattggtc

SEQ ID NO: 3855650 - DNA, 25 bp, Homo sapien
aggtaccgaagtgtcctgccctggg

SEQ ID NO: 3855651 - DNA, 25 bp, Homo sapien
cattgtccctggcaggtttctgttt

SEQ ID NO: 3855652 - DNA, 25 bp, Homo sapien
tcattgtccctggcaggtttctgtt

SEQ ID NO: 3855653 - DNA, 25 bp, Homo sapien
ctcattgtccctggcaggtttctgt

SEQ ID NO: 3855654 - DNA, 25 bp, Homo sapien
ttttctggagcacttcgtggaggtg

SEQ ID NO: 3855655 - DNA, 25 bp, Homo sapien
agtgggagttgctgagctcacccga

SEQ ID NO: 3855656 - DNA, 25 bp, Homo sapien
ttgctgagctcacccgaagcccttg

SEQ ID NO: 3855657 - DNA, 25 bp, Homo sapien
tgcctccaaacaggtggtgcacaga

SEQ ID NO: 3855658 - DNA, 25 bp, Homo sapien
ccttggctggcactgtgagaacttg

SEQ ID NO: 3855659 - DNA, 25 bp, Homo sapien
cagacacgtacatagaaatacacca

SEQ ID NO: 3855660 - DNA, 25 bp, Homo sapien
cacgtatgggctgcagacacgtaca

SEQ ID NO: 3855661 - DNA, 25 bp, Homo sapien
atcagcgtgggccacgtatgggctg

SEQ ID NO: 3855662 - DNA, 25 bp, Homo sapien
gggctgcagacacgtacatagaaat

SEQ ID NO: 3855663 - DNA, 25 bp, Homo sapien
gtgttcttcacagacgaggactctg

SEQ ID NO: 3855664 - DNA, 25 bp, Homo sapien
gttctggtcttgagctctcaacaag

SEQ ID NO: 3855665 - DNA, 25 bp, Homo sapien
ctctcaacaagagctttgccgtgtt

SEQ ID NO: 3855666 - DNA, 25 bp, Homo sapien
cgtgttcttcacagacgaggactct

SEQ ID NO: 3855667 - DNA, 25 bp, Homo sapien
ctgggtggatgtatcctcctgctgc

SEQ ID NO: 3855668 - DNA, 25 bp, Homo sapien
tggatgtattctgctgctgggggtc

SEQ ID NO: 3855669 - DNA, 25 bp, Homo sapien
tccctggggtctgggtggatgtatt

SEQ ID NO: 3855670 - DNA, 25 bp, Homo sapien
gggggtctgggtggatgtatcctcc

SEQ ID NO: 3855671 - DNA, 25 bp, Homo sapien
ttctgccgcttcaccaatgaccccg

SEQ ID NO: 3855672 - DNA, 25 bp, Homo sapien
gttctgggcggatgtgtccttctgc

SEQ ID NO: 3855673 - DNA, 25 bp, Homo sapien
tgaccccgacttggctgccgctggt

SEQ ID NO: 3855674 - DNA, 25 bp, Homo sapien
tgggcggatgtgtccttctgccgct

SEQ ID NO: 3855675 - DNA, 25 bp, Homo sapien
ggctgggaggggtgtttgtgttgtc

SEQ ID NO: 3855676 - DNA, 25 bp, Homo sapien
ctgtattggctgggaggggtgtttg

SEQ ID NO: 3855677 - DNA, 25 bp, Homo sapien
attggctgggaggggtgtttgtgtt

SEQ ID NO: 3855678 - DNA, 25 bp, Homo sapien
tgtattggctgggaggggtgtttgt

SEQ ID NO: 3855679 - DNA, 25 bp, Homo sapien
cacagaccccgatcagcacataggg

SEQ ID NO: 3855680 - DNA, 25 bp, Homo sapien
aggcacagaccccgatcagcacata

SEQ ID NO: 3855681 - DNA, 25 bp, Homo sapien
cttgctgtttgttggatgttggtgc

SEQ ID NO: 3855682 - DNA, 25 bp, Homo sapien
gtttgttggatgttggtgctggcca

SEQ ID NO: 3855683 - DNA, 25 bp, Homo sapien
tgcctggccacaaggccgccaactc

SEQ ID NO: 3855684 - DNA, 25 bp, Homo sapien
cctggccacaaggccgccaactccc

SEQ ID NO: 3855685 - DNA, 25 bp, Homo sapien
gcctggccacaaggccgccaactcc

SEQ ID NO: 3855686 - DNA, 25 bp, Homo sapien
atgcctggccacaaggccgccaact

SEQ ID NO: 3855687 - DNA, 25 bp, Homo sapien
gactgtgccaactctctgggtggtg

SEQ ID NO: 3855688 - DNA, 25 bp, Homo sapien
ccgaggtagcgtttgggtcattcct

SEQ ID NO: 3855689 - DNA, 25 bp, Homo sapien
cactcgcacagctctcctgactgtg

SEQ ID NO: 3855690 - DNA, 25 bp, Homo sapien
ggtggtgcctttagctctttccata

SEQ ID NO: 3855691 - DNA, 25 bp, Homo sapien
acaggccgtggtcgtgcttctctcc

SEQ ID NO: 3855692 - DNA, 25 bp, Homo sapien
tggacacaggccgtggtcgtgcttc

SEQ ID NO: 3855693 - DNA, 25 bp, Homo sapien
tgcagccccactaggtggacacagg

SEQ ID NO: 3855694 - DNA, 25 bp, Homo sapien
cactaggtggacacaggccgtggtc

SEQ ID NO: 3855695 - DNA, 25 bp, Homo sapien
ttttcccatgagaaggtgttgagcg

SEQ ID NO: 3855696 - DNA, 25 bp, Homo sapien
cagtggcacctcgggagcgtcctca

SEQ ID NO: 3855697 - DNA, 25 bp, Homo sapien
tgttgagcgttccagcagtggcacc

SEQ ID NO: 3855698 - DNA, 25 bp, Homo sapien
tggcgtctacgcagctccttcttac

SEQ ID NO: 3855699 - DNA, 25 bp, Homo sapien
ctctggcctccatgtgtcctcctcc

SEQ ID NO: 3855700 - DNA, 25 bp, Homo sapien
gcctctggcctccatgtgtcctcct

SEQ ID NO: 3855701 - DNA, 25 bp, Homo sapien
tggcctctggcctccatgtgtcctc

SEQ ID NO: 3855702 - DNA, 25 bp, Homo sapien
ctgaaagggcttccctggcctctgg

SEQ ID NO: 3855703 - DNA, 25 bp, Homo sapien
tgcacccacagtaggggaaccctgc

SEQ ID NO: 3855704 - DNA, 25 bp, Homo sapien
gagtcgggccctatttttagctcca

SEQ ID NO: 3855705 - DNA, 25 bp, Homo sapien
ctggacgtttcatgtgctctgcacc

SEQ ID NO: 3855706 - DNA, 25 bp, Homo sapien
acgtttcatgtgctctgcacccaca

SEQ ID NO: 3855707 - DNA, 25 bp, Homo sapien
gcatctggctgccaggggcgtgtga

SEQ ID NO: 3855708 - DNA, 25 bp, Homo sapien
ctgggcatctggctgccaggggcgt

SEQ ID NO: 3855709 - DNA, 25 bp, Homo sapien
ctgccaggggcgtgtgagaggccat

SEQ ID NO: 3855710 - DNA, 25 bp, Homo sapien
gggcatctggctgccaggggcgtgt

SEQ ID NO: 3855711 - DNA, 25 bp, Homo sapien
gatgcttattgtcctggtgcttctg

SEQ ID NO: 3855712 - DNA, 25 bp, Homo sapien
gacagtccctactgatgtggagcag

SEQ ID NO: 3855713 - DNA, 25 bp, Homo sapien
taaggatgcttattgtccaaggatg

SEQ ID NO: 3855714 - DNA, 25 bp, Homo sapien
gctgggaaggttgccatgctctaag

SEQ ID NO: 3855715 - DNA, 25 bp, Homo sapien
cacctgcgggagatcatcatctgca

SEQ ID NO: 3855716 - DNA, 25 bp, Homo sapien
acctgcgggagatcatcatctgcac

SEQ ID NO: 3855717 - DNA, 25 bp, Homo sapien
ggctttatcccctccatcggcttaa

SEQ ID NO: 3855718 - DNA, 25 bp, Homo sapien
ttctttgctcagagccgggtgctgt

SEQ ID NO: 3855719 - DNA, 25 bp, Homo sapien
tttgcccgggaatgttctaggacca

SEQ ID NO: 3855720 - DNA, 25 bp, Homo sapien
tccacttgggatcctgaaattcaac

SEQ ID NO: 3855721 - DNA, 25 bp, Homo sapien
gctgctgggatccactgtttccaca

SEQ ID NO: 3855722 - DNA, 25 bp, Homo sapien
tgtttccacacagcgggaaggctgc

SEQ ID NO: 3855723 - DNA, 25 bp, Homo sapien
gctcactgggaccaggaaagcctgt

SEQ ID NO: 3855724 - DNA, 25 bp, Homo sapien
gaagtgccatgtttgcgttgagcct

SEQ ID NO: 3855725 - DNA, 25 bp, Homo sapien
aagcaacggaaccagcgaattctca

SEQ ID NO: 3855726 - DNA, 25 bp, Homo sapien
cactaacatatgaaggattgctgca

SEQ ID NO: 3855727 - DNA, 25 bp, Homo sapien
ttctcactaacatatgaaggattgc

SEQ ID NO: 3855728 - DNA, 25 bp, Homo sapien
ggaaccagcgaattctcactaacat

SEQ ID NO: 3855729 - DNA, 25 bp, Homo sapien
ctaaagtgagtcctttccagccact

SEQ ID NO: 3855730 - DNA, 25 bp, Homo sapien
cctttccagccactgtgttgaagat

SEQ ID NO: 3855731 - DNA, 25 bp, Homo sapien
gtcctttccagccactgtgttgaag

SEQ ID NO: 3855732 - DNA, 25 bp, Homo sapien
tttccagccactgtgttgaagatgg

SEQ ID NO: 3855733 - DNA, 25 bp, Homo sapien
gctcttgttctggttgggcagggtt

SEQ ID NO: 3855734 - DNA, 25 bp, Homo sapien
tctggttgggcagggttgagtatct

SEQ ID NO: 3855735 - DNA, 25 bp, Homo sapien
gttctggttgggcagggttgagtat

SEQ ID NO: 3855736 - DNA, 25 bp, Homo sapien
gttgggcagggttgagtatctgagc

SEQ ID NO: 3855737 - DNA, 25 bp, Homo sapien
acagagaagagaggcggctggccca

SEQ ID NO: 3855738 - DNA, 25 bp, Homo sapien
ctgttgtcagctacagagaagagag

SEQ ID NO: 3855739 - DNA, 25 bp, Homo sapien
tcagctacagagaagagaggcggct

SEQ ID NO: 3855740 - DNA, 25 bp, Homo sapien
ttctgttgtcagctacagagaagag

SEQ ID NO: 3855741 - DNA, 25 bp, Homo sapien
tgctgcatggactggaatcagccca

SEQ ID NO: 3855742 - DNA, 25 bp, Homo sapien
ctccttcacggaaggagagtgaggg

SEQ ID NO: 3855743 - DNA, 25 bp, Homo sapien
tgcatggactggaatcagcccagtg

SEQ ID NO: 3855744 - DNA, 25 bp, Homo sapien
tccttcacggaaggagagtgagggg

SEQ ID NO: 3855745 - DNA, 25 bp, Homo sapien
ttatatacattacctgccagcctgt

SEQ ID NO: 3855746 - DNA, 25 bp, Homo sapien
ccatttatcatgtttatgctgctgc

SEQ ID NO: 3855747 - DNA, 25 bp, Homo sapien
tttcttgagtcagagagttatgagg

SEQ ID NO: 3855748 - DNA, 25 bp, Homo sapien
tccccacgtttctgacaaaagtgga

SEQ ID NO: 3855749 - DNA, 25 bp, Homo sapien
gattagcgtgtaaacccagccacct

SEQ ID NO: 3855750 - DNA, 25 bp, Homo sapien
gctttgccacaccatagagggctca

SEQ ID NO: 3855751 - DNA, 25 bp, Homo sapien
gggccacatgtaaaatccactagca

SEQ ID NO: 3855752 - DNA, 25 bp, Homo sapien
tgggaatacgaagacagccctggct

SEQ ID NO: 3855753 - DNA, 25 bp, Homo sapien
agcacctggcatgatagcggaattt

SEQ ID NO: 3855754 - DNA, 25 bp, Homo sapien
gatagcggaattttaggtggccatg

SEQ ID NO: 3855755 - DNA, 25 bp, Homo sapien
ttttaggtggccatgattcaggttg

SEQ ID NO: 3855756 - DNA, 25 bp, Homo sapien
ggccatgattcaggttgcatctcac

SEQ ID NO: 3855757 - DNA, 25 bp, Homo sapien
aaaatccagccgcactgaccagatg

SEQ ID NO: 3855758 - DNA, 25 bp, Homo sapien
ggtcatcgtccctgccagagtcctg

SEQ ID NO: 3855759 - DNA, 25 bp, Homo sapien
ggtgccaaggaggtcatcgtccctg

SEQ ID NO: 3855760 - DNA, 25 bp, Homo sapien
tcccacacggtgctcgtcctcagct

SEQ ID NO: 3855761 - DNA, 25 bp, Homo sapien
cttcacataggcatccgtggcagtg

SEQ ID NO: 3855762 - DNA, 25 bp, Homo sapien
acataggcatccgtggcagtgaacc

SEQ ID NO: 3855763 - DNA, 25 bp, Homo sapien
ataggcatccgtggcagtgaaccag

SEQ ID NO: 3855764 - DNA, 25 bp, Homo sapien
tcacataggcatccgtggcagtgaa

SEQ ID NO: 3855765 - DNA, 25 bp, Homo sapien
tgccgtggatgcctatgttgacctg

SEQ ID NO: 3855766 - DNA, 25 bp, Homo sapien
taatggaggtgtgatggccgccaac

SEQ ID NO: 3855767 - DNA, 25 bp, Homo sapien
tggatcccgaacagcaggtcgttaa

SEQ ID NO: 3855768 - DNA, 25 bp, Homo sapien
tggaaggaggccgtcatcttgtgct

SEQ ID NO: 3855769 - DNA, 25 bp, Homo sapien
agctgtactggtcctggtgggtctt

SEQ ID NO: 3855770 - DNA, 25 bp, Homo sapien
ctgtagaagcggcactccaccgtgt

SEQ ID NO: 3855771 - DNA, 25 bp, Homo sapien
cactccaccgtgtcagtgctgaagc

SEQ ID NO: 3855772 - DNA, 25 bp, Homo sapien
gctgtactggtcctggtgggtcttc

SEQ ID NO: 3855773 - DNA, 25 bp, Homo sapien
cacattgctggtgggcttaggagtc

SEQ ID NO: 3855774 - DNA, 25 bp, Homo sapien
ctgcctgtgagtgtgagccggccac

SEQ ID NO: 3855775 - DNA, 25 bp, Homo sapien
ctgtgagtgtgagccggccacagac

SEQ ID NO: 3855776 - DNA, 25 bp, Homo sapien
agacacatgcacattgctggtgggc

SEQ ID NO: 3855777 - DNA, 25 bp, Homo sapien
tgtagggcattttcacagagggtgc

SEQ ID NO: 3855778 - DNA, 25 bp, Homo sapien
tcgttgcggatgctacgagccgcat

SEQ ID NO: 3855779 - DNA, 25 bp, Homo sapien
tgtggctgcgcttgcactctgagcg

SEQ ID NO: 3855780 - DNA, 25 bp, Homo sapien
catgcaccaggcacgaacttgtggc

SEQ ID NO: 3855781 - DNA, 25 bp, Homo sapien
ctgggaagccatgggtggagggatg

SEQ ID NO: 3855782 - DNA, 25 bp, Homo sapien
gaatgtcagagctggtatgtccctt

SEQ ID NO: 3855783 - DNA, 25 bp, Homo sapien
cacagattatcagggcacatggaag

SEQ ID NO: 3855784 - DNA, 25 bp, Homo sapien
tggtatgtcccttataggcctggtt

SEQ ID NO: 3855785 - DNA, 25 bp, Homo sapien
gaagcggctacacagatggatatcc

SEQ ID NO: 3855786 - DNA, 25 bp, Homo sapien
cagatggatatcctctcttcaccga

SEQ ID NO: 3855787 - DNA, 25 bp, Homo sapien
ctggaatcccgtatagagaagcggc

SEQ ID NO: 3855788 - DNA, 25 bp, Homo sapien
tcttcaccgaggctcctggaatggt

SEQ ID NO: 3855789 - DNA, 25 bp, Homo sapien
tctataaggctgctaacccctgtgc

SEQ ID NO: 3855790 - DNA, 25 bp, Homo sapien
ctccaggaagggataaattaactct

SEQ ID NO: 3855791 - DNA, 25 bp, Homo sapien
taaggagaaaagtcagcatcaggat

SEQ ID NO: 3855792 - DNA, 25 bp, Homo sapien
taaggctgctaacccctgtgccatg

SEQ ID NO: 3855793 - DNA, 25 bp, Homo sapien
ggctctggtacagaacgggtcctgt

SEQ ID NO: 3855794 - DNA, 25 bp, Homo sapien
gaactgtggctctggtacagaacgg

SEQ ID NO: 3855795 - DNA, 25 bp, Homo sapien
gtggccttcgagctgggtgaaaggg

SEQ ID NO: 3855796 - DNA, 25 bp, Homo sapien
ctggacagggatagagcacctgcca

SEQ ID NO: 3855797 - DNA, 25 bp, Homo sapien
ctgctcactgtcagctggtgtgcgt

SEQ ID NO: 3855798 - DNA, 25 bp, Homo sapien
tgccaagggtgcagcaccttgccca

SEQ ID NO: 3855799 - DNA, 25 bp, Homo sapien
ttgggcctgttctccactgccaagg

SEQ ID NO: 3855800 - DNA, 25 bp, Homo sapien
actgtcagctggtgtgcgtctgagt

SEQ ID NO: 3855801 - DNA, 25 bp, Homo sapien
agggcctccacgcagggtgccgctc

SEQ ID NO: 3855802 - DNA, 25 bp, Homo sapien
gcagggcctccacgcagggtgccgc

SEQ ID NO: 3855803 - DNA, 25 bp, Homo sapien
cagggcctccacgcagggtgccgct

SEQ ID NO: 3855804 - DNA, 25 bp, Homo sapien
ggcagagctccttcgccgagcttgg

SEQ ID NO: 3855805 - DNA, 25 bp, Homo sapien
aggcagagctccttcgccgagcttg

SEQ ID NO: 3855806 - DNA, 25 bp, Homo sapien
ggtcatcccagataactctctccag

SEQ ID NO: 3855807 - DNA, 25 bp, Homo sapien
atgtacgtggcagagcgtgccagtt

SEQ ID NO: 3855808 - DNA, 25 bp, Homo sapien
ggaactgtggccgagtggtcatccc

SEQ ID NO: 3855809 - DNA, 25 bp, Homo sapien
tctttgaacctttggcttgttgtgg

SEQ ID NO: 3855810 - DNA, 25 bp, Homo sapien
tatcacagacagactcccatcgtgg

SEQ ID NO: 3855811 - DNA, 25 bp, Homo sapien
tcaggactagagaaccatttgagca

SEQ ID NO: 3855812 - DNA, 25 bp, Homo sapien
taccagtaccaaggagcttagaggg

SEQ ID NO: 3855813 - DNA, 25 bp, Homo sapien
ctgtttgcacatctatactgggtca

SEQ ID NO: 3855814 - DNA, 25 bp, Homo sapien
ctggcaaggcagcagtatggactgt

SEQ ID NO: 3855815 - DNA, 25 bp, Homo sapien
tctggggcgaggacctctttggaca

SEQ ID NO: 3855816 - DNA, 25 bp, Homo sapien
ggactgtggcgtaaagaagaggcat

SEQ ID NO: 3855817 - DNA, 25 bp, Homo sapien
ggtggcatccaaggtggatctgcag

SEQ ID NO: 3855818 - DNA, 25 bp, Homo sapien
tggctgaagcctgacaccggctgct

SEQ ID NO: 3855819 - DNA, 25 bp, Homo sapien
gtttcgtgcttacagcctggctgcc

SEQ ID NO: 3855820 - DNA, 25 bp, Homo sapien
ctactcaattggatccagatatggg

SEQ ID NO: 3855821 - DNA, 25 bp, Homo sapien
cttggtgatgcacgcggcttctgct

SEQ ID NO: 3855822 - DNA, 25 bp, Homo sapien
cctgttcccctcctggctcacccct

SEQ ID NO: 3855823 - DNA, 25 bp, Homo sapien
ttcccctcctggctcaccccttgcc

SEQ ID NO: 3855824 - DNA, 25 bp, Homo sapien
ctcctgttcccctcctggctcaccc

SEQ ID NO: 3855825 - DNA, 25 bp, Homo sapien
cccctcctggctcaccccttgccat

SEQ ID NO: 3855826 - DNA, 25 bp, Homo sapien
aggactatttggcaacaggtacagt

SEQ ID NO: 3855827 - DNA, 25 bp, Homo sapien
tgaccccggccgctatgcctggcac

SEQ ID NO: 3855828 - DNA, 25 bp, Homo sapien
tggtatcaggactatttggcaacag

SEQ ID NO: 3855829 - DNA, 25 bp, Homo sapien
ggtcaagtgaagacttggtgctctc

SEQ ID NO: 3855830 - DNA, 25 bp, Homo sapien
cagatggcctccttgaggttccagc

SEQ ID NO: 3855831 - DNA, 25 bp, Homo sapien
ccagatggcctccttgaggttccag

SEQ ID NO: 3855832 - DNA, 25 bp, Homo sapien
agcctgtgacttcatttgggctagt

SEQ ID NO: 3855833 - DNA, 25 bp, Homo sapien
acttcatttgggctagtaaggcctg

SEQ ID NO: 3855834 - DNA, 25 bp, Homo sapien
aagagttttcacggtagggaatcag

SEQ ID NO: 3855835 - DNA, 25 bp, Homo sapien
agagttttcacggtagggaatcagg

SEQ ID NO: 3855836 - DNA, 25 bp, Homo sapien
taagagttttcacggtagggaatca

SEQ ID NO: 3855837 - DNA, 25 bp, Homo sapien
ctcttgagcaaggcaggtgcaagtg

SEQ ID NO: 3855838 - DNA, 25 bp, Homo sapien
ctcggcttcgatgtcttcttctctg

SEQ ID NO: 3855839 - DNA, 25 bp, Homo sapien
tctgtgttctggcttgaatgcatct

SEQ ID NO: 3855840 - DNA, 25 bp, Homo sapien
aatgcatctggaggacttgagcttc

SEQ ID NO: 3855841 - DNA, 25 bp, Homo sapien
tctgccctcggcttcgatgtcttct

SEQ ID NO: 3855842 - DNA, 25 bp, Homo sapien
ctggtgaccgaggagggaatccaac

SEQ ID NO: 3855843 - DNA, 25 bp, Homo sapien
agagctgtatctttcctgccgttca

SEQ ID NO: 3855844 - DNA, 25 bp, Homo sapien
gctggttggctcttcctagacttgg

SEQ ID NO: 3855845 - DNA, 25 bp, Homo sapien
gaatggagcgaatggaatccaacct

SEQ ID NO: 3855846 - DNA, 25 bp, Homo sapien
tgggatgtaagttccgtgacagcag

SEQ ID NO: 3855847 - DNA, 25 bp, Homo sapien
tgctgggatgtaagttccgtgacag

SEQ ID NO: 3855848 - DNA, 25 bp, Homo sapien
tgtaagttccgtgacagcaggaact

SEQ ID NO: 3855849 - DNA, 25 bp, Homo sapien
cctccttgctgggatgtaagttccg

SEQ ID NO: 3855850 - DNA, 25 bp, Homo sapien
gactggaatcccctgagaaatccag

SEQ ID NO: 3855851 - DNA, 25 bp, Homo sapien
gaatagatgaaatgagcagcatcct

SEQ ID NO: 3855852 - DNA, 25 bp, Homo sapien
tcatctccaagttgactggaatccc

SEQ ID NO: 3855853 - DNA, 25 bp, Homo sapien
ccaaatgacccactacttggaatct

SEQ ID NO: 3855854 - DNA, 25 bp, Homo sapien
aaaggtgatatcttcgttttcttcg

SEQ ID NO: 3855855 - DNA, 25 bp, Homo sapien
aggtgatatcttcgttttcttcggg

SEQ ID NO: 3855856 - DNA, 25 bp, Homo sapien
tatcttcgttttcttcggggattga

SEQ ID NO: 3855857 - DNA, 25 bp, Homo sapien
tgatatcttcgttttcttcggggat

SEQ ID NO: 3855858 - DNA, 25 bp, Homo sapien
gtccaaggccttgcaagaacccatg

SEQ ID NO: 3855859 - DNA, 25 bp, Homo sapien
tgtccatgactagcacccaggtggc

SEQ ID NO: 3855860 - DNA, 25 bp, Homo sapien
cagtcaggttactttgggtaggcca

SEQ ID NO: 3855861 - DNA, 25 bp, Homo sapien
cctttgagtgggcaagacaagaacc

SEQ ID NO: 3855862 - DNA, 25 bp, Homo sapien
ctgggaggacagaaggctgcagaag

SEQ ID NO: 3855863 - DNA, 25 bp, Homo sapien
gggaggacagaaggctgcagaaggg

SEQ ID NO: 3855864 - DNA, 25 bp, Homo sapien
gaggacagaaggctgcagaagggca

SEQ ID NO: 3855865 - DNA, 25 bp, Homo sapien
cagaagggcagggcggggtgcgggg

SEQ ID NO: 3855866 - DNA, 25 bp, Homo sapien
cttgaggaggttcatgcacttctgg

SEQ ID NO: 3855867 - DNA, 25 bp, Homo sapien
tctcttgaggaggttcatgcacttc

SEQ ID NO: 3855868 - DNA, 25 bp, Homo sapien
cttctcttgaggaggttcatgcact

SEQ ID NO: 3855869 - DNA, 25 bp, Homo sapien
tctggaagctggcttaggagctttt

SEQ ID NO: 3855870 - DNA, 25 bp, Homo sapien
aggagtcccagagcgaggtcttttt

SEQ ID NO: 3855871 - DNA, 25 bp, Homo sapien
tccactgagacagtgctgcggggct

SEQ ID NO: 3855872 - DNA, 25 bp, Homo sapien
ctccactgagacagtgctgcggggc

SEQ ID NO: 3855873 - DNA, 25 bp, Homo sapien
cactgagacagtgctgcggggctgt

SEQ ID NO: 3855874 - DNA, 25 bp, Homo sapien
cctccactgagacagtgctgcgggg

SEQ ID NO: 3855875 - DNA, 25 bp, Homo sapien
tgtttccaggatccgacacaggagc

SEQ ID NO: 3855876 - DNA, 25 bp, Homo sapien
cttgggcggagcgtagagcagccag

SEQ ID NO: 3855877 - DNA, 25 bp, Homo sapien
gcagccagaactggattgcgcttag

SEQ ID NO: 3855878 - DNA, 25 bp, Homo sapien
gattgcgcttagcaagtctgtttcc

SEQ ID NO: 3855879 - DNA, 25 bp, Homo sapien
cattgggctttgcacttaacggagg

SEQ ID NO: 3855880 - DNA, 25 bp, Homo sapien
taacggagggctttgtctcacaaca

SEQ ID NO: 3855881 - DNA, 25 bp, Homo sapien
ggccggttctgcaaactgctcagca

SEQ ID NO: 3855882 - DNA, 25 bp, Homo sapien
aacgtgttcccacaagggtctgtgc

SEQ ID NO: 3855883 - DNA, 25 bp, Homo sapien
tgctggtggctgtagctatggcagg

SEQ ID NO: 3855884 - DNA, 25 bp, Homo sapien
ttagcatcaggaaaagatccagctg

SEQ ID NO: 3855885 - DNA, 25 bp, Homo sapien
cctgcgttctccagtcagttagcat

SEQ ID NO: 3855886 - DNA, 25 bp, Homo sapien
tgtagctatggcaggctggagttgg

SEQ ID NO: 3855887 - DNA, 25 bp, Homo sapien
gagaacctaattccaggtgaggtga

SEQ ID NO: 3855888 - DNA, 25 bp, Homo sapien
gaagcggggatgagcctcccagtct

SEQ ID NO: 3855889 - DNA, 25 bp, Homo sapien
cagtctctgctgagtactttgcccc

SEQ ID NO: 3855890 - DNA, 25 bp, Homo sapien
tggccctggtgagatctgcggcggc

SEQ ID NO: 3855891 - DNA, 25 bp, Homo sapien
tcatgtctgctggaagactgactct

SEQ ID NO: 3855892 - DNA, 25 bp, Homo sapien
tgtgctaggtgcctctgctcggaac

SEQ ID NO: 3855893 - DNA, 25 bp, Homo sapien
aactcagtaatgcagggtcgatcgc

SEQ ID NO: 3855894 - DNA, 25 bp, Homo sapien
ggagggatctccttacacagggaag

SEQ ID NO: 3855895 - DNA, 25 bp, Homo sapien
gcctggtttctgatggtgccctgca

SEQ ID NO: 3855896 - DNA, 25 bp, Homo sapien
acccgggaagctagctccttcaact

SEQ ID NO: 3855897 - DNA, 25 bp, Homo sapien
cacccgggaagctagctccttcaac

SEQ ID NO: 3855898 - DNA, 25 bp, Homo sapien
cgggaagctagctccttcaactcct

SEQ ID NO: 3855899 - DNA, 25 bp, Homo sapien
gccacccgggaagctagctccttca

SEQ ID NO: 3855900 - DNA, 25 bp, Homo sapien
gggttccgattagactgtgggtctc

SEQ ID NO: 3855901 - DNA, 25 bp, Homo sapien
tccccatttgacagccggaaaagac

SEQ ID NO: 3855902 - DNA, 25 bp, Homo sapien
ccggaaaagacagttgactcaggca

SEQ ID NO: 3855903 - DNA, 25 bp, Homo sapien
gaaaatccctgacgacacagacagg

SEQ ID NO: 3855904 - DNA, 25 bp, Homo sapien
ggcttaggtggaccttaagagctcc

SEQ ID NO: 3855905 - DNA, 25 bp, Homo sapien
ctgagaggcagggtgattccggctc

SEQ ID NO: 3855906 - DNA, 25 bp, Homo sapien
ggcagggtgattccggctccacctc

SEQ ID NO: 3855907 - DNA, 25 bp, Homo sapien
gaggcttaggtggaccttaagagct

SEQ ID NO: 3855908 - DNA, 25 bp, Homo sapien
caatccctgggatcaccagttcttt

SEQ ID NO: 3855909 - DNA, 25 bp, Homo sapien
tgactgaggcgtccaaagcagtagg

SEQ ID NO: 3855910 - DNA, 25 bp, Homo sapien
aatgcccggcggatccgctcgaaat

SEQ ID NO: 3855911 - DNA, 25 bp, Homo sapien
gaggcgtccaaagcagtaggtgcca

SEQ ID NO: 3855912 - DNA, 25 bp, Homo sapien
ccttggcttgcgccctgacttcttc

SEQ ID NO: 3855913 - DNA, 25 bp, Homo sapien
cttggcttgcgccctgacttcttct

SEQ ID NO: 3855914 - DNA, 25 bp, Homo sapien
tccttggcttgcgccctgacttctt

SEQ ID NO: 3855915 - DNA, 25 bp, Homo sapien
ctccttggcttgcgccctgacttct

SEQ ID NO: 3855916 - DNA, 25 bp, Homo sapien
cagtggataatcagccaattgaaca

SEQ ID NO: 3855917 - DNA, 25 bp, Homo sapien
cagccaattgaacatctgtagccat

SEQ ID NO: 3855918 - DNA, 25 bp, Homo sapien
ggataatcagccaattgaacatctg

SEQ ID NO: 3855919 - DNA, 25 bp, Homo sapien
catcagtggataatcagccaattga

SEQ ID NO: 3855920 - DNA, 25 bp, Homo sapien
agtgcacttaatactagcgttgagg

SEQ ID NO: 3855921 - DNA, 25 bp, Homo sapien
cacgaactggtggtggaagtgtaaa

SEQ ID NO: 3855922 - DNA, 25 bp, Homo sapien
tttttaacagactaaaggccagtgc

SEQ ID NO: 3855923 - DNA, 25 bp, Homo sapien
gaacaggaactctcacgaactggtg

SEQ ID NO: 3855924 - DNA, 25 bp, Homo sapien
gatgtcaggtactgggctctagagt

SEQ ID NO: 3855925 - DNA, 25 bp, Homo sapien
gctctagagtactgagatgctacaa

SEQ ID NO: 3855926 - DNA, 25 bp, Homo sapien
agaacaggatatgtggaagccccaa

SEQ ID NO: 3855927 - DNA, 25 bp, Homo sapien
gagatgctacaatcttgagaacagg

SEQ ID NO: 3855928 - DNA, 25 bp, Homo sapien
cctctcccgagaggtccctggactc

SEQ ID NO: 3855929 - DNA, 25 bp, Homo sapien
tctcccgagaggtccctggactcac

SEQ ID NO: 3855930 - DNA, 25 bp, Homo sapien
ctctcccgagaggtccctggactca

SEQ ID NO: 3855931 - DNA, 25 bp, Homo sapien
aggcagtgcccgctacagcatgtgt

SEQ ID NO: 3855932 - DNA, 25 bp, Homo sapien
gctacagcatgtgtacgagaagccc

SEQ ID NO: 3855933 - DNA, 25 bp, Homo sapien
acagcatgtgtacgagaagccctgc

SEQ ID NO: 3855934 - DNA, 25 bp, Homo sapien
agtgcccgctacagcatgtgtacga

SEQ ID NO: 3855935 - DNA, 25 bp, Homo sapien
gagcaagaggacaaatcgaggggaa

SEQ ID NO: 3855936 - DNA, 25 bp, Homo sapien
gttctgtgggcaagtctgcctgctt

SEQ ID NO: 3855937 - DNA, 25 bp, Homo sapien
aggagcaagaggacaaatcgagggg

SEQ ID NO: 3855938 - DNA, 25 bp, Homo sapien
tgtgggttctgtgggcaagtctgcc

SEQ ID NO: 3855939 - DNA, 25 bp, Homo sapien
gggcttccagactctgtgtcttttc

SEQ ID NO: 3855940 - DNA, 25 bp, Homo sapien
agtgccgggtgctgtccctcagaat

SEQ ID NO: 3855941 - DNA, 25 bp, Homo sapien
cttgcagacagtgccgggtgctgtc

SEQ ID NO: 3855942 - DNA, 25 bp, Homo sapien
acccctggcttcatactggtgccct

SEQ ID NO: 3855943 - DNA, 25 bp, Homo sapien
tccttcggcaggtcaggatgttccc

SEQ ID NO: 3855944 - DNA, 25 bp, Homo sapien
ggtgactcttttgaaatcatactga

SEQ ID NO: 3855945 - DNA, 25 bp, Homo sapien
ccatccttcggcaggtcaggatgtt

SEQ ID NO: 3855946 - DNA, 25 bp, Homo sapien
tctctgcaggaatacggtgactctt

SEQ ID NO: 3855947 - DNA, 25 bp, Homo sapien
agtctttaaggactcagctccttac

SEQ ID NO: 3855948 - DNA, 25 bp, Homo sapien
tcttcagtctttaaggactcagctc

SEQ ID NO: 3855949 - DNA, 25 bp, Homo sapien
gtactagtcagtaggagccattttt

SEQ ID NO: 3855950 - DNA, 25 bp, Homo sapien
tactagtcagtaggagccatttttt

SEQ ID NO: 3855951 - DNA, 25 bp, Homo sapien
gtgggggtcatggggcagcacccac

SEQ ID NO: 3855952 - DNA, 25 bp, Homo sapien
gccttcatgagattgatttctgact

SEQ ID NO: 3855953 - DNA, 25 bp, Homo sapien
ggagtgttgggtccttgaagccttc

SEQ ID NO: 3855954 - DNA, 25 bp, Homo sapien
agtgttgggtccttgaagccttcat

SEQ ID NO: 3855955 - DNA, 25 bp, Homo sapien
ggtgggagtgttgggtccttgaagc

SEQ ID NO: 3855956 - DNA, 25 bp, Homo sapien
aatgtagcttcatatactgcttgga

SEQ ID NO: 3855957 - DNA, 25 bp, Homo sapien
gcttcatatactgcttggaaagcac

SEQ ID NO: 3855958 - DNA, 25 bp, Homo sapien
tatactgcttggaaagcacataggc

SEQ ID NO: 3855959 - DNA, 25 bp, Homo sapien
caaataggctgcacatggctgtggc

SEQ ID NO: 3855960 - DNA, 25 bp, Homo sapien
gcagcctggtattgccaaattgagt

SEQ ID NO: 3855961 - DNA, 25 bp, Homo sapien
tttgggtcagcattggcagcctggt

SEQ ID NO: 3855962 - DNA, 25 bp, Homo sapien
cctgacttataaagtgtacggctag

SEQ ID NO: 3855963 - DNA, 25 bp, Homo sapien
tacggctagaatgaattggccctca

SEQ ID NO: 3855964 - DNA, 25 bp, Homo sapien
cagaattatgctggctttctatttc

SEQ ID NO: 3855965 - DNA, 25 bp, Homo sapien
aagaataaagagggacctgcctgtt

SEQ ID NO: 3855966 - DNA, 25 bp, Homo sapien
ttatccagaattatgctggctttct

SEQ ID NO: 3855967 - DNA, 25 bp, Homo sapien
tccagaattatgctggctttctatt

SEQ ID NO: 3855968 - DNA, 25 bp, Homo sapien
tgataactcggtgacttgctgcccc

SEQ ID NO: 3855969 - DNA, 25 bp, Homo sapien
aatgtcggggcatttggtccctgct

SEQ ID NO: 3855970 - DNA, 25 bp, Homo sapien
tccagttggcaatgtcggggcattt

SEQ ID NO: 3855971 - DNA, 25 bp, Homo sapien
gtcagggggcccatgataactcggt

SEQ ID NO: 3855972 - DNA, 25 bp, Homo sapien
tgtacaatgccctgcagacctactc

SEQ ID NO: 3855973 - DNA, 25 bp, Homo sapien
ggcctggttgagacattcactggag

SEQ ID NO: 3855974 - DNA, 25 bp, Homo sapien
agttggtgaccgtcgggataccaca

SEQ ID NO: 3855975 - DNA, 25 bp, Homo sapien
ctccaagtgaccaaatgtgacaaga

SEQ ID NO: 3855976 - DNA, 25 bp, Homo sapien
ctgccgggcctccaatctcggcggc

SEQ ID NO: 3855977 - DNA, 25 bp, Homo sapien
ggctgccgggcctccaatctcggcg

SEQ ID NO: 3855978 - DNA, 25 bp, Homo sapien
gcggcggcaacaggggagcctgggt

SEQ ID NO: 3855979 - DNA, 25 bp, Homo sapien
cggcggcaacaggggagcctgggtc

SEQ ID NO: 3855980 - DNA, 25 bp, Homo sapien
ctgggtctggattagtttcatcagc

SEQ ID NO: 3855981 - DNA, 25 bp, Homo sapien
caggattttgattcgctggtctggg

SEQ ID NO: 3855982 - DNA, 25 bp, Homo sapien
gagggaaacctagttgcagcaggat

SEQ ID NO: 3855983 - DNA, 25 bp, Homo sapien
aatgctttgtgggagtctgggtctg

SEQ ID NO: 3855984 - DNA, 25 bp, Homo sapien
ccctggtaagggtagaggttgctga

SEQ ID NO: 3855985 - DNA, 25 bp, Homo sapien
ggtaagggtagaggttgctgaccat

SEQ ID NO: 3855986 - DNA, 25 bp, Homo sapien
cctggtaagggtagaggttgctgac

SEQ ID NO: 3855987 - DNA, 25 bp, Homo sapien
ctggtaagggtagaggttgctgacc

SEQ ID NO: 3855988 - DNA, 25 bp, Homo sapien
gatgccatcatagtgaacaacctta

SEQ ID NO: 3855989 - DNA, 25 bp, Homo sapien
ttagtaccaacctgatgacaaacac

SEQ ID NO: 3855990 - DNA, 25 bp, Homo sapien
tgaacttacagagatatgcagatga

SEQ ID NO: 3855991 - DNA, 25 bp, Homo sapien
gaatgaggactgaaacacttaggag

SEQ ID NO: 3855992 - DNA, 25 bp, Homo sapien
tctcagagtccgcaagagtagtggt

SEQ ID NO: 3855993 - DNA, 25 bp, Homo sapien
gggaatactcaaaggtcactgtcct

SEQ ID NO: 3855994 - DNA, 25 bp, Homo sapien
catagaggtttagtgttgtgccaca

SEQ ID NO: 3855995 - DNA, 25 bp, Homo sapien
tagagccgaaggttttgattaccag

SEQ ID NO: 3855996 - DNA, 25 bp, Homo sapien
acacatgcttattgagccacctgct

SEQ ID NO: 3855997 - DNA, 25 bp, Homo sapien
gcttattgagccacctgctcagtgt

SEQ ID NO: 3855998 - DNA, 25 bp, Homo sapien
tgggtaacgtaatacaggctttgag

SEQ ID NO: 3855999 - DNA, 25 bp, Homo sapien
gtgtgtatacctctgtcatttattc

SEQ ID NO: 3856000 - DNA, 25 bp, Homo sapien
agcccattgggcttttcaattttat

SEQ ID NO: 3856001 - DNA, 25 bp, Homo sapien
gtagaagcccattgggcttttcaat

SEQ ID NO: 3856002 - DNA, 25 bp, Homo sapien
cagtagaagcccattgggcttttca

SEQ ID NO: 3856003 - DNA, 25 bp, Homo sapien
agaagcccattgggcttttcaattt

SEQ ID NO: 3856004 - DNA, 25 bp, Homo sapien
tgaacatcagggttgagaaaaacag

SEQ ID NO: 3856005 - DNA, 25 bp, Homo sapien
tgaccacaaactcacataaaggctt

SEQ ID NO: 3856006 - DNA, 25 bp, Homo sapien
cagaggtagtgtgaattctgaccac

SEQ ID NO: 3856007 - DNA, 25 bp, Homo sapien
gaacctagggattctttgaggccta

SEQ ID NO: 3856008 - DNA, 25 bp, Homo sapien
cagaccttcgtctatttgaaagccc

SEQ ID NO: 3856009 - DNA, 25 bp, Homo sapien
ttagttctgtatggatgctactggc

SEQ ID NO: 3856010 - DNA, 25 bp, Homo sapien
tcagttaggaaggttgctcaaggta

SEQ ID NO: 3856011 - DNA, 25 bp, Homo sapien
gcctctggccagattgaacacagtt

SEQ ID NO: 3856012 - DNA, 25 bp, Homo sapien
gtctaggtgaaagattgagacccca

SEQ ID NO: 3856013 - DNA, 25 bp, Homo sapien
caaaagtccactggtgtttgcataa

SEQ ID NO: 3856014 - DNA, 25 bp, Homo sapien
tctaggtgaaagattgagaccccat

SEQ ID NO: 3856015 - DNA, 25 bp, Homo sapien
gtcaaaagtccactggtgtttgcat

SEQ ID NO: 3856016 - DNA, 25 bp, Homo sapien
tatagtggtagaggtgacaagcagt

SEQ ID NO: 3856017 - DNA, 25 bp, Homo sapien
aaatgaacctgttacctttatctca

SEQ ID NO: 3856018 - DNA, 25 bp, Homo sapien
gactgtgtgtaactagaacatgcta

SEQ ID NO: 3856019 - DNA, 25 bp, Homo sapien
tctcaaattggctaagagaatttct

SEQ ID NO: 3856020 - DNA, 25 bp, Homo sapien
catggtgccgccttcctgaattggc

SEQ ID NO: 3856021 - DNA, 25 bp, Homo sapien
tctgggagcttttggccatggtgcc

SEQ ID NO: 3856022 - DNA, 25 bp, Homo sapien
gaaccctatcctgggctggtgatga

SEQ ID NO: 3856023 - DNA, 25 bp, Homo sapien
gaaagagcacccgtagcaaggaaaa

SEQ ID NO: 3856024 - DNA, 25 bp, Homo sapien
atggtattgttgcacaccggaggct

SEQ ID NO: 3856025 - DNA, 25 bp, Homo sapien
gttgcacaccggaggcttgtagcct

SEQ ID NO: 3856026 - DNA, 25 bp, Homo sapien
tatgataggcctgtgtattatgatt

SEQ ID NO: 3856027 - DNA, 25 bp, Homo sapien
gataggcctgtgtattatgattctc

SEQ ID NO: 3856028 - DNA, 25 bp, Homo sapien
gacggcctggcaagaaaatcattat

SEQ ID NO: 3856029 - DNA, 25 bp, Homo sapien
gactttatttcaccctgtatcacag

SEQ ID NO: 3856030 - DNA, 25 bp, Homo sapien
tattcaaattagtgtaacagagccc

SEQ ID NO: 3856031 - DNA, 25 bp, Homo sapien
tggtgcagggaaaaggtctaaattc

SEQ ID NO: 3856032 - DNA, 25 bp, Homo sapien
tacttgttcgatgaagctggccagg

SEQ ID NO: 3856033 - DNA, 25 bp, Homo sapien
ggccaggtttatgtcccgttctgaa

SEQ ID NO: 3856034 - DNA, 25 bp, Homo sapien
gaaaggccggcacactcatgggtgc

SEQ ID NO: 3856035 - DNA, 25 bp, Homo sapien
tatgtcatggacactgctacttgtt

SEQ ID NO: 3856036 - DNA, 25 bp, Homo sapien
cattcaggatggtggtccagtttct

SEQ ID NO: 3856037 - DNA, 25 bp, Homo sapien
ggccactcttgtcatgaacccaaag

SEQ ID NO: 3856038 - DNA, 25 bp, Homo sapien
cttgttgtacacgttaaaccattca

SEQ ID NO: 3856039 - DNA, 25 bp, Homo sapien
gtacacgttaaaccattcaggatgg

SEQ ID NO: 3856040 - DNA, 25 bp, Homo sapien
tgtggtgtctgagagtcttggctaa

SEQ ID NO: 3856041 - DNA, 25 bp, Homo sapien
catcagcccgtctcagaaaactctg

SEQ ID NO: 3856042 - DNA, 25 bp, Homo sapien
gtcttggctaacaagacgtgaaggg

SEQ ID NO: 3856043 - DNA, 25 bp, Homo sapien
tttgtaaggtgaccccatcagcccg

SEQ ID NO: 3856044 - DNA, 25 bp, Homo sapien
ttgaagatggcatcacggccttcca

SEQ ID NO: 3856045 - DNA, 25 bp, Homo sapien
cacggccttccagctcattccaccc

SEQ ID NO: 3856046 - DNA, 25 bp, Homo sapien
tctcctcagcgctcagcctgtgtgc

SEQ ID NO: 3856047 - DNA, 25 bp, Homo sapien
gcttgaagatggcatcacggccttc

SEQ ID NO: 3856048 - DNA, 25 bp, Homo sapien
tctttgagcaataggctgggaggcc

SEQ ID NO: 3856049 - DNA, 25 bp, Homo sapien
gccgttggcactacctctagtaggt

SEQ ID NO: 3856050 - DNA, 25 bp, Homo sapien
gggaacttagcttccactggctgct

SEQ ID NO: 3856051 - DNA, 25 bp, Homo sapien
tgagattattacatcagtgagggcg

SEQ ID NO: 3856052 - DNA, 25 bp, Homo sapien
aaatggtctgatgaagctcgcgagc

SEQ ID NO: 3856053 - DNA, 25 bp, Homo sapien
tcgcgagcttacagcagagcaaggg

SEQ ID NO: 3856054 - DNA, 25 bp, Homo sapien
tataaagcagaatcgggccaccaag

SEQ ID NO: 3856055 - DNA, 25 bp, Homo sapien
agcataccggcgcagagcgtgagtc

SEQ ID NO: 3856056 - DNA, 25 bp, Homo sapien
cggccccgctgccccgatcgcggcc

SEQ ID NO: 3856057 - DNA, 25 bp, Homo sapien
aatgattaacgtccccagccaggga

SEQ ID NO: 3856058 - DNA, 25 bp, Homo sapien
ctagggtgaagcatgagggctccaa

SEQ ID NO: 3856059 - DNA, 25 bp, Homo sapien
cagggacgcgctcggcctgcttgct

SEQ ID NO: 3856060 - DNA, 25 bp, Homo sapien
tccgtgcttgtttcagggagctagg

SEQ ID NO: 3856061 - DNA, 25 bp, Homo sapien
caggttcagattggcattgcaggag

SEQ ID NO: 3856062 - DNA, 25 bp, Homo sapien
ccaggactgacagatttcaagccca

SEQ ID NO: 3856063 - DNA, 25 bp, Homo sapien
tggccaggttcagattggcattgca

SEQ ID NO: 3856064 - DNA, 25 bp, Homo sapien
tcacttcatgccataccaggactga

SEQ ID NO: 3856065 - DNA, 25 bp, Homo sapien
agattcctgtacaccgcaaaccagc

SEQ ID NO: 3856066 - DNA, 25 bp, Homo sapien
tctcaatgtcggaatcagattcctg

SEQ ID NO: 3856067 - DNA, 25 bp, Homo sapien
tcggaatcagattcctgtacaccgc

SEQ ID NO: 3856068 - DNA, 25 bp, Homo sapien
tcaatgcttctcaatgtcggaatca

SEQ ID NO: 3856069 - DNA, 25 bp, Homo sapien
cctgtccatggggaccatcctgttt

SEQ ID NO: 3856070 - DNA, 25 bp, Homo sapien
ggaccatcctgtttcttcttactct

SEQ ID NO: 3856071 - DNA, 25 bp, Homo sapien
atttcctgtccatggggaccatcct

SEQ ID NO: 3856072 - DNA, 25 bp, Homo sapien
cgagatttcctgtccatggggacca

SEQ ID NO: 3856073 - DNA, 25 bp, Homo sapien
cccccgaagctgggcatggagagca

SEQ ID NO: 3856074 - DNA, 25 bp, Homo sapien
gaagctgggcatggagagcagccat

SEQ ID NO: 3856075 - DNA, 25 bp, Homo sapien
cgaagctgggcatggagagcagcca

SEQ ID NO: 3856076 - DNA, 25 bp, Homo sapien
cccgaagctgggcatggagagcagc

SEQ ID NO: 3856077 - DNA, 25 bp, Homo sapien
aaatgtgtgctcgtctaggcccctg

SEQ ID NO: 3856078 - DNA, 25 bp, Homo sapien
ccgttggcaaatgtgtgctcgtcta

SEQ ID NO: 3856079 - DNA, 25 bp, Homo sapien
ctgagatccctgctggccaaagctc

SEQ ID NO: 3856080 - DNA, 25 bp, Homo sapien
cccttggtctccccgttggcaaatg

SEQ ID NO: 3856081 - DNA, 25 bp, Homo sapien
gcattgctcacatgggagggcgact

SEQ ID NO: 3856082 - DNA, 25 bp, Homo sapien
tgcacaatgggccaatgagcgctcc

SEQ ID NO: 3856083 - DNA, 25 bp, Homo sapien
taagactgctcatgtgtcaggctcc

SEQ ID NO: 3856084 - DNA, 25 bp, Homo sapien
ttaataaccggtgcaggagagcttg

SEQ ID NO: 3856085 - DNA, 25 bp, Homo sapien
tgaggccatactttgggctgcccca

SEQ ID NO: 3856086 - DNA, 25 bp, Homo sapien
gaacgacggcaaagtgtgaggccat

SEQ ID NO: 3856087 - DNA, 25 bp, Homo sapien
tcaacccaacggttcatggagggct

SEQ ID NO: 3856088 - DNA, 25 bp, Homo sapien
cacattctctaaggccgatggcagc

SEQ ID NO: 3856089 - DNA, 25 bp, Homo sapien
gagggaaggcgatggagtgacagca

SEQ ID NO: 3856090 - DNA, 25 bp, Homo sapien
gggagggaaggcgatggagtgacag

SEQ ID NO: 3856091 - DNA, 25 bp, Homo sapien
agggaaggcgatggagtgacagcag

SEQ ID NO: 3856092 - DNA, 25 bp, Homo sapien
ctgggagggaaggcgatggagtgac

SEQ ID NO: 3856093 - DNA, 25 bp, Homo sapien
cagcactgaaggcgagggggtgacc

SEQ ID NO: 3856094 - DNA, 25 bp, Homo sapien
gcactgaaggcgagggggtgacctg

SEQ ID NO: 3856095 - DNA, 25 bp, Homo sapien
acctgggtgcccgtccaggatgcag

SEQ ID NO: 3856096 - DNA, 25 bp, Homo sapien
gggtgacctgggtgcccgtccagga

SEQ ID NO: 3856097 - DNA, 25 bp, Homo sapien
ctgcagaacagagatgaccctgcat

SEQ ID NO: 3856098 - DNA, 25 bp, Homo sapien
cagaacagagatgaccctgcatggt

SEQ ID NO: 3856099 - DNA, 25 bp, Homo sapien
gcagaacagagatgaccctgcatgg

SEQ ID NO: 3856100 - DNA, 25 bp, Homo sapien
gaacagagatgaccctgcatggttg

SEQ ID NO: 3856101 - DNA, 25 bp, Homo sapien
gggcactcatttggggggttatatc

SEQ ID NO: 3856102 - DNA, 25 bp, Homo sapien
tgtaccctcaaagttgcccatgccc

SEQ ID NO: 3856103 - DNA, 25 bp, Homo sapien
ggaacagttgatcccgcagagcttg

SEQ ID NO: 3856104 - DNA, 25 bp, Homo sapien
agagacagcttctgttgaggtctgg

SEQ ID NO: 3856105 - DNA, 25 bp, Homo sapien
tgctgtgctccagcccttgagctgg

SEQ ID NO: 3856106 - DNA, 25 bp, Homo sapien
aaggctgctgtgctccagcccttga

SEQ ID NO: 3856107 - DNA, 25 bp, Homo sapien
gctgtgctccagcccttgagctggg

SEQ ID NO: 3856108 - DNA, 25 bp, Homo sapien
gctgctgtgctccagcccttgagct

SEQ ID NO: 3856109 - DNA, 25 bp, Homo sapien
gatccgatcacaggcattttctggg

SEQ ID NO: 3856110 - DNA, 25 bp, Homo sapien
tctgcaagctgatccgatcacaggc

SEQ ID NO: 3856111 - DNA, 25 bp, Homo sapien
cgtgatgctcaggattttgtgagtc

SEQ ID NO: 3856112 - DNA, 25 bp, Homo sapien
ggtttgctgccaggccccgtgatgc

SEQ ID NO: 3856113 - DNA, 25 bp, Homo sapien
ccaggccagtgcccacccactcctg

SEQ ID NO: 3856114 - DNA, 25 bp, Homo sapien
gcccacccactcctgctgcccccat

SEQ ID NO: 3856115 - DNA, 25 bp, Homo sapien
aggccagtgcccacccactcctgct

SEQ ID NO: 3856116 - DNA, 25 bp, Homo sapien
ctgaaggaagtgtccccaggccagt

SEQ ID NO: 3856117 - DNA, 25 bp, Homo sapien
tgtcatcatgccactctaaggatgg

SEQ ID NO: 3856118 - DNA, 25 bp, Homo sapien
gaggaaggcctgaagttcttgctca

SEQ ID NO: 3856119 - DNA, 25 bp, Homo sapien
agttcttgctcagggacatcagtgg

SEQ ID NO: 3856120 - DNA, 25 bp, Homo sapien
gaagttcttgctcagggacatcagt

SEQ ID NO: 3856121 - DNA, 25 bp, Homo sapien
gggaggaaggcctgaagttcttgct

SEQ ID NO: 3856122 - DNA, 25 bp, Homo sapien
agataagattggtctgttcttttgc

SEQ ID NO: 3856123 - DNA, 25 bp, Homo sapien
cttggagataagattggtctgttct

SEQ ID NO: 3856124 - DNA, 25 bp, Homo sapien
gttcttttgcttcacttctgctttc

SEQ ID NO: 3856125 - DNA, 25 bp, Homo sapien
atggcttggagataagattggtctg

SEQ ID NO: 3856126 - DNA, 25 bp, Homo sapien
tcctaccatatgacagcaggctggc

SEQ ID NO: 3856127 - DNA, 25 bp, Homo sapien
gaacacatgcatgcttcctaccata

SEQ ID NO: 3856128 - DNA, 25 bp, Homo sapien
caggctggccctcggttctcacact

SEQ ID NO: 3856129 - DNA, 25 bp, Homo sapien
cctgcgccaaggcaggcacctgaaa

SEQ ID NO: 3856130 - DNA, 25 bp, Homo sapien
ctgggaggtaacaagtccaaaaatg

SEQ ID NO: 3856131 - DNA, 25 bp, Homo sapien
tgggaggtaacaagtccaaaaatga

SEQ ID NO: 3856132 - DNA, 25 bp, Homo sapien
gaggcagctccagggaactctgaga

SEQ ID NO: 3856133 - DNA, 25 bp, Homo sapien
cagggaactctgagatccatagggc

SEQ ID NO: 3856134 - DNA, 25 bp, Homo sapien
cagctccagggaactctgagatcca

SEQ ID NO: 3856135 - DNA, 25 bp, Homo sapien
gggaactctgagatccatagggcat

SEQ ID NO: 3856136 - DNA, 25 bp, Homo sapien
gccaccgccgcttctggccacctcc

SEQ ID NO: 3856137 - DNA, 25 bp, Homo sapien
ccagccaccgccgcttctggccacc

SEQ ID NO: 3856138 - DNA, 25 bp, Homo sapien
caccgccgcttctggccacctccat

SEQ ID NO: 3856139 - DNA, 25 bp, Homo sapien
agccaccgccgcttctggccacctc

SEQ ID NO: 3856140 - DNA, 25 bp, Homo sapien
gatgctattaaggatacggttgcca

SEQ ID NO: 3856141 - DNA, 25 bp, Homo sapien
ttattggatgctattaaggatacgg

SEQ ID NO: 3856142 - DNA, 25 bp, Homo sapien
tggatgctattaaggatacggttgc

SEQ ID NO: 3856143 - DNA, 25 bp, Homo sapien
ctattaaggatacggttgccataga

SEQ ID NO: 3856144 - DNA, 25 bp, Homo sapien
gccaaacctggaacgtgcattcttc

SEQ ID NO: 3856145 - DNA, 25 bp, Homo sapien
aggtttggatgccaaacctggaacg

SEQ ID NO: 3856146 - DNA, 25 bp, Homo sapien
ggatgccaaacctggaacgtgcatt

SEQ ID NO: 3856147 - DNA, 25 bp, Homo sapien
aacgtgcattcttctgcaagctgct

SEQ ID NO: 3856148 - DNA, 25 bp, Homo sapien
ggaagtcgcctcattagctcagatt

SEQ ID NO: 3856149 - DNA, 25 bp, Homo sapien
gggttgggccaggaagtcgcctcat

SEQ ID NO: 3856150 - DNA, 25 bp, Homo sapien
cccagggcaacctcatgcaggcctc

SEQ ID NO: 3856151 - DNA, 25 bp, Homo sapien
agtcgcctcattagctcagattcca

SEQ ID NO: 3856152 - DNA, 25 bp, Homo sapien
agcaccttttggaccgaggatgttc

SEQ ID NO: 3856153 - DNA, 25 bp, Homo sapien
accttttggaccgaggatgttcaga

SEQ ID NO: 3856154 - DNA, 25 bp, Homo sapien
tttggaccgaggatgttcagataca

SEQ ID NO: 3856155 - DNA, 25 bp, Homo sapien
tcccccagttcattagcaccttttg

SEQ ID NO: 3856156 - DNA, 25 bp, Homo sapien
ctggaagactaaaccagtctagaat

SEQ ID NO: 3856157 - DNA, 25 bp, Homo sapien
gactaaaccagtctagaatttccac

SEQ ID NO: 3856158 - DNA, 25 bp, Homo sapien
agtctagaatttccacgttcttcta

SEQ ID NO: 3856159 - DNA, 25 bp, Homo sapien
gaatttccacgttcttctacctgct

SEQ ID NO: 3856160 - DNA, 25 bp, Homo sapien
agcctcatgccaaactcattcctat

SEQ ID NO: 3856161 - DNA, 25 bp, Homo sapien
atccatagcattggtggtccaaatg

SEQ ID NO: 3856162 - DNA, 25 bp, Homo sapien
tcatgccaaactcattcctatcagc

SEQ ID NO: 3856163 - DNA, 25 bp, Homo sapien
gcattggtggtccaaatggtacaga

SEQ ID NO: 3856164 - DNA, 25 bp, Homo sapien
tgggccccaaatctcgggcttttca

SEQ ID NO: 3856165 - DNA, 25 bp, Homo sapien
gtggtcagaagacactaacgtttgg

SEQ ID NO: 3856166 - DNA, 25 bp, Homo sapien
gtcagaagacactaacgtttgggcc

SEQ ID NO: 3856167 - DNA, 25 bp, Homo sapien
tcagaagacactaacgtttgggccc

SEQ ID NO: 3856168 - DNA, 25 bp, Homo sapien
tatgcaggctattggcagccctgag

SEQ ID NO: 3856169 - DNA, 25 bp, Homo sapien
aagctatgcaggctattggcagccc

SEQ ID NO: 3856170 - DNA, 25 bp, Homo sapien
agaagctatgcaggctattggcagc

SEQ ID NO: 3856171 - DNA, 25 bp, Homo sapien
ggagaagctatgcaggctattggca

SEQ ID NO: 3856172 - DNA, 25 bp, Homo sapien
gcctcaagggacttgcacttcttgc

SEQ ID NO: 3856173 - DNA, 25 bp, Homo sapien
gcccagttcgggaaacaggtgagct

SEQ ID NO: 3856174 - DNA, 25 bp, Homo sapien
ggaagatggagccacactctcgatg

SEQ ID NO: 3856175 - DNA, 25 bp, Homo sapien
ggtgagctgggtgcagctcccggcc

SEQ ID NO: 3856176 - DNA, 25 bp, Homo sapien
cagcagaacagagtttgttcttgag

SEQ ID NO: 3856177 - DNA, 25 bp, Homo sapien
gcagtgcagggcagaagcagcatgt

SEQ ID NO: 3856178 - DNA, 25 bp, Homo sapien
ctgcagacctttgctagatggcacc

SEQ ID NO: 3856179 - DNA, 25 bp, Homo sapien
agagtttgttcttgagcagtgcagg

SEQ ID NO: 3856180 - DNA, 25 bp, Homo sapien
gcacagccccaaggcatccctgggg

SEQ ID NO: 3856181 - DNA, 25 bp, Homo sapien
tgcacagccccaaggcatccctggg

SEQ ID NO: 3856182 - DNA, 25 bp, Homo sapien
gaggtctctcatgctctaatgttct

SEQ ID NO: 3856183 - DNA, 25 bp, Homo sapien
ggcagagggctttccgttcctagct

SEQ ID NO: 3856184 - DNA, 25 bp, Homo sapien
gctttccgttcctagcttcaatctc

SEQ ID NO: 3856185 - DNA, 25 bp, Homo sapien
tgttctctgctggacgtatgttctc

SEQ ID NO: 3856186 - DNA, 25 bp, Homo sapien
agtgggcagcacgtgcggctcccat

SEQ ID NO: 3856187 - DNA, 25 bp, Homo sapien
cagtgggcagcacgtgcggctccca

SEQ ID NO: 3856188 - DNA, 25 bp, Homo sapien
gcaagaagcgtagcccctctttgct

SEQ ID NO: 3856189 - DNA, 25 bp, Homo sapien
gcattaaagcccattattccatcat

SEQ ID NO: 3856190 - DNA, 25 bp, Homo sapien
gagaagcccagtgcattaaagccca

SEQ ID NO: 3856191 - DNA, 25 bp, Homo sapien
ccatcattgctctggacttgccggc

SEQ ID NO: 3856192 - DNA, 25 bp, Homo sapien
agaaggggtcttctgatgccgatgc

SEQ ID NO: 3856193 - DNA, 25 bp, Homo sapien
ggggtcttctgatgccgatgcccat

SEQ ID NO: 3856194 - DNA, 25 bp, Homo sapien
aaggggtcttctgatgccgatgccc

SEQ ID NO: 3856195 - DNA, 25 bp, Homo sapien
gaaggggtcttctgatgccgatgcc

SEQ ID NO: 3856196 - DNA, 25 bp, Homo sapien
catttcacgctgatttcttcaggtc

SEQ ID NO: 3856197 - DNA, 25 bp, Homo sapien
atttcacgctgatttcttcaggtcc

SEQ ID NO: 3856198 - DNA, 25 bp, Homo sapien
gaagagcaggcagccatggagcagc

SEQ ID NO: 3856199 - DNA, 25 bp, Homo sapien
aggcagccatggagcagcaacacca

SEQ ID NO: 3856200 - DNA, 25 bp, Homo sapien
caggcagccatggagcagcaacacc

SEQ ID NO: 3856201 - DNA, 25 bp, Homo sapien
gagcaggcagccatggagcagcaac

SEQ ID NO: 3856202 - DNA, 25 bp, Homo sapien
ttcagaagaggccacttgtgagctg

SEQ ID NO: 3856203 - DNA, 25 bp, Homo sapien
gggacttcagaagaggccacttgtg

SEQ ID NO: 3856204 - DNA, 25 bp, Homo sapien
ggacttcagaagaggccacttgtga

SEQ ID NO: 3856205 - DNA, 25 bp, Homo sapien
agaagaggccacttgtgagctggcc

SEQ ID NO: 3856206 - DNA, 25 bp, Homo sapien
cttgagcatgtatcgtttgctgggc

SEQ ID NO: 3856207 - DNA, 25 bp, Homo sapien
agccagatatgcgttcagcaaattc

SEQ ID NO: 3856208 - DNA, 25 bp, Homo sapien
gatatgcgttcagcaaattcttgag

SEQ ID NO: 3856209 - DNA, 25 bp, Homo sapien
gcaaattcttgagcatgtatcgttt

SEQ ID NO: 3856210 - DNA, 25 bp, Homo sapien
gtggcaaaacatttcgtcatgcagc

SEQ ID NO: 3856211 - DNA, 25 bp, Homo sapien
gcaatacaccaaaaaaggtggcaaa

SEQ ID NO: 3856212 - DNA, 25 bp, Homo sapien
aggatgcttcagcatcatggacagc

SEQ ID NO: 3856213 - DNA, 25 bp, Homo sapien
cagcatcatgggctcacagtagaag

SEQ ID NO: 3856214 - DNA, 25 bp, Homo sapien
tctctaggctctggataccttgccc

SEQ ID NO: 3856215 - DNA, 25 bp, Homo sapien
ctaggctctggataccttgccccat

SEQ ID NO: 3856216 - DNA, 25 bp, Homo sapien
ttctctaggctctggataccttgcc

SEQ ID NO: 3856217 - DNA, 25 bp, Homo sapien
tctaggctctggataccttgcccca

SEQ ID NO: 3856218 - DNA, 25 bp, Homo sapien
cttcagcaacaacttaaaagccaga

SEQ ID NO: 3856219 - DNA, 25 bp, Homo sapien
ggctttggcccaagtctgccaactc

SEQ ID NO: 3856220 - DNA, 25 bp, Homo sapien
cagctccagagccatgctactagga

SEQ ID NO: 3856221 - DNA, 25 bp, Homo sapien
cggcttcccaatagtacagatctcc

SEQ ID NO: 3856222 - DNA, 25 bp, Homo sapien
gcatagtcacggcttcccaatagta

SEQ ID NO: 3856223 - DNA, 25 bp, Homo sapien
taggatgttgtgagagcatagtcac

SEQ ID NO: 3856224 - DNA, 25 bp, Homo sapien
acaatgatcctcaaagacaagcccc

SEQ ID NO: 3856225 - DNA, 25 bp, Homo sapien
ccaggacaatgatcctcaaagacaa

SEQ ID NO: 3856226 - DNA, 25 bp, Homo sapien
caggacaatgatcctcaaagacaag

SEQ ID NO: 3856227 - DNA, 25 bp, Homo sapien
ggacaatgatcctcaaagacaagcc

SEQ ID NO: 3856228 - DNA, 25 bp, Homo sapien
taggtctggagcatgttccacatgg

SEQ ID NO: 3856229 - DNA, 25 bp, Homo sapien
tatatgaactaagtttagggctagg

SEQ ID NO: 3856230 - DNA, 25 bp, Homo sapien
gattaacatggtcagcatacatgca

SEQ ID NO: 3856231 - DNA, 25 bp, Homo sapien
catggtcagcatacatgcagatatc

SEQ ID NO: 3856232 - DNA, 25 bp, Homo sapien
gagatttcctatgcctgcccactcc

SEQ ID NO: 3856233 - DNA, 25 bp, Homo sapien
tgctccaggtaagagatttcctatg

SEQ ID NO: 3856234 - DNA, 25 bp, Homo sapien
ctccaggtaagagatttcctatgcc

SEQ ID NO: 3856235 - DNA, 25 bp, Homo sapien
atgctccaggtaagagatttcctat

SEQ ID NO: 3856236 - DNA, 25 bp, Homo sapien
actgaagagagggccctctgaccta

SEQ ID NO: 3856237 - DNA, 25 bp, Homo sapien
ctgaagagagggccctctgacctac

SEQ ID NO: 3856238 - DNA, 25 bp, Homo sapien
tgccctaaaggacccacactgaaga

SEQ ID NO: 3856239 - DNA, 25 bp, Homo sapien
tcgacagctcgagcccctggtgtgt

SEQ ID NO: 3856240 - DNA, 25 bp, Homo sapien
tcttgacacgggtatgtacctcttt

SEQ ID NO: 3856241 - DNA, 25 bp, Homo sapien
tccgtgccttcttcgacagctcgag

SEQ ID NO: 3856242 - DNA, 25 bp, Homo sapien
ccatttcctcatcttgacacgggta

SEQ ID NO: 3856243 - DNA, 25 bp, Homo sapien
cctggtgcacttgacccatcctcct

SEQ ID NO: 3856244 - DNA, 25 bp, Homo sapien
ctggtgcacttgacccatcctcctg

SEQ ID NO: 3856245 - DNA, 25 bp, Homo sapien
ccctggtgcacttgacccatcctcc

SEQ ID NO: 3856246 - DNA, 25 bp, Homo sapien
aatggcatcagtgctcggagcgtca

SEQ ID NO: 3856247 - DNA, 25 bp, Homo sapien
aagggcaatggcatcagtgctcgga

SEQ ID NO: 3856248 - DNA, 25 bp, Homo sapien
ggaagggcaatggcatcagtgctcg

SEQ ID NO: 3856249 - DNA, 25 bp, Homo sapien
gcaatggcatcagtgctcggagcgt

SEQ ID NO: 3856250 - DNA, 25 bp, Homo sapien
ggcggagcctagaggtgcggatgag

SEQ ID NO: 3856251 - DNA, 25 bp, Homo sapien
tttaacagaaggattcctgcaagag

SEQ ID NO: 3856252 - DNA, 25 bp, Homo sapien
aacagaaggattcctgcaagaggtg

SEQ ID NO: 3856253 - DNA, 25 bp, Homo sapien
ggtgcggatgaggacaaggcatcct

SEQ ID NO: 3856254 - DNA, 25 bp, Homo sapien
catctttgacctggtccttgtcaca

SEQ ID NO: 3856255 - DNA, 25 bp, Homo sapien
tttgacctggtccttgtcacaagga

SEQ ID NO: 3856256 - DNA, 25 bp, Homo sapien
gacctggtccttgtcacaaggagag

SEQ ID NO: 3856257 - DNA, 25 bp, Homo sapien
tctttgacctggtccttgtcacaag

SEQ ID NO: 3856258 - DNA, 25 bp, Homo sapien
cagtccagcggcggcaagctggaaa

SEQ ID NO: 3856259 - DNA, 25 bp, Homo sapien
ctacagtccagcggcggcaagctgg

SEQ ID NO: 3856260 - DNA, 25 bp, Homo sapien
tacagtccagcggcggcaagctgga

SEQ ID NO: 3856261 - DNA, 25 bp, Homo sapien
tccagcggcggcaagctggaaaaga

SEQ ID NO: 3856262 - DNA, 25 bp, Homo sapien
ccaggaggacagtccacagcacggg

SEQ ID NO: 3856263 - DNA, 25 bp, Homo sapien
ttcctcctggtctttcagaaagcat

SEQ ID NO: 3856264 - DNA, 25 bp, Homo sapien
gtaaagatctttatagccaatgtat

SEQ ID NO: 3856265 - DNA, 25 bp, Homo sapien
cacacgcatactccactttgctata

SEQ ID NO: 3856266 - DNA, 25 bp, Homo sapien
acttgccactggaagatatctttgg

SEQ ID NO: 3856267 - DNA, 25 bp, Homo sapien
ccactggaagatatctttggcattt

SEQ ID NO: 3856268 - DNA, 25 bp, Homo sapien
ttgccactggaagatatctttggca

SEQ ID NO: 3856269 - DNA, 25 bp, Homo sapien
gccactggaagatatctttggcatt

SEQ ID NO: 3856270 - DNA, 25 bp, Homo sapien
gcccgaaccaggccgcgggagcatg

SEQ ID NO: 3856271 - DNA, 25 bp, Homo sapien
gcgcccgaaccaggccgcgggagca

SEQ ID NO: 3856272 - DNA, 25 bp, Homo sapien
cgcccgaaccaggccgcgggagcat

SEQ ID NO: 3856273 - DNA, 25 bp, Homo sapien
ggagaggcgcccgaaccaggccgcg

SEQ ID NO: 3856274 - DNA, 25 bp, Homo sapien
cacccactgggttggctcaagaggt

SEQ ID NO: 3856275 - DNA, 25 bp, Homo sapien
cccttagggtctgcgatccgccggg

SEQ ID NO: 3856276 - DNA, 25 bp, Homo sapien
ttgggtggcgcttgattggaactcc

SEQ ID NO: 3856277 - DNA, 25 bp, Homo sapien
ggagagaacactttgcggaaggcct

SEQ ID NO: 3856278 - DNA, 25 bp, Homo sapien
tagcggcctgattagcatcgccgcc

SEQ ID NO: 3856279 - DNA, 25 bp, Homo sapien
catcttagcggcctgattagcatcg

SEQ ID NO: 3856280 - DNA, 25 bp, Homo sapien
cttttccatcttagcggcctgatta

SEQ ID NO: 3856281 - DNA, 25 bp, Homo sapien
ggcctgattagcatcgccgccgctt

SEQ ID NO: 3856282 - DNA, 25 bp, Homo sapien
acggctcggctcacttctccaagaa

SEQ ID NO: 3856283 - DNA, 25 bp, Homo sapien
gagaatgtgtattaagcaggtgggc

SEQ ID NO: 3856284 - DNA, 25 bp, Homo sapien
tgagagtatgtattaaggagtgtgt

SEQ ID NO: 3856285 - DNA, 25 bp, Homo sapien
cttcgcggcgctgcacggctcggct

SEQ ID NO: 3856286 - DNA, 25 bp, Homo sapien
agccataaatcaccctctgggaact

SEQ ID NO: 3856287 - DNA, 25 bp, Homo sapien
cgaagccataaatcaccctctggga

SEQ ID NO: 3856288 - DNA, 25 bp, Homo sapien
aagccataaatcaccctctgggaac

SEQ ID NO: 3856289 - DNA, 25 bp, Homo sapien
gaagccataaatcaccctctgggaa

SEQ ID NO: 3856290 - DNA, 25 bp, Homo sapien
ccagaaggaaatccacaaattgctg

SEQ ID NO: 3856291 - DNA, 25 bp, Homo sapien
caaatgaagaggttctgccctggaa

SEQ ID NO: 3856292 - DNA, 25 bp, Homo sapien
gccatgtagctaatctgctttgtga

SEQ ID NO: 3856293 - DNA, 25 bp, Homo sapien
ggattgctggatcccaaatccacag

SEQ ID NO: 3856294 - DNA, 25 bp, Homo sapien
gacttgtgggcaggtcgctgtccct

SEQ ID NO: 3856295 - DNA, 25 bp, Homo sapien
tgaatgtggtctgcagtatttctac

SEQ ID NO: 3856296 - DNA, 25 bp, Homo sapien
tgtggtctgcagtatttctacttcc

SEQ ID NO: 3856297 - DNA, 25 bp, Homo sapien
ggacttgtgggcaggtcgctgtccc

SEQ ID NO: 3856298 - DNA, 25 bp, Homo sapien
gccacacaggcacacttgatttgat

SEQ ID NO: 3856299 - DNA, 25 bp, Homo sapien
gagattagaaacagggtccacaaag

SEQ ID NO: 3856300 - DNA, 25 bp, Homo sapien
ctaactgctcttggctgaggccgcc

SEQ ID NO: 3856301 - DNA, 25 bp, Homo sapien
tgaggccgccaggagattagaaaca

SEQ ID NO: 3856302 - DNA, 25 bp, Homo sapien
tcccaaggtttatggactgccctgg

SEQ ID NO: 3856303 - DNA, 25 bp, Homo sapien
tggcccagagaagtccaagccaggg

SEQ ID NO: 3856304 - DNA, 25 bp, Homo sapien
cattcttgagattcaggcctggccc

SEQ ID NO: 3856305 - DNA, 25 bp, Homo sapien
ccagggaatcgaagcttcttggtcc

SEQ ID NO: 3856306 - DNA, 25 bp, Homo sapien
ctcagaggagtgagctccacggctg

SEQ ID NO: 3856307 - DNA, 25 bp, Homo sapien
ccctgaagagaacgcccacattttc

SEQ ID NO: 3856308 - DNA, 25 bp, Homo sapien
atgcccctgaagagaacgcccacat

SEQ ID NO: 3856309 - DNA, 25 bp, Homo sapien
acaaaattccacttaggaatgagag

SEQ ID NO: 3856310 - DNA, 25 bp, Homo sapien
aaatggtaaaacctcagccagtcca

SEQ ID NO: 3856311 - DNA, 25 bp, Homo sapien
cattggtgatgagccaggtgagcct

SEQ ID NO: 3856312 - DNA, 25 bp, Homo sapien
ctcattggtgatgagccaggtgagc

SEQ ID NO: 3856313 - DNA, 25 bp, Homo sapien
agccagtccatttccctcattggtg

SEQ ID NO: 3856314 - DNA, 25 bp, Homo sapien
ccacaggaaggggttgctcgaagac

SEQ ID NO: 3856315 - DNA, 25 bp, Homo sapien
agccacaggaaggggttgctcgaag

SEQ ID NO: 3856316 - DNA, 25 bp, Homo sapien
gggttgctcgaagacctcaggggta

SEQ ID NO: 3856317 - DNA, 25 bp, Homo sapien
aaggggttgctcgaagacctcaggg

SEQ ID NO: 3856318 - DNA, 25 bp, Homo sapien
gggtagtggggcaggttttagcagc

SEQ ID NO: 3856319 - DNA, 25 bp, Homo sapien
gtagtggggcaggttttagcagcgg

SEQ ID NO: 3856320 - DNA, 25 bp, Homo sapien
ttgggatggcattgggggtagtggg

SEQ ID NO: 3856321 - DNA, 25 bp, Homo sapien
tagtggggcaggttttagcagcggc

SEQ ID NO: 3856322 - DNA, 25 bp, Homo sapien
gccaaggttggagagactagacagt

SEQ ID NO: 3856323 - DNA, 25 bp, Homo sapien
aaggttggagagactagacagtcca

SEQ ID NO: 3856324 - DNA, 25 bp, Homo sapien
ctggatggccaaggttggagagact

SEQ ID NO: 3856325 - DNA, 25 bp, Homo sapien
ttggagagactagacagtccagggt

SEQ ID NO: 3856326 - DNA, 25 bp, Homo sapien
tcatttctgggcgtcatggctccct

SEQ ID NO: 3856327 - DNA, 25 bp, Homo sapien
cctcctcatttctgggcgtcatggc

SEQ ID NO: 3856328 - DNA, 25 bp, Homo sapien
ctcctctctgtatctgagcgagggt

SEQ ID NO: 3856329 - DNA, 25 bp, Homo sapien
tctctgtatctgagcgagggtgtgc

SEQ ID NO: 3856330 - DNA, 25 bp, Homo sapien
gccccgagagaactgaagctcaggc

SEQ ID NO: 3856331 - DNA, 25 bp, Homo sapien
taaacactccgggttcacggtgctc

SEQ ID NO: 3856332 - DNA, 25 bp, Homo sapien
tctggggcgaccacttctttaaaca

SEQ ID NO: 3856333 - DNA, 25 bp, Homo sapien
gagaccatgctatacaggtgaggcc

SEQ ID NO: 3856334 - DNA, 25 bp, Homo sapien
ccatgctatacaggtgaggcccttg

SEQ ID NO: 3856335 - DNA, 25 bp, Homo sapien
gccgagaccatgctatacaggtgag

SEQ ID NO: 3856336 - DNA, 25 bp, Homo sapien
gtgccgagaccatgctatacaggtg

SEQ ID NO: 3856337 - DNA, 25 bp, Homo sapien
taagaatccatcatgtgccattgtg

SEQ ID NO: 3856338 - DNA, 25 bp, Homo sapien
ctgtctctggagatcgtttcgctca

SEQ ID NO: 3856339 - DNA, 25 bp, Homo sapien
ccccatctgcaagagcgattttcca

SEQ ID NO: 3856340 - DNA, 25 bp, Homo sapien
caatagaaacgctgtacatggcatt

SEQ ID NO: 3856341 - DNA, 25 bp, Homo sapien
tcagaagctgttggcatcgccaggg

SEQ ID NO: 3856342 - DNA, 25 bp, Homo sapien
gaagtcggcttactgtctccaggcc

SEQ ID NO: 3856343 - DNA, 25 bp, Homo sapien
taggcccctagagtccacacgacag

SEQ ID NO: 3856344 - DNA, 25 bp, Homo sapien
ggaggttttctcacgagtcctggga

SEQ ID NO: 3856345 - DNA, 25 bp, Homo sapien
gcccctagagtccacacgacagtgt

SEQ ID NO: 3856346 - DNA, 25 bp, Homo sapien
cagcagcttgcatccgaagccaaag

SEQ ID NO: 3856347 - DNA, 25 bp, Homo sapien
cttgcatccgaagccaaagggctgt

SEQ ID NO: 3856348 - DNA, 25 bp, Homo sapien
tgcatccgaagccaaagggctgtct

SEQ ID NO: 3856349 - DNA, 25 bp, Homo sapien
cagcttgcatccgaagccaaagggc

SEQ ID NO: 3856350 - DNA, 25 bp, Homo sapien
aacaaaaggcaagagcatagtgtaa

SEQ ID NO: 3856351 - DNA, 25 bp, Homo sapien
acaacaaaaggcaagagcatagtgt

SEQ ID NO: 3856352 - DNA, 25 bp, Homo sapien
aaaaggcaagagcatagtgtaaaag

SEQ ID NO: 3856353 - DNA, 25 bp, Homo sapien
ctgtccaacaacaaaaggcaagagc

SEQ ID NO: 3856354 - DNA, 25 bp, Homo sapien
tgagccagcagagctctcaggccat

SEQ ID NO: 3856355 - DNA, 25 bp, Homo sapien
aggaagggagcctccctccgctgag

SEQ ID NO: 3856356 - DNA, 25 bp, Homo sapien
gagctctcaggccattggcagctgg

SEQ ID NO: 3856357 - DNA, 25 bp, Homo sapien
ggaagggagcctccctccgctgagc

SEQ ID NO: 3856358 - DNA, 25 bp, Homo sapien
cgtggagagatgtacatgccaggtg

SEQ ID NO: 3856359 - DNA, 25 bp, Homo sapien
atgttttccatggcttggggcccag

SEQ ID NO: 3856360 - DNA, 25 bp, Homo sapien
agatgtacatgccaggtgctccttg

SEQ ID NO: 3856361 - DNA, 25 bp, Homo sapien
agatgttttccatggcttggggccc

SEQ ID NO: 3856362 - DNA, 25 bp, Homo sapien
ctgagaaatccggcattccattcct

SEQ ID NO: 3856363 - DNA, 25 bp, Homo sapien
ggcctcaggataggggaggcaagca

SEQ ID NO: 3856364 - DNA, 25 bp, Homo sapien
gggcctcaggataggggaggcaagc

SEQ ID NO: 3856365 - DNA, 25 bp, Homo sapien
agaaatccggcattccattccttgc

SEQ ID NO: 3856366 - DNA, 25 bp, Homo sapien
agttgcctcccctttgcgaggaagg

SEQ ID NO: 3856367 - DNA, 25 bp, Homo sapien
gcttggatgcagttttgaaggcccc

SEQ ID NO: 3856368 - DNA, 25 bp, Homo sapien
gacagcaggcaacaggcaaggactg

SEQ ID NO: 3856369 - DNA, 25 bp, Homo sapien
ggttgttcggttctagagcgtggcg

SEQ ID NO: 3856370 - DNA, 25 bp, Homo sapien
tccccgtgccagctctgcgtccttc

SEQ ID NO: 3856371 - DNA, 25 bp, Homo sapien
cccgtgccagctctgcgtccttcag

SEQ ID NO: 3856372 - DNA, 25 bp, Homo sapien
cgtgccagctctgcgtccttcagct

SEQ ID NO: 3856373 - DNA, 25 bp, Homo sapien
tgcgtccttcagctcctccagcaac

SEQ ID NO: 3856374 - DNA, 25 bp, Homo sapien
cccatgccaaccctgggtcagggag

SEQ ID NO: 3856375 - DNA, 25 bp, Homo sapien
tgccaaccctgggtcagggagaggt

SEQ ID NO: 3856376 - DNA, 25 bp, Homo sapien
caaccctgggtcagggagaggtgac

SEQ ID NO: 3856377 - DNA, 25 bp, Homo sapien
atgccaaccctgggtcagggagagg

SEQ ID NO: 3856378 - DNA, 25 bp, Homo sapien
agggagacgtttcacaggagcagat

SEQ ID NO: 3856379 - DNA, 25 bp, Homo sapien
agcagatggacacccccttcaggat

SEQ ID NO: 3856380 - DNA, 25 bp, Homo sapien
tgcctcacagtccttcgagggagac

SEQ ID NO: 3856381 - DNA, 25 bp, Homo sapien
gctggccaccttggcgaagccgctt

SEQ ID NO: 3856382 - DNA, 25 bp, Homo sapien
cccatttgtcatcggtaacggccat

SEQ ID NO: 3856383 - DNA, 25 bp, Homo sapien
agcccccatttgtcatcggtaacgg

SEQ ID NO: 3856384 - DNA, 25 bp, Homo sapien
gccagcccccatttgtcatcggtaa

SEQ ID NO: 3856385 - DNA, 25 bp, Homo sapien
ttaggaatgacttggcgtcccccga

SEQ ID NO: 3856386 - DNA, 25 bp, Homo sapien
aagtagcccctacaagcaggcagac

SEQ ID NO: 3856387 - DNA, 25 bp, Homo sapien
cccaggagtcaaggcgacccattta

SEQ ID NO: 3856388 - DNA, 25 bp, Homo sapien
catagatctgctaccctgtgagagc

SEQ ID NO: 3856389 - DNA, 25 bp, Homo sapien
gatgctgtggagtcactatccttcc

SEQ ID NO: 3856390 - DNA, 25 bp, Homo sapien
tgccccgggagagggcgcataggct

SEQ ID NO: 3856391 - DNA, 25 bp, Homo sapien
ctaaactcgggagcacacgtctggt

SEQ ID NO: 3856392 - DNA, 25 bp, Homo sapien
acacgtctggtttatggtggcaggc

SEQ ID NO: 3856393 - DNA, 25 bp, Homo sapien
gacgatgacggcaggaagcaacaaa

SEQ ID NO: 3856394 - DNA, 25 bp, Homo sapien
gggaagttggtggtgaccgcggctg

SEQ ID NO: 3856395 - DNA, 25 bp, Homo sapien
gaaccacttgttcccagcgcggcca

SEQ ID NO: 3856396 - DNA, 25 bp, Homo sapien
tgccgaaccacttgttcccagcgcg

SEQ ID NO: 3856397 - DNA, 25 bp, Homo sapien
gtgaccgcggctgccgaaccacttg

SEQ ID NO: 3856398 - DNA, 25 bp, Homo sapien
ttttcaagaaagtcttgacaaaatg

SEQ ID NO: 3856399 - DNA, 25 bp, Homo sapien
aattacaatatttcggagagcgtcg

SEQ ID NO: 3856400 - DNA, 25 bp, Homo sapien
gaaagagccgagtaaaattcttcac

SEQ ID NO: 3856401 - DNA, 25 bp, Homo sapien
gtcgtaattctattgcagacagccc

SEQ ID NO: 3856402 - DNA, 25 bp, Homo sapien
ttgtgtccccaggagccatggggcg

SEQ ID NO: 3856403 - DNA, 25 bp, Homo sapien
tctctttctttgtgtccccaggagc

SEQ ID NO: 3856404 - DNA, 25 bp, Homo sapien
tctttgtgtccccaggagccatggg

SEQ ID NO: 3856405 - DNA, 25 bp, Homo sapien
gtccccaggagccatggggcgccat

SEQ ID NO: 3856406 - DNA, 25 bp, Homo sapien
gacatccatcctgggctgtgacagc

SEQ ID NO: 3856407 - DNA, 25 bp, Homo sapien
tcagcccacaagacatccatcctgg

SEQ ID NO: 3856408 - DNA, 25 bp, Homo sapien
cagccttaggctggggaagcctttt

SEQ ID NO: 3856409 - DNA, 25 bp, Homo sapien
ccacaagacatccatcctgggctgt

SEQ ID NO: 3856410 - DNA, 25 bp, Homo sapien
agccttcagcatgtgactgccctca

SEQ ID NO: 3856411 - DNA, 25 bp, Homo sapien
ggccagcttgttctgcagagggtcc

SEQ ID NO: 3856412 - DNA, 25 bp, Homo sapien
tccacaatgccagaggcaccagctg

SEQ ID NO: 3856413 - DNA, 25 bp, Homo sapien
tgccagtacagcctgttcccacatg

SEQ ID NO: 3856414 - DNA, 25 bp, Homo sapien
cagagggtccagtggccttcacctc

SEQ ID NO: 3856415 - DNA, 25 bp, Homo sapien
agcaggggcccggtgaggatcaggg

SEQ ID NO: 3856416 - DNA, 25 bp, Homo sapien
ccaggttattgggtcatgacttggg

SEQ ID NO: 3856417 - DNA, 25 bp, Homo sapien
gcccctgccaggaagttagagagca

SEQ ID NO: 3856418 - DNA, 25 bp, Homo sapien
tgggtcatgacttgggtgagggtct

SEQ ID NO: 3856419 - DNA, 25 bp, Homo sapien
tgtggggcagccctgagtctcgcac

SEQ ID NO: 3856420 - DNA, 25 bp, Homo sapien
agccctgagtctcgcactgtgtggg

SEQ ID NO: 3856421 - DNA, 25 bp, Homo sapien
tcttgcctacatgggtgactgagcc

SEQ ID NO: 3856422 - DNA, 25 bp, Homo sapien
acagcagcgggcttgtgtggcatct

SEQ ID NO: 3856423 - DNA, 25 bp, Homo sapien
tagcataggactgctttaaagttga

SEQ ID NO: 3856424 - DNA, 25 bp, Homo sapien
aaagttgatgccagaagtttcttga

SEQ ID NO: 3856425 - DNA, 25 bp, Homo sapien
ttagcataggactgctttaaagttg

SEQ ID NO: 3856426 - DNA, 25 bp, Homo sapien
ttcttgacccttgggaagcctcctg

SEQ ID NO: 3856427 - DNA, 25 bp, Homo sapien
caaaggacattgagaggtgcagtca

SEQ ID NO: 3856428 - DNA, 25 bp, Homo sapien
caaaaatgctgttcagtggcccgtc

SEQ ID NO: 3856429 - DNA, 25 bp, Homo sapien
gaaagcgtgcccattaatctgtaga

SEQ ID NO: 3856430 - DNA, 25 bp, Homo sapien
gatcatgtgggtcttggtacaaagg

SEQ ID NO: 3856431 - DNA, 25 bp, Homo sapien
tgtggaaatcatggttctgggatcc

SEQ ID NO: 3856432 - DNA, 25 bp, Homo sapien
aatcatggttctgggatcctcccac

SEQ ID NO: 3856433 - DNA, 25 bp, Homo sapien
ctgtggaaatcatggttctgggatc

SEQ ID NO: 3856434 - DNA, 25 bp, Homo sapien
ggaaatcatggttctgggatcctcc

SEQ ID NO: 3856435 - DNA, 25 bp, Homo sapien
tggtcccagggcctgtatctggatg

SEQ ID NO: 3856436 - DNA, 25 bp, Homo sapien
ggtcccagggcctgtatctggatgt

SEQ ID NO: 3856437 - DNA, 25 bp, Homo sapien
ctgcatcttgcttgaacccccttag

SEQ ID NO: 3856438 - DNA, 25 bp, Homo sapien
ggctgcatcttgcttgaaccccctt

SEQ ID NO: 3856439 - DNA, 25 bp, Homo sapien
gctgcatcttgcttgaaccccctta

SEQ ID NO: 3856440 - DNA, 25 bp, Homo sapien
agtccagtgtggctaactcatcagc

SEQ ID NO: 3856441 - DNA, 25 bp, Homo sapien
tccagtgtggctaactcatcagctc

SEQ ID NO: 3856442 - DNA, 25 bp, Homo sapien
tcagtccagtgtggctaactcatca

SEQ ID NO: 3856443 - DNA, 25 bp, Homo sapien
gtgtggctaactcatcagctccctc

SEQ ID NO: 3856444 - DNA, 25 bp, Homo sapien
gaggtaagagcttctgttgaaccaa

SEQ ID NO: 3856445 - DNA, 25 bp, Homo sapien
gaaatccaacaaaatgcccacagtg

SEQ ID NO: 3856446 - DNA, 25 bp, Homo sapien
caaacagacttgcacagccttgggc

SEQ ID NO: 3856447 - DNA, 25 bp, Homo sapien
tagccccagacctgtttacgaggta

SEQ ID NO: 3856448 - DNA, 25 bp, Homo sapien
tctgataggtcatgtccatgaagtc

SEQ ID NO: 3856449 - DNA, 25 bp, Homo sapien
acatgaatggaccttgtgtctggca

SEQ ID NO: 3856450 - DNA, 25 bp, Homo sapien
atcataagagcccagtgaatgtcca

SEQ ID NO: 3856451 - DNA, 25 bp, Homo sapien
tcttgggcttcttgttaggatctga

SEQ ID NO: 3856452 - DNA, 25 bp, Homo sapien
tggcctgctggaggattgctgaatg

SEQ ID NO: 3856453 - DNA, 25 bp, Homo sapien
tgcgccagggccttgtgatgatctg

SEQ ID NO: 3856454 - DNA, 25 bp, Homo sapien
cagggccttgtgatgatctgtggcc

SEQ ID NO: 3856455 - DNA, 25 bp, Homo sapien
tgctggaggattgctgaatggccac

SEQ ID NO: 3856456 - DNA, 25 bp, Homo sapien
gtggctgatggcagtcttatggtct

SEQ ID NO: 3856457 - DNA, 25 bp, Homo sapien
ggttcgttaataagctggctgccag

SEQ ID NO: 3856458 - DNA, 25 bp, Homo sapien
tctggcagttagtgattcaaagact

SEQ ID NO: 3856459 - DNA, 25 bp, Homo sapien
gccagctcccgatggcaccagggtt

SEQ ID NO: 3856460 - DNA, 25 bp, Homo sapien
gggataggacttgacctgtgttctg

SEQ ID NO: 3856461 - DNA, 25 bp, Homo sapien
agcggcaactgtccctggctggcta

SEQ ID NO: 3856462 - DNA, 25 bp, Homo sapien
agccagttctgagtgttccccaggc

SEQ ID NO: 3856463 - DNA, 25 bp, Homo sapien
tagacagacaccctcgcatgggctt

SEQ ID NO: 3856464 - DNA, 25 bp, Homo sapien
catccagacccaaacgggtcagtag

SEQ ID NO: 3856465 - DNA, 25 bp, Homo sapien
ctgatattcaacgcatagtcccctg

SEQ ID NO: 3856466 - DNA, 25 bp, Homo sapien
atattcaacgcatagtcccctgtcc

SEQ ID NO: 3856467 - DNA, 25 bp, Homo sapien
ccatccagacccaaacgggtcagta

SEQ ID NO: 3856468 - DNA, 25 bp, Homo sapien
ttgcgaggctgctctgaaaggctcc

SEQ ID NO: 3856469 - DNA, 25 bp, Homo sapien
tcctgcgagccttgaggacagtctg

SEQ ID NO: 3856470 - DNA, 25 bp, Homo sapien
gacagtctggcctataaaactggaa

SEQ ID NO: 3856471 - DNA, 25 bp, Homo sapien
ccatttggatatttgattgcgaggc

SEQ ID NO: 3856472 - DNA, 25 bp, Homo sapien
tttcccaaccttcatgggcccatgg

SEQ ID NO: 3856473 - DNA, 25 bp, Homo sapien
tcccaaccttcatgggcccatggct

SEQ ID NO: 3856474 - DNA, 25 bp, Homo sapien
ccaaccttcatgggcccatggctga

SEQ ID NO: 3856475 - DNA, 25 bp, Homo sapien
caaccttcatgggcccatggctgag

SEQ ID NO: 3856476 - DNA, 25 bp, Homo sapien
tgttcacccagttccgcatagatga

SEQ ID NO: 3856477 - DNA, 25 bp, Homo sapien
ctgatggtaatgacctctccagggt

SEQ ID NO: 3856478 - DNA, 25 bp, Homo sapien
cgatgctgtccatgccgggtgaata

SEQ ID NO: 3856479 - DNA, 25 bp, Homo sapien
tagggtccatatgcagccgatgctg

SEQ ID NO: 3856480 - DNA, 25 bp, Homo sapien
ggcagagtggacgaagctggcgatg

SEQ ID NO: 3856481 - DNA, 25 bp, Homo sapien
gctggcgatgggagtaggctggggg

SEQ ID NO: 3856482 - DNA, 25 bp, Homo sapien
ggagggcagagtggacgaagctggc

SEQ ID NO: 3856483 - DNA, 25 bp, Homo sapien
gagggcagagtggacgaagctggcg

SEQ ID NO: 3856484 - DNA, 25 bp, Homo sapien
tccataaggagacccgatgcttacc

SEQ ID NO: 3856485 - DNA, 25 bp, Homo sapien
agtctgataagctttagatgccaca

SEQ ID NO: 3856486 - DNA, 25 bp, Homo sapien
gagtcttttgcactttcagttagtc

SEQ ID NO: 3856487 - DNA, 25 bp, Homo sapien
tgtcgtcatcaatgagcctgccctg

SEQ ID NO: 3856488 - DNA, 25 bp, Homo sapien
gaggacttccgtcgaaattccgcat

SEQ ID NO: 3856489 - DNA, 25 bp, Homo sapien
catttgcaattcctaccgctggtct

SEQ ID NO: 3856490 - DNA, 25 bp, Homo sapien
tctaggtggaaatcgagtctccgca

SEQ ID NO: 3856491 - DNA, 25 bp, Homo sapien
aatatctaacagaggtaaggctgcc

SEQ ID NO: 3856492 - DNA, 25 bp, Homo sapien
ccaggcttgggacagagggacaggg

SEQ ID NO: 3856493 - DNA, 25 bp, Homo sapien
gggaggagagacagcaggagagctg

SEQ ID NO: 3856494 - DNA, 25 bp, Homo sapien
tgggaggagtccgaggggcagggga

SEQ ID NO: 3856495 - DNA, 25 bp, Homo sapien
ggcttgggacagagggacaggggtg

SEQ ID NO: 3856496 - DNA, 25 bp, Homo sapien
gccctggaatattgtcagtgatggc

SEQ ID NO: 3856497 - DNA, 25 bp, Homo sapien
tcctgctggtctgcaagtgagaaga

SEQ ID NO: 3856498 - DNA, 25 bp, Homo sapien
caggtgcagggacggccctggaata

SEQ ID NO: 3856499 - DNA, 25 bp, Homo sapien
ctgctcctgctggtctgcaagtgag

SEQ ID NO: 3856500 - DNA, 25 bp, Homo sapien
ggtaaacgtatgagaaatcgctcct

SEQ ID NO: 3856501 - DNA, 25 bp, Homo sapien
ctacagaggtaaacgtatgagaaat

SEQ ID NO: 3856502 - DNA, 25 bp, Homo sapien
cagaggtaaacgtatgagaaatcgc

SEQ ID NO: 3856503 - DNA, 25 bp, Homo sapien
aacgtatgagaaatcgctcctccat

SEQ ID NO: 3856504 - DNA, 25 bp, Homo sapien
ctccacggacccgctgctggcacag

SEQ ID NO: 3856505 - DNA, 25 bp, Homo sapien
cacggacccgctgctggcacaggac

SEQ ID NO: 3856506 - DNA, 25 bp, Homo sapien
tccacggacccgctgctggcacagg

SEQ ID NO: 3856507 - DNA, 25 bp, Homo sapien
cggacccgctgctggcacaggacag

SEQ ID NO: 3856508 - DNA, 25 bp, Homo sapien
gaaagattaattggagccagctccc

SEQ ID NO: 3856509 - DNA, 25 bp, Homo sapien
gaagtcaccccttgcaaaggctagg

SEQ ID NO: 3856510 - DNA, 25 bp, Homo sapien
gtctttcatcaagcagcagcgaggg

SEQ ID NO: 3856511 - DNA, 25 bp, Homo sapien
ccagcgagttaatatagggcagccc

SEQ ID NO: 3856512 - DNA, 25 bp, Homo sapien
tgtagtcacagtggctgcggttgtc

SEQ ID NO: 3856513 - DNA, 25 bp, Homo sapien
ggcatgcactcgtgagccctgcggc

SEQ ID NO: 3856514 - DNA, 25 bp, Homo sapien
catcttggtagattccatgtagtca

SEQ ID NO: 3856515 - DNA, 25 bp, Homo sapien
cggccggcttgcagagcgtcatgaa

SEQ ID NO: 3856516 - DNA, 25 bp, Homo sapien
cagttgcctctgcaagggtcccggg

SEQ ID NO: 3856517 - DNA, 25 bp, Homo sapien
agggtcccgggagtgacgggagctg

SEQ ID NO: 3856518 - DNA, 25 bp, Homo sapien
gtgacgggagctgagagaaaggcga

SEQ ID NO: 3856519 - DNA, 25 bp, Homo sapien
gacgggagctgagagaaaggcgagg

SEQ ID NO: 3856520 - DNA, 25 bp, Homo sapien
tcctggctccctgcgcccagccaac

SEQ ID NO: 3856521 - DNA, 25 bp, Homo sapien
agcagccgcaggacctcactcctgg

SEQ ID NO: 3856522 - DNA, 25 bp, Homo sapien
cccaggcactcaccagcagccgcag

SEQ ID NO: 3856523 - DNA, 25 bp, Homo sapien
agccgcaggacctcactcctggctc

SEQ ID NO: 3856524 - DNA, 25 bp, Homo sapien
ccagccgtccggagctccgtggaga

SEQ ID NO: 3856525 - DNA, 25 bp, Homo sapien
tccgtggagaggtcttctcagctgt

SEQ ID NO: 3856526 - DNA, 25 bp, Homo sapien
ggagctccgtggagaggtcttctca

SEQ ID NO: 3856527 - DNA, 25 bp, Homo sapien
tccggagctccgtggagaggtcttc

SEQ ID NO: 3856528 - DNA, 25 bp, Homo sapien
tggcctgtggccgtccgtggactgg

SEQ ID NO: 3856529 - DNA, 25 bp, Homo sapien
ctggaggcctcacccgcggcaggcc

SEQ ID NO: 3856530 - DNA, 25 bp, Homo sapien
ctgtgattccagccgcagtggcctg

SEQ ID NO: 3856531 - DNA, 25 bp, Homo sapien
ctcacccgcggcaggccttcactct

SEQ ID NO: 3856532 - DNA, 25 bp, Homo sapien
ctctcttctccccacaggtggtctt

SEQ ID NO: 3856533 - DNA, 25 bp, Homo sapien
cacaggtggtcttctccctggcctc

SEQ ID NO: 3856534 - DNA, 25 bp, Homo sapien
tcttctccccacaggtggtcttctc

SEQ ID NO: 3856535 - DNA, 25 bp, Homo sapien
acaggtggtcttctccctggcctct

SEQ ID NO: 3856536 - DNA, 25 bp, Homo sapien
gaatggctctgaagcgaagactcca

SEQ ID NO: 3856537 - DNA, 25 bp, Homo sapien
gactatgctctccacagtacctggg

SEQ ID NO: 3856538 - DNA, 25 bp, Homo sapien
catattctggccactcgaggtgtca

SEQ ID NO: 3856539 - DNA, 25 bp, Homo sapien
tgaaaaaggccatgtatcagcccct

SEQ ID NO: 3856540 - DNA, 25 bp, Homo sapien
ccccatgtagtttttaatagcatcc

SEQ ID NO: 3856541 - DNA, 25 bp, Homo sapien
gtagtttttaatagcatcccgcttc

SEQ ID NO: 3856542 - DNA, 25 bp, Homo sapien
tttccccatgtagtttttaatagca

SEQ ID NO: 3856543 - DNA, 25 bp, Homo sapien
agtttttaatagcatcccgcttcat

SEQ ID NO: 3856544 - DNA, 25 bp, Homo sapien
tgtgtggcacccttgcaatggcccg

SEQ ID NO: 3856545 - DNA, 25 bp, Homo sapien
tgtcccagggtggacaagacattgt

SEQ ID NO: 3856546 - DNA, 25 bp, Homo sapien
tcagattgcccaagacaccatttgc

SEQ ID NO: 3856547 - DNA, 25 bp, Homo sapien
tggacaagacattgtgtggcaccct

SEQ ID NO: 3856548 - DNA, 25 bp, Homo sapien
gggagaatctcagcaccccaaaatc

SEQ ID NO: 3856549 - DNA, 25 bp, Homo sapien
aagggctggacgttctgagacttct

SEQ ID NO: 3856550 - DNA, 25 bp, Homo sapien
ccaaggctcatgtctcagaacgaga

SEQ ID NO: 3856551 - DNA, 25 bp, Homo sapien
cgtttcgggaccaccaagctctggg

SEQ ID NO: 3856552 - DNA, 25 bp, Homo sapien
gccctggctcaaatgcacctgcccc

SEQ ID NO: 3856553 - DNA, 25 bp, Homo sapien
aaggaggccactcacagagccagcc

SEQ ID NO: 3856554 - DNA, 25 bp, Homo sapien
ctgggcttctgggatgtcacagtat

SEQ ID NO: 3856555 - DNA, 25 bp, Homo sapien
agacccagccacaacagcccactgt

SEQ ID NO: 3856556 - DNA, 25 bp, Homo sapien
atgacctcaaagtttggagagtcag

SEQ ID NO: 3856557 - DNA, 25 bp, Homo sapien
aagtttggagagtcagggacagggt

SEQ ID NO: 3856558 - DNA, 25 bp, Homo sapien
ctagatgacctcaaagtttggagag

SEQ ID NO: 3856559 - DNA, 25 bp, Homo sapien
tagatgacctcaaagtttggagagt

SEQ ID NO: 3856560 - DNA, 25 bp, Homo sapien
cagggatgggaagaagacgtctccg

SEQ ID NO: 3856561 - DNA, 25 bp, Homo sapien
tttggcctcgggtatcccctgggca

SEQ ID NO: 3856562 - DNA, 25 bp, Homo sapien
tgctgggctccgaaagcagatgccg

SEQ ID NO: 3856563 - DNA, 25 bp, Homo sapien
ctgccgctgggccacataggacagg

SEQ ID NO: 3856564 - DNA, 25 bp, Homo sapien
ctgccacagaaccagaatggaaggt

SEQ ID NO: 3856565 - DNA, 25 bp, Homo sapien
ccacagaaccagaatggaaggtcat

SEQ ID NO: 3856566 - DNA, 25 bp, Homo sapien
gccacagaaccagaatggaaggtca

SEQ ID NO: 3856567 - DNA, 25 bp, Homo sapien
tgccacagaaccagaatggaaggtc

SEQ ID NO: 3856568 - DNA, 25 bp, Homo sapien
tgtccatccgcaccagctcctgggc

SEQ ID NO: 3856569 - DNA, 25 bp, Homo sapien
tccatccgcaccagctcctgggcac

SEQ ID NO: 3856570 - DNA, 25 bp, Homo sapien
gtccatccgcaccagctcctgggca

SEQ ID NO: 3856571 - DNA, 25 bp, Homo sapien
ctgtccatccgcaccagctcctggg

SEQ ID NO: 3856572 - DNA, 25 bp, Homo sapien
ccagccatgggtattcctgcaggta

SEQ ID NO: 3856573 - DNA, 25 bp, Homo sapien
tgacaagttgttaagggccggccac

SEQ ID NO: 3856574 - DNA, 25 bp, Homo sapien
aataagttgcgagccaaaagccacc

SEQ ID NO: 3856575 - DNA, 25 bp, Homo sapien
agactaaccaagactcaagggcagg

SEQ ID NO: 3856576 - DNA, 25 bp, Homo sapien
acgatgcaggcacccgtagccaggg

SEQ ID NO: 3856577 - DNA, 25 bp, Homo sapien
ggaggcagaggattcctacgatgca

SEQ ID NO: 3856578 - DNA, 25 bp, Homo sapien
ctttgcttgtagaccaggagcagga

SEQ ID NO: 3856579 - DNA, 25 bp, Homo sapien
gattcctacgatgcaggcacccgta

SEQ ID NO: 3856580 - DNA, 25 bp, Homo sapien
gctccttgggcaccaacttctctag

SEQ ID NO: 3856581 - DNA, 25 bp, Homo sapien
gacaccgcactaaggagtgtgccag

SEQ ID NO: 3856582 - DNA, 25 bp, Homo sapien
cctcagcaatgcaggagctccttgg

SEQ ID NO: 3856583 - DNA, 25 bp, Homo sapien
ctgggtgaaagcagacagcacattc

SEQ ID NO: 3856584 - DNA, 25 bp, Homo sapien
gcaagttagcatacatctctaggcc

SEQ ID NO: 3856585 - DNA, 25 bp, Homo sapien
ctccaagctgctgggtattctcacc

SEQ ID NO: 3856586 - DNA, 25 bp, Homo sapien
gggctaactgctacccactgcactg

SEQ ID NO: 3856587 - DNA, 25 bp, Homo sapien
gaaggtgagtatgcagagctaagca

SEQ ID NO: 3856588 - DNA, 25 bp, Homo sapien
gcagggcggcacttagctgcctggg

SEQ ID NO: 3856589 - DNA, 25 bp, Homo sapien
gcggcacttagctgcctggggcacc

SEQ ID NO: 3856590 - DNA, 25 bp, Homo sapien
gggcagggcggcacttagctgcctg

SEQ ID NO: 3856591 - DNA, 25 bp, Homo sapien
gggcggcacttagctgcctggggca

SEQ ID NO: 3856592 - DNA, 25 bp, Homo sapien
catgaggcacttgccctggccaaag

SEQ ID NO: 3856593 - DNA, 25 bp, Homo sapien
tgtcatgaggcacttgccctggcca

SEQ ID NO: 3856594 - DNA, 25 bp, Homo sapien
tgaggcacttgccctggccaaaggt

SEQ ID NO: 3856595 - DNA, 25 bp, Homo sapien
tcatgaggcacttgccctggccaaa

SEQ ID NO: 3856596 - DNA, 25 bp, Homo sapien
aggccagagttccaaacagggtctg

SEQ ID NO: 3856597 - DNA, 25 bp, Homo sapien
cacagccactccagagagtcaagag

SEQ ID NO: 3856598 - DNA, 25 bp, Homo sapien
cttctggggattgcaccaaggagga

SEQ ID NO: 3856599 - DNA, 25 bp, Homo sapien
gagttccaaacagggtctgggtgca

SEQ ID NO: 3856600 - DNA, 25 bp, Homo sapien
gtacaccacacagttggatggtgca

SEQ ID NO: 3856601 - DNA, 25 bp, Homo sapien
ctgggaggaggatgggtacaccaca

SEQ ID NO: 3856602 - DNA, 25 bp, Homo sapien
gggtacaccacacagttggatggtg

SEQ ID NO: 3856603 - DNA, 25 bp, Homo sapien
gggaggaggatgggtacaccacaca

SEQ ID NO: 3856604 - DNA, 25 bp, Homo sapien
aagggccattaggtgggtgtcaggc

SEQ ID NO: 3856605 - DNA, 25 bp, Homo sapien
ggttctcacgctagtgcctactcgg

SEQ ID NO: 3856606 - DNA, 25 bp, Homo sapien
ggcatgtgaatacccgctggtgccc

SEQ ID NO: 3856607 - DNA, 25 bp, Homo sapien
tactcggcagtgttggcccagtggc

SEQ ID NO: 3856608 - DNA, 25 bp, Homo sapien
cagctccatggcaccatggaccctg

SEQ ID NO: 3856609 - DNA, 25 bp, Homo sapien
ccatggcaccatggaccctgtgctc

SEQ ID NO: 3856610 - DNA, 25 bp, Homo sapien
tccatggcaccatggaccctgtgct

SEQ ID NO: 3856611 - DNA, 25 bp, Homo sapien
gctccatggcaccatggaccctgtg

SEQ ID NO: 3856612 - DNA, 25 bp, Homo sapien
gacagacatacagggaatacggcgt

SEQ ID NO: 3856613 - DNA, 25 bp, Homo sapien
gagctgcggtaccacgtcttgtaga

SEQ ID NO: 3856614 - DNA, 25 bp, Homo sapien
agtagaggccgctatccagcagggt

SEQ ID NO: 3856615 - DNA, 25 bp, Homo sapien
tcttgtagaaggtcacatcgtgccc

SEQ ID NO: 3856616 - DNA, 25 bp, Homo sapien
cagtgatgcagtcgggtgtgtccct

SEQ ID NO: 3856617 - DNA, 25 bp, Homo sapien
gactgatccagtgctactcctggca

SEQ ID NO: 3856618 - DNA, 25 bp, Homo sapien
ttgccagggagcactaagagagcac

SEQ ID NO: 3856619 - DNA, 25 bp, Homo sapien
agaggagagccctgtcacctgactg

SEQ ID NO: 3856620 - DNA, 25 bp, Homo sapien
ccttgagcagacgaggcctgcattc

SEQ ID NO: 3856621 - DNA, 25 bp, Homo sapien
cccttgagcagacgaggcctgcatt

SEQ ID NO: 3856622 - DNA, 25 bp, Homo sapien
tccccttgagcagacgaggcctgca

SEQ ID NO: 3856623 - DNA, 25 bp, Homo sapien
tgcattcccgacagcagaaccccat

SEQ ID NO: 3856624 - DNA, 25 bp, Homo sapien
ggcaaaggcaatccaatgccagccc

SEQ ID NO: 3856625 - DNA, 25 bp, Homo sapien
aggcaatccaatgccagccctcagg

SEQ ID NO: 3856626 - DNA, 25 bp, Homo sapien
cagccctcagggcacttggaggagg

SEQ ID NO: 3856627 - DNA, 25 bp, Homo sapien
aaaggcaatccaatgccagccctca

SEQ ID NO: 3856628 - DNA, 25 bp, Homo sapien
atgggaaaacccagtgtctgaggga

SEQ ID NO: 3856629 - DNA, 25 bp, Homo sapien
gacttggtgcatagataggatttca

SEQ ID NO: 3856630 - DNA, 25 bp, Homo sapien
tcagccagtagaaagggtgtcctag

SEQ ID NO: 3856631 - DNA, 25 bp, Homo sapien
ggaccgggacagagagtatatgaaa

SEQ ID NO: 3856632 - DNA, 25 bp, Homo sapien
cttgggggctggccaaagggctggc

SEQ ID NO: 3856633 - DNA, 25 bp, Homo sapien
ctggccaaagggctggctcagcaga

SEQ ID NO: 3856634 - DNA, 25 bp, Homo sapien
caaagggctggctcagcagacacgg

SEQ ID NO: 3856635 - DNA, 25 bp, Homo sapien
ggccaaagggctggctcagcagaca

SEQ ID NO: 3856636 - DNA, 25 bp, Homo sapien
caggctctattgaaggaagcggcac

SEQ ID NO: 3856637 - DNA, 25 bp, Homo sapien
ggaagtgtccattcacatcagacca

SEQ ID NO: 3856638 - DNA, 25 bp, Homo sapien
ttgggaaagcctccgtgcatccggg

SEQ ID NO: 3856639 - DNA, 25 bp, Homo sapien
tctatgctgtgaagacgtcctcagg

SEQ ID NO: 3856640 - DNA, 25 bp, Homo sapien
ctggtcccctggcttgaaactcctg

SEQ ID NO: 3856641 - DNA, 25 bp, Homo sapien
cggcctcattctaaacacttttaca

SEQ ID NO: 3856642 - DNA, 25 bp, Homo sapien
gctcggcctcattctaaacactttt

SEQ ID NO: 3856643 - DNA, 25 bp, Homo sapien
ctgtgctcggcctcattctaaacac

SEQ ID NO: 3856644 - DNA, 25 bp, Homo sapien
gatccccagcgccagctgccggcct

SEQ ID NO: 3856645 - DNA, 25 bp, Homo sapien
agccaggaagagagcgaagagcagg

SEQ ID NO: 3856646 - DNA, 25 bp, Homo sapien
gggacgcagccaggaagagagcgaa

SEQ ID NO: 3856647 - DNA, 25 bp, Homo sapien
agagcgaagagcagggatccccagc

SEQ ID NO: 3856648 - DNA, 25 bp, Homo sapien
cgccgtcggacgcgcagaggaactt

SEQ ID NO: 3856649 - DNA, 25 bp, Homo sapien
tcgccgtcggacgcgcagaggaact

SEQ ID NO: 3856650 - DNA, 25 bp, Homo sapien
gtcgccgtcggacgcgcagaggaac

SEQ ID NO: 3856651 - DNA, 25 bp, Homo sapien
tggtgccggggagcgggcgggacgc

SEQ ID NO: 3856652 - DNA, 25 bp, Homo sapien
tgccggggagcgggcgggacgcggc

SEQ ID NO: 3856653 - DNA, 25 bp, Homo sapien
ctggtgccggggagcgggcgggacg

SEQ ID NO: 3856654 - DNA, 25 bp, Homo sapien
gcgagcgagtgagcgctgcgggcgg

SEQ ID NO: 3856655 - DNA, 25 bp, Homo sapien
agcctcccgcgactgagtgcgagcg

SEQ ID NO: 3856656 - DNA, 25 bp, Homo sapien
ctcccgcgactgagtgcgagcgagt

SEQ ID NO: 3856657 - DNA, 25 bp, Homo sapien
gaagcctcccgcgactgagtgcgag

SEQ ID NO: 3856658 - DNA, 25 bp, Homo sapien
ccatcaggtgtacccaaaactacct

SEQ ID NO: 3856659 - DNA, 25 bp, Homo sapien
caaaactacctattatgtccaatgt

SEQ ID NO: 3856660 - DNA, 25 bp, Homo sapien
ttagtgtacccatcaggtgtaccca

SEQ ID NO: 3856661 - DNA, 25 bp, Homo sapien
tacccaaaactacctattatgtcca

SEQ ID NO: 3856662 - DNA, 25 bp, Homo sapien
gggaatcgtggcttcatcgacatca

SEQ ID NO: 3856663 - DNA, 25 bp, Homo sapien
tcgacatcatggacatgcctaacac

SEQ ID NO: 3856664 - DNA, 25 bp, Homo sapien
cttctccctgcagggaatcgtggct

SEQ ID NO: 3856665 - DNA, 25 bp, Homo sapien
aacaagtactcctttgatgggtgag

SEQ ID NO: 3856666 - DNA, 25 bp, Homo sapien
tcagatcccacttttgccagacgct

SEQ ID NO: 3856667 - DNA, 25 bp, Homo sapien
catctaaggacaaggtaaggagggt

SEQ ID NO: 3856668 - DNA, 25 bp, Homo sapien
ttcgcgacgtgatcatggagacccc

SEQ ID NO: 3856669 - DNA, 25 bp, Homo sapien
ggacaaccttggcttggccctggca

SEQ ID NO: 3856670 - DNA, 25 bp, Homo sapien
gaattttattgttaaatcacagaaa

SEQ ID NO: 3856671 - DNA, 25 bp, Homo sapien
tgggtgcccaagtgggccacagaca

SEQ ID NO: 3856672 - DNA, 25 bp, Homo sapien
cagaagtggacagaagcgtgggtgc

SEQ ID NO: 3856673 - DNA, 25 bp, Homo sapien
caacttcatgtcctgctggctttgc

SEQ ID NO: 3856674 - DNA, 25 bp, Homo sapien
aaatcacgaagtccatttaatagca

SEQ ID NO: 3856675 - DNA, 25 bp, Homo sapien
cggcatgccgccctctaccaggaag

SEQ ID NO: 3856676 - DNA, 25 bp, Homo sapien
agacccttcggcatgccgccctcta

SEQ ID NO: 3856677 - DNA, 25 bp, Homo sapien
ccagcagacccttcggcatgccgcc

SEQ ID NO: 3856678 - DNA, 25 bp, Homo sapien
gccgccctctaccaggaagccagag

SEQ ID NO: 3856679 - DNA, 25 bp, Homo sapien
cagggacatgtaggcaacacgagca

SEQ ID NO: 3856680 - DNA, 25 bp, Homo sapien
ctgtccacacgctcacacaagccag

SEQ ID NO: 3856681 - DNA, 25 bp, Homo sapien
cgcctcaacagccagggacatgtag

SEQ ID NO: 3856682 - DNA, 25 bp, Homo sapien
tcaacagccagggacatgtaggcaa

SEQ ID NO: 3856683 - DNA, 25 bp, Homo sapien
acacgggaaagccaaatcacagttg

SEQ ID NO: 3856684 - DNA, 25 bp, Homo sapien
ttggccccactgatgtcccaagcca

SEQ ID NO: 3856685 - DNA, 25 bp, Homo sapien
cactgatgtcccaagccaccagcag

SEQ ID NO: 3856686 - DNA, 25 bp, Homo sapien
aacccttggccccactgatgtccca

SEQ ID NO: 3856687 - DNA, 25 bp, Homo sapien
gctttgttcaactgagaggcccagg

SEQ ID NO: 3856688 - DNA, 25 bp, Homo sapien
caaaatccctatgctattacagtgg

SEQ ID NO: 3856689 - DNA, 25 bp, Homo sapien
agtgcccaagcacatgtcagggctc

SEQ ID NO: 3856690 - DNA, 25 bp, Homo sapien
gcaggaggccacctcagaagcccag

SEQ ID NO: 3856691 - DNA, 25 bp, Homo sapien
gcaagggcaggctaaaagacctcca

SEQ ID NO: 3856692 - DNA, 25 bp, Homo sapien
aagacctccagtgcatcaacatcca

SEQ ID NO: 3856693 - DNA, 25 bp, Homo sapien
ggcaggctaaaagacctccagtgca

SEQ ID NO: 3856694 - DNA, 25 bp, Homo sapien
ggctaaaagacctccagtgcatcaa

SEQ ID NO: 3856695 - DNA, 25 bp, Homo sapien
ttctgccaagatggaatattcctcc

SEQ ID NO: 3856696 - DNA, 25 bp, Homo sapien
aagtcaaacagatctgtgcgttcat

SEQ ID NO: 3856697 - DNA, 25 bp, Homo sapien
cactgaagcagctatgtctgccagg

SEQ ID NO: 3856698 - DNA, 25 bp, Homo sapien
aaacagatctgtgcgttcattcccc

SEQ ID NO: 3856699 - DNA, 25 bp, Homo sapien
cgttcccggcccatcaatgtatcag

SEQ ID NO: 3856700 - DNA, 25 bp, Homo sapien
cagctggatggcaccagatgctgaa

SEQ ID NO: 3856701 - DNA, 25 bp, Homo sapien
gatatcaccccaaaacaggacctgt

SEQ ID NO: 3856702 - DNA, 25 bp, Homo sapien
aagctgagtttagtcttcggatgaa

SEQ ID NO: 3856703 - DNA, 25 bp, Homo sapien
cagctcgggccttgagaagcaggcc

SEQ ID NO: 3856704 - DNA, 25 bp, Homo sapien
tcgggccttgagaagcaggcccaca

SEQ ID NO: 3856705 - DNA, 25 bp, Homo sapien
ggccttgagaagcaggcccacattt

SEQ ID NO: 3856706 - DNA, 25 bp, Homo sapien
ccttgagaagcaggcccacatttcc

SEQ ID NO: 3856707 - DNA, 25 bp, Homo sapien
tggggctggcggtggagatgggctg

SEQ ID NO: 3856708 - DNA, 25 bp, Homo sapien
ggtggggctggcggtggagatgggc

SEQ ID NO: 3856709 - DNA, 25 bp, Homo sapien
gcggtggagatgggctggagcctag

SEQ ID NO: 3856710 - DNA, 25 bp, Homo sapien
tggcggtggagatgggctggagcct

SEQ ID NO: 3856711 - DNA, 25 bp, Homo sapien
cactgggctgctgtctctgtgttct

SEQ ID NO: 3856712 - DNA, 25 bp, Homo sapien
gtgttctggcaccagtagcttgggc

SEQ ID NO: 3856713 - DNA, 25 bp, Homo sapien
tgtgttctggcaccagtagcttggg

SEQ ID NO: 3856714 - DNA, 25 bp, Homo sapien
tgggctgctgtctctgtgttctggc

SEQ ID NO: 3856715 - DNA, 25 bp, Homo sapien
caagggcttatgggccgaggggcag

SEQ ID NO: 3856716 - DNA, 25 bp, Homo sapien
ttcccaacaagggcttatgggccga

SEQ ID NO: 3856717 - DNA, 25 bp, Homo sapien
cccaacaagggcttatgggccgagg

SEQ ID NO: 3856718 - DNA, 25 bp, Homo sapien
caacaagggcttatgggccgagggg

SEQ ID NO: 3856719 - DNA, 25 bp, Homo sapien
gctgcccgatgtatcgctttcaaaa

SEQ ID NO: 3856720 - DNA, 25 bp, Homo sapien
cccgatgtatcgctttcaaaactaa

SEQ ID NO: 3856721 - DNA, 25 bp, Homo sapien
cgatgtatcgctttcaaaactaaga

SEQ ID NO: 3856722 - DNA, 25 bp, Homo sapien
gagagctgcccgatgtatcgctttc

SEQ ID NO: 3856723 - DNA, 25 bp, Homo sapien
aagcacacgaaggaaggatccatca

SEQ ID NO: 3856724 - DNA, 25 bp, Homo sapien
cgaaggaaggatccatcacctccac

SEQ ID NO: 3856725 - DNA, 25 bp, Homo sapien
gggctcgtactctgccacaaactga

SEQ ID NO: 3856726 - DNA, 25 bp, Homo sapien
gatctcgatcagcacgggctcgtac

SEQ ID NO: 3856727 - DNA, 25 bp, Homo sapien
cctggatacactgttccctgagagc

SEQ ID NO: 3856728 - DNA, 25 bp, Homo sapien
gcaggccctggatacactgttccct

SEQ ID NO: 3856729 - DNA, 25 bp, Homo sapien
tgggggtgtccgagcatagtggggc

SEQ ID NO: 3856730 - DNA, 25 bp, Homo sapien
gccctggatacactgttccctgaga

SEQ ID NO: 3856731 - DNA, 25 bp, Homo sapien
ccgtcctttggctgagtcacgtgaa

SEQ ID NO: 3856732 - DNA, 25 bp, Homo sapien
tctccaggttgcgatccaaataacc

SEQ ID NO: 3856733 - DNA, 25 bp, Homo sapien
tttctcaagagcagccaggatctcc

SEQ ID NO: 3856734 - DNA, 25 bp, Homo sapien
accagcttcttgcacacttcgcaga

SEQ ID NO: 3856735 - DNA, 25 bp, Homo sapien
agccgcgtgccagagcagaggtgca

SEQ ID NO: 3856736 - DNA, 25 bp, Homo sapien
tcttccgacagggacttcggcagct

SEQ ID NO: 3856737 - DNA, 25 bp, Homo sapien
gatggagctgccgtacgtgtccacc

SEQ ID NO: 3856738 - DNA, 25 bp, Homo sapien
cacattttgtcaaaagcgtcgagta

SEQ ID NO: 3856739 - DNA, 25 bp, Homo sapien
cttgttgttgtcaatcagcttggtc

SEQ ID NO: 3856740 - DNA, 25 bp, Homo sapien
ttgttgtcaatcagcttggtcacct

SEQ ID NO: 3856741 - DNA, 25 bp, Homo sapien
gttgttgtcaatcagcttggtcacc

SEQ ID NO: 3856742 - DNA, 25 bp, Homo sapien
tgttgttgtcaatcagcttggtcac

SEQ ID NO: 3856743 - DNA, 25 bp, Homo sapien
ctcatcacagaacccaaccagcgca

SEQ ID NO: 3856744 - DNA, 25 bp, Homo sapien
agggcagggatgacattcttggagg

SEQ ID NO: 3856745 - DNA, 25 bp, Homo sapien
ccactttggcggggaccagagtctg

SEQ ID NO: 3856746 - DNA, 25 bp, Homo sapien
catcacagaacccaaccagcgcaca

SEQ ID NO: 3856747 - DNA, 25 bp, Homo sapien
cattttaagccacaaggtctccaga

SEQ ID NO: 3856748 - DNA, 25 bp, Homo sapien
cagtttccatgttaaagggctcgtg

SEQ ID NO: 3856749 - DNA, 25 bp, Homo sapien
gcatatgtgccagttacatctcggg

SEQ ID NO: 3856750 - DNA, 25 bp, Homo sapien
accagatttttcagcggcaggacca

SEQ ID NO: 3856751 - DNA, 25 bp, Homo sapien
tattcaggaggtatagggctgcttc

SEQ ID NO: 3856752 - DNA, 25 bp, Homo sapien
taaatgcaaccagcaactagctctg

SEQ ID NO: 3856753 - DNA, 25 bp, Homo sapien
cagatggatgccaacgctcagaggt

SEQ ID NO: 3856754 - DNA, 25 bp, Homo sapien
gatgtggctctagatcccaaaggac

SEQ ID NO: 3856755 - DNA, 25 bp, Homo sapien
taacaatgtatccaaagcctcatgc

SEQ ID NO: 3856756 - DNA, 25 bp, Homo sapien
aaaacaacctagatacatccggcca

SEQ ID NO: 3856757 - DNA, 25 bp, Homo sapien
gtacaagaatattcaatggccaaca

SEQ ID NO: 3856758 - DNA, 25 bp, Homo sapien
tgtacacaggtgattattctgcaag

SEQ ID NO: 3856759 - DNA, 25 bp, Homo sapien
gccaatcagatctaaggaggcagtg

SEQ ID NO: 3856760 - DNA, 25 bp, Homo sapien
cctgaatgggtattcttgattctaa

SEQ ID NO: 3856761 - DNA, 25 bp, Homo sapien
agtgcccgttcccaacgtgagcagg

SEQ ID NO: 3856762 - DNA, 25 bp, Homo sapien
gccctgctctgcgtggactagcgag

SEQ ID NO: 3856763 - DNA, 25 bp, Homo sapien
aatactggctgatatagttcttgca

SEQ ID NO: 3856764 - DNA, 25 bp, Homo sapien
catcatcatctggatagcaatttca

SEQ ID NO: 3856765 - DNA, 25 bp, Homo sapien
gcaatttcagaatactggctgatat

SEQ ID NO: 3856766 - DNA, 25 bp, Homo sapien
gatagcaatttcagaatactggctg

SEQ ID NO: 3856767 - DNA, 25 bp, Homo sapien
caaaggtggagttggtccgtacagc

SEQ ID NO: 3856768 - DNA, 25 bp, Homo sapien
cagcagtctggatgtcagtcaccat

SEQ ID NO: 3856769 - DNA, 25 bp, Homo sapien
gcggtcacactcctccttgacatgt

SEQ ID NO: 3856770 - DNA, 25 bp, Homo sapien
cagtcctggcaaacgtccccattat

SEQ ID NO: 3856771 - DNA, 25 bp, Homo sapien
aagggggccaccacctcagtcatgt

SEQ ID NO: 3856772 - DNA, 25 bp, Homo sapien
tgaagggggccaccacctcagtcat

SEQ ID NO: 3856773 - DNA, 25 bp, Homo sapien
catgaagggggccaccacctcagtc

SEQ ID NO: 3856774 - DNA, 25 bp, Homo sapien
gaagggggccaccacctcagtcatg

SEQ ID NO: 3856775 - DNA, 25 bp, Homo sapien
tgggatcttattggactccagctgc

SEQ ID NO: 3856776 - DNA, 25 bp, Homo sapien
gattcagctctgctaggtgcttctg

SEQ ID NO: 3856777 - DNA, 25 bp, Homo sapien
gagagcagagcacacctccccagga

SEQ ID NO: 3856778 - DNA, 25 bp, Homo sapien
ttctggagagactcgcagaggttga

SEQ ID NO: 3856779 - DNA, 25 bp, Homo sapien
cggactaatacaggcttcctaaatg

SEQ ID NO: 3856780 - DNA, 25 bp, Homo sapien
tctttaaaggaacaggaggccaggc

SEQ ID NO: 3856781 - DNA, 25 bp, Homo sapien
ccctcagctcttctttaaaggaaca

SEQ ID NO: 3856782 - DNA, 25 bp, Homo sapien
aggtgctgtcagtcaagatcgcgcc

SEQ ID NO: 3856783 - DNA, 25 bp, Homo sapien
tccaaattccacaaagctagctccg

SEQ ID NO: 3856784 - DNA, 25 bp, Homo sapien
gtcctgtcttgggaaagtcctgccc

SEQ ID NO: 3856785 - DNA, 25 bp, Homo sapien
tcacatctctgaaggttatgccggt

SEQ ID NO: 3856786 - DNA, 25 bp, Homo sapien
cagaagtgaggttttgtgcctgctc

SEQ ID NO: 3856787 - DNA, 25 bp, Homo sapien
cagggaggtaggagtccactatctc

SEQ ID NO: 3856788 - DNA, 25 bp, Homo sapien
tctccttgcatgaagcagacatgtt

SEQ ID NO: 3856789 - DNA, 25 bp, Homo sapien
gacagggaggtaggagtccactatc

SEQ ID NO: 3856790 - DNA, 25 bp, Homo sapien
tgttcggtttcggaagccagtcaca

SEQ ID NO: 3856791 - DNA, 25 bp, Homo sapien
ggcattgtccttcagcatatcacca

SEQ ID NO: 3856792 - DNA, 25 bp, Homo sapien
cagctgcggtgacaacgtctttgca

SEQ ID NO: 3856793 - DNA, 25 bp, Homo sapien
tgcatatgtcgcagggaagggattt

SEQ ID NO: 3856794 - DNA, 25 bp, Homo sapien
cagcatatcaccagctgcggtgaca

SEQ ID NO: 3856795 - DNA, 25 bp, Homo sapien
gcattctttcagtccaaggaccggg

SEQ ID NO: 3856796 - DNA, 25 bp, Homo sapien
tcggacgccgtcttcacattctggc

SEQ ID NO: 3856797 - DNA, 25 bp, Homo sapien
tgttccaaacggtctgcaggcagtg

SEQ ID NO: 3856798 - DNA, 25 bp, Homo sapien
agtgcttcactgccccgcagtcgga

SEQ ID NO: 3856799 - DNA, 25 bp, Homo sapien
aaatgaaaaccaacgtgaggaggtg

SEQ ID NO: 3856800 - DNA, 25 bp, Homo sapien
atgaaaaccaacgtgaggaggtggc

SEQ ID NO: 3856801 - DNA, 25 bp, Homo sapien
tgaaaaccaacgtgaggaggtggcc

SEQ ID NO: 3856802 - DNA, 25 bp, Homo sapien
aatgaaaaccaacgtgaggaggtgg

SEQ ID NO: 3856803 - DNA, 25 bp, Homo sapien
tatacatacttaatcaacgacctcg

SEQ ID NO: 3856804 - DNA, 25 bp, Homo sapien
ttttgagctcacaaatcaagaccag

SEQ ID NO: 3856805 - DNA, 25 bp, Homo sapien
cctaagcccaactaatatacatact

SEQ ID NO: 3856806 - DNA, 25 bp, Homo sapien
tgtatttgttgtttacagtcaaacc

SEQ ID NO: 3856807 - DNA, 25 bp, Homo sapien
ccgccgctttgagttgtttcgccct

SEQ ID NO: 3856808 - DNA, 25 bp, Homo sapien
ctatggcctggaagccccccgccgc

SEQ ID NO: 3856809 - DNA, 25 bp, Homo sapien
gcctggaagccccccgccgctttga

SEQ ID NO: 3856810 - DNA, 25 bp, Homo sapien
cgccgctttgagttgtttcgccctt

SEQ ID NO: 3856811 - DNA, 25 bp, Homo sapien
ggaagcgcagcctgagggaaggcct

SEQ ID NO: 3856812 - DNA, 25 bp, Homo sapien
tcctcccgggggcattttcgcagcc

SEQ ID NO: 3856813 - DNA, 25 bp, Homo sapien
gagaaagccagcgaacgcgcctgcg

SEQ ID NO: 3856814 - DNA, 25 bp, Homo sapien
gaacccactcgagccccgaaggaga

SEQ ID NO: 3856815 - DNA, 25 bp, Homo sapien
ccgcgcccaggaggctggccaggag

SEQ ID NO: 3856816 - DNA, 25 bp, Homo sapien
tggccaggaggaagagggcgtacat

SEQ ID NO: 3856817 - DNA, 25 bp, Homo sapien
gctggccaggaggaagagggcgtac

SEQ ID NO: 3856818 - DNA, 25 bp, Homo sapien
aggctggccaggaggaagagggcgt

SEQ ID NO: 3856819 - DNA, 25 bp, Homo sapien
tctgcaatgcggagcgtcagctgat

SEQ ID NO: 3856820 - DNA, 25 bp, Homo sapien
gctgatcccccgcagatataaatct

SEQ ID NO: 3856821 - DNA, 25 bp, Homo sapien
gtccagagcgcaggcgctaaccccg

SEQ ID NO: 3856822 - DNA, 25 bp, Homo sapien
tgactccgcagtctgcaatgcggag

SEQ ID NO: 3856823 - DNA, 25 bp, Homo sapien
ctgagagccgatcagtgcatgggat

SEQ ID NO: 3856824 - DNA, 25 bp, Homo sapien
ctattctgagagccgatcagtgcat

SEQ ID NO: 3856825 - DNA, 25 bp, Homo sapien
ccgatcagtgcatgggatgcggcct

SEQ ID NO: 3856826 - DNA, 25 bp, Homo sapien
attcctattggacaggcggccccca

SEQ ID NO: 3856827 - DNA, 25 bp, Homo sapien
tagattagatcagttgtttctgagc

SEQ ID NO: 3856828 - DNA, 25 bp, Homo sapien
ctagattagatcagttgtttctgag

SEQ ID NO: 3856829 - DNA, 25 bp, Homo sapien
cccactccatggtagcacagtggcc

SEQ ID NO: 3856830 - DNA, 25 bp, Homo sapien
ccactccatggtagcacagtggccc

SEQ ID NO: 3856831 - DNA, 25 bp, Homo sapien
ggcccagcaggagatattgccagca

SEQ ID NO: 3856832 - DNA, 25 bp, Homo sapien
aggcttgacgttgtccaagggccca

SEQ ID NO: 3856833 - DNA, 25 bp, Homo sapien
cagcaggagatattgccagcaccca

SEQ ID NO: 3856834 - DNA, 25 bp, Homo sapien
cttaagcaaggcttgacgttgtcca

SEQ ID NO: 3856835 - DNA, 25 bp, Homo sapien
aagagtcagtgagccggcggttgag

SEQ ID NO: 3856836 - DNA, 25 bp, Homo sapien
tgagcatcatgatgggttgaagagt

SEQ ID NO: 3856837 - DNA, 25 bp, Homo sapien
gagccggcggttgaggacccactgt

SEQ ID NO: 3856838 - DNA, 25 bp, Homo sapien
catcatgatgggttgaagagtcagt

SEQ ID NO: 3856839 - DNA, 25 bp, Homo sapien
caggattgcctctgggtttgtcaca

SEQ ID NO: 3856840 - DNA, 25 bp, Homo sapien
tgtataatcctgtgcctctaggcct

SEQ ID NO: 3856841 - DNA, 25 bp, Homo sapien
tttgtcacaagctggaacagggtcc

SEQ ID NO: 3856842 - DNA, 25 bp, Homo sapien
acagtcagctccaagcaacggcaca

SEQ ID NO: 3856843 - DNA, 25 bp, Homo sapien
ccactgcactctatgggcttggtgc

SEQ ID NO: 3856844 - DNA, 25 bp, Homo sapien
gaggagggtatgacatagcccctgc

SEQ ID NO: 3856845 - DNA, 25 bp, Homo sapien
cctctgatgtaaaggctgtgcagcc

SEQ ID NO: 3856846 - DNA, 25 bp, Homo sapien
tacacgcattgtgctgtgcaaagtc

SEQ ID NO: 3856847 - DNA, 25 bp, Homo sapien
tgctttgctcatgccgcttgcctca

SEQ ID NO: 3856848 - DNA, 25 bp, Homo sapien
ccctcggctcgtctggtgcctgttt

SEQ ID NO: 3856849 - DNA, 25 bp, Homo sapien
atgctgtgtaccgtctgtgctttgc

SEQ ID NO: 3856850 - DNA, 25 bp, Homo sapien
tttactctgcaaggccagcgcatgc

SEQ ID NO: 3856851 - DNA, 25 bp, Homo sapien
ggacgcagtttcaagtttctcgaga

SEQ ID NO: 3856852 - DNA, 25 bp, Homo sapien
tctgactcacaggacgcattaattg

SEQ ID NO: 3856853 - DNA, 25 bp, Homo sapien
gaatccaatggttctgatgtacggc

SEQ ID NO: 3856854 - DNA, 25 bp, Homo sapien
tttaacagcaagtccgctggaggtg

SEQ ID NO: 3856855 - DNA, 25 bp, Homo sapien
tcatccatgccgataccggctgctt

SEQ ID NO: 3856856 - DNA, 25 bp, Homo sapien
cggctgcttgtggaaccttgtaaga

SEQ ID NO: 3856857 - DNA, 25 bp, Homo sapien
tgtggaaccttgtaagagttcttcc

SEQ ID NO: 3856858 - DNA, 25 bp, Homo sapien
gccgataccggctgcttgtggaacc

SEQ ID NO: 3856859 - DNA, 25 bp, Homo sapien
cttcctggaagcaactagcatatta

SEQ ID NO: 3856860 - DNA, 25 bp, Homo sapien
ttcctggaagcaactagcatattaa

SEQ ID NO: 3856861 - DNA, 25 bp, Homo sapien
gagcataacaggatcagtttttaag

SEQ ID NO: 3856862 - DNA, 25 bp, Homo sapien
cctgagcataacaggatcagttttt

SEQ ID NO: 3856863 - DNA, 25 bp, Homo sapien
tgagcataacaggatcagtttttaa

SEQ ID NO: 3856864 - DNA, 25 bp, Homo sapien
tccctgagcataacaggatcagttt

SEQ ID NO: 3856865 - DNA, 25 bp, Homo sapien
cccttatggcctcagttaattgtaa

SEQ ID NO: 3856866 - DNA, 25 bp, Homo sapien
caatggcaacttattttctggaggc

SEQ ID NO: 3856867 - DNA, 25 bp, Homo sapien
cataacagacttacacaatggcaac

SEQ ID NO: 3856868 - DNA, 25 bp, Homo sapien
agtccaacatcaggtgccattagtt

SEQ ID NO: 3856869 - DNA, 25 bp, Homo sapien
tccaagacgttctcgccttctcggg

SEQ ID NO: 3856870 - DNA, 25 bp, Homo sapien
acagggccatcaccaggattcggaa

SEQ ID NO: 3856871 - DNA, 25 bp, Homo sapien
gcccagcaagtggaatccaagacgt

SEQ ID NO: 3856872 - DNA, 25 bp, Homo sapien
tcatccctcgagaagctggcctttg

SEQ ID NO: 3856873 - DNA, 25 bp, Homo sapien
ccacgccatgcacgggaggcgactg

SEQ ID NO: 3856874 - DNA, 25 bp, Homo sapien
cacgggaggcgactgggaccccact

SEQ ID NO: 3856875 - DNA, 25 bp, Homo sapien
cgaccacgccatgcacgggaggcga

SEQ ID NO: 3856876 - DNA, 25 bp, Homo sapien
agccgaccacgccatgcacgggagg

SEQ ID NO: 3856877 - DNA, 25 bp, Homo sapien
tcgcaggctcgctgcgcaggacggc

SEQ ID NO: 3856878 - DNA, 25 bp, Homo sapien
gccgcttcccttccagcgtgccgac

SEQ ID NO: 3856879 - DNA, 25 bp, Homo sapien
ctcgctgcgcaggacggcgcccgcc

SEQ ID NO: 3856880 - DNA, 25 bp, Homo sapien
ttccagcgtgccgaccggccccgca

SEQ ID NO: 3856881 - DNA, 25 bp, Homo sapien
tgatgcttcttactaacgtggtccc

SEQ ID NO: 3856882 - DNA, 25 bp, Homo sapien
tttttccatacactctgccgagcct

SEQ ID NO: 3856883 - DNA, 25 bp, Homo sapien
tgcttcttactaacgtggtcccagg

SEQ ID NO: 3856884 - DNA, 25 bp, Homo sapien
tctgccgagcctggatataccttag

SEQ ID NO: 3856885 - DNA, 25 bp, Homo sapien
gctgagtcagcgagccctgaagcct

SEQ ID NO: 3856886 - DNA, 25 bp, Homo sapien
tgtgctgagctgagtcagcgagccc

SEQ ID NO: 3856887 - DNA, 25 bp, Homo sapien
gctgagggcccttctcgttctctgt

SEQ ID NO: 3856888 - DNA, 25 bp, Homo sapien
cccttctcgttctctgtggctgtgc

SEQ ID NO: 3856889 - DNA, 25 bp, Homo sapien
gggtgagtcctgcgctccgcacgtc

SEQ ID NO: 3856890 - DNA, 25 bp, Homo sapien
gagtcctgcgctccgcacgtccaca

SEQ ID NO: 3856891 - DNA, 25 bp, Homo sapien
tggggtgagtcctgcgctccgcacg

SEQ ID NO: 3856892 - DNA, 25 bp, Homo sapien
gtgagtcctgcgctccgcacgtcca

SEQ ID NO: 3856893 - DNA, 25 bp, Homo sapien
tcacagccgacttgctgggaccccc

SEQ ID NO: 3856894 - DNA, 25 bp, Homo sapien
ggccggaacaggccgcagtccattt

SEQ ID NO: 3856895 - DNA, 25 bp, Homo sapien
aagtagaaaactcgttctctgggag

SEQ ID NO: 3856896 - DNA, 25 bp, Homo sapien
tgggaggcaccttgccaagtcacga

SEQ ID NO: 3856897 - DNA, 25 bp, Homo sapien
aagggcctggttggaggccatccaa

SEQ ID NO: 3856898 - DNA, 25 bp, Homo sapien
ggcttaggctgttttctgccctccc

SEQ ID NO: 3856899 - DNA, 25 bp, Homo sapien
catttgtctgcagatggcttaggct

SEQ ID NO: 3856900 - DNA, 25 bp, Homo sapien
cttgttaccccacagctgtgagagg

SEQ ID NO: 3856901 - DNA, 25 bp, Homo sapien
agcgttctctccctcacatttgtct

SEQ ID NO: 3856902 - DNA, 25 bp, Homo sapien
cacgctcatgctcacagccactcat

SEQ ID NO: 3856903 - DNA, 25 bp, Homo sapien
gcccacacgctcatgctcacagcca

SEQ ID NO: 3856904 - DNA, 25 bp, Homo sapien
ccacacgctcatgctcacagccact

SEQ ID NO: 3856905 - DNA, 25 bp, Homo sapien
tggcccacacgctcatgctcacagc

SEQ ID NO: 3856906 - DNA, 25 bp, Homo sapien
ttttaccaagtagtgcatagagtgt

SEQ ID NO: 3856907 - DNA, 25 bp, Homo sapien
tctgtgcctccgagaagtttccatg

SEQ ID NO: 3856908 - DNA, 25 bp, Homo sapien
gcagaagctgccttattgtctgtgc

SEQ ID NO: 3856909 - DNA, 25 bp, Homo sapien
ccaagtagtgcatagagtgtttgaa

SEQ ID NO: 3856910 - DNA, 25 bp, Homo sapien
atacaaaggtgtatctgatgtcaca

SEQ ID NO: 3856911 - DNA, 25 bp, Homo sapien
tgggagagaagtgatacaaaggtgt

SEQ ID NO: 3856912 - DNA, 25 bp, Homo sapien
caaaggtgtatctgatgtcacaggt

SEQ ID NO: 3856913 - DNA, 25 bp, Homo sapien
gtgggagagaagtgatacaaaggtg

SEQ ID NO: 3856914 - DNA, 25 bp, Homo sapien
tatttcagtcgagggtcattttttc

SEQ ID NO: 3856915 - DNA, 25 bp, Homo sapien
tgttcaccaactgtgtatctcttgc

SEQ ID NO: 3856916 - DNA, 25 bp, Homo sapien
tctgttgttcaccaactgtgtatct

SEQ ID NO: 3856917 - DNA, 25 bp, Homo sapien
tccatctgttgttcaccaactgtgt

SEQ ID NO: 3856918 - DNA, 25 bp, Homo sapien
ctgtccaccttctagatgcagccat

SEQ ID NO: 3856919 - DNA, 25 bp, Homo sapien
catctcagctgtatattctagtcca

SEQ ID NO: 3856920 - DNA, 25 bp, Homo sapien
tatgtacatatgcatccacgtgtgt

SEQ ID NO: 3856921 - DNA, 25 bp, Homo sapien
gtctgcatggtacgagacacccctt

SEQ ID NO: 3856922 - DNA, 25 bp, Homo sapien
tttgccaacacctcagccctgtttg

SEQ ID NO: 3856923 - DNA, 25 bp, Homo sapien
cacacttgccagaactcccgtgttt

SEQ ID NO: 3856924 - DNA, 25 bp, Homo sapien
ccagagcgagacgtggaagtttgca

SEQ ID NO: 3856925 - DNA, 25 bp, Homo sapien
gtctcctggccccagagcgagacgt

SEQ ID NO: 3856926 - DNA, 25 bp, Homo sapien
cacttgccagaactcccgtgttttc

SEQ ID NO: 3856927 - DNA, 25 bp, Homo sapien
cattttacgactgggttcgggcagc

SEQ ID NO: 3856928 - DNA, 25 bp, Homo sapien
tacgactgggttcgggcagccccgc

SEQ ID NO: 3856929 - DNA, 25 bp, Homo sapien
gccccgcagccaagccctcttgcct

SEQ ID NO: 3856930 - DNA, 25 bp, Homo sapien
tgtgagtcattttacgactgggttc

SEQ ID NO: 3856931 - DNA, 25 bp, Homo sapien
gtgaagtcttcgcttctgccccggg

SEQ ID NO: 3856932 - DNA, 25 bp, Homo sapien
tgcaagtgaagtcttcgcttctgcc

SEQ ID NO: 3856933 - DNA, 25 bp, Homo sapien
caaggctgtagcgtgcaagtgaagt

SEQ ID NO: 3856934 - DNA, 25 bp, Homo sapien
tgtagcgtgcaagtgaagtcttcgc

SEQ ID NO: 3856935 - DNA, 25 bp, Homo sapien
tcaaggccggatggtgtagctctaa

SEQ ID NO: 3856936 - DNA, 25 bp, Homo sapien
caagcctgctgggaacaatgctgga

SEQ ID NO: 3856937 - DNA, 25 bp, Homo sapien
gggtgcaataaacccagccaagtgg

SEQ ID NO: 3856938 - DNA, 25 bp, Homo sapien
tctccaagcctgataagcaaagagc

SEQ ID NO: 3856939 - DNA, 25 bp, Homo sapien
tggtcaaggtcacaaatcaaggagc

SEQ ID NO: 3856940 - DNA, 25 bp, Homo sapien
gaagtttcaagtagctccgagtcag

SEQ ID NO: 3856941 - DNA, 25 bp, Homo sapien
cagataaagacgacacgaggcaggg

SEQ ID NO: 3856942 - DNA, 25 bp, Homo sapien
gaccagtctcagtagggcgaaaggc

SEQ ID NO: 3856943 - DNA, 25 bp, Homo sapien
tgcagctttcggcagctgcttctct

SEQ ID NO: 3856944 - DNA, 25 bp, Homo sapien
tgcttctctccggggtctcagggac

SEQ ID NO: 3856945 - DNA, 25 bp, Homo sapien
tctcagggacagctctctctgttgg

SEQ ID NO: 3856946 - DNA, 25 bp, Homo sapien
tcagagtgcggaaaggctgcagctt

SEQ ID NO: 3856947 - DNA, 25 bp, Homo sapien
ttgggaggacctcagctggtagaca

SEQ ID NO: 3856948 - DNA, 25 bp, Homo sapien
ggacaggctattccagggtctagga

SEQ ID NO: 3856949 - DNA, 25 bp, Homo sapien
caggcagaggtcaactgtgtaacca

SEQ ID NO: 3856950 - DNA, 25 bp, Homo sapien
tccgccttgggttaggagagcttct

SEQ ID NO: 3856951 - DNA, 25 bp, Homo sapien
aaacagctacaaggaggccgaaggg

SEQ ID NO: 3856952 - DNA, 25 bp, Homo sapien
tggattttgacctgtcaatttgtat

SEQ ID NO: 3856953 - DNA, 25 bp, Homo sapien
ggagcagtgtggatcaaggacacat

SEQ ID NO: 3856954 - DNA, 25 bp, Homo sapien
gacacatttgtcagcgcatgccaca

SEQ ID NO: 3856955 - DNA, 25 bp, Homo sapien
ttctggatccgttctcgaagttgcc

SEQ ID NO: 3856956 - DNA, 25 bp, Homo sapien
cgttctcgaagttgcctgctgctgc

SEQ ID NO: 3856957 - DNA, 25 bp, Homo sapien
gactgcatttctggatccgttctcg

SEQ ID NO: 3856958 - DNA, 25 bp, Homo sapien
tctgactgcatttctggatccgttc

SEQ ID NO: 3856959 - DNA, 25 bp, Homo sapien
ctcatcctcccagccgacaccgctt

SEQ ID NO: 3856960 - DNA, 25 bp, Homo sapien
ctaccagatgtagcccccgtcgtca

SEQ ID NO: 3856961 - DNA, 25 bp, Homo sapien
cagccgacaccgcttccaaagtccc

SEQ ID NO: 3856962 - DNA, 25 bp, Homo sapien
cccgtcgtcagcctcgcctgcctcg

SEQ ID NO: 3856963 - DNA, 25 bp, Homo sapien
ccccagcatcccacgacaagggccc

SEQ ID NO: 3856964 - DNA, 25 bp, Homo sapien
cagcatcccacgacaagggccccca

SEQ ID NO: 3856965 - DNA, 25 bp, Homo sapien
gcatcccacgacaagggcccccagg

SEQ ID NO: 3856966 - DNA, 25 bp, Homo sapien
cccagcatcccacgacaagggcccc

SEQ ID NO: 3856967 - DNA, 25 bp, Homo sapien
tcttccggtagtagccatcctcgtc

SEQ ID NO: 3856968 - DNA, 25 bp, Homo sapien
agcagtcaccgctgctctggtcaca

SEQ ID NO: 3856969 - DNA, 25 bp, Homo sapien
atgcgtgcgcgtgccagtcagctcc

SEQ ID NO: 3856970 - DNA, 25 bp, Homo sapien
tctggtcacactgcatcttccggta

SEQ ID NO: 3856971 - DNA, 25 bp, Homo sapien
gcctcctggatctggatgcgctcca

SEQ ID NO: 3856972 - DNA, 25 bp, Homo sapien
tcctggatctggatgcgctccagct

SEQ ID NO: 3856973 - DNA, 25 bp, Homo sapien
cctggatctggatgcgctccagctc

SEQ ID NO: 3856974 - DNA, 25 bp, Homo sapien
ttcttggcggcctcctggatctgga

SEQ ID NO: 3856975 - DNA, 25 bp, Homo sapien
acaaaatctggatccgcctgggagc

SEQ ID NO: 3856976 - DNA, 25 bp, Homo sapien
cctgtattgtttgggctggtcgcca

SEQ ID NO: 3856977 - DNA, 25 bp, Homo sapien
cttaagggatgaagccctaagggag

SEQ ID NO: 3856978 - DNA, 25 bp, Homo sapien
gagctgaaagtgttggcttccctgg

SEQ ID NO: 3856979 - DNA, 25 bp, Homo sapien
gaagcaccactcagcagtagagacc

SEQ ID NO: 3856980 - DNA, 25 bp, Homo sapien
ttgaagaagggacggatgcagacct

SEQ ID NO: 3856981 - DNA, 25 bp, Homo sapien
gatgcagacctcgtacttgtccagg

SEQ ID NO: 3856982 - DNA, 25 bp, Homo sapien
tgatggcggccagctccgtctggtc

SEQ ID NO: 3856983 - DNA, 25 bp, Homo sapien
tctgcttggagttctcatgaaggag

SEQ ID NO: 3856984 - DNA, 25 bp, Homo sapien
cccgcagccgatctcccaggtcagc

SEQ ID NO: 3856985 - DNA, 25 bp, Homo sapien
gccaggtcctgaccggtgcaagtct

SEQ ID NO: 3856986 - DNA, 25 bp, Homo sapien
agccgatctcccaggtcagccaggt

SEQ ID NO: 3856987 - DNA, 25 bp, Homo sapien
cgcagccgatctcccaggtcagcca

SEQ ID NO: 3856988 - DNA, 25 bp, Homo sapien
cctcgcatcgcaccgccagctgctt

SEQ ID NO: 3856989 - DNA, 25 bp, Homo sapien
tgctgctcaggcacgcctgttgctc

SEQ ID NO: 3856990 - DNA, 25 bp, Homo sapien
ctgcttgctgctcaggcacgcctgt

SEQ ID NO: 3856991 - DNA, 25 bp, Homo sapien
ctggtttgccatcggcggtggaggt

SEQ ID NO: 3856992 - DNA, 25 bp, Homo sapien
tgcccatgaacagcctgaagggtcc

SEQ ID NO: 3856993 - DNA, 25 bp, Homo sapien
gctggggacaccctcaagcctctca

SEQ ID NO: 3856994 - DNA, 25 bp, Homo sapien
catgaacagcctgaagggtcctctt

SEQ ID NO: 3856995 - DNA, 25 bp, Homo sapien
tccccccatggagtgcccatgaaca

SEQ ID NO: 3856996 - DNA, 25 bp, Homo sapien
caattcctcggccttcgctaagaac

SEQ ID NO: 3856997 - DNA, 25 bp, Homo sapien
tcggccttcgctaagaactgcttct

SEQ ID NO: 3856998 - DNA, 25 bp, Homo sapien
ataggacacagcaccgcctatggag

SEQ ID NO: 3856999 - DNA, 25 bp, Homo sapien
tatggagcatctaacaattcctcgg

SEQ ID NO: 3857000 - DNA, 25 bp, Homo sapien
actccccacctgcacctgtccgagg

SEQ ID NO: 3857001 - DNA, 25 bp, Homo sapien
acctgtccgaggtcagggacagaca

SEQ ID NO: 3857002 - DNA, 25 bp, Homo sapien
gggtctggctccaactctcaggtag

SEQ ID NO: 3857003 - DNA, 25 bp, Homo sapien
tgaccatagtgtctcttccaggccc

SEQ ID NO: 3857004 - DNA, 25 bp, Homo sapien
cagagctgtaagtgtggccatctga

SEQ ID NO: 3857005 - DNA, 25 bp, Homo sapien
gtggccatctgagccgcagacagag

SEQ ID NO: 3857006 - DNA, 25 bp, Homo sapien
tctgagccgcagacagaggcaagct

SEQ ID NO: 3857007 - DNA, 25 bp, Homo sapien
cacagagctgtaagtgtggccatct

SEQ ID NO: 3857008 - DNA, 25 bp, Homo sapien
atggagtctttgtttccatggagtt

SEQ ID NO: 3857009 - DNA, 25 bp, Homo sapien
tttccatggagtttcacggtcggct

SEQ ID NO: 3857010 - DNA, 25 bp, Homo sapien
ttgtttccatggagtttcacggtcg

SEQ ID NO: 3857011 - DNA, 25 bp, Homo sapien
catggagtttcacggtcggctgctt

SEQ ID NO: 3857012 - DNA, 25 bp, Homo sapien
tgaaaaatggaagcatgggagtcct

SEQ ID NO: 3857013 - DNA, 25 bp, Homo sapien
taaatacctggattcttggcctgtc

SEQ ID NO: 3857014 - DNA, 25 bp, Homo sapien
tgtaatagaccagggccaagaagca

SEQ ID NO: 3857015 - DNA, 25 bp, Homo sapien
ggagtcctggacctgcattcctaca

SEQ ID NO: 3857016 - DNA, 25 bp, Homo sapien
tgctccagcttcttgcgactgatgc

SEQ ID NO: 3857017 - DNA, 25 bp, Homo sapien
cttcttgcgactgatgcacatggcc

SEQ ID NO: 3857018 - DNA, 25 bp, Homo sapien
cctgggcaatgcacaccttgtggcg

SEQ ID NO: 3857019 - DNA, 25 bp, Homo sapien
acatggcccgctggtagccctgggc

SEQ ID NO: 3857020 - DNA, 25 bp, Homo sapien
atctccttgctgattgtcctcccag

SEQ ID NO: 3857021 - DNA, 25 bp, Homo sapien
ttgctgattgtcctcccagctcttg

SEQ ID NO: 3857022 - DNA, 25 bp, Homo sapien
cctcccagctcttgatatagtcatc

SEQ ID NO: 3857023 - DNA, 25 bp, Homo sapien
gattgtcctcccagctcttgatata

SEQ ID NO: 3857024 - DNA, 25 bp, Homo sapien
caggccatggaaaacggagcaggaa

SEQ ID NO: 3857025 - DNA, 25 bp, Homo sapien
gcaatggccttcgatggctgtgttc

SEQ ID NO: 3857026 - DNA, 25 bp, Homo sapien
cctgcctcatcatgtggccgagcaa

SEQ ID NO: 3857027 - DNA, 25 bp, Homo sapien
atggggatatcagtgtgaggccctc

SEQ ID NO: 3857028 - DNA, 25 bp, Homo sapien
cagagctcaagactggccttaggag

SEQ ID NO: 3857029 - DNA, 25 bp, Homo sapien
ccaccaccaggacagatgtccgagg

SEQ ID NO: 3857030 - DNA, 25 bp, Homo sapien
caggacagatgtccgaggtgcccat

SEQ ID NO: 3857031 - DNA, 25 bp, Homo sapien
gagctcaagactggccttaggagta

SEQ ID NO: 3857032 - DNA, 25 bp, Homo sapien
agatgagcggaataggagcccgaac

SEQ ID NO: 3857033 - DNA, 25 bp, Homo sapien
tctgagtctccaggattctgctccc

SEQ ID NO: 3857034 - DNA, 25 bp, Homo sapien
taggagcccgaacgatttcagagac

SEQ ID NO: 3857035 - DNA, 25 bp, Homo sapien
tttcagagacttcgcgtcctctgcc

SEQ ID NO: 3857036 - DNA, 25 bp, Homo sapien
tatctggcaaaggacccaaacccca

SEQ ID NO: 3857037 - DNA, 25 bp, Homo sapien
taaacacacgatattgttagccggc

SEQ ID NO: 3857038 - DNA, 25 bp, Homo sapien
gagggagcccctttgtggctacttg

SEQ ID NO: 3857039 - DNA, 25 bp, Homo sapien
tggcatacaggaagggctcagatct

SEQ ID NO: 3857040 - DNA, 25 bp, Homo sapien
gttagccggcaggtaacaatatccc

SEQ ID NO: 3857041 - DNA, 25 bp, Homo sapien
ccacggagctggctattggaagcag

SEQ ID NO: 3857042 - DNA, 25 bp, Homo sapien
ggaagtggttggcaccaatacagag

SEQ ID NO: 3857043 - DNA, 25 bp, Homo sapien
ggcaccaatacagagagacaggtgg

SEQ ID NO: 3857044 - DNA, 25 bp, Homo sapien
gggtcaagcagtaagtcatttattc

SEQ ID NO: 3857045 - DNA, 25 bp, Homo sapien
gaggcctaggccagtgacacatgga

SEQ ID NO: 3857046 - DNA, 25 bp, Homo sapien
acatggattccggatgggccggcct

SEQ ID NO: 3857047 - DNA, 25 bp, Homo sapien
atcaaacagccagcgagtcggaggg

SEQ ID NO: 3857048 - DNA, 25 bp, Homo sapien
cactggtcccattttggcagatcaa

SEQ ID NO: 3857049 - DNA, 25 bp, Homo sapien
ctgcccaggaagcggcaggagactg

SEQ ID NO: 3857050 - DNA, 25 bp, Homo sapien
cccaggaagcggcaggagactgcgg

SEQ ID NO: 3857051 - DNA, 25 bp, Homo sapien
ccaggaagcggcaggagactgcggc

SEQ ID NO: 3857052 - DNA, 25 bp, Homo sapien
tgcccaggaagcggcaggagactgc

SEQ ID NO: 3857053 - DNA, 25 bp, Homo sapien
ggagacctggctgcccgtggttcct

SEQ ID NO: 3857054 - DNA, 25 bp, Homo sapien
cctgcaggtgcttcgggaaggcctc

SEQ ID NO: 3857055 - DNA, 25 bp, Homo sapien
gagatcagcagcccatcgcggggcc

SEQ ID NO: 3857056 - DNA, 25 bp, Homo sapien
gctccaggctcctgcggctggacag

SEQ ID NO: 3857057 - DNA, 25 bp, Homo sapien
caaaaagatccaaatctctgcctct

SEQ ID NO: 3857058 - DNA, 25 bp, Homo sapien
cctatgaagcatgtgtgttttaaac

SEQ ID NO: 3857059 - DNA, 25 bp, Homo sapien
gagaaacagtcacttgtctgacggt

SEQ ID NO: 3857060 - DNA, 25 bp, Homo sapien
cacttggctggatagcctatgaagc

SEQ ID NO: 3857061 - DNA, 25 bp, Homo sapien
catggtgtggcctgcgttgtactgg

SEQ ID NO: 3857062 - DNA, 25 bp, Homo sapien
tgcgttgtactgggtgggtcggacg

SEQ ID NO: 3857063 - DNA, 25 bp, Homo sapien
tgtactgggtgggtcggacgaggga

SEQ ID NO: 3857064 - DNA, 25 bp, Homo sapien
atggtgtggcctgcgttgtactggg

SEQ ID NO: 3857065 - DNA, 25 bp, Homo sapien
tgcagtgccccgtatgtgcagcctg

SEQ ID NO: 3857066 - DNA, 25 bp, Homo sapien
tgctgcagtgccccgtatgtgcagc

SEQ ID NO: 3857067 - DNA, 25 bp, Homo sapien
agtgccccgtatgtgcagcctgcag

SEQ ID NO: 3857068 - DNA, 25 bp, Homo sapien
cagtgccccgtatgtgcagcctgca

SEQ ID NO: 3857069 - DNA, 25 bp, Homo sapien
ctgccttggcagccctgcggactca

SEQ ID NO: 3857070 - DNA, 25 bp, Homo sapien
ggagctcaatccccgaacccgcaac

SEQ ID NO: 3857071 - DNA, 25 bp, Homo sapien
gagctcaatccccgaacccgcaacc

SEQ ID NO: 3857072 - DNA, 25 bp, Homo sapien
ctctgccttggcagccctgcggact

SEQ ID NO: 3857073 - DNA, 25 bp, Homo sapien
tctcggaagcggttccagtgcttga

SEQ ID NO: 3857074 - DNA, 25 bp, Homo sapien
cagtgcttgatcttgccgctgtact

SEQ ID NO: 3857075 - DNA, 25 bp, Homo sapien
gacagccattgctcgtcctccatga

SEQ ID NO: 3857076 - DNA, 25 bp, Homo sapien
tactgcgagatggacgacagccatt

SEQ ID NO: 3857077 - DNA, 25 bp, Homo sapien
cagcagcggcagcaccagccgcccg

SEQ ID NO: 3857078 - DNA, 25 bp, Homo sapien
agcggcagcaccagccgcccgcagc

SEQ ID NO: 3857079 - DNA, 25 bp, Homo sapien
cttcggccagggctgccgcggccag

SEQ ID NO: 3857080 - DNA, 25 bp, Homo sapien
ttcggccagggctgccgcggccagg

SEQ ID NO: 3857081 - DNA, 25 bp, Homo sapien
ctggttaggagatgcacttgtctga

SEQ ID NO: 3857082 - DNA, 25 bp, Homo sapien
cagtattttaatgtccttcctccca

SEQ ID NO: 3857083 - DNA, 25 bp, Homo sapien
tcagcatcacgtttgacatcatcat

SEQ ID NO: 3857084 - DNA, 25 bp, Homo sapien
ttgtctgaaaaagcccagcactgga

SEQ ID NO: 3857085 - DNA, 25 bp, Homo sapien
aagcgaagcgctccctcgatgagag

SEQ ID NO: 3857086 - DNA, 25 bp, Homo sapien
cagaccaagaaatccagaatcccga

SEQ ID NO: 3857087 - DNA, 25 bp, Homo sapien
atgagagcgccaaacgccagccagc

SEQ ID NO: 3857088 - DNA, 25 bp, Homo sapien
gtgggtagatttcaaagcgaagcgc

SEQ ID NO: 3857089 - DNA, 25 bp, Homo sapien
gacagattgcattagggccgaccct

SEQ ID NO: 3857090 - DNA, 25 bp, Homo sapien
tagccagtaagagcacagtagaagc

SEQ ID NO: 3857091 - DNA, 25 bp, Homo sapien
ggtggtcatgactcagcagcaggta

SEQ ID NO: 3857092 - DNA, 25 bp, Homo sapien
gcataagcttctgcattacagcacg

SEQ ID NO: 3857093 - DNA, 25 bp, Homo sapien
tatcgagatggaagctgacaggtgt

SEQ ID NO: 3857094 - DNA, 25 bp, Homo sapien
tacgatgctggattctactcaatgc

SEQ ID NO: 3857095 - DNA, 25 bp, Homo sapien
tcaatacacctctagtgccagtggg

SEQ ID NO: 3857096 - DNA, 25 bp, Homo sapien
gagctccagcacagtacaagggcaa

SEQ ID NO: 3857097 - DNA, 25 bp, Homo sapien
tgcacagtcctgctgatatcatcag

SEQ ID NO: 3857098 - DNA, 25 bp, Homo sapien
tgtgcagtcccaataataaatctca

SEQ ID NO: 3857099 - DNA, 25 bp, Homo sapien
cagtcctcacaatgtagcaacttaa

SEQ ID NO: 3857100 - DNA, 25 bp, Homo sapien
gcaacttaacacagagttcagaagt

SEQ ID NO: 3857101 - DNA, 25 bp, Homo sapien
ggtacgcacatgtaacggaacattc

SEQ ID NO: 3857102 - DNA, 25 bp, Homo sapien
gacggccacacagcattatgaatgt

SEQ ID NO: 3857103 - DNA, 25 bp, Homo sapien
tactcccaatagtcaagaggaagca

SEQ ID NO: 3857104 - DNA, 25 bp, Homo sapien
tccctgcttggcaattaaaacgaag

SEQ ID NO: 3857105 - DNA, 25 bp, Homo sapien
aggagaagtcaatttgtccacagga

SEQ ID NO: 3857106 - DNA, 25 bp, Homo sapien
caggaagcgtagtttccaaagctgt

SEQ ID NO: 3857107 - DNA, 25 bp, Homo sapien
tctacggtgaacctctgagagatgt

SEQ ID NO: 3857108 - DNA, 25 bp, Homo sapien
tgagagatgtgaattgaattcagct

SEQ ID NO: 3857109 - DNA, 25 bp, Homo sapien
atggatttctcatccagacgtccct

SEQ ID NO: 3857110 - DNA, 25 bp, Homo sapien
tttctcatccagacgtccctagtgc

SEQ ID NO: 3857111 - DNA, 25 bp, Homo sapien
tccctagtgccagtgccaatcttca

SEQ ID NO: 3857112 - DNA, 25 bp, Homo sapien
atccagacgtccctagtgccagtgc

SEQ ID NO: 3857113 - DNA, 25 bp, Homo sapien
tcccaagcccttctcgattctagga

SEQ ID NO: 3857114 - DNA, 25 bp, Homo sapien
ggattttcctggtaggctctgagaa

SEQ ID NO: 3857115 - DNA, 25 bp, Homo sapien
ggctctgagaatatgcatcagagac

SEQ ID NO: 3857116 - DNA, 25 bp, Homo sapien
gcccttctcgattctaggattttcc

SEQ ID NO: 3857117 - DNA, 25 bp, Homo sapien
ccagcctgggcaacaaggcaaagct

SEQ ID NO: 3857118 - DNA, 25 bp, Homo sapien
agtgagcggagattgcatcattgta

SEQ ID NO: 3857119 - DNA, 25 bp, Homo sapien
tccagcctgggcaacaaggcaaagc

SEQ ID NO: 3857120 - DNA, 25 bp, Homo sapien
gagcggagattgcatcattgtactc

SEQ ID NO: 3857121 - DNA, 25 bp, Homo sapien
cattttcagtttgtacatgtttctt

SEQ ID NO: 3857122 - DNA, 25 bp, Homo sapien
attttcagtttgtacatgtttcttt

SEQ ID NO: 3857123 - DNA, 25 bp, Homo sapien
ttttcagtttgtacatgtttctttc

SEQ ID NO: 3857124 - DNA, 25 bp, Homo sapien
cactgcaggaaccaaaatgcagagt

SEQ ID NO: 3857125 - DNA, 25 bp, Homo sapien
tcactgcaggaaccaaaatgcagag

SEQ ID NO: 3857126 - DNA, 25 bp, Homo sapien
tgcaggaaccaaaatgcagagtatc

SEQ ID NO: 3857127 - DNA, 25 bp, Homo sapien
ctgcaggaaccaaaatgcagagtat

SEQ ID NO: 3857128 - DNA, 25 bp, Homo sapien
gaggtagtatctgtattggactttg

SEQ ID NO: 3857129 - DNA, 25 bp, Homo sapien
gaagaggtagtatctgtattggact

SEQ ID NO: 3857130 - DNA, 25 bp, Homo sapien
caagtatcatttgaatacagggaga

SEQ ID NO: 3857131 - DNA, 25 bp, Homo sapien
acaagtatcatttgaatacagggag

SEQ ID NO: 3857132 - DNA, 25 bp, Homo sapien
tgactaaagagtctcccgggaggag

SEQ ID NO: 3857133 - DNA, 25 bp, Homo sapien
cgttcccttaggacagactgactaa

SEQ ID NO: 3857134 - DNA, 25 bp, Homo sapien
aacattaaatgtacgtctcatgtac

SEQ ID NO: 3857135 - DNA, 25 bp, Homo sapien
accttggtagtagtcacattgttca

SEQ ID NO: 3857136 - DNA, 25 bp, Homo sapien
tcatctttaaggcacatagtctggc

SEQ ID NO: 3857137 - DNA, 25 bp, Homo sapien
tagaaggcagggattgtatcataat

SEQ ID NO: 3857138 - DNA, 25 bp, Homo sapien
tgtatcataatgactgtttcatctt

SEQ ID NO: 3857139 - DNA, 25 bp, Homo sapien
agtctggcagatggtatatagtcaa

SEQ ID NO: 3857140 - DNA, 25 bp, Homo sapien
tggtctctacctaaacactgggcat

SEQ ID NO: 3857141 - DNA, 25 bp, Homo sapien
tggtctccaagaacctagctaggtc

SEQ ID NO: 3857142 - DNA, 25 bp, Homo sapien
aattggccattatcccagatcaggc

SEQ ID NO: 3857143 - DNA, 25 bp, Homo sapien
taactagcggtacctctggcaagtc

SEQ ID NO: 3857144 - DNA, 25 bp, Homo sapien
gccaaaggatttccaattcactctg

SEQ ID NO: 3857145 - DNA, 25 bp, Homo sapien
tgccaaagccttaagaggaccagct

SEQ ID NO: 3857146 - DNA, 25 bp, Homo sapien
caaatactctagaagtgccaaagcc

SEQ ID NO: 3857147 - DNA, 25 bp, Homo sapien
cttatatcaccaatttcaggcaggg

SEQ ID NO: 3857148 - DNA, 25 bp, Homo sapien
aaatatttcggccatcaaatgattc

SEQ ID NO: 3857149 - DNA, 25 bp, Homo sapien
tatttcggccatcaaatgattctct

SEQ ID NO: 3857150 - DNA, 25 bp, Homo sapien
ccttccgctgtgtagagattgtacc

SEQ ID NO: 3857151 - DNA, 25 bp, Homo sapien
ctctttccttgaagatatatttgcc

SEQ ID NO: 3857152 - DNA, 25 bp, Homo sapien
tgcctgaaaacgttccagcactcga

SEQ ID NO: 3857153 - DNA, 25 bp, Homo sapien
cagcactcgatcaactaattcttgt

SEQ ID NO: 3857154 - DNA, 25 bp, Homo sapien
gtgtattcataactgtagcatgcag

SEQ ID NO: 3857155 - DNA, 25 bp, Homo sapien
tcactattagtccagatgcctgaaa

SEQ ID NO: 3857156 - DNA, 25 bp, Homo sapien
tccacaggaggtttagacatagtct

SEQ ID NO: 3857157 - DNA, 25 bp, Homo sapien
tttgcaaataacaccagggaaggag

SEQ ID NO: 3857158 - DNA, 25 bp, Homo sapien
aagcagtggtcagattagggaagcc

SEQ ID NO: 3857159 - DNA, 25 bp, Homo sapien
gctaggtggctacttcaacagtcaa

SEQ ID NO: 3857160 - DNA, 25 bp, Homo sapien
tccacgtgattctcattgctactgc

SEQ ID NO: 3857161 - DNA, 25 bp, Homo sapien
gccagatttcactattcttgcatcc

SEQ ID NO: 3857162 - DNA, 25 bp, Homo sapien
cagctggactagagtaatgactttt

SEQ ID NO: 3857163 - DNA, 25 bp, Homo sapien
tgctctagttcaggccttctttgct

SEQ ID NO: 3857164 - DNA, 25 bp, Homo sapien
gcaaaatatcttgcacaaaggaggc

SEQ ID NO: 3857165 - DNA, 25 bp, Homo sapien
cagtacaagaggtgagaattatcca

SEQ ID NO: 3857166 - DNA, 25 bp, Homo sapien
gaataagtcccttaggcatcctaga

SEQ ID NO: 3857167 - DNA, 25 bp, Homo sapien
caaaagtggctattgtcaggaagag

SEQ ID NO: 3857168 - DNA, 25 bp, Homo sapien
ttcatccccattttgtcctggtatc

SEQ ID NO: 3857169 - DNA, 25 bp, Homo sapien
cattttgtcctggtatccactacaa

SEQ ID NO: 3857170 - DNA, 25 bp, Homo sapien
taagattaataaccctatgaagttg

SEQ ID NO: 3857171 - DNA, 25 bp, Homo sapien
tggtatccactacaactgcattaca

SEQ ID NO: 3857172 - DNA, 25 bp, Homo sapien
tcacgtttgaaactcatactctaaa

SEQ ID NO: 3857173 - DNA, 25 bp, Homo sapien
cacgtttgaaactcatactctaaaa

SEQ ID NO: 3857174 - DNA, 25 bp, Homo sapien
gctaccacattagcctggtgcaggg

SEQ ID NO: 3857175 - DNA, 25 bp, Homo sapien
ttgttactatcaatacccgttatcc

SEQ ID NO: 3857176 - DNA, 25 bp, Homo sapien
ccgttatccaagtaactcagtagct

SEQ ID NO: 3857177 - DNA, 25 bp, Homo sapien
tcagtagctaccacattagcctggt

SEQ ID NO: 3857178 - DNA, 25 bp, Homo sapien
gattgaaacaaagaagcattccaga

SEQ ID NO: 3857179 - DNA, 25 bp, Homo sapien
gaaacaaagaagcattccagaaata

SEQ ID NO: 3857180 - DNA, 25 bp, Homo sapien
tcttgattgaaacaaagaagcattc

SEQ ID NO: 3857181 - DNA, 25 bp, Homo sapien
tgattgaaacaaagaagcattccag

SEQ ID NO: 3857182 - DNA, 25 bp, Homo sapien
catctttcatatggactttggcgta

SEQ ID NO: 3857183 - DNA, 25 bp, Homo sapien
ggagccatctttcatatggactttg

SEQ ID NO: 3857184 - DNA, 25 bp, Homo sapien
ggactttggcgtaaagaacatccac

SEQ ID NO: 3857185 - DNA, 25 bp, Homo sapien
gttggagccatctttcatatggact

SEQ ID NO: 3857186 - DNA, 25 bp, Homo sapien
gcacacaaattggaaaacaccggaa

SEQ ID NO: 3857187 - DNA, 25 bp, Homo sapien
tatgttggctcatctctcaggcgcc

SEQ ID NO: 3857188 - DNA, 25 bp, Homo sapien
catttcactcatataacaaaggtgg

SEQ ID NO: 3857189 - DNA, 25 bp, Homo sapien
caagtgatgacagttctgatccata

SEQ ID NO: 3857190 - DNA, 25 bp, Homo sapien
actcaaaagcaccaacatcccaata

SEQ ID NO: 3857191 - DNA, 25 bp, Homo sapien
taatgaattcctctttacactgctg

SEQ ID NO: 3857192 - DNA, 25 bp, Homo sapien
ctgctgtagcatctcacatgtctgc

SEQ ID NO: 3857193 - DNA, 25 bp, Homo sapien
caatagttagatgaagctttttagg

SEQ ID NO: 3857194 - DNA, 25 bp, Homo sapien
aaactagtatctccaccgaaatggg

SEQ ID NO: 3857195 - DNA, 25 bp, Homo sapien
ccgaaatgggacaatatatgaatct

SEQ ID NO: 3857196 - DNA, 25 bp, Homo sapien
ccaacttggtaggttttacaatcag

SEQ ID NO: 3857197 - DNA, 25 bp, Homo sapien
taactagtgcatgaatcaataagac

SEQ ID NO: 3857198 - DNA, 25 bp, Homo sapien
tactgatgtgctttctactggaccc

SEQ ID NO: 3857199 - DNA, 25 bp, Homo sapien
cattctgcccagtgtaagcctccat

SEQ ID NO: 3857200 - DNA, 25 bp, Homo sapien
tataagccttcaaatgttccactgc

SEQ ID NO: 3857201 - DNA, 25 bp, Homo sapien
ggatgcagacccattacccattctg

SEQ ID NO: 3857202 - DNA, 25 bp, Homo sapien
ttaagtcctgaaccaggactgaagg

SEQ ID NO: 3857203 - DNA, 25 bp, Homo sapien
tcttaagtcctgaaccaggactgaa

SEQ ID NO: 3857204 - DNA, 25 bp, Homo sapien
agtcctgaaccaggactgaaggcag

SEQ ID NO: 3857205 - DNA, 25 bp, Homo sapien
cctgaaccaggactgaaggcagaca

SEQ ID NO: 3857206 - DNA, 25 bp, Homo sapien
tttgtagacacaagttttggttgcc

SEQ ID NO: 3857207 - DNA, 25 bp, Homo sapien
tcttttcaacaattcgggaagagta

SEQ ID NO: 3857208 - DNA, 25 bp, Homo sapien
cttaatgaacgtgtccttagataat

SEQ ID NO: 3857209 - DNA, 25 bp, Homo sapien
ggaagagtatatgatttgaataata

SEQ ID NO: 3857210 - DNA, 25 bp, Homo sapien
cactataagattaagaaagtacagc

SEQ ID NO: 3857211 - DNA, 25 bp, Homo sapien
tcaggtaagccaagacaagtgcaca

SEQ ID NO: 3857212 - DNA, 25 bp, Homo sapien
caggtaagccaagacaagtgcacac

SEQ ID NO: 3857213 - DNA, 25 bp, Homo sapien
tttctgtcttcactataagattaag

SEQ ID NO: 3857214 - DNA, 25 bp, Homo sapien
agaaacagtctgatgtcatgtgctt

SEQ ID NO: 3857215 - DNA, 25 bp, Homo sapien
aaacagtctgatgtcatgtgctttc

SEQ ID NO: 3857216 - DNA, 25 bp, Homo sapien
gaaagaaacagtctgatgtcatgtg

SEQ ID NO: 3857217 - DNA, 25 bp, Homo sapien
tctctgccctccacagtgctcccca

SEQ ID NO: 3857218 - DNA, 25 bp, Homo sapien
cacaaccacagggagatgcgtgggc

SEQ ID NO: 3857219 - DNA, 25 bp, Homo sapien
ccacactattggtggttctcgcagg

SEQ ID NO: 3857220 - DNA, 25 bp, Homo sapien
actattggtggttctcgcagggcag

SEQ ID NO: 3857221 - DNA, 25 bp, Homo sapien
tctgcaggccgaaagagccgtggcc

SEQ ID NO: 3857222 - DNA, 25 bp, Homo sapien
gaaattacaccatttcgatgctggc

SEQ ID NO: 3857223 - DNA, 25 bp, Homo sapien
acatcaatccgtgttcgggctgaaa

SEQ ID NO: 3857224 - DNA, 25 bp, Homo sapien
gctgctttcttcgaaaagtgtccaa

SEQ ID NO: 3857225 - DNA, 25 bp, Homo sapien
catggagcacttcgccagtacttcc

SEQ ID NO: 3857226 - DNA, 25 bp, Homo sapien
ggacctcttgatactgtcacctctg

SEQ ID NO: 3857227 - DNA, 25 bp, Homo sapien
aatgcgtatatgaatctaaacaggg

SEQ ID NO: 3857228 - DNA, 25 bp, Homo sapien
cacctctgaggagctaaagcagttc

SEQ ID NO: 3857229 - DNA, 25 bp, Homo sapien
gaagaaagggtaaactgctcaagga

SEQ ID NO: 3857230 - DNA, 25 bp, Homo sapien
cttgtctagaggattaaaagctacc

SEQ ID NO: 3857231 - DNA, 25 bp, Homo sapien
cagacaagaccagatccttgtctag

SEQ ID NO: 3857232 - DNA, 25 bp, Homo sapien
tgcctgagatttcaaaacagacaag

SEQ ID NO: 3857233 - DNA, 25 bp, Homo sapien
gcttctgatgttccattgcctgaga

SEQ ID NO: 3857234 - DNA, 25 bp, Homo sapien
gctatgatggagccaatcaactcta

SEQ ID NO: 3857235 - DNA, 25 bp, Homo sapien
aggtagagtctacactgagctgtga

SEQ ID NO: 3857236 - DNA, 25 bp, Homo sapien
tccaggaggtagagtctacactgag

SEQ ID NO: 3857237 - DNA, 25 bp, Homo sapien
ataaaggactaaaaggccgggcatg

SEQ ID NO: 3857238 - DNA, 25 bp, Homo sapien
ttcaagttaccaaagcatgaaaaga

SEQ ID NO: 3857239 - DNA, 25 bp, Homo sapien
gaaatctggaagctttattccatca

SEQ ID NO: 3857240 - DNA, 25 bp, Homo sapien
taaggcccaggtactcaatcaagat

SEQ ID NO: 3857241 - DNA, 25 bp, Homo sapien
ataaagacgcccatagctggccggg

SEQ ID NO: 3857242 - DNA, 25 bp, Homo sapien
tcttgtccaggtttaggaatgctaa

SEQ ID NO: 3857243 - DNA, 25 bp, Homo sapien
tcctagtgtcccctctctttccaac

SEQ ID NO: 3857244 - DNA, 25 bp, Homo sapien
cccgtcttgtccaggtttaggaatg

SEQ ID NO: 3857245 - DNA, 25 bp, Homo sapien
ccaggtttaggaatgctaatagaag

SEQ ID NO: 3857246 - DNA, 25 bp, Homo sapien
ctggaacccacagtcgtttgatgtg

SEQ ID NO: 3857247 - DNA, 25 bp, Homo sapien
cccacagtcgtttgatgtgttcaag

SEQ ID NO: 3857248 - DNA, 25 bp, Homo sapien
tatcttctggaacccacagtcgttt

SEQ ID NO: 3857249 - DNA, 25 bp, Homo sapien
tattctgacaatccaaagttatctt

SEQ ID NO: 3857250 - DNA, 25 bp, Homo sapien
gggtctgctccacctcgtaggcatc

SEQ ID NO: 3857251 - DNA, 25 bp, Homo sapien
gtaggcatcacagggctcatcagca

SEQ ID NO: 3857252 - DNA, 25 bp, Homo sapien
caaagtagaccggaatccttgtggg

SEQ ID NO: 3857253 - DNA, 25 bp, Homo sapien
ttatagagcaagctgggggccctca

SEQ ID NO: 3857254 - DNA, 25 bp, Homo sapien
tccagctactggggaagatgaggca

SEQ ID NO: 3857255 - DNA, 25 bp, Homo sapien
aggagaattgcttgaacccgggagg

SEQ ID NO: 3857256 - DNA, 25 bp, Homo sapien
gttccagctactggggaagatgagg

SEQ ID NO: 3857257 - DNA, 25 bp, Homo sapien
gtagttccagctactggggaagatg

SEQ ID NO: 3857258 - DNA, 25 bp, Homo sapien
catcttcttcatgttgataggtctg

SEQ ID NO: 3857259 - DNA, 25 bp, Homo sapien
tcctgtaattccggccatcaattct

SEQ ID NO: 3857260 - DNA, 25 bp, Homo sapien
tataagctgtggacgcagaacttcc

SEQ ID NO: 3857261 - DNA, 25 bp, Homo sapien
ataggtctgttcttggactggattc

SEQ ID NO: 3857262 - DNA, 25 bp, Homo sapien
ctttctccaaatgatattccaatta

SEQ ID NO: 3857263 - DNA, 25 bp, Homo sapien
ctccaaatgatattccaattatgcc

SEQ ID NO: 3857264 - DNA, 25 bp, Homo sapien
acactttctccaaatgatattccaa

SEQ ID NO: 3857265 - DNA, 25 bp, Homo sapien
ttctccaaatgatattccaattatg

SEQ ID NO: 3857266 - DNA, 25 bp, Homo sapien
taagatgaaagtcgggccctcagac

SEQ ID NO: 3857267 - DNA, 25 bp, Homo sapien
taatgttcaagccaacgtgggcgcg

SEQ ID NO: 3857268 - DNA, 25 bp, Homo sapien
gatgacatcacaacccagtggccta

SEQ ID NO: 3857269 - DNA, 25 bp, Homo sapien
caaaggttccttacaggctagctga

SEQ ID NO: 3857270 - DNA, 25 bp, Homo sapien
tacgagactgctcggaaggaaagag

SEQ ID NO: 3857271 - DNA, 25 bp, Homo sapien
ctgcgctacgagactgctcggaagg

SEQ ID NO: 3857272 - DNA, 25 bp, Homo sapien
atggccctgcgctacgagactgctc

SEQ ID NO: 3857273 - DNA, 25 bp, Homo sapien
tcctacatggccctgcgctacgaga

SEQ ID NO: 3857274 - DNA, 25 bp, Homo sapien
gaagccgaggccctgaatcatcaaa

SEQ ID NO: 3857275 - DNA, 25 bp, Homo sapien
tgtgtctttctgcaatatcgtgagg

SEQ ID NO: 3857276 - DNA, 25 bp, Homo sapien
ccgaggccctgaatcatcaaagaga

SEQ ID NO: 3857277 - DNA, 25 bp, Homo sapien
tctgcaatatcgtgagggaagccga

SEQ ID NO: 3857278 - DNA, 25 bp, Homo sapien
ttcctctacgcgagcgcgttctctg

SEQ ID NO: 3857279 - DNA, 25 bp, Homo sapien
ggaattcctctacgcgagcgcgttc

SEQ ID NO: 3857280 - DNA, 25 bp, Homo sapien
gaggacccggaattcctctacgcga

SEQ ID NO: 3857281 - DNA, 25 bp, Homo sapien
ggacccggaattcctctacgcgagc

SEQ ID NO: 3857282 - DNA, 25 bp, Homo sapien
tcgtggtgagcgcagccactcaggc

SEQ ID NO: 3857283 - DNA, 25 bp, Homo sapien
gactgctgcagcagacgtgcgatag

SEQ ID NO: 3857284 - DNA, 25 bp, Homo sapien
ccgggtttgaccgagtgcgcatgcg

SEQ ID NO: 3857285 - DNA, 25 bp, Homo sapien
tgcgataggaaatttccccaggccg

SEQ ID NO: 3857286 - DNA, 25 bp, Homo sapien
cagacgtgcgataggaaatttcccc

SEQ ID NO: 3857287 - DNA, 25 bp, Homo sapien
tatctcctgcatgacctttgctgag

SEQ ID NO: 3857288 - DNA, 25 bp, Homo sapien
gatccaatactcatgacacagcgct

SEQ ID NO: 3857289 - DNA, 25 bp, Homo sapien
cgaaatgctcgggactggaagcaca

SEQ ID NO: 3857290 - DNA, 25 bp, Homo sapien
tgggcctggcaaactggttgaagat

SEQ ID NO: 3857291 - DNA, 25 bp, Homo sapien
agcgagactccgtaaataaatacat

SEQ ID NO: 3857292 - DNA, 25 bp, Homo sapien
tacatacatacataccagactgagc

SEQ ID NO: 3857293 - DNA, 25 bp, Homo sapien
atacatacataccagactgagcaac

SEQ ID NO: 3857294 - DNA, 25 bp, Homo sapien
cgagactccgtaaataaatacatac

SEQ ID NO: 3857295 - DNA, 25 bp, Homo sapien
tactgagcacattagaaactgcctt

SEQ ID NO: 3857296 - DNA, 25 bp, Homo sapien
cagcatacagcagtttgcagcattc

SEQ ID NO: 3857297 - DNA, 25 bp, Homo sapien
gacattgtagccactgaagtataaa

SEQ ID NO: 3857298 - DNA, 25 bp, Homo sapien
cttgtgagtctaggatagtaaaccc

SEQ ID NO: 3857299 - DNA, 25 bp, Homo sapien
tttgaaagagctccaaattggtggc

SEQ ID NO: 3857300 - DNA, 25 bp, Homo sapien
ggcgtctgtcctgtcatccatatgg

SEQ ID NO: 3857301 - DNA, 25 bp, Homo sapien
ttttcacaagccaagtagggcatat

SEQ ID NO: 3857302 - DNA, 25 bp, Homo sapien
cagatttggccaactgaatggcgtc

SEQ ID NO: 3857303 - DNA, 25 bp, Homo sapien
ctgctcactgcaacatccacctccc

SEQ ID NO: 3857304 - DNA, 25 bp, Homo sapien
caggctgtatcgcaatggcgcgatc

SEQ ID NO: 3857305 - DNA, 25 bp, Homo sapien
aggctgtatcgcaatggcgcgatct

SEQ ID NO: 3857306 - DNA, 25 bp, Homo sapien
tagcatttagccttaatctcaagag

SEQ ID NO: 3857307 - DNA, 25 bp, Homo sapien
tgtttaacacattctacctgacggg

SEQ ID NO: 3857308 - DNA, 25 bp, Homo sapien
cctggaaggctaagagatgtgctgt

SEQ ID NO: 3857309 - DNA, 25 bp, Homo sapien
ttcagtcggttaagagcctgagccc

SEQ ID NO: 3857310 - DNA, 25 bp, Homo sapien
aatcagagcacaagaagtaccagtc

SEQ ID NO: 3857311 - DNA, 25 bp, Homo sapien
catttgtgtaaccatgcagcatagg

SEQ ID NO: 3857312 - DNA, 25 bp, Homo sapien
taaaagaagttccatattcgacagc

SEQ ID NO: 3857313 - DNA, 25 bp, Homo sapien
gcagcataggcactgtgttacatca

SEQ ID NO: 3857314 - DNA, 25 bp, Homo sapien
gttgcccgacttcgagctgctcagt

SEQ ID NO: 3857315 - DNA, 25 bp, Homo sapien
gcgtttcgttttgaagccgctctaa

SEQ ID NO: 3857316 - DNA, 25 bp, Homo sapien
gccttggcttcctatcccatcggga

SEQ ID NO: 3857317 - DNA, 25 bp, Homo sapien
tgaggatgaacacttgtgtgccaac

SEQ ID NO: 3857318 - DNA, 25 bp, Homo sapien
taggcagctatcttacagacgcatg

SEQ ID NO: 3857319 - DNA, 25 bp, Homo sapien
gaaaactgaggcagccacctaaggt

SEQ ID NO: 3857320 - DNA, 25 bp, Homo sapien
tcactactgacctgttgtaggcagc

SEQ ID NO: 3857321 - DNA, 25 bp, Homo sapien
ttttctgatcggagcatcactactg

SEQ ID NO: 3857322 - DNA, 25 bp, Homo sapien
ctatgaggcaaagctcagctgccag

SEQ ID NO: 3857323 - DNA, 25 bp, Homo sapien
gcaggtcactgagcaaatgcttgac

SEQ ID NO: 3857324 - DNA, 25 bp, Homo sapien
ctgggttcaagcctggggcggcgca

SEQ ID NO: 3857325 - DNA, 25 bp, Homo sapien
gaacagagccttcttgcaggtcact

SEQ ID NO: 3857326 - DNA, 25 bp, Homo sapien
ccaatccgtttccccctgactggca

SEQ ID NO: 3857327 - DNA, 25 bp, Homo sapien
caatccgtttccccctgactggcac

SEQ ID NO: 3857328 - DNA, 25 bp, Homo sapien
tccaatccgtttccccctgactggc

SEQ ID NO: 3857329 - DNA, 25 bp, Homo sapien
ttctcatgtttcaccagcgaaatgg

SEQ ID NO: 3857330 - DNA, 25 bp, Homo sapien
cctgatcccggaatgtcacctgtct

SEQ ID NO: 3857331 - DNA, 25 bp, Homo sapien
cctgaccctgatcccggaatgtcac

SEQ ID NO: 3857332 - DNA, 25 bp, Homo sapien
catgtttcaccagcgaaatgggcat

SEQ ID NO: 3857333 - DNA, 25 bp, Homo sapien
gattccagaatggagggttcacccc

SEQ ID NO: 3857334 - DNA, 25 bp, Homo sapien
tcagcacagctgatgagggagttac

SEQ ID NO: 3857335 - DNA, 25 bp, Homo sapien
gacctgaaaccactggaggctgggt

SEQ ID NO: 3857336 - DNA, 25 bp, Homo sapien
tgagaggcacccatgggaacagaag

SEQ ID NO: 3857337 - DNA, 25 bp, Homo sapien
gccgagattgcgccatggcactcta

SEQ ID NO: 3857338 - DNA, 25 bp, Homo sapien
cctgggtgacagaatgagactccat

SEQ ID NO: 3857339 - DNA, 25 bp, Homo sapien
tagcctgggtgacagaatgagactc

SEQ ID NO: 3857340 - DNA, 25 bp, Homo sapien
ccgagattgcgccatggcactctag

SEQ ID NO: 3857341 - DNA, 25 bp, Homo sapien
cctcaggcaggatcattaggactgg

SEQ ID NO: 3857342 - DNA, 25 bp, Homo sapien
caggatcattaggactggatcagga

SEQ ID NO: 3857343 - DNA, 25 bp, Homo sapien
caggcaggatcattaggactggatc

SEQ ID NO: 3857344 - DNA, 25 bp, Homo sapien
gcaccagtggacaaactcaggcaca

SEQ ID NO: 3857345 - DNA, 25 bp, Homo sapien
taacagcggttctaaagctccagcc

SEQ ID NO: 3857346 - DNA, 25 bp, Homo sapien
gccatacaggcagggtagaatcaac

SEQ ID NO: 3857347 - DNA, 25 bp, Homo sapien
tagaatcaacgtgagaaaaccccaa

SEQ ID NO: 3857348 - DNA, 25 bp, Homo sapien
ggaaatctctgcttcaaatcaaagg

SEQ ID NO: 3857349 - DNA, 25 bp, Homo sapien
tagccatgaagattcttaaagagaa

SEQ ID NO: 3857350 - DNA, 25 bp, Homo sapien
agccatgaagattcttaaagagaag

SEQ ID NO: 3857351 - DNA, 25 bp, Homo sapien
gccatgaagattcttaaagagaagg

SEQ ID NO: 3857352 - DNA, 25 bp, Homo sapien
gatagccatgaagattcttaaagag

SEQ ID NO: 3857353 - DNA, 25 bp, Homo sapien
tgttcttattgcacatggctcagcc

SEQ ID NO: 3857354 - DNA, 25 bp, Homo sapien
tttgtccaaggtacgagaggaggcc

SEQ ID NO: 3857355 - DNA, 25 bp, Homo sapien
gaaactctgggagggtggttatcac

SEQ ID NO: 3857356 - DNA, 25 bp, Homo sapien
catctaccaagaccagatggtcggg

SEQ ID NO: 3857357 - DNA, 25 bp, Homo sapien
ttttcttcaggagtcgaggaggctg

SEQ ID NO: 3857358 - DNA, 25 bp, Homo sapien
actgactcggaggaagaactttctg

SEQ ID NO: 3857359 - DNA, 25 bp, Homo sapien
tttcttcaggagtcgaggaggctgc

SEQ ID NO: 3857360 - DNA, 25 bp, Homo sapien
ccggcaccactgactgactcggagg

SEQ ID NO: 3857361 - DNA, 25 bp, Homo sapien
ggaaaaaccagtggcaatgatggag

SEQ ID NO: 3857362 - DNA, 25 bp, Homo sapien
cttaggaaaaaccagtggcaatgat

SEQ ID NO: 3857363 - DNA, 25 bp, Homo sapien
aaccagtggcaatgatggagctgtg

SEQ ID NO: 3857364 - DNA, 25 bp, Homo sapien
aatgatggagctgtgccctgtggca

SEQ ID NO: 3857365 - DNA, 25 bp, Homo sapien
ctataaggcaaagcccactgaggga

SEQ ID NO: 3857366 - DNA, 25 bp, Homo sapien
tctagcaaaaacatcaccagggtac

SEQ ID NO: 3857367 - DNA, 25 bp, Homo sapien
gaaatggttaggtagatcctggccc

SEQ ID NO: 3857368 - DNA, 25 bp, Homo sapien
tgtgaaaagctctgatgcgactctc

SEQ ID NO: 3857369 - DNA, 25 bp, Homo sapien
gccttcgcgggttcacactatcatg

SEQ ID NO: 3857370 - DNA, 25 bp, Homo sapien
ctttcttcctcctatctttggccag

SEQ ID NO: 3857371 - DNA, 25 bp, Homo sapien
ctctggcttctcctgagaggtggct

SEQ ID NO: 3857372 - DNA, 25 bp, Homo sapien
ctatggagagttctctttcttcctc

SEQ ID NO: 3857373 - DNA, 25 bp, Homo sapien
ttcctcctatctttggccagggcct

SEQ ID NO: 3857374 - DNA, 25 bp, Homo sapien
tacattctactttcgttgccatggt

SEQ ID NO: 3857375 - DNA, 25 bp, Homo sapien
agaggcgatgcggagcctccgccag

SEQ ID NO: 3857376 - DNA, 25 bp, Homo sapien
tctgtatcctaggagagaggcgatg

SEQ ID NO: 3857377 - DNA, 25 bp, Homo sapien
cactgatatctgctgcgagttttac

SEQ ID NO: 3857378 - DNA, 25 bp, Homo sapien
tggctcagtgcatgtcaccaaaaat

SEQ ID NO: 3857379 - DNA, 25 bp, Homo sapien
ttggctcagtgcatgtcaccaaaaa

SEQ ID NO: 3857380 - DNA, 25 bp, Homo sapien
acagtccatcaccttggctcagtgc

SEQ ID NO: 3857381 - DNA, 25 bp, Homo sapien
gcggcaccggctcctctagcttatg

SEQ ID NO: 3857382 - DNA, 25 bp, Homo sapien
caggcagagtcagccatggatccag

SEQ ID NO: 3857383 - DNA, 25 bp, Homo sapien
tctagcttatgccacacaagtagcc

SEQ ID NO: 3857384 - DNA, 25 bp, Homo sapien
gagagtggcaacagttagctcggca

SEQ ID NO: 3857385 - DNA, 25 bp, Homo sapien
ccattcgccgggctgcagaaggagg

SEQ ID NO: 3857386 - DNA, 25 bp, Homo sapien
tctggcaaacgctgggaacagagcc

SEQ ID NO: 3857387 - DNA, 25 bp, Homo sapien
aggagggagcctgctaccagcaact

SEQ ID NO: 3857388 - DNA, 25 bp, Homo sapien
gagcctgctaccagcaactctcatt

SEQ ID NO: 3857389 - DNA, 25 bp, Homo sapien
caggctgccaggtgtgacggcattc

SEQ ID NO: 3857390 - DNA, 25 bp, Homo sapien
tcgtggctgcctgttcatcttgctc

SEQ ID NO: 3857391 - DNA, 25 bp, Homo sapien
cattcgagagagtgcctcagatccc

SEQ ID NO: 3857392 - DNA, 25 bp, Homo sapien
gcaaggccggatgcctgtggcttcc

SEQ ID NO: 3857393 - DNA, 25 bp, Homo sapien
aggcagtgtgcatatggggctctct

SEQ ID NO: 3857394 - DNA, 25 bp, Homo sapien
cagtgtgcatatggggctctcttgg

SEQ ID NO: 3857395 - DNA, 25 bp, Homo sapien
ttcccacatggttcttcctggtatc

SEQ ID NO: 3857396 - DNA, 25 bp, Homo sapien
ctattcccacatggttcttcctggt

SEQ ID NO: 3857397 - DNA, 25 bp, Homo sapien
cagcaacagtttcaagttcccactc

SEQ ID NO: 3857398 - DNA, 25 bp, Homo sapien
cagggcacggacaatagtctgctgt

SEQ ID NO: 3857399 - DNA, 25 bp, Homo sapien
acggacaatagtctgctgtgctgga

SEQ ID NO: 3857400 - DNA, 25 bp, Homo sapien
ggagaaagggccgtgctgactgatg

SEQ ID NO: 3857401 - DNA, 25 bp, Homo sapien
gggaggacagcatcgctagagggcg

SEQ ID NO: 3857402 - DNA, 25 bp, Homo sapien
agcatcgctagagggcggaaaccga

SEQ ID NO: 3857403 - DNA, 25 bp, Homo sapien
cgctagagggcggaaaccgaccttg

SEQ ID NO: 3857404 - DNA, 25 bp, Homo sapien
gacagcatcgctagagggcggaaac

SEQ ID NO: 3857405 - DNA, 25 bp, Homo sapien
gtagcgtgcccggtacagcaagcct

SEQ ID NO: 3857406 - DNA, 25 bp, Homo sapien
tatctgtgtcgccaaagtagcgtgc

SEQ ID NO: 3857407 - DNA, 25 bp, Homo sapien
tgtcgccaaagtagcgtgcccggta

SEQ ID NO: 3857408 - DNA, 25 bp, Homo sapien
ccaaagtagcgtgcccggtacagca

SEQ ID NO: 3857409 - DNA, 25 bp, Homo sapien
cattccgctcgactgttttgaggct

SEQ ID NO: 3857410 - DNA, 25 bp, Homo sapien
cctgtgtactcttcggagaaagtgt

SEQ ID NO: 3857411 - DNA, 25 bp, Homo sapien
cccacatagtagacgacacccaggt

SEQ ID NO: 3857412 - DNA, 25 bp, Homo sapien
gaaagtgtctcccacatagtagacg

SEQ ID NO: 3857413 - DNA, 25 bp, Homo sapien
tgagcatttctagtgggccagacat

SEQ ID NO: 3857414 - DNA, 25 bp, Homo sapien
cagaggttcttcgtcagggttggca

SEQ ID NO: 3857415 - DNA, 25 bp, Homo sapien
tgaagatgtgcacccactgtgtagc

SEQ ID NO: 3857416 - DNA, 25 bp, Homo sapien
taacggctcatgaaatgtcctcaag

SEQ ID NO: 3857417 - DNA, 25 bp, Homo sapien
agaatcaggatgaggataggcatca

SEQ ID NO: 3857418 - DNA, 25 bp, Homo sapien
gctgagagctgacacgagaatcagg

SEQ ID NO: 3857419 - DNA, 25 bp, Homo sapien
gctgacacgagaatcaggatgagga

SEQ ID NO: 3857420 - DNA, 25 bp, Homo sapien
cacgagaatcaggatgaggataggc

SEQ ID NO: 3857421 - DNA, 25 bp, Homo sapien
tcagcagaatggcaagggaggccca

SEQ ID NO: 3857422 - DNA, 25 bp, Homo sapien
ggatttggtgcccttcccgcgctgt

SEQ ID NO: 3857423 - DNA, 25 bp, Homo sapien
cccgccggcaatgtggagcatggct

SEQ ID NO: 3857424 - DNA, 25 bp, Homo sapien
tgggagcctcacactcaaacctggc

SEQ ID NO: 3857425 - DNA, 25 bp, Homo sapien
ctttgctggtaggtatagcgcatgc

SEQ ID NO: 3857426 - DNA, 25 bp, Homo sapien
gcctttgctggtaggtatagcgcat

SEQ ID NO: 3857427 - DNA, 25 bp, Homo sapien
ctgcctttgctggtaggtatagcgc

SEQ ID NO: 3857428 - DNA, 25 bp, Homo sapien
cctttgctggtaggtatagcgcatg

SEQ ID NO: 3857429 - DNA, 25 bp, Homo sapien
gcctggctcttgtcatcgccgaact

SEQ ID NO: 3857430 - DNA, 25 bp, Homo sapien
ggcctcaaagccacggtggaaatcc

SEQ ID NO: 3857431 - DNA, 25 bp, Homo sapien
cggcctcaaagccacggtggaaatc

SEQ ID NO: 3857432 - DNA, 25 bp, Homo sapien
ttgtcatcgccgaactggtcatact

SEQ ID NO: 3857433 - DNA, 25 bp, Homo sapien
cccaggatctcatagtaatctttac

SEQ ID NO: 3857434 - DNA, 25 bp, Homo sapien
cccccaggatctcatagtaatcttt

SEQ ID NO: 3857435 - DNA, 25 bp, Homo sapien
cacccccaggatctcatagtaatct

SEQ ID NO: 3857436 - DNA, 25 bp, Homo sapien
ccccaggatctcatagtaatcttta

SEQ ID NO: 3857437 - DNA, 25 bp, Homo sapien
tgaggggggcgatgaacaggccgtg

SEQ ID NO: 3857438 - DNA, 25 bp, Homo sapien
tgctctacatgggtctgtgtgaggg

SEQ ID NO: 3857439 - DNA, 25 bp, Homo sapien
aacaggccgtgtggggcgcacagct

SEQ ID NO: 3857440 - DNA, 25 bp, Homo sapien
gagaccatggtacggggtgctctac

SEQ ID NO: 3857441 - DNA, 25 bp, Homo sapien
tacaatggaccttgccgactcagtg

SEQ ID NO: 3857442 - DNA, 25 bp, Homo sapien
caatctgagtcttgagtgggtaaca

SEQ ID NO: 3857443 - DNA, 25 bp, Homo sapien
gactcagtgaagtacagatctcgcc

SEQ ID NO: 3857444 - DNA, 25 bp, Homo sapien
ggtgactgttcaccgcaagcacagg

SEQ ID NO: 3857445 - DNA, 25 bp, Homo sapien
tggtctctggcctggtagcgagcta

SEQ ID NO: 3857446 - DNA, 25 bp, Homo sapien
agctgggaacgtctaagcctgagga

SEQ ID NO: 3857447 - DNA, 25 bp, Homo sapien
ccacacaggctctgatctaaaaggg

SEQ ID NO: 3857448 - DNA, 25 bp, Homo sapien
aagctccatctctattgacaaacag

SEQ ID NO: 3857449 - DNA, 25 bp, Homo sapien
cagtgtagcctttggtgctctctcc

SEQ ID NO: 3857450 - DNA, 25 bp, Homo sapien
ttctgcagtgtagcctttggtgctc

SEQ ID NO: 3857451 - DNA, 25 bp, Homo sapien
gtgtagcctttggtgctctctcctc

SEQ ID NO: 3857452 - DNA, 25 bp, Homo sapien
tgcagtgtagcctttggtgctctct

SEQ ID NO: 3857453 - DNA, 25 bp, Homo sapien
catggtctatactttcccacagtga

SEQ ID NO: 3857454 - DNA, 25 bp, Homo sapien
agtgcctgcggcatcacacagggct

SEQ ID NO: 3857455 - DNA, 25 bp, Homo sapien
tgccattgtgcctgcagcaactttc

SEQ ID NO: 3857456 - DNA, 25 bp, Homo sapien
gtccttttcccatgcagtgcctgcg

SEQ ID NO: 3857457 - DNA, 25 bp, Homo sapien
gaaagttcagcagtccaggctacct

SEQ ID NO: 3857458 - DNA, 25 bp, Homo sapien
ttctcaatctcatcaggcgggcagg

SEQ ID NO: 3857459 - DNA, 25 bp, Homo sapien
caaagatcaacctgcaagagtccgg

SEQ ID NO: 3857460 - DNA, 25 bp, Homo sapien
ggtgtcctggcaaatacagcccgaa

SEQ ID NO: 3857461 - DNA, 25 bp, Homo sapien
acagcgctcagcttcatccttgttg

SEQ ID NO: 3857462 - DNA, 25 bp, Homo sapien
gagggcgatgctgatacagcgctca

SEQ ID NO: 3857463 - DNA, 25 bp, Homo sapien
gaactcgcggcgtcggatacagccg

SEQ ID NO: 3857464 - DNA, 25 bp, Homo sapien
ggagcgcccggtcgggctggttgct

SEQ ID NO: 3857465 - DNA, 25 bp, Homo sapien
cagggagggggaggccgggcgagcg

SEQ ID NO: 3857466 - DNA, 25 bp, Homo sapien
gggcagccgggcgcggagtgatgac

SEQ ID NO: 3857467 - DNA, 25 bp, Homo sapien
ggcagccgggcgcggagtgatgaca

SEQ ID NO: 3857468 - DNA, 25 bp, Homo sapien
gcagccgggcgcggagtgatgacat

SEQ ID NO: 3857469 - DNA, 25 bp, Homo sapien
gggtggaagtgctaccgtatgtctt

SEQ ID NO: 3857470 - DNA, 25 bp, Homo sapien
tgtcttctaagaaagggacggctgg

SEQ ID NO: 3857471 - DNA, 25 bp, Homo sapien
cctcctttcccgagttttgagcgag

SEQ ID NO: 3857472 - DNA, 25 bp, Homo sapien
ctttcccgagttttgagcgagggtg

SEQ ID NO: 3857473 - DNA, 25 bp, Homo sapien
tactaaaatcgtctcaggctgctca

SEQ ID NO: 3857474 - DNA, 25 bp, Homo sapien
ttgctgtgtcgcctcaaattcctgg

SEQ ID NO: 3857475 - DNA, 25 bp, Homo sapien
gccttaagagtccaacagggttata

SEQ ID NO: 3857476 - DNA, 25 bp, Homo sapien
ccgaagcagaaatcaaccctgtgtg

SEQ ID NO: 3857477 - DNA, 25 bp, Homo sapien
cactggagtcatcttagggaggctg

SEQ ID NO: 3857478 - DNA, 25 bp, Homo sapien
cgatttgagaactggatgcttccca

SEQ ID NO: 3857479 - DNA, 25 bp, Homo sapien
ggcgcaggcttctcacactagcgta

SEQ ID NO: 3857480 - DNA, 25 bp, Homo sapien
tgcacagagccatgaagcaactact

SEQ ID NO: 3857481 - DNA, 25 bp, Homo sapien
gaggcgagtgaaacccatgtctttg

SEQ ID NO: 3857482 - DNA, 25 bp, Homo sapien
gtttcctgtgcacatttccacatgg

SEQ ID NO: 3857483 - DNA, 25 bp, Homo sapien
tcatcagccgttgcttcatgatgga

SEQ ID NO: 3857484 - DNA, 25 bp, Homo sapien
tgggtaaagcgaagtcccaggcagt

SEQ ID NO: 3857485 - DNA, 25 bp, Homo sapien
taggatcatacctcactacagtctc

SEQ ID NO: 3857486 - DNA, 25 bp, Homo sapien
gcgctaggatcatacctcactacag

SEQ ID NO: 3857487 - DNA, 25 bp, Homo sapien
ggagtgcagcgctaggatcatacct

SEQ ID NO: 3857488 - DNA, 25 bp, Homo sapien
gcagcgctaggatcatacctcacta

SEQ ID NO: 3857489 - DNA, 25 bp, Homo sapien
atcacacacgtggtctgagagctcc

SEQ ID NO: 3857490 - DNA, 25 bp, Homo sapien
tgagagctccactttagccactgtc

SEQ ID NO: 3857491 - DNA, 25 bp, Homo sapien
aaacaccacatcacacacgtggtct

SEQ ID NO: 3857492 - DNA, 25 bp, Homo sapien
gagctccactttagccactgtcctg

SEQ ID NO: 3857493 - DNA, 25 bp, Homo sapien
cttgatatttcaagtactcatcttc

SEQ ID NO: 3857494 - DNA, 25 bp, Homo sapien
ttcttccattctctcagggcacagc

SEQ ID NO: 3857495 - DNA, 25 bp, Homo sapien
tctccccatgaagatggtgcccttt

SEQ ID NO: 3857496 - DNA, 25 bp, Homo sapien
cagggcacagccttctgcaattgtc

SEQ ID NO: 3857497 - DNA, 25 bp, Homo sapien
cggacaagggactatctttttgaag

SEQ ID NO: 3857498 - DNA, 25 bp, Homo sapien
tcctcaacttctacgttatatagag

SEQ ID NO: 3857499 - DNA, 25 bp, Homo sapien
tatatagagccgcactcatccctca

SEQ ID NO: 3857500 - DNA, 25 bp, Homo sapien
ctgtgcccggacaagggactatctt

SEQ ID NO: 3857501 - DNA, 25 bp, Homo sapien
tacaccgaggacgtaactgaaccca

SEQ ID NO: 3857502 - DNA, 25 bp, Homo sapien
caggtttactgcatctgtactatcc

SEQ ID NO: 3857503 - DNA, 25 bp, Homo sapien
tcctgaggtgctttacagtggagct

SEQ ID NO: 3857504 - DNA, 25 bp, Homo sapien
cagtggagctttattgtacctggat

SEQ ID NO: 3857505 - DNA, 25 bp, Homo sapien
catattgcagtatacagtgttcttc

SEQ ID NO: 3857506 - DNA, 25 bp, Homo sapien
tatgcctaaagactggtttgtaacc

SEQ ID NO: 3857507 - DNA, 25 bp, Homo sapien
ttgtaacctctaaaatagccaagga

SEQ ID NO: 3857508 - DNA, 25 bp, Homo sapien
tgccagggcctagaaggtgccaatt

SEQ ID NO: 3857509 - DNA, 25 bp, Homo sapien
tgaggtgtaattgacaaatacaaac

SEQ ID NO: 3857510 - DNA, 25 bp, Homo sapien
tatactgtgaaataattaccacaat

SEQ ID NO: 3857511 - DNA, 25 bp, Homo sapien
tgtaattgacaaatacaaactgtat

SEQ ID NO: 3857512 - DNA, 25 bp, Homo sapien
taacacttccatcacttcaggccag

SEQ ID NO: 3857513 - DNA, 25 bp, Homo sapien
acgttgcttgtacaaactgtaactg

SEQ ID NO: 3857514 - DNA, 25 bp, Homo sapien
cgttgcttgtacaaactgtaactga

SEQ ID NO: 3857515 - DNA, 25 bp, Homo sapien
tcacgttgcttgtacaaactgtaac

SEQ ID NO: 3857516 - DNA, 25 bp, Homo sapien
cacgttgcttgtacaaactgtaact

SEQ ID NO: 3857517 - DNA, 25 bp, Homo sapien
ctcaatgcagtgtccacatcattaa

SEQ ID NO: 3857518 - DNA, 25 bp, Homo sapien
cagtgatatacaggggaacggtgtc

SEQ ID NO: 3857519 - DNA, 25 bp, Homo sapien
aagtcagtgatatacaggggaacgg

SEQ ID NO: 3857520 - DNA, 25 bp, Homo sapien
aggcttaagcgaattgaagaatcac

SEQ ID NO: 3857521 - DNA, 25 bp, Homo sapien
gctttttgaggcttaagcgaattga

SEQ ID NO: 3857522 - DNA, 25 bp, Homo sapien
tgcgcccagcctctcctgcttagtt

SEQ ID NO: 3857523 - DNA, 25 bp, Homo sapien
ccagcctctcctgcttagttttaaa

SEQ ID NO: 3857524 - DNA, 25 bp, Homo sapien
gcccagcctctcctgcttagtttta

SEQ ID NO: 3857525 - DNA, 25 bp, Homo sapien
gcctctcctgcttagttttaaaaca

SEQ ID NO: 3857526 - DNA, 25 bp, Homo sapien
agtaggctctcttatctggaatgtg

SEQ ID NO: 3857527 - DNA, 25 bp, Homo sapien
tgaagtaggctctcttatctggaat

SEQ ID NO: 3857528 - DNA, 25 bp, Homo sapien
gtaggctctcttatctggaatgtgt

SEQ ID NO: 3857529 - DNA, 25 bp, Homo sapien
gaagtaggctctcttatctggaatg

SEQ ID NO: 3857530 - DNA, 25 bp, Homo sapien
ctagactattacagacttaagaaat

SEQ ID NO: 3857531 - DNA, 25 bp, Homo sapien
tctcttactagactattacagactt

SEQ ID NO: 3857532 - DNA, 25 bp, Homo sapien
agaattacagagttctttgcataca

SEQ ID NO: 3857533 - DNA, 25 bp, Homo sapien
tactagactattacagacttaagaa

SEQ ID NO: 3857534 - DNA, 25 bp, Homo sapien
ggagcattgcatctctcgagcagtg

SEQ ID NO: 3857535 - DNA, 25 bp, Homo sapien
tcgagcagtggctcataagcctagc

SEQ ID NO: 3857536 - DNA, 25 bp, Homo sapien
tagaggatcaccactgtgaattaca

SEQ ID NO: 3857537 - DNA, 25 bp, Homo sapien
gagtaatttttgtcaagcacggcag

SEQ ID NO: 3857538 - DNA, 25 bp, Homo sapien
cttgagctgcctctgcatggcggtc

SEQ ID NO: 3857539 - DNA, 25 bp, Homo sapien
ctgcctctgcatggcggtcagcttc

SEQ ID NO: 3857540 - DNA, 25 bp, Homo sapien
cctctgcatggcggtcagcttcttg

SEQ ID NO: 3857541 - DNA, 25 bp, Homo sapien
ttctttgaagtgcttcttgagctgc

SEQ ID NO: 3857542 - DNA, 25 bp, Homo sapien
gcctctcagtaattctcccatccac

SEQ ID NO: 3857543 - DNA, 25 bp, Homo sapien
ctcccatccacagggtcatggcgtt

SEQ ID NO: 3857544 - DNA, 25 bp, Homo sapien
accaaactgcctctcagtaattctc

SEQ ID NO: 3857545 - DNA, 25 bp, Homo sapien
catccacagggtcatggcgttcaaa

SEQ ID NO: 3857546 - DNA, 25 bp, Homo sapien
tttctcaaatggatacaagctgttg

SEQ ID NO: 3857547 - DNA, 25 bp, Homo sapien
tcgttttggaaggacagatggtcta

SEQ ID NO: 3857548 - DNA, 25 bp, Homo sapien
ccttctgcagccattgccactttct

SEQ ID NO: 3857549 - DNA, 25 bp, Homo sapien
tggctttctgttcacactgcgcctc

SEQ ID NO: 3857550 - DNA, 25 bp, Homo sapien
tgatttctataaggatagtcttgag

SEQ ID NO: 3857551 - DNA, 25 bp, Homo sapien
aggatagtcttgagaatgccattca

SEQ ID NO: 3857552 - DNA, 25 bp, Homo sapien
ggatagtcttgagaatgccattcat

SEQ ID NO: 3857553 - DNA, 25 bp, Homo sapien
ctcagaaacatgtagcttaaggaag

SEQ ID NO: 3857554 - DNA, 25 bp, Homo sapien
gcttaaggaagctttaatacacaaa

SEQ ID NO: 3857555 - DNA, 25 bp, Homo sapien
tgcaataaagattgggagactgagg

SEQ ID NO: 3857556 - DNA, 25 bp, Homo sapien
gctagagattggaacacaatatata

SEQ ID NO: 3857557 - DNA, 25 bp, Homo sapien
gaccatagatgccacagagagctgg

SEQ ID NO: 3857558 - DNA, 25 bp, Homo sapien
gatgaatcacgtagttaggcggcaa

SEQ ID NO: 3857559 - DNA, 25 bp, Homo sapien
gcgggcccaacactctcgtgaaagt

SEQ ID NO: 3857560 - DNA, 25 bp, Homo sapien
gaaatcaatagtggtgcaaaggctc

SEQ ID NO: 3857561 - DNA, 25 bp, Homo sapien
tgcctggccgaagatattaacatta

SEQ ID NO: 3857562 - DNA, 25 bp, Homo sapien
gcctggccgaagatattaacattag

SEQ ID NO: 3857563 - DNA, 25 bp, Homo sapien
cctggccgaagatattaacattagt

SEQ ID NO: 3857564 - DNA, 25 bp, Homo sapien
caataccagcagtttcctgtttttt

SEQ ID NO: 3857565 - DNA, 25 bp, Homo sapien
tgagacccatccttctgatctctgg

SEQ ID NO: 3857566 - DNA, 25 bp, Homo sapien
acccatccttctgatctctggccca

SEQ ID NO: 3857567 - DNA, 25 bp, Homo sapien
gctgagacccatccttctgatctct

SEQ ID NO: 3857568 - DNA, 25 bp, Homo sapien
gagacccatccttctgatctctggc

SEQ ID NO: 3857569 - DNA, 25 bp, Homo sapien
tcaaagtatgaattcaaaaggctgc

SEQ ID NO: 3857570 - DNA, 25 bp, Homo sapien
tcctccaaggctgggtagcaagcca

SEQ ID NO: 3857571 - DNA, 25 bp, Homo sapien
tgtgtggtagattgatacaaaacag

SEQ ID NO: 3857572 - DNA, 25 bp, Homo sapien
tctgatgtaatttatgaccctttaa

SEQ ID NO: 3857573 - DNA, 25 bp, Homo sapien
tcccagagtttaccgagtgctctaa

SEQ ID NO: 3857574 - DNA, 25 bp, Homo sapien
cagtcccagagtttaccgagtgctc

SEQ ID NO: 3857575 - DNA, 25 bp, Homo sapien
gagtttaccgagtgctctaatgcct

SEQ ID NO: 3857576 - DNA, 25 bp, Homo sapien
ttaccgagtgctctaatgcctcttc

SEQ ID NO: 3857577 - DNA, 25 bp, Homo sapien
cacacactgtgtctataacttttgc

SEQ ID NO: 3857578 - DNA, 25 bp, Homo sapien
tcccagctaggagattctttcttac

SEQ ID NO: 3857579 - DNA, 25 bp, Homo sapien
ttttcctacttcataatttcccagc

SEQ ID NO: 3857580 - DNA, 25 bp, Homo sapien
gcagtttgagatataacagcaaaat

SEQ ID NO: 3857581 - DNA, 25 bp, Homo sapien
cttggtcagcctagtctcatactcc

SEQ ID NO: 3857582 - DNA, 25 bp, Homo sapien
tcttggtcagcctagtctcatactc

SEQ ID NO: 3857583 - DNA, 25 bp, Homo sapien
atcttggtcagcctagtctcatact

SEQ ID NO: 3857584 - DNA, 25 bp, Homo sapien
gccatcgtgccgggccaaaatgtaa

SEQ ID NO: 3857585 - DNA, 25 bp, Homo sapien
catgggcctctacattcggctaatt

SEQ ID NO: 3857586 - DNA, 25 bp, Homo sapien
taggcatgggcctctacattcggct

SEQ ID NO: 3857587 - DNA, 25 bp, Homo sapien
catcgtgccgggccaaaatgtaaca

SEQ ID NO: 3857588 - DNA, 25 bp, Homo sapien
gtttaggtagtatcttgcaagcaca

SEQ ID NO: 3857589 - DNA, 25 bp, Homo sapien
ttgactgacatcctacttgctacag

SEQ ID NO: 3857590 - DNA, 25 bp, Homo sapien
tagatttggcacctatctccaagga

SEQ ID NO: 3857591 - DNA, 25 bp, Homo sapien
caatagttctcagtagccttagacg

SEQ ID NO: 3857592 - DNA, 25 bp, Homo sapien
gagactagatttttgtctccagaca

SEQ ID NO: 3857593 - DNA, 25 bp, Homo sapien
agaggttgggaaacaccagtgtaag

SEQ ID NO: 3857594 - DNA, 25 bp, Homo sapien
gctagaatagcatgatggtctaaac

SEQ ID NO: 3857595 - DNA, 25 bp, Homo sapien
gctgatggagtaggactgtctcaaa

SEQ ID NO: 3857596 - DNA, 25 bp, Homo sapien
catcatgctgcagtttacgctgaaa

SEQ ID NO: 3857597 - DNA, 25 bp, Homo sapien
gacgatctctgtggcgcatacccat

SEQ ID NO: 3857598 - DNA, 25 bp, Homo sapien
tgaacacaagccagacttgagggtg

SEQ ID NO: 3857599 - DNA, 25 bp, Homo sapien
tgttgccagtagttggacgatctct

SEQ ID NO: 3857600 - DNA, 25 bp, Homo sapien
tcaaatcaaacatcttgaaggcaat

SEQ ID NO: 3857601 - DNA, 25 bp, Homo sapien
atctccattcaaatcaaacatcttg

SEQ ID NO: 3857602 - DNA, 25 bp, Homo sapien
caaacatcttgaaggcaatttcaaa

SEQ ID NO: 3857603 - DNA, 25 bp, Homo sapien
cattcaaatcaaacatcttgaaggc

SEQ ID NO: 3857604 - DNA, 25 bp, Homo sapien
gtttcaacatgctttgccttaaatg

SEQ ID NO: 3857605 - DNA, 25 bp, Homo sapien
tttttgtttcaacatgctttgcctt

SEQ ID NO: 3857606 - DNA, 25 bp, Homo sapien
tcaacatgctttgccttaaatgatt

SEQ ID NO: 3857607 - DNA, 25 bp, Homo sapien
ttgtttcaacatgctttgccttaaa

SEQ ID NO: 3857608 - DNA, 25 bp, Homo sapien
ctttgttgtaagtgcagtcaggagt

SEQ ID NO: 3857609 - DNA, 25 bp, Homo sapien
tttgttgtaagtgcagtcaggagtt

SEQ ID NO: 3857610 - DNA, 25 bp, Homo sapien
tctttgttgtaagtgcagtcaggag

SEQ ID NO: 3857611 - DNA, 25 bp, Homo sapien
ttgttgtaagtgcagtcaggagttc

SEQ ID NO: 3857612 - DNA, 25 bp, Homo sapien
gaatgctaggctacttagagtgaag

SEQ ID NO: 3857613 - DNA, 25 bp, Homo sapien
cagcaagtgttgaaactgattagaa

SEQ ID NO: 3857614 - DNA, 25 bp, Homo sapien
caataagaccctacacaaagtttgt

SEQ ID NO: 3857615 - DNA, 25 bp, Homo sapien
actttctacacgatttccaaaatgg

SEQ ID NO: 3857616 - DNA, 25 bp, Homo sapien
cctagcggcaatctgaacatgggaa

SEQ ID NO: 3857617 - DNA, 25 bp, Homo sapien
gagtttatgaccagcctttccgtag

SEQ ID NO: 3857618 - DNA, 25 bp, Homo sapien
gcaaggatgcttgaactgcccacta

SEQ ID NO: 3857619 - DNA, 25 bp, Homo sapien
tattgggtgccctctcgcagatgac

SEQ ID NO: 3857620 - DNA, 25 bp, Homo sapien
aagaacagttgtgaggaaaatgtag

SEQ ID NO: 3857621 - DNA, 25 bp, Homo sapien
aaaaggatatgagcccacattctcc

SEQ ID NO: 3857622 - DNA, 25 bp, Homo sapien
cattctccaagggtgtaaaatatac

SEQ ID NO: 3857623 - DNA, 25 bp, Homo sapien
gaaaatgtagtctgaaaaggatatg

SEQ ID NO: 3857624 - DNA, 25 bp, Homo sapien
gcacaccaccacgcccatctaattt

SEQ ID NO: 3857625 - DNA, 25 bp, Homo sapien
gagtagctgagattacagatgcaca

SEQ ID NO: 3857626 - DNA, 25 bp, Homo sapien
tcccgggttcaagcctcagcctccc

SEQ ID NO: 3857627 - DNA, 25 bp, Homo sapien
ttgaactcctggcctcaggtaatcc

SEQ ID NO: 3857628 - DNA, 25 bp, Homo sapien
atctcctaatctcatgatctgccca

SEQ ID NO: 3857629 - DNA, 25 bp, Homo sapien
gcctcccaggttcaagcaattcccc

SEQ ID NO: 3857630 - DNA, 25 bp, Homo sapien
acaatctctgcttactgcaatctct

SEQ ID NO: 3857631 - DNA, 25 bp, Homo sapien
gatctgcccaccttggcctctcaaa

SEQ ID NO: 3857632 - DNA, 25 bp, Homo sapien
tgtcataggtcgtcactcaagtctc

SEQ ID NO: 3857633 - DNA, 25 bp, Homo sapien
taatgtggtaactctcgaaatcgca

SEQ ID NO: 3857634 - DNA, 25 bp, Homo sapien
tactctccggatcttttcagactgg

SEQ ID NO: 3857635 - DNA, 25 bp, Homo sapien
tataatgtccgtgcctcctcaagga

SEQ ID NO: 3857636 - DNA, 25 bp, Homo sapien
agtagtttcacaactgctaatccca

SEQ ID NO: 3857637 - DNA, 25 bp, Homo sapien
actagtatatactttggtgtcctgc

SEQ ID NO: 3857638 - DNA, 25 bp, Homo sapien
gaaacaatttggtcttatccctcac

SEQ ID NO: 3857639 - DNA, 25 bp, Homo sapien
catatctatgtcatctagagtccaa

SEQ ID NO: 3857640 - DNA, 25 bp, Homo sapien
agttacttgtatgttttcagaggca

SEQ ID NO: 3857641 - DNA, 25 bp, Homo sapien
catgctcttgttaaagagtggttca

SEQ ID NO: 3857642 - DNA, 25 bp, Homo sapien
aaggtctacattgttcttccatgct

SEQ ID NO: 3857643 - DNA, 25 bp, Homo sapien
tctatatgtcgttttgtgatgtgct

SEQ ID NO: 3857644 - DNA, 25 bp, Homo sapien
ggtagtaatgttctctcactgcccc

SEQ ID NO: 3857645 - DNA, 25 bp, Homo sapien
cactgccccagaagtagttatttac

SEQ ID NO: 3857646 - DNA, 25 bp, Homo sapien
tgatatggaggcatattccaaggag

SEQ ID NO: 3857647 - DNA, 25 bp, Homo sapien
gaatataatcttatcagactggtag

SEQ ID NO: 3857648 - DNA, 25 bp, Homo sapien
tcccagactttccacaggcaataga

SEQ ID NO: 3857649 - DNA, 25 bp, Homo sapien
caaactttagtagtggtggaactca

SEQ ID NO: 3857650 - DNA, 25 bp, Homo sapien
gagacattatggatactcctcacag

SEQ ID NO: 3857651 - DNA, 25 bp, Homo sapien
tagcatgcaaagaacaagtcactgc

SEQ ID NO: 3857652 - DNA, 25 bp, Homo sapien
gaagatctccttggcccgtctgtaa

SEQ ID NO: 3857653 - DNA, 25 bp, Homo sapien
tccttgaagatctccttggcccgtc

SEQ ID NO: 3857654 - DNA, 25 bp, Homo sapien
ccttggcccgtctgtaagtatatat

SEQ ID NO: 3857655 - DNA, 25 bp, Homo sapien
tctccttggcccgtctgtaagtata

SEQ ID NO: 3857656 - DNA, 25 bp, Homo sapien
taagatagtggttgtgtgcactaaa

SEQ ID NO: 3857657 - DNA, 25 bp, Homo sapien
tctcaatccgtaaaatgatgataaa

SEQ ID NO: 3857658 - DNA, 25 bp, Homo sapien
tgagctcaagtagcctcctaaagca

SEQ ID NO: 3857659 - DNA, 25 bp, Homo sapien
gagtaattatgtataagcctggaac

SEQ ID NO: 3857660 - DNA, 25 bp, Homo sapien
ttaaccaagaatttccacttgagtg

SEQ ID NO: 3857661 - DNA, 25 bp, Homo sapien
ccaagaatttccacttgagtggttt

SEQ ID NO: 3857662 - DNA, 25 bp, Homo sapien
taaccaagaatttccacttgagtgg

SEQ ID NO: 3857663 - DNA, 25 bp, Homo sapien
aatttccacttgagtggtttcaggt

SEQ ID NO: 3857664 - DNA, 25 bp, Homo sapien
gagaaagttgtctattacatgcaat

SEQ ID NO: 3857665 - DNA, 25 bp, Homo sapien
tccttgcttaaggaacaatttcatc

SEQ ID NO: 3857666 - DNA, 25 bp, Homo sapien
gggactgaatccaacgttgcggaaa

SEQ ID NO: 3857667 - DNA, 25 bp, Homo sapien
ctatagcttttagaagacataaggg

SEQ ID NO: 3857668 - DNA, 25 bp, Homo sapien
gcatctggaggttccattattcagg

SEQ ID NO: 3857669 - DNA, 25 bp, Homo sapien
aatgggctctggaaaaagattcaac

SEQ ID NO: 3857670 - DNA, 25 bp, Homo sapien
tatttgtcaatatcagttgcaccac

SEQ ID NO: 3857671 - DNA, 25 bp, Homo sapien
gcaatagactatgcaagtgccaata

SEQ ID NO: 3857672 - DNA, 25 bp, Homo sapien
tgttcattgtgctttgtagaaccat

SEQ ID NO: 3857673 - DNA, 25 bp, Homo sapien
tctttctgaccctgtgtaatatttt

SEQ ID NO: 3857674 - DNA, 25 bp, Homo sapien
agccactccatgattgtccttctga

SEQ ID NO: 3857675 - DNA, 25 bp, Homo sapien
tccagccactccatgattgtccttc

SEQ ID NO: 3857676 - DNA, 25 bp, Homo sapien
ccatcaaagcgttttattatatatt

SEQ ID NO: 3857677 - DNA, 25 bp, Homo sapien
attatatattgatccagacccaagt

SEQ ID NO: 3857678 - DNA, 25 bp, Homo sapien
ttccatcaaagcgttttattatata

SEQ ID NO: 3857679 - DNA, 25 bp, Homo sapien
ctttccatcaaagcgttttattata

SEQ ID NO: 3857680 - DNA, 25 bp, Homo sapien
tcttctggtgtcataaacacttctg

SEQ ID NO: 3857681 - DNA, 25 bp, Homo sapien
ttatggatcgcacaaaatcttctgg

SEQ ID NO: 3857682 - DNA, 25 bp, Homo sapien
cactgatgactttcaaggtggcaaa

SEQ ID NO: 3857683 - DNA, 25 bp, Homo sapien
ggagtaggctcgaatcctattctca

SEQ ID NO: 3857684 - DNA, 25 bp, Homo sapien
acatcacaggaccagaccagaggga

SEQ ID NO: 3857685 - DNA, 25 bp, Homo sapien
tgcggtggaacggtttctcctcaaa

SEQ ID NO: 3857686 - DNA, 25 bp, Homo sapien
tggaacatgaccgactaagctctgc

SEQ ID NO: 3857687 - DNA, 25 bp, Homo sapien
tcctgtcagatctgcggcaacatta

SEQ ID NO: 3857688 - DNA, 25 bp, Homo sapien
gaacagggaaaagatagctcttcct

SEQ ID NO: 3857689 - DNA, 25 bp, Homo sapien
gaagtatgagatatgctcatctgct

SEQ ID NO: 3857690 - DNA, 25 bp, Homo sapien
ctggcacagagtaaagttgtgcttt

SEQ ID NO: 3857691 - DNA, 25 bp, Homo sapien
tattttacgaaatggaaagtgtgac

SEQ ID NO: 3857692 - DNA, 25 bp, Homo sapien
ttctgtctctgaatccagaacgttt

SEQ ID NO: 3857693 - DNA, 25 bp, Homo sapien
ggtgaggggcaagatctgcagtctt

SEQ ID NO: 3857694 - DNA, 25 bp, Homo sapien
tctgaatccagaacgtttcttcttt

SEQ ID NO: 3857695 - DNA, 25 bp, Homo sapien
tcatggttacaaacatccccttcat

SEQ ID NO: 3857696 - DNA, 25 bp, Homo sapien
tagttgaagccattgctgcaatgat

SEQ ID NO: 3857697 - DNA, 25 bp, Homo sapien
tggagcaaacgataatagatctgac

SEQ ID NO: 3857698 - DNA, 25 bp, Homo sapien
tagatctgacttcctaccagggcaa

SEQ ID NO: 3857699 - DNA, 25 bp, Homo sapien
aagaagacttttgcttacagccata

SEQ ID NO: 3857700 - DNA, 25 bp, Homo sapien
tagggctaagatagctctagaggct

SEQ ID NO: 3857701 - DNA, 25 bp, Homo sapien
tcaagctctaccaagtcagactaga

SEQ ID NO: 3857702 - DNA, 25 bp, Homo sapien
gatcatgctatattaatagggctaa

SEQ ID NO: 3857703 - DNA, 25 bp, Homo sapien
cagactagaggaacctcactgaaca

SEQ ID NO: 3857704 - DNA, 25 bp, Homo sapien
gcacagtgtttcctaagtattgcct

SEQ ID NO: 3857705 - DNA, 25 bp, Homo sapien
gccttagcatgttgaattctttgaa

SEQ ID NO: 3857706 - DNA, 25 bp, Homo sapien
caaatgatccgagcaagaaattctg

SEQ ID NO: 3857707 - DNA, 25 bp, Homo sapien
tttaaaatgttcagcagaggagaca

SEQ ID NO: 3857708 - DNA, 25 bp, Homo sapien
ttgcagttactgcagatgctcccag

SEQ ID NO: 3857709 - DNA, 25 bp, Homo sapien
tgatcctccatggtaccatcgagaa

SEQ ID NO: 3857710 - DNA, 25 bp, Homo sapien
gatctggatgggctgtgatcctcca

SEQ ID NO: 3857711 - DNA, 25 bp, Homo sapien
catcattagtcttcgccggatctgg

SEQ ID NO: 3857712 - DNA, 25 bp, Homo sapien
aaagcagaaagtgagttcagacgaa

SEQ ID NO: 3857713 - DNA, 25 bp, Homo sapien
agcagaaagtgagttcagacgaaac

SEQ ID NO: 3857714 - DNA, 25 bp, Homo sapien
ctgccaaagcagaaagtgagttcag

SEQ ID NO: 3857715 - DNA, 25 bp, Homo sapien
cagaaagtgagttcagacgaaacat

SEQ ID NO: 3857716 - DNA, 25 bp, Homo sapien
acagggtatcgctctgttgcctggg

SEQ ID NO: 3857717 - DNA, 25 bp, Homo sapien
ctggagtgcaatggcatggtcatag

SEQ ID NO: 3857718 - DNA, 25 bp, Homo sapien
gctatgttgcttaagctagtctcga

SEQ ID NO: 3857719 - DNA, 25 bp, Homo sapien
tgagctcaagccacactcccacctt

SEQ ID NO: 3857720 - DNA, 25 bp, Homo sapien
cctggcctttgtgttaacacaaagc

SEQ ID NO: 3857721 - DNA, 25 bp, Homo sapien
tggcctttgtgttaacacaaagcat

SEQ ID NO: 3857722 - DNA, 25 bp, Homo sapien
ctggcctttgtgttaacacaaagca

SEQ ID NO: 3857723 - DNA, 25 bp, Homo sapien
agccaccatgcctggagtaatattt

SEQ ID NO: 3857724 - DNA, 25 bp, Homo sapien
gccaccatgcctggagtaatatttt

SEQ ID NO: 3857725 - DNA, 25 bp, Homo sapien
caccatgcctggagtaatattttaa

SEQ ID NO: 3857726 - DNA, 25 bp, Homo sapien
ccatgcctggagtaatattttaaat

SEQ ID NO: 3857727 - DNA, 25 bp, Homo sapien
tctgtttcaataagctgaggctcag

SEQ ID NO: 3857728 - DNA, 25 bp, Homo sapien
agtgtattactctaggtaacctagc

SEQ ID NO: 3857729 - DNA, 25 bp, Homo sapien
gataccagatcgtaaccagcttgac

SEQ ID NO: 3857730 - DNA, 25 bp, Homo sapien
cagcttgacctcttattggccatca

SEQ ID NO: 3857731 - DNA, 25 bp, Homo sapien
tgacaacgaaaacaacctactgtca

SEQ ID NO: 3857732 - DNA, 25 bp, Homo sapien
aacgaaaacaacctactgtcatcct

SEQ ID NO: 3857733 - DNA, 25 bp, Homo sapien
ctgcctatgaagtagtcacccattt

SEQ ID NO: 3857734 - DNA, 25 bp, Homo sapien
atcatgaataaagccagccagcagc

SEQ ID NO: 3857735 - DNA, 25 bp, Homo sapien
caatcttattaggatggtaggcaaa

SEQ ID NO: 3857736 - DNA, 25 bp, Homo sapien
aaacagcttgctaattcccatactc

SEQ ID NO: 3857737 - DNA, 25 bp, Homo sapien
gcttataacagacaccaaatccaaa

SEQ ID NO: 3857738 - DNA, 25 bp, Homo sapien
caagcaaggttattagaataggcac

SEQ ID NO: 3857739 - DNA, 25 bp, Homo sapien
tacttatatttactaatggccaccg

SEQ ID NO: 3857740 - DNA, 25 bp, Homo sapien
aaaactgaacagtccgagtagcctg

SEQ ID NO: 3857741 - DNA, 25 bp, Homo sapien
ctttctcaaaacagcctatggccgg

SEQ ID NO: 3857742 - DNA, 25 bp, Homo sapien
tgggcgtttctaaggtaccacagga

SEQ ID NO: 3857743 - DNA, 25 bp, Homo sapien
aaacggccagccacgaagcccagtt

SEQ ID NO: 3857744 - DNA, 25 bp, Homo sapien
cttcgccttccctaaattgctgtct

SEQ ID NO: 3857745 - DNA, 25 bp, Homo sapien
agttccctaaggctgtctcgccaac

SEQ ID NO: 3857746 - DNA, 25 bp, Homo sapien
ctaaattgctgtctccttataccct

SEQ ID NO: 3857747 - DNA, 25 bp, Homo sapien
agcagcctctcggtcaaagccgccc

SEQ ID NO: 3857748 - DNA, 25 bp, Homo sapien
gcagcctctcggtcaaagccgccca

SEQ ID NO: 3857749 - DNA, 25 bp, Homo sapien
gcctctcggtcaaagccgcccacct

SEQ ID NO: 3857750 - DNA, 25 bp, Homo sapien
cagcctctcggtcaaagccgcccac

SEQ ID NO: 3857751 - DNA, 25 bp, Homo sapien
agagatgaaacagcggagacaaacc

SEQ ID NO: 3857752 - DNA, 25 bp, Homo sapien
gaaacagcggagacaaacctccacc

SEQ ID NO: 3857753 - DNA, 25 bp, Homo sapien
gatgaaacagcggagacaaacctcc

SEQ ID NO: 3857754 - DNA, 25 bp, Homo sapien
tagagatgaaacagcggagacaaac

SEQ ID NO: 3857755 - DNA, 25 bp, Homo sapien
tcacgtgactctcctagccgctggg

SEQ ID NO: 3857756 - DNA, 25 bp, Homo sapien
cacgtgactctcctagccgctgggc

SEQ ID NO: 3857757 - DNA, 25 bp, Homo sapien
ctcacgtgactctcctagccgctgg

SEQ ID NO: 3857758 - DNA, 25 bp, Homo sapien
tctcacgtgactctcctagccgctg

SEQ ID NO: 3857759 - DNA, 25 bp, Homo sapien
gcatctctattttccgcaggtttat

SEQ ID NO: 3857760 - DNA, 25 bp, Homo sapien
ttgggcatctctattttccgcaggt

SEQ ID NO: 3857761 - DNA, 25 bp, Homo sapien
tctctattttccgcaggtttattcc

SEQ ID NO: 3857762 - DNA, 25 bp, Homo sapien
gggcatctctattttccgcaggttt

SEQ ID NO: 3857763 - DNA, 25 bp, Homo sapien
acaacctttcagatcttctctgagg

SEQ ID NO: 3857764 - DNA, 25 bp, Homo sapien
cctttcagatcttctctgaggtttg

SEQ ID NO: 3857765 - DNA, 25 bp, Homo sapien
aacctttcagatcttctctgaggtt

SEQ ID NO: 3857766 - DNA, 25 bp, Homo sapien
ctttcagatcttctctgaggtttgt

SEQ ID NO: 3857767 - DNA, 25 bp, Homo sapien
cccttcaacccttctcttgggcttg

SEQ ID NO: 3857768 - DNA, 25 bp, Homo sapien
ttcaacccttctcttgggcttggta

SEQ ID NO: 3857769 - DNA, 25 bp, Homo sapien
acatccccttcaacccttctcttgg

SEQ ID NO: 3857770 - DNA, 25 bp, Homo sapien
tcaacccttctcttgggcttggtaa

SEQ ID NO: 3857771 - DNA, 25 bp, Homo sapien
gaagagaggaaagagcggaacaagg

SEQ ID NO: 3857772 - DNA, 25 bp, Homo sapien
gaaggcacgggacttgaacctctcc

SEQ ID NO: 3857773 - DNA, 25 bp, Homo sapien
ttccagttgagagatggcggccgcc

SEQ ID NO: 3857774 - DNA, 25 bp, Homo sapien
gaagattagccgaactgaacatgcc

SEQ ID NO: 3857775 - DNA, 25 bp, Homo sapien
taggtaactctggaagggactggca

SEQ ID NO: 3857776 - DNA, 25 bp, Homo sapien
tcctttcgagggctactgtataagc

SEQ ID NO: 3857777 - DNA, 25 bp, Homo sapien
cgagggctactgtataagcgtgttc

SEQ ID NO: 3857778 - DNA, 25 bp, Homo sapien
actgtataagcgtgttcacgcgtgc

SEQ ID NO: 3857779 - DNA, 25 bp, Homo sapien
catcctcttgggtccttaaaggtgc

SEQ ID NO: 3857780 - DNA, 25 bp, Homo sapien
catcaaaatcgagtgcctgaaagat

SEQ ID NO: 3857781 - DNA, 25 bp, Homo sapien
cgcctgccttgttctgatcataact

SEQ ID NO: 3857782 - DNA, 25 bp, Homo sapien
ttcaaccctcaataaacacatcgcc

SEQ ID NO: 3857783 - DNA, 25 bp, Homo sapien
ccaatgacagcatcaaaatcgagtg

SEQ ID NO: 3857784 - DNA, 25 bp, Homo sapien
tgtgccacttttgttccgctgtatg

SEQ ID NO: 3857785 - DNA, 25 bp, Homo sapien
gcattggaatggatcacaagtccag

SEQ ID NO: 3857786 - DNA, 25 bp, Homo sapien
gttctggtaaaggtccctgagagac

SEQ ID NO: 3857787 - DNA, 25 bp, Homo sapien
cactaaggttgaatcttgcttggga

SEQ ID NO: 3857788 - DNA, 25 bp, Homo sapien
gatccccccacttcagccttggaaa

SEQ ID NO: 3857789 - DNA, 25 bp, Homo sapien
cacttcagccttggaaagtgttggg

SEQ ID NO: 3857790 - DNA, 25 bp, Homo sapien
cccccacttcagccttggaaagtgt

SEQ ID NO: 3857791 - DNA, 25 bp, Homo sapien
actacagcctctgcccccagagttc

SEQ ID NO: 3857792 - DNA, 25 bp, Homo sapien
tgctgcctaagcacagttgagatag

SEQ ID NO: 3857793 - DNA, 25 bp, Homo sapien
cctgcattggtgttcgattcagaat

SEQ ID NO: 3857794 - DNA, 25 bp, Homo sapien
gacttaaacgttaaaatgctgccta

SEQ ID NO: 3857795 - DNA, 25 bp, Homo sapien
tggacagctgaactccagtcagtgc

SEQ ID NO: 3857796 - DNA, 25 bp, Homo sapien
gaagtatgtcatgtctataaaaagt

SEQ ID NO: 3857797 - DNA, 25 bp, Homo sapien
tacaacctttagcttgagaaattga

SEQ ID NO: 3857798 - DNA, 25 bp, Homo sapien
cctttagcttgagaaattgaacatt

SEQ ID NO: 3857799 - DNA, 25 bp, Homo sapien
aaattacattatgttcaatcagaca

SEQ ID NO: 3857800 - DNA, 25 bp, Homo sapien
tccaacactcttgataatggtttga

SEQ ID NO: 3857801 - DNA, 25 bp, Homo sapien
gatttgctgtagtgcattaaccaga

SEQ ID NO: 3857802 - DNA, 25 bp, Homo sapien
aacatttttgcagagtacacagggc

SEQ ID NO: 3857803 - DNA, 25 bp, Homo sapien
tcaggttgtccctccaaatgatttg

SEQ ID NO: 3857804 - DNA, 25 bp, Homo sapien
tagtgacaataaactggctctctgg

SEQ ID NO: 3857805 - DNA, 25 bp, Homo sapien
agtagcttctgatctcactcagtaa

SEQ ID NO: 3857806 - DNA, 25 bp, Homo sapien
ggcagaaggagacttattcagtagc

SEQ ID NO: 3857807 - DNA, 25 bp, Homo sapien
tcgtaattcagcagtgggaatgatg

SEQ ID NO: 3857808 - DNA, 25 bp, Homo sapien
attgtagatattcttgtcactgagt

SEQ ID NO: 3857809 - DNA, 25 bp, Homo sapien
tagaaattaactccacttgtttaga

SEQ ID NO: 3857810 - DNA, 25 bp, Homo sapien
ccacttgtttagatttagatcattt

SEQ ID NO: 3857811 - DNA, 25 bp, Homo sapien
tgtgtagagatcaagcctgtgagaa

SEQ ID NO: 3857812 - DNA, 25 bp, Homo sapien
ttaatatatctttatgggggggaga

SEQ ID NO: 3857813 - DNA, 25 bp, Homo sapien
tactgtatatgaggcactgttttaa

SEQ ID NO: 3857814 - DNA, 25 bp, Homo sapien
gaatacctactgtatatgaggcact

SEQ ID NO: 3857815 - DNA, 25 bp, Homo sapien
gagatagtaatattcactagaattc

SEQ ID NO: 3857816 - DNA, 25 bp, Homo sapien
caagaagtaggtatgtgacgacaca

SEQ ID NO: 3857817 - DNA, 25 bp, Homo sapien
ccaatgtgactgaaggatgtttcct

SEQ ID NO: 3857818 - DNA, 25 bp, Homo sapien
ccatctttgagggagatatcctagc

SEQ ID NO: 3857819 - DNA, 25 bp, Homo sapien
gatgggtgtctaactgcatgatcca

SEQ ID NO: 3857820 - DNA, 25 bp, Homo sapien
gcaatggtatgatctcagtcactgc

SEQ ID NO: 3857821 - DNA, 25 bp, Homo sapien
tttcagcatgtggatcaggatggtc

SEQ ID NO: 3857822 - DNA, 25 bp, Homo sapien
cggggtttcagcatgtggatcagga

SEQ ID NO: 3857823 - DNA, 25 bp, Homo sapien
tcagcatgtggatcaggatggtctt

SEQ ID NO: 3857824 - DNA, 25 bp, Homo sapien
ggtattttatgatcggcactgccat

SEQ ID NO: 3857825 - DNA, 25 bp, Homo sapien
ttggtattttatgatcggcactgcc

SEQ ID NO: 3857826 - DNA, 25 bp, Homo sapien
tggtattttatgatcggcactgcca

SEQ ID NO: 3857827 - DNA, 25 bp, Homo sapien
tcatgatgtagcacgagaatctccc

SEQ ID NO: 3857828 - DNA, 25 bp, Homo sapien
acagatgcagtttcatgatgtagca

SEQ ID NO: 3857829 - DNA, 25 bp, Homo sapien
aaacctggcagtgctactgccgtca

SEQ ID NO: 3857830 - DNA, 25 bp, Homo sapien
cacatatattacacagtcggcgaag

SEQ ID NO: 3857831 - DNA, 25 bp, Homo sapien
tgaagattgtccgtagaatagggac

SEQ ID NO: 3857832 - DNA, 25 bp, Homo sapien
cactgtgtgaaaaaacggtattatg

SEQ ID NO: 3857833 - DNA, 25 bp, Homo sapien
tagaatagggactgaacaagcactg

SEQ ID NO: 3857834 - DNA, 25 bp, Homo sapien
caatttgaggagatgaagattgtcc

SEQ ID NO: 3857835 - DNA, 25 bp, Homo sapien
ggattcctagcttgccctttctgtt

SEQ ID NO: 3857836 - DNA, 25 bp, Homo sapien
aggattcctagcttgccctttctgt

SEQ ID NO: 3857837 - DNA, 25 bp, Homo sapien
tctgtttccattaatccctgttaag

SEQ ID NO: 3857838 - DNA, 25 bp, Homo sapien
tccctgttaagacctgttccctcat

SEQ ID NO: 3857839 - DNA, 25 bp, Homo sapien
tgaggaattgtgataccaagcgttc

SEQ ID NO: 3857840 - DNA, 25 bp, Homo sapien
gccacctatgtggtctttgaggaat

SEQ ID NO: 3857841 - DNA, 25 bp, Homo sapien
ctggaaacttccactattgagaggt

SEQ ID NO: 3857842 - DNA, 25 bp, Homo sapien
ctaggtttaacttgtacctcttcag

SEQ ID NO: 3857843 - DNA, 25 bp, Homo sapien
tcaaaccattactgctttatgtaat

SEQ ID NO: 3857844 - DNA, 25 bp, Homo sapien
caaaccattactgctttatgtaatg

SEQ ID NO: 3857845 - DNA, 25 bp, Homo sapien
caatgtgatgtaacgtccagagctg

SEQ ID NO: 3857846 - DNA, 25 bp, Homo sapien
aaggcatcaaccaacaatgtgatgt

SEQ ID NO: 3857847 - DNA, 25 bp, Homo sapien
gcatcaaccaacaatgtgatgtaac

SEQ ID NO: 3857848 - DNA, 25 bp, Homo sapien
taacgtccagagctgtaaacgactc

SEQ ID NO: 3857849 - DNA, 25 bp, Homo sapien
gaaactggtaatcctgatcctggta

SEQ ID NO: 3857850 - DNA, 25 bp, Homo sapien
gcaactgcctttaatccaagtggta

SEQ ID NO: 3857851 - DNA, 25 bp, Homo sapien
cctaatttgtaagcatgccatggaa

SEQ ID NO: 3857852 - DNA, 25 bp, Homo sapien
gatgtttcaacacctagacccaaag

SEQ ID NO: 3857853 - DNA, 25 bp, Homo sapien
cagtaataggaacctttaatcagtt

SEQ ID NO: 3857854 - DNA, 25 bp, Homo sapien
ggcaccattgacacaatacagtaat

SEQ ID NO: 3857855 - DNA, 25 bp, Homo sapien
accttcttgacttctatgatttctg

SEQ ID NO: 3857856 - DNA, 25 bp, Homo sapien
tctaagaagccaccgacgttctttg

SEQ ID NO: 3857857 - DNA, 25 bp, Homo sapien
ccctgattgtagaactgaccagttt

SEQ ID NO: 3857858 - DNA, 25 bp, Homo sapien
cttgaactcttttaccataccctga

SEQ ID NO: 3857859 - DNA, 25 bp, Homo sapien
gccaaggtgggtcgctgctcaagct

SEQ ID NO: 3857860 - DNA, 25 bp, Homo sapien
tctacaactacaactatggaaagct

SEQ ID NO: 3857861 - DNA, 25 bp, Homo sapien
taacatatgtttgctataaactctt

SEQ ID NO: 3857862 - DNA, 25 bp, Homo sapien
tatgaattactagaatagacaagga

SEQ ID NO: 3857863 - DNA, 25 bp, Homo sapien
ccatacatacttaaaccaaagcaaa

SEQ ID NO: 3857864 - DNA, 25 bp, Homo sapien
tccatacatacttaaaccaaagcaa

SEQ ID NO: 3857865 - DNA, 25 bp, Homo sapien
cattccatacatacttaaaccaaag

SEQ ID NO: 3857866 - DNA, 25 bp, Homo sapien
aacattccatacatacttaaaccaa

SEQ ID NO: 3857867 - DNA, 25 bp, Homo sapien
ttgacttctgtacatttttggctgg

SEQ ID NO: 3857868 - DNA, 25 bp, Homo sapien
gggaagagaatcacctttttctgta

SEQ ID NO: 3857869 - DNA, 25 bp, Homo sapien
cataactgatgaacttggctgccac

SEQ ID NO: 3857870 - DNA, 25 bp, Homo sapien
gacttctgtacatttttggctggag

SEQ ID NO: 3857871 - DNA, 25 bp, Homo sapien
cagcttcctcattatcttcatcatt

SEQ ID NO: 3857872 - DNA, 25 bp, Homo sapien
tcatcttcctcagcagcaagtttta

SEQ ID NO: 3857873 - DNA, 25 bp, Homo sapien
ttcatcttcttcatcgtcatcatca

SEQ ID NO: 3857874 - DNA, 25 bp, Homo sapien
cttcagcttcctcattatcttcatc

SEQ ID NO: 3857875 - DNA, 25 bp, Homo sapien
acttcaactgtaagatcactggggg

SEQ ID NO: 3857876 - DNA, 25 bp, Homo sapien
aactgtaagatcactgggggtgtta

SEQ ID NO: 3857877 - DNA, 25 bp, Homo sapien
tcaactgtaagatcactgggggtgt

SEQ ID NO: 3857878 - DNA, 25 bp, Homo sapien
ctgtaagatcactgggggtgttatt

SEQ ID NO: 3857879 - DNA, 25 bp, Homo sapien
tatacagacattttcaaagttgcca

SEQ ID NO: 3857880 - DNA, 25 bp, Homo sapien
ctatacagacattttcaaagttgcc

SEQ ID NO: 3857881 - DNA, 25 bp, Homo sapien
acattttcaaagttgccagtgtgac

SEQ ID NO: 3857882 - DNA, 25 bp, Homo sapien
cagacattttcaaagttgccagtgt

SEQ ID NO: 3857883 - DNA, 25 bp, Homo sapien
caccagcccttaaactgactgtttt

SEQ ID NO: 3857884 - DNA, 25 bp, Homo sapien
gtcctttgcaccagcccttaaactg

SEQ ID NO: 3857885 - DNA, 25 bp, Homo sapien
aattcgtcctttgcaccagccctta

SEQ ID NO: 3857886 - DNA, 25 bp, Homo sapien
tttgcaccagcccttaaactgactg

SEQ ID NO: 3857887 - DNA, 25 bp, Homo sapien
gatggagataaaccaccactgctca

SEQ ID NO: 3857888 - DNA, 25 bp, Homo sapien
cggatggagataaaccaccactgct

SEQ ID NO: 3857889 - DNA, 25 bp, Homo sapien
aaggcggatggagataaaccaccac

SEQ ID NO: 3857890 - DNA, 25 bp, Homo sapien
ggcggatggagataaaccaccactg

SEQ ID NO: 3857891 - DNA, 25 bp, Homo sapien
caaggttatagggagaagtatacag

SEQ ID NO: 3857892 - DNA, 25 bp, Homo sapien
gtagtcctagcttacttaggcagct

SEQ ID NO: 3857893 - DNA, 25 bp, Homo sapien
gccaaaacagacaaggtgtattgga

SEQ ID NO: 3857894 - DNA, 25 bp, Homo sapien
aattagtacatttgctggaacattg

SEQ ID NO: 3857895 - DNA, 25 bp, Homo sapien
gaagctcaggcagttacctacagaa

SEQ ID NO: 3857896 - DNA, 25 bp, Homo sapien
ggagccaatgctatccccagacctt

SEQ ID NO: 3857897 - DNA, 25 bp, Homo sapien
tatttgacagcacaagtgcatggga

SEQ ID NO: 3857898 - DNA, 25 bp, Homo sapien
tataccatggttacagaacaactgc

SEQ ID NO: 3857899 - DNA, 25 bp, Homo sapien
tccgcatcgactgggaggactagtt

SEQ ID NO: 3857900 - DNA, 25 bp, Homo sapien
cactgctgaacaatgtggcctgggt

SEQ ID NO: 3857901 - DNA, 25 bp, Homo sapien
cattggacggctctgctctttggag

SEQ ID NO: 3857902 - DNA, 25 bp, Homo sapien
gactagttcgtagccatacctcgag

SEQ ID NO: 3857903 - DNA, 25 bp, Homo sapien
tttaaaagttgctatagtctggact

SEQ ID NO: 3857904 - DNA, 25 bp, Homo sapien
tggtaaatgtattaggctttctggg

SEQ ID NO: 3857905 - DNA, 25 bp, Homo sapien
gatttagatagaagtcagcaacttt

SEQ ID NO: 3857906 - DNA, 25 bp, Homo sapien
tttatggcctttacataagatcaga

SEQ ID NO: 3857907 - DNA, 25 bp, Homo sapien
gcttactggcaactgaaacatgggc

SEQ ID NO: 3857908 - DNA, 25 bp, Homo sapien
gacagctgtggtgtcactcaaaacc

SEQ ID NO: 3857909 - DNA, 25 bp, Homo sapien
tattaaatgtgagaagcttactggc

SEQ ID NO: 3857910 - DNA, 25 bp, Homo sapien
caggtccaggaattgcagggtttgc

SEQ ID NO: 3857911 - DNA, 25 bp, Homo sapien
gctgcccgctgactattcataaagg

SEQ ID NO: 3857912 - DNA, 25 bp, Homo sapien
ggcggcagcccaaggtccacacggt

SEQ ID NO: 3857913 - DNA, 25 bp, Homo sapien
acagatgcaagctgcccgctgacta

SEQ ID NO: 3857914 - DNA, 25 bp, Homo sapien
ggtgttgaacacagtgtcaaccagg

SEQ ID NO: 3857915 - DNA, 25 bp, Homo sapien
cacagcgatatttgttggcaccgca

SEQ ID NO: 3857916 - DNA, 25 bp, Homo sapien
tcagagcagatcgagtggagacacc

SEQ ID NO: 3857917 - DNA, 25 bp, Homo sapien
cagactccgcttaaggtcagagcag

SEQ ID NO: 3857918 - DNA, 25 bp, Homo sapien
tggcaccgcaagtgtcataacagac

SEQ ID NO: 3857919 - DNA, 25 bp, Homo sapien
aagaaggtaatgctggcagtacata

SEQ ID NO: 3857920 - DNA, 25 bp, Homo sapien
caagaaggtaatgctggcagtacat

SEQ ID NO: 3857921 - DNA, 25 bp, Homo sapien
agaaggtaatgctggcagtacatac

SEQ ID NO: 3857922 - DNA, 25 bp, Homo sapien
ccaggaaataggagccgcagccatt

SEQ ID NO: 3857923 - DNA, 25 bp, Homo sapien
gagccgcagccattgggctcttggg

SEQ ID NO: 3857924 - DNA, 25 bp, Homo sapien
gacccaggaaataggagccgcagcc

SEQ ID NO: 3857925 - DNA, 25 bp, Homo sapien
gccgcagccattgggctcttggggc

SEQ ID NO: 3857926 - DNA, 25 bp, Homo sapien
catgcctgtcgttgccgaggctgca

SEQ ID NO: 3857927 - DNA, 25 bp, Homo sapien
gatccctggtgagccacgaaccctt

SEQ ID NO: 3857928 - DNA, 25 bp, Homo sapien
cacagcatgcctgtcgttgccgagg

SEQ ID NO: 3857929 - DNA, 25 bp, Homo sapien
caaatctgcatctggcgccaagtcc

SEQ ID NO: 3857930 - DNA, 25 bp, Homo sapien
caccagcaacagtttttacagaaag

SEQ ID NO: 3857931 - DNA, 25 bp, Homo sapien
ttttacagaaagagaaaccgcacac

SEQ ID NO: 3857932 - DNA, 25 bp, Homo sapien
ccagcaacagtttttacagaaagag

SEQ ID NO: 3857933 - DNA, 25 bp, Homo sapien
tacagaaagagaaaccgcacactca

SEQ ID NO: 3857934 - DNA, 25 bp, Homo sapien
ctccagaaaagaatcgaagtagcta

SEQ ID NO: 3857935 - DNA, 25 bp, Homo sapien
tgaataggactcctccgtgtcaggg

SEQ ID NO: 3857936 - DNA, 25 bp, Homo sapien
tgccgaaggccccagtctgaatagg

SEQ ID NO: 3857937 - DNA, 25 bp, Homo sapien
ggattcaaagcttccccggaggtgc

SEQ ID NO: 3857938 - DNA, 25 bp, Homo sapien
agccacaaaaccaagaagccactgg

SEQ ID NO: 3857939 - DNA, 25 bp, Homo sapien
cacaaaaccaagaagccactggcca

SEQ ID NO: 3857940 - DNA, 25 bp, Homo sapien
tgagccacaaaaccaagaagccact

SEQ ID NO: 3857941 - DNA, 25 bp, Homo sapien
ctgagccacaaaaccaagaagccac

SEQ ID NO: 3857942 - DNA, 25 bp, Homo sapien
gcagccaggtaggtactggcttctc

SEQ ID NO: 3857943 - DNA, 25 bp, Homo sapien
gacaaaccccctacccagatgtcag

SEQ ID NO: 3857944 - DNA, 25 bp, Homo sapien
cctgcagccaggtaggtactggctt

SEQ ID NO: 3857945 - DNA, 25 bp, Homo sapien
ggacaaaccccctacccagatgtca

SEQ ID NO: 3857946 - DNA, 25 bp, Homo sapien
tcttagtcttttctgtagctgtaac

SEQ ID NO: 3857947 - DNA, 25 bp, Homo sapien
tcaggacatgtgagacctccaatat

SEQ ID NO: 3857948 - DNA, 25 bp, Homo sapien
tattctttaccaagattgttggcta

SEQ ID NO: 3857949 - DNA, 25 bp, Homo sapien
cacggtgcttcataatagggtggaa

SEQ ID NO: 3857950 - DNA, 25 bp, Homo sapien
ttgtctaagttacccaatattgttc

SEQ ID NO: 3857951 - DNA, 25 bp, Homo sapien
tgtctaagttacccaatattgttcc

SEQ ID NO: 3857952 - DNA, 25 bp, Homo sapien
atagtttagtccattgggctctgca

SEQ ID NO: 3857953 - DNA, 25 bp, Homo sapien
gtggtatggaagttacatatagcag

SEQ ID NO: 3857954 - DNA, 25 bp, Homo sapien
gtttagtccattgggctctgcatag

SEQ ID NO: 3857955 - DNA, 25 bp, Homo sapien
tttcagttatatggacttaagtggt

SEQ ID NO: 3857956 - DNA, 25 bp, Homo sapien
agatcatctcaatgtggcaggaaga

SEQ ID NO: 3857957 - DNA, 25 bp, Homo sapien
cttttcagtaaagatcatctcaatg

SEQ ID NO: 3857958 - DNA, 25 bp, Homo sapien
taaagatcatctcaatgtggcagga

SEQ ID NO: 3857959 - DNA, 25 bp, Homo sapien
gtaaagatcatctcaatgtggcagg

SEQ ID NO: 3857960 - DNA, 25 bp, Homo sapien
gagctctgtaagtccgttggtgcat

SEQ ID NO: 3857961 - DNA, 25 bp, Homo sapien
taagtccgttggtgcatcttaggtg

SEQ ID NO: 3857962 - DNA, 25 bp, Homo sapien
tgtaagtccgttggtgcatcttagg

SEQ ID NO: 3857963 - DNA, 25 bp, Homo sapien
taatccatgagctctgtaagtccgt

SEQ ID NO: 3857964 - DNA, 25 bp, Homo sapien
accagagaatctacccttaagttca

SEQ ID NO: 3857965 - DNA, 25 bp, Homo sapien
ccagagaatctacccttaagttcag

SEQ ID NO: 3857966 - DNA, 25 bp, Homo sapien
cccagtgttgttatgcaggactttg

SEQ ID NO: 3857967 - DNA, 25 bp, Homo sapien
ttgtaatgtcggaatggtatgcact

SEQ ID NO: 3857968 - DNA, 25 bp, Homo sapien
taatgtcggaatggtatgcactgtt

SEQ ID NO: 3857969 - DNA, 25 bp, Homo sapien
cattgtaatgtcggaatggtatgca

SEQ ID NO: 3857970 - DNA, 25 bp, Homo sapien
gtaatgtcggaatggtatgcactgt

SEQ ID NO: 3857971 - DNA, 25 bp, Homo sapien
gatacttcgtgcctttttgtatata

SEQ ID NO: 3857972 - DNA, 25 bp, Homo sapien
ttcagatacttcgtgcctttttgta

SEQ ID NO: 3857973 - DNA, 25 bp, Homo sapien
tacttcgtgcctttttgtatataca

SEQ ID NO: 3857974 - DNA, 25 bp, Homo sapien
cagatacttcgtgcctttttgtata

SEQ ID NO: 3857975 - DNA, 25 bp, Homo sapien
ttgtggggttctccgggtcaagtga

SEQ ID NO: 3857976 - DNA, 25 bp, Homo sapien
ggttctccgggtcaagtgaatagcg

SEQ ID NO: 3857977 - DNA, 25 bp, Homo sapien
ctccgggtcaagtgaatagcgaacc

SEQ ID NO: 3857978 - DNA, 25 bp, Homo sapien
ttctccgggtcaagtgaatagcgaa

SEQ ID NO: 3857979 - DNA, 25 bp, Homo sapien
tgcctggcccataataacttcataa

SEQ ID NO: 3857980 - DNA, 25 bp, Homo sapien
ccatgcctggcccataataacttca

SEQ ID NO: 3857981 - DNA, 25 bp, Homo sapien
cctggcccataataacttcataacc

SEQ ID NO: 3857982 - DNA, 25 bp, Homo sapien
catgcctggcccataataacttcat

SEQ ID NO: 3857983 - DNA, 25 bp, Homo sapien
cagtgttgttatgcaggactttcca

SEQ ID NO: 3857984 - DNA, 25 bp, Homo sapien
taagaggcaaggtattagcactaag

SEQ ID NO: 3857985 - DNA, 25 bp, Homo sapien
gttactgccacatcatacattcgga

SEQ ID NO: 3857986 - DNA, 25 bp, Homo sapien
gaatgccaatattaccaccctgctg

SEQ ID NO: 3857987 - DNA, 25 bp, Homo sapien
gaaatactaaaactggatgctcaaa

SEQ ID NO: 3857988 - DNA, 25 bp, Homo sapien
caccacagaggagctaaaagaaaag

SEQ ID NO: 3857989 - DNA, 25 bp, Homo sapien
tagcttaacacccaccaactgagat

SEQ ID NO: 3857990 - DNA, 25 bp, Homo sapien
gatcatatgaaagggcaatcacatg

SEQ ID NO: 3857991 - DNA, 25 bp, Homo sapien
attccaattctgacaacgtacaagg

SEQ ID NO: 3857992 - DNA, 25 bp, Homo sapien
cacgttcatggagccatttattgga

SEQ ID NO: 3857993 - DNA, 25 bp, Homo sapien
tctgacaacgtacaaggtcttcgaa

SEQ ID NO: 3857994 - DNA, 25 bp, Homo sapien
aaggtcttcgaaattcttgtccacg

SEQ ID NO: 3857995 - DNA, 25 bp, Homo sapien
catgtccctgactgagagtgagtgc

SEQ ID NO: 3857996 - DNA, 25 bp, Homo sapien
tcgagcctcacattagaacctggta

SEQ ID NO: 3857997 - DNA, 25 bp, Homo sapien
ggcagatgctacttaaaaacttggc

SEQ ID NO: 3857998 - DNA, 25 bp, Homo sapien
ccaaaaccggataaaggcagatgct

SEQ ID NO: 3857999 - DNA, 25 bp, Homo sapien
tccactggcaaacagattataccag

SEQ ID NO: 3858000 - DNA, 25 bp, Homo sapien
tgttgccaactagcactggacaggc

SEQ ID NO: 3858001 - DNA, 25 bp, Homo sapien
tgccgtgtactataatctccttctc

SEQ ID NO: 3858002 - DNA, 25 bp, Homo sapien
gacaggctgcatgccgtgtactata

SEQ ID NO: 3858003 - DNA, 25 bp, Homo sapien
gcaacagagcgagaacaggtctcaa

SEQ ID NO: 3858004 - DNA, 25 bp, Homo sapien
gtgcccggccgttttcagcagtaat

SEQ ID NO: 3858005 - DNA, 25 bp, Homo sapien
ttatccccaagtatacaatgccagg

SEQ ID NO: 3858006 - DNA, 25 bp, Homo sapien
ctctaagtactcgtggcaaggacca

SEQ ID NO: 3858007 - DNA, 25 bp, Homo sapien
aacactagctccaacttcaggaaaa

SEQ ID NO: 3858008 - DNA, 25 bp, Homo sapien
ttttttgggccaaacactagctcca

SEQ ID NO: 3858009 - DNA, 25 bp, Homo sapien
tagctccaacttcaggaaaaacagt

SEQ ID NO: 3858010 - DNA, 25 bp, Homo sapien
gccaaacactagctccaacttcagg

SEQ ID NO: 3858011 - DNA, 25 bp, Homo sapien
tacatgtcagatttggagcaggaac

SEQ ID NO: 3858012 - DNA, 25 bp, Homo sapien
gatattctatgtgcccctctgggaa

SEQ ID NO: 3858013 - DNA, 25 bp, Homo sapien
gcaggaaccatgagttgagcccagt

SEQ ID NO: 3858014 - DNA, 25 bp, Homo sapien
acattcgtctgcagtggtagggtct

SEQ ID NO: 3858015 - DNA, 25 bp, Homo sapien
taaaacagccatgtagcaattctat

SEQ ID NO: 3858016 - DNA, 25 bp, Homo sapien
agctctttgaaagcatctggctcat

SEQ ID NO: 3858017 - DNA, 25 bp, Homo sapien
agccatgtagcaattctatttcctg

SEQ ID NO: 3858018 - DNA, 25 bp, Homo sapien
tctttgaaagcatctggctcatctt

SEQ ID NO: 3858019 - DNA, 25 bp, Homo sapien
tgtccagtgcactataaacatcagg

SEQ ID NO: 3858020 - DNA, 25 bp, Homo sapien
ctaaacatcagtagtaatatcctga

SEQ ID NO: 3858021 - DNA, 25 bp, Homo sapien
cacagtaaattcaatggtgtaaaaa

SEQ ID NO: 3858022 - DNA, 25 bp, Homo sapien
tcagtaatacaaatactctagtggc

SEQ ID NO: 3858023 - DNA, 25 bp, Homo sapien
taagtcaggttagccagaattcccc

SEQ ID NO: 3858024 - DNA, 25 bp, Homo sapien
tacaggttgagcataccaaaagtcc

SEQ ID NO: 3858025 - DNA, 25 bp, Homo sapien
gaaacagacagttccccataaggct

SEQ ID NO: 3858026 - DNA, 25 bp, Homo sapien
gaactttcttctcaagtaggccctg

SEQ ID NO: 3858027 - DNA, 25 bp, Homo sapien
tactgtcctccaactccataatttg

SEQ ID NO: 3858028 - DNA, 25 bp, Homo sapien
ccgtgcaaagtcaaaatggggttca

SEQ ID NO: 3858029 - DNA, 25 bp, Homo sapien
aaaatggggttcatactgtcctcca

SEQ ID NO: 3858030 - DNA, 25 bp, Homo sapien
agtcaaaatggggttcatactgtcc

SEQ ID NO: 3858031 - DNA, 25 bp, Homo sapien
catctagtcctgttagatcttgtat

SEQ ID NO: 3858032 - DNA, 25 bp, Homo sapien
gctgtggaaacatctagtcctgtta

SEQ ID NO: 3858033 - DNA, 25 bp, Homo sapien
tattctcatattaattcgagacacc

SEQ ID NO: 3858034 - DNA, 25 bp, Homo sapien
caccacaggattttcatagccagag

SEQ ID NO: 3858035 - DNA, 25 bp, Homo sapien
ggccacatgttatataatgccactt

SEQ ID NO: 3858036 - DNA, 25 bp, Homo sapien
gatacaaaggccacatgttatataa

SEQ ID NO: 3858037 - DNA, 25 bp, Homo sapien
tgaagcaagagagccgcttgagcat

SEQ ID NO: 3858038 - DNA, 25 bp, Homo sapien
gatggaacatcatattaagtcaaag

SEQ ID NO: 3858039 - DNA, 25 bp, Homo sapien
ctagaacagttaattctcaacaggg

SEQ ID NO: 3858040 - DNA, 25 bp, Homo sapien
caacttaaggaagggtgctactggc

SEQ ID NO: 3858041 - DNA, 25 bp, Homo sapien
ttttacctatcaggggacatttgac

SEQ ID NO: 3858042 - DNA, 25 bp, Homo sapien
catccagtgaaccacagatgctatt

SEQ ID NO: 3858043 - DNA, 25 bp, Homo sapien
tagtccgtcatgaaaactccagcac

SEQ ID NO: 3858044 - DNA, 25 bp, Homo sapien
gcaaggaacttgcaaaggctttgtt

SEQ ID NO: 3858045 - DNA, 25 bp, Homo sapien
ggcacttacttacgcaatacctgca

SEQ ID NO: 3858046 - DNA, 25 bp, Homo sapien
tacctgcagctactaggtgaccctg

SEQ ID NO: 3858047 - DNA, 25 bp, Homo sapien
ctctgtactgtgctgtggtcaattt

SEQ ID NO: 3858048 - DNA, 25 bp, Homo sapien
tactctgtactgtgctgtggtcaat

SEQ ID NO: 3858049 - DNA, 25 bp, Homo sapien
ctgtactgtgctgtggtcaattttc

SEQ ID NO: 3858050 - DNA, 25 bp, Homo sapien
atactctgtactgtgctgtggtcaa

SEQ ID NO: 3858051 - DNA, 25 bp, Homo sapien
tgccaacgtaatcaccatgaaggag

SEQ ID NO: 3858052 - DNA, 25 bp, Homo sapien
catgaaggaggatatgaatcaccgc

SEQ ID NO: 3858053 - DNA, 25 bp, Homo sapien
gaacagccacttccaaatcaagaga

SEQ ID NO: 3858054 - DNA, 25 bp, Homo sapien
caaggacttactccagtagcaggca

SEQ ID NO: 3858055 - DNA, 25 bp, Homo sapien
gtaatgtaccgtctccaagtctcct

SEQ ID NO: 3858056 - DNA, 25 bp, Homo sapien
agtctcctgttattgggtttgaaat

SEQ ID NO: 3858057 - DNA, 25 bp, Homo sapien
tattgggtttgaaatggtggctcgc

SEQ ID NO: 3858058 - DNA, 25 bp, Homo sapien
aattctgtaatgtaccgtctccaag

SEQ ID NO: 3858059 - DNA, 25 bp, Homo sapien
ataatcttggactgagaacaaaggc

SEQ ID NO: 3858060 - DNA, 25 bp, Homo sapien
gggtcaacaaactatggccacagac

SEQ ID NO: 3858061 - DNA, 25 bp, Homo sapien
tgaattaattaccttggatggcacc

SEQ ID NO: 3858062 - DNA, 25 bp, Homo sapien
gcaagaaagaggtgaccgcctagat

SEQ ID NO: 3858063 - DNA, 25 bp, Homo sapien
tccatcatggtagcggcaaaagagt

SEQ ID NO: 3858064 - DNA, 25 bp, Homo sapien
tcctcctgtttagctggagccagaa

SEQ ID NO: 3858065 - DNA, 25 bp, Homo sapien
taatacgaggcttgtcccattcatc

SEQ ID NO: 3858066 - DNA, 25 bp, Homo sapien
tatcatggaagcgaataatacgagg

SEQ ID NO: 3858067 - DNA, 25 bp, Homo sapien
gcctaggtcacacagcgaaatctcg

SEQ ID NO: 3858068 - DNA, 25 bp, Homo sapien
caaggagaccaagatcagcctaggt

SEQ ID NO: 3858069 - DNA, 25 bp, Homo sapien
taaacaagtatgtcaggcctggcat

SEQ ID NO: 3858070 - DNA, 25 bp, Homo sapien
tccatgcactttacctagagtcaaa

SEQ ID NO: 3858071 - DNA, 25 bp, Homo sapien
gattggtcatctgaagcagacttat

SEQ ID NO: 3858072 - DNA, 25 bp, Homo sapien
cacggcacagcatttcgtacttctg

SEQ ID NO: 3858073 - DNA, 25 bp, Homo sapien
tctggcaggtaatccacagcaaccc

SEQ ID NO: 3858074 - DNA, 25 bp, Homo sapien
taccattagctctctgatgttcagg

SEQ ID NO: 3858075 - DNA, 25 bp, Homo sapien
cctcagccgttagaaaagatttgtg

SEQ ID NO: 3858076 - DNA, 25 bp, Homo sapien
tctgcttctgtataggccactttgc

SEQ ID NO: 3858077 - DNA, 25 bp, Homo sapien
ggtctccctgctgatataccgcata

SEQ ID NO: 3858078 - DNA, 25 bp, Homo sapien
tagaaatctcgccttcatccagttg

SEQ ID NO: 3858079 - DNA, 25 bp, Homo sapien
aacaatggaacaatctataatataa

SEQ ID NO: 3858080 - DNA, 25 bp, Homo sapien
gaagttcacaataatcctctggatg

SEQ ID NO: 3858081 - DNA, 25 bp, Homo sapien
taggactacacagctttcaaaatgc

SEQ ID NO: 3858082 - DNA, 25 bp, Homo sapien
ctttaggaatcttaacactactgtg

SEQ ID NO: 3858083 - DNA, 25 bp, Homo sapien
caatctgggcaagagatgaatgtac

SEQ ID NO: 3858084 - DNA, 25 bp, Homo sapien
tacaggaggagaggtaaatacgtca

SEQ ID NO: 3858085 - DNA, 25 bp, Homo sapien
gcccggccaccatatgagatatatc

SEQ ID NO: 3858086 - DNA, 25 bp, Homo sapien
atctcatccctaaccaacaatctgg

SEQ ID NO: 3858087 - DNA, 25 bp, Homo sapien
aatgtaccttattagtctagtttgg

SEQ ID NO: 3858088 - DNA, 25 bp, Homo sapien
ctattaatgtaccttattagtctag

SEQ ID NO: 3858089 - DNA, 25 bp, Homo sapien
caagacaaccccgggcaaaataatg

SEQ ID NO: 3858090 - DNA, 25 bp, Homo sapien
ggcggctagagcctgtaatcctgac

SEQ ID NO: 3858091 - DNA, 25 bp, Homo sapien
gagctagtggctgcataaagcctct

SEQ ID NO: 3858092 - DNA, 25 bp, Homo sapien
gcaccagcgggttcaattgtctagt

SEQ ID NO: 3858093 - DNA, 25 bp, Homo sapien
tgggtagtccaagattcaaagcacc

SEQ ID NO: 3858094 - DNA, 25 bp, Homo sapien
gatggacatagtccaacaacagcag

SEQ ID NO: 3858095 - DNA, 25 bp, Homo sapien
catcattaggaaagtactgtctctg

SEQ ID NO: 3858096 - DNA, 25 bp, Homo sapien
ccctttgagatggtatctgtatcca

SEQ ID NO: 3858097 - DNA, 25 bp, Homo sapien
tgaatggttaggttagagataaagc

SEQ ID NO: 3858098 - DNA, 25 bp, Homo sapien
ggtatcctggagacgtaacagagct

SEQ ID NO: 3858099 - DNA, 25 bp, Homo sapien
gaatgaatgctaaacactccttaag

SEQ ID NO: 3858100 - DNA, 25 bp, Homo sapien
cagatggtaagtaaaatatgtgctc

SEQ ID NO: 3858101 - DNA, 25 bp, Homo sapien
ttactgataactatataaccccaag

SEQ ID NO: 3858102 - DNA, 25 bp, Homo sapien
caaacatgacgttgatcaaccaaaa

SEQ ID NO: 3858103 - DNA, 25 bp, Homo sapien
taattccattattagatcaatcatg

SEQ ID NO: 3858104 - DNA, 25 bp, Homo sapien
ataattccattattagatcaatcat

SEQ ID NO: 3858105 - DNA, 25 bp, Homo sapien
cattatagaatgactactacagatt

SEQ ID NO: 3858106 - DNA, 25 bp, Homo sapien
gagaataaatatatcgatttccttt

SEQ ID NO: 3858107 - DNA, 25 bp, Homo sapien
taaaacaacaaagtgccaaggttca

SEQ ID NO: 3858108 - DNA, 25 bp, Homo sapien
aaacaacttagttcattacttgaga

SEQ ID NO: 3858109 - DNA, 25 bp, Homo sapien
tatccttaaggaccagattctccaa

SEQ ID NO: 3858110 - DNA, 25 bp, Homo sapien
cactcagtattcagacgtttcatta

SEQ ID NO: 3858111 - DNA, 25 bp, Homo sapien
tgaatgcatttactggatgcccaac

SEQ ID NO: 3858112 - DNA, 25 bp, Homo sapien
tcgctgtactagttagccgatctaa

SEQ ID NO: 3858113 - DNA, 25 bp, Homo sapien
cagtatggatcaaatcagtcatctg

SEQ ID NO: 3858114 - DNA, 25 bp, Homo sapien
tataatctttcagagaagtcaccag

SEQ ID NO: 3858115 - DNA, 25 bp, Homo sapien
taatataatctttcagagaagtcac

SEQ ID NO: 3858116 - DNA, 25 bp, Homo sapien
caccagatctttctcagtatggatc

SEQ ID NO: 3858117 - DNA, 25 bp, Homo sapien
caattgaagtaaaaaagcctggatg

SEQ ID NO: 3858118 - DNA, 25 bp, Homo sapien
aattgaagtaaaaaagcctggatga

SEQ ID NO: 3858119 - DNA, 25 bp, Homo sapien
ttgaagtaaaaaagcctggatgagc

SEQ ID NO: 3858120 - DNA, 25 bp, Homo sapien
tgaagtaaaaaagcctggatgagcc

SEQ ID NO: 3858121 - DNA, 25 bp, Homo sapien
gaagcagaattcctataattaatat

SEQ ID NO: 3858122 - DNA, 25 bp, Homo sapien
ctggggaagcagaattcctataatt

SEQ ID NO: 3858123 - DNA, 25 bp, Homo sapien
ggggaagcagaattcctataattaa

SEQ ID NO: 3858124 - DNA, 25 bp, Homo sapien
cctataattaatatataccagatca

SEQ ID NO: 3858125 - DNA, 25 bp, Homo sapien
gatttaattttacaggatcacacac

SEQ ID NO: 3858126 - DNA, 25 bp, Homo sapien
gaagatttaattttacaggatcaca

SEQ ID NO: 3858127 - DNA, 25 bp, Homo sapien
ttggaagatttaattttacaggatc

SEQ ID NO: 3858128 - DNA, 25 bp, Homo sapien
cttggaagatttaattttacaggat

SEQ ID NO: 3858129 - DNA, 25 bp, Homo sapien
gaaagactaatctcagatagcatcc

SEQ ID NO: 3858130 - DNA, 25 bp, Homo sapien
gatagcatccctgaaaagacttgtc

SEQ ID NO: 3858131 - DNA, 25 bp, Homo sapien
ttattctaccttcattcagaaagca

SEQ ID NO: 3858132 - DNA, 25 bp, Homo sapien
aatgcctcctgttctaaatattcaa

SEQ ID NO: 3858133 - DNA, 25 bp, Homo sapien
taaagcaatgggagtgcagaaaaaa

SEQ ID NO: 3858134 - DNA, 25 bp, Homo sapien
gaactgtactgagcagtattgtagc

SEQ ID NO: 3858135 - DNA, 25 bp, Homo sapien
gcagtattgtagcacttattggcat

SEQ ID NO: 3858136 - DNA, 25 bp, Homo sapien
gtactagggtagtgaactgtactga

SEQ ID NO: 3858137 - DNA, 25 bp, Homo sapien
ttctgtactagggtagtgaactgta

SEQ ID NO: 3858138 - DNA, 25 bp, Homo sapien
tttcctagggatacagagagggtag

SEQ ID NO: 3858139 - DNA, 25 bp, Homo sapien
cataaggatactgccgatgccccgg

SEQ ID NO: 3858140 - DNA, 25 bp, Homo sapien
cagagactcatttcggtcaccaggc

SEQ ID NO: 3858141 - DNA, 25 bp, Homo sapien
accgcagccttaatctccaggcttt

SEQ ID NO: 3858142 - DNA, 25 bp, Homo sapien
tatgacttgtatgatagttctcggc

SEQ ID NO: 3858143 - DNA, 25 bp, Homo sapien
taactgactcggcagagatgaaggc

SEQ ID NO: 3858144 - DNA, 25 bp, Homo sapien
tattgttgcagacacatgtaacagg

SEQ ID NO: 3858145 - DNA, 25 bp, Homo sapien
tagttctcggctattcattcttggg

SEQ ID NO: 3858146 - DNA, 25 bp, Homo sapien
ctggaaagtgggacgagagggcggc

SEQ ID NO: 3858147 - DNA, 25 bp, Homo sapien
ctacgtgagctcgatcacaccagcg

SEQ ID NO: 3858148 - DNA, 25 bp, Homo sapien
ttataacctctaggccgcgatggca

SEQ ID NO: 3858149 - DNA, 25 bp, Homo sapien
aggaggcgactgcagccctcgctac

SEQ ID NO: 3858150 - DNA, 25 bp, Homo sapien
ttaaaatggccgtagactctgaagc

SEQ ID NO: 3858151 - DNA, 25 bp, Homo sapien
ttgggaacctgaagctaatctgtgg

SEQ ID NO: 3858152 - DNA, 25 bp, Homo sapien
taacaatacagtgaggtcttccaga

SEQ ID NO: 3858153 - DNA, 25 bp, Homo sapien
caattgcccgttgtgctgatccacc

SEQ ID NO: 3858154 - DNA, 25 bp, Homo sapien
aattagatggacatcatggcgcatg

SEQ ID NO: 3858155 - DNA, 25 bp, Homo sapien
taattgcctgcccatataagccaga

SEQ ID NO: 3858156 - DNA, 25 bp, Homo sapien
gacactgcctactgagctgtggaag

SEQ ID NO: 3858157 - DNA, 25 bp, Homo sapien
gaggatcaggatataggatgcagca

SEQ ID NO: 3858158 - DNA, 25 bp, Homo sapien
caatcagcactctgtttccagctaa

SEQ ID NO: 3858159 - DNA, 25 bp, Homo sapien
tcagcactctgtttccagctaaagg

SEQ ID NO: 3858160 - DNA, 25 bp, Homo sapien
agcactctgtaaaaatgcaccaatc

SEQ ID NO: 3858161 - DNA, 25 bp, Homo sapien
agcactctgtttccagctaaaggat

SEQ ID NO: 3858162 - DNA, 25 bp, Homo sapien
tcaaagctgtattcccgtggttcct

SEQ ID NO: 3858163 - DNA, 25 bp, Homo sapien
aggcgaagtatcacttggtcgccca

SEQ ID NO: 3858164 - DNA, 25 bp, Homo sapien
tgtcccatggaggtccacagtcgtg

SEQ ID NO: 3858165 - DNA, 25 bp, Homo sapien
gagaaacggactctaaacacaggcg

SEQ ID NO: 3858166 - DNA, 25 bp, Homo sapien
tcatttagtagttgggtaagactgc

SEQ ID NO: 3858167 - DNA, 25 bp, Homo sapien
catgataatctacaactggctaagg

SEQ ID NO: 3858168 - DNA, 25 bp, Homo sapien
gaccatcagctcatgagtcagcagc

SEQ ID NO: 3858169 - DNA, 25 bp, Homo sapien
ggaggtagcctcattaaccagttag

SEQ ID NO: 3858170 - DNA, 25 bp, Homo sapien
taccagtttacattctgagtggtgt

SEQ ID NO: 3858171 - DNA, 25 bp, Homo sapien
tatagtatatcacactagttttggg

SEQ ID NO: 3858172 - DNA, 25 bp, Homo sapien
tcagttaacgttcttgtacatatcc

SEQ ID NO: 3858173 - DNA, 25 bp, Homo sapien
aaagagaggcttattatttgacact

SEQ ID NO: 3858174 - DNA, 25 bp, Homo sapien
gtcaacctatgttactaagacacgg

SEQ ID NO: 3858175 - DNA, 25 bp, Homo sapien
tattgtggaatagcttgcaggagaa

SEQ ID NO: 3858176 - DNA, 25 bp, Homo sapien
tttggtgctataggctgctgtcaac

SEQ ID NO: 3858177 - DNA, 25 bp, Homo sapien
taagacacggtgagttttagccaac

SEQ ID NO: 3858178 - DNA, 25 bp, Homo sapien
ttaagatcagactttgtctttccac

SEQ ID NO: 3858179 - DNA, 25 bp, Homo sapien
tgtggtacccctacttcataaaaca

SEQ ID NO: 3858180 - DNA, 25 bp, Homo sapien
tggtaggcactaaagtactgttgaa

SEQ ID NO: 3858181 - DNA, 25 bp, Homo sapien
gaatataagttctattaagatcaga

SEQ ID NO: 3858182 - DNA, 25 bp, Homo sapien
ccctggggcaccatgtgaatacaaa

SEQ ID NO: 3858183 - DNA, 25 bp, Homo sapien
taagtagtaatcttggactgaaaat

SEQ ID NO: 3858184 - DNA, 25 bp, Homo sapien
ttaagtagtaatcttggactgaaaa

SEQ ID NO: 3858185 - DNA, 25 bp, Homo sapien
tggactgaaaatacccctggggcac

SEQ ID NO: 3858186 - DNA, 25 bp, Homo sapien
tgggtaaatttggacaggatgcaca

SEQ ID NO: 3858187 - DNA, 25 bp, Homo sapien
gggtacttcccagtggtcttcagaa

SEQ ID NO: 3858188 - DNA, 25 bp, Homo sapien
tctgtgctgattggatgctctgagc

SEQ ID NO: 3858189 - DNA, 25 bp, Homo sapien
ggtttgctctggatctaggtctgga

SEQ ID NO: 3858190 - DNA, 25 bp, Homo sapien
ctgggatgaggttcacataggagcc

SEQ ID NO: 3858191 - DNA, 25 bp, Homo sapien
ggaaccactttgctattggctcatg

SEQ ID NO: 3858192 - DNA, 25 bp, Homo sapien
gtttccatatagctctgggtccaca

SEQ ID NO: 3858193 - DNA, 25 bp, Homo sapien
ccaagcccggtcacattttgtatat

SEQ ID NO: 3858194 - DNA, 25 bp, Homo sapien
catatacagtatcatgttttcccta

SEQ ID NO: 3858195 - DNA, 25 bp, Homo sapien
cctaagagaaattactttacattgc

SEQ ID NO: 3858196 - DNA, 25 bp, Homo sapien
tgctttaatgacttgccctcacagc

SEQ ID NO: 3858197 - DNA, 25 bp, Homo sapien
gggtgttcaactgtactgggaatgt

SEQ ID NO: 3858198 - DNA, 25 bp, Homo sapien
gatgctagaggaatatgttcagtta

SEQ ID NO: 3858199 - DNA, 25 bp, Homo sapien
tgttcagttagtttacttgtcctga

SEQ ID NO: 3858200 - DNA, 25 bp, Homo sapien
tattcagatttctgatgctagagga

SEQ ID NO: 3858201 - DNA, 25 bp, Homo sapien
tattacctcatatacttcatatgtt

SEQ ID NO: 3858202 - DNA, 25 bp, Homo sapien
agtgctgttaaagatgagccccgca

SEQ ID NO: 3858203 - DNA, 25 bp, Homo sapien
ttctgtgagttgttccagacactag

SEQ ID NO: 3858204 - DNA, 25 bp, Homo sapien
gcattctctccaaatgacaccaggc

SEQ ID NO: 3858205 - DNA, 25 bp, Homo sapien
agacactaggcccagtgctgttaaa

SEQ ID NO: 3858206 - DNA, 25 bp, Homo sapien
tctccgctggcatgatgctcatcag

SEQ ID NO: 3858207 - DNA, 25 bp, Homo sapien
ttctccgctggcatgatgctcatca

SEQ ID NO: 3858208 - DNA, 25 bp, Homo sapien
ctccgctggcatgatgctcatcagt

SEQ ID NO: 3858209 - DNA, 25 bp, Homo sapien
tccgctggcatgatgctcatcagtt

SEQ ID NO: 3858210 - DNA, 25 bp, Homo sapien
atataatctattatccacaggtaat

SEQ ID NO: 3858211 - DNA, 25 bp, Homo sapien
cgtgtgtgcccttccaataatataa

SEQ ID NO: 3858212 - DNA, 25 bp, Homo sapien
gtgggcagcccaccaagaagaacgt

SEQ ID NO: 3858213 - DNA, 25 bp, Homo sapien
ccaagaagaacgtggctggcagcaa

SEQ ID NO: 3858214 - DNA, 25 bp, Homo sapien
agatggctcctgtggcgatcacgct

SEQ ID NO: 3858215 - DNA, 25 bp, Homo sapien
aagactgtgcgctgctttgtcctgg

SEQ ID NO: 3858216 - DNA, 25 bp, Homo sapien
tcacgctggtgtcagatgggacccg

SEQ ID NO: 3858217 - DNA, 25 bp, Homo sapien
atgggacccgatgcctgcttgcccg

SEQ ID NO: 3858218 - DNA, 25 bp, Homo sapien
gcctctcatcacattgaccccagat

SEQ ID NO: 3858219 - DNA, 25 bp, Homo sapien
cagtgaacacccatacacccactac

SEQ ID NO: 3858220 - DNA, 25 bp, Homo sapien
catgtaggcatttgtttgtagggag

SEQ ID NO: 3858221 - DNA, 25 bp, Homo sapien
ttcacatgtaggcatttgtttgtag

SEQ ID NO: 3858222 - DNA, 25 bp, Homo sapien
attttgcatgactgaaacctggtac

SEQ ID NO: 3858223 - DNA, 25 bp, Homo sapien
tgggcctatctatcttgttgcaact

SEQ ID NO: 3858224 - DNA, 25 bp, Homo sapien
cacttagcatgtcctttgggcctat

SEQ ID NO: 3858225 - DNA, 25 bp, Homo sapien
gaccttatggtgtacagatcttcaa

SEQ ID NO: 3858226 - DNA, 25 bp, Homo sapien
agcctgggcaacagagagagactcc

SEQ ID NO: 3858227 - DNA, 25 bp, Homo sapien
tggagcttgcattgagccaagatag

SEQ ID NO: 3858228 - DNA, 25 bp, Homo sapien
cctgggcaacagagagagactccgt

SEQ ID NO: 3858229 - DNA, 25 bp, Homo sapien
gccaagatagcgccactgcactcca

SEQ ID NO: 3858230 - DNA, 25 bp, Homo sapien
ctttgttctgatgtctttttctgtc

SEQ ID NO: 3858231 - DNA, 25 bp, Homo sapien
aaaaggtcattgctctctccactgc

SEQ ID NO: 3858232 - DNA, 25 bp, Homo sapien
ggaaatcaaagtgccttcatcagga

SEQ ID NO: 3858233 - DNA, 25 bp, Homo sapien
gtcttgttagattggcagcttgcct

SEQ ID NO: 3858234 - DNA, 25 bp, Homo sapien
gactaagtcccaaagtcccatagca

SEQ ID NO: 3858235 - DNA, 25 bp, Homo sapien
tgcttttaatggtgaattttatgat

SEQ ID NO: 3858236 - DNA, 25 bp, Homo sapien
cttttaatggtgaattttatgatat

SEQ ID NO: 3858237 - DNA, 25 bp, Homo sapien
gcttttaatggtgaattttatgata

SEQ ID NO: 3858238 - DNA, 25 bp, Homo sapien
tacagtatcaggtatgaaatatcca

SEQ ID NO: 3858239 - DNA, 25 bp, Homo sapien
catgcaaaaattcactgactgtaca

SEQ ID NO: 3858240 - DNA, 25 bp, Homo sapien
tattttaggaggaatatgagcatca

SEQ ID NO: 3858241 - DNA, 25 bp, Homo sapien
gaattactccaagggtatattgtgg

SEQ ID NO: 3858242 - DNA, 25 bp, Homo sapien
ccaagagggccacatttggggctca

SEQ ID NO: 3858243 - DNA, 25 bp, Homo sapien
tgtgtataacccacagctgagatca

SEQ ID NO: 3858244 - DNA, 25 bp, Homo sapien
ggctcatggagaagtcaatctgtaa

SEQ ID NO: 3858245 - DNA, 25 bp, Homo sapien
taccctgccgagttcaaaacctgtg

SEQ ID NO: 3858246 - DNA, 25 bp, Homo sapien
tgaagaaacatttttactaaatgag

SEQ ID NO: 3858247 - DNA, 25 bp, Homo sapien
tgtaatgaagaaacatttttactaa

SEQ ID NO: 3858248 - DNA, 25 bp, Homo sapien
cttgtaatgaagaaacatttttact

SEQ ID NO: 3858249 - DNA, 25 bp, Homo sapien
aatgaagaaacatttttactaaatg

SEQ ID NO: 3858250 - DNA, 25 bp, Homo sapien
aagaaaaaagagaagctaaatgtgc

SEQ ID NO: 3858251 - DNA, 25 bp, Homo sapien
aaaaaagagaagctaaatgtgctgg

SEQ ID NO: 3858252 - DNA, 25 bp, Homo sapien
aaagaaaaaagagaagctaaatgtg

SEQ ID NO: 3858253 - DNA, 25 bp, Homo sapien
gaaaaaagagaagctaaatgtgctg

SEQ ID NO: 3858254 - DNA, 25 bp, Homo sapien
gatcggtgttgtcaggcagctgcac

SEQ ID NO: 3858255 - DNA, 25 bp, Homo sapien
ccagcttgggagctataggattcca

SEQ ID NO: 3858256 - DNA, 25 bp, Homo sapien
tggtgccataacagattctcccgta

SEQ ID NO: 3858257 - DNA, 25 bp, Homo sapien
tgaaaccaggttcaggtctacatct

SEQ ID NO: 3858258 - DNA, 25 bp, Homo sapien
ggtgtgtgctagttcctggtccatc

SEQ ID NO: 3858259 - DNA, 25 bp, Homo sapien
gccaggttcgtgtgtttcaaagtcc

SEQ ID NO: 3858260 - DNA, 25 bp, Homo sapien
cacttggttcctagtggtgaaactt

SEQ ID NO: 3858261 - DNA, 25 bp, Homo sapien
ccatctgggccatgtatgacttgag

SEQ ID NO: 3858262 - DNA, 25 bp, Homo sapien
taagaaaagaatctgcatcaaaagt

SEQ ID NO: 3858263 - DNA, 25 bp, Homo sapien
agtgattggagcctcagaaggttct

SEQ ID NO: 3858264 - DNA, 25 bp, Homo sapien
gaatctgcatcaaaagtgattggag

SEQ ID NO: 3858265 - DNA, 25 bp, Homo sapien
gcatcaaaagtgattggagcctcag

SEQ ID NO: 3858266 - DNA, 25 bp, Homo sapien
tctttcatcaggttcaagagcatca

SEQ ID NO: 3858267 - DNA, 25 bp, Homo sapien
aaagtggtgccattcttaggaaagc

SEQ ID NO: 3858268 - DNA, 25 bp, Homo sapien
aaaatccttgagtttactggccttg

SEQ ID NO: 3858269 - DNA, 25 bp, Homo sapien
gatttagggacctacccactctcta

SEQ ID NO: 3858270 - DNA, 25 bp, Homo sapien
agctctgctcccttgtgggttgaga

SEQ ID NO: 3858271 - DNA, 25 bp, Homo sapien
cagctctgctcccttgtgggttgag

SEQ ID NO: 3858272 - DNA, 25 bp, Homo sapien
aggcagctctgctcccttgtgggtt

SEQ ID NO: 3858273 - DNA, 25 bp, Homo sapien
cgaggcagctctgctcccttgtggg

SEQ ID NO: 3858274 - DNA, 25 bp, Homo sapien
aacagactcggattcttttttgcca

SEQ ID NO: 3858275 - DNA, 25 bp, Homo sapien
ctctgagacttcagttaagtcatag

SEQ ID NO: 3858276 - DNA, 25 bp, Homo sapien
ctccttggaaacagactcggattct

SEQ ID NO: 3858277 - DNA, 25 bp, Homo sapien
tgagacttcagttaagtcatagttc

SEQ ID NO: 3858278 - DNA, 25 bp, Homo sapien
gtattgtctgtaataaggttaagat

SEQ ID NO: 3858279 - DNA, 25 bp, Homo sapien
atcctctgggggaagattagctgct

SEQ ID NO: 3858280 - DNA, 25 bp, Homo sapien
cctctgggggaagattagctgcttc

SEQ ID NO: 3858281 - DNA, 25 bp, Homo sapien
taataaggttaagatttcttcacca

SEQ ID NO: 3858282 - DNA, 25 bp, Homo sapien
gcaatcttcctatctcagcaagtag

SEQ ID NO: 3858283 - DNA, 25 bp, Homo sapien
tgcagccttgactcttgggatcaag

SEQ ID NO: 3858284 - DNA, 25 bp, Homo sapien
ttatttttaatttgagtagctggga

SEQ ID NO: 3858285 - DNA, 25 bp, Homo sapien
ccttgactcttgggatcaagcaatc

SEQ ID NO: 3858286 - DNA, 25 bp, Homo sapien
gtgctaaaatacgaaaagattagcc

SEQ ID NO: 3858287 - DNA, 25 bp, Homo sapien
tcagtggttcccaaccagggacgat

SEQ ID NO: 3858288 - DNA, 25 bp, Homo sapien
tctggttaactactagatagcaggc

SEQ ID NO: 3858289 - DNA, 25 bp, Homo sapien
taaatgtcctatgaagtgcaagcca

SEQ ID NO: 3858290 - DNA, 25 bp, Homo sapien
cagggacgattttgccgcccaggta

SEQ ID NO: 3858291 - DNA, 25 bp, Homo sapien
cctttcccggtactgagcagaacct

SEQ ID NO: 3858292 - DNA, 25 bp, Homo sapien
tgagagctggaagtaattctctgcc

SEQ ID NO: 3858293 - DNA, 25 bp, Homo sapien
tctgccatttctagcctttcccggt

SEQ ID NO: 3858294 - DNA, 25 bp, Homo sapien
gccagtctactgagagctggaagta

SEQ ID NO: 3858295 - DNA, 25 bp, Homo sapien
catcatcatattcttcgggactttt

SEQ ID NO: 3858296 - DNA, 25 bp, Homo sapien
ttttcgtattgctgtgccatcttta

SEQ ID NO: 3858297 - DNA, 25 bp, Homo sapien
tttggagcataagatctcaaatcca

SEQ ID NO: 3858298 - DNA, 25 bp, Homo sapien
tggtgaggcagtcacaagggatttc

SEQ ID NO: 3858299 - DNA, 25 bp, Homo sapien
aggcagtcacaagggatttcttgca

SEQ ID NO: 3858300 - DNA, 25 bp, Homo sapien
tggagcataagatctcaaatccatg

SEQ ID NO: 3858301 - DNA, 25 bp, Homo sapien
ccaattgtgcatatagacatttagt

SEQ ID NO: 3858302 - DNA, 25 bp, Homo sapien
caattcatgggctcggtactgggga

SEQ ID NO: 3858303 - DNA, 25 bp, Homo sapien
caaacctttgttgcaccaattgtgc

SEQ ID NO: 3858304 - DNA, 25 bp, Homo sapien
aggaggcagcctgtatccactccgc

SEQ ID NO: 3858305 - DNA, 25 bp, Homo sapien
ttgaaaacacgacaagctcgcaggt

SEQ ID NO: 3858306 - DNA, 25 bp, Homo sapien
tgctttagcactgccacaatgccag

SEQ ID NO: 3858307 - DNA, 25 bp, Homo sapien
gctcgcaggtcaatagggtctcgta

SEQ ID NO: 3858308 - DNA, 25 bp, Homo sapien
tctcgtaggtaaaatgcctggactg

SEQ ID NO: 3858309 - DNA, 25 bp, Homo sapien
gctcgatgaagtgaggcctgaattt

SEQ ID NO: 3858310 - DNA, 25 bp, Homo sapien
ggaagcagtgtgctcgatgaagtga

SEQ ID NO: 3858311 - DNA, 25 bp, Homo sapien
tgtgctcgatgaagtgaggcctgaa

SEQ ID NO: 3858312 - DNA, 25 bp, Homo sapien
cagtgtgctcgatgaagtgaggcct

SEQ ID NO: 3858313 - DNA, 25 bp, Homo sapien
ctgtgattatattcaatgcttgtgg

SEQ ID NO: 3858314 - DNA, 25 bp, Homo sapien
cctctgatgcgcctattcacagcag

SEQ ID NO: 3858315 - DNA, 25 bp, Homo sapien
tggtgggtaaccaagattctgctcc

SEQ ID NO: 3858316 - DNA, 25 bp, Homo sapien
gctcgtatagattctgaagcaagta

SEQ ID NO: 3858317 - DNA, 25 bp, Homo sapien
acatatgaatgtaatgcagcatgat

SEQ ID NO: 3858318 - DNA, 25 bp, Homo sapien
ctgcaaacggtacatttcaattttc

SEQ ID NO: 3858319 - DNA, 25 bp, Homo sapien
catatgaatgtaatgcagcatgatt

SEQ ID NO: 3858320 - DNA, 25 bp, Homo sapien
tgcaaacggtacatttcaattttca

SEQ ID NO: 3858321 - DNA, 25 bp, Homo sapien
gaattcaccatcattgtcttcaatc

SEQ ID NO: 3858322 - DNA, 25 bp, Homo sapien
gagaaagtcagcagcttctattaac

SEQ ID NO: 3858323 - DNA, 25 bp, Homo sapien
tattaacaagaattcaccatcattg

SEQ ID NO: 3858324 - DNA, 25 bp, Homo sapien
cagcttctattaacaagaattcacc

SEQ ID NO: 3858325 - DNA, 25 bp, Homo sapien
cccaaactttgtcacgccaaacata

SEQ ID NO: 3858326 - DNA, 25 bp, Homo sapien
aataaaccattcatcctcaatgtta

SEQ ID NO: 3858327 - DNA, 25 bp, Homo sapien
cgccaaacatatgagcaggaacacc

SEQ ID NO: 3858328 - DNA, 25 bp, Homo sapien
ttgtgatctgctttattacataaac

SEQ ID NO: 3858329 - DNA, 25 bp, Homo sapien
tttatgtttatctgagtcccttgac

SEQ ID NO: 3858330 - DNA, 25 bp, Homo sapien
gactcatctggtatcaggaacaggc

SEQ ID NO: 3858331 - DNA, 25 bp, Homo sapien
ggaccagcataggtgcaaaccgagt

SEQ ID NO: 3858332 - DNA, 25 bp, Homo sapien
cactgtgtcttccatcgtagcaagc

SEQ ID NO: 3858333 - DNA, 25 bp, Homo sapien
caccaacagtgttttatccaaatcc

SEQ ID NO: 3858334 - DNA, 25 bp, Homo sapien
accaacagtgttttatccaaatcct

SEQ ID NO: 3858335 - DNA, 25 bp, Homo sapien
tctcaccaacagtgttttatccaaa

SEQ ID NO: 3858336 - DNA, 25 bp, Homo sapien
tcaccaacagtgttttatccaaatc

SEQ ID NO: 3858337 - DNA, 25 bp, Homo sapien
cttgacttggagtctagtgctcttt

SEQ ID NO: 3858338 - DNA, 25 bp, Homo sapien
gaccaagcagcaggggcttgacttg

SEQ ID NO: 3858339 - DNA, 25 bp, Homo sapien
cccagagtacagaaaaagaagcgac

SEQ ID NO: 3858340 - DNA, 25 bp, Homo sapien
tacagaaaaagaagcgaccaagcag

SEQ ID NO: 3858341 - DNA, 25 bp, Homo sapien
tctccttcgcgtctctgctgtggca

SEQ ID NO: 3858342 - DNA, 25 bp, Homo sapien
cctctccttcgcgtctctgctgtgg

SEQ ID NO: 3858343 - DNA, 25 bp, Homo sapien
ctctccttcgcgtctctgctgtggc

SEQ ID NO: 3858344 - DNA, 25 bp, Homo sapien
gacgcctgaccggaacctgaagcca

SEQ ID NO: 3858345 - DNA, 25 bp, Homo sapien
gaagccagcggaaatcctgagagaa

SEQ ID NO: 3858346 - DNA, 25 bp, Homo sapien
cgagagctgatcgagagctgccacc

SEQ ID NO: 3858347 - DNA, 25 bp, Homo sapien
ttagccgcctctccgactgcgagag

SEQ ID NO: 3858348 - DNA, 25 bp, Homo sapien
gggcgtgtcgcccttcgtctgaaat

SEQ ID NO: 3858349 - DNA, 25 bp, Homo sapien
gcatccgcagtgcttcaggtcccat

SEQ ID NO: 3858350 - DNA, 25 bp, Homo sapien
ttcctgaaatcaagcactgggtctg

SEQ ID NO: 3858351 - DNA, 25 bp, Homo sapien
gagagatttttcttcggaattctct

SEQ ID NO: 3858352 - DNA, 25 bp, Homo sapien
tagctgtttcatccccaccaaggaa

SEQ ID NO: 3858353 - DNA, 25 bp, Homo sapien
caggaaaatgacgttggtacaatac

SEQ ID NO: 3858354 - DNA, 25 bp, Homo sapien
tagacctacagaccttatccagttt

SEQ ID NO: 3858355 - DNA, 25 bp, Homo sapien
ttggtcccatttacagattactgca

SEQ ID NO: 3858356 - DNA, 25 bp, Homo sapien
cagagaaagctctaggcccaggtga

SEQ ID NO: 3858357 - DNA, 25 bp, Homo sapien
aaggaatacttctcaattcagttca

SEQ ID NO: 3858358 - DNA, 25 bp, Homo sapien
ggtcagcagagtcttgatgctaaaa

SEQ ID NO: 3858359 - DNA, 25 bp, Homo sapien
caattcagttcataataaggtcagc

SEQ ID NO: 3858360 - DNA, 25 bp, Homo sapien
aaatctttcagctgatcacagtggc

SEQ ID NO: 3858361 - DNA, 25 bp, Homo sapien
gggttatttctatctatgtaatttc

SEQ ID NO: 3858362 - DNA, 25 bp, Homo sapien
tccctagaaagacataaattaacaa

SEQ ID NO: 3858363 - DNA, 25 bp, Homo sapien
aatttaaacagctccataccaatct

SEQ ID NO: 3858364 - DNA, 25 bp, Homo sapien
gttccgatacatgttacaacttgga

SEQ ID NO: 3858365 - DNA, 25 bp, Homo sapien
cagttaggtcacagtatacaagaac

SEQ ID NO: 3858366 - DNA, 25 bp, Homo sapien
atttatatgaattgcccagaagagc

SEQ ID NO: 3858367 - DNA, 25 bp, Homo sapien
cagaagagcaattccatagagacag

SEQ ID NO: 3858368 - DNA, 25 bp, Homo sapien
agaaatccataaagtggttgtgatc

SEQ ID NO: 3858369 - DNA, 25 bp, Homo sapien
caaagaaatccataaagtggttgtg

SEQ ID NO: 3858370 - DNA, 25 bp, Homo sapien
aacaaagaaatccataaagtggttg

SEQ ID NO: 3858371 - DNA, 25 bp, Homo sapien
aaagaaatccataaagtggttgtga

SEQ ID NO: 3858372 - DNA, 25 bp, Homo sapien
cattctatggaagagatatacctgt

SEQ ID NO: 3858373 - DNA, 25 bp, Homo sapien
gattgtatcctagatccccttctgc

SEQ ID NO: 3858374 - DNA, 25 bp, Homo sapien
gcttcatatgaaacaaccttgtctc

SEQ ID NO: 3858375 - DNA, 25 bp, Homo sapien
ttctaggtaggcagataatcactcc

SEQ ID NO: 3858376 - DNA, 25 bp, Homo sapien
ccagctaaatataagccaggcttct

SEQ ID NO: 3858377 - DNA, 25 bp, Homo sapien
tgttcactcacgtatcactcatgtg

SEQ ID NO: 3858378 - DNA, 25 bp, Homo sapien
gaaattagggtatcctcccattgct

SEQ ID NO: 3858379 - DNA, 25 bp, Homo sapien
taataccactgagctagaactggaa

SEQ ID NO: 3858380 - DNA, 25 bp, Homo sapien
ttttgtatggccaagtagtagtcca

SEQ ID NO: 3858381 - DNA, 25 bp, Homo sapien
aagcatggatatttctcagatttca

SEQ ID NO: 3858382 - DNA, 25 bp, Homo sapien
taccgtgaataatggagcgataaac

SEQ ID NO: 3858383 - DNA, 25 bp, Homo sapien
gctgcaaaagacagcctttatggaa

SEQ ID NO: 3858384 - DNA, 25 bp, Homo sapien
gaaacaactgtctatgcagaggctg

SEQ ID NO: 3858385 - DNA, 25 bp, Homo sapien
tccagtattgtgtgagagttccagt

SEQ ID NO: 3858386 - DNA, 25 bp, Homo sapien
gaatgagcttggctgtgtacactag

SEQ ID NO: 3858387 - DNA, 25 bp, Homo sapien
caatttaccagtgttgggctgtgaa

SEQ ID NO: 3858388 - DNA, 25 bp, Homo sapien
taatctcataactttacctgtggga

SEQ ID NO: 3858389 - DNA, 25 bp, Homo sapien
tgatccgactatgctgtttctgcct

SEQ ID NO: 3858390 - DNA, 25 bp, Homo sapien
tgtccaatagagtaggcaccagcca

SEQ ID NO: 3858391 - DNA, 25 bp, Homo sapien
gcccagcctgcttggtcatttgtat

SEQ ID NO: 3858392 - DNA, 25 bp, Homo sapien
gagtaggaatcagcccctgtggcaa

SEQ ID NO: 3858393 - DNA, 25 bp, Homo sapien
ctttaattgctacagtgggagccac

SEQ ID NO: 3858394 - DNA, 25 bp, Homo sapien
caagctacttatgaggcctgggtcc

SEQ ID NO: 3858395 - DNA, 25 bp, Homo sapien
gaaattggccaaatcgagctgtgga

SEQ ID NO: 3858396 - DNA, 25 bp, Homo sapien
aatgttggctagaatactatattgg

SEQ ID NO: 3858397 - DNA, 25 bp, Homo sapien
aatctttctgttgatctagctaaag

SEQ ID NO: 3858398 - DNA, 25 bp, Homo sapien
ctagctaaagagttctatttgtaaa

SEQ ID NO: 3858399 - DNA, 25 bp, Homo sapien
ccgtgctgggaacatattcagtgaa

SEQ ID NO: 3858400 - DNA, 25 bp, Homo sapien
ttagctgttgattcacaaaatgtct

SEQ ID NO: 3858401 - DNA, 25 bp, Homo sapien
ctataccaacagagctataaatgca

SEQ ID NO: 3858402 - DNA, 25 bp, Homo sapien
tatgagataataaggccacagcagt

SEQ ID NO: 3858403 - DNA, 25 bp, Homo sapien
gcagtgttttcaatgcggcttccaa

SEQ ID NO: 3858404 - DNA, 25 bp, Homo sapien
gataaggaatactgcaagctgctcc

SEQ ID NO: 3858405 - DNA, 25 bp, Homo sapien
taaggataaggaatactgcaagctg

SEQ ID NO: 3858406 - DNA, 25 bp, Homo sapien
ggataaggaatactgcaagctgctc

SEQ ID NO: 3858407 - DNA, 25 bp, Homo sapien
aaggaatactgcaagctgctccaga

SEQ ID NO: 3858408 - DNA, 25 bp, Homo sapien
gattttatctagaggcttaacccag

SEQ ID NO: 3858409 - DNA, 25 bp, Homo sapien
tctagtcgagctcaaagtgcggtgg

SEQ ID NO: 3858410 - DNA, 25 bp, Homo sapien
tttgtaggctgggagctcgacccca

SEQ ID NO: 3858411 - DNA, 25 bp, Homo sapien
gacgcccctgagtcgaaataatctg

SEQ ID NO: 3858412 - DNA, 25 bp, Homo sapien
cagtatcgtcgctcatgtgcagttg

SEQ ID NO: 3858413 - DNA, 25 bp, Homo sapien
tccctcaagttggtagtctatgcct

SEQ ID NO: 3858414 - DNA, 25 bp, Homo sapien
taaatggctttgtgggcatctggct

SEQ ID NO: 3858415 - DNA, 25 bp, Homo sapien
agttgagtatcctcatcaggcccga

SEQ ID NO: 3858416 - DNA, 25 bp, Homo sapien
tctcactctgctgatcaggccagaa

SEQ ID NO: 3858417 - DNA, 25 bp, Homo sapien
aaaccatcaggatatgctgagtctg

SEQ ID NO: 3858418 - DNA, 25 bp, Homo sapien
gatcagttaatctgttaggccaagg

SEQ ID NO: 3858419 - DNA, 25 bp, Homo sapien
gctgagtctgattctatcgcattaa

SEQ ID NO: 3858420 - DNA, 25 bp, Homo sapien
agttccccgcagcattgtctggtag

SEQ ID NO: 3858421 - DNA, 25 bp, Homo sapien
caaaccatctttgtagtccaagtga

SEQ ID NO: 3858422 - DNA, 25 bp, Homo sapien
tatggtaaaaaactagtctgcctca

SEQ ID NO: 3858423 - DNA, 25 bp, Homo sapien
aaagtcaggtataactggctgggcg

SEQ ID NO: 3858424 - DNA, 25 bp, Homo sapien
aacttatgtaacactgaagtggaag

SEQ ID NO: 3858425 - DNA, 25 bp, Homo sapien
acttatgtaacactgaagtggaagt

SEQ ID NO: 3858426 - DNA, 25 bp, Homo sapien
taacttatgtaacactgaagtggaa

SEQ ID NO: 3858427 - DNA, 25 bp, Homo sapien
cttatgtaacactgaagtggaagtg

SEQ ID NO: 3858428 - DNA, 25 bp, Homo sapien
cattggaaaggcaagtttgtaccca

SEQ ID NO: 3858429 - DNA, 25 bp, Homo sapien
gcagccaaaaatgacatgagtgttg

SEQ ID NO: 3858430 - DNA, 25 bp, Homo sapien
gcagaaattaacctatcccattgga

SEQ ID NO: 3858431 - DNA, 25 bp, Homo sapien
gaataatacccaaatcactgctcat

SEQ ID NO: 3858432 - DNA, 25 bp, Homo sapien
tcttcctaaagtaggttactggtca

SEQ ID NO: 3858433 - DNA, 25 bp, Homo sapien
taaatgcaccttgccagatattctc

SEQ ID NO: 3858434 - DNA, 25 bp, Homo sapien
tgcaccttgccagatattctcctgc

SEQ ID NO: 3858435 - DNA, 25 bp, Homo sapien
agtaggttactggtcatatcttttt

SEQ ID NO: 3858436 - DNA, 25 bp, Homo sapien
ttaagaaaccctggcaattaattca

SEQ ID NO: 3858437 - DNA, 25 bp, Homo sapien
tattgagccaccaaagtataattcc

SEQ ID NO: 3858438 - DNA, 25 bp, Homo sapien
tactgtggaccttttcctaagggca

SEQ ID NO: 3858439 - DNA, 25 bp, Homo sapien
ctataaacagcaggagaggttcagc

SEQ ID NO: 3858440 - DNA, 25 bp, Homo sapien
aatacaaatcttgattgtcatgcca

SEQ ID NO: 3858441 - DNA, 25 bp, Homo sapien
taaatacaaatcttgattgtcatgc

SEQ ID NO: 3858442 - DNA, 25 bp, Homo sapien
aaatacaaatcttgattgtcatgcc

SEQ ID NO: 3858443 - DNA, 25 bp, Homo sapien
ctaaatacaaatcttgattgtcatg

SEQ ID NO: 3858444 - DNA, 25 bp, Homo sapien
ttataccaaggtgttctaatgccat

SEQ ID NO: 3858445 - DNA, 25 bp, Homo sapien
tataccaaggtgttctaatgccatc

SEQ ID NO: 3858446 - DNA, 25 bp, Homo sapien
agacagatgcttcaaacaacctgca

SEQ ID NO: 3858447 - DNA, 25 bp, Homo sapien
aagacagatgcttcaaacaacctgc

SEQ ID NO: 3858448 - DNA, 25 bp, Homo sapien
tgtagtcacaaaccgaaaacgtgtc

SEQ ID NO: 3858449 - DNA, 25 bp, Homo sapien
aacgtgtcgtctttaccttagagct

SEQ ID NO: 3858450 - DNA, 25 bp, Homo sapien
taacctatttgtagtcacaaaccga

SEQ ID NO: 3858451 - DNA, 25 bp, Homo sapien
tgtcgtctttaccttagagctaaag

SEQ ID NO: 3858452 - DNA, 25 bp, Homo sapien
gcctgtaagaagtcatttagcccaa

SEQ ID NO: 3858453 - DNA, 25 bp, Homo sapien
caggacttcagtaatcagtggcagg

SEQ ID NO: 3858454 - DNA, 25 bp, Homo sapien
tggcaggactacaacatacatctct

SEQ ID NO: 3858455 - DNA, 25 bp, Homo sapien
ttcagacaagctcagtggcccaact

SEQ ID NO: 3858456 - DNA, 25 bp, Homo sapien
ctcaagagctgaattgacttttgcc

SEQ ID NO: 3858457 - DNA, 25 bp, Homo sapien
gctcttccaatggccaccctcccca

SEQ ID NO: 3858458 - DNA, 25 bp, Homo sapien
tcctgcttcatgaccacatattcac

SEQ ID NO: 3858459 - DNA, 25 bp, Homo sapien
ctgctcttccaatggccaccctccc

SEQ ID NO: 3858460 - DNA, 25 bp, Homo sapien
agctcctgcttcatgaccacatatt

SEQ ID NO: 3858461 - DNA, 25 bp, Homo sapien
tcatccctggcaagcaagtactcca

SEQ ID NO: 3858462 - DNA, 25 bp, Homo sapien
cagactcagattcctctgatgctga

SEQ ID NO: 3858463 - DNA, 25 bp, Homo sapien
tgtgattgggcatcctcagactctt

SEQ ID NO: 3858464 - DNA, 25 bp, Homo sapien
tgcttggctctgtgattgggcatcc

SEQ ID NO: 3858465 - DNA, 25 bp, Homo sapien
taacccttgggctggagactttcag

SEQ ID NO: 3858466 - DNA, 25 bp, Homo sapien
ctttggacctagagtagtgggccct

SEQ ID NO: 3858467 - DNA, 25 bp, Homo sapien
tctttctttggacctagagtagtgg

SEQ ID NO: 3858468 - DNA, 25 bp, Homo sapien
tgggtcgtggccagcgtgtaaccct

SEQ ID NO: 3858469 - DNA, 25 bp, Homo sapien
aagccaagtgggcaagcagagagat

SEQ ID NO: 3858470 - DNA, 25 bp, Homo sapien
gcttcttctcatacatggtaaccag

SEQ ID NO: 3858471 - DNA, 25 bp, Homo sapien
agcccaatgtgctggtactcccgga

SEQ ID NO: 3858472 - DNA, 25 bp, Homo sapien
gccagtctagcccaatgtgctggta

SEQ ID NO: 3858473 - DNA, 25 bp, Homo sapien
gctggtgggaacaatgattaaatgg

SEQ ID NO: 3858474 - DNA, 25 bp, Homo sapien
tctctttctgggctccatagtaagt

SEQ ID NO: 3858475 - DNA, 25 bp, Homo sapien
gggcaccaccgtttcaactccatct

SEQ ID NO: 3858476 - DNA, 25 bp, Homo sapien
ccatagtaagtgaggattttaaagc

SEQ ID NO: 3858477 - DNA, 25 bp, Homo sapien
aaagaatggagcgacagaaagagga

SEQ ID NO: 3858478 - DNA, 25 bp, Homo sapien
agcaaaagaatggagcgacagaaag

SEQ ID NO: 3858479 - DNA, 25 bp, Homo sapien
tgccagcgctgtgacttgaagttct

SEQ ID NO: 3858480 - DNA, 25 bp, Homo sapien
aagttgaggagtgactgccagcgct

SEQ ID NO: 3858481 - DNA, 25 bp, Homo sapien
gaagttcttgatgttctgcgcctca

SEQ ID NO: 3858482 - DNA, 25 bp, Homo sapien
cagttcttgcgacggaaggcctggt

SEQ ID NO: 3858483 - DNA, 25 bp, Homo sapien
tgcaagggagttcctgtcaggagca

SEQ ID NO: 3858484 - DNA, 25 bp, Homo sapien
cagttaggggattagagaaccactc

SEQ ID NO: 3858485 - DNA, 25 bp, Homo sapien
aagtgcatcaaggaccacagctcca

SEQ ID NO: 3858486 - DNA, 25 bp, Homo sapien
gaaccactccttgaactcgcgatga

SEQ ID NO: 3858487 - DNA, 25 bp, Homo sapien
cttgtggaggcgtttgactagacct

SEQ ID NO: 3858488 - DNA, 25 bp, Homo sapien
ggcgtttgactagaccttcattata

SEQ ID NO: 3858489 - DNA, 25 bp, Homo sapien
gtttgactagaccttcattatactc

SEQ ID NO: 3858490 - DNA, 25 bp, Homo sapien
tggaggcgtttgactagaccttcat

SEQ ID NO: 3858491 - DNA, 25 bp, Homo sapien
ctaggcatcgtagtgcagacctgta

SEQ ID NO: 3858492 - DNA, 25 bp, Homo sapien
caaactagattttgaggagtaattg

SEQ ID NO: 3858493 - DNA, 25 bp, Homo sapien
gaccaactacgcagaatagaaaact

SEQ ID NO: 3858494 - DNA, 25 bp, Homo sapien
gagtaattgttaagtttacaagatg

SEQ ID NO: 3858495 - DNA, 25 bp, Homo sapien
cacaggaagtgatataaggaagcac

SEQ ID NO: 3858496 - DNA, 25 bp, Homo sapien
tggtctgtgccatgaagtcatcata

SEQ ID NO: 3858497 - DNA, 25 bp, Homo sapien
gataacatgctcgtactttttgggc

SEQ ID NO: 3858498 - DNA, 25 bp, Homo sapien
tcatcatagagacagcgttgacgct

SEQ ID NO: 3858499 - DNA, 25 bp, Homo sapien
ggagagcctgcagcggataacatgc

SEQ ID NO: 3858500 - DNA, 25 bp, Homo sapien
ggatggacatccgtggcccttagca

SEQ ID NO: 3858501 - DNA, 25 bp, Homo sapien
tgttgatgacgctcatgaaatggcc

SEQ ID NO: 3858502 - DNA, 25 bp, Homo sapien
tggcctgtggctagtgtctccttag

SEQ ID NO: 3858503 - DNA, 25 bp, Homo sapien
accggtcgagggtcgaacagatttg

SEQ ID NO: 3858504 - DNA, 25 bp, Homo sapien
gccgataacctttacatttcatatt

SEQ ID NO: 3858505 - DNA, 25 bp, Homo sapien
catggttggagtaatgccgataacc

SEQ ID NO: 3858506 - DNA, 25 bp, Homo sapien
cccagtctaacgaaaagaggtacat

SEQ ID NO: 3858507 - DNA, 25 bp, Homo sapien
agtcagaccccagtctaacgaaaag

SEQ ID NO: 3858508 - DNA, 25 bp, Homo sapien
cacttctaacagtacccggcgagag

SEQ ID NO: 3858509 - DNA, 25 bp, Homo sapien
gacacgaccttccaggccaataagg

SEQ ID NO: 3858510 - DNA, 25 bp, Homo sapien
tgcctcatatcgagagacacgacct

SEQ ID NO: 3858511 - DNA, 25 bp, Homo sapien
aaggtcaaatcgacccatgtctatc

SEQ ID NO: 3858512 - DNA, 25 bp, Homo sapien
ttgcttaggtactggctgcagcatc

SEQ ID NO: 3858513 - DNA, 25 bp, Homo sapien
ccactgtccggccttcttgcttagg

SEQ ID NO: 3858514 - DNA, 25 bp, Homo sapien
ctggaggaggtcgaactgggacagg

SEQ ID NO: 3858515 - DNA, 25 bp, Homo sapien
gaggaggtcgaactgggacagggcc

SEQ ID NO: 3858516 - DNA, 25 bp, Homo sapien
ccaggaggccgagatgcaggaataa

SEQ ID NO: 3858517 - DNA, 25 bp, Homo sapien
caggtgaggctgaaaccatcagtga

SEQ ID NO: 3858518 - DNA, 25 bp, Homo sapien
agtggaggcaagaggacagggccag

SEQ ID NO: 3858519 - DNA, 25 bp, Homo sapien
agagaaccactgttgggctgcagtg

SEQ ID NO: 3858520 - DNA, 25 bp, Homo sapien
tgggctcaggcgaactggggcaggt

SEQ ID NO: 3858521 - DNA, 25 bp, Homo sapien
tagggacaaggttggcgtgggaggc

SEQ ID NO: 3858522 - DNA, 25 bp, Homo sapien
caggtggtgttggctttagggacaa

SEQ ID NO: 3858523 - DNA, 25 bp, Homo sapien
caaggttggcgtgggaggccgtgag

SEQ ID NO: 3858524 - DNA, 25 bp, Homo sapien
caggagggaaggtgtagcctggtgg

SEQ ID NO: 3858525 - DNA, 25 bp, Homo sapien
ggtggtagcagttgccgtggtggta

SEQ ID NO: 3858526 - DNA, 25 bp, Homo sapien
catatcgggagatagaatgaggcgc

SEQ ID NO: 3858527 - DNA, 25 bp, Homo sapien
caggcgagcctgcatatcgggagat

SEQ ID NO: 3858528 - DNA, 25 bp, Homo sapien
gagtgtccagttcaaacaactaagc

SEQ ID NO: 3858529 - DNA, 25 bp, Homo sapien
gctcatgattgcagtggcgtaacca

SEQ ID NO: 3858530 - DNA, 25 bp, Homo sapien
tggcctgccaccagactgagctaat

SEQ ID NO: 3858531 - DNA, 25 bp, Homo sapien
tattgtacacaaggctcatcctgct

SEQ ID NO: 3858532 - DNA, 25 bp, Homo sapien
cctgcattagccactggacgttgtg

SEQ ID NO: 3858533 - DNA, 25 bp, Homo sapien
gtgaggctaactgcccgatgctgac

SEQ ID NO: 3858534 - DNA, 25 bp, Homo sapien
tggacgttgtgccagtgaggctaac

SEQ ID NO: 3858535 - DNA, 25 bp, Homo sapien
cccacagcaagctggcgcacctggg

SEQ ID NO: 3858536 - DNA, 25 bp, Homo sapien
gagagggaatacattctctagaatg

SEQ ID NO: 3858537 - DNA, 25 bp, Homo sapien
acataaaggctgacattcaaaaaag

SEQ ID NO: 3858538 - DNA, 25 bp, Homo sapien
agcttgggtaagaaacataaaggct

SEQ ID NO: 3858539 - DNA, 25 bp, Homo sapien
gagggaatacattctctagaatgac

SEQ ID NO: 3858540 - DNA, 25 bp, Homo sapien
gctgacacgaggtgcaccacattcc

SEQ ID NO: 3858541 - DNA, 25 bp, Homo sapien
ctgctgacacgaggtgcaccacatt

SEQ ID NO: 3858542 - DNA, 25 bp, Homo sapien
tgctgacacgaggtgcaccacattc

SEQ ID NO: 3858543 - DNA, 25 bp, Homo sapien
ccctgctgacacgaggtgcaccaca

SEQ ID NO: 3858544 - DNA, 25 bp, Homo sapien
tagcagcaagcggaaggctgaggcc

SEQ ID NO: 3858545 - DNA, 25 bp, Homo sapien
cctggttagcagcaagcggaaggct

SEQ ID NO: 3858546 - DNA, 25 bp, Homo sapien
tggtgctgggggtcgaagaaggcag

SEQ ID NO: 3858547 - DNA, 25 bp, Homo sapien
ggttagcagcaagcggaaggctgag

SEQ ID NO: 3858548 - DNA, 25 bp, Homo sapien
ggtatcatagatattcgcaagggaa

SEQ ID NO: 3858549 - DNA, 25 bp, Homo sapien
catagatattcgcaagggaaaacaa

SEQ ID NO: 3858550 - DNA, 25 bp, Homo sapien
gacaggtatcatagatattcgcaag

SEQ ID NO: 3858551 - DNA, 25 bp, Homo sapien
atcatagatattcgcaagggaaaac

SEQ ID NO: 3858552 - DNA, 25 bp, Homo sapien
tacaatcttcaccacgcctgtatta

SEQ ID NO: 3858553 - DNA, 25 bp, Homo sapien
gaggaacaggagtcagtccatcccg

SEQ ID NO: 3858554 - DNA, 25 bp, Homo sapien
catcccgaggggcttgtctcactac

SEQ ID NO: 3858555 - DNA, 25 bp, Homo sapien
gtattattcaccatggttggtggca

SEQ ID NO: 3858556 - DNA, 25 bp, Homo sapien
ggctcgagcagtacccagagtaggt

SEQ ID NO: 3858557 - DNA, 25 bp, Homo sapien
tacccagagtaggtgtgggtagccg

SEQ ID NO: 3858558 - DNA, 25 bp, Homo sapien
ttaacgtggggcgtggattcaacac

SEQ ID NO: 3858559 - DNA, 25 bp, Homo sapien
gcctcaccagagtgggtgtgggcat

SEQ ID NO: 3858560 - DNA, 25 bp, Homo sapien
ctaagaaaccttgaggcgaccccat

SEQ ID NO: 3858561 - DNA, 25 bp, Homo sapien
tcttgaaattaggtcagggctcagg

SEQ ID NO: 3858562 - DNA, 25 bp, Homo sapien
gcagtacgctgatatgaaaaaacct

SEQ ID NO: 3858563 - DNA, 25 bp, Homo sapien
gaggatgagttagccccagaattct

SEQ ID NO: 3858564 - DNA, 25 bp, Homo sapien
agaagagatggtcaagggggcagct

SEQ ID NO: 3858565 - DNA, 25 bp, Homo sapien
agggaggatggcacgtggagaggag

SEQ ID NO: 3858566 - DNA, 25 bp, Homo sapien
ggaattggcattggagaagaggctg

SEQ ID NO: 3858567 - DNA, 25 bp, Homo sapien
agatggtcaagggggcagctccggg

SEQ ID NO: 3858568 - DNA, 25 bp, Homo sapien
caatggaactgagactgtagaggac

SEQ ID NO: 3858569 - DNA, 25 bp, Homo sapien
tgaagatgacaatggaactgagact

SEQ ID NO: 3858570 - DNA, 25 bp, Homo sapien
ggagtgaagatgacaatggaactga

SEQ ID NO: 3858571 - DNA, 25 bp, Homo sapien
gatggtgagtggagccgaggctggg

SEQ ID NO: 3858572 - DNA, 25 bp, Homo sapien
ggcccgaagcagaaacagtcaaggg

SEQ ID NO: 3858573 - DNA, 25 bp, Homo sapien
cccgaagcagaaacagtcaaggggg

SEQ ID NO: 3858574 - DNA, 25 bp, Homo sapien
tgggcccgaagcagaaacagtcaag

SEQ ID NO: 3858575 - DNA, 25 bp, Homo sapien
ctgggcccgaagcagaaacagtcaa

SEQ ID NO: 3858576 - DNA, 25 bp, Homo sapien
ggtggagtcacactggtcaacagag

SEQ ID NO: 3858577 - DNA, 25 bp, Homo sapien
gctgacggggaagcaccagatggtg

SEQ ID NO: 3858578 - DNA, 25 bp, Homo sapien
aggtgccaatggtggagtcacactg

SEQ ID NO: 3858579 - DNA, 25 bp, Homo sapien
tggagctgtggccaaacctagagtc

SEQ ID NO: 3858580 - DNA, 25 bp, Homo sapien
tcctggagtagacgatggagccata

SEQ ID NO: 3858581 - DNA, 25 bp, Homo sapien
tgctgacggaaaaggactggccaga

SEQ ID NO: 3858582 - DNA, 25 bp, Homo sapien
gagccataactggaaccggagtctg

SEQ ID NO: 3858583 - DNA, 25 bp, Homo sapien
aacatgtgaagaggtgggagccaac

SEQ ID NO: 3858584 - DNA, 25 bp, Homo sapien
gtctgcgtagaagccgggctcggga

SEQ ID NO: 3858585 - DNA, 25 bp, Homo sapien
tgtctgagatggagatgagcctcca

SEQ ID NO: 3858586 - DNA, 25 bp, Homo sapien
ggctagggccagtgtctgcgtagaa

SEQ ID NO: 3858587 - DNA, 25 bp, Homo sapien
tgatgctggagttaatgacaatgtc

SEQ ID NO: 3858588 - DNA, 25 bp, Homo sapien
tggtcctggtgccaaagacagtgtc

SEQ ID NO: 3858589 - DNA, 25 bp, Homo sapien
ggtcctggtgccaaagacagtgtct

SEQ ID NO: 3858590 - DNA, 25 bp, Homo sapien
gtggtcctggtgccaaagacagtgt

SEQ ID NO: 3858591 - DNA, 25 bp, Homo sapien
gccagagacagcgtctgagttggac

SEQ ID NO: 3858592 - DNA, 25 bp, Homo sapien
agccagagacagcgtctgagttgga

SEQ ID NO: 3858593 - DNA, 25 bp, Homo sapien
agtgaagcagatgacgatgctggag

SEQ ID NO: 3858594 - DNA, 25 bp, Homo sapien
ctggagccaaagtcagcgtgtgagc

SEQ ID NO: 3858595 - DNA, 25 bp, Homo sapien
ggagccaaagtcagcgtgtgagctg

SEQ ID NO: 3858596 - DNA, 25 bp, Homo sapien
agcagatgacgatgctggagccaaa

SEQ ID NO: 3858597 - DNA, 25 bp, Homo sapien
gcggcaccagatgccgaaaccacaa

SEQ ID NO: 3858598 - DNA, 25 bp, Homo sapien
caagggagcggcaccagatgccgaa

SEQ ID NO: 3858599 - DNA, 25 bp, Homo sapien
accagatgccgaaaccacaagggaa

SEQ ID NO: 3858600 - DNA, 25 bp, Homo sapien
ggagcggcaccagatgccgaaacca

SEQ ID NO: 3858601 - DNA, 25 bp, Homo sapien
agcgcaatgtcagtgtgtcaggctc

SEQ ID NO: 3858602 - DNA, 25 bp, Homo sapien
cagtgtgtcaggctcatccttggaa

SEQ ID NO: 3858603 - DNA, 25 bp, Homo sapien
ggaccagagcgcaatgtcagtgtgt

SEQ ID NO: 3858604 - DNA, 25 bp, Homo sapien
ccagagcgcaatgtcagtgtgtcag

SEQ ID NO: 3858605 - DNA, 25 bp, Homo sapien
cgggggccaccaaacgaggtagcag

SEQ ID NO: 3858606 - DNA, 25 bp, Homo sapien
gggccaccaaacgaggtagcagtgg

SEQ ID NO: 3858607 - DNA, 25 bp, Homo sapien
tggcgtcgaggccgggggccaccaa

SEQ ID NO: 3858608 - DNA, 25 bp, Homo sapien
ccaccaaacgaggtagcagtggagg

SEQ ID NO: 3858609 - DNA, 25 bp, Homo sapien
gcggatcatgaggtacacgcccagg

SEQ ID NO: 3858610 - DNA, 25 bp, Homo sapien
tcctgttccctcttgaggaagtaaa

SEQ ID NO: 3858611 - DNA, 25 bp, Homo sapien
tgtccaaatgtcactcaagtacttg

SEQ ID NO: 3858612 - DNA, 25 bp, Homo sapien
ttactgcccatttattaccgtgcgg

SEQ ID NO: 3858613 - DNA, 25 bp, Homo sapien
gaggctattatctacttgcagagca

SEQ ID NO: 3858614 - DNA, 25 bp, Homo sapien
ctattgtacagtttagggccaggca

SEQ ID NO: 3858615 - DNA, 25 bp, Homo sapien
tatgactccataggcaaaactagag

SEQ ID NO: 3858616 - DNA, 25 bp, Homo sapien
tcattcaagactaggagggacggag

SEQ ID NO: 3858617 - DNA, 25 bp, Homo sapien
tggccagcatggtatttcaaccaca

SEQ ID NO: 3858618 - DNA, 25 bp, Homo sapien
cagcatggtatttcaaccacatgaa

SEQ ID NO: 3858619 - DNA, 25 bp, Homo sapien
aatggccagcatggtatttcaacca

SEQ ID NO: 3858620 - DNA, 25 bp, Homo sapien
cacttgaggtgtggaattcgaaacc

SEQ ID NO: 3858621 - DNA, 25 bp, Homo sapien
ggtaggccccatacaacatgaactg

SEQ ID NO: 3858622 - DNA, 25 bp, Homo sapien
tgggaacagctaaccggacatccga

SEQ ID NO: 3858623 - DNA, 25 bp, Homo sapien
cagaaaatgggcaacccggcagtga

SEQ ID NO: 3858624 - DNA, 25 bp, Homo sapien
taatatctatccactacacggtagg

SEQ ID NO: 3858625 - DNA, 25 bp, Homo sapien
caggatacagaggcgccaatcaaat

SEQ ID NO: 3858626 - DNA, 25 bp, Homo sapien
gcgccaatcaaatccagaccaggtt

SEQ ID NO: 3858627 - DNA, 25 bp, Homo sapien
atacagaggcgccaatcaaatccag

SEQ ID NO: 3858628 - DNA, 25 bp, Homo sapien
aatccagaccaggtttttgccaagg

SEQ ID NO: 3858629 - DNA, 25 bp, Homo sapien
caactccaggactatagccttcttc

SEQ ID NO: 3858630 - DNA, 25 bp, Homo sapien
cgtaacactcaactccaggactata

SEQ ID NO: 3858631 - DNA, 25 bp, Homo sapien
ctacgtaacactcaactccaggact

SEQ ID NO: 3858632 - DNA, 25 bp, Homo sapien
cactcaactccaggactatagcctt

SEQ ID NO: 3858633 - DNA, 25 bp, Homo sapien
gggcagcctcggtataagtccaaaa

SEQ ID NO: 3858634 - DNA, 25 bp, Homo sapien
aaatccgttccaggcgttcagaccg

SEQ ID NO: 3858635 - DNA, 25 bp, Homo sapien
tgacagctggtctagtcgctgctgg

SEQ ID NO: 3858636 - DNA, 25 bp, Homo sapien
ttcagtcccatacacaggtgccagg

SEQ ID NO: 3858637 - DNA, 25 bp, Homo sapien
gctcagaggccaattgctcctggaa

SEQ ID NO: 3858638 - DNA, 25 bp, Homo sapien
cgcaatcatactggatgagtcttaa

SEQ ID NO: 3858639 - DNA, 25 bp, Homo sapien
caatacggtgcaaaggacgagcccg

SEQ ID NO: 3858640 - DNA, 25 bp, Homo sapien
tcagggaactgggtgcgcatgttac

SEQ ID NO: 3858641 - DNA, 25 bp, Homo sapien
cagacatcttttcccatacagctaa

SEQ ID NO: 3858642 - DNA, 25 bp, Homo sapien
ctgaatgaaggagttagcagcacat

SEQ ID NO: 3858643 - DNA, 25 bp, Homo sapien
aataaaaactctatgctgcactgtc

SEQ ID NO: 3858644 - DNA, 25 bp, Homo sapien
tactgtgcagtcttgtaccaccaga

SEQ ID NO: 3858645 - DNA, 25 bp, Homo sapien
ccagcctgaacactttattatttca

SEQ ID NO: 3858646 - DNA, 25 bp, Homo sapien
gcccagcctgaacactttattattt

SEQ ID NO: 3858647 - DNA, 25 bp, Homo sapien
cgtgcccagcctgaacactttatta

SEQ ID NO: 3858648 - DNA, 25 bp, Homo sapien
agcctgaacactttattatttcatt

SEQ ID NO: 3858649 - DNA, 25 bp, Homo sapien
tacatccagcattcgggtcatctgg

SEQ ID NO: 3858650 - DNA, 25 bp, Homo sapien
tcatctgggtgaagatgagcactcg

SEQ ID NO: 3858651 - DNA, 25 bp, Homo sapien
tctagtagatccatccaggcgcagg

SEQ ID NO: 3858652 - DNA, 25 bp, Homo sapien
tgagaaactgctccaatacatccag

SEQ ID NO: 3858653 - DNA, 25 bp, Homo sapien
cccactccgagttgaaaggatgaag

SEQ ID NO: 3858654 - DNA, 25 bp, Homo sapien
tggccaattcggtgacagcggtcct

SEQ ID NO: 3858655 - DNA, 25 bp, Homo sapien
tatatatgtggacatcccgggtctg

SEQ ID NO: 3858656 - DNA, 25 bp, Homo sapien
catccatggtgggattccagtcgct

SEQ ID NO: 3858657 - DNA, 25 bp, Homo sapien
cctccactgtccgttcactgataag

SEQ ID NO: 3858658 - DNA, 25 bp, Homo sapien
cctcaatggccatgtcccccaacat

SEQ ID NO: 3858659 - DNA, 25 bp, Homo sapien
tgccttttttaggatgttctcctcc

SEQ ID NO: 3858660 - DNA, 25 bp, Homo sapien
ctgtttgaaataggctgtggtgaag

SEQ ID NO: 3858661 - DNA, 25 bp, Homo sapien
cggatgagctagaaggttcctccag

SEQ ID NO: 3858662 - DNA, 25 bp, Homo sapien
ggcacggatgagctagaaggttcct

SEQ ID NO: 3858663 - DNA, 25 bp, Homo sapien
catatcaaacagctctcggatggtc

SEQ ID NO: 3858664 - DNA, 25 bp, Homo sapien
ctgctccagaatatgagtctgcttg

SEQ ID NO: 3858665 - DNA, 25 bp, Homo sapien
ctgggtggctgcacggatatcctct

SEQ ID NO: 3858666 - DNA, 25 bp, Homo sapien
gcaggaaacccatcgttctcattaa

SEQ ID NO: 3858667 - DNA, 25 bp, Homo sapien
gttctacgagggcagcaatttcctg

SEQ ID NO: 3858668 - DNA, 25 bp, Homo sapien
ggctgcacggatatcctcttcatct

SEQ ID NO: 3858669 - DNA, 25 bp, Homo sapien
aggaatttcatggcatagcgctcaa

SEQ ID NO: 3858670 - DNA, 25 bp, Homo sapien
atttcatggcatagcgctcaatggg

SEQ ID NO: 3858671 - DNA, 25 bp, Homo sapien
catggcatagcgctcaatgggggtc

SEQ ID NO: 3858672 - DNA, 25 bp, Homo sapien
gaatttcatggcatagcgctcaatg

SEQ ID NO: 3858673 - DNA, 25 bp, Homo sapien
tctgcctgtttgagctcctctcggc

SEQ ID NO: 3858674 - DNA, 25 bp, Homo sapien
cctgtttgagctcctctcggctcac

SEQ ID NO: 3858675 - DNA, 25 bp, Homo sapien
tgcctgtttgagctcctctcggctc

SEQ ID NO: 3858676 - DNA, 25 bp, Homo sapien
ttctgcctgtttgagctcctctcgg

SEQ ID NO: 3858677 - DNA, 25 bp, Homo sapien
caggtctttgcgggcagcttccact

SEQ ID NO: 3858678 - DNA, 25 bp, Homo sapien
tttttactgcgccggtgggtgcctc

SEQ ID NO: 3858679 - DNA, 25 bp, Homo sapien
ctttggcctttttactgcgccggtg

SEQ ID NO: 3858680 - DNA, 25 bp, Homo sapien
tgcgccggtgggtgcctccaccagt

SEQ ID NO: 3858681 - DNA, 25 bp, Homo sapien
ggagtgtggtttgccccttgagtct

SEQ ID NO: 3858682 - DNA, 25 bp, Homo sapien
gtgtggtttgccccttgagtctcag

SEQ ID NO: 3858683 - DNA, 25 bp, Homo sapien
agtgtggtttgccccttgagtctca

SEQ ID NO: 3858684 - DNA, 25 bp, Homo sapien
aggagtgtggtttgccccttgagtc

SEQ ID NO: 3858685 - DNA, 25 bp, Homo sapien
acagggagaatggttattggatttg

SEQ ID NO: 3858686 - DNA, 25 bp, Homo sapien
agaggaaggagttacaagacaggtt

SEQ ID NO: 3858687 - DNA, 25 bp, Homo sapien
aattgcagccggagctgaagctgga

SEQ ID NO: 3858688 - DNA, 25 bp, Homo sapien
tgggaactcgctccctggcaggact

SEQ ID NO: 3858689 - DNA, 25 bp, Homo sapien
gaggaggtttctgaactggccacag

SEQ ID NO: 3858690 - DNA, 25 bp, Homo sapien
gagaaagtgaggaggtttctgaact

SEQ ID NO: 3858691 - DNA, 25 bp, Homo sapien
gactctggagatgccaatgcctggg

SEQ ID NO: 3858692 - DNA, 25 bp, Homo sapien
ctcaggcctcaagcccaaggggaga

SEQ ID NO: 3858693 - DNA, 25 bp, Homo sapien
tcttctctgacacaggcaggatctc

SEQ ID NO: 3858694 - DNA, 25 bp, Homo sapien
tcagctcttccgaggtcctgtcagc

SEQ ID NO: 3858695 - DNA, 25 bp, Homo sapien
tgtaagggtggtcccctcagcagaa

SEQ ID NO: 3858696 - DNA, 25 bp, Homo sapien
caccttcaggcagcactgtaagggt

SEQ ID NO: 3858697 - DNA, 25 bp, Homo sapien
tcagctgtaacgagttcctgtggct

SEQ ID NO: 3858698 - DNA, 25 bp, Homo sapien
atcagcactggtgcgacgccgagga

SEQ ID NO: 3858699 - DNA, 25 bp, Homo sapien
cctggcagctttcgaagcactttgg

SEQ ID NO: 3858700 - DNA, 25 bp, Homo sapien
gcctggtggttgtcctggccgacca

SEQ ID NO: 3858701 - DNA, 25 bp, Homo sapien
gattctggccctgacatgctgcgga

SEQ ID NO: 3858702 - DNA, 25 bp, Homo sapien
cagtgaggatgaaggagcagcttca

SEQ ID NO: 3858703 - DNA, 25 bp, Homo sapien
cttcacagggcccaccaatgggagg

SEQ ID NO: 3858704 - DNA, 25 bp, Homo sapien
gctggcactagtctcagagacccca

SEQ ID NO: 3858705 - DNA, 25 bp, Homo sapien
tgatggcgagcagtgctccgtctcc

SEQ ID NO: 3858706 - DNA, 25 bp, Homo sapien
cagctcaatgtgacggcgagcaatg

SEQ ID NO: 3858707 - DNA, 25 bp, Homo sapien
gcagtgctccgtctccattctcggg

SEQ ID NO: 3858708 - DNA, 25 bp, Homo sapien
cctccgacgtttcacagcaggtggg

SEQ ID NO: 3858709 - DNA, 25 bp, Homo sapien
gatgggcaaatctcgtgctttaggg

SEQ ID NO: 3858710 - DNA, 25 bp, Homo sapien
aacaattagggtctcaggcccaggg

SEQ ID NO: 3858711 - DNA, 25 bp, Homo sapien
gaagtgctgtcacggtccaagacgg

SEQ ID NO: 3858712 - DNA, 25 bp, Homo sapien
tccacagctctcgagaacagaagtg

SEQ ID NO: 3858713 - DNA, 25 bp, Homo sapien
tggcccgctatctgctaagtccagg

SEQ ID NO: 3858714 - DNA, 25 bp, Homo sapien
gtggtgtcaattccaacccgcctgg

SEQ ID NO: 3858715 - DNA, 25 bp, Homo sapien
gcaggatgcgctggtccccttggtt

SEQ ID NO: 3858716 - DNA, 25 bp, Homo sapien
gctcgtttgcgaggcaacttctcag

SEQ ID NO: 3858717 - DNA, 25 bp, Homo sapien
ttggccttgcggcctctgtgactaa

SEQ ID NO: 3858718 - DNA, 25 bp, Homo sapien
tggccttgcggcctctgtgactaac

SEQ ID NO: 3858719 - DNA, 25 bp, Homo sapien
cagagactatcttgccacccttaac

SEQ ID NO: 3858720 - DNA, 25 bp, Homo sapien
aagtagtggttaacagagtcaggcc

SEQ ID NO: 3858721 - DNA, 25 bp, Homo sapien
agaaggcccctatgtctccctggag

SEQ ID NO: 3858722 - DNA, 25 bp, Homo sapien
aaaacctcattgtagagaagcccct

SEQ ID NO: 3858723 - DNA, 25 bp, Homo sapien
caggtgctaggatctttgcaagaac

SEQ ID NO: 3858724 - DNA, 25 bp, Homo sapien
aaaatcagaagcctccttacgcgga

SEQ ID NO: 3858725 - DNA, 25 bp, Homo sapien
cctggaacatatagtcctgggctag

SEQ ID NO: 3858726 - DNA, 25 bp, Homo sapien
gctccgaggaacgtctaggaaccga

SEQ ID NO: 3858727 - DNA, 25 bp, Homo sapien
tgagcaagagggataaaagggaaag

SEQ ID NO: 3858728 - DNA, 25 bp, Homo sapien
ctgagcaagagggataaaagggaaa

SEQ ID NO: 3858729 - DNA, 25 bp, Homo sapien
gaaggactctgagtttcggctcctg

SEQ ID NO: 3858730 - DNA, 25 bp, Homo sapien
ggtgtggctgactcaaaccagtttg

SEQ ID NO: 3858731 - DNA, 25 bp, Homo sapien
aaccagtttggctagatgaagagca

SEQ ID NO: 3858732 - DNA, 25 bp, Homo sapien
tggagcaactggagctaggacgcct

SEQ ID NO: 3858733 - DNA, 25 bp, Homo sapien
tcagggcttcctctgctatgctgcc

SEQ ID NO: 3858734 - DNA, 25 bp, Homo sapien
tatagatgtcagagagcaggaccct

SEQ ID NO: 3858735 - DNA, 25 bp, Homo sapien
gaaacctgcaaaatgatgccctact

SEQ ID NO: 3858736 - DNA, 25 bp, Homo sapien
caacccgtttcaagcaaagcagcca

SEQ ID NO: 3858737 - DNA, 25 bp, Homo sapien
ccttttacctaagcttgaggttctg

SEQ ID NO: 3858738 - DNA, 25 bp, Homo sapien
gtggctggaatccttttacctaagc

SEQ ID NO: 3858739 - DNA, 25 bp, Homo sapien
tccgtgttgcccaagatctccactg

SEQ ID NO: 3858740 - DNA, 25 bp, Homo sapien
ctagtagctgccaagcagcggaggc

SEQ ID NO: 3858741 - DNA, 25 bp, Homo sapien
gcagccacagataatgctagtagct

SEQ ID NO: 3858742 - DNA, 25 bp, Homo sapien
aaacaccagagccatgactcccagg

SEQ ID NO: 3858743 - DNA, 25 bp, Homo sapien
gattgcgctcatcaccgttcagcgg

SEQ ID NO: 3858744 - DNA, 25 bp, Homo sapien
cccggcggacatgtgctgtttctaa

SEQ ID NO: 3858745 - DNA, 25 bp, Homo sapien
tatgggtcctctgacgacaaggaac

SEQ ID NO: 3858746 - DNA, 25 bp, Homo sapien
tcaccctcgatgtaggccttgagag

SEQ ID NO: 3858747 - DNA, 25 bp, Homo sapien
gcgcccagcctctttgttatcatta

SEQ ID NO: 3858748 - DNA, 25 bp, Homo sapien
atagatgggataacaggtacgtgcc

SEQ ID NO: 3858749 - DNA, 25 bp, Homo sapien
ctctttgttatcattaagggccctt

SEQ ID NO: 3858750 - DNA, 25 bp, Homo sapien
caaatagatgggataacaggtacgt

SEQ ID NO: 3858751 - DNA, 25 bp, Homo sapien
ctgtgggggcaggttcttggttagg

SEQ ID NO: 3858752 - DNA, 25 bp, Homo sapien
gaccggcctgctttatgccgctctt

SEQ ID NO: 3858753 - DNA, 25 bp, Homo sapien
atggcgtaggagagcaaccacagca

SEQ ID NO: 3858754 - DNA, 25 bp, Homo sapien
ctgagcgatggcgtaggagagcaac

SEQ ID NO: 3858755 - DNA, 25 bp, Homo sapien
tgcctcctcggaccggcctgcttta

SEQ ID NO: 3858756 - DNA, 25 bp, Homo sapien
aatgccgcattgcaggatccaggag

SEQ ID NO: 3858757 - DNA, 25 bp, Homo sapien
tataaagggctagaagagctcttcc

SEQ ID NO: 3858758 - DNA, 25 bp, Homo sapien
tcacaggaccttagcaatgccgcat

SEQ ID NO: 3858759 - DNA, 25 bp, Homo sapien
ccaggatccttccaaccactgctgt

SEQ ID NO: 3858760 - DNA, 25 bp, Homo sapien
gcaggaggagaacaattagacagga

SEQ ID NO: 3858761 - DNA, 25 bp, Homo sapien
tatcagtcagatgtccagtctggct

SEQ ID NO: 3858762 - DNA, 25 bp, Homo sapien
caaactgtctgggttcagtctcagc

SEQ ID NO: 3858763 - DNA, 25 bp, Homo sapien
tctgtggacgtacaagggagaagct

SEQ ID NO: 3858764 - DNA, 25 bp, Homo sapien
gttcaaatgcagacaaaattaaatg

SEQ ID NO: 3858765 - DNA, 25 bp, Homo sapien
ctgaatgtggttattcacgtttgct

SEQ ID NO: 3858766 - DNA, 25 bp, Homo sapien
aatgacactgctagaagtcagaatg

SEQ ID NO: 3858767 - DNA, 25 bp, Homo sapien
taaaggaggctttgaagtgttgaca

SEQ ID NO: 3858768 - DNA, 25 bp, Homo sapien
gctcagaagcccttccaattggaaa

SEQ ID NO: 3858769 - DNA, 25 bp, Homo sapien
acctaaggctgcaacgcgacgccgg

SEQ ID NO: 3858770 - DNA, 25 bp, Homo sapien
tgagtcggcgctcggctggacctaa

SEQ ID NO: 3858771 - DNA, 25 bp, Homo sapien
gacgcggccaatcaccgagtggcat

SEQ ID NO: 3858772 - DNA, 25 bp, Homo sapien
cggcggcgggcgacaacccaaggct

SEQ ID NO: 3858773 - DNA, 25 bp, Homo sapien
ggcgggcgacaacccaaggctccgc

SEQ ID NO: 3858774 - DNA, 25 bp, Homo sapien
gcggcgggcgacaacccaaggctcc

SEQ ID NO: 3858775 - DNA, 25 bp, Homo sapien
ggcggcgggcgacaacccaaggctc

SEQ ID NO: 3858776 - DNA, 25 bp, Homo sapien
gccgggtttgcctgcagtcgctcac

SEQ ID NO: 3858777 - DNA, 25 bp, Homo sapien
cgctgtcgccgggtttgcctgcagt

SEQ ID NO: 3858778 - DNA, 25 bp, Homo sapien
acgcgagctgcgctgtcgccgggtt

SEQ ID NO: 3858779 - DNA, 25 bp, Homo sapien
agaggagccagggtcgacgcgagct

SEQ ID NO: 3858780 - DNA, 25 bp, Homo sapien
gcgcaggcgcattcgggcgggcgca

SEQ ID NO: 3858781 - DNA, 25 bp, Homo sapien
ggcaggcggctgttgccgcgcaggc

SEQ ID NO: 3858782 - DNA, 25 bp, Homo sapien
caggcggctgttgccgcgcaggcgc

SEQ ID NO: 3858783 - DNA, 25 bp, Homo sapien
gcgcattcgggcgggcgcaggaagg

SEQ ID NO: 3858784 - DNA, 25 bp, Homo sapien
ccggactggggagaccccgcagaag

SEQ ID NO: 3858785 - DNA, 25 bp, Homo sapien
ggactggggagaccccgcagaagag

SEQ ID NO: 3858786 - DNA, 25 bp, Homo sapien
gactggggagaccccgcagaagagc

SEQ ID NO: 3858787 - DNA, 25 bp, Homo sapien
cggactggggagaccccgcagaaga

SEQ ID NO: 3858788 - DNA, 25 bp, Homo sapien
tctgagacgacccgcatggcggctc

SEQ ID NO: 3858789 - DNA, 25 bp, Homo sapien
gctctgagacgacccgcatggcggc

SEQ ID NO: 3858790 - DNA, 25 bp, Homo sapien
agacgacccgcatggcggctcccgg

SEQ ID NO: 3858791 - DNA, 25 bp, Homo sapien
aggctctgagacgacccgcatggcg

SEQ ID NO: 3858792 - DNA, 25 bp, Homo sapien
gggcagtgagggcagggaggcccac

SEQ ID NO: 3858793 - DNA, 25 bp, Homo sapien
ctgcgcggaggaggagggcagtgag

SEQ ID NO: 3858794 - DNA, 25 bp, Homo sapien
cgcggaggaggagggcagtgagggc

SEQ ID NO: 3858795 - DNA, 25 bp, Homo sapien
agggcagtgagggcagggaggccca

SEQ ID NO: 3858796 - DNA, 25 bp, Homo sapien
gcggcccagtcgggcagctcatcct

SEQ ID NO: 3858797 - DNA, 25 bp, Homo sapien
gatgacgtccttagggtcgtacttc

SEQ ID NO: 3858798 - DNA, 25 bp, Homo sapien
ctgccgatgacgtccttagggtcgt

SEQ ID NO: 3858799 - DNA, 25 bp, Homo sapien
tctggtaaaactctttggcggcggc

SEQ ID NO: 3858800 - DNA, 25 bp, Homo sapien
gctcaggactcagccgctcagctgt

SEQ ID NO: 3858801 - DNA, 25 bp, Homo sapien
gtcacttccataatcttcaccgcaa

SEQ ID NO: 3858802 - DNA, 25 bp, Homo sapien
aaactcgtggccagtagctcgatga

SEQ ID NO: 3858803 - DNA, 25 bp, Homo sapien
acaacggcggaccacagagctcact

SEQ ID NO: 3858804 - DNA, 25 bp, Homo sapien
cgacctggcgaaggatgtgtgtctc

SEQ ID NO: 3858805 - DNA, 25 bp, Homo sapien
gtgtgtctctcgccgtgtggcttcc

SEQ ID NO: 3858806 - DNA, 25 bp, Homo sapien
gtgtctctcgccgtgtggcttcccg

SEQ ID NO: 3858807 - DNA, 25 bp, Homo sapien
gggtggccggcgacctggcgaagga

SEQ ID NO: 3858808 - DNA, 25 bp, Homo sapien
gacagcagcgggctgttactgggaa

SEQ ID NO: 3858809 - DNA, 25 bp, Homo sapien
aaaggagtggatgcacattaacggg

SEQ ID NO: 3858810 - DNA, 25 bp, Homo sapien
ccaacggatggccactctttagtgg

SEQ ID NO: 3858811 - DNA, 25 bp, Homo sapien
tgttggcggaagtgggctatgggca

SEQ ID NO: 3858812 - DNA, 25 bp, Homo sapien
ctagaagactcgtaggaatcgatga

SEQ ID NO: 3858813 - DNA, 25 bp, Homo sapien
accaggaacatgaagctagaagact

SEQ ID NO: 3858814 - DNA, 25 bp, Homo sapien
catgaagctagaagactcgtaggaa

SEQ ID NO: 3858815 - DNA, 25 bp, Homo sapien
aagactcgtaggaatcgatgagggt

SEQ ID NO: 3858816 - DNA, 25 bp, Homo sapien
aggcccaggtgatagagagccccag

SEQ ID NO: 3858817 - DNA, 25 bp, Homo sapien
accacaaatgctgggccatacatgg

SEQ ID NO: 3858818 - DNA, 25 bp, Homo sapien
caatcatggcaccaagggagaaggc

SEQ ID NO: 3858819 - DNA, 25 bp, Homo sapien
gaaggccagagccatgcgctagcag

SEQ ID NO: 3858820 - DNA, 25 bp, Homo sapien
taactatgcctgaaaaaggcctctc

SEQ ID NO: 3858821 - DNA, 25 bp, Homo sapien
tagttagcgtgttaagcagcgcgag

SEQ ID NO: 3858822 - DNA, 25 bp, Homo sapien
gagacagacaccagaatagttagcg

SEQ ID NO: 3858823 - DNA, 25 bp, Homo sapien
tagaaacacagcactccaacaaggc

SEQ ID NO: 3858824 - DNA, 25 bp, Homo sapien
tggtttccttttcagagagggccac

SEQ ID NO: 3858825 - DNA, 25 bp, Homo sapien
ggccaccttctctgtgagatagtca

SEQ ID NO: 3858826 - DNA, 25 bp, Homo sapien
tctctgtgagatagtcaaacagctc

SEQ ID NO: 3858827 - DNA, 25 bp, Homo sapien
caccttctctgtgagatagtcaaac

SEQ ID NO: 3858828 - DNA, 25 bp, Homo sapien
cctggggcttcaggctcaaccctta

SEQ ID NO: 3858829 - DNA, 25 bp, Homo sapien
ctggggcttcaggctcaacccttac

SEQ ID NO: 3858830 - DNA, 25 bp, Homo sapien
ccctggggcttcaggctcaaccctt

SEQ ID NO: 3858831 - DNA, 25 bp, Homo sapien
cagatctcgatgcacaatgttgttg

SEQ ID NO: 3858832 - DNA, 25 bp, Homo sapien
aatattctcgggcttcagatctcga

SEQ ID NO: 3858833 - DNA, 25 bp, Homo sapien
tgttgttggcatggagaaagctcac

SEQ ID NO: 3858834 - DNA, 25 bp, Homo sapien
cgaaatctgaaagtcggatctgcat

SEQ ID NO: 3858835 - DNA, 25 bp, Homo sapien
ttagtttgttctaccactcgggcac

SEQ ID NO: 3858836 - DNA, 25 bp, Homo sapien
ggagattttaacagccccgaattga

SEQ ID NO: 3858837 - DNA, 25 bp, Homo sapien
caaatgagatgagcccttaccgagc

SEQ ID NO: 3858838 - DNA, 25 bp, Homo sapien
gccaagttgcactgatttgccaagt

SEQ ID NO: 3858839 - DNA, 25 bp, Homo sapien
aactatcactcaacccaaggggaag

SEQ ID NO: 3858840 - DNA, 25 bp, Homo sapien
cactcctcacaacttgttaccttag

SEQ ID NO: 3858841 - DNA, 25 bp, Homo sapien
catacatcataatacatacgcaaaa

SEQ ID NO: 3858842 - DNA, 25 bp, Homo sapien
tcctataatctccaactatcactca

SEQ ID NO: 3858843 - DNA, 25 bp, Homo sapien
ctccttgccatagcctgggtgggtt

SEQ ID NO: 3858844 - DNA, 25 bp, Homo sapien
tggagcatttaaggatctctggcgc

SEQ ID NO: 3858845 - DNA, 25 bp, Homo sapien
aggtcgacctccttgccatagcctg

SEQ ID NO: 3858846 - DNA, 25 bp, Homo sapien
gatctctggcgctagataccctggg

SEQ ID NO: 3858847 - DNA, 25 bp, Homo sapien
caggagtgtgaacaagatcacccca

SEQ ID NO: 3858848 - DNA, 25 bp, Homo sapien
gaactgaactggtactggccctcca

SEQ ID NO: 3858849 - DNA, 25 bp, Homo sapien
ggtctttgacagtgctggaacggtc

SEQ ID NO: 3858850 - DNA, 25 bp, Homo sapien
gtaacatcaggatctgccgccggtg

SEQ ID NO: 3858851 - DNA, 25 bp, Homo sapien
ccagagcatgaggggcagctcttgg

SEQ ID NO: 3858852 - DNA, 25 bp, Homo sapien
ggagagacccagagcatgaggggca

SEQ ID NO: 3858853 - DNA, 25 bp, Homo sapien
agagcatgaggggcagctcttgggc

SEQ ID NO: 3858854 - DNA, 25 bp, Homo sapien
cccagagcatgaggggcagctcttg

SEQ ID NO: 3858855 - DNA, 25 bp, Homo sapien
ggggtgaggttccagggttggctgc

SEQ ID NO: 3858856 - DNA, 25 bp, Homo sapien
gctcagctgtcaggcgtgcctcagg

SEQ ID NO: 3858857 - DNA, 25 bp, Homo sapien
gggtgctgtagggcctgctcagctg

SEQ ID NO: 3858858 - DNA, 25 bp, Homo sapien
acgctcaaagaaggggtgctgtagg

SEQ ID NO: 3858859 - DNA, 25 bp, Homo sapien
tcagtggccgtacacgatgggtgct

SEQ ID NO: 3858860 - DNA, 25 bp, Homo sapien
cacagttgtcgatgaggtgccgcac

SEQ ID NO: 3858861 - DNA, 25 bp, Homo sapien
tgaccgcagcgcataagggtccctc

SEQ ID NO: 3858862 - DNA, 25 bp, Homo sapien
cgtagagccggaaggcacagttgtc

SEQ ID NO: 3858863 - DNA, 25 bp, Homo sapien
caggcgtggcgttcagaatggctcc

SEQ ID NO: 3858864 - DNA, 25 bp, Homo sapien
aaacccttcttctggagagttctgc

SEQ ID NO: 3858865 - DNA, 25 bp, Homo sapien
agtgcatgcagcactgaccgggcca

SEQ ID NO: 3858866 - DNA, 25 bp, Homo sapien
tagcaggatcattagtgggcctgag

SEQ ID NO: 3858867 - DNA, 25 bp, Homo sapien
gaagaccaccaatgctgagatgagg

SEQ ID NO: 3858868 - DNA, 25 bp, Homo sapien
tataacaggaagtacctggacgtcc

SEQ ID NO: 3858869 - DNA, 25 bp, Homo sapien
catggccgctaaggagtattgtaca

SEQ ID NO: 3858870 - DNA, 25 bp, Homo sapien
cttgtcatgataggtaacggccacc

SEQ ID NO: 3858871 - DNA, 25 bp, Homo sapien
ttcaccggacgtcactgggcgtcac

SEQ ID NO: 3858872 - DNA, 25 bp, Homo sapien
ccatcttggatttcaccggacgtca

SEQ ID NO: 3858873 - DNA, 25 bp, Homo sapien
aggagggtcagcctagcgccgccat

SEQ ID NO: 3858874 - DNA, 25 bp, Homo sapien
tggatttcaccggacgtcactgggc

SEQ ID NO: 3858875 - DNA, 25 bp, Homo sapien
ctgctggatcccgtcccccccggcg

SEQ ID NO: 3858876 - DNA, 25 bp, Homo sapien
gtcccccccggcgccagagccctca

SEQ ID NO: 3858877 - DNA, 25 bp, Homo sapien
tcccccccggcgccagagccctcac

SEQ ID NO: 3858878 - DNA, 25 bp, Homo sapien
tgctggatcccgtcccccccggcgc

SEQ ID NO: 3858879 - DNA, 25 bp, Homo sapien
ctgaggggcgtcaaacgggaggagg

SEQ ID NO: 3858880 - DNA, 25 bp, Homo sapien
cctgaggggcgtcaaacgggaggag

SEQ ID NO: 3858881 - DNA, 25 bp, Homo sapien
ggcgcgtttgttgcctggcccagac

SEQ ID NO: 3858882 - DNA, 25 bp, Homo sapien
tggtggtcttctcctcacgactcag

SEQ ID NO: 3858883 - DNA, 25 bp, Homo sapien
agatgcctccaagacgaatgggctc

SEQ ID NO: 3858884 - DNA, 25 bp, Homo sapien
gacgaatgggctcgataagagtcgt

SEQ ID NO: 3858885 - DNA, 25 bp, Homo sapien
tggcatcatctgtggcctgccgctt

SEQ ID NO: 3858886 - DNA, 25 bp, Homo sapien
cgttctcggagttcatcttcacaag

SEQ ID NO: 3858887 - DNA, 25 bp, Homo sapien
ctgggcccagtagcgattgacgatg

SEQ ID NO: 3858888 - DNA, 25 bp, Homo sapien
tcttcacaagcctgccgttgttcca

SEQ ID NO: 3858889 - DNA, 25 bp, Homo sapien
gggattggcagctgaatcaaggcct

SEQ ID NO: 3858890 - DNA, 25 bp, Homo sapien
caaggcctggtctttgaaagcagaa

SEQ ID NO: 3858891 - DNA, 25 bp, Homo sapien
cagctgaatcaaggcctggtctttg

SEQ ID NO: 3858892 - DNA, 25 bp, Homo sapien
tggtctttgaaagcagaaggtatcc

SEQ ID NO: 3858893 - DNA, 25 bp, Homo sapien
catcacatgttggcccctcctgggt

SEQ ID NO: 3858894 - DNA, 25 bp, Homo sapien
ccatcacatgttggcccctcctggg

SEQ ID NO: 3858895 - DNA, 25 bp, Homo sapien
tgcctcaggcgctgaagacagctcc

SEQ ID NO: 3858896 - DNA, 25 bp, Homo sapien
ggctctcatggcatcggagaagggc

SEQ ID NO: 3858897 - DNA, 25 bp, Homo sapien
caaggccggctcactgagagggggc

SEQ ID NO: 3858898 - DNA, 25 bp, Homo sapien
gagaactccattcggccttgcagct

SEQ ID NO: 3858899 - DNA, 25 bp, Homo sapien
gaggcctctaccacacgagacacag

SEQ ID NO: 3858900 - DNA, 25 bp, Homo sapien
ttggagaactccattcggccttgca

SEQ ID NO: 3858901 - DNA, 25 bp, Homo sapien
tacactcgctgacagagttcctcca

SEQ ID NO: 3858902 - DNA, 25 bp, Homo sapien
ctcggctgtacactcgctgacagag

SEQ ID NO: 3858903 - DNA, 25 bp, Homo sapien
tgtacactcgctgacagagttcctc

SEQ ID NO: 3858904 - DNA, 25 bp, Homo sapien
cggctgtacactcgctgacagagtt

SEQ ID NO: 3858905 - DNA, 25 bp, Homo sapien
ctccaatgagatgcggtggtgtttc

SEQ ID NO: 3858906 - DNA, 25 bp, Homo sapien
ctctcgggtgtgtgcctgagccgcc

SEQ ID NO: 3858907 - DNA, 25 bp, Homo sapien
gtgtgtgcctgagccgcctcactga

SEQ ID NO: 3858908 - DNA, 25 bp, Homo sapien
tggccaagtcctgcagtcgccggtt

SEQ ID NO: 3858909 - DNA, 25 bp, Homo sapien
tcactttatcctggagctcggagta

SEQ ID NO: 3858910 - DNA, 25 bp, Homo sapien
ctgccgatgtcactttatcctggag

SEQ ID NO: 3858911 - DNA, 25 bp, Homo sapien
gcaccttggtctctgccgatgtcac

SEQ ID NO: 3858912 - DNA, 25 bp, Homo sapien
gatgtcactttatcctggagctcgg

SEQ ID NO: 3858913 - DNA, 25 bp, Homo sapien
ttccgcagcttctcgatgtcccact

SEQ ID NO: 3858914 - DNA, 25 bp, Homo sapien
gagcttttgctctcgcttccgcagc

SEQ ID NO: 3858915 - DNA, 25 bp, Homo sapien
ttctcgatgtcccactgcaagtcct

SEQ ID NO: 3858916 - DNA, 25 bp, Homo sapien
tattgagcttttgctctcgcttccg

SEQ ID NO: 3858917 - DNA, 25 bp, Homo sapien
tcccagatacatagtagccagagtt

SEQ ID NO: 3858918 - DNA, 25 bp, Homo sapien
agctcccagatacatagtagccaga

SEQ ID NO: 3858919 - DNA, 25 bp, Homo sapien
cagatacatagtagccagagttaag

SEQ ID NO: 3858920 - DNA, 25 bp, Homo sapien
tctgcatgctgagtgtgatctggcc

SEQ ID NO: 3858921 - DNA, 25 bp, Homo sapien
tgaagttcggcctgcagtttctcca

SEQ ID NO: 3858922 - DNA, 25 bp, Homo sapien
gctctgccatacggctgttggccag

SEQ ID NO: 3858923 - DNA, 25 bp, Homo sapien
agctctgccatacggctgttggcca

SEQ ID NO: 3858924 - DNA, 25 bp, Homo sapien
cccgagcctcgtctagctgggtctt

SEQ ID NO: 3858925 - DNA, 25 bp, Homo sapien
ttgtagagcagtgagaattgggcct

SEQ ID NO: 3858926 - DNA, 25 bp, Homo sapien
cttcacttgcagagactcgttgtag

SEQ ID NO: 3858927 - DNA, 25 bp, Homo sapien
tccatgtgctcgatgtgtcgcaggt

SEQ ID NO: 3858928 - DNA, 25 bp, Homo sapien
tgggttgatgtgttaaggacccaca

SEQ ID NO: 3858929 - DNA, 25 bp, Homo sapien
cttagcccagccctaacgcctgttc

SEQ ID NO: 3858930 - DNA, 25 bp, Homo sapien
aggactcagtatcttaggaagaatc

SEQ ID NO: 3858931 - DNA, 25 bp, Homo sapien
gaaggcacaaacacgtcaacactaa

SEQ ID NO: 3858932 - DNA, 25 bp, Homo sapien
tcgttggccgccagattctgctcaa

SEQ ID NO: 3858933 - DNA, 25 bp, Homo sapien
ctgaatgacctctgtgcgtagcttc

SEQ ID NO: 3858934 - DNA, 25 bp, Homo sapien
tgctcaaactcgatgcgcagcatct

SEQ ID NO: 3858935 - DNA, 25 bp, Homo sapien
gaatgacctctgtgcgtagcttctt

SEQ ID NO: 3858936 - DNA, 25 bp, Homo sapien
tcctatctgtcaagagctaacacat

SEQ ID NO: 3858937 - DNA, 25 bp, Homo sapien
tgagagacagagacgtcatcagacc

SEQ ID NO: 3858938 - DNA, 25 bp, Homo sapien
ccagaatgttgctccacatggcagg

SEQ ID NO: 3858939 - DNA, 25 bp, Homo sapien
tttgtaacacaagtatctgagagac

SEQ ID NO: 3858940 - DNA, 25 bp, Homo sapien
cagcttgtacttctcgaagcttccg

SEQ ID NO: 3858941 - DNA, 25 bp, Homo sapien
gaagcttccgcttgtatcgctgggc

SEQ ID NO: 3858942 - DNA, 25 bp, Homo sapien
ttttgaagactactaatcaggtggc

SEQ ID NO: 3858943 - DNA, 25 bp, Homo sapien
gctgggcgtccccttttagctggtg

SEQ ID NO: 3858944 - DNA, 25 bp, Homo sapien
gattccttccgcttggtttcttcca

SEQ ID NO: 3858945 - DNA, 25 bp, Homo sapien
ttgagctctgctcggagacccttga

SEQ ID NO: 3858946 - DNA, 25 bp, Homo sapien
tcccgatcagcccttgagagagcgg

SEQ ID NO: 3858947 - DNA, 25 bp, Homo sapien
gggcactgacgccagaatcctctgg

SEQ ID NO: 3858948 - DNA, 25 bp, Homo sapien
tgggcgctgacttgtacatatccag

SEQ ID NO: 3858949 - DNA, 25 bp, Homo sapien
atgagctgcaccttatcccgctgct

SEQ ID NO: 3858950 - DNA, 25 bp, Homo sapien
gacttgtacatatccagcagcagtt

SEQ ID NO: 3858951 - DNA, 25 bp, Homo sapien
tcggccttagccttgcgttccgctg

SEQ ID NO: 3858952 - DNA, 25 bp, Homo sapien
aattcccggatgcggctccgcagct

SEQ ID NO: 3858953 - DNA, 25 bp, Homo sapien
agcttgcgctgcaggtgttctatct

SEQ ID NO: 3858954 - DNA, 25 bp, Homo sapien
tctgcctgccgaatgcgccgcaggg

SEQ ID NO: 3858955 - DNA, 25 bp, Homo sapien
atcctcatccgcgatcttcttgctc

SEQ ID NO: 3858956 - DNA, 25 bp, Homo sapien
gggaaccatgggaaaacgcagcgaa
